United States Patent Application Publication US 2007/0042381 A1 - sequence listing, part 8

SEQ ID NO: 313383 - RNA, 17 nt, Human
cucacggaggaugaauc

SEQ ID NO: 313384 - RNA, 22 nt, Human
agccagugcaacagcagugaag

SEQ ID NO: 313385 - RNA, 22 nt, Human
gauuucuguaacacuucagaua

SEQ ID NO: 313386 - RNA, 22 nt, Human
caaugaaagcaacugccuauaa

SEQ ID NO: 313387 - RNA, 22 nt, Human
cuggagcuaauaauccaucuga

SEQ ID NO: 313388 - RNA, 22 nt, Human
uauguguuugacacccugcaag

SEQ ID NO: 313389 - RNA, 22 nt, Human
ugcugccacauuuaaagagggg

SEQ ID NO: 313390 - RNA, 20 nt, Human
ccugccugccucggcucauu

SEQ ID NO: 313391 - RNA, 22 nt, Human
uuagaaaaaggcuguggucuua

SEQ ID NO: 313392 - RNA, 22 nt, Human
acucugccaucccaggugcugu

SEQ ID NO: 313393 - RNA, 22 nt, Human
cacagacccagaagggaugaag

SEQ ID NO: 313394 - RNA, 22 nt, Human
uuuauuuaaagucguguguuaa

SEQ ID NO: 313395 - RNA, 22 nt, Human
gcucugucaacagcuagcugug

SEQ ID NO: 313396 - RNA, 22 nt, Human
uggcucagagcagggacucugg

SEQ ID NO: 313397 - RNA, 22 nt, Human
ccccagcugcauacuugccaag

SEQ ID NO: 313398 - RNA, 22 nt, Human
ccagagccagagaggugccugc

SEQ ID NO: 313399 - RNA, 18 nt, Human
cugcugugucgucugggc

SEQ ID NO: 313400 - RNA, 22 nt, Human
uccuuggcaugccgucuucucc

SEQ ID NO: 313401 - RNA, 21 nt, Human
ggcagaaguagcauggacggg

SEQ ID NO: 313402 - RNA, 22 nt, Human
gcuguauuuaacaacuggcuca

SEQ ID NO: 313403 - RNA, 22 nt, Human
gggaaccagccgcuuccgccuc

SEQ ID NO: 313404 - RNA, 22 nt, Human
agcaauauuuaaagguuugcaa

SEQ ID NO: 313405 - RNA, 22 nt, Human
acccugagggguauagcagaag

SEQ ID NO: 313406 - RNA, 22 nt, Human
acaaaguuugugguauuccaag

SEQ ID NO: 313407 - RNA, 22 nt, Human
ccagggcugagcugugaccaug

SEQ ID NO: 313408 - RNA, 22 nt, Human
gagagcuggccagcuucaguau

SEQ ID NO: 313409 - RNA, 22 nt, Human
aaucagaauuuauugaaucuuu

SEQ ID NO: 313410 - RNA, 21 nt, Human
ugccagcauuaaacagucauu

SEQ ID NO: 313411 - RNA, 23 nt, Human
acagcaagaggaccagaugugag

SEQ ID NO: 313412 - RNA, 22 nt, Human
uuucuaaaugguggcugcauug

SEQ ID NO: 313413 - RNA, 22 nt, Human
aauaacuucaguucuuacauua

SEQ ID NO: 313414 - RNA, 22 nt, Human
gagaacaggcucuggagucaga

SEQ ID NO: 313415 - RNA, 22 nt, Human
cauuucugggagacaugcuaga

SEQ ID NO: 313416 - RNA, 22 nt, Human
gcagcugcuguggcaucaagcu

SEQ ID NO: 313417 - RNA, 22 nt, Human
acaaacuaccuacagauguuca

SEQ ID NO: 313418 - RNA, 22 nt, Human
uggacucagaaguguucuuuua

SEQ ID NO: 313419 - RNA, 22 nt, Human
uaagaacaagauguuccuguuu

SEQ ID NO: 313420 - RNA, 22 nt, Human
agcuggggguuggauaagggua

SEQ ID NO: 313421 - RNA, 22 nt, Human
aucuggguucaccaugcuccug

SEQ ID NO: 313422 - RNA, 22 nt, Human
cucugagcccgcugcagcccca

SEQ ID NO: 313423 - RNA, 22 nt, Human
acauuucuuuucaucucuauau

SEQ ID NO: 313424 - RNA, 23 nt, Human
ucugggcaccuuguugacaugau

SEQ ID NO: 313425 - RNA, 23 nt, Human
ucauggaacugggcaaucuugaa

SEQ ID NO: 313426 - RNA, 22 nt, Human
ugccagcacaaguuaagagauc

SEQ ID NO: 313427 - RNA, 23 nt, Human
cagaagcaccuguugacugcugc

SEQ ID NO: 313428 - RNA, 21 nt, Human
aaaaugugagcgugaugcuua

SEQ ID NO: 313429 - RNA, 22 nt, Human
caagccucagaaucuucuccau

SEQ ID NO: 313430 - RNA, 22 nt, Human
agagcuguagcuuccuagagcc

SEQ ID NO: 313431 - RNA, 22 nt, Human
agggccuggcuucacuuucuca

SEQ ID NO: 313432 - RNA, 22 nt, Human
cugguucauccccuuccaggaa

SEQ ID NO: 313433 - RNA, 22 nt, Human
ucccagagcaguacuccaggag

SEQ ID NO: 313434 - RNA, 22 nt, Human
agcaggguuuggggauuggcac

SEQ ID NO: 313435 - RNA, 22 nt, Human
acaggcugccuaccaaguauca

SEQ ID NO: 313436 - RNA, 22 nt, Human
acagaacugggaaaugcacaua

SEQ ID NO: 313437 - RNA, 22 nt, Human
uauucacaggcacgaaauauug

SEQ ID NO: 313438 - RNA, 22 nt, Human
auuacaguaacagcuacaaugc

SEQ ID NO: 313439 - RNA, 22 nt, Human
cagggcugguuugucgaagaaa

SEQ ID NO: 313440 - RNA, 17 nt, Human
ucuguccagggagugug

SEQ ID NO: 313441 - RNA, 22 nt, Human
cucuggcuucuaccuugcaguu

SEQ ID NO: 313442 - RNA, 22 nt, Human
ccugucuguccucucaugagcc

SEQ ID NO: 313443 - RNA, 22 nt, Human
gagacacacacaggagguggca

SEQ ID NO: 313444 - RNA, 22 nt, Human
gcacagggcugccaggcggcuu

SEQ ID NO: 313445 - RNA, 18 nt, Human
aucucccauuggccaagg

SEQ ID NO: 313446 - RNA, 22 nt, Human
agguaugagauaaaucaaugaa

SEQ ID NO: 313447 - RNA, 22 nt, Human
aucaggaugcugucaguuacca

SEQ ID NO: 313448 - RNA, 22 nt, Human
aaacaugagcaucucuucaagc

SEQ ID NO: 313449 - RNA, 22 nt, Human
gaauauuuuuaaagggacuaau

SEQ ID NO: 313450 - RNA, 22 nt, Human
aaagauuuaagaauaauuugug

SEQ ID NO: 313451 - RNA, 22 nt, Human
gggcccacuggcugucugaccc

SEQ ID NO: 313452 - RNA, 22 nt, Human
cuggcuggccggagcgaggcgg

SEQ ID NO: 313453 - RNA, 22 nt, Human
uucacaaaacacuauuuucugg

SEQ ID NO: 313454 - RNA, 19 nt, Human
gagguggguccccgcagcc

SEQ ID NO: 313455 - RNA, 22 nt, Human
augggaugaacuugaucugcuu

SEQ ID NO: 313456 - RNA, 22 nt, Human
cagccucucuguaucucaggau

SEQ ID NO: 313457 - RNA, 22 nt, Human
cagcuggguuuaguggggugug

SEQ ID NO: 313458 - RNA, 22 nt, Human
uggcccucagucuugcuccugc

SEQ ID NO: 313459 - RNA, 22 nt, Human
ucauuuguacuugugugcuugu

SEQ ID NO: 313460 - RNA, 22 nt, Human
aauaacuuuuaaaagacccugg

SEQ ID NO: 313461 - RNA, 22 nt, Human
cacuggggugggccugguagag

SEQ ID NO: 313462 - RNA, 22 nt, Human
uccucagacacccugcuggcuu

SEQ ID NO: 313463 - RNA, 22 nt, Human
cagcugagcucccaggccauca

SEQ ID NO: 313464 - RNA, 22 nt, Human
cagcuucccuuggcugagcaga

SEQ ID NO: 313465 - RNA, 22 nt, Human
uagcuuuaccauagaagaguau

SEQ ID NO: 313466 - RNA, 22 nt, Human
caggggcucccugggugccagu

SEQ ID NO: 313467 - RNA, 22 nt, Human
aaggguggauuucugagcucua

SEQ ID NO: 313468 - RNA, 22 nt, Human
agcagcauucucugguaugggg

SEQ ID NO: 313469 - RNA, 22 nt, Human
agaaagaacgcacuugugcugc

SEQ ID NO: 313470 - RNA, 22 nt, Human
uggcaccaggcgggguggcugu

SEQ ID NO: 313471 - RNA, 22 nt, Human
gcucugagcacugugcggcugg

SEQ ID NO: 313472 - RNA, 22 nt, Human
aggaccaacauagcagcagugg

SEQ ID NO: 313473 - RNA, 22 nt, Human
uacauauacugagugauuugcu

SEQ ID NO: 313474 - RNA, 22 nt, Human
aauuuguuaaaagugagugaca

SEQ ID NO: 313475 - RNA, 22 nt, Human
uacauuccauguguguguauuc

SEQ ID NO: 313476 - RNA, 22 nt, Human
gucaggauuuacaaacuucagu

SEQ ID NO: 313477 - RNA, 22 nt, Human
gcagaagucagaccaucugaau

SEQ ID NO: 313478 - RNA, 22 nt, Human
ggacacaaaagugaauaaaaua

SEQ ID NO: 313479 - RNA, 21 nt, Human
gccaccccuggcacaggugcu

SEQ ID NO: 313480 - RNA, 19 nt, Human
auggaaaaugccagacuga

SEQ ID NO: 313481 - RNA, 22 nt, Human
caaggaaggagagaugaugggu

SEQ ID NO: 313482 - RNA, 22 nt, Human
ggucucagcccucgccagcagc

SEQ ID NO: 313483 - RNA, 22 nt, Human
gcagcugcuggaaguuccugcc

SEQ ID NO: 313484 - RNA, 22 nt, Human
cagguacacucccuugugcuga

SEQ ID NO: 313485 - RNA, 22 nt, Human
gggggcuguccugugcauugua

SEQ ID NO: 313486 - RNA, 18 nt, Human
ugucucugaauuccagug

SEQ ID NO: 313487 - RNA, 22 nt, Human
ccugucugaaggcagggggaug

SEQ ID NO: 313488 - RNA, 22 nt, Human
cugggaaauggcuucgagcuca

SEQ ID NO: 313489 - RNA, 22 nt, Human
ggaggccaaagugugggcggcu

SEQ ID NO: 313490 - RNA, 22 nt, Human
acuuucucaggaauucacagac

SEQ ID NO: 313491 - RNA, 22 nt, Human
ucacaguuauagucuguagaau

SEQ ID NO: 313492 - RNA, 22 nt, Human
cagaaaauaaaguuucuacgca

SEQ ID NO: 313493 - RNA, 22 nt, Human
ccugugaggucaucugugguaa

SEQ ID NO: 313494 - RNA, 22 nt, Human
uggccuggugcucaggcaguag

SEQ ID NO: 313495 - RNA, 22 nt, Human
cacaagagagugcgcguugcaa

SEQ ID NO: 313496 - RNA, 22 nt, Human
uggcugggccgggccuugugcc

SEQ ID NO: 313497 - RNA, 22 nt, Human
ccacagggacuguuaaaacccu

SEQ ID NO: 313498 - RNA, 22 nt, Human
cuauugaauuaacuauuaaagu

SEQ ID NO: 313499 - RNA, 22 nt, Human
caccagcuacagacuacugugu

SEQ ID NO: 313500 - RNA, 22 nt, Human
ggaaggagccauaucauaucca

SEQ ID NO: 313501 - RNA, 22 nt, Human
cuggcuggcaaguagaacacaa

SEQ ID NO: 313502 - RNA, 23 nt, Human
aguuuuucugcaugguucuguau

SEQ ID NO: 313503 - RNA, 22 nt, Human
gugcuaggauuacaggcauggg

SEQ ID NO: 313504 - RNA, 22 nt, Human
aauguauggauucaugucugug

SEQ ID NO: 313505 - RNA, 22 nt, Human
agagccugucugccuuucuacc

SEQ ID NO: 313506 - RNA, 22 nt, Human
cucccacuccuggcucaccaca

SEQ ID NO: 313507 - RNA, 22 nt, Human
caguuauuaugaggucauuagg

SEQ ID NO: 313508 - RNA, 22 nt, Human
gggaguggagagcaauggauga

SEQ ID NO: 313509 - RNA, 22 nt, Human
cugcugugauugggagaaaccg

SEQ ID NO: 313510 - RNA, 22 nt, Human
ccuggauucaagucuuucuuuc

SEQ ID NO: 313511 - RNA, 22 nt, Human
aaggcacuacgcugcuggggcg

SEQ ID NO: 313512 - RNA, 21 nt, Human
gcacagggacagaucaucaca

SEQ ID NO: 313513 - RNA, 22 nt, Human
ggagcagagcauuucacagccu

SEQ ID NO: 313514 - RNA, 22 nt, Human
uggaaugacagagagucugaau

SEQ ID NO: 313515 - RNA, 22 nt, Human
uggcagaggaggcucagauuga

SEQ ID NO: 313516 - RNA, 22 nt, Human
ucuucagagacucugagccccu

SEQ ID NO: 313517 - RNA, 22 nt, Human
ucacauucucagcaucuauaca

SEQ ID NO: 313518 - RNA, 22 nt, Human
agcagccagagucugaacauua

SEQ ID NO: 313519 - RNA, 22 nt, Human
agaaauguuacaguuguuauuu

SEQ ID NO: 313520 - RNA, 17 nt, Human
uucaaugauuaaugcau

SEQ ID NO: 313521 - RNA, 22 nt, Human
aaggcagauauaaagacuagag

SEQ ID NO: 313522 - RNA, 22 nt, Human
aaggccaugaccacuugcugug

SEQ ID NO: 313523 - RNA, 22 nt, Human
accugccucagugcagcuggau

SEQ ID NO: 313524 - RNA, 22 nt, Human
caggaacauuuaaccacagggu

SEQ ID NO: 313525 - RNA, 19 nt, Human
gaaggagagcugaguuagg

SEQ ID NO: 313526 - RNA, 22 nt, Human
ggcucaggacacagugguuuag

SEQ ID NO: 313527 - RNA, 22 nt, Human
gcuaccugagcaagagcuucaa

SEQ ID NO: 313528 - RNA, 22 nt, Human
cuggacagaaagggcugcugug

SEQ ID NO: 313529 - RNA, 22 nt, Human
agguggcuccucccauggcugg

SEQ ID NO: 313530 - RNA, 22 nt, Human
cagcugccuguauuguccucau

SEQ ID NO: 313531 - RNA, 22 nt, Human
ugaggugaagaguggagcucag

SEQ ID NO: 313532 - RNA, 22 nt, Human
uuuucaguaaugucuacauaau

SEQ ID NO: 313533 - RNA, 22 nt, Human
cacuggaauucaagauacugag

SEQ ID NO: 313534 - RNA, 22 nt, Human
uacagaaaaacuggcauugaag

SEQ ID NO: 313535 - RNA, 22 nt, Human
cacaaugcguacauauaucaaa

SEQ ID NO: 313536 - RNA, 22 nt, Human
aggcccagggcugcucucugaa

SEQ ID NO: 313537 - RNA, 22 nt, Human
uggccugccuucgcugagcuga

SEQ ID NO: 313538 - RNA, 22 nt, Human
ggcagggcaggaaagucaggaa

SEQ ID NO: 313539 - RNA, 22 nt, Human
aaaugucugagacuucugaacu

SEQ ID NO: 313540 - RNA, 22 nt, Human
cuguccugauggugccacuggu

SEQ ID NO: 313541 - RNA, 22 nt, Human
uccagggauguccuguagcacu

SEQ ID NO: 313542 - RNA, 22 nt, Human
cagaagaaaguggggagacaag

SEQ ID NO: 313543 - RNA, 22 nt, Human
uuccucucucuugccagaaugu

SEQ ID NO: 313544 - RNA, 22 nt, Human
auucuucacaaauauauagaag

SEQ ID NO: 313545 - RNA, 22 nt, Human
ggagccagcagggugacacuga

SEQ ID NO: 313546 - RNA, 22 nt, Human
agcuggccuguuagagcugagu

SEQ ID NO: 313547 - RNA, 22 nt, Human
gagccaggcaccuucuguguug

SEQ ID NO: 313548 - RNA, 21 nt, Human
acaugcauagagagauuucug

SEQ ID NO: 313549 - RNA, 22 nt, Human
ucugcagcgugcaggcuggugc

SEQ ID NO: 313550 - RNA, 22 nt, Human
ugcuuuaaaccauggaugugag

SEQ ID NO: 313551 - RNA, 23 nt, Human
ccugugugcccuuaauucacagc

SEQ ID NO: 313552 - RNA, 22 nt, Human
ucucagagauucagggagaagu

SEQ ID NO: 313553 - RNA, 22 nt, Human
cauugcucaggcccagcaggaa

SEQ ID NO: 313554 - RNA, 22 nt, Human
cagagcugcaaaugccccuccg

SEQ ID NO: 313555 - RNA, 22 nt, Human
ggcucagggaaugaggaagaau

SEQ ID NO: 313556 - RNA, 22 nt, Human
cuugcugucccuugguaugaac

SEQ ID NO: 313557 - RNA, 22 nt, Human
gucaggauuauuuuauuaaaag

SEQ ID NO: 313558 - RNA, 22 nt, Human
ucagcagauggguuguguuggc

SEQ ID NO: 313559 - RNA, 22 nt, Human
ccuuccuuucagggcuaugccu

SEQ ID NO: 313560 - RNA, 22 nt, Human
ccucgaccuccccaggcucagg

SEQ ID NO: 313561 - RNA, 22 nt, Human
ugcucuggaguggcuugugcac

SEQ ID NO: 313562 - RNA, 22 nt, Human
ggcaccagcaggcaccgaugcc

SEQ ID NO: 313563 - RNA, 19 nt, Human
ucccgcccacugagcgugc

SEQ ID NO: 313564 - RNA, 22 nt, Human
cagaugaggcaaccucauugcu

SEQ ID NO: 313565 - RNA, 22 nt, Human
cagcucccagagugaccagcag

SEQ ID NO: 313566 - RNA, 22 nt, Human
gcucccagauuucagccuugug

SEQ ID NO: 313567 - RNA, 22 nt, Human
ucuguaucacccguucccagaa

SEQ ID NO: 313568 - RNA, 22 nt, Human
uuauuuugguaaauguuugccu

SEQ ID NO: 313569 - RNA, 21 nt, Human
gccacguuucagucuucucag

SEQ ID NO: 313570 - RNA, 22 nt, Human
gcagaugguggggcaggaaaau

SEQ ID NO: 313571 - RNA, 22 nt, Human
aaaugcacaggagaaccaauuc

SEQ ID NO: 313572 - RNA, 22 nt, Human
gugucccaaagauuagaaauca

SEQ ID NO: 313573 - RNA, 22 nt, Human
ucaaguauaucuagucauuagg

SEQ ID NO: 313574 - RNA, 22 nt, Human
aaacacagggauauauauucca

SEQ ID NO: 313575 - RNA, 22 nt, Human
uggaaagaaaaacaggccauga

SEQ ID NO: 313576 - RNA, 20 nt, Human
gccugcagagaaggucagag

SEQ ID NO: 313577 - RNA, 22 nt, Human
aggaggcugguucaggccauau

SEQ ID NO: 313578 - RNA, 22 nt, Human
gcagggcucugcuguaguccua

SEQ ID NO: 313579 - RNA, 22 nt, Human
ucauuucaaugauacuacuaag

SEQ ID NO: 313580 - RNA, 22 nt, Human
uuuguaaagucuguucugaguu

SEQ ID NO: 313581 - RNA, 22 nt, Human
gcagggugauagugaggcucag

SEQ ID NO: 313582 - RNA, 22 nt, Human
ucuucuucccaucccucaaaug

SEQ ID NO: 313583 - RNA, 22 nt, Human
ucacaauacucacucaauggcu

SEQ ID NO: 313584 - RNA, 22 nt, Human
aggagccaagcagaacuaagga

SEQ ID NO: 313585 - RNA, 22 nt, Human
uauuucuggcuuugagggugau

SEQ ID NO: 313586 - RNA, 22 nt, Human
cugggaggcacuauucaggagg

SEQ ID NO: 313587 - RNA, 22 nt, Human
agcagcuguggaaaaguaacua

SEQ ID NO: 313588 - RNA, 22 nt, Human
ucagagugggagaaugugccaa

SEQ ID NO: 313589 - RNA, 22 nt, Human
ucacaauuuggauacagcuaug

SEQ ID NO: 313590 - RNA, 22 nt, Human
ugaaaugagauagauaaucagg

SEQ ID NO: 313591 - RNA, 22 nt, Human
ggagcugcuccuucagccaagu

SEQ ID NO: 313592 - RNA, 22 nt, Human
agagaaggucacuaaggaccca

SEQ ID NO: 313593 - RNA, 22 nt, Human
gggauggggagcuggaaagggg

SEQ ID NO: 313594 - RNA, 22 nt, Human
acaugcauacacguacauaccu

SEQ ID NO: 313595 - RNA, 22 nt, Human
uucaaacaguguagaauauaug

SEQ ID NO: 313596 - RNA, 22 nt, Human
cagaaauggagcccaggaaucu

SEQ ID NO: 313597 - RNA, 22 nt, Human
aaauaauguuaggccuuugcuc

SEQ ID NO: 313598 - RNA, 22 nt, Human
cccugcagaaccacagacaaac

SEQ ID NO: 313599 - RNA, 22 nt, Human
ugaaacuucuaauaugaauagu

SEQ ID NO: 313600 - RNA, 22 nt, Human
gccucaguaaccuuaggggaua

SEQ ID NO: 313601 - RNA, 22 nt, Human
uagcugccauugcuccaggaag

SEQ ID NO: 313602 - RNA, 22 nt, Human
agcagcagauccaaaaaaugug

SEQ ID NO: 313603 - RNA, 22 nt, Human
ggcucuggagacauguggagag

SEQ ID NO: 313604 - RNA, 22 nt, Human
augaaauaucuugaagaaauuc

SEQ ID NO: 313605 - RNA, 22 nt, Human
aacagcuuugcuucuggagaca

SEQ ID NO: 313606 - RNA, 22 nt, Human
acacagccaggguaguaaggcu

SEQ ID NO: 313607 - RNA, 22 nt, Human
ucaguuuucucaucuguaauuu

SEQ ID NO: 313608 - RNA, 22 nt, Human
agccucuggcccuagacugcuu

SEQ ID NO: 313609 - RNA, 23 nt, Human
aguuuguaaagaaauauuugcac

SEQ ID NO: 313610 - RNA, 20 nt, Human
aagaaacuugaaaguacaag

SEQ ID NO: 313611 - RNA, 22 nt, Human
ugggcaccuagcaacccuucuc

SEQ ID NO: 313612 - RNA, 22 nt, Human
ugugcccauuacacagaggcau

SEQ ID NO: 313613 - RNA, 22 nt, Human
cucugcagaggcccaaggcuga

SEQ ID NO: 313614 - RNA, 22 nt, Human
aggagucauugagagggguccu

SEQ ID NO: 313615 - RNA, 22 nt, Human
aauacaguagguaauaguucau

SEQ ID NO: 313616 - RNA, 23 nt, Human
caugccaguuugugcaggcagau

SEQ ID NO: 313617 - RNA, 22 nt, Human
ucuuugaauccuuuacaucuga

SEQ ID NO: 313618 - RNA, 22 nt, Human
gcugucaggccaugugggccuu

SEQ ID NO: 313619 - RNA, 22 nt, Human
uccucuggggucagggcacuac

SEQ ID NO: 313620 - RNA, 22 nt, Human
cugugcuucgcaacuccaaggu

SEQ ID NO: 313621 - RNA, 22 nt, Human
cuggccugggagcugcuagcgu

SEQ ID NO: 313622 - RNA, 22 nt, Human
agguggggaggagugucucuuu

SEQ ID NO: 313623 - RNA, 22 nt, Human
cuggccuguccugacccagccu

SEQ ID NO: 313624 - RNA, 22 nt, Human
agagauguucauucagcauguu

SEQ ID NO: 313625 - RNA, 22 nt, Human
uugaagcaaauucugugcagua

SEQ ID NO: 313626 - RNA, 22 nt, Human
gcccagcccugaggucacagcu

SEQ ID NO: 313627 - RNA, 22 nt, Human
cagcagaggaaagcaaaucuaa

SEQ ID NO: 313628 - RNA, 22 nt, Human
ggcauccugggacuggcuucuu

SEQ ID NO: 313629 - RNA, 22 nt, Human
ugcaaacaggagaguaaguaua

SEQ ID NO: 313630 - RNA, 22 nt, Human
cugcuguggugucaagcaucuc

SEQ ID NO: 313631 - RNA, 22 nt, Human
ucagagugugagacauauugga

SEQ ID NO: 313632 - RNA, 22 nt, Human
caggccugaguguggaagucuu

SEQ ID NO: 313633 - RNA, 22 nt, Human
gacccagcuuaagucacauguu

SEQ ID NO: 313634 - RNA, 22 nt, Human
uuuagaaauucaucuauggccu

SEQ ID NO: 313635 - RNA, 22 nt, Human
auucuuggagcagucaaagaag

SEQ ID NO: 313636 - RNA, 20 nt, Human
uguugauuggugucaucuca

SEQ ID NO: 313637 - RNA, 22 nt, Human
cagagcugcucaugguggccag

SEQ ID NO: 313638 - RNA, 21 nt, Human
uguguucuucuaggucagcua

SEQ ID NO: 313639 - RNA, 22 nt, Human
uggcugcugcuuggucuucuuc

SEQ ID NO: 313640 - RNA, 22 nt, Human
accacccccuuggguguggaag

SEQ ID NO: 313641 - RNA, 22 nt, Human
agaugcugccucuccucacaag

SEQ ID NO: 313642 - RNA, 22 nt, Human
caggggcugugggcggagccuc

SEQ ID NO: 313643 - RNA, 22 nt, Human
ggagccaggcaaucuguacuuu

SEQ ID NO: 313644 - RNA, 22 nt, Human
ccaaaguccauaguuuacauua

SEQ ID NO: 313645 - RNA, 22 nt, Human
uuaagaauggaaugaggaauuu

SEQ ID NO: 313646 - RNA, 22 nt, Human
ucucugguggcuccaucaguag

SEQ ID NO: 313647 - RNA, 22 nt, Human
gccuuccuuacaccugcucagc

SEQ ID NO: 313648 - RNA, 21 nt, Human
ggugucaguuuuggucauuag

SEQ ID NO: 313649 - RNA, 22 nt, Human
uuaaauuagucaagcuucucug

SEQ ID NO: 313650 - RNA, 22 nt, Human
ucucuucucuagugagcaacug

SEQ ID NO: 313651 - RNA, 22 nt, Human
gaugugggguugagggaccagc

SEQ ID NO: 313652 - RNA, 22 nt, Human
agagaagauucuuauaugucuu

SEQ ID NO: 313653 - RNA, 22 nt, Human
uguggcuuuugcuagcuuugca

SEQ ID NO: 313654 - RNA, 22 nt, Human
gccagcagccacagaagucacu

SEQ ID NO: 313655 - RNA, 22 nt, Human
cucagaagccuucagucuuggc

SEQ ID NO: 313656 - RNA, 18 nt, Human
aaugcacacauuuacucc

SEQ ID NO: 313657 - RNA, 22 nt, Human
ggagcuguugcgcaugcgcucg

SEQ ID NO: 313658 - RNA, 22 nt, Human
aggucacacuuggaucauagaa

SEQ ID NO: 313659 - RNA, 22 nt, Human
cuggaaggucuguccccacugc

SEQ ID NO: 313660 - RNA, 22 nt, Human
cccugccucugaagcugcucag

SEQ ID NO: 313661 - RNA, 22 nt, Human
uccuccaggucuaggguggcuu

SEQ ID NO: 313662 - RNA, 21 nt, Human
agcugagcccagaagacuggu

SEQ ID NO: 313663 - RNA, 22 nt, Human
ggucagggggaucugugaggua

SEQ ID NO: 313664 - RNA, 22 nt, Human
aaaugcuguguuuuaacauaga

SEQ ID NO: 313665 - RNA, 17 nt, Human
acagggcagaaacagcu

SEQ ID NO: 313666 - RNA, 20 nt, Human
gccugcagguuggaugggau

SEQ ID NO: 313667 - RNA, 22 nt, Human
uaaucacaucaggguaaauggg

SEQ ID NO: 313668 - RNA, 22 nt, Human
guauuugauacaugaaauggug

SEQ ID NO: 313669 - RNA, 22 nt, Human
uagacauuauguauuaaguucu

SEQ ID NO: 313670 - RNA, 22 nt, Human
caggcaggugcagauuccucuu

SEQ ID NO: 313671 - RNA, 22 nt, Human
acaguaauaaguguuggugagg

SEQ ID NO: 313672 - RNA, 22 nt, Human
agccuccuggaguuucugggau

SEQ ID NO: 313673 - RNA, 18 nt, Human
cccucuugcacaaagcaa

SEQ ID NO: 313674 - RNA, 22 nt, Human
uuuccuaggagauugaucacau

SEQ ID NO: 313675 - RNA, 22 nt, Human
aaaauuauucauggcuuuugga

SEQ ID NO: 313676 - RNA, 22 nt, Human
agucccuguacuuuccacugcc

SEQ ID NO: 313677 - RNA, 22 nt, Human
agugaaauggaugcugcuacug

SEQ ID NO: 313678 - RNA, 22 nt, Human
uucucagaugauucagauaaac

SEQ ID NO: 313679 - RNA, 22 nt, Human
gagggagugccagagggccagc

SEQ ID NO: 313680 - RNA, 22 nt, Human
acaaauguggacauggauaaug

SEQ ID NO: 313681 - RNA, 22 nt, Human
cacugcuuaguugguaaaugug

SEQ ID NO: 313682 - RNA, 19 nt, Human
ggcagaagguguaggggga

SEQ ID NO: 313683 - RNA, 22 nt, Human
agguggggcugggaaagauucc

SEQ ID NO: 313684 - RNA, 22 nt, Human
cugcccugaccugccucagagu

SEQ ID NO: 313685 - RNA, 22 nt, Human
caggcagcugggucaccguccc

SEQ ID NO: 313686 - RNA, 22 nt, Human
agguccagcuguugcagccucc

SEQ ID NO: 313687 - RNA, 22 nt, Human
accaguccgcggagcuccgggg

SEQ ID NO: 313688 - RNA, 22 nt, Human
cuuguccuuuacuugagacuca

SEQ ID NO: 313689 - RNA, 22 nt, Human
caggcacugugcugagcucugc

SEQ ID NO: 313690 - RNA, 22 nt, Human
aaaaccaggcguuuccuauuau

SEQ ID NO: 313691 - RNA, 22 nt, Human
gcugccuugaacuuggccuggg

SEQ ID NO: 313692 - RNA, 22 nt, Human
acaggcugcugagccauuugcu

SEQ ID NO: 313693 - RNA, 22 nt, Human
ucaggcaggcagagggcaaaug

SEQ ID NO: 313694 - RNA, 22 nt, Human
ggcaggagcucuccaguuugcc

SEQ ID NO: 313695 - RNA, 22 nt, Human
gcagccaggaaagcuggacccu

SEQ ID NO: 313696 - RNA, 22 nt, Human
cagcagagcauuugguaggagg

SEQ ID NO: 313697 - RNA, 22 nt, Human
gugcauguuaaugguguacaaa

SEQ ID NO: 313698 - RNA, 22 nt, Human
ucagggcagaauccaaagaauu

SEQ ID NO: 313699 - RNA, 22 nt, Human
gguggccugcccugaucccugg

SEQ ID NO: 313700 - RNA, 22 nt, Human
gcaggcaggagcccaacugccu

SEQ ID NO: 313701 - RNA, 18 nt, Human
uccagucccaaggccagc

SEQ ID NO: 313702 - RNA, 22 nt, Human
cugcugggcagaggcugcauga

SEQ ID NO: 313703 - RNA, 22 nt, Human
ugucccaguucccaggguugcu

SEQ ID NO: 313704 - RNA, 22 nt, Human
uuccaggagacuuccagaaaua

SEQ ID NO: 313705 - RNA, 21 nt, Human
gagugcagcaagguagagucu

SEQ ID NO: 313706 - RNA, 22 nt, Human
guuuaagaggguuucauuccca

SEQ ID NO: 313707 - RNA, 22 nt, Human
uuaacagagaacauagaaguag

SEQ ID NO: 313708 - RNA, 22 nt, Human
uuuuccuucuagagcagauuuc

SEQ ID NO: 313709 - RNA, 22 nt, Human
cauguguuaaucuuucugcaaa

SEQ ID NO: 313710 - RNA, 22 nt, Human
aauaguauuuauuuggaaaaag

SEQ ID NO: 313711 - RNA, 22 nt, Human
acaguguucacuaagguuagcu

SEQ ID NO: 313712 - RNA, 22 nt, Human
agcaggugaauuccuggaugug

SEQ ID NO: 313713 - RNA, 22 nt, Human
ccacacugaaccucagugucuu

SEQ ID NO: 313714 - RNA, 22 nt, Human
gccugguguccagaggcgagug

SEQ ID NO: 313715 - RNA, 22 nt, Human
uggccuggugucugcgaggccu

SEQ ID NO: 313716 - RNA, 22 nt, Human
agcaggugcauggcgagcgcgg

SEQ ID NO: 313717 - RNA, 22 nt, Human
acacagccgugaaucugcuucu

SEQ ID NO: 313718 - RNA, 22 nt, Human
auugacaauuagcccuuaggug

SEQ ID NO: 313719 - RNA, 22 nt, Human
ugcugccaccugguggcugaag

SEQ ID NO: 313720 - RNA, 22 nt, Human
gucucagggacugcuucugggg

SEQ ID NO: 313721 - RNA, 22 nt, Human
ggcaggaggaagaguuagcacc

SEQ ID NO: 313722 - RNA, 23 nt, Human
uuguuuuuagagguggcaugaga

SEQ ID NO: 313723 - RNA, 22 nt, Human
cuggcugcaggaaggagugggc

SEQ ID NO: 313724 - RNA, 22 nt, Human
cugcugugacagcugccguguu

SEQ ID NO: 313725 - RNA, 21 nt, Human
cagaggccucaugcucugugc

SEQ ID NO: 313726 - RNA, 22 nt, Human
ggcaggcugcuugggucauguc

SEQ ID NO: 313727 - RNA, 18 nt, Human
acauuucuaugcuucugg

SEQ ID NO: 313728 - RNA, 18 nt, Human
ggagcugggccccacucc

SEQ ID NO: 313729 - RNA, 20 nt, Human
accucugcaucaauccuuug

SEQ ID NO: 313730 - RNA, 22 nt, Human
gagcugagccuggguggaccgc

SEQ ID NO: 313731 - RNA, 22 nt, Human
aaugcuuuuugcgaaaugugca

SEQ ID NO: 313732 - RNA, 22 nt, Human
ugggcacuguagcuggugcugg

SEQ ID NO: 313733 - RNA, 22 nt, Human
aaaguuuguugcuuacaaagaa

SEQ ID NO: 313734 - RNA, 22 nt, Human
caccagcuuugcccacugccca

SEQ ID NO: 313735 - RNA, 22 nt, Human
caggaggaaaugugacccugcu

SEQ ID NO: 313736 - RNA, 22 nt, Human
agggcugagacuaaggccagau

SEQ ID NO: 313737 - RNA, 22 nt, Human
cagagaaacucagauagcugau

SEQ ID NO: 313738 - RNA, 22 nt, Human
uaugagaaauugcugauauuug

SEQ ID NO: 313739 - RNA, 22 nt, Human
cagaauuuuucgaauguacugu

SEQ ID NO: 313740 - RNA, 22 nt, Human
uuguaugaauguauccuaauuu

SEQ ID NO: 313741 - RNA, 22 nt, Human
uaaauuauggcuggcagagcag

SEQ ID NO: 313742 - RNA, 22 nt, Human
agugauggugagugagaagcuc

SEQ ID NO: 313743 - RNA, 22 nt, Human
accaucagagcacaguccgugc

SEQ ID NO: 313744 - RNA, 22 nt, Human
ugggcagacuaaggucaaagcu

SEQ ID NO: 313745 - RNA, 22 nt, Human
uuacuuuggauggucaagaaag

SEQ ID NO: 313746 - RNA, 22 nt, Human
ugcagcugauuaaagggcagac

SEQ ID NO: 313747 - RNA, 22 nt, Human
ucuguucauguugggcuuuucc

SEQ ID NO: 313748 - RNA, 22 nt, Human
ucaggauaaaauguaauggcaa

SEQ ID NO: 313749 - RNA, 22 nt, Human
cuuugaaaacuuaaauaacagc

SEQ ID NO: 313750 - RNA, 22 nt, Human
ugaagccuuguguggccucucu

SEQ ID NO: 313751 - RNA, 22 nt, Human
agggggcccuugcaggugagcg

SEQ ID NO: 313752 - RNA, 22 nt, Human
cagaagccugccucagaugcac

SEQ ID NO: 313753 - RNA, 22 nt, Human
uccuguggcucuguggaaccuu

SEQ ID NO: 313754 - RNA, 22 nt, Human
agaagccacuggagguugagau

SEQ ID NO: 313755 - RNA, 22 nt, Human
uguauuagagcaguagaauuau

SEQ ID NO: 313756 - RNA, 22 nt, Human
cucugugcccuacugcucagcu

SEQ ID NO: 313757 - RNA, 20 nt, Human
uccuucaggcagggccuagu

SEQ ID NO: 313758 - RNA, 22 nt, Human
gggggugaggacaggagcacug

SEQ ID NO: 313759 - RNA, 22 nt, Human
ucugggaaugaauaagaccugu

SEQ ID NO: 313760 - RNA, 22 nt, Human
agaugcugcuccacaggccagg

SEQ ID NO: 313761 - RNA, 22 nt, Human
uauuccagaugaaaucauucag

SEQ ID NO: 313762 - RNA, 22 nt, Human
aggugcagcaugaguccaacgg

SEQ ID NO: 313763 - RNA, 22 nt, Human
cucugucacuucuccagcugag

SEQ ID NO: 313764 - RNA, 22 nt, Human
uguuaaucaaucaacaguauua

SEQ ID NO: 313765 - RNA, 18 nt, Human
gggcaucauucacaaagu

SEQ ID NO: 313766 - RNA, 22 nt, Human
cuggcagcucugagucccuucu

SEQ ID NO: 313767 - RNA, 22 nt, Human
acagcagcuaaaggugucuccu

SEQ ID NO: 313768 - RNA, 22 nt, Human
cagaaauguucuaaugauucag

SEQ ID NO: 313769 - RNA, 22 nt, Human
ucaugucaguuucuucuauaaa

SEQ ID NO: 313770 - RNA, 22 nt, Human
ugcacauuaguguuugagaugc

SEQ ID NO: 313771 - RNA, 22 nt, Human
aggagccaggaaaccugcucug

SEQ ID NO: 313772 - RNA, 22 nt, Human
caaugauucugcaacugugugc

SEQ ID NO: 313773 - RNA, 22 nt, Human
ccuggcugucguuuugugaaau

SEQ ID NO: 313774 - RNA, 22 nt, Human
aagaaauauugggccuuauaaa

SEQ ID NO: 313775 - RNA, 22 nt, Human
cccuggcaaaacacucucuuga

SEQ ID NO: 313776 - RNA, 22 nt, Human
gaaaugugugacaaguuucaau

SEQ ID NO: 313777 - RNA, 22 nt, Human
gaugauuuuaugucuugucauu

SEQ ID NO: 313778 - RNA, 22 nt, Human
gaggaguguauuccacaccacu

SEQ ID NO: 313779 - RNA, 22 nt, Human
cugggagcuagcucugagcuga

SEQ ID NO: 313780 - RNA, 22 nt, Human
cccagcagaccgcugugauggc

SEQ ID NO: 313781 - RNA, 22 nt, Human
cagaacauucacucauaugugg

SEQ ID NO: 313782 - RNA, 22 nt, Human
ucccuggcuguguucaggugcg

SEQ ID NO: 313783 - RNA, 22 nt, Human
uaaaaggagguugaagcuguca

SEQ ID NO: 313784 - RNA, 22 nt, Human
caaauguguuuuuucuucuaca

SEQ ID NO: 313785 - RNA, 22 nt, Human
uuuccucuucuggcaggcaggg

SEQ ID NO: 313786 - RNA, 22 nt, Human
ucccagcagcauagcucagaau

SEQ ID NO: 313787 - RNA, 22 nt, Human
aggacucaucccugcuugucag

SEQ ID NO: 313788 - RNA, 21 nt, Human
aagggagauaggaaucaggcc

SEQ ID NO: 313789 - RNA, 22 nt, Human
ggcugcagauagccagccacca

SEQ ID NO: 313790 - RNA, 19 nt, Human
uggcugggcgugccuccgu

SEQ ID NO: 313791 - RNA, 22 nt, Human
gcugaaggaggcucugguacua

SEQ ID NO: 313792 - RNA, 22 nt, Human
ccauuguaaauucuguggaagu

SEQ ID NO: 313793 - RNA, 22 nt, Human
ugugggcucccccucacucugu

SEQ ID NO: 313794 - RNA, 22 nt, Human
cagagguacaagcuaaguuggg

SEQ ID NO: 313795 - RNA, 19 nt, Human
ucaaaugccaaugucacag

SEQ ID NO: 313796 - RNA, 22 nt, Human
auccagucaaaauuaguaaggu

SEQ ID NO: 313797 - RNA, 22 nt, Human
gcaggagucacugacuuggucc

SEQ ID NO: 313798 - RNA, 22 nt, Human
gcucuuccauuucucuugaacu

SEQ ID NO: 313799 - RNA, 22 nt, Human
auaaggcagaaauagggaaagu

SEQ ID NO: 313800 - RNA, 22 nt, Human
ggccccugcggacugccuagag

SEQ ID NO: 313801 - RNA, 22 nt, Human
gcagcugcagguggucccaugc

SEQ ID NO: 313802 - RNA, 22 nt, Human
uggccucugcaauggauucacc

SEQ ID NO: 313803 - RNA, 22 nt, Human
ugagagggcccagagcacacca

SEQ ID NO: 313804 - RNA, 22 nt, Human
uaaugagaucauaucuucugag

SEQ ID NO: 313805 - RNA, 22 nt, Human
ugucagaugcgauaaacuagug

SEQ ID NO: 313806 - RNA, 22 nt, Human
gccucaguuuauacaccuguaa

SEQ ID NO: 313807 - RNA, 22 nt, Human
cccaagggagugccuggucaac

SEQ ID NO: 313808 - RNA, 22 nt, Human
ggcugagcacuuuaggcaggag

SEQ ID NO: 313809 - RNA, 22 nt, Human
cuuauguauaauguuccacaua

SEQ ID NO: 313810 - RNA, 22 nt, Human
ggcucagguuuaaagugcuuua

SEQ ID NO: 313811 - RNA, 22 nt, Human
cacugaaggcugcagcucagcc

SEQ ID NO: 313812 - RNA, 22 nt, Human
uucuucaaagaugucuguugga

SEQ ID NO: 313813 - RNA, 22 nt, Human
ucaggacagccagggugcagac

SEQ ID NO: 313814 - RNA, 22 nt, Human
cuugaaagcacuccuuugacug

SEQ ID NO: 313815 - RNA, 22 nt, Human
uuccaugaaggagacugagaag

SEQ ID NO: 313816 - RNA, 22 nt, Human
ucaggccacggcucacugagac

SEQ ID NO: 313817 - RNA, 22 nt, Human
aauauaaugcuguuuuaugcca

SEQ ID NO: 313818 - RNA, 22 nt, Human
gcaucuucacacaaagccagug

SEQ ID NO: 313819 - RNA, 22 nt, Human
gcuggaggauggacuggaagaa

SEQ ID NO: 313820 - RNA, 22 nt, Human
uuaacaauagaguuucuucagg

SEQ ID NO: 313821 - RNA, 22 nt, Human
uacacacagaggccaugggauu

SEQ ID NO: 313822 - RNA, 22 nt, Human
agccugagccccauccagcuga

SEQ ID NO: 313823 - RNA, 22 nt, Human
agggcccucuggcaggccaggc

SEQ ID NO: 313824 - RNA, 22 nt, Human
ccugucuguauugguuugcuau

SEQ ID NO: 313825 - RNA, 22 nt, Human
uauacacaaggugugcauuugu

SEQ ID NO: 313826 - RNA, 20 nt, Human
cagaccugcacccacuucga

SEQ ID NO: 313827 - RNA, 22 nt, Human
aacuucuugguccugagcuguu

SEQ ID NO: 313828 - RNA, 22 nt, Human
cuggccuuuuguuucuggagaa

SEQ ID NO: 313829 - RNA, 22 nt, Human
cauuaucucuucuauaugcuag

SEQ ID NO: 313830 - RNA, 22 nt, Human
aggcacugugcuucuuauaugu

SEQ ID NO: 313831 - RNA, 21 nt, Human
aggccucuucauggccaugau

SEQ ID NO: 313832 - RNA, 22 nt, Human
cacagcugaaguagccaugugg

SEQ ID NO: 313833 - RNA, 22 nt, Human
ugcauuauuugcaugugccugu

SEQ ID NO: 313834 - RNA, 22 nt, Human
uugauuucuauucagauguaga

SEQ ID NO: 313835 - RNA, 22 nt, Human
uagcugccuaugugauaagaga

SEQ ID NO: 313836 - RNA, 21 nt, Human
uagcacuucgcuguaauuggg

SEQ ID NO: 313837 - RNA, 22 nt, Human
cagggccaagcugcagcaucug

SEQ ID NO: 313838 - RNA, 19 nt, Human
guaagggcuaauggacuau

SEQ ID NO: 313839 - RNA, 18 nt, Human
ccugccagucuggagcag

SEQ ID NO: 313840 - RNA, 22 nt, Human
cagucccaggguugguucagcu

SEQ ID NO: 313841 - RNA, 22 nt, Human
ggcagcaggagccaucugguag

SEQ ID NO: 313842 - RNA, 22 nt, Human
ugaggggagaagcagcagccug

SEQ ID NO: 313843 - RNA, 22 nt, Human
augguacaaaauguauaaaguc

SEQ ID NO: 313844 - RNA, 22 nt, Human
gcucugcugagauaucugggag

SEQ ID NO: 313845 - RNA, 22 nt, Human
uuugcauuguuucaaaagugaa

SEQ ID NO: 313846 - RNA, 22 nt, Human
cacacagaugguaagggaggga

SEQ ID NO: 313847 - RNA, 22 nt, Human
uucauacacgaaaaugcaugca

SEQ ID NO: 313848 - RNA, 22 nt, Human
ggcugggcaaacaagacucuuc

SEQ ID NO: 313849 - RNA, 22 nt, Human
cuuccuugcugucugcuccagg

SEQ ID NO: 313850 - RNA, 22 nt, Human
gaagcagcgaaguggaagggac

SEQ ID NO: 313851 - RNA, 22 nt, Human
cagcauuuagaauuugaagugu

SEQ ID NO: 313852 - RNA, 22 nt, Human
uaguuucagcuccuucauccug

SEQ ID NO: 313853 - RNA, 22 nt, Human
cacaggcuccggccuugcagcc

SEQ ID NO: 313854 - RNA, 22 nt, Human
aucuucaaagggauguccaugg

SEQ ID NO: 313855 - RNA, 22 nt, Human
cagggccacuguagaugaggag

SEQ ID NO: 313856 - RNA, 19 nt, Human
cccucuugcacaaagcaaa

SEQ ID NO: 313857 - RNA, 22 nt, Human
ugccucugaggaagauuguguu

SEQ ID NO: 313858 - RNA, 22 nt, Human
ggcugccugcucaggugcggcg

SEQ ID NO: 313859 - RNA, 22 nt, Human
caaaguuaucaacugcaacauu

SEQ ID NO: 313860 - RNA, 22 nt, Human
guccucagggaauguggcgggu

SEQ ID NO: 313861 - RNA, 22 nt, Human
uauaucauggagauuaacauuc

SEQ ID NO: 313862 - RNA, 19 nt, Human
uugcauuguaguuggacug

SEQ ID NO: 313863 - RNA, 22 nt, Human
cccagggauuauaaaggugaaa

SEQ ID NO: 313864 - RNA, 22 nt, Human
ucagaguguggugagaugugca

SEQ ID NO: 313865 - RNA, 22 nt, Human
gagugcaucguggccauuuuaa

SEQ ID NO: 313866 - RNA, 22 nt, Human
ccaggccucuggcugcuuaguc

SEQ ID NO: 313867 - RNA, 22 nt, Human
ggucccaggaaucuguguucua

SEQ ID NO: 313868 - RNA, 22 nt, Human
cccagccuuugcuuccugguuc

SEQ ID NO: 313869 - RNA, 22 nt, Human
acuuccuggcguagcugacauu

SEQ ID NO: 313870 - RNA, 22 nt, Human
auguaacuguuauauuuuguug

SEQ ID NO: 313871 - RNA, 22 nt, Human
agcugcugagccaggcugaugu

SEQ ID NO: 313872 - RNA, 22 nt, Human
gugucacaugguuuacugcagc

SEQ ID NO: 313873 - RNA, 22 nt, Human
caguggcuguuucuggaaggca

SEQ ID NO: 313874 - RNA, 23 nt, Human
gccugggacucaggaggagcuca

SEQ ID NO: 313875 - RNA, 20 nt, Human
cuuugccuauucucugccug

SEQ ID NO: 313876 - RNA, 22 nt, Human
aaaguuuccugcuaagugcuau

SEQ ID NO: 313877 - RNA, 22 nt, Human
ccugcugggccugagcaaugag

SEQ ID NO: 313878 - RNA, 22 nt, Human
cuagaaaugcucaagagaaagu

SEQ ID NO: 313879 - RNA, 22 nt, Human
ucucagugacacucuucauaca

SEQ ID NO: 313880 - RNA, 22 nt, Human
cagcugccacaccucuuucucu

SEQ ID NO: 313881 - RNA, 21 nt, Human
uucaaaguuugccuaaagauu

SEQ ID NO: 313882 - RNA, 22 nt, Human
cauaauuucacugucguauggc

SEQ ID NO: 313883 - RNA, 22 nt, Human
ugcccuuggguaacuugcugau

SEQ ID NO: 313884 - RNA, 22 nt, Human
uuucaguuacugcuauaucauu

SEQ ID NO: 313885 - RNA, 22 nt, Human
uuagagaaauucugguaaugua

SEQ ID NO: 313886 - RNA, 22 nt, Human
uccucagucucuaaggccucag

SEQ ID NO: 313887 - RNA, 22 nt, Human
ggcagcuggguuggccagaaac

SEQ ID NO: 313888 - RNA, 22 nt, Human
cuccuuccugccccagugauaa

SEQ ID NO: 313889 - RNA, 22 nt, Human
cagccaucccagccugugguuc

SEQ ID NO: 313890 - RNA, 22 nt, Human
uccaggcuagguuuacaggaca

SEQ ID NO: 313891 - RNA, 21 nt, Human
ggagucauuagucauuuccuu

SEQ ID NO: 313892 - RNA, 17 nt, Human
agaacuguaguagcucc

SEQ ID NO: 313893 - RNA, 22 nt, Human
uuaugcuaagugcaacaagcca

SEQ ID NO: 313894 - RNA, 22 nt, Human
ucuucagauugcacugagcaag

SEQ ID NO: 313895 - RNA, 18 nt, Human
caugggugacagguggau

SEQ ID NO: 313896 - RNA, 22 nt, Human
ccaguguuuacaguugaacaaa

SEQ ID NO: 313897 - RNA, 21 nt, Human
gcaugccugcaucuuaguguu

SEQ ID NO: 313898 - RNA, 22 nt, Human
gaguggggcccacugcugggug

SEQ ID NO: 313899 - RNA, 18 nt, Human
ggaaaaggagugucuagc

SEQ ID NO: 313900 - RNA, 22 nt, Human
ccuggcugcuuucacuauggag

SEQ ID NO: 313901 - RNA, 22 nt, Human
ccuuucucuggcagcaggacag

SEQ ID NO: 313902 - RNA, 22 nt, Human
uacaguaucuucuggcaagcau

SEQ ID NO: 313903 - RNA, 22 nt, Human
aagggcagccugacucacgguc

SEQ ID NO: 313904 - RNA, 22 nt, Human
uccuguggggaaaagccuaucu

SEQ ID NO: 313905 - RNA, 22 nt, Human
ucaagagagugcugcuuggggu

SEQ ID NO: 313906 - RNA, 22 nt, Human
cccagcauccucagggagcggg

SEQ ID NO: 313907 - RNA, 22 nt, Human
cauuuucagcacccaucugaaa

SEQ ID NO: 313908 - RNA, 22 nt, Human
acaguguucacuuaacaaugga

SEQ ID NO: 313909 - RNA, 22 nt, Human
ccuguucaagggaugauugacc

SEQ ID NO: 313910 - RNA, 19 nt, Human
ggaagagaggaaaggugga

SEQ ID NO: 313911 - RNA, 23 nt, Human
auguauuuaaauuucagugauga

SEQ ID NO: 313912 - RNA, 22 nt, Human
uguuuguucccucucuuuccug

SEQ ID NO: 313913 - RNA, 22 nt, Human
aucuccaggcauuucaagagac

SEQ ID NO: 313914 - RNA, 22 nt, Human
accagagcgcucaagccuuccc

SEQ ID NO: 313915 - RNA, 22 nt, Human
gugaccaucagagaauaacaaa

SEQ ID NO: 313916 - RNA, 23 nt, Human
uggagaugccccacucccugucu

SEQ ID NO: 313917 - RNA, 22 nt, Human
caggaaugaggucguaaguguc

SEQ ID NO: 313918 - RNA, 22 nt, Human
guccuggaauccuagaacagug

SEQ ID NO: 313919 - RNA, 22 nt, Human
ggcugccacgucgaggguccaa

SEQ ID NO: 313920 - RNA, 22 nt, Human
gagcagugggaaggaacagggu

SEQ ID NO: 313921 - RNA, 22 nt, Human
gugcuuccucugccaacacucu

SEQ ID NO: 313922 - RNA, 22 nt, Human
agcugccauccgaggugucaga

SEQ ID NO: 313923 - RNA, 22 nt, Human
ucacaaauagcuauauuaagga

SEQ ID NO: 313924 - RNA, 22 nt, Human
uuugcauaggauggacauuuua

SEQ ID NO: 313925 - RNA, 22 nt, Human
cacaugcaucugucauguuugg

SEQ ID NO: 313926 - RNA, 19 nt, Human
caggaaugagguaauggcu

SEQ ID NO: 313927 - RNA, 22 nt, Human
acagugcuggcuacaacccugg

SEQ ID NO: 313928 - RNA, 22 nt, Human
ucugcugucacucauuugcuuc

SEQ ID NO: 313929 - RNA, 22 nt, Human
cuacauaaauuuaucacagacu

SEQ ID NO: 313930 - RNA, 23 nt, Human
aucaaacuggugagaaugucagu

SEQ ID NO: 313931 - RNA, 22 nt, Human
ugucaugcagguuuguuauaga

SEQ ID NO: 313932 - RNA, 22 nt, Human
ccaguguugaacaguauuugga

SEQ ID NO: 313933 - RNA, 22 nt, Human
cagaaauucccauuucagauuc

SEQ ID NO: 313934 - RNA, 22 nt, Human
cugccagcucaaagcgcagcua

SEQ ID NO: 313935 - RNA, 22 nt, Human
cauugcacucuggcuggaacgg

SEQ ID NO: 313936 - RNA, 22 nt, Human
cugucccagauguucucagcac

SEQ ID NO: 313937 - RNA, 22 nt, Human
uucucagagugaccaagucuuu

SEQ ID NO: 313938 - RNA, 22 nt, Human
acagaugaggaauuuauuuggu

SEQ ID NO: 313939 - RNA, 22 nt, Human
agaauucuccuucagggcagga

SEQ ID NO: 313940 - RNA, 22 nt, Human
uggccugccugggagcagcagg

SEQ ID NO: 313941 - RNA, 22 nt, Human
aagcccagcaucccugcaccag

SEQ ID NO: 313942 - RNA, 22 nt, Human
acauuucucuuagaguuggacu

SEQ ID NO: 313943 - RNA, 22 nt, Human
cauuagaagaacaguuauauua

SEQ ID NO: 313944 - RNA, 22 nt, Human
aacaguaaagacagaauuuauc

SEQ ID NO: 313945 - RNA, 22 nt, Human
cauauguauuucucauaauuag

SEQ ID NO: 313946 - RNA, 22 nt, Human
gccagccccuuagggcucuccc

SEQ ID NO: 313947 - RNA, 21 nt, Human
gcucuuggaaggggcucagcu

SEQ ID NO: 313948 - RNA, 22 nt, Human
cuggccuggcaggggaccucua

SEQ ID NO: 313949 - RNA, 22 nt, Human
gcuggcuguuggagguaccugc

SEQ ID NO: 313950 - RNA, 19 nt, Human
gcucagugaugccagacca

SEQ ID NO: 313951 - RNA, 23 nt, Human
uugaaggagaaagcuuucuuggu

SEQ ID NO: 313952 - RNA, 21 nt, Human
aagagcugucaggaaggcugc

SEQ ID NO: 313953 - RNA, 22 nt, Human
agcacaggaccaaggaagcugu

SEQ ID NO: 313954 - RNA, 22 nt, Human
ucauugcagugauguuguaugu

SEQ ID NO: 313955 - RNA, 22 nt, Human
caagagcugcaaauagcgugac

SEQ ID NO: 313956 - RNA, 22 nt, Human
gguaugaaaugauuccauguua

SEQ ID NO: 313957 - RNA, 22 nt, Human
cagggcuggcuguggcaaucuc

SEQ ID NO: 313958 - RNA, 22 nt, Human
gcugcagcaagcccuccagggg

SEQ ID NO: 313959 - RNA, 22 nt, Human
cacagcugccauggcugcacuu

SEQ ID NO: 313960 - RNA, 22 nt, Human
augggguggaguccgggcagcg

SEQ ID NO: 313961 - RNA, 22 nt, Human
uauagagguggaaacugagguu

SEQ ID NO: 313962 - RNA, 19 nt, Human
auuucaagagguuuauugg

SEQ ID NO: 313963 - RNA, 22 nt, Human
acagucuugcuguauggucagg

SEQ ID NO: 313964 - RNA, 22 nt, Human
gaaggcagguuuuucaaaacug

SEQ ID NO: 313965 - RNA, 22 nt, Human
ugguauaaaacuuuuuauugaa

SEQ ID NO: 313966 - RNA, 22 nt, Human
gagcagcucugggugacccagu

SEQ ID NO: 313967 - RNA, 22 nt, Human
cucauaaugugacuguauuuga

SEQ ID NO: 313968 - RNA, 22 nt, Human
ucaguuuuuacggucacaggga

SEQ ID NO: 313969 - RNA, 22 nt, Human
gcaugguggccuuaggguagcc

SEQ ID NO: 313970 - RNA, 22 nt, Human
aucagcaaucaaauugcagagu

SEQ ID NO: 313971 - RNA, 22 nt, Human
ccagccuggacugggucuugug

SEQ ID NO: 313972 - RNA, 22 nt, Human
agcaguggagcgagauguuuaa

SEQ ID NO: 313973 - RNA, 22 nt, Human
auaccuuuuagacauguaguug

SEQ ID NO: 313974 - RNA, 22 nt, Human
uucagucagugacuaagcaguu

SEQ ID NO: 313975 - RNA, 22 nt, Human
uagaauaugugguaggaucugg

SEQ ID NO: 313976 - RNA, 18 nt, Human
ggcugagguugacuagaa

SEQ ID NO: 313977 - RNA, 22 nt, Human
cugcuuugggcagcuuuguggc

SEQ ID NO: 313978 - RNA, 22 nt, Human
ccaaggagcugcaggcacuugu

SEQ ID NO: 313979 - RNA, 22 nt, Human
augucacagcucccauuccucc

SEQ ID NO: 313980 - RNA, 22 nt, Human
uagacauuucugguuauugaca

SEQ ID NO: 313981 - RNA, 22 nt, Human
gaagcagcagcuggggacaguu

SEQ ID NO: 313982 - RNA, 22 nt, Human
aggcagggcugggauuagacuc

SEQ ID NO: 313983 - RNA, 22 nt, Human
uggggguguccuggugcacaca

SEQ ID NO: 313984 - RNA, 22 nt, Human
uuugcuauuuuucugugcagcu

SEQ ID NO: 313985 - RNA, 22 nt, Human
uggcagagucaucacaucugga

SEQ ID NO: 313986 - RNA, 22 nt, Human
acauaucuuucccucuccugaa

SEQ ID NO: 313987 - RNA, 22 nt, Human
ucauauaacuggauauuuucaa

SEQ ID NO: 313988 - RNA, 22 nt, Human
cuagcaucagaugagaagcugu

SEQ ID NO: 313989 - RNA, 22 nt, Human
ccugagacaugaaccaggcucc

SEQ ID NO: 313990 - RNA, 22 nt, Human
uugcauugaaugcacauuuuua

SEQ ID NO: 313991 - RNA, 22 nt, Human
agaggagugggaagcagugcaa

SEQ ID NO: 313992 - RNA, 22 nt, Human
aggcagggucuugcuauguugc

SEQ ID NO: 313993 - RNA, 22 nt, Human
ucagaguggugguuuugccuuc

SEQ ID NO: 313994 - RNA, 22 nt, Human
gaggccugggagccuguccucc

SEQ ID NO: 313995 - RNA, 22 nt, Human
cacagcuuaugccacugauugg

SEQ ID NO: 313996 - RNA, 22 nt, Human
cccuggaagguucucuggcuca

SEQ ID NO: 313997 - RNA, 22 nt, Human
guucuucagcauuagaagucau

SEQ ID NO: 313998 - RNA, 22 nt, Human
uaaaaguuuuaguuguacauaa

SEQ ID NO: 313999 - RNA, 22 nt, Human
cacagggcagguacucucagag

SEQ ID NO: 314000 - RNA, 22 nt, Human
ucuuagaaaugaaguucuuucu

SEQ ID NO: 314001 - RNA, 22 nt, Human
gcugauuauuacaugucugugg

SEQ ID NO: 314002 - RNA, 22 nt, Human
aaguaugaaucaaagacuaucu

SEQ ID NO: 314003 - RNA, 22 nt, Human
agaggagcugggaggcccucgu

SEQ ID NO: 314004 - RNA, 22 nt, Human
aagggcugaaugaaggguugaa

SEQ ID NO: 314005 - RNA, 23 nt, Human
cuguggcugaguccuguuggagu

SEQ ID NO: 314006 - RNA, 22 nt, Human
gcagagccuugcgucaugugcc

SEQ ID NO: 314007 - RNA, 22 nt, Human
cagacacaccaggcccauucug

SEQ ID NO: 314008 - RNA, 21 nt, Human
gugcuuuuccuuaauguucuu

SEQ ID NO: 314009 - RNA, 22 nt, Human
aaaaugaggucaauauccuuuu

SEQ ID NO: 314010 - RNA, 22 nt, Human
gagcaccucaauuugcuauuug

SEQ ID NO: 314011 - RNA, 22 nt, Human
gccuggagacaaggacaaaggg

SEQ ID NO: 314012 - RNA, 22 nt, Human
ugccugggagugaccaagacuc

SEQ ID NO: 314013 - RNA, 22 nt, Human
ggcugggcucgcugauuggcug

SEQ ID NO: 314014 - RNA, 22 nt, Human
cagcucccgccaucgggaggca

SEQ ID NO: 314015 - RNA, 22 nt, Human
gguauaaaugaucagaucgcug

SEQ ID NO: 314016 - RNA, 22 nt, Human
uguuuuaaagccauugccuuuc

SEQ ID NO: 314017 - RNA, 22 nt, Human
guuucaaauagguuucagcaaa

SEQ ID NO: 314018 - RNA, 22 nt, Human
uucauucccuuauauuagcauu

SEQ ID NO: 314019 - RNA, 22 nt, Human
gccaggcuggugucacaacucu

SEQ ID NO: 314020 - RNA, 22 nt, Human
ucuggcucucauacucgccagu

SEQ ID NO: 314021 - RNA, 19 nt, Human
ucacaggcaucuccccaga

SEQ ID NO: 314022 - RNA, 22 nt, Human
ucucaguggaucucagaauuuu

SEQ ID NO: 314023 - RNA, 22 nt, Human
uggcccugcuguaucaucugcu

SEQ ID NO: 314024 - RNA, 22 nt, Human
ugucagugaguuaguugcaagu

SEQ ID NO: 314025 - RNA, 22 nt, Human
uuucacauaaauauuaugccua

SEQ ID NO: 314026 - RNA, 22 nt, Human
ucauuuauaaggaugcaauuaa

SEQ ID NO: 314027 - RNA, 22 nt, Human
gagggcaguagccucguacccu

SEQ ID NO: 314028 - RNA, 22 nt, Human
gccugagagacccauggggcaa

SEQ ID NO: 314029 - RNA, 22 nt, Human
ugcccaggaucuggcgaugcuc

SEQ ID NO: 314030 - RNA, 22 nt, Human
caguacuuauuucuauuuaggg

SEQ ID NO: 314031 - RNA, 22 nt, Human
uacuuuaaaaacugauaauuca

SEQ ID NO: 314032 - RNA, 21 nt, Human
gcucucugcaugguggcucag

SEQ ID NO: 314033 - RNA, 22 nt, Human
ucagaccauccugcuguuagug

SEQ ID NO: 314034 - RNA, 22 nt, Human
uuucaugauuaacuuagugaau

SEQ ID NO: 314035 - RNA, 22 nt, Human
ucuuacauauagcaugaguaca

SEQ ID NO: 314036 - RNA, 22 nt, Human
uggcagggccuaccccaauauc

SEQ ID NO: 314037 - RNA, 22 nt, Human
uggaggugagugugguacagca

SEQ ID NO: 314038 - RNA, 22 nt, Human
uagacacaagagaaggguauaa

SEQ ID NO: 314039 - RNA, 22 nt, Human
gucccagggagguucagggcuu

SEQ ID NO: 314040 - RNA, 22 nt, Human
cuguggcuaugguguacauacu

SEQ ID NO: 314041 - RNA, 20 nt, Human
agagccuugaggaagaugau

SEQ ID NO: 314042 - RNA, 22 nt, Human
ugugaaaagcaggcuacuuucu

SEQ ID NO: 314043 - RNA, 22 nt, Human
cccugaggggaguggugaggug

SEQ ID NO: 314044 - RNA, 22 nt, Human
uuucaguggguuuauuucaugu

SEQ ID NO: 314045 - RNA, 22 nt, Human
gcagcuuggauuucuguaguuu

SEQ ID NO: 314046 - RNA, 19 nt, Human
gugaggauacugcucagag

SEQ ID NO: 314047 - RNA, 22 nt, Human
uucuagauugccuguaaguaaa

SEQ ID NO: 314048 - RNA, 22 nt, Human
aagggcagaaagggacgcuuug

SEQ ID NO: 314049 - RNA, 22 nt, Human
gucacaggccuggaugaggggc

SEQ ID NO: 314050 - RNA, 22 nt, Human
gaggcccaguccugcaagcacg

SEQ ID NO: 314051 - RNA, 22 nt, Human
cccagacugcagagcgggcaga

SEQ ID NO: 314052 - RNA, 22 nt, Human
uuugcauaagucauguccagug

SEQ ID NO: 314053 - RNA, 22 nt, Human
cccagcaggucggugcugccug

SEQ ID NO: 314054 - RNA, 17 nt, Human
ucaugcccaacuauuac

SEQ ID NO: 314055 - RNA, 22 nt, Human
ccagcuccaaguuugggcauca

SEQ ID NO: 314056 - RNA, 22 nt, Human
gccuuugccugcgacguggcug

SEQ ID NO: 314057 - RNA, 22 nt, Human
gcuggagccaagcugcucuugg

SEQ ID NO: 314058 - RNA, 22 nt, Human
agacagaacagaauaauuguug

SEQ ID NO: 314059 - RNA, 22 nt, Human
cagcauggggcuuggagucagc

SEQ ID NO: 314060 - RNA, 22 nt, Human
ugucucaucucuuaaccccacu

SEQ ID NO: 314061 - RNA, 22 nt, Human
cagcugccuucugcgggaaguc

SEQ ID NO: 314062 - RNA, 22 nt, Human
gaaaagcuaggccaguucagcu

SEQ ID NO: 314063 - RNA, 22 nt, Human
aaaggucagcugccaucguucu

SEQ ID NO: 314064 - RNA, 22 nt, Human
gcagggugugucucauacaguu

SEQ ID NO: 314065 - RNA, 22 nt, Human
ugcugggcuaggguggagcucu

SEQ ID NO: 314066 - RNA, 18 nt, Human
ucuggaacaacuucaugu

SEQ ID NO: 314067 - RNA, 22 nt, Human
accugaggcuguuagucuaggu

SEQ ID NO: 314068 - RNA, 22 nt, Human
gagccuggagcuggaacgaagc

SEQ ID NO: 314069 - RNA, 19 nt, Human
acucaagucuaaugaaauc

SEQ ID NO: 314070 - RNA, 22 nt, Human
uaaaauguagcuucuaggcugg

SEQ ID NO: 314071 - RNA, 23 nt, Human
uccugagaugagacagugcugcc

SEQ ID NO: 314072 - RNA, 22 nt, Human
ccaggaggcagagguuacagug

SEQ ID NO: 314073 - RNA, 22 nt, Human
agggggugggaagucuagaauc

SEQ ID NO: 314074 - RNA, 23 nt, Human
ucccagggaaggugagcgaggcu

SEQ ID NO: 314075 - RNA, 22 nt, Human
uggggccugagguggagcugca

SEQ ID NO: 314076 - RNA, 22 nt, Human
auaguuugugaaacacagcagu

SEQ ID NO: 314077 - RNA, 22 nt, Human
ucacaugcucaccuaagccaca

SEQ ID NO: 314078 - RNA, 22 nt, Human
gaaggaagacugguuuaaaugu

SEQ ID NO: 314079 - RNA, 22 nt, Human
ugucugugaccucuuuggagcc

SEQ ID NO: 314080 - RNA, 22 nt, Human
auaaggcagucccuuaacaagg

SEQ ID NO: 314081 - RNA, 22 nt, Human
cuggccugagaaugcuacccuu

SEQ ID NO: 314082 - RNA, 22 nt, Human
gcuccuggucuggagcuucaag

SEQ ID NO: 314083 - RNA, 22 nt, Human
ucacuuauugcucaucucaugc

SEQ ID NO: 314084 - RNA, 22 nt, Human
cacacaggagagugcuggaggu

SEQ ID NO: 314085 - RNA, 22 nt, Human
auugcuguacacuucuagaucu

SEQ ID NO: 314086 - RNA, 22 nt, Human
acaaauauuuacugaauccacu

SEQ ID NO: 314087 - RNA, 22 nt, Human
cccagguggcagaagcugcagu

SEQ ID NO: 314088 - RNA, 22 nt, Human
ggcuggaaaagacaaagcuauu

SEQ ID NO: 314089 - RNA, 22 nt, Human
cccuggggcugagggauggccg

SEQ ID NO: 314090 - RNA, 22 nt, Human
ccuguucauuuuuugacucugc

SEQ ID NO: 314091 - RNA, 22 nt, Human
agauauauuuaagguaauaagu

SEQ ID NO: 314092 - RNA, 17 nt, Human
gggcagggacuccuggg

SEQ ID NO: 314093 - RNA, 22 nt, Human
gggcagcugccaagugcaucgc

SEQ ID NO: 314094 - RNA, 23 nt, Human
aaguucuuuuagaugucuucgug

SEQ ID NO: 314095 - RNA, 22 nt, Human
cuggcucaggaaaguugcugcu

SEQ ID NO: 314096 - RNA, 22 nt, Human
aggccagguggucaugcuugcu

SEQ ID NO: 314097 - RNA, 22 nt, Human
ugagcuguagcagaugcuguug

SEQ ID NO: 314098 - RNA, 22 nt, Human
gcaggcuggaggcuguucuggg

SEQ ID NO: 314099 - RNA, 22 nt, Human
cagaaguaagauuacugugaga

SEQ ID NO: 314100 - RNA, 22 nt, Human
uuccagaagccuccauauuacu

SEQ ID NO: 314101 - RNA, 22 nt, Human
gcaccugauugauuucacugcu

SEQ ID NO: 314102 - RNA, 19 nt, Human
gcauaaaaugucaaugugu

SEQ ID NO: 314103 - RNA, 22 nt, Human
uuugaaagcaccauuugaguag

SEQ ID NO: 314104 - RNA, 22 nt, Human
aguuugaaaguauugacagaag

SEQ ID NO: 314105 - RNA, 22 nt, Human
uugcacagaugagggugaugcu

SEQ ID NO: 314106 - RNA, 22 nt, Human
gccagguggcugagugacugag

SEQ ID NO: 314107 - RNA, 22 nt, Human
cauuucuguucucuuccuguac

SEQ ID NO: 314108 - RNA, 22 nt, Human
uccagugguacauggagacacu

SEQ ID NO: 314109 - RNA, 22 nt, Human
gccugucaauuuuguguacaau

SEQ ID NO: 314110 - RNA, 22 nt, Human
agucucuuuguggacucugccu

SEQ ID NO: 314111 - RNA, 21 nt, Human
acagccugucaucucaugguc

SEQ ID NO: 314112 - RNA, 22 nt, Human
agagggaucacccuguuucugg

SEQ ID NO: 314113 - RNA, 22 nt, Human
cugaggaagacagcagcugugu

SEQ ID NO: 314114 - RNA, 22 nt, Human
gcugcugguccucagagcucau

SEQ ID NO: 314115 - RNA, 22 nt, Human
uacaaaguagaaauucaguaaa

SEQ ID NO: 314116 - RNA, 22 nt, Human
gcuggccugaccagccacaggc

SEQ ID NO: 314117 - RNA, 22 nt, Human
gagccugggacugggggucaug

SEQ ID NO: 314118 - RNA, 22 nt, Human
gggcagcagcaggaggucucug

SEQ ID NO: 314119 - RNA, 22 nt, Human
gcaaggagacuguagggccaag

SEQ ID NO: 314120 - RNA, 22 nt, Human
aauguaugacaguucuaguggu

SEQ ID NO: 314121 - RNA, 20 nt, Human
accauaauguuaauuacaaa

SEQ ID NO: 314122 - RNA, 22 nt, Human
caggccugauacacugaacucu

SEQ ID NO: 314123 - RNA, 22 nt, Human
aagacuguacauuuuccagucu

SEQ ID NO: 314124 - RNA, 22 nt, Human
gauuucuugaccccugucucag

SEQ ID NO: 314125 - RNA, 22 nt, Human
gucuucuuuaaccuacuaaagc

SEQ ID NO: 314126 - RNA, 22 nt, Human
uugaagcagagaaauacuugaa

SEQ ID NO: 314127 - RNA, 22 nt, Human
ugaguucuaguggcugcagauu

SEQ ID NO: 314128 - RNA, 22 nt, Human
uagggcagccacccaggcugcu

SEQ ID NO: 314129 - RNA, 22 nt, Human
agcugcaguaaagcucuccagg

SEQ ID NO: 314130 - RNA, 22 nt, Human
agucccagcucagaaccacuag

SEQ ID NO: 314131 - RNA, 22 nt, Human
agcugggagcagagccacagcc

SEQ ID NO: 314132 - RNA, 22 nt, Human
acucugcuuauugcugcaggca

SEQ ID NO: 314133 - RNA, 22 nt, Human
aggggccuggacauggacgcgc

SEQ ID NO: 314134 - RNA, 22 nt, Human
uggcccaggaggccagagggca

SEQ ID NO: 314135 - RNA, 22 nt, Human
gugaaaauaaggcugguucuug

SEQ ID NO: 314136 - RNA, 22 nt, Human
cuggcuuccucaggagcagugg

SEQ ID NO: 314137 - RNA, 22 nt, Human
accagccugucugagucguggg

SEQ ID NO: 314138 - RNA, 22 nt, Human
ucaugaacaucucaaauaacca

SEQ ID NO: 314139 - RNA, 22 nt, Human
aggccuggguguucaccagaag

SEQ ID NO: 314140 - RNA, 22 nt, Human
aaguaaaauucaaucuucacug

SEQ ID NO: 314141 - RNA, 22 nt, Human
acauauauuacuaguaaagaca

SEQ ID NO: 314142 - RNA, 22 nt, Human
cucuuccuacagucugcuaugc

SEQ ID NO: 314143 - RNA, 21 nt, Human
agcagaggggacauguuugau

SEQ ID NO: 314144 - RNA, 22 nt, Human
aauucuauguucuugaguaaga

SEQ ID NO: 314145 - RNA, 22 nt, Human
guuaacacaggacucucugccu

SEQ ID NO: 314146 - RNA, 22 nt, Human
acucugggccccagguggagcu

SEQ ID NO: 314147 - RNA, 22 nt, Human
auucuucaguauguguggauug

SEQ ID NO: 314148 - RNA, 22 nt, Human
ugugugaaggaauauauacuca

SEQ ID NO: 314149 - RNA, 22 nt, Human
cagggcagggccacacccccug

SEQ ID NO: 314150 - RNA, 22 nt, Human
gccaggugcauggcugagucuc

SEQ ID NO: 314151 - RNA, 22 nt, Human
gugucauguagaaauugaugaa

SEQ ID NO: 314152 - RNA, 20 nt, Human
caggaugauuggacacgaug

SEQ ID NO: 314153 - RNA, 22 nt, Human
agggcuggaggguacuaguuua

SEQ ID NO: 314154 - RNA, 20 nt, Human
uccuugaaagugggguauau

SEQ ID NO: 314155 - RNA, 22 nt, Human
caugagaaguggccuucaaaaa

SEQ ID NO: 314156 - RNA, 22 nt, Human
ucuggagcgaggucccugucug

SEQ ID NO: 314157 - RNA, 22 nt, Human
auauuuaaacaggguaccaaua

SEQ ID NO: 314158 - RNA, 22 nt, Human
cagaaauguuuauauguggugu

SEQ ID NO: 314159 - RNA, 21 nt, Human
gaauaguucuguggcagcagu

SEQ ID NO: 314160 - RNA, 20 nt, Human
gcugaggucauuaugccuca

SEQ ID NO: 314161 - RNA, 22 nt, Human
aaguuguauauaccgcuuuaag

SEQ ID NO: 314162 - RNA, 22 nt, Human
cucaggccagguuucucccaca

SEQ ID NO: 314163 - RNA, 22 nt, Human
agucauaauuauaaacaucagu

SEQ ID NO: 314164 - RNA, 22 nt, Human
auccaaagcccuaaguuaacug

SEQ ID NO: 314165 - RNA, 19 nt, Human
uggccagguacugucugcu

SEQ ID NO: 314166 - RNA, 22 nt, Human
ccaggagucaauaaaggaagcu

SEQ ID NO: 314167 - RNA, 22 nt, Human
caaaugcauagaaagaugaaac

SEQ ID NO: 314168 - RNA, 22 nt, Human
ucugucacccagagugcagugg

SEQ ID NO: 314169 - RNA, 22 nt, Human
aaugaaauguagcuuauccaua

SEQ ID NO: 314170 - RNA, 22 nt, Human
ugcacacaguucucaggaaaga

SEQ ID NO: 314171 - RNA, 22 nt, Human
uggaagggagugacagucagag

SEQ ID NO: 314172 - RNA, 20 nt, Human
aagauucauuguaauuaggg

SEQ ID NO: 314173 - RNA, 22 nt, Human
uggcucuggcgugaagcccaga

SEQ ID NO: 314174 - RNA, 22 nt, Human
agauuuccugcacugccuuuga

SEQ ID NO: 314175 - RNA, 22 nt, Human
uccuucagcuuauuucuuagga

SEQ ID NO: 314176 - RNA, 22 nt, Human
gcacugaaugccaaaguguagg

SEQ ID NO: 314177 - RNA, 22 nt, Human
ggcucugcagugacuugagggg

SEQ ID NO: 314178 - RNA, 21 nt, Human
ugggaugggucugggaccagc

SEQ ID NO: 314179 - RNA, 21 nt, Human
gccauuguuuucuaccuggag

SEQ ID NO: 314180 - RNA, 23 nt, Human
auguaucucauccaaggaagcuc

SEQ ID NO: 314181 - RNA, 22 nt, Human
uggcuucagacuucugcuacgu

SEQ ID NO: 314182 - RNA, 22 nt, Human
auuguggugucaguuauaggca

SEQ ID NO: 314183 - RNA, 18 nt, Human
ggccugaggauuucagca

SEQ ID NO: 314184 - RNA, 22 nt, Human
aucuacagugcacaggacagcc

SEQ ID NO: 314185 - RNA, 22 nt, Human
uguacaugugucuguauaucuu

SEQ ID NO: 314186 - RNA, 19 nt, Human
ccuuccuccccagggccau

SEQ ID NO: 314187 - RNA, 22 nt, Human
cuggggggcuacugacagagga

SEQ ID NO: 314188 - RNA, 22 nt, Human
gagcagcuggacaggccucccu

SEQ ID NO: 314189 - RNA, 22 nt, Human
aaguaaaagcuuuaccaugcgc

SEQ ID NO: 314190 - RNA, 22 nt, Human
cucagaguccccacaucugggu

SEQ ID NO: 314191 - RNA, 22 nt, Human
cagugcuggagauggguggaac

SEQ ID NO: 314192 - RNA, 19 nt, Human
cagagcagugguuccugaa

SEQ ID NO: 314193 - RNA, 18 nt, Human
uccagcgugcuccagggc

SEQ ID NO: 314194 - RNA, 22 nt, Human
auuuucagagacaucuggacuu

SEQ ID NO: 314195 - RNA, 22 nt, Human
aggccagcacgacagccgcagg

SEQ ID NO: 314196 - RNA, 22 nt, Human
uugaaaguuuauggagucugca

SEQ ID NO: 314197 - RNA, 22 nt, Human
agucucuuccuucaaggcuggu

SEQ ID NO: 314198 - RNA, 20 nt, Human
gaguuccccauuucuccugg

SEQ ID NO: 314199 - RNA, 22 nt, Human
aagcugccaaugguaagcugcu

SEQ ID NO: 314200 - RNA, 22 nt, Human
caaaaugugagucccaccucaa

SEQ ID NO: 314201 - RNA, 22 nt, Human
ucagugcucaggggagccgagg

SEQ ID NO: 314202 - RNA, 22 nt, Human
accaaggagaaggugcaagcuu

SEQ ID NO: 314203 - RNA, 22 nt, Human
ggcucuggugugaagcagccuc

SEQ ID NO: 314204 - RNA, 22 nt, Human
ucucagaguuuuuuuccaggac

SEQ ID NO: 314205 - RNA, 22 nt, Human
acacagggucuagaguuaggcc

SEQ ID NO: 314206 - RNA, 22 nt, Human
ugguaucagagccaucuguauu

SEQ ID NO: 314207 - RNA, 22 nt, Human
cugcccuggucccauggcugau

SEQ ID NO: 314208 - RNA, 22 nt, Human
ggcaguggaggacccugugucu

SEQ ID NO: 314209 - RNA, 22 nt, Human
cuccagaagacccauccucaug

SEQ ID NO: 314210 - RNA, 22 nt, Human
ucugaaagaagggcagucuuuu

SEQ ID NO: 314211 - RNA, 22 nt, Human
uucuagaugauaaaccagcagc

SEQ ID NO: 314212 - RNA, 22 nt, Human
auguagcaugaggcacugugcc

SEQ ID NO: 314213 - RNA, 22 nt, Human
cugccucugguuuuggucccug

SEQ ID NO: 314214 - RNA, 22 nt, Human
cagcagcuacuuggagcagcag

SEQ ID NO: 314215 - RNA, 22 nt, Human
acagagauggcacagagaaggu

SEQ ID NO: 314216 - RNA, 22 nt, Human
cagagccaggccugcccucuuu

SEQ ID NO: 314217 - RNA, 22 nt, Human
cacagcuucuccuugauaucgc

SEQ ID NO: 314218 - RNA, 22 nt, Human
cccuggagucagguuggccugg

SEQ ID NO: 314219 - RNA, 22 nt, Human
cauggcugcgagaagagugggu

SEQ ID NO: 314220 - RNA, 22 nt, Human
uucaacuaauguuuauuuuaug

SEQ ID NO: 314221 - RNA, 22 nt, Human
gcagaagcccggucagcgcacg

SEQ ID NO: 314222 - RNA, 22 nt, Human
ggagaaaauugaugaaguuggc

SEQ ID NO: 314223 - RNA, 22 nt, Human
uccuugaaugaagagaggugac

SEQ ID NO: 314224 - RNA, 22 nt, Human
uggcagagaauaaaucuugacu

SEQ ID NO: 314225 - RNA, 23 nt, Human
aggcacugaaugugucagugagu

SEQ ID NO: 314226 - RNA, 22 nt, Human
uggagcugguaaacagugacau

SEQ ID NO: 314227 - RNA, 22 nt, Human
gcugccuguccugaggaguccg

SEQ ID NO: 314228 - RNA, 22 nt, Human
agccagagagccccagguucua

SEQ ID NO: 314229 - RNA, 22 nt, Human
uggcagucuggguuggcaguua

SEQ ID NO: 314230 - RNA, 22 nt, Human
accucugcucaagaccccuccg

SEQ ID NO: 314231 - RNA, 22 nt, Human
aguguccccuacagaggcauuc

SEQ ID NO: 314232 - RNA, 23 nt, Human
uugauacagaagaaucaguuugu

SEQ ID NO: 314233 - RNA, 22 nt, Human
cuggugggaagauggaaaacau

SEQ ID NO: 314234 - RNA, 22 nt, Human
uuagcuaaacuguaacuagaau

SEQ ID NO: 314235 - RNA, 22 nt, Human
cuggcagcagcuucuggaucga

SEQ ID NO: 314236 - RNA, 22 nt, Human
cacaggcuuccaguccccagcu

SEQ ID NO: 314237 - RNA, 22 nt, Human
ggcuccagggaguggagagaag

SEQ ID NO: 314238 - RNA, 22 nt, Human
auaagagcuagucuuuuccuug

SEQ ID NO: 314239 - RNA, 22 nt, Human
gccuuggccuuccuaggccuga

SEQ ID NO: 314240 - RNA, 22 nt, Human
ugacagaaagaauaugucaauc

SEQ ID NO: 314241 - RNA, 21 nt, Human
ucuggagcccuaagcugagaa

SEQ ID NO: 314242 - RNA, 22 nt, Human
gcagagcuccccaagacaccaa

SEQ ID NO: 314243 - RNA, 22 nt, Human
gacagguggggaaacuaaggua

SEQ ID NO: 314244 - RNA, 22 nt, Human
ugacagcauaacacuggucuug

SEQ ID NO: 314245 - RNA, 22 nt, Human
uuuaguaaguucacugcaaagc

SEQ ID NO: 314246 - RNA, 22 nt, Human
ugguccaggguguaguacagag

SEQ ID NO: 314247 - RNA, 22 nt, Human
uagcugccagaccauucuuacu

SEQ ID NO: 314248 - RNA, 22 nt, Human
gcagggugccgacuucagggau

SEQ ID NO: 314249 - RNA, 21 nt, Human
ggauggauagggaagagauuu

SEQ ID NO: 314250 - RNA, 22 nt, Human
uguacaaugccagggaacacca

SEQ ID NO: 314251 - RNA, 22 nt, Human
cagguggggcgcccucaggcag

SEQ ID NO: 314252 - RNA, 22 nt, Human
caguccugaauacuggacggug

SEQ ID NO: 314253 - RNA, 22 nt, Human
uucauucuugucuuuguauagu

SEQ ID NO: 314254 - RNA, 22 nt, Human
uucauagugauuguucagauag

SEQ ID NO: 314255 - RNA, 22 nt, Human
gucaaacaaauuaacauaucca

SEQ ID NO: 314256 - RNA, 22 nt, Human
ggcaucccuagaauagccaggu

SEQ ID NO: 314257 - RNA, 22 nt, Human
acaguaaugauucugagucucu

SEQ ID NO: 314258 - RNA, 20 nt, Human
ccagcauguacacaugugga

SEQ ID NO: 314259 - RNA, 22 nt, Human
ggagcuguaacgagccauugcu

SEQ ID NO: 314260 - RNA, 22 nt, Human
gcagggcagcuuagucccuguc

SEQ ID NO: 314261 - RNA, 22 nt, Human
aaggccaugcacauccuaggca

SEQ ID NO: 314262 - RNA, 22 nt, Human
agggaggagaauggacuccuuc

SEQ ID NO: 314263 - RNA, 23 nt, Human
aaauaugucugagggcaaagaau

SEQ ID NO: 314264 - RNA, 22 nt, Human
uuauguacaauguuaauguaaa

SEQ ID NO: 314265 - RNA, 22 nt, Human
caccaggcugaaccagagggga

SEQ ID NO: 314266 - RNA, 22 nt, Human
ucagcucucacagaucucaacc

SEQ ID NO: 314267 - RNA, 22 nt, Human
auccuugagccaaugacugauu

SEQ ID NO: 314268 - RNA, 23 nt, Human
ucuuuacauacugaugaguucuc

SEQ ID NO: 314269 - RNA, 22 nt, Human
gagucuuugguaaagucugcug

SEQ ID NO: 314270 - RNA, 22 nt, Human
auucacaaaaugauauagauac

SEQ ID NO: 314271 - RNA, 22 nt, Human
agggaaggaaaagcugucgcuu

SEQ ID NO: 314272 - RNA, 22 nt, Human
gcaguguuaaugcgaguguuca

SEQ ID NO: 314273 - RNA, 22 nt, Human
cgggcagauugggaagguucau

SEQ ID NO: 314274 - RNA, 22 nt, Human
ucauuuguaccauuuuuuaaga

SEQ ID NO: 314275 - RNA, 22 nt, Human
uuuauuauguacaggcacuaua

SEQ ID NO: 314276 - RNA, 22 nt, Human
uucucagaauugacugggagca

SEQ ID NO: 314277 - RNA, 22 nt, Human
uccuuucaccaaaaaguguugu

SEQ ID NO: 314278 - RNA, 22 nt, Human
gccagagcaugcacugccugca

SEQ ID NO: 314279 - RNA, 19 nt, Human
guugaaaguaggugagggu

SEQ ID NO: 314280 - RNA, 20 nt, Human
ugcagagcugacauuaccug

SEQ ID NO: 314281 - RNA, 22 nt, Human
gcauuuguguucuuccuagagc

SEQ ID NO: 314282 - RNA, 22 nt, Human
cauuggaaugcauuugaagaga

SEQ ID NO: 314283 - RNA, 22 nt, Human
gcuguucagggcacucaugggc

SEQ ID NO: 314284 - RNA, 18 nt, Human
agggaucaucacugcagc

SEQ ID NO: 314285 - RNA, 22 nt, Human
gugccagggggcacugaacaga

SEQ ID NO: 314286 - RNA, 22 nt, Human
aauguugaggauaucagaaaau

SEQ ID NO: 314287 - RNA, 22 nt, Human
gcucagagaugucugcugccuu

SEQ ID NO: 314288 - RNA, 22 nt, Human
uccuugaagaaugauucuugga

SEQ ID NO: 314289 - RNA, 22 nt, Human
aguaugaagaauacauagauga

SEQ ID NO: 314290 - RNA, 22 nt, Human
aaaacacugcaaagcugauugg

SEQ ID NO: 314291 - RNA, 22 nt, Human
guucuucaucuuaaccaucugu

SEQ ID NO: 314292 - RNA, 22 nt, Human
ccugaagagcacucuagaguug

SEQ ID NO: 314293 - RNA, 22 nt, Human
gccccuuccaucaugugaggac

SEQ ID NO: 314294 - RNA, 22 nt, Human
agguaaagacugcaaggagaau

SEQ ID NO: 314295 - RNA, 22 nt, Human
ggcaggaggugaguggcgggug

SEQ ID NO: 314296 - RNA, 22 nt, Human
cauugcuguuaauugucucuag

SEQ ID NO: 314297 - RNA, 22 nt, Human
ggcaccugcucaucuggacuca

SEQ ID NO: 314298 - RNA, 22 nt, Human
uggcagggccugcucaucaucc

SEQ ID NO: 314299 - RNA, 22 nt, Human
uaacacauuaguucuccuagau

SEQ ID NO: 314300 - RNA, 22 nt, Human
ccaguccagugccaugcauggc

SEQ ID NO: 314301 - RNA, 22 nt, Human
uauuucuaagagauaucuguac

SEQ ID NO: 314302 - RNA, 22 nt, Human
cuggcucaauaaauauuagcug

SEQ ID NO: 314303 - RNA, 22 nt, Human
ucugcuguucauucuuuuagcu

SEQ ID NO: 314304 - RNA, 21 nt, Human
gccucugcugucuuauuguga

SEQ ID NO: 314305 - RNA, 22 nt, Human
uucugucaaaugccaguagaga

SEQ ID NO: 314306 - RNA, 22 nt, Human
uauguaaaaauucaucaggcug

SEQ ID NO: 314307 - RNA, 22 nt, Human
ugcucacagcccagaacauaau

SEQ ID NO: 314308 - RNA, 22 nt, Human
agacaaaggauuaaugaugaug

SEQ ID NO: 314309 - RNA, 20 nt, Human
agcccuguuuccuggagaga

SEQ ID NO: 314310 - RNA, 22 nt, Human
gcuggccuccugcuagauggaa

SEQ ID NO: 314311 - RNA, 22 nt, Human
uccugccuuagagcaaggaaaa

SEQ ID NO: 314312 - RNA, 22 nt, Human
auagucuuagaucagauaaagu

SEQ ID NO: 314313 - RNA, 22 nt, Human
ccccuuccgucucuugaguguc

SEQ ID NO: 314314 - RNA, 22 nt, Human
caggcagcugacugucagauau

SEQ ID NO: 314315 - RNA, 22 nt, Human
ucccagccuuccuuguggugaa

SEQ ID NO: 314316 - RNA, 22 nt, Human
aagcagaucugauagggcccug

SEQ ID NO: 314317 - RNA, 23 nt, Human
gccagccuugcucuccugcagcc

SEQ ID NO: 314318 - RNA, 22 nt, Human
ccaggagcuggagggugcagug

SEQ ID NO: 314319 - RNA, 22 nt, Human
uuuggaauuggaaagugcugug

SEQ ID NO: 314320 - RNA, 22 nt, Human
uuugcacuagcauuuguccaug

SEQ ID NO: 314321 - RNA, 22 nt, Human
aaugucauugguaaagauuagg

SEQ ID NO: 314322 - RNA, 22 nt, Human
agcuuuauucaugauuucaggg

SEQ ID NO: 314323 - RNA, 22 nt, Human
gaucuguuucauucacagucug

SEQ ID NO: 314324 - RNA, 22 nt, Human
ucucaguguggugcuuaggaua

SEQ ID NO: 314325 - RNA, 22 nt, Human
gcucugggauuaccagccuuag

SEQ ID NO: 314326 - RNA, 22 nt, Human
aggucauuguuaagucaccaua

SEQ ID NO: 314327 - RNA, 22 nt, Human
cccuuagcucaauuucuugccc

SEQ ID NO: 314328 - RNA, 22 nt, Human
aguggacucuucccagugcuug

SEQ ID NO: 314329 - RNA, 22 nt, Human
uuuuuaagcuccuuugauguca

SEQ ID NO: 314330 - RNA, 22 nt, Human
ucuuuccuguaacugcuguuca

SEQ ID NO: 314331 - RNA, 19 nt, Human
uacauuuguguacacuugu

SEQ ID NO: 314332 - RNA, 22 nt, Human
ucuccucaccaccagcagcaga

SEQ ID NO: 314333 - RNA, 22 nt, Human
uggcagucggacuucuaucuca

SEQ ID NO: 314334 - RNA, 22 nt, Human
ccucacucuuguccuggcaggu

SEQ ID NO: 314335 - RNA, 22 nt, Human
agcaauaugacauugcuacauc

SEQ ID NO: 314336 - RNA, 22 nt, Human
ccugggagcuguggaaaggcug

SEQ ID NO: 314337 - RNA, 22 nt, Human
uguaggaaaaacaaugaucugc

SEQ ID NO: 314338 - RNA, 22 nt, Human
gggcagagagcuggaacuccuu

SEQ ID NO: 314339 - RNA, 22 nt, Human
gcucugaggcugugaggugcug

SEQ ID NO: 314340 - RNA, 22 nt, Human
agcagcuucuuucacuccugga

SEQ ID NO: 314341 - RNA, 22 nt, Human
auuccuugcacaucagauaguu

SEQ ID NO: 314342 - RNA, 22 nt, Human
acugccuuauaugcugugugug

SEQ ID NO: 314343 - RNA, 21 nt, Human
uggaaagauucaaagaccagg

SEQ ID NO: 314344 - RNA, 22 nt, Human
uacuuucuagcucuccccaguu

SEQ ID NO: 314345 - RNA, 22 nt, Human
cagucacacaaguggacuuggg

SEQ ID NO: 314346 - RNA, 22 nt, Human
gcugccacauuuucaggacuaa

SEQ ID NO: 314347 - RNA, 22 nt, Human
agaggccuaaccaagauguccu

SEQ ID NO: 314348 - RNA, 20 nt, Human
cugcugugugugccucagcc

SEQ ID NO: 314349 - RNA, 22 nt, Human
agagcuggaaucagaccucagg

SEQ ID NO: 314350 - RNA, 22 nt, Human
aaaaugagccaugaaccaacca

SEQ ID NO: 314351 - RNA, 22 nt, Human
accaaggagccacauacaaccu

SEQ ID NO: 314352 - RNA, 22 nt, Human
cagagccaggucuaggagucuc

SEQ ID NO: 314353 - RNA, 22 nt, Human
uucucagagcucacuguaguaa

SEQ ID NO: 314354 - RNA, 20 nt, Human
ggcugcugugggcagagagg

SEQ ID NO: 314355 - RNA, 22 nt, Human
cagaagcaaaugccuugcugag

SEQ ID NO: 314356 - RNA, 22 nt, Human
ccagcagcagcguccaaggaga

SEQ ID NO: 314357 - RNA, 19 nt, Human
aggucauugauagugcagg

SEQ ID NO: 314358 - RNA, 22 nt, Human
gucccugggaugcccuucuggg

SEQ ID NO: 314359 - RNA, 22 nt, Human
ugaaagguagcuggccucauag

SEQ ID NO: 314360 - RNA, 22 nt, Human
auuuccagugcacugaauagaa

SEQ ID NO: 314361 - RNA, 22 nt, Human
cucaggaugcaggucacaggac

SEQ ID NO: 314362 - RNA, 22 nt, Human
ccagcccucgguagucccauag

SEQ ID NO: 314363 - RNA, 23 nt, Human
ugugaaauuugaggucagugcuu

SEQ ID NO: 314364 - RNA, 22 nt, Human
aacucaguguguuucuuaguau

SEQ ID NO: 314365 - RNA, 22 nt, Human
aagauuauuuaagacaggaacc

SEQ ID NO: 314366 - RNA, 22 nt, Human
gcagcccaaaaaagagguagau

SEQ ID NO: 314367 - RNA, 22 nt, Human
gccuucugcgcucgugucuccg

SEQ ID NO: 314368 - RNA, 22 nt, Human
gcugagaggcacuaucuccgga

SEQ ID NO: 314369 - RNA, 22 nt, Human
caggcugccgugaagcaggccu

SEQ ID NO: 314370 - RNA, 22 nt, Human
agguggaacguucaggugcuag

SEQ ID NO: 314371 - RNA, 22 nt, Human
agugugcugcuuaaacaguugu

SEQ ID NO: 314372 - RNA, 22 nt, Human
gaggagaaugcgcaccacauau

SEQ ID NO: 314373 - RNA, 22 nt, Human
aaaagguuuugaguacaaauau

SEQ ID NO: 314374 - RNA, 20 nt, Human
auguaaaauuauaaggcuga

SEQ ID NO: 314375 - RNA, 22 nt, Human
agaaaucugacugcugugcaca

SEQ ID NO: 314376 - RNA, 17 nt, Human
agugaaauuuacauugc

SEQ ID NO: 314377 - RNA, 19 nt, Human
uuggaaggagccagagugg

SEQ ID NO: 314378 - RNA, 22 nt, Human
uggcucaguuugggggauugaa

SEQ ID NO: 314379 - RNA, 22 nt, Human
cuggggcugcgguggaggagcc

SEQ ID NO: 314380 - RNA, 21 nt, Human
cucaggauggcggccuggugg

SEQ ID NO: 314381 - RNA, 22 nt, Human
ccucccacuucuugcugagguc

SEQ ID NO: 314382 - RNA, 22 nt, Human
ucaggcugguggucagauggcu

SEQ ID NO: 314383 - RNA, 22 nt, Human
ccugagggaaggaugcuaccca

SEQ ID NO: 314384 - RNA, 22 nt, Human
ucucucagucagaugcuaaaga

SEQ ID NO: 314385 - RNA, 22 nt, Human
gagggaaagguuaauacaugau

SEQ ID NO: 314386 - RNA, 22 nt, Human
accccagcucugagccacacca

SEQ ID NO: 314387 - RNA, 22 nt, Human
uuucuauaugaggagcuaaagu

SEQ ID NO: 314388 - RNA, 22 nt, Human
caagauggacauaaggagagaa

SEQ ID NO: 314389 - RNA, 22 nt, Human
aaguguuaaaagauuaaaugcu

SEQ ID NO: 314390 - RNA, 22 nt, Human
agcccugggcuguagauaagca

SEQ ID NO: 314391 - RNA, 20 nt, Human
uugauucaagggcugaugga

SEQ ID NO: 314392 - RNA, 22 nt, Human
agagcuggagcagccccacugg

SEQ ID NO: 314393 - RNA, 19 nt, Human
acccucucagugccugagg

SEQ ID NO: 314394 - RNA, 21 nt, Human
ugggggagaauugguugcuuu

SEQ ID NO: 314395 - RNA, 22 nt, Human
aggguauguuuuuaucuacugu

SEQ ID NO: 314396 - RNA, 22 nt, Human
ggcgcacaaugugcagguuugu

SEQ ID NO: 314397 - RNA, 17 nt, Human
acagagcacaucaagau

SEQ ID NO: 314398 - RNA, 22 nt, Human
uggcuuccuccagagcaggagg

SEQ ID NO: 314399 - RNA, 22 nt, Human
agucccagccuguaggauuggg

SEQ ID NO: 314400 - RNA, 22 nt, Human
uucaggccuaauuucuagcccc

SEQ ID NO: 314401 - RNA, 22 nt, Human
auggggugagacuaggauuaaa

SEQ ID NO: 314402 - RNA, 22 nt, Human
augugugccccuuuuacucuuu

SEQ ID NO: 314403 - RNA, 22 nt, Human
gaugcagaaaguagacaccauc

SEQ ID NO: 314404 - RNA, 22 nt, Human
ccagggcuccauugcucauccu

SEQ ID NO: 314405 - RNA, 22 nt, Human
guuuggggucugcagagcggcg

SEQ ID NO: 314406 - RNA, 22 nt, Human
aucagcaagauguaauuucuau

SEQ ID NO: 314407 - RNA, 22 nt, Human
accuuuuuucagaacucuaaag

SEQ ID NO: 314408 - RNA, 22 nt, Human
cccucaguuuuccagugugggc

SEQ ID NO: 314409 - RNA, 22 nt, Human
agcagccacacgccuccuucuc

SEQ ID NO: 314410 - RNA, 22 nt, Human
aggccuggcuuugguuugcuga

SEQ ID NO: 314411 - RNA, 22 nt, Human
agucucuggacugggagauggc

SEQ ID NO: 314412 - RNA, 22 nt, Human
aggagguggccugagcgugccc

SEQ ID NO: 314413 - RNA, 22 nt, Human
cccaggcugaugggaugggcca

SEQ ID NO: 314414 - RNA, 22 nt, Human
uuugaaguggaaaaggauuuaa

SEQ ID NO: 314415 - RNA, 22 nt, Human
uuccuauuuccaugaaacacaa

SEQ ID NO: 314416 - RNA, 20 nt, Human
acaggggcagcacaauaaug

SEQ ID NO: 314417 - RNA, 22 nt, Human
uuguccuuggaugaagcuggga

SEQ ID NO: 314418 - RNA, 22 nt, Human
cugggcacauuuugacuagugu

SEQ ID NO: 314419 - RNA, 22 nt, Human
gaacacauuagucugaguuggc

SEQ ID NO: 314420 - RNA, 23 nt, Human
ggaguuggauuguacuugcugcu

SEQ ID NO: 314421 - RNA, 22 nt, Human
aaaaaucacuuuuauaggcagc

SEQ ID NO: 314422 - RNA, 22 nt, Human
agcagacaacccagaugaccca

SEQ ID NO: 314423 - RNA, 22 nt, Human
cauacaagcguucaauagaugu

SEQ ID NO: 314424 - RNA, 22 nt, Human
ggccagaggugguacauagcuu

SEQ ID NO: 314425 - RNA, 22 nt, Human
cagggcagagccaggauuucaa

SEQ ID NO: 314426 - RNA, 22 nt, Human
gccagccugugggggcucugug

SEQ ID NO: 314427 - RNA, 22 nt, Human
ccugggugucaugggcagcugg

SEQ ID NO: 314428 - RNA, 22 nt, Human
uuuucuaacaucuaguaauuug

SEQ ID NO: 314429 - RNA, 22 nt, Human
agcacauucugccuugcuuugc

SEQ ID NO: 314430 - RNA, 22 nt, Human
ugcauuaugcuacccagaagcu

SEQ ID NO: 314431 - RNA, 22 nt, Human
gagauuggauuuaauggccaaa

SEQ ID NO: 314432 - RNA, 22 nt, Human
ugccuuggugcuucuucaugug

SEQ ID NO: 314433 - RNA, 22 nt, Human
ccacaggggcccacgagccgcu

SEQ ID NO: 314434 - RNA, 22 nt, Human
cacaguguuugauuuaggggcc

SEQ ID NO: 314435 - RNA, 22 nt, Human
augaugcuguuuaucauauacu

SEQ ID NO: 314436 - RNA, 22 nt, Human
ggguggcacaggugcagagggu

SEQ ID NO: 314437 - RNA, 20 nt, Human
gcugccagugccugaugcuu

SEQ ID NO: 314438 - RNA, 22 nt, Human
ucucagugcagcaaggaauuua

SEQ ID NO: 314439 - RNA, 22 nt, Human
caguggguaggaaaggcucuuc

SEQ ID NO: 314440 - RNA, 21 nt, Human
ugcagagauaucugaagcaga

SEQ ID NO: 314441 - RNA, 22 nt, Human
uaauacagaaguguauuaaaau

SEQ ID NO: 314442 - RNA, 22 nt, Human
cuggcugguuacuauuucuggu

SEQ ID NO: 314443 - RNA, 22 nt, Human
ccagcgcuucccaucagggagg

SEQ ID NO: 314444 - RNA, 21 nt, Human
aaugugugcuauuuaucuuuu

SEQ ID NO: 314445 - RNA, 22 nt, Human
aaggagucucagcugggccuga

SEQ ID NO: 314446 - RNA, 22 nt, Human
ccuuucagaugggcauggaccg

SEQ ID NO: 314447 - RNA, 22 nt, Human
uggcuuccgccgcgggccucgg

SEQ ID NO: 314448 - RNA, 19 nt, Human
agggcugcucuggccuggg

SEQ ID NO: 314449 - RNA, 22 nt, Human
gaggcugcggggaggagccugc

SEQ ID NO: 314450 - RNA, 22 nt, Human
cugaggcugcccagggccaggu

SEQ ID NO: 314451 - RNA, 22 nt, Human
uugcauuuaaguagauguuaca

SEQ ID NO: 314452 - RNA, 22 nt, Human
ccuggagguggagguugcagug

SEQ ID NO: 314453 - RNA, 19 nt, Human
uggcauugguccagauaaa

SEQ ID NO: 314454 - RNA, 22 nt, Human
ccugcaggcugcaggccaguuc

SEQ ID NO: 314455 - RNA, 22 nt, Human
ugaacgcagguccacauggcuc

SEQ ID NO: 314456 - RNA, 22 nt, Human
gcccagcugcacccuggugggu

SEQ ID NO: 314457 - RNA, 22 nt, Human
uauacaauggcugaaucaucca

SEQ ID NO: 314458 - RNA, 22 nt, Human
caaugugguggcagaugucagu

SEQ ID NO: 314459 - RNA, 22 nt, Human
acaggcagcacuaaucucuggu

SEQ ID NO: 314460 - RNA, 22 nt, Human
cacagcagaaaguguaggagga

SEQ ID NO: 314461 - RNA, 22 nt, Human
aacaguaaugugguguuggguu

SEQ ID NO: 314462 - RNA, 22 nt, Human
uucucuuuucaccaguugcuaa

SEQ ID NO: 314463 - RNA, 22 nt, Human
ugcaagggcuuagggggcugug

SEQ ID NO: 314464 - RNA, 22 nt, Human
gagcugggacuuggaauccaca

SEQ ID NO: 314465 - RNA, 22 nt, Human
ucuggucaguaauaagaagugg

SEQ ID NO: 314466 - RNA, 22 nt, Human
gagcugggauuugaaccuggga

SEQ ID NO: 314467 - RNA, 22 nt, Human
uagcugggaauuaucugguugc

SEQ ID NO: 314468 - RNA, 22 nt, Human
ugguuuugcuccaguauaaaua

SEQ ID NO: 314469 - RNA, 22 nt, Human
ggagcagagcucuucaucugca

SEQ ID NO: 314470 - RNA, 22 nt, Human
gccucugcaggugcgguuaucc

SEQ ID NO: 314471 - RNA, 22 nt, Human
gccaggcacaguucuaggugcu

SEQ ID NO: 314472 - RNA, 22 nt, Human
uguugagacugagggagucagc

SEQ ID NO: 314473 - RNA, 22 nt, Human
uuucugcugugcuuucuugcgu

SEQ ID NO: 314474 - RNA, 22 nt, Human
uccacagcacaaagccagugug

SEQ ID NO: 314475 - RNA, 22 nt, Human
aauuuagauugauaaacaugga

SEQ ID NO: 314476 - RNA, 22 nt, Human
accgaaggaaacuggaaccguu

SEQ ID NO: 314477 - RNA, 22 nt, Human
uccaagaucuacagcaguuuag

SEQ ID NO: 314478 - RNA, 22 nt, Human
ccaaggagcucauauucuuguu

SEQ ID NO: 314479 - RNA, 22 nt, Human
acaggggcuccgaaggugaggg

SEQ ID NO: 314480 - RNA, 22 nt, Human
agagccuugaagaucuggaaaa

SEQ ID NO: 314481 - RNA, 22 nt, Human
uguaugaauauguuggggaggu

SEQ ID NO: 314482 - RNA, 22 nt, Human
aggggagagaacauaaggaagu

SEQ ID NO: 314483 - RNA, 22 nt, Human
ucucugagcccaauguagcaau

SEQ ID NO: 314484 - RNA, 22 nt, Human
gcagcuuuuuggaugucaguua

SEQ ID NO: 314485 - RNA, 22 nt, Human
agaauuuuugauuaucuacucg

SEQ ID NO: 314486 - RNA, 22 nt, Human
cugcugcaggaugggcacucug

SEQ ID NO: 314487 - RNA, 22 nt, Human
caggcacagaguuauucauuua

SEQ ID NO: 314488 - RNA, 22 nt, Human
gagccuguguuuccuguagcca

SEQ ID NO: 314489 - RNA, 22 nt, Human
ugaggccaggaucccaggcucu

SEQ ID NO: 314490 - RNA, 22 nt, Human
augaaaacggaccagagcuauu

SEQ ID NO: 314491 - RNA, 22 nt, Human
aaagauuucagaagccugugcc

SEQ ID NO: 314492 - RNA, 22 nt, Human
agugucauuccagggacccucg

SEQ ID NO: 314493 - RNA, 21 nt, Human
uggagcugccacuuguccucc

SEQ ID NO: 314494 - RNA, 22 nt, Human
ucagagguaagggcugagagga

SEQ ID NO: 314495 - RNA, 22 nt, Human
ucauuguuauguuuugcugucu

SEQ ID NO: 314496 - RNA, 22 nt, Human
uaucaucuuguugucaugcagc

SEQ ID NO: 314497 - RNA, 22 nt, Human
gggcucagccccauugaaccag

SEQ ID NO: 314498 - RNA, 22 nt, Human
guccucugcccaggucaagguu

SEQ ID NO: 314499 - RNA, 23 nt, Human
gcaggugguucgaacagaaguuu

SEQ ID NO: 314500 - RNA, 22 nt, Human
gggcccuggacguggcggcaga

SEQ ID NO: 314501 - RNA, 22 nt, Human
ggagugggcagcacugcccugu

SEQ ID NO: 314502 - RNA, 22 nt, Human
cucugugggggagaggcagcug

SEQ ID NO: 314503 - RNA, 22 nt, Human
aaagccuugagauccuauaguu

SEQ ID NO: 314504 - RNA, 22 nt, Human
gagagugaugaaugguuaaaca

SEQ ID NO: 314505 - RNA, 22 nt, Human
agucaauuaucucuaggucauc

SEQ ID NO: 314506 - RNA, 22 nt, Human
uccaggagaggccugaccaggu

SEQ ID NO: 314507 - RNA, 22 nt, Human
uaaggcacccuucugaguagag

SEQ ID NO: 314508 - RNA, 22 nt, Human
agaaaucaugacuaagagcagu

SEQ ID NO: 314509 - RNA, 19 nt, Human
ggucacagggguuacaagg

SEQ ID NO: 314510 - RNA, 22 nt, Human
cugaucuuaaguaacauuauuu

SEQ ID NO: 314511 - RNA, 22 nt, Human
agcugccacagagccuggccag

SEQ ID NO: 314512 - RNA, 17 nt, Human
uggcacagaggugcuau

SEQ ID NO: 314513 - RNA, 22 nt, Human
gacaggguacgggcuaggcaca

SEQ ID NO: 314514 - RNA, 18 nt, Human
ugugguggagcugccuuc

SEQ ID NO: 314515 - RNA, 22 nt, Human
ccagguggaaggucugugcucu

SEQ ID NO: 314516 - RNA, 22 nt, Human
cagauggaacacagaaaggaga

SEQ ID NO: 314517 - RNA, 22 nt, Human
uguguccauucaggcacugacc

SEQ ID NO: 314518 - RNA, 17 nt, Human
aauagcugcucagagag

SEQ ID NO: 314519 - RNA, 22 nt, Human
uggcuccuaucaaggagugggu

SEQ ID NO: 314520 - RNA, 19 nt, Human
ucccaggaagcaaauguca

SEQ ID NO: 314521 - RNA, 23 nt, Human
gcucagagguuuuucucuggaug

SEQ ID NO: 314522 - RNA, 22 nt, Human
ggagccugugggaugagaugug

SEQ ID NO: 314523 - RNA, 22 nt, Human
ggccagagaauaugccuuacgu

SEQ ID NO: 314524 - RNA, 22 nt, Human
ucagcagggaggcucugugccc

SEQ ID NO: 314525 - RNA, 22 nt, Human
cugugucccaguaccuugggua

SEQ ID NO: 314526 - RNA, 22 nt, Human
aggccaggcaacauucugaagu

SEQ ID NO: 314527 - RNA, 22 nt, Human
ggaggccaaggcagguggaucg

SEQ ID NO: 314528 - RNA, 19 nt, Human
cugcugggugcugagggag

SEQ ID NO: 314529 - RNA, 22 nt, Human
ggcaccuggagguuuacuggau

SEQ ID NO: 314530 - RNA, 22 nt, Human
uugaagcaaggcgaaucuugug

SEQ ID NO: 314531 - RNA, 22 nt, Human
ucagugcagggugggagagaga

SEQ ID NO: 314532 - RNA, 22 nt, Human
ccuucauugcaucuuuaagaga

SEQ ID NO: 314533 - RNA, 22 nt, Human
agucucagccacacagaccuau

SEQ ID NO: 314534 - RNA, 22 nt, Human
uuuaaagaaauuccucaucuuu

SEQ ID NO: 314535 - RNA, 22 nt, Human
uuaagucauuucugauuauaga

SEQ ID NO: 314536 - RNA, 22 nt, Human
agucccagagaggucggggcca

SEQ ID NO: 314537 - RNA, 17 nt, Human
ggcagcugccacuuuuu

SEQ ID NO: 314538 - RNA, 19 nt, Human
cucugccucccuccugggu

SEQ ID NO: 314539 - RNA, 22 nt, Human
agggaggauaguagucaguuua

SEQ ID NO: 314540 - RNA, 22 nt, Human
uagcuagaaugcuucgugauau

SEQ ID NO: 314541 - RNA, 22 nt, Human
cacugagaggucucauuuccaa

SEQ ID NO: 314542 - RNA, 22 nt, Human
cccagcccagcguucgaggggu

SEQ ID NO: 314543 - RNA, 22 nt, Human
agccaaggacacggagccuccu

SEQ ID NO: 314544 - RNA, 22 nt, Human
ggaggggauuuaguagaugcua

SEQ ID NO: 314545 - RNA, 19 nt, Human
ucuguucacauuguuucgc

SEQ ID NO: 314546 - RNA, 22 nt, Human
gagccuggauagccuuguucca

SEQ ID NO: 314547 - RNA, 22 nt, Human
ccugugucagccccugccucca

SEQ ID NO: 314548 - RNA, 22 nt, Human
gcaaagcugggugugaaugcac

SEQ ID NO: 314549 - RNA, 22 nt, Human
ugacaauacagagagagcaaaa

SEQ ID NO: 314550 - RNA, 22 nt, Human
guuuauaaggcccaauauuucu

SEQ ID NO: 314551 - RNA, 22 nt, Human
ccucagugcguacugaacagug

SEQ ID NO: 314552 - RNA, 22 nt, Human
ucuucacaccgggcagcaggaa

SEQ ID NO: 314553 - RNA, 20 nt, Human
aagcuggguaggagaggagc

SEQ ID NO: 314554 - RNA, 22 nt, Human
gaggguuggugcaaaugggaug

SEQ ID NO: 314555 - RNA, 22 nt, Human
gagcucagcccaaagagcagug

SEQ ID NO: 314556 - RNA, 22 nt, Human
ucaguuuugaaaacauugaaug

SEQ ID NO: 314557 - RNA, 22 nt, Human
gaaggccacaagagaaguuaag

SEQ ID NO: 314558 - RNA, 22 nt, Human
cucaggauuaaggaaucuaaau

SEQ ID NO: 314559 - RNA, 22 nt, Human
agaguguuucagucuuccuaga

SEQ ID NO: 314560 - RNA, 22 nt, Human
ggugacuggagggacccaggcc

SEQ ID NO: 314561 - RNA, 22 nt, Human
cagaagcauugacuccuugcuc

SEQ ID NO: 314562 - RNA, 22 nt, Human
ccaggaggcagaaguugcagug

SEQ ID NO: 314563 - RNA, 19 nt, Human
uggcagggagugauauuag

SEQ ID NO: 314564 - RNA, 23 nt, Human
ucuggcuccauccuuggggaucc

SEQ ID NO: 314565 - RNA, 22 nt, Human
gccugccuguuggcugaggugc

SEQ ID NO: 314566 - RNA, 22 nt, Human
agaugguagguggcaggacuga

SEQ ID NO: 314567 - RNA, 22 nt, Human
cugggcucagaugagaggaagg

SEQ ID NO: 314568 - RNA, 22 nt, Human
uggagugaaguaaagaggacaa

SEQ ID NO: 314569 - RNA, 22 nt, Human
accugaggccuccccagcagac

SEQ ID NO: 314570 - RNA, 22 nt, Human
uucucuuagcuguaaagucaau

SEQ ID NO: 314571 - RNA, 22 nt, Human
cucaggaaaggccaugcaaggg

SEQ ID NO: 314572 - RNA, 21 nt, Human
ucugggcccaugcugccucac

SEQ ID NO: 314573 - RNA, 22 nt, Human
gcaguguuuguguucucacaug

SEQ ID NO: 314574 - RNA, 22 nt, Human
caaaugcuggcccugcuacuua

SEQ ID NO: 314575 - RNA, 19 nt, Human
acagggcagcaauaggaua

SEQ ID NO: 314576 - RNA, 22 nt, Human
gccuccuggauuuuagugccau

SEQ ID NO: 314577 - RNA, 22 nt, Human
caugagcugcugggagccuguc

SEQ ID NO: 314578 - RNA, 22 nt, Human
guuuuccugaaacugauggugu

SEQ ID NO: 314579 - RNA, 22 nt, Human
cuuuaagacucugcucuuggug

SEQ ID NO: 314580 - RNA, 22 nt, Human
cuggcugggagcgagcugcuca

SEQ ID NO: 314581 - RNA, 22 nt, Human
cagcuuccaucuccacugcccu

SEQ ID NO: 314582 - RNA, 22 nt, Human
aaucucacucaaagaauucucu

SEQ ID NO: 314583 - RNA, 22 nt, Human
uccaggacuagcauuucugaua

SEQ ID NO: 314584 - RNA, 21 nt, Human
ggccucugccuugccccacuc

SEQ ID NO: 314585 - RNA, 22 nt, Human
augcugugccuucucugugcca

SEQ ID NO: 314586 - RNA, 22 nt, Human
ccugggcauaaaucacuccaag

SEQ ID NO: 314587 - RNA, 22 nt, Human
gccagcagguggagagaucaag

SEQ ID NO: 314588 - RNA, 22 nt, Human
cugcccuguuuggacagcccgg

SEQ ID NO: 314589 - RNA, 22 nt, Human
auacaucuuccuuuuaaaaugc

SEQ ID NO: 314590 - RNA, 22 nt, Human
gcccugagacugagcauggguu

SEQ ID NO: 314591 - RNA, 22 nt, Human
aagggaggccagagguuuugca

SEQ ID NO: 314592 - RNA, 22 nt, Human
uggccuugggcagguggccugc

SEQ ID NO: 314593 - RNA, 19 nt, Human
ugcagcucagggcaggggc

SEQ ID NO: 314594 - RNA, 22 nt, Human
cugcucuaacugcauuaguuuu

SEQ ID NO: 314595 - RNA, 22 nt, Human
aaauacacguacauguguaaaa

SEQ ID NO: 314596 - RNA, 18 nt, Human
cugcuugggagacgucag

SEQ ID NO: 314597 - RNA, 22 nt, Human
gauauguauugaaugaucauuu

SEQ ID NO: 314598 - RNA, 22 nt, Human
ggaggccacgguuuagcaccga

SEQ ID NO: 314599 - RNA, 22 nt, Human
ggcagccauacucagaccuggg

SEQ ID NO: 314600 - RNA, 22 nt, Human
uggcucugcaccucaguguacc

SEQ ID NO: 314601 - RNA, 22 nt, Human
auucaaguucuucugucuuugc

SEQ ID NO: 314602 - RNA, 21 nt, Human
gcccagcaaggugagaaggcc

SEQ ID NO: 314603 - RNA, 22 nt, Human
acugaguguaggacuuugaguu

SEQ ID NO: 314604 - RNA, 22 nt, Human
gcagagccaggcuggggcaggu

SEQ ID NO: 314605 - RNA, 22 nt, Human
ugcugucccuaagucucuucaa

SEQ ID NO: 314606 - RNA, 22 nt, Human
aaucucuuuggcucaaggaucc

SEQ ID NO: 314607 - RNA, 22 nt, Human
gcucagagcacucagacucagc

SEQ ID NO: 314608 - RNA, 22 nt, Human
agucuucccugugccagagugu

SEQ ID NO: 314609 - RNA, 22 nt, Human
auucauuugcuauuguguaugg

SEQ ID NO: 314610 - RNA, 22 nt, Human
auuguacaaugccuggaacauu

SEQ ID NO: 314611 - RNA, 22 nt, Human
uggaggagggcuggugucugua

SEQ ID NO: 314612 - RNA, 22 nt, Human
gucuuucuaugaugaacuguug

SEQ ID NO: 314613 - RNA, 22 nt, Human
uacagugucuggauaucaaagg

SEQ ID NO: 314614 - RNA, 22 nt, Human
aauguguagggugccuguuuuu

SEQ ID NO: 314615 - RNA, 21 nt, Human
ugguuugcggccaaaguuaaa

SEQ ID NO: 314616 - RNA, 22 nt, Human
aacauuucagcaaauaagaaca

SEQ ID NO: 314617 - RNA, 22 nt, Human
ggccaggcuggucucagacuuc

SEQ ID NO: 314618 - RNA, 22 nt, Human
cccaggucuaugccagcucuga

SEQ ID NO: 314619 - RNA, 22 nt, Human
ugagcuucuuuauuuggccaga

SEQ ID NO: 314620 - RNA, 22 nt, Human
ccugggcaaaugccagagacaa

SEQ ID NO: 314621 - RNA, 22 nt, Human
ugcuuccuucccguucuucucc

SEQ ID NO: 314622 - RNA, 23 nt, Human
aaugauuucaugaugauagcagc

SEQ ID NO: 314623 - RNA, 22 nt, Human
gagcuuccacucuagaaggagu

SEQ ID NO: 314624 - RNA, 22 nt, Human
agcucagcuuccucuccaugcu

SEQ ID NO: 314625 - RNA, 22 nt, Human
cucagcagcagggaagagguca

SEQ ID NO: 314626 - RNA, 22 nt, Human
auggggcugggauucuccucgg

SEQ ID NO: 314627 - RNA, 22 nt, Human
cagggcccaagacacaaugagg

SEQ ID NO: 314628 - RNA, 20 nt, Human
ucucuucuggggagauaaaa

SEQ ID NO: 314629 - RNA, 22 nt, Human
ucugggaauuuauuggcacuuu

SEQ ID NO: 314630 - RNA, 22 nt, Human
aacauacauauuucagugucca

SEQ ID NO: 314631 - RNA, 20 nt, Human
cucuggcuccgcgugaccgc

SEQ ID NO: 314632 - RNA, 22 nt, Human
ucgcugugguuucuguacaugg

SEQ ID NO: 314633 - RNA, 22 nt, Human
agauuguagaaacuguagcauu

SEQ ID NO: 314634 - RNA, 22 nt, Human
aguuuaugaaacacagauuuga

SEQ ID NO: 314635 - RNA, 22 nt, Human
cguguacagucuaucuuuuuuc

SEQ ID NO: 314636 - RNA, 22 nt, Human
gcugggcaccggagagacccca

SEQ ID NO: 314637 - RNA, 22 nt, Human
gaugccucuuuuggcugaauua

SEQ ID NO: 314638 - RNA, 22 nt, Human
ccagccugaaaugccucauccu

SEQ ID NO: 314639 - RNA, 22 nt, Human
uuccauaauaaccugagagaaa

SEQ ID NO: 314640 - RNA, 22 nt, Human
gcagggugaaggucacauagaa

SEQ ID NO: 314641 - RNA, 22 nt, Human
uuagacauagaauauugucuag

SEQ ID NO: 314642 - RNA, 22 nt, Human
uuggcuuccaggaucucagcag

SEQ ID NO: 314643 - RNA, 20 nt, Human
aggaaaaggguggugguaga

SEQ ID NO: 314644 - RNA, 21 nt, Human
guauucuuuaugaagugaaaa

SEQ ID NO: 314645 - RNA, 22 nt, Human
acauuucaguaaguguuaauuu

SEQ ID NO: 314646 - RNA, 22 nt, Human
ugggcugcggauaggccucgga

SEQ ID NO: 314647 - RNA, 22 nt, Human
uuguuacaucuuauguaagugg

SEQ ID NO: 314648 - RNA, 22 nt, Human
aauaacaggcucaucagaugcu

SEQ ID NO: 314649 - RNA, 22 nt, Human
agccagcaugaagacagaggcc

SEQ ID NO: 314650 - RNA, 21 nt, Human
uuucuucacuuugccccaugu

SEQ ID NO: 314651 - RNA, 22 nt, Human
uaagaacaagcuggggguucca

SEQ ID NO: 314652 - RNA, 22 nt, Human
gagccaggcccguacuugcugu

SEQ ID NO: 314653 - RNA, 22 nt, Human
uggcuuccaaaggaaugggccu

SEQ ID NO: 314654 - RNA, 22 nt, Human
uaaauucagugaguaauuucug

SEQ ID NO: 314655 - RNA, 22 nt, Human
uugacagcaaagauugugccua

SEQ ID NO: 314656 - RNA, 21 nt, Human
aggggacagaguagcuccagg

SEQ ID NO: 314657 - RNA, 22 nt, Human
aaaauuauagaucuagugccug

SEQ ID NO: 314658 - RNA, 22 nt, Human
guccucuggaagaugaguucuu

SEQ ID NO: 314659 - RNA, 22 nt, Human
aggccucagccugccaggccug

SEQ ID NO: 314660 - RNA, 22 nt, Human
cagagcugcuucccaguuugug

SEQ ID NO: 314661 - RNA, 22 nt, Human
ugaaggagaaauggaaaguggg

SEQ ID NO: 314662 - RNA, 22 nt, Human
uggaggcauuuuagguugucac

SEQ ID NO: 314663 - RNA, 22 nt, Human
gcagcaaucuucacagugucau

SEQ ID NO: 314664 - RNA, 18 nt, Human
cacaggcucccagugagg

SEQ ID NO: 314665 - RNA, 22 nt, Human
uuuaacagguaaaguaaaugug

SEQ ID NO: 314666 - RNA, 18 nt, Human
gaagggagcuggaaugca

SEQ ID NO: 314667 - RNA, 22 nt, Human
ucagcagaggggaaggcaucug

SEQ ID NO: 314668 - RNA, 22 nt, Human
gcugcaggggggucuggacuug

SEQ ID NO: 314669 - RNA, 22 nt, Human
uccagcucagaugcagggauca

SEQ ID NO: 314670 - RNA, 20 nt, Human
ugugcccaauguccagguuc

SEQ ID NO: 314671 - RNA, 22 nt, Human
aauuucagagguagagauucua

SEQ ID NO: 314672 - RNA, 22 nt, Human
acagagcucccagccaucuccu

SEQ ID NO: 314673 - RNA, 22 nt, Human
aggcagagagcaguggccgucu

SEQ ID NO: 314674 - RNA, 22 nt, Human
ugcucuguaacaaauugacaug

SEQ ID NO: 314675 - RNA, 22 nt, Human
acugucuccucaucaugccugg

SEQ ID NO: 314676 - RNA, 22 nt, Human
uuuauauuguaaaaaugguucu

SEQ ID NO: 314677 - RNA, 22 nt, Human
aggcucagcccaagguggagag

SEQ ID NO: 314678 - RNA, 21 nt, Human
uagagaaaagaagcuguuccu

SEQ ID NO: 314679 - RNA, 22 nt, Human
ugggcuacucugggagccuaac

SEQ ID NO: 314680 - RNA, 22 nt, Human
cucuggagcauuucaccuacau

SEQ ID NO: 314681 - RNA, 22 nt, Human
gaggccugguuugcaugagaau

SEQ ID NO: 314682 - RNA, 23 nt, Human
cagggcugggcuugguguuaggc

SEQ ID NO: 314683 - RNA, 22 nt, Human
ugcagggccagacuggguugga

SEQ ID NO: 314684 - RNA, 22 nt, Human
gggcagugguccaggcuacagc

SEQ ID NO: 314685 - RNA, 23 nt, Human
ucucuuucaagagcuuaaugugc

SEQ ID NO: 314686 - RNA, 22 nt, Human
agcagggcucuguggagggugg

SEQ ID NO: 314687 - RNA, 22 nt, Human
uaagaacaucuguccccagauu

SEQ ID NO: 314688 - RNA, 22 nt, Human
agggagaagagaacaaagcccu

SEQ ID NO: 314689 - RNA, 22 nt, Human
aaucaguuaggguguuaaugag

SEQ ID NO: 314690 - RNA, 22 nt, Human
cccagccaaggugcugguguug

SEQ ID NO: 314691 - RNA, 22 nt, Human
ggcagccaugcacgcugccugg

SEQ ID NO: 314692 - RNA, 22 nt, Human
aggcaggggagcuggaagggua

SEQ ID NO: 314693 - RNA, 22 nt, Human
uggcucagccuggcccuuucau

SEQ ID NO: 314694 - RNA, 22 nt, Human
uuauuuuuaaaaguucacacag

SEQ ID NO: 314695 - RNA, 19 nt, Human
agcagccauagacaauaug

SEQ ID NO: 314696 - RNA, 22 nt, Human
ugcucuggguccugggccuccu

SEQ ID NO: 314697 - RNA, 22 nt, Human
aguuggagaagaggucgggaau

SEQ ID NO: 314698 - RNA, 22 nt, Human
agcccagguugaggcugcagug

SEQ ID NO: 314699 - RNA, 22 nt, Human
uagaaguuaaaggaauacagaa

SEQ ID NO: 314700 - RNA, 21 nt, Human
ucuguggcggacucuaggccc

SEQ ID NO: 314701 - RNA, 22 nt, Human
caauguguguguuuuucucaac

SEQ ID NO: 314702 - RNA, 21 nt, Human
cugaggcagcacagcuaguca

SEQ ID NO: 314703 - RNA, 22 nt, Human
ucccagaaaaaggaggcuauga

SEQ ID NO: 314704 - RNA, 22 nt, Human
agccacagcaacaagugcaauu

SEQ ID NO: 314705 - RNA, 22 nt, Human
gcccagcuggcuuccagcacau

SEQ ID NO: 314706 - RNA, 22 nt, Human
uccucacagucaacacuuugag

SEQ ID NO: 314707 - RNA, 22 nt, Human
cacugccuggaaggagagacau

SEQ ID NO: 314708 - RNA, 22 nt, Human
uaguuuuuucaacaaauggugc

SEQ ID NO: 314709 - RNA, 22 nt, Human
gguggcagucuuaagagaucuu

SEQ ID NO: 314710 - RNA, 22 nt, Human
gcacagcaauuucuauaagcuc

SEQ ID NO: 314711 - RNA, 22 nt, Human
ccacagagacaggguccuugcu

SEQ ID NO: 314712 - RNA, 22 nt, Human
ggucucaggagacuggagagca

SEQ ID NO: 314713 - RNA, 22 nt, Human
gcagccacagaggagggaugca

SEQ ID NO: 314714 - RNA, 22 nt, Human
aacauucugguucuaaaaaccu

SEQ ID NO: 314715 - RNA, 22 nt, Human
aaggaguuuggguagucauaca

SEQ ID NO: 314716 - RNA, 22 nt, Human
gggacuucauagcuaggcacuu

SEQ ID NO: 314717 - RNA, 23 nt, Human
acugagccagggccugggucagc

SEQ ID NO: 314718 - RNA, 22 nt, Human
cuccaugaauuugagcuuugug

SEQ ID NO: 314719 - RNA, 22 nt, Human
auguacacaugcaugcaugugc

SEQ ID NO: 314720 - RNA, 22 nt, Human
uuugaagucaggcuuucuaccc

SEQ ID NO: 314721 - RNA, 22 nt, Human
cugcauccuaaccuccaugcag

SEQ ID NO: 314722 - RNA, 22 nt, Human
uaaauguguaaaccuccauuac

SEQ ID NO: 314723 - RNA, 22 nt, Human
aaugagaacugggaguuggugg

SEQ ID NO: 314724 - RNA, 23 nt, Human
uggcucucucagugcugcagagg

SEQ ID NO: 314725 - RNA, 22 nt, Human
gcauccagucuuggcuccugga

SEQ ID NO: 314726 - RNA, 22 nt, Human
gagccaggguuugaaacuagac

SEQ ID NO: 314727 - RNA, 22 nt, Human
uucuucaugcuguugcugcuug

SEQ ID NO: 314728 - RNA, 20 nt, Human
agugccagggcaggugagag

SEQ ID NO: 314729 - RNA, 22 nt, Human
gaggaaugucagcacaggccuc

SEQ ID NO: 314730 - RNA, 19 nt, Human
uggggccuccugucccugg

SEQ ID NO: 314731 - RNA, 22 nt, Human
gccugccugcugucaucugccu

SEQ ID NO: 314732 - RNA, 22 nt, Human
uuauuuucagcuaggaaagcca

SEQ ID NO: 314733 - RNA, 22 nt, Human
cuggcuggccggaggcaucccu

SEQ ID NO: 314734 - RNA, 22 nt, Human
uauagaagagacaugugcauag

SEQ ID NO: 314735 - RNA, 21 nt, Human
agucuguuaggaugacucuga

SEQ ID NO: 314736 - RNA, 22 nt, Human
cagcuucugagcaagccagggg

SEQ ID NO: 314737 - RNA, 22 nt, Human
cagcucugaggaacacuccuuu

SEQ ID NO: 314738 - RNA, 21 nt, Human
ucuuugcaucaguuguuuucu

SEQ ID NO: 314739 - RNA, 22 nt, Human
ugaagcagagugaaggugaauu

SEQ ID NO: 314740 - RNA, 18 nt, Human
auccaaaaagauggaagu

SEQ ID NO: 314741 - RNA, 22 nt, Human
auaaacaguagagaaagguggu

SEQ ID NO: 314742 - RNA, 22 nt, Human
aaaugucuaucuggcauauucc

SEQ ID NO: 314743 - RNA, 22 nt, Human
auucugucauuucaagaaaaac

SEQ ID NO: 314744 - RNA, 22 nt, Human
agccacagcauguguguaugua

SEQ ID NO: 314745 - RNA, 22 nt, Human
cugguccuccuugccuucagau

SEQ ID NO: 314746 - RNA, 22 nt, Human
ucagaggagccaaaguucugag

SEQ ID NO: 314747 - RNA, 22 nt, Human
gugugcaugcauagacaccaca

SEQ ID NO: 314748 - RNA, 22 nt, Human
aggaggcuguggagcacuccau

SEQ ID NO: 314749 - RNA, 22 nt, Human
ucaggccucaagcugcuuuaag

SEQ ID NO: 314750 - RNA, 22 nt, Human
accagguggccccagcgugguu

SEQ ID NO: 314751 - RNA, 22 nt, Human
guguuuccuaguuuaaugaaug

SEQ ID NO: 314752 - RNA, 22 nt, Human
agagcugggaccgucuggaagu

SEQ ID NO: 314753 - RNA, 22 nt, Human
uggcaguggcucagagugcaga

SEQ ID NO: 314754 - RNA, 22 nt, Human
cccucaggagaugucagcugga

SEQ ID NO: 314755 - RNA, 22 nt, Human
auuuuucucucacacuuaccag

SEQ ID NO: 314756 - RNA, 22 nt, Human
aaagaacagauguguggugcau

SEQ ID NO: 314757 - RNA, 23 nt, Human
ucuccagugucucuucauugagu

SEQ ID NO: 314758 - RNA, 21 nt, Human
aggugcagagccagggaccag

SEQ ID NO: 314759 - RNA, 22 nt, Human
uucaggaagguccuauagcaga

SEQ ID NO: 314760 - RNA, 22 nt, Human
agagcuggaagcugcucuuaga

SEQ ID NO: 314761 - RNA, 18 nt, Human
ccuggcuuccaucuuggu

SEQ ID NO: 314762 - RNA, 22 nt, Human
aaggccugaacaugaggagaug

SEQ ID NO: 314763 - RNA, 22 nt, Human
aaaugcacagagccuuagagau

SEQ ID NO: 314764 - RNA, 22 nt, Human
cugggggcaagcagacagcugu

SEQ ID NO: 314765 - RNA, 22 nt, Human
ugucaugcuuauguuacauacu

SEQ ID NO: 314766 - RNA, 22 nt, Human
cagccugcagggcugccuguug

SEQ ID NO: 314767 - RNA, 22 nt, Human
ggagcugucuguagggcacagg

SEQ ID NO: 314768 - RNA, 22 nt, Human
acucaggaaauugagauaaugg

SEQ ID NO: 314769 - RNA, 22 nt, Human
guucugucugagcaccacagga

SEQ ID NO: 314770 - RNA, 22 nt, Human
uguggccuggaaggggcugcuc

SEQ ID NO: 314771 - RNA, 22 nt, Human
uuugcauuauauuuauagaaga

SEQ ID NO: 314772 - RNA, 19 nt, Human
auagaaaggguuaaagaca

SEQ ID NO: 314773 - RNA, 22 nt, Human
ucucagaguuugaaucuggagu

SEQ ID NO: 314774 - RNA, 22 nt, Human
agagccuggacuuuucugagcc

SEQ ID NO: 314775 - RNA, 23 nt, Human
cccauuuucauguuaacuccugg

SEQ ID NO: 314776 - RNA, 22 nt, Human
gugacaguggucacuuguaguu

SEQ ID NO: 314777 - RNA, 22 nt, Human
auagaaauggcagcuggugcua

SEQ ID NO: 314778 - RNA, 22 nt, Human
cccagcacuuugaauaugucac

SEQ ID NO: 314779 - RNA, 22 nt, Human
gccuggggucucugacucacag

SEQ ID NO: 314780 - RNA, 22 nt, Human
cugggcagccucacacaauguu

SEQ ID NO: 314781 - RNA, 22 nt, Human
ucaguuuuuaagaguuaugcga

SEQ ID NO: 314782 - RNA, 18 nt, Human
agaaggagcuaugggcag

SEQ ID NO: 314783 - RNA, 22 nt, Human
uuuguaaauagcaguacucaug

SEQ ID NO: 314784 - RNA, 22 nt, Human
auuauuauauagggaaaguccc

SEQ ID NO: 314785 - RNA, 17 nt, Human
uuccccugaccaagccu

SEQ ID NO: 314786 - RNA, 22 nt, Human
agggacuggcucucugagcagg

SEQ ID NO: 314787 - RNA, 20 nt, Human
ugcguguguauuuauuuucu

SEQ ID NO: 314788 - RNA, 22 nt, Human
guguccagagaaacucacagcu

SEQ ID NO: 314789 - RNA, 19 nt, Human
ucauucaggaccaguggau

SEQ ID NO: 314790 - RNA, 22 nt, Human
uggacaggugagugacucaggg

SEQ ID NO: 314791 - RNA, 22 nt, Human
ucuguucaagacugaggugaca

SEQ ID NO: 314792 - RNA, 22 nt, Human
aagaggaaaugauugacuauau

SEQ ID NO: 314793 - RNA, 22 nt, Human
guuauguauugggaaauccaag

SEQ ID NO: 314794 - RNA, 22 nt, Human
ucagagccccuccgcuguccca

SEQ ID NO: 314795 - RNA, 22 nt, Human
auguccuuccauuuugaucugu

SEQ ID NO: 314796 - RNA, 22 nt, Human
uauuggugggggcagagagaga

SEQ ID NO: 314797 - RNA, 21 nt, Human
acagggcaugcagcuggcugu

SEQ ID NO: 314798 - RNA, 22 nt, Human
gcccugagggguggugucugua

SEQ ID NO: 314799 - RNA, 22 nt, Human
ggcaggugcucugugggccugg

SEQ ID NO: 314800 - RNA, 22 nt, Human
agcagaagaaagccacaugacu

SEQ ID NO: 314801 - RNA, 22 nt, Human
agaagccauucccuguaggcuc

SEQ ID NO: 314802 - RNA, 22 nt, Human
ugcuccagugagcuggccaucc

SEQ ID NO: 314803 - RNA, 22 nt, Human
caggguuucaccauguuagcag

SEQ ID NO: 314804 - RNA, 22 nt, Human
gucccugcccuccugggacuca

SEQ ID NO: 314805 - RNA, 22 nt, Human
uuccaaagaaauugaccaagac

SEQ ID NO: 314806 - RNA, 18 nt, Human
gagguccugcucuagccc

SEQ ID NO: 314807 - RNA, 22 nt, Human
gaugcacagugacccugccagu

SEQ ID NO: 314808 - RNA, 22 nt, Human
auucuucauacagacaaguccu

SEQ ID NO: 314809 - RNA, 21 nt, Human
cugugcuucuuccuaagccag

SEQ ID NO: 314810 - RNA, 22 nt, Human
uccacuggcccaccuccucagu

SEQ ID NO: 314811 - RNA, 22 nt, Human
aauuauguagccauaugaaaca

SEQ ID NO: 314812 - RNA, 22 nt, Human
ugccauauugcaaagugucugc

SEQ ID NO: 314813 - RNA, 22 nt, Human
aaaguguggucguucauuuugu

SEQ ID NO: 314814 - RNA, 22 nt, Human
gucuccugagacugcagucacc

SEQ ID NO: 314815 - RNA, 22 nt, Human
cugggagggguagccaauccua

SEQ ID NO: 314816 - RNA, 22 nt, Human
uugcugugucauuuguuuaauc

SEQ ID NO: 314817 - RNA, 22 nt, Human
uuucaugaggggcaaaaucuca

SEQ ID NO: 314818 - RNA, 22 nt, Human
auagugucagaaaaucauaaga

SEQ ID NO: 314819 - RNA, 22 nt, Human
uccuuugacuucuugcagucca

SEQ ID NO: 314820 - RNA, 22 nt, Human
ggggauggaggcgugugguccu

SEQ ID NO: 314821 - RNA, 20 nt, Human
uuaucugucaaucugucuca

SEQ ID NO: 314822 - RNA, 22 nt, Human
ucagaggaaaggucagauggcu

SEQ ID NO: 314823 - RNA, 22 nt, Human
caggggcucugggugaugugag

SEQ ID NO: 314824 - RNA, 22 nt, Human
gcuggcaggagccuuucccuuu

SEQ ID NO: 314825 - RNA, 22 nt, Human
ucaagaaagggcuucaccagga

SEQ ID NO: 314826 - RNA, 22 nt, Human
uuucugaagauacagcuuugcu

SEQ ID NO: 314827 - RNA, 23 nt, Human
agccacuucuaucuugcuccugg

SEQ ID NO: 314828 - RNA, 22 nt, Human
gccuucagcggccgcucgcugc

SEQ ID NO: 314829 - RNA, 22 nt, Human
cacagaggaaaggcaguuggua

SEQ ID NO: 314830 - RNA, 22 nt, Human
aaauaauugaguuggucaauau

SEQ ID NO: 314831 - RNA, 23 nt, Human
aggagccaggugcagcccuugug

SEQ ID NO: 314832 - RNA, 22 nt, Human
guauucauauuaaacauaucaa

SEQ ID NO: 314833 - RNA, 22 nt, Human
uacauguaauuuucauaguaag

SEQ ID NO: 314834 - RNA, 22 nt, Human
agagcacaggcucuggagucua

SEQ ID NO: 314835 - RNA, 22 nt, Human
cugugcauugucuugucuguag

SEQ ID NO: 314836 - RNA, 22 nt, Human
cugagccaaggggacagugaca

SEQ ID NO: 314837 - RNA, 22 nt, Human
agccuccaaaugucaggucccg

SEQ ID NO: 314838 - RNA, 22 nt, Human
ucuuccucuagaucugaggccc

SEQ ID NO: 314839 - RNA, 22 nt, Human
agagccacugggagacagagca

SEQ ID NO: 314840 - RNA, 22 nt, Human
gugucacaagagcccaggaaac

SEQ ID NO: 314841 - RNA, 22 nt, Human
gcugccugcucggcuccuggga

SEQ ID NO: 314842 - RNA, 19 nt, Human
cucuggccucuggaugcug

SEQ ID NO: 314843 - RNA, 22 nt, Human
cccagcagaaucugaugagggc

SEQ ID NO: 314844 - RNA, 18 nt, Human
ccagagcuggcuccucgc

SEQ ID NO: 314845 - RNA, 22 nt, Human
uuucuagaggcuccaggggagu

SEQ ID NO: 314846 - RNA, 22 nt, Human
aggcccuguccauggugcugaa

SEQ ID NO: 314847 - RNA, 22 nt, Human
uucuucuucuggcugcaccugg

SEQ ID NO: 314848 - RNA, 22 nt, Human
uuauuccaauuucuccuacaaa

SEQ ID NO: 314849 - RNA, 22 nt, Human
auucauuuagguauucacuuac

SEQ ID NO: 314850 - RNA, 22 nt, Human
guggcagagguuccucagugug

SEQ ID NO: 314851 - RNA, 22 nt, Human
ccugccuguacuagagacccag

SEQ ID NO: 314852 - RNA, 22 nt, Human
acugccuugaaagauuguugag

SEQ ID NO: 314853 - RNA, 22 nt, Human
gcucagugaagggugccaagua

SEQ ID NO: 314854 - RNA, 22 nt, Human
gauuucaaaaguagauccauca

SEQ ID NO: 314855 - RNA, 22 nt, Human
gccugcaguucugugcuaggca

SEQ ID NO: 314856 - RNA, 22 nt, Human
ugugccugucacccucagagag

SEQ ID NO: 314857 - RNA, 22 nt, Human
guacaguuuucaguguucacug

SEQ ID NO: 314858 - RNA, 22 nt, Human
auucacagaauaguuuuaccag

SEQ ID NO: 314859 - RNA, 22 nt, Human
uuaauacagucuccagaaguaa

SEQ ID NO: 314860 - RNA, 22 nt, Human
acuuuucaaaugggaaacucag

SEQ ID NO: 314861 - RNA, 22 nt, Human
ggccuggaagaggacagagaaa

SEQ ID NO: 314862 - RNA, 22 nt, Human
gugaaacagaagcuccuggaau

SEQ ID NO: 314863 - RNA, 22 nt, Human
gagcuuugcuggaagccugggg

SEQ ID NO: 314864 - RNA, 20 nt, Human
agggcagagggauuacaggc

SEQ ID NO: 314865 - RNA, 22 nt, Human
augacaguucuacacuuaaucu

SEQ ID NO: 314866 - RNA, 22 nt, Human
ugguaauuuacgcauuucugua

SEQ ID NO: 314867 - RNA, 22 nt, Human
uuucaguuuaugucuugaauua

SEQ ID NO: 314868 - RNA, 20 nt, Human
gcugaccccugcugucaugc

SEQ ID NO: 314869 - RNA, 22 nt, Human
ucaguguucagggaccaggucc

SEQ ID NO: 314870 - RNA, 22 nt, Human
ugcugcauuuaucuucucaaac

SEQ ID NO: 314871 - RNA, 22 nt, Human
ugcagaaggaggaggaaaucca

SEQ ID NO: 314872 - RNA, 22 nt, Human
gaccauuugcuaguaaauugca

SEQ ID NO: 314873 - RNA, 22 nt, Human
gagagcugggaaagccguggag

SEQ ID NO: 314874 - RNA, 22 nt, Human
gugcuggggagauaggaagaga

SEQ ID NO: 314875 - RNA, 22 nt, Human
caggugggccaugaaaaaugac

SEQ ID NO: 314876 - RNA, 22 nt, Human
ggaaggucgagcugcaucuggc

SEQ ID NO: 314877 - RNA, 22 nt, Human
guugaaagagcauggacuugaa

SEQ ID NO: 314878 - RNA, 22 nt, Human
ggcucuggagcacagacgucug

SEQ ID NO: 314879 - RNA, 22 nt, Human
ccuggagcucacugggagccgg

SEQ ID NO: 314880 - RNA, 23 nt, Human
cugcugugaaacaugguuuuggu

SEQ ID NO: 314881 - RNA, 22 nt, Human
uggcucagcuuacuuuugaggg

SEQ ID NO: 314882 - RNA, 22 nt, Human
uggccugggccugccggugcaa

SEQ ID NO: 314883 - RNA, 22 nt, Human
guccucaggaaagcagauaaca

SEQ ID NO: 314884 - RNA, 22 nt, Human
aagcagauauugugggaguggg

SEQ ID NO: 314885 - RNA, 22 nt, Human
gcuguguuggugaagcuguagc

SEQ ID NO: 314886 - RNA, 22 nt, Human
ugguuccuacgcacauugaauu

SEQ ID NO: 314887 - RNA, 22 nt, Human
gaggacagugugaucugccagc

SEQ ID NO: 314888 - RNA, 22 nt, Human
uaugaagacaaugauagcauga

SEQ ID NO: 314889 - RNA, 22 nt, Human
aggcugcuggcaggcguggacg

SEQ ID NO: 314890 - RNA, 22 nt, Human
gcucuggcuacuguggcuaccg

SEQ ID NO: 314891 - RNA, 22 nt, Human
aaaggucaaaaucgugacauug

SEQ ID NO: 314892 - RNA, 22 nt, Human
uauuuucuggacagucuugcuu

SEQ ID NO: 314893 - RNA, 22 nt, Human
cauaauuuuuuuaagucagaac

SEQ ID NO: 314894 - RNA, 22 nt, Human
gcguggugcugcccugcacaca

SEQ ID NO: 314895 - RNA, 22 nt, Human
auauuguacuaggguuacaugu

SEQ ID NO: 314896 - RNA, 22 nt, Human
cuggagcaggcuugucccagcu

SEQ ID NO: 314897 - RNA, 22 nt, Human
ugccacagaggugaagcccacu

SEQ ID NO: 314898 - RNA, 22 nt, Human
acagcaggauuuggcgauguug

SEQ ID NO: 314899 - RNA, 22 nt, Human
gcagggcucaacaggacacccc

SEQ ID NO: 314900 - RNA, 22 nt, Human
ugucauaaaacacaagcuguug

SEQ ID NO: 314901 - RNA, 22 nt, Human
guuauguaugagggaaugauua

SEQ ID NO: 314902 - RNA, 20 nt, Human
gggugagauguaggagaggg

SEQ ID NO: 314903 - RNA, 22 nt, Human
gagauguacaauguguauuaau

SEQ ID NO: 314904 - RNA, 22 nt, Human
acaggcucucagccaguuggca

SEQ ID NO: 314905 - RNA, 18 nt, Human
ugagagugugugcucuug

SEQ ID NO: 314906 - RNA, 22 nt, Human
agaccaagugcaggugccacua

SEQ ID NO: 314907 - RNA, 22 nt, Human
cucugucagaguguugucccca

SEQ ID NO: 314908 - RNA, 22 nt, Human
ggcccagucuggggcccuguga

SEQ ID NO: 314909 - RNA, 22 nt, Human
acucaggaauggggcugggacu

SEQ ID NO: 314910 - RNA, 22 nt, Human
ugcccaggguggagugcagcgg

SEQ ID NO: 314911 - RNA, 23 nt, Human
gcugcagcuguggauguucucag

SEQ ID NO: 314912 - RNA, 22 nt, Human
acauucaugucccacuucuagc

SEQ ID NO: 314913 - RNA, 22 nt, Human
aauguguacuuuuucaugcuca

SEQ ID NO: 314914 - RNA, 19 nt, Human
uggcuuccaucucucucau

SEQ ID NO: 314915 - RNA, 21 nt, Human
agcugggccucagccugcagu

SEQ ID NO: 314916 - RNA, 22 nt, Human
caguggccugagccaggcuucc

SEQ ID NO: 314917 - RNA, 22 nt, Human
caggccuggggcuggcuuccag

SEQ ID NO: 314918 - RNA, 22 nt, Human
cagucccagaagagccugggag

SEQ ID NO: 314919 - RNA, 23 nt, Human
agaugagccaacaccuccaugcc

SEQ ID NO: 314920 - RNA, 22 nt, Human
cucaggauauugggcuggagca

SEQ ID NO: 314921 - RNA, 22 nt, Human
aaguuuuccuguguccaagaug

SEQ ID NO: 314922 - RNA, 22 nt, Human
agaggcccucucucuccugaug

SEQ ID NO: 314923 - RNA, 22 nt, Human
gguuugcauucugaaaggcuca

SEQ ID NO: 314924 - RNA, 22 nt, Human
cucagagaggcaguggaaguca

SEQ ID NO: 314925 - RNA, 22 nt, Human
aauuacuuaagagaaacuuuga

SEQ ID NO: 314926 - RNA, 22 nt, Human
uaaaucaguuucucuuauuggu

SEQ ID NO: 314927 - RNA, 21 nt, Human
agcuuguguguaucacagugu

SEQ ID NO: 314928 - RNA, 22 nt, Human
agcaagcuaccuagauagucua

SEQ ID NO: 314929 - RNA, 22 nt, Human
acacaggggcucggcugggugc

SEQ ID NO: 314930 - RNA, 22 nt, Human
gcaggagccaggccgagcuggu

SEQ ID NO: 314931 - RNA, 22 nt, Human
cagguggcuucucccuaggcca

SEQ ID NO: 314932 - RNA, 22 nt, Human
aaaucugguucaguaaguccuc

SEQ ID NO: 314933 - RNA, 22 nt, Human
aaaggccacuugaaggauuuuu

SEQ ID NO: 314934 - RNA, 22 nt, Human
augcacuugcguguuugcaaau

SEQ ID NO: 314935 - RNA, 23 nt, Human
uuugcaaauuggacacaaccaca

SEQ ID NO: 314936 - RNA, 22 nt, Human
uaguaucuuucuauauuuccca

SEQ ID NO: 314937 - RNA, 22 nt, Human
ugauuuccccagucuugcugcu

SEQ ID NO: 314938 - RNA, 22 nt, Human
agcaccuugcucuuggccuucc

SEQ ID NO: 314939 - RNA, 22 nt, Human
gaugagggccugguggcugugc

SEQ ID NO: 314940 - RNA, 22 nt, Human
ucuggagagucacagugccaga

SEQ ID NO: 314941 - RNA, 22 nt, Human
uucuacaugguugcucagaggg

SEQ ID NO: 314942 - RNA, 22 nt, Human
aagcagccucauuugugguaag

SEQ ID NO: 314943 - RNA, 22 nt, Human
uggccugggugcugcugacauc

SEQ ID NO: 314944 - RNA, 22 nt, Human
agcuggccuucggugucacugg

SEQ ID NO: 314945 - RNA, 22 nt, Human
ugauuuccuggcuuuggaguuc

SEQ ID NO: 314946 - RNA, 22 nt, Human
ugcugcucaaugagaugccauc

SEQ ID NO: 314947 - RNA, 22 nt, Human
cagggcugaaaucaagguguag

SEQ ID NO: 314948 - RNA, 22 nt, Human
uguucucacuggaugcuucaca

SEQ ID NO: 314949 - RNA, 22 nt, Human
gaaguucuuuauagcaguguga

SEQ ID NO: 314950 - RNA, 22 nt, Human
acaucucaugaaugauaaauca

SEQ ID NO: 314951 - RNA, 22 nt, Human
aaacucuguugagauaauauuu

SEQ ID NO: 314952 - RNA, 22 nt, Human
ugggcagauuaaugcaguggcu

SEQ ID NO: 314953 - RNA, 22 nt, Human
cauuucugauuacagaauacua

SEQ ID NO: 314954 - RNA, 21 nt, Human
guggcucugccaggacugaaa

SEQ ID NO: 314955 - RNA, 17 nt, Human
gcuguaguuugauaaga

SEQ ID NO: 314956 - RNA, 22 nt, Human
cacucugcagcugaagggcugg

SEQ ID NO: 314957 - RNA, 22 nt, Human
ugucccagacacaguaugcgcu

SEQ ID NO: 314958 - RNA, 22 nt, Human
ccaggagcauuaagagaacaua

SEQ ID NO: 314959 - RNA, 22 nt, Human
cagggccugcuuccuucuuguu

SEQ ID NO: 314960 - RNA, 22 nt, Human
gagccuggauugucaccgacuu

SEQ ID NO: 314961 - RNA, 22 nt, Human
cuuaagaugaggucaugcuaua

SEQ ID NO: 314962 - RNA, 22 nt, Human
agugcugucccgacaacugagg

SEQ ID NO: 314963 - RNA, 22 nt, Human
acaguguuucacuuaaccguuu

SEQ ID NO: 314964 - RNA, 22 nt, Human
cagaccugggucccuggccugu

SEQ ID NO: 314965 - RNA, 22 nt, Human
gccucaguggcuuuaggaguuc

SEQ ID NO: 314966 - RNA, 20 nt, Human
auguagaugaaagcaaaggc

SEQ ID NO: 314967 - RNA, 22 nt, Human
gggcuucucccuaaggacucug

SEQ ID NO: 314968 - RNA, 22 nt, Human
ggcccaguguaccccaggcagu

SEQ ID NO: 314969 - RNA, 22 nt, Human
ccagaggugcugggagaggucu

SEQ ID NO: 314970 - RNA, 22 nt, Human
gggcugugagaguggggcugcu

SEQ ID NO: 314971 - RNA, 22 nt, Human
cagacagacagccguggccacc

SEQ ID NO: 314972 - RNA, 22 nt, Human
gagagaaaugugcaguuugggc

SEQ ID NO: 314973 - RNA, 22 nt, Human
gugguaauagagcuccaaacua

SEQ ID NO: 314974 - RNA, 22 nt, Human
uuauguaauuuguuugcucuuc

SEQ ID NO: 314975 - RNA, 22 nt, Human
ugcagaccucccauggcugccu

SEQ ID NO: 314976 - RNA, 22 nt, Human
uucaagaugcacaguggcauuc

SEQ ID NO: 314977 - RNA, 22 nt, Human
uuucaauguaacauuuccaggc

SEQ ID NO: 314978 - RNA, 22 nt, Human
gcuguucacggaggaggauggg

SEQ ID NO: 314979 - RNA, 22 nt, Human
cagagcaguaaaucuggggcac

SEQ ID NO: 314980 - RNA, 22 nt, Human
guccugggccugcugaggcuga

SEQ ID NO: 314981 - RNA, 23 nt, Human
cagcccugaaaucgaggugacac

SEQ ID NO: 314982 - RNA, 22 nt, Human
cccaagcagggugcagaggcau

SEQ ID NO: 314983 - RNA, 22 nt, Human
gccagcccagcuccaggggaaa

SEQ ID NO: 314984 - RNA, 22 nt, Human
ucaggggcugugcauuucccag

SEQ ID NO: 314985 - RNA, 22 nt, Human
cugggcugcaggaguggggcaa

SEQ ID NO: 314986 - RNA, 22 nt, Human
guuuucuuugaaugcuucuaga

SEQ ID NO: 314987 - RNA, 22 nt, Human
ugcucccaggcauucucuguug

SEQ ID NO: 314988 - RNA, 22 nt, Human
acugaaggcuuaacucuuucau

SEQ ID NO: 314989 - RNA, 22 nt, Human
uaaggccaccguuauagaacca

SEQ ID NO: 314990 - RNA, 22 nt, Human
ugcaccauuaauuuaugugaga

SEQ ID NO: 314991 - RNA, 22 nt, Human
uugcauugcuuggucuucaaga

SEQ ID NO: 314992 - RNA, 22 nt, Human
gccaucacauccaggcuaccuc

SEQ ID NO: 314993 - RNA, 22 nt, Human
gcuggcagaagagcugguucaa

SEQ ID NO: 314994 - RNA, 22 nt, Human
auguaugauauuuccaguauca

SEQ ID NO: 314995 - RNA, 20 nt, Human
cucuccuugccgacuuggca

SEQ ID NO: 314996 - RNA, 22 nt, Human
gcaaggcugugcacuuugcauu

SEQ ID NO: 314997 - RNA, 23 nt, Human
aagcugccagucugaagccuggg

SEQ ID NO: 314998 - RNA, 22 nt, Human
aauguaugcugugguaucuucu

SEQ ID NO: 314999 - RNA, 22 nt, Human
ggaaggaggaugcucuggccuu

SEQ ID NO: 315000 - RNA, 22 nt, Human
ugcacagugaccccuggugacu

SEQ ID NO: 315001 - RNA, 22 nt, Human
cagcagcuggugagacacagcc

SEQ ID NO: 315002 - RNA, 22 nt, Human
ucucacugggucacagcagagg

SEQ ID NO: 315003 - RNA, 22 nt, Human
augcuguggccagaguucaacu

SEQ ID NO: 315004 - RNA, 22 nt, Human
ucucagggcagcaaggaagcau

SEQ ID NO: 315005 - RNA, 22 nt, Human
ccucaguguuaggauaagagaa

SEQ ID NO: 315006 - RNA, 22 nt, Human
uccagggacagcgcuggagcua

SEQ ID NO: 315007 - RNA, 22 nt, Human
cgggcuggcugcagcugcugga

SEQ ID NO: 315008 - RNA, 22 nt, Human
gaggccugguuuccagcauccu

SEQ ID NO: 315009 - RNA, 17 nt, Human
uguuccauuugaccacc

SEQ ID NO: 315010 - RNA, 22 nt, Human
cagugcagaacacauggaaaau

SEQ ID NO: 315011 - RNA, 22 nt, Human
ucauggcacuuagcacaguccu

SEQ ID NO: 315012 - RNA, 22 nt, Human
aauaaauguuaagauugucuca

SEQ ID NO: 315013 - RNA, 22 nt, Human
aacauauaaacucuuaaguuca

SEQ ID NO: 315014 - RNA, 22 nt, Human
uccugccucuugccuucuucac

SEQ ID NO: 315015 - RNA, 20 nt, Human
cuguccccgaggucaccagg

SEQ ID NO: 315016 - RNA, 22 nt, Human
acagcagcuugcgugucugguc

SEQ ID NO: 315017 - RNA, 22 nt, Human
cucugcaugccuugcucagaca

SEQ ID NO: 315018 - RNA, 22 nt, Human
ccaggcucugucuggucagaag

SEQ ID NO: 315019 - RNA, 22 nt, Human
cagacaggcuagccagacucac

SEQ ID NO: 315020 - RNA, 22 nt, Human
gaggaguggaguugcuggguug

SEQ ID NO: 315021 - RNA, 22 nt, Human
cagccagggucaggcagcuucu

SEQ ID NO: 315022 - RNA, 22 nt, Human
aucuauuaugcugagaaacugu

SEQ ID NO: 315023 - RNA, 23 nt, Human
aucagucuugguagcugugccca

SEQ ID NO: 315024 - RNA, 22 nt, Human
acauuucuuccacaugcugcug

SEQ ID NO: 315025 - RNA, 20 nt, Human
uauuucugggcaaccauuua

SEQ ID NO: 315026 - RNA, 22 nt, Human
ggaccagagcucgggcuucuca

SEQ ID NO: 315027 - RNA, 22 nt, Human
agcccucauggaacagcuccua

SEQ ID NO: 315028 - RNA, 22 nt, Human
ccugggaggcagagguugcagu

SEQ ID NO: 315029 - RNA, 22 nt, Human
uuagaaauacaagugagguuga

SEQ ID NO: 315030 - RNA, 19 nt, Human
agccuggcuuugcucugcu

SEQ ID NO: 315031 - RNA, 22 nt, Human
uggagggcgcuuagauggaggg

SEQ ID NO: 315032 - RNA, 23 nt, Human
auaauaacgucugucuugucucu

SEQ ID NO: 315033 - RNA, 22 nt, Human
ggaaaaggccauuguuucucug

SEQ ID NO: 315034 - RNA, 22 nt, Human
cccagcaucuccaggcauggcc

SEQ ID NO: 315035 - RNA, 22 nt, Human
acuuugcacuaaguuacucauu

SEQ ID NO: 315036 - RNA, 22 nt, Human
uucucacuauguauguagauug

SEQ ID NO: 315037 - RNA, 22 nt, Human
gccuaggaguggggauggcggu

SEQ ID NO: 315038 - RNA, 22 nt, Human
auauucuuccaaaacaucauuu

SEQ ID NO: 315039 - RNA, 22 nt, Human
uccagcccgacugggccugccg

SEQ ID NO: 315040 - RNA, 22 nt, Human
cgugucaucugagccuugggcg

SEQ ID NO: 315041 - RNA, 22 nt, Human
uagucuuuuuaauaaauaaugc

SEQ ID NO: 315042 - RNA, 21 nt, Human
ggagcuggggagcuggcccca

SEQ ID NO: 315043 - RNA, 22 nt, Human
gaggagaggccaucguuguuau

SEQ ID NO: 315044 - RNA, 22 nt, Human
uucaaagugcauguuccucaga

SEQ ID NO: 315045 - RNA, 22 nt, Human
ccugucugcaugaucccugcca

SEQ ID NO: 315046 - RNA, 22 nt, Human
ugcugcuccccagcacacagca

SEQ ID NO: 315047 - RNA, 22 nt, Human
cagggccucuccuccaggaacu

SEQ ID NO: 315048 - RNA, 22 nt, Human
aaaguucugggggagaagaacg

SEQ ID NO: 315049 - RNA, 22 nt, Human
aaugaugguuucaucacuugaa

SEQ ID NO: 315050 - RNA, 22 nt, Human
ucacaggcuccagggccuggau

SEQ ID NO: 315051 - RNA, 22 nt, Human
aaaggucauugaaaaggaggaa

SEQ ID NO: 315052 - RNA, 22 nt, Human
acagguggaggcuuuaggaggu

SEQ ID NO: 315053 - RNA, 22 nt, Human
augcugggacguacuuguucau

SEQ ID NO: 315054 - RNA, 22 nt, Human
gccccuucguggaagugcauuc

SEQ ID NO: 315055 - RNA, 22 nt, Human
auugaaagcauggauuuggauu

SEQ ID NO: 315056 - RNA, 22 nt, Human
acagaauauugguuacuguugc

SEQ ID NO: 315057 - RNA, 22 nt, Human
ggucucuguugccuccaucaag

SEQ ID NO: 315058 - RNA, 22 nt, Human
acaaaguuauucuuucagagga

SEQ ID NO: 315059 - RNA, 22 nt, Human
ccucagugagaugcucagcgaa

SEQ ID NO: 315060 - RNA, 22 nt, Human
cugccuggaccggcagcccucc

SEQ ID NO: 315061 - RNA, 22 nt, Human
ugccugucuccucugcagggug

SEQ ID NO: 315062 - RNA, 22 nt, Human
aagcagccaccucaucuccacu

SEQ ID NO: 315063 - RNA, 18 nt, Human
cuccagggaacucaguca

SEQ ID NO: 315064 - RNA, 22 nt, Human
uggagccuguguuucugcccag

SEQ ID NO: 315065 - RNA, 17 nt, Human
uggcuucccugggccac

SEQ ID NO: 315066 - RNA, 22 nt, Human
cagggccuccccggcagucuuu

SEQ ID NO: 315067 - RNA, 22 nt, Human
cagugcuccugauguacccuug

SEQ ID NO: 315068 - RNA, 19 nt, Human
auguaugaggucuucugcu

SEQ ID NO: 315069 - RNA, 22 nt, Human
acagauauuuggggaaagacgu

SEQ ID NO: 315070 - RNA, 22 nt, Human
ucuguucaugaaauaucuuuuu

SEQ ID NO: 315071 - RNA, 22 nt, Human
agaccaagaaaggaugaggauc

SEQ ID NO: 315072 - RNA, 22 nt, Human
ucucagagagcuguguuuuccu

SEQ ID NO: 315073 - RNA, 22 nt, Human
gggucucucucggcuccacgcg

SEQ ID NO: 315074 - RNA, 22 nt, Human
cuguagcagugugcucuuuuuc

SEQ ID NO: 315075 - RNA, 22 nt, Human
gagagguccauuccccugucag

SEQ ID NO: 315076 - RNA, 22 nt, Human
ucuggcccagccccugagguca

SEQ ID NO: 315077 - RNA, 22 nt, Human
gagggcagagucuaaugaugca

SEQ ID NO: 315078 - RNA, 22 nt, Human
ugcugccucagcuuccugggcu

SEQ ID NO: 315079 - RNA, 22 nt, Human
acauacauaugacaacuuuccu

SEQ ID NO: 315080 - RNA, 22 nt, Human
cagccugcccuggaagcccagc

SEQ ID NO: 315081 - RNA, 22 nt, Human
agccuggagaggcgccauacac

SEQ ID NO: 315082 - RNA, 22 nt, Human
cccuggaggaccccaauguggc

SEQ ID NO: 315083 - RNA, 20 nt, Human
cucucccagcacagcuuccu

SEQ ID NO: 315084 - RNA, 22 nt, Human
cuguuuauuacacuggauagca

SEQ ID NO: 315085 - RNA, 21 nt, Human
gcacagcaugaguguuggcau

SEQ ID NO: 315086 - RNA, 21 nt, Human
aagaagcaauuuauuggaagg

SEQ ID NO: 315087 - RNA, 22 nt, Human
uggagcaggugccaggugugug

SEQ ID NO: 315088 - RNA, 22 nt, Human
guccuggggauuauagaguguu

SEQ ID NO: 315089 - RNA, 22 nt, Human
ucaaauaugugauagaagcuaa

SEQ ID NO: 315090 - RNA, 22 nt, Human
agccuggcccugcugaacucug

SEQ ID NO: 315091 - RNA, 22 nt, Human
cagcuugggucaggugccugcu

SEQ ID NO: 315092 - RNA, 22 nt, Human
ugcccugcagugagugcgucug

SEQ ID NO: 315093 - RNA, 22 nt, Human
gccauccucugagcacuaggca

SEQ ID NO: 315094 - RNA, 22 nt, Human
ucaggggagguugaaucgucuc

SEQ ID NO: 315095 - RNA, 22 nt, Human
cucagagucugcauuucuguca

SEQ ID NO: 315096 - RNA, 22 nt, Human
augucuaaaagauaaaguuuaa

SEQ ID NO: 315097 - RNA, 21 nt, Human
uguucacauggagcagaaugu

SEQ ID NO: 315098 - RNA, 22 nt, Human
aggccugucuggggcucagcca

SEQ ID NO: 315099 - RNA, 22 nt, Human
ggcucaggggccaggccugucc

SEQ ID NO: 315100 - RNA, 22 nt, Human
aggccuggccuuuauguucaag

SEQ ID NO: 315101 - RNA, 22 nt, Human
gggccaugagagguucaucaac

SEQ ID NO: 315102 - RNA, 22 nt, Human
cugcagccuccugggguacaug

SEQ ID NO: 315103 - RNA, 22 nt, Human
ggagccuggccuggcucugugu

SEQ ID NO: 315104 - RNA, 22 nt, Human
ucccuggggauguuggccugcc

SEQ ID NO: 315105 - RNA, 22 nt, Human
uuucagaucacuuucaggaaag

SEQ ID NO: 315106 - RNA, 22 nt, Human
gggcucugcgcucagcuccagc

SEQ ID NO: 315107 - RNA, 22 nt, Human
ugggguggauagaaagugaugu

SEQ ID NO: 315108 - RNA, 22 nt, Human
gagccagguuugaaucucaguc

SEQ ID NO: 315109 - RNA, 22 nt, Human
aagcuuucagagcagaauguga

SEQ ID NO: 315110 - RNA, 22 nt, Human
cugcuguggaugcaggaccuca

SEQ ID NO: 315111 - RNA, 22 nt, Human
gcagccagaagacucagaacaa

SEQ ID NO: 315112 - RNA, 22 nt, Human
agcuggggcugcagagaacagg

SEQ ID NO: 315113 - RNA, 22 nt, Human
uucuuuuccuacacagcgauuu

SEQ ID NO: 315114 - RNA, 22 nt, Human
uguaugaauauguauuuucaua

SEQ ID NO: 315115 - RNA, 22 nt, Human
aaaagcucuuucugcuguagau

SEQ ID NO: 315116 - RNA, 22 nt, Human
acuuggcaaguaucuauaaagu

SEQ ID NO: 315117 - RNA, 22 nt, Human
agcuggccuuagugagcaccug

SEQ ID NO: 315118 - RNA, 22 nt, Human
ccagcuccgggaguugcugcug

SEQ ID NO: 315119 - RNA, 22 nt, Human
uuuuaucugcuucauuaguuga

SEQ ID NO: 315120 - RNA, 22 nt, Human
ccuggcagcuaagugcuuugag

SEQ ID NO: 315121 - RNA, 22 nt, Human
uccagcagcccgaaggcccauc

SEQ ID NO: 315122 - RNA, 22 nt, Human
gggggcuggacuuucccacaca

SEQ ID NO: 315123 - RNA, 22 nt, Human
guaaaauucuagcaucugaaag

SEQ ID NO: 315124 - RNA, 22 nt, Human
ggaaggggagcuggaaagggua

SEQ ID NO: 315125 - RNA, 22 nt, Human
cugagccauccauaccagcuua

SEQ ID NO: 315126 - RNA, 22 nt, Human
gcugccugucccaggaugagga

SEQ ID NO: 315127 - RNA, 22 nt, Human
ggucaggguuccagguaucuuc

SEQ ID NO: 315128 - RNA, 22 nt, Human
uucagcagugcagacacccagu

SEQ ID NO: 315129 - RNA, 22 nt, Human
gccaggcagccacccucugcga

SEQ ID NO: 315130 - RNA, 22 nt, Human
uuucacagcuggguggcagagu

SEQ ID NO: 315131 - RNA, 22 nt, Human
ccaggguggggcaggcccacug

SEQ ID NO: 315132 - RNA, 22 nt, Human
aggcagagcuggguuuugaaau

SEQ ID NO: 315133 - RNA, 22 nt, Human
uguggcugucuguucuccuagg

SEQ ID NO: 315134 - RNA, 18 nt, Human
gcagagcugggauuccca

SEQ ID NO: 315135 - RNA, 22 nt, Human
uacaguaaccagucuacuuaga

SEQ ID NO: 315136 - RNA, 22 nt, Human
aguggcagagguugacugcagu

SEQ ID NO: 315137 - RNA, 22 nt, Human
uucaaauacauucuuugccacu

SEQ ID NO: 315138 - RNA, 22 nt, Human
uucauugugauucuuggcuagc

SEQ ID NO: 315139 - RNA, 22 nt, Human
aguguguguuugggcgguuuau

SEQ ID NO: 315140 - RNA, 22 nt, Human
gcuuuggaugugugccugaggu

SEQ ID NO: 315141 - RNA, 22 nt, Human
aauggccagcugggagaguuga

SEQ ID NO: 315142 - RNA, 22 nt, Human
aaaucaguucacguucugaggu

SEQ ID NO: 315143 - RNA, 22 nt, Human
cucagggcuugaguguccagga

SEQ ID NO: 315144 - RNA, 22 nt, Human
caggcacugugcuagauccuug

SEQ ID NO: 315145 - RNA, 19 nt, Human
cugucaggggcuggauguu

SEQ ID NO: 315146 - RNA, 21 nt, Human
cucaaagaccaaaaguguaga

SEQ ID NO: 315147 - RNA, 22 nt, Human
uugaaaggaauacagaggccua

SEQ ID NO: 315148 - RNA, 22 nt, Human
ucacccuugauaauguucuucu

SEQ ID NO: 315149 - RNA, 22 nt, Human
agagcccugaagcagagcuaaa

SEQ ID NO: 315150 - RNA, 22 nt, Human
ggcagaggagcuggaaacaugg

SEQ ID NO: 315151 - RNA, 22 nt, Human
ccauuguaguaucuguuuuagu

SEQ ID NO: 315152 - RNA, 22 nt, Human
uggccugguaccacauagauuu

SEQ ID NO: 315153 - RNA, 22 nt, Human
gcucccaggaugaggagccagg

SEQ ID NO: 315154 - RNA, 22 nt, Human
gggccuggggugacguaccccu

SEQ ID NO: 315155 - RNA, 22 nt, Human
uggucuuuaagguagcugucau

SEQ ID NO: 315156 - RNA, 22 nt, Human
ggcagcucacugauuagcaauu

SEQ ID NO: 315157 - RNA, 22 nt, Human
guuuccaaccccaccaaagugc

SEQ ID NO: 315158 - RNA, 22 nt, Human
uaaagguagugugacauauugu

SEQ ID NO: 315159 - RNA, 22 nt, Human
ggcucuggugggaagguuagau

SEQ ID NO: 315160 - RNA, 22 nt, Human
ugcagaagauggucugagcacc

SEQ ID NO: 315161 - RNA, 22 nt, Human
gccaggccugcaagugcuggug

SEQ ID NO: 315162 - RNA, 22 nt, Human
gccuggcuccuaagagcacaac

SEQ ID NO: 315163 - RNA, 22 nt, Human
aggcacuguucccaguuauccu

SEQ ID NO: 315164 - RNA, 22 nt, Human
ucuuggaaucuccauagaguga

SEQ ID NO: 315165 - RNA, 22 nt, Human
cagccagaaccuaggaugagcu

SEQ ID NO: 315166 - RNA, 22 nt, Human
uagcacauaacuuagaauaguu

SEQ ID NO: 315167 - RNA, 22 nt, Human
ccuggcuuccuggagcucacaa

SEQ ID NO: 315168 - RNA, 22 nt, Human
agggggaggcugugcugcgucu

SEQ ID NO: 315169 - RNA, 22 nt, Human
uaagacauuugaaaugugaucc

SEQ ID NO: 315170 - RNA, 20 nt, Human
gcccacucuaauccacuguc

SEQ ID NO: 315171 - RNA, 22 nt, Human
augcauaauguauguauugacu

SEQ ID NO: 315172 - RNA, 23 nt, Human
cacugcagcguggucuggcagga

SEQ ID NO: 315173 - RNA, 22 nt, Human
cccagcuccgagcuccgagccg

SEQ ID NO: 315174 - RNA, 22 nt, Human
aaguauauuuuuugaagcauau

SEQ ID NO: 315175 - RNA, 22 nt, Human
augauugaccaucugcugggcu

SEQ ID NO: 315176 - RNA, 22 nt, Human
ugggaggaucgcuugagcccag

SEQ ID NO: 315177 - RNA, 22 nt, Human
ucaccuuagcuagaggaagaga

SEQ ID NO: 315178 - RNA, 22 nt, Human
cagcuggggcagccacgugcgg

SEQ ID NO: 315179 - RNA, 22 nt, Human
uuaacacauauuuaucaauugc

SEQ ID NO: 315180 - RNA, 22 nt, Human
aaacucuggauuggaguccagc

SEQ ID NO: 315181 - RNA, 22 nt, Human
cacuguguaagaagaugggcuu

SEQ ID NO: 315182 - RNA, 22 nt, Human
ggcagcucugaugaugcucugg

SEQ ID NO: 315183 - RNA, 22 nt, Human
ugggcagaucuuugguggcuag

SEQ ID NO: 315184 - RNA, 21 nt, Human
ccucuggcuugugcugugccc

SEQ ID NO: 315185 - RNA, 20 nt, Human
gucagugucuucaguaguga

SEQ ID NO: 315186 - RNA, 22 nt, Human
uguggccaccagagcugcuauu

SEQ ID NO: 315187 - RNA, 22 nt, Human
uauaacacucagaaagaaucau

SEQ ID NO: 315188 - RNA, 22 nt, Human
uagcaguggaaucuuuugucca

SEQ ID NO: 315189 - RNA, 20 nt, Human
cccugagaccagagagcagc

SEQ ID NO: 315190 - RNA, 22 nt, Human
uccagagguauguagagaguau

SEQ ID NO: 315191 - RNA, 22 nt, Human
ugacaguuaagguauacauuca

SEQ ID NO: 315192 - RNA, 22 nt, Human
uucacagucacccuucuccaug

SEQ ID NO: 315193 - RNA, 22 nt, Human
ccacagggcacaagggagguug

SEQ ID NO: 315194 - RNA, 22 nt, Human
agacaugucaccaauucuuacu

SEQ ID NO: 315195 - RNA, 22 nt, Human
aggcucugcagugcuggaggac

SEQ ID NO: 315196 - RNA, 22 nt, Human
agcuggaggauaacucacuucu

SEQ ID NO: 315197 - RNA, 22 nt, Human
guucuccauucagcuuccugug

SEQ ID NO: 315198 - RNA, 20 nt, Human
cccagggaccugagcuccau

SEQ ID NO: 315199 - RNA, 22 nt, Human
uggcuuccugcauggauccucu

SEQ ID NO: 315200 - RNA, 22 nt, Human
cuuauguauauuuggaacguac

SEQ ID NO: 315201 - RNA, 22 nt, Human
cugcagagcaaguaacauccuc

SEQ ID NO: 315202 - RNA, 22 nt, Human
cacagugucugugcuucagugu

SEQ ID NO: 315203 - RNA, 22 nt, Human
ugggcucugcaucagugcccau

SEQ ID NO: 315204 - RNA, 22 nt, Human
ugaaacaaugugaaguugcuga

SEQ ID NO: 315205 - RNA, 22 nt, Human
ccugccugaaggucagccaccc

SEQ ID NO: 315206 - RNA, 22 nt, Human
uucuucaguuugguaaauguaa

SEQ ID NO: 315207 - RNA, 22 nt, Human
ggugggcaacauuuggccugag

SEQ ID NO: 315208 - RNA, 20 nt, Human
gcagagcuguucugugggga

SEQ ID NO: 315209 - RNA, 22 nt, Human
ugcccacauucaaaaggugaug

SEQ ID NO: 315210 - RNA, 22 nt, Human
gcugucuucacuuccugguuuc

SEQ ID NO: 315211 - RNA, 22 nt, Human
gaaguucuuagucucauuugca

SEQ ID NO: 315212 - RNA, 22 nt, Human
cagucucuaaaucaaucugaau

SEQ ID NO: 315213 - RNA, 22 nt, Human
gcagagccccauugcuggcggg

SEQ ID NO: 315214 - RNA, 22 nt, Human
ggcacugacacuagcauggcac

SEQ ID NO: 315215 - RNA, 22 nt, Human
ugaccuauuagauuuccuugcc

SEQ ID NO: 315216 - RNA, 19 nt, Human
aaacacagauuucuuacca

SEQ ID NO: 315217 - RNA, 22 nt, Human
cuuccucccccacacacucacu

SEQ ID NO: 315218 - RNA, 17 nt, Human
agcuccugcccauggcu

SEQ ID NO: 315219 - RNA, 20 nt, Human
aggcagacaaggagucuguu

SEQ ID NO: 315220 - RNA, 22 nt, Human
uguccacaucacucacuuguca

SEQ ID NO: 315221 - RNA, 22 nt, Human
ugaaaugauguacaagaaggca

SEQ ID NO: 315222 - RNA, 22 nt, Human
ugggggagauugugcaucucua

SEQ ID NO: 315223 - RNA, 22 nt, Human
ccuugcauauauuauaucuuug

SEQ ID NO: 315224 - RNA, 22 nt, Human
auucugucuaagcuggcuacgu

SEQ ID NO: 315225 - RNA, 22 nt, Human
gcugcccugugguccagcaggu

SEQ ID NO: 315226 - RNA, 22 nt, Human
gcaggggcuaaggacacagaga

SEQ ID NO: 315227 - RNA, 23 nt, Human
agaaaagcuuggacacauggccu

SEQ ID NO: 315228 - RNA, 22 nt, Human
ugaaacacugcgauaaaauccu

SEQ ID NO: 315229 - RNA, 22 nt, Human
agucagugaaaacuagaauguu

SEQ ID NO: 315230 - RNA, 22 nt, Human
uacauucuacuuuuucacuccc

SEQ ID NO: 315231 - RNA, 23 nt, Human
ccaggcaguagcuauugaaguga

SEQ ID NO: 315232 - RNA, 22 nt, Human
cccuggguucuggcugggcugc

SEQ ID NO: 315233 - RNA, 22 nt, Human
gcccagcaggacagagugguuu

SEQ ID NO: 315234 - RNA, 19 nt, Human
ggccccucucacaggaguu

SEQ ID NO: 315235 - RNA, 22 nt, Human
aaugagcuagaccugcuuccuc

SEQ ID NO: 315236 - RNA, 22 nt, Human
auggacaggaacucccuuggca

SEQ ID NO: 315237 - RNA, 22 nt, Human
cacaggagguuaggaagugguc

SEQ ID NO: 315238 - RNA, 22 nt, Human
cuggagcagguuuaggaguccc

SEQ ID NO: 315239 - RNA, 22 nt, Human
aaucagaaaauucaguggaauu

SEQ ID NO: 315240 - RNA, 22 nt, Human
acagcagagugugagauagcca

SEQ ID NO: 315241 - RNA, 22 nt, Human
acucucagaggguggcagcaau

SEQ ID NO: 315242 - RNA, 19 nt, Human
ccagcagcuuugauucucu

SEQ ID NO: 315243 - RNA, 22 nt, Human
ucccagaguauuagcaauugcu

SEQ ID NO: 315244 - RNA, 22 nt, Human
uggagcuggaauuugagcugga

SEQ ID NO: 315245 - RNA, 23 nt, Human
agcagggccagaauacuugcugu

SEQ ID NO: 315246 - RNA, 22 nt, Human
caggauccuggcugcauggacg

SEQ ID NO: 315247 - RNA, 22 nt, Human
gggccuggcaugcagccccguu

SEQ ID NO: 315248 - RNA, 22 nt, Human
cuugauguauaaguugauaugu

SEQ ID NO: 315249 - RNA, 22 nt, Human
ggcagcuguaagaugagugaau

SEQ ID NO: 315250 - RNA, 22 nt, Human
acugaaagauaaaucaguuagc

SEQ ID NO: 315251 - RNA, 22 nt, Human
augcugugucuagcaggaacac

SEQ ID NO: 315252 - RNA, 22 nt, Human
agccccacacucucucugagaa

SEQ ID NO: 315253 - RNA, 20 nt, Human
agccagaagaaggcuggaga

SEQ ID NO: 315254 - RNA, 22 nt, Human
uuucaucuuccuuggcauaggu

SEQ ID NO: 315255 - RNA, 22 nt, Human
ucacauuuuaucuauuuuaagu

SEQ ID NO: 315256 - RNA, 22 nt, Human
ccucagugugcagcagcaucug

SEQ ID NO: 315257 - RNA, 22 nt, Human
ucuguucagguuucagagaacu

SEQ ID NO: 315258 - RNA, 22 nt, Human
cuuccugcauugugccagaguu

SEQ ID NO: 315259 - RNA, 22 nt, Human
cauuugaauuguucugugggaa

SEQ ID NO: 315260 - RNA, 22 nt, Human
cugacucagcagcugaugaucc

SEQ ID NO: 315261 - RNA, 22 nt, Human
ugccucugguuaucugguaccu

SEQ ID NO: 315262 - RNA, 23 nt, Human
augcaguauaugucaguaguuua

SEQ ID NO: 315263 - RNA, 22 nt, Human
uagcugugagcacccaggcugu

SEQ ID NO: 315264 - RNA, 22 nt, Human
uuacaaagagaaguuguagaau

SEQ ID NO: 315265 - RNA, 22 nt, Human
gcugucacauuuggagcacugg

SEQ ID NO: 315266 - RNA, 22 nt, Human
acagguggagugguuagcaggc

SEQ ID NO: 315267 - RNA, 22 nt, Human
ccacagggcacagacaggaagc

SEQ ID NO: 315268 - RNA, 22 nt, Human
ugcauauuauguguaucugucu

SEQ ID NO: 315269 - RNA, 22 nt, Human
cauuuguuuagaagucuuuaua

SEQ ID NO: 315270 - RNA, 22 nt, Human
uaugagaauuugcuaauuggcu

SEQ ID NO: 315271 - RNA, 22 nt, Human
cagagcugauuggauccagaga

SEQ ID NO: 315272 - RNA, 22 nt, Human
aggcacugcuucuaaguaggaa

SEQ ID NO: 315273 - RNA, 22 nt, Human
ucagaagcauguggggagccug

SEQ ID NO: 315274 - RNA, 21 nt, Human
agaaaaaccagcauguuuuca

SEQ ID NO: 315275 - RNA, 22 nt, Human
ccagagcccagggucaugcagg

SEQ ID NO: 315276 - RNA, 22 nt, Human
ucucagagcaucauuuucuuag

SEQ ID NO: 315277 - RNA, 19 nt, Human
cuugguuaugguaugaugc

SEQ ID NO: 315278 - RNA, 22 nt, Human
uggaaggcaacggagugagcug

SEQ ID NO: 315279 - RNA, 22 nt, Human
ugcugccuuagcagccaggcaa

SEQ ID NO: 315280 - RNA, 22 nt, Human
uccagagggcgauggcuggggg

SEQ ID NO: 315281 - RNA, 22 nt, Human
auucaguaggucuagaauaaga

SEQ ID NO: 315282 - RNA, 22 nt, Human
auuucaaggcuauuaauauaaa

SEQ ID NO: 315283 - RNA, 22 nt, Human
acuguucaucucuuagaaagua

SEQ ID NO: 315284 - RNA, 22 nt, Human
ucucuguacaguacaugccgug

SEQ ID NO: 315285 - RNA, 22 nt, Human
uuugaaaggguuaugagacuga

SEQ ID NO: 315286 - RNA, 22 nt, Human
ggagggcaucaaucaggccugg

SEQ ID NO: 315287 - RNA, 22 nt, Human
cuggcuccuccaaggccuggag

SEQ ID NO: 315288 - RNA, 22 nt, Human
aaugcacacauuugguacugaa

SEQ ID NO: 315289 - RNA, 22 nt, Human
aauucuagcauugugaaaauau

SEQ ID NO: 315290 - RNA, 22 nt, Human
agcuccuggcaaggucauggug

SEQ ID NO: 315291 - RNA, 22 nt, Human
ggguccagcgacagcaggcuca

SEQ ID NO: 315292 - RNA, 22 nt, Human
ggacuggacucucaggcucaca

SEQ ID NO: 315293 - RNA, 22 nt, Human
cccugcagcuuuugcauaguca

SEQ ID NO: 315294 - RNA, 22 nt, Human
uucauacaguggcugcacucca

SEQ ID NO: 315295 - RNA, 20 nt, Human
ccugucuccucuuaccuggc

SEQ ID NO: 315296 - RNA, 22 nt, Human
acauuuuuauucaucaaagcag

SEQ ID NO: 315297 - RNA, 22 nt, Human
uaggacauguguuuuauauaug

SEQ ID NO: 315298 - RNA, 22 nt, Human
aaaggccagguuggcugguauu

SEQ ID NO: 315299 - RNA, 22 nt, Human
cagcuggcgggcagagccgcca

SEQ ID NO: 315300 - RNA, 22 nt, Human
aucucccagccacagcauucuu

SEQ ID NO: 315301 - RNA, 21 nt, Human
acagcagggcuggcaugacag

SEQ ID NO: 315302 - RNA, 22 nt, Human
ccagccuggagggcaguggugg

SEQ ID NO: 315303 - RNA, 19 nt, Human
accaggcuuauggucagug

SEQ ID NO: 315304 - RNA, 22 nt, Human
aucuuugugcuaauguaguucu

SEQ ID NO: 315305 - RNA, 22 nt, Human
ucagaggaauaaugcugcauuu

SEQ ID NO: 315306 - RNA, 22 nt, Human
caguuucuauggcugggcucug

SEQ ID NO: 315307 - RNA, 22 nt, Human
guuauguaaucuaacacucagu

SEQ ID NO: 315308 - RNA, 22 nt, Human
uaugagaaauuauaccuagguu

SEQ ID NO: 315309 - RNA, 22 nt, Human
ccaaggaguagagcaggaagcu

SEQ ID NO: 315310 - RNA, 22 nt, Human
gagagugagauaauuucacaua

SEQ ID NO: 315311 - RNA, 22 nt, Human
ccaaagugcugggguuacaggc

SEQ ID NO: 315312 - RNA, 22 nt, Human
auguaugaagcuuuguuuggga

SEQ ID NO: 315313 - RNA, 22 nt, Human
acagugcuaaacacuucuugaa

SEQ ID NO: 315314 - RNA, 22 nt, Human
agcuuccuguugagagagggag

SEQ ID NO: 315315 - RNA, 22 nt, Human
cugcugggaaggucugcucagu

SEQ ID NO: 315316 - RNA, 22 nt, Human
uccugaggcuaaagugcagugg

SEQ ID NO: 315317 - RNA, 22 nt, Human
agcuggagaugcccagcaccgg

SEQ ID NO: 315318 - RNA, 22 nt, Human
ugaagcaggaaacuucuuguuu

SEQ ID NO: 315319 - RNA, 22 nt, Human
ugcugcacucaccaacagauaa

SEQ ID NO: 315320 - RNA, 22 nt, Human
ccagacuguggaguuccuggug

SEQ ID NO: 315321 - RNA, 22 nt, Human
gccuccugaaaggaagagcucc

SEQ ID NO: 315322 - RNA, 20 nt, Human
gugcauuucaccuguacugu

SEQ ID NO: 315323 - RNA, 22 nt, Human
ucagaggacaagcucccuggug

SEQ ID NO: 315324 - RNA, 22 nt, Human
ugccuaggaaaccucaugcuuc

SEQ ID NO: 315325 - RNA, 22 nt, Human
cacagagagcuacgugcagcgu

SEQ ID NO: 315326 - RNA, 22 nt, Human
uugggcugaacccugcagcuga

SEQ ID NO: 315327 - RNA, 22 nt, Human
cagcaggcccaggugcugguga

SEQ ID NO: 315328 - RNA, 21 nt, Human
acagaacuguauagugauaaa

SEQ ID NO: 315329 - RNA, 22 nt, Human
cacagguggcuccaaguuagag

SEQ ID NO: 315330 - RNA, 22 nt, Human
ugcuucagaggaaaggcaaaag

SEQ ID NO: 315331 - RNA, 22 nt, Human
gugcagguguuuuggcugccag

SEQ ID NO: 315332 - RNA, 22 nt, Human
uacagaaaucacaucgcuuuga

SEQ ID NO: 315333 - RNA, 22 nt, Human
uuccaaaggaauggggagcuau

SEQ ID NO: 315334 - RNA, 18 nt, Human
uaugagaagauuagcaau

SEQ ID NO: 315335 - RNA, 22 nt, Human
uccaugagcuagcuuuccaaag

SEQ ID NO: 315336 - RNA, 19 nt, Human
uguagcaguuuaaaacaac

SEQ ID NO: 315337 - RNA, 23 nt, Human
ucagagaacucgggcagaugacc

SEQ ID NO: 315338 - RNA, 22 nt, Human
gucaggaugacaagugcuuuca

SEQ ID NO: 315339 - RNA, 22 nt, Human
aggggcucaaagugugcaggga

SEQ ID NO: 315340 - RNA, 21 nt, Human
uccucugcucucauaccacaa

SEQ ID NO: 315341 - RNA, 22 nt, Human
gccuggagaggaagccggugga

SEQ ID NO: 315342 - RNA, 22 nt, Human
gucccagggaagaaggcagcac

SEQ ID NO: 315343 - RNA, 22 nt, Human
ucuucauuccguagauauuuau

SEQ ID NO: 315344 - RNA, 22 nt, Human
ugugaaaggggucacagggaaa

SEQ ID NO: 315345 - RNA, 22 nt, Human
auggcagcaaaugucuggcugg

SEQ ID NO: 315346 - RNA, 22 nt, Human
augcuguguggccaccuccaug

SEQ ID NO: 315347 - RNA, 21 nt, Human
auucagaguaauucaucuuua

SEQ ID NO: 315348 - RNA, 22 nt, Human
uggagacucugcaucugugaca

SEQ ID NO: 315349 - RNA, 22 nt, Human
uugaggagcaggaugggaggcu

SEQ ID NO: 315350 - RNA, 22 nt, Human
ucugggaagcugcgugccuguu

SEQ ID NO: 315351 - RNA, 22 nt, Human
ccacagggauaggaauggggcu

SEQ ID NO: 315352 - RNA, 22 nt, Human
acucagugggcuugaugucgaa

SEQ ID NO: 315353 - RNA, 22 nt, Human
uaugaacauguucauugacuua

SEQ ID NO: 315354 - RNA, 22 nt, Human
ucagucuucccuccagugcaac

SEQ ID NO: 315355 - RNA, 22 nt, Human
ugcuuccuauccacacaaugcc

SEQ ID NO: 315356 - RNA, 22 nt, Human
cugccuuggcccuaguucaugg

SEQ ID NO: 315357 - RNA, 22 nt, Human
caguggccaugguggcaggggu

SEQ ID NO: 315358 - RNA, 21 nt, Human
agcaggaggcagucacagcuc

SEQ ID NO: 315359 - RNA, 22 nt, Human
gauggcacacagacauccccgc

SEQ ID NO: 315360 - RNA, 22 nt, Human
ucaagagauugaauaauaacug

SEQ ID NO: 315361 - RNA, 22 nt, Human
cuuuaagagaucaccaaucaca

SEQ ID NO: 315362 - RNA, 22 nt, Human
ggccugcucugcagccucuaca

SEQ ID NO: 315363 - RNA, 22 nt, Human
ucaggaugguguggaggaaaua

SEQ ID NO: 315364 - RNA, 22 nt, Human
agguauaagaagauuauuuaua

SEQ ID NO: 315365 - RNA, 22 nt, Human
auuuccauagagcgucucacag

SEQ ID NO: 315366 - RNA, 22 nt, Human
uggcucagcgguggcagcagac

SEQ ID NO: 315367 - RNA, 22 nt, Human
aacagcaugcuggguaacauug

SEQ ID NO: 315368 - RNA, 22 nt, Human
cuuaaauuuucaucuacaagaa

SEQ ID NO: 315369 - RNA, 22 nt, Human
ggguccagacacuccagaggaa

SEQ ID NO: 315370 - RNA, 22 nt, Human
uuuuuggguccaggcuguaucu

SEQ ID NO: 315371 - RNA, 19 nt, Human
agcagccaucgaccaugga

SEQ ID NO: 315372 - RNA, 20 nt, Human
caagcccucuuuagccugcc

SEQ ID NO: 315373 - RNA, 20 nt, Human
ugaaggccauuuguuccaga

SEQ ID NO: 315374 - RNA, 22 nt, Human
gggugggguguaucggauccua

SEQ ID NO: 315375 - RNA, 22 nt, Human
gugaaaucugaggcccaugaug

SEQ ID NO: 315376 - RNA, 23 nt, Human
uucuucucaauuaguugauucag

SEQ ID NO: 315377 - RNA, 22 nt, Human
gcuggggucugugaggagggcu

SEQ ID NO: 315378 - RNA, 22 nt, Human
guguaucaaagcacagacuuca

SEQ ID NO: 315379 - RNA, 22 nt, Human
uuauucuucuucucuugccagg

SEQ ID NO: 315380 - RNA, 22 nt, Human
agguggagaucagggacuaagg

SEQ ID NO: 315381 - RNA, 22 nt, Human
cugcucuggcuguguacuucag

SEQ ID NO: 315382 - RNA, 22 nt, Human
uugcaccaaaugaguuaaaauu

SEQ ID NO: 315383 - RNA, 22 nt, Human
caggcccugggcaggaucagcc

SEQ ID NO: 315384 - RNA, 22 nt, Human
acagcagcgucaacuuaaaauu

SEQ ID NO: 315385 - RNA, 22 nt, Human
uacuguauuugauaagugaagu

SEQ ID NO: 315386 - RNA, 22 nt, Human
uuuuccucugagcuuugaauaa

SEQ ID NO: 315387 - RNA, 22 nt, Human
ucagucuuugcuuaugacaaua

SEQ ID NO: 315388 - RNA, 22 nt, Human
cuggugcacauucgcucucaua

SEQ ID NO: 315389 - RNA, 22 nt, Human
ccucucaucauuaucgcuuugu

SEQ ID NO: 315390 - RNA, 22 nt, Human
ugguacuuggaggcagaaaaau

SEQ ID NO: 315391 - RNA, 22 nt, Human
gccuccccugcaauuguccuug

SEQ ID NO: 315392 - RNA, 22 nt, Human
auccuucaaggggcugacagcu

SEQ ID NO: 315393 - RNA, 22 nt, Human
acuggcaguagagggagcgcau

SEQ ID NO: 315394 - RNA, 22 nt, Human
cccucugcucaggugcauaggc

SEQ ID NO: 315395 - RNA, 22 nt, Human
uacauggugguggcacuugacu

SEQ ID NO: 315396 - RNA, 22 nt, Human
agcaguggccuggggcucugug

SEQ ID NO: 315397 - RNA, 22 nt, Human
uggaaggggagcuggaaagggg

SEQ ID NO: 315398 - RNA, 22 nt, Human
uugcauuguaggauguuagaag

SEQ ID NO: 315399 - RNA, 22 nt, Human
ucugagggcuugaggggaagua

SEQ ID NO: 315400 - RNA, 22 nt, Human
cggcagagacggcgcuuugaac

SEQ ID NO: 315401 - RNA, 22 nt, Human
cuggccacaacuagcccaggac

SEQ ID NO: 315402 - RNA, 22 nt, Human
ucuagaaacaugacauugaucu

SEQ ID NO: 315403 - RNA, 22 nt, Human
cuugcuuuguccagaaauucag

SEQ ID NO: 315404 - RNA, 22 nt, Human
uagauaaauuagaaaguuuacu

SEQ ID NO: 315405 - RNA, 22 nt, Human
auuugcuuuuacuauguuaaaa

SEQ ID NO: 315406 - RNA, 22 nt, Human
augaagcugaccuugucuugcu

SEQ ID NO: 315407 - RNA, 22 nt, Human
ucucucagcuuugagaccugcu

SEQ ID NO: 315408 - RNA, 18 nt, Human
gucaccuggaucagauua

SEQ ID NO: 315409 - RNA, 22 nt, Human
agcucccagagcucgagaguaa

SEQ ID NO: 315410 - RNA, 20 nt, Human
agguggcuccugcugggggu

SEQ ID NO: 315411 - RNA, 22 nt, Human
guugaaagcuuuucauuuaguu

SEQ ID NO: 315412 - RNA, 22 nt, Human
ucacuuaaaaauucuaguuaug

SEQ ID NO: 315413 - RNA, 22 nt, Human
agccacagucaaccuguccaua

SEQ ID NO: 315414 - RNA, 22 nt, Human
ugauuuccacagucaggggugc

SEQ ID NO: 315415 - RNA, 22 nt, Human
ggccagagagccgcuguuagga

SEQ ID NO: 315416 - RNA, 22 nt, Human
agcaucuggucaugagugagaa

SEQ ID NO: 315417 - RNA, 22 nt, Human
guccuggcccacuggcaggcug

SEQ ID NO: 315418 - RNA, 22 nt, Human
cuggggcucucuggaaugcuug

SEQ ID NO: 315419 - RNA, 22 nt, Human
uugaaaggguuaaagugguaaa

SEQ ID NO: 315420 - RNA, 22 nt, Human
ugccauccaacaguuccaucuu

SEQ ID NO: 315421 - RNA, 22 nt, Human
uggcucagaagaaaagguaaac

SEQ ID NO: 315422 - RNA, 22 nt, Human
aaggggaguuagugauaaaacc

SEQ ID NO: 315423 - RNA, 22 nt, Human
acagcuggcaggggggcaugaa

SEQ ID NO: 315424 - RNA, 20 nt, Human
ucauccaggacaggaguggc

SEQ ID NO: 315425 - RNA, 20 nt, Human
agagcugggaagcucccuau

SEQ ID NO: 315426 - RNA, 22 nt, Human
cuccccagguucaggagguggg

SEQ ID NO: 315427 - RNA, 22 nt, Human
caucaaauaggaauauuuggca

SEQ ID NO: 315428 - RNA, 22 nt, Human
uuccagauuucuacacaagacc

SEQ ID NO: 315429 - RNA, 22 nt, Human
agaugagaauuuuuagagugcu

SEQ ID NO: 315430 - RNA, 22 nt, Human
uaacuuucuucauaugugaacc

SEQ ID NO: 315431 - RNA, 22 nt, Human
cuguguggccucaagccagccu

SEQ ID NO: 315432 - RNA, 22 nt, Human
auucugauaucuuauucuagcu

SEQ ID NO: 315433 - RNA, 22 nt, Human
cagaguggcagucccaggccca

SEQ ID NO: 315434 - RNA, 22 nt, Human
gcugcucugcuguguaagcagg

SEQ ID NO: 315435 - RNA, 20 nt, Human
cccugagacaaaggaggggc

SEQ ID NO: 315436 - RNA, 22 nt, Human
acagggccagccugggaccugg

SEQ ID NO: 315437 - RNA, 22 nt, Human
gccaggcuguggggaacuugaa

SEQ ID NO: 315438 - RNA, 22 nt, Human
uccuugaagcuuguaucuaaua

SEQ ID NO: 315439 - RNA, 22 nt, Human
acagagcaauaacagggagagg

SEQ ID NO: 315440 - RNA, 22 nt, Human
cucuugaagcaggggccaguuc

SEQ ID NO: 315441 - RNA, 22 nt, Human
uaauuuaauuucaugccagccu

SEQ ID NO: 315442 - RNA, 22 nt, Human
ugugcagggaagggcaugcuau

SEQ ID NO: 315443 - RNA, 22 nt, Human
ugugcuucugcagagacuauuu

SEQ ID NO: 315444 - RNA, 22 nt, Human
agggccucugacgcccccagcc

SEQ ID NO: 315445 - RNA, 22 nt, Human
ggucaggggcugcucuacagag

SEQ ID NO: 315446 - RNA, 22 nt, Human
acaagauagcuuagaagauuca

SEQ ID NO: 315447 - RNA, 22 nt, Human
acagcagcuggguucccaccau

SEQ ID NO: 315448 - RNA, 22 nt, Human
aagugagauuauauguacggga

SEQ ID NO: 315449 - RNA, 22 nt, Human
acauuuacagugcuagacaauc

SEQ ID NO: 315450 - RNA, 22 nt, Human
agaggcagcagucauacuacag

SEQ ID NO: 315451 - RNA, 22 nt, Human
cacagggcaccaguuggccauc

SEQ ID NO: 315452 - RNA, 23 nt, Human
aaaguugauuugcaguuuaagag

SEQ ID NO: 315453 - RNA, 22 nt, Human
ggccugaggcaauagucagaca

SEQ ID NO: 315454 - RNA, 19 nt, Human
cuggugcuugagugaguca

SEQ ID NO: 315455 - RNA, 22 nt, Human
uugcaggggaaggagcagagcu

SEQ ID NO: 315456 - RNA, 20 nt, Human
ugcagggcucugcuucucuc

SEQ ID NO: 315457 - RNA, 22 nt, Human
ccagaaagaaugaacugaaccc

SEQ ID NO: 315458 - RNA, 22 nt, Human
uugugucugggggagugacauc

SEQ ID NO: 315459 - RNA, 22 nt, Human
ugagcugggcugggcugagcug

SEQ ID NO: 315460 - RNA, 22 nt, Human
uaaggccaauuaacaaccaggg

SEQ ID NO: 315461 - RNA, 20 nt, Human
agggucaguagcacagagcu

SEQ ID NO: 315462 - RNA, 22 nt, Human
cacauguaguaagcaggcaaug

SEQ ID NO: 315463 - RNA, 22 nt, Human
aaaagaggagugguuuaugaca

SEQ ID NO: 315464 - RNA, 22 nt, Human
ucauugcaguagggagagaccc

SEQ ID NO: 315465 - RNA, 22 nt, Human
ccuggcagcuccuccccggcgg

SEQ ID NO: 315466 - RNA, 22 nt, Human
guggccugccgugugguauggg

SEQ ID NO: 315467 - RNA, 22 nt, Human
gccucugcugcaagccugguug

SEQ ID NO: 315468 - RNA, 22 nt, Human
ucaaaguagccggauggaauuu

SEQ ID NO: 315469 - RNA, 22 nt, Human
ccaggcagagggauccccaucc

SEQ ID NO: 315470 - RNA, 22 nt, Human
auaaggcagaaaugauucuagu

SEQ ID NO: 315471 - RNA, 22 nt, Human
agggccagcacuccuggcagga

SEQ ID NO: 315472 - RNA, 22 nt, Human
ugcagggccgcuggaggucaug

SEQ ID NO: 315473 - RNA, 22 nt, Human
aguguuucucagaagggccuau

SEQ ID NO: 315474 - RNA, 22 nt, Human
ggcucagguugggucacaugac

SEQ ID NO: 315475 - RNA, 22 nt, Human
uuaagucacuuaucuaaagaca

SEQ ID NO: 315476 - RNA, 22 nt, Human
gggccucugugcagaggggccu

SEQ ID NO: 315477 - RNA, 22 nt, Human
aguuacuuucugaucagugugu

SEQ ID NO: 315478 - RNA, 22 nt, Human
ccucaggauccgcaggugcagu

SEQ ID NO: 315479 - RNA, 22 nt, Human
uggggcuguccuuagucugaga

SEQ ID NO: 315480 - RNA, 22 nt, Human
aaguucuugcugugugucagau

SEQ ID NO: 315481 - RNA, 22 nt, Human
gucaggauuuuaaaaucccagu

SEQ ID NO: 315482 - RNA, 22 nt, Human
ggagauagacuuggugagccac

SEQ ID NO: 315483 - RNA, 22 nt, Human
aguaugaauugcuuugccugua

SEQ ID NO: 315484 - RNA, 22 nt, Human
ucaguguucgcucagggacucc

SEQ ID NO: 315485 - RNA, 17 nt, Human
ucuguucaugcauaccu

SEQ ID NO: 315486 - RNA, 22 nt, Human
aggcucagauucacauuugguu

SEQ ID NO: 315487 - RNA, 21 nt, Human
ugcugccauagaccugaggga

SEQ ID NO: 315488 - RNA, 22 nt, Human
cugaaggaagcagaagcgaggu

SEQ ID NO: 315489 - RNA, 22 nt, Human
cuccucccugcgauugcucugc

SEQ ID NO: 315490 - RNA, 22 nt, Human
aaauacuagaauucagaguuga

SEQ ID NO: 315491 - RNA, 19 nt, Human
caggagagcaugcacuuug

SEQ ID NO: 315492 - RNA, 22 nt, Human
gugcuuuccauccucccugcug

SEQ ID NO: 315493 - RNA, 22 nt, Human
uggagcugggaguccugggcug

SEQ ID NO: 315494 - RNA, 22 nt, Human
auaagguaugaaaaguaaaugg

SEQ ID NO: 315495 - RNA, 21 nt, Human
aggcacuguuugugguuuggg

SEQ ID NO: 315496 - RNA, 21 nt, Human
uuugcauuuuacaugugggga

SEQ ID NO: 315497 - RNA, 22 nt, Human
cuccugagcucugaggaagcuu

SEQ ID NO: 315498 - RNA, 22 nt, Human
uaacaauaguguuugcuaguca

SEQ ID NO: 315499 - RNA, 22 nt, Human
cagcaagauuuuuaaagcaagg

SEQ ID NO: 315500 - RNA, 22 nt, Human
cugcucuguauaugagcaggaa

SEQ ID NO: 315501 - RNA, 22 nt, Human
agugcuuuagagaaauggugcu

SEQ ID NO: 315502 - RNA, 22 nt, Human
agguggguccuggcucugccau

SEQ ID NO: 315503 - RNA, 22 nt, Human
gucacacuagggccaaguggag

SEQ ID NO: 315504 - RNA, 22 nt, Human
aguuuuucugggaggcacugcu

SEQ ID NO: 315505 - RNA, 22 nt, Human
acaccagggccuagccagggcg

SEQ ID NO: 315506 - RNA, 22 nt, Human
agcccagcagaaaguccagccu

SEQ ID NO: 315507 - RNA, 22 nt, Human
auguaucaacaaauuguacagu

SEQ ID NO: 315508 - RNA, 22 nt, Human
uaaacauuuguuauucuuguuu

SEQ ID NO: 315509 - RNA, 22 nt, Human
gcagagcaguacucucuugacu

SEQ ID NO: 315510 - RNA, 22 nt, Human
agacagcugcucgcagagcuau

SEQ ID NO: 315511 - RNA, 22 nt, Human
gcccauggacacccaagugcca

SEQ ID NO: 315512 - RNA, 22 nt, Human
cacugaagccacuggaagagga

SEQ ID NO: 315513 - RNA, 22 nt, Human
uuggaugaagucuagcuuuagu

SEQ ID NO: 315514 - RNA, 22 nt, Human
ugcugccagccaggccauggag

SEQ ID NO: 315515 - RNA, 22 nt, Human
ugggcucugcugcguaccaguu

SEQ ID NO: 315516 - RNA, 22 nt, Human
agucaguguagaaagcccaggc

SEQ ID NO: 315517 - RNA, 21 nt, Human
cucuggagucaagagcuucca

SEQ ID NO: 315518 - RNA, 22 nt, Human
agugaccaacaaugcugagaag

SEQ ID NO: 315519 - RNA, 22 nt, Human
cuggcugccacuucagggucuu

SEQ ID NO: 315520 - RNA, 21 nt, Human
gagacagcccagugccagggc

SEQ ID NO: 315521 - RNA, 22 nt, Human
uaaucuguguaccuucaucgga

SEQ ID NO: 315522 - RNA, 22 nt, Human
cucuuuccucagccacagucua

SEQ ID NO: 315523 - RNA, 22 nt, Human
uccucaguggggcauucauuau

SEQ ID NO: 315524 - RNA, 22 nt, Human
acagaguagcucaagaagauug

SEQ ID NO: 315525 - RNA, 22 nt, Human
gccuuggccaacaccuugcaaa

SEQ ID NO: 315526 - RNA, 20 nt, Human
ucagccagcuaacaugggga

SEQ ID NO: 315527 - RNA, 23 nt, Human
acaagauagggauaaaaagauaa

SEQ ID NO: 315528 - RNA, 22 nt, Human
uuacaaagagugccagagugug

SEQ ID NO: 315529 - RNA, 22 nt, Human
gaaaaugugucaucccuacugu

SEQ ID NO: 315530 - RNA, 22 nt, Human
agggacaguuacaucaucagac

SEQ ID NO: 315531 - RNA, 22 nt, Human
ggugcagcugcagccugggagc

SEQ ID NO: 315532 - RNA, 22 nt, Human
gcagccacugggagugcuuaua

SEQ ID NO: 315533 - RNA, 22 nt, Human
auuguacuuuuauuacauguag

SEQ ID NO: 315534 - RNA, 22 nt, Human
cuggcagcugugugaagaacug

SEQ ID NO: 315535 - RNA, 22 nt, Human
cagaagaauggugucugagcuc

SEQ ID NO: 315536 - RNA, 22 nt, Human
uaccuuggguugaguucauucu

SEQ ID NO: 315537 - RNA, 22 nt, Human
cugggccugguagggcuugaaa

SEQ ID NO: 315538 - RNA, 22 nt, Human
gcagacaggcccaguggaggga

SEQ ID NO: 315539 - RNA, 20 nt, Human
aguuauaguaucuagccaug

SEQ ID NO: 315540 - RNA, 22 nt, Human
aauaaaauggucaguuuucuca

SEQ ID NO: 315541 - RNA, 22 nt, Human
gcugugcacuaccuauacaucc

SEQ ID NO: 315542 - RNA, 22 nt, Human
auucuucagcaggggacacuau

SEQ ID NO: 315543 - RNA, 22 nt, Human
ccaaaguccacaguuuacauua

SEQ ID NO: 315544 - RNA, 22 nt, Human
ucacaaauauuuuaacaguagg

SEQ ID NO: 315545 - RNA, 19 nt, Human
cuguccuuggcugcacugu

SEQ ID NO: 315546 - RNA, 22 nt, Human
ccacagggucagccacucugca

SEQ ID NO: 315547 - RNA, 22 nt, Human
ggagcacuauaauagagauuuu

SEQ ID NO: 315548 - RNA, 22 nt, Human
ccagggugugagaaggaaguag

SEQ ID NO: 315549 - RNA, 21 nt, Human
ucugucucuccacugcccugc

SEQ ID NO: 315550 - RNA, 22 nt, Human
uccagggaccucccugagagcu

SEQ ID NO: 315551 - RNA, 17 nt, Human
ucuuuccugccaugcuc

SEQ ID NO: 315552 - RNA, 22 nt, Human
gcugugcagccaagugccucug

SEQ ID NO: 315553 - RNA, 22 nt, Human
cagccugcuagggcaaugccuu

SEQ ID NO: 315554 - RNA, 22 nt, Human
ccugagagcauuccacacugaa

SEQ ID NO: 315555 - RNA, 22 nt, Human
acagccagaggugguccugggu

SEQ ID NO: 315556 - RNA, 17 nt, Human
agguauaaaaugguagc

SEQ ID NO: 315557 - RNA, 22 nt, Human
cugcuguggguuaagacacugu

SEQ ID NO: 315558 - RNA, 21 nt, Human
acaggcuuuagaaaaugacuc

SEQ ID NO: 315559 - RNA, 22 nt, Human
agagccuguuuugugggagaug

SEQ ID NO: 315560 - RNA, 22 nt, Human
ucuggcucaggucagacaggga

SEQ ID NO: 315561 - RNA, 22 nt, Human
cugagacuuucaugugcuuuua

SEQ ID NO: 315562 - RNA, 22 nt, Human
ccacugucagaggggcugugcc

SEQ ID NO: 315563 - RNA, 20 nt, Human
ugcucugucuaaaacuuccc

SEQ ID NO: 315564 - RNA, 22 nt, Human
gggcccagcgugguuccaucug

SEQ ID NO: 315565 - RNA, 22 nt, Human
uuagauauguuuuugcuaaugc

SEQ ID NO: 315566 - RNA, 22 nt, Human
gaguuauuucagaaggaaagau

SEQ ID NO: 315567 - RNA, 22 nt, Human
ggccacagugggaaauccuggg

SEQ ID NO: 315568 - RNA, 19 nt, Human
cccaaggcccugggcaggc

SEQ ID NO: 315569 - RNA, 19 nt, Human
ucaggacugacuugaaguc

SEQ ID NO: 315570 - RNA, 19 nt, Human
ccuggcccugcugcgcggg

SEQ ID NO: 315571 - RNA, 22 nt, Human
ggaccagagaagugagcaccug

SEQ ID NO: 315572 - RNA, 22 nt, Human
uaaagguagcaugaaacugcaa

SEQ ID NO: 315573 - RNA, 22 nt, Human
cagggagcuggugccagccgac

SEQ ID NO: 315574 - RNA, 22 nt, Human
ucuguucaucaucuggacacau

SEQ ID NO: 315575 - RNA, 20 nt, Human
auuauucauacaugugugac

SEQ ID NO: 315576 - RNA, 22 nt, Human
auuucaguguuuuaagaguuca

SEQ ID NO: 315577 - RNA, 22 nt, Human
ucugauuagagcauucuugagu

SEQ ID NO: 315578 - RNA, 22 nt, Human
gccuucugauugcuggacugac

SEQ ID NO: 315579 - RNA, 22 nt, Human
agcugccagaugacagugcuau

SEQ ID NO: 315580 - RNA, 22 nt, Human
cuggcuccaucacugggugaug

SEQ ID NO: 315581 - RNA, 22 nt, Human
uucauguguauggaacauuuuu

SEQ ID NO: 315582 - RNA, 22 nt, Human
agcuccugcacccagccuugag

SEQ ID NO: 315583 - RNA, 19 nt, Human
cagagcugcuggccucguc

SEQ ID NO: 315584 - RNA, 23 nt, Human
uuacuuuugcaccaaccuaauau

SEQ ID NO: 315585 - RNA, 22 nt, Human
aggaccugacuggcuccugcuu

SEQ ID NO: 315586 - RNA, 22 nt, Human
uacaaaguuuucuuggauugag

SEQ ID NO: 315587 - RNA, 22 nt, Human
cugcaggggccucgagcacagg

SEQ ID NO: 315588 - RNA, 22 nt, Human
ucaucucaaaacccaaggggca

SEQ ID NO: 315589 - RNA, 23 nt, Human
acugucugauauguuuuccauca

SEQ ID NO: 315590 - RNA, 22 nt, Human
gaucauuuugaugcccuuuuag

SEQ ID NO: 315591 - RNA, 22 nt, Human
uggucucugacucugaagaccc

SEQ ID NO: 315592 - RNA, 22 nt, Human
ccagggagcggggcugggucuc

SEQ ID NO: 315593 - RNA, 21 nt, Human
uucucagaucgaguagugaga

SEQ ID NO: 315594 - RNA, 22 nt, Human
ugugcucuggaguugccuucac

SEQ ID NO: 315595 - RNA, 19 nt, Human
uccugggcugggccagguc

SEQ ID NO: 315596 - RNA, 22 nt, Human
ugggccuccaauuccagcggga

SEQ ID NO: 315597 - RNA, 18 nt, Human
gggaagaggaucuggccc

SEQ ID NO: 315598 - RNA, 22 nt, Human
uaaauguauaggcacuaaaccu

SEQ ID NO: 315599 - RNA, 22 nt, Human
auguggaggaaaugaguguaca

SEQ ID NO: 315600 - RNA, 22 nt, Human
aggucacacaacugucagaggc

SEQ ID NO: 315601 - RNA, 22 nt, Human
uccacauccauugcuugacuuu

SEQ ID NO: 315602 - RNA, 22 nt, Human
aaucacaauuacuuuugcacca

SEQ ID NO: 315603 - RNA, 22 nt, Human
gccuggucucuuucaugucagu

SEQ ID NO: 315604 - RNA, 22 nt, Human
cucaggauccaucuccugcccu

SEQ ID NO: 315605 - RNA, 22 nt, Human
cugggcacuuuggggagccuac

SEQ ID NO: 315606 - RNA, 22 nt, Human
cuggcucauuuuagcaucaggu

SEQ ID NO: 315607 - RNA, 22 nt, Human
ugcugccuugaccuccugggcu

SEQ ID NO: 315608 - RNA, 17 nt, Human
uucucugagcuguauug

SEQ ID NO: 315609 - RNA, 22 nt, Human
cccaggaggcagaaguugcagu

SEQ ID NO: 315610 - RNA, 22 nt, Human
agggagugguuaagaaggugca

SEQ ID NO: 315611 - RNA, 22 nt, Human
uucugucauuuagcauugucau

SEQ ID NO: 315612 - RNA, 23 nt, Human
auuuccuacuauaaaagagguaa

SEQ ID NO: 315613 - RNA, 22 nt, Human
cugaggugcuauggaggauacg

SEQ ID NO: 315614 - RNA, 17 nt, Human
gccuggcccagccuggc

SEQ ID NO: 315615 - RNA, 22 nt, Human
acaaaagugagugugucucaga

SEQ ID NO: 315616 - RNA, 22 nt, Human
aagcaauauacugauaugauua

SEQ ID NO: 315617 - RNA, 22 nt, Human
uccuugaauggacauuacacug

SEQ ID NO: 315618 - RNA, 22 nt, Human
augcugaggacaaagagaucaa

SEQ ID NO: 315619 - RNA, 22 nt, Human
acagagguaggacaugagauau

SEQ ID NO: 315620 - RNA, 22 nt, Human
gccucugcacuguggcacacca

SEQ ID NO: 315621 - RNA, 22 nt, Human
ccuggugaauguucauggacug

SEQ ID NO: 315622 - RNA, 22 nt, Human
ccagccuccauguagauagcug

SEQ ID NO: 315623 - RNA, 22 nt, Human
guaacugaggcagcuuuuaaga

SEQ ID NO: 315624 - RNA, 22 nt, Human
uugcaccauuucacuuccauua

SEQ ID NO: 315625 - RNA, 22 nt, Human
accaggcugugaagugagacua

SEQ ID NO: 315626 - RNA, 22 nt, Human
ggagucagccugucagagugua

SEQ ID NO: 315627 - RNA, 22 nt, Human
gagcucagauucuggugucaga

SEQ ID NO: 315628 - RNA, 22 nt, Human
cggcuggguagaggugccgggu

SEQ ID NO: 315629 - RNA, 22 nt, Human
cuuccucacggugcaacaggaa

SEQ ID NO: 315630 - RNA, 22 nt, Human
acagccuguguaccagcuggga

SEQ ID NO: 315631 - RNA, 22 nt, Human
aucacugucgucaucugagauu

SEQ ID NO: 315632 - RNA, 22 nt, Human
ugcauggacucaucagacaaga

SEQ ID NO: 315633 - RNA, 22 nt, Human
cagggugcgccacucagaugua

SEQ ID NO: 315634 - RNA, 15 nt, Human
aggcacugugggacc

SEQ ID NO: 315635 - RNA, 22 nt, Human
auaugagaguaaaugccgaucu

SEQ ID NO: 315636 - RNA, 22 nt, Human
uggcagugccccuugaccagug

SEQ ID NO: 315637 - RNA, 22 nt, Human
uuucaacaccagagaccaugcg

SEQ ID NO: 315638 - RNA, 22 nt, Human
gggagggacacaaagaguuccc

SEQ ID NO: 315639 - RNA, 22 nt, Human
augggaguuuucucugaugcuc

SEQ ID NO: 315640 - RNA, 22 nt, Human
aggcugcuucagcugcagggag

SEQ ID NO: 315641 - RNA, 22 nt, Human
uccugcagccacugcaggcaga

SEQ ID NO: 315642 - RNA, 22 nt, Human
gagauggggaauaggagcaagc

SEQ ID NO: 315643 - RNA, 22 nt, Human
uucucugaaggccaugcucacu

SEQ ID NO: 315644 - RNA, 22 nt, Human
uccucaggauguggaguagaau

SEQ ID NO: 315645 - RNA, 22 nt, Human
cuugcaggcagggccuccugga

SEQ ID NO: 315646 - RNA, 22 nt, Human
ggagcugcuuugaucugaagaa

SEQ ID NO: 315647 - RNA, 22 nt, Human
ucagaaauagucuuuaaaauga

SEQ ID NO: 315648 - RNA, 22 nt, Human
cauuuugugcuagacacuaugg

SEQ ID NO: 315649 - RNA, 22 nt, Human
ucacugucugaaagaaauggcc

SEQ ID NO: 315650 - RNA, 20 nt, Human
ugaaaggugggaauuguggg

SEQ ID NO: 315651 - RNA, 22 nt, Human
ggaggccaaggcgggcggauca

SEQ ID NO: 315652 - RNA, 22 nt, Human
cuucugggcauucagcugcaca

SEQ ID NO: 315653 - RNA, 22 nt, Human
uaacaguguggacuugagaucu

SEQ ID NO: 315654 - RNA, 23 nt, Human
uaaugagaagcuuuguuuccuga

SEQ ID NO: 315655 - RNA, 22 nt, Human
gcugucucggggcuuucuccug

SEQ ID NO: 315656 - RNA, 22 nt, Human
gagguacaugaggauacacagg

SEQ ID NO: 315657 - RNA, 22 nt, Human
ccucacuuuccuuucuccuggg

SEQ ID NO: 315658 - RNA, 22 nt, Human
uucaaugauuuuuagggaucau

SEQ ID NO: 315659 - RNA, 22 nt, Human
gggcugcacagaucuucaaggg

SEQ ID NO: 315660 - RNA, 22 nt, Human
ugcagagggacagccacagcuc

SEQ ID NO: 315661 - RNA, 22 nt, Human
gaugccugcauuucaggagagu

SEQ ID NO: 315662 - RNA, 22 nt, Human
cagggccugccugguuccugga

SEQ ID NO: 315663 - RNA, 22 nt, Human
uggggugccgacagggagggca

SEQ ID NO: 315664 - RNA, 22 nt, Human
agagccaggcggcugggcaccu

SEQ ID NO: 315665 - RNA, 22 nt, Human
ccuggcugugcauugccggccc

SEQ ID NO: 315666 - RNA, 22 nt, Human
accuuuuuguucuguucucagc

SEQ ID NO: 315667 - RNA, 22 nt, Human
cagugcugacagggaggaaccu

SEQ ID NO: 315668 - RNA, 22 nt, Human
aggccuguuccuuccugggcac

SEQ ID NO: 315669 - RNA, 22 nt, Human
caggcugagcucuggccugggc

SEQ ID NO: 315670 - RNA, 23 nt, Human
ucucagaggauuccugggccuug

SEQ ID NO: 315671 - RNA, 15 nt, Human
ugggcagaucacuug

SEQ ID NO: 315672 - RNA, 23 nt, Human
uggcccugugcaugcugcuuccc

SEQ ID NO: 315673 - RNA, 22 nt, Human
ugaaaucugcaugcaaaguccu

SEQ ID NO: 315674 - RNA, 22 nt, Human
acugugcaugaaccgaaacaaa

SEQ ID NO: 315675 - RNA, 22 nt, Human
gcacccagggacuuggcuggcc

SEQ ID NO: 315676 - RNA, 20 nt, Human
ucugaggcugagcucuacuu

SEQ ID NO: 315677 - RNA, 19 nt, Human
cccagcuugaccaccugcu

SEQ ID NO: 315678 - RNA, 22 nt, Human
ucuucauuuuacaggcagaccu

SEQ ID NO: 315679 - RNA, 22 nt, Human
cccagcauggagugaggacuca

SEQ ID NO: 315680 - RNA, 22 nt, Human
ugaagaugucagcagggguggu

SEQ ID NO: 315681 - RNA, 22 nt, Human
uagaaacacagaucugguguca

SEQ ID NO: 315682 - RNA, 22 nt, Human
ggucaggguauaaucaagugag

SEQ ID NO: 315683 - RNA, 22 nt, Human
uaaugaauaaacuugagaguca

SEQ ID NO: 315684 - RNA, 22 nt, Human
cacaccuguaauaccagcuacu

SEQ ID NO: 315685 - RNA, 22 nt, Human
guaguucugcagugucaccuga

SEQ ID NO: 315686 - RNA, 22 nt, Human
aacauuuaugguagucauugca

SEQ ID NO: 315687 - RNA, 22 nt, Human
aaaucaguucucccuuucuuca

SEQ ID NO: 315688 - RNA, 22 nt, Human
agcaccuguugcacuucauaau

SEQ ID NO: 315689 - RNA, 22 nt, Human
auuccuugcucucaucaaccuu

SEQ ID NO: 315690 - RNA, 22 nt, Human
ucagugaucuaaggguauggcc

SEQ ID NO: 315691 - RNA, 22 nt, Human
uggggagcacgguagggaaaug

SEQ ID NO: 315692 - RNA, 22 nt, Human
cccagaaggucgaggcugcagu

SEQ ID NO: 315693 - RNA, 22 nt, Human
cccaggaggucgaagcugcagu

SEQ ID NO: 315694 - RNA, 22 nt, Human
gaaaugcauggaucuuggcaga

SEQ ID NO: 315695 - RNA, 22 nt, Human
cuggagggagauucaaaggagg

SEQ ID NO: 315696 - RNA, 22 nt, Human
agcccuucaaccugccuacucc

SEQ ID NO: 315697 - RNA, 22 nt, Human
gagggagagugauggaccauug

SEQ ID NO: 315698 - RNA, 22 nt, Human
uuuccuuccuugcuagccugag

SEQ ID NO: 315699 - RNA, 19 nt, Human
ugggccugcaucugggucu

SEQ ID NO: 315700 - RNA, 22 nt, Human
gcucucugguuccagucaggaa

SEQ ID NO: 315701 - RNA, 22 nt, Human
uuaugggagcaauuggggaggu

SEQ ID NO: 315702 - RNA, 22 nt, Human
aagccagguguuuaggccagcg

SEQ ID NO: 315703 - RNA, 20 nt, Human
gaggccucagccucagcucc

SEQ ID NO: 315704 - RNA, 22 nt, Human
guggcugcuaagucuccuuccu

SEQ ID NO: 315705 - RNA, 22 nt, Human
caugggagcuaucuccaucacu

SEQ ID NO: 315706 - RNA, 22 nt, Human
cccugagcccauaguugacauu

SEQ ID NO: 315707 - RNA, 22 nt, Human
gaacaguaaauuuaugcagcac

SEQ ID NO: 315708 - RNA, 22 nt, Human
ccuggccugugaaucugagagc

SEQ ID NO: 315709 - RNA, 22 nt, Human
cugagaaggaagccuccacucu

SEQ ID NO: 315710 - RNA, 22 nt, Human
uaugacuuauuucaucaguucu

SEQ ID NO: 315711 - RNA, 22 nt, Human
gccacagggcagaugcgcagag

SEQ ID NO: 315712 - RNA, 22 nt, Human
ccuguucagagcuaagcaucau

SEQ ID NO: 315713 - RNA, 22 nt, Human
ggucccagcuggucacugucag

SEQ ID NO: 315714 - RNA, 22 nt, Human
agauggguaacuggagucugcu

SEQ ID NO: 315715 - RNA, 22 nt, Human
ugggcagaggcucugaagucca

SEQ ID NO: 315716 - RNA, 22 nt, Human
gacccaggguuucugcacaggg

SEQ ID NO: 315717 - RNA, 22 nt, Human
cacaggaggaggccagagcgua

SEQ ID NO: 315718 - RNA, 22 nt, Human
ugcuggggucauggggcgcccg

SEQ ID NO: 315719 - RNA, 22 nt, Human
agccacagugcaagagagaaaa

SEQ ID NO: 315720 - RNA, 23 nt, Human
uaugagaauuaagugcgagugcc

SEQ ID NO: 315721 - RNA, 22 nt, Human
caggguccggcugccuggcugu

SEQ ID NO: 315722 - RNA, 22 nt, Human
caaggcugcugcgggucgcacc

SEQ ID NO: 315723 - RNA, 22 nt, Human
ggcuucccuuuccgagaggaga

SEQ ID NO: 315724 - RNA, 22 nt, Human
ugugcugguacaugugaggaug

SEQ ID NO: 315725 - RNA, 20 nt, Human
agccugccagcuggcccaga

SEQ ID NO: 315726 - RNA, 23 nt, Human
ugucacauuuaguuggcauuguu

SEQ ID NO: 315727 - RNA, 22 nt, Human
uagaaaucuacuuagacuuucu

SEQ ID NO: 315728 - RNA, 22 nt, Human
uuuccaagacuccaguucuccc

SEQ ID NO: 315729 - RNA, 20 nt, Human
uggcaccaggugguggcccc

SEQ ID NO: 315730 - RNA, 22 nt, Human
ugcuggguuaccuaagccuaaa

SEQ ID NO: 315731 - RNA, 22 nt, Human
ggagagagaugccgccuugcuc

SEQ ID NO: 315732 - RNA, 22 nt, Human
acagcuguggccacuugcaucc

SEQ ID NO: 315733 - RNA, 22 nt, Human
uuuucuuacugucugugauccu

SEQ ID NO: 315734 - RNA, 20 nt, Human
ugugugcacacaugacauuc

SEQ ID NO: 315735 - RNA, 22 nt, Human
guacuucccugggaggcaagca

SEQ ID NO: 315736 - RNA, 22 nt, Human
cucaggauagauuguccucuca

SEQ ID NO: 315737 - RNA, 22 nt, Human
ccugcucugguuuagucagucu

SEQ ID NO: 315738 - RNA, 22 nt, Human
ugucccagucaaggcugucauc

SEQ ID NO: 315739 - RNA, 22 nt, Human
agucuucagagaaauuaacucu

SEQ ID NO: 315740 - RNA, 22 nt, Human
agagcuggggccagagucaagg

SEQ ID NO: 315741 - RNA, 22 nt, Human
agcagcauuaugauauaucuua

SEQ ID NO: 315742 - RNA, 22 nt, Human
ucugggcuugguuagggcuguu

SEQ ID NO: 315743 - RNA, 22 nt, Human
acuuccuggcugggugaccugg

SEQ ID NO: 315744 - RNA, 22 nt, Human
auauauuugagaauauucauga

SEQ ID NO: 315745 - RNA, 22 nt, Human
gcugccuuugugagccaagggg

SEQ ID NO: 315746 - RNA, 22 nt, Human
gugcauuggugcgccacuucac

SEQ ID NO: 315747 - RNA, 22 nt, Human
gguagcagggcugugagucaga

SEQ ID NO: 315748 - RNA, 22 nt, Human
ggaaggagucuuuaacacccau

SEQ ID NO: 315749 - RNA, 22 nt, Human
cagucuucuaaccuagcagccu

SEQ ID NO: 315750 - RNA, 22 nt, Human
aggcacugaagaacucuuuuug

SEQ ID NO: 315751 - RNA, 22 nt, Human
agcaggaaguagucuguaagca

SEQ ID NO: 315752 - RNA, 22 nt, Human
caggggacauuaaagcuccaua

SEQ ID NO: 315753 - RNA, 19 nt, Human
auaaggcaauuggauuugg

SEQ ID NO: 315754 - RNA, 22 nt, Human
ggagggcuguagaggagaccug

SEQ ID NO: 315755 - RNA, 22 nt, Human
cagaugcuuggaggacacuugg

SEQ ID NO: 315756 - RNA, 22 nt, Human
cccuccagccauggacccaggu

SEQ ID NO: 315757 - RNA, 22 nt, Human
aaaguuuguuauaugauaagga

SEQ ID NO: 315758 - RNA, 22 nt, Human
cugugcuugacagugggaagca

SEQ ID NO: 315759 - RNA, 22 nt, Human
aguaggaggcgggagcaugaag

SEQ ID NO: 315760 - RNA, 22 nt, Human
ggccaugguuggggaagacaug

SEQ ID NO: 315761 - RNA, 22 nt, Human
auguaguauuuggaaauguaaa

SEQ ID NO: 315762 - RNA, 22 nt, Human
ccagguggcuucugcccgaugu

SEQ ID NO: 315763 - RNA, 22 nt, Human
uagaaaugaauguuuaaaaguc

SEQ ID NO: 315764 - RNA, 22 nt, Human
aagucacacuagacaacugagg

SEQ ID NO: 315765 - RNA, 22 nt, Human
aacaugaaaguugcuaagugca

SEQ ID NO: 315766 - RNA, 22 nt, Human
ucuguucaugucuuuuuaagug

SEQ ID NO: 315767 - RNA, 22 nt, Human
ugaaagggguugaguuacagcu

SEQ ID NO: 315768 - RNA, 20 nt, Human
cuccucaguuccaugggagg

SEQ ID NO: 315769 - RNA, 22 nt, Human
ucccagaggcaguugguaacuu

SEQ ID NO: 315770 - RNA, 22 nt, Human
uucaagaugucuucacaauagu

SEQ ID NO: 315771 - RNA, 22 nt, Human
gagggcugauaaaugcgcaugg

SEQ ID NO: 315772 - RNA, 19 nt, Human
ucucacaucagcuccuagc

SEQ ID NO: 315773 - RNA, 22 nt, Human
ugccauuucuuucaauauucuu

SEQ ID NO: 315774 - RNA, 22 nt, Human
ucauccaguucacauggugagu

SEQ ID NO: 315775 - RNA, 22 nt, Human
gcccugugagucaugcggcaga

SEQ ID NO: 315776 - RNA, 22 nt, Human
aguaucaaggaucuccagcacc

SEQ ID NO: 315777 - RNA, 22 nt, Human
agaugaaaagauaagcagcaau

SEQ ID NO: 315778 - RNA, 22 nt, Human
ugggcugcuuccucagcugaga

SEQ ID NO: 315779 - RNA, 22 nt, Human
ucugucaucucuaaaauagaaa

SEQ ID NO: 315780 - RNA, 22 nt, Human
ccugcccuagagaugacacaau

SEQ ID NO: 315781 - RNA, 22 nt, Human
ggcaggguggcccuccagugag

SEQ ID NO: 315782 - RNA, 21 nt, Human
gcagagccggggcgagaaggc

SEQ ID NO: 315783 - RNA, 22 nt, Human
uggccuguggcuuaaggucugu

SEQ ID NO: 315784 - RNA, 22 nt, Human
guuuuauaggcuguugcuauau

SEQ ID NO: 315785 - RNA, 20 nt, Human
gagauggcuaagugcugaac

SEQ ID NO: 315786 - RNA, 22 nt, Human
uaagaaauuuaguuauagaaug

SEQ ID NO: 315787 - RNA, 22 nt, Human
auuucuguaacuuaugaaaguu

SEQ ID NO: 315788 - RNA, 17 nt, Human
ggagagugggaauggcc

SEQ ID NO: 315789 - RNA, 22 nt, Human
ucuucaaaugcuaguaauauca

SEQ ID NO: 315790 - RNA, 22 nt, Human
cugccuggaaggagcaagggga

SEQ ID NO: 315791 - RNA, 22 nt, Human
ucauugcacuccagccugggca

SEQ ID NO: 315792 - RNA, 22 nt, Human
uuauuccagcuaagaguccugg

SEQ ID NO: 315793 - RNA, 22 nt, Human
cagggagaggcaucauagggaa

SEQ ID NO: 315794 - RNA, 22 nt, Human
gcuggagcugcagccugggccu

SEQ ID NO: 315795 - RNA, 22 nt, Human
uucugucauccuuucuagaugu

SEQ ID NO: 315796 - RNA, 22 nt, Human
gggaggcuggcucuggccacag

SEQ ID NO: 315797 - RNA, 22 nt, Human
uaaauucuacaacuucaaagau

SEQ ID NO: 315798 - RNA, 22 nt, Human
agagcugcaccuaugcagaccu

SEQ ID NO: 315799 - RNA, 22 nt, Human
uugcuuuguuacugcaguuucc

SEQ ID NO: 315800 - RNA, 22 nt, Human
ggcagccaugucccagggcuuc

SEQ ID NO: 315801 - RNA, 22 nt, Human
uauaucuuauaugugcagguac

SEQ ID NO: 315802 - RNA, 22 nt, Human
gagcuggugugugcccgagcac

SEQ ID NO: 315803 - RNA, 22 nt, Human
ucucagugaagaguauaacaaa

SEQ ID NO: 315804 - RNA, 22 nt, Human
ucagggcaagucucagaagguu

SEQ ID NO: 315805 - RNA, 22 nt, Human
ccaggcaggcgauggugcagug

SEQ ID NO: 315806 - RNA, 21 nt, Human
ugcucacagaugugcucagug

SEQ ID NO: 315807 - RNA, 22 nt, Human
ugaguagcggcuauguguaacu

SEQ ID NO: 315808 - RNA, 22 nt, Human
guccagcuccagggaggcaggc

SEQ ID NO: 315809 - RNA, 22 nt, Human
caggccuccacuccacgcagac

SEQ ID NO: 315810 - RNA, 22 nt, Human
ggagcugaaggggugggcucag

SEQ ID NO: 315811 - RNA, 22 nt, Human
ggcugccugccuccaagccggg

SEQ ID NO: 315812 - RNA, 16 nt, Human
gccuggaguggcaggg

SEQ ID NO: 315813 - RNA, 22 nt, Human
cagcuggcagcccuggcccugc

SEQ ID NO: 315814 - RNA, 22 nt, Human
aucuggcuugacuuugcgacuu

SEQ ID NO: 315815 - RNA, 22 nt, Human
cucacagguaccagcacccucc

SEQ ID NO: 315816 - RNA, 22 nt, Human
uguaugaaaaggaauagauuga

SEQ ID NO: 315817 - RNA, 22 nt, Human
ccugucagcugauggcuaugua

SEQ ID NO: 315818 - RNA, 22 nt, Human
uggcuggacagugggcagugga

SEQ ID NO: 315819 - RNA, 22 nt, Human
uuuucauuguaaaucaggaaac

SEQ ID NO: 315820 - RNA, 19 nt, Human
agaaaucucgagauuuguu

SEQ ID NO: 315821 - RNA, 22 nt, Human
cccuuagcuccaagggguuugg

SEQ ID NO: 315822 - RNA, 22 nt, Human
uguacaaugccgagacuaacuc

SEQ ID NO: 315823 - RNA, 20 nt, Human
ucagagucaucaaagauggu

SEQ ID NO: 315824 - RNA, 22 nt, Human
uccuucagcucucuauuuagau

SEQ ID NO: 315825 - RNA, 22 nt, Human
gcugccucccccauggcuggaa

SEQ ID NO: 315826 - RNA, 22 nt, Human
cagcauggagacaaagugggca

SEQ ID NO: 315827 - RNA, 22 nt, Human
gagcucaggagcaucagaagaa

SEQ ID NO: 315828 - RNA, 22 nt, Human
aaugcaguuucauuuguagaau

SEQ ID NO: 315829 - RNA, 22 nt, Human
ugccuggauucgguuguuguca

SEQ ID NO: 315830 - RNA, 22 nt, Human
ucucagaguaauucuuuaaggu

SEQ ID NO: 315831 - RNA, 21 nt, Human
ccagcuccaggaccuuggauc

SEQ ID NO: 315832 - RNA, 22 nt, Human
cagcccugggaguuggggccga

SEQ ID NO: 315833 - RNA, 22 nt, Human
aaacugaauucccaagggcaug

SEQ ID NO: 315834 - RNA, 23 nt, Human
ggcuggcccggggcugcuccuga

SEQ ID NO: 315835 - RNA, 22 nt, Human
aaugugaaaccgcacagaauaa

SEQ ID NO: 315836 - RNA, 22 nt, Human
uugaaaggcacaggcaccuggg

SEQ ID NO: 315837 - RNA, 22 nt, Human
cugucuguucagauucauuacu

SEQ ID NO: 315838 - RNA, 19 nt, Human
cuggcagccugucuguguc

SEQ ID NO: 315839 - RNA, 22 nt, Human
uuuacagaaugucaauuucuau

SEQ ID NO: 315840 - RNA, 23 nt, Human
agaaaguuugugccuugugacac

SEQ ID NO: 315841 - RNA, 22 nt, Human
cugcccugucugcagccuggcu

SEQ ID NO: 315842 - RNA, 22 nt, Human
agcagccuuugaucaucuggga

SEQ ID NO: 315843 - RNA, 22 nt, Human
uccucuggauauaagccucacc

SEQ ID NO: 315844 - RNA, 22 nt, Human
ucauugcaagcucauuuaucug

SEQ ID NO: 315845 - RNA, 22 nt, Human
cagcaauaacucaaagccauuu

SEQ ID NO: 315846 - RNA, 22 nt, Human
uuuggaauuggcauucuauucu

SEQ ID NO: 315847 - RNA, 22 nt, Human
cagcuggcuggucagugcacaa

SEQ ID NO: 315848 - RNA, 22 nt, Human
ccugugugcacacgaggccaug

SEQ ID NO: 315849 - RNA, 22 nt, Human
uuucaaaguugggaauuguaau

SEQ ID NO: 315850 - RNA, 22 nt, Human
uauuuccagcaguaagaagaca

SEQ ID NO: 315851 - RNA, 22 nt, Human
aggcugccucgugagcucgcug

SEQ ID NO: 315852 - RNA, 22 nt, Human
cuggccugaucucaugcugucc

SEQ ID NO: 315853 - RNA, 22 nt, Human
ccuggagcaggagcugcagagg

SEQ ID NO: 315854 - RNA, 22 nt, Human
uguguacaagaguguuuacugu

SEQ ID NO: 315855 - RNA, 22 nt, Human
cucagagaaaaggagcaagggu

SEQ ID NO: 315856 - RNA, 20 nt, Human
caguccugucccugcugccc

SEQ ID NO: 315857 - RNA, 22 nt, Human
ucuccuggauggaccuucucuu

SEQ ID NO: 315858 - RNA, 22 nt, Human
ucacaucucccuggaggacaca

SEQ ID NO: 315859 - RNA, 19 nt, Human
gucacauuugucucccagg

SEQ ID NO: 315860 - RNA, 22 nt, Human
gccuggagagcacugugcgcuu

SEQ ID NO: 315861 - RNA, 22 nt, Human
uccugccuguuuaccuguacuu

SEQ ID NO: 315862 - RNA, 22 nt, Human
ccuuccuggagcccaugcagau

SEQ ID NO: 315863 - RNA, 22 nt, Human
uauuuguauuucaugcaguaaa

SEQ ID NO: 315864 - RNA, 22 nt, Human
gccucugggcucugccccuggc

SEQ ID NO: 315865 - RNA, 22 nt, Human
ugauugaacugagcuucaagau

SEQ ID NO: 315866 - RNA, 20 nt, Human
ccagguggugccuggagagg

SEQ ID NO: 315867 - RNA, 22 nt, Human
ugaugaaauguugaggcaguga

SEQ ID NO: 315868 - RNA, 22 nt, Human
aaugagaaccuugaaaggaacu

SEQ ID NO: 315869 - RNA, 22 nt, Human
cuuccuugcggccccugccuag

SEQ ID NO: 315870 - RNA, 22 nt, Human
caguccagcucaucaguggcac

SEQ ID NO: 315871 - RNA, 22 nt, Human
cugagagucagcuucuccuccu

SEQ ID NO: 315872 - RNA, 22 nt, Human
uaugcacaccuggguccuuguc

SEQ ID NO: 315873 - RNA, 22 nt, Human
ugugcaguuucuauguugucca

SEQ ID NO: 315874 - RNA, 22 nt, Human
gcagggcuaauggggcaaguag

SEQ ID NO: 315875 - RNA, 22 nt, Human
gccaggaaugcauaaaugaccu

SEQ ID NO: 315876 - RNA, 22 nt, Human
cuugaaagucacaugcagcccu

SEQ ID NO: 315877 - RNA, 22 nt, Human
ugcugccaggucuugcugucca

SEQ ID NO: 315878 - RNA, 22 nt, Human
uuuagaaauugcagagugggug

SEQ ID NO: 315879 - RNA, 22 nt, Human
uauucugugugauauguaaaug

SEQ ID NO: 315880 - RNA, 19 nt, Human
aauacaguguuauagaauu

SEQ ID NO: 315881 - RNA, 18 nt, Human
gugagcagagagcaucac

SEQ ID NO: 315882 - RNA, 22 nt, Human
aauuaugagguagauaucacau

SEQ ID NO: 315883 - RNA, 22 nt, Human
uuuuccucuguuauuaguguga

SEQ ID NO: 315884 - RNA, 22 nt, Human
ggaaggggagcuaaaucuacug

SEQ ID NO: 315885 - RNA, 22 nt, Human
gcagguggcagaggugggaucu

SEQ ID NO: 315886 - RNA, 22 nt, Human
aggccuggcaugagaccugaga

SEQ ID NO: 315887 - RNA, 22 nt, Human
ccagggcagccaacccagaugc

SEQ ID NO: 315888 - RNA, 22 nt, Human
ugucccuggaacuauggcucca

SEQ ID NO: 315889 - RNA, 22 nt, Human
aaaugucuuuaucucauguaac

SEQ ID NO: 315890 - RNA, 22 nt, Human
ugcugccacaaauucagcugcc

SEQ ID NO: 315891 - RNA, 23 nt, Human
ugcugguguuuuugggaccaggg

SEQ ID NO: 315892 - RNA, 22 nt, Human
gcagguguggaguggggugagc

SEQ ID NO: 315893 - RNA, 22 nt, Human
ggauccuucuuugaccucacag

SEQ ID NO: 315894 - RNA, 22 nt, Human
agaagcagacucugaggcaagg

SEQ ID NO: 315895 - RNA, 22 nt, Human
ugcugucuguuuacuggcuaua

SEQ ID NO: 315896 - RNA, 22 nt, Human
uggaaagaugaagauguuuaag

SEQ ID NO: 315897 - RNA, 22 nt, Human
uaugaaauugccauuuuuaugg

SEQ ID NO: 315898 - RNA, 22 nt, Human
aagccaggggcugcuuaggaga

SEQ ID NO: 315899 - RNA, 22 nt, Human
gccugcagaggugcugcuagcu

SEQ ID NO: 315900 - RNA, 22 nt, Human
auucuucauaccuacugagguu

SEQ ID NO: 315901 - RNA, 22 nt, Human
cuuaacauccugcauuuuucuu

SEQ ID NO: 315902 - RNA, 22 nt, Human
cuggcuccacucccugccugac

SEQ ID NO: 315903 - RNA, 22 nt, Human
uucucuuauucuggauaugcag

SEQ ID NO: 315904 - RNA, 22 nt, Human
uggcagcuugaaugcagucuuu

SEQ ID NO: 315905 - RNA, 22 nt, Human
caggguggggcuggcuaucaaa

SEQ ID NO: 315906 - RNA, 22 nt, Human
uugaaaacuuucuagaccaaga

SEQ ID NO: 315907 - RNA, 22 nt, Human
guacaaaguggaccugauagua

SEQ ID NO: 315908 - RNA, 23 nt, Human
ugguggggucuuggagacagcac

SEQ ID NO: 315909 - RNA, 22 nt, Human
cuguucucuggcgguggcuguu

SEQ ID NO: 315910 - RNA, 22 nt, Human
uggagaaagcugcauauggaaa

SEQ ID NO: 315911 - RNA, 22 nt, Human
uccagucauuuccauuguuccc

SEQ ID NO: 315912 - RNA, 22 nt, Human
acuguguccucauguggcagaa

SEQ ID NO: 315913 - RNA, 21 nt, Human
acccuggguucuccauacccu

SEQ ID NO: 315914 - RNA, 22 nt, Human
gcugagcugggacaguccuggg

SEQ ID NO: 315915 - RNA, 22 nt, Human
guuauguaugggggccuuauga

SEQ ID NO: 315916 - RNA, 22 nt, Human
guuaucaugcuucaucaucacu

SEQ ID NO: 315917 - RNA, 22 nt, Human
agcagcuggugagcaagcucag

SEQ ID NO: 315918 - RNA, 22 nt, Human
uagcagcucacagccucccauu

SEQ ID NO: 315919 - RNA, 22 nt, Human
cauuaagauuuuuuucuacugg

SEQ ID NO: 315920 - RNA, 22 nt, Human
agauuucagaugcucggcaguu

SEQ ID NO: 315921 - RNA, 22 nt, Human
aacagaacccgagugugaaucu

SEQ ID NO: 315922 - RNA, 22 nt, Human
ucccaggauguuggcggcaggu

SEQ ID NO: 315923 - RNA, 19 nt, Human
aaaagucuauucaauuaca

SEQ ID NO: 315924 - RNA, 22 nt, Human
agggucuguggaugcaucuggg

SEQ ID NO: 315925 - RNA, 22 nt, Human
uuaaauuauuucuagugaggug

SEQ ID NO: 315926 - RNA, 22 nt, Human
aggugaaguugaggaggcagaa

SEQ ID NO: 315927 - RNA, 22 nt, Human
acuuccugcuaugagcuucugu

SEQ ID NO: 315928 - RNA, 22 nt, Human
gaggggcuugaggcccugaugg

SEQ ID NO: 315929 - RNA, 22 nt, Human
aaaugugcuugugaucagcugu

SEQ ID NO: 315930 - RNA, 22 nt, Human
uagagcuauuuagagcauuuua

SEQ ID NO: 315931 - RNA, 18 nt, Human
cucaggccuuucccugug

SEQ ID NO: 315932 - RNA, 22 nt, Human
uggccuggaagagaggucgagg

SEQ ID NO: 315933 - RNA, 22 nt, Human
ucagagaugcagugccaccuac

SEQ ID NO: 315934 - RNA, 22 nt, Human
ggagucccagcaaagccuuccc

SEQ ID NO: 315935 - RNA, 22 nt, Human
agcagaaccacagcacuguuga

SEQ ID NO: 315936 - RNA, 22 nt, Human
gucccaggcuuauguggagcuu

SEQ ID NO: 315937 - RNA, 22 nt, Human
cucuggagguugagcccagcaa

SEQ ID NO: 315938 - RNA, 22 nt, Human
gcaguucuacuuauccauagac

SEQ ID NO: 315939 - RNA, 22 nt, Human
caaaugugguuucucagcauuc

SEQ ID NO: 315940 - RNA, 19 nt, Human
aggcccagcgcugggggcu

SEQ ID NO: 315941 - RNA, 22 nt, Human
gaaggccaguuuugagauaggu

SEQ ID NO: 315942 - RNA, 22 nt, Human
acucaggagggaucagcuauca

SEQ ID NO: 315943 - RNA, 22 nt, Human
gggagagcgcgcuagggccgag

SEQ ID NO: 315944 - RNA, 22 nt, Human
aucaaaaugcuccagugauggu

SEQ ID NO: 315945 - RNA, 22 nt, Human
ggccucuggcaggcaggcccuc

SEQ ID NO: 315946 - RNA, 22 nt, Human
aucaggauggguuuggcuuagg

SEQ ID NO: 315947 - RNA, 22 nt, Human
uggcagcagggccccuggagga

SEQ ID NO: 315948 - RNA, 22 nt, Human
uuuuccuacugauaaacaguua

SEQ ID NO: 315949 - RNA, 22 nt, Human
acacugaauaauugagaguuga

SEQ ID NO: 315950 - RNA, 20 nt, Human
gucucagaauggauuugcau

SEQ ID NO: 315951 - RNA, 22 nt, Human
ugucucaguucccuucucugga

SEQ ID NO: 315952 - RNA, 22 nt, Human
ccagcugcugugcagggaggcu

SEQ ID NO: 315953 - RNA, 22 nt, Human
uggcccugacugauguggaggg

SEQ ID NO: 315954 - RNA, 22 nt, Human
gccuccugguugcuucuccaac

SEQ ID NO: 315955 - RNA, 22 nt, Human
uggcucaguggcagccgcagcu

SEQ ID NO: 315956 - RNA, 22 nt, Human
aaaguucagugccuucuauaca

SEQ ID NO: 315957 - RNA, 22 nt, Human
cucuggacacuggcaugggguc

SEQ ID NO: 315958 - RNA, 20 nt, Human
uccugcaguuccuaggaggg

SEQ ID NO: 315959 - RNA, 22 nt, Human
cuggcagcuuagcacucugguu

SEQ ID NO: 315960 - RNA, 22 nt, Human
agcugcagauucuaucuagaag

SEQ ID NO: 315961 - RNA, 21 nt, Human
aggcucagcagguguauaaag

SEQ ID NO: 315962 - RNA, 22 nt, Human
uggagcaggacugcugcccuca

SEQ ID NO: 315963 - RNA, 21 nt, Human
ggcccugguuacgccuccucu

SEQ ID NO: 315964 - RNA, 22 nt, Human
aguucacauaucuguuuuauuu

SEQ ID NO: 315965 - RNA, 22 nt, Human
caggggccaggcugucugcugu

SEQ ID NO: 315966 - RNA, 22 nt, Human
guugggaagcagauggaugagc

SEQ ID NO: 315967 - RNA, 22 nt, Human
gggcaggaugcaguuucagaga

SEQ ID NO: 315968 - RNA, 23 nt, Human
ccagcuccgugagccucgggcuc

SEQ ID NO: 315969 - RNA, 22 nt, Human
caaagaugcugauguuggauca

SEQ ID NO: 315970 - RNA, 22 nt, Human
ggcgaggccgggacaggcugga

SEQ ID NO: 315971 - RNA, 22 nt, Human
agcuggguggagggcccacggu

SEQ ID NO: 315972 - RNA, 22 nt, Human
aagacauuuauuugaaucaauu

SEQ ID NO: 315973 - RNA, 22 nt, Human
uugaaauaucaaguuauuagug

SEQ ID NO: 315974 - RNA, 22 nt, Human
uuuucauuguuccucgagcauu

SEQ ID NO: 315975 - RNA, 22 nt, Human
uguuccuaaauaugaauggaga

SEQ ID NO: 315976 - RNA, 22 nt, Human
aaaacucugcaguuaguuucua

SEQ ID NO: 315977 - RNA, 22 nt, Human
uggggagugaugccucggauaa

SEQ ID NO: 315978 - RNA, 22 nt, Human
guggggggacguuggucacuuu

SEQ ID NO: 315979 - RNA, 22 nt, Human
uggagggaacccaggcugcucu

SEQ ID NO: 315980 - RNA, 22 nt, Human
ucagcuucagaucagcuagaga

SEQ ID NO: 315981 - RNA, 22 nt, Human
uuucacauaugguuguugauug

SEQ ID NO: 315982 - RNA, 22 nt, Human
agggcagaggcggacacggaag

SEQ ID NO: 315983 - RNA, 22 nt, Human
ugcaagagguaaaaugaaagga

SEQ ID NO: 315984 - RNA, 22 nt, Human
caugauuuugucuuguguuaau

SEQ ID NO: 315985 - RNA, 22 nt, Human
gccugguggugugcucaagugg

SEQ ID NO: 315986 - RNA, 19 nt, Human
ugaaauggcaguugcuaaa

SEQ ID NO: 315987 - RNA, 22 nt, Human
cccccaggcucugacacaggag

SEQ ID NO: 315988 - RNA, 22 nt, Human
agaggcuccuagccacuggcuu

SEQ ID NO: 315989 - RNA, 22 nt, Human
agugugaccuuauuuggaaaca

SEQ ID NO: 315990 - RNA, 22 nt, Human
cugguccuugacgcgugggagg

SEQ ID NO: 315991 - RNA, 22 nt, Human
cacagcugcccuacuccaugug

SEQ ID NO: 315992 - RNA, 22 nt, Human
ucugggaacagccuggcugugu

SEQ ID NO: 315993 - RNA, 18 nt, Human
gucauugcaacauacugu

SEQ ID NO: 315994 - RNA, 22 nt, Human
aucacauuguuagcauagacug

SEQ ID NO: 315995 - RNA, 22 nt, Human
caggugggaccaugauagggca

SEQ ID NO: 315996 - RNA, 22 nt, Human
ucaaaguuacuugugguuuucu

SEQ ID NO: 315997 - RNA, 22 nt, Human
augccuggucccaccucuaggu

SEQ ID NO: 315998 - RNA, 22 nt, Human
gcauuucugugcauacacauga

SEQ ID NO: 315999 - RNA, 22 nt, Human
agaggccaguggcugugcuguc

SEQ ID NO: 316000 - RNA, 22 nt, Human
ucuuuguaaaugccuagcauaa

SEQ ID NO: 316001 - RNA, 22 nt, Human
caggcacuagcagaaugaggcu

SEQ ID NO: 316002 - RNA, 22 nt, Human
augcuuuuccuaaaaugaugcc

SEQ ID NO: 316003 - RNA, 22 nt, Human
uuuuauuggagugauaccaagc

SEQ ID NO: 316004 - RNA, 22 nt, Human
gagaaagacguaggcugggagg

SEQ ID NO: 316005 - RNA, 22 nt, Human
cugccaucugagccaaaagugc

SEQ ID NO: 316006 - RNA, 22 nt, Human
cagcccugcacgcugccuccgc

SEQ ID NO: 316007 - RNA, 22 nt, Human
caggagacaauggcuguggggc

SEQ ID NO: 316008 - RNA, 22 nt, Human
acagggcagagugaaaugcuau

SEQ ID NO: 316009 - RNA, 19 nt, Human
aggaaagguggccuuagca

SEQ ID NO: 316010 - RNA, 21 nt, Human
gcagcaguguucuagaauacu

SEQ ID NO: 316011 - RNA, 22 nt, Human
uucuucaaaauccagcaugauu

SEQ ID NO: 316012 - RNA, 22 nt, Human
cuggagccauguauagccuaug

SEQ ID NO: 316013 - RNA, 22 nt, Human
uuacaaagaguguucuuuucca

SEQ ID NO: 316014 - RNA, 22 nt, Human
cugcuuugcauagcugccagag

SEQ ID NO: 316015 - RNA, 22 nt, Human
uuagccauauagaaaaagagcu

SEQ ID NO: 316016 - RNA, 22 nt, Human
gaggccuggagccgccuaggcg

SEQ ID NO: 316017 - RNA, 22 nt, Human
uagccucucuccuccacaaccu

SEQ ID NO: 316018 - RNA, 22 nt, Human
cuuucauucuuagauauuagug

SEQ ID NO: 316019 - RNA, 22 nt, Human
aggcacuggguaauuaguagcu

SEQ ID NO: 316020 - RNA, 22 nt, Human
gcuuccucgcugggcagaggca

SEQ ID NO: 316021 - RNA, 22 nt, Human
accagagaaaacacagcaggcu

SEQ ID NO: 316022 - RNA, 22 nt, Human
cugagcucuaaugucagccuug

SEQ ID NO: 316023 - RNA, 22 nt, Human
uacaguaaagcugcuaugaauu

SEQ ID NO: 316024 - RNA, 22 nt, Human
aguuuauguagaauuggcaaua

SEQ ID NO: 316025 - RNA, 22 nt, Human
guaaaguucuacuagaaucaac

SEQ ID NO: 316026 - RNA, 22 nt, Human
aaacuguaaacacagcaguaca

SEQ ID NO: 316027 - RNA, 22 nt, Human
caaaagauacuugcaucuaacu

SEQ ID NO: 316028 - RNA, 21 nt, Human
uacugagaccucacagugugc

SEQ ID NO: 316029 - RNA, 22 nt, Human
ggcaggugcaccugagccaucu

SEQ ID NO: 316030 - RNA, 22 nt, Human
ucccagaggaaauggcagcuga

SEQ ID NO: 316031 - RNA, 22 nt, Human
aggccaaguagcuagcauugaa

SEQ ID NO: 316032 - RNA, 22 nt, Human
ugcacagagagaugagacacgu

SEQ ID NO: 316033 - RNA, 22 nt, Human
agugaaauagcauuuaugaagc

SEQ ID NO: 316034 - RNA, 22 nt, Human
agucucagaaaagaagcaugga

SEQ ID NO: 316035 - RNA, 22 nt, Human
acacauauauacauauuugugc

SEQ ID NO: 316036 - RNA, 22 nt, Human
uguauuuucuucuggaagcuua

SEQ ID NO: 316037 - RNA, 20 nt, Human
uaagaacaagacuaggaagc

SEQ ID NO: 316038 - RNA, 22 nt, Human
ggcugcagcagagggacucacg

SEQ ID NO: 316039 - RNA, 19 nt, Human
cugaagucuuuucagcugg

SEQ ID NO: 316040 - RNA, 22 nt, Human
aaggcagccgugugacugcaug

SEQ ID NO: 316041 - RNA, 22 nt, Human
acacaugcugauaagaauauaa

SEQ ID NO: 316042 - RNA, 22 nt, Human
auuuucagaacauucauucacu

SEQ ID NO: 316043 - RNA, 22 nt, Human
cagcuggcccuuugguagccuu

SEQ ID NO: 316044 - RNA, 19 nt, Human
aucuuacagagcagaguac

SEQ ID NO: 316045 - RNA, 18 nt, Human
cucugucauaagugucau

SEQ ID NO: 316046 - RNA, 22 nt, Human
guggccuggaugagcuucgaca

SEQ ID NO: 316047 - RNA, 22 nt, Human
uccugagagcagcugcuuugga

SEQ ID NO: 316048 - RNA, 22 nt, Human
aauauugagaaccagcauguuu

SEQ ID NO: 316049 - RNA, 22 nt, Human
agcuccugcaccaggggccccu

SEQ ID NO: 316050 - RNA, 22 nt, Human
agcagaugagccucaugacugg

SEQ ID NO: 316051 - RNA, 22 nt, Human
uuucauguuuucuuaaauggca

SEQ ID NO: 316052 - RNA, 22 nt, Human
aaauguaguauguugcauguau

SEQ ID NO: 316053 - RNA, 23 nt, Human
agggaaaguaguaauggccuuug

SEQ ID NO: 316054 - RNA, 22 nt, Human
aaggcaguaggaucuuccacag

SEQ ID NO: 316055 - RNA, 22 nt, Human
gaguggggucugggcaucaguc

SEQ ID NO: 316056 - RNA, 22 nt, Human
ggcuggcuuucucuccgcaccu

SEQ ID NO: 316057 - RNA, 22 nt, Human
caggcacugugcaagggucucg

SEQ ID NO: 316058 - RNA, 19 nt, Human
auuugaaagcugugcuugc

SEQ ID NO: 316059 - RNA, 22 nt, Human
augcucugggcaggagcccugg

SEQ ID NO: 316060 - RNA, 22 nt, Human
uagaaauguugguauuaacauu

SEQ ID NO: 316061 - RNA, 22 nt, Human
guuauaaaggugauaaugguca

SEQ ID NO: 316062 - RNA, 22 nt, Human
aggucauuuccuuagaggcaga

SEQ ID NO: 316063 - RNA, 22 nt, Human
gcacagggcccugugcguaggu

SEQ ID NO: 316064 - RNA, 22 nt, Human
auuaaauuaaguggcuaauuua

SEQ ID NO: 316065 - RNA, 20 nt, Human
agucccagaucaaauuucug

SEQ ID NO: 316066 - RNA, 22 nt, Human
cagcugcccaagccccagaugu

SEQ ID NO: 316067 - RNA, 22 nt, Human
aaauuauuacaagcuaguuggc

SEQ ID NO: 316068 - RNA, 22 nt, Human
aagcuccccgaaacccaccucu

SEQ ID NO: 316069 - RNA, 22 nt, Human
ucagguggcuuggagggggacg

SEQ ID NO: 316070 - RNA, 22 nt, Human
gccaggcauucuagaaguagug

SEQ ID NO: 316071 - RNA, 22 nt, Human
augaaaugcugagaggugcuuc

SEQ ID NO: 316072 - RNA, 22 nt, Human
uuugaaagagcugauacaugaa

SEQ ID NO: 316073 - RNA, 20 nt, Human
aaagucuuaugguuaauuuu

SEQ ID NO: 316074 - RNA, 22 nt, Human
ccuggcugguggcagcgacaag

SEQ ID NO: 316075 - RNA, 22 nt, Human
gagcagcugguaggugaaccca

SEQ ID NO: 316076 - RNA, 22 nt, Human
uccagucaucucccuucacauu

SEQ ID NO: 316077 - RNA, 22 nt, Human
aauguacaauaagacaaagagg

SEQ ID NO: 316078 - RNA, 22 nt, Human
agaagccaacagggcaggagag

SEQ ID NO: 316079 - RNA, 22 nt, Human
gucugagaaucuugcauaucau

SEQ ID NO: 316080 - RNA, 22 nt, Human
augugaaagagguguucagugg

SEQ ID NO: 316081 - RNA, 23 nt, Human
uggaccugaaccagugccucugu

SEQ ID NO: 316082 - RNA, 22 nt, Human
auggccuggccagagcucugcu

SEQ ID NO: 316083 - RNA, 22 nt, Human
uucacauugguucuugauagcu

SEQ ID NO: 316084 - RNA, 22 nt, Human
ugcugcucuguaaagugaugag

SEQ ID NO: 316085 - RNA, 22 nt, Human
cucuuaaagaauguuccagcug

SEQ ID NO: 316086 - RNA, 22 nt, Human
aauaucaguauauuguaucagu

SEQ ID NO: 316087 - RNA, 20 nt, Human
uaggcagagcugugcagccu

SEQ ID NO: 316088 - RNA, 22 nt, Human
ucugccuuggcaaccacagcuu

SEQ ID NO: 316089 - RNA, 20 nt, Human
ugcugcuuugccacuaguug

SEQ ID NO: 316090 - RNA, 22 nt, Human
aaggaugaacauuaauacauca

SEQ ID NO: 316091 - RNA, 22 nt, Human
ccuggagggcgccgcacagucc

SEQ ID NO: 316092 - RNA, 22 nt, Human
acauuuaaauaccuauguuucu

SEQ ID NO: 316093 - RNA, 22 nt, Human
gcccagcuccucugcagacccu

SEQ ID NO: 316094 - RNA, 22 nt, Human
ccuuaaaagaacuaucucuucu

SEQ ID NO: 316095 - RNA, 22 nt, Human
uuugacauggaauaacucauuu

SEQ ID NO: 316096 - RNA, 22 nt, Human
caguacuuguccucagguguua

SEQ ID NO: 316097 - RNA, 22 nt, Human
ugggagagugcucaaugugcaa

SEQ ID NO: 316098 - RNA, 22 nt, Human
auacauacauguaugcacauac

SEQ ID NO: 316099 - RNA, 18 nt, Human
cccacggugcuguagggc

SEQ ID NO: 316100 - RNA, 22 nt, Human
uccugccuugccugggacauca

SEQ ID NO: 316101 - RNA, 22 nt, Human
aaagaucuccccuucaaagagu

SEQ ID NO: 316102 - RNA, 22 nt, Human
ugugugccagccuacgaggagc

SEQ ID NO: 316103 - RNA, 22 nt, Human
ucuaggagaaccaucagggagg

SEQ ID NO: 316104 - RNA, 20 nt, Human
aguaggggaaugcaagagca

SEQ ID NO: 316105 - RNA, 22 nt, Human
cagggcuguaaauuagugcuga

SEQ ID NO: 316106 - RNA, 22 nt, Human
aggagccaagauggggcaagua

SEQ ID NO: 316107 - RNA, 22 nt, Human
caaacugagcaucagaaaguuu

SEQ ID NO: 316108 - RNA, 22 nt, Human
gcugucugggaugucacugcug

SEQ ID NO: 316109 - RNA, 22 nt, Human
uggugaagucagcggagcccgg

SEQ ID NO: 316110 - RNA, 19 nt, Human
uguggccaugguucagcug

SEQ ID NO: 316111 - RNA, 22 nt, Human
aaaguuugaaugauauauuagu

SEQ ID NO: 316112 - RNA, 22 nt, Human
guggcccucugauagggucagg

SEQ ID NO: 316113 - RNA, 23 nt, Human
agcacacuuguacaaugcccuag

SEQ ID NO: 316114 - RNA, 22 nt, Human
uguguauuaccauuuuacagcu

SEQ ID NO: 316115 - RNA, 22 nt, Human
uccucaguuuucuaguauggca

SEQ ID NO: 316116 - RNA, 22 nt, Human
ugucucagaguaucccugaacu

SEQ ID NO: 316117 - RNA, 22 nt, Human
ggagagaacugaccugaaagga

SEQ ID NO: 316118 - RNA, 22 nt, Human
ucagcugccucucccuggaaga

SEQ ID NO: 316119 - RNA, 22 nt, Human
gucucagauucagacaucuaca

SEQ ID NO: 316120 - RNA, 22 nt, Human
acugcuuuucuaagauucugug

SEQ ID NO: 316121 - RNA, 18 nt, Human
uucaccagugugaugggu

SEQ ID NO: 316122 - RNA, 22 nt, Human
cagugccucuuaagugucaccc

SEQ ID NO: 316123 - RNA, 20 nt, Human
ggccugagcauggcuggcag

SEQ ID NO: 316124 - RNA, 22 nt, Human
cauggccucaaaggacugcaga

SEQ ID NO: 316125 - RNA, 22 nt, Human
gcucaggaucagccaccucuuu

SEQ ID NO: 316126 - RNA, 22 nt, Human
aggcuccuaucgcuuucagcaa

SEQ ID NO: 316127 - RNA, 22 nt, Human
agggagacacaugaggaaguca

SEQ ID NO: 316128 - RNA, 22 nt, Human
ucagcagcagcucagcauguuu

SEQ ID NO: 316129 - RNA, 22 nt, Human
cugcccugucuuuuucugauga

SEQ ID NO: 316130 - RNA, 21 nt, Human
accaggcuugugggagggagc

SEQ ID NO: 316131 - RNA, 22 nt, Human
uucacaggaggguggaugcaug

SEQ ID NO: 316132 - RNA, 22 nt, Human
ccaaagagcuagaauuauaggc

SEQ ID NO: 316133 - RNA, 22 nt, Human
aauauguucaaaauagaucacu

SEQ ID NO: 316134 - RNA, 22 nt, Human
auuuuacuacuccaauuaauga

SEQ ID NO: 316135 - RNA, 22 nt, Human
caucacuguccucagcauucca

SEQ ID NO: 316136 - RNA, 22 nt, Human
uuucagcugguaaaggaguagc

SEQ ID NO: 316137 - RNA, 22 nt, Human
ccagagcuccagggcuacagaa

SEQ ID NO: 316138 - RNA, 22 nt, Human
ucacaucuuauuagaguaucuc

SEQ ID NO: 316139 - RNA, 22 nt, Human
uccaugagggacacuggaugcu

SEQ ID NO: 316140 - RNA, 22 nt, Human
ggccucugggguccugagccca

SEQ ID NO: 316141 - RNA, 22 nt, Human
aagcugccacacggugaguacu

SEQ ID NO: 316142 - RNA, 22 nt, Human
uaacagaauagcagaaacagaa

SEQ ID NO: 316143 - RNA, 20 nt, Human
ggccuuggguuucgccuguu

SEQ ID NO: 316144 - RNA, 22 nt, Human
gcugggagucgcgucuguggcc

SEQ ID NO: 316145 - RNA, 22 nt, Human
ggccaccuuccaguugccugca

SEQ ID NO: 316146 - RNA, 22 nt, Human
cucauuaaaggaaaucaccugc

SEQ ID NO: 316147 - RNA, 20 nt, Human
aguagcagugugacauugac

SEQ ID NO: 316148 - RNA, 22 nt, Human
caggagugaaaugaggcccagg

SEQ ID NO: 316149 - RNA, 22 nt, Human
ugcaggagcugugcggugaggg

SEQ ID NO: 316150 - RNA, 22 nt, Human
gcauugucaaaagugguaugac

SEQ ID NO: 316151 - RNA, 23 nt, Human
uugcuucugugcaauucaguacu

SEQ ID NO: 316152 - RNA, 22 nt, Human
augugaggaagaaagagguaag

SEQ ID NO: 316153 - RNA, 22 nt, Human
ccagggugggguccaggaacca

SEQ ID NO: 316154 - RNA, 18 nt, Human
ucagcuggggcugcagcc

SEQ ID NO: 316155 - RNA, 22 nt, Human
ccaggcaggcagcguucucagg

SEQ ID NO: 316156 - RNA, 23 nt, Human
uacauuguggauggaguccuggg

SEQ ID NO: 316157 - RNA, 18 nt, Human
guucaaggucaagagaga

SEQ ID NO: 316158 - RNA, 22 nt, Human
caaagugcugagauuacaggua

SEQ ID NO: 316159 - RNA, 22 nt, Human
caggagcaaggagcagugggau

SEQ ID NO: 316160 - RNA, 22 nt, Human
cuggcucauagagcagcuccaa

SEQ ID NO: 316161 - RNA, 22 nt, Human
gcagggaggaagagaugcuucc

SEQ ID NO: 316162 - RNA, 22 nt, Human
agcugagcacauucaaacaggu

SEQ ID NO: 316163 - RNA, 22 nt, Human
ggcuagaacuuuacacuuugca

SEQ ID NO: 316164 - RNA, 22 nt, Human
ucucagugguggcauuccagac

SEQ ID NO: 316165 - RNA, 22 nt, Human
uucuuaaagaggcaaaacacag

SEQ ID NO: 316166 - RNA, 22 nt, Human
gggcugcugccaccagguggau

SEQ ID NO: 316167 - RNA, 22 nt, Human
gcugugcuggaaggggaccugc

SEQ ID NO: 316168 - RNA, 22 nt, Human
aggcagaggagaaugaucuucc

SEQ ID NO: 316169 - RNA, 20 nt, Human
ucauuucuugggguuccaag

SEQ ID NO: 316170 - RNA, 22 nt, Human
ggagccaggggaccuucacaga

SEQ ID NO: 316171 - RNA, 22 nt, Human
ugcagugguugagagcccagac

SEQ ID NO: 316172 - RNA, 22 nt, Human
aauaacuuaagaaauuucccca

SEQ ID NO: 316173 - RNA, 22 nt, Human
ggugugccuggggcuuagcugc

SEQ ID NO: 316174 - RNA, 22 nt, Human
gcuggggaggcagcagagaaca

SEQ ID NO: 316175 - RNA, 22 nt, Human
uuuauauuaccuggaauagcuu

SEQ ID NO: 316176 - RNA, 22 nt, Human
cacagggcaggccccaggccuc

SEQ ID NO: 316177 - RNA, 22 nt, Human
cugccagguuggcgcucgcucu

SEQ ID NO: 316178 - RNA, 22 nt, Human
cuugcacacauguacaugugua

SEQ ID NO: 316179 - RNA, 20 nt, Human
acugcuucuuucucugaccu

SEQ ID NO: 316180 - RNA, 22 nt, Human
ggugaaggaggaagcugaugga

SEQ ID NO: 316181 - RNA, 22 nt, Human
auuaaauuuucacuaggcuccc

SEQ ID NO: 316182 - RNA, 20 nt, Human
ugcagagcuggcuggcuccu

SEQ ID NO: 316183 - RNA, 22 nt, Human
caaaugaagaaccuucucaccu

SEQ ID NO: 316184 - RNA, 23 nt, Human
ugggcaucuccucugugccaggc

SEQ ID NO: 316185 - RNA, 22 nt, Human
gcugccucuguagcuuuggacc

SEQ ID NO: 316186 - RNA, 22 nt, Human
cacaaauggccguguucaaaga

SEQ ID NO: 316187 - RNA, 22 nt, Human
acacauauucauauguacuuac

SEQ ID NO: 316188 - RNA, 22 nt, Human
agcaugcacaugacuggcuuaa

SEQ ID NO: 316189 - RNA, 22 nt, Human
gacacauagaucuaucucacuc

SEQ ID NO: 316190 - RNA, 22 nt, Human
ugaaggcauugaugaaggaauc

SEQ ID NO: 316191 - RNA, 19 nt, Human
uguguaaagucugugguca

SEQ ID NO: 316192 - RNA, 20 nt, Human
gaaaugugaccucuucugug

SEQ ID NO: 316193 - RNA, 21 nt, Human
gccuggcagguggaagggcuc

SEQ ID NO: 316194 - RNA, 22 nt, Human
augucuuuggcuuugacauggc

SEQ ID NO: 316195 - RNA, 22 nt, Human
ucccagagcucugacaccagcu

SEQ ID NO: 316196 - RNA, 22 nt, Human
aaugcagugagccauuaaaugg

SEQ ID NO: 316197 - RNA, 22 nt, Human
agcuccugauacaugcaggaau

SEQ ID NO: 316198 - RNA, 18 nt, Human
aagcugggaaggagacag

SEQ ID NO: 316199 - RNA, 22 nt, Human
gcccugucccuuggcuucuagg

SEQ ID NO: 316200 - RNA, 18 nt, Human
ggccucagccuggccgga

SEQ ID NO: 316201 - RNA, 22 nt, Human
gagcugggacauggguccucuc

SEQ ID NO: 316202 - RNA, 22 nt, Human
aaggucauuuaacaauuuauga

SEQ ID NO: 316203 - RNA, 22 nt, Human
auacacauauguguguauaugu

SEQ ID NO: 316204 - RNA, 22 nt, Human
ccagccuggguguuagaagaca

SEQ ID NO: 316205 - RNA, 22 nt, Human
uccagcagguuggucaggugca

SEQ ID NO: 316206 - RNA, 22 nt, Human
acauuucugcauguaggguaau

SEQ ID NO: 316207 - RNA, 22 nt, Human
gcuguucacaucuggaccauuu

SEQ ID NO: 316208 - RNA, 22 nt, Human
uuuucauuuuuguagaugcaag

SEQ ID NO: 316209 - RNA, 22 nt, Human
aaggccagcuuguagggcuggu

SEQ ID NO: 316210 - RNA, 22 nt, Human
agccccucuguggcucugccuc

SEQ ID NO: 316211 - RNA, 22 nt, Human
uucuucuucauuucugacgaug

SEQ ID NO: 316212 - RNA, 22 nt, Human
caggcagcagccacucugguau

SEQ ID NO: 316213 - RNA, 22 nt, Human
aguuauaaucugcuacugauau

SEQ ID NO: 316214 - RNA, 22 nt, Human
ggggcagauggaacagagcaca

SEQ ID NO: 316215 - RNA, 22 nt, Human
ccccaggacacauggaccaagu

SEQ ID NO: 316216 - RNA, 22 nt, Human
ugucugucugcaagccagaaag

SEQ ID NO: 316217 - RNA, 22 nt, Human
agcccagaggcugggcgugcau

SEQ ID NO: 316218 - RNA, 22 nt, Human
ggcugccuccugcugggcugga

SEQ ID NO: 316219 - RNA, 22 nt, Human
uuggcugaagguuaagugcugg

SEQ ID NO: 316220 - RNA, 22 nt, Human
gcucagagauggggaaugaaaa

SEQ ID NO: 316221 - RNA, 22 nt, Human
ccaggagcagggcuggcugcac

SEQ ID NO: 316222 - RNA, 22 nt, Human
gaggagaggggcucccaagagc

SEQ ID NO: 316223 - RNA, 22 nt, Human
agaaauguauucuguauguuuu

SEQ ID NO: 316224 - RNA, 22 nt, Human
uuccauaauuaaguggagagaa

SEQ ID NO: 316225 - RNA, 22 nt, Human
agaauaugaugguuggagaauu

SEQ ID NO: 316226 - RNA, 22 nt, Human
cagguggagcugacugagggca

SEQ ID NO: 316227 - RNA, 22 nt, Human
uucuggagagaaaccuuacaaa

SEQ ID NO: 316228 - RNA, 22 nt, Human
ccucccuuggccauagccagcc

SEQ ID NO: 316229 - RNA, 22 nt, Human
ucacacagauugguagagcuga

SEQ ID NO: 316230 - RNA, 22 nt, Human
ucugaggcuucagacuguacug

SEQ ID NO: 316231 - RNA, 22 nt, Human
cuacacaguucugccuaauggc

SEQ ID NO: 316232 - RNA, 22 nt, Human
ggggcagcucccgagggcagga

SEQ ID NO: 316233 - RNA, 22 nt, Human
ugggggucaggaugaggccuug

SEQ ID NO: 316234 - RNA, 22 nt, Human
cagcugaguuuccaagucugcc

SEQ ID NO: 316235 - RNA, 22 nt, Human
ucucacuggguauaaaugagua

SEQ ID NO: 316236 - RNA, 22 nt, Human
ccuaguccccaggaggucagug

SEQ ID NO: 316237 - RNA, 22 nt, Human
cucucaguaaauuucugcccca

SEQ ID NO: 316238 - RNA, 22 nt, Human
cuuuggaauauuuuauugagaa

SEQ ID NO: 316239 - RNA, 22 nt, Human
aaacagcuggucucaaauguuc

SEQ ID NO: 316240 - RNA, 22 nt, Human
gccaugcuugguaugcugugag

SEQ ID NO: 316241 - RNA, 22 nt, Human
agcaugcugguguucauggcag

SEQ ID NO: 316242 - RNA, 22 nt, Human
agucucugugagcucccaaugg

SEQ ID NO: 316243 - RNA, 22 nt, Human
uuggcauucaugggacaacaaa

SEQ ID NO: 316244 - RNA, 22 nt, Human
uccaugagacagauacuguaag

SEQ ID NO: 316245 - RNA, 20 nt, Human
acugagcugcauggagagga

SEQ ID NO: 316246 - RNA, 22 nt, Human
guuuuguugcugcagagcucaa

SEQ ID NO: 316247 - RNA, 22 nt, Human
uacauuguucaugcaugagaaa

SEQ ID NO: 316248 - RNA, 22 nt, Human
agcagaacugaugagacuugag

SEQ ID NO: 316249 - RNA, 22 nt, Human
uaccaggcagcugcacagaggc

SEQ ID NO: 316250 - RNA, 22 nt, Human
gaagcagccacggggagacaga

SEQ ID NO: 316251 - RNA, 22 nt, Human
auccagcuuugucuggucuucg

SEQ ID NO: 316252 - RNA, 22 nt, Human
caggaaauaucuccuggcagag

SEQ ID NO: 316253 - RNA, 22 nt, Human
uauuuugagguauuuuugagcu

SEQ ID NO: 316254 - RNA, 22 nt, Human
gccucacugcagccccaggaag

SEQ ID NO: 316255 - RNA, 18 nt, Human
gugggguguugugaggau

SEQ ID NO: 316256 - RNA, 17 nt, Human
ccaggugggaggugggg

SEQ ID NO: 316257 - RNA, 22 nt, Human
cucugggcuuguugaccugcac

SEQ ID NO: 316258 - RNA, 22 nt, Human
cuuccuuggcuucuggggugug

SEQ ID NO: 316259 - RNA, 22 nt, Human
cagugcauagauccugaggccu

SEQ ID NO: 316260 - RNA, 22 nt, Human
uguagcauguaaauugguuauu

SEQ ID NO: 316261 - RNA, 22 nt, Human
ucaccacugaacagaccuuugg

SEQ ID NO: 316262 - RNA, 22 nt, Human
augucacagucugacucaguga

SEQ ID NO: 316263 - RNA, 22 nt, Human
uuccucuccucccaccagguga

SEQ ID NO: 316264 - RNA, 22 nt, Human
ggcuagaauaauugacuucauu

SEQ ID NO: 316265 - RNA, 22 nt, Human
aaaugugucaguuucauucucu

SEQ ID NO: 316266 - RNA, 22 nt, Human
uaugagaaaggagaaugacuuu

SEQ ID NO: 316267 - RNA, 22 nt, Human
uggcucugcugaaccuagugca

SEQ ID NO: 316268 - RNA, 22 nt, Human
gcucagaaaagugaggcucagu

SEQ ID NO: 316269 - RNA, 22 nt, Human
caguccaggccuggaggagcca

SEQ ID NO: 316270 - RNA, 22 nt, Human
caaagcucaugcucuuagccau

SEQ ID NO: 316271 - RNA, 19 nt, Human
acauauguggauauacaug

SEQ ID NO: 316272 - RNA, 22 nt, Human
cugcagagguugguucuaagau

SEQ ID NO: 316273 - RNA, 22 nt, Human
cuggcagguuuggugucuggug

SEQ ID NO: 316274 - RNA, 22 nt, Human
cuucaguucuaaaguagaaugu

SEQ ID NO: 316275 - RNA, 22 nt, Human
ugcagccauuuucugccaaugc

SEQ ID NO: 316276 - RNA, 22 nt, Human
agcagcauagaagcugggagga

SEQ ID NO: 316277 - RNA, 19 nt, Human
cucucacucgccacauccu

SEQ ID NO: 316278 - RNA, 22 nt, Human
ugagccugggagauggaggcug

SEQ ID NO: 316279 - RNA, 22 nt, Human
ccuugcaggggaacaggcagug

SEQ ID NO: 316280 - RNA, 22 nt, Human
uaaguucaguuggucgaaguag

SEQ ID NO: 316281 - RNA, 22 nt, Human
aaguuucauguggagguagacu

SEQ ID NO: 316282 - RNA, 22 nt, Human
uuggcugagagaggaaaagggc

SEQ ID NO: 316283 - RNA, 22 nt, Human
aaauacauaaagguuguaccag

SEQ ID NO: 316284 - RNA, 21 nt, Human
accagcaggagaucagaagga

SEQ ID NO: 316285 - RNA, 20 nt, Human
agugcaagaaagcacagcug

SEQ ID NO: 316286 - RNA, 22 nt, Human
guaagagcacugucuccugcug

SEQ ID NO: 316287 - RNA, 22 nt, Human
gcugucacaucaaggcacuaaa

SEQ ID NO: 316288 - RNA, 22 nt, Human
ucugggaagcugguccuguucu

SEQ ID NO: 316289 - RNA, 22 nt, Human
uaguccaguaaaacagcuaacg

SEQ ID NO: 316290 - RNA, 22 nt, Human
aagagcugcaucuaagccauga

SEQ ID NO: 316291 - RNA, 22 nt, Human
cacagugugacugaccuucagc

SEQ ID NO: 316292 - RNA, 22 nt, Human
uuuaagaugguauuuuauaaag

SEQ ID NO: 316293 - RNA, 22 nt, Human
ggguuggggcccagcagucugc

SEQ ID NO: 316294 - RNA, 22 nt, Human
uuuaacagaugugaaauuuuca

SEQ ID NO: 316295 - RNA, 22 nt, Human
uggccugccucccggcuucuuu

SEQ ID NO: 316296 - RNA, 22 nt, Human
caguuucuuaucuucaaaauug

SEQ ID NO: 316297 - RNA, 22 nt, Human
agauuucccucuuguauuugca

SEQ ID NO: 316298 - RNA, 22 nt, Human
agcugccaaguuggaguagcaa

SEQ ID NO: 316299 - RNA, 22 nt, Human
cuuuccuagauggccaucuuuc

SEQ ID NO: 316300 - RNA, 22 nt, Human
aaggcugccucugccagaggag

SEQ ID NO: 316301 - RNA, 22 nt, Human
ucacagggcauuauggcuccag

SEQ ID NO: 316302 - RNA, 22 nt, Human
accagcucagaagccagaaaga

SEQ ID NO: 316303 - RNA, 20 nt, Human
aggcuccuguaccugaggaa

SEQ ID NO: 316304 - RNA, 22 nt, Human
ugagaaagacagacauuccuaa

SEQ ID NO: 316305 - RNA, 19 nt, Human
ucgagucaagacacuaggc

SEQ ID NO: 316306 - RNA, 22 nt, Human
aauacugucuuucacagauauu

SEQ ID NO: 316307 - RNA, 19 nt, Human
ucugccucuggucaggcuc

SEQ ID NO: 316308 - RNA, 22 nt, Human
ggcugccuacuuucccagaguu

SEQ ID NO: 316309 - RNA, 22 nt, Human
cucaggccugaguggcaguccc

SEQ ID NO: 316310 - RNA, 22 nt, Human
gcaggaugggagcuucacucug

SEQ ID NO: 316311 - RNA, 22 nt, Human
caggagugcagguggugaggca

SEQ ID NO: 316312 - RNA, 18 nt, Human
agcugcagaccaggaggu

SEQ ID NO: 316313 - RNA, 22 nt, Human
ucugcagcuucuugccagagag

SEQ ID NO: 316314 - RNA, 22 nt, Human
cugacucugacaggacuugugg

SEQ ID NO: 316315 - RNA, 22 nt, Human
ugcagagcuucauugcauaggc

SEQ ID NO: 316316 - RNA, 22 nt, Human
agagggagcccagucauagcug

SEQ ID NO: 316317 - RNA, 22 nt, Human
uuguuuguaaggcucuuagaau

SEQ ID NO: 316318 - RNA, 22 nt, Human
gaggcaugucuggccuguccca

SEQ ID NO: 316319 - RNA, 22 nt, Human
aucuuguuaaaaugcagaaacu

SEQ ID NO: 316320 - RNA, 22 nt, Human
uccuucuuucccccuagucauu

SEQ ID NO: 316321 - RNA, 22 nt, Human
ugaagcagaggggucuugagcu

SEQ ID NO: 316322 - RNA, 22 nt, Human
aucugccuggcuccaggugagc

SEQ ID NO: 316323 - RNA, 22 nt, Human
uccaggcuggacaugaggcggg

SEQ ID NO: 316324 - RNA, 22 nt, Human
uguuuuaagagcgcacuuuaua

SEQ ID NO: 316325 - RNA, 22 nt, Human
ucagcagucacauguuguccca

SEQ ID NO: 316326 - RNA, 21 nt, Human
gagugcaggucugaugccauc

SEQ ID NO: 316327 - RNA, 22 nt, Human
cccagggcccuggacagcuaca

SEQ ID NO: 316328 - RNA, 22 nt, Human
cauacauuuugcauauuuacca

SEQ ID NO: 316329 - RNA, 22 nt, Human
cugcuguguggugaaacucagu

SEQ ID NO: 316330 - RNA, 18 nt, Human
gggcuguguucaugccca

SEQ ID NO: 316331 - RNA, 22 nt, Human
gcaggggaguccacucuaugca

SEQ ID NO: 316332 - RNA, 22 nt, Human
ggggcagagaauaaaaaccuaa

SEQ ID NO: 316333 - RNA, 19 nt, Human
acacugaauguagaauugg

SEQ ID NO: 316334 - RNA, 22 nt, Human
gugacagaguuuuagaucucau

SEQ ID NO: 316335 - RNA, 22 nt, Human
ugaaggagggaagaaggcucug

SEQ ID NO: 316336 - RNA, 22 nt, Human
gcaguguugagugguggcugaa

SEQ ID NO: 316337 - RNA, 22 nt, Human
cagacaugauguaagcagaggc

SEQ ID NO: 316338 - RNA, 22 nt, Human
caggggacaguaugguggauga

SEQ ID NO: 316339 - RNA, 22 nt, Human
agcugaugccauguggaacagu

SEQ ID NO: 316340 - RNA, 18 nt, Human
gcagcugacacuggaguu

SEQ ID NO: 316341 - RNA, 22 nt, Human
uauuuagaaugcguguacgugu

SEQ ID NO: 316342 - RNA, 22 nt, Human
gcaaggcuuugugaauuuuaaa

SEQ ID NO: 316343 - RNA, 22 nt, Human
uaucaauacauguuaucagugu

SEQ ID NO: 316344 - RNA, 22 nt, Human
uauuccaguccuauccucuuuu

SEQ ID NO: 316345 - RNA, 22 nt, Human
aagcagccuggacuugggcugg

SEQ ID NO: 316346 - RNA, 22 nt, Human
cugagguguugaugaccuaugc

SEQ ID NO: 316347 - RNA, 22 nt, Human
uagcagggaaggugugcugagc

SEQ ID NO: 316348 - RNA, 22 nt, Human
caggcagcaggagcccugcucg

SEQ ID NO: 316349 - RNA, 22 nt, Human
aggcacugagaggcuguguugc

SEQ ID NO: 316350 - RNA, 22 nt, Human
ucaggcuggaaugcaguggggc

SEQ ID NO: 316351 - RNA, 22 nt, Human
ugucagugguagacccagaggu

SEQ ID NO: 316352 - RNA, 22 nt, Human
agaauccuguuuuacuucauca

SEQ ID NO: 316353 - RNA, 22 nt, Human
ggccgggcaggucucagccagc

SEQ ID NO: 316354 - RNA, 22 nt, Human
ucacagacauggugagguaaca

SEQ ID NO: 316355 - RNA, 22 nt, Human
gaaugugucacccugucccaug

SEQ ID NO: 316356 - RNA, 22 nt, Human
agggaauguagcaagaugccaa

SEQ ID NO: 316357 - RNA, 22 nt, Human
acacuagcuaaaugcugauuaa

SEQ ID NO: 316358 - RNA, 22 nt, Human
cuuuggcaaugucauuuucaau

SEQ ID NO: 316359 - RNA, 22 nt, Human
ccucaggaaaugaauaaauggc

SEQ ID NO: 316360 - RNA, 22 nt, Human
uuuauguuugacaaugaucugg

SEQ ID NO: 316361 - RNA, 22 nt, Human
cuggugcuggagccuagucccu

SEQ ID NO: 316362 - RNA, 22 nt, Human
gcagaacauuucacaguaucuu

SEQ ID NO: 316363 - RNA, 22 nt, Human
ucugggaacugagcuccccuag

SEQ ID NO: 316364 - RNA, 22 nt, Human
uucuuacagcccuauuacuaaa

SEQ ID NO: 316365 - RNA, 22 nt, Human
gcaagcugcuuaagcucauugu

SEQ ID NO: 316366 - RNA, 22 nt, Human
ucaugaaucguggaaugauuua

SEQ ID NO: 316367 - RNA, 19 nt, Human
gcuccugggccucacucau

SEQ ID NO: 316368 - RNA, 22 nt, Human
ccugagagcagcuuccugcuua

SEQ ID NO: 316369 - RNA, 22 nt, Human
aagaauguuaguuucugauaca

SEQ ID NO: 316370 - RNA, 22 nt, Human
ggcagagcuuguuccuucuguu

SEQ ID NO: 316371 - RNA, 22 nt, Human
gaggccuggugugucucccgcu

SEQ ID NO: 316372 - RNA, 22 nt, Human
gcaguguugugauccaggucuu

SEQ ID NO: 316373 - RNA, 22 nt, Human
uguacacaauucuuaacauaca

SEQ ID NO: 316374 - RNA, 22 nt, Human
acagaugaauuuuaauuguguu

SEQ ID NO: 316375 - RNA, 22 nt, Human
ucacaggacccugaggguggcg

SEQ ID NO: 316376 - RNA, 22 nt, Human
ugggccugggcuccuguccucu

SEQ ID NO: 316377 - RNA, 22 nt, Human
agaacagaugugggcagaccug

SEQ ID NO: 316378 - RNA, 22 nt, Human
cccugguguccacuggaggaag

SEQ ID NO: 316379 - RNA, 22 nt, Human
agugucugccaacugcaugguc

SEQ ID NO: 316380 - RNA, 22 nt, Human
guuauaaaaugcacaguuguuu

SEQ ID NO: 316381 - RNA, 22 nt, Human
aagcugaggcccauggcaaggu

SEQ ID NO: 316382 - RNA, 22 nt, Human
cccuggaggaaaaucugaggcu

SEQ ID NO: 316383 - RNA, 22 nt, Human
uagucucuggagacucuagggg

SEQ ID NO: 316384 - RNA, 22 nt, Human
uugaaucucuugaaucucuguu

SEQ ID NO: 316385 - RNA, 22 nt, Human
ucagcaaugagaacuggcauuu

SEQ ID NO: 316386 - RNA, 22 nt, Human
aggucaaaccacagcucuaggc

SEQ ID NO: 316387 - RNA, 22 nt, Human
gaaagaagcuuuagauggcuau

SEQ ID NO: 316388 - RNA, 22 nt, Human
agcagcugggcucagagcuggg

SEQ ID NO: 316389 - RNA, 22 nt, Human
uuaggaaauuaugguuucagau

SEQ ID NO: 316390 - RNA, 22 nt, Human
aaaaugugcaguuuuuaagcug

SEQ ID NO: 316391 - RNA, 22 nt, Human
auuuucugguugagguuuaaca

SEQ ID NO: 316392 - RNA, 22 nt, Human
gcucuggguagccacugccugg

SEQ ID NO: 316393 - RNA, 22 nt, Human
ggagcugcucagagccaguccc

SEQ ID NO: 316394 - RNA, 20 nt, Human
gcccaagguccagaaggggg

SEQ ID NO: 316395 - RNA, 22 nt, Human
uuucagaugcaauuaauuuuca

SEQ ID NO: 316396 - RNA, 22 nt, Human
ucaggaucaggggccuuuccuu

SEQ ID NO: 316397 - RNA, 22 nt, Human
accucaggauguggacacagaa

SEQ ID NO: 316398 - RNA, 22 nt, Human
ggugccaggcucccagcucagg

SEQ ID NO: 316399 - RNA, 22 nt, Human
uuagccauuaauguccugugca

SEQ ID NO: 316400 - RNA, 17 nt, Human
uagagcugguucaggag

SEQ ID NO: 316401 - RNA, 22 nt, Human
gcccuggccuucaucucagaca

SEQ ID NO: 316402 - RNA, 22 nt, Human
ugggcagacgggagcuugccuu

SEQ ID NO: 316403 - RNA, 22 nt, Human
ccagagugacgugaagugugaa

SEQ ID NO: 316404 - RNA, 22 nt, Human
gcuguucauagaaauggucuca

SEQ ID NO: 316405 - RNA, 22 nt, Human
uccaguccuaucugcccuugga

SEQ ID NO: 316406 - RNA, 22 nt, Human
aauaauuagugggacagagaac

SEQ ID NO: 316407 - RNA, 22 nt, Human
cugagcauggccgguccauggu

SEQ ID NO: 316408 - RNA, 22 nt, Human
cucuucuugcuagacugagugc

SEQ ID NO: 316409 - RNA, 20 nt, Human
cagucccaauccagggccag

SEQ ID NO: 316410 - RNA, 22 nt, Human
agcaccugcuaugugucaggga

SEQ ID NO: 316411 - RNA, 22 nt, Human
gaaucucaguggaagcaggaag

SEQ ID NO: 316412 - RNA, 22 nt, Human
agggggaguuucaguuagaaag

SEQ ID NO: 316413 - RNA, 22 nt, Human
uaaagaugcccacauugcaggu

SEQ ID NO: 316414 - RNA, 22 nt, Human
uugacacagaucaauauucaac

SEQ ID NO: 316415 - RNA, 20 nt, Human
ugcuugucaugcacucaggc

SEQ ID NO: 316416 - RNA, 19 nt, Human
uccccagcaccucugaguc

SEQ ID NO: 316417 - RNA, 22 nt, Human
aacagcaauagcacuauucauu

SEQ ID NO: 316418 - RNA, 21 nt, Human
cagagcuguccaaacccugac

SEQ ID NO: 316419 - RNA, 22 nt, Human
cccuggagugccggaaucaaga

SEQ ID NO: 316420 - RNA, 22 nt, Human
agcugcugcggaaagaugccac

SEQ ID NO: 316421 - RNA, 22 nt, Human
uugaaagaggcaaaguuugauc

SEQ ID NO: 316422 - RNA, 20 nt, Human
uucuuucaucuacacguugu

SEQ ID NO: 316423 - RNA, 19 nt, Human
cccuggcaggcaagccugg

SEQ ID NO: 316424 - RNA, 17 nt, Human
gcuggcugacccaugcc

SEQ ID NO: 316425 - RNA, 22 nt, Human
ugaaggccacuuccugugagcu

SEQ ID NO: 316426 - RNA, 22 nt, Human
cugcuguguuagcagguuuagu

SEQ ID NO: 316427 - RNA, 22 nt, Human
aaggcacugacugugcagggga

SEQ ID NO: 316428 - RNA, 22 nt, Human
uaugcacagaaguuugcugaau

SEQ ID NO: 316429 - RNA, 22 nt, Human
uucuucuuuccuauaauuaauu

SEQ ID NO: 316430 - RNA, 22 nt, Human
ccagucacagguguguuuauau

SEQ ID NO: 316431 - RNA, 22 nt, Human
ggcucugcccagaugaagagga

SEQ ID NO: 316432 - RNA, 20 nt, Human
ugggccugagccugugggcu

SEQ ID NO: 316433 - RNA, 22 nt, Human
cuggccugugggcugucuccgg

SEQ ID NO: 316434 - RNA, 22 nt, Human
uugaaauacugcauuguucagu

SEQ ID NO: 316435 - RNA, 22 nt, Human
aucaggauagucuguaaauugu

SEQ ID NO: 316436 - RNA, 22 nt, Human
gcagggccagugcagagaggaa

SEQ ID NO: 316437 - RNA, 22 nt, Human
gggcagcagaggaucccuuaau

SEQ ID NO: 316438 - RNA, 22 nt, Human
aauccagcacauggacacaguc

SEQ ID NO: 316439 - RNA, 22 nt, Human
ucucagaggcccgacguucucc

SEQ ID NO: 316440 - RNA, 23 nt, Human
auucuucauuaucuucuagaaaa

SEQ ID NO: 316441 - RNA, 22 nt, Human
agauuucccaaauacuuguuau

SEQ ID NO: 316442 - RNA, 22 nt, Human
uggcuucuuagaccaguggccu

SEQ ID NO: 316443 - RNA, 22 nt, Human
gaagaacaagcagugcuuuccu

SEQ ID NO: 316444 - RNA, 21 nt, Human
agaaaaguagaguuuucagag

SEQ ID NO: 316445 - RNA, 22 nt, Human
gauuucaaccuaacaguaugac

SEQ ID NO: 316446 - RNA, 22 nt, Human
agugucuuugacacauucaaag

SEQ ID NO: 316447 - RNA, 22 nt, Human
cuuugaaaggaagccacacagc

SEQ ID NO: 316448 - RNA, 22 nt, Human
gcugcugucagugguggcaguu

SEQ ID NO: 316449 - RNA, 22 nt, Human
ugcucugguaacucacuuccau

SEQ ID NO: 316450 - RNA, 22 nt, Human
ugcugaggucaccuugcugcua

SEQ ID NO: 316451 - RNA, 22 nt, Human
gagggggcgugcaaggcuccgc

SEQ ID NO: 316452 - RNA, 22 nt, Human
ucugggcccuaaaccagcucua

SEQ ID NO: 316453 - RNA, 22 nt, Human
aggacuucaucaccuguauaaa

SEQ ID NO: 316454 - RNA, 22 nt, Human
ccuguucaaugcccuggcuuca

SEQ ID NO: 316455 - RNA, 22 nt, Human
cugcagcuauauuuucccacag

SEQ ID NO: 316456 - RNA, 22 nt, Human
ugcagggcuacaggacuacaac

SEQ ID NO: 316457 - RNA, 22 nt, Human
aaaggccaugguuggaguguuu

SEQ ID NO: 316458 - RNA, 22 nt, Human
gcauuauuaauagcugcaugag

SEQ ID NO: 316459 - RNA, 22 nt, Human
ugcccaaguguuuggcugaguc

SEQ ID NO: 316460 - RNA, 22 nt, Human
ccucagcucuucccugugcaca

SEQ ID NO: 316461 - RNA, 20 nt, Human
ccuccaggcacacccaugug

SEQ ID NO: 316462 - RNA, 21 nt, Human
ucaggcaggcgcagagggaag

SEQ ID NO: 316463 - RNA, 22 nt, Human
ccucuggggugagugggccacu

SEQ ID NO: 316464 - RNA, 22 nt, Human
agaccgagaaguucuccaggcc

SEQ ID NO: 316465 - RNA, 22 nt, Human
aagcugccagcugagcugaggc

SEQ ID NO: 316466 - RNA, 22 nt, Human
agagaagggccuguauguaauc

SEQ ID NO: 316467 - RNA, 22 nt, Human
ggcuggucacaccacugcaggg

SEQ ID NO: 316468 - RNA, 22 nt, Human
ucuucagagugaaagucuguga

SEQ ID NO: 316469 - RNA, 22 nt, Human
gaggccuggguuggaggugcau

SEQ ID NO: 316470 - RNA, 22 nt, Human
uggcagaguuauggguauuuau

SEQ ID NO: 316471 - RNA, 22 nt, Human
cucagaauuuagggcucugagg

SEQ ID NO: 316472 - RNA, 22 nt, Human
ucuucuccagugcuucugcaca

SEQ ID NO: 316473 - RNA, 22 nt, Human
uuuucuuauggugaagcacaaa

SEQ ID NO: 316474 - RNA, 22 nt, Human
aaagaauagccuuuguccaaau

SEQ ID NO: 316475 - RNA, 21 nt, Human
agcaccuuacagcuauaaugg

SEQ ID NO: 316476 - RNA, 22 nt, Human
ggcagugaaaaaguauguuucc

SEQ ID NO: 316477 - RNA, 22 nt, Human
ccagcagacacacaggcguggg

SEQ ID NO: 316478 - RNA, 22 nt, Human
acagagcaugcucaguguguga

SEQ ID NO: 316479 - RNA, 22 nt, Human
agcauuuaugacuaauguaaaa

SEQ ID NO: 316480 - RNA, 22 nt, Human
agaugaaaauacgugacuuuaa

SEQ ID NO: 316481 - RNA, 22 nt, Human
ggcuucugguaaagaccacacc

SEQ ID NO: 316482 - RNA, 22 nt, Human
gauuucuucauucauuagaugg

SEQ ID NO: 316483 - RNA, 22 nt, Human
uggcagcuccggguaggggcug

SEQ ID NO: 316484 - RNA, 22 nt, Human
ugcauuguugaccaguugugca

SEQ ID NO: 316485 - RNA, 22 nt, Human
uacaguaacauguuguacaagc

SEQ ID NO: 316486 - RNA, 22 nt, Human
uucuuuccaaccagauauuggu

SEQ ID NO: 316487 - RNA, 22 nt, Human
aaaguggucaccuucucauuuc

SEQ ID NO: 316488 - RNA, 19 nt, Human
aucugccuguuaucacaua

SEQ ID NO: 316489 - RNA, 22 nt, Human
augaaacaugagaaauggagag

SEQ ID NO: 316490 - RNA, 22 nt, Human
gccagagcacaggcugguagua

SEQ ID NO: 316491 - RNA, 22 nt, Human
cagagccugcucacgucucugu

SEQ ID NO: 316492 - RNA, 22 nt, Human
gucucaguaagaaaggcuccug

SEQ ID NO: 316493 - RNA, 22 nt, Human
ccaggcagcaaauuuucugaau

SEQ ID NO: 316494 - RNA, 22 nt, Human
ugucauuuaguccucugugugu

SEQ ID NO: 316495 - RNA, 22 nt, Human
guuccuuguaauuuguuaagga

SEQ ID NO: 316496 - RNA, 22 nt, Human
uauguacauaacaugaaaugca

SEQ ID NO: 316497 - RNA, 21 nt, Human
aucauucuggaaaauucaagc

SEQ ID NO: 316498 - RNA, 22 nt, Human
ugucaaaaugacuuuacuacag

SEQ ID NO: 316499 - RNA, 22 nt, Human
auuguaaguagaaauguuaugg

SEQ ID NO: 316500 - RNA, 22 nt, Human
gggugaggcccauuugaggcca

SEQ ID NO: 316501 - RNA, 22 nt, Human
uagggcuauaagagaauaagac

SEQ ID NO: 316502 - RNA, 22 nt, Human
cauaagaaauaaugaugaugac

SEQ ID NO: 316503 - RNA, 22 nt, Human
ggugucccaggccagcugugug

SEQ ID NO: 316504 - RNA, 19 nt, Human
cauuuuaagcauccccagu

SEQ ID NO: 316505 - RNA, 22 nt, Human
caccaggcacauaguaggcacu

SEQ ID NO: 316506 - RNA, 22 nt, Human
uucuugaaucacuuuagagaua

SEQ ID NO: 316507 - RNA, 22 nt, Human
ugucaugccauuuaaaauguuu

SEQ ID NO: 316508 - RNA, 22 nt, Human
gagugcagaugaacagaagauu

SEQ ID NO: 316509 - RNA, 22 nt, Human
guccucagucaguuuggugggg

SEQ ID NO: 316510 - RNA, 22 nt, Human
ucaaauguucccuguacuggcc

SEQ ID NO: 316511 - RNA, 22 nt, Human
aguuuuucugcuggucucacua

SEQ ID NO: 316512 - RNA, 22 nt, Human
aguuuuuccugauuuuacagaa

SEQ ID NO: 316513 - RNA, 21 nt, Human
cagcaaaucauugggcagacu

SEQ ID NO: 316514 - RNA, 18 nt, Human
gucuggaggucaggagcu

SEQ ID NO: 316515 - RNA, 22 nt, Human
gggcuggcaucgguugcugaga

SEQ ID NO: 316516 - RNA, 22 nt, Human
ugaugguugauuauaaaucagu

SEQ ID NO: 316517 - RNA, 22 nt, Human
ggcagcucugugucugggaagc

SEQ ID NO: 316518 - RNA, 15 nt, Human
ugauuuccuacuaac

SEQ ID NO: 316519 - RNA, 22 nt, Human
gugcugcucacaucuggaggua

SEQ ID NO: 316520 - RNA, 22 nt, Human
aggggcucaguuacuuuggcag

SEQ ID NO: 316521 - RNA, 22 nt, Human
uagcugccuuugggcuccugcu

SEQ ID NO: 316522 - RNA, 22 nt, Human
aagguacaaaguauuauuuaaa

SEQ ID NO: 316523 - RNA, 22 nt, Human
guccucugcuucaugcccugau

SEQ ID NO: 316524 - RNA, 22 nt, Human
aacaucuuuuuguuugcugaaa

SEQ ID NO: 316525 - RNA, 22 nt, Human
caaagggcucuagacucagcag

SEQ ID NO: 316526 - RNA, 22 nt, Human
cggagcugccugccaagccugc

SEQ ID NO: 316527 - RNA, 22 nt, Human
cagccuggauugcagaaugcua

SEQ ID NO: 316528 - RNA, 22 nt, Human
gaagccaagugcaaaugccuua

SEQ ID NO: 316529 - RNA, 22 nt, Human
gagcugggagcugggauuugga

SEQ ID NO: 316530 - RNA, 22 nt, Human
acugugcaaugaguaauaaacu

SEQ ID NO: 316531 - RNA, 22 nt, Human
guuuuauaggugaaauauuacu

SEQ ID NO: 316532 - RNA, 22 nt, Human
guaucuuucccaccaaucacaa

SEQ ID NO: 316533 - RNA, 22 nt, Human
uaaauguguuguggaugaaguu

SEQ ID NO: 316534 - RNA, 22 nt, Human
aagcagugcgcucaucuaaggg

SEQ ID NO: 316535 - RNA, 17 nt, Human
ugaaggccaugaccacg

SEQ ID NO: 316536 - RNA, 22 nt, Human
cauugacaucaggcuuggccaa

SEQ ID NO: 316537 - RNA, 22 nt, Human
caggccuggagugcaauggcac

SEQ ID NO: 316538 - RNA, 22 nt, Human
gcuguucccauguggggcucag

SEQ ID NO: 316539 - RNA, 22 nt, Human
auguuucaccagcaaauuaccu

SEQ ID NO: 316540 - RNA, 22 nt, Human
cuggacuuuggcccaucugcca

SEQ ID NO: 316541 - RNA, 22 nt, Human
uauguccugcuacucucucaug

SEQ ID NO: 316542 - RNA, 22 nt, Human
ugcugcugaucauuuauagucu

SEQ ID NO: 316543 - RNA, 22 nt, Human
acauuuaggauguuuugagaga

SEQ ID NO: 316544 - RNA, 22 nt, Human
gagugagggcagcaggggcugc

SEQ ID NO: 316545 - RNA, 22 nt, Human
gcugcucuuuucagagaugaga

SEQ ID NO: 316546 - RNA, 22 nt, Human
agagcuggcagcagcuucuccu

SEQ ID NO: 316547 - RNA, 22 nt, Human
aacuacauuguccuuucugaag

SEQ ID NO: 316548 - RNA, 22 nt, Human
uuaaugcagaaaucaaacugac

SEQ ID NO: 316549 - RNA, 20 nt, Human
uacaaaccuccacacuggug

SEQ ID NO: 316550 - RNA, 23 nt, Human
gcugucaguuguuuuugucucua

SEQ ID NO: 316551 - RNA, 22 nt, Human
cuggggcuggugaggcaggcuc

SEQ ID NO: 316552 - RNA, 22 nt, Human
agaaacugaauuauuucugagg

SEQ ID NO: 316553 - RNA, 22 nt, Human
gauuuauuggucuuucauuggu

SEQ ID NO: 316554 - RNA, 22 nt, Human
gugcugggcccugagaccaggg

SEQ ID NO: 316555 - RNA, 22 nt, Human
ggagccuggucagguuggcucc

SEQ ID NO: 316556 - RNA, 22 nt, Human
agggggugcauuugugaaugaa

SEQ ID NO: 316557 - RNA, 19 nt, Human
acagaagcauagaaaagga

SEQ ID NO: 316558 - RNA, 22 nt, Human
aauguucagaggacaauauaaa

SEQ ID NO: 316559 - RNA, 22 nt, Human
uugaagagugccuuccagacau

SEQ ID NO: 316560 - RNA, 22 nt, Human
uggcucagcugucacagccugg

SEQ ID NO: 316561 - RNA, 22 nt, Human
gcagggacaaggcagguguucu

SEQ ID NO: 316562 - RNA, 22 nt, Human
uucaagauggcugcaaauacuu

SEQ ID NO: 316563 - RNA, 22 nt, Human
caggucagagucccccuguccu

SEQ ID NO: 316564 - RNA, 22 nt, Human
caauacuuccuuguuagaggca

SEQ ID NO: 316565 - RNA, 22 nt, Human
caggccugacccugagcuucac

SEQ ID NO: 316566 - RNA, 22 nt, Human
uggccugguuauauugcuauca

SEQ ID NO: 316567 - RNA, 22 nt, Human
acaguguuuucuuaaggagaaa

SEQ ID NO: 316568 - RNA, 22 nt, Human
agggugggcuagacucuucccc

SEQ ID NO: 316569 - RNA, 22 nt, Human
aauucuauaggcaagcuauuuu

SEQ ID NO: 316570 - RNA, 22 nt, Human
acauugaucagccucccaugca

SEQ ID NO: 316571 - RNA, 22 nt, Human
ugcuggcccaguauggacugca

SEQ ID NO: 316572 - RNA, 18 nt, Human
acaaauguagugucuuaa

SEQ ID NO: 316573 - RNA, 22 nt, Human
ccucccagugccuccagagcag

SEQ ID NO: 316574 - RNA, 22 nt, Human
ucugggugaugaaaugcacugu

SEQ ID NO: 316575 - RNA, 22 nt, Human
uccaggagguuuggaggaagca

SEQ ID NO: 316576 - RNA, 22 nt, Human
caggugcugcguggcggagcug

SEQ ID NO: 316577 - RNA, 22 nt, Human
aaguuugacagaaguuucuaau

SEQ ID NO: 316578 - RNA, 22 nt, Human
ggagccuuccagacugcccaca

SEQ ID NO: 316579 - RNA, 22 nt, Human
aucuggcucacuuagucuagga

SEQ ID NO: 316580 - RNA, 22 nt, Human
gcagcuuggugaaaggugaugg

SEQ ID NO: 316581 - RNA, 22 nt, Human
cucucugagugagggacaagcu

SEQ ID NO: 316582 - RNA, 22 nt, Human
uacccagcuucaagucaggacu

SEQ ID NO: 316583 - RNA, 22 nt, Human
cugcagaggguuugagcauccu

SEQ ID NO: 316584 - RNA, 22 nt, Human
uuccuugaaugagucauggaaa

SEQ ID NO: 316585 - RNA, 22 nt, Human
uggcucuguuuguuaacuagac

SEQ ID NO: 316586 - RNA, 22 nt, Human
ugcagucuuccagcugcacaaa

SEQ ID NO: 316587 - RNA, 22 nt, Human
uuucugugguggguaguucaga

SEQ ID NO: 316588 - RNA, 22 nt, Human
aauguuguuuuucugcaugucu

SEQ ID NO: 316589 - RNA, 22 nt, Human
cccuccagagcuugaccugcug

SEQ ID NO: 316590 - RNA, 22 nt, Human
uuuuuccuuagggguuacucac

SEQ ID NO: 316591 - RNA, 22 nt, Human
aagaugcuuauugcuccugcag

SEQ ID NO: 316592 - RNA, 20 nt, Human
uggagccacagucagguucc

SEQ ID NO: 316593 - RNA, 22 nt, Human
ggggaagaggcgugauggaucc

SEQ ID NO: 316594 - RNA, 22 nt, Human
acauaugugcuuauauccauga

SEQ ID NO: 316595 - RNA, 22 nt, Human
agaggcaguauacaauccgagc

SEQ ID NO: 316596 - RNA, 22 nt, Human
cuggagcccaggccuggugucu

SEQ ID NO: 316597 - RNA, 22 nt, Human
caguauguacucuuaucaugua

SEQ ID NO: 316598 - RNA, 22 nt, Human
caaaucuauauguugauauucu

SEQ ID NO: 316599 - RNA, 22 nt, Human
agauacauagcugugagcacac

SEQ ID NO: 316600 - RNA, 22 nt, Human
ccuggcucuguccucgcgcaaa

SEQ ID NO: 316601 - RNA, 22 nt, Human
caguccugagcuccugggcuga

SEQ ID NO: 316602 - RNA, 22 nt, Human
agagcugaauuuggguggugga

SEQ ID NO: 316603 - RNA, 22 nt, Human
ugcuggccaacaaggcuccaag

SEQ ID NO: 316604 - RNA, 22 nt, Human
cauuguauugaggauacuuaag

SEQ ID NO: 316605 - RNA, 22 nt, Human
agaggggcucauauccugucau

SEQ ID NO: 316606 - RNA, 22 nt, Human
cagcagcuucuguugaucagaa

SEQ ID NO: 316607 - RNA, 22 nt, Human
caagugucuauaucagugcuug

SEQ ID NO: 316608 - RNA, 22 nt, Human
ggaggaugccaagcugugcaca

SEQ ID NO: 316609 - RNA, 22 nt, Human
ggaggcucccacgcagcucaca

SEQ ID NO: 316610 - RNA, 22 nt, Human
gcauaugaucacgugugucggu

SEQ ID NO: 316611 - RNA, 22 nt, Human
uggggcuggggaucuugagccu

SEQ ID NO: 316612 - RNA, 22 nt, Human
ccucacucugcacccugcagca

SEQ ID NO: 316613 - RNA, 22 nt, Human
cuggccuuuaaaaugaccuuau

SEQ ID NO: 316614 - RNA, 19 nt, Human
cagaguccuugaccagucc

SEQ ID NO: 316615 - RNA, 21 nt, Human
ucccugcuuucuggcccaguc

SEQ ID NO: 316616 - RNA, 22 nt, Human
uaaaugaagaaauggagauugu

SEQ ID NO: 316617 - RNA, 22 nt, Human
gccaggcuccaggcccuccuga

SEQ ID NO: 316618 - RNA, 22 nt, Human
uucucuggaacugaaacaagau

SEQ ID NO: 316619 - RNA, 22 nt, Human
aucaaaguggaaguuuacuagg

SEQ ID NO: 316620 - RNA, 22 nt, Human
aaaggagaguagguuacuccau

SEQ ID NO: 316621 - RNA, 22 nt, Human
ugcaggcaggggaugagcagcc

SEQ ID NO: 316622 - RNA, 23 nt, Human
cugcuguuuucuguaccugaagc

SEQ ID NO: 316623 - RNA, 22 nt, Human
uuccaggaggcacugacagagg

SEQ ID NO: 316624 - RNA, 22 nt, Human
augauucagcaauuuuauaucu

SEQ ID NO: 316625 - RNA, 17 nt, Human
ugagacagggcaggccc

SEQ ID NO: 316626 - RNA, 22 nt, Human
aagggcagcugacagaugcuua

SEQ ID NO: 316627 - RNA, 22 nt, Human
cugcagcuccccugagaucaag

SEQ ID NO: 316628 - RNA, 22 nt, Human
uagcauuaucugucuuaucauu

SEQ ID NO: 316629 - RNA, 22 nt, Human
gaugaggggucauuggcuggga

SEQ ID NO: 316630 - RNA, 22 nt, Human
ggcugccuucagacuccagcuu

SEQ ID NO: 316631 - RNA, 22 nt, Human
uuauuuacaacucuucucuucc

SEQ ID NO: 316632 - RNA, 23 nt, Human
cuggcuccgaagacuccaggauc

SEQ ID NO: 316633 - RNA, 22 nt, Human
cucuuaguaaugccaugaagca

SEQ ID NO: 316634 - RNA, 22 nt, Human
gagagcugugguuugaccaggc

SEQ ID NO: 316635 - RNA, 22 nt, Human
aggcagcuggcagcacccaggg

SEQ ID NO: 316636 - RNA, 22 nt, Human
uggacaggaucugagacugaga

SEQ ID NO: 316637 - RNA, 22 nt, Human
ggaggccaugaggcucuaggug

SEQ ID NO: 316638 - RNA, 22 nt, Human
aauaacuucauguaacauuuaa

SEQ ID NO: 316639 - RNA, 22 nt, Human
cacagaauuaagggagaaauau

SEQ ID NO: 316640 - RNA, 23 nt, Human
ucacaggggccagcgcucugugg

SEQ ID NO: 316641 - RNA, 22 nt, Human
ugccaggcgugguggugcgcac

SEQ ID NO: 316642 - RNA, 22 nt, Human
uuuauguaaguggaaugaugcc

SEQ ID NO: 316643 - RNA, 22 nt, Human
uuucaugagauuccuccacauc

SEQ ID NO: 316644 - RNA, 22 nt, Human
caccugagugucaguauucuca

SEQ ID NO: 316645 - RNA, 19 nt, Human
ggggagaacuagagacagc

SEQ ID NO: 316646 - RNA, 22 nt, Human
ugacagcugagccccaggcaag

SEQ ID NO: 316647 - RNA, 22 nt, Human
ugaaggaaaugacggcagaaga

SEQ ID NO: 316648 - RNA, 22 nt, Human
gaggcaggcagauugcuugagg

SEQ ID NO: 316649 - RNA, 22 nt, Human
cacugucuuuugugaagacaau

SEQ ID NO: 316650 - RNA, 22 nt, Human
uaacacauuuuaagccauuuua

SEQ ID NO: 316651 - RNA, 22 nt, Human
aguguguccagaaaucuguauu

SEQ ID NO: 316652 - RNA, 22 nt, Human
aucauccuagaaggaagcuagg

SEQ ID NO: 316653 - RNA, 22 nt, Human
uaguccauuuucacacugcuga

SEQ ID NO: 316654 - RNA, 22 nt, Human
agcagauguuucagagcaggcu

SEQ ID NO: 316655 - RNA, 22 nt, Human
gagagggccgggggccagcucc

SEQ ID NO: 316656 - RNA, 22 nt, Human
uaguauuuaaucacuuuugucu

SEQ ID NO: 316657 - RNA, 22 nt, Human
agcagggcuuugcagacuuggg

SEQ ID NO: 316658 - RNA, 22 nt, Human
gacuuucucuccucccaggugu

SEQ ID NO: 316659 - RNA, 22 nt, Human
uccaugaggcagggaggcuggc

SEQ ID NO: 316660 - RNA, 22 nt, Human
aguccaugguucugacucaucu

SEQ ID NO: 316661 - RNA, 22 nt, Human
ucuggccugaaaguccaugcuu

SEQ ID NO: 316662 - RNA, 22 nt, Human
cccuguggaggcagcauccugc

SEQ ID NO: 316663 - RNA, 20 nt, Human
ggucccugcccucugucauc

SEQ ID NO: 316664 - RNA, 20 nt, Human
ucauuguguugccaauuccc

SEQ ID NO: 316665 - RNA, 22 nt, Human
gcucagugugguccucagaugu

SEQ ID NO: 316666 - RNA, 21 nt, Human
gcagccagccgagaccaugcc

SEQ ID NO: 316667 - RNA, 22 nt, Human
gcugagagcaaagcaugucuag

SEQ ID NO: 316668 - RNA, 23 nt, Human
acagacaacacugaugagagaaa

SEQ ID NO: 316669 - RNA, 22 nt, Human
agcagagcggggccuccggaag

SEQ ID NO: 316670 - RNA, 22 nt, Human
gggcuggugaggcugcccugca

SEQ ID NO: 316671 - RNA, 22 nt, Human
cccuccagcucaaagcaaccgg

SEQ ID NO: 316672 - RNA, 22 nt, Human
cucagacccccagagcugcuaa

SEQ ID NO: 316673 - RNA, 22 nt, Human
ucuggcucuaacuaggcaucag

SEQ ID NO: 316674 - RNA, 22 nt, Human
uauaacaguuuaggugguguca

SEQ ID NO: 316675 - RNA, 22 nt, Human
agagaaggcauagaacuugagu

SEQ ID NO: 316676 - RNA, 22 nt, Human
uggagggcuaagcugagggaua

SEQ ID NO: 316677 - RNA, 22 nt, Human
caugggagguuggcuuggcaug

SEQ ID NO: 316678 - RNA, 22 nt, Human
gcagggcugcugaaacuuguuu

SEQ ID NO: 316679 - RNA, 22 nt, Human
gaugguuugguaaaaguauguu

SEQ ID NO: 316680 - RNA, 22 nt, Human
uuaaaauagccagugccccucu

SEQ ID NO: 316681 - RNA, 23 nt, Human
acacaaggguaacugccagccau

SEQ ID NO: 316682 - RNA, 22 nt, Human
ugucaugccaggaaauaguccc

SEQ ID NO: 316683 - RNA, 22 nt, Human
ggaggaccccagcagcucccca

SEQ ID NO: 316684 - RNA, 22 nt, Human
cugcuggagguuggagcaugca

SEQ ID NO: 316685 - RNA, 22 nt, Human
aggcacagcacaccuggccccc

SEQ ID NO: 316686 - RNA, 22 nt, Human
gccugccugaaggcuguaccag

SEQ ID NO: 316687 - RNA, 22 nt, Human
acugccauuggucaaaugagug

SEQ ID NO: 316688 - RNA, 22 nt, Human
gguggagcuguggacaggaagg

SEQ ID NO: 316689 - RNA, 22 nt, Human
aagucauuaucucuucuaaucu

SEQ ID NO: 316690 - RNA, 19 nt, Human
ucccuggcgccucucgggc

SEQ ID NO: 316691 - RNA, 22 nt, Human
ucucuggaagcgcagaucuguu

SEQ ID NO: 316692 - RNA, 21 nt, Human
ugaaugaggaggauggcauuu

SEQ ID NO: 316693 - RNA, 19 nt, Human
ugggcuuccccagggcaga

SEQ ID NO: 316694 - RNA, 21 nt, Human
guggccugauuaugaaugggu

SEQ ID NO: 316695 - RNA, 22 nt, Human
cacagggcagaggguccguggc

SEQ ID NO: 316696 - RNA, 22 nt, Human
ugugaaaggagccauagacagu

SEQ ID NO: 316697 - RNA, 22 nt, Human
ucuucucuacaccagcagcccc

SEQ ID NO: 316698 - RNA, 22 nt, Human
uuucuucauagaccuugucuug

SEQ ID NO: 316699 - RNA, 22 nt, Human
cugucagguuggucucagagcu

SEQ ID NO: 316700 - RNA, 22 nt, Human
uguugaagauaaaguucucauu

SEQ ID NO: 316701 - RNA, 22 nt, Human
agagcagaggcauggccguggg

SEQ ID NO: 316702 - RNA, 22 nt, Human
augugcauuaaaugucaauguu

SEQ ID NO: 316703 - RNA, 22 nt, Human
agcccugggcagccaaggaagc

SEQ ID NO: 316704 - RNA, 22 nt, Human
cuucuucaaccugaaaguuuca

SEQ ID NO: 316705 - RNA, 19 nt, Human
uguagcuagugucuaucca

SEQ ID NO: 316706 - RNA, 22 nt, Human
ucugccugcaguguggcagggc

SEQ ID NO: 316707 - RNA, 22 nt, Human
uauguacaaucagcaguucaua

SEQ ID NO: 316708 - RNA, 18 nt, Human
ggaaggaguggaccccag

SEQ ID NO: 316709 - RNA, 22 nt, Human
uguacacugcaggaugcauugc

SEQ ID NO: 316710 - RNA, 22 nt, Human
gcccaggccggagagcagugcu

SEQ ID NO: 316711 - RNA, 22 nt, Human
ugcugccaagcccgugcuccug

SEQ ID NO: 316712 - RNA, 22 nt, Human
cugcucuagagagcauuaguca

SEQ ID NO: 316713 - RNA, 22 nt, Human
ucacaggguaucugggauggau

SEQ ID NO: 316714 - RNA, 22 nt, Human
gcucaagggaugggagugggug

SEQ ID NO: 316715 - RNA, 22 nt, Human
gggagagguuacccgagcaacu

SEQ ID NO: 316716 - RNA, 22 nt, Human
aaccauuugccauuaucuuaag

SEQ ID NO: 316717 - RNA, 22 nt, Human
uggcuccuaggauggugccugg

SEQ ID NO: 316718 - RNA, 22 nt, Human
cauugcugugggcauuugcugc

SEQ ID NO: 316719 - RNA, 22 nt, Human
ucugggcuuuacacugugcuua

SEQ ID NO: 316720 - RNA, 22 nt, Human
uaauuuauuucaacugccaagg

SEQ ID NO: 316721 - RNA, 20 nt, Human
cccuggagagaagcuccacg

SEQ ID NO: 316722 - RNA, 21 nt, Human
agagcugggacuugccugaga

SEQ ID NO: 316723 - RNA, 20 nt, Human
aagagcugacucacaguggu

SEQ ID NO: 316724 - RNA, 22 nt, Human
uaugaacuguaacccucaccgc

SEQ ID NO: 316725 - RNA, 22 nt, Human
agaaaagggcaggagggauaca

SEQ ID NO: 316726 - RNA, 20 nt, Human
guucucacugaucugcaggg

SEQ ID NO: 316727 - RNA, 22 nt, Human
gcaggagcucguuuccaggcug

SEQ ID NO: 316728 - RNA, 22 nt, Human
gcaucuaaauaaacgugggagu

SEQ ID NO: 316729 - RNA, 22 nt, Human
cuuccuugugguccuucucauu

SEQ ID NO: 316730 - RNA, 21 nt, Human
gcaggguccuuuccauuccua

SEQ ID NO: 316731 - RNA, 22 nt, Human
uccucagacuucccuuugugua

SEQ ID NO: 316732 - RNA, 22 nt, Human
ugggagcaagcuggugcuggag

SEQ ID NO: 316733 - RNA, 22 nt, Human
guggcucuccauugacauggaa

SEQ ID NO: 316734 - RNA, 22 nt, Human
cugcuuuggacaacuauucuug

SEQ ID NO: 316735 - RNA, 22 nt, Human
aucucagggcuggagcccugga

SEQ ID NO: 316736 - RNA, 22 nt, Human
agcugcugcgccucacccuggc

SEQ ID NO: 316737 - RNA, 22 nt, Human
cucugaaagaguuuaguauuau

SEQ ID NO: 316738 - RNA, 22 nt, Human
gaagcccacguuuggugaugua

SEQ ID NO: 316739 - RNA, 23 nt, Human
uggcccugaaucuguccuggagg

SEQ ID NO: 316740 - RNA, 22 nt, Human
uagaggugucacuuugggaagu

SEQ ID NO: 316741 - RNA, 22 nt, Human
auuuguugcuagcagcacugau

SEQ ID NO: 316742 - RNA, 22 nt, Human
cugggugagcuggccagagggu

SEQ ID NO: 316743 - RNA, 22 nt, Human
gccugugcauagcagcggacuc

SEQ ID NO: 316744 - RNA, 22 nt, Human
auuuagaacuuuguuugccaau

SEQ ID NO: 316745 - RNA, 22 nt, Human
aucaggaugacuauaaggcugc

SEQ ID NO: 316746 - RNA, 22 nt, Human
ucugucugacaggguaugaacu

SEQ ID NO: 316747 - RNA, 22 nt, Human
uuuuuauaugaaggauagugcg

SEQ ID NO: 316748 - RNA, 22 nt, Human
uuuuauguaauccuuacugucg

SEQ ID NO: 316749 - RNA, 22 nt, Human
gggcacagaagucuaagacauc

SEQ ID NO: 316750 - RNA, 22 nt, Human
gggaguggauuauguggaccca

SEQ ID NO: 316751 - RNA, 22 nt, Human
acagccugcugccugcuucuug

SEQ ID NO: 316752 - RNA, 22 nt, Human
agcagcucuggcacuguagcau

SEQ ID NO: 316753 - RNA, 22 nt, Human
agcucccaggcagucaugagga

SEQ ID NO: 316754 - RNA, 22 nt, Human
aggugccagugcuguggucccc

SEQ ID NO: 316755 - RNA, 22 nt, Human
uggcucuguugugcugagccag

SEQ ID NO: 316756 - RNA, 22 nt, Human
aggcugccuguuccaaucuccu

SEQ ID NO: 316757 - RNA, 22 nt, Human
gagggcugauaacaggaauaca

SEQ ID NO: 316758 - RNA, 22 nt, Human
uuacauuuuaguuaaccuguga

SEQ ID NO: 316759 - RNA, 22 nt, Human
agagcuggcugguagcccugau

SEQ ID NO: 316760 - RNA, 22 nt, Human
agaaagaacguugguuaucuua

SEQ ID NO: 316761 - RNA, 22 nt, Human
gaaacauaguugagacacugcu

SEQ ID NO: 316762 - RNA, 22 nt, Human
uccugcaggccuguucccagua

SEQ ID NO: 316763 - RNA, 22 nt, Human
gcucccugccuacacggaccuu

SEQ ID NO: 316764 - RNA, 22 nt, Human
caacagaaggaagcagggucag

SEQ ID NO: 316765 - RNA, 22 nt, Human
gcuggccucuacaggccggcca

SEQ ID NO: 316766 - RNA, 22 nt, Human
ggcagcagcaagguuggagcug

SEQ ID NO: 316767 - RNA, 22 nt, Human
ccaggcugcagucaaggggcau

SEQ ID NO: 316768 - RNA, 20 nt, Human
gugccuggagaagaggcugu

SEQ ID NO: 316769 - RNA, 22 nt, Human
gagcugccaguguaugaauucu

SEQ ID NO: 316770 - RNA, 22 nt, Human
ccagcagccaccuucucgaaau

SEQ ID NO: 316771 - RNA, 22 nt, Human
acugcagccuagggaccacagu

SEQ ID NO: 316772 - RNA, 21 nt, Human
ucacaucuauguuaagcaaac

SEQ ID NO: 316773 - RNA, 22 nt, Human
auuaaaagcuucccaagaguua

SEQ ID NO: 316774 - RNA, 22 nt, Human
ccaaagucugcauuuuaacaug

SEQ ID NO: 316775 - RNA, 22 nt, Human
cagagacaccccagaaaauaag

SEQ ID NO: 316776 - RNA, 22 nt, Human
augcaguaaauguucuaguuug

SEQ ID NO: 316777 - RNA, 22 nt, Human
gacagaguuguugauguaugcu

SEQ ID NO: 316778 - RNA, 22 nt, Human
cugcccugggaguaccuguccu

SEQ ID NO: 316779 - RNA, 22 nt, Human
uuguuucugaguuuucauguau

SEQ ID NO: 316780 - RNA, 22 nt, Human
ucuagaaauuuugccuuguauu

SEQ ID NO: 316781 - RNA, 20 nt, Human
gcaggcagggaaugggggug

SEQ ID NO: 316782 - RNA, 22 nt, Human
augaaggcuguguagauggaug

SEQ ID NO: 316783 - RNA, 22 nt, Human
auacauguuguaccauauguuu

SEQ ID NO: 316784 - RNA, 22 nt, Human
uccauuuucuaaguaucacuua

SEQ ID NO: 316785 - RNA, 22 nt, Human
uuauagaaggagcauucacuua

SEQ ID NO: 316786 - RNA, 18 nt, Human
uggcagcaggaagccauu

SEQ ID NO: 316787 - RNA, 22 nt, Human
aaugcacaugccacauguggua

SEQ ID NO: 316788 - RNA, 22 nt, Human
gauggguggucucagacuugcc

SEQ ID NO: 316789 - RNA, 18 nt, Human
gagcugggagaaggaagg

SEQ ID NO: 316790 - RNA, 23 nt, Human
ggccuccuggucuaggcuagacu

SEQ ID NO: 316791 - RNA, 19 nt, Human
agugaaauggaguauucaa

SEQ ID NO: 316792 - RNA, 23 nt, Human
gugugccaagcacugugccagga

SEQ ID NO: 316793 - RNA, 22 nt, Human
cuguagccagaagcagaaggcc

SEQ ID NO: 316794 - RNA, 22 nt, Human
gcucacugccauucucuagaug

SEQ ID NO: 316795 - RNA, 22 nt, Human
ggaggcugcugccucacguggg

SEQ ID NO: 316796 - RNA, 22 nt, Human
acaggagaaaucuggucaaaag

SEQ ID NO: 316797 - RNA, 22 nt, Human
cauuugaaccuggauguucuua

SEQ ID NO: 316798 - RNA, 22 nt, Human
ugaaggcuguuggauggggaag

SEQ ID NO: 316799 - RNA, 22 nt, Human
guguaauuauauaaagaucuac

SEQ ID NO: 316800 - RNA, 22 nt, Human
guuaauaaagguauagaaucag

SEQ ID NO: 316801 - RNA, 22 nt, Human
gccucagugauaugugggacaa

SEQ ID NO: 316802 - RNA, 22 nt, Human
uacagaguggugagaucuuuug

SEQ ID NO: 316803 - RNA, 22 nt, Human
guauacauagaugaugaacaag

SEQ ID NO: 316804 - RNA, 22 nt, Human
aucaguuuugggggacauacug

SEQ ID NO: 316805 - RNA, 22 nt, Human
cugccagcacugccuccugagg

SEQ ID NO: 316806 - RNA, 23 nt, Human
cagagcuggcucagagcugccug

SEQ ID NO: 316807 - RNA, 22 nt, Human
gcuccugggcucuaccuugcua

SEQ ID NO: 316808 - RNA, 22 nt, Human
ccugccugacagagaagguuca

SEQ ID NO: 316809 - RNA, 22 nt, Human
uccugggcuugcuccuccagcu

SEQ ID NO: 316810 - RNA, 22 nt, Human
cucuccucagaacaggcccucu

SEQ ID NO: 316811 - RNA, 22 nt, Human
ugugccaugaggcucugauaug

SEQ ID NO: 316812 - RNA, 22 nt, Human
ucuggcuccacaccucacugca

SEQ ID NO: 316813 - RNA, 22 nt, Human
gcugcagcuguaggacacaauu

SEQ ID NO: 316814 - RNA, 22 nt, Human
gaguggagcaaaagagguagau

SEQ ID NO: 316815 - RNA, 22 nt, Human
ccugaagaugcuguggccuggu

SEQ ID NO: 316816 - RNA, 22 nt, Human
aacagaaaagguagguggcuuu

SEQ ID NO: 316817 - RNA, 23 nt, Human
gaggagggucugacaaguguagc

SEQ ID NO: 316818 - RNA, 22 nt, Human
aagaaugucguugguauuuuaa

SEQ ID NO: 316819 - RNA, 22 nt, Human
cugguacaaaaugcugauauca

SEQ ID NO: 316820 - RNA, 22 nt, Human
ugcuggccgugagcucucggga

SEQ ID NO: 316821 - RNA, 22 nt, Human
uccuuuccaugcuucuagaggc

SEQ ID NO: 316822 - RNA, 22 nt, Human
gucccuggucuaccguggcuuc

SEQ ID NO: 316823 - RNA, 22 nt, Human
ucugucugcaccuaagcacagu

SEQ ID NO: 316824 - RNA, 23 nt, Human
cauggcagcaagagcucauggcc

SEQ ID NO: 316825 - RNA, 22 nt, Human
gccuucugugcuccuggccuuu

SEQ ID NO: 316826 - RNA, 22 nt, Human
caggcugaucagggcugggaug

SEQ ID NO: 316827 - RNA, 22 nt, Human
augugaaauagcuggauaugaa

SEQ ID NO: 316828 - RNA, 22 nt, Human
cuucagaggggacucaaaguca

SEQ ID NO: 316829 - RNA, 20 nt, Human
ugggagcuggugaggucuca

SEQ ID NO: 316830 - RNA, 22 nt, Human
ugaaagcacucacuucugcucu

SEQ ID NO: 316831 - RNA, 22 nt, Human
ugagcaguaggucugaauagug

SEQ ID NO: 316832 - RNA, 22 nt, Human
cgcuggggcuuuuugcuugaga

SEQ ID NO: 316833 - RNA, 20 nt, Human
ccuaggcaugcugagucucc

SEQ ID NO: 316834 - RNA, 22 nt, Human
cucccuggcuuuguccugaggc

SEQ ID NO: 316835 - RNA, 22 nt, Human
cagcucucacacccuccuccca

SEQ ID NO: 316836 - RNA, 22 nt, Human
ccuggccuccuggccuucucau

SEQ ID NO: 316837 - RNA, 22 nt, Human
cuccucaguugucccauggaga

SEQ ID NO: 316838 - RNA, 22 nt, Human
cagcccugagagaaccaucuau

SEQ ID NO: 316839 - RNA, 22 nt, Human
gagccagguuggaggcugcagu

SEQ ID NO: 316840 - RNA, 22 nt, Human
ggcuccucucuggccgcucccg

SEQ ID NO: 316841 - RNA, 22 nt, Human
agaaaucuuggagucuguggua

SEQ ID NO: 316842 - RNA, 22 nt, Human
uuugggaagaggaaucucugga

SEQ ID NO: 316843 - RNA, 22 nt, Human
cucugggcaggaccaguggacc

SEQ ID NO: 316844 - RNA, 22 nt, Human
uacaaaguauauuucuagcugu

SEQ ID NO: 316845 - RNA, 22 nt, Human
aacaugcucuguuucuuggaug

SEQ ID NO: 316846 - RNA, 22 nt, Human
caucacuguccaaaguucaguu

SEQ ID NO: 316847 - RNA, 22 nt, Human
ucaggggacagccagcuggagg

SEQ ID NO: 316848 - RNA, 22 nt, Human
ccccagccagcaggaccucuga

SEQ ID NO: 316849 - RNA, 22 nt, Human
ggagccagagggaugcaguuga

SEQ ID NO: 316850 - RNA, 22 nt, Human
aggauccuuuuucugcuguuug

SEQ ID NO: 316851 - RNA, 22 nt, Human
ggcaggcuggcuuuguuccagg

SEQ ID NO: 316852 - RNA, 22 nt, Human
uucacauuaucaggauuguuuc

SEQ ID NO: 316853 - RNA, 22 nt, Human
aagggaggggauguaagccugg

SEQ ID NO: 316854 - RNA, 20 nt, Human
ugcugucguguuuucugcuu

SEQ ID NO: 316855 - RNA, 22 nt, Human
auaucuuuguuuuugccaagau

SEQ ID NO: 316856 - RNA, 22 nt, Human
aauguguacaugacagauagaa

SEQ ID NO: 316857 - RNA, 22 nt, Human
ugaagcaggguggccagauugu

SEQ ID NO: 316858 - RNA, 23 nt, Human
ccagcgcucacucagagcauguu

SEQ ID NO: 316859 - RNA, 18 nt, Human
acagacaaaauggaaaug

SEQ ID NO: 316860 - RNA, 23 nt, Human
ugaguucucaucuuggcuucuau

SEQ ID NO: 316861 - RNA, 22 nt, Human
ucaucugucccaggcuuuuuuc

SEQ ID NO: 316862 - RNA, 22 nt, Human
aggaaaggccucagcagaaacc

SEQ ID NO: 316863 - RNA, 22 nt, Human
aagucuguuugagugucacacu

SEQ ID NO: 316864 - RNA, 22 nt, Human
ggcucugcgcgguaaagugacu

SEQ ID NO: 316865 - RNA, 22 nt, Human
caaaggcaacauauacuuguuu

SEQ ID NO: 316866 - RNA, 22 nt, Human
augcugcacaagccacauguag

SEQ ID NO: 316867 - RNA, 22 nt, Human
uuggccuuguuaaggaggcccu

SEQ ID NO: 316868 - RNA, 22 nt, Human
guuauaaaugacugcaaaaguu

SEQ ID NO: 316869 - RNA, 22 nt, Human
auguuaaaugguuuauuauuaa

SEQ ID NO: 316870 - RNA, 22 nt, Human
acaggcuuuuuuagaaugacau

SEQ ID NO: 316871 - RNA, 22 nt, Human
gcucccagcauugcugcugaau

SEQ ID NO: 316872 - RNA, 22 nt, Human
gaggcugggaaguccaagacca

SEQ ID NO: 316873 - RNA, 22 nt, Human
gaggaaccaaucugugauauuc

SEQ ID NO: 316874 - RNA, 22 nt, Human
acuuugcagggcuugauaucca

SEQ ID NO: 316875 - RNA, 22 nt, Human
ugccugggccuucccaccucug

SEQ ID NO: 316876 - RNA, 22 nt, Human
cucaccaggaacagcugcggag

SEQ ID NO: 316877 - RNA, 22 nt, Human
acccagcucuuugauggucuug

SEQ ID NO: 316878 - RNA, 22 nt, Human
gcagcuggagccagccagacac

SEQ ID NO: 316879 - RNA, 22 nt, Human
ccaguggguaggccauggugag

SEQ ID NO: 316880 - RNA, 22 nt, Human
aagaaagguguguuugcagaug

SEQ ID NO: 316881 - RNA, 22 nt, Human
uccugcaggccagaggggugag

SEQ ID NO: 316882 - RNA, 22 nt, Human
ccaggguggaggcuggauggag

SEQ ID NO: 316883 - RNA, 22 nt, Human
gcugccugauuuacauagugaa

SEQ ID NO: 316884 - RNA, 22 nt, Human
gugcugugcgcuuuuucuguau

SEQ ID NO: 316885 - RNA, 22 nt, Human
ugcauaaagugccauaguauua

SEQ ID NO: 316886 - RNA, 22 nt, Human
cagucccaugagcccagaacau

SEQ ID NO: 316887 - RNA, 22 nt, Human
acagagccacuuuggugccuac

SEQ ID NO: 316888 - RNA, 22 nt, Human
ccucccucuguuagagcugucu

SEQ ID NO: 316889 - RNA, 22 nt, Human
gggaguguugagcgcccugcca

SEQ ID NO: 316890 - RNA, 22 nt, Human
aucucugguuguuuugcuccca

SEQ ID NO: 316891 - RNA, 17 nt, Human
guccuacccauggucua

SEQ ID NO: 316892 - RNA, 22 nt, Human
gccacguugccacccgggugac

SEQ ID NO: 316893 - RNA, 22 nt, Human
uguuccaucaguuuuugguuga

SEQ ID NO: 316894 - RNA, 22 nt, Human
uggacagguugaguaggaggag

SEQ ID NO: 316895 - RNA, 22 nt, Human
ggcucagaccucccagcuccag

SEQ ID NO: 316896 - RNA, 22 nt, Human
ggagccagugcccucuggugga

SEQ ID NO: 316897 - RNA, 22 nt, Human
ggugcagaggagccagcugggg

SEQ ID NO: 316898 - RNA, 22 nt, Human
aggugcuggagucugggcagga

SEQ ID NO: 316899 - RNA, 22 nt, Human
aguaaaaucuuaagcacagugg

SEQ ID NO: 316900 - RNA, 22 nt, Human
cacagccugcugcacucaagaa

SEQ ID NO: 316901 - RNA, 22 nt, Human
acagaaauauagaagguaggaa

SEQ ID NO: 316902 - RNA, 22 nt, Human
agcagggggaguuagacuagau

SEQ ID NO: 316903 - RNA, 22 nt, Human
agucugcacucagguggagguc

SEQ ID NO: 316904 - RNA, 22 nt, Human
gcaggcugauagaggauuccau

SEQ ID NO: 316905 - RNA, 22 nt, Human
guuuagaauucuaacuuuaagg

SEQ ID NO: 316906 - RNA, 22 nt, Human
ccugccugggcucacuugccag

SEQ ID NO: 316907 - RNA, 22 nt, Human
ccuggcagcgugccgagcugcg

SEQ ID NO: 316908 - RNA, 22 nt, Human
acuucuugggacccuggcaccg

SEQ ID NO: 316909 - RNA, 22 nt, Human
ugccaaggguaugggcaagaua

SEQ ID NO: 316910 - RNA, 22 nt, Human
uccugggaagagaccugagcau

SEQ ID NO: 316911 - RNA, 22 nt, Human
augucccaagauacagcuagag

SEQ ID NO: 316912 - RNA, 22 nt, Human
ggaugcugggagacagcaggca

SEQ ID NO: 316913 - RNA, 22 nt, Human
cuuaaauucuuaaugcccucau

SEQ ID NO: 316914 - RNA, 22 nt, Human
ugaagccagcuuuggaagacac

SEQ ID NO: 316915 - RNA, 22 nt, Human
cugugcaguaggucagggcugg

SEQ ID NO: 316916 - RNA, 22 nt, Human
ucccacugcuuugcucugcuca

SEQ ID NO: 316917 - RNA, 22 nt, Human
gcagacagccagacugcacugg

SEQ ID NO: 316918 - RNA, 22 nt, Human
uacauguaagacaugagacucu

SEQ ID NO: 316919 - RNA, 22 nt, Human
gcaggccucuguugagggccuu

SEQ ID NO: 316920 - RNA, 22 nt, Human
ugcagcagcagggaggaggcuc

SEQ ID NO: 316921 - RNA, 22 nt, Human
gaaaaaugagcugaugucaggg

SEQ ID NO: 316922 - RNA, 22 nt, Human
cccugcagccggccagcucauu

SEQ ID NO: 316923 - RNA, 22 nt, Human
uaugaaacauucauacaaauaa

SEQ ID NO: 316924 - RNA, 18 nt, Human
agcagagcccaugcauuc

SEQ ID NO: 316925 - RNA, 22 nt, Human
aaaucuguaagcaauugcucag

SEQ ID NO: 316926 - RNA, 22 nt, Human
uauccuuguacuauaguauuua

SEQ ID NO: 316927 - RNA, 20 nt, Human
uccagcugggaacagcugau

SEQ ID NO: 316928 - RNA, 22 nt, Human
aucaggaugacaacugcugggu

SEQ ID NO: 316929 - RNA, 20 nt, Human
gacauucauaguuauuacca

SEQ ID NO: 316930 - RNA, 22 nt, Human
ggaaggggccuugagcaaacug

SEQ ID NO: 316931 - RNA, 22 nt, Human
guggcuucacauggcauuuggc

SEQ ID NO: 316932 - RNA, 22 nt, Human
guggcaggucccauuggagcag

SEQ ID NO: 316933 - RNA, 22 nt, Human
agcuccugcgcacggugcacac

SEQ ID NO: 316934 - RNA, 22 nt, Human
gggagccaaggagagaggccuu

SEQ ID NO: 316935 - RNA, 22 nt, Human
gaggagcacaugaggcugaggg

SEQ ID NO: 316936 - RNA, 22 nt, Human
uguucuucuagauugccuuuua

SEQ ID NO: 316937 - RNA, 22 nt, Human
ccuaugccugucacucugcgcu

SEQ ID NO: 316938 - RNA, 22 nt, Human
uuauacuaaaacgcauugaauu

SEQ ID NO: 316939 - RNA, 22 nt, Human
uuccgcuggggccgccuggcgg

SEQ ID NO: 316940 - RNA, 22 nt, Human
gccagcucagaugcaggaagga

SEQ ID NO: 316941 - RNA, 22 nt, Human
gcagcagagaacacaaugaugg

SEQ ID NO: 316942 - RNA, 22 nt, Human
caagacaagaucuaagcaugcu

SEQ ID NO: 316943 - RNA, 22 nt, Human
cacccagcagcacuuaagacua

SEQ ID NO: 316944 - RNA, 22 nt, Human
augcuuuuaugucacaugguca

SEQ ID NO: 316945 - RNA, 22 nt, Human
ucauauaaguuuaaaacuaucu

SEQ ID NO: 316946 - RNA, 22 nt, Human
ccucugcagcagagagccagag

SEQ ID NO: 316947 - RNA, 22 nt, Human
gacccugaggaugcaccagcag

SEQ ID NO: 316948 - RNA, 22 nt, Human
uggggcucaccuaggcuggaag

SEQ ID NO: 316949 - RNA, 22 nt, Human
cuguccuccggccaccuacagu

SEQ ID NO: 316950 - RNA, 22 nt, Human
ccagcagcuuuauuggcucucc

SEQ ID NO: 316951 - RNA, 22 nt, Human
cagaguggcgacccccucagcu

SEQ ID NO: 316952 - RNA, 22 nt, Human
ucuccucucuuaccugguacaa

SEQ ID NO: 316953 - RNA, 22 nt, Human
cagggagaucuuggcuccuggu

SEQ ID NO: 316954 - RNA, 22 nt, Human
ccaguugguuucaaugggacag

SEQ ID NO: 316955 - RNA, 22 nt, Human
cagcauuuggaggagaggcuuu

SEQ ID NO: 316956 - RNA, 22 nt, Human
ugccuggcaagaggggcuggcu

SEQ ID NO: 316957 - RNA, 22 nt, Human
gagcugccuacauugccaagag

SEQ ID NO: 316958 - RNA, 22 nt, Human
cagcuuggaggaggaucuaaga

SEQ ID NO: 316959 - RNA, 22 nt, Human
ugagugccugaacauagaguag

SEQ ID NO: 316960 - RNA, 18 nt, Human
cuucagugacagucuggc

SEQ ID NO: 316961 - RNA, 17 nt, Human
uuuagaauacaauguuu

SEQ ID NO: 316962 - RNA, 22 nt, Human
cuccagggaaaggggcguccgc

SEQ ID NO: 316963 - RNA, 22 nt, Human
uuccuguauucuaaagggaaag

SEQ ID NO: 316964 - RNA, 22 nt, Human
ccugacagcgugucccuggccc

SEQ ID NO: 316965 - RNA, 22 nt, Human
uucccucucacuuaaagcuugg

SEQ ID NO: 316966 - RNA, 22 nt, Human
gccuggaguggacuuggccccu

SEQ ID NO: 316967 - RNA, 22 nt, Human
acagagagaaacaaucagcagc

SEQ ID NO: 316968 - RNA, 22 nt, Human
cucacuguccaacaggcuuuac

SEQ ID NO: 316969 - RNA, 22 nt, Human
cauuugaaauucuuagaacaaa

SEQ ID NO: 316970 - RNA, 22 nt, Human
uuuugcuugagugcacaaaaug

SEQ ID NO: 316971 - RNA, 22 nt, Human
caguccugcuggccuucccugg

SEQ ID NO: 316972 - RNA, 22 nt, Human
uugcuuugccaccagaagucua

SEQ ID NO: 316973 - RNA, 22 nt, Human
cagagcugcacauucuaugaug

SEQ ID NO: 316974 - RNA, 23 nt, Human
ucucagugcacgcaccaugccug

SEQ ID NO: 316975 - RNA, 22 nt, Human
cacaauuuccuugcuucacuuu

SEQ ID NO: 316976 - RNA, 22 nt, Human
ucagggacugcagagggaagcu

SEQ ID NO: 316977 - RNA, 22 nt, Human
ggagcaagagguggugaaaaau

SEQ ID NO: 316978 - RNA, 22 nt, Human
ccaggugguucaggucaccaua

SEQ ID NO: 316979 - RNA, 22 nt, Human
cugcugggcuccucaugugacu

SEQ ID NO: 316980 - RNA, 22 nt, Human
cagucccagcugcucagaaggc

SEQ ID NO: 316981 - RNA, 23 nt, Human
uuccagaguccacaucugccacc

SEQ ID NO: 316982 - RNA, 22 nt, Human
ugccugggguuggcaaacugcu

SEQ ID NO: 316983 - RNA, 22 nt, Human
uuuuagaaauacugauuuagug

SEQ ID NO: 316984 - RNA, 22 nt, Human
ugcugccuggagccuuuuguuu

SEQ ID NO: 316985 - RNA, 22 nt, Human
cucuggccugcuuccucaggua

SEQ ID NO: 316986 - RNA, 22 nt, Human
cacucccuucaggagccuagga

SEQ ID NO: 316987 - RNA, 21 nt, Human
uucaaagagugggcauuguca

SEQ ID NO: 316988 - RNA, 22 nt, Human
cagaguacugggagaacagaag

SEQ ID NO: 316989 - RNA, 22 nt, Human
uccuugaaaaucuugguuuaga

SEQ ID NO: 316990 - RNA, 22 nt, Human
ucuggcucucucaucacccaau

SEQ ID NO: 316991 - RNA, 22 nt, Human
uugcauguuauuuaaucuguau

SEQ ID NO: 316992 - RNA, 20 nt, Human
caaugcacacagcugcuucu

SEQ ID NO: 316993 - RNA, 22 nt, Human
uggugcuguggaggggcagaag

SEQ ID NO: 316994 - RNA, 22 nt, Human
agcaggagcccuuaucaccagg

SEQ ID NO: 316995 - RNA, 22 nt, Human
caggcuggagugcaguugugca

SEQ ID NO: 316996 - RNA, 17 nt, Human
ugauaguucauuuuaag

SEQ ID NO: 316997 - RNA, 22 nt, Human
ugcugccaccccucaccagagc

SEQ ID NO: 316998 - RNA, 22 nt, Human
gcccagcaccucucucaggguu

SEQ ID NO: 316999 - RNA, 22 nt, Human
cagcugaguguuggcauguuca

SEQ ID NO: 317000 - RNA, 22 nt, Human
agccagacauggcuccugcucc

SEQ ID NO: 317001 - RNA, 17 nt, Human
gccucugcuugugucau

SEQ ID NO: 317002 - RNA, 22 nt, Human
agcuagaaguacagccauauga

SEQ ID NO: 317003 - RNA, 22 nt, Human
ugucccaggccucauguugcca

SEQ ID NO: 317004 - RNA, 22 nt, Human
cccuguccugcuaggcccuggu

SEQ ID NO: 317005 - RNA, 22 nt, Human
cccuggugguacggcacuggca

SEQ ID NO: 317006 - RNA, 22 nt, Human
aaaauguaaagcuugaguguag

SEQ ID NO: 317007 - RNA, 23 nt, Human
ggcagagagcauggcuggggccc

SEQ ID NO: 317008 - RNA, 22 nt, Human
agccaacuaggagauuaaggua

SEQ ID NO: 317009 - RNA, 22 nt, Human
guccugggcccaggggcugccu

SEQ ID NO: 317010 - RNA, 22 nt, Human
acagagcuguacaugugccaug

SEQ ID NO: 317011 - RNA, 22 nt, Human
ccaggguguagggauuccagau

SEQ ID NO: 317012 - RNA, 22 nt, Human
ccagggucuuggagaggagugc

SEQ ID NO: 317013 - RNA, 22 nt, Human
cucugagagagcuggugagcac

SEQ ID NO: 317014 - RNA, 22 nt, Human
gagccuucaucgcagccuuguu

SEQ ID NO: 317015 - RNA, 22 nt, Human
aucaguuucacuugcuugcaaa

SEQ ID NO: 317016 - RNA, 22 nt, Human
auugucuucuggucuuaucuuu

SEQ ID NO: 317017 - RNA, 22 nt, Human
cagcucaaguuucccaggucag

SEQ ID NO: 317018 - RNA, 22 nt, Human
ugcauuguugaugaguugaaua

SEQ ID NO: 317019 - RNA, 22 nt, Human
ccagggcaggagaaagacucac

SEQ ID NO: 317020 - RNA, 22 nt, Human
ugugaaagucaaauuaauugaa

SEQ ID NO: 317021 - RNA, 22 nt, Human
cauucacucagcgaugccagua

SEQ ID NO: 317022 - RNA, 22 nt, Human
aacaaauggaacacaaaucuuu

SEQ ID NO: 317023 - RNA, 23 nt, Human
gccugccugaccugugcaaaguc

SEQ ID NO: 317024 - RNA, 23 nt, Human
auaaggcauaaagguacauugga

SEQ ID NO: 317025 - RNA, 22 nt, Human
caggaccccauauucacugaac

SEQ ID NO: 317026 - RNA, 22 nt, Human
aaggcacugcuuugcugcgccc

SEQ ID NO: 317027 - RNA, 22 nt, Human
accugagcaugccaggagagug

SEQ ID NO: 317028 - RNA, 22 nt, Human
guggcccugucccaggccuccu

SEQ ID NO: 317029 - RNA, 22 nt, Human
uggcucuggugcgggcuccugc

SEQ ID NO: 317030 - RNA, 22 nt, Human
ugccuucaaucaggauggucuc

SEQ ID NO: 317031 - RNA, 22 nt, Human
acuuugcaauacuuaauacaaa

SEQ ID NO: 317032 - RNA, 22 nt, Human
uuuaaaaaacuagucugagucu

SEQ ID NO: 317033 - RNA, 22 nt, Human
uucaggaucauuuguuuuaucu

SEQ ID NO: 317034 - RNA, 22 nt, Human
ucuggcucuguguccccaccca

SEQ ID NO: 317035 - RNA, 22 nt, Human
caaggccacugcucagguuucc

SEQ ID NO: 317036 - RNA, 22 nt, Human
uauguuaaauguuugauguuua

SEQ ID NO: 317037 - RNA, 22 nt, Human
agguggcagagugacaggcuga

SEQ ID NO: 317038 - RNA, 22 nt, Human
guccagggcuaaaucagguucc

SEQ ID NO: 317039 - RNA, 22 nt, Human
uauucacaggcuggagugaugu

SEQ ID NO: 317040 - RNA, 19 nt, Human
cagugcuguucauucagug

SEQ ID NO: 317041 - RNA, 22 nt, Human
agguggccggugccagccgggc

SEQ ID NO: 317042 - RNA, 22 nt, Human
uagagcaguuggcagcuguauu

SEQ ID NO: 317043 - RNA, 22 nt, Human
uucucaguuucauagcugagca

SEQ ID NO: 317044 - RNA, 22 nt, Human
aagggcugccagggggugccag

SEQ ID NO: 317045 - RNA, 22 nt, Human
agcugccaucagccuuuggaug

SEQ ID NO: 317046 - RNA, 22 nt, Human
acugugcuuucucuggaggcau

SEQ ID NO: 317047 - RNA, 22 nt, Human
agcauuuaauuacaguuuaauu

SEQ ID NO: 317048 - RNA, 22 nt, Human
gaucucuggguccuguuggccu

SEQ ID NO: 317049 - RNA, 23 nt, Human
ggccuguguuuugucugaaguac

SEQ ID NO: 317050 - RNA, 22 nt, Human
acagaugaguuaaagcagagug

SEQ ID NO: 317051 - RNA, 22 nt, Human
uggggcugucccgguuuggcga

SEQ ID NO: 317052 - RNA, 22 nt, Human
agcucccagcuccuuugagaga

SEQ ID NO: 317053 - RNA, 22 nt, Human
aggcagagcuaggaagaauugu

SEQ ID NO: 317054 - RNA, 22 nt, Human
uauuuccugcauggugauguaa

SEQ ID NO: 317055 - RNA, 21 nt, Human
uccaggaguggcugggcaggg

SEQ ID NO: 317056 - RNA, 22 nt, Human
aaagccuuggucaucugguucc

SEQ ID NO: 317057 - RNA, 22 nt, Human
uuuccaauaaagugucauuguu

SEQ ID NO: 317058 - RNA, 22 nt, Human
gcugggcuucacagagccuuua

SEQ ID NO: 317059 - RNA, 22 nt, Human
uucaugugaucacagauuguaa

SEQ ID NO: 317060 - RNA, 22 nt, Human
ggcuucucucuucacauggcuu

SEQ ID NO: 317061 - RNA, 22 nt, Human
ugcaugcauaaauguacacaca

SEQ ID NO: 317062 - RNA, 22 nt, Human
gccugucucuuggaacuuggua

SEQ ID NO: 317063 - RNA, 22 nt, Human
cagcccaaagccccaggcuaga

SEQ ID NO: 317064 - RNA, 22 nt, Human
ggcccucccugagccagguggg

SEQ ID NO: 317065 - RNA, 22 nt, Human
acacuuuguuguggcauauacg

SEQ ID NO: 317066 - RNA, 22 nt, Human
gaggccagaaugagcugaaugc

SEQ ID NO: 317067 - RNA, 22 nt, Human
ggcgugggaaguggggcuucug

SEQ ID NO: 317068 - RNA, 22 nt, Human
cccauucauccucgcuuccuuc

SEQ ID NO: 317069 - RNA, 22 nt, Human
uguaugcagggcuuguaugcag

SEQ ID NO: 317070 - RNA, 22 nt, Human
aaucucuugggaggaaugaauu

SEQ ID NO: 317071 - RNA, 22 nt, Human
acauuuagaguucuuuacucca

SEQ ID NO: 317072 - RNA, 21 nt, Human
ccaccaggucuucugcucggg

SEQ ID NO: 317073 - RNA, 22 nt, Human
guggccugaugccagcccugug

SEQ ID NO: 317074 - RNA, 22 nt, Human
guguacauagaauugugcuuug

SEQ ID NO: 317075 - RNA, 19 nt, Human
agcuggggcgguguguguu

SEQ ID NO: 317076 - RNA, 22 nt, Human
cugccucuauucacugaggcag

SEQ ID NO: 317077 - RNA, 20 nt, Human
agaaucugacccagagagac

SEQ ID NO: 317078 - RNA, 22 nt, Human
uccagagccuauauguucaacu

SEQ ID NO: 317079 - RNA, 21 nt, Human
auccuugaucagaagagugcu

SEQ ID NO: 317080 - RNA, 22 nt, Human
cuuuggcaaggguuuuaauugu

SEQ ID NO: 317081 - RNA, 22 nt, Human
aagcaucucuauguggagagug

SEQ ID NO: 317082 - RNA, 22 nt, Human
uuauuuaaaauguagguuggga

SEQ ID NO: 317083 - RNA, 22 nt, Human
ucagcaggcgguuccuuguggg

SEQ ID NO: 317084 - RNA, 22 nt, Human
cugcagagaauuguggggcuuc

SEQ ID NO: 317085 - RNA, 22 nt, Human
cccagcaucccagugggcagca

SEQ ID NO: 317086 - RNA, 22 nt, Human
ugcugggggugucucaccaggc

SEQ ID NO: 317087 - RNA, 22 nt, Human
ucugccuggauuccauucucca

SEQ ID NO: 317088 - RNA, 22 nt, Human
ugggccuguugccugaguccau

SEQ ID NO: 317089 - RNA, 22 nt, Human
aagauuuaccacuuuauucaag

SEQ ID NO: 317090 - RNA, 22 nt, Human
caggugggcuugggagaacacu

SEQ ID NO: 317091 - RNA, 22 nt, Human
ccugggcuuucaaaaccagccu

SEQ ID NO: 317092 - RNA, 22 nt, Human
aacaaauguaaaaugcagaugc

SEQ ID NO: 317093 - RNA, 22 nt, Human
uuacauuuggcuauguccucua

SEQ ID NO: 317094 - RNA, 22 nt, Human
uuuugugagcccauaaaugcca

SEQ ID NO: 317095 - RNA, 19 nt, Human
caggaugaucccaugacac

SEQ ID NO: 317096 - RNA, 22 nt, Human
ucagggcagguuaacuugggug

SEQ ID NO: 317097 - RNA, 22 nt, Human
ggaugcuggggaccaaucucug

SEQ ID NO: 317098 - RNA, 22 nt, Human
uauaaaguuucgaaagauguau

SEQ ID NO: 317099 - RNA, 17 nt, Human
agcccugugcucuuuuu

SEQ ID NO: 317100 - RNA, 22 nt, Human
auuguaucuugucauuaugcau

SEQ ID NO: 317101 - RNA, 22 nt, Human
gaaguagaaagccucguaaaua

SEQ ID NO: 317102 - RNA, 22 nt, Human
uuuuucuuaaauguggguuggc

SEQ ID NO: 317103 - RNA, 22 nt, Human
ggaggccuugaggccaggagcu

SEQ ID NO: 317104 - RNA, 22 nt, Human
cacugcuucuggaggaauuugg

SEQ ID NO: 317105 - RNA, 22 nt, Human
aaaugcacacaccaggaaacua

SEQ ID NO: 317106 - RNA, 22 nt, Human
uaugaacugugagugugauggg

SEQ ID NO: 317107 - RNA, 21 nt, Human
uggagcugaauuuuuggcauc

SEQ ID NO: 317108 - RNA, 22 nt, Human
auugaaagcacaaagaacaagu

SEQ ID NO: 317109 - RNA, 20 nt, Human
uguuucuuuuaaugagcggc

SEQ ID NO: 317110 - RNA, 23 nt, Human
ggcacugaagcuacaauggugag

SEQ ID NO: 317111 - RNA, 22 nt, Human
ugcaggcuguaaucugaggcua

SEQ ID NO: 317112 - RNA, 19 nt, Human
gccugagccagccaugcaa

SEQ ID NO: 317113 - RNA, 22 nt, Human
gcagcuguggguuccaagucua

SEQ ID NO: 317114 - RNA, 22 nt, Human
acuguugucaggcugcuuugga

SEQ ID NO: 317115 - RNA, 22 nt, Human
uuagaaaacauaagugguaaag

SEQ ID NO: 317116 - RNA, 22 nt, Human
gcaccaggcagcugagcaggcc

SEQ ID NO: 317117 - RNA, 22 nt, Human
cagaaggcuuuguggaguagac

SEQ ID NO: 317118 - RNA, 22 nt, Human
uucaacacaggaacaugauaua

SEQ ID NO: 317119 - RNA, 22 nt, Human
ccagcuggugggucuuucucug

SEQ ID NO: 317120 - RNA, 23 nt, Human
uuugaaguugacugccuuccaga

SEQ ID NO: 317121 - RNA, 22 nt, Human
aaaaaugugaccacaggguguu

SEQ ID NO: 317122 - RNA, 22 nt, Human
uuugggcugguuugccaugccc

SEQ ID NO: 317123 - RNA, 22 nt, Human
uggcagagguauauugggagga

SEQ ID NO: 317124 - RNA, 22 nt, Human
aacaaauggggccuuguaugaa

SEQ ID NO: 317125 - RNA, 22 nt, Human
ucucagugagcuuuucuauguu

SEQ ID NO: 317126 - RNA, 22 nt, Human
uguucauaucauuuugaaagcu

SEQ ID NO: 317127 - RNA, 22 nt, Human
auggauaagucaaagaguaucc

SEQ ID NO: 317128 - RNA, 22 nt, Human
cugggagcugucaggagcgugu

SEQ ID NO: 317129 - RNA, 22 nt, Human
gcugucccgcugacuuccagcu

SEQ ID NO: 317130 - RNA, 22 nt, Human
gucucagaccacccucuuuggc

SEQ ID NO: 317131 - RNA, 20 nt, Human
cauuugaaucuccauucugc

SEQ ID NO: 317132 - RNA, 22 nt, Human
ggcagcaugagccuggugaauu

SEQ ID NO: 317133 - RNA, 22 nt, Human
ccugcuucagggaugauggcac

SEQ ID NO: 317134 - RNA, 22 nt, Human
cuagguauucauguuucguggc

SEQ ID NO: 317135 - RNA, 22 nt, Human
ugaugaaaauaugauucugagg

SEQ ID NO: 317136 - RNA, 22 nt, Human
caaaguuaugaaugauaagauu

SEQ ID NO: 317137 - RNA, 22 nt, Human
auguagaagugggcauuauaga

SEQ ID NO: 317138 - RNA, 22 nt, Human
cagccagggagggcaaaugaga

SEQ ID NO: 317139 - RNA, 22 nt, Human
cacagggccuggggcagcugcu

SEQ ID NO: 317140 - RNA, 22 nt, Human
gccucugcaucaucacuccagc

SEQ ID NO: 317141 - RNA, 22 nt, Human
acugauuacacgaguucugacu

SEQ ID NO: 317142 - RNA, 20 nt, Human
agauggugaaggccagggag

SEQ ID NO: 317143 - RNA, 22 nt, Human
ggggccuguagagcuucaggga

SEQ ID NO: 317144 - RNA, 22 nt, Human
agggcagcucucaccucuggcc

SEQ ID NO: 317145 - RNA, 22 nt, Human
uguaugaagccagaaucuguuu

SEQ ID NO: 317146 - RNA, 20 nt, Human
agaggcuuccuugggaggag

SEQ ID NO: 317147 - RNA, 22 nt, Human
uucauucugcaguucucagcuc

SEQ ID NO: 317148 - RNA, 20 nt, Human
ggcagcucacuacuuucugu

SEQ ID NO: 317149 - RNA, 22 nt, Human
gaaaagagaacaucugaggauc

SEQ ID NO: 317150 - RNA, 22 nt, Human
gaccagagaaaggcacuggaag

SEQ ID NO: 317151 - RNA, 22 nt, Human
ccagagucuuuauauuccugaa

SEQ ID NO: 317152 - RNA, 22 nt, Human
ggcagggaaacagcugauccca

SEQ ID NO: 317153 - RNA, 22 nt, Human
ugcaauaaagugcuauaaaucc

SEQ ID NO: 317154 - RNA, 21 nt, Human
uucaaaaugguguguuugucu

SEQ ID NO: 317155 - RNA, 22 nt, Human
gggcugggaauggcuaaguaug

SEQ ID NO: 317156 - RNA, 22 nt, Human
aguauguagugcaaucagucag

SEQ ID NO: 317157 - RNA, 22 nt, Human
aggcucagauccuuguguccug

SEQ ID NO: 317158 - RNA, 22 nt, Human
uaaagcaggccacauaugugau

SEQ ID NO: 317159 - RNA, 22 nt, Human
guguggcugccagccaagaggc

SEQ ID NO: 317160 - RNA, 21 nt, Human
cagaaguaaggguaacuucuc

SEQ ID NO: 317161 - RNA, 17 nt, Human
ucagcaaagacaaagga

SEQ ID NO: 317162 - RNA, 19 nt, Human
gcagccaccgcggcggccg

SEQ ID NO: 317163 - RNA, 22 nt, Human
gugugaaagcuuguccucugua

SEQ ID NO: 317164 - RNA, 20 nt, Human
ugagugauggaggcggguca

SEQ ID NO: 317165 - RNA, 22 nt, Human
cagggcccauggcucagguagg

SEQ ID NO: 317166 - RNA, 22 nt, Human
uggccaggcagguagaacggcc

SEQ ID NO: 317167 - RNA, 22 nt, Human
acagggccucagcugauucugg

SEQ ID NO: 317168 - RNA, 22 nt, Human
ucaaugauuagaguuuagugug

SEQ ID NO: 317169 - RNA, 20 nt, Human
uaguauuugcauaaggauag

SEQ ID NO: 317170 - RNA, 23 nt, Human
auacauacagucuuacugacuuu

SEQ ID NO: 317171 - RNA, 22 nt, Human
uagaggugacacugagaccaua

SEQ ID NO: 317172 - RNA, 21 nt, Human
cuguuucuugugaagugacac

SEQ ID NO: 317173 - RNA, 22 nt, Human
uggcucaguuuagcagcucagu

SEQ ID NO: 317174 - RNA, 22 nt, Human
ugcauuguugaauauuucauag

SEQ ID NO: 317175 - RNA, 22 nt, Human
ccacccuggacaggccucugag

SEQ ID NO: 317176 - RNA, 22 nt, Human
guguauaaugcuguuuguacau

SEQ ID NO: 317177 - RNA, 22 nt, Human
uaacagaagagcaggcagcccu

SEQ ID NO: 317178 - RNA, 22 nt, Human
cacugcaguuccccagugcgca

SEQ ID NO: 317179 - RNA, 22 nt, Human
cagagagagucaaaucuuugcu

SEQ ID NO: 317180 - RNA, 22 nt, Human
gcuggccucaucacugacuucu

SEQ ID NO: 317181 - RNA, 22 nt, Human
gcucugcugaagccccuugcau

SEQ ID NO: 317182 - RNA, 22 nt, Human
cagggccaccguguuugcugcu

SEQ ID NO: 317183 - RNA, 20 nt, Human
cuguggcucaugcaucugcc

SEQ ID NO: 317184 - RNA, 22 nt, Human
ucuggcucugacacuacuguua

SEQ ID NO: 317185 - RNA, 22 nt, Human
cugggccauggaagucucugcc

SEQ ID NO: 317186 - RNA, 22 nt, Human
agagugaaguaauuguuaggau

SEQ ID NO: 317187 - RNA, 22 nt, Human
gcuggccugcgagggcaggcug

SEQ ID NO: 317188 - RNA, 22 nt, Human
agccaggauggucucgaucggc

SEQ ID NO: 317189 - RNA, 18 nt, Human
accugccuguucuucucu

SEQ ID NO: 317190 - RNA, 19 nt, Human
augucuggguaacagcugc

SEQ ID NO: 317191 - RNA, 22 nt, Human
caggcagcagaggaguguggga

SEQ ID NO: 317192 - RNA, 22 nt, Human
uggcucagugcauucacaguaa

SEQ ID NO: 317193 - RNA, 22 nt, Human
ucaagagaagugcuccacagua

SEQ ID NO: 317194 - RNA, 22 nt, Human
ugaaaucugucccacuuuagcu

SEQ ID NO: 317195 - RNA, 22 nt, Human
uauguacauguuaaagggcaaa

SEQ ID NO: 317196 - RNA, 22 nt, Human
cugggaggcagucucucuagaa

SEQ ID NO: 317197 - RNA, 22 nt, Human
gcccucugcacagcucugagca

SEQ ID NO: 317198 - RNA, 22 nt, Human
agagcccucuucacugccccuu

SEQ ID NO: 317199 - RNA, 19 nt, Human
ucucagugccgcugaccgc

SEQ ID NO: 317200 - RNA, 22 nt, Human
acguuuucuagagaauaugcag

SEQ ID NO: 317201 - RNA, 20 nt, Human
ucugugcaccugcuacaagg

SEQ ID NO: 317202 - RNA, 22 nt, Human
caagggaccugagauggucucu

SEQ ID NO: 317203 - RNA, 22 nt, Human
gagcccagguucugcuuccagc

SEQ ID NO: 317204 - RNA, 22 nt, Human
aaaggagauaaagggcccuuca

SEQ ID NO: 317205 - RNA, 22 nt, Human
acuguacacgugucauuuacag

SEQ ID NO: 317206 - RNA, 22 nt, Human
gccuggaggaauguagcugagg

SEQ ID NO: 317207 - RNA, 22 nt, Human
gccuguguggaugcgccggugc

SEQ ID NO: 317208 - RNA, 22 nt, Human
uacaaaguuugggguccucaaa

SEQ ID NO: 317209 - RNA, 22 nt, Human
agaugacagcuacgggaugaaa

SEQ ID NO: 317210 - RNA, 18 nt, Human
agaguguucucagugaaa

SEQ ID NO: 317211 - RNA, 22 nt, Human
aauaauuuuagcucagaguugu

SEQ ID NO: 317212 - RNA, 22 nt, Human
aaacagcagcuguuuaauuugc

SEQ ID NO: 317213 - RNA, 22 nt, Human
uuagaaaauuugcuucuuugga

SEQ ID NO: 317214 - RNA, 22 nt, Human
ccugcagacacuuguccagcaa

SEQ ID NO: 317215 - RNA, 22 nt, Human
acugggaguucuccaugucccu

SEQ ID NO: 317216 - RNA, 22 nt, Human
aguguacauguuuacagcaucu

SEQ ID NO: 317217 - RNA, 22 nt, Human
uuuccucugcugccauugcccc

SEQ ID NO: 317218 - RNA, 19 nt, Human
uuagccauccacagugaaa

SEQ ID NO: 317219 - RNA, 22 nt, Human
gagagucuaggaaccucauaua

SEQ ID NO: 317220 - RNA, 22 nt, Human
cugccugugccaccgccucauu

SEQ ID NO: 317221 - RNA, 22 nt, Human
uaaugucagcauaguuuauuuu

SEQ ID NO: 317222 - RNA, 22 nt, Human
gagauuucuuuugaugccuguc

SEQ ID NO: 317223 - RNA, 22 nt, Human
uccaugucuucaugugucuaac

SEQ ID NO: 317224 - RNA, 22 nt, Human
cauuuucaugaguuucuguuca

SEQ ID NO: 317225 - RNA, 19 nt, Human
cccucaggucugagcaguc

SEQ ID NO: 317226 - RNA, 22 nt, Human
uuccucagagggcgcuggggaa

SEQ ID NO: 317227 - RNA, 22 nt, Human
cugcugcucgaccagucccagg

SEQ ID NO: 317228 - RNA, 21 nt, Human
auggagggaccagggaagcag

SEQ ID NO: 317229 - RNA, 20 nt, Human
uuuuccagaaaguaucauug

SEQ ID NO: 317230 - RNA, 22 nt, Human
uagaaaucagguuuuuagaaag

SEQ ID NO: 317231 - RNA, 22 nt, Human
agaaauguacgauguuaugcag

SEQ ID NO: 317232 - RNA, 22 nt, Human
gaaaugcaggcuuggauucagc

SEQ ID NO: 317233 - RNA, 22 nt, Human
ucuccuggucaccucagaaguc

SEQ ID NO: 317234 - RNA, 22 nt, Human
ugaaauguugccaugaggucuc

SEQ ID NO: 317235 - RNA, 22 nt, Human
uugcagcugcaguaaauguuca

SEQ ID NO: 317236 - RNA, 22 nt, Human
agagccuggucugagauaggac

SEQ ID NO: 317237 - RNA, 22 nt, Human
agauacaucauuuauaccuuca

SEQ ID NO: 317238 - RNA, 22 nt, Human
cauuucugucacguucuuuuau

SEQ ID NO: 317239 - RNA, 22 nt, Human
cugucugucaaguucaucucca

SEQ ID NO: 317240 - RNA, 22 nt, Human
uacaguaagaugaaauagcaau

SEQ ID NO: 317241 - RNA, 19 nt, Human
ggcuggcaagugacagugu

SEQ ID NO: 317242 - RNA, 23 nt, Human
aacaccaaggcucagagagauaa

SEQ ID NO: 317243 - RNA, 22 nt, Human
ggaguuggugagcaccaggcuu

SEQ ID NO: 317244 - RNA, 22 nt, Human
uaaguggaagguuauaugcuaa

SEQ ID NO: 317245 - RNA, 22 nt, Human
gcagggacugugaucucacaga

SEQ ID NO: 317246 - RNA, 22 nt, Human
auugacaauguauuuguaucug

SEQ ID NO: 317247 - RNA, 22 nt, Human
uguuacuuaucucacgugaugc

SEQ ID NO: 317248 - RNA, 22 nt, Human
cugggccugggaggccaggucu

SEQ ID NO: 317249 - RNA, 22 nt, Human
gcauggcagugaggauggugcu

SEQ ID NO: 317250 - RNA, 20 nt, Human
gugggcagaugugugcaugg

SEQ ID NO: 317251 - RNA, 22 nt, Human
gcccucagcuccuggacacaug

SEQ ID NO: 317252 - RNA, 22 nt, Human
ccuggggagaagagcuuccccc

SEQ ID NO: 317253 - RNA, 22 nt, Human
gagcacagcuggagguagcauu

SEQ ID NO: 317254 - RNA, 22 nt, Human
gcuggccuucugcagaguucug

SEQ ID NO: 317255 - RNA, 22 nt, Human
ucugcagcuuuuugguggggug

SEQ ID NO: 317256 - RNA, 19 nt, Human
gcacacccugcaccaccau

SEQ ID NO: 317257 - RNA, 18 nt, Human
ugcucuggucucacuugg

SEQ ID NO: 317258 - RNA, 22 nt, Human
uggacucaaguccaaguucacg

SEQ ID NO: 317259 - RNA, 22 nt, Human
aauauuuguuaguguuuuaaug

SEQ ID NO: 317260 - RNA, 20 nt, Human
ggcacuggaagcacacagga

SEQ ID NO: 317261 - RNA, 22 nt, Human
cauugcaccacauugcaucccu

SEQ ID NO: 317262 - RNA, 22 nt, Human
uguucuugagccuuuagaccua

SEQ ID NO: 317263 - RNA, 22 nt, Human
cauuccuuaacguggggagucu

SEQ ID NO: 317264 - RNA, 22 nt, Human
uaguacuuaucucugucauugu

SEQ ID NO: 317265 - RNA, 22 nt, Human
ugauuuccaauaaggagaaugu

SEQ ID NO: 317266 - RNA, 22 nt, Human
accagagcuggcagaguaucaa

SEQ ID NO: 317267 - RNA, 22 nt, Human
ugcauuguuuagaacucuuugg

SEQ ID NO: 317268 - RNA, 22 nt, Human
cagaagcauuccagcaaauagu

SEQ ID NO: 317269 - RNA, 22 nt, Human
uggcagaaguacacaagcaugc

SEQ ID NO: 317270 - RNA, 22 nt, Human
aaucuguuuaguucugcguaug

SEQ ID NO: 317271 - RNA, 21 nt, Human
acagaguaguugaaacagaga

SEQ ID NO: 317272 - RNA, 22 nt, Human
cuggccuggucuggccucucca

SEQ ID NO: 317273 - RNA, 22 nt, Human
acaggcagggaccuuggcuaag

SEQ ID NO: 317274 - RNA, 22 nt, Human
ggccugagaaccauggggccaa

SEQ ID NO: 317275 - RNA, 22 nt, Human
aguacuucagaggcugcccagg

SEQ ID NO: 317276 - RNA, 22 nt, Human
gucccuggaauggacucugcgc

SEQ ID NO: 317277 - RNA, 22 nt, Human
auacaguguacuauuuagcagu

SEQ ID NO: 317278 - RNA, 22 nt, Human
uccauguggccagacacuggca

SEQ ID NO: 317279 - RNA, 22 nt, Human
cccuggagcuagucugagcaga

SEQ ID NO: 317280 - RNA, 20 nt, Human
cacaggcuauaugagagcca

SEQ ID NO: 317281 - RNA, 22 nt, Human
ugagcuuacuucuguacacaga

SEQ ID NO: 317282 - RNA, 22 nt, Human
uuuucucuuguuaauguacuga

SEQ ID NO: 317283 - RNA, 22 nt, Human
auccugggaagcugacauugaa

SEQ ID NO: 317284 - RNA, 22 nt, Human
cacugcagaucagaggcugaga

SEQ ID NO: 317285 - RNA, 22 nt, Human
agugaaauuuguuuagauaggu

SEQ ID NO: 317286 - RNA, 22 nt, Human
gccuggcugagguggggaggca

SEQ ID NO: 317287 - RNA, 22 nt, Human
cugugcuuaccugcccagguga

SEQ ID NO: 317288 - RNA, 23 nt, Human
uuucuguuggguauauauccaag

SEQ ID NO: 317289 - RNA, 22 nt, Human
agggagaaugaccaagguauau

SEQ ID NO: 317290 - RNA, 22 nt, Human
ucaggaugguccuuuaugagaa

SEQ ID NO: 317291 - RNA, 22 nt, Human
ccaguguuuuccaguuugccca

SEQ ID NO: 317292 - RNA, 22 nt, Human
agucuacaaucuuaaaugaacu

SEQ ID NO: 317293 - RNA, 22 nt, Human
ugaggcuguucuaccagggcca

SEQ ID NO: 317294 - RNA, 22 nt, Human
uaugagaacgggggcguguggg

SEQ ID NO: 317295 - RNA, 22 nt, Human
cuggcagcaguuaugaaacaau

SEQ ID NO: 317296 - RNA, 22 nt, Human
cagggcucaucugugugaccag

SEQ ID NO: 317297 - RNA, 22 nt, Human
aaguaugugauacauguuaauu

SEQ ID NO: 317298 - RNA, 22 nt, Human
uguggugagaaacugguagauu

SEQ ID NO: 317299 - RNA, 22 nt, Human
aaacagcugucauuguuuuaaa

SEQ ID NO: 317300 - RNA, 22 nt, Human
gauaaugaugacaaugacaacc

SEQ ID NO: 317301 - RNA, 22 nt, Human
uuucaugcacaaaugagcaagg

SEQ ID NO: 317302 - RNA, 22 nt, Human
ccagugggugcugggcucugcc

SEQ ID NO: 317303 - RNA, 22 nt, Human
acugcuuacaaaaggaaagaau

SEQ ID NO: 317304 - RNA, 22 nt, Human
ccuggagcuuggucacgcugcg

SEQ ID NO: 317305 - RNA, 22 nt, Human
cagcugcuguuacugcuuauua

SEQ ID NO: 317306 - RNA, 22 nt, Human
ugaaaugaagggcuuguucugg

SEQ ID NO: 317307 - RNA, 22 nt, Human
ggucucagaucuuuauuaaggc

SEQ ID NO: 317308 - RNA, 22 nt, Human
uagccucuggaauccuuucucu

SEQ ID NO: 317309 - RNA, 22 nt, Human
auuauguaacugugguucagca

SEQ ID NO: 317310 - RNA, 22 nt, Human
cagccccucccucaggcaggug

SEQ ID NO: 317311 - RNA, 22 nt, Human
ucacaugcuugaggaaagaaaa

SEQ ID NO: 317312 - RNA, 22 nt, Human
acuuccugggcaugcagagucc

SEQ ID NO: 317313 - RNA, 22 nt, Human
cugugagcuggguggccaggac

SEQ ID NO: 317314 - RNA, 22 nt, Human
uggcagaggagaauuaagauua

SEQ ID NO: 317315 - RNA, 22 nt, Human
aaucuggcucagaagaagauga

SEQ ID NO: 317316 - RNA, 22 nt, Human
aaguucuugauaaguccacugu

SEQ ID NO: 317317 - RNA, 22 nt, Human
aucuggcuauugacauguuaua

SEQ ID NO: 317318 - RNA, 22 nt, Human
cagcucuguugccaaagugggc

SEQ ID NO: 317319 - RNA, 22 nt, Human
auuucuucaggucagaaauaga

SEQ ID NO: 317320 - RNA, 22 nt, Human
agcagcucuguuuaccuggagg

SEQ ID NO: 317321 - RNA, 22 nt, Human
gaugcacuuucuuuucaacagu

SEQ ID NO: 317322 - RNA, 22 nt, Human
ucuguucagcugccucagggua

SEQ ID NO: 317323 - RNA, 22 nt, Human
auaugaaaagaagucaccauug

SEQ ID NO: 317324 - RNA, 22 nt, Human
cagggacugagauccagacugu

SEQ ID NO: 317325 - RNA, 22 nt, Human
ucagugcagaauagugaugcau

SEQ ID NO: 317326 - RNA, 22 nt, Human
uagaaacauauaggauggcagg

SEQ ID NO: 317327 - RNA, 22 nt, Human
ggcaaaguuuucaucucauaac

SEQ ID NO: 317328 - RNA, 22 nt, Human
cugcaggcucgaagacacggau

SEQ ID NO: 317329 - RNA, 20 nt, Human
aucagcaacugccacucagu

SEQ ID NO: 317330 - RNA, 22 nt, Human
caccccagucuaaaaccagccu

SEQ ID NO: 317331 - RNA, 22 nt, Human
guaucacuuuugagagugagaa

SEQ ID NO: 317332 - RNA, 22 nt, Human
cuccucagcugggaggaguccc

SEQ ID NO: 317333 - RNA, 21 nt, Human
ugccaggccugagcugggguc

SEQ ID NO: 317334 - RNA, 22 nt, Human
gucccuaguggaaagacaugau

SEQ ID NO: 317335 - RNA, 22 nt, Human
uggcucagucuggguugacuga

SEQ ID NO: 317336 - RNA, 22 nt, Human
ucuguucuauuggucuaugugu

SEQ ID NO: 317337 - RNA, 22 nt, Human
aauuugcaugaugagaacaaua

SEQ ID NO: 317338 - RNA, 22 nt, Human
uagaaauguuagauguauugag

SEQ ID NO: 317339 - RNA, 22 nt, Human
acuugauuuugaaccuuucuac

SEQ ID NO: 317340 - RNA, 22 nt, Human
cagucacauggaugauggauag

SEQ ID NO: 317341 - RNA, 22 nt, Human
cuucaucaacucuaacaaaugu

SEQ ID NO: 317342 - RNA, 22 nt, Human
ugaagcaguuacuggguguuaa

SEQ ID NO: 317343 - RNA, 22 nt, Human
gggaaggagguggcuugaagug

SEQ ID NO: 317344 - RNA, 23 nt, Human
ccugcagcugcuggggcuccacc

SEQ ID NO: 317345 - RNA, 22 nt, Human
agcugucugucuccugaggaga

SEQ ID NO: 317346 - RNA, 22 nt, Human
cagcaauaagguaagcuucucc

SEQ ID NO: 317347 - RNA, 23 nt, Human
aaauuauugcucuucaauugccu

SEQ ID NO: 317348 - RNA, 20 nt, Human
ccuggcuuugcaucugugau

SEQ ID NO: 317349 - RNA, 22 nt, Human
uugagaagaauguguugaguuu

SEQ ID NO: 317350 - RNA, 22 nt, Human
uauuccagguauucuucaagag

SEQ ID NO: 317351 - RNA, 22 nt, Human
aagggcagggaguuugugucua

SEQ ID NO: 317352 - RNA, 22 nt, Human
agugaggggcagcugagugggc

SEQ ID NO: 317353 - RNA, 23 nt, Human
cccuguagcccaggacaggcuuu

SEQ ID NO: 317354 - RNA, 22 nt, Human
accugggagucacaccugagaa

SEQ ID NO: 317355 - RNA, 22 nt, Human
caaauaucuuuggcaaagagaa

SEQ ID NO: 317356 - RNA, 20 nt, Human
agugucugggccucaggccc

SEQ ID NO: 317357 - RNA, 22 nt, Human
cauuuguauguuccuccuuagg

SEQ ID NO: 317358 - RNA, 22 nt, Human
uuucacaauuuuaaggagcaaa

SEQ ID NO: 317359 - RNA, 18 nt, Human
ugcuggguaacuguaugg

SEQ ID NO: 317360 - RNA, 22 nt, Human
ucuacuauguuucuuaaauaga

SEQ ID NO: 317361 - RNA, 22 nt, Human
aucuguuccccuaugcucucua

SEQ ID NO: 317362 - RNA, 22 nt, Human
uaugcacacauguaugcaugug

SEQ ID NO: 317363 - RNA, 22 nt, Human
ggggcugggauuugaacccagg

SEQ ID NO: 317364 - RNA, 22 nt, Human
ggcugcuguacugaugucaguu

SEQ ID NO: 317365 - RNA, 20 nt, Human
uggaggcaccuguggagauc

SEQ ID NO: 317366 - RNA, 22 nt, Human
guuaugaaauaaauauagauca

SEQ ID NO: 317367 - RNA, 23 nt, Human
ccugaagggucaggguccucagc

SEQ ID NO: 317368 - RNA, 22 nt, Human
uuucuucucacccaggacagag

SEQ ID NO: 317369 - RNA, 22 nt, Human
gggcuggaucuccugcaggcag

SEQ ID NO: 317370 - RNA, 22 nt, Human
ugaggccacuuccccacagccc

SEQ ID NO: 317371 - RNA, 22 nt, Human
agcaccugucacaagcagaagg

SEQ ID NO: 317372 - RNA, 22 nt, Human
caggacaguauaggcuuuagga

SEQ ID NO: 317373 - RNA, 22 nt, Human
ugaggccagucucaucacaggc

SEQ ID NO: 317374 - RNA, 22 nt, Human
cccccagccagcagugcucagc

SEQ ID NO: 317375 - RNA, 22 nt, Human
uacuuacagagcuuauaaguua

SEQ ID NO: 317376 - RNA, 22 nt, Human
uccauguguuuuccuguccaca

SEQ ID NO: 317377 - RNA, 22 nt, Human
ucauuuuucacacagggucacc

SEQ ID NO: 317378 - RNA, 22 nt, Human
gccuucaguagugucagcugua

SEQ ID NO: 317379 - RNA, 22 nt, Human
ucaucaaagcgcuuggaguagg

SEQ ID NO: 317380 - RNA, 21 nt, Human
uccuuccuugagguccuuucc

SEQ ID NO: 317381 - RNA, 22 nt, Human
ggcuuugccuggaauuuccuug

SEQ ID NO: 317382 - RNA, 22 nt, Human
aagauuuccuucaguagagcua

SEQ ID NO: 317383 - RNA, 22 nt, Human
ugaaagaacuagcaucuucaag

SEQ ID NO: 317384 - RNA, 22 nt, Human
gagguggccucaagcagucuuc

SEQ ID NO: 317385 - RNA, 18 nt, Human
aggccugggaagcugagg

SEQ ID NO: 317386 - RNA, 19 nt, Human
ccagagcccgccagauggg

SEQ ID NO: 317387 - RNA, 22 nt, Human
uguauguaaaguuuguaauaga

SEQ ID NO: 317388 - RNA, 22 nt, Human
cagagcugggaucccaugggcg

SEQ ID NO: 317389 - RNA, 22 nt, Human
ccugggaagagcugacaggagg

SEQ ID NO: 317390 - RNA, 18 nt, Human
gcucugcccaggcugccc

SEQ ID NO: 317391 - RNA, 22 nt, Human
cauguacauucuguagauggag

SEQ ID NO: 317392 - RNA, 22 nt, Human
cccugagagugagugccaccuu

SEQ ID NO: 317393 - RNA, 22 nt, Human
acuuucuccagaaaaccaagga

SEQ ID NO: 317394 - RNA, 22 nt, Human
gcuuagucaauuauaaauaggc

SEQ ID NO: 317395 - RNA, 20 nt, Human
ggggcccaagcccucuugcc

SEQ ID NO: 317396 - RNA, 22 nt, Human
augcaguauaaaucauuucugg

SEQ ID NO: 317397 - RNA, 22 nt, Human
aggccagcucacccuggcuccu

SEQ ID NO: 317398 - RNA, 22 nt, Human
uggucaguugcaucagagaagu

SEQ ID NO: 317399 - RNA, 22 nt, Human
gcucuguguccacagcuggaaa

SEQ ID NO: 317400 - RNA, 22 nt, Human
ccuggcugcauuuugcuggaug

SEQ ID NO: 317401 - RNA, 16 nt, Human
ugggcagaugagaaga

SEQ ID NO: 317402 - RNA, 22 nt, Human
ggcucugcaugugagugggugg

SEQ ID NO: 317403 - RNA, 22 nt, Human
agaugcugugucuguucccuug

SEQ ID NO: 317404 - RNA, 22 nt, Human
ugggggagcgacagacauaauu

SEQ ID NO: 317405 - RNA, 22 nt, Human
ugaaucauggauaaauagcuua

SEQ ID NO: 317406 - RNA, 22 nt, Human
cuguaauucacuagggucagcg

SEQ ID NO: 317407 - RNA, 22 nt, Human
uuucuguuaggcaucauuuuaa

SEQ ID NO: 317408 - RNA, 22 nt, Human
ugagccuggcggaagcagcgug

SEQ ID NO: 317409 - RNA, 22 nt, Human
uucaugaauguuccaugugagu

SEQ ID NO: 317410 - RNA, 22 nt, Human
gcccagcacauugcugaggacc

SEQ ID NO: 317411 - RNA, 23 nt, Human
uagagcagggaaaucugucagag

SEQ ID NO: 317412 - RNA, 22 nt, Human
ggcagcuccucucagcaaaaga

SEQ ID NO: 317413 - RNA, 22 nt, Human
auuagcugaccucuaaggagcc

SEQ ID NO: 317414 - RNA, 22 nt, Human
ucucaguguuuaaaaagauuuc

SEQ ID NO: 317415 - RNA, 22 nt, Human
ugugcuucaucacuucucaguu

SEQ ID NO: 317416 - RNA, 16 nt, Human
gggcugggggauucug

SEQ ID NO: 317417 - RNA, 22 nt, Human
ugggacagagugagcuuuggcc

SEQ ID NO: 317418 - RNA, 22 nt, Human
gcccauccauggggucauggcc

SEQ ID NO: 317419 - RNA, 22 nt, Human
gcagagccccucaagccagccu

SEQ ID NO: 317420 - RNA, 22 nt, Human
agcuggagcuucaagcagguaa

SEQ ID NO: 317421 - RNA, 22 nt, Human
ugcucugcaagcaggagcaaga

SEQ ID NO: 317422 - RNA, 22 nt, Human
uaauuauuugaagacauuagag

SEQ ID NO: 317423 - RNA, 22 nt, Human
gagcuuggugaugccuccuggu

SEQ ID NO: 317424 - RNA, 22 nt, Human
uccugccucaggcucuggagua

SEQ ID NO: 317425 - RNA, 22 nt, Human
aacaaaugauuguugguuggag

SEQ ID NO: 317426 - RNA, 22 nt, Human
ccucuucuagguuucagccugc

SEQ ID NO: 317427 - RNA, 22 nt, Human
ucugugcauuguaacaacuaaa

SEQ ID NO: 317428 - RNA, 22 nt, Human
guuucacagucugcagaauuuu

SEQ ID NO: 317429 - RNA, 20 nt, Human
cagcucugggaaagaggcca

SEQ ID NO: 317430 - RNA, 22 nt, Human
ggcccuguccuggcugucuccg

SEQ ID NO: 317431 - RNA, 22 nt, Human
uuagaacugaagaagauuaagg

SEQ ID NO: 317432 - RNA, 22 nt, Human
gugcugugucuaucaggaauaa

SEQ ID NO: 317433 - RNA, 22 nt, Human
uauuucagucacuucuucucug

SEQ ID NO: 317434 - RNA, 22 nt, Human
ggcuggagugggcuccagaguu

SEQ ID NO: 317435 - RNA, 22 nt, Human
guucuucaccaaggucagaggc

SEQ ID NO: 317436 - RNA, 22 nt, Human
gucucaguuugaagugaugcca

SEQ ID NO: 317437 - RNA, 22 nt, Human
acucugaggcaggucagggcag

SEQ ID NO: 317438 - RNA, 22 nt, Human
cagcauggggaucacuguaggc

SEQ ID NO: 317439 - RNA, 22 nt, Human
ucagugugaggggcuggguccu

SEQ ID NO: 317440 - RNA, 22 nt, Human
agggaugauggaaagaagcagg

SEQ ID NO: 317441 - RNA, 22 nt, Human
ggcaaaaacagcaaugacuuuu

SEQ ID NO: 317442 - RNA, 21 nt, Human
aguucauacugaguaacaaaa

SEQ ID NO: 317443 - RNA, 22 nt, Human
cagucccuaguggagcucacag

SEQ ID NO: 317444 - RNA, 22 nt, Human
agucucuuauucccuauugcug

SEQ ID NO: 317445 - RNA, 22 nt, Human
aaaugcaccuugcugugagacu

SEQ ID NO: 317446 - RNA, 22 nt, Human
auguagagcaguguuguccaau

SEQ ID NO: 317447 - RNA, 22 nt, Human
ugggugagugggaaaagcccag

SEQ ID NO: 317448 - RNA, 22 nt, Human
cacaggggcaaacuguagggga

SEQ ID NO: 317449 - RNA, 22 nt, Human
aggggugauuugggacaggaca

SEQ ID NO: 317450 - RNA, 21 nt, Human
ucucuggaguuagcagagaga

SEQ ID NO: 317451 - RNA, 22 nt, Human
ccugggggccaggaagguguga

SEQ ID NO: 317452 - RNA, 22 nt, Human
ggcuucaccaggugcaugcaug

SEQ ID NO: 317453 - RNA, 22 nt, Human
gggcugggauugcuugcuguga

SEQ ID NO: 317454 - RNA, 22 nt, Human
uccagcccugcuuccugccuca

SEQ ID NO: 317455 - RNA, 22 nt, Human
cugcugugcacccaggaaggcu

SEQ ID NO: 317456 - RNA, 19 nt, Human
guggccugcgcugggugcg

SEQ ID NO: 317457 - RNA, 23 nt, Human
ucagaaugcacugaauuuacccu

SEQ ID NO: 317458 - RNA, 22 nt, Human
guugcacaguuccucaagcagg

SEQ ID NO: 317459 - RNA, 22 nt, Human
agucaauucuuuucaacucaag

SEQ ID NO: 317460 - RNA, 22 nt, Human
cagguccccuccccuaccaggc

SEQ ID NO: 317461 - RNA, 22 nt, Human
acuuugcagagccagaagagaa

SEQ ID NO: 317462 - RNA, 22 nt, Human
gccugagcaggcguggaccaug

SEQ ID NO: 317463 - RNA, 22 nt, Human
agcucugggccaggaacccuaa

SEQ ID NO: 317464 - RNA, 22 nt, Human
ggggaugguagaccggugacgu

SEQ ID NO: 317465 - RNA, 22 nt, Human
ucugaaaguaucuggaucuuuu

SEQ ID NO: 317466 - RNA, 22 nt, Human
ucugucaccgagggcauccaaa

SEQ ID NO: 317467 - RNA, 22 nt, Human
uuccauauguauauagcuguua

SEQ ID NO: 317468 - RNA, 22 nt, Human
augggaggaugcucgggugcuc

SEQ ID NO: 317469 - RNA, 22 nt, Human
gugcugucaauugcuuucagua

SEQ ID NO: 317470 - RNA, 22 nt, Human
gguggcaggcccugagcauccc

SEQ ID NO: 317471 - RNA, 22 nt, Human
gagaggucaucucccaucagca

SEQ ID NO: 317472 - RNA, 22 nt, Human
cagcuguucggggcuggcaugu

SEQ ID NO: 317473 - RNA, 22 nt, Human
gucacuguauccagguuccagc

SEQ ID NO: 317474 - RNA, 22 nt, Human
agguuuucagcuguauccugag

SEQ ID NO: 317475 - RNA, 22 nt, Human
gcaguguuggcaggauggggcu

SEQ ID NO: 317476 - RNA, 21 nt, Human
aagaaguuuggauuuuguccu

SEQ ID NO: 317477 - RNA, 22 nt, Human
ugagacaguucugcagcugggu

SEQ ID NO: 317478 - RNA, 22 nt, Human
uuagcucagaaaauuuaaacuu

SEQ ID NO: 317479 - RNA, 22 nt, Human
ggagccuggcaaugcugcgucc

SEQ ID NO: 317480 - RNA, 22 nt, Human
ugcucuggggagcuccucugcg

SEQ ID NO: 317481 - RNA, 22 nt, Human
uuuuaucuucauuccuaucuac

SEQ ID NO: 317482 - RNA, 22 nt, Human
gggcagagaaauggacaguugg

SEQ ID NO: 317483 - RNA, 22 nt, Human
gaguggggcguggauccagcgu

SEQ ID NO: 317484 - RNA, 22 nt, Human
agggcugcaucugccuggugaa

SEQ ID NO: 317485 - RNA, 22 nt, Human
uccuuagagacaagaccaguuu

SEQ ID NO: 317486 - RNA, 22 nt, Human
ccagccccuauccucgcuccac

SEQ ID NO: 317487 - RNA, 22 nt, Human
ucagugcuucggcgagcaccua

SEQ ID NO: 317488 - RNA, 22 nt, Human
ucacauuuuccuugguaucugu

SEQ ID NO: 317489 - RNA, 18 nt, Human
gggcaagcggcugucacc

SEQ ID NO: 317490 - RNA, 22 nt, Human
caagcuccuuacauccacaggg

SEQ ID NO: 317491 - RNA, 22 nt, Human
uugcucaggcuggugugcagug

SEQ ID NO: 317492 - RNA, 22 nt, Human
cccagcugcaccucuauggccu

SEQ ID NO: 317493 - RNA, 19 nt, Human
aauguaguguuaugucaac

SEQ ID NO: 317494 - RNA, 22 nt, Human
cagagcuguuacuauucaugaa

SEQ ID NO: 317495 - RNA, 22 nt, Human
uugaaucauuacaauagauaag

SEQ ID NO: 317496 - RNA, 22 nt, Human
cagcccaggccgacaguuccuc

SEQ ID NO: 317497 - RNA, 22 nt, Human
ucucuucuaacacuagaaauuc

SEQ ID NO: 317498 - RNA, 21 nt, Human
gggccacaccuucugcagacc

SEQ ID NO: 317499 - RNA, 22 nt, Human
gauguagacacuuggaggcuua

SEQ ID NO: 317500 - RNA, 22 nt, Human
aggucaaguuuagauagaguua

SEQ ID NO: 317501 - RNA, 22 nt, Human
ucugccagaaguucugagagua

SEQ ID NO: 317502 - RNA, 22 nt, Human
auauacuuggagacuaucauug

SEQ ID NO: 317503 - RNA, 23 nt, Human
ccagcccuccaccagcucuaggc

SEQ ID NO: 317504 - RNA, 22 nt, Human
aggcagcagccacaaggccuga

SEQ ID NO: 317505 - RNA, 22 nt, Human
ccacagggcucuaggcgcuucc

SEQ ID NO: 317506 - RNA, 22 nt, Human
aggucauugaaguuauuuucuu

SEQ ID NO: 317507 - RNA, 22 nt, Human
cugccuggccugaucuccacgc

SEQ ID NO: 317508 - RNA, 22 nt, Human
caggagcucucaucgucagggc

SEQ ID NO: 317509 - RNA, 22 nt, Human
uccugagggcgauucagcaggu

SEQ ID NO: 317510 - RNA, 22 nt, Human
ggagagugggagcaacuguugc

SEQ ID NO: 317511 - RNA, 22 nt, Human
cugcugugcagacagacucucu

SEQ ID NO: 317512 - RNA, 22 nt, Human
ucccaggcuaggccucugcguu

SEQ ID NO: 317513 - RNA, 22 nt, Human
ccacccagccagaugcaggaag

SEQ ID NO: 317514 - RNA, 21 nt, Human
agagucugcauuucugacaag

SEQ ID NO: 317515 - RNA, 22 nt, Human
cugggaguguucuaggucacau

SEQ ID NO: 317516 - RNA, 20 nt, Human
auuccauaguuggcacuuuu

SEQ ID NO: 317517 - RNA, 22 nt, Human
ucuccucugcgcggcagugccc

SEQ ID NO: 317518 - RNA, 23 nt, Human
aggagccaggaaccagcuucccc

SEQ ID NO: 317519 - RNA, 22 nt, Human
uuuguagaggguaauugacaga

SEQ ID NO: 317520 - RNA, 21 nt, Human
aaagagguuaauauuguaagu

SEQ ID NO: 317521 - RNA, 22 nt, Human
acaaagugcacaagaugagaac

SEQ ID NO: 317522 - RNA, 22 nt, Human
uuaaaaauauguagggcccgau

SEQ ID NO: 317523 - RNA, 22 nt, Human
aauguaugugauuauuccucua

SEQ ID NO: 317524 - RNA, 22 nt, Human
aggcacugacaauucuggacug

SEQ ID NO: 317525 - RNA, 20 nt, Human
uucuggaggcuacaagucug

SEQ ID NO: 317526 - RNA, 22 nt, Human
acugccaggauggcacuagagg

SEQ ID NO: 317527 - RNA, 22 nt, Human
ucgagcucuggagccaaggaug

SEQ ID NO: 317528 - RNA, 22 nt, Human
auuucacucauucauguuacuu

SEQ ID NO: 317529 - RNA, 23 nt, Human
gugauuucagggaacagaaucag

SEQ ID NO: 317530 - RNA, 22 nt, Human
agggcagaccacgugcaaggau

SEQ ID NO: 317531 - RNA, 22 nt, Human
ucagaggagaaguugggaaaau

SEQ ID NO: 317532 - RNA, 22 nt, Human
gauaccagacagggagggagaa

SEQ ID NO: 317533 - RNA, 22 nt, Human
cagcugcccaggccaccuggag

SEQ ID NO: 317534 - RNA, 22 nt, Human
gcagggacgccagggacagcaa

SEQ ID NO: 317535 - RNA, 22 nt, Human
agcugguucagaaauuagaugg

SEQ ID NO: 317536 - RNA, 22 nt, Human
gcagagccagaauggccaggac

SEQ ID NO: 317537 - RNA, 22 nt, Human
gaaggagggugcggaucugagc

SEQ ID NO: 317538 - RNA, 22 nt, Human
gucucagauaacauguauucua

SEQ ID NO: 317539 - RNA, 22 nt, Human
ugaugcugcugggaguggugcu

SEQ ID NO: 317540 - RNA, 22 nt, Human
acauucuuaacaguuaaaaacu

SEQ ID NO: 317541 - RNA, 22 nt, Human
gcugcugucacggugcuaaggg

SEQ ID NO: 317542 - RNA, 22 nt, Human
agugaaauaaagcugccuaugg

SEQ ID NO: 317543 - RNA, 22 nt, Human
ccccaccugugcgucugccgca

SEQ ID NO: 317544 - RNA, 22 nt, Human
agcugagccagcagcaacagga

SEQ ID NO: 317545 - RNA, 22 nt, Human
aauguauguguauaucaaauca

SEQ ID NO: 317546 - RNA, 22 nt, Human
aaaucaguuguuauauuaaaga

SEQ ID NO: 317547 - RNA, 22 nt, Human
cuggguggcagagccugcagug

SEQ ID NO: 317548 - RNA, 22 nt, Human
aggcacugcagauuacaggcgc

SEQ ID NO: 317549 - RNA, 22 nt, Human
cuugggaaugcuaacagaugac

SEQ ID NO: 317550 - RNA, 22 nt, Human
acacaguaugaaaagucuaguu

SEQ ID NO: 317551 - RNA, 22 nt, Human
gaggguccccaugcagagcuca

SEQ ID NO: 317552 - RNA, 22 nt, Human
agcugccaucugaagaacugca

SEQ ID NO: 317553 - RNA, 22 nt, Human
ucuuugcaaauguuauuaucuu

SEQ ID NO: 317554 - RNA, 22 nt, Human
guggcagcaaaauccugcauuc

SEQ ID NO: 317555 - RNA, 22 nt, Human
ugcagcagucagucaggccugg

SEQ ID NO: 317556 - RNA, 22 nt, Human
acccaggguagagugcaguggc

SEQ ID NO: 317557 - RNA, 22 nt, Human
uaagugcaauguuuuacuuaaa

SEQ ID NO: 317558 - RNA, 21 nt, Human
aucuuuauuacgcagagaaga

SEQ ID NO: 317559 - RNA, 22 nt, Human
gacaguuuuuaauccuuucaug

SEQ ID NO: 317560 - RNA, 22 nt, Human
gcugugugacugagagccuggc

SEQ ID NO: 317561 - RNA, 22 nt, Human
ggccacagucucuggaaggaug

SEQ ID NO: 317562 - RNA, 17 nt, Human
aaaauucuguaaagagg

SEQ ID NO: 317563 - RNA, 22 nt, Human
uuagccauggacugaauugacu

SEQ ID NO: 317564 - RNA, 22 nt, Human
ggcuccuggggaggugagcuug

SEQ ID NO: 317565 - RNA, 22 nt, Human
uggcugcuuguuuuagugaggc

SEQ ID NO: 317566 - RNA, 22 nt, Human
agcagcugagaugguaagauuc

SEQ ID NO: 317567 - RNA, 22 nt, Human
agggcuggcaagggauugaaau

SEQ ID NO: 317568 - RNA, 22 nt, Human
cuguauuuaguuaaaaugcuaa

SEQ ID NO: 317569 - RNA, 20 nt, Human
ucucugcuguccacauuugc

SEQ ID NO: 317570 - RNA, 22 nt, Human
ucaguguuugaacccaggguua

SEQ ID NO: 317571 - RNA, 22 nt, Human
ucugagagucucugaggcagau

SEQ ID NO: 317572 - RNA, 22 nt, Human
uggccuggcucacagugagauu

SEQ ID NO: 317573 - RNA, 18 nt, Human
cagucccaaaccuuagga

SEQ ID NO: 317574 - RNA, 20 nt, Human
uugauaggcagcuugucagg

SEQ ID NO: 317575 - RNA, 22 nt, Human
uauuuagaacagacaauagaaa

SEQ ID NO: 317576 - RNA, 19 nt, Human
ucucugcuucucuuggcau

SEQ ID NO: 317577 - RNA, 22 nt, Human
accuggccauccagcuggcauc

SEQ ID NO: 317578 - RNA, 20 nt, Human
uggagcugugguaaggagca

SEQ ID NO: 317579 - RNA, 22 nt, Human
uucuuucccaguagaugugaaa

SEQ ID NO: 317580 - RNA, 22 nt, Human
aggggugaaagagggcccucaa

SEQ ID NO: 317581 - RNA, 22 nt, Human
ugcagcauugcaaagcagucuu

SEQ ID NO: 317582 - RNA, 22 nt, Human
aauguguagcauuuaaugcagu

SEQ ID NO: 317583 - RNA, 22 nt, Human
gcucccacgcaauucuuuucag

SEQ ID NO: 317584 - RNA, 22 nt, Human
auauaucaugaguaaaacuuga

SEQ ID NO: 317585 - RNA, 22 nt, Human
uauuugaaaguguacaaaaacu

SEQ ID NO: 317586 - RNA, 22 nt, Human
uaaauguggagacucaggaguc

SEQ ID NO: 317587 - RNA, 22 nt, Human
uaaagucaucuuuacaucuuug

SEQ ID NO: 317588 - RNA, 22 nt, Human
uugaaauggaagugaaaauucu

SEQ ID NO: 317589 - RNA, 22 nt, Human
ccaguguuuucauccucccuug

SEQ ID NO: 317590 - RNA, 22 nt, Human
cuuucaaugugccugccuuggg

SEQ ID NO: 317591 - RNA, 22 nt, Human
uugacaauguccuuugaauuuc

SEQ ID NO: 317592 - RNA, 22 nt, Human
gacccuguuucuacaaauaauu

SEQ ID NO: 317593 - RNA, 22 nt, Human
cuucuucaguugcauguauugg

SEQ ID NO: 317594 - RNA, 22 nt, Human
ucucccacugcaagcccaggcu

SEQ ID NO: 317595 - RNA, 22 nt, Human
aggaccagccuccaggucucuu

SEQ ID NO: 317596 - RNA, 22 nt, Human
ucacugcagagaccucuaguca

SEQ ID NO: 317597 - RNA, 22 nt, Human
gagagaagaauguuccgaggcc

SEQ ID NO: 317598 - RNA, 22 nt, Human
ugccaggggaccuagggauguc

SEQ ID NO: 317599 - RNA, 22 nt, Human
ccugauggagcccugcugcaug

SEQ ID NO: 317600 - RNA, 22 nt, Human
uaauuucaccguugcuagaaau

SEQ ID NO: 317601 - RNA, 22 nt, Human
ucagcucuguuuugaguggaac

SEQ ID NO: 317602 - RNA, 18 nt, Human
ugacagaaccuggagccu

SEQ ID NO: 317603 - RNA, 22 nt, Human
aaaggcuccuucucccaugacc

SEQ ID NO: 317604 - RNA, 22 nt, Human
gccaccccauagguguuaggug

SEQ ID NO: 317605 - RNA, 19 nt, Human
aagaagcaauaagcuguga

SEQ ID NO: 317606 - RNA, 22 nt, Human
uagaaaagaauuuuauuugaua

SEQ ID NO: 317607 - RNA, 21 nt, Human
cagcuuugucugucuucgggg

SEQ ID NO: 317608 - RNA, 22 nt, Human
gaauagcuuccuuuuuuccaaa

SEQ ID NO: 317609 - RNA, 22 nt, Human
gcucccaccuccagccugaguu

SEQ ID NO: 317610 - RNA, 16 nt, Human
ccuuucucugccuucc

SEQ ID NO: 317611 - RNA, 17 nt, Human
uuccaguuuaguauugu

SEQ ID NO: 317612 - RNA, 22 nt, Human
caucugccuaaguggcccuguu

SEQ ID NO: 317613 - RNA, 22 nt, Human
gugcuuccaucuagagggucac

SEQ ID NO: 317614 - RNA, 22 nt, Human
ugucccagcacuuugggagucu

SEQ ID NO: 317615 - RNA, 22 nt, Human
aaguguagauuauggagugucu

SEQ ID NO: 317616 - RNA, 22 nt, Human
uuucacaagacagcuacuguug

SEQ ID NO: 317617 - RNA, 21 nt, Human
uuugaaagugggugauucuuu

SEQ ID NO: 317618 - RNA, 22 nt, Human
ugagcccaggaguuggaggcug

SEQ ID NO: 317619 - RNA, 22 nt, Human
ccccugccagcuaucccugaac

SEQ ID NO: 317620 - RNA, 21 nt, Human
acagcaagccuuccuuucagg

SEQ ID NO: 317621 - RNA, 22 nt, Human
cagaguguggcaucuuccaacu

SEQ ID NO: 317622 - RNA, 22 nt, Human
uaaggccaauuacauauguuca

SEQ ID NO: 317623 - RNA, 22 nt, Human
caaaccuugcagaacugggcag

SEQ ID NO: 317624 - RNA, 22 nt, Human
uacauucaacaugucacuaugu

SEQ ID NO: 317625 - RNA, 22 nt, Human
uggccagguguggguucucaga

SEQ ID NO: 317626 - RNA, 22 nt, Human
uggcaggguuggccaccuuacc

SEQ ID NO: 317627 - RNA, 18 nt, Human
uguuccaaggaaggaauc

SEQ ID NO: 317628 - RNA, 22 nt, Human
agaaaucuuugaaguguaaugu

SEQ ID NO: 317629 - RNA, 22 nt, Human
cccugccuuguuggagccuaug

SEQ ID NO: 317630 - RNA, 22 nt, Human
ucagggcugccgggcagaccgu

SEQ ID NO: 317631 - RNA, 22 nt, Human
gaaauuuauuaucuacaucauu

SEQ ID NO: 317632 - RNA, 22 nt, Human
aagggcugcuguagaagcagag

SEQ ID NO: 317633 - RNA, 22 nt, Human
ugggaugggaucucgcuguguc

SEQ ID NO: 317634 - RNA, 22 nt, Human
ugaugggaggugcugcaggacc

SEQ ID NO: 317635 - RNA, 22 nt, Human
aaaugcacugaacacauguugu

SEQ ID NO: 317636 - RNA, 19 nt, Human
ggcugucuggcguguggau

SEQ ID NO: 317637 - RNA, 22 nt, Human
uugcuagcugguguaugcauug

SEQ ID NO: 317638 - RNA, 22 nt, Human
agguggagacccagagaaggcg

SEQ ID NO: 317639 - RNA, 22 nt, Human
agauuuagacugccuuaaucau

SEQ ID NO: 317640 - RNA, 21 nt, Human
ccugcagcaccagaaggagau

SEQ ID NO: 317641 - RNA, 22 nt, Human
uccugcaguuacaucccagcca

SEQ ID NO: 317642 - RNA, 22 nt, Human
cccugcagaccaaugccauaga

SEQ ID NO: 317643 - RNA, 22 nt, Human
aggccugagcagaggaguggac

SEQ ID NO: 317644 - RNA, 22 nt, Human
ucucuucuuguguuuuccugcc

SEQ ID NO: 317645 - RNA, 22 nt, Human
cugugauuguuaguuccuauac

SEQ ID NO: 317646 - RNA, 22 nt, Human
gaggcagcagggcugguuccuu

SEQ ID NO: 317647 - RNA, 22 nt, Human
uggcacuggaaucguagccuug

SEQ ID NO: 317648 - RNA, 22 nt, Human
ccugagcuggaagagcuugugc

SEQ ID NO: 317649 - RNA, 22 nt, Human
accuugaugccuuuccaagaug

SEQ ID NO: 317650 - RNA, 22 nt, Human
cauguaaaacacucagaacagu

SEQ ID NO: 317651 - RNA, 22 nt, Human
aagggaaaucauauggugcagu

SEQ ID NO: 317652 - RNA, 19 nt, Human
augagcuggcauuucaggu

SEQ ID NO: 317653 - RNA, 22 nt, Human
ggcagcuccucaaaaaauuaaa

SEQ ID NO: 317654 - RNA, 22 nt, Human
caguagcacuagauaugugugg

SEQ ID NO: 317655 - RNA, 22 nt, Human
auucuaggcuugaaacaugaag

SEQ ID NO: 317656 - RNA, 18 nt, Human
cugccuguugcugagagg

SEQ ID NO: 317657 - RNA, 22 nt, Human
agugucugaaccaccggggcau

SEQ ID NO: 317658 - RNA, 22 nt, Human
agcugccagggacugggcaugg

SEQ ID NO: 317659 - RNA, 22 nt, Human
cuucaagagaaugcagggaugu

SEQ ID NO: 317660 - RNA, 22 nt, Human
agccucugcacgggcacgggug

SEQ ID NO: 317661 - RNA, 22 nt, Human
acugggccuggauuggcguguc

SEQ ID NO: 317662 - RNA, 16 nt, Human
gggggugagagagagu

SEQ ID NO: 317663 - RNA, 22 nt, Human
ugaagcagcaaaugaugggaga

SEQ ID NO: 317664 - RNA, 22 nt, Human
cugaggagagaucacguggugu

SEQ ID NO: 317665 - RNA, 22 nt, Human
gagcagaacuacucacauaucg

SEQ ID NO: 317666 - RNA, 22 nt, Human
aucagcaagcauuuauugagug

SEQ ID NO: 317667 - RNA, 22 nt, Human
ugggcagaaugugggauccaga

SEQ ID NO: 317668 - RNA, 22 nt, Human
aguuauauuccauagauucaga

SEQ ID NO: 317669 - RNA, 22 nt, Human
auaauaaaccaggaugggucug

SEQ ID NO: 317670 - RNA, 22 nt, Human
gaaaugaacugauuaucauugc

SEQ ID NO: 317671 - RNA, 22 nt, Human
uaugcacauuaucuaauccauu

SEQ ID NO: 317672 - RNA, 22 nt, Human
agucccagcccaguccuguaag

SEQ ID NO: 317673 - RNA, 22 nt, Human
caucugcuguuccuuggacuca

SEQ ID NO: 317674 - RNA, 22 nt, Human
ggcauggcucggagucagaaca

SEQ ID NO: 317675 - RNA, 22 nt, Human
uaaggcacccgugagcugccag

SEQ ID NO: 317676 - RNA, 22 nt, Human
uggccugggccggcagauauac

SEQ ID NO: 317677 - RNA, 22 nt, Human
aggguagggcccggagacagac

SEQ ID NO: 317678 - RNA, 19 nt, Human
acagaaauuaguuauuuuc

SEQ ID NO: 317679 - RNA, 22 nt, Human
uuuuaacuuaaaauacauagau

SEQ ID NO: 317680 - RNA, 22 nt, Human
uugaaucuauguauucagugua

SEQ ID NO: 317681 - RNA, 22 nt, Human
ugccucagagugggcuugcuau

SEQ ID NO: 317682 - RNA, 22 nt, Human
uaaagcacauaucuuacaauaa

SEQ ID NO: 317683 - RNA, 22 nt, Human
acaggcuucucacagaaaaggg

SEQ ID NO: 317684 - RNA, 20 nt, Human
uugcagcagugaggugaagg

SEQ ID NO: 317685 - RNA, 22 nt, Human
cuggguggaucgcagccccagg

SEQ ID NO: 317686 - RNA, 21 nt, Human
uccauaagagaccaucuccua

SEQ ID NO: 317687 - RNA, 22 nt, Human
guuuuucuuugugugaagacaa

SEQ ID NO: 317688 - RNA, 22 nt, Human
gggcuucucuuuagugagcuga

SEQ ID NO: 317689 - RNA, 22 nt, Human
ccacaggaccagaggagaucac

SEQ ID NO: 317690 - RNA, 22 nt, Human
caaugguggugucagaagagau

SEQ ID NO: 317691 - RNA, 22 nt, Human
aagccucaccuuuuagaagcua

SEQ ID NO: 317692 - RNA, 22 nt, Human
guaucuuuccacaucuucagua

SEQ ID NO: 317693 - RNA, 22 nt, Human
ccaucuccacugucccugucaa

SEQ ID NO: 317694 - RNA, 22 nt, Human
gauuuuaauuauaggagguccu

SEQ ID NO: 317695 - RNA, 22 nt, Human
guuuuuccugcugacuuggguc

SEQ ID NO: 317696 - RNA, 22 nt, Human
gcagcuggcucagagagguggg

SEQ ID NO: 317697 - RNA, 22 nt, Human
ccuggcaggccccuccuggauu

SEQ ID NO: 317698 - RNA, 22 nt, Human
acccaggagcaggcugggcagu

SEQ ID NO: 317699 - RNA, 22 nt, Human
ugcaggggcuugucugggccug

SEQ ID NO: 317700 - RNA, 19 nt, Human
gcccuccucacugagcucu

SEQ ID NO: 317701 - RNA, 22 nt, Human
ucauuuguucaucugcucuucu

SEQ ID NO: 317702 - RNA, 22 nt, Human
uuaacagagugccuggcaugua

SEQ ID NO: 317703 - RNA, 22 nt, Human
agauuucaauggauauugcaag

SEQ ID NO: 317704 - RNA, 22 nt, Human
aaugugguuaacccauuuaaga

SEQ ID NO: 317705 - RNA, 22 nt, Human
cagaaggcuggcagauugagau

SEQ ID NO: 317706 - RNA, 22 nt, Human
gccaccagccccaugcgcugug

SEQ ID NO: 317707 - RNA, 22 nt, Human
agaaaucagaacccugaaguuc

SEQ ID NO: 317708 - RNA, 22 nt, Human
acuuucuaggucucaguccuuu

SEQ ID NO: 317709 - RNA, 22 nt, Human
accagagcagacuacuggaggu

SEQ ID NO: 317710 - RNA, 22 nt, Human
aggcucuguuauucuagagggc

SEQ ID NO: 317711 - RNA, 22 nt, Human
ucucucagggggaaggcugaag

SEQ ID NO: 317712 - RNA, 22 nt, Human
caaauucucaagguuuauccca

SEQ ID NO: 317713 - RNA, 22 nt, Human
aaugucugccagaacugaucau

SEQ ID NO: 317714 - RNA, 22 nt, Human
uucacagacauugcagacugaa

SEQ ID NO: 317715 - RNA, 22 nt, Human
ugcugccacugguagucucauu

SEQ ID NO: 317716 - RNA, 22 nt, Human
uauuuucuguggaggaccagau

SEQ ID NO: 317717 - RNA, 22 nt, Human
aagaggaagucuccauggagag

SEQ ID NO: 317718 - RNA, 22 nt, Human
ucagagagugcaaaauauagcu

SEQ ID NO: 317719 - RNA, 22 nt, Human
cgagaguggacagggcgcagcu

SEQ ID NO: 317720 - RNA, 22 nt, Human
uaaggcaccauaauauauuuaa

SEQ ID NO: 317721 - RNA, 22 nt, Human
ccugggcuucugucuagauguu

SEQ ID NO: 317722 - RNA, 22 nt, Human
gcagggccuuagcagcggcugc

SEQ ID NO: 317723 - RNA, 22 nt, Human
gcagagcagugcuugcccagcg

SEQ ID NO: 317724 - RNA, 22 nt, Human
acagcuggaggccccauugucc

SEQ ID NO: 317725 - RNA, 22 nt, Human
aaaccuuuaccagacuagcaag

SEQ ID NO: 317726 - RNA, 22 nt, Human
cuggagccacuuuuuauccuuu

SEQ ID NO: 317727 - RNA, 22 nt, Human
cuuaagaauauugaaguugugg

SEQ ID NO: 317728 - RNA, 22 nt, Human
ggggagugacgcagggccauag

SEQ ID NO: 317729 - RNA, 22 nt, Human
uccagggguaccggccaggcag

SEQ ID NO: 317730 - RNA, 23 nt, Human
agaugaggcuucuccauguuggu

SEQ ID NO: 317731 - RNA, 22 nt, Human
gaaaggucuuccggucuuccag

SEQ ID NO: 317732 - RNA, 22 nt, Human
ucauaauacaaagaguucugca

SEQ ID NO: 317733 - RNA, 22 nt, Human
gcucugcugucuucuugcaggc

SEQ ID NO: 317734 - RNA, 22 nt, Human
gccugccuuuuggaggcacauu

SEQ ID NO: 317735 - RNA, 22 nt, Human
gccugcagccucaagggcugag

SEQ ID NO: 317736 - RNA, 22 nt, Human
uacauauagacaguuacucuag

SEQ ID NO: 317737 - RNA, 20 nt, Human
ugggcagcacugcuggcugg

SEQ ID NO: 317738 - RNA, 22 nt, Human
cuuguucaguugccucuccugc

SEQ ID NO: 317739 - RNA, 22 nt, Human
uuugacagacauuuacuacauu

SEQ ID NO: 317740 - RNA, 18 nt, Human
ccugcagcccaggaggcc

SEQ ID NO: 317741 - RNA, 22 nt, Human
cagacuugacggcagcugcuuu

SEQ ID NO: 317742 - RNA, 22 nt, Human
augcugugauuguagaaauauu

SEQ ID NO: 317743 - RNA, 22 nt, Human
uucugucaaacucacaggccga

SEQ ID NO: 317744 - RNA, 22 nt, Human
gcagggagguuugcugaccugg

SEQ ID NO: 317745 - RNA, 22 nt, Human
ugucacagggauaccauggggc

SEQ ID NO: 317746 - RNA, 23 nt, Human
agccagggcacugguggagauug

SEQ ID NO: 317747 - RNA, 22 nt, Human
ccuggccuggcacucccucugc

SEQ ID NO: 317748 - RNA, 22 nt, Human
ucucugcucugugccucaguuu

SEQ ID NO: 317749 - RNA, 22 nt, Human
guggccuuuccugaagaaauga

SEQ ID NO: 317750 - RNA, 22 nt, Human
cccaggcuggagugcaauggca

SEQ ID NO: 317751 - RNA, 22 nt, Human
ccucugggugggaggccgggcg

SEQ ID NO: 317752 - RNA, 22 nt, Human
uacauuguuuuuucuugccauc

SEQ ID NO: 317753 - RNA, 22 nt, Human
ugugccagaaaauaugcugagg

SEQ ID NO: 317754 - RNA, 22 nt, Human
uacaaagcuguauagccugguc

SEQ ID NO: 317755 - RNA, 22 nt, Human
gugcugggauuacaggugugag

SEQ ID NO: 317756 - RNA, 22 nt, Human
gcucaggacccaggugugaccu

SEQ ID NO: 317757 - RNA, 22 nt, Human
aaugucugccugaacuuuauau

SEQ ID NO: 317758 - RNA, 22 nt, Human
uuauugccugauugaggucauu

SEQ ID NO: 317759 - RNA, 22 nt, Human
aauggagacuucaaaauggauu

SEQ ID NO: 317760 - RNA, 22 nt, Human
ucugcugcugagcacacuccua

SEQ ID NO: 317761 - RNA, 22 nt, Human
ggugcccaccugucuuccugga

SEQ ID NO: 317762 - RNA, 22 nt, Human
uuccaggauagcuuucaggaau

SEQ ID NO: 317763 - RNA, 22 nt, Human
acauuucuccuugcaggaguca

SEQ ID NO: 317764 - RNA, 22 nt, Human
cuggagccaugucuugacugcu

SEQ ID NO: 317765 - RNA, 22 nt, Human
gccuggagcucuccacuugggg

SEQ ID NO: 317766 - RNA, 23 nt, Human
gcugucugucaucucugcgggag

SEQ ID NO: 317767 - RNA, 22 nt, Human
cagcucugagacugaggcuaug

SEQ ID NO: 317768 - RNA, 22 nt, Human
cagagcagcagagcuuccaugg

SEQ ID NO: 317769 - RNA, 22 nt, Human
gaugugagugguagcugggauu

SEQ ID NO: 317770 - RNA, 20 nt, Human
agaagcugauacugauggaa

SEQ ID NO: 317771 - RNA, 22 nt, Human
gucauuguguggacauggagaa

SEQ ID NO: 317772 - RNA, 20 nt, Human
gugugaagcccucaggagga

SEQ ID NO: 317773 - RNA, 22 nt, Human
aaagauuugaguucugcuuaua

SEQ ID NO: 317774 - RNA, 22 nt, Human
uucuucaaccaucuacauaaac

SEQ ID NO: 317775 - RNA, 22 nt, Human
gcagcugguuaaugggagaauu

SEQ ID NO: 317776 - RNA, 22 nt, Human
gagugaaaaaggaagggccaua

SEQ ID NO: 317777 - RNA, 22 nt, Human
aggaaagguucagugauugaaa

SEQ ID NO: 317778 - RNA, 22 nt, Human
aaggccuggauuuagguuguga

SEQ ID NO: 317779 - RNA, 22 nt, Human
ugucugguggguugacaggcag

SEQ ID NO: 317780 - RNA, 23 nt, Human
uggcaccaggcauucuaggggua

SEQ ID NO: 317781 - RNA, 22 nt, Human
aggagacauacuauaggaauau

SEQ ID NO: 317782 - RNA, 22 nt, Human
ccugguguugugaaguagccgu

SEQ ID NO: 317783 - RNA, 22 nt, Human
uggccucuuaggacauccucua

SEQ ID NO: 317784 - RNA, 22 nt, Human
uuugcauuugcaaauaaugaaa

SEQ ID NO: 317785 - RNA, 22 nt, Human
cagugcagguuuagggcugggg

SEQ ID NO: 317786 - RNA, 22 nt, Human
aauauccacacugugucccugc

SEQ ID NO: 317787 - RNA, 22 nt, Human
gaggagggagcuggaagcucuu

SEQ ID NO: 317788 - RNA, 21 nt, Human
acagcaagccuucacaugagu

SEQ ID NO: 317789 - RNA, 22 nt, Human
auggacaggcugagcuuccuca

SEQ ID NO: 317790 - RNA, 22 nt, Human
guaaacauuacugugcuguaua

SEQ ID NO: 317791 - RNA, 22 nt, Human
gaagagaugacaaaggagcaug

SEQ ID NO: 317792 - RNA, 22 nt, Human
uuucauugcagagucugugugc

SEQ ID NO: 317793 - RNA, 22 nt, Human
ugggaggaaugucacugagcca

SEQ ID NO: 317794 - RNA, 22 nt, Human
uccucagugcuagccaacugcc

SEQ ID NO: 317795 - RNA, 22 nt, Human
cuguccuguggaccugaggacg

SEQ ID NO: 317796 - RNA, 17 nt, Human
uccagagcacagagcuc

SEQ ID NO: 317797 - RNA, 20 nt, Human
gaggcugcggacugcuggac

SEQ ID NO: 317798 - RNA, 22 nt, Human
uuucacauuagauaugucauuu

SEQ ID NO: 317799 - RNA, 20 nt, Human
gcaaaauaggcucuguuggu

SEQ ID NO: 317800 - RNA, 23 nt, Human
agccucuuuucuccugcccugca

SEQ ID NO: 317801 - RNA, 22 nt, Human
uugagucaguaauuccauuucu

SEQ ID NO: 317802 - RNA, 22 nt, Human
ugaugauguuuaucuugguauu

SEQ ID NO: 317803 - RNA, 20 nt, Human
agaguaacuggcacauaggg

SEQ ID NO: 317804 - RNA, 22 nt, Human
ugaguuauaaugaauauuugaa

SEQ ID NO: 317805 - RNA, 22 nt, Human
aagaaaacaugaucuaauuuaa

SEQ ID NO: 317806 - RNA, 22 nt, Human
cugagauggaguuuugcucuug

SEQ ID NO: 317807 - RNA, 22 nt, Human
agugcuguuagguuaauauagu

SEQ ID NO: 317808 - RNA, 22 nt, Human
ucgaacucauagucguagcugu

SEQ ID NO: 317809 - RNA, 22 nt, Human
augcugugccuggaaagcggcu

SEQ ID NO: 317810 - RNA, 22 nt, Human
ccugagcugaacuaagcaguuu

SEQ ID NO: 317811 - RNA, 21 nt, Human
aaggccugcuuacugcuaguu

SEQ ID NO: 317812 - RNA, 22 nt, Human
cuugaaagaagggucuuuuaau

SEQ ID NO: 317813 - RNA, 22 nt, Human
gaaucucaaauuaagaauuuua

SEQ ID NO: 317814 - RNA, 23 nt, Human
gggugggccaaauuagguagccu

SEQ ID NO: 317815 - RNA, 22 nt, Human
uucucuuuugugaugugagaug

SEQ ID NO: 317816 - RNA, 22 nt, Human
uuucaaagguggaagagugaau

SEQ ID NO: 317817 - RNA, 22 nt, Human
augcacagcagugaguucagug

SEQ ID NO: 317818 - RNA, 22 nt, Human
ugggcagagucauacaggagac

SEQ ID NO: 317819 - RNA, 22 nt, Human
uuguuuuaucuuucuacagacu

SEQ ID NO: 317820 - RNA, 20 nt, Human
agugacagagacuguguggc

SEQ ID NO: 317821 - RNA, 22 nt, Human
ccucuguccuggggaguggagc

SEQ ID NO: 317822 - RNA, 22 nt, Human
ugugccuucucaguccugcuca

SEQ ID NO: 317823 - RNA, 22 nt, Human
ggaucauuaacacauccaucac

SEQ ID NO: 317824 - RNA, 22 nt, Human
gugaggugggcuggccagagac

SEQ ID NO: 317825 - RNA, 22 nt, Human
ugagaaucauccagaggcuucu

SEQ ID NO: 317826 - RNA, 22 nt, Human
uggcagaggaaaaagucacugg

SEQ ID NO: 317827 - RNA, 22 nt, Human
gcuguccugggaacaggcacua

SEQ ID NO: 317828 - RNA, 22 nt, Human
cuggcagggugggcuuugcuuu

SEQ ID NO: 317829 - RNA, 22 nt, Human
agggcucugggguggcagagau

SEQ ID NO: 317830 - RNA, 22 nt, Human
gacauucacaguuuccgauggu

SEQ ID NO: 317831 - RNA, 22 nt, Human
gccccuggcuggccagcuccuc

SEQ ID NO: 317832 - RNA, 22 nt, Human
acagauauaugauuguguaaau

SEQ ID NO: 317833 - RNA, 22 nt, Human
cuugcugucuugcauuuagagc

SEQ ID NO: 317834 - RNA, 22 nt, Human
agggcagagauuaauuaagaca

SEQ ID NO: 317835 - RNA, 22 nt, Human
uaguccagccuuggguguagcc

SEQ ID NO: 317836 - RNA, 22 nt, Human
ggccugggcccacugucaagag

SEQ ID NO: 317837 - RNA, 22 nt, Human
ccuggggagagaaagcccagcc

SEQ ID NO: 317838 - RNA, 22 nt, Human
uggcucaggaucuaagcagaau

SEQ ID NO: 317839 - RNA, 22 nt, Human
cugcaggcaucuaacugugggc

SEQ ID NO: 317840 - RNA, 22 nt, Human
uuucauugaugggugauagaaa

SEQ ID NO: 317841 - RNA, 22 nt, Human
uucaagaucuuccaaaggauac

SEQ ID NO: 317842 - RNA, 22 nt, Human
uccagugguaguaaagaggucu

SEQ ID NO: 317843 - RNA, 22 nt, Human
uuuucaugucauguccuugagg

SEQ ID NO: 317844 - RNA, 22 nt, Human
uccagucaggcugaauucaagg

SEQ ID NO: 317845 - RNA, 22 nt, Human
cacagaggcaaccuucuggggu

SEQ ID NO: 317846 - RNA, 22 nt, Human
gcugccugggcaggaggcgcug

SEQ ID NO: 317847 - RNA, 22 nt, Human
ucaguagcagaaagcaaugagu

SEQ ID NO: 317848 - RNA, 21 nt, Human
uuaagagcuuagcaguaggcc

SEQ ID NO: 317849 - RNA, 22 nt, Human
auuuugauaaucauguuagaga

SEQ ID NO: 317850 - RNA, 22 nt, Human
guuugauucaagaacaaagagu

SEQ ID NO: 317851 - RNA, 22 nt, Human
gcagacagacugcagugauuuu

SEQ ID NO: 317852 - RNA, 22 nt, Human
gaauacaugauacaugaacugc

SEQ ID NO: 317853 - RNA, 22 nt, Human
uucacagaugccugaugugugg

SEQ ID NO: 317854 - RNA, 22 nt, Human
ugcuggggcucugaccacucca

SEQ ID NO: 317855 - RNA, 22 nt, Human
aggcagccagauggcagccugc

SEQ ID NO: 317856 - RNA, 22 nt, Human
ggccucucuccagucagugcag

SEQ ID NO: 317857 - RNA, 22 nt, Human
caguaugucuacuggacaaagu

SEQ ID NO: 317858 - RNA, 22 nt, Human
aguccugggucuggagaaugga

SEQ ID NO: 317859 - RNA, 22 nt, Human
uaacuuucacaucacacugacu

SEQ ID NO: 317860 - RNA, 22 nt, Human
uuaauuaaauucaugagcauug

SEQ ID NO: 317861 - RNA, 21 nt, Human
cauuucuauugaugagaaaag

SEQ ID NO: 317862 - RNA, 19 nt, Human
gccugcagaaaaggcaggg

SEQ ID NO: 317863 - RNA, 22 nt, Human
ccugggugaaaucucuccugca

SEQ ID NO: 317864 - RNA, 22 nt, Human
ccagcagagcauggggaggaag

SEQ ID NO: 317865 - RNA, 22 nt, Human
acauuucugcuagaauagguga

SEQ ID NO: 317866 - RNA, 22 nt, Human
gcugaagggagugcugagucug

SEQ ID NO: 317867 - RNA, 22 nt, Human
auuuagaaauuccaaaaguauu

SEQ ID NO: 317868 - RNA, 22 nt, Human
uggagcucaaaggccuguggga

SEQ ID NO: 317869 - RNA, 22 nt, Human
ccuccucugggaagauucagag

SEQ ID NO: 317870 - RNA, 22 nt, Human
agccuucaguaaauccacugug

SEQ ID NO: 317871 - RNA, 22 nt, Human
uggaggaugccuggggaggccu

SEQ ID NO: 317872 - RNA, 22 nt, Human
ucaggagagaaagaauacaauu

SEQ ID NO: 317873 - RNA, 22 nt, Human
guggugaguucaggcuggggug

SEQ ID NO: 317874 - RNA, 22 nt, Human
auacaucuaugccuuucugaca

SEQ ID NO: 317875 - RNA, 22 nt, Human
ucucauguauugcccuggugug

SEQ ID NO: 317876 - RNA, 22 nt, Human
cagaggugcauacaggucauua

SEQ ID NO: 317877 - RNA, 22 nt, Human
agcagggcagugcuucagcucu

SEQ ID NO: 317878 - RNA, 18 nt, Human
gggcauggaugcagcauc

SEQ ID NO: 317879 - RNA, 22 nt, Human
ucauugcaggcauuccccugcc

SEQ ID NO: 317880 - RNA, 22 nt, Human
caggaguggugugagggacucc

SEQ ID NO: 317881 - RNA, 22 nt, Human
uagcagaaccagcagucaauuu

SEQ ID NO: 317882 - RNA, 22 nt, Human
uauucacagcugccgcacucag

SEQ ID NO: 317883 - RNA, 22 nt, Human
cacugcauggaugauggcugua

SEQ ID NO: 317884 - RNA, 22 nt, Human
cagcugcaggaacaaaaaugug

SEQ ID NO: 317885 - RNA, 22 nt, Human
acaguguuuggcaaugcaugca

SEQ ID NO: 317886 - RNA, 22 nt, Human
ggcucaggagaggggcuaaaag

SEQ ID NO: 317887 - RNA, 22 nt, Human
agaguguuuuucugucaaggac

SEQ ID NO: 317888 - RNA, 22 nt, Human
ggagugacucucggggccacua

SEQ ID NO: 317889 - RNA, 22 nt, Human
cagaggcucuuccucacugccc

SEQ ID NO: 317890 - RNA, 22 nt, Human
gcagcugaauguccauugcugc

SEQ ID NO: 317891 - RNA, 18 nt, Human
ggagagugacagagucgu

SEQ ID NO: 317892 - RNA, 22 nt, Human
gaaaucugaaucuucuguuggu

SEQ ID NO: 317893 - RNA, 22 nt, Human
auaaguaggaaaauuugaauau

SEQ ID NO: 317894 - RNA, 22 nt, Human
uugagucucugccaaaacacaa

SEQ ID NO: 317895 - RNA, 22 nt, Human
uucuucuuuaucucaguauccu

SEQ ID NO: 317896 - RNA, 21 nt, Human
augucaaaugcuuuauuuuau

SEQ ID NO: 317897 - RNA, 22 nt, Human
gcccagaaguugaggcugcagu

SEQ ID NO: 317898 - RNA, 22 nt, Human
caugaaaucugaguauguuucc

SEQ ID NO: 317899 - RNA, 22 nt, Human
agccacagagguugaugugguu

SEQ ID NO: 317900 - RNA, 22 nt, Human
uggccugguuguugcugccguu

SEQ ID NO: 317901 - RNA, 22 nt, Human
caggaaaaaugccaggagucag

SEQ ID NO: 317902 - RNA, 22 nt, Human
uuacaggggacauuggggacau

SEQ ID NO: 317903 - RNA, 22 nt, Human
gcaguguuaccucuucaguggg

SEQ ID NO: 317904 - RNA, 22 nt, Human
auucuuauuauaguaaaacagu

SEQ ID NO: 317905 - RNA, 22 nt, Human
gcugcagcagcugcaggguugu

SEQ ID NO: 317906 - RNA, 22 nt, Human
aggagcugcuuaaaugguuggu

SEQ ID NO: 317907 - RNA, 22 nt, Human
ucuggcucagggcucugaggga

SEQ ID NO: 317908 - RNA, 22 nt, Human
uucuguauauuguaaagacuca

SEQ ID NO: 317909 - RNA, 22 nt, Human
ugcugcuccugccuggcuccca

SEQ ID NO: 317910 - RNA, 22 nt, Human
guggcugcagagggcacagcau

SEQ ID NO: 317911 - RNA, 22 nt, Human
ugguauucuuucuguagaucau

SEQ ID NO: 317912 - RNA, 22 nt, Human
aggcuggaguacaguggcuauu

SEQ ID NO: 317913 - RNA, 19 nt, Human
cacagggcaggucucaugu

SEQ ID NO: 317914 - RNA, 22 nt, Human
auaugcacauacauacauaggu

SEQ ID NO: 317915 - RNA, 22 nt, Human
acccagaggugucuagcaagcu

SEQ ID NO: 317916 - RNA, 22 nt, Human
guggcagcugguaugcagacag

SEQ ID NO: 317917 - RNA, 22 nt, Human
ucucagagcuucaguuauuuuc

SEQ ID NO: 317918 - RNA, 22 nt, Human
gcugcagcccggcgcgccugag

SEQ ID NO: 317919 - RNA, 22 nt, Human
ugaaccaggaggcagccagcac

SEQ ID NO: 317920 - RNA, 22 nt, Human
aagauaaacucuugauuucuga

SEQ ID NO: 317921 - RNA, 22 nt, Human
gugccugcagcaauccauggca

SEQ ID NO: 317922 - RNA, 21 nt, Human
agaaaauggcguuuuagauuu

SEQ ID NO: 317923 - RNA, 22 nt, Human
ugcagcauucuuggccacuacu

SEQ ID NO: 317924 - RNA, 22 nt, Human
gcucugugggugaguagaaucu

SEQ ID NO: 317925 - RNA, 22 nt, Human
cuguggaaaauuuguauguaau

SEQ ID NO: 317926 - RNA, 22 nt, Human
ccuggcaguuuugcccaggauu

SEQ ID NO: 317927 - RNA, 22 nt, Human
ccacagaguuacaaaacaguca

SEQ ID NO: 317928 - RNA, 17 nt, Human
ucucagugacugauagc

SEQ ID NO: 317929 - RNA, 18 nt, Human
gagucuuuguuacugcug

SEQ ID NO: 317930 - RNA, 22 nt, Human
cacauuuaaagguugaagcuga

SEQ ID NO: 317931 - RNA, 22 nt, Human
gguggguauugaauacaggugu

SEQ ID NO: 317932 - RNA, 22 nt, Human
gcaggcagaucaccugucagga

SEQ ID NO: 317933 - RNA, 19 nt, Human
uucacauuggaagaaguag

SEQ ID NO: 317934 - RNA, 21 nt, Human
uccucugcagugagguggccu

SEQ ID NO: 317935 - RNA, 22 nt, Human
aagcugcagacccccugucuca

SEQ ID NO: 317936 - RNA, 22 nt, Human
cugccuggaaugccagcuucuc

SEQ ID NO: 317937 - RNA, 22 nt, Human
ggucccaguugcccaggucagg

SEQ ID NO: 317938 - RNA, 22 nt, Human
uaaaugcaguuaguacuugcca

SEQ ID NO: 317939 - RNA, 22 nt, Human
aucacaggugguaggaaaagaa

SEQ ID NO: 317940 - RNA, 22 nt, Human
ggugaguugggguucacagguc

SEQ ID NO: 317941 - RNA, 23 nt, Human
uucuuucaagaaguucacagugc

SEQ ID NO: 317942 - RNA, 23 nt, Human
aauuuaguuugagacauuagccu

SEQ ID NO: 317943 - RNA, 22 nt, Human
uggcuggcaguaggcuaguggc

SEQ ID NO: 317944 - RNA, 22 nt, Human
uccugcagagccgcccucaggu

SEQ ID NO: 317945 - RNA, 20 nt, Human
uguuccaugacuauuuggau

SEQ ID NO: 317946 - RNA, 22 nt, Human
ccuggcugggccugauuucuca

SEQ ID NO: 317947 - RNA, 22 nt, Human
ugucccaguuuaucugggacug

SEQ ID NO: 317948 - RNA, 22 nt, Human
ccugagggaggguauaggcugu

SEQ ID NO: 317949 - RNA, 22 nt, Human
acagaauucucucugcagaggc

SEQ ID NO: 317950 - RNA, 22 nt, Human
ugaaaguuacaggaaaacagau

SEQ ID NO: 317951 - RNA, 22 nt, Human
cagggcaggaauuugacauugc

SEQ ID NO: 317952 - RNA, 22 nt, Human
aggaccagaggccagagucagc

SEQ ID NO: 317953 - RNA, 22 nt, Human
gggcuggaggugagcaggacag

SEQ ID NO: 317954 - RNA, 22 nt, Human
ccagggugagugucauggguua

SEQ ID NO: 317955 - RNA, 22 nt, Human
ugggaauggaugcuaagugcua

SEQ ID NO: 317956 - RNA, 21 nt, Human
ucagcagcuuuugcagucccu

SEQ ID NO: 317957 - RNA, 22 nt, Human
auguuauuuuggaaaauacaaa

SEQ ID NO: 317958 - RNA, 22 nt, Human
uacaguauuaugagugauugaa

SEQ ID NO: 317959 - RNA, 22 nt, Human
uuugaaaguguuuacuugggaa

SEQ ID NO: 317960 - RNA, 23 nt, Human
gggcugcuccaggccaaggcugg

SEQ ID NO: 317961 - RNA, 17 nt, Human
uagcuguguuucagcua

SEQ ID NO: 317962 - RNA, 22 nt, Human
ccugcagggaaucgaggcagaa

SEQ ID NO: 317963 - RNA, 22 nt, Human
cccuguccuggaugggagcacu

SEQ ID NO: 317964 - RNA, 22 nt, Human
aauuucaaacuaauaggaacca

SEQ ID NO: 317965 - RNA, 22 nt, Human
gugccugccccacuccucagca

SEQ ID NO: 317966 - RNA, 22 nt, Human
gaggggaaagugugaggcugcg

SEQ ID NO: 317967 - RNA, 22 nt, Human
ccucucucuccugcacacacac

SEQ ID NO: 317968 - RNA, 22 nt, Human
ccugucaguugcugucagggau

SEQ ID NO: 317969 - RNA, 22 nt, Human
agugucauaugccacugcaucc

SEQ ID NO: 317970 - RNA, 22 nt, Human
gggagagaugcugauugccaau

SEQ ID NO: 317971 - RNA, 22 nt, Human
aggugcugccccgagaaggaug

SEQ ID NO: 317972 - RNA, 22 nt, Human
cuggggcugcagcgaucuucau

SEQ ID NO: 317973 - RNA, 22 nt, Human
ucccagccuuucuuuucugcug

SEQ ID NO: 317974 - RNA, 19 nt, Human
ugcagccacgugagagacu

SEQ ID NO: 317975 - RNA, 22 nt, Human
gccucucucuacccaguaugau

SEQ ID NO: 317976 - RNA, 22 nt, Human
uugaaguuguaguucagugaag

SEQ ID NO: 317977 - RNA, 22 nt, Human
agagcaggcauaaagcuuugaa

SEQ ID NO: 317978 - RNA, 22 nt, Human
ugcaagaggaauucuagaagca

SEQ ID NO: 317979 - RNA, 22 nt, Human
auuuuuccaugauacuuaucug

SEQ ID NO: 317980 - RNA, 22 nt, Human
uuuacagagaauguacauaaag

SEQ ID NO: 317981 - RNA, 22 nt, Human
ugugaaggagaugaagggagug

SEQ ID NO: 317982 - RNA, 22 nt, Human
ucauacaucuguccuggagcuc

SEQ ID NO: 317983 - RNA, 22 nt, Human
cagagcugguguuacaagucca

SEQ ID NO: 317984 - RNA, 22 nt, Human
ggcagcugauuagcaucaagga

SEQ ID NO: 317985 - RNA, 22 nt, Human
ucucuccuuaucauuguguuua

SEQ ID NO: 317986 - RNA, 22 nt, Human
acaauguaggauauguacuugu

SEQ ID NO: 317987 - RNA, 22 nt, Human
caagauggagaagcagcaaggg

SEQ ID NO: 317988 - RNA, 22 nt, Human
cagagcugacccaaggauugaa

SEQ ID NO: 317989 - RNA, 20 nt, Human
ggaccagguggggcgguggc

SEQ ID NO: 317990 - RNA, 22 nt, Human
cccaggccccagggcuugucag

SEQ ID NO: 317991 - RNA, 22 nt, Human
ccucaugguacuuacuguagcu

SEQ ID NO: 317992 - RNA, 22 nt, Human
agcuuccugaugcaagagggcu

SEQ ID NO: 317993 - RNA, 22 nt, Human
uaacacauauuugcaguaagca

SEQ ID NO: 317994 - RNA, 22 nt, Human
acaguguuguggcucuuaauag

SEQ ID NO: 317995 - RNA, 22 nt, Human
aggugcagcugguggagucugg

SEQ ID NO: 317996 - RNA, 22 nt, Human
uuagaaagaacuuuagauauca

SEQ ID NO: 317997 - RNA, 23 nt, Human
agacccagagacuggcucugcuc

SEQ ID NO: 317998 - RNA, 22 nt, Human
caggugggagcggagacugauu

SEQ ID NO: 317999 - RNA, 22 nt, Human
ggccacagagggcgggaugcug

SEQ ID NO: 318000 - RNA, 22 nt, Human
gagacugauggggcucccagaa

SEQ ID NO: 318001 - RNA, 22 nt, Human
cacauccuucagcugagcccag

SEQ ID NO: 318002 - RNA, 22 nt, Human
acagaauugaaaguauaaucug

SEQ ID NO: 318003 - RNA, 22 nt, Human
ugcagaguaaaagcagaugcua

SEQ ID NO: 318004 - RNA, 22 nt, Human
gggcuucuagaccagcagugag

SEQ ID NO: 318005 - RNA, 22 nt, Human
uggccugaggcucggcaugggu

SEQ ID NO: 318006 - RNA, 22 nt, Human
gggccugugcacaguucuguua

SEQ ID NO: 318007 - RNA, 22 nt, Human
guggccaggacauugccaggca

SEQ ID NO: 318008 - RNA, 22 nt, Human
gcuuccuagcauuagccauugc

SEQ ID NO: 318009 - RNA, 22 nt, Human
ucaacacuauccaggcaaucuu

SEQ ID NO: 318010 - RNA, 22 nt, Human
cauuucuguacauguuuuggug

SEQ ID NO: 318011 - RNA, 22 nt, Human
cuggcagcuuccuuugcaucug

SEQ ID NO: 318012 - RNA, 22 nt, Human
ucugcagauuuaucagcagcug

SEQ ID NO: 318013 - RNA, 22 nt, Human
ucagaggauugccucagcgagc

SEQ ID NO: 318014 - RNA, 22 nt, Human
aaaagguagauucuccuucuau

SEQ ID NO: 318015 - RNA, 22 nt, Human
ucagugcuccuaaagugaaugc

SEQ ID NO: 318016 - RNA, 22 nt, Human
ucacacagguuugcaaugauuu

SEQ ID NO: 318017 - RNA, 22 nt, Human
ucagagcuuuggagaccaggaa

SEQ ID NO: 318018 - RNA, 22 nt, Human
gcuggccucuggagaagggcuu

SEQ ID NO: 318019 - RNA, 22 nt, Human
ucuggccuacuggaguccauga

SEQ ID NO: 318020 - RNA, 22 nt, Human
uacauucagaagaauggacacg

SEQ ID NO: 318021 - RNA, 22 nt, Human
ucuggcuccguguccgcuccca

SEQ ID NO: 318022 - RNA, 22 nt, Human
cuauaauuaugcucaaaaugua

SEQ ID NO: 318023 - RNA, 22 nt, Human
aagagcuggaagugaagauaac

SEQ ID NO: 318024 - RNA, 22 nt, Human
gggagagagaaaacguggcgca

SEQ ID NO: 318025 - RNA, 22 nt, Human
uauguuuuucaagugcacacua

SEQ ID NO: 318026 - RNA, 22 nt, Human
uggggacacagagccaaacuau

SEQ ID NO: 318027 - RNA, 22 nt, Human
ugaucaaaacauuacuccacca

SEQ ID NO: 318028 - RNA, 22 nt, Human
aguuagaaaguaaaucauuuga

SEQ ID NO: 318029 - RNA, 22 nt, Human
cagugcugggcagaggagagcg

SEQ ID NO: 318030 - RNA, 21 nt, Human
uggagacucugguucuuugug

SEQ ID NO: 318031 - RNA, 21 nt, Human
gcugccaccgcgugcuccagg

SEQ ID NO: 318032 - RNA, 22 nt, Human
gagccuggccuccugccucagc

SEQ ID NO: 318033 - RNA, 22 nt, Human
uggggugguaauacaccguucu

SEQ ID NO: 318034 - RNA, 22 nt, Human
augaggcaaucaugguccaguu

SEQ ID NO: 318035 - RNA, 22 nt, Human
uuauuucauguaaaauuuaugu

SEQ ID NO: 318036 - RNA, 22 nt, Human
auucagagcacuggguagaauu

SEQ ID NO: 318037 - RNA, 22 nt, Human
aaggcaggaugggaaaagauuu

SEQ ID NO: 318038 - RNA, 22 nt, Human
acaguguuacuugauaguguau

SEQ ID NO: 318039 - RNA, 22 nt, Human
agucucagaguaccugagggac

SEQ ID NO: 318040 - RNA, 22 nt, Human
ugugugcauucacaugcaugcc

SEQ ID NO: 318041 - RNA, 22 nt, Human
aucagaagcuuguagucucucu

SEQ ID NO: 318042 - RNA, 22 nt, Human
uguauuuuuaggaaugcgcuau

SEQ ID NO: 318043 - RNA, 22 nt, Human
gagaaugggaaugaaaguagca

SEQ ID NO: 318044 - RNA, 22 nt, Human
aggaggcacucacucucagggu

SEQ ID NO: 318045 - RNA, 21 nt, Human
aacauuucugggagaacucac

SEQ ID NO: 318046 - RNA, 20 nt, Human
uccagcccagcagccugaca

SEQ ID NO: 318047 - RNA, 22 nt, Human
ucugcugugauuugcuaccugu

SEQ ID NO: 318048 - RNA, 22 nt, Human
agagagcauugaggaaaucuuc

SEQ ID NO: 318049 - RNA, 22 nt, Human
auugacaaggaaacuauaccag

SEQ ID NO: 318050 - RNA, 22 nt, Human
agagaacaaauuaaaggugguu

SEQ ID NO: 318051 - RNA, 22 nt, Human
ccugagccugaguggugcaggg

SEQ ID NO: 318052 - RNA, 18 nt, Human
cuuguucuucucuuggcg

SEQ ID NO: 318053 - RNA, 22 nt, Human
uuacuuuguucucaagauaugu

SEQ ID NO: 318054 - RNA, 22 nt, Human
cugcaggaauucaaagugagcu

SEQ ID NO: 318055 - RNA, 21 nt, Human
agcagcugggcaacauggagg

SEQ ID NO: 318056 - RNA, 19 nt, Human
ugucucagugucccuuccu

SEQ ID NO: 318057 - RNA, 19 nt, Human
aggguccagggagcggcuc

SEQ ID NO: 318058 - RNA, 22 nt, Human
ucuggcucuauaacuccuagcu

SEQ ID NO: 318059 - RNA, 22 nt, Human
auggaaagggaagcaaggaaca

SEQ ID NO: 318060 - RNA, 22 nt, Human
aaguucaagucugcaucuuuuu

SEQ ID NO: 318061 - RNA, 22 nt, Human
gccugcuggauguggccaggcc

SEQ ID NO: 318062 - RNA, 22 nt, Human
aauagcucacugauuucucuuu

SEQ ID NO: 318063 - RNA, 22 nt, Human
uggcucugaucagauguccagu

SEQ ID NO: 318064 - RNA, 22 nt, Human
agccaggaauuggacaacacau

SEQ ID NO: 318065 - RNA, 22 nt, Human
aucuagauuagguauaagagcu

SEQ ID NO: 318066 - RNA, 22 nt, Human
aguuucauauuaccaugucacc

SEQ ID NO: 318067 - RNA, 22 nt, Human
agggagcuuccgaacuacagcu

SEQ ID NO: 318068 - RNA, 21 nt, Human
cagagcagcguucugcugugg

SEQ ID NO: 318069 - RNA, 22 nt, Human
cuggaagaggaagccagcugga

SEQ ID NO: 318070 - RNA, 22 nt, Human
cucuggcuuugcucaugcaucc

SEQ ID NO: 318071 - RNA, 22 nt, Human
ugccuggcaaugccagaagcca

SEQ ID NO: 318072 - RNA, 22 nt, Human
uucagaaguagcuaagcaguca

SEQ ID NO: 318073 - RNA, 22 nt, Human
uagaaaggcaagcgugaaauau

SEQ ID NO: 318074 - RNA, 22 nt, Human
agcagccauuuaaaaugaauug

SEQ ID NO: 318075 - RNA, 22 nt, Human
ucagggcaaugucccucagaag

SEQ ID NO: 318076 - RNA, 22 nt, Human
ucugagagccucuagccuaagu

SEQ ID NO: 318077 - RNA, 22 nt, Human
ucuucaaguuccaaagugcagg

SEQ ID NO: 318078 - RNA, 20 nt, Human
gcacugaagguuccagggga

SEQ ID NO: 318079 - RNA, 22 nt, Human
cuguauuucccacauucucuau

SEQ ID NO: 318080 - RNA, 17 nt, Human
agcugagcuggccaggg

SEQ ID NO: 318081 - RNA, 22 nt, Human
cagaccucaguccucaguagga

SEQ ID NO: 318082 - RNA, 22 nt, Human
gggcugcuguagagaacauguu

SEQ ID NO: 318083 - RNA, 22 nt, Human
aauguaugagcgugaaagcacu

SEQ ID NO: 318084 - RNA, 22 nt, Human
gcugcugugaauuuuuuaaaug

SEQ ID NO: 318085 - RNA, 22 nt, Human
ugauuuccaaaaggcuucuaag

SEQ ID NO: 318086 - RNA, 22 nt, Human
uuggaggcaaugggaaggaggc

SEQ ID NO: 318087 - RNA, 22 nt, Human
gcucuucucagauuguacacuc

SEQ ID NO: 318088 - RNA, 22 nt, Human
uauggaaagcucuuuuugauug

SEQ ID NO: 318089 - RNA, 22 nt, Human
gaaggagaggauugugaggcug

SEQ ID NO: 318090 - RNA, 22 nt, Human
ucuaaaaaagucuguucacuug

SEQ ID NO: 318091 - RNA, 22 nt, Human
uuguuucaugaguguaaaggga

SEQ ID NO: 318092 - RNA, 22 nt, Human
aaagaugucacaagaugugaug

SEQ ID NO: 318093 - RNA, 20 nt, Human
acaaaugcauucugugacau

SEQ ID NO: 318094 - RNA, 22 nt, Human
agcaaggggcagugaaagugug

SEQ ID NO: 318095 - RNA, 22 nt, Human
ucuggcuccugaguccaugcuc

SEQ ID NO: 318096 - RNA, 22 nt, Human
ccugccugguguaagucuaagg

SEQ ID NO: 318097 - RNA, 20 nt, Human
aggcacuguugucuguaucc

SEQ ID NO: 318098 - RNA, 22 nt, Human
agucuccuuggccucaaugccu

SEQ ID NO: 318099 - RNA, 22 nt, Human
gccuggugugcgccgcgcagcu

SEQ ID NO: 318100 - RNA, 22 nt, Human
ggagauuuauagcacacuucag

SEQ ID NO: 318101 - RNA, 22 nt, Human
uucaauucugcucugaucuuag

SEQ ID NO: 318102 - RNA, 22 nt, Human
uuugaaauaugaggcauuauga

SEQ ID NO: 318103 - RNA, 22 nt, Human
cugcugcauuccucuuuaugag

SEQ ID NO: 318104 - RNA, 22 nt, Human
ggucagccuuggauuugguagc

SEQ ID NO: 318105 - RNA, 22 nt, Human
gugucauuaaccaccaugcaaa

SEQ ID NO: 318106 - RNA, 19 nt, Human
cuucuucuuggcagccaag

SEQ ID NO: 318107 - RNA, 22 nt, Human
gcugagagcaguguggccuuaa

SEQ ID NO: 318108 - RNA, 22 nt, Human
ucccagacaaucauuggccacc

SEQ ID NO: 318109 - RNA, 22 nt, Human
guguaaggccccagguucuuua

SEQ ID NO: 318110 - RNA, 22 nt, Human
ucugcugugggucuauauuuua

SEQ ID NO: 318111 - RNA, 22 nt, Human
gagcuguccuaccaggaguccu

SEQ ID NO: 318112 - RNA, 22 nt, Human
gacagggccgcagauggagacu

SEQ ID NO: 318113 - RNA, 22 nt, Human
ggugcagaaggaagggagcugg

SEQ ID NO: 318114 - RNA, 22 nt, Human
aaaugcacagaaaggaugugga

SEQ ID NO: 318115 - RNA, 22 nt, Human
accaucagucauugucaguggg

SEQ ID NO: 318116 - RNA, 20 nt, Human
ugcagcuucaccugugucau

SEQ ID NO: 318117 - RNA, 22 nt, Human
uaaggcacccauguucauacag

SEQ ID NO: 318118 - RNA, 22 nt, Human
uccuauugguagacauuucugu

SEQ ID NO: 318119 - RNA, 19 nt, Human
ugaagcagcaaacucucag

SEQ ID NO: 318120 - RNA, 22 nt, Human
ucaaagucauggcuaguaauga

SEQ ID NO: 318121 - RNA, 22 nt, Human
ggugaagggccuuaggagacag

SEQ ID NO: 318122 - RNA, 22 nt, Human
uagcacauuguugaccagaagg

SEQ ID NO: 318123 - RNA, 22 nt, Human
gcuggccauggccugcgccauc

SEQ ID NO: 318124 - RNA, 22 nt, Human
gggcauggaggucugucugcag

SEQ ID NO: 318125 - RNA, 22 nt, Human
gcucugagucucagcuaccaca

SEQ ID NO: 318126 - RNA, 22 nt, Human
gggcaguggcucacgccuguaa

SEQ ID NO: 318127 - RNA, 22 nt, Human
uaaugcaguacugauauaaaca

SEQ ID NO: 318128 - RNA, 22 nt, Human
gguccccagcaguggcugcuuc

SEQ ID NO: 318129 - RNA, 22 nt, Human
accauccugaaaccuucaugcu

SEQ ID NO: 318130 - RNA, 22 nt, Human
gucaccagugcuaagaggugga

SEQ ID NO: 318131 - RNA, 22 nt, Human
uccuucaggguugaggccgacu

SEQ ID NO: 318132 - RNA, 22 nt, Human
gagcuccucccaggguagcacu

SEQ ID NO: 318133 - RNA, 22 nt, Human
gcagggacaccuuugugaagcu

SEQ ID NO: 318134 - RNA, 22 nt, Human
agcuccuggacgaacagggagu

SEQ ID NO: 318135 - RNA, 22 nt, Human
gucugaggaagaugcaggggga

SEQ ID NO: 318136 - RNA, 22 nt, Human
ggcaguggguuccccaaggcac

SEQ ID NO: 318137 - RNA, 22 nt, Human
ggugggcagcucuuggcaggca

SEQ ID NO: 318138 - RNA, 23 nt, Human
gacagagugagaccuugucuuac

SEQ ID NO: 318139 - RNA, 22 nt, Human
cugcuucugggaugauggagua

SEQ ID NO: 318140 - RNA, 22 nt, Human
agagacaggguuuugucguguu

SEQ ID NO: 318141 - RNA, 22 nt, Human
ucaggaaagaagaugcucagug

SEQ ID NO: 318142 - RNA, 22 nt, Human
gccuggcccagggcucuuguug

SEQ ID NO: 318143 - RNA, 22 nt, Human
ugcaggugaaaauuaugaggau

SEQ ID NO: 318144 - RNA, 22 nt, Human
ucagggcagccuaaggcaccuc

SEQ ID NO: 318145 - RNA, 22 nt, Human
aggcugcucugcgaagucagcu

SEQ ID NO: 318146 - RNA, 22 nt, Human
ucucccaggugggugccuggag

SEQ ID NO: 318147 - RNA, 22 nt, Human
uccagccaagccuugguagcug

SEQ ID NO: 318148 - RNA, 22 nt, Human
uaacagaaguuguucauugugg

SEQ ID NO: 318149 - RNA, 18 nt, Human
agagcagcggcaucacac

SEQ ID NO: 318150 - RNA, 22 nt, Human
caguccuggggaccaggcugag

SEQ ID NO: 318151 - RNA, 22 nt, Human
guaucuuuugguggaaaaauaa

SEQ ID NO: 318152 - RNA, 22 nt, Human
cuuggcagauccaaaaaugaca

SEQ ID NO: 318153 - RNA, 22 nt, Human
agcagcaggcuguguggacuga

SEQ ID NO: 318154 - RNA, 22 nt, Human
uuagauaauguuauuguaauuu

SEQ ID NO: 318155 - RNA, 22 nt, Human
gaggccuggcugggaggaggug

SEQ ID NO: 318156 - RNA, 22 nt, Human
auggauaauggugauaguugca

SEQ ID NO: 318157 - RNA, 22 nt, Human
cuggagaggccccaagauauuu

SEQ ID NO: 318158 - RNA, 22 nt, Human
ggauggcaggacaaggacccag

SEQ ID NO: 318159 - RNA, 22 nt, Human
gccaggaguucagaugcauguu

SEQ ID NO: 318160 - RNA, 22 nt, Human
gcagacuguaucaaugucagua

SEQ ID NO: 318161 - RNA, 22 nt, Human
gagcagugacuggagcaugaga

SEQ ID NO: 318162 - RNA, 22 nt, Human
uuauuuauggcacuguuggugg

SEQ ID NO: 318163 - RNA, 22 nt, Human
ugcucuccggcuuccguggccu

SEQ ID NO: 318164 - RNA, 22 nt, Human
caggugaccuuuguccuaaguu

SEQ ID NO: 318165 - RNA, 22 nt, Human
uccuggaggcaaaugagcacau

SEQ ID NO: 318166 - RNA, 22 nt, Human
uccaugagagguaacuuuacaa

SEQ ID NO: 318167 - RNA, 22 nt, Human
agagaagagucuugucaaauua

SEQ ID NO: 318168 - RNA, 22 nt, Human
aauuucaagucuugaagaagua

SEQ ID NO: 318169 - RNA, 20 nt, Human
cacguuuuuccacuagcaaa

SEQ ID NO: 318170 - RNA, 22 nt, Human
caggauggagaguuguugguug

SEQ ID NO: 318171 - RNA, 22 nt, Human
cccuuucccuucuggcucaggg

SEQ ID NO: 318172 - RNA, 23 nt, Human
uggcuggcagaaacugaagcaug

SEQ ID NO: 318173 - RNA, 22 nt, Human
ucccaggaucugagggcagaga

SEQ ID NO: 318174 - RNA, 22 nt, Human
auccccagaaaauaggugccua

SEQ ID NO: 318175 - RNA, 22 nt, Human
gguuggggcgagcuggaggccc

SEQ ID NO: 318176 - RNA, 23 nt, Human
uugucugugcuuuuccaguugcu

SEQ ID NO: 318177 - RNA, 22 nt, Human
aguguguacucauauacuucca

SEQ ID NO: 318178 - RNA, 22 nt, Human
cugugcccaggccccuggggau

SEQ ID NO: 318179 - RNA, 22 nt, Human
uauucaaaguaccuucauugcc

SEQ ID NO: 318180 - RNA, 22 nt, Human
agguacagggugaaaguuuaug

SEQ ID NO: 318181 - RNA, 22 nt, Human
uuugaaaauuuaagugcuacac

SEQ ID NO: 318182 - RNA, 22 nt, Human
uuugcauuacuugacuuuaguu

SEQ ID NO: 318183 - RNA, 22 nt, Human
cagacacagauaugcauauggc

SEQ ID NO: 318184 - RNA, 22 nt, Human
guacauuuugagguuaaaacaa

SEQ ID NO: 318185 - RNA, 21 nt, Human
gcacagugccaggcacacagu

SEQ ID NO: 318186 - RNA, 22 nt, Human
cugagcugcucccgcugcagcg

SEQ ID NO: 318187 - RNA, 22 nt, Human
auucacaguuuccucauauucu

SEQ ID NO: 318188 - RNA, 22 nt, Human
cuucucagcaugguuacuguga

SEQ ID NO: 318189 - RNA, 22 nt, Human
cuguggcugcagccuugguccu

SEQ ID NO: 318190 - RNA, 22 nt, Human
cagguggggcagcugugggagc

SEQ ID NO: 318191 - RNA, 22 nt, Human
ggguccaggucuucaggcagag

SEQ ID NO: 318192 - RNA, 21 nt, Human
ccugagggugguugugaagau

SEQ ID NO: 318193 - RNA, 22 nt, Human
caaauucucuuacuguuugaca

SEQ ID NO: 318194 - RNA, 20 nt, Human
cucucuggaaggugggagcc

SEQ ID NO: 318195 - RNA, 22 nt, Human
cagccugggcuccagagucccu

SEQ ID NO: 318196 - RNA, 22 nt, Human
aaaugcacagaggccagagagg

SEQ ID NO: 318197 - RNA, 22 nt, Human
acagggcaaccucugggagacu

SEQ ID NO: 318198 - RNA, 22 nt, Human
aguuuuaugcaguguucugaua

SEQ ID NO: 318199 - RNA, 22 nt, Human
uuccuugguagagagaauauuu

SEQ ID NO: 318200 - RNA, 22 nt, Human
ggagcugggaauuggaucaucu

SEQ ID NO: 318201 - RNA, 18 nt, Human
gcaggugccacugcuguu

SEQ ID NO: 318202 - RNA, 22 nt, Human
gcucugcugcuuacuagauggu

SEQ ID NO: 318203 - RNA, 22 nt, Human
agaaaauaauuucuuggcuggu

SEQ ID NO: 318204 - RNA, 20 nt, Human
gaggaaaagcugccaggccu

SEQ ID NO: 318205 - RNA, 18 nt, Human
gagcugccauauuuaguu

SEQ ID NO: 318206 - RNA, 22 nt, Human
uuucaaugacacaaaagagaaa

SEQ ID NO: 318207 - RNA, 22 nt, Human
aucaaaguuucccagaaguugu

SEQ ID NO: 318208 - RNA, 22 nt, Human
cugagccaugagccugcgccca

SEQ ID NO: 318209 - RNA, 22 nt, Human
ucccagagcagaugugcuaaag

SEQ ID NO: 318210 - RNA, 21 nt, Human
aggugggagaccauguagguc

SEQ ID NO: 318211 - RNA, 22 nt, Human
cagucucucagcuuucagcugu

SEQ ID NO: 318212 - RNA, 22 nt, Human
uucauuaguucugaagaugucu

SEQ ID NO: 318213 - RNA, 22 nt, Human
gcuggaccaggugugcacaggc

SEQ ID NO: 318214 - RNA, 23 nt, Human
agcuggguggccugcgugaagcu

SEQ ID NO: 318215 - RNA, 22 nt, Human
uugcauuugagaaaguucuccu

SEQ ID NO: 318216 - RNA, 23 nt, Human
auugaugacuugauuacacuuuu

SEQ ID NO: 318217 - RNA, 22 nt, Human
cagggagcagcgcuggggccuc

SEQ ID NO: 318218 - RNA, 22 nt, Human
uccugugccuccaccugcuccg

SEQ ID NO: 318219 - RNA, 22 nt, Human
ugccugucuucaggagugucac

SEQ ID NO: 318220 - RNA, 22 nt, Human
aagagcauauuaauaguggaga

SEQ ID NO: 318221 - RNA, 22 nt, Human
acagaggucauggagaguucuc

SEQ ID NO: 318222 - RNA, 22 nt, Human
ugggugcuucgucagcucugag

SEQ ID NO: 318223 - RNA, 22 nt, Human
acuucacagaaauuuuaugagg

SEQ ID NO: 318224 - RNA, 22 nt, Human
cugagguggaacagaggugaag

SEQ ID NO: 318225 - RNA, 22 nt, Human
uggcccugccacucacugcuga

SEQ ID NO: 318226 - RNA, 19 nt, Human
gcucugagaggggcauggg

SEQ ID NO: 318227 - RNA, 21 nt, Human
ugauuuccaucuuaaaauaaa

SEQ ID NO: 318228 - RNA, 22 nt, Human
augggaggaaggaggcccuuga

SEQ ID NO: 318229 - RNA, 22 nt, Human
ucugucacuauuggccagaaca

SEQ ID NO: 318230 - RNA, 22 nt, Human
cccaggagguggagguugcagu

SEQ ID NO: 318231 - RNA, 22 nt, Human
aggagcagauugguaagaucau

SEQ ID NO: 318232 - RNA, 22 nt, Human
ugauuuccacgugcacccaggu

SEQ ID NO: 318233 - RNA, 22 nt, Human
gccugggaacucugaucuccug

SEQ ID NO: 318234 - RNA, 22 nt, Human
ucccugggcaucacguugcuuc

SEQ ID NO: 318235 - RNA, 22 nt, Human
uacugccuggagcauuggugcu

SEQ ID NO: 318236 - RNA, 20 nt, Human
gcugccuuguccugcuuggu

SEQ ID NO: 318237 - RNA, 22 nt, Human
ugcagugguguccagguguacu

SEQ ID NO: 318238 - RNA, 22 nt, Human
cuucaagaagacagcagagcau

SEQ ID NO: 318239 - RNA, 22 nt, Human
cagaaugcaaauuuuauaauau

SEQ ID NO: 318240 - RNA, 22 nt, Human
uccauggguagcccugguugag

SEQ ID NO: 318241 - RNA, 22 nt, Human
caucagcacuaugauuaaagua

SEQ ID NO: 318242 - RNA, 21 nt, Human
uuagcaaagcaaacacaugcu

SEQ ID NO: 318243 - RNA, 22 nt, Human
ucugugaacaucacauugacag

SEQ ID NO: 318244 - RNA, 22 nt, Human
uccuucuuugacaaguggcaga

SEQ ID NO: 318245 - RNA, 22 nt, Human
augcaucauggaaaacucaguu

SEQ ID NO: 318246 - RNA, 22 nt, Human
ccagggcagcgccccuccacgc

SEQ ID NO: 318247 - RNA, 22 nt, Human
ccaggcugggcuacaaguugag

SEQ ID NO: 318248 - RNA, 22 nt, Human
gucaugccuggcuucuuagaca

SEQ ID NO: 318249 - RNA, 22 nt, Human
ggcugccucuggaagcuggaga

SEQ ID NO: 318250 - RNA, 22 nt, Human
uugaagcaggaaaauuucuauu

SEQ ID NO: 318251 - RNA, 22 nt, Human
ccugccugcagaaaguaucucc

SEQ ID NO: 318252 - RNA, 22 nt, Human
ggagagcugguagcuggcucca

SEQ ID NO: 318253 - RNA, 22 nt, Human
aagcucugcucagcagacuagg

SEQ ID NO: 318254 - RNA, 22 nt, Human
cagugcaguuucccagaugcug

SEQ ID NO: 318255 - RNA, 22 nt, Human
cucuucuuuaguccagaccauc

SEQ ID NO: 318256 - RNA, 22 nt, Human
uagggcuauucugaguaauaau

SEQ ID NO: 318257 - RNA, 22 nt, Human
ugcuuagacgucaaguacagcc

SEQ ID NO: 318258 - RNA, 22 nt, Human
uguucuuuggcuucacagcucu

SEQ ID NO: 318259 - RNA, 22 nt, Human
agagcuggggcccguaaagcca

SEQ ID NO: 318260 - RNA, 22 nt, Human
aacagugucaggauuacagaua

SEQ ID NO: 318261 - RNA, 22 nt, Human
agcuucuugaccaagccuguaa

SEQ ID NO: 318262 - RNA, 22 nt, Human
ugaaggagcucaggagauaguc

SEQ ID NO: 318263 - RNA, 22 nt, Human
cccaccccuggacaggugagug

SEQ ID NO: 318264 - RNA, 22 nt, Human
uucauugucucuguuugccuuc

SEQ ID NO: 318265 - RNA, 22 nt, Human
caggaaaggugugucaugaugg

SEQ ID NO: 318266 - RNA, 22 nt, Human
auuauauaggacuugcccuucc

SEQ ID NO: 318267 - RNA, 22 nt, Human
aaacacaauguuucuuuguucu

SEQ ID NO: 318268 - RNA, 21 nt, Human
uugaagcaaggguggcucuga

SEQ ID NO: 318269 - RNA, 22 nt, Human
caguagcaggcaggugcuuuug

SEQ ID NO: 318270 - RNA, 22 nt, Human
aguucucagcuuaguaugcugu

SEQ ID NO: 318271 - RNA, 22 nt, Human
uaaggcauucucaugcugugaa

SEQ ID NO: 318272 - RNA, 22 nt, Human
ggcuagaagucagaggucaaga

SEQ ID NO: 318273 - RNA, 22 nt, Human
gaggccuggaauuccagccugg

SEQ ID NO: 318274 - RNA, 21 nt, Human
gggcuggacaugguggcucau

SEQ ID NO: 318275 - RNA, 23 nt, Human
ucuccuccuagauacagucaugg

SEQ ID NO: 318276 - RNA, 22 nt, Human
gccaggcaaauuaaggaaugca

SEQ ID NO: 318277 - RNA, 22 nt, Human
ugucucuggcccaugagcagag

SEQ ID NO: 318278 - RNA, 22 nt, Human
aucuggcucuuccuggaguucc

SEQ ID NO: 318279 - RNA, 17 nt, Human
agcagcugaagcagcca

SEQ ID NO: 318280 - RNA, 22 nt, Human
ggcccaguguugccagaccuga

SEQ ID NO: 318281 - RNA, 22 nt, Human
ucagugucuugaccugggugug

SEQ ID NO: 318282 - RNA, 22 nt, Human
cacauaaguggguuccauugca

SEQ ID NO: 318283 - RNA, 22 nt, Human
uugaccauaccuccaggcaguu

SEQ ID NO: 318284 - RNA, 22 nt, Human
uaggagcuaaaauauuuuauau

SEQ ID NO: 318285 - RNA, 22 nt, Human
aaaaauagcuucucuugucccu

SEQ ID NO: 318286 - RNA, 22 nt, Human
ucaugacaucuguuuaucucaa

SEQ ID NO: 318287 - RNA, 22 nt, Human
aaauaugaaugauaagaguuau

SEQ ID NO: 318288 - RNA, 22 nt, Human
ucuguccucuuugaagcugcuc

SEQ ID NO: 318289 - RNA, 22 nt, Human
ccuuuuucaauauagaauugca

SEQ ID NO: 318290 - RNA, 22 nt, Human
ccugggcuuucggcggcuuccu

SEQ ID NO: 318291 - RNA, 22 nt, Human
gcaguggggcgcugggaguugg

SEQ ID NO: 318292 - RNA, 22 nt, Human
caggauggugugagugugagga

SEQ ID NO: 318293 - RNA, 19 nt, Human
ugccuggcaccagcuccac

SEQ ID NO: 318294 - RNA, 22 nt, Human
cuuaacagcaagaucuguguca

SEQ ID NO: 318295 - RNA, 22 nt, Human
gcugucagugaggugagacaug

SEQ ID NO: 318296 - RNA, 22 nt, Human
gcugucugacuccaaguuggag

SEQ ID NO: 318297 - RNA, 22 nt, Human
ugaaggccagcagagugaaggc

SEQ ID NO: 318298 - RNA, 22 nt, Human
auuccuuguuucacugaaaagg

SEQ ID NO: 318299 - RNA, 22 nt, Human
gauuuucauuugcacucuagaa

SEQ ID NO: 318300 - RNA, 22 nt, Human
augcuuuagugucaaguuuggg

SEQ ID NO: 318301 - RNA, 21 nt, Human
uggcucaguugcugggcacag

SEQ ID NO: 318302 - RNA, 22 nt, Human
gcauuccugagaaugcagagug

SEQ ID NO: 318303 - RNA, 22 nt, Human
uguggaaaauuggaacguuccu

SEQ ID NO: 318304 - RNA, 22 nt, Human
cuuguagaauugaaauggucuc

SEQ ID NO: 318305 - RNA, 22 nt, Human
gcugcucuccauggccgugagu

SEQ ID NO: 318306 - RNA, 21 nt, Human
gcuccuggugcugcguggcgc

SEQ ID NO: 318307 - RNA, 22 nt, Human
uggagccauaacccuuucguac

SEQ ID NO: 318308 - RNA, 22 nt, Human
ggggcuggcucacuaagagacu

SEQ ID NO: 318309 - RNA, 17 nt, Human
cagggcugucugccuag

SEQ ID NO: 318310 - RNA, 22 nt, Human
cccaggaguuugaguucagcau

SEQ ID NO: 318311 - RNA, 22 nt, Human
aaaucagugcucauuugaaagg

SEQ ID NO: 318312 - RNA, 22 nt, Human
gcugccugaagugucuacacug

SEQ ID NO: 318313 - RNA, 22 nt, Human
cugccucuggccucaggcccag

SEQ ID NO: 318314 - RNA, 22 nt, Human
augggaggcagcagagcccagc

SEQ ID NO: 318315 - RNA, 22 nt, Human
gcccuguguguuugcacugauu

SEQ ID NO: 318316 - RNA, 22 nt, Human
ccuguggcucucuuuggagguc

SEQ ID NO: 318317 - RNA, 22 nt, Human
cagggagcuggcuggcgugagu

SEQ ID NO: 318318 - RNA, 22 nt, Human
uguaugcuuguguauaauauaa

SEQ ID NO: 318319 - RNA, 22 nt, Human
auuucagcccaguaugagcccc

SEQ ID NO: 318320 - RNA, 22 nt, Human
cagcccugcagccauggccugu

SEQ ID NO: 318321 - RNA, 22 nt, Human
uucuuucacucaagaaggaucu

SEQ ID NO: 318322 - RNA, 22 nt, Human
ugcucccaaacgaccuacugug

SEQ ID NO: 318323 - RNA, 22 nt, Human
ugcagcagguuccaaaggguua

SEQ ID NO: 318324 - RNA, 22 nt, Human
uggguggaauaaaucaguucug

SEQ ID NO: 318325 - RNA, 22 nt, Human
cuccuuccugguuagcaccuua

SEQ ID NO: 318326 - RNA, 19 nt, Human
cuggcucuuggguggagga

SEQ ID NO: 318327 - RNA, 22 nt, Human
ggcacugagaacaggcugacuu

SEQ ID NO: 318328 - RNA, 22 nt, Human
gcugggagcaaguacucaucuu

SEQ ID NO: 318329 - RNA, 22 nt, Human
ugggcacaaacaucugccuguu

SEQ ID NO: 318330 - RNA, 22 nt, Human
aaaugcaggaaauuaugcuuuu

SEQ ID NO: 318331 - RNA, 22 nt, Human
ugaggcagaaauuccuguuuuc

SEQ ID NO: 318332 - RNA, 22 nt, Human
ccaaaccauccaucuccaggcu

SEQ ID NO: 318333 - RNA, 22 nt, Human
gccugaaguuucaugccucuau

SEQ ID NO: 318334 - RNA, 22 nt, Human
ucuucccuaaucaccaucuuca

SEQ ID NO: 318335 - RNA, 22 nt, Human
auccaaaucaugucagaagaac

SEQ ID NO: 318336 - RNA, 20 nt, Human
uuucaguugguuaauggcau

SEQ ID NO: 318337 - RNA, 22 nt, Human
ucugucuucaucagcaugugau

SEQ ID NO: 318338 - RNA, 22 nt, Human
cuuucacaguccugacugagcg

SEQ ID NO: 318339 - RNA, 19 nt, Human
uaucuguuuccugcuuguc

SEQ ID NO: 318340 - RNA, 22 nt, Human
ucagguggcuucggggaguggc

SEQ ID NO: 318341 - RNA, 22 nt, Human
ugaagcagcuucuuucugucaa

SEQ ID NO: 318342 - RNA, 22 nt, Human
uugcuuuguggugguucuucca

SEQ ID NO: 318343 - RNA, 22 nt, Human
ugccuggguucccaccccaaag

SEQ ID NO: 318344 - RNA, 22 nt, Human
ggcagaggaaggaugaauucac

SEQ ID NO: 318345 - RNA, 22 nt, Human
ccugugccauccugagcauccc

SEQ ID NO: 318346 - RNA, 22 nt, Human
ccagcugggauuaagggaaaau

SEQ ID NO: 318347 - RNA, 20 nt, Human
uggggccuguuucugugguu

SEQ ID NO: 318348 - RNA, 22 nt, Human
aguccuuugggaaaaaugacua

SEQ ID NO: 318349 - RNA, 22 nt, Human
cagagcucagagcagggcacuc

SEQ ID NO: 318350 - RNA, 22 nt, Human
agcagggcuugccgcuuguccu

SEQ ID NO: 318351 - RNA, 22 nt, Human
caggcacucauucagagaggug

SEQ ID NO: 318352 - RNA, 21 nt, Human
cuacuuaaguaggggauuagg

SEQ ID NO: 318353 - RNA, 22 nt, Human
uguggcuuaagaaugccuuuaa

SEQ ID NO: 318354 - RNA, 22 nt, Human
ugcagaaguauuccaggcccca

SEQ ID NO: 318355 - RNA, 22 nt, Human
auaaauuuauaauuguuuccug

SEQ ID NO: 318356 - RNA, 22 nt, Human
uccacugcagcuucugauggaa

SEQ ID NO: 318357 - RNA, 22 nt, Human
cuccucuggaaauuccucugcc

SEQ ID NO: 318358 - RNA, 22 nt, Human
cauuguuaauugguaucuuaca

SEQ ID NO: 318359 - RNA, 22 nt, Human
caaaguccauaguuuacaauag

SEQ ID NO: 318360 - RNA, 22 nt, Human
uuugaagucagacacugcuuug

SEQ ID NO: 318361 - RNA, 22 nt, Human
uuugcauuuugauaagaucacu

SEQ ID NO: 318362 - RNA, 22 nt, Human
uuauuccaguaaucucuguaau

SEQ ID NO: 318363 - RNA, 22 nt, Human
uggcucaggggucuggcucugu

SEQ ID NO: 318364 - RNA, 22 nt, Human
uuucccagagguaugaauaagu

SEQ ID NO: 318365 - RNA, 20 nt, Human
aauaaaagaagccuucaccc

SEQ ID NO: 318366 - RNA, 22 nt, Human
ucauucuccucuggaaaaggca

SEQ ID NO: 318367 - RNA, 22 nt, Human
gggaucagaaacauagcccuga

SEQ ID NO: 318368 - RNA, 18 nt, Human
uaaaugcauguuaauaac

SEQ ID NO: 318369 - RNA, 22 nt, Human
ugaaaucuuuaguuucuguccc

SEQ ID NO: 318370 - RNA, 19 nt, Human
uggaaaauggauugaauca

SEQ ID NO: 318371 - RNA, 22 nt, Human
uucuuugaguuaguacagucca

SEQ ID NO: 318372 - RNA, 22 nt, Human
uggcucagucauggaugaguaa

SEQ ID NO: 318373 - RNA, 22 nt, Human
ggcaggagaaaggucucuucuu

SEQ ID NO: 318374 - RNA, 20 nt, Human
uccaggagaacugggagccg

SEQ ID NO: 318375 - RNA, 22 nt, Human
uggcugccuuucaccucaucuc

SEQ ID NO: 318376 - RNA, 22 nt, Human
uucacacacagcuuccuauugu

SEQ ID NO: 318377 - RNA, 22 nt, Human
auguuucaaugcacuuuagccu

SEQ ID NO: 318378 - RNA, 22 nt, Human
accucugcuucccggguucaag

SEQ ID NO: 318379 - RNA, 19 nt, Human
ccucuccgcccaccagccc

SEQ ID NO: 318380 - RNA, 22 nt, Human
gacauuucaaucucauuauggg

SEQ ID NO: 318381 - RNA, 22 nt, Human
ggagccuugggcgcucucccau

SEQ ID NO: 318382 - RNA, 22 nt, Human
agagccaggaugucuucugggg

SEQ ID NO: 318383 - RNA, 22 nt, Human
aaauguagaccuauagggaccu

SEQ ID NO: 318384 - RNA, 22 nt, Human
ucacgagaggcacagaauagag

SEQ ID NO: 318385 - RNA, 22 nt, Human
gugcaguggcagauccuagcuc

SEQ ID NO: 318386 - RNA, 22 nt, Human
uauucaugagauaggcaguuuu

SEQ ID NO: 318387 - RNA, 22 nt, Human
uggggcuggcacagucucuauu

SEQ ID NO: 318388 - RNA, 22 nt, Human
ggcccaaggcccaggucgagcu

SEQ ID NO: 318389 - RNA, 22 nt, Human
ccucucuguguggccucuccau

SEQ ID NO: 318390 - RNA, 18 nt, Human
agcagcugucagaaugcc

SEQ ID NO: 318391 - RNA, 22 nt, Human
uuaagacaguguauuuguuuuc

SEQ ID NO: 318392 - RNA, 22 nt, Human
ugcagcuucuuguccugugauu

SEQ ID NO: 318393 - RNA, 22 nt, Human
cucugagcuccuggaagcgugc

SEQ ID NO: 318394 - RNA, 22 nt, Human
uagcuggguugaggucaucuac

SEQ ID NO: 318395 - RNA, 21 nt, Human
ccaggcuccugaggcugguca

SEQ ID NO: 318396 - RNA, 22 nt, Human
auuuguaauuucuuaucugugu

SEQ ID NO: 318397 - RNA, 22 nt, Human
gacacagagauaggccuguguu

SEQ ID NO: 318398 - RNA, 19 nt, Human
cccaguccuuguccugggc

SEQ ID NO: 318399 - RNA, 20 nt, Human
acuuuacugagcuguaauuc

SEQ ID NO: 318400 - RNA, 22 nt, Human
gaugauggacaaagcauuggug

SEQ ID NO: 318401 - RNA, 20 nt, Human
gugggcagcaggcauacugg

SEQ ID NO: 318402 - RNA, 22 nt, Human
agcauuuaguuaguaaauguuu

SEQ ID NO: 318403 - RNA, 22 nt, Human
uccucucagugugguuguggga

SEQ ID NO: 318404 - RNA, 22 nt, Human
uggcucagcagguuagaaacua

SEQ ID NO: 318405 - RNA, 22 nt, Human
uccagaaacuuuuccagucuca

SEQ ID NO: 318406 - RNA, 22 nt, Human
acauuguagacuuuucauaugu

SEQ ID NO: 318407 - RNA, 22 nt, Human
gggggcucugacucccucagcu

SEQ ID NO: 318408 - RNA, 23 nt, Human
uggcucagggucucuuaugaagu

SEQ ID NO: 318409 - RNA, 22 nt, Human
caagagcugugaccucauucac

SEQ ID NO: 318410 - RNA, 22 nt, Human
uguccugcaacugaaggagaag

SEQ ID NO: 318411 - RNA, 22 nt, Human
uggagggauacaaagaugaaaa

SEQ ID NO: 318412 - RNA, 22 nt, Human
cacugcuuuuuuggcuauguac

SEQ ID NO: 318413 - RNA, 22 nt, Human
aggggcugccuggcuuggcacu

SEQ ID NO: 318414 - RNA, 22 nt, Human
gcaggagugacauggaugugga

SEQ ID NO: 318415 - RNA, 22 nt, Human
agaggccaggcugcagagggau

SEQ ID NO: 318416 - RNA, 22 nt, Human
gcuggcagggacagcugcgugu

SEQ ID NO: 318417 - RNA, 22 nt, Human
ugcccuguuccugccuccagcu

SEQ ID NO: 318418 - RNA, 22 nt, Human
uguggccagcagguggcugugu

SEQ ID NO: 318419 - RNA, 22 nt, Human
uggccugcccagagcagcucug

SEQ ID NO: 318420 - RNA, 22 nt, Human
aggacuuagaacauuauguacu

SEQ ID NO: 318421 - RNA, 22 nt, Human
ucucagagauuuuguuucccuu

SEQ ID NO: 318422 - RNA, 22 nt, Human
cucaggaggaggaaguucauug

SEQ ID NO: 318423 - RNA, 22 nt, Human
uuugcaaauaccaugaaacuug

SEQ ID NO: 318424 - RNA, 22 nt, Human
gagauauguuagaaagcuauug

SEQ ID NO: 318425 - RNA, 22 nt, Human
aucaggaucaugcuggguggga

SEQ ID NO: 318426 - RNA, 22 nt, Human
uccauuuuagagaugaagaaac

SEQ ID NO: 318427 - RNA, 22 nt, Human
ucuuuacaaucuaagcauaguu

SEQ ID NO: 318428 - RNA, 21 nt, Human
caugaagccgguucccuguuu

SEQ ID NO: 318429 - RNA, 22 nt, Human
ccucugcucccuggugucugag

SEQ ID NO: 318430 - RNA, 22 nt, Human
aaagaugaucuacaaguucauu

SEQ ID NO: 318431 - RNA, 22 nt, Human
ugcuuccugaggccgucuucuc

SEQ ID NO: 318432 - RNA, 22 nt, Human
cuggcugugcagucuuccagaa

SEQ ID NO: 318433 - RNA, 22 nt, Human
ggccuugguaaagggaugcaug

SEQ ID NO: 318434 - RNA, 22 nt, Human
ugaaggaggaauguggccucca

SEQ ID NO: 318435 - RNA, 22 nt, Human
gccaggcuggcaaaaggaaacc

SEQ ID NO: 318436 - RNA, 22 nt, Human
cagagcagugaggaguugugua

SEQ ID NO: 318437 - RNA, 22 nt, Human
gccugcagauauauaggauggu

SEQ ID NO: 318438 - RNA, 22 nt, Human
ucccagggucaguggugaggcc

SEQ ID NO: 318439 - RNA, 22 nt, Human
uagggcaguuucauguuaucuu

SEQ ID NO: 318440 - RNA, 22 nt, Human
agcagaaccugcagaccugucu

SEQ ID NO: 318441 - RNA, 22 nt, Human
aaucagucauuagcucugaccu

SEQ ID NO: 318442 - RNA, 21 nt, Human
cugcucuggggaccggcugug

SEQ ID NO: 318443 - RNA, 22 nt, Human
gcaguguuaaacaacugcugcu

SEQ ID NO: 318444 - RNA, 22 nt, Human
cacaguccagacuccuggaguu

SEQ ID NO: 318445 - RNA, 22 nt, Human
aggagacagaauuuaaauuugg

SEQ ID NO: 318446 - RNA, 22 nt, Human
cauaaucagauguguacauaag

SEQ ID NO: 318447 - RNA, 22 nt, Human
cccuggaguccuggcaguugau

SEQ ID NO: 318448 - RNA, 22 nt, Human
uuugacauugccaauuugcuca

SEQ ID NO: 318449 - RNA, 21 nt, Human
uacagaaugcgcuucagucug

SEQ ID NO: 318450 - RNA, 22 nt, Human
cccagcuccuuggaugggcagg

SEQ ID NO: 318451 - RNA, 22 nt, Human
cuucuaggcuucucagggggca

SEQ ID NO: 318452 - RNA, 22 nt, Human
gaacagaagaggcuggugccac

SEQ ID NO: 318453 - RNA, 22 nt, Human
uguggcucucagauccuccaau

SEQ ID NO: 318454 - RNA, 22 nt, Human
ccacaucucgguccccucuuug

SEQ ID NO: 318455 - RNA, 22 nt, Human
ccuguucaagguauuaauuauc

SEQ ID NO: 318456 - RNA, 22 nt, Human
cacucugagaaguacaagcucc

SEQ ID NO: 318457 - RNA, 22 nt, Human
gcaggggcugagcaccagcggg

SEQ ID NO: 318458 - RNA, 22 nt, Human
cugcugagcaucagggcugccc

SEQ ID NO: 318459 - RNA, 22 nt, Human
agggaggaucugcuccuugucu

SEQ ID NO: 318460 - RNA, 22 nt, Human
cuuauguacacacauauauugu

SEQ ID NO: 318461 - RNA, 22 nt, Human
uagggcaggugaagaaaagcua

SEQ ID NO: 318462 - RNA, 22 nt, Human
cagcugccccuccagggcuggg

SEQ ID NO: 318463 - RNA, 22 nt, Human
cauuuguaguaucuguuuauau

SEQ ID NO: 318464 - RNA, 22 nt, Human
aguaugaacggaaggccuggga

SEQ ID NO: 318465 - RNA, 22 nt, Human
aaggcaguacuuuauguccaua

SEQ ID NO: 318466 - RNA, 22 nt, Human
agucucagcaagcauggcuagu

SEQ ID NO: 318467 - RNA, 22 nt, Human
ucugucacuuuuauuuacugaa

SEQ ID NO: 318468 - RNA, 22 nt, Human
uuagucaauagugaauauagag

SEQ ID NO: 318469 - RNA, 22 nt, Human
aaaggccacacugcucuuucuc

SEQ ID NO: 318470 - RNA, 22 nt, Human
cugucauuuaagacauucugga

SEQ ID NO: 318471 - RNA, 22 nt, Human
aguguuugagacacauuucacu

SEQ ID NO: 318472 - RNA, 22 nt, Human
ugggagcccaagggagcugccg

SEQ ID NO: 318473 - RNA, 22 nt, Human
gaaauauuacaguggaggggau

SEQ ID NO: 318474 - RNA, 22 nt, Human
ggagacagugacuuagagacug

SEQ ID NO: 318475 - RNA, 21 nt, Human
ucacuagugccuucugucauu

SEQ ID NO: 318476 - RNA, 21 nt, Human
ucuagaauccuguauaagacu

SEQ ID NO: 318477 - RNA, 23 nt, Human
aggcuuccuaucuuagagcuggg

SEQ ID NO: 318478 - RNA, 22 nt, Human
ggcuucugaaaucucugugcgu

SEQ ID NO: 318479 - RNA, 22 nt, Human
cuccugggaauuuaguugugag

SEQ ID NO: 318480 - RNA, 22 nt, Human
acaaagucuuuuacaacaguca

SEQ ID NO: 318481 - RNA, 22 nt, Human
cagcuggcaaguggagcagggu

SEQ ID NO: 318482 - RNA, 22 nt, Human
ugaguuuugucuugcuagaagu

SEQ ID NO: 318483 - RNA, 22 nt, Human
ccuccuuuccuguuuuccugag

SEQ ID NO: 318484 - RNA, 22 nt, Human
ugccagcccaccuuggggccuc

SEQ ID NO: 318485 - RNA, 22 nt, Human
uuccagcuaacucacaucccuu

SEQ ID NO: 318486 - RNA, 22 nt, Human
aggcuccaugcaaaggcuguuu

SEQ ID NO: 318487 - RNA, 22 nt, Human
aucaguuuauacuuauaaaucu

SEQ ID NO: 318488 - RNA, 22 nt, Human
ucaggcagaugcagggauggau

SEQ ID NO: 318489 - RNA, 22 nt, Human
ccugcaggggagagacuucuag

SEQ ID NO: 318490 - RNA, 22 nt, Human
ggcuucucucccccagcuccac

SEQ ID NO: 318491 - RNA, 22 nt, Human
ccagugcuucuuugcuagcugg

SEQ ID NO: 318492 - RNA, 22 nt, Human
cugcucuguuucuuagcugggu

SEQ ID NO: 318493 - RNA, 22 nt, Human
gucccauaaguagugcaacuug

SEQ ID NO: 318494 - RNA, 22 nt, Human
gagggcacgaaacaaccacuuc

SEQ ID NO: 318495 - RNA, 22 nt, Human
gccuggccugaacuaggaggug

SEQ ID NO: 318496 - RNA, 22 nt, Human
gaggaggaaacccuguuccucu

SEQ ID NO: 318497 - RNA, 22 nt, Human
uauucacaguugauuuacaguu

SEQ ID NO: 318498 - RNA, 22 nt, Human
aaagacuuggcuuaugauuugc

SEQ ID NO: 318499 - RNA, 22 nt, Human
cucacugcccugaaguuggguu

SEQ ID NO: 318500 - RNA, 22 nt, Human
aggcuuccgaguagcugggacu

SEQ ID NO: 318501 - RNA, 22 nt, Human
caagcagacaguaggccuagaa

SEQ ID NO: 318502 - RNA, 18 nt, Human
aaauguacuguccauggc

SEQ ID NO: 318503 - RNA, 22 nt, Human
ugccugucuuggaguccuggcc

SEQ ID NO: 318504 - RNA, 22 nt, Human
uucuucuuucccccugugguac

SEQ ID NO: 318505 - RNA, 22 nt, Human
ggcuggaagguagaagaugagg

SEQ ID NO: 318506 - RNA, 22 nt, Human
gcugccacgaucucugcuguag

SEQ ID NO: 318507 - RNA, 22 nt, Human
accuuucaaaguggcuaucacu

SEQ ID NO: 318508 - RNA, 22 nt, Human
ugcaggcuuuagccccauggcu

SEQ ID NO: 318509 - RNA, 22 nt, Human
gccggggcuggggagagacaug

SEQ ID NO: 318510 - RNA, 22 nt, Human
uagcaggguaaauguagaugga

SEQ ID NO: 318511 - RNA, 20 nt, Human
cagggccacgcuccaaggca

SEQ ID NO: 318512 - RNA, 22 nt, Human
ucugagcauugaauuuucuucc

SEQ ID NO: 318513 - RNA, 22 nt, Human
uaugaaauuucuaguucugcuu

SEQ ID NO: 318514 - RNA, 22 nt, Human
ucuggccaggauggcaagacca

SEQ ID NO: 318515 - RNA, 22 nt, Human
uuccuguaguugugcaauguac

SEQ ID NO: 318516 - RNA, 21 nt, Human
uaaggccaagucuauuucugu

SEQ ID NO: 318517 - RNA, 22 nt, Human
ccuggcagucaggggaguccuu

SEQ ID NO: 318518 - RNA, 22 nt, Human
agaaagggaacuggcaaagcca

SEQ ID NO: 318519 - RNA, 19 nt, Human
ugucucugaaagaugagcu

SEQ ID NO: 318520 - RNA, 22 nt, Human
uagggcagagcuuguacacgau

SEQ ID NO: 318521 - RNA, 22 nt, Human
agugucauuuuguccaucuucu

SEQ ID NO: 318522 - RNA, 22 nt, Human
cauggggagacaccuagggaaa

SEQ ID NO: 318523 - RNA, 22 nt, Human
uagcccagagucccaauuccag

SEQ ID NO: 318524 - RNA, 22 nt, Human
guguguccaggcgggagucaag

SEQ ID NO: 318525 - RNA, 22 nt, Human
agcagcucuuaacaaagcaugg

SEQ ID NO: 318526 - RNA, 21 nt, Human
ccuggcugcacaguugcuggu

SEQ ID NO: 318527 - RNA, 20 nt, Human
cuccagggaacagacuggag

SEQ ID NO: 318528 - RNA, 22 nt, Human
accugccucuaagcagcaggug

SEQ ID NO: 318529 - RNA, 23 nt, Human
uggcucugagcuuccugguggcc

SEQ ID NO: 318530 - RNA, 22 nt, Human
uggaggaaguggcuggccagaa

SEQ ID NO: 318531 - RNA, 22 nt, Human
uuaacaugucuugacuucaucu

SEQ ID NO: 318532 - RNA, 19 nt, Human
acagaaauguaagugagac

SEQ ID NO: 318533 - RNA, 22 nt, Human
aguuucuaccgguacauucagg

SEQ ID NO: 318534 - RNA, 22 nt, Human
cugucuguuuuaccuucuccag

SEQ ID NO: 318535 - RNA, 22 nt, Human
uuugcauaaaggagcauuucuc

SEQ ID NO: 318536 - RNA, 22 nt, Human
acaauucugaugguuucccagu

SEQ ID NO: 318537 - RNA, 22 nt, Human
gguaaaaugcagauucuuagcc

SEQ ID NO: 318538 - RNA, 22 nt, Human
augcaguaaauguuaagaaaaa

SEQ ID NO: 318539 - RNA, 22 nt, Human
acaugcauaggagaagucuuua

SEQ ID NO: 318540 - RNA, 21 nt, Human
ggccucugucauccugggaag

SEQ ID NO: 318541 - RNA, 22 nt, Human
uggcagggucuugcuguguugc

SEQ ID NO: 318542 - RNA, 22 nt, Human
ggcuggccucaggguccucgcu

SEQ ID NO: 318543 - RNA, 23 nt, Human
uuuauauuccuaaugucuugagc

SEQ ID NO: 318544 - RNA, 22 nt, Human
uccuugaauauaauaacaguag

SEQ ID NO: 318545 - RNA, 22 nt, Human
cauguacacucauguaacuaua

SEQ ID NO: 318546 - RNA, 22 nt, Human
aguggccagugcugcucugggg

SEQ ID NO: 318547 - RNA, 22 nt, Human
auuuaaugucgagcuauuguag

SEQ ID NO: 318548 - RNA, 22 nt, Human
ugcaauaaggaguaauaguaaa

SEQ ID NO: 318549 - RNA, 22 nt, Human
ccugcccccgucagaggugaug

SEQ ID NO: 318550 - RNA, 22 nt, Human
ccaggcagcucugauuuauguc

SEQ ID NO: 318551 - RNA, 22 nt, Human
agcagggggccacagucacagc

SEQ ID NO: 318552 - RNA, 22 nt, Human
aaggaggccuggcagaugaaga

SEQ ID NO: 318553 - RNA, 22 nt, Human
aguggcagccgagcaggagaug

SEQ ID NO: 318554 - RNA, 22 nt, Human
acaguuaucuuugaaauagaga

SEQ ID NO: 318555 - RNA, 22 nt, Human
auuauguagguuaggugguugu

SEQ ID NO: 318556 - RNA, 22 nt, Human
agccuggagguaaugaggaaac

SEQ ID NO: 318557 - RNA, 22 nt, Human
aguugaauaauuagacauaucu

SEQ ID NO: 318558 - RNA, 22 nt, Human
uuuccuuccagguuccuaaggc

SEQ ID NO: 318559 - RNA, 22 nt, Human
uggcaccugaacuuagaggugu

SEQ ID NO: 318560 - RNA, 22 nt, Human
acucaggaaaugaagacugguu

SEQ ID NO: 318561 - RNA, 22 nt, Human
uuucccaguucccugcucuaua

SEQ ID NO: 318562 - RNA, 22 nt, Human
uuuuaagaugcuaguauuucag

SEQ ID NO: 318563 - RNA, 19 nt, Human
ucaucucacagggccuggc

SEQ ID NO: 318564 - RNA, 22 nt, Human
cugaggugagcuucccugggcu

SEQ ID NO: 318565 - RNA, 22 nt, Human
ucuggagcuggagggcaaggca

SEQ ID NO: 318566 - RNA, 22 nt, Human
ccuuaaauucuccauuugaaag

SEQ ID NO: 318567 - RNA, 22 nt, Human
caggccugugacaccgugucug

SEQ ID NO: 318568 - RNA, 20 nt, Human
uaucaaucagaaagaagacu

SEQ ID NO: 318569 - RNA, 22 nt, Human
gguugccggggcaggacuggaa

SEQ ID NO: 318570 - RNA, 22 nt, Human
gagcauuugguuauaguaauuu

SEQ ID NO: 318571 - RNA, 22 nt, Human
cagcucuggcgucagggagcga

SEQ ID NO: 318572 - RNA, 22 nt, Human
agcagugggugacagagcugag

SEQ ID NO: 318573 - RNA, 22 nt, Human
ucucuuucuauugcaccaugcu

SEQ ID NO: 318574 - RNA, 22 nt, Human
uauuuuaaagacugccagccua

SEQ ID NO: 318575 - RNA, 22 nt, Human
agccucucuccagcuuggcaga

SEQ ID NO: 318576 - RNA, 22 nt, Human
ggagugaaucacuagaugcaga

SEQ ID NO: 318577 - RNA, 19 nt, Human
uggaggagaggaaaaguca

SEQ ID NO: 318578 - RNA, 22 nt, Human
ccuggcagaauauuaaagugca

SEQ ID NO: 318579 - RNA, 22 nt, Human
cucagcagugacaagagaguau

SEQ ID NO: 318580 - RNA, 22 nt, Human
gcagcugagagaagaacagggc

SEQ ID NO: 318581 - RNA, 22 nt, Human
cuccagugucucagagcagaug

SEQ ID NO: 318582 - RNA, 22 nt, Human
gugauuucuaaucaucugaaug

SEQ ID NO: 318583 - RNA, 22 nt, Human
augguuuguguggcccagauga

SEQ ID NO: 318584 - RNA, 20 nt, Human
agcaggaaugaugcuuucau

SEQ ID NO: 318585 - RNA, 22 nt, Human
caaggaaaaagcgagcucgggg

SEQ ID NO: 318586 - RNA, 22 nt, Human
uccuucagauuccugcuucugg

SEQ ID NO: 318587 - RNA, 22 nt, Human
gggcuccaacggugagcaugga

SEQ ID NO: 318588 - RNA, 22 nt, Human
cccccuggcaggcuggccucuc

SEQ ID NO: 318589 - RNA, 22 nt, Human
aaagccagagcaagcugucaca

SEQ ID NO: 318590 - RNA, 19 nt, Human
agcagagcagggccguggg

SEQ ID NO: 318591 - RNA, 22 nt, Human
ggcugcugggaauaugccagcu

SEQ ID NO: 318592 - RNA, 22 nt, Human
agagcugugaaaaugagguuug

SEQ ID NO: 318593 - RNA, 22 nt, Human
ggauggagguucucagaugcuc

SEQ ID NO: 318594 - RNA, 17 nt, Human
aggagucucagaugagc

SEQ ID NO: 318595 - RNA, 22 nt, Human
ggcacagggggcugaggacuag

SEQ ID NO: 318596 - RNA, 22 nt, Human
aggagucaggaccaaauggaaa

SEQ ID NO: 318597 - RNA, 22 nt, Human
ucugccagugguuuggcccuga

SEQ ID NO: 318598 - RNA, 22 nt, Human
uccucaguaaggaucgucagcu

SEQ ID NO: 318599 - RNA, 22 nt, Human
caggaggcuccuagggcucugu

SEQ ID NO: 318600 - RNA, 22 nt, Human
auuaaauuggacgcugggggaa

SEQ ID NO: 318601 - RNA, 22 nt, Human
uuugcauuuguucaaguauuga

SEQ ID NO: 318602 - RNA, 22 nt, Human
cccagcacaggcaauuccauac

SEQ ID NO: 318603 - RNA, 22 nt, Human
uacuacauuaauaaaacauuca

SEQ ID NO: 318604 - RNA, 22 nt, Human
uccuuccucggggacccagauc

SEQ ID NO: 318605 - RNA, 22 nt, Human
uuaguuuucccaucuuuauggu

SEQ ID NO: 318606 - RNA, 22 nt, Human
aaguauuucuggccugugaaag

SEQ ID NO: 318607 - RNA, 22 nt, Human
caggaccuggaaugcuugugaa

SEQ ID NO: 318608 - RNA, 22 nt, Human
ugcuggaauaauuucauguuaa

SEQ ID NO: 318609 - RNA, 22 nt, Human
caaaguuuggcucucaugacau

SEQ ID NO: 318610 - RNA, 20 nt, Human
ccucaagcagacugacagcu

SEQ ID NO: 318611 - RNA, 22 nt, Human
ggggggugcugaucaguggagc

SEQ ID NO: 318612 - RNA, 22 nt, Human
gcugccuggaauaacggcuggc

SEQ ID NO: 318613 - RNA, 22 nt, Human
gaaaucugcuucuugcauagua

SEQ ID NO: 318614 - RNA, 22 nt, Human
ccugcuguucuguuuagugaac

SEQ ID NO: 318615 - RNA, 22 nt, Human
ucugccuuccccauaaucugau

SEQ ID NO: 318616 - RNA, 22 nt, Human
gaggcagaggaagguggucucu

SEQ ID NO: 318617 - RNA, 22 nt, Human
gcuggagccauuggcuuggccu

SEQ ID NO: 318618 - RNA, 22 nt, Human
uucuuuccucccagccuuugga

SEQ ID NO: 318619 - RNA, 22 nt, Human
gggauggggggaagcguccaug

SEQ ID NO: 318620 - RNA, 22 nt, Human
gcaggcagagagggguuuccag

SEQ ID NO: 318621 - RNA, 22 nt, Human
agggagcucaguuggaagcggu

SEQ ID NO: 318622 - RNA, 22 nt, Human
ugggccacggggguggagagcu

SEQ ID NO: 318623 - RNA, 22 nt, Human
gcugagagugagcacuggauau

SEQ ID NO: 318624 - RNA, 20 nt, Human
cucaguguggccugaguguu

SEQ ID NO: 318625 - RNA, 22 nt, Human
aagacagagggaagcaaugaug

SEQ ID NO: 318626 - RNA, 22 nt, Human
agcugucuccagauacaggauu

SEQ ID NO: 318627 - RNA, 22 nt, Human
ucauggagacuuugagccuguu

SEQ ID NO: 318628 - RNA, 22 nt, Human
gaaguucucaaggaucacagaa

SEQ ID NO: 318629 - RNA, 22 nt, Human
acaagguauccacauuaaaugu

SEQ ID NO: 318630 - RNA, 22 nt, Human
ugggcagauguccucugaagug

SEQ ID NO: 318631 - RNA, 22 nt, Human
uggcagaguuggagguggaaga

SEQ ID NO: 318632 - RNA, 22 nt, Human
ugcccaaguccuccaccgaggu

SEQ ID NO: 318633 - RNA, 22 nt, Human
ugacucuguaccugucugccuu

SEQ ID NO: 318634 - RNA, 22 nt, Human
uaccauuucauucuuuccucau

SEQ ID NO: 318635 - RNA, 22 nt, Human
acgcagaagggccuggcgugcc

SEQ ID NO: 318636 - RNA, 22 nt, Human
gaagcagcuuucuggugaggag

SEQ ID NO: 318637 - RNA, 22 nt, Human
agccaggacguugcucagcucc

SEQ ID NO: 318638 - RNA, 22 nt, Human
acauaugauauugaggaucuca

SEQ ID NO: 318639 - RNA, 22 nt, Human
cuucugcaauaaguuuuggucc

SEQ ID NO: 318640 - RNA, 22 nt, Human
ccuggagcacucucccuggcug

SEQ ID NO: 318641 - RNA, 22 nt, Human
gucagcagugucagcucugggg

SEQ ID NO: 318642 - RNA, 22 nt, Human
agagccugggaauuugcauguu

SEQ ID NO: 318643 - RNA, 22 nt, Human
aaguucaaucagaugaaaaagc

SEQ ID NO: 318644 - RNA, 22 nt, Human
gggaccaggugggugcauuccg

SEQ ID NO: 318645 - RNA, 22 nt, Human
aagggaggaggauuuauuguac

SEQ ID NO: 318646 - RNA, 22 nt, Human
uuuauguaguuacggacuauca

SEQ ID NO: 318647 - RNA, 22 nt, Human
gggccuggugcuucugacuccu

SEQ ID NO: 318648 - RNA, 22 nt, Human
cagacuuucaaggagugaaggc

SEQ ID NO: 318649 - RNA, 22 nt, Human
cucuucuuauggccguggcuga

SEQ ID NO: 318650 - RNA, 22 nt, Human
cucugcauuuuaacagaugauu

SEQ ID NO: 318651 - RNA, 22 nt, Human
uuuauuuauaagccacuugcug

SEQ ID NO: 318652 - RNA, 22 nt, Human
ggagagaauuccauggacaugu

SEQ ID NO: 318653 - RNA, 22 nt, Human
ucagcugaaguggagaagcaga

SEQ ID NO: 318654 - RNA, 17 nt, Human
acaagcaguggccaugg

SEQ ID NO: 318655 - RNA, 22 nt, Human
gcugcaggagcuggagcugugg

SEQ ID NO: 318656 - RNA, 22 nt, Human
aacaguguuuuucuucagcacu

SEQ ID NO: 318657 - RNA, 22 nt, Human
uccugagauguggagcuccaug

SEQ ID NO: 318658 - RNA, 22 nt, Human
gagucacaaagccuuucuuauu

SEQ ID NO: 318659 - RNA, 22 nt, Human
aaacugcuuuccacaguggcua

SEQ ID NO: 318660 - RNA, 22 nt, Human
ggaggacaggggcugcagcaca

SEQ ID NO: 318661 - RNA, 22 nt, Human
ugggcagaaggaagagccaccu

SEQ ID NO: 318662 - RNA, 22 nt, Human
cugagccuuauucaccagcccu

SEQ ID NO: 318663 - RNA, 22 nt, Human
cugucccucaucaccucugggu

SEQ ID NO: 318664 - RNA, 22 nt, Human
cagcuugcuaauuuugacuuca

SEQ ID NO: 318665 - RNA, 22 nt, Human
ugcaggugguuuggacacugcu

SEQ ID NO: 318666 - RNA, 22 nt, Human
auugucuuuggugcuuccagga

SEQ ID NO: 318667 - RNA, 22 nt, Human
ucucugggaaugggccugggua

SEQ ID NO: 318668 - RNA, 22 nt, Human
uuuuuguagucauuagaagagg

SEQ ID NO: 318669 - RNA, 21 nt, Human
uguaugcacgcacaugcacac

SEQ ID NO: 318670 - RNA, 18 nt, Human
acccucuggcuucugagc

SEQ ID NO: 318671 - RNA, 22 nt, Human
aagugaagaaauacaugagaau

SEQ ID NO: 318672 - RNA, 23 nt, Human
uuuuccagaaucgacucuguaga

SEQ ID NO: 318673 - RNA, 22 nt, Human
acacaugagaaacaucaguugu

SEQ ID NO: 318674 - RNA, 22 nt, Human
ggccuggcucuugcccagccug

SEQ ID NO: 318675 - RNA, 22 nt, Human
ggcccaucucuugcucuggguu

SEQ ID NO: 318676 - RNA, 22 nt, Human
agcaggugacccaagcaggcug

SEQ ID NO: 318677 - RNA, 19 nt, Human
uugaaauuguuugauaugg

SEQ ID NO: 318678 - RNA, 22 nt, Human
ccuguucaugaaacugcuuucc

SEQ ID NO: 318679 - RNA, 22 nt, Human
ucaggagucugugcaguuccac

SEQ ID NO: 318680 - RNA, 22 nt, Human
gaggcugcuuugaugacaggag

SEQ ID NO: 318681 - RNA, 22 nt, Human
agacccugucaguguuaggaaa

SEQ ID NO: 318682 - RNA, 22 nt, Human
ggcuucugccacgagagggaag

SEQ ID NO: 318683 - RNA, 22 nt, Human
agaauccucuucaguaaauucu

SEQ ID NO: 318684 - RNA, 22 nt, Human
uggcaggggaggugcuugcuua

SEQ ID NO: 318685 - RNA, 22 nt, Human
ccuuccaggugcaggcaagccu

SEQ ID NO: 318686 - RNA, 22 nt, Human
cagcuccugcagcugcugccgu

SEQ ID NO: 318687 - RNA, 22 nt, Human
ccuggggucagggacgcugugc

SEQ ID NO: 318688 - RNA, 22 nt, Human
ucuuugcacugugcaagcagaa

SEQ ID NO: 318689 - RNA, 22 nt, Human
ugggccaggauuucaagacccu

SEQ ID NO: 318690 - RNA, 22 nt, Human
ggcuccugaaagacuaugggaa

SEQ ID NO: 318691 - RNA, 22 nt, Human
gcuggccugggcucaagaccag

SEQ ID NO: 318692 - RNA, 22 nt, Human
aagcagaugcguuggagcaguu

SEQ ID NO: 318693 - RNA, 22 nt, Human
uccuuggagguguucaucugcc

SEQ ID NO: 318694 - RNA, 22 nt, Human
uugcucuguaauaaucuggggu

SEQ ID NO: 318695 - RNA, 22 nt, Human
gugcugucguggaacugggcug

SEQ ID NO: 318696 - RNA, 22 nt, Human
cugugggcugaaagugcucccg

SEQ ID NO: 318697 - RNA, 22 nt, Human
gaagguagcugcugagaugaca

SEQ ID NO: 318698 - RNA, 22 nt, Human
ugggugaggaugaugaggcagc

SEQ ID NO: 318699 - RNA, 21 nt, Human
cccuucuugggucaaaguaua

SEQ ID NO: 318700 - RNA, 22 nt, Human
ugucaaaaauaagagagauugu

SEQ ID NO: 318701 - RNA, 22 nt, Human
cuuggcugucuauaggaaagag

SEQ ID NO: 318702 - RNA, 19 nt, Human
ggcugucucggcccagcca

SEQ ID NO: 318703 - RNA, 22 nt, Human
ugagagacacacugugcaugua

SEQ ID NO: 318704 - RNA, 22 nt, Human
uugacagcuauuuugcuuugau

SEQ ID NO: 318705 - RNA, 22 nt, Human
gcagcugccgugagcucacgcc

SEQ ID NO: 318706 - RNA, 22 nt, Human
aaaugcagguucuugagccaag

SEQ ID NO: 318707 - RNA, 22 nt, Human
agcaggaguguccccuggcugu

SEQ ID NO: 318708 - RNA, 22 nt, Human
ucaguggagcuaagcaugagau

SEQ ID NO: 318709 - RNA, 23 nt, Human
gcaguguuugcuucaucuuaucc

SEQ ID NO: 318710 - RNA, 22 nt, Human
ucccuucacagaugcgauguuu

SEQ ID NO: 318711 - RNA, 22 nt, Human
gcuuccuucuaccacaucaugc

SEQ ID NO: 318712 - RNA, 22 nt, Human
uugauaaaaugauaucuucuuu

SEQ ID NO: 318713 - RNA, 22 nt, Human
uaagcauaacuaaaaaugauuu

SEQ ID NO: 318714 - RNA, 22 nt, Human
ggagccuguggccgucacgacu

SEQ ID NO: 318715 - RNA, 22 nt, Human
ucagugcuuuugagaagcuccu

SEQ ID NO: 318716 - RNA, 22 nt, Human
gaaggccaagaggcuccaagau

SEQ ID NO: 318717 - RNA, 21 nt, Human
gucagcagauccagcacuugu

SEQ ID NO: 318718 - RNA, 22 nt, Human
gaguaaggcugcugauggagug

SEQ ID NO: 318719 - RNA, 23 nt, Human
cauaaaauauuaguaugguagca

SEQ ID NO: 318720 - RNA, 22 nt, Human
ggccagaggccauccuccugcu

SEQ ID NO: 318721 - RNA, 22 nt, Human
uugaaaggugcugugugcugau

SEQ ID NO: 318722 - RNA, 22 nt, Human
gagccagcgccuugccucuggg

SEQ ID NO: 318723 - RNA, 22 nt, Human
aauacaguaauuuugaugaguu

SEQ ID NO: 318724 - RNA, 22 nt, Human
ccagcagcgauagggugagugc

SEQ ID NO: 318725 - RNA, 22 nt, Human
aggucauuuuugccuucuauuu

SEQ ID NO: 318726 - RNA, 22 nt, Human
uauagaaguaagcauugugaug

SEQ ID NO: 318727 - RNA, 22 nt, Human
aagcugcccucauucccagugc

SEQ ID NO: 318728 - RNA, 22 nt, Human
uaauguguccugaaagcuucug

SEQ ID NO: 318729 - RNA, 22 nt, Human
cugccacuuucacccagugcuc

SEQ ID NO: 318730 - RNA, 21 nt, Human
ugggcagauggcaguguggcu

SEQ ID NO: 318731 - RNA, 22 nt, Human
cuuugcaaacugucacacuuuc

SEQ ID NO: 318732 - RNA, 22 nt, Human
gccuggccgcuccgagcuccgc

SEQ ID NO: 318733 - RNA, 22 nt, Human
ggcuccuguccuccuggagcuc

SEQ ID NO: 318734 - RNA, 22 nt, Human
cagacagaaggcuccuugaggu

SEQ ID NO: 318735 - RNA, 22 nt, Human
augggggccugaacaggcaaaa

SEQ ID NO: 318736 - RNA, 22 nt, Human
ugguuuugcuaaaauagaaaga

SEQ ID NO: 318737 - RNA, 22 nt, Human
uuuucucuacaaaauaaccagc

SEQ ID NO: 318738 - RNA, 20 nt, Human
cucugcagcaaggccugggu

SEQ ID NO: 318739 - RNA, 22 nt, Human
aggcccugcccagugccacaag

SEQ ID NO: 318740 - RNA, 22 nt, Human
agcccugugggccuuguggcac

SEQ ID NO: 318741 - RNA, 22 nt, Human
ccaugcccuaaaggacuggcag

SEQ ID NO: 318742 - RNA, 22 nt, Human
agcuggccuccgggugccuggg

SEQ ID NO: 318743 - RNA, 22 nt, Human
uaccucaaguuccaggaaagcg

SEQ ID NO: 318744 - RNA, 22 nt, Human
ugagugaggaagcgguggagga

SEQ ID NO: 318745 - RNA, 22 nt, Human
gcagacuggucuucagccuugg

SEQ ID NO: 318746 - RNA, 22 nt, Human
gacccugagcaaaagcaguucu

SEQ ID NO: 318747 - RNA, 20 nt, Human
aucuuugucucuguaguugu

SEQ ID NO: 318748 - RNA, 22 nt, Human
gaaaaaugcuccaaaucugugg

SEQ ID NO: 318749 - RNA, 22 nt, Human
agagucuuccaggcagccugag

SEQ ID NO: 318750 - RNA, 22 nt, Human
agugcacaccuuaguacaaagu

SEQ ID NO: 318751 - RNA, 22 nt, Human
gcaggaagaugagcucagguaa

SEQ ID NO: 318752 - RNA, 22 nt, Human
cacugaaucucaaggggagggu

SEQ ID NO: 318753 - RNA, 22 nt, Human
guccugucccccaaggcugugg

SEQ ID NO: 318754 - RNA, 22 nt, Human
gccaggcuggugcaaggauauu

SEQ ID NO: 318755 - RNA, 22 nt, Human
aagggacuuugucagcuuucca

SEQ ID NO: 318756 - RNA, 22 nt, Human
gaggggcugggguugacuccaa

SEQ ID NO: 318757 - RNA, 22 nt, Human
gcugcucugaaaaugacuguug

SEQ ID NO: 318758 - RNA, 22 nt, Human
cugcucugagaggcucuuccua

SEQ ID NO: 318759 - RNA, 22 nt, Human
ggcugagccuggagcaucuggu

SEQ ID NO: 318760 - RNA, 22 nt, Human
acaaagucucuaauaaucuucu

SEQ ID NO: 318761 - RNA, 22 nt, Human
caugggcuuuggaggcuggagg

SEQ ID NO: 318762 - RNA, 22 nt, Human
cuggcucccucgcugaggugcu

SEQ ID NO: 318763 - RNA, 22 nt, Human
cuguacaucccgagagccagua

SEQ ID NO: 318764 - RNA, 22 nt, Human
uguuguuuucucauggagaaua

SEQ ID NO: 318765 - RNA, 19 nt, Human
uccucagugacaaccucag

SEQ ID NO: 318766 - RNA, 22 nt, Human
aaaugugugcacaaagacagcu

SEQ ID NO: 318767 - RNA, 23 nt, Human
gugagcagcccacuaggaaugcc

SEQ ID NO: 318768 - RNA, 21 nt, Human
auuauuauuucuguguccagc

SEQ ID NO: 318769 - RNA, 22 nt, Human
cagggcaguaccgcccucuggc

SEQ ID NO: 318770 - RNA, 18 nt, Human
uucagcagcagacacacu

SEQ ID NO: 318771 - RNA, 22 nt, Human
agcagccaaccuuacauucauc

SEQ ID NO: 318772 - RNA, 22 nt, Human
ucaggggaaaucucucagcgaa

SEQ ID NO: 318773 - RNA, 22 nt, Human
uagauuucaggcuggcuugcgg

SEQ ID NO: 318774 - RNA, 22 nt, Human
aauguaugggugagaaaguuga

SEQ ID NO: 318775 - RNA, 22 nt, Human
ucuuuucuggacucugcaugga

SEQ ID NO: 318776 - RNA, 22 nt, Human
agcuggcagucauccuagugag

SEQ ID NO: 318777 - RNA, 22 nt, Human
uggcagaguggaccauacucaa

SEQ ID NO: 318778 - RNA, 22 nt, Human
ugaaugcuuggagucauaaaau

SEQ ID NO: 318779 - RNA, 22 nt, Human
auacuaaaguauagaacuuagu

SEQ ID NO: 318780 - RNA, 22 nt, Human
aggcuggcgacaucuggcgggc

SEQ ID NO: 318781 - RNA, 22 nt, Human
acugcuuuaucugagaaguccu

SEQ ID NO: 318782 - RNA, 22 nt, Human
uggcagaguucgcugugccuuu

SEQ ID NO: 318783 - RNA, 19 nt, Human
aggcucugagcuccuggag

SEQ ID NO: 318784 - RNA, 22 nt, Human
uuagggcuuuucugaauaggcc

SEQ ID NO: 318785 - RNA, 22 nt, Human
gaaggaggcuccccaaagucug

SEQ ID NO: 318786 - RNA, 22 nt, Human
ggcagaguggagugcggccucc

SEQ ID NO: 318787 - RNA, 22 nt, Human
gccuucugaucgcuggacugac

SEQ ID NO: 318788 - RNA, 21 nt, Human
ugaaaugagaaugcugagcac

SEQ ID NO: 318789 - RNA, 22 nt, Human
auguagcagaagauguuuuccu

SEQ ID NO: 318790 - RNA, 20 nt, Human
cugcugugauucccuccucc

SEQ ID NO: 318791 - RNA, 22 nt, Human
guccucagagugggcagguccu

SEQ ID NO: 318792 - RNA, 22 nt, Human
uaggccaggacagagcuuccag

SEQ ID NO: 318793 - RNA, 20 nt, Human
uccaagcccuccuuccauuc

SEQ ID NO: 318794 - RNA, 22 nt, Human
uucuuucucaacaugaauguuu

SEQ ID NO: 318795 - RNA, 22 nt, Human
aggcacuguggaagacaugguu

SEQ ID NO: 318796 - RNA, 22 nt, Human
cuuccaaagcacuuuauggacc

SEQ ID NO: 318797 - RNA, 22 nt, Human
cugggaggcaccgcgucgugcu

SEQ ID NO: 318798 - RNA, 22 nt, Human
cugggaggauucauugagguga

SEQ ID NO: 318799 - RNA, 22 nt, Human
cccugcagccuugcaugccuuc

SEQ ID NO: 318800 - RNA, 22 nt, Human
uaggacauaaguauucuaacuu

SEQ ID NO: 318801 - RNA, 22 nt, Human
agccucugauggcucccaagga

SEQ ID NO: 318802 - RNA, 19 nt, Human
aguagcagaaagugcagug

SEQ ID NO: 318803 - RNA, 22 nt, Human
ugccucagucuaaagucucuca

SEQ ID NO: 318804 - RNA, 22 nt, Human
uucucagauccaucagaagucc

SEQ ID NO: 318805 - RNA, 22 nt, Human
uauguacacauacacuuguaau

SEQ ID NO: 318806 - RNA, 22 nt, Human
ucagggacuaggugcugccuga

SEQ ID NO: 318807 - RNA, 22 nt, Human
ucuggagcuggcagggcccugg

SEQ ID NO: 318808 - RNA, 22 nt, Human
gagguggcgcgccaucccugcc

SEQ ID NO: 318809 - RNA, 22 nt, Human
uagcagggccaggcugggaacc

SEQ ID NO: 318810 - RNA, 21 nt, Human
uuucacaaaaguaugugacaa

SEQ ID NO: 318811 - RNA, 22 nt, Human
cugcugagguccuugcucagac

SEQ ID NO: 318812 - RNA, 22 nt, Human
acaaaauuguguuaaacuuuau

SEQ ID NO: 318813 - RNA, 22 nt, Human
cugugcuuccaggauggcagcu

SEQ ID NO: 318814 - RNA, 22 nt, Human
uuugaauaucacaaacuuucaa

SEQ ID NO: 318815 - RNA, 22 nt, Human
ugucaugcccaggagcaaggua

SEQ ID NO: 318816 - RNA, 22 nt, Human
cccacagguccccaugaacucg

SEQ ID NO: 318817 - RNA, 22 nt, Human
cugucacccacccagccuguca

SEQ ID NO: 318818 - RNA, 22 nt, Human
agcacuuuccuggcaaaugugg

SEQ ID NO: 318819 - RNA, 22 nt, Human
uaucuguuaggaucagagcugg

SEQ ID NO: 318820 - RNA, 22 nt, Human
auucaagagcccauguuuccug

SEQ ID NO: 318821 - RNA, 22 nt, Human
ccugccagucacuaugucaccu

SEQ ID NO: 318822 - RNA, 19 nt, Human
uuacaucugcaacacuggu

SEQ ID NO: 318823 - RNA, 20 nt, Human
cugggcugcccagcuauggg

SEQ ID NO: 318824 - RNA, 22 nt, Human
gcacagggaggcuggccuggcc

SEQ ID NO: 318825 - RNA, 23 nt, Human
ugucccagagggagggauaggcu

SEQ ID NO: 318826 - RNA, 22 nt, Human
cugucucucuaggacacugggg

SEQ ID NO: 318827 - RNA, 22 nt, Human
agagauaugaguaguugugaca

SEQ ID NO: 318828 - RNA, 22 nt, Human
cugcccugagucaugccagaug

SEQ ID NO: 318829 - RNA, 22 nt, Human
gugcugugugauccaugcuggc

SEQ ID NO: 318830 - RNA, 22 nt, Human
aagggcaggugggcauuucugg

SEQ ID NO: 318831 - RNA, 22 nt, Human
cuugugcaauugacauugaauc

SEQ ID NO: 318832 - RNA, 22 nt, Human
uuauuauuuuguguacagcaaa

SEQ ID NO: 318833 - RNA, 22 nt, Human
uggagggcaugcuguccauggg

SEQ ID NO: 318834 - RNA, 22 nt, Human
gucaaaugcacagaaccauuaa

SEQ ID NO: 318835 - RNA, 22 nt, Human
ccugucauacuaacguaguggg

SEQ ID NO: 318836 - RNA, 22 nt, Human
aauacauauggaauuccauguu

SEQ ID NO: 318837 - RNA, 22 nt, Human
acaaucauuccguucacaacag

SEQ ID NO: 318838 - RNA, 21 nt, Human
uucugccuuccccuagcuggg

SEQ ID NO: 318839 - RNA, 22 nt, Human
cuggccaggcuugggacagaca

SEQ ID NO: 318840 - RNA, 22 nt, Human
ccagccuggggaggcagcuucu

SEQ ID NO: 318841 - RNA, 22 nt, Human
auaaggcagucacuggaauguu

SEQ ID NO: 318842 - RNA, 22 nt, Human
ggcagggcuugucucugugaug

SEQ ID NO: 318843 - RNA, 22 nt, Human
ccagagccuggcaucugcauaa

SEQ ID NO: 318844 - RNA, 22 nt, Human
gaaucauuuauuuuugacagca

SEQ ID NO: 318845 - RNA, 22 nt, Human
aggaccuguaccucagcaucua

SEQ ID NO: 318846 - RNA, 22 nt, Human
acauuguuugagaauacagaug

SEQ ID NO: 318847 - RNA, 22 nt, Human
cugaaagaauaagauguuuaca

SEQ ID NO: 318848 - RNA, 21 nt, Human
agauuguauggaggugagagg

SEQ ID NO: 318849 - RNA, 22 nt, Human
gggaggagcuuggagauucacu

SEQ ID NO: 318850 - RNA, 20 nt, Human
agauuauuccuaagauuucu

SEQ ID NO: 318851 - RNA, 20 nt, Human
accccagccccucuaucuga

SEQ ID NO: 318852 - RNA, 18 nt, Human
ucagagguacagaaaagu

SEQ ID NO: 318853 - RNA, 22 nt, Human
cuccugaguaguagcauuguca

SEQ ID NO: 318854 - RNA, 22 nt, Human
gccugcuggcuguccauugcag

SEQ ID NO: 318855 - RNA, 22 nt, Human
uggcuguguuaccacuucaugu

SEQ ID NO: 318856 - RNA, 22 nt, Human
caucaucaaaacaaauggaguc

SEQ ID NO: 318857 - RNA, 22 nt, Human
gcucagagauguucaguagcuu

SEQ ID NO: 318858 - RNA, 18 nt, Human
ccagcaugccagaggcug

SEQ ID NO: 318859 - RNA, 22 nt, Human
ucuggcuuucauuuguuuaaag

SEQ ID NO: 318860 - RNA, 22 nt, Human
ugugccugaguuggcugaguac

SEQ ID NO: 318861 - RNA, 22 nt, Human
acauuaacaccgugaguuuggu

SEQ ID NO: 318862 - RNA, 22 nt, Human
ggucccugguucccucugagcu

SEQ ID NO: 318863 - RNA, 22 nt, Human
gcagugaaacaauaggaucaaa

SEQ ID NO: 318864 - RNA, 22 nt, Human
gccuggcaggccugggccagca

SEQ ID NO: 318865 - RNA, 22 nt, Human
ucucuguaguugggcagcugcu

SEQ ID NO: 318866 - RNA, 22 nt, Human
aguauuucuaguugguucuacu

SEQ ID NO: 318867 - RNA, 19 nt, Human
aguguguacugaaagcacu

SEQ ID NO: 318868 - RNA, 22 nt, Human
auuucagaugaccaaauggaaa

SEQ ID NO: 318869 - RNA, 22 nt, Human
uuauuauaaugagggauaaaaa

SEQ ID NO: 318870 - RNA, 22 nt, Human
uuugcauuaguuuagauuucaa

SEQ ID NO: 318871 - RNA, 22 nt, Human
cacaguggauugggugaugccc

SEQ ID NO: 318872 - RNA, 22 nt, Human
acauauuuccaugcagcauguc

SEQ ID NO: 318873 - RNA, 22 nt, Human
uaguuaaagcccuaaauugaua

SEQ ID NO: 318874 - RNA, 22 nt, Human
ucccugggccuccugcuaugca

SEQ ID NO: 318875 - RNA, 22 nt, Human
cccugagaugccucacccuagu

SEQ ID NO: 318876 - RNA, 23 nt, Human
acagcugcaccuggccgccuggc

SEQ ID NO: 318877 - RNA, 22 nt, Human
ucucgacagccuggcacagugg

SEQ ID NO: 318878 - RNA, 22 nt, Human
ccuccaggauaagucagggccu

SEQ ID NO: 318879 - RNA, 22 nt, Human
uguaccuuuuucugugcaugcu

SEQ ID NO: 318880 - RNA, 22 nt, Human
uugaagauggaucgccacucuc

SEQ ID NO: 318881 - RNA, 22 nt, Human
agaacagaggccuuauguuuca

SEQ ID NO: 318882 - RNA, 22 nt, Human
uauugaguuacagaaaauacuu

SEQ ID NO: 318883 - RNA, 22 nt, Human
ucauuuaauaauuuuugaguag

SEQ ID NO: 318884 - RNA, 22 nt, Human
agccacaccuguccugccagcu

SEQ ID NO: 318885 - RNA, 22 nt, Human
ugcauuguuugauaggugaauu

SEQ ID NO: 318886 - RNA, 22 nt, Human
guuccuuguauuucagacauga

SEQ ID NO: 318887 - RNA, 22 nt, Human
guaugaaaauuguaaaguucuu

SEQ ID NO: 318888 - RNA, 22 nt, Human
uuagucuucuuccuuauauguu

SEQ ID NO: 318889 - RNA, 22 nt, Human
ucaggauguuaauauagcauua

SEQ ID NO: 318890 - RNA, 22 nt, Human
gcucucuggguggugggcaaca

SEQ ID NO: 318891 - RNA, 22 nt, Human
cucaaguaagaaacagaauugg

SEQ ID NO: 318892 - RNA, 22 nt, Human
gccaggcucagcagucaaccug

SEQ ID NO: 318893 - RNA, 22 nt, Human
agaaaugaauauguagugguua

SEQ ID NO: 318894 - RNA, 22 nt, Human
cagcauugaucccaggcugugg

SEQ ID NO: 318895 - RNA, 22 nt, Human
aaaugcagauuuugaugcagca

SEQ ID NO: 318896 - RNA, 22 nt, Human
uauuuccaccuauuauuuucug

SEQ ID NO: 318897 - RNA, 22 nt, Human
ccuggcugccgagugugcagcg

SEQ ID NO: 318898 - RNA, 22 nt, Human
acaugauuuuaguaucauaaua

SEQ ID NO: 318899 - RNA, 22 nt, Human
cuggggacuugcagacacaauu

SEQ ID NO: 318900 - RNA, 17 nt, Human
guuugcaugguguuaac

SEQ ID NO: 318901 - RNA, 18 nt, Human
ccagguggugacagagau

SEQ ID NO: 318902 - RNA, 22 nt, Human
gugcagugagcagugcagcacc

SEQ ID NO: 318903 - RNA, 22 nt, Human
uagaaaugcccagauucugcua

SEQ ID NO: 318904 - RNA, 22 nt, Human
gagagcugucagcguagcaccg

SEQ ID NO: 318905 - RNA, 22 nt, Human
ucacuugccuagcccaguucag

SEQ ID NO: 318906 - RNA, 21 nt, Human
ucuuuccugcccaguugcccu

SEQ ID NO: 318907 - RNA, 22 nt, Human
uuuaucuuuaggacuuugcaga

SEQ ID NO: 318908 - RNA, 22 nt, Human
cagcugccacuugcucucggcu

SEQ ID NO: 318909 - RNA, 22 nt, Human
cccucugcaggcuggaccugcc

SEQ ID NO: 318910 - RNA, 22 nt, Human
ugucacauaauuuaucuguagg

SEQ ID NO: 318911 - RNA, 22 nt, Human
uuagauaaauuaagacuuuaca

SEQ ID NO: 318912 - RNA, 21 nt, Human
gcaggaugcaucuuggugucu

SEQ ID NO: 318913 - RNA, 22 nt, Human
uccauuuucuugcucuagguaa

SEQ ID NO: 318914 - RNA, 22 nt, Human
cuggcucauccagguguugcuc

SEQ ID NO: 318915 - RNA, 22 nt, Human
gcucacagccggcuggcagggg

SEQ ID NO: 318916 - RNA, 23 nt, Human
ggggccugcaccggucugcgcgg

SEQ ID NO: 318917 - RNA, 21 nt, Human
uggcucuguucaauauaugga

SEQ ID NO: 318918 - RNA, 22 nt, Human
uccauuuuagaagaaaauccac

SEQ ID NO: 318919 - RNA, 22 nt, Human
gagcugaaucagagauauuauu

SEQ ID NO: 318920 - RNA, 21 nt, Human
ugcaggagucugugagucagg

SEQ ID NO: 318921 - RNA, 22 nt, Human
aaaucaguuaagaugaggccau

SEQ ID NO: 318922 - RNA, 22 nt, Human
acuuaaaaagaaucuuuucacg

SEQ ID NO: 318923 - RNA, 22 nt, Human
gggcacagcugcuacccagugc

SEQ ID NO: 318924 - RNA, 22 nt, Human
ugccuggaaggcccaugggaag

SEQ ID NO: 318925 - RNA, 22 nt, Human
uuuauuccaugugucuaugacc

SEQ ID NO: 318926 - RNA, 22 nt, Human
cuguacauauacauuuuuuucc

SEQ ID NO: 318927 - RNA, 22 nt, Human
cuccagggggcauccacacagc

SEQ ID NO: 318928 - RNA, 22 nt, Human
aggcuggggaauugaauuugcu

SEQ ID NO: 318929 - RNA, 22 nt, Human
aguugacauccagagacauucu

SEQ ID NO: 318930 - RNA, 22 nt, Human
gaacaguaucaguagugccagu

SEQ ID NO: 318931 - RNA, 22 nt, Human
uguauauucugccuaaaagcuu

SEQ ID NO: 318932 - RNA, 22 nt, Human
gguggagagcuggaugagaggu

SEQ ID NO: 318933 - RNA, 22 nt, Human
agaaaugaagcaggaguuauua

SEQ ID NO: 318934 - RNA, 22 nt, Human
ucaguguuuauucaauguuauu

SEQ ID NO: 318935 - RNA, 22 nt, Human
gcccugugcucaugggaacauc

SEQ ID NO: 318936 - RNA, 22 nt, Human
aacucaguuacauauuagaaua

SEQ ID NO: 318937 - RNA, 22 nt, Human
aggggagaaaaaugccuucugu

SEQ ID NO: 318938 - RNA, 22 nt, Human
aggcacugaagugguaaaugua

SEQ ID NO: 318939 - RNA, 22 nt, Human
aaggucauggcaaauuacuuuu

SEQ ID NO: 318940 - RNA, 22 nt, Human
ucacauuuucuacuacuguacg

SEQ ID NO: 318941 - RNA, 22 nt, Human
ccagcuccuucugucuguggag

SEQ ID NO: 318942 - RNA, 22 nt, Human
ccacagcaugcaggccugacac

SEQ ID NO: 318943 - RNA, 22 nt, Human
gccacugcacuccagcccaggc

SEQ ID NO: 318944 - RNA, 22 nt, Human
agggcagagcacugaauuggga

SEQ ID NO: 318945 - RNA, 22 nt, Human
acagaaauugggcaaauggaag

SEQ ID NO: 318946 - RNA, 23 nt, Human
agacagaggcugaggcuggccgc

SEQ ID NO: 318947 - RNA, 22 nt, Human
gcuggccaggugcuuugguucu

SEQ ID NO: 318948 - RNA, 22 nt, Human
cacagggcagugcugcccacuc

SEQ ID NO: 318949 - RNA, 22 nt, Human
aaaaguauuggccaccauuucu

SEQ ID NO: 318950 - RNA, 22 nt, Human
caugcacaaagguaagaugcgu

SEQ ID NO: 318951 - RNA, 22 nt, Human
uccucaggucaaagcaggagaa

SEQ ID NO: 318952 - RNA, 22 nt, Human
ccugugcauccgguggucauug

SEQ ID NO: 318953 - RNA, 22 nt, Human
ugcugccaugcagagcaacaga

SEQ ID NO: 318954 - RNA, 22 nt, Human
ucucaagagggaggcaaucaug

SEQ ID NO: 318955 - RNA, 23 nt, Human
ggacagggcccugcccuauggcc

SEQ ID NO: 318956 - RNA, 22 nt, Human
uaaaugcagcaguuucuguucu

SEQ ID NO: 318957 - RNA, 22 nt, Human
cugggagauugcuagagaugca

SEQ ID NO: 318958 - RNA, 22 nt, Human
agggacagaugaaugacugagu

SEQ ID NO: 318959 - RNA, 19 nt, Human
uucuccaggcugcagaggg

SEQ ID NO: 318960 - RNA, 22 nt, Human
uucuggaggccccuuccuucuc

SEQ ID NO: 318961 - RNA, 22 nt, Human
ccagcucuggcuucuugcuggg

SEQ ID NO: 318962 - RNA, 22 nt, Human
gggacagcuguagugcuuggcu

SEQ ID NO: 318963 - RNA, 21 nt, Human
ugggcacugagggugcugcuc

SEQ ID NO: 318964 - RNA, 22 nt, Human
ugcuuucaaaggcuuucuagau

SEQ ID NO: 318965 - RNA, 22 nt, Human
cagacagaccugcaagggcaca

SEQ ID NO: 318966 - RNA, 22 nt, Human
aaguuacuggcaagggcugcag

SEQ ID NO: 318967 - RNA, 22 nt, Human
gagagcuggauucuggauaggu

SEQ ID NO: 318968 - RNA, 22 nt, Human
cuggcagcauuaacagagagca

SEQ ID NO: 318969 - RNA, 22 nt, Human
ggcagagcugcaugagcacuca

SEQ ID NO: 318970 - RNA, 19 nt, Human
ggacacagaaagcugcauu

SEQ ID NO: 318971 - RNA, 22 nt, Human
gagggguguggagccaucaguu

SEQ ID NO: 318972 - RNA, 22 nt, Human
gcagggcuguggacacuuuggu

SEQ ID NO: 318973 - RNA, 22 nt, Human
agaaaaggauugauggaucaga

SEQ ID NO: 318974 - RNA, 22 nt, Human
ggagggguggaaggagugccug

SEQ ID NO: 318975 - RNA, 22 nt, Human
uaaaaguggauaagcuguagga

SEQ ID NO: 318976 - RNA, 22 nt, Human
ucugagcuuuuauuaucaaccu

SEQ ID NO: 318977 - RNA, 22 nt, Human
uuuagaguugaguauucauugg

SEQ ID NO: 318978 - RNA, 20 nt, Human
ucacuaguaaccaucugcuu

SEQ ID NO: 318979 - RNA, 22 nt, Human
acagucucuccacacugcaggg

SEQ ID NO: 318980 - RNA, 20 nt, Human
uucuucucuaguuaucuuca

SEQ ID NO: 318981 - RNA, 22 nt, Human
gugugccaccagucaaggugaa

SEQ ID NO: 318982 - RNA, 22 nt, Human
agcagccaauuggaggaugaag

SEQ ID NO: 318983 - RNA, 22 nt, Human
gggcuggcaggaccugggcuga

SEQ ID NO: 318984 - RNA, 22 nt, Human
cugggggcagcaagaagccaug

SEQ ID NO: 318985 - RNA, 22 nt, Human
auuacaauaagguuuauuugua

SEQ ID NO: 318986 - RNA, 22 nt, Human
gauacauuuuaucuccuaacag

SEQ ID NO: 318987 - RNA, 22 nt, Human
aaaguucagauuagacucaaga

SEQ ID NO: 318988 - RNA, 22 nt, Human
ggucuuccgagaggccugugcu

SEQ ID NO: 318989 - RNA, 22 nt, Human
gacacaaaguuugucagaaauu

SEQ ID NO: 318990 - RNA, 22 nt, Human
caaaugauaccuauuacuaggc

SEQ ID NO: 318991 - RNA, 22 nt, Human
gccagguggcugagcagcugca

SEQ ID NO: 318992 - RNA, 22 nt, Human
ugcauuccuccaccuccugcac

SEQ ID NO: 318993 - RNA, 22 nt, Human
acaaagauaagucagaaaguca

SEQ ID NO: 318994 - RNA, 22 nt, Human
uuuacuuugugucaagucaaga

SEQ ID NO: 318995 - RNA, 22 nt, Human
auucaaguccagcuucucuaca

SEQ ID NO: 318996 - RNA, 22 nt, Human
cuggcagcgcagcaugaagucg

SEQ ID NO: 318997 - RNA, 22 nt, Human
ggucauuguucuuuucugugau

SEQ ID NO: 318998 - RNA, 22 nt, Human
acugcccucccaucuauugcaa

SEQ ID NO: 318999 - RNA, 22 nt, Human
uggcuucugggacuugugagca

SEQ ID NO: 319000 - RNA, 22 nt, Human
ccagcucugauuuugaccucca

SEQ ID NO: 319001 - RNA, 22 nt, Human
cacauguacagaagcaggcugg

SEQ ID NO: 319002 - RNA, 22 nt, Human
ucugucaaaaguuuucaauaaa

SEQ ID NO: 319003 - RNA, 20 nt, Human
gcaaauggaucccacaagcc

SEQ ID NO: 319004 - RNA, 22 nt, Human
uaaggcagaaauaugagcaggg

SEQ ID NO: 319005 - RNA, 22 nt, Human
aaggagagguuguccguguugu

SEQ ID NO: 319006 - RNA, 22 nt, Human
cucuucuugaaagaggaauuca

SEQ ID NO: 319007 - RNA, 22 nt, Human
ucacagacaauuguuuuggugu

SEQ ID NO: 319008 - RNA, 22 nt, Human
aaucgguugaacccaggaagug

SEQ ID NO: 319009 - RNA, 22 nt, Human
ucugggagguaaccaugcugau

SEQ ID NO: 319010 - RNA, 22 nt, Human
gugugcagaagacacaagacau

SEQ ID NO: 319011 - RNA, 22 nt, Human
agccaggauuggcugagccuua

SEQ ID NO: 319012 - RNA, 22 nt, Human
ugcuucaggaagaaacgccagg

SEQ ID NO: 319013 - RNA, 22 nt, Human
uagcaauagaaacauauaaagu

SEQ ID NO: 319014 - RNA, 22 nt, Human
acauuuuuuagagucccacauu

SEQ ID NO: 319015 - RNA, 18 nt, Human
caggaugagugaugggga

SEQ ID NO: 319016 - RNA, 22 nt, Human
augcaagauguauagaagacuu

SEQ ID NO: 319017 - RNA, 18 nt, Human
gggcacuggggacuggag

SEQ ID NO: 319018 - RNA, 18 nt, Human
ucugucuguacaaguauc

SEQ ID NO: 319019 - RNA, 22 nt, Human
gagggcagagacagugauucac

SEQ ID NO: 319020 - RNA, 22 nt, Human
caggaggcaucauggagcggac

SEQ ID NO: 319021 - RNA, 22 nt, Human
auuagugucugugaauaauucu

SEQ ID NO: 319022 - RNA, 22 nt, Human
auccaugaagguacuucucagg

SEQ ID NO: 319023 - RNA, 22 nt, Human
auccaguucucagugcuuacag

SEQ ID NO: 319024 - RNA, 19 nt, Human
acuuucuccaggaccuguu

SEQ ID NO: 319025 - RNA, 22 nt, Human
uugcauugugauuacagaggug

SEQ ID NO: 319026 - RNA, 20 nt, Human
ugucauuguuucuaggaccu

SEQ ID NO: 319027 - RNA, 22 nt, Human
caggcagcguccugcuuccugu

SEQ ID NO: 319028 - RNA, 22 nt, Human
ggguggaggagaacaggcccca

SEQ ID NO: 319029 - RNA, 22 nt, Human
accucugcaguagggcugugcc

SEQ ID NO: 319030 - RNA, 22 nt, Human
augggcagcagcugccauucau

SEQ ID NO: 319031 - RNA, 22 nt, Human
aaagauuauggcauugaaauac

SEQ ID NO: 319032 - RNA, 22 nt, Human
gcagugccuugcuucucugucu

SEQ ID NO: 319033 - RNA, 22 nt, Human
aagcccagaugugagaacugag

SEQ ID NO: 319034 - RNA, 22 nt, Human
gauuucaccugaucuugucauc

SEQ ID NO: 319035 - RNA, 22 nt, Human
auaaggaaugauguaucaguuu

SEQ ID NO: 319036 - RNA, 22 nt, Human
uggcucugucacugugagcuau

SEQ ID NO: 319037 - RNA, 22 nt, Human
gagcaggcuugcagagaagggg

SEQ ID NO: 319038 - RNA, 22 nt, Human
agggcagcuaaggugcugacug

SEQ ID NO: 319039 - RNA, 22 nt, Human
aucauucuaguccuuauggucu

SEQ ID NO: 319040 - RNA, 22 nt, Human
ugcuagugcaggguuuucaguu

SEQ ID NO: 319041 - RNA, 22 nt, Human
aaaucaguaaauguucauuaac

SEQ ID NO: 319042 - RNA, 22 nt, Human
aucucagacauguuguccauga

SEQ ID NO: 319043 - RNA, 22 nt, Human
auuguggcuagacagucacaau

SEQ ID NO: 319044 - RNA, 22 nt, Human
agccuccaucccaugcacaaag

SEQ ID NO: 319045 - RNA, 22 nt, Human
ugugcccauuccacuugaguac

SEQ ID NO: 319046 - RNA, 22 nt, Human
acagaccaaguuuccagcaggu

SEQ ID NO: 319047 - RNA, 22 nt, Human
ugcuggaggccugacuguguuu

SEQ ID NO: 319048 - RNA, 22 nt, Human
auuucucuuagcaagacauuac

SEQ ID NO: 319049 - RNA, 22 nt, Human
uguaagauauucagcuuauuga

SEQ ID NO: 319050 - RNA, 22 nt, Human
ugagccaggcucaagugauccu

SEQ ID NO: 319051 - RNA, 18 nt, Human
uugagggaggggcagagu

SEQ ID NO: 319052 - RNA, 22 nt, Human
agcuggagaucaugcugauacu

SEQ ID NO: 319053 - RNA, 23 nt, Human
ugccucugccucccuagucugca

SEQ ID NO: 319054 - RNA, 22 nt, Human
cuggcagcgguuugcagccugg

SEQ ID NO: 319055 - RNA, 22 nt, Human
cagauaaaggcuuacuaguagu

SEQ ID NO: 319056 - RNA, 22 nt, Human
aaauuagucgguuuaggaauuu

SEQ ID NO: 319057 - RNA, 18 nt, Human
gcugagguggugucagag

SEQ ID NO: 319058 - RNA, 22 nt, Human
auggcagggcagccucucagag

SEQ ID NO: 319059 - RNA, 22 nt, Human
cagcccagcagggucuggcccu

SEQ ID NO: 319060 - RNA, 23 nt, Human
uggagcugacagucagagggagg

SEQ ID NO: 319061 - RNA, 22 nt, Human
ucuuagaaguucauguuccagc

SEQ ID NO: 319062 - RNA, 23 nt, Human
acacauuuuucccguucugaggu

SEQ ID NO: 319063 - RNA, 22 nt, Human
ccuuccagaguucagucugccc

SEQ ID NO: 319064 - RNA, 22 nt, Human
agcugcuaugacaacaccagcc

SEQ ID NO: 319065 - RNA, 22 nt, Human
caggugccucaggaugagacaa

SEQ ID NO: 319066 - RNA, 22 nt, Human
cgccucagccguggucaucuuc

SEQ ID NO: 319067 - RNA, 22 nt, Human
cauuucacaaauggccacauca

SEQ ID NO: 319068 - RNA, 22 nt, Human
ccuccaggcugaauaucuagaa

SEQ ID NO: 319069 - RNA, 22 nt, Human
cagaauggcuuuuauggcucag

SEQ ID NO: 319070 - RNA, 22 nt, Human
ccugccugcaccuucucugggg

SEQ ID NO: 319071 - RNA, 20 nt, Human
caguccugccccuuggggac

SEQ ID NO: 319072 - RNA, 22 nt, Human
cugagcugggaguagagacucu

SEQ ID NO: 319073 - RNA, 22 nt, Human
cucaaggaaagucuggagaaga

SEQ ID NO: 319074 - RNA, 22 nt, Human
aaucacaugugcucaauuuuaa

SEQ ID NO: 319075 - RNA, 20 nt, Human
agugugcauuuagagucugc

SEQ ID NO: 319076 - RNA, 22 nt, Human
gcaguguuuuacagaccagcau

SEQ ID NO: 319077 - RNA, 22 nt, Human
gaggaaaauggaguguaauuaa

SEQ ID NO: 319078 - RNA, 22 nt, Human
agugaguggacccugcaaggaa

SEQ ID NO: 319079 - RNA, 22 nt, Human
uggcacugccuggcagggcccc

SEQ ID NO: 319080 - RNA, 22 nt, Human
ucuuuccuagaggcugaugagu

SEQ ID NO: 319081 - RNA, 22 nt, Human
uuccuguaugucagugaagagc

SEQ ID NO: 319082 - RNA, 19 nt, Human
caguggccuggaggucucu

SEQ ID NO: 319083 - RNA, 21 nt, Human
agcuggcagauauggugucug

SEQ ID NO: 319084 - RNA, 22 nt, Human
ccucucauagucuguauccuuu

SEQ ID NO: 319085 - RNA, 22 nt, Human
ugggcuccggcggccucaggcu

SEQ ID NO: 319086 - RNA, 22 nt, Human
ugaccaaaggugguuuauuugg

SEQ ID NO: 319087 - RNA, 22 nt, Human
uagagaaaagcagggaucagga

SEQ ID NO: 319088 - RNA, 22 nt, Human
gaggccugaaaggggaccuaug

SEQ ID NO: 319089 - RNA, 18 nt, Human
acaaaggucugcaagacc

SEQ ID NO: 319090 - RNA, 22 nt, Human
augaagcuaaacccugcagcca

SEQ ID NO: 319091 - RNA, 20 nt, Human
uccaagggcagcagaaucag

SEQ ID NO: 319092 - RNA, 22 nt, Human
gcagauggaaagugcuugaggg

SEQ ID NO: 319093 - RNA, 22 nt, Human
caggcagcugaggacuuugcua

SEQ ID NO: 319094 - RNA, 22 nt, Human
ucuguggcacgauugcacugca

SEQ ID NO: 319095 - RNA, 22 nt, Human
ccaggcugggcggggaaccugg

SEQ ID NO: 319096 - RNA, 22 nt, Human
agugcagugguuaggagccagg

SEQ ID NO: 319097 - RNA, 22 nt, Human
ucuguucagaaauggaagugcc

SEQ ID NO: 319098 - RNA, 22 nt, Human
acugggccggugcagaguaguu

SEQ ID NO: 319099 - RNA, 22 nt, Human
aagaacagguucuagaaccauu

SEQ ID NO: 319100 - RNA, 22 nt, Human
caccagggacaaugcuaggggu

SEQ ID NO: 319101 - RNA, 22 nt, Human
ucagguguuagaagaaauuuca

SEQ ID NO: 319102 - RNA, 22 nt, Human
aucuuugaagaggacuugaagu

SEQ ID NO: 319103 - RNA, 22 nt, Human
uuuccuuccaaaugcccgggag

SEQ ID NO: 319104 - RNA, 21 nt, Human
ucucuggaauuagaccauguu

SEQ ID NO: 319105 - RNA, 22 nt, Human
uccugagaugagacagugcugc

SEQ ID NO: 319106 - RNA, 22 nt, Human
ggcuggagauaugucuggaaca

SEQ ID NO: 319107 - RNA, 22 nt, Human
agggcagcacagcugugcuccu

SEQ ID NO: 319108 - RNA, 22 nt, Human
cagugcuggcuguuaggacagu

SEQ ID NO: 319109 - RNA, 22 nt, Human
aggcccagcccguccucgugcu

SEQ ID NO: 319110 - RNA, 22 nt, Human
uaugagaacugacagagugcca

SEQ ID NO: 319111 - RNA, 22 nt, Human
accaaggagacaaagguguauu

SEQ ID NO: 319112 - RNA, 22 nt, Human
agggucccgaaggagacagcaa

SEQ ID NO: 319113 - RNA, 18 nt, Human
ucugucucuguccuugcu

SEQ ID NO: 319114 - RNA, 22 nt, Human
uuuccuguugccaucaagaaug

SEQ ID NO: 319115 - RNA, 22 nt, Human
aaaugcagauugucauucagga

SEQ ID NO: 319116 - RNA, 22 nt, Human
agacccagaaagcagcugcauu

SEQ ID NO: 319117 - RNA, 22 nt, Human
gggaggucagggugccugcugg

SEQ ID NO: 319118 - RNA, 22 nt, Human
aguaaaauuaauggaucagaag

SEQ ID NO: 319119 - RNA, 22 nt, Human
guguacauauugagucugcuga

SEQ ID NO: 319120 - RNA, 22 nt, Human
cagcugccaugacauguccugc

SEQ ID NO: 319121 - RNA, 22 nt, Human
augguuuguaacccaauacucc

SEQ ID NO: 319122 - RNA, 19 nt, Human
cagcaauaaugccagaugg

SEQ ID NO: 319123 - RNA, 22 nt, Human
agaggcugagaaacccucuucu

SEQ ID NO: 319124 - RNA, 22 nt, Human
gcagagugaggaagagcuucca

SEQ ID NO: 319125 - RNA, 23 nt, Human
uuuuccuguggagacaugacugg

SEQ ID NO: 319126 - RNA, 22 nt, Human
cggcagcuccgcgccguaggac

SEQ ID NO: 319127 - RNA, 22 nt, Human
uccuggguccauggcagccgaa

SEQ ID NO: 319128 - RNA, 22 nt, Human
cagggcuccccgcaccgcagcc

SEQ ID NO: 319129 - RNA, 22 nt, Human
caagaugggcaccccagcaccu

SEQ ID NO: 319130 - RNA, 22 nt, Human
gcugucugucucugugacuuaa

SEQ ID NO: 319131 - RNA, 22 nt, Human
acugcuuuagaccuagagcucu

SEQ ID NO: 319132 - RNA, 20 nt, Human
uuuacauuuugaaacaguga

SEQ ID NO: 319133 - RNA, 22 nt, Human
agggcugcugaggaagccuugc

SEQ ID NO: 319134 - RNA, 22 nt, Human
gcagugcuaaguagcuggccca

SEQ ID NO: 319135 - RNA, 22 nt, Human
ucucuucuagcuucuugugguu

SEQ ID NO: 319136 - RNA, 22 nt, Human
uuagaaaaauguucaguaguuu

SEQ ID NO: 319137 - RNA, 22 nt, Human
gguggguuuggaagagcaggcu

SEQ ID NO: 319138 - RNA, 22 nt, Human
ccugccugucaucgccugcgcc

SEQ ID NO: 319139 - RNA, 22 nt, Human
ucaggauggcuucugcaucaaa

SEQ ID NO: 319140 - RNA, 22 nt, Human
aaggagaaggguaaucaacaca

SEQ ID NO: 319141 - RNA, 22 nt, Human
acaagcaugggcuuugacauca

SEQ ID NO: 319142 - RNA, 22 nt, Human
gggcagagguucaacuucaaca

SEQ ID NO: 319143 - RNA, 22 nt, Human
uccagcagggaauuaguagucu

SEQ ID NO: 319144 - RNA, 22 nt, Human
gcuggucacucugggagcugcu

SEQ ID NO: 319145 - RNA, 22 nt, Human
uccugccuucauacugcuguau

SEQ ID NO: 319146 - RNA, 19 nt, Human
gagcagcugcacccauuga

SEQ ID NO: 319147 - RNA, 22 nt, Human
aaggcaguagguguuucaaacu

SEQ ID NO: 319148 - RNA, 22 nt, Human
auuugcuuucagguauaaaagg

SEQ ID NO: 319149 - RNA, 22 nt, Human
acacugaauguuuaagaacuug

SEQ ID NO: 319150 - RNA, 22 nt, Human
agcagaacauuuucagggcugu

SEQ ID NO: 319151 - RNA, 22 nt, Human
cagagccucccuccucugccau

SEQ ID NO: 319152 - RNA, 22 nt, Human
cuggccuagcucucugcuugaa

SEQ ID NO: 319153 - RNA, 22 nt, Human
uuauuucauugauuucuaagac

SEQ ID NO: 319154 - RNA, 22 nt, Human
gggccuguguguucaggagccu

SEQ ID NO: 319155 - RNA, 22 nt, Human
uccuuggcuuucuggagcuucu

SEQ ID NO: 319156 - RNA, 22 nt, Human
auuuugaugcuaucuaaugaau

SEQ ID NO: 319157 - RNA, 22 nt, Human
gagcugccggcccacaguacua

SEQ ID NO: 319158 - RNA, 22 nt, Human
uggagcugauacagcuggcuuu

SEQ ID NO: 319159 - RNA, 22 nt, Human
gggcugugcugaguaggaggug

SEQ ID NO: 319160 - RNA, 22 nt, Human
uagcaggguccaaugugaggca

SEQ ID NO: 319161 - RNA, 22 nt, Human
guaucuuuuacaccaggaaauu

SEQ ID NO: 319162 - RNA, 20 nt, Human
ugucaugcauuagaugaaga

SEQ ID NO: 319163 - RNA, 21 nt, Human
uuuuuucuugcgugaggccug

SEQ ID NO: 319164 - RNA, 22 nt, Human
aucacauucuuucaaagcaguc

SEQ ID NO: 319165 - RNA, 22 nt, Human
acuuugaaggggaacauuuuaa

SEQ ID NO: 319166 - RNA, 22 nt, Human
ucugaaauacugcagguucucu

SEQ ID NO: 319167 - RNA, 22 nt, Human
gguggggccugcuccagcggcc

SEQ ID NO: 319168 - RNA, 22 nt, Human
cuccagggcagcauggcagugg

SEQ ID NO: 319169 - RNA, 22 nt, Human
cguuggagacacuugaggacuu

SEQ ID NO: 319170 - RNA, 23 nt, Human
ucuguacaauugagaagagaaca

SEQ ID NO: 319171 - RNA, 22 nt, Human
aggcccagacucagcggggcgg

SEQ ID NO: 319172 - RNA, 22 nt, Human
uuaauacaagcauaugcacaca

SEQ ID NO: 319173 - RNA, 22 nt, Human
gggauggcuuuguggcugacuc

SEQ ID NO: 319174 - RNA, 19 nt, Human
uuuggcacucugaaguguu

SEQ ID NO: 319175 - RNA, 22 nt, Human
ucaugcaaggcugaaacauggu

SEQ ID NO: 319176 - RNA, 23 nt, Human
agagcuuucuaaaauguaaaucu

SEQ ID NO: 319177 - RNA, 22 nt, Human
cuuuggaagugaccacaauccu

SEQ ID NO: 319178 - RNA, 22 nt, Human
cucaggcccacagcagacccac

SEQ ID NO: 319179 - RNA, 22 nt, Human
aaauccuaaggagaauaugauu

SEQ ID NO: 319180 - RNA, 22 nt, Human
auucuucagaauaucuggcacu

SEQ ID NO: 319181 - RNA, 22 nt, Human
acagggcagguggcuacugguc

SEQ ID NO: 319182 - RNA, 22 nt, Human
cuguggagcuuguggcaguggg

SEQ ID NO: 319183 - RNA, 22 nt, Human
gugacucacacaggccugggcu

SEQ ID NO: 319184 - RNA, 22 nt, Human
uccuucagccaugggcucucca

SEQ ID NO: 319185 - RNA, 22 nt, Human
aaaacaguuuaggcaucacagu

SEQ ID NO: 319186 - RNA, 22 nt, Human
gccuggagacagcagaggcggc

SEQ ID NO: 319187 - RNA, 22 nt, Human
agacagagauacuauguuguca

SEQ ID NO: 319188 - RNA, 22 nt, Human
acauuugagaugccuuuuaggu

SEQ ID NO: 319189 - RNA, 22 nt, Human
ucucccaggcugcccuguggac

SEQ ID NO: 319190 - RNA, 22 nt, Human
ucauucuugaucacuaguuagu

SEQ ID NO: 319191 - RNA, 22 nt, Human
acaguguuuauguacagauugu

SEQ ID NO: 319192 - RNA, 22 nt, Human
cuucagaauccagaaucagaau

SEQ ID NO: 319193 - RNA, 22 nt, Human
cagggccugagggcugcucugc

SEQ ID NO: 319194 - RNA, 22 nt, Human
gcuguucaaaagccacaguuac

SEQ ID NO: 319195 - RNA, 22 nt, Human
uggccagguugggcuuugcagc

SEQ ID NO: 319196 - RNA, 22 nt, Human
agccaucauuucugucacuggc

SEQ ID NO: 319197 - RNA, 22 nt, Human
gagccagccuucuucugagguc

SEQ ID NO: 319198 - RNA, 22 nt, Human
cugcugagcccuggcacaggug

SEQ ID NO: 319199 - RNA, 22 nt, Human
aauucuguuacuaaugugaugu

SEQ ID NO: 319200 - RNA, 22 nt, Human
ucaagcaucuuggucuacgauc

SEQ ID NO: 319201 - RNA, 22 nt, Human
auaaugaggauuugcauauuag

SEQ ID NO: 319202 - RNA, 22 nt, Human
uccaggagagguguggggacug

SEQ ID NO: 319203 - RNA, 22 nt, Human
cugccuugaaaaugaagcuuua

SEQ ID NO: 319204 - RNA, 22 nt, Human
uucaugugauaaaugugugacu

SEQ ID NO: 319205 - RNA, 22 nt, Human
gccgaagcugccgucugguccu

SEQ ID NO: 319206 - RNA, 22 nt, Human
auuuggcaacauuaauugaauc

SEQ ID NO: 319207 - RNA, 22 nt, Human
agaguggggaagguguugagaa

SEQ ID NO: 319208 - RNA, 22 nt, Human
uacuuuagaaggaaauaaguuc

SEQ ID NO: 319209 - RNA, 22 nt, Human
cagccacguagcccuuggccgu

SEQ ID NO: 319210 - RNA, 21 nt, Human
cccuugccugcacuccucggc

SEQ ID NO: 319211 - RNA, 22 nt, Human
cagugcugagagccuggccagg

SEQ ID NO: 319212 - RNA, 22 nt, Human
ccaggugggaggaaagcagaga

SEQ ID NO: 319213 - RNA, 22 nt, Human
agugaggggauucaggcaaggu

SEQ ID NO: 319214 - RNA, 22 nt, Human
ucuucuuccucauuuauacaua

SEQ ID NO: 319215 - RNA, 22 nt, Human
aaguucaaggcucuagaguucc

SEQ ID NO: 319216 - RNA, 22 nt, Human
ggagcuggcuacagagaacucc

SEQ ID NO: 319217 - RNA, 22 nt, Human
gagaggccaaaaucccugcccc

SEQ ID NO: 319218 - RNA, 22 nt, Human
ucaaaagucugcauucuucaca

SEQ ID NO: 319219 - RNA, 22 nt, Human
gagcucauccccaugguccguc

SEQ ID NO: 319220 - RNA, 22 nt, Human
aagccagggauuccugagggag

SEQ ID NO: 319221 - RNA, 22 nt, Human
ucaaguguaguggugucagguc

SEQ ID NO: 319222 - RNA, 22 nt, Human
agcccagcaaagggagguucag

SEQ ID NO: 319223 - RNA, 22 nt, Human
aaagcaguauauugguaguugu

SEQ ID NO: 319224 - RNA, 22 nt, Human
gaggcugaggguuagagaguca

SEQ ID NO: 319225 - RNA, 22 nt, Human
ccagggcaaaugagaucauagc

SEQ ID NO: 319226 - RNA, 22 nt, Human
uucacauuagugguucuauaua

SEQ ID NO: 319227 - RNA, 22 nt, Human
caguggugaagagcaggggcuc

SEQ ID NO: 319228 - RNA, 22 nt, Human
gcugccuuuuaaagccucgcuu

SEQ ID NO: 319229 - RNA, 22 nt, Human
uuagauaaauugcaacuugauu

SEQ ID NO: 319230 - RNA, 22 nt, Human
ggcagcuggggcagugcccugu

SEQ ID NO: 319231 - RNA, 18 nt, Human
caggucugucugccuccc

SEQ ID NO: 319232 - RNA, 22 nt, Human
cagcugagcaucacuagucugg

SEQ ID NO: 319233 - RNA, 22 nt, Human
aacagaaaucauuuagggcucu

SEQ ID NO: 319234 - RNA, 20 nt, Human
cccucccagaugcuucccaa

SEQ ID NO: 319235 - RNA, 22 nt, Human
uuugacagauccuuaacucagc

SEQ ID NO: 319236 - RNA, 22 nt, Human
gccuggagaccugcuccucuac

SEQ ID NO: 319237 - RNA, 20 nt, Human
cuucuucauuaacccuacug

SEQ ID NO: 319238 - RNA, 22 nt, Human
ccaguguuuccccagaagagag

SEQ ID NO: 319239 - RNA, 22 nt, Human
agcugccaggccccugagaacc

SEQ ID NO: 319240 - RNA, 22 nt, Human
ccugggagggcaagugcugaug

SEQ ID NO: 319241 - RNA, 22 nt, Human
gggggcuggaauauccaucaac

SEQ ID NO: 319242 - RNA, 22 nt, Human
ccagguggaggugugagguccu

SEQ ID NO: 319243 - RNA, 22 nt, Human
ugcaucuuacguuuugaaaggg

SEQ ID NO: 319244 - RNA, 22 nt, Human
caagaugugccuaaucagaccu

SEQ ID NO: 319245 - RNA, 22 nt, Human
gccuggcaggccucaugagggg

SEQ ID NO: 319246 - RNA, 22 nt, Human
auaaauaucacuguugucccuc

SEQ ID NO: 319247 - RNA, 22 nt, Human
ugccugcuaggcccugcugggu

SEQ ID NO: 319248 - RNA, 18 nt, Human
acugugugaauuagcucc

SEQ ID NO: 319249 - RNA, 22 nt, Human
cagcuggcagaaccugcaucca

SEQ ID NO: 319250 - RNA, 22 nt, Human
cagggccagcgucucgggcuau

SEQ ID NO: 319251 - RNA, 22 nt, Human
cuuagaaauaaugguuucaguu

SEQ ID NO: 319252 - RNA, 22 nt, Human
gcagcaggcacggucucgacau

SEQ ID NO: 319253 - RNA, 23 nt, Human
uggcucuguggaucccucaggag

SEQ ID NO: 319254 - RNA, 22 nt, Human
gggagcugagcuggaagagaau

SEQ ID NO: 319255 - RNA, 19 nt, Human
agccuggagggcuggucac

SEQ ID NO: 319256 - RNA, 22 nt, Human
gcaccacaucaaugaggggagc

SEQ ID NO: 319257 - RNA, 22 nt, Human
cugucugcuagaacaucuauac

SEQ ID NO: 319258 - RNA, 22 nt, Human
gugcauuuaggucacaugaugu

SEQ ID NO: 319259 - RNA, 22 nt, Human
guuugcauuuauuagucuucug

SEQ ID NO: 319260 - RNA, 22 nt, Human
gaauguaauagucaguagaaca

SEQ ID NO: 319261 - RNA, 22 nt, Human
aguuacuugagacguuuaugaa

SEQ ID NO: 319262 - RNA, 22 nt, Human
aaaugcuugcucuugauuauuu

SEQ ID NO: 319263 - RNA, 22 nt, Human
uguaugaagacuucuucugugu

SEQ ID NO: 319264 - RNA, 21 nt, Human
ccugggccaaauucccuggac

SEQ ID NO: 319265 - RNA, 22 nt, Human
uccuucaguuaaagaucucaca

SEQ ID NO: 319266 - RNA, 22 nt, Human
aaacucugaugcuuauugggaa

SEQ ID NO: 319267 - RNA, 22 nt, Human
uuggaggacuaguuaagagacc

SEQ ID NO: 319268 - RNA, 22 nt, Human
ggauggagaugaccauggugac

SEQ ID NO: 319269 - RNA, 22 nt, Human
uuccaguugguagaauguaagg

SEQ ID NO: 319270 - RNA, 22 nt, Human
ggcagcugggucacaccgaucu

SEQ ID NO: 319271 - RNA, 22 nt, Human
aagagagagcauucuucuguua

SEQ ID NO: 319272 - RNA, 22 nt, Human
cacaugggugugccuggaggaa

SEQ ID NO: 319273 - RNA, 22 nt, Human
acccuggggguggccagugcca

SEQ ID NO: 319274 - RNA, 22 nt, Human
acauuucuaauuuaauguaaca

SEQ ID NO: 319275 - RNA, 22 nt, Human
gugcccugguccccagcauaua

SEQ ID NO: 319276 - RNA, 21 nt, Human
agagccugagaucuuccagca

SEQ ID NO: 319277 - RNA, 22 nt, Human
cagccaggccuggugaccaaag

SEQ ID NO: 319278 - RNA, 20 nt, Human
ucucaggccccaguuuucuu

SEQ ID NO: 319279 - RNA, 22 nt, Human
auagcuguuagauuggggucga

SEQ ID NO: 319280 - RNA, 22 nt, Human
ggcuuggaccagucacaguggu

SEQ ID NO: 319281 - RNA, 22 nt, Human
accaucaguacuggaugcugac

SEQ ID NO: 319282 - RNA, 22 nt, Human
agggcagagagaugaaugggau

SEQ ID NO: 319283 - RNA, 22 nt, Human
ccagccugguucagaauuggcu

SEQ ID NO: 319284 - RNA, 22 nt, Human
caggcagcucgaugccuuguug

SEQ ID NO: 319285 - RNA, 22 nt, Human
cagaggccuuucuacagugaua

SEQ ID NO: 319286 - RNA, 22 nt, Human
acauguaaaaggaacaugcaug

SEQ ID NO: 319287 - RNA, 22 nt, Human
aacaguaucuuuuaucagaaau

SEQ ID NO: 319288 - RNA, 22 nt, Human
ggaggcucugcuccguguguuc

SEQ ID NO: 319289 - RNA, 22 nt, Human
uuuugaaagaguccugcuacag

SEQ ID NO: 319290 - RNA, 20 nt, Human
gcuuuuucuaauagcagucc

SEQ ID NO: 319291 - RNA, 22 nt, Human
auugaaagauaggcuacugugg

SEQ ID NO: 319292 - RNA, 22 nt, Human
uucagugugugauaccugcugu

SEQ ID NO: 319293 - RNA, 22 nt, Human
gccuggagaagauggaacuagc

SEQ ID NO: 319294 - RNA, 22 nt, Human
cuauugaauagcccaaaucauu

SEQ ID NO: 319295 - RNA, 22 nt, Human
uugaagcauuugcuauagcauu

SEQ ID NO: 319296 - RNA, 22 nt, Human
gucaugccagcggagcucggga

SEQ ID NO: 319297 - RNA, 22 nt, Human
aaggcacucauucaaggagaua

SEQ ID NO: 319298 - RNA, 22 nt, Human
ugggaggcagguaggugaugau

SEQ ID NO: 319299 - RNA, 22 nt, Human
auuccuuggaacagaugcgaag

SEQ ID NO: 319300 - RNA, 17 nt, Human
aggcugcugggccaggg

SEQ ID NO: 319301 - RNA, 22 nt, Human
ucacugaauacuugucucaucc

SEQ ID NO: 319302 - RNA, 22 nt, Human
uggcagagagacucuccuugau

SEQ ID NO: 319303 - RNA, 21 nt, Human
gauuucacuuaccuucauuua

SEQ ID NO: 319304 - RNA, 22 nt, Human
agccuggauccuaggcucagcu

SEQ ID NO: 319305 - RNA, 22 nt, Human
cuggaaauuggagaugauguuu

SEQ ID NO: 319306 - RNA, 22 nt, Human
gcugcuccgucugagcucuggu

SEQ ID NO: 319307 - RNA, 22 nt, Human
ucauuucaaguucugacagcua

SEQ ID NO: 319308 - RNA, 22 nt, Human
caugaaaauaacauuguuguga

SEQ ID NO: 319309 - RNA, 20 nt, Human
acaaaauagguacuggguag

SEQ ID NO: 319310 - RNA, 22 nt, Human
agagauuacagcaggguccagc

SEQ ID NO: 319311 - RNA, 22 nt, Human
ucucagagaacaguuggugcuu

SEQ ID NO: 319312 - RNA, 22 nt, Human
uuucaaauagaaucuuuccaaa

SEQ ID NO: 319313 - RNA, 22 nt, Human
ccacacagucaguuuccaagaa

SEQ ID NO: 319314 - RNA, 22 nt, Human
ggccucuguuuggagccaggau

SEQ ID NO: 319315 - RNA, 22 nt, Human
cugagcuuccaguuccuccagg

SEQ ID NO: 319316 - RNA, 21 nt, Human
auacuuugaauuacagccuug

SEQ ID NO: 319317 - RNA, 22 nt, Human
guacuuccagccaagugagaca

SEQ ID NO: 319318 - RNA, 22 nt, Human
aguuuuucuccccuggcuucau

SEQ ID NO: 319319 - RNA, 22 nt, Human
ucucaggaguagugggauccau

SEQ ID NO: 319320 - RNA, 22 nt, Human
guccuggcuuaguucgcuguaa

SEQ ID NO: 319321 - RNA, 21 nt, Human
acagagccgggcacaaagcug

SEQ ID NO: 319322 - RNA, 22 nt, Human
gcccaggcuggagugcaguagc

SEQ ID NO: 319323 - RNA, 23 nt, Human
aaaguguagccagguuaagaacc

SEQ ID NO: 319324 - RNA, 22 nt, Human
auguagaauggugauuggcagg

SEQ ID NO: 319325 - RNA, 22 nt, Human
agcagcuggggccugugacgau

SEQ ID NO: 319326 - RNA, 22 nt, Human
guggcuucugcggugugcgcag

SEQ ID NO: 319327 - RNA, 22 nt, Human
uuucucuaaauagggaggcuua

SEQ ID NO: 319328 - RNA, 22 nt, Human
cucugcaacuucuagcaguguc

SEQ ID NO: 319329 - RNA, 22 nt, Human
auaacagaugugaagugcuaau

SEQ ID NO: 319330 - RNA, 22 nt, Human
cagcagugugcaggugugcugg

SEQ ID NO: 319331 - RNA, 22 nt, Human
cccagcauuucugggcugcacu

SEQ ID NO: 319332 - RNA, 22 nt, Human
uagcuuuccuuguugccugugc

SEQ ID NO: 319333 - RNA, 22 nt, Human
uuucucaguucucugcaaggag

SEQ ID NO: 319334 - RNA, 22 nt, Human
uguaggccuauguccagcaauu

SEQ ID NO: 319335 - RNA, 22 nt, Human
uacauacacaaauauacuguuu

SEQ ID NO: 319336 - RNA, 22 nt, Human
caauauucaguggaaaagccau

SEQ ID NO: 319337 - RNA, 22 nt, Human
gugagcaggauuucauggugua

SEQ ID NO: 319338 - RNA, 22 nt, Human
ccucuccaguuuuaacgugacc

SEQ ID NO: 319339 - RNA, 22 nt, Human
aacugcuguggccuaguacuua

SEQ ID NO: 319340 - RNA, 18 nt, Human
uacaugcauaaaugaagc

SEQ ID NO: 319341 - RNA, 22 nt, Human
ucccacucccaggcaggccucu

SEQ ID NO: 319342 - RNA, 20 nt, Human
uaacuuucuaugcuuucagc

SEQ ID NO: 319343 - RNA, 22 nt, Human
uggaagccaggcccgcuccuaa

SEQ ID NO: 319344 - RNA, 22 nt, Human
agguuauaugucauacugaagu

SEQ ID NO: 319345 - RNA, 22 nt, Human
aggccugggucucgugccuacc

SEQ ID NO: 319346 - RNA, 22 nt, Human
aaaugcauuuuuaauuagaccc

SEQ ID NO: 319347 - RNA, 22 nt, Human
gcugggagccccgagccagcgc

SEQ ID NO: 319348 - RNA, 22 nt, Human
aagauucucagagugaaagaau

SEQ ID NO: 319349 - RNA, 22 nt, Human
gaggccuggaccagccacagag

SEQ ID NO: 319350 - RNA, 22 nt, Human
cagugucuuauuuguagcucag

SEQ ID NO: 319351 - RNA, 22 nt, Human
agguggggccaaaugcuacagu

SEQ ID NO: 319352 - RNA, 22 nt, Human
uguaugaaguuacugagccucu

SEQ ID NO: 319353 - RNA, 22 nt, Human
auaaguucagguaaagaaauca

SEQ ID NO: 319354 - RNA, 22 nt, Human
augauauuugcaaugugcuugc

SEQ ID NO: 319355 - RNA, 18 nt, Human
aggagccuuugcacugga

SEQ ID NO: 319356 - RNA, 22 nt, Human
ucuggcucaggagcuguguuca

SEQ ID NO: 319357 - RNA, 22 nt, Human
ugcagggcccuugggguugaac

SEQ ID NO: 319358 - RNA, 18 nt, Human
ccugagcccugcuuacuu

SEQ ID NO: 319359 - RNA, 22 nt, Human
uaaguaaauuuauaaugugauu

SEQ ID NO: 319360 - RNA, 23 nt, Human
ugcuucucugcuugacaguucug

SEQ ID NO: 319361 - RNA, 22 nt, Human
uagcauuuauggucaugugucc

SEQ ID NO: 319362 - RNA, 22 nt, Human
caggcagccuucucgucucaca

SEQ ID NO: 319363 - RNA, 22 nt, Human
gcagcccagguguagcucuuug

SEQ ID NO: 319364 - RNA, 22 nt, Human
gcagcugauggaaguccuauug

SEQ ID NO: 319365 - RNA, 22 nt, Human
agagguagagguugcagugagc

SEQ ID NO: 319366 - RNA, 19 nt, Human
ucuaacagaagugucgucc

SEQ ID NO: 319367 - RNA, 22 nt, Human
gaaguucuuugcuccccaguac

SEQ ID NO: 319368 - RNA, 22 nt, Human
aucaguuuuguucacuacuaua

SEQ ID NO: 319369 - RNA, 22 nt, Human
cuuuccaaugcauuuccaaugu

SEQ ID NO: 319370 - RNA, 22 nt, Human
cgcugccaggauccccugccgg

SEQ ID NO: 319371 - RNA, 22 nt, Human
gcccuggaaucucuccauggga

SEQ ID NO: 319372 - RNA, 22 nt, Human
ccuucuucuguguggcccaaga

SEQ ID NO: 319373 - RNA, 22 nt, Human
gucuauauauugcuugaauaau

SEQ ID NO: 319374 - RNA, 22 nt, Human
guaaaucccauccuuucucugg

SEQ ID NO: 319375 - RNA, 20 nt, Human
gugcuucagaagccauugcu

SEQ ID NO: 319376 - RNA, 22 nt, Human
uugaauaguuuuggauagcaua

SEQ ID NO: 319377 - RNA, 22 nt, Human
aggagaaggaagugcaucacua

SEQ ID NO: 319378 - RNA, 22 nt, Human
agaaugcaagauaaacuuuauu

SEQ ID NO: 319379 - RNA, 22 nt, Human
uacaaagucacauugaaaugaa

SEQ ID NO: 319380 - RNA, 22 nt, Human
aggugccagaugcacagcugaa

SEQ ID NO: 319381 - RNA, 22 nt, Human
gggaagggagggaccucagucu

SEQ ID NO: 319382 - RNA, 22 nt, Human
aaagaucagucugaagcaacau

SEQ ID NO: 319383 - RNA, 22 nt, Human
gucucccacuuucuggccucuu

SEQ ID NO: 319384 - RNA, 22 nt, Human
agcagcugagccccagcuguga

SEQ ID NO: 319385 - RNA, 22 nt, Human
cuacauuuuaauaagcugcuua

SEQ ID NO: 319386 - RNA, 22 nt, Human
agugaaaugauaguguaaauac

SEQ ID NO: 319387 - RNA, 22 nt, Human
gcaaaugcucuccuuggucagg

SEQ ID NO: 319388 - RNA, 18 nt, Human
ucacagugcucuugccua

SEQ ID NO: 319389 - RNA, 22 nt, Human
agagcuggagaugcagguuucg

SEQ ID NO: 319390 - RNA, 22 nt, Human
aggccugaggaccagauaaaug

SEQ ID NO: 319391 - RNA, 22 nt, Human
uaaauucugaucaaguuccuuc

SEQ ID NO: 319392 - RNA, 22 nt, Human
cccugccuugggguccacaccg

SEQ ID NO: 319393 - RNA, 22 nt, Human
agcagccaaaugaagauuuuac

SEQ ID NO: 319394 - RNA, 22 nt, Human
gaggcaggguguugauuacaga

SEQ ID NO: 319395 - RNA, 22 nt, Human
aucuggcucgcuaggcucuggg

SEQ ID NO: 319396 - RNA, 22 nt, Human
uauuucaugugcaccauaauuc

SEQ ID NO: 319397 - RNA, 22 nt, Human
uccaguccagggaauggcugau

SEQ ID NO: 319398 - RNA, 22 nt, Human
aggcugagauagguggaucauu

SEQ ID NO: 319399 - RNA, 22 nt, Human
gagacagaguuucacucuuguu

SEQ ID NO: 319400 - RNA, 22 nt, Human
cacagcuucugagugaggauuu

SEQ ID NO: 319401 - RNA, 22 nt, Human
ccaguguuuaggaauaaaaugu

SEQ ID NO: 319402 - RNA, 19 nt, Human
agcuccuguucagcagcuc

SEQ ID NO: 319403 - RNA, 22 nt, Human
uuugcauugccucugacuuaug

SEQ ID NO: 319404 - RNA, 22 nt, Human
auauuguugacuauaagaguaa

SEQ ID NO: 319405 - RNA, 22 nt, Human
gugccugguuuggggaauguuc

SEQ ID NO: 319406 - RNA, 22 nt, Human
ccaucagcaugggagcaugggc

SEQ ID NO: 319407 - RNA, 22 nt, Human
auucucaaacaagugguuugau

SEQ ID NO: 319408 - RNA, 22 nt, Human
aggcccaguagucgacggcgcu

SEQ ID NO: 319409 - RNA, 22 nt, Human
aggaggccgcugaugggcuccc

SEQ ID NO: 319410 - RNA, 22 nt, Human
aaucaguuaaauauugaguaca

SEQ ID NO: 319411 - RNA, 22 nt, Human
agcccccaaaagugcuuaugau

SEQ ID NO: 319412 - RNA, 22 nt, Human
ggcccugugguuuugcaaaguc

SEQ ID NO: 319413 - RNA, 22 nt, Human
ccugggcaucucaugcaccugc

SEQ ID NO: 319414 - RNA, 22 nt, Human
ggccuggccuccagaugugggc

SEQ ID NO: 319415 - RNA, 22 nt, Human
aucuggcuauuucuggucgggg

SEQ ID NO: 319416 - RNA, 22 nt, Human
ugcugcucuucaccauggccuc

SEQ ID NO: 319417 - RNA, 22 nt, Human
uaauuccaaguugagacaugca

SEQ ID NO: 319418 - RNA, 22 nt, Human
gcagcaugagcuauacaaagua

SEQ ID NO: 319419 - RNA, 22 nt, Human
aaucuuagguuuggcuucaucu

SEQ ID NO: 319420 - RNA, 22 nt, Human
caggcucagcaggagccugacc

SEQ ID NO: 319421 - RNA, 22 nt, Human
aggcuuccuggaggaagaggua

SEQ ID NO: 319422 - RNA, 22 nt, Human
aaaaaguuucaacugccaacuc

SEQ ID NO: 319423 - RNA, 22 nt, Human
ccuggcagcuguuuggcuuggc

SEQ ID NO: 319424 - RNA, 22 nt, Human
uuucaagcauaacugggaagag

SEQ ID NO: 319425 - RNA, 22 nt, Human
aagcaaaagguuacacuucugg

SEQ ID NO: 319426 - RNA, 22 nt, Human
gagcagcuagauaaagcccuuc

SEQ ID NO: 319427 - RNA, 22 nt, Human
ugagggaguuggguguauagga

SEQ ID NO: 319428 - RNA, 18 nt, Human
uuccauaauguauguaac

SEQ ID NO: 319429 - RNA, 22 nt, Human
aaguuauaucaucucauugacg

SEQ ID NO: 319430 - RNA, 22 nt, Human
aaugagaagccuagguguacug

SEQ ID NO: 319431 - RNA, 22 nt, Human
ucccagcagagccagcaagccg

SEQ ID NO: 319432 - RNA, 22 nt, Human
agcagcugaccagugaguccug

SEQ ID NO: 319433 - RNA, 22 nt, Human
aaaagaugaaauggugucuugg

SEQ ID NO: 319434 - RNA, 22 nt, Human
ucauuugugugagugauuugac

SEQ ID NO: 319435 - RNA, 18 nt, Human
guccugagcucugcugua

SEQ ID NO: 319436 - RNA, 22 nt, Human
gaggagaaauuuggggaccuga

SEQ ID NO: 319437 - RNA, 22 nt, Human
gaaaucugucuuuguuugaaua

SEQ ID NO: 319438 - RNA, 22 nt, Human
aggcccaguagugcugccuuua

SEQ ID NO: 319439 - RNA, 22 nt, Human
ccaggcugugguuuagauagag

SEQ ID NO: 319440 - RNA, 22 nt, Human
gucaaguuuauccgcucauuca

SEQ ID NO: 319441 - RNA, 22 nt, Human
cagcccugcagagggcgcuccu

SEQ ID NO: 319442 - RNA, 22 nt, Human
uuggcagggccaggcucucucu

SEQ ID NO: 319443 - RNA, 22 nt, Human
cugaaggacuuggugauaguug

SEQ ID NO: 319444 - RNA, 22 nt, Human
aaugaugggaaggagaaaagca

SEQ ID NO: 319445 - RNA, 22 nt, Human
uaucuguuccaggcacucagcu

SEQ ID NO: 319446 - RNA, 22 nt, Human
gccagcuggagugagagugggc

SEQ ID NO: 319447 - RNA, 22 nt, Human
uggcucucaggccugcugcguu

SEQ ID NO: 319448 - RNA, 22 nt, Human
agugaaauuccuggucuuuguu

SEQ ID NO: 319449 - RNA, 17 nt, Human
agccccucagcgucacc

SEQ ID NO: 319450 - RNA, 22 nt, Human
uucccucuccuacucaggaaag

SEQ ID NO: 319451 - RNA, 22 nt, Human
guacauuucauuuaaaugaugu

SEQ ID NO: 319452 - RNA, 22 nt, Human
cagugcugugcuggaagcuguu

SEQ ID NO: 319453 - RNA, 22 nt, Human
ugcaguggaagagguggagauc

SEQ ID NO: 319454 - RNA, 22 nt, Human
ggcugccaggagggaggccagu

SEQ ID NO: 319455 - RNA, 22 nt, Human
ucacagaaauaagauaguuauu

SEQ ID NO: 319456 - RNA, 22 nt, Human
ugaugggaaaaugaggccuggg

SEQ ID NO: 319457 - RNA, 22 nt, Human
cacaauguauauguauaucaaa

SEQ ID NO: 319458 - RNA, 22 nt, Human
cucuuaguuuaucuuugacaaa

SEQ ID NO: 319459 - RNA, 21 nt, Human
ccagaggccucucuuggccac

SEQ ID NO: 319460 - RNA, 22 nt, Human
uugcuucaguagcucuuuaaag

SEQ ID NO: 319461 - RNA, 22 nt, Human
cauggcagaaaccugagcugcu

SEQ ID NO: 319462 - RNA, 22 nt, Human
aacagaaugcaggggaugcugc

SEQ ID NO: 319463 - RNA, 21 nt, Human
acacaaaccuccucagccugg

SEQ ID NO: 319464 - RNA, 22 nt, Human
aggccuggugugccggaugcag

SEQ ID NO: 319465 - RNA, 22 nt, Human
gaguuguucaacgugugugaaa

SEQ ID NO: 319466 - RNA, 20 nt, Human
ccugggcuccaggagccccg

SEQ ID NO: 319467 - RNA, 22 nt, Human
ggcacagagcccagcuuccuag

SEQ ID NO: 319468 - RNA, 22 nt, Human
uuugcauugcauacaaggaacu

SEQ ID NO: 319469 - RNA, 22 nt, Human
uuccugggguacuggagaaaau

SEQ ID NO: 319470 - RNA, 22 nt, Human
acacagggcaaugcuuugaccu

SEQ ID NO: 319471 - RNA, 22 nt, Human
uaacacauaagcugagaccaug

SEQ ID NO: 319472 - RNA, 22 nt, Human
aagauuuccauuucuagcucau

SEQ ID NO: 319473 - RNA, 22 nt, Human
agaugcuucaguguuuaauuua

SEQ ID NO: 319474 - RNA, 22 nt, Human
ucagcuuuugucagaaauugua

SEQ ID NO: 319475 - RNA, 22 nt, Human
auggauaagaacaaauaucuga

SEQ ID NO: 319476 - RNA, 22 nt, Human
ccuggccuuaagggcagggagc

SEQ ID NO: 319477 - RNA, 22 nt, Human
ugaagcaaacgcuucuguuccu

SEQ ID NO: 319478 - RNA, 22 nt, Human
gcuuccugagaaacaaucugau

SEQ ID NO: 319479 - RNA, 22 nt, Human
uugcauuccaguccccacugug

SEQ ID NO: 319480 - RNA, 22 nt, Human
uccucaguuauaaauaggaaac

SEQ ID NO: 319481 - RNA, 22 nt, Human
caaauacuggguaaguuaauuu

SEQ ID NO: 319482 - RNA, 22 nt, Human
aaugcaccuaccuugauucugc

SEQ ID NO: 319483 - RNA, 22 nt, Human
aaauguguuuagaugguuuauu

SEQ ID NO: 319484 - RNA, 22 nt, Human
gaaggggacuggcagcugcaga

SEQ ID NO: 319485 - RNA, 22 nt, Human
augaugguuguccuaggugcau

SEQ ID NO: 319486 - RNA, 22 nt, Human
ugcucugguccucccucggcgc

SEQ ID NO: 319487 - RNA, 22 nt, Human
cuguucacacacuuguacucuc

SEQ ID NO: 319488 - RNA, 21 nt, Human
uuucugucucugccacuaguu

SEQ ID NO: 319489 - RNA, 22 nt, Human
uggaggcauaggccugggcccu

SEQ ID NO: 319490 - RNA, 22 nt, Human
uggccugggucacaccaggguc

SEQ ID NO: 319491 - RNA, 23 nt, Human
aaguaacagggauaauagcaguu

SEQ ID NO: 319492 - RNA, 22 nt, Human
cugcaggagugaaagcaggccu

SEQ ID NO: 319493 - RNA, 22 nt, Human
acuuuugguucuguaacuguga

SEQ ID NO: 319494 - RNA, 22 nt, Human
ugggcaggaugcguugauucuu

SEQ ID NO: 319495 - RNA, 22 nt, Human
gcuggcucagggacuagaguuu

SEQ ID NO: 319496 - RNA, 21 nt, Human
gauuuuaaagagacugccaca

SEQ ID NO: 319497 - RNA, 22 nt, Human
auacagauguugaauguuauau

SEQ ID NO: 319498 - RNA, 22 nt, Human
uuugcaguagacaucuuauuuu

SEQ ID NO: 319499 - RNA, 22 nt, Human
cacuacuugaaagaauuacaga

SEQ ID NO: 319500 - RNA, 22 nt, Human
uaacagaaauuuuaguuagggg

SEQ ID NO: 319501 - RNA, 22 nt, Human
gcagggcugcagagggcacugu

SEQ ID NO: 319502 - RNA, 22 nt, Human
cuccuuccccuacucagcaucc

SEQ ID NO: 319503 - RNA, 22 nt, Human
uugucuaaugagcuccacuuca

SEQ ID NO: 319504 - RNA, 22 nt, Human
gcagcagagcuuuguccuggcu

SEQ ID NO: 319505 - RNA, 22 nt, Human
ugcuccauucucuagccagugc

SEQ ID NO: 319506 - RNA, 22 nt, Human
augauuuccaguuguugcuaag

SEQ ID NO: 319507 - RNA, 22 nt, Human
auugaaagauuuugggcucaug

SEQ ID NO: 319508 - RNA, 22 nt, Human
ucccagagugagccaggggcag

SEQ ID NO: 319509 - RNA, 22 nt, Human
aaaauaacuucuacuauuugca

SEQ ID NO: 319510 - RNA, 22 nt, Human
gcucagugcagccuuucuguau

SEQ ID NO: 319511 - RNA, 19 nt, Human
gaucuuugccaauuuaagc

SEQ ID NO: 319512 - RNA, 22 nt, Human
aagcgccacgagaagcuggacc

SEQ ID NO: 319513 - RNA, 22 nt, Human
gucuuuaugguaugaaaacuga

SEQ ID NO: 319514 - RNA, 22 nt, Human
ccugcugugaagccaggccugu

SEQ ID NO: 319515 - RNA, 22 nt, Human
uagcacauacauaauagauaga

SEQ ID NO: 319516 - RNA, 22 nt, Human
auguagaaaguucauagaugcg

SEQ ID NO: 319517 - RNA, 22 nt, Human
uuuuccucaggaaugcuaagcu

SEQ ID NO: 319518 - RNA, 22 nt, Human
cuugaaucuucugaguauuugc

SEQ ID NO: 319519 - RNA, 22 nt, Human
aaaaguauuuuggaucucagau

SEQ ID NO: 319520 - RNA, 22 nt, Human
gguggccucucaugcaagguag

SEQ ID NO: 319521 - RNA, 22 nt, Human
uucacauuggugauauguuucu

SEQ ID NO: 319522 - RNA, 22 nt, Human
ggcucuggaaaguguccuugau

SEQ ID NO: 319523 - RNA, 22 nt, Human
acugggaggcaucuggagcuga

SEQ ID NO: 319524 - RNA, 22 nt, Human
agaugguguuuccccaggugga

SEQ ID NO: 319525 - RNA, 22 nt, Human
guacauguugguuguuuccagu

SEQ ID NO: 319526 - RNA, 22 nt, Human
caaauguguaaggaaguguuag

SEQ ID NO: 319527 - RNA, 22 nt, Human
cugcccucccaguugguccgug

SEQ ID NO: 319528 - RNA, 17 nt, Human
agauggcaggaggcaga

SEQ ID NO: 319529 - RNA, 22 nt, Human
cacagaagaaucaugcuguguu

SEQ ID NO: 319530 - RNA, 22 nt, Human
auagaagauagcuuuuguuucu

SEQ ID NO: 319531 - RNA, 22 nt, Human
aacugcauucagaaagcucacu

SEQ ID NO: 319532 - RNA, 22 nt, Human
ugcuuaauauugugauguaaua

SEQ ID NO: 319533 - RNA, 22 nt, Human
cauguugaauggccuugauuuu

SEQ ID NO: 319534 - RNA, 22 nt, Human
cuucaagauccauagauauugc

SEQ ID NO: 319535 - RNA, 22 nt, Human
uuugaaagaaaccagugaguga

SEQ ID NO: 319536 - RNA, 22 nt, Human
aauuuccagaucagaugacuca

SEQ ID NO: 319537 - RNA, 22 nt, Human
cuacccaggcuggagugcagua

SEQ ID NO: 319538 - RNA, 20 nt, Human
caguccaaucagaggccacc

SEQ ID NO: 319539 - RNA, 22 nt, Human
uuaguaaauaaagucuacuuuc

SEQ ID NO: 319540 - RNA, 23 nt, Human
gccucugcucugcguuggggacu

SEQ ID NO: 319541 - RNA, 22 nt, Human
aaugcugcaagaggugaaaaga

SEQ ID NO: 319542 - RNA, 22 nt, Human
aaggcugcuuuuaacaugcaua

SEQ ID NO: 319543 - RNA, 22 nt, Human
cagcucuguaaauuccuucauc

SEQ ID NO: 319544 - RNA, 22 nt, Human
gagccuggauugaagugggugg

SEQ ID NO: 319545 - RNA, 22 nt, Human
uugcuauuuugagagucauagu

SEQ ID NO: 319546 - RNA, 17 nt, Human
aggccagaugaggcaag

SEQ ID NO: 319547 - RNA, 19 nt, Human
agacacacuugauaugugu

SEQ ID NO: 319548 - RNA, 22 nt, Human
ggccugcugacccaaguccugu

SEQ ID NO: 319549 - RNA, 22 nt, Human
aggcucauucuugccucugagc

SEQ ID NO: 319550 - RNA, 22 nt, Human
acaguguucugcuuuuuaaucc

SEQ ID NO: 319551 - RNA, 22 nt, Human
caugagaaccaggucuguguuu

SEQ ID NO: 319552 - RNA, 22 nt, Human
uccuccuucgggacugcuugac

SEQ ID NO: 319553 - RNA, 22 nt, Human
gaaacuuacuuacucacauuuc

SEQ ID NO: 319554 - RNA, 22 nt, Human
agaugcagauuuggauucagga

SEQ ID NO: 319555 - RNA, 22 nt, Human
uuugacaaauccuucagcaaug

SEQ ID NO: 319556 - RNA, 22 nt, Human
caggcagauuugcugcccucca

SEQ ID NO: 319557 - RNA, 22 nt, Human
ccagggccaagagaccucgagg

SEQ ID NO: 319558 - RNA, 22 nt, Human
uaugaacuuuugaugugacaug

SEQ ID NO: 319559 - RNA, 22 nt, Human
ucucaccaaagccuugaccaua

SEQ ID NO: 319560 - RNA, 22 nt, Human
agucucagcuacuugggaggcu

SEQ ID NO: 319561 - RNA, 22 nt, Human
gaaugcacuuccaacaucuauu

SEQ ID NO: 319562 - RNA, 22 nt, Human
gccuggagccucagcaaggagg

SEQ ID NO: 319563 - RNA, 22 nt, Human
cagcgcugugggaacagggcua

SEQ ID NO: 319564 - RNA, 22 nt, Human
cacugaaggacaguaggaaggg

SEQ ID NO: 319565 - RNA, 22 nt, Human
cagggcaggaugcugugauuau

SEQ ID NO: 319566 - RNA, 22 nt, Human
aaaucaguuggaacacaagcag

SEQ ID NO: 319567 - RNA, 20 nt, Human
ccuccuggucaggugugcag

SEQ ID NO: 319568 - RNA, 22 nt, Human
ugugcacaggaagcuauucucu

SEQ ID NO: 319569 - RNA, 22 nt, Human
ccaguguucaauacauauuugu

SEQ ID NO: 319570 - RNA, 22 nt, Human
ggaccuggcaauuugcaucucu

SEQ ID NO: 319571 - RNA, 22 nt, Human
aagcagaaaaacugagcuccaa

SEQ ID NO: 319572 - RNA, 22 nt, Human
ugagagagccugaaucucuuac

SEQ ID NO: 319573 - RNA, 22 nt, Human
gguuggaggugggaauagcuag

SEQ ID NO: 319574 - RNA, 22 nt, Human
caaaugcauaguuuauaagaag

SEQ ID NO: 319575 - RNA, 22 nt, Human
gaggcuggcagaaaagcacagg

SEQ ID NO: 319576 - RNA, 20 nt, Human
aaguuuucuccaaauacagu

SEQ ID NO: 319577 - RNA, 22 nt, Human
cauuuagaaacuguuuuuaaca

SEQ ID NO: 319578 - RNA, 22 nt, Human
caguccugggugcagcaggaaa

SEQ ID NO: 319579 - RNA, 19 nt, Human
agauggggaagagugugag

SEQ ID NO: 319580 - RNA, 23 nt, Human
acagaugaaaguguggcucagag

SEQ ID NO: 319581 - RNA, 16 nt, Human
uucugucacguacggc

SEQ ID NO: 319582 - RNA, 22 nt, Human
ccugggcucaagugauccuccu

SEQ ID NO: 319583 - RNA, 22 nt, Human
gcugagucuugagcacugagca

SEQ ID NO: 319584 - RNA, 22 nt, Human
cucuggagaacuccuugugucu

SEQ ID NO: 319585 - RNA, 22 nt, Human
gcucucugccuuucucaaugac

SEQ ID NO: 319586 - RNA, 22 nt, Human
ggcuggcacucuguccaguguc

SEQ ID NO: 319587 - RNA, 22 nt, Human
gagcugcugguugcuggugccu

SEQ ID NO: 319588 - RNA, 22 nt, Human
aggccagguuccucaaucuuga

SEQ ID NO: 319589 - RNA, 22 nt, Human
uuuaagauucaguaaggcaaac

SEQ ID NO: 319590 - RNA, 22 nt, Human
agggucugacaaugugacuuag

SEQ ID NO: 319591 - RNA, 22 nt, Human
auuucacucuuaauugcuuccu

SEQ ID NO: 319592 - RNA, 22 nt, Human
gugggacucuucuuuggcagug

SEQ ID NO: 319593 - RNA, 19 nt, Human
acaagggcaggcaagguga

SEQ ID NO: 319594 - RNA, 22 nt, Human
uauuacugagguuuuauggagu

SEQ ID NO: 319595 - RNA, 22 nt, Human
uuaaguccuugguaauuuucuu

SEQ ID NO: 319596 - RNA, 22 nt, Human
gcccuuccaacccagagggcaa

SEQ ID NO: 319597 - RNA, 22 nt, Human
ggcagagaugugggucagaauc

SEQ ID NO: 319598 - RNA, 22 nt, Human
ugcauuguaggauguuuagcag

SEQ ID NO: 319599 - RNA, 20 nt, Human
cucaggauugucuagccccu

SEQ ID NO: 319600 - RNA, 20 nt, Human
ggccuuggccucuuugcagc

SEQ ID NO: 319601 - RNA, 22 nt, Human
augauggugagguugagcacag

SEQ ID NO: 319602 - RNA, 22 nt, Human
cagagccauuauggagacuugc

SEQ ID NO: 319603 - RNA, 22 nt, Human
agugcauauaugaagaguauga

SEQ ID NO: 319604 - RNA, 22 nt, Human
uggcagcugaggggaggcuuug

SEQ ID NO: 319605 - RNA, 22 nt, Human
cucagagucccuucccucgugg

SEQ ID NO: 319606 - RNA, 20 nt, Human
auauguguacguguauacau

SEQ ID NO: 319607 - RNA, 22 nt, Human
aggagcugacuuguaaagcauu

SEQ ID NO: 319608 - RNA, 22 nt, Human
uccuucaaaaguugagagagcc

SEQ ID NO: 319609 - RNA, 22 nt, Human
cagcaauauacacagucuaugg

SEQ ID NO: 319610 - RNA, 22 nt, Human
uguuccaauaaggaguugaaau

SEQ ID NO: 319611 - RNA, 22 nt, Human
acagauauaaacuauaguagug

SEQ ID NO: 319612 - RNA, 22 nt, Human
auaacaugaccugugcuucaca

SEQ ID NO: 319613 - RNA, 22 nt, Human
ugaggcuggcaaggcugguauu

SEQ ID NO: 319614 - RNA, 22 nt, Human
ccaggccuguguuguguggagg

SEQ ID NO: 319615 - RNA, 19 nt, Human
uaaggccaaaaguaagugu

SEQ ID NO: 319616 - RNA, 22 nt, Human
acaaacuuccaucaugaauuuu

SEQ ID NO: 319617 - RNA, 22 nt, Human
cagcugaauucuucagacucca

SEQ ID NO: 319618 - RNA, 22 nt, Human
auguaaacaagguuauugucca

SEQ ID NO: 319619 - RNA, 22 nt, Human
caggagaagguuuggagugcag

SEQ ID NO: 319620 - RNA, 22 nt, Human
uauuucugggaguucagaaauu

SEQ ID NO: 319621 - RNA, 18 nt, Human
gguggcaggucagaugcc

SEQ ID NO: 319622 - RNA, 22 nt, Human
guucauauuacuuugagugcag

SEQ ID NO: 319623 - RNA, 22 nt, Human
uccugggcugcagggaagagca

SEQ ID NO: 319624 - RNA, 22 nt, Human
auaaggcacacauagauagggu

SEQ ID NO: 319625 - RNA, 22 nt, Human
uagcagcuuccagagagggcag

SEQ ID NO: 319626 - RNA, 22 nt, Human
uucagagaugacaccugguguu

SEQ ID NO: 319627 - RNA, 22 nt, Human
guggcauugacauguaaacagu

SEQ ID NO: 319628 - RNA, 22 nt, Human
gccuugcuuugcuucuggacag

SEQ ID NO: 319629 - RNA, 18 nt, Human
acauuucuccuucugacc

SEQ ID NO: 319630 - RNA, 22 nt, Human
agggcagcauugccuuucucca

SEQ ID NO: 319631 - RNA, 22 nt, Human
gcuguggcuguacagagaccau

SEQ ID NO: 319632 - RNA, 22 nt, Human
uuaaauauuauguugucugcaa

SEQ ID NO: 319633 - RNA, 22 nt, Human
uuauuugcccauguuuagcaga

SEQ ID NO: 319634 - RNA, 19 nt, Human
uccauaagcuuguguucau

SEQ ID NO: 319635 - RNA, 22 nt, Human
auacuguuuugugacuuaucuu

SEQ ID NO: 319636 - RNA, 22 nt, Human
ccucccacauccuagcucugcu

SEQ ID NO: 319637 - RNA, 19 nt, Human
agggagaauuccaagagga

SEQ ID NO: 319638 - RNA, 22 nt, Human
gcacccagcccagggcgugaug

SEQ ID NO: 319639 - RNA, 22 nt, Human
gcacacagauuaggaaacagaa

SEQ ID NO: 319640 - RNA, 22 nt, Human
caggaacacaaugagucucaaa

SEQ ID NO: 319641 - RNA, 22 nt, Human
ucugagagguuaagcaauuuga

SEQ ID NO: 319642 - RNA, 22 nt, Human
aaagaugucauacacauuaaga

SEQ ID NO: 319643 - RNA, 22 nt, Human
gcugugcagguccccacugccu

SEQ ID NO: 319644 - RNA, 22 nt, Human
auuccuuguauaucuacaugca

SEQ ID NO: 319645 - RNA, 22 nt, Human
gcuggggagggcgucaaggcca

SEQ ID NO: 319646 - RNA, 22 nt, Human
gaguuauuaauggcugaguuug

SEQ ID NO: 319647 - RNA, 22 nt, Human
aaggaaccauuugugugcaugg

SEQ ID NO: 319648 - RNA, 22 nt, Human
auaugugaaugauaucacuuug

SEQ ID NO: 319649 - RNA, 22 nt, Human
ucugcuggccuuagcaggucua

SEQ ID NO: 319650 - RNA, 22 nt, Human
ggggcagagucuggacuguugu

SEQ ID NO: 319651 - RNA, 22 nt, Human
gugauaaaauucaaauagcucu

SEQ ID NO: 319652 - RNA, 22 nt, Human
ucacuggggccuuuggucagga

SEQ ID NO: 319653 - RNA, 22 nt, Human
ucagagugaggcccagcaaucu

SEQ ID NO: 319654 - RNA, 22 nt, Human
uccuugaaaagaaugucuccau

SEQ ID NO: 319655 - RNA, 22 nt, Human
cacucugacuggcccugcagga

SEQ ID NO: 319656 - RNA, 22 nt, Human
uggacucagugcugccauuccc

SEQ ID NO: 319657 - RNA, 22 nt, Human
caugaaaaugucaaguucugcu

SEQ ID NO: 319658 - RNA, 22 nt, Human
gggcuccagcccgggaccaggu

SEQ ID NO: 319659 - RNA, 22 nt, Human
uuacaaaguucugaguucaaac

SEQ ID NO: 319660 - RNA, 22 nt, Human
cugagcccaggcgggagcugag

SEQ ID NO: 319661 - RNA, 21 nt, Human
aauguauguuuaucucacagu

SEQ ID NO: 319662 - RNA, 22 nt, Human
ccucccaccauuuagagagagc

SEQ ID NO: 319663 - RNA, 22 nt, Human
cuggcuggucaucagcaguacg

SEQ ID NO: 319664 - RNA, 22 nt, Human
ugcaauaacccaguaucuguga

SEQ ID NO: 319665 - RNA, 22 nt, Human
uuucuguaauuaaaagggcagg

SEQ ID NO: 319666 - RNA, 22 nt, Human
gaacacaugauuauaaaugcua

SEQ ID NO: 319667 - RNA, 22 nt, Human
agauaauuugaguaaauuaauu

SEQ ID NO: 319668 - RNA, 22 nt, Human
gcagauggugggggaggaguac

SEQ ID NO: 319669 - RNA, 19 nt, Human
ucugaggguccagaugcau

SEQ ID NO: 319670 - RNA, 22 nt, Human
aggggaggcagcgauaaaccug

SEQ ID NO: 319671 - RNA, 22 nt, Human
agaaaaggcuugaagagguuuu

SEQ ID NO: 319672 - RNA, 22 nt, Human
uaucuguuguccaugcagaaag

SEQ ID NO: 319673 - RNA, 17 nt, Human
agcagaagucagaggga

SEQ ID NO: 319674 - RNA, 22 nt, Human
ugggccuggacaaggccacuag

SEQ ID NO: 319675 - RNA, 22 nt, Human
ggguccagcuacaucagggugg

SEQ ID NO: 319676 - RNA, 22 nt, Human
cuucagggugacgcaggcugca

SEQ ID NO: 319677 - RNA, 22 nt, Human
ggcugcucuucuuggcgaccuc

SEQ ID NO: 319678 - RNA, 22 nt, Human
aauuaacagagggcuuauuacu

SEQ ID NO: 319679 - RNA, 21 nt, Human
aaggaaaagcuuggucucuga

SEQ ID NO: 319680 - RNA, 22 nt, Human
ggcugccugugcccaggcacac

SEQ ID NO: 319681 - RNA, 22 nt, Human
cagagcugcgcuuuuuccuggu

SEQ ID NO: 319682 - RNA, 23 nt, Human
aggaacugaggccuagggaggua

SEQ ID NO: 319683 - RNA, 21 nt, Human
uagaaaucagcuggugccucu

SEQ ID NO: 319684 - RNA, 22 nt, Human
uggagggcucuuucaccuggua

SEQ ID NO: 319685 - RNA, 22 nt, Human
cccaggagguggagcuugcagu

SEQ ID NO: 319686 - RNA, 22 nt, Human
gcucaggaaauaguuuaguguu

SEQ ID NO: 319687 - RNA, 23 nt, Human
aagaauaaaugacauuaaaggug

SEQ ID NO: 319688 - RNA, 22 nt, Human
uauuucagcccuacuacuuggc

SEQ ID NO: 319689 - RNA, 22 nt, Human
ccaggacuucgaggcuacagug

SEQ ID NO: 319690 - RNA, 22 nt, Human
uuguaacagguacuaaauaacu

SEQ ID NO: 319691 - RNA, 22 nt, Human
auauuccauugguuucccuucu

SEQ ID NO: 319692 - RNA, 22 nt, Human
uuaauaaacaggugcagcugaa

SEQ ID NO: 319693 - RNA, 22 nt, Human
ggccuugggcagacacgucaca

SEQ ID NO: 319694 - RNA, 22 nt, Human
gagcuggugaucagcuggagga

SEQ ID NO: 319695 - RNA, 22 nt, Human
ugcuggccaauggcagaggcgg

SEQ ID NO: 319696 - RNA, 22 nt, Human
cucagugcuuuggauccuggau

SEQ ID NO: 319697 - RNA, 22 nt, Human
uguucaauccccagguccugaa

SEQ ID NO: 319698 - RNA, 22 nt, Human
uguucuugggaaucuuacaguu

SEQ ID NO: 319699 - RNA, 22 nt, Human
aaauugcaaaaguacuuuuagg

SEQ ID NO: 319700 - RNA, 22 nt, Human
gaggaacccagcugggguugcc

SEQ ID NO: 319701 - RNA, 20 nt, Human
cuggguggcaagcaaggggg

SEQ ID NO: 319702 - RNA, 22 nt, Human
caaggccagagccagcgauaag

SEQ ID NO: 319703 - RNA, 18 nt, Human
uggcucugcagccagaug

SEQ ID NO: 319704 - RNA, 22 nt, Human
uugcauaaagauuuuauugcau

SEQ ID NO: 319705 - RNA, 22 nt, Human
ggacucuguuuuccugaucacu

SEQ ID NO: 319706 - RNA, 22 nt, Human
aggggcugacuggaaagugcca

SEQ ID NO: 319707 - RNA, 22 nt, Human
agccucucuguuagucacuggg

SEQ ID NO: 319708 - RNA, 22 nt, Human
aggaaacuccccuacaucucaa

SEQ ID NO: 319709 - RNA, 22 nt, Human
uugugaaacauucauggauuug

SEQ ID NO: 319710 - RNA, 22 nt, Human
aaucaguuguccaaaguucaca

SEQ ID NO: 319711 - RNA, 22 nt, Human
aaguguauauaugacuuauaaa

SEQ ID NO: 319712 - RNA, 22 nt, Human
agaagcaguuauuuuuugcaca

SEQ ID NO: 319713 - RNA, 23 nt, Human
acacaauagaguacuauucagcc

SEQ ID NO: 319714 - RNA, 22 nt, Human
uggagcaggcaucuuucucucu

SEQ ID NO: 319715 - RNA, 22 nt, Human
uuugugaagggaacagaagugu

SEQ ID NO: 319716 - RNA, 18 nt, Human
ggugagggagcuggaagc

SEQ ID NO: 319717 - RNA, 22 nt, Human
cagcccuguccaaugucugcuc

SEQ ID NO: 319718 - RNA, 22 nt, Human
ggugaggcuaagugacacaggg

SEQ ID NO: 319719 - RNA, 22 nt, Human
gaugggaggaaccugggucccu

SEQ ID NO: 319720 - RNA, 22 nt, Human
ccaggcugcuuagccuuaucuu

SEQ ID NO: 319721 - RNA, 22 nt, Human
ggccccacgggggaguccuagu

SEQ ID NO: 319722 - RNA, 22 nt, Human
caggccugagacaucugagaua

SEQ ID NO: 319723 - RNA, 21 nt, Human
ucauuugugaucugauuucca

SEQ ID NO: 319724 - RNA, 22 nt, Human
cagugcagguggcagaggacag

SEQ ID NO: 319725 - RNA, 22 nt, Human
uaggcagggauuaggguugauu

SEQ ID NO: 319726 - RNA, 22 nt, Human
aaguucaaguaguguuacaugg

SEQ ID NO: 319727 - RNA, 22 nt, Human
uucauucccaagaguaaacaua

SEQ ID NO: 319728 - RNA, 22 nt, Human
aggcugcagaacagucaggugc

SEQ ID NO: 319729 - RNA, 22 nt, Human
uuugcauuguaauauuuaguuc

SEQ ID NO: 319730 - RNA, 17 nt, Human
ucugggcuucagugguc

SEQ ID NO: 319731 - RNA, 22 nt, Human
gcagagugauggaaugugggug

SEQ ID NO: 319732 - RNA, 22 nt, Human
accagcagaguugaggaggaca

SEQ ID NO: 319733 - RNA, 22 nt, Human
caaauucacaugauugcuucug

SEQ ID NO: 319734 - RNA, 20 nt, Human
auacaaagagauugauguau

SEQ ID NO: 319735 - RNA, 22 nt, Human
uuaugacaggaaaaucacagaa

SEQ ID NO: 319736 - RNA, 22 nt, Human
guagaagugaugucauguuaua

SEQ ID NO: 319737 - RNA, 22 nt, Human
cugacccuugcucgggcccugu

SEQ ID NO: 319738 - RNA, 22 nt, Human
ucagauggcacacagagccugc

SEQ ID NO: 319739 - RNA, 22 nt, Human
aggaguggaauuacuggguucu

SEQ ID NO: 319740 - RNA, 22 nt, Human
acuuccugcagcuucucagccc

SEQ ID NO: 319741 - RNA, 22 nt, Human
ugucuuuggaauauuuagcuga

SEQ ID NO: 319742 - RNA, 22 nt, Human
ggccugagucccaccuggcugu

SEQ ID NO: 319743 - RNA, 22 nt, Human
uccucagggggccaacccagcc

SEQ ID NO: 319744 - RNA, 22 nt, Human
ccacugucuuuuccaggcugaa

SEQ ID NO: 319745 - RNA, 22 nt, Human
uuauccaagcagaagcugcaca

SEQ ID NO: 319746 - RNA, 22 nt, Human
auacagaaaaugaugcagaguu

SEQ ID NO: 319747 - RNA, 17 nt, Human
cccagagaugcugccuu

SEQ ID NO: 319748 - RNA, 22 nt, Human
uuuacacaaaagauagcacacc

SEQ ID NO: 319749 - RNA, 22 nt, Human
aaugagacacgugaagcagaug

SEQ ID NO: 319750 - RNA, 22 nt, Human
aaagaacaaaugauauaugguu

SEQ ID NO: 319751 - RNA, 22 nt, Human
caugagaagggguggaguuaga

SEQ ID NO: 319752 - RNA, 23 nt, Human
gaauaguuuuagaaauuggagaa

SEQ ID NO: 319753 - RNA, 22 nt, Human
ggguguccugugccaagcuggg

SEQ ID NO: 319754 - RNA, 22 nt, Human
uuuguuuagaugguaaaucagu

SEQ ID NO: 319755 - RNA, 23 nt, Human
cuggcucuguagguggcauccuu

SEQ ID NO: 319756 - RNA, 22 nt, Human
uccucugcuccaggcuggacuu

SEQ ID NO: 319757 - RNA, 22 nt, Human
uccugucugcucacagagcugg

SEQ ID NO: 319758 - RNA, 22 nt, Human
gcagagccaugggagguuuuug

SEQ ID NO: 319759 - RNA, 22 nt, Human
gagcccaggcagagguugcagu

SEQ ID NO: 319760 - RNA, 22 nt, Human
ucagaaauuuucucaguaguuc

SEQ ID NO: 319761 - RNA, 22 nt, Human
gcccaugcacuuucugugaugg

SEQ ID NO: 319762 - RNA, 22 nt, Human
cugagccauaagggaggcuggg

SEQ ID NO: 319763 - RNA, 22 nt, Human
aaguuaugaaauuuggacagcu

SEQ ID NO: 319764 - RNA, 22 nt, Human
ccagcuccucuucccaguguca

SEQ ID NO: 319765 - RNA, 22 nt, Human
ucaaggcuaaacuuucagagua

SEQ ID NO: 319766 - RNA, 20 nt, Human
cccucugcacauggcugugg

SEQ ID NO: 319767 - RNA, 22 nt, Human
caggaugagguagaggcagaua

SEQ ID NO: 319768 - RNA, 22 nt, Human
ucucagggagggcgagucagcg

SEQ ID NO: 319769 - RNA, 22 nt, Human
ccagucugugugccagccugcg

SEQ ID NO: 319770 - RNA, 22 nt, Human
gcugccugauguccagcaggac

SEQ ID NO: 319771 - RNA, 22 nt, Human
cugggccagcaacugcaaugga

SEQ ID NO: 319772 - RNA, 22 nt, Human
ggccucucucccuggcuugcag

SEQ ID NO: 319773 - RNA, 22 nt, Human
agaggcuccaccuucucugucc

SEQ ID NO: 319774 - RNA, 20 nt, Human
gcugggggugugcugaguga

SEQ ID NO: 319775 - RNA, 22 nt, Human
cugggagucaccaggagcaagg

SEQ ID NO: 319776 - RNA, 21 nt, Human
cccagggaagccgcagucacc

SEQ ID NO: 319777 - RNA, 22 nt, Human
cucugauuuccuuauucuguca

SEQ ID NO: 319778 - RNA, 22 nt, Human
agugacugacaccuguaauccc

SEQ ID NO: 319779 - RNA, 18 nt, Human
uggcucagauggcuuuaa

SEQ ID NO: 319780 - RNA, 22 nt, Human
ugaagacagaccaaggagaaug

SEQ ID NO: 319781 - RNA, 20 nt, Human
gcuuccuucccagcccccac

SEQ ID NO: 319782 - RNA, 22 nt, Human
uaaggcacuucaauguuuagaa

SEQ ID NO: 319783 - RNA, 22 nt, Human
augaguucaauuguuucaguca

SEQ ID NO: 319784 - RNA, 22 nt, Human
uggcugcuagccagagcuucag

SEQ ID NO: 319785 - RNA, 22 nt, Human
agucccagacuccaguuuucug

SEQ ID NO: 319786 - RNA, 18 nt, Human
gagcccugagucugcaca

SEQ ID NO: 319787 - RNA, 20 nt, Human
ccuguucacugcgcaguuuc

SEQ ID NO: 319788 - RNA, 22 nt, Human
uuaaacagguuuuugaauggcc

SEQ ID NO: 319789 - RNA, 22 nt, Human
uggugcugacaguucugagugc

SEQ ID NO: 319790 - RNA, 22 nt, Human
uaguuaaaauaauggagauguu

SEQ ID NO: 319791 - RNA, 22 nt, Human
ucucagggugaggaaagaauuu

SEQ ID NO: 319792 - RNA, 22 nt, Human
acaaaaauuagcugggcauggu

SEQ ID NO: 319793 - RNA, 22 nt, Human
cccagcuaccucugcuaggaga

SEQ ID NO: 319794 - RNA, 22 nt, Human
ggcugagcucaggggcagcagg

SEQ ID NO: 319795 - RNA, 22 nt, Human
ccagcugagaaguguaaaguga

SEQ ID NO: 319796 - RNA, 19 nt, Human
uuucaggagcuaugcaggg

SEQ ID NO: 319797 - RNA, 22 nt, Human
gagcacagaaucuucccaugca

SEQ ID NO: 319798 - RNA, 22 nt, Human
gcuccugucuuggggcacuggc

SEQ ID NO: 319799 - RNA, 23 nt, Human
gcauugucuccccacuucugggc

SEQ ID NO: 319800 - RNA, 22 nt, Human
gccucugcaauuacauugugcc

SEQ ID NO: 319801 - RNA, 19 nt, Human
ggcccaaguacugagugcc

SEQ ID NO: 319802 - RNA, 22 nt, Human
gcuggugagcaaaggagaagga

SEQ ID NO: 319803 - RNA, 22 nt, Human
gugcagugaaaaaagaaugucc

SEQ ID NO: 319804 - RNA, 22 nt, Human
gugcauccacuagggcucuccc

SEQ ID NO: 319805 - RNA, 22 nt, Human
uggccuuggcagugagaagagu

SEQ ID NO: 319806 - RNA, 22 nt, Human
uuucauaugggcauuggcaaua

SEQ ID NO: 319807 - RNA, 22 nt, Human
aaaaguucccugguuagaaaag

SEQ ID NO: 319808 - RNA, 18 nt, Human
gaaaugugauucuagggc

SEQ ID NO: 319809 - RNA, 22 nt, Human
ugcuagaauuagguuaaacaaa

SEQ ID NO: 319810 - RNA, 22 nt, Human
guucacaucacuucacugaacc

SEQ ID NO: 319811 - RNA, 18 nt, Human
auguacauuugcuaaagc

SEQ ID NO: 319812 - RNA, 22 nt, Human
ccugccugucccucaguccaca

SEQ ID NO: 319813 - RNA, 22 nt, Human
ggccaggagcaagccaggcucu

SEQ ID NO: 319814 - RNA, 22 nt, Human
uuuccucugacugcuccccugc

SEQ ID NO: 319815 - RNA, 22 nt, Human
cuaauguaucauggcucucagc

SEQ ID NO: 319816 - RNA, 22 nt, Human
gagcaggcauucuaguggcuga

SEQ ID NO: 319817 - RNA, 22 nt, Human
guguaauugaaauugagaacca

SEQ ID NO: 319818 - RNA, 22 nt, Human
uuggaauucaaguuguagcuua

SEQ ID NO: 319819 - RNA, 22 nt, Human
ccuuccuugagaagcaauuccu

SEQ ID NO: 319820 - RNA, 22 nt, Human
ucuguggccuguguccaagugc

SEQ ID NO: 319821 - RNA, 22 nt, Human
guccugggaacuggacagcuaa

SEQ ID NO: 319822 - RNA, 22 nt, Human
gccugccuucggugcgcagcgg

SEQ ID NO: 319823 - RNA, 22 nt, Human
ccagaggaaaaauaucucccua

SEQ ID NO: 319824 - RNA, 21 nt, Human
uaaagaagaugaaugugauca

SEQ ID NO: 319825 - RNA, 22 nt, Human
ucugggagagcugcugucagag

SEQ ID NO: 319826 - RNA, 22 nt, Human
uuggcauugaaguuucauuggu

SEQ ID NO: 319827 - RNA, 18 nt, Human
cagggccccagaauuauc

SEQ ID NO: 319828 - RNA, 20 nt, Human
ugcuguaagauuagagagcu

SEQ ID NO: 319829 - RNA, 22 nt, Human
ggcagcucugcuccacaugagu

SEQ ID NO: 319830 - RNA, 22 nt, Human
agcaggguuccaggaguugcag

SEQ ID NO: 319831 - RNA, 21 nt, Human
uucuucaaagaagaaggcaca

SEQ ID NO: 319832 - RNA, 22 nt, Human
gccugagcuacuagggagucug

SEQ ID NO: 319833 - RNA, 22 nt, Human
ucacugggagaugugggaaggg

SEQ ID NO: 319834 - RNA, 22 nt, Human
cagcccugcugacacugucuga

SEQ ID NO: 319835 - RNA, 20 nt, Human
gagccugggaagucuaaggu

SEQ ID NO: 319836 - RNA, 22 nt, Human
ugcuguguggaugugaagaauc

SEQ ID NO: 319837 - RNA, 22 nt, Human
gggcacagagggucuugaagaa

SEQ ID NO: 319838 - RNA, 22 nt, Human
ucuuucucucuaaucaagcaca

SEQ ID NO: 319839 - RNA, 22 nt, Human
gauuucaaggauguuagaggug

SEQ ID NO: 319840 - RNA, 22 nt, Human
ucaguguuuuuaaagcaauaua

SEQ ID NO: 319841 - RNA, 22 nt, Human
cucccuggcacagcgagagguu

SEQ ID NO: 319842 - RNA, 22 nt, Human
agucucugcaugccugcugugc

SEQ ID NO: 319843 - RNA, 22 nt, Human
gcugccuggcuuuaguccacuu

SEQ ID NO: 319844 - RNA, 22 nt, Human
gcuggccugucuagagccuuac

SEQ ID NO: 319845 - RNA, 22 nt, Human
gagcugaguuaccuccagauca

SEQ ID NO: 319846 - RNA, 22 nt, Human
ugugugcagccucugucuuugg

SEQ ID NO: 319847 - RNA, 22 nt, Human
guacaugucaaaaaaugcauaa

SEQ ID NO: 319848 - RNA, 20 nt, Human
aaggcacuaugucugcuagc

SEQ ID NO: 319849 - RNA, 22 nt, Human
gccagagcugagacacgagucc

SEQ ID NO: 319850 - RNA, 22 nt, Human
guccucuguguaggcugcagac

SEQ ID NO: 319851 - RNA, 22 nt, Human
uccagggaagagcagaggcuac

SEQ ID NO: 319852 - RNA, 22 nt, Human
gcagagcauguccucaggacag

SEQ ID NO: 319853 - RNA, 22 nt, Human
agcagcugaucaaagcacuuau

SEQ ID NO: 319854 - RNA, 22 nt, Human
uaaaugcaguacaaauuguucu

SEQ ID NO: 319855 - RNA, 22 nt, Human
gagacauggcaaaagcacuggu

SEQ ID NO: 319856 - RNA, 22 nt, Human
gcagacagcauguugggcuauu

SEQ ID NO: 319857 - RNA, 22 nt, Human
uccucuucugcccaucagaggc

SEQ ID NO: 319858 - RNA, 18 nt, Human
ucugggcuucccgaggcu

SEQ ID NO: 319859 - RNA, 22 nt, Human
gggcucugguacuuccuggcuc

SEQ ID NO: 319860 - RNA, 22 nt, Human
agggccugcucuaucacucuca

SEQ ID NO: 319861 - RNA, 22 nt, Human
cugugccuaagaugcaugucuc

SEQ ID NO: 319862 - RNA, 22 nt, Human
agcuggugcugaagcucuugag

SEQ ID NO: 319863 - RNA, 22 nt, Human
auugaagauuaaaugcuuccuu

SEQ ID NO: 319864 - RNA, 22 nt, Human
uccuggaguugugcagugcaca

SEQ ID NO: 319865 - RNA, 22 nt, Human
gugcagggcuggcaccggaggc

SEQ ID NO: 319866 - RNA, 22 nt, Human
ccacaaguuucagcacccagag

SEQ ID NO: 319867 - RNA, 22 nt, Human
auguucuuucagccagugcauc

SEQ ID NO: 319868 - RNA, 22 nt, Human
agcagagcuauucuugugcaau

SEQ ID NO: 319869 - RNA, 22 nt, Human
uagucuuuugagaaguauaucu

SEQ ID NO: 319870 - RNA, 22 nt, Human
agaugaaagauuuuuauagaga

SEQ ID NO: 319871 - RNA, 19 nt, Human
ucauaaggagagaggaaau

SEQ ID NO: 319872 - RNA, 22 nt, Human
gucagaggaauggaugagugau

SEQ ID NO: 319873 - RNA, 22 nt, Human
ugaagcaggcauugacugauga

SEQ ID NO: 319874 - RNA, 20 nt, Human
cuucuucagccuaugcuuca

SEQ ID NO: 319875 - RNA, 22 nt, Human
ucaaugauagacaagaucuaag

SEQ ID NO: 319876 - RNA, 22 nt, Human
acacauuucucuuuuuguaagu

SEQ ID NO: 319877 - RNA, 18 nt, Human
ugagaggcagguagagga

SEQ ID NO: 319878 - RNA, 22 nt, Human
acagagcuuaauucaggagcuu

SEQ ID NO: 319879 - RNA, 22 nt, Human
guuugcauaaaguggaugcagg

SEQ ID NO: 319880 - RNA, 22 nt, Human
cucuggaguggguggccgggag

SEQ ID NO: 319881 - RNA, 22 nt, Human
ggccauggaccccgagcugacc

SEQ ID NO: 319882 - RNA, 22 nt, Human
aguacauuuauuaaugguaaaa

SEQ ID NO: 319883 - RNA, 22 nt, Human
gguggccuuucaguggaucagg

SEQ ID NO: 319884 - RNA, 22 nt, Human
ucucaagcuuguugguauguuu

SEQ ID NO: 319885 - RNA, 22 nt, Human
gcugucacacaugggaucucag

SEQ ID NO: 319886 - RNA, 22 nt, Human
uacuuuuagccuauuugauucu

SEQ ID NO: 319887 - RNA, 22 nt, Human
gugcauugcgaugcagacgacc

SEQ ID NO: 319888 - RNA, 22 nt, Human
acagagcacugcccugugccgc

SEQ ID NO: 319889 - RNA, 22 nt, Human
ggcaccagggacaauccucuuc

SEQ ID NO: 319890 - RNA, 22 nt, Human
guggccugccagcagauggcgc

SEQ ID NO: 319891 - RNA, 22 nt, Human
gcugugugcucacguaguggaa

SEQ ID NO: 319892 - RNA, 22 nt, Human
uuucucaucuggaaacagugcu

SEQ ID NO: 319893 - RNA, 23 nt, Human
acagaaaguucugcuggacagag

SEQ ID NO: 319894 - RNA, 22 nt, Human
aucauuccacauguaccacuag

SEQ ID NO: 319895 - RNA, 22 nt, Human
auggaaaggcuguggaaacuua

SEQ ID NO: 319896 - RNA, 22 nt, Human
ucaaugauaucagcaggaugug

SEQ ID NO: 319897 - RNA, 22 nt, Human
acagaguaucuaucaggaguau

SEQ ID NO: 319898 - RNA, 22 nt, Human
cacucuccagcacaccccauuu

SEQ ID NO: 319899 - RNA, 22 nt, Human
caagggaguuacugagggcggg

SEQ ID NO: 319900 - RNA, 20 nt, Human
uaugcuuuuuauaagauuga

SEQ ID NO: 319901 - RNA, 19 nt, Human
gcccugcaggagguggggc

SEQ ID NO: 319902 - RNA, 22 nt, Human
caucacugacgcugagauucca

SEQ ID NO: 319903 - RNA, 22 nt, Human
aaaaugacauuccagugauauu

SEQ ID NO: 319904 - RNA, 22 nt, Human
uuagcaucugcuguaagcuuau

SEQ ID NO: 319905 - RNA, 22 nt, Human
uggcuucuugggaugggucauu

SEQ ID NO: 319906 - RNA, 22 nt, Human
auguaucaauuaucugucugca

SEQ ID NO: 319907 - RNA, 22 nt, Human
gaggccugaggcugccuggagc

SEQ ID NO: 319908 - RNA, 20 nt, Human
uggcccaguggggcagggug

SEQ ID NO: 319909 - RNA, 22 nt, Human
ggccuagggaguggccaugccu

SEQ ID NO: 319910 - RNA, 22 nt, Human
cuaaaugccuuuccuaccuaac

SEQ ID NO: 319911 - RNA, 22 nt, Human
aagcaccugcaguugacaaaaa

SEQ ID NO: 319912 - RNA, 22 nt, Human
cacuggggaaaacaggcuucuu

SEQ ID NO: 319913 - RNA, 22 nt, Human
ugaaguuguuaagguugccauu

SEQ ID NO: 319914 - RNA, 22 nt, Human
aauaucaacaguguccuucuaa

SEQ ID NO: 319915 - RNA, 21 nt, Human
ggcacugagccagauggacuc

SEQ ID NO: 319916 - RNA, 22 nt, Human
aaauuauaggugccaccuugga

SEQ ID NO: 319917 - RNA, 22 nt, Human
uugagggucuggaucugcugcu

SEQ ID NO: 319918 - RNA, 22 nt, Human
gaucauuugcaggaaacauuaa

SEQ ID NO: 319919 - RNA, 22 nt, Human
cauugcacuuuggguccaggac

SEQ ID NO: 319920 - RNA, 22 nt, Human
cagaggcuguguaggcagacug

SEQ ID NO: 319921 - RNA, 22 nt, Human
agccuguggaucccugcacugg

SEQ ID NO: 319922 - RNA, 22 nt, Human
agaagcugacagaugcagcagg

SEQ ID NO: 319923 - RNA, 22 nt, Human
uguguacauaucuauccuagau

SEQ ID NO: 319924 - RNA, 22 nt, Human
caggcagaagaaguggaaggac

SEQ ID NO: 319925 - RNA, 22 nt, Human
uccaggcugggcugaagggugc

SEQ ID NO: 319926 - RNA, 22 nt, Human
aggcuccuugcucacaggcuca

SEQ ID NO: 319927 - RNA, 22 nt, Human
auugaaagguuuugagcagaua

SEQ ID NO: 319928 - RNA, 22 nt, Human
cugccaggacugacgucuucag

SEQ ID NO: 319929 - RNA, 22 nt, Human
ugccagggcugcuacuggcuga

SEQ ID NO: 319930 - RNA, 22 nt, Human
ucuggcuccuggcuccacugcc

SEQ ID NO: 319931 - RNA, 22 nt, Human
uuaauuuuaaccuguuuguguc

SEQ ID NO: 319932 - RNA, 22 nt, Human
uucugucacuuuuuuggaaucu

SEQ ID NO: 319933 - RNA, 22 nt, Human
gguuugcaugugauguugggca

SEQ ID NO: 319934 - RNA, 22 nt, Human
auucacagggacaaugggagag

SEQ ID NO: 319935 - RNA, 22 nt, Human
ggcugcagcggauuggggauug

SEQ ID NO: 319936 - RNA, 20 nt, Human
ccugggguacacuggcaugu

SEQ ID NO: 319937 - RNA, 22 nt, Human
uguaugcagcaaaacaauuagu

SEQ ID NO: 319938 - RNA, 22 nt, Human
gccugcagugagugcagaaggu

SEQ ID NO: 319939 - RNA, 22 nt, Human
cuagaaauauuuuacagucaag

SEQ ID NO: 319940 - RNA, 22 nt, Human
cuacugaguccuucagcugcca

SEQ ID NO: 319941 - RNA, 22 nt, Human
uggcugaauaauauucuguugu

SEQ ID NO: 319942 - RNA, 22 nt, Human
ugcugccuccaacuccugggcu

SEQ ID NO: 319943 - RNA, 22 nt, Human
gcugucuguucgagcguguguu

SEQ ID NO: 319944 - RNA, 22 nt, Human
ugagaggcagaauggugccugc

SEQ ID NO: 319945 - RNA, 22 nt, Human
ucuuuccuacuuuauugugaac

SEQ ID NO: 319946 - RNA, 23 nt, Human
ccugggcauuggcugcagcuucu

SEQ ID NO: 319947 - RNA, 22 nt, Human
aagcagccacuggccaguuaua

SEQ ID NO: 319948 - RNA, 22 nt, Human
gagcagcugcagugcagacccu

SEQ ID NO: 319949 - RNA, 22 nt, Human
uccucaggaucuaggagugcuu

SEQ ID NO: 319950 - RNA, 20 nt, Human
gcugggcuaccacuggcccu

SEQ ID NO: 319951 - RNA, 22 nt, Human
auugaaaguccuaucuaaggga

SEQ ID NO: 319952 - RNA, 22 nt, Human
gcucucagaugcuccagcagcc

SEQ ID NO: 319953 - RNA, 22 nt, Human
uuauuauugugaccugagaaug

SEQ ID NO: 319954 - RNA, 22 nt, Human
guucuucaguaaaauuaaaugu

SEQ ID NO: 319955 - RNA, 22 nt, Human
uggcagcuguguccagguagaa

SEQ ID NO: 319956 - RNA, 22 nt, Human
gcaguguucuuguugcuuuuau

SEQ ID NO: 319957 - RNA, 22 nt, Human
gacucagugauuugacaugccu

SEQ ID NO: 319958 - RNA, 22 nt, Human
ugcucccagggacucuggcugg

SEQ ID NO: 319959 - RNA, 22 nt, Human
ucagcuggcaguucagaggcug

SEQ ID NO: 319960 - RNA, 22 nt, Human
uagugaaacaguuaucaaucug

SEQ ID NO: 319961 - RNA, 22 nt, Human
cagccaggcccccgagucguug

SEQ ID NO: 319962 - RNA, 22 nt, Human
gcugggcagccccuacagagag

SEQ ID NO: 319963 - RNA, 18 nt, Human
gaggauggaaggagaugc

SEQ ID NO: 319964 - RNA, 20 nt, Human
gggguuggcuggcacaggga

SEQ ID NO: 319965 - RNA, 22 nt, Human
auggaaagcuaagccauuuacc

SEQ ID NO: 319966 - RNA, 22 nt, Human
ucuccuucgaggcccagcuccc

SEQ ID NO: 319967 - RNA, 22 nt, Human
auacauguaacugcauuguaau

SEQ ID NO: 319968 - RNA, 22 nt, Human
uuccaagagcuuuaauuguuga

SEQ ID NO: 319969 - RNA, 22 nt, Human
cugggaggacaacuuggagcuc

SEQ ID NO: 319970 - RNA, 22 nt, Human
uuucauguuuauggaaaaugag

SEQ ID NO: 319971 - RNA, 22 nt, Human
cagagagagugggguguggauu

SEQ ID NO: 319972 - RNA, 22 nt, Human
ugcucuguugugcaugugggau

SEQ ID NO: 319973 - RNA, 21 nt, Human
aaagaacaggcagauguucuu

SEQ ID NO: 319974 - RNA, 22 nt, Human
ggguaauuggggccuugcagug

SEQ ID NO: 319975 - RNA, 22 nt, Human
aggagcugagucagcccgacag

SEQ ID NO: 319976 - RNA, 22 nt, Human
guccaugauucuguguaguaga

SEQ ID NO: 319977 - RNA, 22 nt, Human
acagccuguuugaucuggugcu

SEQ ID NO: 319978 - RNA, 22 nt, Human
auuuuuccaauuaggauaaaga

SEQ ID NO: 319979 - RNA, 22 nt, Human
cugggaguugacgaggcuugua

SEQ ID NO: 319980 - RNA, 22 nt, Human
agguacagaugaaagucuaguu

SEQ ID NO: 319981 - RNA, 22 nt, Human
uaacagaaauauuuccagguga

SEQ ID NO: 319982 - RNA, 22 nt, Human
cuacauuuugugauuaugaaau

SEQ ID NO: 319983 - RNA, 22 nt, Human
aauauucaaguuauucuuucuu

SEQ ID NO: 319984 - RNA, 22 nt, Human
uguauguguauguacauaugca

SEQ ID NO: 319985 - RNA, 22 nt, Human
ggcauggcuggguucuggugag

SEQ ID NO: 319986 - RNA, 22 nt, Human
ucuggcucggauuugucuagca

SEQ ID NO: 319987 - RNA, 22 nt, Human
acauuucucagguaagucauuu

SEQ ID NO: 319988 - RNA, 22 nt, Human
ccugcagguuucccccggacgg

SEQ ID NO: 319989 - RNA, 22 nt, Human
agaauucuguucuucgggugug

SEQ ID NO: 319990 - RNA, 22 nt, Human
ggaaagaccugagauaggaaua

SEQ ID NO: 319991 - RNA, 22 nt, Human
ucucagagaagugaugagcaau

SEQ ID NO: 319992 - RNA, 21 nt, Human
agucccaggggugagugaugu

SEQ ID NO: 319993 - RNA, 21 nt, Human
agaagggauugugguaaagau

SEQ ID NO: 319994 - RNA, 22 nt, Human
guuuagaacacggaaauacuga

SEQ ID NO: 319995 - RNA, 22 nt, Human
uccuuuccagccucaccucagc

SEQ ID NO: 319996 - RNA, 22 nt, Human
cugucucuguugccuguaggug

SEQ ID NO: 319997 - RNA, 22 nt, Human
uccaugagaacccuuggagaua

SEQ ID NO: 319998 - RNA, 22 nt, Human
gaagagcugcaguuuccugggc

SEQ ID NO: 319999 - RNA, 22 nt, Human
ucacuguugaccuggaaguggg

SEQ ID NO: 320000 - RNA, 22 nt, Human
gagggcaggggucuugcacggu

SEQ ID NO: 320001 - RNA, 22 nt, Human
ggcagaggaagcuggaaguggg

SEQ ID NO: 320002 - RNA, 22 nt, Human
uaaagguaugucuuaaucaaac

SEQ ID NO: 320003 - RNA, 22 nt, Human
uacuuagagcgauaauuuauac

SEQ ID NO: 320004 - RNA, 22 nt, Human
gggagccaugcuggucuucuuu

SEQ ID NO: 320005 - RNA, 22 nt, Human
guucauuuuacuguaaauagca

SEQ ID NO: 320006 - RNA, 22 nt, Human
agccagggauggcagugcccag

SEQ ID NO: 320007 - RNA, 22 nt, Human
acauacuuuuuaaaagauugcu

SEQ ID NO: 320008 - RNA, 22 nt, Human
cugggccuggcguuccaggcug

SEQ ID NO: 320009 - RNA, 22 nt, Human
uaaguucagaguucucauuugu

SEQ ID NO: 320010 - RNA, 22 nt, Human
gggcacuggaaggcucucaggc

SEQ ID NO: 320011 - RNA, 22 nt, Human
uaugcacaguuacaagaauauc

SEQ ID NO: 320012 - RNA, 22 nt, Human
gaaagauauuuauuggcaacag

SEQ ID NO: 320013 - RNA, 22 nt, Human
ugaaagguguccaauauuucuc

SEQ ID NO: 320014 - RNA, 22 nt, Human
agaggccuuucuguugagugaa

SEQ ID NO: 320015 - RNA, 22 nt, Human
cacugaaggcuaggauuagaug

SEQ ID NO: 320016 - RNA, 22 nt, Human
agcagcaacuuauuuuucuuau

SEQ ID NO: 320017 - RNA, 22 nt, Human
gucucagaguccuacuuauucc

SEQ ID NO: 320018 - RNA, 23 nt, Human
auuucuaggggauuuucuggugc

SEQ ID NO: 320019 - RNA, 22 nt, Human
aggucacauggauaaugaucag

SEQ ID NO: 320020 - RNA, 22 nt, Human
aaaguucuaaaacucuuuguga

SEQ ID NO: 320021 - RNA, 22 nt, Human
uagcagcugugaguaaaagcca

SEQ ID NO: 320022 - RNA, 22 nt, Human
ucugaaaugcaaauuugacuga

SEQ ID NO: 320023 - RNA, 22 nt, Human
cauuuucucaaugaacccucuu

SEQ ID NO: 320024 - RNA, 22 nt, Human
ugggcuggcguggagaguuuag

SEQ ID NO: 320025 - RNA, 22 nt, Human
ccugccuggcugucagcagagc

SEQ ID NO: 320026 - RNA, 22 nt, Human
gcucagugaaacaucaaauagu

SEQ ID NO: 320027 - RNA, 22 nt, Human
ucuucacagaugcauauacuuc

SEQ ID NO: 320028 - RNA, 22 nt, Human
cccaugagguggagguugcagu

SEQ ID NO: 320029 - RNA, 22 nt, Human
ggcucaggacugcagcguagag

SEQ ID NO: 320030 - RNA, 22 nt, Human
cucaggaggugguagaggcccu

SEQ ID NO: 320031 - RNA, 22 nt, Human
acagaaggcggggacaaggcgg

SEQ ID NO: 320032 - RNA, 22 nt, Human
aaaugcacucugcuucugugac

SEQ ID NO: 320033 - RNA, 22 nt, Human
cugggguggaggagcuccccug

SEQ ID NO: 320034 - RNA, 22 nt, Human
aaguucuaauuuugcauucagg

SEQ ID NO: 320035 - RNA, 22 nt, Human
uucaguaaaacacugcaauguc

SEQ ID NO: 320036 - RNA, 19 nt, Human
ucucagaggaaaaauugcu

SEQ ID NO: 320037 - RNA, 21 nt, Human
agagcugguagguagguaggu

SEQ ID NO: 320038 - RNA, 22 nt, Human
ucucagaguuccucuggagucc

SEQ ID NO: 320039 - RNA, 22 nt, Human
caagcccaggauuccccaguua

SEQ ID NO: 320040 - RNA, 22 nt, Human
auugacaaauggauguugacau

SEQ ID NO: 320041 - RNA, 22 nt, Human
uaugagaauaaucugguaaaua

SEQ ID NO: 320042 - RNA, 22 nt, Human
gcugccugcacagagcugcuuu

SEQ ID NO: 320043 - RNA, 22 nt, Human
gcugagggcuguaacagcagag

SEQ ID NO: 320044 - RNA, 22 nt, Human
cucccagagagcaggugggccg

SEQ ID NO: 320045 - RNA, 22 nt, Human
aagccgggccugagaaaugaca

SEQ ID NO: 320046 - RNA, 22 nt, Human
uccugaggcacaauccuagaau

SEQ ID NO: 320047 - RNA, 22 nt, Human
gaaagggagugaagaugguaua

SEQ ID NO: 320048 - RNA, 22 nt, Human
aagagcuggcccaaucugagca

SEQ ID NO: 320049 - RNA, 22 nt, Human
agagcuggauggucaagauggc

SEQ ID NO: 320050 - RNA, 22 nt, Human
ucugccuugagguccucagcuc

SEQ ID NO: 320051 - RNA, 22 nt, Human
uccucugcuguucugguucuuu

SEQ ID NO: 320052 - RNA, 22 nt, Human
ggucaugcugugaaucagugcu

SEQ ID NO: 320053 - RNA, 21 nt, Human
cugcuuuacuucagaggaucu

SEQ ID NO: 320054 - RNA, 22 nt, Human
ugcaguggaggccgugagacag

SEQ ID NO: 320055 - RNA, 22 nt, Human
agcacaugcacagugcuacacu

SEQ ID NO: 320056 - RNA, 22 nt, Human
cagaggccaccuguggccacug

SEQ ID NO: 320057 - RNA, 22 nt, Human
cagcucuguugcccuggaaacg

SEQ ID NO: 320058 - RNA, 22 nt, Human
ggcagauggaagaggcuggguc

SEQ ID NO: 320059 - RNA, 22 nt, Human
ucugccugcggcugcagguggc

SEQ ID NO: 320060 - RNA, 22 nt, Human
gaacuguaguuaauacuacaca

SEQ ID NO: 320061 - RNA, 22 nt, Human
aauacuauguugugacacauga

SEQ ID NO: 320062 - RNA, 23 nt, Human
gugcaugugucuuuacaguagca

SEQ ID NO: 320063 - RNA, 22 nt, Human
aggccagcuuccagaggggcag

SEQ ID NO: 320064 - RNA, 19 nt, Human
gcaggguguugacuguccc

SEQ ID NO: 320065 - RNA, 22 nt, Human
ccagaggucuccugcacgggau

SEQ ID NO: 320066 - RNA, 23 nt, Human
gccucugcagccuaguuaguguc

SEQ ID NO: 320067 - RNA, 22 nt, Human
acuuaguauuuuucagcuuuga

SEQ ID NO: 320068 - RNA, 22 nt, Human
acuuugaaacuaaaauucauua

SEQ ID NO: 320069 - RNA, 22 nt, Human
caggccucccggugcacacuga

SEQ ID NO: 320070 - RNA, 22 nt, Human
ugaggugaccgcagaugggaag

SEQ ID NO: 320071 - RNA, 20 nt, Human
augcuuucuugugugcugcu

SEQ ID NO: 320072 - RNA, 22 nt, Human
ugaaagcuguccacuaggcugu

SEQ ID NO: 320073 - RNA, 22 nt, Human
uggcaguguauagguggcuccu

SEQ ID NO: 320074 - RNA, 19 nt, Human
ucccagagucuagagguug

SEQ ID NO: 320075 - RNA, 22 nt, Human
gcucacuggccugaagaggacg

SEQ ID NO: 320076 - RNA, 22 nt, Human
agccuggccugggcaggcacau

SEQ ID NO: 320077 - RNA, 22 nt, Human
cucucuguuaugcuuucaugaa

SEQ ID NO: 320078 - RNA, 22 nt, Human
uaaaugugggggccacgggcuu

SEQ ID NO: 320079 - RNA, 22 nt, Human
agcugccauccuguucagcacc

SEQ ID NO: 320080 - RNA, 22 nt, Human
uuaaaugaggcugauguagauu

SEQ ID NO: 320081 - RNA, 22 nt, Human
uauuucugaauccaaaagguca

SEQ ID NO: 320082 - RNA, 22 nt, Human
cuccucuggcuuccuggaggca

SEQ ID NO: 320083 - RNA, 22 nt, Human
uucuggagcuaaaguccacucu

SEQ ID NO: 320084 - RNA, 20 nt, Human
ccacaggaguccagucgacc

SEQ ID NO: 320085 - RNA, 22 nt, Human
uccagccaacugccuagggagc

SEQ ID NO: 320086 - RNA, 22 nt, Human
aaggcugaguaaaacagagaac

SEQ ID NO: 320087 - RNA, 22 nt, Human
gaguguucccacaccccaguug

SEQ ID NO: 320088 - RNA, 22 nt, Human
agcugccagcaaguuucaaaca

SEQ ID NO: 320089 - RNA, 23 nt, Human
aucaaaguggaaaucaauuaucu

SEQ ID NO: 320090 - RNA, 22 nt, Human
caggccugcaggaaaggcuccc

SEQ ID NO: 320091 - RNA, 22 nt, Human
ucucuggaauuuugagagugac

SEQ ID NO: 320092 - RNA, 22 nt, Human
gucucaguuacucucccuggua

SEQ ID NO: 320093 - RNA, 22 nt, Human
cugggcucuaagggagcaccgu

SEQ ID NO: 320094 - RNA, 22 nt, Human
gaaaugcagauucugauucugu

SEQ ID NO: 320095 - RNA, 22 nt, Human
cuugaauccaaaugggagauga

SEQ ID NO: 320096 - RNA, 22 nt, Human
ugcucugugguccaagauggcu

SEQ ID NO: 320097 - RNA, 22 nt, Human
aaagagcuucauuuccauuuau

SEQ ID NO: 320098 - RNA, 22 nt, Human
ugcagcuguuacggacccuguc

SEQ ID NO: 320099 - RNA, 22 nt, Human
agggaguguaaauggugcucag

SEQ ID NO: 320100 - RNA, 22 nt, Human
cugcuguguuggcauuggauag

SEQ ID NO: 320101 - RNA, 22 nt, Human
ggaggggccggcugccugccac

SEQ ID NO: 320102 - RNA, 22 nt, Human
cugcucuguuaauuaaacuuug

SEQ ID NO: 320103 - RNA, 22 nt, Human
uucugucagaagcuagcuccug

SEQ ID NO: 320104 - RNA, 22 nt, Human
gcaaggcagcgcggaguagcua

SEQ ID NO: 320105 - RNA, 20 nt, Human
agcagcuguguuuucauccu

SEQ ID NO: 320106 - RNA, 18 nt, Human
gcuccuggaccaggucac

SEQ ID NO: 320107 - RNA, 20 nt, Human
cugagcccccagccugcagg

SEQ ID NO: 320108 - RNA, 22 nt, Human
agggccuggaacuggagaccac

SEQ ID NO: 320109 - RNA, 22 nt, Human
aggcuucuuagauuggcuggag

SEQ ID NO: 320110 - RNA, 20 nt, Human
aggaggcaauguagauaagc

SEQ ID NO: 320111 - RNA, 22 nt, Human
ucuuuccuaggugauaugcaau

SEQ ID NO: 320112 - RNA, 23 nt, Human
uugcuuucaucaugagaugcucc

SEQ ID NO: 320113 - RNA, 22 nt, Human
ucuucacauggaacaugaagcu

SEQ ID NO: 320114 - RNA, 22 nt, Human
gaauuguagagggaacagaagc

SEQ ID NO: 320115 - RNA, 22 nt, Human
uccuugaagagugggcggucga

SEQ ID NO: 320116 - RNA, 22 nt, Human
cuggagccuagguugaccuggg

SEQ ID NO: 320117 - RNA, 22 nt, Human
cagagccugccaccuuucuccc

SEQ ID NO: 320118 - RNA, 22 nt, Human
guucuucaggccauccucccag

SEQ ID NO: 320119 - RNA, 22 nt, Human
ucauugcaguugaguuguguua

SEQ ID NO: 320120 - RNA, 22 nt, Human
ggcugcaggcagaggcugucug

SEQ ID NO: 320121 - RNA, 22 nt, Human
ggaggggagucucccaaagccg

SEQ ID NO: 320122 - RNA, 22 nt, Human
auguacaguggaaacuaacaaa

SEQ ID NO: 320123 - RNA, 21 nt, Human
gcugcaucaaucuacccaggg

SEQ ID NO: 320124 - RNA, 22 nt, Human
gacagccucaugaggagcaaaa

SEQ ID NO: 320125 - RNA, 22 nt, Human
gaaguacaguuuuaucuagcca

SEQ ID NO: 320126 - RNA, 22 nt, Human
agaugggcgcccuggacugagg

SEQ ID NO: 320127 - RNA, 22 nt, Human
uguuagaaguuaaucacuaauu

SEQ ID NO: 320128 - RNA, 22 nt, Human
uguguguauaugcauuuaucua

SEQ ID NO: 320129 - RNA, 22 nt, Human
gcuccagaugaaaggccagagg

SEQ ID NO: 320130 - RNA, 23 nt, Human
uugauuucaaaugcagagaacac

SEQ ID NO: 320131 - RNA, 22 nt, Human
ggacccugggcuugcuccuggg

SEQ ID NO: 320132 - RNA, 22 nt, Human
aauugcuaaagauuauguuuuc

SEQ ID NO: 320133 - RNA, 22 nt, Human
ccugucugcagauaucucaggu

SEQ ID NO: 320134 - RNA, 17 nt, Human
ucauuuguugugacuag

SEQ ID NO: 320135 - RNA, 18 nt, Human
uggcagccagcugcuccu

SEQ ID NO: 320136 - RNA, 20 nt, Human
ugcagggcugccucccagcu

SEQ ID NO: 320137 - RNA, 22 nt, Human
cucauggagggagugcucuucc

SEQ ID NO: 320138 - RNA, 22 nt, Human
uuucaguguaucuuccaaaagc

SEQ ID NO: 320139 - RNA, 22 nt, Human
caguggcagagaacagagaccu

SEQ ID NO: 320140 - RNA, 22 nt, Human
uaguuauuauuguuacuaucag

SEQ ID NO: 320141 - RNA, 22 nt, Human
ucacaggguuuggaagccuccu

SEQ ID NO: 320142 - RNA, 22 nt, Human
ggccucugcccucacuccuguc

SEQ ID NO: 320143 - RNA, 20 nt, Human
agugucuggugcagggccuc

SEQ ID NO: 320144 - RNA, 22 nt, Human
aaguucaaguguaaucuuuauu

SEQ ID NO: 320145 - RNA, 22 nt, Human
ucacauuuucauauucucugag

SEQ ID NO: 320146 - RNA, 22 nt, Human
aacauucuauuuugcuaaaaca

SEQ ID NO: 320147 - RNA, 22 nt, Human
uugugaaauguuucaaaauagu

SEQ ID NO: 320148 - RNA, 22 nt, Human
cccagaggugcuucagaggugc

SEQ ID NO: 320149 - RNA, 21 nt, Human
auugaaagucaacaaucaguu

SEQ ID NO: 320150 - RNA, 22 nt, Human
cagagaccccgcugcccuucug

SEQ ID NO: 320151 - RNA, 22 nt, Human
ccauggaguuccucuggucuau

SEQ ID NO: 320152 - RNA, 22 nt, Human
agugcuuuaccuagauaauguu

SEQ ID NO: 320153 - RNA, 22 nt, Human
agcugcugaaugacacugcaag

SEQ ID NO: 320154 - RNA, 22 nt, Human
ugcucuguaaggucagaaaagg

SEQ ID NO: 320155 - RNA, 22 nt, Human
agcucauggugcuaucucaggg

SEQ ID NO: 320156 - RNA, 22 nt, Human
ugcauauuuuauaaagauggaa

SEQ ID NO: 320157 - RNA, 22 nt, Human
agcagcaugaugacagagucuc

SEQ ID NO: 320158 - RNA, 22 nt, Human
uguaaaaccaaaucaaucuagu

SEQ ID NO: 320159 - RNA, 21 nt, Human
ucagggcagugggagguuccu

SEQ ID NO: 320160 - RNA, 22 nt, Human
ucucagagggaaacaugaguga

SEQ ID NO: 320161 - RNA, 22 nt, Human
gcugucugcugggucgcucagg

SEQ ID NO: 320162 - RNA, 22 nt, Human
aggguauaaagagcaagcagaa

SEQ ID NO: 320163 - RNA, 21 nt, Human
uauuucuuugacucucucccu

SEQ ID NO: 320164 - RNA, 22 nt, Human
ccagagccggcucccucagcuu

SEQ ID NO: 320165 - RNA, 22 nt, Human
gaaauuauugcuagagacugca

SEQ ID NO: 320166 - RNA, 22 nt, Human
uuugaacuucuccauucugaug

SEQ ID NO: 320167 - RNA, 19 nt, Human
cuugcugggugguuucugc

SEQ ID NO: 320168 - RNA, 22 nt, Human
guccucugacucagccuuggga

SEQ ID NO: 320169 - RNA, 22 nt, Human
aguguuucuggcaaaugaaagu

SEQ ID NO: 320170 - RNA, 22 nt, Human
ggcugccagugagugcagaccg

SEQ ID NO: 320171 - RNA, 22 nt, Human
gaguguuccagaaacuggcccu

SEQ ID NO: 320172 - RNA, 22 nt, Human
uggcagggugccaguugcgagu

SEQ ID NO: 320173 - RNA, 22 nt, Human
agccuggaguucccaggagaag

SEQ ID NO: 320174 - RNA, 22 nt, Human
gcucucuggaggccauggacag

SEQ ID NO: 320175 - RNA, 22 nt, Human
ccugucucccuggcauggcuca

SEQ ID NO: 320176 - RNA, 22 nt, Human
uccucaggcggugaggaggggc

SEQ ID NO: 320177 - RNA, 22 nt, Human
guguaugaacgaaagaauggau

SEQ ID NO: 320178 - RNA, 22 nt, Human
aaaguucaugguguuauagaaa

SEQ ID NO: 320179 - RNA, 22 nt, Human
ugggcccaagagagucuccaac

SEQ ID NO: 320180 - RNA, 18 nt, Human
ugucauugccagggaagc

SEQ ID NO: 320181 - RNA, 22 nt, Human
ugagaacugaggauuugaauuc

SEQ ID NO: 320182 - RNA, 22 nt, Human
cuguguccugcgucaagccaau

SEQ ID NO: 320183 - RNA, 22 nt, Human
auuucuguauccugcugucaga

SEQ ID NO: 320184 - RNA, 22 nt, Human
gagcaacaguuuaugguuuuuc

SEQ ID NO: 320185 - RNA, 22 nt, Human
aagcagccuggcaugaugcuuu

SEQ ID NO: 320186 - RNA, 22 nt, Human
agaggaggccaggcccacaccu

SEQ ID NO: 320187 - RNA, 22 nt, Human
gcacacagccagcugagggcua

SEQ ID NO: 320188 - RNA, 22 nt, Human
caagaugccccugguagggauc

SEQ ID NO: 320189 - RNA, 22 nt, Human
uaaaugugucuuuuuaaggccu

SEQ ID NO: 320190 - RNA, 22 nt, Human
uugacaauugggagauauaaag

SEQ ID NO: 320191 - RNA, 20 nt, Human
ccaguccaccugagacaugu

SEQ ID NO: 320192 - RNA, 22 nt, Human
ugggcagaaaucaguaucagau

SEQ ID NO: 320193 - RNA, 21 nt, Human
aucagcaaaugccugucuccc

SEQ ID NO: 320194 - RNA, 20 nt, Human
acauguacuaaugaauacag

SEQ ID NO: 320195 - RNA, 22 nt, Human
uccuggggcucugagcgagaca

SEQ ID NO: 320196 - RNA, 22 nt, Human
gaggucaggggagaggcugaug

SEQ ID NO: 320197 - RNA, 22 nt, Human
acagaguaggugcugucgacug

SEQ ID NO: 320198 - RNA, 22 nt, Human
aaagcuaugaggcaugcauuuc

SEQ ID NO: 320199 - RNA, 22 nt, Human
cagucccacuagugccaauacc

SEQ ID NO: 320200 - RNA, 22 nt, Human
cacagcuuguuuagugacucac

SEQ ID NO: 320201 - RNA, 22 nt, Human
cuguaugaguugggaauagaau

SEQ ID NO: 320202 - RNA, 22 nt, Human
gucccaggugggcuccaccucu

SEQ ID NO: 320203 - RNA, 22 nt, Human
acugaaggcuuucccaagguca

SEQ ID NO: 320204 - RNA, 21 nt, Human
cucuggaggcaagggagagug

SEQ ID NO: 320205 - RNA, 22 nt, Human
aagcgccaugguuccugcgcag

SEQ ID NO: 320206 - RNA, 22 nt, Human
ggucccagaauugguuagcaca

SEQ ID NO: 320207 - RNA, 22 nt, Human
ugaaaugaaacagaacauauca

SEQ ID NO: 320208 - RNA, 22 nt, Human
ggccagaggccacagcuguguc

SEQ ID NO: 320209 - RNA, 22 nt, Human
ccuccaaguuugacucaggaca

SEQ ID NO: 320210 - RNA, 22 nt, Human
gccccagccaaggugacacgaa

SEQ ID NO: 320211 - RNA, 22 nt, Human
guggagccaggggcuguaggua

SEQ ID NO: 320212 - RNA, 22 nt, Human
gagggucccugcucagggccag

SEQ ID NO: 320213 - RNA, 22 nt, Human
agugcuuucuugcuccaucagu

SEQ ID NO: 320214 - RNA, 22 nt, Human
gcccucugcuggccucaccucg

SEQ ID NO: 320215 - RNA, 22 nt, Human
cuggcuguauuaguuugauccu

SEQ ID NO: 320216 - RNA, 22 nt, Human
uugaaaguagcagcugcauaug

SEQ ID NO: 320217 - RNA, 23 nt, Human
uccaagggcuacaaacacagacc

SEQ ID NO: 320218 - RNA, 22 nt, Human
uuguuucauggggauguuuauu

SEQ ID NO: 320219 - RNA, 22 nt, Human
cuguucauggaaaaauaguugg

SEQ ID NO: 320220 - RNA, 22 nt, Human
gcaggagcuggaaagugauguu

SEQ ID NO: 320221 - RNA, 22 nt, Human
auucccaucgucaacuucacug

SEQ ID NO: 320222 - RNA, 22 nt, Human
auguaagguucagaguauguga

SEQ ID NO: 320223 - RNA, 22 nt, Human
gugggggcaggcagugcuagga

SEQ ID NO: 320224 - RNA, 22 nt, Human
cuggucugagggcucuugaggc

SEQ ID NO: 320225 - RNA, 22 nt, Human
uuccauuguuucugucuucacu

SEQ ID NO: 320226 - RNA, 22 nt, Human
uuuuccucuguauuugaaaugc

SEQ ID NO: 320227 - RNA, 22 nt, Human
ugggcuggcccaccacaccucg

SEQ ID NO: 320228 - RNA, 22 nt, Human
auagaaauguauuuuggacuag

SEQ ID NO: 320229 - RNA, 22 nt, Human
aggggagaguuaaugugaaugu

SEQ ID NO: 320230 - RNA, 22 nt, Human
cucuccuggggagcacacacac

SEQ ID NO: 320231 - RNA, 22 nt, Human
ucuccaagcagggcugcaaggc

SEQ ID NO: 320232 - RNA, 19 nt, Human
guuuuucccagacgaggca

SEQ ID NO: 320233 - RNA, 22 nt, Human
uaacauuagguagacauaagcc

SEQ ID NO: 320234 - RNA, 22 nt, Human
caaaguuuaaaguagauuucag

SEQ ID NO: 320235 - RNA, 22 nt, Human
ugaggccaaugacccugggcag

SEQ ID NO: 320236 - RNA, 22 nt, Human
ugaaaugagauaauuuaagugc

SEQ ID NO: 320237 - RNA, 22 nt, Human
cauggcaggugcagauucugug

SEQ ID NO: 320238 - RNA, 22 nt, Human
aguccaaggagagacagcauuu

SEQ ID NO: 320239 - RNA, 20 nt, Human
ugaagcagccuugauucugu

SEQ ID NO: 320240 - RNA, 22 nt, Human
aggacugggugcagagggcauc

SEQ ID NO: 320241 - RNA, 22 nt, Human
gccuggugaaaggcagagagcg

SEQ ID NO: 320242 - RNA, 22 nt, Human
uaaggcaccuguccaggcuggg

SEQ ID NO: 320243 - RNA, 22 nt, Human
cuuagaaaugcagauucucagg

SEQ ID NO: 320244 - RNA, 22 nt, Human
uucaguaugauuccuccaguag

SEQ ID NO: 320245 - RNA, 17 nt, Human
auuuccucagggcugag

SEQ ID NO: 320246 - RNA, 22 nt, Human
uuuuuaguagagguggguuuca

SEQ ID NO: 320247 - RNA, 22 nt, Human
cugccugugccaaugcuccuuu

SEQ ID NO: 320248 - RNA, 22 nt, Human
cuuccaaacccaggguaugggc

SEQ ID NO: 320249 - RNA, 22 nt, Human
acaggcagcgucauugcugcuc

SEQ ID NO: 320250 - RNA, 22 nt, Human
ugggcuguggagcaccuuugca

SEQ ID NO: 320251 - RNA, 21 nt, Human
ugcuuuaugggaaaaauguca

SEQ ID NO: 320252 - RNA, 22 nt, Human
gaaauauuucucuugagccccu

SEQ ID NO: 320253 - RNA, 22 nt, Human
uauaucaccaaaaacaguucug

SEQ ID NO: 320254 - RNA, 22 nt, Human
agacaucagcuugugugcaggg

SEQ ID NO: 320255 - RNA, 22 nt, Human
aagggagacaguugugugagga

SEQ ID NO: 320256 - RNA, 22 nt, Human
aguguuccuugcuuucccagag

SEQ ID NO: 320257 - RNA, 22 nt, Human
gcccucucuucugcagccucca

SEQ ID NO: 320258 - RNA, 23 nt, Human
agaggcaggaguggcuugcccgg

SEQ ID NO: 320259 - RNA, 22 nt, Human
gcugccacucugagcuugcuuc

SEQ ID NO: 320260 - RNA, 22 nt, Human
ucacacguccuugcuacuccuc

SEQ ID NO: 320261 - RNA, 22 nt, Human
cugcuuugacuguuaagaacca

SEQ ID NO: 320262 - RNA, 22 nt, Human
uaugcauauagaugcacacaca

SEQ ID NO: 320263 - RNA, 22 nt, Human
ucaguguuggcauucagaaaug

SEQ ID NO: 320264 - RNA, 22 nt, Human
cagccagagaaagggcacugcc

SEQ ID NO: 320265 - RNA, 22 nt, Human
uucaggaugcagagguuguagu

SEQ ID NO: 320266 - RNA, 22 nt, Human
ucacaggagggagagacaccca

SEQ ID NO: 320267 - RNA, 22 nt, Human
uuuccucuucgauuaaguuugg

SEQ ID NO: 320268 - RNA, 22 nt, Human
ccaaggagaaugacaccaugga

SEQ ID NO: 320269 - RNA, 22 nt, Human
ggcuucuuccugugaacauguu

SEQ ID NO: 320270 - RNA, 22 nt, Human
gagggcugcuggaaaaaugcag

SEQ ID NO: 320271 - RNA, 22 nt, Human
uuucaaagaguuguaaauuacu

SEQ ID NO: 320272 - RNA, 22 nt, Human
augagagacuguguguugggag

SEQ ID NO: 320273 - RNA, 22 nt, Human
ugcugucccccgugucugggcu

SEQ ID NO: 320274 - RNA, 22 nt, Human
uaaggccaaacuauuauaguuc

SEQ ID NO: 320275 - RNA, 22 nt, Human
cacauuuaauccuuuauaagua

SEQ ID NO: 320276 - RNA, 22 nt, Human
caaaagucuuccuauucucuua

SEQ ID NO: 320277 - RNA, 22 nt, Human
gaggggcucuugggcaugaagg

SEQ ID NO: 320278 - RNA, 22 nt, Human
uucuugcaggucacucacugag

SEQ ID NO: 320279 - RNA, 22 nt, Human
ucccagaguucaaugggaaggu

SEQ ID NO: 320280 - RNA, 22 nt, Human
uuucacaaguaaaguccuaagu

SEQ ID NO: 320281 - RNA, 19 nt, Human
ccaggccuccugggagguc

SEQ ID NO: 320282 - RNA, 22 nt, Human
uucaggaugacaccauguccag

SEQ ID NO: 320283 - RNA, 22 nt, Human
ccagggcacuuaggcccagccc

SEQ ID NO: 320284 - RNA, 19 nt, Human
cccagagcauccugaacuu

SEQ ID NO: 320285 - RNA, 22 nt, Human
uggcucugaccagguagaggag

SEQ ID NO: 320286 - RNA, 17 nt, Human
uuccuggaagucauucc

SEQ ID NO: 320287 - RNA, 22 nt, Human
aguuauuacucuuuaacauauu

SEQ ID NO: 320288 - RNA, 22 nt, Human
agcugccauggccugaauuuac

SEQ ID NO: 320289 - RNA, 22 nt, Human
ucaggcagcuccaggaauggua

SEQ ID NO: 320290 - RNA, 21 nt, Human
ugcagccauucagcccuaugc

SEQ ID NO: 320291 - RNA, 22 nt, Human
uucuuuaaaauagugagaaaga

SEQ ID NO: 320292 - RNA, 22 nt, Human
aaggcacuuuuccugagaugau

SEQ ID NO: 320293 - RNA, 22 nt, Human
auucuucauuguugauucaugu

SEQ ID NO: 320294 - RNA, 20 nt, Human
agagccuggaaaaagacauc

SEQ ID NO: 320295 - RNA, 21 nt, Human
gagacagacuuucguccccug

SEQ ID NO: 320296 - RNA, 22 nt, Human
guuccauaucacagcagacgaa

SEQ ID NO: 320297 - RNA, 22 nt, Human
uucucugaucuugcuagacuga

SEQ ID NO: 320298 - RNA, 22 nt, Human
agagccugcagcugugaagaaa

SEQ ID NO: 320299 - RNA, 22 nt, Human
uggcuuccacugugugcccccu

SEQ ID NO: 320300 - RNA, 23 nt, Human
gcagagcugcccuauugccuugg

SEQ ID NO: 320301 - RNA, 22 nt, Human
ucucagagauuuauggaaaacu

SEQ ID NO: 320302 - RNA, 22 nt, Human
uaauacuguauacugcaaauuu

SEQ ID NO: 320303 - RNA, 22 nt, Human
agggcugguauguccaugaaag

SEQ ID NO: 320304 - RNA, 22 nt, Human
uuuccucauuuaucugcuggga

SEQ ID NO: 320305 - RNA, 22 nt, Human
gaaguucucagcuaggugaugu

SEQ ID NO: 320306 - RNA, 22 nt, Human
gaaggaaaggucucaugccuuu

SEQ ID NO: 320307 - RNA, 22 nt, Human
cuaggaggcgggggcugcagua

SEQ ID NO: 320308 - RNA, 22 nt, Human
aguuaaagucugaaauagagaa

SEQ ID NO: 320309 - RNA, 22 nt, Human
ucacuuagauggggaucaucac

SEQ ID NO: 320310 - RNA, 22 nt, Human
ugaauaguccuuggaauaacug

SEQ ID NO: 320311 - RNA, 22 nt, Human
cucugggcaaguaugauagaaa

SEQ ID NO: 320312 - RNA, 20 nt, Human
aggcugggguguuuugccca

SEQ ID NO: 320313 - RNA, 22 nt, Human
agagaagggguaaagaguccug

SEQ ID NO: 320314 - RNA, 22 nt, Human
agcaggcuaagggaccuguuua

SEQ ID NO: 320315 - RNA, 22 nt, Human
ggcagcuccuccuagucugccc

SEQ ID NO: 320316 - RNA, 22 nt, Human
aagaggccucaccucacugccc

SEQ ID NO: 320317 - RNA, 19 nt, Human
agcaaauauaauaguguuc

SEQ ID NO: 320318 - RNA, 22 nt, Human
aaacuguaagagaauaaacuac

SEQ ID NO: 320319 - RNA, 22 nt, Human
ccugggaggcugugggucugcu

SEQ ID NO: 320320 - RNA, 22 nt, Human
gagaaacuuggaguuauucugg

SEQ ID NO: 320321 - RNA, 22 nt, Human
ucggagcuguagaugaaacccu

SEQ ID NO: 320322 - RNA, 22 nt, Human
cagucccaaggaggaagcaguc

SEQ ID NO: 320323 - RNA, 22 nt, Human
uuucacauacaguguauaguag

SEQ ID NO: 320324 - RNA, 19 nt, Human
cuggggcuuugguacugcc

SEQ ID NO: 320325 - RNA, 22 nt, Human
agggcagagacaugcuuccuga

SEQ ID NO: 320326 - RNA, 22 nt, Human
acacaaguucuaaagauugcgc

SEQ ID NO: 320327 - RNA, 22 nt, Human
uuagaacuuaagaauacugucu

SEQ ID NO: 320328 - RNA, 22 nt, Human
uaaaguucagugcaugaaugug

SEQ ID NO: 320329 - RNA, 22 nt, Human
aggcacugauucucagaguuac

SEQ ID NO: 320330 - RNA, 22 nt, Human
uugaaaggugaacaugaugcac

SEQ ID NO: 320331 - RNA, 22 nt, Human
agcagccagaaauccagaggug

SEQ ID NO: 320332 - RNA, 22 nt, Human
gagcugccugaacaagcagcag

SEQ ID NO: 320333 - RNA, 21 nt, Human
aacaaagggaugcucaucuuu

SEQ ID NO: 320334 - RNA, 18 nt, Human
uugcuuuguaagcuugca

SEQ ID NO: 320335 - RNA, 22 nt, Human
ucuggccauggcaagccgagug

SEQ ID NO: 320336 - RNA, 20 nt, Human
ucaggcaguggggaaaggca

SEQ ID NO: 320337 - RNA, 22 nt, Human
cagcccuggccccagguggucu

SEQ ID NO: 320338 - RNA, 22 nt, Human
gaaguuuauuucaaucuauuca

SEQ ID NO: 320339 - RNA, 22 nt, Human
auggcagccuguggacagucaa

SEQ ID NO: 320340 - RNA, 22 nt, Human
gaaucucauucuaacuaguagg

SEQ ID NO: 320341 - RNA, 22 nt, Human
agugcuuugugcucucacugca

SEQ ID NO: 320342 - RNA, 22 nt, Human
aggcagaaaauagucauccaaa

SEQ ID NO: 320343 - RNA, 22 nt, Human
ugauuucauaguauauacauga

SEQ ID NO: 320344 - RNA, 22 nt, Human
caguccugcuagugugaaaagc

SEQ ID NO: 320345 - RNA, 22 nt, Human
agaaaagguugaaaguaggauu

SEQ ID NO: 320346 - RNA, 22 nt, Human
guguacaugagaaaucaacuuu

SEQ ID NO: 320347 - RNA, 22 nt, Human
uggccacagccucugccaguuc

SEQ ID NO: 320348 - RNA, 22 nt, Human
uugcagggcaggaccauggaca

SEQ ID NO: 320349 - RNA, 22 nt, Human
cccagccuggugcacugugggg

SEQ ID NO: 320350 - RNA, 22 nt, Human
cagcugccaagaaucuuuucua

SEQ ID NO: 320351 - RNA, 22 nt, Human
gagcugggaguuauagcauguu

SEQ ID NO: 320352 - RNA, 22 nt, Human
ucugccuggguguggagcagag

SEQ ID NO: 320353 - RNA, 22 nt, Human
cugcccugagggccuguguguu

SEQ ID NO: 320354 - RNA, 23 nt, Human
cagaaaacccagagcucaguccc

SEQ ID NO: 320355 - RNA, 19 nt, Human
agcagcuggagguggagug

SEQ ID NO: 320356 - RNA, 22 nt, Human
auggggcucugcggcugcuccc

SEQ ID NO: 320357 - RNA, 22 nt, Human
ggagugacucacagcugggaca

SEQ ID NO: 320358 - RNA, 22 nt, Human
gccaggcagcaggaagccagug

SEQ ID NO: 320359 - RNA, 22 nt, Human
cagcucucuaaggucuugcuuu

SEQ ID NO: 320360 - RNA, 18 nt, Human
ucuuccaacacugacacc

SEQ ID NO: 320361 - RNA, 22 nt, Human
guuuuccuucucagccauugcc

SEQ ID NO: 320362 - RNA, 22 nt, Human
cucuggaauguuuacaugcccu

SEQ ID NO: 320363 - RNA, 22 nt, Human
uaaugugugucaucaguagagu

SEQ ID NO: 320364 - RNA, 22 nt, Human
ggccugugucugugccuguccu

SEQ ID NO: 320365 - RNA, 22 nt, Human
uacugcaugguggaguggagcu

SEQ ID NO: 320366 - RNA, 22 nt, Human
ggccucuggucaagacaagcau

SEQ ID NO: 320367 - RNA, 22 nt, Human
uguggcccagaugagugugcua

SEQ ID NO: 320368 - RNA, 22 nt, Human
ccugggcaacauagugagaccc

SEQ ID NO: 320369 - RNA, 22 nt, Human
cacaggaggaggugcccgggcc

SEQ ID NO: 320370 - RNA, 22 nt, Human
cagcccuggaacagcugacuca

SEQ ID NO: 320371 - RNA, 22 nt, Human
gcugugcuauaucucugagugu

SEQ ID NO: 320372 - RNA, 22 nt, Human
aucuuccuucacuuucucccac

SEQ ID NO: 320373 - RNA, 23 nt, Human
ugcucccaggugacgcugcuguu

SEQ ID NO: 320374 - RNA, 22 nt, Human
ggagcugggaacuauguaguau

SEQ ID NO: 320375 - RNA, 22 nt, Human
uuguaugagcuccaggaacuca

SEQ ID NO: 320376 - RNA, 22 nt, Human
cucacaggagaaagucaugguc

SEQ ID NO: 320377 - RNA, 22 nt, Human
ucauugcagcuucagguguuca

SEQ ID NO: 320378 - RNA, 22 nt, Human
auugaauagaugcauuauacua

SEQ ID NO: 320379 - RNA, 21 nt, Human
gagcugggcgaggcuccgggg

SEQ ID NO: 320380 - RNA, 16 nt, Human
gggagggaguuggugg

SEQ ID NO: 320381 - RNA, 22 nt, Human
acagaguauuggaaaggcagug

SEQ ID NO: 320382 - RNA, 22 nt, Human
auggggagagaagggcugagcu

SEQ ID NO: 320383 - RNA, 22 nt, Human
gaggcaggcacuguuaucagca

SEQ ID NO: 320384 - RNA, 22 nt, Human
caaaugaauauuuccauggguu

SEQ ID NO: 320385 - RNA, 22 nt, Human
agugagaguauuaaugugaacu

SEQ ID NO: 320386 - RNA, 22 nt, Human
gcccucagaggacagcugacuu

SEQ ID NO: 320387 - RNA, 22 nt, Human
agccucugcuggcccuggcacu

SEQ ID NO: 320388 - RNA, 22 nt, Human
ucagagagccucaggcacugcc

SEQ ID NO: 320389 - RNA, 20 nt, Human
ccuguggagcugccuccucc

SEQ ID NO: 320390 - RNA, 22 nt, Human
cugggcaguuuauucaguucug

SEQ ID NO: 320391 - RNA, 22 nt, Human
gcucaggaaacagcagggcuug

SEQ ID NO: 320392 - RNA, 22 nt, Human
ucaguucugcuagaaaaacagu

SEQ ID NO: 320393 - RNA, 22 nt, Human
ccaggccuucugaggacacucu

SEQ ID NO: 320394 - RNA, 22 nt, Human
uuuguguuuguacaaugcacua

SEQ ID NO: 320395 - RNA, 22 nt, Human
ucucuggagggcuccaggcggg

SEQ ID NO: 320396 - RNA, 22 nt, Human
gaggaagcagggcuuggcugag

SEQ ID NO: 320397 - RNA, 22 nt, Human
ugggauggagccugaguauagu

SEQ ID NO: 320398 - RNA, 22 nt, Human
uggggcuguggauucucacgaa

SEQ ID NO: 320399 - RNA, 22 nt, Human
cugcaggggcaguccacuuccu

SEQ ID NO: 320400 - RNA, 22 nt, Human
caggagcugggucuggaagcag

SEQ ID NO: 320401 - RNA, 22 nt, Human
agagugaaguuuuugaaaguga

SEQ ID NO: 320402 - RNA, 22 nt, Human
ucugccuggaugauggcagggc

SEQ ID NO: 320403 - RNA, 22 nt, Human
ugggcaagucacuucugucuuu

SEQ ID NO: 320404 - RNA, 22 nt, Human
agagaacacgugcaucugcaau

SEQ ID NO: 320405 - RNA, 22 nt, Human
ggcugcuguuucagagacuguu

SEQ ID NO: 320406 - RNA, 22 nt, Human
ucccugggccacagcugugagc

SEQ ID NO: 320407 - RNA, 22 nt, Human
caggcugcagcagcaguggccc

SEQ ID NO: 320408 - RNA, 22 nt, Human
aacuuuauuguuaggggcuaaa

SEQ ID NO: 320409 - RNA, 22 nt, Human
gaggagagggcugcgggcccac

SEQ ID NO: 320410 - RNA, 22 nt, Human
ucugggagacguguguugucag

SEQ ID NO: 320411 - RNA, 22 nt, Human
ucauuucccuccuacaaagagg

SEQ ID NO: 320412 - RNA, 22 nt, Human
aaacacagauuucuuuguccca

SEQ ID NO: 320413 - RNA, 22 nt, Human
gaggcagagugcaccccaggag

SEQ ID NO: 320414 - RNA, 22 nt, Human
caggggcuuaagugacagaagg

SEQ ID NO: 320415 - RNA, 22 nt, Human
uaugagcuuccaguguugcaug

SEQ ID NO: 320416 - RNA, 22 nt, Human
ugcugggcuagaagcugaggcc

SEQ ID NO: 320417 - RNA, 22 nt, Human
ugucaagucucugaaugaaaug

SEQ ID NO: 320418 - RNA, 19 nt, Human
agaggccucagcagcuggc

SEQ ID NO: 320419 - RNA, 16 nt, Human
ccaccugcagcucuca

SEQ ID NO: 320420 - RNA, 22 nt, Human
gccucugcggggcccgagcccg

SEQ ID NO: 320421 - RNA, 22 nt, Human
uagcugggucucuguuuucuca

SEQ ID NO: 320422 - RNA, 22 nt, Human
gugauuucagguuuuucauacu

SEQ ID NO: 320423 - RNA, 22 nt, Human
uuugaaaggaaguuaauacuuu

SEQ ID NO: 320424 - RNA, 20 nt, Human
ggcugaaaguagaaaguauu

SEQ ID NO: 320425 - RNA, 22 nt, Human
gagccucguggcggccacugcg

SEQ ID NO: 320426 - RNA, 22 nt, Human
uuucuguauuuaaaagaucugg

SEQ ID NO: 320427 - RNA, 22 nt, Human
uagaaauccccagucucauagu

SEQ ID NO: 320428 - RNA, 22 nt, Human
uccuucagaggacggcagccag

SEQ ID NO: 320429 - RNA, 22 nt, Human
cugggcuguaauguggcacuga

SEQ ID NO: 320430 - RNA, 20 nt, Human
aagagcauaguacaggaaga

SEQ ID NO: 320431 - RNA, 22 nt, Human
guucccauacaguaucagugcu

SEQ ID NO: 320432 - RNA, 22 nt, Human
uucuucaauuauuggaaagaaa

SEQ ID NO: 320433 - RNA, 22 nt, Human
cauuuguaauacugacuugcag

SEQ ID NO: 320434 - RNA, 22 nt, Human
ggcugccucugaugugcagacg

SEQ ID NO: 320435 - RNA, 22 nt, Human
ugaagcagcaccauuuuagagc

SEQ ID NO: 320436 - RNA, 22 nt, Human
gcugccuccugaaagcgcucug

SEQ ID NO: 320437 - RNA, 22 nt, Human
uagcagggguagauagagugug

SEQ ID NO: 320438 - RNA, 22 nt, Human
ucuuccucucuaauugaucaga

SEQ ID NO: 320439 - RNA, 22 nt, Human
cuguaucuguguuggaugaguu

SEQ ID NO: 320440 - RNA, 22 nt, Human
agcagggccaacaguaaacacc

SEQ ID NO: 320441 - RNA, 22 nt, Human
gugaggggaguaaagccauguu

SEQ ID NO: 320442 - RNA, 23 nt, Human
ucagucuucccugucaguaauag

SEQ ID NO: 320443 - RNA, 22 nt, Human
cuuccaaguugcucugcugacc

SEQ ID NO: 320444 - RNA, 22 nt, Human
ccuggcugaaccaaugaagugg

SEQ ID NO: 320445 - RNA, 22 nt, Human
uccuugaaugaauguucucucc

SEQ ID NO: 320446 - RNA, 22 nt, Human
cucccaagggguaagggagcug

SEQ ID NO: 320447 - RNA, 22 nt, Human
ggccccaggaccuccacggucc

SEQ ID NO: 320448 - RNA, 22 nt, Human
ucuaaagaagaggguucugcgg

SEQ ID NO: 320449 - RNA, 18 nt, Human
acauacauucugucugca

SEQ ID NO: 320450 - RNA, 20 nt, Human
ucagggcaugggacagcccc

SEQ ID NO: 320451 - RNA, 22 nt, Human
cauucauuagaauagauaugua

SEQ ID NO: 320452 - RNA, 21 nt, Human
aacauuucaggauccaaauug

SEQ ID NO: 320453 - RNA, 22 nt, Human
uuacaaagcguugagacaagua

SEQ ID NO: 320454 - RNA, 22 nt, Human
agcccuagagcuggaggucagu

SEQ ID NO: 320455 - RNA, 22 nt, Human
uacuuuggauccuuacaauagc

SEQ ID NO: 320456 - RNA, 22 nt, Human
auacuuucugaccaauuaauug

SEQ ID NO: 320457 - RNA, 21 nt, Human
uucucagagucuauuacaguu

SEQ ID NO: 320458 - RNA, 22 nt, Human
gcugucuuccuugcuccaaggg

SEQ ID NO: 320459 - RNA, 22 nt, Human
cagggcagugaagaacacacgu

SEQ ID NO: 320460 - RNA, 22 nt, Human
aaauaguuuagcucucauuuca

SEQ ID NO: 320461 - RNA, 22 nt, Human
caguuuuucaaaauuacaugau

SEQ ID NO: 320462 - RNA, 18 nt, Human
ccuggaccugucuccuuu

SEQ ID NO: 320463 - RNA, 19 nt, Human
uugguggugguuuugguuc

SEQ ID NO: 320464 - RNA, 22 nt, Human
cagacccucgggugaguuggcc

SEQ ID NO: 320465 - RNA, 22 nt, Human
cagaguguauucugcaguugca

SEQ ID NO: 320466 - RNA, 22 nt, Human
agugcuggaaagggacggagga

SEQ ID NO: 320467 - RNA, 22 nt, Human
augaaaaguucgaucuagaagg

SEQ ID NO: 320468 - RNA, 22 nt, Human
ggaggugaggccguagggugug

SEQ ID NO: 320469 - RNA, 22 nt, Human
ucccuguccugggcaaucccag

SEQ ID NO: 320470 - RNA, 22 nt, Human
aggcaggugggucacuugaguc

SEQ ID NO: 320471 - RNA, 22 nt, Human
gaggaggcuaagugggcucugg

SEQ ID NO: 320472 - RNA, 22 nt, Human
auuuacagaugaugcuauuuga

SEQ ID NO: 320473 - RNA, 22 nt, Human
ggagcuggucagccuugagcau

SEQ ID NO: 320474 - RNA, 22 nt, Human
gccuucaggaggguuccagaca

SEQ ID NO: 320475 - RNA, 22 nt, Human
gaagaacacuucaugauucauu

SEQ ID NO: 320476 - RNA, 22 nt, Human
caggagugucuccacacagcaa

SEQ ID NO: 320477 - RNA, 22 nt, Human
gcugcuguugauuuaguccaau

SEQ ID NO: 320478 - RNA, 22 nt, Human
ugcccuguuaucuuggaagagu

SEQ ID NO: 320479 - RNA, 22 nt, Human
guggccucaugucuauaaagag

SEQ ID NO: 320480 - RNA, 22 nt, Human
ucuggccuuaucuguccaagcc

SEQ ID NO: 320481 - RNA, 22 nt, Human
cuguacaucucugaggacagua

SEQ ID NO: 320482 - RNA, 18 nt, Human
gcucaguguguuaacacu

SEQ ID NO: 320483 - RNA, 22 nt, Human
ugcuagaauuugcagaagcaua

SEQ ID NO: 320484 - RNA, 18 nt, Human
ucuggcucaggacugaac

SEQ ID NO: 320485 - RNA, 22 nt, Human
uggcaggguacaccuuaacacc

SEQ ID NO: 320486 - RNA, 19 nt, Human
gccagcagaaugaugaggc

SEQ ID NO: 320487 - RNA, 22 nt, Human
ucccuuaaaacucauguguugu

SEQ ID NO: 320488 - RNA, 21 nt, Human
ugcucaguaaaugcugaguga

SEQ ID NO: 320489 - RNA, 22 nt, Human
uaauuuaauccaaguguuacau

SEQ ID NO: 320490 - RNA, 22 nt, Human
caugaaauugcuccuuuggugc

SEQ ID NO: 320491 - RNA, 22 nt, Human
uggagucugugaugcucugggu

SEQ ID NO: 320492 - RNA, 22 nt, Human
aggaccaguaugagagcaucug

SEQ ID NO: 320493 - RNA, 22 nt, Human
auuucagauucagaaauguagg

SEQ ID NO: 320494 - RNA, 21 nt, Human
uuagaaagcucacuacaguua

SEQ ID NO: 320495 - RNA, 23 nt, Human
ugggccuggaaagccuuagagag

SEQ ID NO: 320496 - RNA, 22 nt, Human
aguuuauagcccagauucaugg

SEQ ID NO: 320497 - RNA, 22 nt, Human
cucugggcaaguuucuucauga

SEQ ID NO: 320498 - RNA, 22 nt, Human
acuuccuguguuggucuugcug

SEQ ID NO: 320499 - RNA, 22 nt, Human
agggaggaguccucaaagucau

SEQ ID NO: 320500 - RNA, 22 nt, Human
aaagucauguaaugauaugauu

SEQ ID NO: 320501 - RNA, 22 nt, Human
caaggccaugagcagcgagugu

SEQ ID NO: 320502 - RNA, 22 nt, Human
ccagucccaggcagaaauccag

SEQ ID NO: 320503 - RNA, 22 nt, Human
auuucauacuaaggcucaaaaa

SEQ ID NO: 320504 - RNA, 22 nt, Human
cugcucuguucccccaucaucu

SEQ ID NO: 320505 - RNA, 22 nt, Human
agcagagcccuuccauggccuu

SEQ ID NO: 320506 - RNA, 22 nt, Human
ggccugcuucucagugagcuug

SEQ ID NO: 320507 - RNA, 22 nt, Human
ugagccagauaagggcucacgc

SEQ ID NO: 320508 - RNA, 22 nt, Human
uggaaauacuugccauaaaacu

SEQ ID NO: 320509 - RNA, 20 nt, Human
caugagaagggcagugugag

SEQ ID NO: 320510 - RNA, 22 nt, Human
uugagaagaggcuuuguaggaa

SEQ ID NO: 320511 - RNA, 21 nt, Human
ccagccucagaucagggagcu

SEQ ID NO: 320512 - RNA, 22 nt, Human
gcagcuguguaaugagcccaca

SEQ ID NO: 320513 - RNA, 22 nt, Human
gagcaggccagcaauggaaggg

SEQ ID NO: 320514 - RNA, 22 nt, Human
uggacagguuugggugccuguu

SEQ ID NO: 320515 - RNA, 22 nt, Human
ugggagaagcauggggugcaga

SEQ ID NO: 320516 - RNA, 23 nt, Human
aaaguuugaagcaacaguaguug

SEQ ID NO: 320517 - RNA, 17 nt, Human
ugccagccugucccagg

SEQ ID NO: 320518 - RNA, 22 nt, Human
ccucauggccuugagcugaggg

SEQ ID NO: 320519 - RNA, 22 nt, Human
cauuugaaauaguucauucuug

SEQ ID NO: 320520 - RNA, 22 nt, Human
uaaggccaaguucauauacaac

SEQ ID NO: 320521 - RNA, 19 nt, Human
uuucuuaggccuuuggccu

SEQ ID NO: 320522 - RNA, 22 nt, Human
aggagggugauccgggcugguc

SEQ ID NO: 320523 - RNA, 22 nt, Human
uaaaugugagugaugcggugaa

SEQ ID NO: 320524 - RNA, 22 nt, Human
cauugaaaaacguugacugagu

SEQ ID NO: 320525 - RNA, 21 nt, Human
ggacuuacauagguaaggggu

SEQ ID NO: 320526 - RNA, 22 nt, Human
uucuacaauaugaauaaugaag

SEQ ID NO: 320527 - RNA, 22 nt, Human
cuccuugguguaguacugagca

SEQ ID NO: 320528 - RNA, 22 nt, Human
ccauggcaauggucagucuauu

SEQ ID NO: 320529 - RNA, 22 nt, Human
aagcuggcaugucaccugagaa

SEQ ID NO: 320530 - RNA, 22 nt, Human
uggaaagaaaguaaaggcguau

SEQ ID NO: 320531 - RNA, 22 nt, Human
ugcagaagaccuuccagggcug

SEQ ID NO: 320532 - RNA, 22 nt, Human
uucauacaaugggauauuauga

SEQ ID NO: 320533 - RNA, 22 nt, Human
ugggcuccagcaccugugcucu

SEQ ID NO: 320534 - RNA, 22 nt, Human
acccugggucauauacagugug

SEQ ID NO: 320535 - RNA, 22 nt, Human
ucacagugaugacgugggagca

SEQ ID NO: 320536 - RNA, 22 nt, Human
caggcugaggcaguaggguuug

SEQ ID NO: 320537 - RNA, 22 nt, Human
augcugugagugugccgcagag

SEQ ID NO: 320538 - RNA, 22 nt, Human
uuggcuucuggcagucuggacg

SEQ ID NO: 320539 - RNA, 22 nt, Human
cugccucuugacagaucguggc

SEQ ID NO: 320540 - RNA, 22 nt, Human
ugagcccagucugucugacaug

SEQ ID NO: 320541 - RNA, 22 nt, Human
cucugagaaagcugugagcuaa

SEQ ID NO: 320542 - RNA, 22 nt, Human
aaaggagagugagucagaugcc

SEQ ID NO: 320543 - RNA, 22 nt, Human
gccagagcugagugagguucuu

SEQ ID NO: 320544 - RNA, 22 nt, Human
aaacaugaauagauauuaaaca

SEQ ID NO: 320545 - RNA, 22 nt, Human
gugccagcucuccccacaucug

SEQ ID NO: 320546 - RNA, 22 nt, Human
gagaagguggaccugaaggagc

SEQ ID NO: 320547 - RNA, 23 nt, Human
uuacaguaggaguuggaaaacca

SEQ ID NO: 320548 - RNA, 22 nt, Human
agguauaagucucauuucuguu

SEQ ID NO: 320549 - RNA, 22 nt, Human
ggauggcauguugggcucuguu

SEQ ID NO: 320550 - RNA, 22 nt, Human
acagaaauaacuuuuuauguuu

SEQ ID NO: 320551 - RNA, 22 nt, Human
auauaguuggguuucauucuac

SEQ ID NO: 320552 - RNA, 22 nt, Human
auuucauugaaguuaauucuuc

SEQ ID NO: 320553 - RNA, 22 nt, Human
ggcaggcaggagcgugcuuggg

SEQ ID NO: 320554 - RNA, 22 nt, Human
cccaugccuucugacucacagg

SEQ ID NO: 320555 - RNA, 22 nt, Human
acugcaggagacacagcugcug

SEQ ID NO: 320556 - RNA, 22 nt, Human
cugcucugaagccaggauucug

SEQ ID NO: 320557 - RNA, 22 nt, Human
acucagcucaggagcuggcugg

SEQ ID NO: 320558 - RNA, 22 nt, Human
auguccuucuccucuuaccugc

SEQ ID NO: 320559 - RNA, 22 nt, Human
uuguuacagcagugauuucaga

SEQ ID NO: 320560 - RNA, 22 nt, Human
cgucccaguuccagccgcgcug

SEQ ID NO: 320561 - RNA, 22 nt, Human
caggcuugauuauucagacaau

SEQ ID NO: 320562 - RNA, 22 nt, Human
uuguuaaaaugcauauucuggu

SEQ ID NO: 320563 - RNA, 23 nt, Human
cuucucagaagucugugccagga

SEQ ID NO: 320564 - RNA, 22 nt, Human
gggcuggcgggaaaggcaauuc

SEQ ID NO: 320565 - RNA, 22 nt, Human
ugcugucugauucagggugauu

SEQ ID NO: 320566 - RNA, 22 nt, Human
uguucauuuggcccuuuuguau

SEQ ID NO: 320567 - RNA, 22 nt, Human
gucccugcaucaccacgggacu

SEQ ID NO: 320568 - RNA, 22 nt, Human
uuauuuucuccucagaaagugg

SEQ ID NO: 320569 - RNA, 22 nt, Human
ucucaguccaaaugagagguug

SEQ ID NO: 320570 - RNA, 22 nt, Human
caaggccauauugccuguaugu

SEQ ID NO: 320571 - RNA, 22 nt, Human
gcacagggagacagccguggcc

SEQ ID NO: 320572 - RNA, 22 nt, Human
auagacuugguuaguaaauuug

SEQ ID NO: 320573 - RNA, 22 nt, Human
auguacauuuuccuaauguuuu

SEQ ID NO: 320574 - RNA, 22 nt, Human
uuuccuaugauauucuaugugu

SEQ ID NO: 320575 - RNA, 22 nt, Human
ucaggaggccaccaggaccugu

SEQ ID NO: 320576 - RNA, 22 nt, Human
ugaugaauaaacuugagaguca

SEQ ID NO: 320577 - RNA, 22 nt, Human
aaggccugcucagcugucugug

SEQ ID NO: 320578 - RNA, 22 nt, Human
uuuguuuucaaugugucauuca

SEQ ID NO: 320579 - RNA, 22 nt, Human
gcuggcagaauuucuucuugcu

SEQ ID NO: 320580 - RNA, 22 nt, Human
uguuuaaucuauaaaauggaga

SEQ ID NO: 320581 - RNA, 22 nt, Human
cagcaauaguguguuuguuuca

SEQ ID NO: 320582 - RNA, 22 nt, Human
ugaucagucccaugaucuucca

SEQ ID NO: 320583 - RNA, 22 nt, Human
uucuucuuaauguccugggaac

SEQ ID NO: 320584 - RNA, 22 nt, Human
aucuuucaguuucauaccaauu

SEQ ID NO: 320585 - RNA, 22 nt, Human
ucuuuucaucauuuaauaggua

SEQ ID NO: 320586 - RNA, 22 nt, Human
ugcuugagacacauaugaauuu

SEQ ID NO: 320587 - RNA, 22 nt, Human
aggggcuggcuuaucugagagu

SEQ ID NO: 320588 - RNA, 22 nt, Human
guaaaauagaauaacguggcua

SEQ ID NO: 320589 - RNA, 22 nt, Human
gcugggcuucucaaugcugccu

SEQ ID NO: 320590 - RNA, 22 nt, Human
ccugccuguaagauggguacaa

SEQ ID NO: 320591 - RNA, 22 nt, Human
ggcaguagccagggacuggcag

SEQ ID NO: 320592 - RNA, 22 nt, Human
guacuuccguggacuaauuguu

SEQ ID NO: 320593 - RNA, 22 nt, Human
aauaugcauuaacuguguacau

SEQ ID NO: 320594 - RNA, 22 nt, Human
agcugcuguccuaggcacugua

SEQ ID NO: 320595 - RNA, 21 nt, Human
ugcccacagcaaaugcagagg

SEQ ID NO: 320596 - RNA, 22 nt, Human
uugaacauuggcaauuucauau

SEQ ID NO: 320597 - RNA, 22 nt, Human
aucuagaaaguguugaagauca

SEQ ID NO: 320598 - RNA, 22 nt, Human
auucuucaucagagaugcacua

SEQ ID NO: 320599 - RNA, 22 nt, Human
gugggccuugcagggugcaggg

SEQ ID NO: 320600 - RNA, 19 nt, Human
ccugucugucuucagcuag

SEQ ID NO: 320601 - RNA, 22 nt, Human
cugaugcuauaagccacagugg

SEQ ID NO: 320602 - RNA, 22 nt, Human
agcucccagcagagcuggccac

SEQ ID NO: 320603 - RNA, 22 nt, Human
aaugucugcucuacucaggagg

SEQ ID NO: 320604 - RNA, 22 nt, Human
agucuuuccugcuugacuguuc

SEQ ID NO: 320605 - RNA, 22 nt, Human
gcugcaggcucugcaggaauug

SEQ ID NO: 320606 - RNA, 22 nt, Human
gcaggguauaauacuuagguga

SEQ ID NO: 320607 - RNA, 22 nt, Human
aggggccugguuggccucuguu

SEQ ID NO: 320608 - RNA, 22 nt, Human
gaguuauucuagguccuuugua

SEQ ID NO: 320609 - RNA, 22 nt, Human
ggaugcugcuaucaggcuucga

SEQ ID NO: 320610 - RNA, 21 nt, Human
aggcagaaagagcccaggcug

SEQ ID NO: 320611 - RNA, 22 nt, Human
cugcuucuccaaaguaggacuu

SEQ ID NO: 320612 - RNA, 20 nt, Human
uugcauuggaugugcaggug

SEQ ID NO: 320613 - RNA, 22 nt, Human
uuguuuguaugcugagaagaau

SEQ ID NO: 320614 - RNA, 22 nt, Human
ggcugccuggaccuccucuuuc

SEQ ID NO: 320615 - RNA, 22 nt, Human
aagaauacguaucaacaauggu

SEQ ID NO: 320616 - RNA, 22 nt, Human
cuccagggagcuuggaaagacc

SEQ ID NO: 320617 - RNA, 22 nt, Human
aagagggaggugcgggugcaga

SEQ ID NO: 320618 - RNA, 22 nt, Human
gccugccuuugugaggaagcgg

SEQ ID NO: 320619 - RNA, 22 nt, Human
cacacauugaauucauucuugu

SEQ ID NO: 320620 - RNA, 22 nt, Human
ugaguucucacccauucuucuu

SEQ ID NO: 320621 - RNA, 22 nt, Human
ugccucugggugaccaaggagc

SEQ ID NO: 320622 - RNA, 22 nt, Human
aaaguugugaaaccgaacaugu

SEQ ID NO: 320623 - RNA, 22 nt, Human
ucaguguagcagacuuguagcc

SEQ ID NO: 320624 - RNA, 22 nt, Human
agcaccugcacaguggaggaaa

SEQ ID NO: 320625 - RNA, 22 nt, Human
agcucuccacacauaggacuag

SEQ ID NO: 320626 - RNA, 22 nt, Human
uaauuauuaugacaacaauugc

SEQ ID NO: 320627 - RNA, 22 nt, Human
uugggcugaaguagagggcaga

SEQ ID NO: 320628 - RNA, 22 nt, Human
ccugagagcgaguggccucaug

SEQ ID NO: 320629 - RNA, 22 nt, Human
ucugaaggugcuagagaaagcu

SEQ ID NO: 320630 - RNA, 22 nt, Human
ggaggagagagguugcaaacac

SEQ ID NO: 320631 - RNA, 22 nt, Human
cacagggcuaaaugaaggguug

SEQ ID NO: 320632 - RNA, 22 nt, Human
guacauuggcaacucucuuaga

SEQ ID NO: 320633 - RNA, 22 nt, Human
ucagcaauaugauaggcuuugu

SEQ ID NO: 320634 - RNA, 22 nt, Human
acccugagucagacagccugac

SEQ ID NO: 320635 - RNA, 22 nt, Human
augcuacauuuugguuuauaaa

SEQ ID NO: 320636 - RNA, 22 nt, Human
uaccaaguguauuaugcuuugu

SEQ ID NO: 320637 - RNA, 18 nt, Human
uggcucuggacuugcucc

SEQ ID NO: 320638 - RNA, 22 nt, Human
ucagaacauuuaaaaagugguu

SEQ ID NO: 320639 - RNA, 19 nt, Human
cacugugguccuucacugc

SEQ ID NO: 320640 - RNA, 22 nt, Human
gggcuggcucugucuagaaagg

SEQ ID NO: 320641 - RNA, 22 nt, Human
gcagcccagagcgcaggacccc

SEQ ID NO: 320642 - RNA, 22 nt, Human
aacacaaagaagcugcaggauc

SEQ ID NO: 320643 - RNA, 22 nt, Human
cuggagccccaggcugugcaga

SEQ ID NO: 320644 - RNA, 20 nt, Human
ugcugcaguuucaugggacu

SEQ ID NO: 320645 - RNA, 22 nt, Human
cagcccugccauggagccuccu

SEQ ID NO: 320646 - RNA, 22 nt, Human
ugcauuauaacugaauguuguu

SEQ ID NO: 320647 - RNA, 22 nt, Human
ucaacugcaaguuugcuuaguu

SEQ ID NO: 320648 - RNA, 22 nt, Human
cagccccucacagagcuguccu

SEQ ID NO: 320649 - RNA, 22 nt, Human
agccuggccacucagggccuga

SEQ ID NO: 320650 - RNA, 22 nt, Human
aaggcucucugauggcagcagu

SEQ ID NO: 320651 - RNA, 22 nt, Human
agaauaguggcaaugacugcac

SEQ ID NO: 320652 - RNA, 22 nt, Human
ccugcagguugcagaggcggaa

SEQ ID NO: 320653 - RNA, 22 nt, Human
cagagcagaagcgguccucaca

SEQ ID NO: 320654 - RNA, 18 nt, Human
augggaggggccaagaga

SEQ ID NO: 320655 - RNA, 22 nt, Human
aagauuucagaguuugggggaa

SEQ ID NO: 320656 - RNA, 22 nt, Human
aguccuucaagaaaucuggaaa

SEQ ID NO: 320657 - RNA, 22 nt, Human
aggucaccauggcaugcuccac

SEQ ID NO: 320658 - RNA, 22 nt, Human
ggggauggauuccgggucccug

SEQ ID NO: 320659 - RNA, 22 nt, Human
cccuggaggcaaagguugcagu

SEQ ID NO: 320660 - RNA, 22 nt, Human
cugaaauuccauuucagccaca

SEQ ID NO: 320661 - RNA, 20 nt, Human
gcccuggagccuuguccugg

SEQ ID NO: 320662 - RNA, 21 nt, Human
cugugcuuuuuaagugugaug

SEQ ID NO: 320663 - RNA, 22 nt, Human
gcugucucauacaaggcccugc

SEQ ID NO: 320664 - RNA, 22 nt, Human
gugcauauaugcacauaugugu

SEQ ID NO: 320665 - RNA, 22 nt, Human
auucuucacaccuguuccuguu

SEQ ID NO: 320666 - RNA, 22 nt, Human
cuuguaauuauaauguacuguu

SEQ ID NO: 320667 - RNA, 22 nt, Human
gggcaugguggugcacaccugu

SEQ ID NO: 320668 - RNA, 22 nt, Human
cauuuccagcuccugcaucaug

SEQ ID NO: 320669 - RNA, 22 nt, Human
uccucagcuuugguuuacucau

SEQ ID NO: 320670 - RNA, 22 nt, Human
acuguagcugccacuggaugca

SEQ ID NO: 320671 - RNA, 22 nt, Human
gcuguccagagcaugggagcaa

SEQ ID NO: 320672 - RNA, 21 nt, Human
aguuuccucaacugcagaagg

SEQ ID NO: 320673 - RNA, 22 nt, Human
ugucccucauugacgcugugcc

SEQ ID NO: 320674 - RNA, 22 nt, Human
agggcccaggacagcaucaggg

SEQ ID NO: 320675 - RNA, 22 nt, Human
ucugucacucccugaugaugaa

SEQ ID NO: 320676 - RNA, 23 nt, Human
acuauaaaguuguucugauuuac

SEQ ID NO: 320677 - RNA, 22 nt, Human
uuuguaaaggccugaauuucag

SEQ ID NO: 320678 - RNA, 19 nt, Human
cagcccucuuaccacugug

SEQ ID NO: 320679 - RNA, 22 nt, Human
cugccagcagaggccagcgcug

SEQ ID NO: 320680 - RNA, 22 nt, Human
cuucccacuaguaucacagagc

SEQ ID NO: 320681 - RNA, 22 nt, Human
aagauuauggcagauaacaauu

SEQ ID NO: 320682 - RNA, 22 nt, Human
ggaggccaguccuggccgggcu

SEQ ID NO: 320683 - RNA, 22 nt, Human
aacagacagaaaaaugugaucu

SEQ ID NO: 320684 - RNA, 22 nt, Human
gggcuggagccagcuguggcug

SEQ ID NO: 320685 - RNA, 22 nt, Human
ugggcuggcugaacuucaaccu

SEQ ID NO: 320686 - RNA, 19 nt, Human
ugcuuccucaccaucuccc

SEQ ID NO: 320687 - RNA, 22 nt, Human
ugcugaugcuguucuguuagga

SEQ ID NO: 320688 - RNA, 22 nt, Human
gcaggaugccagggcagcagcg

SEQ ID NO: 320689 - RNA, 22 nt, Human
agcuguucccucacugcaguca

SEQ ID NO: 320690 - RNA, 22 nt, Human
uuuuggucagguuggucucgaa

SEQ ID NO: 320691 - RNA, 22 nt, Human
ucugucacucuagagauggcag

SEQ ID NO: 320692 - RNA, 22 nt, Human
gcugcugcuugaaggcucggag

SEQ ID NO: 320693 - RNA, 22 nt, Human
ugugucagagguagagauggca

SEQ ID NO: 320694 - RNA, 22 nt, Human
ccuguccuccaagagcacaucu

SEQ ID NO: 320695 - RNA, 22 nt, Human
cagugcauaaucuaaauggggg

SEQ ID NO: 320696 - RNA, 21 nt, Human
gaacauuuggguuguuucuac

SEQ ID NO: 320697 - RNA, 22 nt, Human
aaauuucuggaagugucagagu

SEQ ID NO: 320698 - RNA, 22 nt, Human
uccacagaauguaagauccaca

SEQ ID NO: 320699 - RNA, 22 nt, Human
cuuacauugugugcaugagggg

SEQ ID NO: 320700 - RNA, 22 nt, Human
gagcugggcacacgccacuuga

SEQ ID NO: 320701 - RNA, 22 nt, Human
ccagcccugccucucagggccc

SEQ ID NO: 320702 - RNA, 22 nt, Human
ugucucaguauacgaaacacuu

SEQ ID NO: 320703 - RNA, 20 nt, Human
gugaccagaagacagugggu

SEQ ID NO: 320704 - RNA, 22 nt, Human
ggaaggagcauuugccaguuua

SEQ ID NO: 320705 - RNA, 22 nt, Human
cugcugcauuacucuucucaag

SEQ ID NO: 320706 - RNA, 22 nt, Human
uacaaaugaccauagccacuua

SEQ ID NO: 320707 - RNA, 23 nt, Human
agccuucaggcaaugucaguaga

SEQ ID NO: 320708 - RNA, 22 nt, Human
uuucauaauauccagagauuuu

SEQ ID NO: 320709 - RNA, 22 nt, Human
cuguccuguagcuccaucaguc

SEQ ID NO: 320710 - RNA, 22 nt, Human
ucauuauuuuggacuggagugu

SEQ ID NO: 320711 - RNA, 21 nt, Human
gagcauggcuuacaucagcag

SEQ ID NO: 320712 - RNA, 22 nt, Human
ggcaugggguguauguggcacg

SEQ ID NO: 320713 - RNA, 22 nt, Human
gcugucuggaggcucugaggga

SEQ ID NO: 320714 - RNA, 22 nt, Human
cuuuccaagaaugcagauaccu

SEQ ID NO: 320715 - RNA, 22 nt, Human
uggaaggagcuaaggaccuggg

SEQ ID NO: 320716 - RNA, 22 nt, Human
auuuccuagccucucuugcagu

SEQ ID NO: 320717 - RNA, 22 nt, Human
ucugucaaaugagcaaguaacu

SEQ ID NO: 320718 - RNA, 22 nt, Human
aagggcagaauagagaagaugg

SEQ ID NO: 320719 - RNA, 22 nt, Human
auaaggcagugacuucaucuau

SEQ ID NO: 320720 - RNA, 22 nt, Human
cucaucugauaaaucacucuua

SEQ ID NO: 320721 - RNA, 22 nt, Human
agcugccacaugcccaagggca

SEQ ID NO: 320722 - RNA, 22 nt, Human
caguagcaggcacucagcacgu

SEQ ID NO: 320723 - RNA, 22 nt, Human
uccugucagugaggcagaugaa

SEQ ID NO: 320724 - RNA, 22 nt, Human
gagacaaaaguuggagugcaag

SEQ ID NO: 320725 - RNA, 22 nt, Human
aggcugcuuucauggccgcccc

SEQ ID NO: 320726 - RNA, 22 nt, Human
ucugagccguauggcuuggcua

SEQ ID NO: 320727 - RNA, 22 nt, Human
cugagcugggcucucuugaggg

SEQ ID NO: 320728 - RNA, 22 nt, Human
uccccagccgugaaggagagga

SEQ ID NO: 320729 - RNA, 22 nt, Human
aggagcugaagucucugcacuc

SEQ ID NO: 320730 - RNA, 22 nt, Human
uggcucagugaagagauaacuu

SEQ ID NO: 320731 - RNA, 22 nt, Human
uguaucaaggguuuauguaagc

SEQ ID NO: 320732 - RNA, 22 nt, Human
gucauuccuuauguugauucag

SEQ ID NO: 320733 - RNA, 22 nt, Human
ugggcuccucgucacucgcugu

SEQ ID NO: 320734 - RNA, 22 nt, Human
uaucuguuugcucacagguguu

SEQ ID NO: 320735 - RNA, 22 nt, Human
agcuaggaaauugaggcugaga

SEQ ID NO: 320736 - RNA, 20 nt, Human
ggggcugcaugcagagaaga

SEQ ID NO: 320737 - RNA, 22 nt, Human
auuaguguucuuaucuucuagg

SEQ ID NO: 320738 - RNA, 22 nt, Human
cccucuacagggaagcgcuuuc

SEQ ID NO: 320739 - RNA, 22 nt, Human
gugcucaggaagcuguuccugc

SEQ ID NO: 320740 - RNA, 23 nt, Human
ccaaagucgaagucuaguccaga

SEQ ID NO: 320741 - RNA, 19 nt, Human
ugaagcaggcagagaagau

SEQ ID NO: 320742 - RNA, 17 nt, Human
cccagcuggcagugccg

SEQ ID NO: 320743 - RNA, 22 nt, Human
acacuuuacagcuuccuuugca

SEQ ID NO: 320744 - RNA, 22 nt, Human
cugaggugcuagggucccugcu

SEQ ID NO: 320745 - RNA, 22 nt, Human
gacauguugaagaauauuugga

SEQ ID NO: 320746 - RNA, 22 nt, Human
cagagccucaucauccacucca

SEQ ID NO: 320747 - RNA, 22 nt, Human
gcagcagaugcuuucauggaca

SEQ ID NO: 320748 - RNA, 22 nt, Human
gaggcugcaggcaaugcugccc

SEQ ID NO: 320749 - RNA, 22 nt, Human
cugggcucaaauccuggcccug

SEQ ID NO: 320750 - RNA, 23 nt, Human
uguagcaucucuuauuucucagc

SEQ ID NO: 320751 - RNA, 22 nt, Human
ugaccacagacccaaugacuac

SEQ ID NO: 320752 - RNA, 22 nt, Human
aaaaaucuaugacugcuucucc

SEQ ID NO: 320753 - RNA, 22 nt, Human
cugccucuccccagaguggccc

SEQ ID NO: 320754 - RNA, 22 nt, Human
uggcugaauaaaauaugguguu

SEQ ID NO: 320755 - RNA, 20 nt, Human
ugccaugguaacagagugug

SEQ ID NO: 320756 - RNA, 22 nt, Human
aauuuagaauucgcuagcuaau

SEQ ID NO: 320757 - RNA, 22 nt, Human
gcagaggcauuucugacgcugc

SEQ ID NO: 320758 - RNA, 22 nt, Human
cuacagacccaccuuggaagaa

SEQ ID NO: 320759 - RNA, 22 nt, Human
gcagaugauguagacagacagu

SEQ ID NO: 320760 - RNA, 22 nt, Human
gaaauauucuugucuuguuuuc

SEQ ID NO: 320761 - RNA, 22 nt, Human
uucugucaugcucauguaauug

SEQ ID NO: 320762 - RNA, 22 nt, Human
agugaaaucagguuuugacugc

SEQ ID NO: 320763 - RNA, 22 nt, Human
aguaaacauaauuuaccuguag

SEQ ID NO: 320764 - RNA, 22 nt, Human
aauacaaucaaauucacuagca

SEQ ID NO: 320765 - RNA, 22 nt, Human
ucaggaugaccacgagccucua

SEQ ID NO: 320766 - RNA, 22 nt, Human
uaugagaaucugcaguaugcuu

SEQ ID NO: 320767 - RNA, 22 nt, Human
gaccaaggaagaggggagccag

SEQ ID NO: 320768 - RNA, 22 nt, Human
ucauuucuauugcuacugucug

SEQ ID NO: 320769 - RNA, 22 nt, Human
ggggcagagcauagcuccaauu

SEQ ID NO: 320770 - RNA, 22 nt, Human
cuuuggcagccucugcuauuga

SEQ ID NO: 320771 - RNA, 22 nt, Human
uggagcagagaugguggccuuc

SEQ ID NO: 320772 - RNA, 22 nt, Human
acaauacuauuuucaguauccu

SEQ ID NO: 320773 - RNA, 22 nt, Human
uuaauaaaguaugaauuggaaa

SEQ ID NO: 320774 - RNA, 16 nt, Human
ccacagggcaaggggc

SEQ ID NO: 320775 - RNA, 22 nt, Human
caggagcccagaguccucagcu

SEQ ID NO: 320776 - RNA, 22 nt, Human
uggagcaggaagucuauggcug

SEQ ID NO: 320777 - RNA, 22 nt, Human
uggcucuggauuaaucuaggaa

SEQ ID NO: 320778 - RNA, 22 nt, Human
gagcugggcuggcuuccucccu

SEQ ID NO: 320779 - RNA, 22 nt, Human
uggcuuucucccccagcuucuc

SEQ ID NO: 320780 - RNA, 22 nt, Human
ugaggcaggagguugagaacug

SEQ ID NO: 320781 - RNA, 22 nt, Human
uggaggcaucagagugcuuggc

SEQ ID NO: 320782 - RNA, 22 nt, Human
uuucuucagccuucacaaccug

SEQ ID NO: 320783 - RNA, 22 nt, Human
aacuuucagaauccuaugcauu

SEQ ID NO: 320784 - RNA, 22 nt, Human
uugggguguuggauggagcaag

SEQ ID NO: 320785 - RNA, 22 nt, Human
cagugcagacguggagggggca

SEQ ID NO: 320786 - RNA, 22 nt, Human
agcccagccggauucccaguuc

SEQ ID NO: 320787 - RNA, 19 nt, Human
cugugcuuuaaacuccuau

SEQ ID NO: 320788 - RNA, 22 nt, Human
gugggaugguagguagguaaua

SEQ ID NO: 320789 - RNA, 22 nt, Human
uucuguguggguagcuccuguu

SEQ ID NO: 320790 - RNA, 22 nt, Human
aggaccuguagggccugcaucc

SEQ ID NO: 320791 - RNA, 22 nt, Human
cuggcccuucucuugcuuccug

SEQ ID NO: 320792 - RNA, 22 nt, Human
gcucuguguugucagaggcacc

SEQ ID NO: 320793 - RNA, 22 nt, Human
ugggcugcagagcccggccuuc

SEQ ID NO: 320794 - RNA, 22 nt, Human
uuugacaucaauacccuagaau

SEQ ID NO: 320795 - RNA, 22 nt, Human
caugggggucuggacaacaggc

SEQ ID NO: 320796 - RNA, 22 nt, Human
uuucagaucauuuuuuaaguac

SEQ ID NO: 320797 - RNA, 22 nt, Human
cugcuguguuucacaccucugg

SEQ ID NO: 320798 - RNA, 21 nt, Human
uggcucuggguaggagagugc

SEQ ID NO: 320799 - RNA, 22 nt, Human
ggccuugggaggagggucagaa

SEQ ID NO: 320800 - RNA, 22 nt, Human
ucacugcucagucuguacuaca

SEQ ID NO: 320801 - RNA, 22 nt, Human
augaugguggguaauguguaaa

SEQ ID NO: 320802 - RNA, 22 nt, Human
gaggcucugugaugugccaggc

SEQ ID NO: 320803 - RNA, 22 nt, Human
aggggugaaggcccgauaggag

SEQ ID NO: 320804 - RNA, 22 nt, Human
ugggcugcugucugcacaugcu

SEQ ID NO: 320805 - RNA, 22 nt, Human
gcugaagcugcagcaggaggaa

SEQ ID NO: 320806 - RNA, 22 nt, Human
gccauuuagggaggcaagguga

SEQ ID NO: 320807 - RNA, 22 nt, Human
agauuucagguuggggcagaag

SEQ ID NO: 320808 - RNA, 22 nt, Human
guuguauagagggcaugaaucu

SEQ ID NO: 320809 - RNA, 22 nt, Human
ugaaggagauuuuuagggaggc

SEQ ID NO: 320810 - RNA, 22 nt, Human
ucuucuuccuccacagggccca

SEQ ID NO: 320811 - RNA, 19 nt, Human
auuuacugccuaaaaucuc

SEQ ID NO: 320812 - RNA, 22 nt, Human
uagcucuucauuucaucugauu

SEQ ID NO: 320813 - RNA, 22 nt, Human
gggcaagcucuucagaagcucu

SEQ ID NO: 320814 - RNA, 22 nt, Human
uccuucaguuaucacaguacug

SEQ ID NO: 320815 - RNA, 22 nt, Human
acauacuaugaauacauguguc

SEQ ID NO: 320816 - RNA, 20 nt, Human
gcugcucuccacggucugca

SEQ ID NO: 320817 - RNA, 19 nt, Human
gcuguauuaaagauacaug

SEQ ID NO: 320818 - RNA, 18 nt, Human
gugcugugggcaguggcc

SEQ ID NO: 320819 - RNA, 22 nt, Human
ucagcugagcuccagcucauag

SEQ ID NO: 320820 - RNA, 22 nt, Human
uagucaaaccucagaauacccc

SEQ ID NO: 320821 - RNA, 22 nt, Human
agagugauggguugugcugacc

SEQ ID NO: 320822 - RNA, 22 nt, Human
gcucccaccaggcagaccuacc

SEQ ID NO: 320823 - RNA, 22 nt, Human
cuucuuccugcugcagccucca

SEQ ID NO: 320824 - RNA, 22 nt, Human
ugauuuccucuacuagcaauua

SEQ ID NO: 320825 - RNA, 22 nt, Human
uuccuacaucaccagggggagu

SEQ ID NO: 320826 - RNA, 22 nt, Human
gcaguaaaaaaggauaugugca

SEQ ID NO: 320827 - RNA, 22 nt, Human
gcuggaaggcuaggcucaguug

SEQ ID NO: 320828 - RNA, 22 nt, Human
cuguccuggagggcauaggacg

SEQ ID NO: 320829 - RNA, 22 nt, Human
ugacaaaacugcaauuacuuuu

SEQ ID NO: 320830 - RNA, 22 nt, Human
ucccaguguggcaggccaugga

SEQ ID NO: 320831 - RNA, 22 nt, Human
uagaaagugaagguuaauuaau

SEQ ID NO: 320832 - RNA, 22 nt, Human
ccagagucuaugaguccucauu

SEQ ID NO: 320833 - RNA, 18 nt, Human
agugugugcccuuucagg

SEQ ID NO: 320834 - RNA, 22 nt, Human
cugggcuggcgcauccgacacg

SEQ ID NO: 320835 - RNA, 22 nt, Human
agugaggcuaauaggcaauggu

SEQ ID NO: 320836 - RNA, 22 nt, Human
ugucaccucuuuggcugcagcu

SEQ ID NO: 320837 - RNA, 22 nt, Human
gagcugggaagauagcuugagc

SEQ ID NO: 320838 - RNA, 22 nt, Human
acuuuacaagcuuauagccuag

SEQ ID NO: 320839 - RNA, 22 nt, Human
ccuggcagcaggugggcccgug

SEQ ID NO: 320840 - RNA, 22 nt, Human
agguaggguuaauggagauaua

SEQ ID NO: 320841 - RNA, 22 nt, Human
gagagugaaggcuucccagcaa

SEQ ID NO: 320842 - RNA, 22 nt, Human
ucaaaugcuucuacuccuaaga

SEQ ID NO: 320843 - RNA, 22 nt, Human
cccuggaggucagaggccuggg

SEQ ID NO: 320844 - RNA, 17 nt, Human
cgagggcuugcuggcuc

SEQ ID NO: 320845 - RNA, 22 nt, Human
uaguaaaaguuuaguugaaagu

SEQ ID NO: 320846 - RNA, 22 nt, Human
ggcucuggugcccuggcuccca

SEQ ID NO: 320847 - RNA, 22 nt, Human
cagagccagaacuagaccuugu

SEQ ID NO: 320848 - RNA, 22 nt, Human
uggccucugggaaagcagauuc

SEQ ID NO: 320849 - RNA, 22 nt, Human
aacuuucuuggaugucucaaca

SEQ ID NO: 320850 - RNA, 22 nt, Human
uaugaagaaguucugugaaaug

SEQ ID NO: 320851 - RNA, 22 nt, Human
cauggcagagaaggggaacugg

SEQ ID NO: 320852 - RNA, 22 nt, Human
caaggccuucgucuccuagcuu

SEQ ID NO: 320853 - RNA, 22 nt, Human
aggagcagaccguaguccugca

SEQ ID NO: 320854 - RNA, 22 nt, Human
agaaagggagcguggaucaauu

SEQ ID NO: 320855 - RNA, 22 nt, Human
aggcaguuuaggcagcgauuua

SEQ ID NO: 320856 - RNA, 22 nt, Human
gaagagcugacagugucauccu

SEQ ID NO: 320857 - RNA, 22 nt, Human
uucuggaguauuccuggcaccu

SEQ ID NO: 320858 - RNA, 22 nt, Human
cuuucucugugugguaaagggc

SEQ ID NO: 320859 - RNA, 22 nt, Human
gcuuccuaaaugcacagggcag

SEQ ID NO: 320860 - RNA, 22 nt, Human
gucaggauuaaugggaguaugc

SEQ ID NO: 320861 - RNA, 22 nt, Human
aaggagugcaugacucagagua

SEQ ID NO: 320862 - RNA, 22 nt, Human
caguacuuuucaaccaguauga

SEQ ID NO: 320863 - RNA, 22 nt, Human
ggccugcuccgggggcugagcu

SEQ ID NO: 320864 - RNA, 22 nt, Human
aacugguaucucuucaguguaa

SEQ ID NO: 320865 - RNA, 22 nt, Human
ugggacugcucuugcugggguc

SEQ ID NO: 320866 - RNA, 22 nt, Human
aggcacugaauauccaguaaaa

SEQ ID NO: 320867 - RNA, 22 nt, Human
guuugcauguauuaagucaaua

SEQ ID NO: 320868 - RNA, 22 nt, Human
uugcauuuccuguacuguuuga

SEQ ID NO: 320869 - RNA, 22 nt, Human
aagaugauaggacuugcuuaag

SEQ ID NO: 320870 - RNA, 22 nt, Human
uuaacauuguccuuagcagauu

SEQ ID NO: 320871 - RNA, 22 nt, Human
agcagggcuucugugccugugc

SEQ ID NO: 320872 - RNA, 22 nt, Human
uuugcaaagugacuauuauaug

SEQ ID NO: 320873 - RNA, 22 nt, Human
cacugggcguguccugggugag

SEQ ID NO: 320874 - RNA, 20 nt, Human
gucugaggagcagugggaaa

SEQ ID NO: 320875 - RNA, 22 nt, Human
ugcccacauggugccauggcca

SEQ ID NO: 320876 - RNA, 22 nt, Human
ugagggaggcccuuugagcaga

SEQ ID NO: 320877 - RNA, 22 nt, Human
ugaaggccagggauuugcagcc

SEQ ID NO: 320878 - RNA, 22 nt, Human
ccaggagcaaagaucacuggga

SEQ ID NO: 320879 - RNA, 22 nt, Human
ccaggaggugcuggaagaaagc

SEQ ID NO: 320880 - RNA, 21 nt, Human
agggcagauuagcuguaagag

SEQ ID NO: 320881 - RNA, 22 nt, Human
uccugccucuuuucuuauucca

SEQ ID NO: 320882 - RNA, 23 nt, Human
aggauccugguacaggagcagag

SEQ ID NO: 320883 - RNA, 22 nt, Human
ucucugauguauaucagagaac

SEQ ID NO: 320884 - RNA, 22 nt, Human
gaaaaggaaauuuauagagauc

SEQ ID NO: 320885 - RNA, 18 nt, Human
uggagcagguaggcauga

SEQ ID NO: 320886 - RNA, 22 nt, Human
agaucucaccucuguguauuau

SEQ ID NO: 320887 - RNA, 22 nt, Human
gaaggccacggaauggagcugg

SEQ ID NO: 320888 - RNA, 22 nt, Human
ggccugucucacccccgggugc

SEQ ID NO: 320889 - RNA, 20 nt, Human
cucaggauacugcaaaguug

SEQ ID NO: 320890 - RNA, 22 nt, Human
ucaacacucuuuggcacaguua

SEQ ID NO: 320891 - RNA, 23 nt, Human
uguugaaguaacuguuacauaga

SEQ ID NO: 320892 - RNA, 18 nt, Human
uccugccugugccccagg

SEQ ID NO: 320893 - RNA, 22 nt, Human
caggugcccagcuccugcugug

SEQ ID NO: 320894 - RNA, 22 nt, Human
gaagcacauggcuauagcuauu

SEQ ID NO: 320895 - RNA, 22 nt, Human
uuaacauacaucaugaacaaug

SEQ ID NO: 320896 - RNA, 22 nt, Human
cagaauaugacaagauuuuccu

SEQ ID NO: 320897 - RNA, 22 nt, Human
gcugguuagaaaacagagcuca

SEQ ID NO: 320898 - RNA, 22 nt, Human
uugaauuagacuuugcuacagg

SEQ ID NO: 320899 - RNA, 22 nt, Human
uggcucaguuucugcccagcug

SEQ ID NO: 320900 - RNA, 22 nt, Human
uggcagcugauuagauggugcc

SEQ ID NO: 320901 - RNA, 22 nt, Human
agccuggauucgugcauccaca

SEQ ID NO: 320902 - RNA, 22 nt, Human
ggagggcucaauugacuccuga

SEQ ID NO: 320903 - RNA, 21 nt, Human
cugcuguggcccccgacaugc

SEQ ID NO: 320904 - RNA, 22 nt, Human
ccauuugucaccucugcacucc

SEQ ID NO: 320905 - RNA, 22 nt, Human
aggggugugcauccuggaggau

SEQ ID NO: 320906 - RNA, 22 nt, Human
accauguuggccaagcuggucu

SEQ ID NO: 320907 - RNA, 22 nt, Human
cccauuuagauaacaguucaaa

SEQ ID NO: 320908 - RNA, 22 nt, Human
uagucccauuuugagguauuug

SEQ ID NO: 320909 - RNA, 21 nt, Human
agugaaaugaaguguaugcuc

SEQ ID NO: 320910 - RNA, 22 nt, Human
ugcagggcuaagucagagccug

SEQ ID NO: 320911 - RNA, 22 nt, Human
augugaggcagcacggagauua

SEQ ID NO: 320912 - RNA, 22 nt, Human
ccuguggagcuuucagcagcuc

SEQ ID NO: 320913 - RNA, 22 nt, Human
cagcuucugucugauuagcaag

SEQ ID NO: 320914 - RNA, 22 nt, Human
ucgagucauguucucccauuaa

SEQ ID NO: 320915 - RNA, 22 nt, Human
guaacagaaagucaugcucauu

SEQ ID NO: 320916 - RNA, 22 nt, Human
agccagcugccuuucacaucug

SEQ ID NO: 320917 - RNA, 22 nt, Human
cauugcacuccacccuaggcaa

SEQ ID NO: 320918 - RNA, 22 nt, Human
ccugccagggccuuggaagaaa

SEQ ID NO: 320919 - RNA, 22 nt, Human
auguuauggcucaaacauuugg

SEQ ID NO: 320920 - RNA, 22 nt, Human
uagcugucaccagaaauggcca

SEQ ID NO: 320921 - RNA, 22 nt, Human
cucauggauauaagaacuguuu

SEQ ID NO: 320922 - RNA, 22 nt, Human
uuguuugaggucacugauauuu

SEQ ID NO: 320923 - RNA, 22 nt, Human
gcucucuugguggcuguccugg

SEQ ID NO: 320924 - RNA, 22 nt, Human
ucaagauaccaccauuauaugu

SEQ ID NO: 320925 - RNA, 22 nt, Human
uacagcuaggcaaaaaugacau

SEQ ID NO: 320926 - RNA, 22 nt, Human
uggccugacugucaggcuguau

SEQ ID NO: 320927 - RNA, 16 nt, Human
cagcccugaggaagaa

SEQ ID NO: 320928 - RNA, 19 nt, Human
gcugucugaugcugagguc

SEQ ID NO: 320929 - RNA, 22 nt, Human
uauguacaccggggaagguggg

SEQ ID NO: 320930 - RNA, 22 nt, Human
cacugaagguaggaccaaggcu

SEQ ID NO: 320931 - RNA, 22 nt, Human
uugaaggaggcuccuuuuuaaa

SEQ ID NO: 320932 - RNA, 22 nt, Human
uuccucaugggguuccuucaga

SEQ ID NO: 320933 - RNA, 20 nt, Human
uauuuacaacuuagagccuc

SEQ ID NO: 320934 - RNA, 22 nt, Human
aaguucuacuguggguaaaaug

SEQ ID NO: 320935 - RNA, 22 nt, Human
ugaaaucaaugucuucugucuc

SEQ ID NO: 320936 - RNA, 22 nt, Human
cugugccuuuguagcugugccu

SEQ ID NO: 320937 - RNA, 23 nt, Human
aggugccaacugagagcugagag

SEQ ID NO: 320938 - RNA, 22 nt, Human
aaaaagauagcauugugcuccu

SEQ ID NO: 320939 - RNA, 22 nt, Human
auucuguauggaaaagcacuau

SEQ ID NO: 320940 - RNA, 22 nt, Human
cccagcccacgguccugggugg

SEQ ID NO: 320941 - RNA, 22 nt, Human
ggucccaguccucucccugcua

SEQ ID NO: 320942 - RNA, 19 nt, Human
caucuggaugauucuccug

SEQ ID NO: 320943 - RNA, 22 nt, Human
uacaguagacaauguuaguaug

SEQ ID NO: 320944 - RNA, 22 nt, Human
uagcugucagcaaucaaguggu

SEQ ID NO: 320945 - RNA, 22 nt, Human
cauuguuaccaucuuuuaccua

SEQ ID NO: 320946 - RNA, 22 nt, Human
uaaaugagggcugacaugauug

SEQ ID NO: 320947 - RNA, 18 nt, Human
gaaaggagagacaguagg

SEQ ID NO: 320948 - RNA, 22 nt, Human
cugaggucucuuuccauaguga

SEQ ID NO: 320949 - RNA, 20 nt, Human
guaaaauauggucuuugggu

SEQ ID NO: 320950 - RNA, 21 nt, Human
ggcagcccgcccucuccuggc

SEQ ID NO: 320951 - RNA, 22 nt, Human
agagacaccgcgcaucauggcu

SEQ ID NO: 320952 - RNA, 22 nt, Human
gucuuucuuaauucaagugcuu

SEQ ID NO: 320953 - RNA, 22 nt, Human
aaaaaugucauuauggaacuga

SEQ ID NO: 320954 - RNA, 22 nt, Human
ugcagaagacacaagguaacgu

SEQ ID NO: 320955 - RNA, 22 nt, Human
aagcaagacagaaguuacugcc

SEQ ID NO: 320956 - RNA, 22 nt, Human
gcugccaauccagcugugggag

SEQ ID NO: 320957 - RNA, 22 nt, Human
ucuggcucaaaauacguacucu

SEQ ID NO: 320958 - RNA, 22 nt, Human
uugcacuaggaaaaggcagcca

SEQ ID NO: 320959 - RNA, 22 nt, Human
cuugaaagauuuggccucugug

SEQ ID NO: 320960 - RNA, 22 nt, Human
ugcauugauagaaaaacaugga

SEQ ID NO: 320961 - RNA, 19 nt, Human
uucauucucuuauuguugu

SEQ ID NO: 320962 - RNA, 22 nt, Human
gcagccccaggagacgcccagg

SEQ ID NO: 320963 - RNA, 22 nt, Human
gagggcugcugccagauaugcc

SEQ ID NO: 320964 - RNA, 22 nt, Human
ggcugaguugagaggauuacuu

SEQ ID NO: 320965 - RNA, 22 nt, Human
ugaugaaacugagguuccaaga

SEQ ID NO: 320966 - RNA, 22 nt, Human
ugggcucauggcccagcacugg

SEQ ID NO: 320967 - RNA, 22 nt, Human
uggcucagaugcucuuccagug

SEQ ID NO: 320968 - RNA, 22 nt, Human
ucagaaaugaucguuauucauu

SEQ ID NO: 320969 - RNA, 22 nt, Human
aggcacugacucaagggagcca

SEQ ID NO: 320970 - RNA, 22 nt, Human
agaggcugucccuugcuauucc

SEQ ID NO: 320971 - RNA, 22 nt, Human
agcuuccuacaaccaucucaga

SEQ ID NO: 320972 - RNA, 22 nt, Human
ccugggagagccaucuguggcc

SEQ ID NO: 320973 - RNA, 22 nt, Human
ucucagucuuugcaaggaugcu

SEQ ID NO: 320974 - RNA, 22 nt, Human
ggcuuggaaauugcaggacaca

SEQ ID NO: 320975 - RNA, 22 nt, Human
ucugucaccauucagcuugaau

SEQ ID NO: 320976 - RNA, 22 nt, Human
gccugcuguuaacugcaggaau

SEQ ID NO: 320977 - RNA, 22 nt, Human
uggagacugugcuaagggaguu

SEQ ID NO: 320978 - RNA, 22 nt, Human
agucucugagguucagaugccu

SEQ ID NO: 320979 - RNA, 22 nt, Human
ccaggcucaggugcgagagaca

SEQ ID NO: 320980 - RNA, 22 nt, Human
ucucagaggucuucagccucug

SEQ ID NO: 320981 - RNA, 22 nt, Human
aagcagcagaccugauuuugaa

SEQ ID NO: 320982 - RNA, 16 nt, Human
agcagggcgggaagga

SEQ ID NO: 320983 - RNA, 22 nt, Human
aagauguaucaguuaagucuuc

SEQ ID NO: 320984 - RNA, 22 nt, Human
agcuuccuuggcgcugaggccu

SEQ ID NO: 320985 - RNA, 22 nt, Human
uugcacuccagcccgagcaaca

SEQ ID NO: 320986 - RNA, 22 nt, Human
uggcccagagcacugcugggca

SEQ ID NO: 320987 - RNA, 22 nt, Human
ucucugggauaaacugggccag

SEQ ID NO: 320988 - RNA, 22 nt, Human
ccagcuggagccaagguggacu

SEQ ID NO: 320989 - RNA, 20 nt, Human
ucuggcucuuugcuccuccc

SEQ ID NO: 320990 - RNA, 22 nt, Human
gguuugcacgauauuuccaugg

SEQ ID NO: 320991 - RNA, 22 nt, Human
cugaggcuuugugugcaugccu

SEQ ID NO: 320992 - RNA, 22 nt, Human
ggucccugcugaagccuuggug

SEQ ID NO: 320993 - RNA, 22 nt, Human
aggaugagagauacauggagca

SEQ ID NO: 320994 - RNA, 22 nt, Human
gugucaugggagucagaaguga

SEQ ID NO: 320995 - RNA, 22 nt, Human
cccagguggguuggccucuguc

SEQ ID NO: 320996 - RNA, 23 nt, Human
cuccucguaacucuguggugggu

SEQ ID NO: 320997 - RNA, 22 nt, Human
uggagcugagaaguggagcucu

SEQ ID NO: 320998 - RNA, 22 nt, Human
agugaguggguuacagauggga

SEQ ID NO: 320999 - RNA, 22 nt, Human
uaaugcacaugacugaacuauu

SEQ ID NO: 321000 - RNA, 22 nt, Human
ucucuucuauuugagacuauuu

SEQ ID NO: 321001 - RNA, 22 nt, Human
cagagguagccgagugcaaucg

SEQ ID NO: 321002 - RNA, 22 nt, Human
ccuuagagaguacugggcugcc

SEQ ID NO: 321003 - RNA, 22 nt, Human
uaaagguaacaugaacugcuuu

SEQ ID NO: 321004 - RNA, 21 nt, Human
ggccugaguauaggacaggcc

SEQ ID NO: 321005 - RNA, 22 nt, Human
aaaugguguuucuaaugcuaga

SEQ ID NO: 321006 - RNA, 22 nt, Human
cuuacauugucuuaguuuucaa

SEQ ID NO: 321007 - RNA, 20 nt, Human
acagccagaggaggcagaca

SEQ ID NO: 321008 - RNA, 22 nt, Human
ggagggagggcuagaccaaaga

SEQ ID NO: 321009 - RNA, 20 nt, Human
aagcacauuucuacaauaau

SEQ ID NO: 321010 - RNA, 22 nt, Human
cucuuucaguucugauagucuc

SEQ ID NO: 321011 - RNA, 22 nt, Human
cuuugggcaaagggccaauucg

SEQ ID NO: 321012 - RNA, 22 nt, Human
cagcaucuuucucuucuggagu

SEQ ID NO: 321013 - RNA, 22 nt, Human
uuugacaguaauaaagcacaag

SEQ ID NO: 321014 - RNA, 19 nt, Human
ggccaggcugacugugguc

SEQ ID NO: 321015 - RNA, 21 nt, Human
ggcaucccaggccagugacug

SEQ ID NO: 321016 - RNA, 20 nt, Human
gcucccagccugcagucccc

SEQ ID NO: 321017 - RNA, 22 nt, Human
aguauaaagugguuuucagcac

SEQ ID NO: 321018 - RNA, 22 nt, Human
aaggcagucugguuucaaagca

SEQ ID NO: 321019 - RNA, 22 nt, Human
cucacugcaaguuccaccuacc

SEQ ID NO: 321020 - RNA, 22 nt, Human
ugggacacccucacgccugcac

SEQ ID NO: 321021 - RNA, 22 nt, Human
gggagggaaggaccuuaugaau

SEQ ID NO: 321022 - RNA, 22 nt, Human
uggcugccuagucccucagccu

SEQ ID NO: 321023 - RNA, 22 nt, Human
cagaaaaccugacucuagaacu

SEQ ID NO: 321024 - RNA, 22 nt, Human
augcuguggggagugaggguag

SEQ ID NO: 321025 - RNA, 21 nt, Human
gcucagaguauugcacuguuu

SEQ ID NO: 321026 - RNA, 22 nt, Human
aaauguauugcauaggauauuu

SEQ ID NO: 321027 - RNA, 19 nt, Human
gcaugcuugguggcuucug

SEQ ID NO: 321028 - RNA, 22 nt, Human
aagaaaagaaaccugaggcuuu

SEQ ID NO: 321029 - RNA, 20 nt, Human
gcucccugguagaaauguuu

SEQ ID NO: 321030 - RNA, 22 nt, Human
aagacccacaaggcugaauguu

SEQ ID NO: 321031 - RNA, 22 nt, Human
ugaaaugauuauaugguguuug

SEQ ID NO: 321032 - RNA, 22 nt, Human
gggguugguuuaaaugcuugag

SEQ ID NO: 321033 - RNA, 22 nt, Human
guccuggggaauacagaagccg

SEQ ID NO: 321034 - RNA, 22 nt, Human
ucucuucuuuggggugggcuca

SEQ ID NO: 321035 - RNA, 22 nt, Human
uaaagguacgaagugagggauu

SEQ ID NO: 321036 - RNA, 21 nt, Human
gugguuauuuucauuagcauc

SEQ ID NO: 321037 - RNA, 22 nt, Human
uccagucaagcuugagaauuuc

SEQ ID NO: 321038 - RNA, 22 nt, Human
agcucacagaaauccugcagga

SEQ ID NO: 321039 - RNA, 22 nt, Human
caggcugggaacgccacccgcu

SEQ ID NO: 321040 - RNA, 22 nt, Human
acagagcaauucuuggguguuu

SEQ ID NO: 321041 - RNA, 22 nt, Human
aauguauuccucaugcaagagu

SEQ ID NO: 321042 - RNA, 19 nt, Human
ccuguucaugacucugucc

SEQ ID NO: 321043 - RNA, 20 nt, Human
auccaugagagucuggauuc

SEQ ID NO: 321044 - RNA, 22 nt, Human
ucugccuguucaagucuucuag

SEQ ID NO: 321045 - RNA, 21 nt, Human
gauuugcagaaacuagacagg

SEQ ID NO: 321046 - RNA, 22 nt, Human
ucucccagaggaucccagugga

SEQ ID NO: 321047 - RNA, 22 nt, Human
ugcuugcaagagaugcaaugac

SEQ ID NO: 321048 - RNA, 22 nt, Human
uaucuuuagaggaagagaaucu

SEQ ID NO: 321049 - RNA, 22 nt, Human
ugugcagcuaguccuggacuug

SEQ ID NO: 321050 - RNA, 22 nt, Human
auaaaaguaggaccaacuuaca

SEQ ID NO: 321051 - RNA, 22 nt, Human
aucugccuccaaguccaugugu

SEQ ID NO: 321052 - RNA, 21 nt, Human
ggcagccucuguggaagggga

SEQ ID NO: 321053 - RNA, 22 nt, Human
gucccuuggcucacaaacagcu

SEQ ID NO: 321054 - RNA, 22 nt, Human
ugcuaucucuauauccauuuau

SEQ ID NO: 321055 - RNA, 22 nt, Human
cuggcagcugcccgagaugccc

SEQ ID NO: 321056 - RNA, 22 nt, Human
uuuccauguuggugaaaugagg

SEQ ID NO: 321057 - RNA, 22 nt, Human
ucaguccugaugacaggcccaa

SEQ ID NO: 321058 - RNA, 22 nt, Human
ugacacauuaaaugcucacaaa

SEQ ID NO: 321059 - RNA, 22 nt, Human
gcuggcuguguuccuucugcca

SEQ ID NO: 321060 - RNA, 22 nt, Human
aguuuucacacucaccaaaagg

SEQ ID NO: 321061 - RNA, 22 nt, Human
ucaucacucauuggacaacaga

SEQ ID NO: 321062 - RNA, 22 nt, Human
auucuuggcaaggagauuuaaa

SEQ ID NO: 321063 - RNA, 22 nt, Human
uggcucaguuccaucaucugga

SEQ ID NO: 321064 - RNA, 22 nt, Human
aauuccugucuuaacaguucug

SEQ ID NO: 321065 - RNA, 22 nt, Human
ggcagcuggccuccucgcccac

SEQ ID NO: 321066 - RNA, 22 nt, Human
aaaagggacuacucucagcucc

SEQ ID NO: 321067 - RNA, 22 nt, Human
ggcuucugagugcucugcuguu

SEQ ID NO: 321068 - RNA, 22 nt, Human
ucaggggcuugaggugcauguc

SEQ ID NO: 321069 - RNA, 22 nt, Human
ucuggccugggccugccggugc

SEQ ID NO: 321070 - RNA, 21 nt, Human
agcugccacccuagcuucuga

SEQ ID NO: 321071 - RNA, 22 nt, Human
uucaagauaauaggaaugaaaa

SEQ ID NO: 321072 - RNA, 19 nt, Human
aguccaugaauggaggaug

SEQ ID NO: 321073 - RNA, 22 nt, Human
ugcucccaggcucuguggucug

SEQ ID NO: 321074 - RNA, 22 nt, Human
ggcugccuccucgagacaggau

SEQ ID NO: 321075 - RNA, 22 nt, Human
agcugcucaggagagccagguc

SEQ ID NO: 321076 - RNA, 22 nt, Human
cagcacugcuucgcagccaggg

SEQ ID NO: 321077 - RNA, 22 nt, Human
cugucuccuccacugcauggga

SEQ ID NO: 321078 - RNA, 20 nt, Human
ccugucugcaauggagguca

SEQ ID NO: 321079 - RNA, 22 nt, Human
gcucuguacgcaggaugagggg

SEQ ID NO: 321080 - RNA, 22 nt, Human
acagaauuaaugaaaauuacaa

SEQ ID NO: 321081 - RNA, 22 nt, Human
uagugauuaaaggcagaauguu

SEQ ID NO: 321082 - RNA, 22 nt, Human
agggccugggauguccuccuag

SEQ ID NO: 321083 - RNA, 19 nt, Human
gccaggagggcucuggcug

SEQ ID NO: 321084 - RNA, 22 nt, Human
ucuggccaacaaaaacuaaguc

SEQ ID NO: 321085 - RNA, 22 nt, Human
gcagagccugacgggauuuuuc

SEQ ID NO: 321086 - RNA, 22 nt, Human
aagacaauuugauacuaguugc

SEQ ID NO: 321087 - RNA, 22 nt, Human
ucaggccuuguccugaccuccu

SEQ ID NO: 321088 - RNA, 22 nt, Human
cugggagguggagguugcauug

SEQ ID NO: 321089 - RNA, 22 nt, Human
agucccagaucuccauucgguc

SEQ ID NO: 321090 - RNA, 22 nt, Human
auggagggugguaagacagaga

SEQ ID NO: 321091 - RNA, 22 nt, Human
cagcugcccauccugggaaaug

SEQ ID NO: 321092 - RNA, 22 nt, Human
gcucccagcauugcuucccagg

SEQ ID NO: 321093 - RNA, 22 nt, Human
auguagaaauuaggaugauagu

SEQ ID NO: 321094 - RNA, 22 nt, Human
caagagcuggagaggcagucua

SEQ ID NO: 321095 - RNA, 22 nt, Human
aggcucagaggugagcaucugc

SEQ ID NO: 321096 - RNA, 22 nt, Human
ucaggcugagaaaaucuggacc

SEQ ID NO: 321097 - RNA, 22 nt, Human
acuucuggugucauacugcauu

SEQ ID NO: 321098 - RNA, 22 nt, Human
gggcugucaugugucagugacc

SEQ ID NO: 321099 - RNA, 22 nt, Human
ggaccugccagaacucaggcua

SEQ ID NO: 321100 - RNA, 22 nt, Human
agcugcccccagggcugugcuu

SEQ ID NO: 321101 - RNA, 22 nt, Human
cugcucuggggaagccagaugu

SEQ ID NO: 321102 - RNA, 22 nt, Human
gcauuuccugugcuuggcauau

SEQ ID NO: 321103 - RNA, 22 nt, Human
gucugucucucuccagagugca

SEQ ID NO: 321104 - RNA, 18 nt, Human
agucuucugauccauuuu

SEQ ID NO: 321105 - RNA, 22 nt, Human
gcagcccaauggacugagacag

SEQ ID NO: 321106 - RNA, 22 nt, Human
guggagaccuccuaggaugugu

SEQ ID NO: 321107 - RNA, 22 nt, Human
uguuauugagguuacuuauaag

SEQ ID NO: 321108 - RNA, 22 nt, Human
gagaugagugggggaucucuca

SEQ ID NO: 321109 - RNA, 22 nt, Human
ugcugucaguuggcaggaugag

SEQ ID NO: 321110 - RNA, 22 nt, Human
gggccaggucggugaaugguca

SEQ ID NO: 321111 - RNA, 22 nt, Human
acugucuuccaggucuggaggu

SEQ ID NO: 321112 - RNA, 22 nt, Human
uuugacaugcaaagcacuuuag

SEQ ID NO: 321113 - RNA, 22 nt, Human
cuggguaaguuccuaaggcuca

SEQ ID NO: 321114 - RNA, 22 nt, Human
aggccuggugaaugaaguaucu

SEQ ID NO: 321115 - RNA, 22 nt, Human
acugagcucuugacugggaguu

SEQ ID NO: 321116 - RNA, 22 nt, Human
ggccagaaguuggaaaagagcc

SEQ ID NO: 321117 - RNA, 22 nt, Human
ggagagcagggaggcugcucug

SEQ ID NO: 321118 - RNA, 22 nt, Human
cugugucggacgugggcagcag

SEQ ID NO: 321119 - RNA, 22 nt, Human
aaaugcaucagcucauaagaga

SEQ ID NO: 321120 - RNA, 22 nt, Human
ccaguguucccucggguucaug

SEQ ID NO: 321121 - RNA, 22 nt, Human
cagucucuugcuucauuaguug

SEQ ID NO: 321122 - RNA, 22 nt, Human
cuggcagcucuacucagagccu

SEQ ID NO: 321123 - RNA, 22 nt, Human
ugaacagaucaauagaacugac

SEQ ID NO: 321124 - RNA, 22 nt, Human
ucugagaguacgggcugcgcgc

SEQ ID NO: 321125 - RNA, 22 nt, Human
augagaaagaguuguaucuaga

SEQ ID NO: 321126 - RNA, 22 nt, Human
auaggagaucaauaugcaauuu

SEQ ID NO: 321127 - RNA, 22 nt, Human
caggauggccccggggcugugc

SEQ ID NO: 321128 - RNA, 22 nt, Human
cuuguucaguccugacuuccug

SEQ ID NO: 321129 - RNA, 22 nt, Human
ggcuggcucagggcuugagaga

SEQ ID NO: 321130 - RNA, 22 nt, Human
aagggcuggcccugggaagagu

SEQ ID NO: 321131 - RNA, 22 nt, Human
uccagaguacggaagagucauc

SEQ ID NO: 321132 - RNA, 22 nt, Human
cagggacaauggcagagccuga

SEQ ID NO: 321133 - RNA, 22 nt, Human
uagauuucgcugcaucucaauc

SEQ ID NO: 321134 - RNA, 22 nt, Human
cagaugcuauguauuauguaug

SEQ ID NO: 321135 - RNA, 21 nt, Human
aggcagcucaggcccagagag

SEQ ID NO: 321136 - RNA, 22 nt, Human
auuccaguuggguucuaauaca

SEQ ID NO: 321137 - RNA, 19 nt, Human
cuguggcugaccucuggcc

SEQ ID NO: 321138 - RNA, 22 nt, Human
ggagcagacauaaccuuacaga

SEQ ID NO: 321139 - RNA, 22 nt, Human
acuucacagauauuuauuuggu

SEQ ID NO: 321140 - RNA, 22 nt, Human
aggcaucugaguuugcaagcuu

SEQ ID NO: 321141 - RNA, 22 nt, Human
agccauugaguuuuaugugcua

SEQ ID NO: 321142 - RNA, 22 nt, Human
uuagccauuuuauacaagugua

SEQ ID NO: 321143 - RNA, 20 nt, Human
aaaaacaguaaugcugaaga

SEQ ID NO: 321144 - RNA, 21 nt, Human
uucuucaguuuaauauaaaau

SEQ ID NO: 321145 - RNA, 22 nt, Human
aaguucaagagugacauauuag

SEQ ID NO: 321146 - RNA, 22 nt, Human
gcccagcacagcuggaagaguc

SEQ ID NO: 321147 - RNA, 22 nt, Human
cuggccuuggugcuugcagaca

SEQ ID NO: 321148 - RNA, 22 nt, Human
gaugggggccagggccugcuuu

SEQ ID NO: 321149 - RNA, 22 nt, Human
ucaccgccuugcccggccgggc

SEQ ID NO: 321150 - RNA, 22 nt, Human
aucaggauagugguuaccuggg

SEQ ID NO: 321151 - RNA, 22 nt, Human
uggaaauauacaaugugucucu

SEQ ID NO: 321152 - RNA, 22 nt, Human
gggagcugaauggcaauggaga

SEQ ID NO: 321153 - RNA, 22 nt, Human
agcucacaguguccuuccucaa

SEQ ID NO: 321154 - RNA, 22 nt, Human
gcugcccugucugcagcaggac

SEQ ID NO: 321155 - RNA, 22 nt, Human
cagcuggaucccugcagaacuu

SEQ ID NO: 321156 - RNA, 22 nt, Human
acaaaugcuuaguucaccaaaa

SEQ ID NO: 321157 - RNA, 22 nt, Human
ucucaguggcuuccucacuuuu

SEQ ID NO: 321158 - RNA, 22 nt, Human
auucugucuuuuuaaaauaaua

SEQ ID NO: 321159 - RNA, 22 nt, Human
agccagcuggugggucagcugg

SEQ ID NO: 321160 - RNA, 20 nt, Human
auuucaguguuugcaauuuc

SEQ ID NO: 321161 - RNA, 21 nt, Human
ccugggagaucagcugccuuc

SEQ ID NO: 321162 - RNA, 22 nt, Human
uugcauuuugguuguaaauaug

SEQ ID NO: 321163 - RNA, 22 nt, Human
uucuuuccacagaggggaugau

SEQ ID NO: 321164 - RNA, 19 nt, Human
ugagaggcuuaaggcagcu

SEQ ID NO: 321165 - RNA, 19 nt, Human
ugaggggcucacagucuca

SEQ ID NO: 321166 - RNA, 22 nt, Human
ccuggccacucagguguggggc

SEQ ID NO: 321167 - RNA, 22 nt, Human
ucucagagaggggccgggccuu

SEQ ID NO: 321168 - RNA, 22 nt, Human
uugcagcuuagugauguuaucu

SEQ ID NO: 321169 - RNA, 22 nt, Human
uuuaaucaggcaaagcauaaua

SEQ ID NO: 321170 - RNA, 22 nt, Human
gaaggccucacucugcagcaua

SEQ ID NO: 321171 - RNA, 22 nt, Human
auagugguuggauaugucagag

SEQ ID NO: 321172 - RNA, 22 nt, Human
aaagagaaaaagaucccggcuc

SEQ ID NO: 321173 - RNA, 22 nt, Human
aaagagcuaacauugccgagau

SEQ ID NO: 321174 - RNA, 22 nt, Human
augaaggcaguuaaacgucauc

SEQ ID NO: 321175 - RNA, 22 nt, Human
agacaggacacaagcugcauaa

SEQ ID NO: 321176 - RNA, 22 nt, Human
aguuacaaccaugacacaagca

SEQ ID NO: 321177 - RNA, 22 nt, Human
gugaaggauaaggaucuaaauu

SEQ ID NO: 321178 - RNA, 22 nt, Human
uaaaucccuacaucuguguuuu

SEQ ID NO: 321179 - RNA, 22 nt, Human
cagagcuggguuugggaaaccu

SEQ ID NO: 321180 - RNA, 22 nt, Human
caaggccaagguuuugugaacu

SEQ ID NO: 321181 - RNA, 22 nt, Human
ucacaggguguacaucaccuau

SEQ ID NO: 321182 - RNA, 22 nt, Human
aagaauuauugcaauacuagau

SEQ ID NO: 321183 - RNA, 22 nt, Human
uuccauaaugagauucccagcc

SEQ ID NO: 321184 - RNA, 22 nt, Human
ugugaaauauuuauauacucaa

SEQ ID NO: 321185 - RNA, 18 nt, Human
uccauuguucuacuguga

SEQ ID NO: 321186 - RNA, 22 nt, Human
gauuuucaugauaaacuuguga

SEQ ID NO: 321187 - RNA, 22 nt, Human
acagagguguguguaggacagu

SEQ ID NO: 321188 - RNA, 22 nt, Human
cuuuggcacagucucauuugau

SEQ ID NO: 321189 - RNA, 22 nt, Human
gcaggcagagaaggaacauuua

SEQ ID NO: 321190 - RNA, 22 nt, Human
agagaggcugggcguagggcuu

SEQ ID NO: 321191 - RNA, 22 nt, Human
auccaaaccuggacaugagugg

SEQ ID NO: 321192 - RNA, 22 nt, Human
uaaggucauggugaauaauaag

SEQ ID NO: 321193 - RNA, 22 nt, Human
agcuccuccugugccaggccag

SEQ ID NO: 321194 - RNA, 22 nt, Human
ccagggcuggugggagaugcug

SEQ ID NO: 321195 - RNA, 22 nt, Human
gcucucugucguuaugcuucau

SEQ ID NO: 321196 - RNA, 22 nt, Human
agcagccaguucucugugguag

SEQ ID NO: 321197 - RNA, 22 nt, Human
ucagucucaucaacucuauucc

SEQ ID NO: 321198 - RNA, 22 nt, Human
uacauuaacuuacguccacaug

SEQ ID NO: 321199 - RNA, 22 nt, Human
ucugccugaaauucacauguaa

SEQ ID NO: 321200 - RNA, 22 nt, Human
auuuaguguguauugcuauuau

SEQ ID NO: 321201 - RNA, 23 nt, Human
aaauucaguccuucaacucugag

SEQ ID NO: 321202 - RNA, 22 nt, Human
ucugugugcccaccugacaccu

SEQ ID NO: 321203 - RNA, 22 nt, Human
cucugaacucuugggcagcaug

SEQ ID NO: 321204 - RNA, 22 nt, Human
acauuucucauaggagagccac

SEQ ID NO: 321205 - RNA, 22 nt, Human
guggccagcaagugcugccucu

SEQ ID NO: 321206 - RNA, 22 nt, Human
agcugcuggggagggcagacac

SEQ ID NO: 321207 - RNA, 22 nt, Human
aaucugucguaguaaaaagcag

SEQ ID NO: 321208 - RNA, 23 nt, Human
uuucuucagaagccuugcgaggc

SEQ ID NO: 321209 - RNA, 22 nt, Human
caggagacaaguuagcagcuga

SEQ ID NO: 321210 - RNA, 18 nt, Human
aagcugcccucaggcagg

SEQ ID NO: 321211 - RNA, 21 nt, Human
acagauauuucauugaacauu

SEQ ID NO: 321212 - RNA, 22 nt, Human
cagucacauugcccugcauuua

SEQ ID NO: 321213 - RNA, 22 nt, Human
ucauccaguuguggagagggaa

SEQ ID NO: 321214 - RNA, 22 nt, Human
ucaaaguauuuuaacuguaucc

SEQ ID NO: 321215 - RNA, 22 nt, Human
ucucagagaugucaagagucua

SEQ ID NO: 321216 - RNA, 22 nt, Human
uggacagcgaaagugccuggga

SEQ ID NO: 321217 - RNA, 22 nt, Human
auacagaagaacuauagccacu

SEQ ID NO: 321218 - RNA, 22 nt, Human
cuuccucccggcccaugcucug

SEQ ID NO: 321219 - RNA, 22 nt, Human
ccagcugguguuccuuaggacc

SEQ ID NO: 321220 - RNA, 22 nt, Human
uugacacaguuuucucauuaag

SEQ ID NO: 321221 - RNA, 22 nt, Human
uaagaagcuucugcuaaugccu

SEQ ID NO: 321222 - RNA, 22 nt, Human
uuaagacauucagauauuucua

SEQ ID NO: 321223 - RNA, 22 nt, Human
cauugcacuccagcuugggcaa

SEQ ID NO: 321224 - RNA, 22 nt, Human
caggcacuggccagucagcaca

SEQ ID NO: 321225 - RNA, 22 nt, Human
gcucugagauugagccuuuggu

SEQ ID NO: 321226 - RNA, 22 nt, Human
agagcugcaggguggacccagg

SEQ ID NO: 321227 - RNA, 22 nt, Human
gugucccagccccacaggccug

SEQ ID NO: 321228 - RNA, 22 nt, Human
gcugccagcuuuccuuggcuga

SEQ ID NO: 321229 - RNA, 22 nt, Human
uuccaggaagcaguuagcagcc

SEQ ID NO: 321230 - RNA, 20 nt, Human
ggccacagggugcuggugga

SEQ ID NO: 321231 - RNA, 22 nt, Human
ccaguguucaucaagaaaaugu

SEQ ID NO: 321232 - RNA, 22 nt, Human
ucucaaaucaaacuuugagcuu

SEQ ID NO: 321233 - RNA, 22 nt, Human
uugaagcauuucuuugagcuuc

SEQ ID NO: 321234 - RNA, 22 nt, Human
uucaggauuguguuuuuccuga

SEQ ID NO: 321235 - RNA, 22 nt, Human
gaacacauguccuccuuggauu

SEQ ID NO: 321236 - RNA, 22 nt, Human
ucaaacuagccugacugguauu

SEQ ID NO: 321237 - RNA, 22 nt, Human
uuuugucuaagaacuuugcaaa

SEQ ID NO: 321238 - RNA, 22 nt, Human
gauuucaagcccccagagauuc

SEQ ID NO: 321239 - RNA, 22 nt, Human
ucacugcugcugccaugaugga

SEQ ID NO: 321240 - RNA, 22 nt, Human
agggcacaucugcugggaaugg

SEQ ID NO: 321241 - RNA, 17 nt, Human
gugcagggaugaaggau

SEQ ID NO: 321242 - RNA, 22 nt, Human
gcuuggaaguaggauugggaga

SEQ ID NO: 321243 - RNA, 22 nt, Human
aggcucugguuggcaaguaaag

SEQ ID NO: 321244 - RNA, 19 nt, Human
acaggcagaauugggugug

SEQ ID NO: 321245 - RNA, 22 nt, Human
uacauguguucuguuucaaguu

SEQ ID NO: 321246 - RNA, 23 nt, Human
cuggccuccgacacuggccaaga

SEQ ID NO: 321247 - RNA, 22 nt, Human
uuggcauuggagaugcaagaac

SEQ ID NO: 321248 - RNA, 20 nt, Human
uaaggcuguuuuguauuccu

SEQ ID NO: 321249 - RNA, 22 nt, Human
gcugccuguguggccacucacu

SEQ ID NO: 321250 - RNA, 22 nt, Human
acucagaaccauuuacucugag

SEQ ID NO: 321251 - RNA, 22 nt, Human
agacuuugagcucuuagagaag

SEQ ID NO: 321252 - RNA, 22 nt, Human
auucaaauuaaguuaauucagc

SEQ ID NO: 321253 - RNA, 22 nt, Human
uagggcaggggaggaaucugaa

SEQ ID NO: 321254 - RNA, 22 nt, Human
gcacccaggccggcgacugcag

SEQ ID NO: 321255 - RNA, 22 nt, Human
aaaucaaaagacauguguuuua

SEQ ID NO: 321256 - RNA, 22 nt, Human
ggacuggccggcgcugaggccc

SEQ ID NO: 321257 - RNA, 22 nt, Human
gggaugaauugagucagaaggg

SEQ ID NO: 321258 - RNA, 22 nt, Human
gaaggagcuaccaagacugaau

SEQ ID NO: 321259 - RNA, 22 nt, Human
uuggccuuaaccucucugugcc

SEQ ID NO: 321260 - RNA, 22 nt, Human
auguuuccagguucuuccuaug

SEQ ID NO: 321261 - RNA, 22 nt, Human
agaauuagucacaauuauagga

SEQ ID NO: 321262 - RNA, 22 nt, Human
acaguguuuaaaaaucagaucu

SEQ ID NO: 321263 - RNA, 22 nt, Human
cagagccucagaauccugugga

SEQ ID NO: 321264 - RNA, 22 nt, Human
uauaauccauucauugauuucu

SEQ ID NO: 321265 - RNA, 22 nt, Human
ucaguguuggagauaauugcac

SEQ ID NO: 321266 - RNA, 22 nt, Human
gggcugcuuuuaagggucucag

SEQ ID NO: 321267 - RNA, 21 nt, Human
ugcugaugucagagaagcaag

SEQ ID NO: 321268 - RNA, 22 nt, Human
ggggacaguuaaagaccaagac

SEQ ID NO: 321269 - RNA, 22 nt, Human
gaggacaggagacucacuguuu

SEQ ID NO: 321270 - RNA, 22 nt, Human
accucugcaacccuggaauggg

SEQ ID NO: 321271 - RNA, 22 nt, Human
auuguauuagcacaauacaauu

SEQ ID NO: 321272 - RNA, 17 nt, Human
ucugaggccucuaggag

SEQ ID NO: 321273 - RNA, 22 nt, Human
ccuauugacaauucucuucucc

SEQ ID NO: 321274 - RNA, 22 nt, Human
ucuuugcagaauuuaacuuugc

SEQ ID NO: 321275 - RNA, 22 nt, Human
auguucuuccaaaucuguaaca

SEQ ID NO: 321276 - RNA, 22 nt, Human
aaaguauuugugauuuuuacca

SEQ ID NO: 321277 - RNA, 22 nt, Human
ugcauuaucuuuaauguucuca

SEQ ID NO: 321278 - RNA, 22 nt, Human
cuggagcucuguguguuccuga

SEQ ID NO: 321279 - RNA, 22 nt, Human
ugugucagaaggcaauggggau

SEQ ID NO: 321280 - RNA, 22 nt, Human
uuucacaaucaaauggugaaau

SEQ ID NO: 321281 - RNA, 22 nt, Human
ggagugggaacaaugacauggu

SEQ ID NO: 321282 - RNA, 22 nt, Human
uccuccucacgcuguugcuugu

SEQ ID NO: 321283 - RNA, 22 nt, Human
agcagggcagcugaugcgcacg

SEQ ID NO: 321284 - RNA, 22 nt, Human
ucuggcucuccagugcucuuag

SEQ ID NO: 321285 - RNA, 22 nt, Human
gucccagaggacagggucacau

SEQ ID NO: 321286 - RNA, 22 nt, Human
uugaauaggacucagcagugau

SEQ ID NO: 321287 - RNA, 22 nt, Human
cucaguccgucccgcuaggugc

SEQ ID NO: 321288 - RNA, 22 nt, Human
ggcagagacuggguuggcagag

SEQ ID NO: 321289 - RNA, 22 nt, Human
uucuuacuacauuugcaggcua

SEQ ID NO: 321290 - RNA, 22 nt, Human
uuugaaguguuauuucuaucac

SEQ ID NO: 321291 - RNA, 22 nt, Human
acucagaguuugcguuccauac

SEQ ID NO: 321292 - RNA, 22 nt, Human
uagcagggaagaugaucagaau

SEQ ID NO: 321293 - RNA, 22 nt, Human
gcugccuucccggaaugucauc

SEQ ID NO: 321294 - RNA, 22 nt, Human
uaaugucaaggugauagauuug

SEQ ID NO: 321295 - RNA, 22 nt, Human
uggcucaggccacuucuuuuau

SEQ ID NO: 321296 - RNA, 22 nt, Human
ucuugauuacaaauaacaucau

SEQ ID NO: 321297 - RNA, 22 nt, Human
gcugucaccaaagcaggcacug

SEQ ID NO: 321298 - RNA, 22 nt, Human
acauuuaaauaugccuuauauu

SEQ ID NO: 321299 - RNA, 19 nt, Human
ugaagcaauaccauuuuug

SEQ ID NO: 321300 - RNA, 22 nt, Human
gggcugcugccaaucacagccu

SEQ ID NO: 321301 - RNA, 22 nt, Human
gcucugcuggaaguucucugga

SEQ ID NO: 321302 - RNA, 17 nt, Human
auuucacuuagcaugag

SEQ ID NO: 321303 - RNA, 22 nt, Human
gcugagggcauguguggcgacu

SEQ ID NO: 321304 - RNA, 22 nt, Human
uccuggauucugcccugaaggc

SEQ ID NO: 321305 - RNA, 22 nt, Human
ccugcagggugcugccacagau

SEQ ID NO: 321306 - RNA, 22 nt, Human
ugaaggaaugagggaguggguc

SEQ ID NO: 321307 - RNA, 23 nt, Human
ugcauuauccucucugaagacca

SEQ ID NO: 321308 - RNA, 19 nt, Human
agcaacaccguuuauuucc

SEQ ID NO: 321309 - RNA, 22 nt, Human
gagccugagugcugccuccccu

SEQ ID NO: 321310 - RNA, 22 nt, Human
gugccuggcaugcgccggugcu

SEQ ID NO: 321311 - RNA, 22 nt, Human
acuccuggggcugccaucacag

SEQ ID NO: 321312 - RNA, 22 nt, Human
uacauagcaaggaaaugacaga

SEQ ID NO: 321313 - RNA, 22 nt, Human
uauacuuuccugcaacuuugau

SEQ ID NO: 321314 - RNA, 22 nt, Human
gacaauaaaaugaucuuacagu

SEQ ID NO: 321315 - RNA, 22 nt, Human
uggcccugcagaacuagccugg

SEQ ID NO: 321316 - RNA, 22 nt, Human
uacaaaguuugagaaugcuuuc

SEQ ID NO: 321317 - RNA, 22 nt, Human
ccaggccaaauucagucagcag

SEQ ID NO: 321318 - RNA, 22 nt, Human
acccaggccugagagacaggag

SEQ ID NO: 321319 - RNA, 22 nt, Human
ccaguguucauaauuuuacacu

SEQ ID NO: 321320 - RNA, 20 nt, Human
aucaggauucuugcuuuguu

SEQ ID NO: 321321 - RNA, 22 nt, Human
gagcuuccauggacgccaucug

SEQ ID NO: 321322 - RNA, 22 nt, Human
guaggcagucucucaggugauc

SEQ ID NO: 321323 - RNA, 23 nt, Human
ugcagccacucaggagcucagug

SEQ ID NO: 321324 - RNA, 22 nt, Human
uguauaaauuuaaauuccugcu

SEQ ID NO: 321325 - RNA, 22 nt, Human
cugccuggggaaugugaggauu

SEQ ID NO: 321326 - RNA, 22 nt, Human
aaggcugagacagcacaggucc

SEQ ID NO: 321327 - RNA, 22 nt, Human
gagccuggggacccuccugagu

SEQ ID NO: 321328 - RNA, 22 nt, Human
cagccagguucaaguccuuaua

SEQ ID NO: 321329 - RNA, 22 nt, Human
aauucuguaacuuuacugaauu

SEQ ID NO: 321330 - RNA, 22 nt, Human
ccaggagcagauauggacauaa

SEQ ID NO: 321331 - RNA, 22 nt, Human
acaaaugucuccucuuuuguua

SEQ ID NO: 321332 - RNA, 22 nt, Human
gccacagucacugcugcagggg

SEQ ID NO: 321333 - RNA, 22 nt, Human
agagauucauguuuacuguagg

SEQ ID NO: 321334 - RNA, 22 nt, Human
cugggccucaaucucagaguuu

SEQ ID NO: 321335 - RNA, 22 nt, Human
agagcuguggauaguccuggau

SEQ ID NO: 321336 - RNA, 22 nt, Human
aaugggagagaacacaaagucc

SEQ ID NO: 321337 - RNA, 22 nt, Human
cacauuucugugagucaauauu

SEQ ID NO: 321338 - RNA, 22 nt, Human
ggcacugaucugauuucccucc

SEQ ID NO: 321339 - RNA, 22 nt, Human
agcagcuccugccaugagugcu

SEQ ID NO: 321340 - RNA, 22 nt, Human
uccaguggugguuugaagggca

SEQ ID NO: 321341 - RNA, 22 nt, Human
caauaguucgguccugaaggcc

SEQ ID NO: 321342 - RNA, 22 nt, Human
cagggcuguuagcugcugcucu

SEQ ID NO: 321343 - RNA, 22 nt, Human
agcucccagaaggcccugcgcc

SEQ ID NO: 321344 - RNA, 22 nt, Human
cugggaggcggagguuguagug

SEQ ID NO: 321345 - RNA, 22 nt, Human
aaauauaauuucugccucaaua

SEQ ID NO: 321346 - RNA, 22 nt, Human
ucuuuauugcuacugguuuguc

SEQ ID NO: 321347 - RNA, 22 nt, Human
agcuccugugugaagccucccu

SEQ ID NO: 321348 - RNA, 22 nt, Human
uuucaugugcaauuagcaauau

SEQ ID NO: 321349 - RNA, 22 nt, Human
uaccuuuugcuuauuaugacac

SEQ ID NO: 321350 - RNA, 21 nt, Human
auacauucuauuaagcauuua

SEQ ID NO: 321351 - RNA, 22 nt, Human
ccugguggacagcagccagcag

SEQ ID NO: 321352 - RNA, 23 nt, Human
uccagcucccuucaauggcacug

SEQ ID NO: 321353 - RNA, 22 nt, Human
auuucuuccucugucaguaacu

SEQ ID NO: 321354 - RNA, 23 nt, Human
ucugucacuuucugcuguggagu

SEQ ID NO: 321355 - RNA, 22 nt, Human
gcugccucugcgacucugggcg

SEQ ID NO: 321356 - RNA, 22 nt, Human
cagcuccugcagcuggcuccca

SEQ ID NO: 321357 - RNA, 22 nt, Human
ugaaggagcugauguaaggggu

SEQ ID NO: 321358 - RNA, 22 nt, Human
aagacagaccacgugacagggc

SEQ ID NO: 321359 - RNA, 22 nt, Human
uugaagcauuguggcuuguauu

SEQ ID NO: 321360 - RNA, 22 nt, Human
caggggcuguggcacauggugu

SEQ ID NO: 321361 - RNA, 22 nt, Human
ggccugcacagagguggcucua

SEQ ID NO: 321362 - RNA, 22 nt, Human
gcuugaaaauucauagguauuu

SEQ ID NO: 321363 - RNA, 22 nt, Human
ccaaaugcuccacugacuuugg

SEQ ID NO: 321364 - RNA, 22 nt, Human
cagggcagccaggccccguggg

SEQ ID NO: 321365 - RNA, 22 nt, Human
gcugggaagugcaagaucaagg

SEQ ID NO: 321366 - RNA, 22 nt, Human
cccucugaccuccugccacagu

SEQ ID NO: 321367 - RNA, 22 nt, Human
ucucucagaggaagaggcagug

SEQ ID NO: 321368 - RNA, 22 nt, Human
gcaggugggggucggugcaucu

SEQ ID NO: 321369 - RNA, 22 nt, Human
aacauucaaaacccaguucagu

SEQ ID NO: 321370 - RNA, 22 nt, Human
caggagcuacucagguuggguu

SEQ ID NO: 321371 - RNA, 22 nt, Human
ggaagggcaaaagagaugaacu

SEQ ID NO: 321372 - RNA, 22 nt, Human
acugcuuacccggccugacuuc

SEQ ID NO: 321373 - RNA, 18 nt, Human
ugggcugccuggccucug

SEQ ID NO: 321374 - RNA, 22 nt, Human
ccuggcagcagcacaugccuuc

SEQ ID NO: 321375 - RNA, 22 nt, Human
cagucuuuguucccauuacuga

SEQ ID NO: 321376 - RNA, 22 nt, Human
ucagaagcugguguccuuugaa

SEQ ID NO: 321377 - RNA, 17 nt, Human
aaugaaugaauucuuug

SEQ ID NO: 321378 - RNA, 22 nt, Human
ugucaugggcauuuauugaggg

SEQ ID NO: 321379 - RNA, 22 nt, Human
gcaguggcuaagcucgcaugca

SEQ ID NO: 321380 - RNA, 22 nt, Human
cuuguccccagcagguugguuu

SEQ ID NO: 321381 - RNA, 22 nt, Human
uggcugggugcuauccaguacu

SEQ ID NO: 321382 - RNA, 22 nt, Human
acaggugguaaaauggacuguc

SEQ ID NO: 321383 - RNA, 22 nt, Human
aggccugaaggaagaugagcug

SEQ ID NO: 321384 - RNA, 22 nt, Human
ucuguucagaauuguaacacuc

SEQ ID NO: 321385 - RNA, 22 nt, Human
gaaggaagugcucauacuaguu

SEQ ID NO: 321386 - RNA, 22 nt, Human
uuuuccucugcagagcaguuag

SEQ ID NO: 321387 - RNA, 22 nt, Human
agcuuuauuugucauucacggc

SEQ ID NO: 321388 - RNA, 22 nt, Human
uucauggaucaugccuuuugug

SEQ ID NO: 321389 - RNA, 22 nt, Human
ugcugucuuccaggauggugaa

SEQ ID NO: 321390 - RNA, 22 nt, Human
uaggacaugcuacauaaauagg

SEQ ID NO: 321391 - RNA, 22 nt, Human
ccucugugucagggaagagacu

SEQ ID NO: 321392 - RNA, 22 nt, Human
uccuggagaauccugccaccug

SEQ ID NO: 321393 - RNA, 22 nt, Human
uauugaaauucuucauguccuc

SEQ ID NO: 321394 - RNA, 18 nt, Human
gcugccugcauuccucac

SEQ ID NO: 321395 - RNA, 22 nt, Human
agaaaugcauuagcacauauag

SEQ ID NO: 321396 - RNA, 22 nt, Human
cuggagccuucaccaggggaaa

SEQ ID NO: 321397 - RNA, 19 nt, Human
cugugcaggccgggcugag

SEQ ID NO: 321398 - RNA, 22 nt, Human
ugucuucaguaaaauacacuau

SEQ ID NO: 321399 - RNA, 22 nt, Human
ggcaguggguggaucucaggga

SEQ ID NO: 321400 - RNA, 22 nt, Human
uuuuugaaggcugaugugauua

SEQ ID NO: 321401 - RNA, 22 nt, Human
ucagccugcuccaagugcugcc

SEQ ID NO: 321402 - RNA, 22 nt, Human
caguguccucagccagcagcua

SEQ ID NO: 321403 - RNA, 22 nt, Human
cauacuuugggauaagagugga

SEQ ID NO: 321404 - RNA, 22 nt, Human
guuuuauaauugcuucauaaga

SEQ ID NO: 321405 - RNA, 22 nt, Human
gauacaaauucaugucugaauu

SEQ ID NO: 321406 - RNA, 22 nt, Human
aaauguguauaugaaacaugau

SEQ ID NO: 321407 - RNA, 19 nt, Human
cgcaggagccgaggugacc

SEQ ID NO: 321408 - RNA, 22 nt, Human
uuaaacagacaguaaaugaaac

SEQ ID NO: 321409 - RNA, 22 nt, Human
agugcauuauauguuucaaugg

SEQ ID NO: 321410 - RNA, 22 nt, Human
augggcuguccuaguccagccc

SEQ ID NO: 321411 - RNA, 22 nt, Human
caaucccaucaccaucugcucu

SEQ ID NO: 321412 - RNA, 22 nt, Human
cagaguggcacucugcuggaug

SEQ ID NO: 321413 - RNA, 22 nt, Human
agcugccacugagggugcacag

SEQ ID NO: 321414 - RNA, 22 nt, Human
gccagacacuccccugggcagg

SEQ ID NO: 321415 - RNA, 18 nt, Human
uguacaguuaugagcauu

SEQ ID NO: 321416 - RNA, 22 nt, Human
agagcugggacuuggacucaau

SEQ ID NO: 321417 - RNA, 22 nt, Human
agagauggccuuaggugggaau

SEQ ID NO: 321418 - RNA, 22 nt, Human
uuugaaaggaauuaggaugaca

SEQ ID NO: 321419 - RNA, 22 nt, Human
cacugggcaauucugagccuaa

SEQ ID NO: 321420 - RNA, 22 nt, Human
gcacagaacagagaaauagcca

SEQ ID NO: 321421 - RNA, 22 nt, Human
agccagccaguucacuaggaaa

SEQ ID NO: 321422 - RNA, 22 nt, Human
cagggccauaucuugugcacca

SEQ ID NO: 321423 - RNA, 22 nt, Human
gacauucacagguaaacauucc

SEQ ID NO: 321424 - RNA, 22 nt, Human
agaggccuaauugcuacccuuu

SEQ ID NO: 321425 - RNA, 22 nt, Human
ggcugggcaggucugcacaggg

SEQ ID NO: 321426 - RNA, 22 nt, Human
ggacuucuaagugccagacacu

SEQ ID NO: 321427 - RNA, 22 nt, Human
ggaaggaucuggcugaaaucca

SEQ ID NO: 321428 - RNA, 22 nt, Human
ucauuauccuaguaucuugaau

SEQ ID NO: 321429 - RNA, 22 nt, Human
uucuuucccuuccagcagcucc

SEQ ID NO: 321430 - RNA, 21 nt, Human
uggcucugagccucauggcug

SEQ ID NO: 321431 - RNA, 22 nt, Human
auggcaggcccagguguucauu

SEQ ID NO: 321432 - RNA, 22 nt, Human
ucucuacagacacuguugacuu

SEQ ID NO: 321433 - RNA, 22 nt, Human
aaggacuccaauucuuucaucu

SEQ ID NO: 321434 - RNA, 19 nt, Human
uggcaggcccaggauggac

SEQ ID NO: 321435 - RNA, 22 nt, Human
cccucugcugccuggcuggguc

SEQ ID NO: 321436 - RNA, 22 nt, Human
ugaauggucacugagcaucugu

SEQ ID NO: 321437 - RNA, 22 nt, Human
uacagcauguccuuagcaaggc

SEQ ID NO: 321438 - RNA, 22 nt, Human
auguucuuguucaaaugucagu

SEQ ID NO: 321439 - RNA, 22 nt, Human
gcugccagucuaaugggaaaca

SEQ ID NO: 321440 - RNA, 22 nt, Human
cacaggagcuguggggcagugu

SEQ ID NO: 321441 - RNA, 22 nt, Human
ucagaaagaacacaggcaguag

SEQ ID NO: 321442 - RNA, 22 nt, Human
acaguguucuugauauuacagu

SEQ ID NO: 321443 - RNA, 22 nt, Human
gcucugucuucagcacacagua

SEQ ID NO: 321444 - RNA, 22 nt, Human
ucaugcccagagcaguaaauua

SEQ ID NO: 321445 - RNA, 20 nt, Human
aggcugccaggucucacauc

SEQ ID NO: 321446 - RNA, 22 nt, Human
uccugguggugccggugcccgg

SEQ ID NO: 321447 - RNA, 22 nt, Human
ggccugagcucuggggaggcaa

SEQ ID NO: 321448 - RNA, 22 nt, Human
auauuucuugagcaccugguau

SEQ ID NO: 321449 - RNA, 22 nt, Human
agaagccaauucugugugaguc

SEQ ID NO: 321450 - RNA, 22 nt, Human
ugcuggcuguauaugugagagu

SEQ ID NO: 321451 - RNA, 22 nt, Human
agugcuuuagcauccaacuguc

SEQ ID NO: 321452 - RNA, 22 nt, Human
auggaguucuuuaaauucacag

SEQ ID NO: 321453 - RNA, 22 nt, Human
uggcagcaguggagguagaaag

SEQ ID NO: 321454 - RNA, 22 nt, Human
gcacaugagcugcugggauggg

SEQ ID NO: 321455 - RNA, 21 nt, Human
agggaaagaaaaugagcuaau

SEQ ID NO: 321456 - RNA, 22 nt, Human
ccugcagguaaggcuaacugcc

SEQ ID NO: 321457 - RNA, 22 nt, Human
acagucuacuugagcuuguaua

SEQ ID NO: 321458 - RNA, 19 nt, Human
uuucaauggcuuagagaaa

SEQ ID NO: 321459 - RNA, 22 nt, Human
aaggcaguaaaaucuaccuugc

SEQ ID NO: 321460 - RNA, 22 nt, Human
auguaucagauaaagcaugugg

SEQ ID NO: 321461 - RNA, 22 nt, Human
cacugagcugauagaauuccag

SEQ ID NO: 321462 - RNA, 22 nt, Human
gggagacaaggagaaccaaaga

SEQ ID NO: 321463 - RNA, 22 nt, Human
aaggcacugaacuuaaauucug

SEQ ID NO: 321464 - RNA, 22 nt, Human
gcuucuggaggagcugggcuga

SEQ ID NO: 321465 - RNA, 22 nt, Human
cucacaggcaucucaucaggcu

SEQ ID NO: 321466 - RNA, 17 nt, Human
aaucuguuuacagucag

SEQ ID NO: 321467 - RNA, 22 nt, Human
ugugcuucagguugucgccacg

SEQ ID NO: 321468 - RNA, 22 nt, Human
aacaaaugauaccaguucucaa

SEQ ID NO: 321469 - RNA, 22 nt, Human
ggucccagguugacagggagac

SEQ ID NO: 321470 - RNA, 22 nt, Human
cugaggcucccucgggucugcu

SEQ ID NO: 321471 - RNA, 22 nt, Human
gaugaaaugcugagccugaguu

SEQ ID NO: 321472 - RNA, 21 nt, Human
cugccuugaaugguacuggga

SEQ ID NO: 321473 - RNA, 22 nt, Human
aucuggcucucucauuuacaaa

SEQ ID NO: 321474 - RNA, 22 nt, Human
uccauuuucaucucauguauaa

SEQ ID NO: 321475 - RNA, 22 nt, Human
cagcaugcaaguccagaugugg

SEQ ID NO: 321476 - RNA, 22 nt, Human
uggaagggggaagacagcucug

SEQ ID NO: 321477 - RNA, 22 nt, Human
ccauggccgccgcugcucagga

SEQ ID NO: 321478 - RNA, 22 nt, Human
cuccuggacauggagcggagga

SEQ ID NO: 321479 - RNA, 22 nt, Human
uggcucagugacauuccuccca

SEQ ID NO: 321480 - RNA, 22 nt, Human
gcuucucuggccugcagggcau

SEQ ID NO: 321481 - RNA, 22 nt, Human
aagauuucugcuccugagagaa

SEQ ID NO: 321482 - RNA, 22 nt, Human
gagguagcaugcuggaagggac

SEQ ID NO: 321483 - RNA, 22 nt, Human
gcacagaagagcuuuggaauga

SEQ ID NO: 321484 - RNA, 22 nt, Human
gguggagcuggaccaggagagg

SEQ ID NO: 321485 - RNA, 22 nt, Human
ucccagagguugagucacuuau

SEQ ID NO: 321486 - RNA, 22 nt, Human
uguuaaauguuccuuuacugga

SEQ ID NO: 321487 - RNA, 22 nt, Human
uuuucacacaaggugauaaguu

SEQ ID NO: 321488 - RNA, 22 nt, Human
caggaaugacugcagauggggc

SEQ ID NO: 321489 - RNA, 22 nt, Human
uuaauuuauguccaaaccagau

SEQ ID NO: 321490 - RNA, 22 nt, Human
aaaggugacugcagcagcuauu

SEQ ID NO: 321491 - RNA, 21 nt, Human
gauaaaaugggccuugguccu

SEQ ID NO: 321492 - RNA, 22 nt, Human
agucuugcucuugcaucugcuu

SEQ ID NO: 321493 - RNA, 22 nt, Human
accaccccaaaugaaccucugu

SEQ ID NO: 321494 - RNA, 19 nt, Human
ucucaauguucagaaagcu

SEQ ID NO: 321495 - RNA, 22 nt, Human
cagggcagagggaaacuccuuu

SEQ ID NO: 321496 - RNA, 22 nt, Human
uggaagcagugauucuugucug

SEQ ID NO: 321497 - RNA, 22 nt, Human
cagcugagaccagaaugcaggu

SEQ ID NO: 321498 - RNA, 22 nt, Human
ccaggccagcaggcacaccugc

SEQ ID NO: 321499 - RNA, 22 nt, Human
gcaggagcagucaggggcagcu

SEQ ID NO: 321500 - RNA, 22 nt, Human
auuugcagagcucugaauuuug

SEQ ID NO: 321501 - RNA, 22 nt, Human
ucacugcaaucucugccuucca

SEQ ID NO: 321502 - RNA, 20 nt, Human
guugaaaguaauaugaugcu

SEQ ID NO: 321503 - RNA, 20 nt, Human
accaauguuagcuuaguacu

SEQ ID NO: 321504 - RNA, 19 nt, Human
aggcagcacccaguccuug

SEQ ID NO: 321505 - RNA, 22 nt, Human
aguaaaaauugaggugcaaaau

SEQ ID NO: 321506 - RNA, 21 nt, Human
augacagaugcugcagaucgu

SEQ ID NO: 321507 - RNA, 22 nt, Human
aagagcuggagcugcuacagga

SEQ ID NO: 321508 - RNA, 22 nt, Human
gggucuggacggcugcaggaag

SEQ ID NO: 321509 - RNA, 21 nt, Human
uggcagaguugaguaguuaug

SEQ ID NO: 321510 - RNA, 22 nt, Human
gaccugccugagcugccucugc

SEQ ID NO: 321511 - RNA, 22 nt, Human
ugggcucuccuggaggacaaca

SEQ ID NO: 321512 - RNA, 22 nt, Human
gggcagcugcagggauggugac

SEQ ID NO: 321513 - RNA, 22 nt, Human
cugacucuccucaagcauaaau

SEQ ID NO: 321514 - RNA, 22 nt, Human
cagcccugcuuccccgcuaguu

SEQ ID NO: 321515 - RNA, 22 nt, Human
cucccagggccaucgagucacu

SEQ ID NO: 321516 - RNA, 22 nt, Human
guccucuggccuuucccaggac

SEQ ID NO: 321517 - RNA, 22 nt, Human
accugccuauggagccacaugg

SEQ ID NO: 321518 - RNA, 22 nt, Human
cagcagcaaaucuagaagagga

SEQ ID NO: 321519 - RNA, 22 nt, Human
agacaaauggaguaugagcaac

SEQ ID NO: 321520 - RNA, 22 nt, Human
aaauugcucuuuaaaaguacug

SEQ ID NO: 321521 - RNA, 22 nt, Human
uccugcugagcgucugucauuu

SEQ ID NO: 321522 - RNA, 17 nt, Human
ccucagcuucuuuccuc

SEQ ID NO: 321523 - RNA, 22 nt, Human
ucagggcauccauugccuguug

SEQ ID NO: 321524 - RNA, 22 nt, Human
cggcuggguucggcugcaggcc

SEQ ID NO: 321525 - RNA, 19 nt, Human
agguggucuaggcuggaga

SEQ ID NO: 321526 - RNA, 22 nt, Human
gcagcuggagcaucuucucauc

SEQ ID NO: 321527 - RNA, 22 nt, Human
aagauucagccaaauuguucau

SEQ ID NO: 321528 - RNA, 22 nt, Human
gagcuggcaggaggcuccccga

SEQ ID NO: 321529 - RNA, 22 nt, Human
ccaaggagcaaguuuacaccug

SEQ ID NO: 321530 - RNA, 20 nt, Human
agacaaaaugacuucaugca

SEQ ID NO: 321531 - RNA, 22 nt, Human
auugacaagcaguaugucuuag

SEQ ID NO: 321532 - RNA, 22 nt, Human
auuuccaggagaaaggauuuua

SEQ ID NO: 321533 - RNA, 22 nt, Human
cagcccuggccucuucgcuuuc

SEQ ID NO: 321534 - RNA, 22 nt, Human
cuggaguuagaguagacacuga

SEQ ID NO: 321535 - RNA, 22 nt, Human
ccuggaggagcgcugaccagcu

SEQ ID NO: 321536 - RNA, 22 nt, Human
ucaaagucuaucuguaauuacu

SEQ ID NO: 321537 - RNA, 22 nt, Human
ccuccagcgcgauccacuccgg

SEQ ID NO: 321538 - RNA, 22 nt, Human
uuuuagauaguuuaacugcacu

SEQ ID NO: 321539 - RNA, 22 nt, Human
cucuucuuggcccccaugaggg

SEQ ID NO: 321540 - RNA, 22 nt, Human
caguuucugggcguucacaggu

SEQ ID NO: 321541 - RNA, 22 nt, Human
cuccucacacccacugcaacca

SEQ ID NO: 321542 - RNA, 22 nt, Human
uuugugaaaugaagucacaacu

SEQ ID NO: 321543 - RNA, 22 nt, Human
aucugucagccugggauuaggg

SEQ ID NO: 321544 - RNA, 22 nt, Human
uccuggaggcaaaugaagacuc

SEQ ID NO: 321545 - RNA, 22 nt, Human
uuuuuauaacucuuuugugaca

SEQ ID NO: 321546 - RNA, 22 nt, Human
ugccuugguucucuacuuggag

SEQ ID NO: 321547 - RNA, 22 nt, Human
auuguguaauuuucagcucaua

SEQ ID NO: 321548 - RNA, 21 nt, Human
agagagaaggccauauggucc

SEQ ID NO: 321549 - RNA, 22 nt, Human
aaagacugguguguuacauaua

SEQ ID NO: 321550 - RNA, 22 nt, Human
ugccagcacuucuggcugucug

SEQ ID NO: 321551 - RNA, 22 nt, Human
cuggcagucugccucuucacug

SEQ ID NO: 321552 - RNA, 22 nt, Human
agcuguguggugucugacagcu

SEQ ID NO: 321553 - RNA, 22 nt, Human
acagagauguggaugagggauu

SEQ ID NO: 321554 - RNA, 22 nt, Human
ucucagggcgcagugaggcagu

SEQ ID NO: 321555 - RNA, 22 nt, Human
ucaguguugaauuuuuugcaaa

SEQ ID NO: 321556 - RNA, 22 nt, Human
ugcuggcuacugauggcaggcc

SEQ ID NO: 321557 - RNA, 22 nt, Human
auaguaacuggcauguuuauga

SEQ ID NO: 321558 - RNA, 22 nt, Human
uauaaaugccaggacuuuagau

SEQ ID NO: 321559 - RNA, 20 nt, Human
uuugucuguuaaguguuucu

SEQ ID NO: 321560 - RNA, 21 nt, Human
auucugucaucccagcuacuu

SEQ ID NO: 321561 - RNA, 22 nt, Human
acacaggaagucagcacugaug

SEQ ID NO: 321562 - RNA, 22 nt, Human
aaaucaguuagugguaggauug

SEQ ID NO: 321563 - RNA, 22 nt, Human
gugccugggguugagcuaugaa

SEQ ID NO: 321564 - RNA, 22 nt, Human
aggacuucuccgauaagucaga

SEQ ID NO: 321565 - RNA, 22 nt, Human
gcugggagcaaagccaugcaua

SEQ ID NO: 321566 - RNA, 22 nt, Human
augagcuguaagguggcuuccu

SEQ ID NO: 321567 - RNA, 23 nt, Human
ucagagaaguuguaggcugggga

SEQ ID NO: 321568 - RNA, 22 nt, Human
guaaaguucuauuugaauuuag

SEQ ID NO: 321569 - RNA, 22 nt, Human
acacacagguaaaggagccugg

SEQ ID NO: 321570 - RNA, 22 nt, Human
uucugucagcugcuuugucuca

SEQ ID NO: 321571 - RNA, 22 nt, Human
cugccuuccaaccccagacucc

SEQ ID NO: 321572 - RNA, 22 nt, Human
ucccagagucagagguggggcc

SEQ ID NO: 321573 - RNA, 22 nt, Human
auguagaagcugacagugcugu

SEQ ID NO: 321574 - RNA, 22 nt, Human
ucuggcuccacucugugcaugc

SEQ ID NO: 321575 - RNA, 22 nt, Human
gggcucuggauggagccugcag

SEQ ID NO: 321576 - RNA, 22 nt, Human
uaacagaaaggcucaggugcuc

SEQ ID NO: 321577 - RNA, 22 nt, Human
auuacucugucugccucugacc

SEQ ID NO: 321578 - RNA, 22 nt, Human
uuacuuuggguccugcuuauaa

SEQ ID NO: 321579 - RNA, 22 nt, Human
gaaauacaaagccagccauuuu

SEQ ID NO: 321580 - RNA, 22 nt, Human
acagaauacuacagacugguua

SEQ ID NO: 321581 - RNA, 22 nt, Human
acaguggagaaggcaugaggcu

SEQ ID NO: 321582 - RNA, 22 nt, Human
ugcagggcacacgcacgggugu

SEQ ID NO: 321583 - RNA, 22 nt, Human
gcaguguugagccagcuggggg

SEQ ID NO: 321584 - RNA, 22 nt, Human
uaugcuuucauucauaugugag

SEQ ID NO: 321585 - RNA, 22 nt, Human
ccacagaaaguugucuagagua

SEQ ID NO: 321586 - RNA, 18 nt, Human
gagaggcccggcugugcc

SEQ ID NO: 321587 - RNA, 22 nt, Human
ugccuguccugaggaugagggu

SEQ ID NO: 321588 - RNA, 22 nt, Human
ugguaaaguguacugaauauga

SEQ ID NO: 321589 - RNA, 22 nt, Human
auguaucaugcaggguccauga

SEQ ID NO: 321590 - RNA, 22 nt, Human
gggcagcagagcccugccgagu

SEQ ID NO: 321591 - RNA, 22 nt, Human
cagugcagccaaggacaggcac

SEQ ID NO: 321592 - RNA, 22 nt, Human
gcuucauuacugacagucugug

SEQ ID NO: 321593 - RNA, 22 nt, Human
cccaggucugugccagcucuga

SEQ ID NO: 321594 - RNA, 18 nt, Human
aggcccuggccucgaaca

SEQ ID NO: 321595 - RNA, 22 nt, Human
gcaguguuucccagagauggaa

SEQ ID NO: 321596 - RNA, 22 nt, Human
cuggcuucugggccagggcaga

SEQ ID NO: 321597 - RNA, 22 nt, Human
ggucagguuuuuaggagugacc

SEQ ID NO: 321598 - RNA, 22 nt, Human
ucaguuuugauuccugguucuc

SEQ ID NO: 321599 - RNA, 22 nt, Human
ucagagcuaaggggagagcaaa

SEQ ID NO: 321600 - RNA, 17 nt, Human
gucauucucagaaaaug

SEQ ID NO: 321601 - RNA, 22 nt, Human
ccugucugcggaggaguggaag

SEQ ID NO: 321602 - RNA, 22 nt, Human
cagagcaggcccacugcccucc

SEQ ID NO: 321603 - RNA, 22 nt, Human
ggcugcugaguuggccaggaga

SEQ ID NO: 321604 - RNA, 22 nt, Human
gccuggagaaaggaagguggga

SEQ ID NO: 321605 - RNA, 22 nt, Human
gucuggggaagucagggcauca

SEQ ID NO: 321606 - RNA, 22 nt, Human
uccagggaucuuuagagucuuu

SEQ ID NO: 321607 - RNA, 22 nt, Human
ugcagugccucggcagugcagc

SEQ ID NO: 321608 - RNA, 22 nt, Human
aagcugccaccagcccagggca

SEQ ID NO: 321609 - RNA, 22 nt, Human
ucuucauauauaaaguggaaua

SEQ ID NO: 321610 - RNA, 22 nt, Human
uagcagcucugauucugggccc

SEQ ID NO: 321611 - RNA, 22 nt, Human
aagggcaggcacccacccucac

SEQ ID NO: 321612 - RNA, 22 nt, Human
acuccuggguugcaguccucaa

SEQ ID NO: 321613 - RNA, 22 nt, Human
cagggcugugcccaucuucccc

SEQ ID NO: 321614 - RNA, 22 nt, Human
ccaccccaaaugaagaccucuc

SEQ ID NO: 321615 - RNA, 22 nt, Human
gcaugcugcaccagagccucuc

SEQ ID NO: 321616 - RNA, 22 nt, Human
cauguacaguuuuucuguccug

SEQ ID NO: 321617 - RNA, 22 nt, Human
gagggucccgagcccugucaga

SEQ ID NO: 321618 - RNA, 22 nt, Human
ccugggucacucaggcaggcgg

SEQ ID NO: 321619 - RNA, 22 nt, Human
ugcauauuuguaugauguuuag

SEQ ID NO: 321620 - RNA, 22 nt, Human
aagggccauaacuugcaguguu

SEQ ID NO: 321621 - RNA, 22 nt, Human
aggcucugaucagguggcugug

SEQ ID NO: 321622 - RNA, 22 nt, Human
ccaggaugacccccacuuuccu

SEQ ID NO: 321623 - RNA, 22 nt, Human
aaggagcucccggcagaccagg

SEQ ID NO: 321624 - RNA, 21 nt, Human
ucccagagugcuugggacugc

SEQ ID NO: 321625 - RNA, 22 nt, Human
uguauuuucugaagauaaucaa

SEQ ID NO: 321626 - RNA, 22 nt, Human
auaauucagguuuucuggcaca

SEQ ID NO: 321627 - RNA, 22 nt, Human
accuuaaaacugacacauggag

SEQ ID NO: 321628 - RNA, 22 nt, Human
cacagcugucagcugaccuagg

SEQ ID NO: 321629 - RNA, 21 nt, Human
aggucccagguuugggcagca

SEQ ID NO: 321630 - RNA, 22 nt, Human
ugucuuuucuacuguaagcaua

SEQ ID NO: 321631 - RNA, 22 nt, Human
ccaguccucagauggucugugc

SEQ ID NO: 321632 - RNA, 21 nt, Human
ccuucuccacagggucuccgg

SEQ ID NO: 321633 - RNA, 22 nt, Human
agugcuuugguauagaacuauu

SEQ ID NO: 321634 - RNA, 22 nt, Human
uguggccuccccacuucugggg

SEQ ID NO: 321635 - RNA, 22 nt, Human
agggccagggaagcuguauuuu

SEQ ID NO: 321636 - RNA, 22 nt, Human
aucuucucaagcagcauccugu

SEQ ID NO: 321637 - RNA, 22 nt, Human
ugcacacaaaugugaacgugcc

SEQ ID NO: 321638 - RNA, 22 nt, Human
cuggagaggcugggaacagguu

SEQ ID NO: 321639 - RNA, 22 nt, Human
ggcugcugguggaaugguaggc

SEQ ID NO: 321640 - RNA, 22 nt, Human
cagguggcaugacugccuacaa

SEQ ID NO: 321641 - RNA, 22 nt, Human
augucuuucgcaucaguagcua

SEQ ID NO: 321642 - RNA, 18 nt, Human
acagaaauagcugugccu

SEQ ID NO: 321643 - RNA, 22 nt, Human
cagagccaacgccaccugccca

SEQ ID NO: 321644 - RNA, 22 nt, Human
cugcagaggucuugcugauggu

SEQ ID NO: 321645 - RNA, 22 nt, Human
aaugaacaucaaaugccuacca

SEQ ID NO: 321646 - RNA, 22 nt, Human
gccuuggcugaugugcgaauga

SEQ ID NO: 321647 - RNA, 22 nt, Human
gcauucaucuuccuccaugcag

SEQ ID NO: 321648 - RNA, 22 nt, Human
uggcugucagcugccuggugcg

SEQ ID NO: 321649 - RNA, 22 nt, Human
uuaagaaugugccuuuugguug

SEQ ID NO: 321650 - RNA, 22 nt, Human
gaggccacgguuuuccuugggg

SEQ ID NO: 321651 - RNA, 22 nt, Human
cagcccuuuccuucucagcuuu

SEQ ID NO: 321652 - RNA, 22 nt, Human
ugcaaucucggcacuuugggag

SEQ ID NO: 321653 - RNA, 22 nt, Human
aucugucaagauagacucugca

SEQ ID NO: 321654 - RNA, 22 nt, Human
guacauuuuacuuuguuugaau

SEQ ID NO: 321655 - RNA, 22 nt, Human
ccucaggggcuuuucguuguug

SEQ ID NO: 321656 - RNA, 21 nt, Human
acucaggagacuaacuauguc

SEQ ID NO: 321657 - RNA, 22 nt, Human
ugucccagacauaaguggacau

SEQ ID NO: 321658 - RNA, 22 nt, Human
ugguccugccccgugcacagag

SEQ ID NO: 321659 - RNA, 22 nt, Human
cuggcaggagcauucacagagg

SEQ ID NO: 321660 - RNA, 22 nt, Human
gagaaguuucugguuugcauag

SEQ ID NO: 321661 - RNA, 22 nt, Human
ccaggcagccaagugugugugu

SEQ ID NO: 321662 - RNA, 22 nt, Human
ggcugggccagggccuguggac

SEQ ID NO: 321663 - RNA, 23 nt, Human
ugcugggcagagcuggugcugag

SEQ ID NO: 321664 - RNA, 22 nt, Human
acuugcauuauauuuaucacaa

SEQ ID NO: 321665 - RNA, 22 nt, Human
gcaagcugaugugauagugaaa

SEQ ID NO: 321666 - RNA, 22 nt, Human
aggccugagguuccugugcuca

SEQ ID NO: 321667 - RNA, 22 nt, Human
uagagcugauaaugaggccaag

SEQ ID NO: 321668 - RNA, 22 nt, Human
aggccuccuggcuccaggccuu

SEQ ID NO: 321669 - RNA, 22 nt, Human
gcugucacaaauauuucucagc

SEQ ID NO: 321670 - RNA, 22 nt, Human
uuguaacaaucugucauaaaug

SEQ ID NO: 321671 - RNA, 22 nt, Human
uucuccuugaaaagcugcaucu

SEQ ID NO: 321672 - RNA, 19 nt, Human
caaggccaccauuucuccg

SEQ ID NO: 321673 - RNA, 22 nt, Human
ugcaccccauuuuacauuuaca

SEQ ID NO: 321674 - RNA, 21 nt, Human
aagcuucccugcucuccaggg

SEQ ID NO: 321675 - RNA, 22 nt, Human
agagcagauggagcuggaagag

SEQ ID NO: 321676 - RNA, 22 nt, Human
aucaauucuuaggaaaauagcu

SEQ ID NO: 321677 - RNA, 22 nt, Human
uuucauggcuaggacuagagug

SEQ ID NO: 321678 - RNA, 22 nt, Human
uggcuuccuggacagaugcggu

SEQ ID NO: 321679 - RNA, 22 nt, Human
cccucccagaugggcuugaggu

SEQ ID NO: 321680 - RNA, 22 nt, Human
uagagcuagcuucaaaaugcga

SEQ ID NO: 321681 - RNA, 22 nt, Human
cccacaggcuagggguagggca

SEQ ID NO: 321682 - RNA, 22 nt, Human
ucuguucauacagaguauagua

SEQ ID NO: 321683 - RNA, 22 nt, Human
aucacauugccagugauuaccc

SEQ ID NO: 321684 - RNA, 22 nt, Human
ggcccacuugaaauggagcuca

SEQ ID NO: 321685 - RNA, 22 nt, Human
caggcugggcagccuccccggc

SEQ ID NO: 321686 - RNA, 20 nt, Human
agguauaagaaaugugauuu

SEQ ID NO: 321687 - RNA, 22 nt, Human
uuucauuacguguuugacuugu

SEQ ID NO: 321688 - RNA, 22 nt, Human
uuucagaaaacuuaucaucagu

SEQ ID NO: 321689 - RNA, 22 nt, Human
ccucugaguccucccugguugc

SEQ ID NO: 321690 - RNA, 22 nt, Human
agugcacagcgugauguauugg

SEQ ID NO: 321691 - RNA, 22 nt, Human
auccaugauuaguaggauaaag

SEQ ID NO: 321692 - RNA, 22 nt, Human
aggucauuccagccauuccccu

SEQ ID NO: 321693 - RNA, 22 nt, Human
cagugcaguugguggcaggggu

SEQ ID NO: 321694 - RNA, 22 nt, Human
aagacugucuuuucugagugac

SEQ ID NO: 321695 - RNA, 22 nt, Human
ggcuucagugagcugagcucac

SEQ ID NO: 321696 - RNA, 22 nt, Human
aggcaagggggcgccaccuucc

SEQ ID NO: 321697 - RNA, 22 nt, Human
acauuucuuucuauucaguagc

SEQ ID NO: 321698 - RNA, 22 nt, Human
gccagagccacuuuugggugau

SEQ ID NO: 321699 - RNA, 22 nt, Human
uauuaaauuauggauuuaggag

SEQ ID NO: 321700 - RNA, 22 nt, Human
ugggcugcacccucagccucug

SEQ ID NO: 321701 - RNA, 22 nt, Human
caggccacaaguuggguucaag

SEQ ID NO: 321702 - RNA, 23 nt, Human
cagcugaagcagccugggcugga

SEQ ID NO: 321703 - RNA, 22 nt, Human
aguuuuauuccaaugugcagca

SEQ ID NO: 321704 - RNA, 22 nt, Human
gugcaggggaucagguugcagc

SEQ ID NO: 321705 - RNA, 22 nt, Human
gagggcugccacguugggcgag

SEQ ID NO: 321706 - RNA, 18 nt, Human
gcccugguggagcuggug

SEQ ID NO: 321707 - RNA, 22 nt, Human
ucuggagccacaaaccucagcu

SEQ ID NO: 321708 - RNA, 22 nt, Human
acuuccugcaaucguccacucc

SEQ ID NO: 321709 - RNA, 22 nt, Human
ucagugugaggucuuccacccg

SEQ ID NO: 321710 - RNA, 22 nt, Human
ucugcaggaggcuggcugcagg

SEQ ID NO: 321711 - RNA, 22 nt, Human
agcagcaggagccgugggguga

SEQ ID NO: 321712 - RNA, 22 nt, Human
gcuggggcugggcugaggaaga

SEQ ID NO: 321713 - RNA, 22 nt, Human
aaaaguuuaagacucauucuag

SEQ ID NO: 321714 - RNA, 22 nt, Human
agcaccugcuuaaugugcagug

SEQ ID NO: 321715 - RNA, 22 nt, Human
agcauggggcaaugcaugugcu

SEQ ID NO: 321716 - RNA, 22 nt, Human
gagcagcuguccccaaagcuuc

SEQ ID NO: 321717 - RNA, 22 nt, Human
uguaggaauguuuuuaaguugg

SEQ ID NO: 321718 - RNA, 22 nt, Human
uuaugcuaaaugaaucaaguca

SEQ ID NO: 321719 - RNA, 22 nt, Human
ggagcuguucaggacugcuuca

SEQ ID NO: 321720 - RNA, 23 nt, Human
cugucuccugggcuagguggaau

SEQ ID NO: 321721 - RNA, 22 nt, Human
cuggccagcauuuuugcuuuag

SEQ ID NO: 321722 - RNA, 22 nt, Human
uugcuguguaacuccuggccug

SEQ ID NO: 321723 - RNA, 22 nt, Human
caggggcuguuugccucaggcc

SEQ ID NO: 321724 - RNA, 22 nt, Human
cccugugggguccgccuguccg

SEQ ID NO: 321725 - RNA, 22 nt, Human
ggacacagcugcagccacaccc

SEQ ID NO: 321726 - RNA, 22 nt, Human
uuccaguuaaggaagcuauucu

SEQ ID NO: 321727 - RNA, 22 nt, Human
gccugccuuuguaugacccuga

SEQ ID NO: 321728 - RNA, 22 nt, Human
gagguauguaugcuacauucuu

SEQ ID NO: 321729 - RNA, 22 nt, Human
aggggcugcuggguccgccccu

SEQ ID NO: 321730 - RNA, 22 nt, Human
uaacagaaauaguaggugaggg

SEQ ID NO: 321731 - RNA, 22 nt, Human
acugugugggccgcucacuggg

SEQ ID NO: 321732 - RNA, 22 nt, Human
cacacaggaugaagcagcagaa

SEQ ID NO: 321733 - RNA, 19 nt, Human
ucuggcuccugccaggcug

SEQ ID NO: 321734 - RNA, 22 nt, Human
aggguccugggugcaguugcuu

SEQ ID NO: 321735 - RNA, 22 nt, Human
ucauggauggccgggaggugau

SEQ ID NO: 321736 - RNA, 22 nt, Human
ucuguucauuugccucggcucu

SEQ ID NO: 321737 - RNA, 22 nt, Human
auugcaccuuggguuuugaaag

SEQ ID NO: 321738 - RNA, 22 nt, Human
acauuucuuagccuaguuccag

SEQ ID NO: 321739 - RNA, 18 nt, Human
caggucagccuggccuca

SEQ ID NO: 321740 - RNA, 22 nt, Human
gccuggagugguccugcugccc

SEQ ID NO: 321741 - RNA, 22 nt, Human
caggaaagaaaugagaacacca

SEQ ID NO: 321742 - RNA, 22 nt, Human
aaggcuaugaucuuuuucauga

SEQ ID NO: 321743 - RNA, 22 nt, Human
uguuccauaaguggugcuuugu

SEQ ID NO: 321744 - RNA, 22 nt, Human
ugagguguguccccagggaggu

SEQ ID NO: 321745 - RNA, 22 nt, Human
cugcugccggcgagccucccuu

SEQ ID NO: 321746 - RNA, 22 nt, Human
uggcagagucucuccuuuccag

SEQ ID NO: 321747 - RNA, 22 nt, Human
ggacaggguaaguacuagugug

SEQ ID NO: 321748 - RNA, 19 nt, Human
ccauggcaaugaucugaug

SEQ ID NO: 321749 - RNA, 22 nt, Human
ccuggcucuucagagguuccua

SEQ ID NO: 321750 - RNA, 22 nt, Human
uauuaucauugguaauaugguc

SEQ ID NO: 321751 - RNA, 22 nt, Human
uucaggaucaaguugccaguag

SEQ ID NO: 321752 - RNA, 22 nt, Human
cagccucugagccuuggcagau

SEQ ID NO: 321753 - RNA, 19 nt, Human
aaacucugaaggccacugg

SEQ ID NO: 321754 - RNA, 22 nt, Human
cuggccugcugggugagguccu

SEQ ID NO: 321755 - RNA, 22 nt, Human
agauuucccacuccauguauug

SEQ ID NO: 321756 - RNA, 18 nt, Human
ccuggagcuccacagcaa

SEQ ID NO: 321757 - RNA, 22 nt, Human
uucccaguauuaccuucaggaa

SEQ ID NO: 321758 - RNA, 22 nt, Human
agaugugagaaucaagugacca

SEQ ID NO: 321759 - RNA, 22 nt, Human
cuggggcuucaaugcuucggug

SEQ ID NO: 321760 - RNA, 22 nt, Human
ugcaguggcgccaucucagcuc

SEQ ID NO: 321761 - RNA, 22 nt, Human
ucagagugugacuuggucauga

SEQ ID NO: 321762 - RNA, 22 nt, Human
cccucccaggaguggccagaga

SEQ ID NO: 321763 - RNA, 22 nt, Human
cagcaggcccagaguuucaugg

SEQ ID NO: 321764 - RNA, 22 nt, Human
gaaauaagaguccaugccaggu

SEQ ID NO: 321765 - RNA, 22 nt, Human
cagggagcucugggccggacuc

SEQ ID NO: 321766 - RNA, 22 nt, Human
agggcacagccuaaagccuaug

SEQ ID NO: 321767 - RNA, 22 nt, Human
ggggcugguggugguuucucca

SEQ ID NO: 321768 - RNA, 22 nt, Human
cucucuggaagggggagcugau

SEQ ID NO: 321769 - RNA, 22 nt, Human
ugaguuuuuucaacauaugaag

SEQ ID NO: 321770 - RNA, 22 nt, Human
aguaacuaugcuugagaaucag

SEQ ID NO: 321771 - RNA, 22 nt, Human
aagagcugauuaagucaugagg

SEQ ID NO: 321772 - RNA, 22 nt, Human
uaaauguguuagucaugguuuu

SEQ ID NO: 321773 - RNA, 22 nt, Human
cucuccagccacagaagcugcu

SEQ ID NO: 321774 - RNA, 22 nt, Human
ccugcagagccacgugccagcg

SEQ ID NO: 321775 - RNA, 22 nt, Human
cuguuuaucucuaaccuguuua

SEQ ID NO: 321776 - RNA, 22 nt, Human
ggcugcugguagggguaggaag

SEQ ID NO: 321777 - RNA, 22 nt, Human
agcuguccuggcucaggcugug

SEQ ID NO: 321778 - RNA, 22 nt, Human
cacucugcgcugggcgccagcg

SEQ ID NO: 321779 - RNA, 22 nt, Human
agaccacagucaggcuccuggu

SEQ ID NO: 321780 - RNA, 22 nt, Human
uuuuagauugggaaauguaaag

SEQ ID NO: 321781 - RNA, 22 nt, Human
ucugggguuuucacgcugucuc

SEQ ID NO: 321782 - RNA, 22 nt, Human
ugugaaaagggcuuuguacaaa

SEQ ID NO: 321783 - RNA, 22 nt, Human
aaaguuucaauagaggaagugg

SEQ ID NO: 321784 - RNA, 22 nt, Human
aaaggccauuacuugcuuuuag

SEQ ID NO: 321785 - RNA, 22 nt, Human
aaucaguuucuuggcaaguuua

SEQ ID NO: 321786 - RNA, 22 nt, Human
uggcuaggcuccaagagcugga

SEQ ID NO: 321787 - RNA, 22 nt, Human
aggcagcaugcucugcuucuac

SEQ ID NO: 321788 - RNA, 22 nt, Human
ugaaagguuauuuaggucugcu

SEQ ID NO: 321789 - RNA, 22 nt, Human
ucccuggagauaacuucuggga

SEQ ID NO: 321790 - RNA, 22 nt, Human
auuuugcuggucugaauuacuu

SEQ ID NO: 321791 - RNA, 22 nt, Human
cagcuguuacucugaguaaaug

SEQ ID NO: 321792 - RNA, 22 nt, Human
uaugugcaguuugcucuuaaca

SEQ ID NO: 321793 - RNA, 22 nt, Human
agagugggccucugagucccag

SEQ ID NO: 321794 - RNA, 22 nt, Human
gcaggcagucaucuuucauauu

SEQ ID NO: 321795 - RNA, 22 nt, Human
ucacuuuugaucccuaugcagu

SEQ ID NO: 321796 - RNA, 20 nt, Human
cugccaugauugauagagug

SEQ ID NO: 321797 - RNA, 22 nt, Human
guggauggacaugggcaagagg

SEQ ID NO: 321798 - RNA, 22 nt, Human
gccccagguugccugucccagg

SEQ ID NO: 321799 - RNA, 22 nt, Human
acuccugguuuguguccuggcu

SEQ ID NO: 321800 - RNA, 22 nt, Human
uaauuauucuagucacauagca

SEQ ID NO: 321801 - RNA, 22 nt, Human
uucuuguauguaugcaaaauca

SEQ ID NO: 321802 - RNA, 22 nt, Human
ccagggccucguguucugagug

SEQ ID NO: 321803 - RNA, 22 nt, Human
gagguuagaggucagugcaguc

SEQ ID NO: 321804 - RNA, 20 nt, Human
ccaggccugggccugcucua

SEQ ID NO: 321805 - RNA, 22 nt, Human
gauuauauaauggaagcucuug

SEQ ID NO: 321806 - RNA, 22 nt, Human
uaauuauaacaguuacaucuua

SEQ ID NO: 321807 - RNA, 22 nt, Human
ucucagagccuaacuaaccuaa

SEQ ID NO: 321808 - RNA, 22 nt, Human
ggagaagggacagacucagcuu

SEQ ID NO: 321809 - RNA, 22 nt, Human
cugcagccucaaccuccugagc

SEQ ID NO: 321810 - RNA, 22 nt, Human
cauuuacauuuaagguuaauau

SEQ ID NO: 321811 - RNA, 22 nt, Human
agccagcuggagaccacuguuu

SEQ ID NO: 321812 - RNA, 22 nt, Human
cugcugugugaccauggacagg

SEQ ID NO: 321813 - RNA, 20 nt, Human
uccagggcuagggagcucau

SEQ ID NO: 321814 - RNA, 22 nt, Human
ugccugucuuuccucccucgua

SEQ ID NO: 321815 - RNA, 22 nt, Human
ggaaaaggccacagggacacau

SEQ ID NO: 321816 - RNA, 22 nt, Human
agugaccaaucaugguuagauu

SEQ ID NO: 321817 - RNA, 22 nt, Human
aucacgucaugguuugaucugg

SEQ ID NO: 321818 - RNA, 21 nt, Human
agaggccuuacaggauagacc

SEQ ID NO: 321819 - RNA, 22 nt, Human
cucagugcagcuaggcaugaga

SEQ ID NO: 321820 - RNA, 22 nt, Human
aaauuauucucauguguuucuu

SEQ ID NO: 321821 - RNA, 21 nt, Human
ccucugcucgggcaugcguuu

SEQ ID NO: 321822 - RNA, 22 nt, Human
ggccucucauguccugggcuuc

SEQ ID NO: 321823 - RNA, 22 nt, Human
aacuagucagugauucucagaa

SEQ ID NO: 321824 - RNA, 18 nt, Human
uggcagagugucuguucu

SEQ ID NO: 321825 - RNA, 23 nt, Human
ucaguccuguaggggcuccaggu

SEQ ID NO: 321826 - RNA, 22 nt, Human
cugggcagcuaccaccacugcu

SEQ ID NO: 321827 - RNA, 22 nt, Human
ucugucccugagagcucaggag

SEQ ID NO: 321828 - RNA, 19 nt, Human
agucccaggcccgaaagag

SEQ ID NO: 321829 - RNA, 22 nt, Human
ggggacccucaggacugcgucu

SEQ ID NO: 321830 - RNA, 22 nt, Human
acaacauuauacauagaaagcu

SEQ ID NO: 321831 - RNA, 22 nt, Human
aucaggauuacacggggaugcu

SEQ ID NO: 321832 - RNA, 20 nt, Human
agaaauauugaguucagagg

SEQ ID NO: 321833 - RNA, 22 nt, Human
caugagaagguuuuggcauaua

SEQ ID NO: 321834 - RNA, 22 nt, Human
aagagcuggaugaagaaaucaa

SEQ ID NO: 321835 - RNA, 22 nt, Human
cagagagaggccacugcuauua

SEQ ID NO: 321836 - RNA, 23 nt, Human
ucagugauguugaaccuagcagu

SEQ ID NO: 321837 - RNA, 22 nt, Human
uggaugcuguaggacacgcucu

SEQ ID NO: 321838 - RNA, 22 nt, Human
ucuuagcauuucauaacaacug

SEQ ID NO: 321839 - RNA, 22 nt, Human
uuugacagcuuguuacaaaguu

SEQ ID NO: 321840 - RNA, 22 nt, Human
cagggccauuggcguggcuguc

SEQ ID NO: 321841 - RNA, 22 nt, Human
cuggcucuucagugcuugguuc

SEQ ID NO: 321842 - RNA, 22 nt, Human
gagauucuguagucaggcaucu

SEQ ID NO: 321843 - RNA, 22 nt, Human
cagccagcuggugcggcagagc

SEQ ID NO: 321844 - RNA, 20 nt, Human
augccucuaauuuugcaaac

SEQ ID NO: 321845 - RNA, 22 nt, Human
gagcuggcuccgccaugcugcu

SEQ ID NO: 321846 - RNA, 22 nt, Human
agccccuugcugcccucuagag

SEQ ID NO: 321847 - RNA, 22 nt, Human
aguauuuccuggcuuaucugcu

SEQ ID NO: 321848 - RNA, 22 nt, Human
gagggcagugaauuuugaagcu

SEQ ID NO: 321849 - RNA, 22 nt, Human
ugaagcaguucucagaaguggg

SEQ ID NO: 321850 - RNA, 22 nt, Human
aaauaguuacuucugcugucuu

SEQ ID NO: 321851 - RNA, 22 nt, Human
gcuaugcaggagccuaaugaca

SEQ ID NO: 321852 - RNA, 22 nt, Human
ugcagaagaaugagcuuggagu

SEQ ID NO: 321853 - RNA, 22 nt, Human
agccucucugaugugacagcua

SEQ ID NO: 321854 - RNA, 22 nt, Human
gggacuggaguagaggccggug

SEQ ID NO: 321855 - RNA, 22 nt, Human
acaauguguuuuuauacauuug

SEQ ID NO: 321856 - RNA, 22 nt, Human
acagggccucagccagggcaga

SEQ ID NO: 321857 - RNA, 22 nt, Human
cacaguggcagguguggguugu

SEQ ID NO: 321858 - RNA, 22 nt, Human
ccuuuccuuuuuagugugggag

SEQ ID NO: 321859 - RNA, 22 nt, Human
uuucaaagaccauuaacuauca

SEQ ID NO: 321860 - RNA, 22 nt, Human
gagagcuguaauagucaugucu

SEQ ID NO: 321861 - RNA, 18 nt, Human
ggcugccuguuccugaag

SEQ ID NO: 321862 - RNA, 22 nt, Human
gugugaaaaugugcacaauaug

SEQ ID NO: 321863 - RNA, 22 nt, Human
agccucugcuuaugcaaaggua

SEQ ID NO: 321864 - RNA, 22 nt, Human
aggggcuggaguucgagguuac

SEQ ID NO: 321865 - RNA, 22 nt, Human
ggcaaaaaguucccaucagugu

SEQ ID NO: 321866 - RNA, 22 nt, Human
uccuucagggcugaccacaggc

SEQ ID NO: 321867 - RNA, 22 nt, Human
gccaggcagcagcgaggauggu

SEQ ID NO: 321868 - RNA, 22 nt, Human
auaucaaacgaaguuauuuuaa

SEQ ID NO: 321869 - RNA, 22 nt, Human
ccaguguuccagagagcugaug

SEQ ID NO: 321870 - RNA, 22 nt, Human
aacaaaugaccugauuucuucc

SEQ ID NO: 321871 - RNA, 22 nt, Human
agauacauugaguuuccuccug

SEQ ID NO: 321872 - RNA, 22 nt, Human
cuuguacauagagaagaagccu

SEQ ID NO: 321873 - RNA, 22 nt, Human
cugccacuagcuuucacaucuu

SEQ ID NO: 321874 - RNA, 22 nt, Human
ugcugucugcaacaguacuaca

SEQ ID NO: 321875 - RNA, 22 nt, Human
ugagaugaauaacuccugcuaa

SEQ ID NO: 321876 - RNA, 22 nt, Human
ugcauuauacuuuuagaaauuu

SEQ ID NO: 321877 - RNA, 22 nt, Human
cuguauuuguccucuauuuauu

SEQ ID NO: 321878 - RNA, 22 nt, Human
gcaguggcuaggagucuggcgu

SEQ ID NO: 321879 - RNA, 22 nt, Human
cucaggaugaaagucaugguga

SEQ ID NO: 321880 - RNA, 22 nt, Human
uuuggaaaguugucacuuuaga

SEQ ID NO: 321881 - RNA, 18 nt, Human
gcugucugaggucugagg

SEQ ID NO: 321882 - RNA, 22 nt, Human
uuucauaauacuguacaugaaa

SEQ ID NO: 321883 - RNA, 22 nt, Human
aucuaggauuugaaugcacagu

SEQ ID NO: 321884 - RNA, 18 nt, Human
uucacaggaaaugucuuu

SEQ ID NO: 321885 - RNA, 22 nt, Human
uuuauuauagugguggggacug

SEQ ID NO: 321886 - RNA, 22 nt, Human
ccucagugaguguuuccuucuu

SEQ ID NO: 321887 - RNA, 22 nt, Human
uugcaucuagggcaacccagag

SEQ ID NO: 321888 - RNA, 22 nt, Human
gccagcagggcccaaaugcugg

SEQ ID NO: 321889 - RNA, 22 nt, Human
caagagcucccagaccugggca

SEQ ID NO: 321890 - RNA, 22 nt, Human
uuuagacauggcuugcucacuu

SEQ ID NO: 321891 - RNA, 22 nt, Human
ucaaagucauggcaggcucaga

SEQ ID NO: 321892 - RNA, 22 nt, Human
uccaugaggaccaaauucguag

SEQ ID NO: 321893 - RNA, 22 nt, Human
gucacuggggccacaugcagaa

SEQ ID NO: 321894 - RNA, 22 nt, Human
agcugccugcuuaugagcucca

SEQ ID NO: 321895 - RNA, 22 nt, Human
cugccccuggugauggacgcca

SEQ ID NO: 321896 - RNA, 22 nt, Human
caggagccccaggcugacaaua

SEQ ID NO: 321897 - RNA, 22 nt, Human
ggcagugaaugaaacagaggcu

SEQ ID NO: 321898 - RNA, 21 nt, Human
uggcugccuacaugcugcagg

SEQ ID NO: 321899 - RNA, 22 nt, Human
ccuggcuccugccucugcaggg

SEQ ID NO: 321900 - RNA, 22 nt, Human
cccaucaggaacccaggagccc

SEQ ID NO: 321901 - RNA, 22 nt, Human
gcaaaugcuaaaguguagagac

SEQ ID NO: 321902 - RNA, 22 nt, Human
auuugucuucaguagguucuuc

SEQ ID NO: 321903 - RNA, 22 nt, Human
caggucagaggcgcagccccca

SEQ ID NO: 321904 - RNA, 22 nt, Human
agaguguuauuugcucuguauu

SEQ ID NO: 321905 - RNA, 22 nt, Human
uggccuuccuggugacucauga

SEQ ID NO: 321906 - RNA, 22 nt, Human
cugggcugagccugggcugugu

SEQ ID NO: 321907 - RNA, 18 nt, Human
cagagcagagguggagcg

SEQ ID NO: 321908 - RNA, 22 nt, Human
uguuugaaacuuugaucacuaa

SEQ ID NO: 321909 - RNA, 22 nt, Human
acuaaauacacacauuuguuca

SEQ ID NO: 321910 - RNA, 22 nt, Human
agagagcccgggccagggcaca

SEQ ID NO: 321911 - RNA, 19 nt, Human
ggcugccuggagcgagggc

SEQ ID NO: 321912 - RNA, 18 nt, Human
aggcuucccaggcaggcc

SEQ ID NO: 321913 - RNA, 22 nt, Human
cccugugguugcuagggcacag

SEQ ID NO: 321914 - RNA, 22 nt, Human
gugaaggacuagcauggagggc

SEQ ID NO: 321915 - RNA, 22 nt, Human
caccaucagcagcaggugucaa

SEQ ID NO: 321916 - RNA, 22 nt, Human
caagaacaguuugccaaauugg

SEQ ID NO: 321917 - RNA, 22 nt, Human
ggcagcagaacuggcccuguau

SEQ ID NO: 321918 - RNA, 22 nt, Human
aaggcacuagcaagcugccugg

SEQ ID NO: 321919 - RNA, 22 nt, Human
caagagcuggguggcaagcuag

SEQ ID NO: 321920 - RNA, 18 nt, Human
ucaaagucuggcuccacu

SEQ ID NO: 321921 - RNA, 22 nt, Human
agagcuggcugcugcggugcuu

SEQ ID NO: 321922 - RNA, 22 nt, Human
agugcuguaacaacuuauuugg

SEQ ID NO: 321923 - RNA, 22 nt, Human
cugcugugccuuaaaaugcaag

SEQ ID NO: 321924 - RNA, 22 nt, Human
uaaaugcaagugcuccugggag

SEQ ID NO: 321925 - RNA, 22 nt, Human
aagauggagcacgagcagaagc

SEQ ID NO: 321926 - RNA, 22 nt, Human
ucucuggggauggaccugggag

SEQ ID NO: 321927 - RNA, 22 nt, Human
gcccauggcagaacugugagca

SEQ ID NO: 321928 - RNA, 22 nt, Human
agucagcagccuggccaggaga

SEQ ID NO: 321929 - RNA, 22 nt, Human
aagcugggagggagcccagagu

SEQ ID NO: 321930 - RNA, 22 nt, Human
ucccagccauuccuuuaggugu

SEQ ID NO: 321931 - RNA, 19 nt, Human
ggcugcugguuacagaggc

SEQ ID NO: 321932 - RNA, 22 nt, Human
cagaggcucaccagccuuucac

SEQ ID NO: 321933 - RNA, 22 nt, Human
cuggccucauagccaagcugug

SEQ ID NO: 321934 - RNA, 22 nt, Human
gaaagaggaaggagauguauua

SEQ ID NO: 321935 - RNA, 22 nt, Human
ccuccuggugggcgcuucuggc

SEQ ID NO: 321936 - RNA, 22 nt, Human
cuggcugcuuguagacucgacu

SEQ ID NO: 321937 - RNA, 22 nt, Human
caagaugaucccugaaggcagc

SEQ ID NO: 321938 - RNA, 22 nt, Human
ccagcuggucugugcucauguu

SEQ ID NO: 321939 - RNA, 22 nt, Human
uccaguucuaggucacucucug

SEQ ID NO: 321940 - RNA, 22 nt, Human
caggcuggaguuaccuuuaggg

SEQ ID NO: 321941 - RNA, 22 nt, Human
gucaggaucucccaguacauau

SEQ ID NO: 321942 - RNA, 22 nt, Human
uggcucugccacuaacuuggua

SEQ ID NO: 321943 - RNA, 19 nt, Human
cugcucccuccuucuggca

SEQ ID NO: 321944 - RNA, 22 nt, Human
ucaauauauuccauguuuucuc

SEQ ID NO: 321945 - RNA, 22 nt, Human
aguaauaauuuauauuagggag

SEQ ID NO: 321946 - RNA, 22 nt, Human
acccagagcugggcuuggcaaa

SEQ ID NO: 321947 - RNA, 22 nt, Human
aaaaaugaauucuucaguggca

SEQ ID NO: 321948 - RNA, 22 nt, Human
uagccaggcgaggucagugucg

SEQ ID NO: 321949 - RNA, 22 nt, Human
uggagccagagcgcagccuggg

SEQ ID NO: 321950 - RNA, 22 nt, Human
agggcugccauuucuggcccaa

SEQ ID NO: 321951 - RNA, 22 nt, Human
ggccccaguucacuccuggccg

SEQ ID NO: 321952 - RNA, 22 nt, Human
gggcugcuuuuuucuuagcaga

SEQ ID NO: 321953 - RNA, 19 nt, Human
acauuuagaauguacuugc

SEQ ID NO: 321954 - RNA, 22 nt, Human
uugucuguaaagacggccacca

SEQ ID NO: 321955 - RNA, 21 nt, Human
cugcucugacagugaggccag

SEQ ID NO: 321956 - RNA, 22 nt, Human
ccaggcaucacgggcauguggc

SEQ ID NO: 321957 - RNA, 22 nt, Human
ggcugcagaaguacuuccggau

SEQ ID NO: 321958 - RNA, 22 nt, Human
agaggcaggagguugacuugag

SEQ ID NO: 321959 - RNA, 22 nt, Human
ugccugagugauguggcagcca

SEQ ID NO: 321960 - RNA, 22 nt, Human
uuugaaaggugucgagaugugu

SEQ ID NO: 321961 - RNA, 22 nt, Human
ucuugccucuuccccuuuccau

SEQ ID NO: 321962 - RNA, 22 nt, Human
ugaaagguuaaaaguaguauug

SEQ ID NO: 321963 - RNA, 22 nt, Human
agcugauuccacuuuuucccca

SEQ ID NO: 321964 - RNA, 22 nt, Human
cccagcucuuuuagcggcaucu

SEQ ID NO: 321965 - RNA, 22 nt, Human
ucacaguaucacacaaggauua

SEQ ID NO: 321966 - RNA, 22 nt, Human
ucuguucaucucaugggagaau

SEQ ID NO: 321967 - RNA, 22 nt, Human
cugggacagcugagacaggaga

SEQ ID NO: 321968 - RNA, 22 nt, Human
ugcaaacuauugguagagaugg

SEQ ID NO: 321969 - RNA, 21 nt, Human
guucuuaguuauauucucaau

SEQ ID NO: 321970 - RNA, 20 nt, Human
aggcagagcgcacuuuuaga

SEQ ID NO: 321971 - RNA, 22 nt, Human
cugccagucuaugcugcucggc

SEQ ID NO: 321972 - RNA, 23 nt, Human
aguuccagaaaaaugcucaagca

SEQ ID NO: 321973 - RNA, 22 nt, Human
acuguucauauucuuagaaauu

SEQ ID NO: 321974 - RNA, 22 nt, Human
acagggcagagggcaguuggua

SEQ ID NO: 321975 - RNA, 22 nt, Human
uugccaggagcucaucugaggg

SEQ ID NO: 321976 - RNA, 16 nt, Human
gcagagcucagggacu

SEQ ID NO: 321977 - RNA, 22 nt, Human
acuucauuguaauauuauagca

SEQ ID NO: 321978 - RNA, 22 nt, Human
uuuccuuguucauuugcccuau

SEQ ID NO: 321979 - RNA, 22 nt, Human
ucuggcucacuucaggcuucac

SEQ ID NO: 321980 - RNA, 22 nt, Human
cuaguucugccauucaguguca

SEQ ID NO: 321981 - RNA, 23 nt, Human
ucccagccucuucucuugcauac

SEQ ID NO: 321982 - RNA, 20 nt, Human
ccugaggguuuguguucuuu

SEQ ID NO: 321983 - RNA, 22 nt, Human
ggcaccaggcugggcauaggcc

SEQ ID NO: 321984 - RNA, 22 nt, Human
uccuucagugucccgcucaggu

SEQ ID NO: 321985 - RNA, 22 nt, Human
ucucagggccucccucuguuuc

SEQ ID NO: 321986 - RNA, 22 nt, Human
uucuuguaauuuggagaaauga

SEQ ID NO: 321987 - RNA, 22 nt, Human
ugucucagaggcaggaagagcc

SEQ ID NO: 321988 - RNA, 17 nt, Human
ggccuugggcugcucuu

SEQ ID NO: 321989 - RNA, 22 nt, Human
auuuguagugaagugaaaauaa

SEQ ID NO: 321990 - RNA, 22 nt, Human
cuacuucuaaguacauggugau

SEQ ID NO: 321991 - RNA, 22 nt, Human
ggccuucacgugaccuggcgug

SEQ ID NO: 321992 - RNA, 21 nt, Human
aggcccagcuuuccucuugcu

SEQ ID NO: 321993 - RNA, 22 nt, Human
agucucugcugguugugccuau

SEQ ID NO: 321994 - RNA, 22 nt, Human
uucuuacuaguauguuucagca

SEQ ID NO: 321995 - RNA, 22 nt, Human
agccuggaagaaccugaagucu

SEQ ID NO: 321996 - RNA, 22 nt, Human
auuugaauggcuuaacacaacg

SEQ ID NO: 321997 - RNA, 22 nt, Human
cuggccucaccucagacuuacu

SEQ ID NO: 321998 - RNA, 22 nt, Human
ccaggccuuucuucuuggucug

SEQ ID NO: 321999 - RNA, 22 nt, Human
ccaggcucugcgcuggacaugg

SEQ ID NO: 322000 - RNA, 23 nt, Human
ucuugaaaagccuacagcaguuc

SEQ ID NO: 322001 - RNA, 22 nt, Human
ccaggccauucccagaguugcu

SEQ ID NO: 322002 - RNA, 22 nt, Human
ggcugcuggggacgugggagag

SEQ ID NO: 322003 - RNA, 22 nt, Human
cucagccugugaagagcagagg

SEQ ID NO: 322004 - RNA, 22 nt, Human
aggcagagaaaaaccagauaug

SEQ ID NO: 322005 - RNA, 22 nt, Human
ucuucacaugaccuucaugucu

SEQ ID NO: 322006 - RNA, 22 nt, Human
gaggggcugcccuggugucagg

SEQ ID NO: 322007 - RNA, 22 nt, Human
uggguagagacacagucugggg

SEQ ID NO: 322008 - RNA, 22 nt, Human
aguggcagagugcacucaggca

SEQ ID NO: 322009 - RNA, 22 nt, Human
ggaggccaggaagagccgcccu

SEQ ID NO: 322010 - RNA, 17 nt, Human
uccuucagugccucugc

SEQ ID NO: 322011 - RNA, 22 nt, Human
ccaggcccugcuccucacacca

SEQ ID NO: 322012 - RNA, 22 nt, Human
gaagccaacauuccaaguagaa

SEQ ID NO: 322013 - RNA, 20 nt, Human
ucagaugggagugagccauc

SEQ ID NO: 322014 - RNA, 22 nt, Human
acucaguggcacuuuggaauuu

SEQ ID NO: 322015 - RNA, 22 nt, Human
ggcugagcaauuuugaugacau

SEQ ID NO: 322016 - RNA, 22 nt, Human
uagagacaccaguaccauucug

SEQ ID NO: 322017 - RNA, 22 nt, Human
gcucugagccgggggccugucc

SEQ ID NO: 322018 - RNA, 22 nt, Human
cauuacaugguccaggauauau

SEQ ID NO: 322019 - RNA, 22 nt, Human
aacagaauaguugauguacagu

SEQ ID NO: 322020 - RNA, 22 nt, Human
cagggcuggcucaugaaaaguu

SEQ ID NO: 322021 - RNA, 18 nt, Human
aaguaacagaagagcaca

SEQ ID NO: 322022 - RNA, 22 nt, Human
gcuuccugucccucagccauga

SEQ ID NO: 322023 - RNA, 22 nt, Human
aagggcaggcagagaucauaua

SEQ ID NO: 322024 - RNA, 22 nt, Human
uggccgggccgggcgccuccac

SEQ ID NO: 322025 - RNA, 22 nt, Human
ccagcuccccucagcagguaau

SEQ ID NO: 322026 - RNA, 22 nt, Human
agagaauuuuaaaagccuugaa

SEQ ID NO: 322027 - RNA, 22 nt, Human
uaguuacagcaggcaggauaua

SEQ ID NO: 322028 - RNA, 22 nt, Human
cuccuucccuucaaguguuccu

SEQ ID NO: 322029 - RNA, 22 nt, Human
gccuuccugcagcucugagcgu

SEQ ID NO: 322030 - RNA, 22 nt, Human
auugaaagagaauguagcucuu

SEQ ID NO: 322031 - RNA, 22 nt, Human
cuggccagaguuggagggugug

SEQ ID NO: 322032 - RNA, 22 nt, Human
aagacuugaccagguugaaggc

SEQ ID NO: 322033 - RNA, 22 nt, Human
caucacagauguuguguggagu

SEQ ID NO: 322034 - RNA, 22 nt, Human
agaguuggccaaaaggggcauu

SEQ ID NO: 322035 - RNA, 22 nt, Human
cuacauggagaagaaaauucuu

SEQ ID NO: 322036 - RNA, 22 nt, Human
cccaggagguggagguugcagc

SEQ ID NO: 322037 - RNA, 22 nt, Human
ugcacccucaucagucaaaugg

SEQ ID NO: 322038 - RNA, 21 nt, Human
gcagccagacgggauucaguu

SEQ ID NO: 322039 - RNA, 22 nt, Human
uggcagagcuggcugcggauga

SEQ ID NO: 322040 - RNA, 22 nt, Human
cugucccuucauuauucacuac

SEQ ID NO: 322041 - RNA, 22 nt, Human
ccagucagccaagcugcagcgg

SEQ ID NO: 322042 - RNA, 22 nt, Human
ucucaggaaauaggauuugagu

SEQ ID NO: 322043 - RNA, 22 nt, Human
cacaaaugguuguagacauuaa

SEQ ID NO: 322044 - RNA, 22 nt, Human
gaaacuguauguaguuuuuggg

SEQ ID NO: 322045 - RNA, 22 nt, Human
uauacaaugaguacauucuggg

SEQ ID NO: 322046 - RNA, 22 nt, Human
ccauggccaauugcaccuugcu

SEQ ID NO: 322047 - RNA, 20 nt, Human
aucuggcucagauccugcag

SEQ ID NO: 322048 - RNA, 22 nt, Human
gagggcacuggguuucaauguc

SEQ ID NO: 322049 - RNA, 22 nt, Human
gcugccuggagcucagccugcc

SEQ ID NO: 322050 - RNA, 22 nt, Human
cgcuggccauagccuccugugu

SEQ ID NO: 322051 - RNA, 22 nt, Human
cauacauaugcauguguguaua

SEQ ID NO: 322052 - RNA, 22 nt, Human
agugcuguccaguuucacaggu

SEQ ID NO: 322053 - RNA, 22 nt, Human
gugaaggaccaauaugacucau

SEQ ID NO: 322054 - RNA, 22 nt, Human
cacccagccuucacacaggagu

SEQ ID NO: 322055 - RNA, 21 nt, Human
ugcaagaaucaggaagcugcc

SEQ ID NO: 322056 - RNA, 22 nt, Human
ccuggcuggcaagaucgugaag

SEQ ID NO: 322057 - RNA, 22 nt, Human
ucaaaccaccuuguuacugggg

SEQ ID NO: 322058 - RNA, 22 nt, Human
gcaggccugacuguagggggca

SEQ ID NO: 322059 - RNA, 22 nt, Human
ucaggaauccagacagggcaca

SEQ ID NO: 322060 - RNA, 16 nt, Human
gaaggagauucagaaa

SEQ ID NO: 322061 - RNA, 22 nt, Human
cuggagcugucuucacaggccu

SEQ ID NO: 322062 - RNA, 22 nt, Human
aaggcacuagcagaauuaguga

SEQ ID NO: 322063 - RNA, 22 nt, Human
gauuucaauccagcuuucuucu

SEQ ID NO: 322064 - RNA, 22 nt, Human
cuaugaaaugucagauucugca

SEQ ID NO: 322065 - RNA, 22 nt, Human
agaaaugaaaccaaagccuaga

SEQ ID NO: 322066 - RNA, 22 nt, Human
ucuacugcacuggugucucauc

SEQ ID NO: 322067 - RNA, 20 nt, Human
cugagcugagcuccaugggu

SEQ ID NO: 322068 - RNA, 22 nt, Human
cagagccaugguaugggcuugu

SEQ ID NO: 322069 - RNA, 22 nt, Human
ccagaggcuggguucaccucag

SEQ ID NO: 322070 - RNA, 22 nt, Human
gugcauuugugcaugcacaugu

SEQ ID NO: 322071 - RNA, 22 nt, Human
ugcugccuucuaggcgugcccu

SEQ ID NO: 322072 - RNA, 22 nt, Human
uagacagauuuaaaggaaugga

SEQ ID NO: 322073 - RNA, 22 nt, Human
ggcagaagaaaggcuaagucuc

SEQ ID NO: 322074 - RNA, 22 nt, Human
auaucacaaacaagucuguacu

SEQ ID NO: 322075 - RNA, 22 nt, Human
gaaggagcuaaagggagcccug

SEQ ID NO: 322076 - RNA, 22 nt, Human
ugucucagggcagcagcagggg

SEQ ID NO: 322077 - RNA, 20 nt, Human
ucauugcacauaauggaagc

SEQ ID NO: 322078 - RNA, 22 nt, Human
ggcugaaaggugggaggauggc

SEQ ID NO: 322079 - RNA, 22 nt, Human
ucagccuggcaggauggccugg

SEQ ID NO: 322080 - RNA, 22 nt, Human
acagacagggcaccugccuccu

SEQ ID NO: 322081 - RNA, 23 nt, Human
ugaugggaaggaacgacuaccac

SEQ ID NO: 322082 - RNA, 22 nt, Human
gggcugggcaugguguucccuc

SEQ ID NO: 322083 - RNA, 22 nt, Human
aaauucaguuuuaauaaucacu

SEQ ID NO: 322084 - RNA, 22 nt, Human
ucucagugggaagggcacaguu

SEQ ID NO: 322085 - RNA, 22 nt, Human
ugggccugccccaggcuucagc

SEQ ID NO: 322086 - RNA, 22 nt, Human
gaggccuggcucugcccuccug

SEQ ID NO: 322087 - RNA, 22 nt, Human
uuuaacacuaguuucuuuaacu

SEQ ID NO: 322088 - RNA, 22 nt, Human
cuuguauuccccuaucucuaaa

SEQ ID NO: 322089 - RNA, 17 nt, Human
gcugcagcgguaggcag

SEQ ID NO: 322090 - RNA, 22 nt, Human
ugacccauggucugaucauagg

SEQ ID NO: 322091 - RNA, 22 nt, Human
gagcagugguugaacagaggca

SEQ ID NO: 322092 - RNA, 22 nt, Human
cugcagugaaaucaggaagcaa

SEQ ID NO: 322093 - RNA, 20 nt, Human
cagcccuccaguggaggcag

SEQ ID NO: 322094 - RNA, 22 nt, Human
ucagcuccucaugcaggggaua

SEQ ID NO: 322095 - RNA, 22 nt, Human
cucagaauuacaucccauuuua

SEQ ID NO: 322096 - RNA, 22 nt, Human
aaucauucuuauuucacagcaa

SEQ ID NO: 322097 - RNA, 22 nt, Human
acacagggcggaaagcaugaga

SEQ ID NO: 322098 - RNA, 22 nt, Human
ugguggcaauguccuggagaag

SEQ ID NO: 322099 - RNA, 23 nt, Human
uuucacaaugagcauuacagaau

SEQ ID NO: 322100 - RNA, 22 nt, Human
caaggccacuccagagacuggu

SEQ ID NO: 322101 - RNA, 20 nt, Human
cugggcucgguggcccuggc

SEQ ID NO: 322102 - RNA, 22 nt, Human
cagagccugccucuggcugugg

SEQ ID NO: 322103 - RNA, 22 nt, Human
uucaggauggaguaccuuuuau

SEQ ID NO: 322104 - RNA, 22 nt, Human
auuugcuugugcuaugaaaguu

SEQ ID NO: 322105 - RNA, 20 nt, Human
gggaguggugguagccugug

SEQ ID NO: 322106 - RNA, 22 nt, Human
gaggccaaguuggagaccaggu

SEQ ID NO: 322107 - RNA, 22 nt, Human
aguaugaaaguuaaucaauuua

SEQ ID NO: 322108 - RNA, 22 nt, Human
ugucagaacucuauugaugucc

SEQ ID NO: 322109 - RNA, 17 nt, Human
ugcauuguaggcuagcc

SEQ ID NO: 322110 - RNA, 22 nt, Human
uucaagucaaggaaagaggucu

SEQ ID NO: 322111 - RNA, 22 nt, Human
ggaggccaggguggguggaucg

SEQ ID NO: 322112 - RNA, 22 nt, Human
uggggacaggagacuuacagcu

SEQ ID NO: 322113 - RNA, 19 nt, Human
uggcucugucgaaggcaca

SEQ ID NO: 322114 - RNA, 22 nt, Human
ugaaauuaugcauuguuguacc

SEQ ID NO: 322115 - RNA, 22 nt, Human
aaauguuuugcucccauguggu

SEQ ID NO: 322116 - RNA, 22 nt, Human
aggucauuaaaguuaaaugagg

SEQ ID NO: 322117 - RNA, 22 nt, Human
auucuagaugcuguaaguagca

SEQ ID NO: 322118 - RNA, 22 nt, Human
cuguguuugaugagaagccacc

SEQ ID NO: 322119 - RNA, 22 nt, Human
guaagggauuugaacauagguu

SEQ ID NO: 322120 - RNA, 22 nt, Human
ugggcacuauggcucugugcac

SEQ ID NO: 322121 - RNA, 22 nt, Human
ggagacagcaggaagaaauauc

SEQ ID NO: 322122 - RNA, 22 nt, Human
gccagggggucagcaggcacuu

SEQ ID NO: 322123 - RNA, 22 nt, Human
aagcaccuggguuauaucuuag

SEQ ID NO: 322124 - RNA, 20 nt, Human
aggagcugaauuagaggguu

SEQ ID NO: 322125 - RNA, 22 nt, Human
cagccaggacagggaaacuagu

SEQ ID NO: 322126 - RNA, 22 nt, Human
aagaaauguagagccuaguaaa

SEQ ID NO: 322127 - RNA, 22 nt, Human
guggauggauugaggcaguggg

SEQ ID NO: 322128 - RNA, 22 nt, Human
gucaggauuugaacucaggucu

SEQ ID NO: 322129 - RNA, 22 nt, Human
ugugugacccccagugaagccu

SEQ ID NO: 322130 - RNA, 22 nt, Human
aaccaggaauugcagggcugca

SEQ ID NO: 322131 - RNA, 22 nt, Human
cugggcucagcccaugcugucc

SEQ ID NO: 322132 - RNA, 17 nt, Human
ucagcaggggccaagcu

SEQ ID NO: 322133 - RNA, 17 nt, Human
uucaagauauugaaaug

SEQ ID NO: 322134 - RNA, 22 nt, Human
gcuuccaaaucuguucaaaaug

SEQ ID NO: 322135 - RNA, 22 nt, Human
aguauuucugcucaugaaagag

SEQ ID NO: 322136 - RNA, 22 nt, Human
ugguggcuguugcagaacugag

SEQ ID NO: 322137 - RNA, 22 nt, Human
uucucuucaucucaguaaaugu

SEQ ID NO: 322138 - RNA, 22 nt, Human
acuccagggcuccaucccuugu

SEQ ID NO: 322139 - RNA, 22 nt, Human
caggguggaaaagcuaguugga

SEQ ID NO: 322140 - RNA, 22 nt, Human
ccaguguuauuuuagaguguga

SEQ ID NO: 322141 - RNA, 22 nt, Human
gcucagagcaucccagugaaug

SEQ ID NO: 322142 - RNA, 22 nt, Human
cugcccugggauggucugugcg

SEQ ID NO: 322143 - RNA, 22 nt, Human
acugccuugucucuugccuguu

SEQ ID NO: 322144 - RNA, 22 nt, Human
aucaguuuaacugucaagagcc

SEQ ID NO: 322145 - RNA, 22 nt, Human
aaaugcauaucaaagacuugaa

SEQ ID NO: 322146 - RNA, 22 nt, Human
ggcagggguccugguguugacu

SEQ ID NO: 322147 - RNA, 22 nt, Human
cucucugggcccaguuggcacc

SEQ ID NO: 322148 - RNA, 22 nt, Human
ucuaggagcaugaagggaaggc

SEQ ID NO: 322149 - RNA, 20 nt, Human
gaagccagaggggaaaggag

SEQ ID NO: 322150 - RNA, 22 nt, Human
ggagcagccacgucucagggca

SEQ ID NO: 322151 - RNA, 22 nt, Human
agguagagcuccaguagaaaau

SEQ ID NO: 322152 - RNA, 22 nt, Human
cugcugugccucuuuucacgug

SEQ ID NO: 322153 - RNA, 22 nt, Human
uauauguaaauaagucuaaugu

SEQ ID NO: 322154 - RNA, 17 nt, Human
gccaaaggguuccaauc

SEQ ID NO: 322155 - RNA, 22 nt, Human
ccugggagugucagacuugcuu

SEQ ID NO: 322156 - RNA, 22 nt, Human
cucuccuugcagauggcugccu

SEQ ID NO: 322157 - RNA, 23 nt, Human
ccacagagcugccaauuccugug

SEQ ID NO: 322158 - RNA, 22 nt, Human
ccaguccuagaagaggagucga

SEQ ID NO: 322159 - RNA, 22 nt, Human
auuuccagcagcauauuugucu

SEQ ID NO: 322160 - RNA, 22 nt, Human
cuucuucaauagcaagcgcaua

SEQ ID NO: 322161 - RNA, 22 nt, Human
agcaauauaaauguuggguaga

SEQ ID NO: 322162 - RNA, 22 nt, Human
acuggcaguggcagcagaaaga

SEQ ID NO: 322163 - RNA, 22 nt, Human
aaguauuucguucugaaaaagu

SEQ ID NO: 322164 - RNA, 22 nt, Human
aagccagauagaagaacucauu

SEQ ID NO: 322165 - RNA, 22 nt, Human
ugcuuccuugaucauucccaaa

SEQ ID NO: 322166 - RNA, 22 nt, Human
ugaaaugacaaagguuuuucuu

SEQ ID NO: 322167 - RNA, 22 nt, Human
ugugacagaucuuuaaauaaug

SEQ ID NO: 322168 - RNA, 22 nt, Human
caaggccaguucaccaagggca

SEQ ID NO: 322169 - RNA, 22 nt, Human
gcuuccugauauucauacuguu

SEQ ID NO: 322170 - RNA, 22 nt, Human
cucccugcuuguuucccuucag

SEQ ID NO: 322171 - RNA, 22 nt, Human
aaauauguauggaguucaugaa

SEQ ID NO: 322172 - RNA, 22 nt, Human
ccagugcaggugagcaccaggu

SEQ ID NO: 322173 - RNA, 22 nt, Human
aucaguuucuaccauguggaau

SEQ ID NO: 322174 - RNA, 19 nt, Human
uucucaguucaggagaaga

SEQ ID NO: 322175 - RNA, 22 nt, Human
gccacaggcacuuaagggcugg

SEQ ID NO: 322176 - RNA, 22 nt, Human
aagaacauguuaaaagauucac

SEQ ID NO: 322177 - RNA, 22 nt, Human
cgccugggaguccacaccugcu

SEQ ID NO: 322178 - RNA, 22 nt, Human
gcucaggaaggcucaaccagga

SEQ ID NO: 322179 - RNA, 22 nt, Human
uguaaucauuacaguacaugga

SEQ ID NO: 322180 - RNA, 22 nt, Human
caggugggagcgaggagcuacu

SEQ ID NO: 322181 - RNA, 23 nt, Human
uaauucacauauacauugcuuca

SEQ ID NO: 322182 - RNA, 22 nt, Human
ucauuuguggaagugauugugg

SEQ ID NO: 322183 - RNA, 22 nt, Human
ccucccuggccagagcagcagc

SEQ ID NO: 322184 - RNA, 22 nt, Human
ccuucagaccuagacaggaauc

SEQ ID NO: 322185 - RNA, 22 nt, Human
cagaggccauauuucuucacuc

SEQ ID NO: 322186 - RNA, 22 nt, Human
ggccucugaggacagccuuggc

SEQ ID NO: 322187 - RNA, 23 nt, Human
gagugcagaauagacaugcagug

SEQ ID NO: 322188 - RNA, 22 nt, Human
cugagaggugacagcgugcugg

SEQ ID NO: 322189 - RNA, 22 nt, Human
ccugcagcuccggauuucuggg

SEQ ID NO: 322190 - RNA, 22 nt, Human
gcugagcucccagcaguaucug

SEQ ID NO: 322191 - RNA, 22 nt, Human
ucauguaaguauagaaagcagu

SEQ ID NO: 322192 - RNA, 22 nt, Human
ucagugcauucauggguggcug

SEQ ID NO: 322193 - RNA, 22 nt, Human
uuuccucuccggggccuccagg

SEQ ID NO: 322194 - RNA, 22 nt, Human
acaggggaauuuacugucauua

SEQ ID NO: 322195 - RNA, 22 nt, Human
caaggccauaagagauacaaaa

SEQ ID NO: 322196 - RNA, 22 nt, Human
augcagguugggcaaguguggg

SEQ ID NO: 322197 - RNA, 22 nt, Human
cggcuggggcuguccccaugac

SEQ ID NO: 322198 - RNA, 22 nt, Human
cccuggaguccggagcucaccu

SEQ ID NO: 322199 - RNA, 22 nt, Human
uguguacacaaugauugcagag

SEQ ID NO: 322200 - RNA, 22 nt, Human
ucacaauauuuaucuuccaauu

SEQ ID NO: 322201 - RNA, 22 nt, Human
uggugcugauaauggcaggauu

SEQ ID NO: 322202 - RNA, 22 nt, Human
acauuguauaaugauuaucaca

SEQ ID NO: 322203 - RNA, 22 nt, Human
ucugcugcacaaauucaucucu

SEQ ID NO: 322204 - RNA, 22 nt, Human
auacaacuuuacaugcaauucc

SEQ ID NO: 322205 - RNA, 22 nt, Human
ucaggccuccagguuaccauuu

SEQ ID NO: 322206 - RNA, 22 nt, Human
gcaccugcaggaugagccaggg

SEQ ID NO: 322207 - RNA, 22 nt, Human
gugcagugacccuggagagcug

SEQ ID NO: 322208 - RNA, 22 nt, Human
uggaagagggagcuggguggcc

SEQ ID NO: 322209 - RNA, 22 nt, Human
agcaggcuuucaagagucuucu

SEQ ID NO: 322210 - RNA, 22 nt, Human
agagccaggcaggcaauguuga

SEQ ID NO: 322211 - RNA, 22 nt, Human
ucaguuuuucuauacuuuguag

SEQ ID NO: 322212 - RNA, 22 nt, Human
ccagagccccugagcuucccug

SEQ ID NO: 322213 - RNA, 22 nt, Human
ccugucugagccagggugggca

SEQ ID NO: 322214 - RNA, 22 nt, Human
auguaacaggugaagcucugag

SEQ ID NO: 322215 - RNA, 22 nt, Human
ugugaaggcagcagcucugucc

SEQ ID NO: 322216 - RNA, 22 nt, Human
aauuaaaaaaggagagcuugcu

SEQ ID NO: 322217 - RNA, 22 nt, Human
ugggcagaggcagcagaaaccu

SEQ ID NO: 322218 - RNA, 22 nt, Human
cucaggaugcaauuccaucaag

SEQ ID NO: 322219 - RNA, 21 nt, Human
aaguaaaucagagaaauaacc

SEQ ID NO: 322220 - RNA, 22 nt, Human
cccagcccccgagugucuggaa

SEQ ID NO: 322221 - RNA, 22 nt, Human
gggcccuggggccugauuugca

SEQ ID NO: 322222 - RNA, 22 nt, Human
ggcuucuguccucuggaucugu

SEQ ID NO: 322223 - RNA, 22 nt, Human
gguggggcccuggcacugguau

SEQ ID NO: 322224 - RNA, 16 nt, Human
uggaaggggucuccgg

SEQ ID NO: 322225 - RNA, 22 nt, Human
cuccaggccagggaaguggaca

SEQ ID NO: 322226 - RNA, 22 nt, Human
ugcagggcuuccucuuggaguu

SEQ ID NO: 322227 - RNA, 22 nt, Human
cugaggaguuuggguuguucaa

SEQ ID NO: 322228 - RNA, 22 nt, Human
ccugggaccucgcgggaagcgg

SEQ ID NO: 322229 - RNA, 22 nt, Human
ggggaggcugaugugggcaaag

SEQ ID NO: 322230 - RNA, 22 nt, Human
cagguggaucucuaaggacuga

SEQ ID NO: 322231 - RNA, 21 nt, Human
agagaagggacucuuccaguc

SEQ ID NO: 322232 - RNA, 22 nt, Human
uugcauugaugucuauacgcug

SEQ ID NO: 322233 - RNA, 22 nt, Human
uugcuuccaguccaagucuguu

SEQ ID NO: 322234 - RNA, 22 nt, Human
aagagcuggcucuugcagcagc

SEQ ID NO: 322235 - RNA, 22 nt, Human
aguugaaauuagaguccuggcu

SEQ ID NO: 322236 - RNA, 22 nt, Human
cuauuucugccuaaugaccugu

SEQ ID NO: 322237 - RNA, 22 nt, Human
uuuuuccuagcgauuugucagc

SEQ ID NO: 322238 - RNA, 22 nt, Human
agggucaggagacacuggcaac

SEQ ID NO: 322239 - RNA, 23 nt, Human
cagggccaggcagcagcugucac

SEQ ID NO: 322240 - RNA, 22 nt, Human
uauauauucuuaaguaguguag

SEQ ID NO: 322241 - RNA, 22 nt, Human
caaaguauauuggauugaaugg

SEQ ID NO: 322242 - RNA, 22 nt, Human
aagcacagggacucaggaccgg

SEQ ID NO: 322243 - RNA, 20 nt, Human
agggcagcuugaggagccgg

SEQ ID NO: 322244 - RNA, 21 nt, Human
ccaggguccagcugccauggu

SEQ ID NO: 322245 - RNA, 22 nt, Human
ccaugagccaggcugaggaagc

SEQ ID NO: 322246 - RNA, 22 nt, Human
agcucuggaauaaugaugugau

SEQ ID NO: 322247 - RNA, 22 nt, Human
ugagcccagagaucugagcuau

SEQ ID NO: 322248 - RNA, 18 nt, Human
auggucucauacugggag

SEQ ID NO: 322249 - RNA, 22 nt, Human
ugucaguguauacauacaguau

SEQ ID NO: 322250 - RNA, 22 nt, Human
cucuggacagcaggugcugugg

SEQ ID NO: 322251 - RNA, 22 nt, Human
auaguuugaaggcuguucuacu

SEQ ID NO: 322252 - RNA, 22 nt, Human
uggccuggcagagcaaggccug

SEQ ID NO: 322253 - RNA, 22 nt, Human
agaggcugcacuugcucaugau

SEQ ID NO: 322254 - RNA, 22 nt, Human
cccuggucagggaaggcgccug

SEQ ID NO: 322255 - RNA, 22 nt, Human
gugcugggugcugcagacaggu

SEQ ID NO: 322256 - RNA, 21 nt, Human
ccauaccuaccucaccugguu

SEQ ID NO: 322257 - RNA, 22 nt, Human
ccagggcagugggagaaggugc

SEQ ID NO: 322258 - RNA, 21 nt, Human
uucagcaguccucuagagaua

SEQ ID NO: 322259 - RNA, 22 nt, Human
aucagcaaggcaaucacugcag

SEQ ID NO: 322260 - RNA, 19 nt, Human
gggaaauucacuugcuucc

SEQ ID NO: 322261 - RNA, 22 nt, Human
aggaggcccuagagcucuagag

SEQ ID NO: 322262 - RNA, 22 nt, Human
acaguguccuuguggucccugu

SEQ ID NO: 322263 - RNA, 22 nt, Human
cacaguccugccagagggccuu

SEQ ID NO: 322264 - RNA, 22 nt, Human
aagagcuggauugugcugcaga

SEQ ID NO: 322265 - RNA, 22 nt, Human
uguguucugaaggagaagagug

SEQ ID NO: 322266 - RNA, 22 nt, Human
cuggcagcgugagcagcaucca

SEQ ID NO: 322267 - RNA, 22 nt, Human
cuuacauuaaguaagagauuga

SEQ ID NO: 322268 - RNA, 22 nt, Human
cugccucucagccugaccgcca

SEQ ID NO: 322269 - RNA, 22 nt, Human
uuuuugcaccaaccuaauagaa

SEQ ID NO: 322270 - RNA, 22 nt, Human
gccugcagaacugugaggcaau

SEQ ID NO: 322271 - RNA, 22 nt, Human
ucugugcucuucucaguaucac

SEQ ID NO: 322272 - RNA, 22 nt, Human
ucaguuaacaacuauuuauuga

SEQ ID NO: 322273 - RNA, 19 nt, Human
agcauuuggaauucuacac

SEQ ID NO: 322274 - RNA, 20 nt, Human
ggggaagaaaaggaugugau

SEQ ID NO: 322275 - RNA, 22 nt, Human
ugagaauuuuuugucaugcauu

SEQ ID NO: 322276 - RNA, 20 nt, Human
acugugaaugcugaauuagc

SEQ ID NO: 322277 - RNA, 22 nt, Human
ugucaaauuuuuauugcaguau

SEQ ID NO: 322278 - RNA, 22 nt, Human
gggcuaggcuuggccagcacug

SEQ ID NO: 322279 - RNA, 22 nt, Human
ccagccuucugagcugccugga

SEQ ID NO: 322280 - RNA, 22 nt, Human
agcagggcugcagugugucuuu

SEQ ID NO: 322281 - RNA, 22 nt, Human
uagagcuggaaaacugcaggua

SEQ ID NO: 322282 - RNA, 22 nt, Human
cuggccaguuguccuggcuugg

SEQ ID NO: 322283 - RNA, 20 nt, Human
ugaaggccagcagcauaggg

SEQ ID NO: 322284 - RNA, 22 nt, Human
gcuggccauagaagccaaagag

SEQ ID NO: 322285 - RNA, 22 nt, Human
cugggugaguugaugaaggaga

SEQ ID NO: 322286 - RNA, 22 nt, Human
augaaggauggcuggcugcccu

SEQ ID NO: 322287 - RNA, 22 nt, Human
gcucagugcaucauuccaggcu

SEQ ID NO: 322288 - RNA, 22 nt, Human
ugaaaucuuauacuuugguagu

SEQ ID NO: 322289 - RNA, 21 nt, Human
aaacugaccuugccugagaca

SEQ ID NO: 322290 - RNA, 22 nt, Human
acuguucacagauuagucgaug

SEQ ID NO: 322291 - RNA, 22 nt, Human
aggugaguugguaggaaguuug

SEQ ID NO: 322292 - RNA, 19 nt, Human
acacagggcuagaguuaca

SEQ ID NO: 322293 - RNA, 22 nt, Human
caaauucagaaaauugguagag

SEQ ID NO: 322294 - RNA, 22 nt, Human
uggcccugcuaugauccugcaa

SEQ ID NO: 322295 - RNA, 22 nt, Human
ccaguccugccacccugucuau

SEQ ID NO: 322296 - RNA, 22 nt, Human
gaggcagaaguugcagugagca

SEQ ID NO: 322297 - RNA, 22 nt, Human
uuggagcccugaggaucuggau

SEQ ID NO: 322298 - RNA, 22 nt, Human
ugagagugaaaugucacauguc

SEQ ID NO: 322299 - RNA, 22 nt, Human
uauugaaauccauuacguucuu

SEQ ID NO: 322300 - RNA, 22 nt, Human
uccaucagauucccuccugaga

SEQ ID NO: 322301 - RNA, 22 nt, Human
uuaacagacauauauauuugua

SEQ ID NO: 322302 - RNA, 22 nt, Human
ggccucgcggcuucugguggcu

SEQ ID NO: 322303 - RNA, 22 nt, Human
gaggaaggucccaucagaauuu

SEQ ID NO: 322304 - RNA, 22 nt, Human
cagggccaagccccuuuggcug

SEQ ID NO: 322305 - RNA, 22 nt, Human
guggaauguccuugaucauaag

SEQ ID NO: 322306 - RNA, 22 nt, Human
agccccuugcacuuccccacgc

SEQ ID NO: 322307 - RNA, 22 nt, Human
ccacacagggggaugaguuauu

SEQ ID NO: 322308 - RNA, 20 nt, Human
cagagcuguuauggaugaug

SEQ ID NO: 322309 - RNA, 22 nt, Human
aaugaaaugaagauaugaucag

SEQ ID NO: 322310 - RNA, 22 nt, Human
ugcugugagguugagaaggaag

SEQ ID NO: 322311 - RNA, 22 nt, Human
ucuuugcaaaauacaacaaugg

SEQ ID NO: 322312 - RNA, 22 nt, Human
caguggagagacuuuuacucuu

SEQ ID NO: 322313 - RNA, 22 nt, Human
accagcuguguccuggcugcag

SEQ ID NO: 322314 - RNA, 22 nt, Human
agcugaaggcuagaacagcugg

SEQ ID NO: 322315 - RNA, 22 nt, Human
gccccugggagcagagccacca

SEQ ID NO: 322316 - RNA, 22 nt, Human
uucacauuugcccuuaugugug

SEQ ID NO: 322317 - RNA, 20 nt, Human
ggaagcagagaacuguuuuc

SEQ ID NO: 322318 - RNA, 22 nt, Human
acuggagcccguggaggcgcag

SEQ ID NO: 322319 - RNA, 22 nt, Human
cagacuggccacaucugcacug

SEQ ID NO: 322320 - RNA, 22 nt, Human
guggccugggguuuguucugag

SEQ ID NO: 322321 - RNA, 20 nt, Human
cucaguguauucugggugcu

SEQ ID NO: 322322 - RNA, 22 nt, Human
auauuuaacuggucccaauaua

SEQ ID NO: 322323 - RNA, 22 nt, Human
ucuguucagacacuuuacaugu

SEQ ID NO: 322324 - RNA, 22 nt, Human
cuuucacauaauugaccuugaa

SEQ ID NO: 322325 - RNA, 22 nt, Human
cugcucuggucucuucauguuu

SEQ ID NO: 322326 - RNA, 22 nt, Human
aaauauugguaggaugcuuguu

SEQ ID NO: 322327 - RNA, 22 nt, Human
uggcagagaugaagaguuguuu

SEQ ID NO: 322328 - RNA, 22 nt, Human
uggggcugugagacuacaggau

SEQ ID NO: 322329 - RNA, 23 nt, Human
gccugggacugguagugugaccu

SEQ ID NO: 322330 - RNA, 22 nt, Human
guucuucaggcugugcucuaga

SEQ ID NO: 322331 - RNA, 22 nt, Human
gcagggucugaggccacagagg

SEQ ID NO: 322332 - RNA, 22 nt, Human
agccacagcgaaccucucuucc

SEQ ID NO: 322333 - RNA, 22 nt, Human
cugcccuggcagccuaccaugg

SEQ ID NO: 322334 - RNA, 22 nt, Human
caauguguuugcauauuaaaau

SEQ ID NO: 322335 - RNA, 22 nt, Human
gccuggguccacugaucaugcu

SEQ ID NO: 322336 - RNA, 22 nt, Human
cugaggccucuguucaccagaa

SEQ ID NO: 322337 - RNA, 23 nt, Human
ucagcugcuuccuccugccugcc

SEQ ID NO: 322338 - RNA, 23 nt, Human
cagggcugguagggaagagcgug

SEQ ID NO: 322339 - RNA, 22 nt, Human
aggaagaauguuuacauaucaa

SEQ ID NO: 322340 - RNA, 22 nt, Human
ucagugugaguaccaugcucag

SEQ ID NO: 322341 - RNA, 22 nt, Human
gcugccacuuggucaugucaug

SEQ ID NO: 322342 - RNA, 22 nt, Human
aaaguguggagauugaacuaaa

SEQ ID NO: 322343 - RNA, 22 nt, Human
cucaggauguacuacagaaggc

SEQ ID NO: 322344 - RNA, 22 nt, Human
ucuggagccuuggaugggaaag

SEQ ID NO: 322345 - RNA, 22 nt, Human
caggccugguugagcccugaga

SEQ ID NO: 322346 - RNA, 22 nt, Human
cacagucccauucgagaguaau

SEQ ID NO: 322347 - RNA, 22 nt, Human
agaggccagcagugccuaucug

SEQ ID NO: 322348 - RNA, 22 nt, Human
aaaugcagcagcuaauugaaaa

SEQ ID NO: 322349 - RNA, 22 nt, Human
agaaaucuaagaugcucaagga

SEQ ID NO: 322350 - RNA, 21 nt, Human
accaggccaggaggcuggcac

SEQ ID NO: 322351 - RNA, 22 nt, Human
ccucuggcaacuucacagccca

SEQ ID NO: 322352 - RNA, 22 nt, Human
aagaacagauucagccugaacu

SEQ ID NO: 322353 - RNA, 22 nt, Human
uagaagcaguaauagaaauagg

SEQ ID NO: 322354 - RNA, 22 nt, Human
cugcucuggcguacucggcauc

SEQ ID NO: 322355 - RNA, 22 nt, Human
aacagacaacuccuguggcuca

SEQ ID NO: 322356 - RNA, 22 nt, Human
uucauugugaacacauucugcc

SEQ ID NO: 322357 - RNA, 23 nt, Human
ugcagcugccucuggcgggccgg

SEQ ID NO: 322358 - RNA, 22 nt, Human
ucaaauaccagcuuuuccagaa

SEQ ID NO: 322359 - RNA, 22 nt, Human
agccaggggauucaucagggac

SEQ ID NO: 322360 - RNA, 22 nt, Human
accaaggaagaaucuauuugag

SEQ ID NO: 322361 - RNA, 22 nt, Human
caguguuuguggaauucaggug

SEQ ID NO: 322362 - RNA, 22 nt, Human
ggcuucccagcagagggcgcac

SEQ ID NO: 322363 - RNA, 22 nt, Human
caaugauguuuagauaaaaucc

SEQ ID NO: 322364 - RNA, 22 nt, Human
cccuguacagucucuguggcac

SEQ ID NO: 322365 - RNA, 22 nt, Human
uguauacauucucuuggguuug

SEQ ID NO: 322366 - RNA, 22 nt, Human
auaugaagucagacaaacuggg

SEQ ID NO: 322367 - RNA, 22 nt, Human
aaggcagcaccgccuccugaaa

SEQ ID NO: 322368 - RNA, 22 nt, Human
ccagcuuguuugaagcucguca

SEQ ID NO: 322369 - RNA, 22 nt, Human
agggcagagggugccucaccug

SEQ ID NO: 322370 - RNA, 19 nt, Human
ucugcuggcagaauucccu

SEQ ID NO: 322371 - RNA, 18 nt, Human
cucugggagaggcauaca

SEQ ID NO: 322372 - RNA, 22 nt, Human
acagacauuuucuguauugccu

SEQ ID NO: 322373 - RNA, 22 nt, Human
aaccauuugcaguuacugagac

SEQ ID NO: 322374 - RNA, 22 nt, Human
cuugcuggugguguuuucuaug

SEQ ID NO: 322375 - RNA, 22 nt, Human
uccuggcccacuaugccagcau

SEQ ID NO: 322376 - RNA, 22 nt, Human
agccccaguccgcugcgggcgg

SEQ ID NO: 322377 - RNA, 22 nt, Human
uccuggagggaggcggugcuac

SEQ ID NO: 322378 - RNA, 19 nt, Human
ucucagagcccuagaggcc

SEQ ID NO: 322379 - RNA, 22 nt, Human
gagaugaauguaaacaaaggca

SEQ ID NO: 322380 - RNA, 22 nt, Human
gcgaaaaauguguaaauauguu

SEQ ID NO: 322381 - RNA, 22 nt, Human
uucaguuucagucuugcaaaaa

SEQ ID NO: 322382 - RNA, 22 nt, Human
ggcugaaggaugaaagcugcag

SEQ ID NO: 322383 - RNA, 22 nt, Human
uaacacauuuuccucauacgga

SEQ ID NO: 322384 - RNA, 22 nt, Human
ccuggaaguuggagguugcagu

SEQ ID NO: 322385 - RNA, 22 nt, Human
aagauacugaugauguaggcua

SEQ ID NO: 322386 - RNA, 22 nt, Human
cugccugugugugccugcagaa

SEQ ID NO: 322387 - RNA, 21 nt, Human
aaggcagaagcauggaaugag

SEQ ID NO: 322388 - RNA, 22 nt, Human
uugaaagucacaauggcauuaa

SEQ ID NO: 322389 - RNA, 22 nt, Human
uggcuucaucugcagcacugcc

SEQ ID NO: 322390 - RNA, 22 nt, Human
cauuucugcagaauugcucuuc

SEQ ID NO: 322391 - RNA, 22 nt, Human
agugaaauaugcccauugcugu

SEQ ID NO: 322392 - RNA, 22 nt, Human
uguuuuguuuaugagagcacag

SEQ ID NO: 322393 - RNA, 22 nt, Human
agcugcagucaagcugggccac

SEQ ID NO: 322394 - RNA, 22 nt, Human
aauagguagccagauauauaaa

SEQ ID NO: 322395 - RNA, 22 nt, Human
aaaauacacauacuaggggaaa

SEQ ID NO: 322396 - RNA, 22 nt, Human
cugugaggcccugggugcugga

SEQ ID NO: 322397 - RNA, 22 nt, Human
aggaagcccuugucauuucugu

SEQ ID NO: 322398 - RNA, 22 nt, Human
ggcugccuugacccuggcuccg

SEQ ID NO: 322399 - RNA, 22 nt, Human
gcucccagaaccaaggcugggg

SEQ ID NO: 322400 - RNA, 22 nt, Human
caggaugaagggcaaaggcaag

SEQ ID NO: 322401 - RNA, 22 nt, Human
ucuguucacugagcaauggcaa

SEQ ID NO: 322402 - RNA, 22 nt, Human
aauuuggcagugucuugaagua

SEQ ID NO: 322403 - RNA, 22 nt, Human
uccaggaggguuuucugccuuc

SEQ ID NO: 322404 - RNA, 22 nt, Human
ucagcagggcugugguguggcu

SEQ ID NO: 322405 - RNA, 22 nt, Human
gcuggcaggguucucacugaaa

SEQ ID NO: 322406 - RNA, 22 nt, Human
agcuccugaaaagcgcuugcuu

SEQ ID NO: 322407 - RNA, 22 nt, Human
gcagggcagccacaggcccccu

SEQ ID NO: 322408 - RNA, 22 nt, Human
agcagcugcagagggcuccccc

SEQ ID NO: 322409 - RNA, 23 nt, Human
aauguauguuaguaucuuagaga

SEQ ID NO: 322410 - RNA, 22 nt, Human
uccaguccuagaaacuggagag

SEQ ID NO: 322411 - RNA, 22 nt, Human
uagagugguuaacaguuuagaa

SEQ ID NO: 322412 - RNA, 22 nt, Human
uccagccaugacucggacagug

SEQ ID NO: 322413 - RNA, 22 nt, Human
uaggagaggugaauggcacacu

SEQ ID NO: 322414 - RNA, 22 nt, Human
cucuucuugucucugguuagaa

SEQ ID NO: 322415 - RNA, 22 nt, Human
ggaggcugagaaguccaagauc

SEQ ID NO: 322416 - RNA, 22 nt, Human
gccuggcacauugcaguggauu

SEQ ID NO: 322417 - RNA, 22 nt, Human
gaggccaaucaauagggcaaua

SEQ ID NO: 322418 - RNA, 22 nt, Human
caguggguggcuaaguggcuga

SEQ ID NO: 322419 - RNA, 22 nt, Human
uggcuggcccugggagugcaga

SEQ ID NO: 322420 - RNA, 22 nt, Human
cugccuggguucaaguccuguu

SEQ ID NO: 322421 - RNA, 22 nt, Human
uaucuguucaauggaagaugac

SEQ ID NO: 322422 - RNA, 22 nt, Human
gcugcucuugaggggcucacug

SEQ ID NO: 322423 - RNA, 22 nt, Human
aauaugugagguauguucagug

SEQ ID NO: 322424 - RNA, 22 nt, Human
aaggcacugagccagccgucuc

SEQ ID NO: 322425 - RNA, 22 nt, Human
uccuuuuugguccaaggugacc

SEQ ID NO: 322426 - RNA, 22 nt, Human
gaaccaaguaggauacaaggag

SEQ ID NO: 322427 - RNA, 22 nt, Human
gagcacaggcuuugguggacac

SEQ ID NO: 322428 - RNA, 22 nt, Human
cuuccuggccauugccauggca

SEQ ID NO: 322429 - RNA, 22 nt, Human
agccuuguuggucugaguuugg

SEQ ID NO: 322430 - RNA, 22 nt, Human
ucccugcucagcucaccuggca

SEQ ID NO: 322431 - RNA, 17 nt, Human
gucugggcuuuagagac

SEQ ID NO: 322432 - RNA, 22 nt, Human
cuggagagaccgaaagaggcug

SEQ ID NO: 322433 - RNA, 22 nt, Human
cagggccuucguaaguguccgg

SEQ ID NO: 322434 - RNA, 22 nt, Human
aggcuucccaagcagcugcaaa

SEQ ID NO: 322435 - RNA, 17 nt, Human
ggcagagcugacagggc

SEQ ID NO: 322436 - RNA, 22 nt, Human
aguggcagaucucuggucugga

SEQ ID NO: 322437 - RNA, 22 nt, Human
aaaaucuaaguagcgaguaagg

SEQ ID NO: 322438 - RNA, 22 nt, Human
uuuccauauucugcgucugcca

SEQ ID NO: 322439 - RNA, 22 nt, Human
auuucuguugcuuauaaauuac

SEQ ID NO: 322440 - RNA, 22 nt, Human
cugugugcugaaaugcagugag

SEQ ID NO: 322441 - RNA, 22 nt, Human
aaauguauccuacuuccugagu

SEQ ID NO: 322442 - RNA, 22 nt, Human
ccaggggaaacagggagcacuc

SEQ ID NO: 322443 - RNA, 22 nt, Human
ucaugccacuuacaaaauaaug

SEQ ID NO: 322444 - RNA, 22 nt, Human
cucaccccuguaauuccagcac

SEQ ID NO: 322445 - RNA, 22 nt, Human
guggcuucuggcugggccucag

SEQ ID NO: 322446 - RNA, 22 nt, Human
ggcuccuguggcaagacagcuu

SEQ ID NO: 322447 - RNA, 22 nt, Human
caaaugauagagccgauuauca

SEQ ID NO: 322448 - RNA, 22 nt, Human
gagggauggugugagaggcuca

SEQ ID NO: 322449 - RNA, 22 nt, Human
auauucuugugauuauaaagua

SEQ ID NO: 322450 - RNA, 22 nt, Human
ggucccagcugcucaagaggcu

SEQ ID NO: 322451 - RNA, 22 nt, Human
uccugcagccauuagaggucaa

SEQ ID NO: 322452 - RNA, 19 nt, Human
gcuuuuuguugucaaaggu

SEQ ID NO: 322453 - RNA, 22 nt, Human
caaauguauucucacuucaggg

SEQ ID NO: 322454 - RNA, 22 nt, Human
aacaugaagguaggaugguuuu

SEQ ID NO: 322455 - RNA, 22 nt, Human
agggcagauggaacuuccccga

SEQ ID NO: 322456 - RNA, 22 nt, Human
guccucagggagucccagucau

SEQ ID NO: 322457 - RNA, 22 nt, Human
gcagugguccaguucacaccca

SEQ ID NO: 322458 - RNA, 21 nt, Human
uccuccuucaaguccuggccu

SEQ ID NO: 322459 - RNA, 22 nt, Human
aucauguuccagaaacagugau

SEQ ID NO: 322460 - RNA, 18 nt, Human
acugugguuuauguguag

SEQ ID NO: 322461 - RNA, 22 nt, Human
agcugggaggugggcagugaga

SEQ ID NO: 322462 - RNA, 22 nt, Human
ugaaggccagcucuuuaucagc

SEQ ID NO: 322463 - RNA, 22 nt, Human
agccucugguccucccucagcu

SEQ ID NO: 322464 - RNA, 22 nt, Human
gcagaggccaucaacuuugcca

SEQ ID NO: 322465 - RNA, 22 nt, Human
ccuccugggcuccugucugcac

SEQ ID NO: 322466 - RNA, 22 nt, Human
acuguguccuauuuccuugaca

SEQ ID NO: 322467 - RNA, 22 nt, Human
aaaggagacagucuuaccugga

SEQ ID NO: 322468 - RNA, 22 nt, Human
ugggaggacuugugggcuucau

SEQ ID NO: 322469 - RNA, 22 nt, Human
aaaguucuggcauuuucugucu

SEQ ID NO: 322470 - RNA, 22 nt, Human
aaugauggauuuagacaagcug

SEQ ID NO: 322471 - RNA, 18 nt, Human
auuuugaacaaugcugua

SEQ ID NO: 322472 - RNA, 22 nt, Human
agagcagguggcaacucuggga

SEQ ID NO: 322473 - RNA, 22 nt, Human
cugaaggagcauagucaguuuu

SEQ ID NO: 322474 - RNA, 22 nt, Human
aggcacaggccucagcacccag

SEQ ID NO: 322475 - RNA, 22 nt, Human
gagggggagaugugcacacacu

SEQ ID NO: 322476 - RNA, 22 nt, Human
gaaaucugcggugaggccugag

SEQ ID NO: 322477 - RNA, 21 nt, Human
cagaggggcuagccuggcugc

SEQ ID NO: 322478 - RNA, 22 nt, Human
gaagcagcaaguauaggacagg

SEQ ID NO: 322479 - RNA, 22 nt, Human
ggaggccagggacccagucagc

SEQ ID NO: 322480 - RNA, 22 nt, Human
ugcuuccuugagcucuccaauc

SEQ ID NO: 322481 - RNA, 22 nt, Human
gcugucccgaaccccugguaau

SEQ ID NO: 322482 - RNA, 22 nt, Human
uggcucaguuucaguccugguu

SEQ ID NO: 322483 - RNA, 22 nt, Human
augaggcaucugcagucacuag

SEQ ID NO: 322484 - RNA, 22 nt, Human
agcuccaggugcaagucauggu

SEQ ID NO: 322485 - RNA, 22 nt, Human
uuguuuuuaugaacauccagga

SEQ ID NO: 322486 - RNA, 22 nt, Human
auguauuucuauguagugaaga

SEQ ID NO: 322487 - RNA, 22 nt, Human
gucccucugugucccugcaguc

SEQ ID NO: 322488 - RNA, 22 nt, Human
uugaaagugccaaguccuagug

SEQ ID NO: 322489 - RNA, 22 nt, Human
ucccagcauaacaaacugcccg

SEQ ID NO: 322490 - RNA, 22 nt, Human
aggcuucccagcugagcucagc

SEQ ID NO: 322491 - RNA, 23 nt, Human
cagcccuggagaugugggaggca

SEQ ID NO: 322492 - RNA, 22 nt, Human
cagcugcuuuaguuuuccaucc

SEQ ID NO: 322493 - RNA, 22 nt, Human
caaauauuccagguacaucccu

SEQ ID NO: 322494 - RNA, 22 nt, Human
ggccagggggcuucagacucca

SEQ ID NO: 322495 - RNA, 22 nt, Human
aaguuuuaacaaguacuuacua

SEQ ID NO: 322496 - RNA, 22 nt, Human
augggaggaagagaagaugucu

SEQ ID NO: 322497 - RNA, 22 nt, Human
caagcagagacuagauagcugu

SEQ ID NO: 322498 - RNA, 22 nt, Human
ucacaccuguaaucccaggccu

SEQ ID NO: 322499 - RNA, 22 nt, Human
aggcugucugaccccagagccc

SEQ ID NO: 322500 - RNA, 22 nt, Human
auucuucacauggauaggaucu

SEQ ID NO: 322501 - RNA, 22 nt, Human
caucagcaggcaacacucuugg

SEQ ID NO: 322502 - RNA, 22 nt, Human
ggcuucucgugccgaagcaaga

SEQ ID NO: 322503 - RNA, 22 nt, Human
ugugaugguucacugggcauga

SEQ ID NO: 322504 - RNA, 22 nt, Human
guugaaagaucauguggcugcc

SEQ ID NO: 322505 - RNA, 22 nt, Human
ugucuguacaaauuuucugugu

SEQ ID NO: 322506 - RNA, 18 nt, Human
cggcagagugcuucuagc

SEQ ID NO: 322507 - RNA, 20 nt, Human
augugucuguaaacaacucu

SEQ ID NO: 322508 - RNA, 22 nt, Human
gaugcacugcaguauauacugu

SEQ ID NO: 322509 - RNA, 22 nt, Human
gccugaugagcuuccagcugag

SEQ ID NO: 322510 - RNA, 22 nt, Human
uucaaaggcaggauagcagcug

SEQ ID NO: 322511 - RNA, 22 nt, Human
cagagccccucagcucucuccc

SEQ ID NO: 322512 - RNA, 22 nt, Human
auugugcaaauauuaucuguag

SEQ ID NO: 322513 - RNA, 22 nt, Human
acagugaaugcccaagaaaagu

SEQ ID NO: 322514 - RNA, 22 nt, Human
uugcagcuucgagucuaucugu

SEQ ID NO: 322515 - RNA, 22 nt, Human
caugucuguguacacaugcaca

SEQ ID NO: 322516 - RNA, 22 nt, Human
agcagccagugggagugauaca

SEQ ID NO: 322517 - RNA, 23 nt, Human
aucauucuccaaucuggagcagg

SEQ ID NO: 322518 - RNA, 22 nt, Human
auuugucuuugagugcccugcu

SEQ ID NO: 322519 - RNA, 22 nt, Human
gcugggagaggcccugaaguga

SEQ ID NO: 322520 - RNA, 20 nt, Human
cugcuguguuauuguagaac

SEQ ID NO: 322521 - RNA, 22 nt, Human
gaaacugugaucguguucuggg

SEQ ID NO: 322522 - RNA, 22 nt, Human
ccauaagguuuggggccaugca

SEQ ID NO: 322523 - RNA, 22 nt, Human
ccaggguggcguagaugcuggg

SEQ ID NO: 322524 - RNA, 22 nt, Human
ucucaguguuaucuaucugccu

SEQ ID NO: 322525 - RNA, 22 nt, Human
ggcugccauaacagaguaccac

SEQ ID NO: 322526 - RNA, 22 nt, Human
acugaaggguaaugugggagcc

SEQ ID NO: 322527 - RNA, 23 nt, Human
uagaaugucauucaaugauaugg

SEQ ID NO: 322528 - RNA, 18 nt, Human
ugugaacacauuuuucug

SEQ ID NO: 322529 - RNA, 22 nt, Human
ggccagcagucacagggucaga

SEQ ID NO: 322530 - RNA, 22 nt, Human
cagcauuuggugaucaucuuaa

SEQ ID NO: 322531 - RNA, 22 nt, Human
aacccuggggcagcugcuaggg

SEQ ID NO: 322532 - RNA, 22 nt, Human
gggggacaggaugaauaucugu

SEQ ID NO: 322533 - RNA, 22 nt, Human
ucuuucaaugagcauucuuucc

SEQ ID NO: 322534 - RNA, 22 nt, Human
cugcuuugaaaauaaacuuguc

SEQ ID NO: 322535 - RNA, 22 nt, Human
gcugaaugaauguauuuuaaaa

SEQ ID NO: 322536 - RNA, 22 nt, Human
ucugucuccucugaggugccag

SEQ ID NO: 322537 - RNA, 22 nt, Human
gagaggccauggcugugcagug

SEQ ID NO: 322538 - RNA, 22 nt, Human
ugaucccaaucuuuccugcucc

SEQ ID NO: 322539 - RNA, 22 nt, Human
uggaggaaucagggcuuaggcu

SEQ ID NO: 322540 - RNA, 22 nt, Human
aaggucauuuuuuccucuguug

SEQ ID NO: 322541 - RNA, 21 nt, Human
ugcaggcaggcagagaugcug

SEQ ID NO: 322542 - RNA, 22 nt, Human
uugucugugaaauggaaauagu

SEQ ID NO: 322543 - RNA, 22 nt, Human
agcaggaggguuuuguagaguc

SEQ ID NO: 322544 - RNA, 22 nt, Human
ugaagcagagaauuugacaguc

SEQ ID NO: 322545 - RNA, 22 nt, Human
uggcagcuacagacagagguga

SEQ ID NO: 322546 - RNA, 22 nt, Human
gaagaacaccugcugcccagug

SEQ ID NO: 322547 - RNA, 22 nt, Human
gcaguguuauguuuucuauaau

SEQ ID NO: 322548 - RNA, 22 nt, Human
ggagacagugguagggccuaag

SEQ ID NO: 322549 - RNA, 22 nt, Human
agauguaguagugggucuuuua

SEQ ID NO: 322550 - RNA, 22 nt, Human
gaagagcuguagccugcucuuu

SEQ ID NO: 322551 - RNA, 19 nt, Human
gcagccaggugcucuaccu

SEQ ID NO: 322552 - RNA, 22 nt, Human
cacacucauuagucauuucucu

SEQ ID NO: 322553 - RNA, 19 nt, Human
ccuuugaaucaggacacuu

SEQ ID NO: 322554 - RNA, 22 nt, Human
uucucagauauuuacugagcau

SEQ ID NO: 322555 - RNA, 22 nt, Human
gcccagagagaugcuguagacc

SEQ ID NO: 322556 - RNA, 19 nt, Human
agcaccugugagagccugg

SEQ ID NO: 322557 - RNA, 22 nt, Human
gcucuccaaacccuguggcuuu

SEQ ID NO: 322558 - RNA, 22 nt, Human
uagauauguguuuauuaugcug

SEQ ID NO: 322559 - RNA, 22 nt, Human
gcuuccuggagggagagagcug

SEQ ID NO: 322560 - RNA, 22 nt, Human
uucuaacucuguuauguguuuc

SEQ ID NO: 322561 - RNA, 20 nt, Human
cugggcagguguuugaucuc

SEQ ID NO: 322562 - RNA, 22 nt, Human
ucauuuguugcuguuaccugag

SEQ ID NO: 322563 - RNA, 18 nt, Human
agggucagugucacuggc

SEQ ID NO: 322564 - RNA, 23 nt, Human
uacaugcuauaauuucacccuca

SEQ ID NO: 322565 - RNA, 22 nt, Human
ucuucucucauguaggagggaa

SEQ ID NO: 322566 - RNA, 22 nt, Human
aggcacugggggaugagcaagg

SEQ ID NO: 322567 - RNA, 22 nt, Human
cucucugaggaaggagcaucug

SEQ ID NO: 322568 - RNA, 22 nt, Human
caauagcagcuucugaaugcaa

SEQ ID NO: 322569 - RNA, 22 nt, Human
cagauccacccuuguagugaca

SEQ ID NO: 322570 - RNA, 22 nt, Human
ggugaaggcacaagagggcaag

SEQ ID NO: 322571 - RNA, 22 nt, Human
cuucuucauguauugauagucu

SEQ ID NO: 322572 - RNA, 22 nt, Human
ccugccuggagcugagugugga

SEQ ID NO: 322573 - RNA, 22 nt, Human
auugacaaucuacuauguucug

SEQ ID NO: 322574 - RNA, 22 nt, Human
caccaggcuggagugcagaggu

SEQ ID NO: 322575 - RNA, 22 nt, Human
gauuuccuugcauauugguaau

SEQ ID NO: 322576 - RNA, 19 nt, Human
ucagaggauuuggcuauga

SEQ ID NO: 322577 - RNA, 22 nt, Human
uuucuagucucgaucucuuaau

SEQ ID NO: 322578 - RNA, 22 nt, Human
ggugacugguuuaucuggcagu

SEQ ID NO: 322579 - RNA, 22 nt, Human
ucagagcugcccaugcaagggg

SEQ ID NO: 322580 - RNA, 22 nt, Human
uggcucagcuuuccccaucugg

SEQ ID NO: 322581 - RNA, 22 nt, Human
cugucagcacucuacuacagau

SEQ ID NO: 322582 - RNA, 22 nt, Human
cuccucacuuuccagacugggc

SEQ ID NO: 322583 - RNA, 22 nt, Human
cugugcaagcccaagauaaaac

SEQ ID NO: 322584 - RNA, 22 nt, Human
caucagcagucacaugaugcug

SEQ ID NO: 322585 - RNA, 22 nt, Human
gauuuccucacuaacauccauc

SEQ ID NO: 322586 - RNA, 22 nt, Human
agagcugcccacacagcagauu

SEQ ID NO: 322587 - RNA, 22 nt, Human
ucauccaguaccauggaaggca

SEQ ID NO: 322588 - RNA, 22 nt, Human
ccugcuguaaugugucuuuauu

SEQ ID NO: 322589 - RNA, 22 nt, Human
guguuuccucuagaagccaugg

SEQ ID NO: 322590 - RNA, 18 nt, Human
ucuuggaguaaugaucaa

SEQ ID NO: 322591 - RNA, 21 nt, Human
ucucugggaggacuugugaga

SEQ ID NO: 322592 - RNA, 21 nt, Human
gccugccugcgugacccucuu

SEQ ID NO: 322593 - RNA, 22 nt, Human
agcuugccucuuaaucaccuca

SEQ ID NO: 322594 - RNA, 22 nt, Human
gcucccaccuuugcuaucagua

SEQ ID NO: 322595 - RNA, 22 nt, Human
uuccuucucagcccucgaggau

SEQ ID NO: 322596 - RNA, 22 nt, Human
ccaggccugauugggaaucuug

SEQ ID NO: 322597 - RNA, 18 nt, Human
agagaugguguagaguuu

SEQ ID NO: 322598 - RNA, 22 nt, Human
aagcuggaacaucuugaggaag

SEQ ID NO: 322599 - RNA, 22 nt, Human
agucagugaaggcauugcucaa

SEQ ID NO: 322600 - RNA, 22 nt, Human
ccacccuuggguucggaggccg

SEQ ID NO: 322601 - RNA, 22 nt, Human
acccugggcuuggccugcucag

SEQ ID NO: 322602 - RNA, 22 nt, Human
ggaaagaggauaguggguaggu

SEQ ID NO: 322603 - RNA, 22 nt, Human
cccagcucaagcagagagcuaa

SEQ ID NO: 322604 - RNA, 22 nt, Human
ugagccuguggggugacaacca

SEQ ID NO: 322605 - RNA, 22 nt, Human
cucuguccacagguuugucccu

SEQ ID NO: 322606 - RNA, 22 nt, Human
agcaggugacagggcuguggug

SEQ ID NO: 322607 - RNA, 22 nt, Human
aauguguagauguugcauuccu

SEQ ID NO: 322608 - RNA, 22 nt, Human
uugauacaggcucuauuucauc

SEQ ID NO: 322609 - RNA, 22 nt, Human
agcugccacauggugucacugu

SEQ ID NO: 322610 - RNA, 22 nt, Human
uauuuagaugcauuuggauugc

SEQ ID NO: 322611 - RNA, 22 nt, Human
ucuuggagacucuuguauauuu

SEQ ID NO: 322612 - RNA, 22 nt, Human
gccugaagaacagcugugagga

SEQ ID NO: 322613 - RNA, 22 nt, Human
cugaggcuggggaagggaagug

SEQ ID NO: 322614 - RNA, 22 nt, Human
gcucugcuggagggaaagagaa

SEQ ID NO: 322615 - RNA, 22 nt, Human
caacugugaauuuuaugauacc

SEQ ID NO: 322616 - RNA, 22 nt, Human
guguaugaggggagaauguuuu

SEQ ID NO: 322617 - RNA, 20 nt, Human
cugugccuaaaccuccgggu

SEQ ID NO: 322618 - RNA, 22 nt, Human
gcugccaguguggcaugaugca

SEQ ID NO: 322619 - RNA, 22 nt, Human
auuugcuucugugaaaucaagu

SEQ ID NO: 322620 - RNA, 22 nt, Human
gacagagugcagggcuagaaga

SEQ ID NO: 322621 - RNA, 22 nt, Human
ccuugcugcgugcuagcacaga

SEQ ID NO: 322622 - RNA, 22 nt, Human
ucagggcaggacaguguaggcc

SEQ ID NO: 322623 - RNA, 22 nt, Human
ggcaccagggaaggaaggcugg

SEQ ID NO: 322624 - RNA, 22 nt, Human
ugagguggcuagggaggcacuc

SEQ ID NO: 322625 - RNA, 22 nt, Human
ucuuguccuaagagcuggauuc

SEQ ID NO: 322626 - RNA, 18 nt, Human
acaggccucaguccugca

SEQ ID NO: 322627 - RNA, 22 nt, Human
cccaucacagacacuggguuau

SEQ ID NO: 322628 - RNA, 19 nt, Human
guggccucggagcgcgcgg

SEQ ID NO: 322629 - RNA, 22 nt, Human
cacauauuguaguucaccagga

SEQ ID NO: 322630 - RNA, 22 nt, Human
cugggcaggagggcucuaugga

SEQ ID NO: 322631 - RNA, 17 nt, Human
uggcucugaggcugaau

SEQ ID NO: 322632 - RNA, 22 nt, Human
ucugagaguccaucuccaagcc

SEQ ID NO: 322633 - RNA, 22 nt, Human
cagugccaugucugagccccua

SEQ ID NO: 322634 - RNA, 22 nt, Human
cugggguggauggguccaaguu

SEQ ID NO: 322635 - RNA, 22 nt, Human
aucuggcuccuacacuugaaga

SEQ ID NO: 322636 - RNA, 22 nt, Human
uaaaucacuccuaauaaucagu

SEQ ID NO: 322637 - RNA, 22 nt, Human
ccacagggaacaugacagccuu

SEQ ID NO: 322638 - RNA, 22 nt, Human
uugucugaaagaucauuacauu

SEQ ID NO: 322639 - RNA, 23 nt, Human
gggagaauaugaggaugauggug

SEQ ID NO: 322640 - RNA, 22 nt, Human
gaaucacgguauucugcacggg

SEQ ID NO: 322641 - RNA, 22 nt, Human
agcuagaauauugaucugaaau

SEQ ID NO: 322642 - RNA, 22 nt, Human
gguggccucgguggugcacagg

SEQ ID NO: 322643 - RNA, 22 nt, Human
uaucuaaauggaauauuccaga

SEQ ID NO: 322644 - RNA, 17 nt, Human
ugaggccugcaucagug

SEQ ID NO: 322645 - RNA, 22 nt, Human
gcuccagguauuugcccuuuua

SEQ ID NO: 322646 - RNA, 22 nt, Human
agcagagcgccugcucagaggg

SEQ ID NO: 322647 - RNA, 22 nt, Human
cagcaugguggagcugcucuuu

SEQ ID NO: 322648 - RNA, 22 nt, Human
ggaggccaucuggcuggaggcu

SEQ ID NO: 322649 - RNA, 22 nt, Human
uccagccaccaccuugauugcc

SEQ ID NO: 322650 - RNA, 22 nt, Human
gcuuggggagcucaguguccuu

SEQ ID NO: 322651 - RNA, 22 nt, Human
gccugggagugcacagugaggu

SEQ ID NO: 322652 - RNA, 22 nt, Human
ugaugcugagccugggacugac

SEQ ID NO: 322653 - RNA, 22 nt, Human
aggaaaaucgagucuggaggca

SEQ ID NO: 322654 - RNA, 22 nt, Human
agagcagauggccagggggccu

SEQ ID NO: 322655 - RNA, 22 nt, Human
cagagacaaccugguagagaaa

SEQ ID NO: 322656 - RNA, 22 nt, Human
caaugugugcuuacaggccagu

SEQ ID NO: 322657 - RNA, 22 nt, Human
auagacauauggcuuuguuucu

SEQ ID NO: 322658 - RNA, 21 nt, Human
uucaaugaaaacaaagugagg

SEQ ID NO: 322659 - RNA, 20 nt, Human
ucucaggguucagcaaagua

SEQ ID NO: 322660 - RNA, 22 nt, Human
ccaaaguccuuucuccaccugc

SEQ ID NO: 322661 - RNA, 22 nt, Human
ugaacacauaaggcuuuccugu

SEQ ID NO: 322662 - RNA, 22 nt, Human
uuugaaagaauuuauguacuuu

SEQ ID NO: 322663 - RNA, 22 nt, Human
uuuaacagaugcuaugucuacc

SEQ ID NO: 322664 - RNA, 22 nt, Human
auggaagguccuacagagcgca

SEQ ID NO: 322665 - RNA, 22 nt, Human
ggccucacccaucggugccuuu

SEQ ID NO: 322666 - RNA, 22 nt, Human
uccuucaaagcuccuagugagc

SEQ ID NO: 322667 - RNA, 18 nt, Human
aguaguggguuuagcuuc

SEQ ID NO: 322668 - RNA, 22 nt, Human
gaggcagcugaaggagugacag

SEQ ID NO: 322669 - RNA, 22 nt, Human
acagagcuucccagccugagca

SEQ ID NO: 322670 - RNA, 22 nt, Human
uccucaugccgggucucacgcu

SEQ ID NO: 322671 - RNA, 22 nt, Human
uuccucuccucacaugagucac

SEQ ID NO: 322672 - RNA, 22 nt, Human
gauggcagcagcagccagggau

SEQ ID NO: 322673 - RNA, 22 nt, Human
cugggcucaagaagucuucccu

SEQ ID NO: 322674 - RNA, 22 nt, Human
ucuucaucucagauuaacagga

SEQ ID NO: 322675 - RNA, 21 nt, Human
ucccagggccaggugccauca

SEQ ID NO: 322676 - RNA, 22 nt, Human
caagagcuagacuuugucagga

SEQ ID NO: 322677 - RNA, 22 nt, Human
ucugcgcugccuugauccuugg

SEQ ID NO: 322678 - RNA, 22 nt, Human
ucuggccagugaaaugcagaau

SEQ ID NO: 322679 - RNA, 22 nt, Human
ccaggcugcucacaagcugccc

SEQ ID NO: 322680 - RNA, 22 nt, Human
ggaggaccugcuggcccugcaa

SEQ ID NO: 322681 - RNA, 22 nt, Human
gggccucucccuucucacgcau

SEQ ID NO: 322682 - RNA, 22 nt, Human
uccagcucuggcuuggcuagcu

SEQ ID NO: 322683 - RNA, 22 nt, Human
acauuucucuugaugucucuau

SEQ ID NO: 322684 - RNA, 22 nt, Human
augucuuuauaaauguauaaug

SEQ ID NO: 322685 - RNA, 22 nt, Human
gcccugggauuggguggaggcu

SEQ ID NO: 322686 - RNA, 22 nt, Human
ucuucaauuagauuuaccaauu

SEQ ID NO: 322687 - RNA, 22 nt, Human
agagacagaggcaauauagcuu

SEQ ID NO: 322688 - RNA, 22 nt, Human
uggcaucucaaacaggcagauu

SEQ ID NO: 322689 - RNA, 22 nt, Human
caagggugguauugggagcaua

SEQ ID NO: 322690 - RNA, 22 nt, Human
uggcagagucugggcuugggca

SEQ ID NO: 322691 - RNA, 22 nt, Human
uucacaggauauaugugcaggg

SEQ ID NO: 322692 - RNA, 22 nt, Human
aguggggacuuaugccagcauu

SEQ ID NO: 322693 - RNA, 22 nt, Human
cuguucaugcugauucuguaug

SEQ ID NO: 322694 - RNA, 19 nt, Human
acuuugcaugugugucuaa

SEQ ID NO: 322695 - RNA, 22 nt, Human
acuuguguaacacagaaagaac

SEQ ID NO: 322696 - RNA, 22 nt, Human
uaauucagggccagaaucccca

SEQ ID NO: 322697 - RNA, 22 nt, Human
cucccaggguagggagagacua

SEQ ID NO: 322698 - RNA, 22 nt, Human
auuaaauuggaucugcauaguu

SEQ ID NO: 322699 - RNA, 22 nt, Human
uggcccugcugggucagagcug

SEQ ID NO: 322700 - RNA, 23 nt, Human
uccucccaaauuucagccucauu

SEQ ID NO: 322701 - RNA, 22 nt, Human
uaaauuguuuucuagaaguugu

SEQ ID NO: 322702 - RNA, 22 nt, Human
cagaguguuucuuugggugggu

SEQ ID NO: 322703 - RNA, 22 nt, Human
aggcuucuacguggucccaggg

SEQ ID NO: 322704 - RNA, 22 nt, Human
ggagugaguacuggaguagcug

SEQ ID NO: 322705 - RNA, 22 nt, Human
uugauacaggccuucuagauga

SEQ ID NO: 322706 - RNA, 18 nt, Human
acauuucuaggugaaagc

SEQ ID NO: 322707 - RNA, 22 nt, Human
uucuccagaccuugugacuaug

SEQ ID NO: 322708 - RNA, 22 nt, Human
gcacagaaguaaaauacaaguc

SEQ ID NO: 322709 - RNA, 22 nt, Human
aagcaacucccuccucauuuuu

SEQ ID NO: 322710 - RNA, 22 nt, Human
ucagcugccuuucccaugcuag

SEQ ID NO: 322711 - RNA, 21 nt, Human
gaggccacuaauaggggcaga

SEQ ID NO: 322712 - RNA, 22 nt, Human
uggagcauauucuggagcuugg

SEQ ID NO: 322713 - RNA, 22 nt, Human
aguucuuuugugaacauaugcu

SEQ ID NO: 322714 - RNA, 22 nt, Human
uacuuccagcaaucugcauauu

SEQ ID NO: 322715 - RNA, 22 nt, Human
uacaaagugugcccaugcugag

SEQ ID NO: 322716 - RNA, 22 nt, Human
ucccagggcagcuguccagaag

SEQ ID NO: 322717 - RNA, 22 nt, Human
ggcagcugcaaaucugcucugu

SEQ ID NO: 322718 - RNA, 22 nt, Human
cuugucugugucggauaaaacu

SEQ ID NO: 322719 - RNA, 22 nt, Human
ucucucagaggccaggguccug

SEQ ID NO: 322720 - RNA, 22 nt, Human
ucuggcucucaacaaauauuua

SEQ ID NO: 322721 - RNA, 22 nt, Human
uuuauuaugauggacaccuucg

SEQ ID NO: 322722 - RNA, 22 nt, Human
auuccuugggaauuauugaaug

SEQ ID NO: 322723 - RNA, 22 nt, Human
agaaaaaucuuggcgcuugucu

SEQ ID NO: 322724 - RNA, 22 nt, Human
ggcaugggagugagcaaccuua

SEQ ID NO: 322725 - RNA, 22 nt, Human
cauuacauuucaaaauguuucc

SEQ ID NO: 322726 - RNA, 21 nt, Human
aaauguguuccauaaugcuuu

SEQ ID NO: 322727 - RNA, 21 nt, Human
gagugucuaauccaggcuguc

SEQ ID NO: 322728 - RNA, 20 nt, Human
uauuuguauuugggaaaguu

SEQ ID NO: 322729 - RNA, 22 nt, Human
acaggcuuacaggcugcaagua

SEQ ID NO: 322730 - RNA, 22 nt, Human
ugcaagcacucaaugcaaacag

SEQ ID NO: 322731 - RNA, 22 nt, Human
cauucugugauucuaaaucccu

SEQ ID NO: 322732 - RNA, 22 nt, Human
cagagggcucuuggcugccugc

SEQ ID NO: 322733 - RNA, 20 nt, Human
uuucuguaaggcauuaaucu

SEQ ID NO: 322734 - RNA, 22 nt, Human
cucuguccuaugcuugauagaa

SEQ ID NO: 322735 - RNA, 22 nt, Human
cagggcagaaggcacucuacuc

SEQ ID NO: 322736 - RNA, 21 nt, Human
ucauuuuuauugcuaccuugc

SEQ ID NO: 322737 - RNA, 22 nt, Human
aaaagucagucucuccuagcuc

SEQ ID NO: 322738 - RNA, 20 nt, Human
uuucugugcccaggucuguu

SEQ ID NO: 322739 - RNA, 22 nt, Human
uucaggaugcucagaguagucu

SEQ ID NO: 322740 - RNA, 22 nt, Human
ugggaaauguguuucuggacca

SEQ ID NO: 322741 - RNA, 19 nt, Human
gggaugggcccucacccuc

SEQ ID NO: 322742 - RNA, 21 nt, Human
ccccugggagcccugucagua

SEQ ID NO: 322743 - RNA, 22 nt, Human
gccagcagguugucaaggagcu

SEQ ID NO: 322744 - RNA, 22 nt, Human
cuuccuucugaagcauagaagc

SEQ ID NO: 322745 - RNA, 22 nt, Human
ugagccuggggccugggcagcg

SEQ ID NO: 322746 - RNA, 22 nt, Human
ucuggcucauacaagccugcaa

SEQ ID NO: 322747 - RNA, 22 nt, Human
gucugggguacuuucaucugau

SEQ ID NO: 322748 - RNA, 22 nt, Human
cggcagcaaaggaagccagguc

SEQ ID NO: 322749 - RNA, 22 nt, Human
ggcucagaaacuaaaggcgcug

SEQ ID NO: 322750 - RNA, 22 nt, Human
acagagcacauagauuggaguu

SEQ ID NO: 322751 - RNA, 20 nt, Human
uggagcuccagcguccaugu

SEQ ID NO: 322752 - RNA, 22 nt, Human
uggcucaggccuacgacgccuu

SEQ ID NO: 322753 - RNA, 22 nt, Human
aagggcagagggaaucccacau

SEQ ID NO: 322754 - RNA, 20 nt, Human
cagccuccacucacucagcu

SEQ ID NO: 322755 - RNA, 22 nt, Human
ucaggggacuuaggagagaagu

SEQ ID NO: 322756 - RNA, 22 nt, Human
ggaggccuagccagcuccaguu

SEQ ID NO: 322757 - RNA, 22 nt, Human
accugccuaucagcugccugcu

SEQ ID NO: 322758 - RNA, 21 nt, Human
gagccuucccucugcccuuuc

SEQ ID NO: 322759 - RNA, 19 nt, Human
cagaugagaaaagugaggu

SEQ ID NO: 322760 - RNA, 22 nt, Human
ggagugucagaaacaguguccu

SEQ ID NO: 322761 - RNA, 22 nt, Human
aacuuaaacccacucauguaga

SEQ ID NO: 322762 - RNA, 22 nt, Human
aggcaggcucaggcccaugcuu

SEQ ID NO: 322763 - RNA, 22 nt, Human
uguaaauaaugcauguaaauca

SEQ ID NO: 322764 - RNA, 22 nt, Human
cagcaggguauacagggaauuu

SEQ ID NO: 322765 - RNA, 22 nt, Human
acaauucuggguauuuauauag

SEQ ID NO: 322766 - RNA, 22 nt, Human
caaaugcuaacuucuuuccaaa

SEQ ID NO: 322767 - RNA, 22 nt, Human
uccuucagggggccgccugcac

SEQ ID NO: 322768 - RNA, 22 nt, Human
agcucccauuaucuucugaaac

SEQ ID NO: 322769 - RNA, 22 nt, Human
gucaccagucccagcuccugaa

SEQ ID NO: 322770 - RNA, 22 nt, Human
uccagaggcuccaaagggagau

SEQ ID NO: 322771 - RNA, 22 nt, Human
aaaugcuguaacugauauucug

SEQ ID NO: 322772 - RNA, 22 nt, Human
uuugaaagggacaaagucacug

SEQ ID NO: 322773 - RNA, 22 nt, Human
ggagccagggaagcugcuuccu

SEQ ID NO: 322774 - RNA, 22 nt, Human
caggaaccuaaagagacauuac

SEQ ID NO: 322775 - RNA, 22 nt, Human
aaagcccauguggaaguacagg

SEQ ID NO: 322776 - RNA, 22 nt, Human
gcaguguuccuucuacuggggc

SEQ ID NO: 322777 - RNA, 22 nt, Human
gcugaagcccacguggcuugua

SEQ ID NO: 322778 - RNA, 22 nt, Human
aucagcaaguccuguuaauucu

SEQ ID NO: 322779 - RNA, 22 nt, Human
ugggauggcauccugggccuug

SEQ ID NO: 322780 - RNA, 22 nt, Human
gggagucugggcuagacuccuu

SEQ ID NO: 322781 - RNA, 19 nt, Human
ugcauaaauuauauacuuu

SEQ ID NO: 322782 - RNA, 22 nt, Human
cugaagcaaaggaucgagcuaa

SEQ ID NO: 322783 - RNA, 22 nt, Human
gcuggcagucccaucagcuggg

SEQ ID NO: 322784 - RNA, 22 nt, Human
agggcagacuaggauggaagug

SEQ ID NO: 322785 - RNA, 22 nt, Human
ugcuuuauuuauaaaauagcaa

SEQ ID NO: 322786 - RNA, 22 nt, Human
gcugcccaguucugcugcugcc

SEQ ID NO: 322787 - RNA, 20 nt, Human
aagggcagagggaacagacu

SEQ ID NO: 322788 - RNA, 18 nt, Human
ggcugugcguggaggcug

SEQ ID NO: 322789 - RNA, 20 nt, Human
agcccaggccugugugaguc

SEQ ID NO: 322790 - RNA, 22 nt, Human
uugaauaguguuuucaguauac

SEQ ID NO: 322791 - RNA, 22 nt, Human
aaaguuguucaguaagaaacuc

SEQ ID NO: 322792 - RNA, 22 nt, Human
agggccuggaacugugggcagg

SEQ ID NO: 322793 - RNA, 22 nt, Human
ccucagaggugaacaucagugc

SEQ ID NO: 322794 - RNA, 22 nt, Human
aggccucacucucagagcuucu

SEQ ID NO: 322795 - RNA, 22 nt, Human
ugagccagaggaggcugugugg

SEQ ID NO: 322796 - RNA, 22 nt, Human
gugucccaggccucuggaauua

SEQ ID NO: 322797 - RNA, 22 nt, Human
ugugaaauucuugaaaugcaca

SEQ ID NO: 322798 - RNA, 22 nt, Human
agggggugcuacuuccagaguu

SEQ ID NO: 322799 - RNA, 22 nt, Human
ggcaccagggcaagggucuuuc

SEQ ID NO: 322800 - RNA, 22 nt, Human
aggguggggugcuacaucuuua

SEQ ID NO: 322801 - RNA, 22 nt, Human
gcuccucuauuccccacauuuu

SEQ ID NO: 322802 - RNA, 22 nt, Human
gaggaaaagagacagguuauug

SEQ ID NO: 322803 - RNA, 22 nt, Human
ggcuggcaagugucugcucaug

SEQ ID NO: 322804 - RNA, 22 nt, Human
cuucucagaggccagaagcuau

SEQ ID NO: 322805 - RNA, 22 nt, Human
acagguggcuuauuggcugauu

SEQ ID NO: 322806 - RNA, 22 nt, Human
caggaggcccaaagggcgcaga

SEQ ID NO: 322807 - RNA, 22 nt, Human
cuuaaauuggaugaguuaaguu

SEQ ID NO: 322808 - RNA, 22 nt, Human
aaggcucuuggagugaaugcag

SEQ ID NO: 322809 - RNA, 22 nt, Human
agcuuuauauuuaaugaauucu

SEQ ID NO: 322810 - RNA, 22 nt, Human
uccagccccggcuuccuuacag

SEQ ID NO: 322811 - RNA, 22 nt, Human
acacccagagcgccagugccga

SEQ ID NO: 322812 - RNA, 22 nt, Human
cugcuguguuucugcuagaaaa

SEQ ID NO: 322813 - RNA, 22 nt, Human
aguugucccggucuagccacuu

SEQ ID NO: 322814 - RNA, 22 nt, Human
aaucuguucuacucuauucaga

SEQ ID NO: 322815 - RNA, 22 nt, Human
aggagaguucacacuggucaga

SEQ ID NO: 322816 - RNA, 22 nt, Human
gaggaaccaaaucagcuugcac

SEQ ID NO: 322817 - RNA, 22 nt, Human
uuggaaggugagucccuggguu

SEQ ID NO: 322818 - RNA, 22 nt, Human
cauagaaacuugcagcaagcac

SEQ ID NO: 322819 - RNA, 22 nt, Human
cuugccuguggcuaguuggcuc

SEQ ID NO: 322820 - RNA, 18 nt, Human
ugaucuuugaguauaaug

SEQ ID NO: 322821 - RNA, 18 nt, Human
aucuuuccauagcauguu

SEQ ID NO: 322822 - RNA, 22 nt, Human
agcagcauguugggaugugaaa

SEQ ID NO: 322823 - RNA, 23 nt, Human
ugcaugugaauucauacuuguuu

SEQ ID NO: 322824 - RNA, 22 nt, Human
cugaaggacacgugaggagcca

SEQ ID NO: 322825 - RNA, 22 nt, Human
auagacauggucuuuugucauu

SEQ ID NO: 322826 - RNA, 22 nt, Human
caagagcauuuaguuagcuggu

SEQ ID NO: 322827 - RNA, 19 nt, Human
aaaugugaugguacaauuc

SEQ ID NO: 322828 - RNA, 22 nt, Human
gcaguguucagugaagcaggag

SEQ ID NO: 322829 - RNA, 22 nt, Human
gcagggccagggcucaggcugu

SEQ ID NO: 322830 - RNA, 22 nt, Human
auguguagaacuguaaugccca

SEQ ID NO: 322831 - RNA, 22 nt, Human
uccuggagccacggagcuuuca

SEQ ID NO: 322832 - RNA, 22 nt, Human
ggcacagggagccgcaguugca

SEQ ID NO: 322833 - RNA, 22 nt, Human
agagcuuauaucuuggccaucc

SEQ ID NO: 322834 - RNA, 22 nt, Human
uuugaaugcaggacauacagaa

SEQ ID NO: 322835 - RNA, 22 nt, Human
gaguguggugaacaggagcacc

SEQ ID NO: 322836 - RNA, 22 nt, Human
gccaggcagcugggagggugcc

SEQ ID NO: 322837 - RNA, 22 nt, Human
ucaaaaguuucacauagagaua

SEQ ID NO: 322838 - RNA, 22 nt, Human
cugcugugggcaggguagcugg

SEQ ID NO: 322839 - RNA, 22 nt, Human
gcuguucagaugcgauucagga

SEQ ID NO: 322840 - RNA, 22 nt, Human
gcagccacccucaaggcugaau

SEQ ID NO: 322841 - RNA, 22 nt, Human
cugaggaugguguggucuucuc

SEQ ID NO: 322842 - RNA, 22 nt, Human
cacagguguaugaauaugucca

SEQ ID NO: 322843 - RNA, 22 nt, Human
ucaccugggagggcugugguag

SEQ ID NO: 322844 - RNA, 22 nt, Human
uauuugaaggcauacauuuuga

SEQ ID NO: 322845 - RNA, 22 nt, Human
ucagcagggagaggagaaugca

SEQ ID NO: 322846 - RNA, 22 nt, Human
cuuucauaaaggaaaugaugag

SEQ ID NO: 322847 - RNA, 22 nt, Human
cucaggacccgguccagguggg

SEQ ID NO: 322848 - RNA, 22 nt, Human
uacuuugucauucuaaccuucc

SEQ ID NO: 322849 - RNA, 22 nt, Human
uccauuuuguagguaugcuaca

SEQ ID NO: 322850 - RNA, 22 nt, Human
uucacagaauggcaaguuaugg

SEQ ID NO: 322851 - RNA, 22 nt, Human
cgcugccaggucaccaggggua

SEQ ID NO: 322852 - RNA, 22 nt, Human
gaagucuucauucucucugaga

SEQ ID NO: 322853 - RNA, 22 nt, Human
gggcugagggguaucucauggg

SEQ ID NO: 322854 - RNA, 22 nt, Human
agcuggguguguaucagauaaa

SEQ ID NO: 322855 - RNA, 22 nt, Human
gaggugaguggaucacgagguc

SEQ ID NO: 322856 - RNA, 22 nt, Human
uuaaagggccgauuuccaggcc

SEQ ID NO: 322857 - RNA, 22 nt, Human
cauuuguuaauuacuauuaucu

SEQ ID NO: 322858 - RNA, 22 nt, Human
ugcagccuugccuccucccagc

SEQ ID NO: 322859 - RNA, 23 nt, Human
ggccucuguguucugcccacaug

SEQ ID NO: 322860 - RNA, 21 nt, Human
agccuguugguuuacugcuca

SEQ ID NO: 322861 - RNA, 23 nt, Human
cuuugccacccagagccugacag

SEQ ID NO: 322862 - RNA, 22 nt, Human
ucagggcaagauugguuaauaa

SEQ ID NO: 322863 - RNA, 22 nt, Human
uauuucagacacugaucuugca

SEQ ID NO: 322864 - RNA, 18 nt, Human
cagcagagacauucaaaa

SEQ ID NO: 322865 - RNA, 22 nt, Human
ucugggaaguccucugucaugc

SEQ ID NO: 322866 - RNA, 22 nt, Human
uuucagugcuucuguuuaccgg

SEQ ID NO: 322867 - RNA, 22 nt, Human
auucuucacauaagugcuguac

SEQ ID NO: 322868 - RNA, 22 nt, Human
aagccagggucaggggccuccu

SEQ ID NO: 322869 - RNA, 23 nt, Human
ccaggccucucagagggugugcc

SEQ ID NO: 322870 - RNA, 22 nt, Human
uccucaggaugugggguagaau

SEQ ID NO: 322871 - RNA, 22 nt, Human
ccaggagcaggagcuggacaga

SEQ ID NO: 322872 - RNA, 22 nt, Human
ugaagcaacuggacaaguuggc

SEQ ID NO: 322873 - RNA, 23 nt, Human
agaagcagcuucuggaguaucgg

SEQ ID NO: 322874 - RNA, 22 nt, Human
ucaucacauaugucaugauuug

SEQ ID NO: 322875 - RNA, 23 nt, Human
ugggaguguugggaucucugcuc

SEQ ID NO: 322876 - RNA, 22 nt, Human
cagggcaguuugugccuaugag

SEQ ID NO: 322877 - RNA, 22 nt, Human
aagugagugguaaggagcaugg

SEQ ID NO: 322878 - RNA, 22 nt, Human
aagccuuccugagugcaaggcc

SEQ ID NO: 322879 - RNA, 22 nt, Human
agcaggaguuugaugcuuuuau

SEQ ID NO: 322880 - RNA, 22 nt, Human
aagccaggcaugcuuggacagu

SEQ ID NO: 322881 - RNA, 22 nt, Human
uuguuauaaagacuaaauaugu

SEQ ID NO: 322882 - RNA, 22 nt, Human
aguaaugugccugaaauacuug

SEQ ID NO: 322883 - RNA, 22 nt, Human
uugaaucuggguacuuguaaua

SEQ ID NO: 322884 - RNA, 17 nt, Human
ugagaaguaggcaucau

SEQ ID NO: 322885 - RNA, 22 nt, Human
gccuuucaguuccaucaaagga

SEQ ID NO: 322886 - RNA, 23 nt, Human
ccugucugugcuggguggacaca

SEQ ID NO: 322887 - RNA, 20 nt, Human
uuucaguuaucuugaccuuc

SEQ ID NO: 322888 - RNA, 22 nt, Human
uauuuucaucuuguccuuggau

SEQ ID NO: 322889 - RNA, 23 nt, Human
cccuggaguaaauucuuggaagg

SEQ ID NO: 322890 - RNA, 22 nt, Human
aaagaacaaauuagcuguuuua

SEQ ID NO: 322891 - RNA, 23 nt, Human
auguuauuauuagcagucuugcc

SEQ ID NO: 322892 - RNA, 22 nt, Human
aaagauaauguuuccuuauucu

SEQ ID NO: 322893 - RNA, 22 nt, Human
cuccauugaacauccucucaga

SEQ ID NO: 322894 - RNA, 22 nt, Human
agaaaucauucccaaacccaua

SEQ ID NO: 322895 - RNA, 22 nt, Human
gagaggaguaggcugauggugc

SEQ ID NO: 322896 - RNA, 22 nt, Human
ucagugcuuauauucugagccu

SEQ ID NO: 322897 - RNA, 23 nt, Human
gugagucuugccuuugcugugga

SEQ ID NO: 322898 - RNA, 22 nt, Human
cccuggagggacagcugcucua

SEQ ID NO: 322899 - RNA, 22 nt, Human
ggcuggcauccagggaaaucca

SEQ ID NO: 322900 - RNA, 22 nt, Human
gcagcugccuauucagggcuug

SEQ ID NO: 322901 - RNA, 22 nt, Human
ucucaggguuuguacaagugua

SEQ ID NO: 322902 - RNA, 22 nt, Human
agccagccgggggaccacagug

SEQ ID NO: 322903 - RNA, 21 nt, Human
uggcagggguaguaguacagc

SEQ ID NO: 322904 - RNA, 22 nt, Human
ucuggagauaagacagacagau

SEQ ID NO: 322905 - RNA, 22 nt, Human
cagaggcugcucuggguggcau

SEQ ID NO: 322906 - RNA, 22 nt, Human
aauuuuaagcauaugacugguu

SEQ ID NO: 322907 - RNA, 22 nt, Human
ccaggagccacucaggcccaca

SEQ ID NO: 322908 - RNA, 22 nt, Human
uuuccucuuccgagggggaggc

SEQ ID NO: 322909 - RNA, 22 nt, Human
uugaaggacaucuuguuucuag

SEQ ID NO: 322910 - RNA, 22 nt, Human
guucuuccucauugcuuugaag

SEQ ID NO: 322911 - RNA, 22 nt, Human
uagcagcuuaaguaauuagaau

SEQ ID NO: 322912 - RNA, 22 nt, Human
aaguuacaggagaaagagauca

SEQ ID NO: 322913 - RNA, 22 nt, Human
uguccucuaauuggccucuugc

SEQ ID NO: 322914 - RNA, 22 nt, Human
gggcugcuuccuggggaaugcu

SEQ ID NO: 322915 - RNA, 22 nt, Human
ggcugugcgggcagccguggga

SEQ ID NO: 322916 - RNA, 22 nt, Human
ucuugaaggggggcaguguuga

SEQ ID NO: 322917 - RNA, 23 nt, Human
ggguccagagacaggcaugggug

SEQ ID NO: 322918 - RNA, 23 nt, Human
ucuguucaaggcuuucuccuuga

SEQ ID NO: 322919 - RNA, 22 nt, Human
aaauugugagcuauagaucuag

SEQ ID NO: 322920 - RNA, 22 nt, Human
ugcagauucaaaugaaaugcaa

SEQ ID NO: 322921 - RNA, 22 nt, Human
uaguaacagauuuauacagucu

SEQ ID NO: 322922 - RNA, 22 nt, Human
ugaacaguuucaagaaaacuuu

SEQ ID NO: 322923 - RNA, 22 nt, Human
ggauggcagucugcaugagaaa

SEQ ID NO: 322924 - RNA, 22 nt, Human
ugaaaggugacauuucuuggau

SEQ ID NO: 322925 - RNA, 22 nt, Human
ggucccaggauugguugcgcag

SEQ ID NO: 322926 - RNA, 22 nt, Human
ggcugcaguuugucuuuugcuu

SEQ ID NO: 322927 - RNA, 22 nt, Human
agucugggagaaggugagauua

SEQ ID NO: 322928 - RNA, 22 nt, Human
cagcaguggaacuacccaggga

SEQ ID NO: 322929 - RNA, 22 nt, Human
cagcauggcuugaguguuuccu

SEQ ID NO: 322930 - RNA, 22 nt, Human
guauucuugguuaucaaaauac

SEQ ID NO: 322931 - RNA, 22 nt, Human
uauugucuguccgggucaaagc

SEQ ID NO: 322932 - RNA, 22 nt, Human
agugguaacuaaguccugcuua

SEQ ID NO: 322933 - RNA, 22 nt, Human
ggagccagaggcugcugcugug

SEQ ID NO: 322934 - RNA, 22 nt, Human
gcagagccaggagcccaggauc

SEQ ID NO: 322935 - RNA, 22 nt, Human
aucuggcucauucagggaacgg

SEQ ID NO: 322936 - RNA, 22 nt, Human
aguugacauccauaacaggaag

SEQ ID NO: 322937 - RNA, 22 nt, Human
ccuugcugaccaucaccuuuga

SEQ ID NO: 322938 - RNA, 22 nt, Human
ugcuggagaucauuaauguuca

SEQ ID NO: 322939 - RNA, 22 nt, Human
ccugccaggacauugcuugaag

SEQ ID NO: 322940 - RNA, 22 nt, Human
gcucagaggaugcuccuuuaug

SEQ ID NO: 322941 - RNA, 22 nt, Human
uagcauuuauuccagauuugga

SEQ ID NO: 322942 - RNA, 22 nt, Human
aaggcugagagucacaguccua

SEQ ID NO: 322943 - RNA, 22 nt, Human
cucugggcaaagaugccucauc

SEQ ID NO: 322944 - RNA, 23 nt, Human
ugcagagggacugaagccagcuu

SEQ ID NO: 322945 - RNA, 22 nt, Human
acuggcugaaguuuacuuuuug

SEQ ID NO: 322946 - RNA, 22 nt, Human
uacauuugcuuugauuuucagc

SEQ ID NO: 322947 - RNA, 22 nt, Human
auacacauguguaugugcaugc

SEQ ID NO: 322948 - RNA, 23 nt, Human
gccucagagaaacagcugcacac

SEQ ID NO: 322949 - RNA, 22 nt, Human
cucuuuccaggguaccccaggu

SEQ ID NO: 322950 - RNA, 22 nt, Human
cagcccugagaaggaggaucuc

SEQ ID NO: 322951 - RNA, 22 nt, Human
guuaaauucgaugauggauaaa

SEQ ID NO: 322952 - RNA, 22 nt, Human
cagccugacaccagcuuugggc

SEQ ID NO: 322953 - RNA, 22 nt, Human
ugaggggcggccugcagaggcc

SEQ ID NO: 322954 - RNA, 22 nt, Human
aaaguuugucacuuggcuagaa

SEQ ID NO: 322955 - RNA, 22 nt, Human
guguuccauguuugagguaguu

SEQ ID NO: 322956 - RNA, 22 nt, Human
acacugaauauacaaugaauau

SEQ ID NO: 322957 - RNA, 22 nt, Human
ccaggaggcggaagguacagug

SEQ ID NO: 322958 - RNA, 22 nt, Human
cuacauuuguucuauagcuuuu

SEQ ID NO: 322959 - RNA, 22 nt, Human
gagcugcccugagcuuugcaug

SEQ ID NO: 322960 - RNA, 22 nt, Human
ccucaguguguuuggggugagg

SEQ ID NO: 322961 - RNA, 22 nt, Human
agcagagccagaauuggaccag

SEQ ID NO: 322962 - RNA, 22 nt, Human
gugcuuucugcugcauuccucu

SEQ ID NO: 322963 - RNA, 22 nt, Human
uggcucugugcuucuaguaucu

SEQ ID NO: 322964 - RNA, 22 nt, Human
agaggucagaacaggaaagugu

SEQ ID NO: 322965 - RNA, 22 nt, Human
gucuuuggagaggugccauuuc

SEQ ID NO: 322966 - RNA, 19 nt, Human
ugcagaagacacaguggug

SEQ ID NO: 322967 - RNA, 22 nt, Human
ucagggcauggcugcacuuggc

SEQ ID NO: 322968 - RNA, 22 nt, Human
uuguaauuugcaaauguauugu

SEQ ID NO: 322969 - RNA, 22 nt, Human
uccagggcuuggcugggacggu

SEQ ID NO: 322970 - RNA, 22 nt, Human
ggcccugagcugaaguacugug

SEQ ID NO: 322971 - RNA, 21 nt, Human
agcugcuuucagcuccuagag

SEQ ID NO: 322972 - RNA, 22 nt, Human
uacauucuggaaaggcacagac

SEQ ID NO: 322973 - RNA, 22 nt, Human
ccuuucucuaucgacccaucgc

SEQ ID NO: 322974 - RNA, 22 nt, Human
ucagcugaguucuagagcacuc

SEQ ID NO: 322975 - RNA, 22 nt, Human
ucaggcacugcuuucugauaug

SEQ ID NO: 322976 - RNA, 22 nt, Human
cauuaaaauaucucaugguguu

SEQ ID NO: 322977 - RNA, 21 nt, Human
ucugggggugagccuagaaau

SEQ ID NO: 322978 - RNA, 22 nt, Human
aaggcagcagugcacgacugau

SEQ ID NO: 322979 - RNA, 22 nt, Human
auaucacaguaguuguuuaguu

SEQ ID NO: 322980 - RNA, 22 nt, Human
cucagcuggcaauucuggcucc

SEQ ID NO: 322981 - RNA, 22 nt, Human
augaaacacacacgcgcauacu

SEQ ID NO: 322982 - RNA, 22 nt, Human
ucugugacuugcgggaggagaa

SEQ ID NO: 322983 - RNA, 17 nt, Human
gagauggguggaucacc

SEQ ID NO: 322984 - RNA, 22 nt, Human
ugggggugacuaucucgggaau

SEQ ID NO: 322985 - RNA, 19 nt, Human
acagagcucucugcuucug

SEQ ID NO: 322986 - RNA, 22 nt, Human
uuaaauuuuagaaacagacucu

SEQ ID NO: 322987 - RNA, 22 nt, Human
aucaguuuuuauuaauguagcu

SEQ ID NO: 322988 - RNA, 22 nt, Human
aguccagggcuuagucagcggg

SEQ ID NO: 322989 - RNA, 22 nt, Human
uuugcauuuuagauuuaggccu

SEQ ID NO: 322990 - RNA, 17 nt, Human
ugcauuguuggaaauuu

SEQ ID NO: 322991 - RNA, 22 nt, Human
gggcugcugcccaggaggcacc

SEQ ID NO: 322992 - RNA, 22 nt, Human
ucuacagacagagcagguggga

SEQ ID NO: 322993 - RNA, 22 nt, Human
gagucacauuaauuuaauuuua

SEQ ID NO: 322994 - RNA, 22 nt, Human
accagagcuggcucugagcacc

SEQ ID NO: 322995 - RNA, 22 nt, Human
gggagcuguaguccagauaccg

SEQ ID NO: 322996 - RNA, 22 nt, Human
ccucugccugcacaucauccug

SEQ ID NO: 322997 - RNA, 22 nt, Human
aaugggaggauuuucucucuug

SEQ ID NO: 322998 - RNA, 22 nt, Human
agacuucucaguuuuauuagua

SEQ ID NO: 322999 - RNA, 20 nt, Human
gggcuggcgcauggggaaag

SEQ ID NO: 323000 - RNA, 22 nt, Human
aggcccuggguuagggcccacu

SEQ ID NO: 323001 - RNA, 22 nt, Human
agccacagagcaggagaccuuu

SEQ ID NO: 323002 - RNA, 22 nt, Human
ucuccuuugaaaguuaggacug

SEQ ID NO: 323003 - RNA, 22 nt, Human
gcucaguguuucugguagaaaa

SEQ ID NO: 323004 - RNA, 22 nt, Human
auuucuuuucaagagggugcuu

SEQ ID NO: 323005 - RNA, 22 nt, Human
acacagggcagagagcuggcuc

SEQ ID NO: 323006 - RNA, 22 nt, Human
ugauuucaaguagugacaugcu

SEQ ID NO: 323007 - RNA, 22 nt, Human
cuugaaucuggcuuugccacuu

SEQ ID NO: 323008 - RNA, 22 nt, Human
uugaagaggacuuugcagcugu

SEQ ID NO: 323009 - RNA, 23 nt, Human
auuugagaaaguauuuuuaagac

SEQ ID NO: 323010 - RNA, 22 nt, Human
gcucagugaauuuuugcccaug

SEQ ID NO: 323011 - RNA, 22 nt, Human
ccuaagaauuaaugaauacacc

SEQ ID NO: 323012 - RNA, 23 nt, Human
uccagcagagccuuccaggaggg

SEQ ID NO: 323013 - RNA, 22 nt, Human
gauuucuuuagguguaauagug

SEQ ID NO: 323014 - RNA, 22 nt, Human
cacagguguucuugcagugaaa

SEQ ID NO: 323015 - RNA, 22 nt, Human
ucauuuugggguuugucaucuu

SEQ ID NO: 323016 - RNA, 20 nt, Human
acagaaagagagaaugucag

SEQ ID NO: 323017 - RNA, 23 nt, Human
gcagauggccccagagugcugcc

SEQ ID NO: 323018 - RNA, 22 nt, Human
agagcuggugcauauucagaaa

SEQ ID NO: 323019 - RNA, 22 nt, Human
cagaaccaggaacugauggaga

SEQ ID NO: 323020 - RNA, 22 nt, Human
ucucagugcagcuugacagaga

SEQ ID NO: 323021 - RNA, 22 nt, Human
uuucacagguacaaacacuccu

SEQ ID NO: 323022 - RNA, 22 nt, Human
cagagccaggguugcaccccug

SEQ ID NO: 323023 - RNA, 22 nt, Human
ccugcagcuguaggagaaggcg

SEQ ID NO: 323024 - RNA, 22 nt, Human
ccagcccuugagauggaaggga

SEQ ID NO: 323025 - RNA, 22 nt, Human
ccagccagucccgcaugaccgc

SEQ ID NO: 323026 - RNA, 22 nt, Human
ccaggccugugcaaggagggag

SEQ ID NO: 323027 - RNA, 22 nt, Human
cauugcacagcccuguggugau

SEQ ID NO: 323028 - RNA, 22 nt, Human
gggcacuguggggcccaugcug

SEQ ID NO: 323029 - RNA, 22 nt, Human
gaaaguuuauagguuauauaau

SEQ ID NO: 323030 - RNA, 22 nt, Human
ugacuucaaaggcucuacuccu

SEQ ID NO: 323031 - RNA, 22 nt, Human
caaggccacguucugcaugcgg

SEQ ID NO: 323032 - RNA, 22 nt, Human
gacagccaugcacuucugcugu

SEQ ID NO: 323033 - RNA, 22 nt, Human
uguggcugacuccuggucccca

SEQ ID NO: 323034 - RNA, 22 nt, Human
gaugguuuggaaugaaguagcu

SEQ ID NO: 323035 - RNA, 22 nt, Human
guccucugggagccuugagccu

SEQ ID NO: 323036 - RNA, 19 nt, Human
cucugccucuggcuguggc

SEQ ID NO: 323037 - RNA, 22 nt, Human
auucaaguggcugcuauguuaa

SEQ ID NO: 323038 - RNA, 22 nt, Human
uuggaaagcaagcuggacauac

SEQ ID NO: 323039 - RNA, 22 nt, Human
cucuggaguucucaugaggaac

SEQ ID NO: 323040 - RNA, 22 nt, Human
cugugcuugcggguguggagcc

SEQ ID NO: 323041 - RNA, 22 nt, Human
aucaguuuguauaugaaacacu

SEQ ID NO: 323042 - RNA, 22 nt, Human
uuucucuugcgauaugcuacac

SEQ ID NO: 323043 - RNA, 22 nt, Human
ugaagguggcauaggagagaug

SEQ ID NO: 323044 - RNA, 22 nt, Human
ugguuuauuucucugaaagguu

SEQ ID NO: 323045 - RNA, 22 nt, Human
ggaaccaguggaaugauaugcu

SEQ ID NO: 323046 - RNA, 22 nt, Human
agagauggagagcacuggggcu

SEQ ID NO: 323047 - RNA, 22 nt, Human
auaauuuaaauuaguaugugau

SEQ ID NO: 323048 - RNA, 22 nt, Human
ucucuggaguauaaccagggau

SEQ ID NO: 323049 - RNA, 22 nt, Human
uuaagauagaacccaguagucu

SEQ ID NO: 323050 - RNA, 22 nt, Human
augggaggguggaaaggcucug

SEQ ID NO: 323051 - RNA, 22 nt, Human
auuugucucugcacuuuacuca

SEQ ID NO: 323052 - RNA, 22 nt, Human
ucugucacccgagcaggcgaga

SEQ ID NO: 323053 - RNA, 22 nt, Human
augcaguacugauacaugccac

SEQ ID NO: 323054 - RNA, 22 nt, Human
gccuaggaguacagaaugguuu

SEQ ID NO: 323055 - RNA, 22 nt, Human
agucucagaaaauaugcuuuuu

SEQ ID NO: 323056 - RNA, 19 nt, Human
cugagcagcggcagcacuu

SEQ ID NO: 323057 - RNA, 22 nt, Human
aguguuuaaugccuuuuccagc

SEQ ID NO: 323058 - RNA, 20 nt, Human
uggcuccucuuggcuguggc

SEQ ID NO: 323059 - RNA, 22 nt, Human
cagggcugagaauuuagagaca

SEQ ID NO: 323060 - RNA, 22 nt, Human
ugcuucugggcaaaugugugug

SEQ ID NO: 323061 - RNA, 22 nt, Human
uggccuccccuaacagccucuu

SEQ ID NO: 323062 - RNA, 22 nt, Human
ggaagggccucgggcgugggac

SEQ ID NO: 323063 - RNA, 22 nt, Human
uuuacauggaauauugucuugu

SEQ ID NO: 323064 - RNA, 22 nt, Human
auugaggcagcauaguucaggg

SEQ ID NO: 323065 - RNA, 22 nt, Human
aagaaagggcuauuguucucca

SEQ ID NO: 323066 - RNA, 22 nt, Human
gcauucuuuuuaggagguuccu

SEQ ID NO: 323067 - RNA, 22 nt, Human
uuaugaaagacauuucuguugg

SEQ ID NO: 323068 - RNA, 22 nt, Human
uuccaguucccaugaggauuaa

SEQ ID NO: 323069 - RNA, 22 nt, Human
agagcagagggcucugggacaa

SEQ ID NO: 323070 - RNA, 22 nt, Human
accaggaggccuggagcacaaa

SEQ ID NO: 323071 - RNA, 22 nt, Human
aaaaauguuaucuacuguccga

SEQ ID NO: 323072 - RNA, 22 nt, Human
gggcuucucuuaugcuaacugg

SEQ ID NO: 323073 - RNA, 22 nt, Human
cugcucucuguuccccuggauc

SEQ ID NO: 323074 - RNA, 22 nt, Human
cauuugcagagggugacacucu

SEQ ID NO: 323075 - RNA, 22 nt, Human
ugagccagucugucugggugaa

SEQ ID NO: 323076 - RNA, 22 nt, Human
gcagcuggaagugacacucugu

SEQ ID NO: 323077 - RNA, 22 nt, Human
uuucuucucgacaccuuauccc

SEQ ID NO: 323078 - RNA, 22 nt, Human
gaaggggaaaguugagcaaaua

SEQ ID NO: 323079 - RNA, 22 nt, Human
gggugcugacuggggccugaaa

SEQ ID NO: 323080 - RNA, 22 nt, Human
ugccccucuccugugauccaag

SEQ ID NO: 323081 - RNA, 22 nt, Human
ugagcuggggucagcuccccug

SEQ ID NO: 323082 - RNA, 22 nt, Human
gugcuuccugccuggugccuuu

SEQ ID NO: 323083 - RNA, 22 nt, Human
cagaguguugaccauaagccca

SEQ ID NO: 323084 - RNA, 22 nt, Human
ccaggccuggaccaugccaggg

SEQ ID NO: 323085 - RNA, 22 nt, Human
aagaagagaaaugugcugcugg

SEQ ID NO: 323086 - RNA, 21 nt, Human
ccagcagcucaaggaucucuu

SEQ ID NO: 323087 - RNA, 22 nt, Human
guggcccaggcuuggcgcuggc

SEQ ID NO: 323088 - RNA, 21 nt, Human
ugccagcauguaggcuaguug

SEQ ID NO: 323089 - RNA, 22 nt, Human
uguguaaagcuuguuccagaaa

SEQ ID NO: 323090 - RNA, 22 nt, Human
uucaugaauggaaucaaugcuc

SEQ ID NO: 323091 - RNA, 22 nt, Human
gcagggacaacugugcaccuga

SEQ ID NO: 323092 - RNA, 22 nt, Human
cugucuccagggcaggugcagg

SEQ ID NO: 323093 - RNA, 22 nt, Human
gcucuguccagcgugcacagaa

SEQ ID NO: 323094 - RNA, 22 nt, Human
uuccuuaggcuguuugcagugc

SEQ ID NO: 323095 - RNA, 22 nt, Human
augcuguggaaguuccugaagc

SEQ ID NO: 323096 - RNA, 21 nt, Human
uggcucugcucagagcagucc

SEQ ID NO: 323097 - RNA, 22 nt, Human
uuugaaagacagaauauuuuug

SEQ ID NO: 323098 - RNA, 22 nt, Human
caggagcccguugcuccggcgg

SEQ ID NO: 323099 - RNA, 22 nt, Human
aaauagaaaccaacaaggucag

SEQ ID NO: 323100 - RNA, 22 nt, Human
auaucuuuguaugguucagcag

SEQ ID NO: 323101 - RNA, 19 nt, Human
ccugggagucagcugaagg

SEQ ID NO: 323102 - RNA, 22 nt, Human
cagcagcccacgcgugcugucc

SEQ ID NO: 323103 - RNA, 22 nt, Human
cugggcugcaguuccugguccu

SEQ ID NO: 323104 - RNA, 22 nt, Human
ucccagcgcggggggaggaucc

SEQ ID NO: 323105 - RNA, 21 nt, Human
agcagccauuucacagagacu

SEQ ID NO: 323106 - RNA, 22 nt, Human
guggcugcuguccucucugguu

SEQ ID NO: 323107 - RNA, 22 nt, Human
accuuucauuaaagucuguagu

SEQ ID NO: 323108 - RNA, 22 nt, Human
ggcuucagugacuggugcccuc

SEQ ID NO: 323109 - RNA, 22 nt, Human
aggcucagagaugaguaagcac

SEQ ID NO: 323110 - RNA, 22 nt, Human
cagagccacuuggagaugagaa

SEQ ID NO: 323111 - RNA, 22 nt, Human
cacaugaguccugccagguaug

SEQ ID NO: 323112 - RNA, 22 nt, Human
ucagaggaccuuacugagaacc

SEQ ID NO: 323113 - RNA, 22 nt, Human
caguacuuugcaucauuccacu

SEQ ID NO: 323114 - RNA, 22 nt, Human
ccugccugauuccaggauggcu

SEQ ID NO: 323115 - RNA, 22 nt, Human
caguguacuuggaauguaacag

SEQ ID NO: 323116 - RNA, 22 nt, Human
gcuggagcuugagaggacaggg

SEQ ID NO: 323117 - RNA, 22 nt, Human
gcagcuggugcaaaugucacuc

SEQ ID NO: 323118 - RNA, 22 nt, Human
cugccuguuagucuagcaguua

SEQ ID NO: 323119 - RNA, 22 nt, Human
ccagcugcagguguuccagaug

SEQ ID NO: 323120 - RNA, 20 nt, Human
uuucaagucagcaauucuca

SEQ ID NO: 323121 - RNA, 22 nt, Human
uggagcccagggugagaaggag

SEQ ID NO: 323122 - RNA, 22 nt, Human
cauuguuauagcauuacacacc

SEQ ID NO: 323123 - RNA, 22 nt, Human
uuugaaagcuacuuucggguca

SEQ ID NO: 323124 - RNA, 22 nt, Human
ccagcucugccaagcgucagcu

SEQ ID NO: 323125 - RNA, 22 nt, Human
aggagcugucagagugccagag

SEQ ID NO: 323126 - RNA, 22 nt, Human
ccagccaguccagcauuggugu

SEQ ID NO: 323127 - RNA, 22 nt, Human
ggcagucagugugguucauaaa

SEQ ID NO: 323128 - RNA, 22 nt, Human
agagggcauuaacucugucuug

SEQ ID NO: 323129 - RNA, 22 nt, Human
uuccucugaaauggcuuggaaa

SEQ ID NO: 323130 - RNA, 22 nt, Human
aaaauauuuuagggccaggaga

SEQ ID NO: 323131 - RNA, 22 nt, Human
ucagcaguguaguuuaucauuc

SEQ ID NO: 323132 - RNA, 22 nt, Human
ucauugcagaaauaaaggugaa

SEQ ID NO: 323133 - RNA, 22 nt, Human
uaaguucauaagcuuauucuua

SEQ ID NO: 323134 - RNA, 22 nt, Human
ucuuuuggguucuuaugauuua

SEQ ID NO: 323135 - RNA, 22 nt, Human
ugcugcugauggcaccuaggca

SEQ ID NO: 323136 - RNA, 22 nt, Human
gccugccugcugugugcaaguu

SEQ ID NO: 323137 - RNA, 22 nt, Human
guggguggaucaccugagguca

SEQ ID NO: 323138 - RNA, 22 nt, Human
cacagugugggcauggugccug

SEQ ID NO: 323139 - RNA, 22 nt, Human
cagugggcugugauggauucac

SEQ ID NO: 323140 - RNA, 22 nt, Human
ccuuugggugaauuccucucuu

SEQ ID NO: 323141 - RNA, 22 nt, Human
caaggagauaaaauguugagcu

SEQ ID NO: 323142 - RNA, 22 nt, Human
uaaagauggagaugaccuagga

SEQ ID NO: 323143 - RNA, 19 nt, Human
auuccucaaggacagaaau

SEQ ID NO: 323144 - RNA, 22 nt, Human
ugguaauuaauuugauagguuc

SEQ ID NO: 323145 - RNA, 22 nt, Human
guggccucugugcuccugccua

SEQ ID NO: 323146 - RNA, 22 nt, Human
cuggugcaggaaggagcuggca

SEQ ID NO: 323147 - RNA, 22 nt, Human
uacauguaggugacauuuuaau

SEQ ID NO: 323148 - RNA, 22 nt, Human
acaacaaaaucacuagucuucc

SEQ ID NO: 323149 - RNA, 23 nt, Human
acucagugaagcaaacagauagu

SEQ ID NO: 323150 - RNA, 22 nt, Human
ugaagcagauggucuggucauu

SEQ ID NO: 323151 - RNA, 22 nt, Human
uccugccuagcaggugaccuau

SEQ ID NO: 323152 - RNA, 22 nt, Human
cugucucugucuuaacucccag

SEQ ID NO: 323153 - RNA, 22 nt, Human
acacaaauuguaggauaauugc

SEQ ID NO: 323154 - RNA, 22 nt, Human
auguuagaaucucugaaugugg

SEQ ID NO: 323155 - RNA, 21 nt, Human
ucucuacacuuucacuaggcu

SEQ ID NO: 323156 - RNA, 22 nt, Human
ggcuggaaguccaagaucaaga

SEQ ID NO: 323157 - RNA, 22 nt, Human
uucucagguagugcugaugcug

SEQ ID NO: 323158 - RNA, 22 nt, Human
agcugagagguggcaagcugua

SEQ ID NO: 323159 - RNA, 23 nt, Human
aaagacugcugagaauuuuagga

SEQ ID NO: 323160 - RNA, 22 nt, Human
cagguccuggcaucaggcaggu

SEQ ID NO: 323161 - RNA, 22 nt, Human
ggcugcuucucacucauuugca

SEQ ID NO: 323162 - RNA, 23 nt, Human
ugaaggccuggaggacgcguugu

SEQ ID NO: 323163 - RNA, 22 nt, Human
aaaggcuaugagauagaagaua

SEQ ID NO: 323164 - RNA, 22 nt, Human
ucuggccacccgaggccccugc

SEQ ID NO: 323165 - RNA, 22 nt, Human
gaugcacuugccccuccucaga

SEQ ID NO: 323166 - RNA, 22 nt, Human
ucccagagccucugccacucug

SEQ ID NO: 323167 - RNA, 22 nt, Human
gucuucuuguuuugaaggaaau

SEQ ID NO: 323168 - RNA, 22 nt, Human
ucugggcagcagcagcuaguag

SEQ ID NO: 323169 - RNA, 22 nt, Human
ucuuuacaucacaauuguaugg

SEQ ID NO: 323170 - RNA, 22 nt, Human
ccucaggauacaggagccacag

SEQ ID NO: 323171 - RNA, 22 nt, Human
acagugucugacacauuguagc

SEQ ID NO: 323172 - RNA, 22 nt, Human
uaaggagagaauuuagagguuu

SEQ ID NO: 323173 - RNA, 22 nt, Human
uggcugaaucugcagcaggaag

SEQ ID NO: 323174 - RNA, 22 nt, Human
ucuuugcaacucccauuuccau

SEQ ID NO: 323175 - RNA, 22 nt, Human
gagagucacugucugcauuucc

SEQ ID NO: 323176 - RNA, 22 nt, Human
aaaggucaagcuggacucaggu

SEQ ID NO: 323177 - RNA, 22 nt, Human
acccagagccagggucaggagc

SEQ ID NO: 323178 - RNA, 22 nt, Human
guuagaaacacauucuuauuga

SEQ ID NO: 323179 - RNA, 21 nt, Human
caggccccaggccuggggugc

SEQ ID NO: 323180 - RNA, 22 nt, Human
ugcagcucauugcuggggucug

SEQ ID NO: 323181 - RNA, 22 nt, Human
uacaauauguggccuuuuguga

SEQ ID NO: 323182 - RNA, 22 nt, Human
gcagagcugucuaagucacuuc

SEQ ID NO: 323183 - RNA, 22 nt, Human
uucuuaacucaaauauauaucc

SEQ ID NO: 323184 - RNA, 22 nt, Human
uauuccaagcacagcaacccag

SEQ ID NO: 323185 - RNA, 22 nt, Human
cagaccugagguugaguaccag

SEQ ID NO: 323186 - RNA, 22 nt, Human
acguuuucagccuuaauguaga

SEQ ID NO: 323187 - RNA, 22 nt, Human
uggcugggcccccaccugccuc

SEQ ID NO: 323188 - RNA, 22 nt, Human
gcuggccugcaaagcccggcug

SEQ ID NO: 323189 - RNA, 22 nt, Human
ugggccugugaugcugggcuau

SEQ ID NO: 323190 - RNA, 22 nt, Human
acauguggucaaucuguguagg

SEQ ID NO: 323191 - RNA, 22 nt, Human
augaaacaguguguauagcaaa

SEQ ID NO: 323192 - RNA, 22 nt, Human
ugccucuguggaaauggugguc

SEQ ID NO: 323193 - RNA, 23 nt, Human
gggauauggaccuuggaggaguc

SEQ ID NO: 323194 - RNA, 22 nt, Human
ugcauauuguccuugauauuau

SEQ ID NO: 323195 - RNA, 19 nt, Human
ucaaugcaugaaaucagcc

SEQ ID NO: 323196 - RNA, 22 nt, Human
uucucagagcacugcugacaaa

SEQ ID NO: 323197 - RNA, 22 nt, Human
gcucucuguuauuaagaucuuu

SEQ ID NO: 323198 - RNA, 22 nt, Human
ugcaugcagcuggugauaagaa

SEQ ID NO: 323199 - RNA, 22 nt, Human
gugauaaagacgugucauaauu

SEQ ID NO: 323200 - RNA, 22 nt, Human
ccacagaggacaacugccuggc

SEQ ID NO: 323201 - RNA, 22 nt, Human
aaugaugguauugaugagcuaa

SEQ ID NO: 323202 - RNA, 22 nt, Human
cugggcacaaguggcccuggau

SEQ ID NO: 323203 - RNA, 23 nt, Human
aggagaagagauuuccacaugca

SEQ ID NO: 323204 - RNA, 18 nt, Human
agaauugcugcuucuucu

SEQ ID NO: 323205 - RNA, 22 nt, Human
cugggcagaauuuuaggauggc

SEQ ID NO: 323206 - RNA, 22 nt, Human
uccagggagauggcagaggcug

SEQ ID NO: 323207 - RNA, 22 nt, Human
cugcucugcagcuuggacuccc

SEQ ID NO: 323208 - RNA, 20 nt, Human
aagggagaauaaugauugua

SEQ ID NO: 323209 - RNA, 22 nt, Human
aagcugccugccacgcuagaua

SEQ ID NO: 323210 - RNA, 22 nt, Human
cccugccuacaggguuuucuuu

SEQ ID NO: 323211 - RNA, 22 nt, Human
agauacauauagaaaacaucaa

SEQ ID NO: 323212 - RNA, 22 nt, Human
ggaagggaguaguuggaaugca

SEQ ID NO: 323213 - RNA, 22 nt, Human
cugguggagaugccuggccccu

SEQ ID NO: 323214 - RNA, 22 nt, Human
gagccuccuccuggugugccga

SEQ ID NO: 323215 - RNA, 22 nt, Human
aaagguuaagguguucaagaaa

SEQ ID NO: 323216 - RNA, 22 nt, Human
uagaaaugcaguguacuguguc

SEQ ID NO: 323217 - RNA, 22 nt, Human
gcaggcagagguggaggagaca

SEQ ID NO: 323218 - RNA, 22 nt, Human
ucagcucuaccugggagcuguc

SEQ ID NO: 323219 - RNA, 22 nt, Human
acugcagccuugaacucugggc

SEQ ID NO: 323220 - RNA, 22 nt, Human
agaccuggauuccaauccuacc

SEQ ID NO: 323221 - RNA, 22 nt, Human
aucagcaaaaaugccuucagaa

SEQ ID NO: 323222 - RNA, 22 nt, Human
aaaugucuuugaguauuucugc

SEQ ID NO: 323223 - RNA, 22 nt, Human
aaaugaugauuaaaaugaggua

SEQ ID NO: 323224 - RNA, 22 nt, Human
gcuccacuugcagcuaggcuug

SEQ ID NO: 323225 - RNA, 19 nt, Human
ggucucagugcagcugcag

SEQ ID NO: 323226 - RNA, 22 nt, Human
acuggcagagacccugauggcc

SEQ ID NO: 323227 - RNA, 22 nt, Human
uucauuccuucccuaagcaacu

SEQ ID NO: 323228 - RNA, 22 nt, Human
guguggcuaccucagaggagca

SEQ ID NO: 323229 - RNA, 22 nt, Human
cuggggggagcugcguccagca

SEQ ID NO: 323230 - RNA, 22 nt, Human
ucugggggaggaggcauggccc

SEQ ID NO: 323231 - RNA, 22 nt, Human
augcugucgaaaccaaacaucu

SEQ ID NO: 323232 - RNA, 22 nt, Human
uguuacacagcagaauagcaag

SEQ ID NO: 323233 - RNA, 22 nt, Human
gcagaggcuccauuuuacagau

SEQ ID NO: 323234 - RNA, 22 nt, Human
agugucuuugucucucaagcac

SEQ ID NO: 323235 - RNA, 22 nt, Human
aaugauguauuaguacaacaca

SEQ ID NO: 323236 - RNA, 22 nt, Human
aauauuguuucaagaucacaga

SEQ ID NO: 323237 - RNA, 22 nt, Human
agaagugccauacuguggucca

SEQ ID NO: 323238 - RNA, 22 nt, Human
agggcagaaguacagacacuua

SEQ ID NO: 323239 - RNA, 20 nt, Human
gucucaaguaucucacaguc

SEQ ID NO: 323240 - RNA, 22 nt, Human
caggcagccugagggaucuggg

SEQ ID NO: 323241 - RNA, 22 nt, Human
cccagcccaucucaaaggucua

SEQ ID NO: 323242 - RNA, 22 nt, Human
uaaauucccaacucugcucuuc

SEQ ID NO: 323243 - RNA, 22 nt, Human
uggcagagaacacggcugaucu

SEQ ID NO: 323244 - RNA, 22 nt, Human
cauauucuuuaagcaaugcucu

SEQ ID NO: 323245 - RNA, 22 nt, Human
acagcuguggggacucuugccc

SEQ ID NO: 323246 - RNA, 23 nt, Human
ccagcucccaggucugaggacug

SEQ ID NO: 323247 - RNA, 21 nt, Human
ccugcugugaucuuagugagu

SEQ ID NO: 323248 - RNA, 22 nt, Human
uuaaaaugaauauugauuagca

SEQ ID NO: 323249 - RNA, 22 nt, Human
uuacaguuuaguccaagccaga

SEQ ID NO: 323250 - RNA, 22 nt, Human
gcagcuggucuggccuagagua

SEQ ID NO: 323251 - RNA, 17 nt, Human
cuggagccaagagggcc

SEQ ID NO: 323252 - RNA, 22 nt, Human
ugcugggggcuuucuggauacc

SEQ ID NO: 323253 - RNA, 22 nt, Human
aaugcuguaaagaugcuaucug

SEQ ID NO: 323254 - RNA, 22 nt, Human
ucccuggcagcuaagggugguc

SEQ ID NO: 323255 - RNA, 22 nt, Human
agaugacagccaaggagaugaa

SEQ ID NO: 323256 - RNA, 22 nt, Human
ucagaaaagguagcugugacaa

SEQ ID NO: 323257 - RNA, 22 nt, Human
ugggcagagaguagaggcaacg

SEQ ID NO: 323258 - RNA, 22 nt, Human
gccuuugcaccaucagugcaau

SEQ ID NO: 323259 - RNA, 22 nt, Human
agcagugaugcaugacagccua

SEQ ID NO: 323260 - RNA, 22 nt, Human
caggggccggcuguccgugccc

SEQ ID NO: 323261 - RNA, 22 nt, Human
uugcauaaaagaguauaucuua

SEQ ID NO: 323262 - RNA, 22 nt, Human
auacauguugagaaaauaucug

SEQ ID NO: 323263 - RNA, 22 nt, Human
aagagcuguaugccauaugauu

SEQ ID NO: 323264 - RNA, 22 nt, Human
uuuggaaaguguacaaauuuga

SEQ ID NO: 323265 - RNA, 22 nt, Human
ugcacacacaugaaguagcaug

SEQ ID NO: 323266 - RNA, 22 nt, Human
ccagggcaauuauuuggagggu

SEQ ID NO: 323267 - RNA, 20 nt, Human
gggagucuggaugaaagaug

SEQ ID NO: 323268 - RNA, 22 nt, Human
uccuuccugcaggccaaguccu

SEQ ID NO: 323269 - RNA, 22 nt, Human
ucaguguuuaccguauguuguu

SEQ ID NO: 323270 - RNA, 22 nt, Human
ucaguuuucaauuucaucagag

SEQ ID NO: 323271 - RNA, 22 nt, Human
gugucccaaucuacuuuucccu

SEQ ID NO: 323272 - RNA, 22 nt, Human
ucugagggugggagaaggagcu

SEQ ID NO: 323273 - RNA, 22 nt, Human
uuagccaugugggaaaaacagc

SEQ ID NO: 323274 - RNA, 22 nt, Human
ggccugagcuugggcagcguau

SEQ ID NO: 323275 - RNA, 22 nt, Human
uuauuuaaugugaucugaagag

SEQ ID NO: 323276 - RNA, 22 nt, Human
acagggcaccugagguaggaag

SEQ ID NO: 323277 - RNA, 21 nt, Human
uaauaauuccacuacagagua

SEQ ID NO: 323278 - RNA, 22 nt, Human
aaauauaguaaaugcauaguuc

SEQ ID NO: 323279 - RNA, 22 nt, Human
aaaguuuuagaacuaggaagca

SEQ ID NO: 323280 - RNA, 22 nt, Human
gagguggaaggcaggaacaaau

SEQ ID NO: 323281 - RNA, 22 nt, Human
acaguguucugaaaguugaggg

SEQ ID NO: 323282 - RNA, 22 nt, Human
ucauugaacgaagagcuccauu

SEQ ID NO: 323283 - RNA, 22 nt, Human
gaaggccauuuuuagguagaau

SEQ ID NO: 323284 - RNA, 22 nt, Human
uggcucaggguccccaaauggu

SEQ ID NO: 323285 - RNA, 22 nt, Human
ucaauaaaauuguuuuccuauc

SEQ ID NO: 323286 - RNA, 22 nt, Human
gucccagaugucuggaacuccc

SEQ ID NO: 323287 - RNA, 22 nt, Human
cucagaguccauaguuuacagu

SEQ ID NO: 323288 - RNA, 22 nt, Human
aaacucugccauuuuuggccug

SEQ ID NO: 323289 - RNA, 22 nt, Human
cugggcagugcagcuauagaac

SEQ ID NO: 323290 - RNA, 22 nt, Human
cuccaggauguuagacguccag

SEQ ID NO: 323291 - RNA, 22 nt, Human
ggagcugaugacgucaccaugg

SEQ ID NO: 323292 - RNA, 22 nt, Human
agugugucugaucacuugugag

SEQ ID NO: 323293 - RNA, 21 nt, Human
acaugucucuaaucucaguga

SEQ ID NO: 323294 - RNA, 22 nt, Human
cucccagagaccaagcugagaa

SEQ ID NO: 323295 - RNA, 22 nt, Human
agcugaguuaauucaucacuua

SEQ ID NO: 323296 - RNA, 21 nt, Human
ggucuuccaaauaaggagaaa

SEQ ID NO: 323297 - RNA, 22 nt, Human
uuuauugcauacacaaauguca

SEQ ID NO: 323298 - RNA, 22 nt, Human
ccucacugcuauguguuugcuc

SEQ ID NO: 323299 - RNA, 22 nt, Human
ugucuccucauacugucauauu

SEQ ID NO: 323300 - RNA, 22 nt, Human
acacaguaccccaaggcugggc

SEQ ID NO: 323301 - RNA, 22 nt, Human
gagcucccaggccccagcaagg

SEQ ID NO: 323302 - RNA, 22 nt, Human
cagggugggcacccagccucca

SEQ ID NO: 323303 - RNA, 22 nt, Human
agaggcuggauugagcauagac

SEQ ID NO: 323304 - RNA, 22 nt, Human
cccaggagguagagguugcagu

SEQ ID NO: 323305 - RNA, 22 nt, Human
gagagugagauccuccugggga

SEQ ID NO: 323306 - RNA, 22 nt, Human
uccucacaagcaagcacaggua

SEQ ID NO: 323307 - RNA, 21 nt, Human
cugagggccgcagcugggcuc

SEQ ID NO: 323308 - RNA, 22 nt, Human
uuauuuauuguguaccuacugu

SEQ ID NO: 323309 - RNA, 22 nt, Human
ggagcuggcagcgcaacccaga

SEQ ID NO: 323310 - RNA, 22 nt, Human
aagaagaugguuaacuuucagu

SEQ ID NO: 323311 - RNA, 22 nt, Human
agaggagguggugaugcuuuaa

SEQ ID NO: 323312 - RNA, 22 nt, Human
ugagauguaagguaugcuuacu

SEQ ID NO: 323313 - RNA, 22 nt, Human
cagggcagaacauauagauagu

SEQ ID NO: 323314 - RNA, 22 nt, Human
uguucaaaugaucuucuuaaau

SEQ ID NO: 323315 - RNA, 22 nt, Human
uuagagucaagcugcauguucu

SEQ ID NO: 323316 - RNA, 20 nt, Human
uggaaguucuguugcauugg

SEQ ID NO: 323317 - RNA, 22 nt, Human
ucugggcucugucagcaccucu

SEQ ID NO: 323318 - RNA, 22 nt, Human
uuauucuuuucuccagaauccc

SEQ ID NO: 323319 - RNA, 22 nt, Human
ugccuggguccaggccaagccu

SEQ ID NO: 323320 - RNA, 21 nt, Human
cgcagagcgaacuugcggcgc

SEQ ID NO: 323321 - RNA, 22 nt, Human
uuugcauuuauaaguuggugga

SEQ ID NO: 323322 - RNA, 22 nt, Human
agguauagaauugaaaggguuu

SEQ ID NO: 323323 - RNA, 22 nt, Human
ggcuucaccgcgggguugcagg

SEQ ID NO: 323324 - RNA, 22 nt, Human
ugggccugacucaccugccucc

SEQ ID NO: 323325 - RNA, 22 nt, Human
gaucuguuauaaucucuuuuau

SEQ ID NO: 323326 - RNA, 22 nt, Human
acaggcucuggggcaggauggc

SEQ ID NO: 323327 - RNA, 22 nt, Human
acaaagugaauugcaucgaguu

SEQ ID NO: 323328 - RNA, 22 nt, Human
gugcucuggcuggucucccggu

SEQ ID NO: 323329 - RNA, 22 nt, Human
ucccagugagguccuggcuguc

SEQ ID NO: 323330 - RNA, 22 nt, Human
aagacauugucauuuuauaauu

SEQ ID NO: 323331 - RNA, 22 nt, Human
aggccucagugaucaucaucag

SEQ ID NO: 323332 - RNA, 22 nt, Human
gaagcagcaaaucugcaguauc

SEQ ID NO: 323333 - RNA, 22 nt, Human
auguuggagucguaaggcaugg

SEQ ID NO: 323334 - RNA, 22 nt, Human
agagcugggugaagugccauca

SEQ ID NO: 323335 - RNA, 20 nt, Human
cugggaggucuuccaaauca

SEQ ID NO: 323336 - RNA, 22 nt, Human
cuggcugugcugcaggcuuugg

SEQ ID NO: 323337 - RNA, 22 nt, Human
aguucuggcggcugucggcacu

SEQ ID NO: 323338 - RNA, 21 nt, Human
agaugaggauacugaggccua

SEQ ID NO: 323339 - RNA, 22 nt, Human
gagaggccaccugacgagcagu

SEQ ID NO: 323340 - RNA, 22 nt, Human
uuuuauagcugaauaguauucc

SEQ ID NO: 323341 - RNA, 22 nt, Human
cagucucucuuguagugcagcu

SEQ ID NO: 323342 - RNA, 22 nt, Human
ucucacugcaaauauuauguau

SEQ ID NO: 323343 - RNA, 22 nt, Human
ugaaguccuagaacuccuggua

SEQ ID NO: 323344 - RNA, 22 nt, Human
guucucuaucauuagugaauuu

SEQ ID NO: 323345 - RNA, 19 nt, Human
uuuuccuucuauauguuuc

SEQ ID NO: 323346 - RNA, 22 nt, Human
aguuagaauagucagauuguag

SEQ ID NO: 323347 - RNA, 22 nt, Human
gagcugucuggggacucugggu

SEQ ID NO: 323348 - RNA, 22 nt, Human
ccagcagagucuaggaaggagg

SEQ ID NO: 323349 - RNA, 22 nt, Human
uaauccacaauagagauuaucu

SEQ ID NO: 323350 - RNA, 22 nt, Human
agauacaugucaagagacuuau

SEQ ID NO: 323351 - RNA, 22 nt, Human
guguuuuaagaaagaagcucag

SEQ ID NO: 323352 - RNA, 22 nt, Human
gcucuggacccuggaguggcug

SEQ ID NO: 323353 - RNA, 22 nt, Human
ucuuugaauuucugacugucuu

SEQ ID NO: 323354 - RNA, 22 nt, Human
aggaagccugcaggugacugcu

SEQ ID NO: 323355 - RNA, 22 nt, Human
ugcuggggagugauugaccauc

SEQ ID NO: 323356 - RNA, 22 nt, Human
auguaacuucugugaaucugac

SEQ ID NO: 323357 - RNA, 22 nt, Human
aaugcuguauaucuuagcuaau

SEQ ID NO: 323358 - RNA, 22 nt, Human
gcugauagacugaauguuggga

SEQ ID NO: 323359 - RNA, 22 nt, Human
auccuugaaugacucugcccuc

SEQ ID NO: 323360 - RNA, 22 nt, Human
uuccuuaguguuagauucugug

SEQ ID NO: 323361 - RNA, 22 nt, Human
acacaguauuacaauaggugcu

SEQ ID NO: 323362 - RNA, 22 nt, Human
auuuaugacuggugaauagaac

SEQ ID NO: 323363 - RNA, 20 nt, Human
acaguguuaguuaucaucuc

SEQ ID NO: 323364 - RNA, 22 nt, Human
ucucuucuaauuuucccgagua

SEQ ID NO: 323365 - RNA, 22 nt, Human
cccaccaguacagaugguagau

SEQ ID NO: 323366 - RNA, 22 nt, Human
gcucuccacugaccacggggca

SEQ ID NO: 323367 - RNA, 20 nt, Human
cugagagucugugcuuaguc

SEQ ID NO: 323368 - RNA, 20 nt, Human
augugagggguugaaguggg

SEQ ID NO: 323369 - RNA, 22 nt, Human
cacagggccacuuucccaguaa

SEQ ID NO: 323370 - RNA, 22 nt, Human
agucucuuuaaucacagugucu

SEQ ID NO: 323371 - RNA, 22 nt, Human
ugaggcagcuuuuucugugugu

SEQ ID NO: 323372 - RNA, 18 nt, Human
ggucuuuaggucaguguc

SEQ ID NO: 323373 - RNA, 22 nt, Human
agugcuuugagcguuugaaaag

SEQ ID NO: 323374 - RNA, 22 nt, Human
aucccugcccucauggagcuua

SEQ ID NO: 323375 - RNA, 22 nt, Human
agcaaauacuugaauaaaaaga

SEQ ID NO: 323376 - RNA, 22 nt, Human
gccuggaguucagccaaguccc

SEQ ID NO: 323377 - RNA, 19 nt, Human
ccugggaggcggagguugc

SEQ ID NO: 323378 - RNA, 22 nt, Human
uguaugcaaauuuauuagcaca

SEQ ID NO: 323379 - RNA, 22 nt, Human
uccuggaguauuucuguggugu

SEQ ID NO: 323380 - RNA, 22 nt, Human
agggcuggccacaugauuuggu

SEQ ID NO: 323381 - RNA, 22 nt, Human
cagccccuuccuggcaucugga

SEQ ID NO: 323382 - RNA, 22 nt, Human
cugggaggauacacaagaucag

SEQ ID NO: 323383 - RNA, 22 nt, Human
cuguccugcaguugggggcagg

SEQ ID NO: 323384 - RNA, 22 nt, Human
guugaaaguagaugcuauuugg

SEQ ID NO: 323385 - RNA, 21 nt, Human
gggcagaggggccuccugggu

SEQ ID NO: 323386 - RNA, 22 nt, Human
gcccugucggaacugcgaccuc

SEQ ID NO: 323387 - RNA, 22 nt, Human
agcagagccugggcuaggggug

SEQ ID NO: 323388 - RNA, 22 nt, Human
gcaggauggugcccuuucugcc

SEQ ID NO: 323389 - RNA, 22 nt, Human
uaucauuguguuauuucuucca

SEQ ID NO: 323390 - RNA, 22 nt, Human
guacaauagcaguuuucccuuu

SEQ ID NO: 323391 - RNA, 22 nt, Human
agaaacuucagcuauucuuuug

SEQ ID NO: 323392 - RNA, 22 nt, Human
ggagcuggagagcuagccuagg

SEQ ID NO: 323393 - RNA, 22 nt, Human
ucucuucauagugacacccauc

SEQ ID NO: 323394 - RNA, 22 nt, Human
gaguuauuuguagggauuauau

SEQ ID NO: 323395 - RNA, 22 nt, Human
uggccuggccacauccagcagg

SEQ ID NO: 323396 - RNA, 22 nt, Human
uuguguccugauuugacacaau

SEQ ID NO: 323397 - RNA, 22 nt, Human
uuucaaacauagaucugaauau

SEQ ID NO: 323398 - RNA, 22 nt, Human
aaguucaagcucugccuaaaau

SEQ ID NO: 323399 - RNA, 22 nt, Human
aacuaaaucuggcauuuagagc

SEQ ID NO: 323400 - RNA, 22 nt, Human
cagcauuuucuuaauguaggug

SEQ ID NO: 323401 - RNA, 21 nt, Human
acuguucaucuguucagaagc

SEQ ID NO: 323402 - RNA, 22 nt, Human
uuguuuucacagcuuugcccgg

SEQ ID NO: 323403 - RNA, 22 nt, Human
ggagcugggacccugucaucug

SEQ ID NO: 323404 - RNA, 22 nt, Human
gcaggauggguguagcccagca

SEQ ID NO: 323405 - RNA, 22 nt, Human
ucugaggcuauguucaggcuaa

SEQ ID NO: 323406 - RNA, 20 nt, Human
uccagcugucuuucagagac

SEQ ID NO: 323407 - RNA, 22 nt, Human
ucaggagcagcaugggugagag

SEQ ID NO: 323408 - RNA, 22 nt, Human
gaaggcugaugacagauucugc

SEQ ID NO: 323409 - RNA, 22 nt, Human
gcugggcucuuaucaccuguac

SEQ ID NO: 323410 - RNA, 22 nt, Human
gcucccuccaugaggcagaccg

SEQ ID NO: 323411 - RNA, 21 nt, Human
uugaaaguaaauucagcagcu

SEQ ID NO: 323412 - RNA, 22 nt, Human
ggagccaguauuuaguggucuu

SEQ ID NO: 323413 - RNA, 22 nt, Human
acuuucucccacccacccgucu

SEQ ID NO: 323414 - RNA, 22 nt, Human
uccugcagagacagaggccuca

SEQ ID NO: 323415 - RNA, 23 nt, Human
agcuggaggcugucuacucccaa

SEQ ID NO: 323416 - RNA, 22 nt, Human
uuaggaguccagaugucuuggg

SEQ ID NO: 323417 - RNA, 22 nt, Human
ugcagugggccggaggccaggg

SEQ ID NO: 323418 - RNA, 22 nt, Human
aaacacaucauucaugucguca

SEQ ID NO: 323419 - RNA, 18 nt, Human
ugagagcauucgaggcaa

SEQ ID NO: 323420 - RNA, 22 nt, Human
cccaguccuaaagcagacgcca

SEQ ID NO: 323421 - RNA, 22 nt, Human
cagcugccugcaacacaagcuu

SEQ ID NO: 323422 - RNA, 22 nt, Human
agugaccauuuucagcuagagg

SEQ ID NO: 323423 - RNA, 22 nt, Human
gaguccaguuguucacagaggc

SEQ ID NO: 323424 - RNA, 22 nt, Human
agucccagaugacccagcuacu

SEQ ID NO: 323425 - RNA, 22 nt, Human
uccagccuaggggaacagcugc

SEQ ID NO: 323426 - RNA, 22 nt, Human
aaagauuuaugaaguucaauua

SEQ ID NO: 323427 - RNA, 22 nt, Human
ccagggcauguccaagacuuag

SEQ ID NO: 323428 - RNA, 22 nt, Human
uuccucagcuggccugauuggg

SEQ ID NO: 323429 - RNA, 22 nt, Human
gcugguuaggugagggugcgcc

SEQ ID NO: 323430 - RNA, 22 nt, Human
auguagcagauauuugugcaca

SEQ ID NO: 323431 - RNA, 22 nt, Human
cccuggccagcucaugucugag

SEQ ID NO: 323432 - RNA, 22 nt, Human
gccucugcaucuucgccgcacu

SEQ ID NO: 323433 - RNA, 22 nt, Human
aaggcgacacaggcagcaggcc

SEQ ID NO: 323434 - RNA, 22 nt, Human
ccuguucaaguugcagggcugg

SEQ ID NO: 323435 - RNA, 20 nt, Human
uggcuccugcgguggaacca

SEQ ID NO: 323436 - RNA, 22 nt, Human
cauuugaugacucaacucauaa

SEQ ID NO: 323437 - RNA, 22 nt, Human
uggcugggggugcuauagcugc

SEQ ID NO: 323438 - RNA, 22 nt, Human
acagagcauauaaagugcuuug

SEQ ID NO: 323439 - RNA, 22 nt, Human
gcaguguuacuugguuugcaga

SEQ ID NO: 323440 - RNA, 22 nt, Human
guccagccacccuggaggcacg

SEQ ID NO: 323441 - RNA, 22 nt, Human
gucucccaucguuugugaggaa

SEQ ID NO: 323442 - RNA, 22 nt, Human
agaauucuggaguugggaggaa

SEQ ID NO: 323443 - RNA, 22 nt, Human
agaugaaauuuguguugaguug

SEQ ID NO: 323444 - RNA, 22 nt, Human
uuucuuauauucugucauuguu

SEQ ID NO: 323445 - RNA, 17 nt, Human
agaaagaggauccacag

SEQ ID NO: 323446 - RNA, 22 nt, Human
acaggccacaguggagucucug

SEQ ID NO: 323447 - RNA, 22 nt, Human
ggcagggugccuggcuccuguu

SEQ ID NO: 323448 - RNA, 22 nt, Human
uaggaaaaauacagaauuauau

SEQ ID NO: 323449 - RNA, 22 nt, Human
ugugaaaagcguguguucuagg

SEQ ID NO: 323450 - RNA, 22 nt, Human
uccauucauucauugaugaaca

SEQ ID NO: 323451 - RNA, 22 nt, Human
gcugguccacucccuggaggcu

SEQ ID NO: 323452 - RNA, 22 nt, Human
ugggcagacugagcccuguccc

SEQ ID NO: 323453 - RNA, 18 nt, Human
gagacacaagggccugga

SEQ ID NO: 323454 - RNA, 22 nt, Human
acacaaugcauauuuuuccaga

SEQ ID NO: 323455 - RNA, 23 nt, Human
uugaaagguagcuggcagcuaga

SEQ ID NO: 323456 - RNA, 22 nt, Human
aaauguguuugauaggaauauu

SEQ ID NO: 323457 - RNA, 22 nt, Human
gcuggcugaggucuagcucuuu

SEQ ID NO: 323458 - RNA, 22 nt, Human
auguauguuaguguauuaucua

SEQ ID NO: 323459 - RNA, 22 nt, Human
aguuuccaaagcauguucacac

SEQ ID NO: 323460 - RNA, 22 nt, Human
aguucuucauaaccuuacugug

SEQ ID NO: 323461 - RNA, 22 nt, Human
gcucugugccacaugcaguguu

SEQ ID NO: 323462 - RNA, 22 nt, Human
aguggcagagcugugucuugaa

SEQ ID NO: 323463 - RNA, 18 nt, Human
agagaugggaguuggaaa

SEQ ID NO: 323464 - RNA, 22 nt, Human
ggaaagagcccagcagugcuug

SEQ ID NO: 323465 - RNA, 22 nt, Human
cagucccagacauaguaaggga

SEQ ID NO: 323466 - RNA, 22 nt, Human
agcuccuguggcagcucuucug

SEQ ID NO: 323467 - RNA, 22 nt, Human
gucaggaucaaauugaaguuau

SEQ ID NO: 323468 - RNA, 22 nt, Human
auucuccagcucacuguccaua

SEQ ID NO: 323469 - RNA, 22 nt, Human
ugucaugggucuaaacauugau

SEQ ID NO: 323470 - RNA, 22 nt, Human
uuccauaaaggugauaguauac

SEQ ID NO: 323471 - RNA, 22 nt, Human
gcucaggauuucauccaugugu

SEQ ID NO: 323472 - RNA, 22 nt, Human
aucucuguaaaccauaaauuga

SEQ ID NO: 323473 - RNA, 22 nt, Human
aucaggaugaagcuguagcgaa

SEQ ID NO: 323474 - RNA, 22 nt, Human
cagugggugaugaguccugggg

SEQ ID NO: 323475 - RNA, 22 nt, Human
uggcucaggagggaucuuugcu

SEQ ID NO: 323476 - RNA, 22 nt, Human
gcuggccugcugggcaccaccg

SEQ ID NO: 323477 - RNA, 22 nt, Human
ggccugcugcuaugacuuccug

SEQ ID NO: 323478 - RNA, 22 nt, Human
gggaugucacugugccuggcac

SEQ ID NO: 323479 - RNA, 22 nt, Human
gcugcagcucgccuuccggccu

SEQ ID NO: 323480 - RNA, 22 nt, Human
gagagcugggcuuugggugaag

SEQ ID NO: 323481 - RNA, 22 nt, Human
gccuggagggcucuagagaggc

SEQ ID NO: 323482 - RNA, 22 nt, Human
gaaaggcaguacagcugagccu

SEQ ID NO: 323483 - RNA, 22 nt, Human
gcugguuuccuuaucuauaaag

SEQ ID NO: 323484 - RNA, 22 nt, Human
gaggggcuggcacgauggcugc

SEQ ID NO: 323485 - RNA, 22 nt, Human
agaaaauauucauugagaggcu

SEQ ID NO: 323486 - RNA, 22 nt, Human
ucagaagccggaagugcuccuc

SEQ ID NO: 323487 - RNA, 22 nt, Human
ccccuuucucccgcgucuggcc

SEQ ID NO: 323488 - RNA, 22 nt, Human
cuggccugaggucggcuguagg

SEQ ID NO: 323489 - RNA, 20 nt, Human
caccaggcgcucugagaaca

SEQ ID NO: 323490 - RNA, 22 nt, Human
cagcucugugggagcguaugug

SEQ ID NO: 323491 - RNA, 22 nt, Human
uggcucagcgcggccuggucuu

SEQ ID NO: 323492 - RNA, 22 nt, Human
agggacagucuacuguucacug

SEQ ID NO: 323493 - RNA, 22 nt, Human
ucauuuccucaaauucaagguu

SEQ ID NO: 323494 - RNA, 22 nt, Human
gugucccagcagcacauuggcu

SEQ ID NO: 323495 - RNA, 22 nt, Human
agucccagaucuacaggaggga

SEQ ID NO: 323496 - RNA, 22 nt, Human
ccagucugaggccuggugaggg

SEQ ID NO: 323497 - RNA, 22 nt, Human
gccugcagggugaugggcugcc

SEQ ID NO: 323498 - RNA, 22 nt, Human
uguggccuugcagccuggaggu

SEQ ID NO: 323499 - RNA, 22 nt, Human
aaacacauuuuaggaaaaucua

SEQ ID NO: 323500 - RNA, 23 nt, Human
uaugagaacccauacgcugucuu

SEQ ID NO: 323501 - RNA, 22 nt, Human
aguacagaccugucucuuccug

SEQ ID NO: 323502 - RNA, 22 nt, Human
agcugaagggaggauauguaca

SEQ ID NO: 323503 - RNA, 22 nt, Human
uucugugauugacauguggcuu

SEQ ID NO: 323504 - RNA, 22 nt, Human
gcucccagcaauugaggcagcc

SEQ ID NO: 323505 - RNA, 22 nt, Human
cuggcucaugugaugagggcaa

SEQ ID NO: 323506 - RNA, 22 nt, Human
agcauucauugcuagaauguaa

SEQ ID NO: 323507 - RNA, 22 nt, Human
uuacaagcagcuacauaucaca

SEQ ID NO: 323508 - RNA, 22 nt, Human
ucagugcuaaaagagcuggugu

SEQ ID NO: 323509 - RNA, 22 nt, Human
ucauucuuuaccaaguugucac

SEQ ID NO: 323510 - RNA, 22 nt, Human
ugugccagccucuggcuguguc

SEQ ID NO: 323511 - RNA, 22 nt, Human
gccuugccucagccauggaaac

SEQ ID NO: 323512 - RNA, 22 nt, Human
ccugcucagagcgucuugugug

SEQ ID NO: 323513 - RNA, 22 nt, Human
gggcuggcaucaguugccgaga

SEQ ID NO: 323514 - RNA, 22 nt, Human
ccaggccuagccccugagggua

SEQ ID NO: 323515 - RNA, 22 nt, Human
acccagcuggaugcauggaggc

SEQ ID NO: 323516 - RNA, 22 nt, Human
ugaaaaggagccuuagguaggu

SEQ ID NO: 323517 - RNA, 20 nt, Human
cccagccccuaccuguugcc

SEQ ID NO: 323518 - RNA, 22 nt, Human
ccuccagucaccuggaugagaa

SEQ ID NO: 323519 - RNA, 20 nt, Human
ccaccuggccaaggcugugc

SEQ ID NO: 323520 - RNA, 17 nt, Human
agugacuuggaaagagc

SEQ ID NO: 323521 - RNA, 22 nt, Human
gugcccugaguggguaggagag

SEQ ID NO: 323522 - RNA, 22 nt, Human
uaucuguugucuuuuacaugua

SEQ ID NO: 323523 - RNA, 22 nt, Human
ucccagccggugccuggguccc

SEQ ID NO: 323524 - RNA, 22 nt, Human
gcaguguuucagugcuuuuucu

SEQ ID NO: 323525 - RNA, 22 nt, Human
caaggcaggcaguucacuugag

SEQ ID NO: 323526 - RNA, 22 nt, Human
ucucagaguuuacggggcugaa

SEQ ID NO: 323527 - RNA, 17 nt, Human
aaucucaguggcuuaag

SEQ ID NO: 323528 - RNA, 22 nt, Human
gccagguggucuggcuccagag

SEQ ID NO: 323529 - RNA, 22 nt, Human
uucugucuguaaacuucucaau

SEQ ID NO: 323530 - RNA, 22 nt, Human
agccagcagggcuuagaggaca

SEQ ID NO: 323531 - RNA, 22 nt, Human
ugcaguggaaagacucagacuu

SEQ ID NO: 323532 - RNA, 22 nt, Human
auugaaaaaugacuauugcuua

SEQ ID NO: 323533 - RNA, 22 nt, Human
caguggaggcucaagugugcuu

SEQ ID NO: 323534 - RNA, 22 nt, Human
uccucacauggugagccacaca

SEQ ID NO: 323535 - RNA, 22 nt, Human
aagaguuuucuauaaucuuggc

SEQ ID NO: 323536 - RNA, 22 nt, Human
uuaugauuugccacagauuggu

SEQ ID NO: 323537 - RNA, 22 nt, Human
auccuugacacacuccaguacu

SEQ ID NO: 323538 - RNA, 22 nt, Human
ucccacacagcccgcucaccgg

SEQ ID NO: 323539 - RNA, 22 nt, Human
uagagcuguaucaaagagccuu

SEQ ID NO: 323540 - RNA, 22 nt, Human
aagaaaugcagaaaugugcugg

SEQ ID NO: 323541 - RNA, 22 nt, Human
aagcaggcauuccagagacaau

SEQ ID NO: 323542 - RNA, 22 nt, Human
ggcugucucugugacugccacc

SEQ ID NO: 323543 - RNA, 22 nt, Human
uaauuucaauagcuugcauaau

SEQ ID NO: 323544 - RNA, 21 nt, Human
agcuggugucagagcucuggg

SEQ ID NO: 323545 - RNA, 22 nt, Human
aaugcacauaaauauggucuua

SEQ ID NO: 323546 - RNA, 22 nt, Human
aagcugcccaagacugaagcau

SEQ ID NO: 323547 - RNA, 22 nt, Human
gagagcugcagccgagaggggg

SEQ ID NO: 323548 - RNA, 22 nt, Human
ccucagcugcuucccuggagcc

SEQ ID NO: 323549 - RNA, 22 nt, Human
agggagccagaguugggagcuc

SEQ ID NO: 323550 - RNA, 22 nt, Human
cuugugcauuucauuccucagg

SEQ ID NO: 323551 - RNA, 22 nt, Human
acaggccugacacacagagggc

SEQ ID NO: 323552 - RNA, 22 nt, Human
ccagcccuguaaggaugaggca

SEQ ID NO: 323553 - RNA, 17 nt, Human
ugaaacaccaagacugu

SEQ ID NO: 323554 - RNA, 22 nt, Human
ucagggcaaaagggaaaccauu

SEQ ID NO: 323555 - RNA, 22 nt, Human
gcucccugacucaguuccugag

SEQ ID NO: 323556 - RNA, 20 nt, Human
accuugaacccgccagccau

SEQ ID NO: 323557 - RNA, 22 nt, Human
aaugaaauaguuggcuguagag

SEQ ID NO: 323558 - RNA, 22 nt, Human
ucaguuuucauuucaugagcag

SEQ ID NO: 323559 - RNA, 22 nt, Human
guuauauauaguauuucucuga

SEQ ID NO: 323560 - RNA, 22 nt, Human
ggcccagcugugcuuccagccc

SEQ ID NO: 323561 - RNA, 21 nt, Human
aaaaaugaaguuguucaggaa

SEQ ID NO: 323562 - RNA, 22 nt, Human
aggacccagaggcagaggacgu

SEQ ID NO: 323563 - RNA, 22 nt, Human
cugugcugauucagcacaggcc

SEQ ID NO: 323564 - RNA, 22 nt, Human
acauauuuugaaagcuuucuaa

SEQ ID NO: 323565 - RNA, 22 nt, Human
agggccaggaacaccugaaggg

SEQ ID NO: 323566 - RNA, 22 nt, Human
ucucagaggugcccuggcaucu

SEQ ID NO: 323567 - RNA, 23 nt, Human
uaacucugugaagggugacuggg

SEQ ID NO: 323568 - RNA, 20 nt, Human
ggcagcaggaguuuccucuu

SEQ ID NO: 323569 - RNA, 22 nt, Human
auuugcauaauagugauuugua

SEQ ID NO: 323570 - RNA, 17 nt, Human
ggcugcugugcuggugc

SEQ ID NO: 323571 - RNA, 22 nt, Human
gugaaggaggggccacagauau

SEQ ID NO: 323572 - RNA, 22 nt, Human
ugcagggccuucuagaccaugg

SEQ ID NO: 323573 - RNA, 20 nt, Human
cauuuguuagcuuucuacug

SEQ ID NO: 323574 - RNA, 22 nt, Human
ggaggagacaguaaaaagcacg

SEQ ID NO: 323575 - RNA, 22 nt, Human
uugauacauagcacaguuuagg

SEQ ID NO: 323576 - RNA, 22 nt, Human
aaucuucuuucuuaacaguaca

SEQ ID NO: 323577 - RNA, 22 nt, Human
cugcagcuuuggaaaccuguuu

SEQ ID NO: 323578 - RNA, 22 nt, Human
gcagugguggagcuuacauauc

SEQ ID NO: 323579 - RNA, 22 nt, Human
uucuuuuacauuaagauuucag

SEQ ID NO: 323580 - RNA, 22 nt, Human
cuuuuuccagcuucaggguggg

SEQ ID NO: 323581 - RNA, 22 nt, Human
agaaaacuugucacagcucuca

SEQ ID NO: 323582 - RNA, 22 nt, Human
auccuugagaaaauaaaugacc

SEQ ID NO: 323583 - RNA, 22 nt, Human
ucagaaauacuaucagcuuuug

SEQ ID NO: 323584 - RNA, 22 nt, Human
agagggcccauguugggcugcu

SEQ ID NO: 323585 - RNA, 23 nt, Human
ucagugugcaagaauggagaagc

SEQ ID NO: 323586 - RNA, 22 nt, Human
uggccugucuuguugugcuaga

SEQ ID NO: 323587 - RNA, 22 nt, Human
aaaaucaguacacuuuauuuug

SEQ ID NO: 323588 - RNA, 22 nt, Human
gccucugcccauccaccaucag

SEQ ID NO: 323589 - RNA, 22 nt, Human
cagagacagggcagggagugug

SEQ ID NO: 323590 - RNA, 22 nt, Human
ucugucuccugccagugccucu

SEQ ID NO: 323591 - RNA, 22 nt, Human
uugugugguagcuucauugaac

SEQ ID NO: 323592 - RNA, 22 nt, Human
cugcugugcaacauugcaccua

SEQ ID NO: 323593 - RNA, 22 nt, Human
agcccaagcuaugaggugaccu

SEQ ID NO: 323594 - RNA, 22 nt, Human
agaagauuuagguugacgcuau

SEQ ID NO: 323595 - RNA, 22 nt, Human
uuagacauguuugcuaaaauga

SEQ ID NO: 323596 - RNA, 22 nt, Human
cugcucuaauaucagauagacu

SEQ ID NO: 323597 - RNA, 22 nt, Human
acauuucucauucuccccuaac

SEQ ID NO: 323598 - RNA, 22 nt, Human
agaccagcugccucccagggcc

SEQ ID NO: 323599 - RNA, 22 nt, Human
accaugggucagccaccucagc

SEQ ID NO: 323600 - RNA, 22 nt, Human
gggcacugugcuaggugcugag

SEQ ID NO: 323601 - RNA, 18 nt, Human
uggagccauugccaccau

SEQ ID NO: 323602 - RNA, 22 nt, Human
agccucuguagaaagcagugug

SEQ ID NO: 323603 - RNA, 22 nt, Human
ucccaggacaggccacauggaa

SEQ ID NO: 323604 - RNA, 22 nt, Human
ccucagagguguggcaucucug

SEQ ID NO: 323605 - RNA, 22 nt, Human
uggcaggagguuuucuccagga

SEQ ID NO: 323606 - RNA, 22 nt, Human
aaacuguauauuuauggcaugu

SEQ ID NO: 323607 - RNA, 17 nt, Human
gcacugaacaauccugu

SEQ ID NO: 323608 - RNA, 22 nt, Human
agcuggcccucgagagccaauu

SEQ ID NO: 323609 - RNA, 22 nt, Human
uuucacaacugcuuauuugaga

SEQ ID NO: 323610 - RNA, 22 nt, Human
ccaggggcuggugcugagcugg

SEQ ID NO: 323611 - RNA, 22 nt, Human
cuuaaagaaauugaggagagga

SEQ ID NO: 323612 - RNA, 22 nt, Human
caguuucuuggaugccaauuuc

SEQ ID NO: 323613 - RNA, 22 nt, Human
gcugucugggaggccuccacuu

SEQ ID NO: 323614 - RNA, 22 nt, Human
gggcagaggggcgcuucccucu

SEQ ID NO: 323615 - RNA, 22 nt, Human
aggcugcuuccuuacguggcug

SEQ ID NO: 323616 - RNA, 22 nt, Human
acagaaauauucguggugcuug

SEQ ID NO: 323617 - RNA, 22 nt, Human
uuccaggaagauucaacaaaag

SEQ ID NO: 323618 - RNA, 22 nt, Human
aaggccauuauucugauauauu

SEQ ID NO: 323619 - RNA, 22 nt, Human
aagggccuccuggggagccugg

SEQ ID NO: 323620 - RNA, 22 nt, Human
guaagcaucugucucuucugca

SEQ ID NO: 323621 - RNA, 22 nt, Human
ggcaggcgugguggccucagaa

SEQ ID NO: 323622 - RNA, 22 nt, Human
gcuguucauuagaaauagaaug

SEQ ID NO: 323623 - RNA, 22 nt, Human
uccaugugccaaggggcagagg

SEQ ID NO: 323624 - RNA, 22 nt, Human
ccagcuggcaggagagucaggg

SEQ ID NO: 323625 - RNA, 23 nt, Human
ucucagugccgauugcauacaca

SEQ ID NO: 323626 - RNA, 22 nt, Human
aauuucaaugcacucaugguug

SEQ ID NO: 323627 - RNA, 22 nt, Human
gcacccagaauaaggacaggac

SEQ ID NO: 323628 - RNA, 22 nt, Human
cgcagaagagguugucuagucc

SEQ ID NO: 323629 - RNA, 20 nt, Human
ccuggagccuggaaggaguc

SEQ ID NO: 323630 - RNA, 22 nt, Human
gaaagagaaccugggccuagau

SEQ ID NO: 323631 - RNA, 22 nt, Human
ggggaugguggcauuuguaaaa

SEQ ID NO: 323632 - RNA, 22 nt, Human
agagugaaguucaucgugcagc

SEQ ID NO: 323633 - RNA, 22 nt, Human
ugaaaaggaguccuuguuuuca

SEQ ID NO: 323634 - RNA, 23 nt, Human
uggcagugaucaaaagcuuacau

SEQ ID NO: 323635 - RNA, 22 nt, Human
auaguggugagcugcauuuaug

SEQ ID NO: 323636 - RNA, 22 nt, Human
aaauugugcucacacugauauu

SEQ ID NO: 323637 - RNA, 22 nt, Human
auuuaagauugcguauucaugu

SEQ ID NO: 323638 - RNA, 22 nt, Human
cccuggagcaucucugcugucu

SEQ ID NO: 323639 - RNA, 19 nt, Human
augauacaggugaaaauug

SEQ ID NO: 323640 - RNA, 22 nt, Human
ccugggcauucuuugaguucuc

SEQ ID NO: 323641 - RNA, 22 nt, Human
agggccugucagcgguguccug

SEQ ID NO: 323642 - RNA, 22 nt, Human
gaugaaaaaagacgagcauaua

SEQ ID NO: 323643 - RNA, 22 nt, Human
gggcuacauugugagagaaguu

SEQ ID NO: 323644 - RNA, 22 nt, Human
agugcuggagggaggcagguuc

SEQ ID NO: 323645 - RNA, 20 nt, Human
gcagcugaaaguaugacacc

SEQ ID NO: 323646 - RNA, 22 nt, Human
caagaugaaacuacagggagga

SEQ ID NO: 323647 - RNA, 22 nt, Human
ugaaacuuauaagaauaugaau

SEQ ID NO: 323648 - RNA, 22 nt, Human
auuucuguuugcuacuauaagu

SEQ ID NO: 323649 - RNA, 22 nt, Human
ggguguguuccuaaggaaacca

SEQ ID NO: 323650 - RNA, 22 nt, Human
aggccuagaggaauggccaggg

SEQ ID NO: 323651 - RNA, 22 nt, Human
caggagcagaggguggucagca

SEQ ID NO: 323652 - RNA, 22 nt, Human
agaccaugggcucugaagagca

SEQ ID NO: 323653 - RNA, 22 nt, Human
agucuggggucugguagaacga

SEQ ID NO: 323654 - RNA, 22 nt, Human
gguaacaguauguagaguaaga

SEQ ID NO: 323655 - RNA, 22 nt, Human
auaaaaacugacccauccuuug

SEQ ID NO: 323656 - RNA, 19 nt, Human
uuugcagugguuccuuugu

SEQ ID NO: 323657 - RNA, 23 nt, Human
uugcauguagcccaugaguaacu

SEQ ID NO: 323658 - RNA, 22 nt, Human
gcucccugcagcugagaguucc

SEQ ID NO: 323659 - RNA, 22 nt, Human
uucaauucuaaacuaauauucu

SEQ ID NO: 323660 - RNA, 22 nt, Human
uugcauuucccauugaguaaug

SEQ ID NO: 323661 - RNA, 22 nt, Human
ucugggaaccagugcggcuggg

SEQ ID NO: 323662 - RNA, 15 nt, Human
cuccaugauuuugca

SEQ ID NO: 323663 - RNA, 22 nt, Human
uccugcagaccucagucagguc

SEQ ID NO: 323664 - RNA, 20 nt, Human
cuuggccuacuuagcuuugu

SEQ ID NO: 323665 - RNA, 22 nt, Human
gccaccaggagcccaguccaaa

SEQ ID NO: 323666 - RNA, 22 nt, Human
aagauucuacaguagguacauu

SEQ ID NO: 323667 - RNA, 22 nt, Human
cccgucccuuuugcccgcuggu

SEQ ID NO: 323668 - RNA, 22 nt, Human
cugccucuguugggcauggucu

SEQ ID NO: 323669 - RNA, 19 nt, Human
agcauccagucaugggauc

SEQ ID NO: 323670 - RNA, 20 nt, Human
cuaucuccuggcgugccuuc

SEQ ID NO: 323671 - RNA, 22 nt, Human
uuucuuauacuauauugucauc

SEQ ID NO: 323672 - RNA, 22 nt, Human
uggcccaggcgaggugggcaga

SEQ ID NO: 323673 - RNA, 18 nt, Human
cagauccaggcagcuauu

SEQ ID NO: 323674 - RNA, 22 nt, Human
ugaagccacagagcaucugccu

SEQ ID NO: 323675 - RNA, 22 nt, Human
aggagccuccuucucaugugca

SEQ ID NO: 323676 - RNA, 22 nt, Human
acaguguucaaaccacuaggcu

SEQ ID NO: 323677 - RNA, 22 nt, Human
aaagacuagcauuuauauguac

SEQ ID NO: 323678 - RNA, 22 nt, Human
cuggugccuccucccugugcuu

SEQ ID NO: 323679 - RNA, 22 nt, Human
aagugggaauagaaaugaaggu

SEQ ID NO: 323680 - RNA, 22 nt, Human
cugaaggauucaaaauggcagg

SEQ ID NO: 323681 - RNA, 22 nt, Human
gcagauggcugagccugcagau

SEQ ID NO: 323682 - RNA, 17 nt, Human
gagagcugcugcuuccg

SEQ ID NO: 323683 - RNA, 22 nt, Human
cauaauaucuccgauuacuugc

SEQ ID NO: 323684 - RNA, 22 nt, Human
uguaugaaagaacaagggcuua

SEQ ID NO: 323685 - RNA, 22 nt, Human
uauuuugucuucugcucaucac

SEQ ID NO: 323686 - RNA, 22 nt, Human
uucaacuagauuuauacaauuc

SEQ ID NO: 323687 - RNA, 22 nt, Human
aucugcuugaguuugaagucag

SEQ ID NO: 323688 - RNA, 22 nt, Human
acaaaguuaacaguuggauagu

SEQ ID NO: 323689 - RNA, 22 nt, Human
ggaaccaggaguuacacgaguu

SEQ ID NO: 323690 - RNA, 22 nt, Human
uacaggaggauuaucaaaggau

SEQ ID NO: 323691 - RNA, 22 nt, Human
cagaaugagauaacccagauug

SEQ ID NO: 323692 - RNA, 17 nt, Human
uagcugccccgaaugcu

SEQ ID NO: 323693 - RNA, 22 nt, Human
gcagagcccuggggguauggug

SEQ ID NO: 323694 - RNA, 22 nt, Human
gcuugggauaugcugauguaaa

SEQ ID NO: 323695 - RNA, 22 nt, Human
ucugucucaaguucuugcacuc

SEQ ID NO: 323696 - RNA, 22 nt, Human
gauccuugcaacucugugaggu

SEQ ID NO: 323697 - RNA, 19 nt, Human
ccugcagggaugagagguu

SEQ ID NO: 323698 - RNA, 22 nt, Human
cuccugggcucaagugauccuc

SEQ ID NO: 323699 - RNA, 22 nt, Human
uccagggagauacuggcugcca

SEQ ID NO: 323700 - RNA, 23 nt, Human
agucaguguaaguuuggaaugca

SEQ ID NO: 323701 - RNA, 22 nt, Human
uguccucagauaugucuacucu

SEQ ID NO: 323702 - RNA, 22 nt, Human
uuugacaaaggaaaaaugcaca

SEQ ID NO: 323703 - RNA, 22 nt, Human
ccugggugaugugcugcccucg

SEQ ID NO: 323704 - RNA, 22 nt, Human
acuuuggaucugauguaaucag

SEQ ID NO: 323705 - RNA, 22 nt, Human
ggaggugggagacauaggcggc

SEQ ID NO: 323706 - RNA, 22 nt, Human
ugauggcuaucccuggaagggc

SEQ ID NO: 323707 - RNA, 22 nt, Human
ccagguggugaaagugggcccu

SEQ ID NO: 323708 - RNA, 22 nt, Human
cuccucccucuuugccacacau

SEQ ID NO: 323709 - RNA, 22 nt, Human
uggcccugaggacccagugugg

SEQ ID NO: 323710 - RNA, 22 nt, Human
gaggccagcgcgcagcacuuuu

SEQ ID NO: 323711 - RNA, 22 nt, Human
gcugugcugauucauucccugc

SEQ ID NO: 323712 - RNA, 22 nt, Human
acagauugaucuugagaauuau

SEQ ID NO: 323713 - RNA, 22 nt, Human
gcacagggcaacaggucuguua

SEQ ID NO: 323714 - RNA, 22 nt, Human
aauaaacugcucaauugcauca

SEQ ID NO: 323715 - RNA, 23 nt, Human
agaugaaagcuucccaucacagu

SEQ ID NO: 323716 - RNA, 22 nt, Human
cucaggaucgcuugcccuaggg

SEQ ID NO: 323717 - RNA, 22 nt, Human
accugagggcccaaacuuggua

SEQ ID NO: 323718 - RNA, 22 nt, Human
uaaggccagccagcaaaucugu

SEQ ID NO: 323719 - RNA, 20 nt, Human
ggcugccuccuuccuuuccu

SEQ ID NO: 323720 - RNA, 22 nt, Human
gccuuuuuuguugcucugucac

SEQ ID NO: 323721 - RNA, 22 nt, Human
cauugcuuccuaugucccuucu

SEQ ID NO: 323722 - RNA, 22 nt, Human
ccagggugaggaggcucccacg

SEQ ID NO: 323723 - RNA, 19 nt, Human
cugaggcccauguaccaug

SEQ ID NO: 323724 - RNA, 22 nt, Human
aaggcagccucugccagccggg

SEQ ID NO: 323725 - RNA, 22 nt, Human
ggcccuguuagagcucccacaa

SEQ ID NO: 323726 - RNA, 22 nt, Human
cagccaggagccucugcaacua

SEQ ID NO: 323727 - RNA, 22 nt, Human
ucuuuacaguccucugucaauc

SEQ ID NO: 323728 - RNA, 22 nt, Human
aaaguuagacagcaucauuucu

SEQ ID NO: 323729 - RNA, 23 nt, Human
aggcccugccugucccucuuuuu

SEQ ID NO: 323730 - RNA, 21 nt, Human
agcuuccugcagugggagguc

SEQ ID NO: 323731 - RNA, 22 nt, Human
gccuggaguuguggugaagcca

SEQ ID NO: 323732 - RNA, 22 nt, Human
gcaggagagucugugccagguu

SEQ ID NO: 323733 - RNA, 22 nt, Human
acaguaccugcucucaagcaaa

SEQ ID NO: 323734 - RNA, 22 nt, Human
uuugaaaucuaaucaaggaaca

SEQ ID NO: 323735 - RNA, 22 nt, Human
agucccagugacuuggccagaa

SEQ ID NO: 323736 - RNA, 22 nt, Human
uggagccaaggccaguucucag

SEQ ID NO: 323737 - RNA, 21 nt, Human
ggucagggggugccuccaggu

SEQ ID NO: 323738 - RNA, 22 nt, Human
ugguccugagcaccagccugac

SEQ ID NO: 323739 - RNA, 22 nt, Human
gcagagccugugucugagcaaa

SEQ ID NO: 323740 - RNA, 22 nt, Human
cucaggguaaugaaagacgaau

SEQ ID NO: 323741 - RNA, 23 nt, Human
uccagcagccaagaaggguagaa

SEQ ID NO: 323742 - RNA, 22 nt, Human
aagcagcauaauugcuauuuua

SEQ ID NO: 323743 - RNA, 22 nt, Human
gggcacuguacacugugcaugg

SEQ ID NO: 323744 - RNA, 22 nt, Human
ccagagccugcugagccccauu

SEQ ID NO: 323745 - RNA, 22 nt, Human
acagccagguaaaggcauggca

SEQ ID NO: 323746 - RNA, 22 nt, Human
cagagcugggcauggugaaagg

SEQ ID NO: 323747 - RNA, 22 nt, Human
uaaaauguguuucuguaugguu

SEQ ID NO: 323748 - RNA, 22 nt, Human
aaggagacauuugcagagcacc

SEQ ID NO: 323749 - RNA, 22 nt, Human
gaaaguuucuucauuaagaugu

SEQ ID NO: 323750 - RNA, 22 nt, Human
uuggcaguaaaagaaaaugcuu

SEQ ID NO: 323751 - RNA, 22 nt, Human
agggcagcagcggcccaggccu

SEQ ID NO: 323752 - RNA, 18 nt, Human
ucugcugcugcguccugc

SEQ ID NO: 323753 - RNA, 22 nt, Human
cuggccugaggccgccuucaga

SEQ ID NO: 323754 - RNA, 22 nt, Human
cugggcagugguggcaucuuug

SEQ ID NO: 323755 - RNA, 22 nt, Human
ggagccugcgggagcucccauu

SEQ ID NO: 323756 - RNA, 22 nt, Human
ccuggagcacagcccaguccca

SEQ ID NO: 323757 - RNA, 22 nt, Human
auuuagaaguuggagggcaaga

SEQ ID NO: 323758 - RNA, 19 nt, Human
ggaggccuggguauuugcc

SEQ ID NO: 323759 - RNA, 23 nt, Human
uccuuccuuugagaggcuccauc

SEQ ID NO: 323760 - RNA, 22 nt, Human
ugguggccaauucacagggcuc

SEQ ID NO: 323761 - RNA, 22 nt, Human
acugucugcccugagaugccag

SEQ ID NO: 323762 - RNA, 22 nt, Human
uuuccucugucaugacagcuga

SEQ ID NO: 323763 - RNA, 22 nt, Human
ccaagggcucugacuugccugc

SEQ ID NO: 323764 - RNA, 22 nt, Human
gugcauuuggugacucucaccc

SEQ ID NO: 323765 - RNA, 22 nt, Human
agcugcucccuauccuuuccuu

SEQ ID NO: 323766 - RNA, 22 nt, Human
ucaguguuuguggcaaauguua

SEQ ID NO: 323767 - RNA, 22 nt, Human
cagggugacugcccuggccacu

SEQ ID NO: 323768 - RNA, 22 nt, Human
caagagcucaccggagagcauu

SEQ ID NO: 323769 - RNA, 22 nt, Human
gucuugaucuccugaccuugug

SEQ ID NO: 323770 - RNA, 23 nt, Human
aaacuacauuuauaguuuuucuc

SEQ ID NO: 323771 - RNA, 22 nt, Human
cagggugcagugucgcugcuag

SEQ ID NO: 323772 - RNA, 22 nt, Human
auuuuccucaagccucuggaag

SEQ ID NO: 323773 - RNA, 22 nt, Human
ggcucaggcuggagugcagugg

SEQ ID NO: 323774 - RNA, 22 nt, Human
guccucugaaguugugcaaugc

SEQ ID NO: 323775 - RNA, 22 nt, Human
caugcacaacauacucaagagg

SEQ ID NO: 323776 - RNA, 22 nt, Human
uggcagagagagugcagucgac

SEQ ID NO: 323777 - RNA, 22 nt, Human
ugccuggaugugcuggccucac

SEQ ID NO: 323778 - RNA, 22 nt, Human
caaagugcuggaauuacaggug

SEQ ID NO: 323779 - RNA, 22 nt, Human
agccuggacagcuacggagaac

SEQ ID NO: 323780 - RNA, 22 nt, Human
ucaugaacauggaauaucuuuu

SEQ ID NO: 323781 - RNA, 21 nt, Human
cuugaaagguagagucuacag

SEQ ID NO: 323782 - RNA, 21 nt, Human
uaagaacauuaucuucuuccu

SEQ ID NO: 323783 - RNA, 22 nt, Human
agggccagaggcaccuugcagc

SEQ ID NO: 323784 - RNA, 22 nt, Human
aaucaagaguuguguaauauuu

SEQ ID NO: 323785 - RNA, 22 nt, Human
aaaaguuaccucuguaauauaa

SEQ ID NO: 323786 - RNA, 22 nt, Human
gcugcucuggcucugcaguguc

SEQ ID NO: 323787 - RNA, 22 nt, Human
caaaucuccuuaaagguaaaau

SEQ ID NO: 323788 - RNA, 22 nt, Human
uaucuugagagacaacacagca

SEQ ID NO: 323789 - RNA, 22 nt, Human
uggcagggaguugcaggauuuc

SEQ ID NO: 323790 - RNA, 22 nt, Human
uacccaggagaaacagcagggc

SEQ ID NO: 323791 - RNA, 22 nt, Human
ccugcacuaccuggggcugcug

SEQ ID NO: 323792 - RNA, 22 nt, Human
uuuuuccaccguacuuccugag

SEQ ID NO: 323793 - RNA, 22 nt, Human
cacagggcuucucauggggugc

SEQ ID NO: 323794 - RNA, 22 nt, Human
aaagccuugggauuugugauca

SEQ ID NO: 323795 - RNA, 22 nt, Human
gccacagugggcuggggccaga

SEQ ID NO: 323796 - RNA, 22 nt, Human
gggaguaaacuauggugaggau

SEQ ID NO: 323797 - RNA, 23 nt, Human
cagaugagguuggcagcaugguc

SEQ ID NO: 323798 - RNA, 22 nt, Human
guauuuucaagagcaguaguau

SEQ ID NO: 323799 - RNA, 22 nt, Human
uuugacaggacuaacauauggc

SEQ ID NO: 323800 - RNA, 22 nt, Human
cagcuggccugaucccuguggc

SEQ ID NO: 323801 - RNA, 22 nt, Human
gaaguucaggugggaauugagc

SEQ ID NO: 323802 - RNA, 22 nt, Human
uaaaugcaaugugcuuuaccag

SEQ ID NO: 323803 - RNA, 22 nt, Human
gaggagagaacauuccuccaua

SEQ ID NO: 323804 - RNA, 22 nt, Human
gcaguguucuaaauugggugug

SEQ ID NO: 323805 - RNA, 22 nt, Human
ccauaaggagccagacauucca

SEQ ID NO: 323806 - RNA, 22 nt, Human
acaggcugcccgcuccccaccu

SEQ ID NO: 323807 - RNA, 22 nt, Human
ggcucaggaccugggauugcca

SEQ ID NO: 323808 - RNA, 22 nt, Human
ugagaaccaugaaaagcuguca

SEQ ID NO: 323809 - RNA, 20 nt, Human
ccagcugagccaaggggaga

SEQ ID NO: 323810 - RNA, 22 nt, Human
auuguauuuccagcuugaaugu

SEQ ID NO: 323811 - RNA, 22 nt, Human
uauuccagguuucuuguuguau

SEQ ID NO: 323812 - RNA, 22 nt, Human
gcuggcaucacuggcuucggug

SEQ ID NO: 323813 - RNA, 22 nt, Human
cuuuauguccaccagacugcaa

SEQ ID NO: 323814 - RNA, 22 nt, Human
aucauaaagugcuaucugauug

SEQ ID NO: 323815 - RNA, 22 nt, Human
uauguacaucguugaauucaaa

SEQ ID NO: 323816 - RNA, 22 nt, Human
aacagcauaaguauuuauuuca

SEQ ID NO: 323817 - RNA, 22 nt, Human
gcaucuuucuguccauucagca

SEQ ID NO: 323818 - RNA, 20 nt, Human
ccagacagcaccugccuggu

SEQ ID NO: 323819 - RNA, 22 nt, Human
acacugaaugcuguuuagaaau

SEQ ID NO: 323820 - RNA, 22 nt, Human
acagaugaaaaagcuuguggau

SEQ ID NO: 323821 - RNA, 22 nt, Human
ucuuugcaugugcuucuuggcc

SEQ ID NO: 323822 - RNA, 22 nt, Human
uccucagcaaacacuucacucu

SEQ ID NO: 323823 - RNA, 22 nt, Human
acuguucaaguuuuaugcugga

SEQ ID NO: 323824 - RNA, 22 nt, Human
gcaggaugguggaaggccugcu

SEQ ID NO: 323825 - RNA, 22 nt, Human
cccagggagguagcaggagaaa

SEQ ID NO: 323826 - RNA, 22 nt, Human
caguccuguuccuggaguaguu

SEQ ID NO: 323827 - RNA, 22 nt, Human
guggagacgggacagaagcuaa

SEQ ID NO: 323828 - RNA, 22 nt, Human
gagguuggugaggggacacggu

SEQ ID NO: 323829 - RNA, 18 nt, Human
cguuuuuccgggauugca

SEQ ID NO: 323830 - RNA, 22 nt, Human
aggcucugcagaccccagcugu

SEQ ID NO: 323831 - RNA, 22 nt, Human
guagcuuauuagggauaauagu

SEQ ID NO: 323832 - RNA, 22 nt, Human
ugacaugcuuguuuuccuugaa

SEQ ID NO: 323833 - RNA, 22 nt, Human
acagacagauuuugucugaugu

SEQ ID NO: 323834 - RNA, 21 nt, Human
gccacugcacuccagccuggg

SEQ ID NO: 323835 - RNA, 22 nt, Human
cucugagaggugagaagcagca

SEQ ID NO: 323836 - RNA, 22 nt, Human
aggagcugaaacuucucauaug

SEQ ID NO: 323837 - RNA, 21 nt, Human
guuugcaugaacaagucagcc

SEQ ID NO: 323838 - RNA, 22 nt, Human
aggcugggcaccguuuugaucc

SEQ ID NO: 323839 - RNA, 22 nt, Human
ggcuggcuggcuuagcagagga

SEQ ID NO: 323840 - RNA, 22 nt, Human
auggggagcucaccaccuguuu

SEQ ID NO: 323841 - RNA, 22 nt, Human
gcaguugcaggauuuguguugu

SEQ ID NO: 323842 - RNA, 20 nt, Human
cuguuugcuaucaugagcug

SEQ ID NO: 323843 - RNA, 22 nt, Human
caugccugccuggugggcgugg

SEQ ID NO: 323844 - RNA, 22 nt, Human
uuauggcauucauuggggcuuu

SEQ ID NO: 323845 - RNA, 22 nt, Human
uggagcagccuuuucuaagcaa

SEQ ID NO: 323846 - RNA, 22 nt, Human
ucccaguggcuucauaaggcag

SEQ ID NO: 323847 - RNA, 22 nt, Human
guucucugccggcaccuacccg

SEQ ID NO: 323848 - RNA, 22 nt, Human
ugccuguggaaaggcuggugcu

SEQ ID NO: 323849 - RNA, 22 nt, Human
cagcuggaggagcagcuuccag

SEQ ID NO: 323850 - RNA, 22 nt, Human
uccacagggaugccugcggcuu

SEQ ID NO: 323851 - RNA, 22 nt, Human
acugauuucagggaugagaaga

SEQ ID NO: 323852 - RNA, 22 nt, Human
gucuagggcuccucagugacaa

SEQ ID NO: 323853 - RNA, 22 nt, Human
ugcuccaggcugcugaagaucu

SEQ ID NO: 323854 - RNA, 22 nt, Human
uggaaggggccaggcgcggagu

SEQ ID NO: 323855 - RNA, 22 nt, Human
ccauggccugaaggagugcauc

SEQ ID NO: 323856 - RNA, 21 nt, Human
uguguucuucuaggucagcua

SEQ ID NO: 323857 - RNA, 22 nt, Human
agaagagccacuguugacggca

SEQ ID NO: 323858 - RNA, 22 nt, Human
cugcauaucaaauuacuccugg

SEQ ID NO: 323859 - RNA, 22 nt, Human
cagacucuugagcugauuguau

SEQ ID NO: 323860 - RNA, 22 nt, Human
ugcaucuaaguggcuaacaacc

SEQ ID NO: 323861 - RNA, 22 nt, Human
uuuguagauuuucucuccagua

SEQ ID NO: 323862 - RNA, 22 nt, Human
cugguuaauccauaaacagaga

SEQ ID NO: 323863 - RNA, 22 nt, Human
uccguuuucacacugcuauaaa

SEQ ID NO: 323864 - RNA, 22 nt, Human
aagagcuggcucuugcagcagc

SEQ ID NO: 323865 - RNA, 23 nt, Human
gguuggcuguacccaggcucccu

SEQ ID NO: 323866 - RNA, 22 nt, Human
uuucauguuggauacuguuuca

SEQ ID NO: 323867 - RNA, 22 nt, Human
cuuccagcugauuggcauccag

SEQ ID NO: 323868 - RNA, 22 nt, Human
ugggaagaguuagagacagcug

SEQ ID NO: 323869 - RNA, 22 nt, Human
gggcuccagaggcucacccugg

SEQ ID NO: 323870 - RNA, 22 nt, Human
ugguccucacccuacccagcug

SEQ ID NO: 323871 - RNA, 22 nt, Human
aguuggcuucaaaggcagagag

SEQ ID NO: 323872 - RNA, 22 nt, Human
ucagcacaggucuugcaaaaca

SEQ ID NO: 323873 - RNA, 18 nt, Human
ucuuccaacacugacacc

SEQ ID NO: 323874 - RNA, 22 nt, Human
auguacaaucuaucacaagaag

SEQ ID NO: 323875 - RNA, 21 nt, Human
agccugcaauguagguaccgg

SEQ ID NO: 323876 - RNA, 22 nt, Human
uccgguccggguacuccucucu

SEQ ID NO: 323877 - RNA, 22 nt, Human
ugcgccugcgcaaagguuucug

SEQ ID NO: 323878 - RNA, 22 nt, Human
cagcgguggcaaggugacugug

SEQ ID NO: 323879 - RNA, 22 nt, Human
ugcauuaagaauuucugaggau

SEQ ID NO: 323880 - RNA, 22 nt, Human
aacaucuagguucucaucgaua

SEQ ID NO: 323881 - RNA, 22 nt, Human
agcuccugaaaagcgcuugcuu

SEQ ID NO: 323882 - RNA, 22 nt, Human
ugcuuucaaugaauuguauacu

SEQ ID NO: 323883 - RNA, 22 nt, Human
cucuaaauguggucugcagaua

SEQ ID NO: 323884 - RNA, 17 nt, Human
ccuuucuucccagaggg

SEQ ID NO: 323885 - RNA, 21 nt, Human
uaccaagaaguuugggaaagc

SEQ ID NO: 323886 - RNA, 22 nt, Human
uggugaagucagcggagcccgg

SEQ ID NO: 323887 - RNA, 22 nt, Human
gcucccuggaauguuggcugcc

SEQ ID NO: 323888 - RNA, 22 nt, Human
ucaggccaggagaucagauuga

SEQ ID NO: 323889 - RNA, 22 nt, Human
gugcuaaugaauuggagugccu

SEQ ID NO: 323890 - RNA, 22 nt, Human
uuuuucaagacaaccugcaugu

SEQ ID NO: 323891 - RNA, 22 nt, Human
aagcccucagagccucuuugac

SEQ ID NO: 323892 - RNA, 22 nt, Human
agcgcuugccgcacuccaagca

SEQ ID NO: 323893 - RNA, 22 nt, Human
gggcucaucaagccucuccgcc

SEQ ID NO: 323894 - RNA, 22 nt, Human
agcacauucccaccuguacuuc

SEQ ID NO: 323895 - RNA, 22 nt, Human
aguuggaagacacccugaaauc

SEQ ID NO: 323896 - RNA, 22 nt, Human
cugggguuggccagggcccuag

SEQ ID NO: 323897 - RNA, 22 nt, Human
cacaauuuccauugagcagcag

SEQ ID NO: 323898 - RNA, 22 nt, Human
caucagucugaaagccagggag

SEQ ID NO: 323899 - RNA, 22 nt, Human
ugucuggauagagccuaggccc

SEQ ID NO: 323900 - RNA, 23 nt, Human
cagcugguugugggaguggcugc

SEQ ID NO: 323901 - RNA, 23 nt, Human
gacagagugagaccuugucuuac

SEQ ID NO: 323902 - RNA, 22 nt, Human
cagagcugacccaaggauugaa

SEQ ID NO: 323903 - RNA, 22 nt, Human
uggaaauacaagaaguauguca

SEQ ID NO: 323904 - RNA, 23 nt, Human
caaaaugcuaugugcccaaugca

SEQ ID NO: 323905 - RNA, 22 nt, Human
guuaacaacacugugagugcug

SEQ ID NO: 323906 - RNA, 22 nt, Human
cccuggaacccauggccagugu

SEQ ID NO: 323907 - RNA, 22 nt, Human
auuagguaguauaaucuuuguu

SEQ ID NO: 323908 - RNA, 22 nt, Human
aaugcaaugcagcaccuccuug

SEQ ID NO: 323909 - RNA, 20 nt, Human
cuugaguucagagcugucau

SEQ ID NO: 323910 - RNA, 22 nt, Human
aauacagauggcaugugaagau

SEQ ID NO: 323911 - RNA, 22 nt, Human
aacacugagaggggaguggcac

SEQ ID NO: 323912 - RNA, 22 nt, Human
uucuguuuauaauuugcaguug

SEQ ID NO: 323913 - RNA, 22 nt, Human
agcacugugagcaccagcacgc

SEQ ID NO: 323914 - RNA, 19 nt, Human
ucuggcugccaaggauuga

SEQ ID NO: 323915 - RNA, 22 nt, Human
gucccucugccugugguucucu

SEQ ID NO: 323916 - RNA, 22 nt, Human
aauguuugaacuuugcauauuu

SEQ ID NO: 323917 - RNA, 22 nt, Human
acaccacaaguaacucuuuucc

SEQ ID NO: 323918 - RNA, 22 nt, Human
gcuaagggauaggcugccuccu

SEQ ID NO: 323919 - RNA, 22 nt, Human
cagugacguaaacugcaugugc

SEQ ID NO: 323920 - RNA, 22 nt, Human
cauuguguauuucuguaguacu

SEQ ID NO: 323921 - RNA, 22 nt, Human
caaagcccagaggccucacuuu

SEQ ID NO: 323922 - RNA, 22 nt, Human
uuuccaaagguggcaggaacaa

SEQ ID NO: 323923 - RNA, 22 nt, Human
cuggcuuucauggcgcaguuga

SEQ ID NO: 323924 - RNA, 22 nt, Human
aucucccaaauuagccucuuga

SEQ ID NO: 323925 - RNA, 22 nt, Human
agugcuuuauguuguugugcaa

SEQ ID NO: 323926 - RNA, 22 nt, Human
ccugcgggcugugcugaagccu

SEQ ID NO: 323927 - RNA, 22 nt, Human
uuccagcuaacucacaucccuu

SEQ ID NO: 323928 - RNA, 22 nt, Human
ucucuuugacccuuuagcucca

SEQ ID NO: 323929 - RNA, 22 nt, Human
uuccaggacuggguguuugaag

SEQ ID NO: 323930 - RNA, 22 nt, Human
caauguuuuuccuuccuuaaua

SEQ ID NO: 323931 - RNA, 22 nt, Human
guggcauuugggagaugcgugg

SEQ ID NO: 323932 - RNA, 22 nt, Human
uguguuucugagaaucccaccu

SEQ ID NO: 323933 - RNA, 22 nt, Human
uugagcugccuggcuguggcuc

SEQ ID NO: 323934 - RNA, 22 nt, Human
gcguggcuuagagugggguacc

SEQ ID NO: 323935 - RNA, 22 nt, Human
uuaguguccagaguuuuuauua

SEQ ID NO: 323936 - RNA, 22 nt, Human
guuggcuaugagagcuuuagug

SEQ ID NO: 323937 - RNA, 22 nt, Human
gacuuugccacuugcuccagcu

SEQ ID NO: 323938 - RNA, 22 nt, Human
guguuuugugaggccuucuuuc

SEQ ID NO: 323939 - RNA, 22 nt, Human
agagcaauuagcuuagguaaaa

SEQ ID NO: 323940 - RNA, 18 nt, Human
uccaccgcgugcaccucu

SEQ ID NO: 323941 - RNA, 22 nt, Human
cagguuccaguugcagggacuu

SEQ ID NO: 323942 - RNA, 21 nt, Human
uccaaaggagacugagugugu

SEQ ID NO: 323943 - RNA, 20 nt, Human
uucaugcagugguugcugug

SEQ ID NO: 323944 - RNA, 22 nt, Human
augcuugcccauguuucugaag

SEQ ID NO: 323945 - RNA, 22 nt, Human
acccaggucucucgacuucugg

SEQ ID NO: 323946 - RNA, 21 nt, Human
uggcaggcagcuggaagcuug

SEQ ID NO: 323947 - RNA, 22 nt, Human
uuccagagaguuauuccccugg

SEQ ID NO: 323948 - RNA, 22 nt, Human
ugcacauggccugagugccuga

SEQ ID NO: 323949 - RNA, 22 nt, Human
uuuccacacucacugcacucau

SEQ ID NO: 323950 - RNA, 22 nt, Human
ccgcuguccuggagcugcugcu

SEQ ID NO: 323951 - RNA, 22 nt, Human
uguuuuaagggucaacugucac

SEQ ID NO: 323952 - RNA, 21 nt, Human
ugcaaugcauugacagcagca

SEQ ID NO: 323953 - RNA, 22 nt, Human
uuauuuaaaauguagguuggga

SEQ ID NO: 323954 - RNA, 22 nt, Human
cagcugcucugguggucucucc

SEQ ID NO: 323955 - RNA, 22 nt, Human
cuuucugaggagacgggcuuug

SEQ ID NO: 323956 - RNA, 23 nt, Human
uugguuacuggauuugaggggcc

SEQ ID NO: 323957 - RNA, 22 nt, Human
uuucaaguagagggaucgcuag

SEQ ID NO: 323958 - RNA, 22 nt, Human
aaugaaacuauauuuagagagg

SEQ ID NO: 323959 - RNA, 22 nt, Human
aauucauacucuauauugcuuu

SEQ ID NO: 323960 - RNA, 22 nt, Human
cccacugcaugaguugguauua

SEQ ID NO: 323961 - RNA, 22 nt, Human
aggcuuaacuacaauuuuugcc

SEQ ID NO: 323962 - RNA, 22 nt, Human
ggagaggggaacuuguugcuug

SEQ ID NO: 323963 - RNA, 23 nt, Human
uggcucugagcuuccugguggcc

SEQ ID NO: 323964 - RNA, 17 nt, Human
gcuccagaauucuaguc

SEQ ID NO: 323965 - RNA, 22 nt, Human
uuccagaacaauguggacguau

SEQ ID NO: 323966 - RNA, 22 nt, Human
ugagucaccucucagaagccac

SEQ ID NO: 323967 - RNA, 22 nt, Human
uggcggugacggcggcgccugg

SEQ ID NO: 323968 - RNA, 22 nt, Human
uacauguacaugcauagguaga

SEQ ID NO: 323969 - RNA, 22 nt, Human
agggccagcagcuuggccaacc

SEQ ID NO: 323970 - RNA, 22 nt, Human
ggucuggccuccgggcaggugg

SEQ ID NO: 323971 - RNA, 21 nt, Human
ucccacuggcccagggcucca

SEQ ID NO: 323972 - RNA, 22 nt, Human
gaaaugucaagauauguuugga

SEQ ID NO: 323973 - RNA, 22 nt, Human
uggauaaaaugacauuaccuga

SEQ ID NO: 323974 - RNA, 23 nt, Human
acaaguguuuccaauauggcugg

SEQ ID NO: 323975 - RNA, 22 nt, Human
accccagaggcggaggcugcag

SEQ ID NO: 323976 - RNA, 22 nt, Human
gugcuggcuggggcaucaggca

SEQ ID NO: 323977 - RNA, 22 nt, Human
agggaaauuaaugugagcaaug

SEQ ID NO: 323978 - RNA, 22 nt, Human
ucaggagaguguucaguggagg

SEQ ID NO: 323979 - RNA, 21 nt, Human
uccugccuuaguccagagcag

SEQ ID NO: 323980 - RNA, 22 nt, Human
cuguccagcgacuaggggaugg

SEQ ID NO: 323981 - RNA, 22 nt, Human
uuuccucacacagaagaucuug

SEQ ID NO: 323982 - RNA, 22 nt, Human
ucuggcuucaguaggguucacu

SEQ ID NO: 323983 - RNA, 22 nt, Human
aauuauugagcaucuacugugu

SEQ ID NO: 323984 - RNA, 22 nt, Human
auuucagcagcccauguuugga

SEQ ID NO: 323985 - RNA, 22 nt, Human
guagcccaccuggggagggcga

SEQ ID NO: 323986 - RNA, 21 nt, Human
uccaggagcacgggacuagga

SEQ ID NO: 323987 - RNA, 19 nt, Human
cgcacagccugccaggcgc

SEQ ID NO: 323988 - RNA, 22 nt, Human
gagcugcagcggcugacgcaac

SEQ ID NO: 323989 - RNA, 22 nt, Human
agcaccaggucgcuggcacgcu

SEQ ID NO: 323990 - RNA, 22 nt, Human
uacaaagugauuuuggaauuga

SEQ ID NO: 323991 - RNA, 22 nt, Human
ucacccuucccagcuguccgcc

SEQ ID NO: 323992 - RNA, 22 nt, Human
ccagcugcgggcaucgagaguu

SEQ ID NO: 323993 - RNA, 22 nt, Human
cccaugcacccucuaagaagga

SEQ ID NO: 323994 - RNA, 22 nt, Human
gcuugcuuuguaaauaucugug

SEQ ID NO: 323995 - RNA, 22 nt, Human
auacaacagaaaaugauuauuc

SEQ ID NO: 323996 - RNA, 22 nt, Human
uugaagcauuugcuauagcauu

SEQ ID NO: 323997 - RNA, 22 nt, Human
gauugcugggucccacucccag

SEQ ID NO: 323998 - RNA, 22 nt, Human
gcccaguggcaucuucacugcu

SEQ ID NO: 323999 - RNA, 22 nt, Human
ugucaaguuguuaaguucuggg

SEQ ID NO: 324000 - RNA, 22 nt, Human
ccuuggcuuaccuucugugugg

SEQ ID NO: 324001 - RNA, 22 nt, Human
aucaacuuguccuugauguuaa

SEQ ID NO: 324002 - RNA, 22 nt, Human
cugguuuuccaauguuuugacu

SEQ ID NO: 324003 - RNA, 22 nt, Human
cauuuagaagucuuagaacuau

SEQ ID NO: 324004 - RNA, 22 nt, Human
ggaaggguuuaagcaggagagu

SEQ ID NO: 324005 - RNA, 21 nt, Human
uaaaagaugacaagacagcuc

SEQ ID NO: 324006 - RNA, 22 nt, Human
ugccuggauggcucugagcagg

SEQ ID NO: 324007 - RNA, 20 nt, Human
agcuuugguuaagccagugg

SEQ ID NO: 324008 - RNA, 22 nt, Human
uacugcugagcuggguagaagg

SEQ ID NO: 324009 - RNA, 22 nt, Human
ugcaaaaagagcgaggagcccu

SEQ ID NO: 324010 - RNA, 18 nt, Human
agguguguuucuaggagc

SEQ ID NO: 324011 - RNA, 20 nt, Human
agcuggcccccgguggccug

SEQ ID NO: 324012 - RNA, 22 nt, Human
gaaggcaagcagcauaaauguc

SEQ ID NO: 324013 - RNA, 21 nt, Human
agcugugguuuuacaucuuuu

SEQ ID NO: 324014 - RNA, 22 nt, Human
auuguauacaagcuuaauuguu

SEQ ID NO: 324015 - RNA, 22 nt, Human
cauuuacauuuaagguuaauau

SEQ ID NO: 324016 - RNA, 22 nt, Human
uuccuguucaggaaaguugugu

SEQ ID NO: 324017 - RNA, 22 nt, Human
ugugugggcgaagacagccuuu

SEQ ID NO: 324018 - RNA, 22 nt, Human
cgcgcugcagacagcggaggcc

SEQ ID NO: 324019 - RNA, 20 nt, Human
acagagauccucucuuuauc

SEQ ID NO: 324020 - RNA, 22 nt, Human
gaaacauuuguugaguacuugc

SEQ ID NO: 324021 - RNA, 22 nt, Human
aaagaugucauacacauuaaga

SEQ ID NO: 324022 - RNA, 22 nt, Human
gaccacaguccagucaucaugg

SEQ ID NO: 324023 - RNA, 22 nt, Human
agagacauagcacaguuuuucg

SEQ ID NO: 324024 - RNA, 22 nt, Human
uacauuccaaaggaaacuggcu

SEQ ID NO: 324025 - RNA, 22 nt, Human
uuacuguagcuugacauauguc

SEQ ID NO: 324026 - RNA, 22 nt, Human
cuccguggcuguggacgcagcc

SEQ ID NO: 324027 - RNA, 22 nt, Human
ggagcugugcugggugaucagg

SEQ ID NO: 324028 - RNA, 22 nt, Human
guccuguguaaguacuugcuca

SEQ ID NO: 324029 - RNA, 22 nt, Human
agcucaguggcuggggcgcugc

SEQ ID NO: 324030 - RNA, 22 nt, Human
uucuuuuaauagagauccugug

SEQ ID NO: 324031 - RNA, 22 nt, Human
cauggccaaagaauuauauuuu

SEQ ID NO: 324032 - RNA, 22 nt, Human
guagcagagggcccagguaacu

SEQ ID NO: 324033 - RNA, 22 nt, Human
cccagagcaugugcugccuuug

SEQ ID NO: 324034 - RNA, 21 nt, Human
gcugcucgagauccagugcuu

SEQ ID NO: 324035 - RNA, 17 nt, Human
uccuggccuggugugug

SEQ ID NO: 324036 - RNA, 22 nt, Human
uaaucuuagacauguauuuuuc

SEQ ID NO: 324037 - RNA, 22 nt, Human
gcccuguuuucuggguuccuug

SEQ ID NO: 324038 - RNA, 22 nt, Human
gaagguuuuguuugcaaaucau

SEQ ID NO: 324039 - RNA, 21 nt, Human
uuccuggaggcagaaacguga

SEQ ID NO: 324040 - RNA, 22 nt, Human
acugcauuaucaccaagaugua

SEQ ID NO: 324041 - RNA, 22 nt, Human
gcaggcuuauggggagacagag

SEQ ID NO: 324042 - RNA, 22 nt, Human
ugggcugcuuccucagcugaga

SEQ ID NO: 324043 - RNA, 22 nt, Human
uccuggcccuguggccugcagu

SEQ ID NO: 324044 - RNA, 17 nt, Human
caguuucuucccccucu

SEQ ID NO: 324045 - RNA, 22 nt, Human
ugggggagccuucacaguagcu

SEQ ID NO: 324046 - RNA, 22 nt, Human
ggagacucaccccgcauucuag

SEQ ID NO: 324047 - RNA, 22 nt, Human
uuuagcaaaaaagcucugcgua

SEQ ID NO: 324048 - RNA, 22 nt, Human
uccagcucugcugugcgccggu

SEQ ID NO: 324049 - RNA, 22 nt, Human
uggcugaggagagggcggaagu

SEQ ID NO: 324050 - RNA, 22 nt, Human
cugagcugguucucuugugaaa

SEQ ID NO: 324051 - RNA, 22 nt, Human
uggcuccuuccgcagcaugccu

SEQ ID NO: 324052 - RNA, 19 nt, Human
gggaaugauggaagacuuc

SEQ ID NO: 324053 - RNA, 22 nt, Human
uguccagaucaaugcccacaug

SEQ ID NO: 324054 - RNA, 22 nt, Human
uccagcaguccaugugagacac

SEQ ID NO: 324055 - RNA, 23 nt, Human
gccagagcugccugcccuugcug

SEQ ID NO: 324056 - RNA, 22 nt, Human
uagaaaagccccagcuggaggg

SEQ ID NO: 324057 - RNA, 22 nt, Human
gucaggggccaugggccaagga

SEQ ID NO: 324058 - RNA, 22 nt, Human
gcuuccuucuaccacaucaugc

SEQ ID NO: 324059 - RNA, 22 nt, Human
cgcaggugccggcagauggggu

SEQ ID NO: 324060 - RNA, 22 nt, Human
caguauuucauucagaauuguu

SEQ ID NO: 324061 - RNA, 22 nt, Human
gucccuggucuaccguggcuuc

SEQ ID NO: 324062 - RNA, 22 nt, Human
ggagguggagcuggaaguucca

SEQ ID NO: 324063 - RNA, 17 nt, Human
aguuuuuggaccugugu

SEQ ID NO: 324064 - RNA, 22 nt, Human
uguaagcuucaaauaucuguga

SEQ ID NO: 324065 - RNA, 22 nt, Human
gcuuccaaugcuucuaucacau

SEQ ID NO: 324066 - RNA, 22 nt, Human
aaguuugucucauuugaucuuc

SEQ ID NO: 324067 - RNA, 22 nt, Human
gguggcagaggugcaucagccc

SEQ ID NO: 324068 - RNA, 17 nt, Human
aguuggcagccguugcu

SEQ ID NO: 324069 - RNA, 22 nt, Human
acagcuucgaggaucucauccc

SEQ ID NO: 324070 - RNA, 22 nt, Human
gcagcagaaggccaaggggagc

SEQ ID NO: 324071 - RNA, 23 nt, Human
gacagguaaggguugggagaauc

SEQ ID NO: 324072 - RNA, 22 nt, Human
gcacaaaagguacuucauguag

SEQ ID NO: 324073 - RNA, 22 nt, Human
aaugguaauauuucauaguugu

SEQ ID NO: 324074 - RNA, 22 nt, Human
uuuucaguugugcucucuaguu

SEQ ID NO: 324075 - RNA, 22 nt, Human
aauuauguuugcuuuagaugga

SEQ ID NO: 324076 - RNA, 22 nt, Human
ucaccccuugugaaugcugcuc

SEQ ID NO: 324077 - RNA, 22 nt, Human
cauggcaggugcagauucugug

SEQ ID NO: 324078 - RNA, 22 nt, Human
uuagaaaaaggcuguggucuua

SEQ ID NO: 324079 - RNA, 21 nt, Human
gacauugagcgugucgcagug

SEQ ID NO: 324080 - RNA, 20 nt, Human
ucagugggaaagugagagug

SEQ ID NO: 324081 - RNA, 22 nt, Human
agagcuauuucuuaaaagcugu

SEQ ID NO: 324082 - RNA, 22 nt, Human
ugucacagagcgugcaacagaa

SEQ ID NO: 324083 - RNA, 22 nt, Human
uggaagggguuacgcagcagga

SEQ ID NO: 324084 - RNA, 22 nt, Human
ucuauuaaugauucaauagugu

SEQ ID NO: 324085 - RNA, 22 nt, Human
ugcagguggcagcggggcacca

SEQ ID NO: 324086 - RNA, 22 nt, Human
gugccaccagaugcuguugcua

SEQ ID NO: 324087 - RNA, 22 nt, Human
ugcucuguucaguguaucuugu

SEQ ID NO: 324088 - RNA, 22 nt, Human
gucauuuuugacuuugaaguga

SEQ ID NO: 324089 - RNA, 20 nt, Human
gggcucugcauccaucagcc

SEQ ID NO: 324090 - RNA, 22 nt, Human
aucccaggcggcacagguugca

SEQ ID NO: 324091 - RNA, 22 nt, Human
ugcaaauucuuuacucugugau

SEQ ID NO: 324092 - RNA, 22 nt, Human
guuuccaagucucucaacaccc

SEQ ID NO: 324093 - RNA, 22 nt, Human
uugauggacagggaccacuguc

SEQ ID NO: 324094 - RNA, 22 nt, Human
guucuucaggcugugcucuaga

SEQ ID NO: 324095 - RNA, 22 nt, Human
cugggguccuugccauguguca

SEQ ID NO: 324096 - RNA, 22 nt, Human
uaacaaaguauuguuuguguau

SEQ ID NO: 324097 - RNA, 22 nt, Human
cuggcagcucugagucccuucu

SEQ ID NO: 324098 - RNA, 22 nt, Human
gagggugguggcuuaaggugcu

SEQ ID NO: 324099 - RNA, 22 nt, Human
acauuguugagccucuuguuca

SEQ ID NO: 324100 - RNA, 22 nt, Human
caguggaugucucauaguguga

SEQ ID NO: 324101 - RNA, 22 nt, Human
ucugcuggaaaaccagggaauu

SEQ ID NO: 324102 - RNA, 22 nt, Human
guuuuaguggguggccacugau

SEQ ID NO: 324103 - RNA, 22 nt, Human
gcagcuuuggagguggaacucu

SEQ ID NO: 324104 - RNA, 22 nt, Human
ccaaggcuggagggcuuaugua

SEQ ID NO: 324105 - RNA, 22 nt, Human
aggcugcagaggugcugccaga

SEQ ID NO: 324106 - RNA, 22 nt, Human
cucugagguuccuuugcccucg

SEQ ID NO: 324107 - RNA, 22 nt, Human
uuguugcaagccuggaaucugg

SEQ ID NO: 324108 - RNA, 22 nt, Human
uacagcuugauguuuguguguu

SEQ ID NO: 324109 - RNA, 22 nt, Human
uggcuuuugaaaaggugaugua

SEQ ID NO: 324110 - RNA, 22 nt, Human
cagagcugucauuugccaguga

SEQ ID NO: 324111 - RNA, 20 nt, Human
auuugcuuaccuuguuucua

SEQ ID NO: 324112 - RNA, 22 nt, Human
gguggcaccuuacccugcgcag

SEQ ID NO: 324113 - RNA, 22 nt, Human
ccagcugcugcaccgugcaugg

SEQ ID NO: 324114 - RNA, 22 nt, Human
uaaagcauguuucaguaagguu

SEQ ID NO: 324115 - RNA, 21 nt, Human
aucuuaaaaggucuuaacuuu

SEQ ID NO: 324116 - RNA, 23 nt, Human
aggcagguuugggcucuucuugu

SEQ ID NO: 324117 - RNA, 22 nt, Human
ggcgcggugacucagccucgcu

SEQ ID NO: 324118 - RNA, 22 nt, Human
augcauaucuccuaucuccuca

SEQ ID NO: 324119 - RNA, 22 nt, Human
aacugcuaacugguuugauacu

SEQ ID NO: 324120 - RNA, 18 nt, Human
gcugaaauucuaaacaaa

SEQ ID NO: 324121 - RNA, 22 nt, Human
acauuuuuggguugaugucuga

SEQ ID NO: 324122 - RNA, 22 nt, Human
ggccuugguaaauuggcauuug

SEQ ID NO: 324123 - RNA, 22 nt, Human
acaguguuacuugauaguguau

SEQ ID NO: 324124 - RNA, 19 nt, Human
acaguuugggaaaugagca

SEQ ID NO: 324125 - RNA, 22 nt, Human
gugccgcuggagcuggaauuga

SEQ ID NO: 324126 - RNA, 22 nt, Human
cuuuacagauggauaauuguuu

SEQ ID NO: 324127 - RNA, 22 nt, Human
uggccagaacucagacaugugg

SEQ ID NO: 324128 - RNA, 19 nt, Human
ugguggaggccccauguuc

SEQ ID NO: 324129 - RNA, 22 nt, Human
ggggaagaaauagaacauuuug

SEQ ID NO: 324130 - RNA, 22 nt, Human
guggcagagagcaagugucuga

SEQ ID NO: 324131 - RNA, 22 nt, Human
uccaagaagcuuacaaucuaau

SEQ ID NO: 324132 - RNA, 22 nt, Human
ccacugauucugccaggucucu

SEQ ID NO: 324133 - RNA, 22 nt, Human
agccacauggaccugaugcuag

SEQ ID NO: 324134 - RNA, 22 nt, Human
caggaggaaaguuccacucaac

SEQ ID NO: 324135 - RNA, 22 nt, Human
ccugcacuaccuggggcugcug

SEQ ID NO: 324136 - RNA, 22 nt, Human
ggagacagugacuuagagacug

SEQ ID NO: 324137 - RNA, 22 nt, Human
auggcauuugaaucugucuuuu

SEQ ID NO: 324138 - RNA, 22 nt, Human
uuuggcaagcgaguacuuucug

SEQ ID NO: 324139 - RNA, 22 nt, Human
cuggcuuuuggaggagggucag

SEQ ID NO: 324140 - RNA, 22 nt, Human
gcugggagucgcgucuguggcc

SEQ ID NO: 324141 - RNA, 19 nt, Human
ggcugccuucugcucaucu

SEQ ID NO: 324142 - RNA, 22 nt, Human
caucuugucuuuuugggccuga

SEQ ID NO: 324143 - RNA, 22 nt, Human
cuaguucugccauucaguguca

SEQ ID NO: 324144 - RNA, 22 nt, Human
guucuccaggggcuguucaucu

SEQ ID NO: 324145 - RNA, 18 nt, Human
uccauccucugcucuuca

SEQ ID NO: 324146 - RNA, 22 nt, Human
auauaugaagaagucuugauua

SEQ ID NO: 324147 - RNA, 22 nt, Human
ucugcuugugucuguccagccu

SEQ ID NO: 324148 - RNA, 22 nt, Human
aagcuggccuguaccugcugag

SEQ ID NO: 324149 - RNA, 22 nt, Human
ugaugggaggugcugcaggacc

SEQ ID NO: 324150 - RNA, 22 nt, Human
cugccaucugagccaaaagugc

SEQ ID NO: 324151 - RNA, 22 nt, Human
cuggagcuggcccaggcuggcc

SEQ ID NO: 324152 - RNA, 22 nt, Human
aacuuucagaauccuaugcauu

SEQ ID NO: 324153 - RNA, 22 nt, Human
guugcagcaucacugcugagug

SEQ ID NO: 324154 - RNA, 22 nt, Human
auaguagcgagaucucagcuca

SEQ ID NO: 324155 - RNA, 22 nt, Human
ccaggugugcucugcaguggau

SEQ ID NO: 324156 - RNA, 22 nt, Human
ccuuuuaagggagacuagagau

SEQ ID NO: 324157 - RNA, 22 nt, Human
uuuucuuggaguggcuguccuu

SEQ ID NO: 324158 - RNA, 22 nt, Human
ugccaggccucaggagucucca

SEQ ID NO: 324159 - RNA, 22 nt, Human
uuguuuguaaggcucuuagaau

SEQ ID NO: 324160 - RNA, 22 nt, Human
augcugccuccucuucagccgc

SEQ ID NO: 324161 - RNA, 22 nt, Human
acaaacugggauaggauccugu

SEQ ID NO: 324162 - RNA, 22 nt, Human
gaugggcaucaaacaugacgug

SEQ ID NO: 324163 - RNA, 22 nt, Human
acugcauucuuuaucccacaac

SEQ ID NO: 324164 - RNA, 22 nt, Human
aaauugcuugagauuagucucc

SEQ ID NO: 324165 - RNA, 22 nt, Human
uuguuuaaagaacuucugacuu

SEQ ID NO: 324166 - RNA, 22 nt, Human
ggccgcggauuuucccgcuggc

SEQ ID NO: 324167 - RNA, 21 nt, Human
ucuuggggaggagggcugcac

SEQ ID NO: 324168 - RNA, 22 nt, Human
ugugacguuguucuggauuccc

SEQ ID NO: 324169 - RNA, 21 nt, Human
acucugaaaauuaauaguuau

SEQ ID NO: 324170 - RNA, 22 nt, Human
uuagccaugcccuagaagagga

SEQ ID NO: 324171 - RNA, 22 nt, Human
gagcuguguaugcaucauucug

SEQ ID NO: 324172 - RNA, 22 nt, Human
ucagaacauccugguuuaaaau

SEQ ID NO: 324173 - RNA, 22 nt, Human
cacuguugagcaauguacagug

SEQ ID NO: 324174 - RNA, 22 nt, Human
aaagcacauuacaagcucaguc

SEQ ID NO: 324175 - RNA, 21 nt, Human
auccauccaucuuggccuaac

SEQ ID NO: 324176 - RNA, 22 nt, Human
uuucugcagcagacucagugug

SEQ ID NO: 324177 - RNA, 22 nt, Human
cagcuccagcccaggcagcucc

SEQ ID NO: 324178 - RNA, 22 nt, Human
ucuucaugaaauugauugcuua

SEQ ID NO: 324179 - RNA, 22 nt, Human
gcuagaaacuguuuaaucucuu

SEQ ID NO: 324180 - RNA, 22 nt, Human
ugucuuuagccacuugccucuu

SEQ ID NO: 324181 - RNA, 22 nt, Human
ugguggcacugacaucagacac

SEQ ID NO: 324182 - RNA, 18 nt, Human
cccacggugcuguagggc

SEQ ID NO: 324183 - RNA, 22 nt, Human
ugccgcgcgcccagguuaggug

SEQ ID NO: 324184 - RNA, 22 nt, Human
ggcuucuuagaauuugacuuac

SEQ ID NO: 324185 - RNA, 22 nt, Human
ucacaauacucacucaauggcu

SEQ ID NO: 324186 - RNA, 22 nt, Human
guuuacaacaucuuguccuuca

SEQ ID NO: 324187 - RNA, 22 nt, Human
ugggcacagugaguugccuuua

SEQ ID NO: 324188 - RNA, 22 nt, Human
agucaacauuugagaugcaaug

SEQ ID NO: 324189 - RNA, 22 nt, Human
cgcugcgaggcgcccuuguugc

SEQ ID NO: 324190 - RNA, 23 nt, Human
uuguucuuggaucuuccugaagc

SEQ ID NO: 324191 - RNA, 22 nt, Human
caguauuuaggauuaggagaga

SEQ ID NO: 324192 - RNA, 22 nt, Human
uaucuguauucugacagucacu

SEQ ID NO: 324193 - RNA, 22 nt, Human
uguauuucugcuuucucuagua

SEQ ID NO: 324194 - RNA, 22 nt, Human
gucuggaggaggaagaaggcac

SEQ ID NO: 324195 - RNA, 22 nt, Human
ucuucaugucaugguauauuga

SEQ ID NO: 324196 - RNA, 22 nt, Human
aaaacauuuuacugccaucuca

SEQ ID NO: 324197 - RNA, 22 nt, Human
ucaaagcacuggggaaagccug

SEQ ID NO: 324198 - RNA, 22 nt, Human
cuugcuuuaucugguuucucau

SEQ ID NO: 324199 - RNA, 22 nt, Human
ggcagcaggguagccauuucuc

SEQ ID NO: 324200 - RNA, 22 nt, Human
gguucaguggaauguguugacc

SEQ ID NO: 324201 - RNA, 22 nt, Human
gggaagugcccucuucaggaga

SEQ ID NO: 324202 - RNA, 22 nt, Human
gccagugccugcugcucagggc

SEQ ID NO: 324203 - RNA, 22 nt, Human
ugcauuucccauuguguggcuc

SEQ ID NO: 324204 - RNA, 22 nt, Human
uuauuccauagaagucaaggaa

SEQ ID NO: 324205 - RNA, 21 nt, Human
gucuuuuuaauugcgauuucc

SEQ ID NO: 324206 - RNA, 22 nt, Human
uuaaaagaauccuguuauccuc

SEQ ID NO: 324207 - RNA, 22 nt, Human
uggaaagaggaagugcccagca

SEQ ID NO: 324208 - RNA, 22 nt, Human
aauagcaaaugcucauuugaaa

SEQ ID NO: 324209 - RNA, 22 nt, Human
ugcuucucucuaggaagacgcu

SEQ ID NO: 324210 - RNA, 22 nt, Human
uuccuuggaaagagacgucgcu

SEQ ID NO: 324211 - RNA, 22 nt, Human
cuuauuugcccauguuucuuua

SEQ ID NO: 324212 - RNA, 22 nt, Human
gcccucugguggccgccucggc

SEQ ID NO: 324213 - RNA, 22 nt, Human
aggcauuacaucuaaauauuua

SEQ ID NO: 324214 - RNA, 22 nt, Human
uggcugaggcuuuucuuaaaga

SEQ ID NO: 324215 - RNA, 22 nt, Human
aauguuaaguuuagauuauaac

SEQ ID NO: 324216 - RNA, 22 nt, Human
augacagcucuagcacacagua

SEQ ID NO: 324217 - RNA, 22 nt, Human
gagcacugauuuauuuuugucu

SEQ ID NO: 324218 - RNA, 18 nt, Human
gacaaaaguacagacaga

SEQ ID NO: 324219 - RNA, 22 nt, Human
gggagacaaaggugagguucuu

SEQ ID NO: 324220 - RNA, 22 nt, Human
ggagccaguuuagaccucaguu

SEQ ID NO: 324221 - RNA, 22 nt, Human
cagaaagugauuugcuauucca

SEQ ID NO: 324222 - RNA, 22 nt, Human
ccucuggccuaggccgggagag

SEQ ID NO: 324223 - RNA, 22 nt, Human
aggaauuugggguuacaugaug

SEQ ID NO: 324224 - RNA, 22 nt, Human
cgggaagguggagguugcagug

SEQ ID NO: 324225 - RNA, 22 nt, Human
ugcacccacuuagcugaaguuc

SEQ ID NO: 324226 - RNA, 23 nt, Human
ccacuggagaaaguggcaggugg

SEQ ID NO: 324227 - RNA, 22 nt, Human
uccaggagcucauccacgucaa

SEQ ID NO: 324228 - RNA, 22 nt, Human
ucauggcucuaaagacauagau

SEQ ID NO: 324229 - RNA, 19 nt, Human
ccuggcccugcugcgcggg

SEQ ID NO: 324230 - RNA, 22 nt, Human
cuguguccaauggccuuagcag

SEQ ID NO: 324231 - RNA, 22 nt, Human
gcuucugcagagccguccugag

SEQ ID NO: 324232 - RNA, 22 nt, Human
acagugcuaucaauagcuagaa

SEQ ID NO: 324233 - RNA, 22 nt, Human
aucuggcucccuuggaauccgu

SEQ ID NO: 324234 - RNA, 22 nt, Human
ucugcucagccgaucugcuccg

SEQ ID NO: 324235 - RNA, 22 nt, Human
uauuuggauagacagggagaug

SEQ ID NO: 324236 - RNA, 20 nt, Human
gcugugccaugacccucgag

SEQ ID NO: 324237 - RNA, 23 nt, Human
aguguucagcauguaguaaauac

SEQ ID NO: 324238 - RNA, 22 nt, Human
caugcaugccgggcugacagag

SEQ ID NO: 324239 - RNA, 22 nt, Human
uguuccucugaacuucuuccaa

SEQ ID NO: 324240 - RNA, 22 nt, Human
caaacuuacuguguuuaaagag

SEQ ID NO: 324241 - RNA, 22 nt, Human
auauguggcauuauuucugagg

SEQ ID NO: 324242 - RNA, 18 nt, Human
uggguggcuagggaguuu

SEQ ID NO: 324243 - RNA, 22 nt, Human
cugcggcuggggacagcuguug

SEQ ID NO: 324244 - RNA, 22 nt, Human
ugagaagcauuaggaagaacau

SEQ ID NO: 324245 - RNA, 22 nt, Human
auuuccuauacaguuguccaua

SEQ ID NO: 324246 - RNA, 22 nt, Human
uccucauucuuggugcaucaaa

SEQ ID NO: 324247 - RNA, 22 nt, Human
gccagcuggcugcaggucccag

SEQ ID NO: 324248 - RNA, 22 nt, Human
cucagcuucuaccuccugagug

SEQ ID NO: 324249 - RNA, 22 nt, Human
auccauuugccgugcuaugugc

SEQ ID NO: 324250 - RNA, 19 nt, Human
gagcagcuuccuaucuggu

SEQ ID NO: 324251 - RNA, 22 nt, Human
aacagaaaucauuuagggcucu

SEQ ID NO: 324252 - RNA, 22 nt, Human
ugguuacccagucgcuggaguu

SEQ ID NO: 324253 - RNA, 22 nt, Human
gaauguuauugaacuacgagcu

SEQ ID NO: 324254 - RNA, 22 nt, Human
uuuauccaccuuacccuguucc

SEQ ID NO: 324255 - RNA, 22 nt, Human
ccacuuaagagaacagcuauag

SEQ ID NO: 324256 - RNA, 20 nt, Human
ucucuggcaagaagcugcag

SEQ ID NO: 324257 - RNA, 22 nt, Human
cagcuggcgacucuccucgaug

SEQ ID NO: 324258 - RNA, 22 nt, Human
ucagaagguacugaagacaugg

SEQ ID NO: 324259 - RNA, 22 nt, Human
cgugcagcggagcuggucacug

SEQ ID NO: 324260 - RNA, 22 nt, Human
gagggaaacagauggguugugg

SEQ ID NO: 324261 - RNA, 22 nt, Human
gagguggcugcuugcugggaaa

SEQ ID NO: 324262 - RNA, 22 nt, Human
ccauggccaggaaagccaaggu

SEQ ID NO: 324263 - RNA, 22 nt, Human
augacuuaaucauacuugcauu

SEQ ID NO: 324264 - RNA, 22 nt, Human
ggcaguggcuccucucuacucc

SEQ ID NO: 324265 - RNA, 22 nt, Human
uaaagugaaguucagaauggcu

SEQ ID NO: 324266 - RNA, 22 nt, Human
auguccagaguaaagcacauuc

SEQ ID NO: 324267 - RNA, 22 nt, Human
ggcagguguuuuuauauuaaag

SEQ ID NO: 324268 - RNA, 22 nt, Human
guuuuguucaugaacauugggu

SEQ ID NO: 324269 - RNA, 22 nt, Human
uccuccuuuccccgcuggagcc

SEQ ID NO: 324270 - RNA, 22 nt, Human
acuagaaacuaauggauuauua

SEQ ID NO: 324271 - RNA, 22 nt, Human
gcugucugcugggucgcucagg

SEQ ID NO: 324272 - RNA, 22 nt, Human
acucauuugcaugaugugcuau

SEQ ID NO: 324273 - RNA, 18 nt, Human
uauaaacacacuuagguu

SEQ ID NO: 324274 - RNA, 22 nt, Human
uucaccugugacagguagaguu

SEQ ID NO: 324275 - RNA, 22 nt, Human
uguacauauucaagcacuucua

SEQ ID NO: 324276 - RNA, 22 nt, Human
caaagaugccaaaaggaagaca

SEQ ID NO: 324277 - RNA, 22 nt, Human
uuuggauugcuuggaugcuucg

SEQ ID NO: 324278 - RNA, 22 nt, Human
uaaaugcaguacaaauuguucu

SEQ ID NO: 324279 - RNA, 22 nt, Human
ccacugcuguuacuuacgcaaa

SEQ ID NO: 324280 - RNA, 22 nt, Human
gcauuuaaauuugaacuucaga

SEQ ID NO: 324281 - RNA, 22 nt, Human
caguguuuagcacagugcuugg

SEQ ID NO: 324282 - RNA, 22 nt, Human
uugcaaauaauagccugaaacu

SEQ ID NO: 324283 - RNA, 22 nt, Human
cauuuugugcuagacacuaugg

SEQ ID NO: 324284 - RNA, 22 nt, Human
aguccgcgcuccaugggagucc

SEQ ID NO: 324285 - RNA, 22 nt, Human
gaaggagaggauugugaggcug

SEQ ID NO: 324286 - RNA, 22 nt, Human
uuauuugcccauguuuagcaga

SEQ ID NO: 324287 - RNA, 22 nt, Human
gaaccuggcagcccuauaucug

SEQ ID NO: 324288 - RNA, 22 nt, Human
gucuuaagaaugaaugcugaga

SEQ ID NO: 324289 - RNA, 22 nt, Human
cugcaucaguggauaugauggu

SEQ ID NO: 324290 - RNA, 22 nt, Human
acaguuaguugaggaguguuug

SEQ ID NO: 324291 - RNA, 22 nt, Human
aaaugccucauuuucucucacu

SEQ ID NO: 324292 - RNA, 19 nt, Human
augggaagcggccagcgga

SEQ ID NO: 324293 - RNA, 22 nt, Human
aaugcuuuuugcgaaaugugca

SEQ ID NO: 324294 - RNA, 22 nt, Human
cagagcugagucuucaagguug

SEQ ID NO: 324295 - RNA, 23 nt, Human
agcccagcagagaaccuaggucc

SEQ ID NO: 324296 - RNA, 22 nt, Human
ucucauuuacuuccacaggcug

SEQ ID NO: 324297 - RNA, 22 nt, Human
uccuggccucugagucaagaac

SEQ ID NO: 324298 - RNA, 22 nt, Human
uagaaguuaaaggaauacagaa

SEQ ID NO: 324299 - RNA, 22 nt, Human
gcagaagcccggucagcgcacg

SEQ ID NO: 324300 - RNA, 19 nt, Human
ccugcugaagugaugcagc

SEQ ID NO: 324301 - RNA, 22 nt, Human
ucauuguuucugcuuuucauga

SEQ ID NO: 324302 - RNA, 22 nt, Human
auuaguguuguggcuucauggc

SEQ ID NO: 324303 - RNA, 22 nt, Human
ccaugcagugcuggagcugauu

SEQ ID NO: 324304 - RNA, 22 nt, Human
aaaagagccacuuaugaccuca

SEQ ID NO: 324305 - RNA, 22 nt, Human
auggccagcaagguagggcaau

SEQ ID NO: 324306 - RNA, 22 nt, Human
cauggaaggcaaaagacacaga

SEQ ID NO: 324307 - RNA, 22 nt, Human
gcucaugggcccagagcagccc

SEQ ID NO: 324308 - RNA, 22 nt, Human
uggcacagcuugucauaaacuc

SEQ ID NO: 324309 - RNA, 22 nt, Human
caauuaccaguaauugagguuu

SEQ ID NO: 324310 - RNA, 22 nt, Human
gauuuucauuauagcuaguuuc

SEQ ID NO: 324311 - RNA, 20 nt, Human
cucuuuucacucucaguggu

SEQ ID NO: 324312 - RNA, 22 nt, Human
uggucaggcugcucugcggcgu

SEQ ID NO: 324313 - RNA, 22 nt, Human
uuuugucagugagaacagaguu

SEQ ID NO: 324314 - RNA, 22 nt, Human
aacuugccaagagcuuugcuag

SEQ ID NO: 324315 - RNA, 22 nt, Human
cucuggcaauugcugcugacuc

SEQ ID NO: 324316 - RNA, 22 nt, Human
aggcaguugaguggcuuuuuca

SEQ ID NO: 324317 - RNA, 22 nt, Human
acagugcugaucuagacugacc

SEQ ID NO: 324318 - RNA, 22 nt, Human
aucuaaagugucauaaguagcu

SEQ ID NO: 324319 - RNA, 22 nt, Human
uuugaacuucuaccugucauau

SEQ ID NO: 324320 - RNA, 22 nt, Human
ucaguccuuaucugguguucag

SEQ ID NO: 324321 - RNA, 22 nt, Human
aagauuuaccacuuuauucaag

SEQ ID NO: 324322 - RNA, 22 nt, Human
cccucucccugcagaauguggc

SEQ ID NO: 324323 - RNA, 19 nt, Human
gcagcugugggaagagcca

SEQ ID NO: 324324 - RNA, 22 nt, Human
ccagcuggcccagcugugcucc

SEQ ID NO: 324325 - RNA, 18 nt, Human
gccagcccuccaaccucc

SEQ ID NO: 324326 - RNA, 19 nt, Human
cagcaaacacuguaaaugg

SEQ ID NO: 324327 - RNA, 22 nt, Human
aaggcacuugcccagagcugca

SEQ ID NO: 324328 - RNA, 20 nt, Human
ggcagcaaccauaugcuaca

SEQ ID NO: 324329 - RNA, 22 nt, Human
ucuccacaccagaaggagcuga

SEQ ID NO: 324330 - RNA, 19 nt, Human
ucuuucauuucuagcucug

SEQ ID NO: 324331 - RNA, 22 nt, Human
guaaagcaaaauguagagauug

SEQ ID NO: 324332 - RNA, 22 nt, Human
uacugucuuuuccuaaaugggu

SEQ ID NO: 324333 - RNA, 22 nt, Human
acagagacacggaagcuaaaga

SEQ ID NO: 324334 - RNA, 22 nt, Human
gugggggcaggcagugcuagga

SEQ ID NO: 324335 - RNA, 22 nt, Human
uaaaaguuagcuaggacaaagu

SEQ ID NO: 324336 - RNA, 22 nt, Human
ucuuauaccccuaaacugcagc

SEQ ID NO: 324337 - RNA, 22 nt, Human
uauuacaguucgaguuucuagg

SEQ ID NO: 324338 - RNA, 22 nt, Human
ugggaagauaugagugaccaac

SEQ ID NO: 324339 - RNA, 22 nt, Human
uguuucaggcuucugggauuuu

SEQ ID NO: 324340 - RNA, 22 nt, Human
acauuuguuucucuagaguagg

SEQ ID NO: 324341 - RNA, 22 nt, Human
guggccuuuucaaguaggguau

SEQ ID NO: 324342 - RNA, 22 nt, Human
uuugaagauaaauauggagaaa

SEQ ID NO: 324343 - RNA, 22 nt, Human
acacuccagggagggagggaau

SEQ ID NO: 324344 - RNA, 22 nt, Human
gauccacaggaaccaaaacgca

SEQ ID NO: 324345 - RNA, 21 nt, Human
ucucuccucaagcucgacccc

SEQ ID NO: 324346 - RNA, 22 nt, Human
uuuguugguugcacuggugggu

SEQ ID NO: 324347 - RNA, 22 nt, Human
agccagugucgugugacaugag

SEQ ID NO: 324348 - RNA, 22 nt, Human
ugcauuugcaauggguacacaa

SEQ ID NO: 324349 - RNA, 22 nt, Human
agggcucacuacaacccuggga

SEQ ID NO: 324350 - RNA, 22 nt, Human
ugaaaugccuaugaagucagga

SEQ ID NO: 324351 - RNA, 22 nt, Human
accauccaaacugcuuucugug

SEQ ID NO: 324352 - RNA, 22 nt, Human
acccagcucuuugauggucuug

SEQ ID NO: 324353 - RNA, 22 nt, Human
uugcugccagcgcccugcaggg

SEQ ID NO: 324354 - RNA, 22 nt, Human
aggagacaguuuggacguguag

SEQ ID NO: 324355 - RNA, 22 nt, Human
acuggcccuggcugcuaggcug

SEQ ID NO: 324356 - RNA, 23 nt, Human
aaauugucguaagguggagaugu

SEQ ID NO: 324357 - RNA, 22 nt, Human
uggaaggggagcuggaaagggg

SEQ ID NO: 324358 - RNA, 22 nt, Human
uuugccaguauuuuauugauga

SEQ ID NO: 324359 - RNA, 22 nt, Human
aguggcaguagaugagcugguu

SEQ ID NO: 324360 - RNA, 22 nt, Human
agaugguucagaauuauaaaga

SEQ ID NO: 324361 - RNA, 22 nt, Human
gugguuguuuccagguuugaaa

SEQ ID NO: 324362 - RNA, 22 nt, Human
auuaggcauucugaaugagguc

SEQ ID NO: 324363 - RNA, 22 nt, Human
ucuggcuucaacuuuacugaaa

SEQ ID NO: 324364 - RNA, 23 nt, Human
cuuuccuuucuuugacacccagc

SEQ ID NO: 324365 - RNA, 22 nt, Human
ggcaagaaccucaauuaccuuu

SEQ ID NO: 324366 - RNA, 22 nt, Human
gacaaauguaccccuagagucu

SEQ ID NO: 324367 - RNA, 22 nt, Human
auacaggaugcugaacaucucu

SEQ ID NO: 324368 - RNA, 22 nt, Human
auuuccuggaggaauggaagca

SEQ ID NO: 324369 - RNA, 22 nt, Human
gacacuacguggcucacauuuc

SEQ ID NO: 324370 - RNA, 22 nt, Human
ucaugucccguugcuggcugcc

SEQ ID NO: 324371 - RNA, 22 nt, Human
gaguuucuucauggugcagagg

SEQ ID NO: 324372 - RNA, 22 nt, Human
uccuucccaggugucgccgccu

SEQ ID NO: 324373 - RNA, 22 nt, Human
uaauuuugucacagugacaugc

SEQ ID NO: 324374 - RNA, 22 nt, Human
cuggcuuuuuucccauuaugca

SEQ ID NO: 324375 - RNA, 22 nt, Human
cugggguaucugccacaacucu

SEQ ID NO: 324376 - RNA, 22 nt, Human
aagcugccugggaggaagggcu

SEQ ID NO: 324377 - RNA, 22 nt, Human
ucuccucuccuuucauguuguu

SEQ ID NO: 324378 - RNA, 22 nt, Human
ggaagcaaauuccagaaccaca

SEQ ID NO: 324379 - RNA, 22 nt, Human
aguggcagggacuucauauaaa

SEQ ID NO: 324380 - RNA, 18 nt, Human
gccuggcuucggagccgc

SEQ ID NO: 324381 - RNA, 22 nt, Human
cccaccacgugcuuugcuggag

SEQ ID NO: 324382 - RNA, 19 nt, Human
cugaaacacagagagggcu

SEQ ID NO: 324383 - RNA, 23 nt, Human
uggccucuccccaccuggcagaa

SEQ ID NO: 324384 - RNA, 22 nt, Human
uuuacaaggcaguuauuuuccu

SEQ ID NO: 324385 - RNA, 22 nt, Human
aguuuccacuggagacacugug

SEQ ID NO: 324386 - RNA, 22 nt, Human
cugaaggacacgugaggagcca

SEQ ID NO: 324387 - RNA, 22 nt, Human
uugcugugucauuuguuuaauc

SEQ ID NO: 324388 - RNA, 22 nt, Human
aucaugugacuagguuuggcca

SEQ ID NO: 324389 - RNA, 17 nt, Human
gccuggcccagccuggc

SEQ ID NO: 324390 - RNA, 21 nt, Human
caggccaaaagguucaacauu

SEQ ID NO: 324391 - RNA, 22 nt, Human
guagagcagggagcaggaagcu

SEQ ID NO: 324392 - RNA, 22 nt, Human
auggcugugguaucagacgcag

SEQ ID NO: 324393 - RNA, 20 nt, Human
ucccuggggcccuacuuccu

SEQ ID NO: 324394 - RNA, 22 nt, Human
aaaauuaagugucugggaagcc

SEQ ID NO: 324395 - RNA, 22 nt, Human
ccucuucuaggacguccuugug

SEQ ID NO: 324396 - RNA, 22 nt, Human
ccauuuguaccauuucuuugua

SEQ ID NO: 324397 - RNA, 22 nt, Human
aaguuacacauuuucauuguaa

SEQ ID NO: 324398 - RNA, 20 nt, Human
uugcaaagugaauagcaauu

SEQ ID NO: 324399 - RNA, 22 nt, Human
uggcagaaugaagacuggggcc

SEQ ID NO: 324400 - RNA, 22 nt, Human
ucuuugcagaauuuaacuuugc

SEQ ID NO: 324401 - RNA, 22 nt, Human
gccucugcacuguggcacacca

SEQ ID NO: 324402 - RNA, 22 nt, Human
aaugaaacuaguagaaucuuug

SEQ ID NO: 324403 - RNA, 22 nt, Human
uuuuuggguccaggcuguaucu

SEQ ID NO: 324404 - RNA, 19 nt, Human
augagcuggcauuucaggu

SEQ ID NO: 324405 - RNA, 22 nt, Human
cuggcuuugaucagagugaccu

SEQ ID NO: 324406 - RNA, 22 nt, Human
ucuguggcaugguaucuggagg

SEQ ID NO: 324407 - RNA, 22 nt, Human
auuccucagcaggccuuuuguu

SEQ ID NO: 324408 - RNA, 22 nt, Human
gcagcagcggggccccugcgcg

SEQ ID NO: 324409 - RNA, 22 nt, Human
acuggcuuugagggaauagcua

SEQ ID NO: 324410 - RNA, 22 nt, Human
gaaugcuggcuuacaggcaguu

SEQ ID NO: 324411 - RNA, 22 nt, Human
aaugcauacguguuuguggcaa

SEQ ID NO: 324412 - RNA, 22 nt, Human
caagauauguccuguuacuaag

SEQ ID NO: 324413 - RNA, 22 nt, Human
caaugggccuggagagagcugg

SEQ ID NO: 324414 - RNA, 19 nt, Human
uggcucugucgaaggcaca

SEQ ID NO: 324415 - RNA, 22 nt, Human
uaaugccuuaugucaaauguaa

SEQ ID NO: 324416 - RNA, 22 nt, Human
cagguagaggcugccaucagcu

SEQ ID NO: 324417 - RNA, 22 nt, Human
ccagcuugcuccucugcaaugg

SEQ ID NO: 324418 - RNA, 22 nt, Human
gcaaaacagucgaugccuccca

SEQ ID NO: 324419 - RNA, 22 nt, Human
caggaagucgcagagcuggggg

SEQ ID NO: 324420 - RNA, 22 nt, Human
cacuuggaggaaggccuauuca

SEQ ID NO: 324421 - RNA, 22 nt, Human
uagauacauacauuuuaaaaug

SEQ ID NO: 324422 - RNA, 22 nt, Human
auagcuuugagggcuccuuagg

SEQ ID NO: 324423 - RNA, 22 nt, Human
cagguguugcaguugaagacug

SEQ ID NO: 324424 - RNA, 22 nt, Human
cuuugcagagggggugggagcu

SEQ ID NO: 324425 - RNA, 22 nt, Human
gggaagugagcuggaaucaagg

SEQ ID NO: 324426 - RNA, 22 nt, Human
uuuaaacuaacaguacacguug

SEQ ID NO: 324427 - RNA, 22 nt, Human
uagcagcacuauuuguuguagu

SEQ ID NO: 324428 - RNA, 22 nt, Human
cagcagcucaggcuccuuccca

SEQ ID NO: 324429 - RNA, 22 nt, Human
auucaugcaggauugucuccaa

SEQ ID NO: 324430 - RNA, 22 nt, Human
cagcuuuugcagacuucuugcc

SEQ ID NO: 324431 - RNA, 22 nt, Human
ggggucugggcuuagcuggaau

SEQ ID NO: 324432 - RNA, 22 nt, Human
accagucauagaaagcaguggu

SEQ ID NO: 324433 - RNA, 22 nt, Human
caucugcaggggaagccaguuu

SEQ ID NO: 324434 - RNA, 22 nt, Human
uccacccugcuuuugucuuuga

SEQ ID NO: 324435 - RNA, 22 nt, Human
uugaacaguuuugucagguuca

SEQ ID NO: 324436 - RNA, 22 nt, Human
gccaaaguccuccagccaugca

SEQ ID NO: 324437 - RNA, 22 nt, Human
uggcugagcugcagcguggcuu

SEQ ID NO: 324438 - RNA, 22 nt, Human
ccugaaaugaguucugcucacu

SEQ ID NO: 324439 - RNA, 22 nt, Human
ucuuuuaucuguuguguaacaa

SEQ ID NO: 324440 - RNA, 22 nt, Human
uugccaggggacaucuggagcc

SEQ ID NO: 324441 - RNA, 22 nt, Human
ggggaagucggagccugagcac

SEQ ID NO: 324442 - RNA, 22 nt, Human
aagacacuuucuaaauagaagu

SEQ ID NO: 324443 - RNA, 22 nt, Human
caauuuuuaaacuaugaaguug

SEQ ID NO: 324444 - RNA, 22 nt, Human
uagaugaacagaaagccacugu

SEQ ID NO: 324445 - RNA, 23 nt, Human
uguacacuuggucaagguacuua

SEQ ID NO: 324446 - RNA, 22 nt, Human
ccuuuuggccaggucagugcag

SEQ ID NO: 324447 - RNA, 22 nt, Human
uggcaugcaagaggaggcuccc

SEQ ID NO: 324448 - RNA, 22 nt, Human
ugucacagugcacagcuaagaa

SEQ ID NO: 324449 - RNA, 20 nt, Human
uccagccacuuccgcugguc

SEQ ID NO: 324450 - RNA, 22 nt, Human
uuuacgaauggggugacaacuu

SEQ ID NO: 324451 - RNA, 22 nt, Human
uggcacuugauauuugauuugc

SEQ ID NO: 324452 - RNA, 22 nt, Human
uuuccuguccugguacuuggca

SEQ ID NO: 324453 - RNA, 22 nt, Human
ugggcacacugaaucugcuauu

SEQ ID NO: 324454 - RNA, 22 nt, Human
cuucauuaaugucuauaaguuu

SEQ ID NO: 324455 - RNA, 22 nt, Human
cauuaacacuuuggauuuagac

SEQ ID NO: 324456 - RNA, 19 nt, Human
auucuucucuuccugcugu

SEQ ID NO: 324457 - RNA, 22 nt, Human
uccugcagccauuagaggucaa

SEQ ID NO: 324458 - RNA, 22 nt, Human
cacugguugccucuuucuguuc

SEQ ID NO: 324459 - RNA, 22 nt, Human
guaaacugaauuggauacugug

SEQ ID NO: 324460 - RNA, 22 nt, Human
agcagugccgcaucuugugacc

SEQ ID NO: 324461 - RNA, 22 nt, Human
uguucauucugugaccugguuc

SEQ ID NO: 324462 - RNA, 22 nt, Human
ccccagcagacucagggcaggu

SEQ ID NO: 324463 - RNA, 19 nt, Human
agggaguuuauauuugcac

SEQ ID NO: 324464 - RNA, 22 nt, Human
cgcacuggagcuggaacgaguc

SEQ ID NO: 324465 - RNA, 22 nt, Human
gaggugggaugugugugcuacu

SEQ ID NO: 324466 - RNA, 22 nt, Human
caguuuccugaagagaaagaau

SEQ ID NO: 324467 - RNA, 22 nt, Human
agguggcagacuaacagaagga

SEQ ID NO: 324468 - RNA, 22 nt, Human
ccaggcuaggaccgauuucccu

SEQ ID NO: 324469 - RNA, 22 nt, Human
uauugccaaaugucugcuggaa

SEQ ID NO: 324470 - RNA, 22 nt, Human
uaaacagagaugccugggucug

SEQ ID NO: 324471 - RNA, 22 nt, Human
aaauugcauuuuaaagguagau

SEQ ID NO: 324472 - RNA, 22 nt, Human
cacaccuuaggccugagcgcuu

SEQ ID NO: 324473 - RNA, 22 nt, Human
gagaaagggaacuuacagagug

SEQ ID NO: 324474 - RNA, 22 nt, Human
augugaaagagguguucagugg

SEQ ID NO: 324475 - RNA, 22 nt, Human
caugggcucuucuggacugcac

SEQ ID NO: 324476 - RNA, 22 nt, Human
gaccaaggaagaggggagccag

SEQ ID NO: 324477 - RNA, 22 nt, Human
uggauguuugaaguugcaugug

SEQ ID NO: 324478 - RNA, 22 nt, Human
agucuggagugauuauguggga

SEQ ID NO: 324479 - RNA, 22 nt, Human
aucagagcugcauuuuagagcc

SEQ ID NO: 324480 - RNA, 22 nt, Human
augaagcugguuuuggcuuggg

SEQ ID NO: 324481 - RNA, 22 nt, Human
uauaagaaacaaggcaaauuuu

SEQ ID NO: 324482 - RNA, 22 nt, Human
ucauaggaguagcagugagagg

SEQ ID NO: 324483 - RNA, 22 nt, Human
uuucucuuucaaucugcaguac

SEQ ID NO: 324484 - RNA, 22 nt, Human
uggcauuuuguagcuguguauc

SEQ ID NO: 324485 - RNA, 22 nt, Human
caagagcucccagaccugggca

SEQ ID NO: 324486 - RNA, 22 nt, Human
aaugacaguggcacagucacuu

SEQ ID NO: 324487 - RNA, 22 nt, Human
caugucacaauucuuaauggga

SEQ ID NO: 324488 - RNA, 22 nt, Human
aagggaaacuuucacaaugucc

SEQ ID NO: 324489 - RNA, 22 nt, Human
ccccaacccugguuccguggcg

SEQ ID NO: 324490 - RNA, 22 nt, Human
ucugcgcccugucgccugcucc

SEQ ID NO: 324491 - RNA, 22 nt, Human
caaugcagauaccuuccagaga

SEQ ID NO: 324492 - RNA, 22 nt, Human
gcacccagggcaggaagugagg

SEQ ID NO: 324493 - RNA, 22 nt, Human
gcagucauggguagaacucaag

SEQ ID NO: 324494 - RNA, 22 nt, Human
agcuuuauuugucauucacggc

SEQ ID NO: 324495 - RNA, 22 nt, Human
gggcauuucuugucaauguagg

SEQ ID NO: 324496 - RNA, 22 nt, Human
ugcuugacuuaguuucucauuu

SEQ ID NO: 324497 - RNA, 18 nt, Human
cugccagugugcucuccg

SEQ ID NO: 324498 - RNA, 22 nt, Human
auggcagcggagcuggaaauga

SEQ ID NO: 324499 - RNA, 22 nt, Human
auggauggaacucugcuguggu

SEQ ID NO: 324500 - RNA, 22 nt, Human
acaguucuguccuagacuucgu

SEQ ID NO: 324501 - RNA, 23 nt, Human
agcaacagugggugaguguugcu

SEQ ID NO: 324502 - RNA, 22 nt, Human
uuguccagcgaccaggcucugu

SEQ ID NO: 324503 - RNA, 22 nt, Human
uuuugaauaauucagaaacagc

SEQ ID NO: 324504 - RNA, 22 nt, Human
ugaggaggugggcacacagagu

SEQ ID NO: 324505 - RNA, 22 nt, Human
agaggaaguaaucaggaccugc

SEQ ID NO: 324506 - RNA, 22 nt, Human
uuacaguuaaugugacuaacca

SEQ ID NO: 324507 - RNA, 22 nt, Human
gccuuuuaaggcagagggagau

SEQ ID NO: 324508 - RNA, 22 nt, Human
aauaucaucucucuuuucugca

SEQ ID NO: 324509 - RNA, 22 nt, Human
cuggccagggugcgaucguggu

SEQ ID NO: 324510 - RNA, 22 nt, Human
caacagcuggaggcuuggcccg

SEQ ID NO: 324511 - RNA, 22 nt, Human
ugugugaacucucugauguaca

SEQ ID NO: 324512 - RNA, 22 nt, Human
guggucaucuaacuaaauuuuc

SEQ ID NO: 324513 - RNA, 22 nt, Human
agauguuuauaacucaugagug

SEQ ID NO: 324514 - RNA, 22 nt, Human
agcugccgaugcccagcugcau

SEQ ID NO: 324515 - RNA, 22 nt, Human
ccaaaauauuagugcuuaagua

SEQ ID NO: 324516 - RNA, 22 nt, Human
agcuggugauguggucccucac

SEQ ID NO: 324517 - RNA, 22 nt, Human
cuguggcuaggaagcuguggga

SEQ ID NO: 324518 - RNA, 22 nt, Human
cuuguuuucuucugcagucuau

SEQ ID NO: 324519 - RNA, 18 nt, Human
ggaaggugcuggagugca

SEQ ID NO: 324520 - RNA, 22 nt, Human
gagcaacacauugaaugaggau

SEQ ID NO: 324521 - RNA, 22 nt, Human
uggucccuagugugggagcuug

SEQ ID NO: 324522 - RNA, 22 nt, Human
ucuuucagaaacuuugucugcg

SEQ ID NO: 324523 - RNA, 22 nt, Human
cggcagcgguuggagguuguag

SEQ ID NO: 324524 - RNA, 22 nt, Human
gaguuugugggaauggaguauu

SEQ ID NO: 324525 - RNA, 22 nt, Human
ucuuccuggauggggguugaug

SEQ ID NO: 324526 - RNA, 21 nt, Human
uaaacauaaccuuguauggcu

SEQ ID NO: 324527 - RNA, 22 nt, Human
ggcaagagggcagauggagugc

SEQ ID NO: 324528 - RNA, 22 nt, Human
caguggguccugcgucugccag

SEQ ID NO: 324529 - RNA, 22 nt, Human
gacauacagcccucucccuggu

SEQ ID NO: 324530 - RNA, 22 nt, Human
guggcauuuuagaacagcugac

SEQ ID NO: 324531 - RNA, 22 nt, Human
uuucauuauaaaaaguuggcuu

SEQ ID NO: 324532 - RNA, 22 nt, Human
gcugcagugagccaagaucgug

SEQ ID NO: 324533 - RNA, 22 nt, Human
uuuaaaccuaucuaagaaauag

SEQ ID NO: 324534 - RNA, 22 nt, Human
accagagcuggcagaguaucaa

SEQ ID NO: 324535 - RNA, 19 nt, Human
ugcucucuggugcuucaug

SEQ ID NO: 324536 - RNA, 22 nt, Human
agaaaucugacugcugugcaca

SEQ ID NO: 324537 - RNA, 22 nt, Human
cugaggagauccccccagaagu

SEQ ID NO: 324538 - RNA, 17 nt, Human
ugagcaguagaagaugc

SEQ ID NO: 324539 - RNA, 19 nt, Human
cuccacagggauugugauu

SEQ ID NO: 324540 - RNA, 22 nt, Human
gggcggggcuuccguccuccac

SEQ ID NO: 324541 - RNA, 22 nt, Human
cagagccaaaccucagggcccg

SEQ ID NO: 324542 - RNA, 22 nt, Human
auguaugagagauucuuuuauu

SEQ ID NO: 324543 - RNA, 20 nt, Human
uucuccacaggguggaggag

SEQ ID NO: 324544 - RNA, 22 nt, Human
ugugcugcucucagugacagcc

SEQ ID NO: 324545 - RNA, 22 nt, Human
aaucuguuuuaaaguuugugcc

SEQ ID NO: 324546 - RNA, 22 nt, Human
ggaaugugcugacacgcgagag

SEQ ID NO: 324547 - RNA, 22 nt, Human
ucguuagccucgagaucuuugu

SEQ ID NO: 324548 - RNA, 22 nt, Human
gcccuguguguuugcacugauu

SEQ ID NO: 324549 - RNA, 22 nt, Human
cuucuucagaggccagccucug

SEQ ID NO: 324550 - RNA, 22 nt, Human
ucccacacagcccgcucaccgg

SEQ ID NO: 324551 - RNA, 22 nt, Human
ccugggacgacucuguacccuu

SEQ ID NO: 324552 - RNA, 22 nt, Human
uuggauggagguucaagcacua

SEQ ID NO: 324553 - RNA, 22 nt, Human
cuggcuccauccuugagcucug

SEQ ID NO: 324554 - RNA, 22 nt, Human
aaauacaguggcagcagauaau

SEQ ID NO: 324555 - RNA, 22 nt, Human
cucuccaggcgagguccuacug

SEQ ID NO: 324556 - RNA, 22 nt, Human
guaugugucuuagaacuuggga

SEQ ID NO: 324557 - RNA, 22 nt, Human
cuuucuuucgaagacgugauua

SEQ ID NO: 324558 - RNA, 22 nt, Human
aacagguagggacucuaacuug

SEQ ID NO: 324559 - RNA, 22 nt, Human
cuggcuccucaggacugcggga

SEQ ID NO: 324560 - RNA, 22 nt, Human
ucauacauguuguguucaaaug

SEQ ID NO: 324561 - RNA, 22 nt, Human
ugggcccaucauugcugugggc

SEQ ID NO: 324562 - RNA, 23 nt, Human
ugaaagcaaugggucuauaguau

SEQ ID NO: 324563 - RNA, 22 nt, Human
ugcucccaggcauucucuguug

SEQ ID NO: 324564 - RNA, 22 nt, Human
ugcugggauuacagucaugagc

SEQ ID NO: 324565 - RNA, 21 nt, Human
agcauucaaaagaugccauaa

SEQ ID NO: 324566 - RNA, 20 nt, Human
agugauuuguuaguacauug

SEQ ID NO: 324567 - RNA, 22 nt, Human
acugcuuacccggccugacuuc

SEQ ID NO: 324568 - RNA, 22 nt, Human
ugaaaacacuuuaguuuagguc

SEQ ID NO: 324569 - RNA, 22 nt, Human
acucuguuugcagguagcucag

SEQ ID NO: 324570 - RNA, 22 nt, Human
cugaaagcaaaguaauucuuaa

SEQ ID NO: 324571 - RNA, 21 nt, Human
gcuggcugucucuuacacggu

SEQ ID NO: 324572 - RNA, 22 nt, Human
ggaagcuguuaucaucuguauc

SEQ ID NO: 324573 - RNA, 22 nt, Human
cacaguuuuaucuuauacugau

SEQ ID NO: 324574 - RNA, 22 nt, Human
gacuacaggugugugccaccau

SEQ ID NO: 324575 - RNA, 19 nt, Human
ugggcagugccagggcuua

SEQ ID NO: 324576 - RNA, 19 nt, Human
cauaauacaguggaucuga

SEQ ID NO: 324577 - RNA, 22 nt, Human
uucuccacccacucuuuuguug

SEQ ID NO: 324578 - RNA, 22 nt, Human
cugauggagagugugauuuggg

SEQ ID NO: 324579 - RNA, 22 nt, Human
auuuccaggaguugaggucuga

SEQ ID NO: 324580 - RNA, 22 nt, Human
aucuuuggguacaaacuugccu

SEQ ID NO: 324581 - RNA, 22 nt, Human
caggugggagccacagcguaca

SEQ ID NO: 324582 - RNA, 18 nt, Human
uacagcuugaguugacug

SEQ ID NO: 324583 - RNA, 22 nt, Human
cagggagccccaauuccaugcc

SEQ ID NO: 324584 - RNA, 22 nt, Human
cugcugucuuuauuucacugcu

SEQ ID NO: 324585 - RNA, 22 nt, Human
gaauguuaaugcacuucuagcu

SEQ ID NO: 324586 - RNA, 17 nt, Human
cagucacaggucuuuuc

SEQ ID NO: 324587 - RNA, 22 nt, Human
guuuccaggcuuugguaugguu

SEQ ID NO: 324588 - RNA, 22 nt, Human
cagcaguacuucucagagguau

SEQ ID NO: 324589 - RNA, 22 nt, Human
uuuaagguacagcuagcagcau

SEQ ID NO: 324590 - RNA, 22 nt, Human
guaguucuuucucaauguucaa

SEQ ID NO: 324591 - RNA, 22 nt, Human
uuugcaaaguccauugaaguua

SEQ ID NO: 324592 - RNA, 22 nt, Human
ucaugacaacuugcacaguuuu

SEQ ID NO: 324593 - RNA, 22 nt, Human
gccuggaaugcaaugugacgaa

SEQ ID NO: 324594 - RNA, 22 nt, Human
auuauguagcuaaaaauugugu

SEQ ID NO: 324595 - RNA, 22 nt, Human
uggcugcccccucccguggaca

SEQ ID NO: 324596 - RNA, 22 nt, Human
gauucugaaauuaacagacugg

SEQ ID NO: 324597 - RNA, 22 nt, Human
ggcuuccuccuuccugcuguca

SEQ ID NO: 324598 - RNA, 22 nt, Human
uccaaauagcuggaugauggug

SEQ ID NO: 324599 - RNA, 19 nt, Human
cacuaagaagcaggggagc

SEQ ID NO: 324600 - RNA, 22 nt, Human
uuggaaaugcauuuguuauuau

SEQ ID NO: 324601 - RNA, 22 nt, Human
uuuggagagaugaaguucugug

SEQ ID NO: 324602 - RNA, 22 nt, Human
acacaucagaaauaugaaugag

SEQ ID NO: 324603 - RNA, 22 nt, Human
augaaaacggaccagagcuauu

SEQ ID NO: 324604 - RNA, 22 nt, Human
uagcauuucacugaucuucacu

SEQ ID NO: 324605 - RNA, 22 nt, Human
gaagagguucaacguggucauc

SEQ ID NO: 324606 - RNA, 22 nt, Human
gccuguuucuccuccuuggccc

SEQ ID NO: 324607 - RNA, 22 nt, Human
guguguggaaugcucauuuauu

SEQ ID NO: 324608 - RNA, 22 nt, Human
aaagacuaaccaguugucaaaa

SEQ ID NO: 324609 - RNA, 22 nt, Human
uauccaaaggaacaaucacagc

SEQ ID NO: 324610 - RNA, 22 nt, Human
cuggccgcaguguggaguugug

SEQ ID NO: 324611 - RNA, 22 nt, Human
cugaaggauguguggugggagu

SEQ ID NO: 324612 - RNA, 22 nt, Human
ugggcugcuucuauuggugguc

SEQ ID NO: 324613 - RNA, 22 nt, Human
uuuguucaccuagcaaacuuuu

SEQ ID NO: 324614 - RNA, 22 nt, Human
auagucuuagaaucuugagugu

SEQ ID NO: 324615 - RNA, 23 nt, Human
gggaaaucaaaagauauuucuuc

SEQ ID NO: 324616 - RNA, 23 nt, Human
cguuuuuuccucagauguucugg

SEQ ID NO: 324617 - RNA, 20 nt, Human
ggucacuguggcugcaggau

SEQ ID NO: 324618 - RNA, 22 nt, Human
gcucgcuuagauuuuccucuga

SEQ ID NO: 324619 - RNA, 21 nt, Human
uccugcugagaaacagauggu

SEQ ID NO: 324620 - RNA, 22 nt, Human
ggcacagcugaugcagacacac

SEQ ID NO: 324621 - RNA, 21 nt, Human
uuuaaggccagcaggagguga

SEQ ID NO: 324622 - RNA, 22 nt, Human
guuguuuuugaacggugguggc

SEQ ID NO: 324623 - RNA, 22 nt, Human
auuguugacuugauuacucaac

SEQ ID NO: 324624 - RNA, 22 nt, Human
ccgcgagguggagguugcagug

SEQ ID NO: 324625 - RNA, 17 nt, Human
gcaggcacugcugccug

SEQ ID NO: 324626 - RNA, 22 nt, Human
augguuuuguccucuuugguuc

SEQ ID NO: 324627 - RNA, 22 nt, Human
auugaagacuugguauccgugg

SEQ ID NO: 324628 - RNA, 22 nt, Human
agcuuucuauauaugaguugcu

SEQ ID NO: 324629 - RNA, 18 nt, Human
ucugaaggaaugauucca

SEQ ID NO: 324630 - RNA, 22 nt, Human
gccagccccagacauccuaucg

SEQ ID NO: 324631 - RNA, 22 nt, Human
ucuuugcauggacauguguuuu

SEQ ID NO: 324632 - RNA, 21 nt, Human
uaagaacauuaucuucuuccu

SEQ ID NO: 324633 - RNA, 20 nt, Human
acuagaaagucacugggggg

SEQ ID NO: 324634 - RNA, 22 nt, Human
auguggcuuucugcguuuucuc

SEQ ID NO: 324635 - RNA, 18 nt, Human
ggaaaaggagugucuagc

SEQ ID NO: 324636 - RNA, 19 nt, Human
aucaggcuucuauuuucuc

SEQ ID NO: 324637 - RNA, 22 nt, Human
ggccuugggauguggcugcagc

SEQ ID NO: 324638 - RNA, 22 nt, Human
cuguucaguaaccuauaaaaca

SEQ ID NO: 324639 - RNA, 22 nt, Human
uuggggaagcuuugaaauacuu

SEQ ID NO: 324640 - RNA, 22 nt, Human
uaguguguggucucucccuugu

SEQ ID NO: 324641 - RNA, 22 nt, Human
ccucccugccggcuggacuagu

SEQ ID NO: 324642 - RNA, 22 nt, Human
uggcuccaggggacacgcagua

SEQ ID NO: 324643 - RNA, 22 nt, Human
uuccuggugguggugacagcac

SEQ ID NO: 324644 - RNA, 22 nt, Human
uauggcuucugggccaaauuua

SEQ ID NO: 324645 - RNA, 22 nt, Human
cccagcauuucugggcugcacu

SEQ ID NO: 324646 - RNA, 22 nt, Human
uuauuuaaaagugguaagauuc

SEQ ID NO: 324647 - RNA, 22 nt, Human
acugccaguuguuuuguccagu

SEQ ID NO: 324648 - RNA, 22 nt, Human
gcauaaaggacuauaaggauca

SEQ ID NO: 324649 - RNA, 21 nt, Human
uuuguucaggggcaaaguuaa

SEQ ID NO: 324650 - RNA, 22 nt, Human
gccugccuucggugcgcagcgg

SEQ ID NO: 324651 - RNA, 22 nt, Human
caggccugugacaccgugucug

SEQ ID NO: 324652 - RNA, 22 nt, Human
ugcuugucacccugccugagug

SEQ ID NO: 324653 - RNA, 22 nt, Human
ccucguccacaauccuugcaca

SEQ ID NO: 324654 - RNA, 22 nt, Human
uguccagcugaaggcagccuca

SEQ ID NO: 324655 - RNA, 22 nt, Human
gcugcaagugcauguugcaacu

SEQ ID NO: 324656 - RNA, 21 nt, Human
auacaagaagauggcagucug

SEQ ID NO: 324657 - RNA, 22 nt, Human
aagucaauuaguaaacuuggaa

SEQ ID NO: 324658 - RNA, 22 nt, Human
cugcaccgugucucgggcugcc

SEQ ID NO: 324659 - RNA, 21 nt, Human
ugucagcaacaauacuuucuc

SEQ ID NO: 324660 - RNA, 22 nt, Human
uugggugcugucauggggcacg

SEQ ID NO: 324661 - RNA, 22 nt, Human
cauaaauuguacccauuccaac

SEQ ID NO: 324662 - RNA, 22 nt, Human
aaugcugugauuuauuaaguau

SEQ ID NO: 324663 - RNA, 22 nt, Human
ugggcaaaugcuuuuuagucaa

SEQ ID NO: 324664 - RNA, 22 nt, Human
ucaaaaugccgagugcccaggu

SEQ ID NO: 324665 - RNA, 21 nt, Human
uuccuccucuggagaagaaga

SEQ ID NO: 324666 - RNA, 22 nt, Human
ggcacuggcaaagcaaagucug

SEQ ID NO: 324667 - RNA, 22 nt, Human
cagcuuguuuacaugcuuauuc

SEQ ID NO: 324668 - RNA, 22 nt, Human
acaggacagucuaguaacagua

SEQ ID NO: 324669 - RNA, 22 nt, Human
aagccugagccaugcuuuacug

SEQ ID NO: 324670 - RNA, 22 nt, Human
guggcgcagaggguggcagaga

SEQ ID NO: 324671 - RNA, 22 nt, Human
aacuuucuuugcaucuaaguuu

SEQ ID NO: 324672 - RNA, 22 nt, Human
gacaguggagccacguugggag

SEQ ID NO: 324673 - RNA, 22 nt, Human
uuggaaguucuuagccuuuuca

SEQ ID NO: 324674 - RNA, 22 nt, Human
ccaagcuggacagcagcaagga

SEQ ID NO: 324675 - RNA, 22 nt, Human
uaaaccuuauuugaauaccaac

SEQ ID NO: 324676 - RNA, 22 nt, Human
uaaaguuuauuggcaccaccau

SEQ ID NO: 324677 - RNA, 22 nt, Human
cuggucagggcucuuugggagc

SEQ ID NO: 324678 - RNA, 22 nt, Human
auggaguugagcucuguugucc

SEQ ID NO: 324679 - RNA, 22 nt, Human
uuuuuugucuugaagaaauggu

SEQ ID NO: 324680 - RNA, 22 nt, Human
uggcuccacaggccagggugug

SEQ ID NO: 324681 - RNA, 22 nt, Human
gggaggugauuaggaccaugua

SEQ ID NO: 324682 - RNA, 22 nt, Human
cauugcuguuaauugucucuag

SEQ ID NO: 324683 - RNA, 22 nt, Human
accuggccaguggggccgcgcu

SEQ ID NO: 324684 - RNA, 22 nt, Human
uaccuugugagcuuucuaacau

SEQ ID NO: 324685 - RNA, 22 nt, Human
ugccucugcugcauauucaccu

SEQ ID NO: 324686 - RNA, 22 nt, Human
aggcuguagaucuagacaugua

SEQ ID NO: 324687 - RNA, 22 nt, Human
ccuggcagaauauuaaagugca

SEQ ID NO: 324688 - RNA, 22 nt, Human
cugagcagaagggugcacgugc

SEQ ID NO: 324689 - RNA, 22 nt, Human
uggcuggcuguccagcugggca

SEQ ID NO: 324690 - RNA, 22 nt, Human
uguuccugacggccaaagaggu

SEQ ID NO: 324691 - RNA, 22 nt, Human
uguaaagaaagacgcagaguua

SEQ ID NO: 324692 - RNA, 21 nt, Human
aaacugaccuugccugagaca

SEQ ID NO: 324693 - RNA, 22 nt, Human
aggcaguuguugcugagcagcu

SEQ ID NO: 324694 - RNA, 22 nt, Human
agccagugcagcuggaaauuca

SEQ ID NO: 324695 - RNA, 22 nt, Human
gcaguaaauugagagucauguu

SEQ ID NO: 324696 - RNA, 22 nt, Human
auuuccuguaggggcuugcgaa

SEQ ID NO: 324697 - RNA, 22 nt, Human
aaugccuuggagagccuagagg

SEQ ID NO: 324698 - RNA, 22 nt, Human
gugcaggacagcacaucuccug

SEQ ID NO: 324699 - RNA, 22 nt, Human
cuugccagggacucagucaggg

SEQ ID NO: 324700 - RNA, 22 nt, Human
acuuccagaaaugauuuaauuu

SEQ ID NO: 324701 - RNA, 22 nt, Human
cuggaaggagcccgggcggauc

SEQ ID NO: 324702 - RNA, 22 nt, Human
guggcaggagggcaucacuugg

SEQ ID NO: 324703 - RNA, 20 nt, Human
caacacugcccauuguuugc

SEQ ID NO: 324704 - RNA, 22 nt, Human
gauuguacuuauugagcuaaac

SEQ ID NO: 324705 - RNA, 22 nt, Human
gucuccugaggcauccauugaa

SEQ ID NO: 324706 - RNA, 20 nt, Human
gugcccaguuggugacagac

SEQ ID NO: 324707 - RNA, 22 nt, Human
gaugaaggggcuggugcccucu

SEQ ID NO: 324708 - RNA, 22 nt, Human
gcagccuccgcacugcgagucc

SEQ ID NO: 324709 - RNA, 22 nt, Human
ccucuaaauuguuugaaguugg

SEQ ID NO: 324710 - RNA, 22 nt, Human
uaaugccuuucuguacuauaug

SEQ ID NO: 324711 - RNA, 21 nt, Human
ugcauauauaagugcauacac

SEQ ID NO: 324712 - RNA, 22 nt, Human
ucuggaaggggaucugugguca

SEQ ID NO: 324713 - RNA, 22 nt, Human
uagugucucuuccuguuugaaa

SEQ ID NO: 324714 - RNA, 22 nt, Human
acuugcaucuuagagacucacc

SEQ ID NO: 324715 - RNA, 22 nt, Human
gcucagugaagggugccaagua

SEQ ID NO: 324716 - RNA, 23 nt, Human
uguguucagucaaggaucagagu

SEQ ID NO: 324717 - RNA, 22 nt, Human
uuuucuaacaucuaguaauuug

SEQ ID NO: 324718 - RNA, 22 nt, Human
aaaacuuucagggauacagaaa

SEQ ID NO: 324719 - RNA, 22 nt, Human
cucucuguuaugcuuucaugaa

SEQ ID NO: 324720 - RNA, 22 nt, Human
gcucuggcuacuguggcuaccg

SEQ ID NO: 324721 - RNA, 22 nt, Human
auuggagccccagaagcaaggu

SEQ ID NO: 324722 - RNA, 22 nt, Human
acacugguucucuuaacccuau

SEQ ID NO: 324723 - RNA, 22 nt, Human
cuuguauuaggaagaaugcuuu

SEQ ID NO: 324724 - RNA, 22 nt, Human
agauuucaauggauauugcaag

SEQ ID NO: 324725 - RNA, 23 nt, Human
acucugacuuaguuauagcuauu

SEQ ID NO: 324726 - RNA, 23 nt, Human
aagugcucaguggacagcauugc

SEQ ID NO: 324727 - RNA, 18 nt, Human
uccuuucaccccuucucu

SEQ ID NO: 324728 - RNA, 22 nt, Human
aguguuaaggcugguugcuaua

SEQ ID NO: 324729 - RNA, 22 nt, Human
guuuccuuuuggaauuagagcu

SEQ ID NO: 324730 - RNA, 22 nt, Human
ucuggauggucagcucuuccug

SEQ ID NO: 324731 - RNA, 22 nt, Human
ccucuuccuucucacuguggaa

SEQ ID NO: 324732 - RNA, 22 nt, Human
ugguuggauggcucuuguggcu

SEQ ID NO: 324733 - RNA, 22 nt, Human
cuccagcagaaagggcgagugg

SEQ ID NO: 324734 - RNA, 22 nt, Human
ccuggccgacauggugaaacgc

SEQ ID NO: 324735 - RNA, 22 nt, Human
ggacucuggcucaguguugcuu

SEQ ID NO: 324736 - RNA, 22 nt, Human
cauugcugugggcauuugcugc

SEQ ID NO: 324737 - RNA, 22 nt, Human
acggccgaugacuccagcaugg

SEQ ID NO: 324738 - RNA, 22 nt, Human
gccuggcucugaguuucucucc

SEQ ID NO: 324739 - RNA, 22 nt, Human
uccaggcugacgcagcuauuua

SEQ ID NO: 324740 - RNA, 22 nt, Human
guagaggggugauucugugaga

SEQ ID NO: 324741 - RNA, 22 nt, Human
ugcuggccucggcgcugggccu

SEQ ID NO: 324742 - RNA, 22 nt, Human
agcagugugggcugcacgcugg

SEQ ID NO: 324743 - RNA, 22 nt, Human
uaaaguuggaccugauuuuauu

SEQ ID NO: 324744 - RNA, 22 nt, Human
guggcauugccuucugcaggaa

SEQ ID NO: 324745 - RNA, 22 nt, Human
aacaggcuaaauuguccauuuc

SEQ ID NO: 324746 - RNA, 22 nt, Human
cgcagcugcugcucugaaacag

SEQ ID NO: 324747 - RNA, 22 nt, Human
uaaagcaaugaaaguuuugcag

SEQ ID NO: 324748 - RNA, 23 nt, Human
cauuugauccucacaauaaaugg

SEQ ID NO: 324749 - RNA, 23 nt, Human
ugcaaaauuugcagaguucgaug

SEQ ID NO: 324750 - RNA, 22 nt, Human
cuguucccgguggccgggccag

SEQ ID NO: 324751 - RNA, 22 nt, Human
ggauguggaccuugccugguga

SEQ ID NO: 324752 - RNA, 20 nt, Human
uuucacuggcuugauaaggu

SEQ ID NO: 324753 - RNA, 22 nt, Human
caguuuuacccaagcuuauuuu

SEQ ID NO: 324754 - RNA, 22 nt, Human
cuugaggcugcacuccagggcc

SEQ ID NO: 324755 - RNA, 22 nt, Human
cuucacugcagucauggcucug

SEQ ID NO: 324756 - RNA, 22 nt, Human
uccucacagcugguucauucag

SEQ ID NO: 324757 - RNA, 18 nt, Human
ucaguccuccauagagcu

SEQ ID NO: 324758 - RNA, 22 nt, Human
guugcaaaugggaagaugguua

SEQ ID NO: 324759 - RNA, 22 nt, Human
agguuuggguucauugcuggcu

SEQ ID NO: 324760 - RNA, 22 nt, Human
ucuacaacgugguuuuguugua

SEQ ID NO: 324761 - RNA, 22 nt, Human
cgccaguggcagcuggaacagg

SEQ ID NO: 324762 - RNA, 22 nt, Human
cugucaccucugcccuuugccc

SEQ ID NO: 324763 - RNA, 22 nt, Human
gguuuguugggguccaggccca

SEQ ID NO: 324764 - RNA, 22 nt, Human
gguauggagucugaguuucuag

SEQ ID NO: 324765 - RNA, 22 nt, Human
aaugaguuuguucuauuauuug

SEQ ID NO: 324766 - RNA, 22 nt, Human
cuuccugcaacaccuguguugc

SEQ ID NO: 324767 - RNA, 22 nt, Human
gauugcugccagcguguccgug

SEQ ID NO: 324768 - RNA, 22 nt, Human
ccagagcugcagguaaaaugcu

SEQ ID NO: 324769 - RNA, 22 nt, Human
cucaguguuaaagacuuuccag

SEQ ID NO: 324770 - RNA, 21 nt, Human
cuggagcuuggugagaagugu

SEQ ID NO: 324771 - RNA, 22 nt, Human
ccuguaccgcgaucugcugcgc

SEQ ID NO: 324772 - RNA, 22 nt, Human
uuugucaccaguggcuuuggua

SEQ ID NO: 324773 - RNA, 22 nt, Human
ugugagauuuuauuugauaugc

SEQ ID NO: 324774 - RNA, 22 nt, Human
uuuacuuuugguaaggucauuu

SEQ ID NO: 324775 - RNA, 22 nt, Human
aacaugaugacauuguaagcuu

SEQ ID NO: 324776 - RNA, 20 nt, Human
gcucaguggagaaaugcacc

SEQ ID NO: 324777 - RNA, 23 nt, Human
uugggcaaaucacuaacgucucc

SEQ ID NO: 324778 - RNA, 23 nt, Human
uacagccaugucgcugauuuaac

SEQ ID NO: 324779 - RNA, 15 nt, Human
caguuucugaucauc

SEQ ID NO: 324780 - RNA, 22 nt, Human
caaaauuguugaugcugcuuug

SEQ ID NO: 324781 - RNA, 22 nt, Human
ggcagcagaacuggcccuguau

SEQ ID NO: 324782 - RNA, 22 nt, Human
cugucaaauggaaacuuauccu

SEQ ID NO: 324783 - RNA, 22 nt, Human
aaaaugcucaucagcgauggcu

SEQ ID NO: 324784 - RNA, 22 nt, Human
ugggaaggggagcuggaaagga

SEQ ID NO: 324785 - RNA, 22 nt, Human
aaccauggauuucaguucaccu

SEQ ID NO: 324786 - RNA, 22 nt, Human
ugcugaggagguggcugugcuu

SEQ ID NO: 324787 - RNA, 22 nt, Human
gaaaacacuuugaucugaaagu

SEQ ID NO: 324788 - RNA, 22 nt, Human
uccuucaaucacccagugggga

SEQ ID NO: 324789 - RNA, 22 nt, Human
ucuucaugucucugcuugaguc

SEQ ID NO: 324790 - RNA, 22 nt, Human
ugcacaguuggcuacaucgugg

SEQ ID NO: 324791 - RNA, 22 nt, Human
gggagcuggagcuggaagacuc

SEQ ID NO: 324792 - RNA, 22 nt, Human
acaaagugaaaagcaucgaauu

SEQ ID NO: 324793 - RNA, 21 nt, Human
ccaugucagaugugggcugug

SEQ ID NO: 324794 - RNA, 22 nt, Human
gcugauggcuugcuggcugaca

SEQ ID NO: 324795 - RNA, 22 nt, Human
uagcgggucacccugcugugaa

SEQ ID NO: 324796 - RNA, 22 nt, Human
guacacucccccugugaaguug

SEQ ID NO: 324797 - RNA, 22 nt, Human
uugcuggaagguggcuggaauc

SEQ ID NO: 324798 - RNA, 22 nt, Human
ggccagccuggggcucccagac

SEQ ID NO: 324799 - RNA, 22 nt, Human
uccuuggagaaucuuguuuuac

SEQ ID NO: 324800 - RNA, 22 nt, Human
ugaagccagggacugacacuuc

SEQ ID NO: 324801 - RNA, 22 nt, Human
gaacugcauugugguauauguu

SEQ ID NO: 324802 - RNA, 22 nt, Human
ugcaaauauuccaugcuguuca

SEQ ID NO: 324803 - RNA, 22 nt, Human
augcauugaggaugacaugagu

SEQ ID NO: 324804 - RNA, 22 nt, Human
uuugaaauguaucaguauaggu

SEQ ID NO: 324805 - RNA, 22 nt, Human
guuaaugcaaagcagagggcaa

SEQ ID NO: 324806 - RNA, 22 nt, Human
uguaauguuagaaacaauugcu

SEQ ID NO: 324807 - RNA, 22 nt, Human
gucuugcacuuaccuaagaacu

SEQ ID NO: 324808 - RNA, 22 nt, Human
cauggccagauucuuucuucuc

SEQ ID NO: 324809 - RNA, 22 nt, Human
aaagccauaucuauucuauucu

SEQ ID NO: 324810 - RNA, 22 nt, Human
uuuuccuucugauacuccauuu

SEQ ID NO: 324811 - RNA, 22 nt, Human
cuguccuaugaguacucacuag

SEQ ID NO: 324812 - RNA, 23 nt, Human
ucuggcugcuccuuucaaugcuc

SEQ ID NO: 324813 - RNA, 22 nt, Human
gagucacuucccgaauaaaccc

SEQ ID NO: 324814 - RNA, 22 nt, Human
cguggcucugggcuccuuugcc

SEQ ID NO: 324815 - RNA, 22 nt, Human
aagcauuuuagauaaagcauca

SEQ ID NO: 324816 - RNA, 22 nt, Human
ugcuugcugaaaggcauuuaga

SEQ ID NO: 324817 - RNA, 22 nt, Human
uuucugugauaggcugcgacgc

SEQ ID NO: 324818 - RNA, 22 nt, Human
aggugggacccguggggugcga

SEQ ID NO: 324819 - RNA, 22 nt, Human
agucacuguucugucaugucaa

SEQ ID NO: 324820 - RNA, 22 nt, Human
uccggcggccggccugagcccg

SEQ ID NO: 324821 - RNA, 22 nt, Human
augccuguuugaaauuggaccu

SEQ ID NO: 324822 - RNA, 23 nt, Human
ggaggcacuuaggcagagcagag

SEQ ID NO: 324823 - RNA, 22 nt, Human
gugcgccagcucaaggggaggc

SEQ ID NO: 324824 - RNA, 19 nt, Human
uuugauagggcauaauaua

SEQ ID NO: 324825 - RNA, 22 nt, Human
agccaggucaggaaagguccca

SEQ ID NO: 324826 - RNA, 22 nt, Human
cacagcuucuccccgcugcggc

SEQ ID NO: 324827 - RNA, 22 nt, Human
ggagggaguuucauuccugccc

SEQ ID NO: 324828 - RNA, 22 nt, Human
acaaaggugagcagaagacaca

SEQ ID NO: 324829 - RNA, 18 nt, Human
aaacauggcuuaaaggcu

SEQ ID NO: 324830 - RNA, 22 nt, Human
ugcaucauuaagguacaguugg

SEQ ID NO: 324831 - RNA, 22 nt, Human
uugauguaauacuuugcaacca

SEQ ID NO: 324832 - RNA, 22 nt, Human
gaggggcucuugggcaugaagg

SEQ ID NO: 324833 - RNA, 22 nt, Human
ggcggcgcguagccggagacuu

SEQ ID NO: 324834 - RNA, 22 nt, Human
agcugcaccggcuggaccacug

SEQ ID NO: 324835 - RNA, 22 nt, Human
ccagcugggucccugcuggggc

SEQ ID NO: 324836 - RNA, 22 nt, Human
cuccugcagcccucagcagcca

SEQ ID NO: 324837 - RNA, 23 nt, Human
aauagcugguaaugauagcacaa

SEQ ID NO: 324838 - RNA, 23 nt, Human
aggcugcagaagaauagggucau

SEQ ID NO: 324839 - RNA, 22 nt, Human
auuuugacauugcggcauugcu

SEQ ID NO: 324840 - RNA, 22 nt, Human
agcugaaacuucccauuaauug

SEQ ID NO: 324841 - RNA, 19 nt, Human
uggcagcauugguaccuug

SEQ ID NO: 324842 - RNA, 22 nt, Human
cagcccaggacugcagguguuu

SEQ ID NO: 324843 - RNA, 22 nt, Human
auuguuacuggguuaauuugga

SEQ ID NO: 324844 - RNA, 19 nt, Human
uuacaugacauaugaagga

SEQ ID NO: 324845 - RNA, 22 nt, Human
gaccacugaaugcacuucuaau

SEQ ID NO: 324846 - RNA, 22 nt, Human
uuagacaucaagaagccaaugu

SEQ ID NO: 324847 - RNA, 22 nt, Human
uuccuucuucauuguguuacag

SEQ ID NO: 324848 - RNA, 22 nt, Human
cuucacaaaauauuucauuaua

SEQ ID NO: 324849 - RNA, 22 nt, Human
uuugcuugauuaggauauggaa

SEQ ID NO: 324850 - RNA, 22 nt, Human
ugacuuuggacuagugauuuaa

SEQ ID NO: 324851 - RNA, 22 nt, Human
caggguggcaggcaccauggcc

SEQ ID NO: 324852 - RNA, 22 nt, Human
cuuggcugaacuccaggaugca

SEQ ID NO: 324853 - RNA, 22 nt, Human
agucaguaugacuuauaguucu

SEQ ID NO: 324854 - RNA, 22 nt, Human
gacagcagccacagggagaggg

SEQ ID NO: 324855 - RNA, 22 nt, Human
augcaucaccgaguugcccacc

SEQ ID NO: 324856 - RNA, 22 nt, Human
cuggagaacagagcuguuuaga

SEQ ID NO: 324857 - RNA, 22 nt, Human
uguguuucucugaggggucccu

SEQ ID NO: 324858 - RNA, 22 nt, Human
gccaugaacucgggcauggaga

SEQ ID NO: 324859 - RNA, 22 nt, Human
uccuggccaaguagauguggcg

SEQ ID NO: 324860 - RNA, 22 nt, Human
uaguauuuccuguaagcuauag

SEQ ID NO: 324861 - RNA, 22 nt, Human
aguggcugugaaauacauggga

SEQ ID NO: 324862 - RNA, 22 nt, Human
cugagcaugcuacaugcagcac

SEQ ID NO: 324863 - RNA, 22 nt, Human
aggcucagcaucugauucauau

SEQ ID NO: 324864 - RNA, 22 nt, Human
agaaaagaggcuuucuaagcau

SEQ ID NO: 324865 - RNA, 22 nt, Human
ccaguccaggccauggauuuug

SEQ ID NO: 324866 - RNA, 22 nt, Human
uagaucuuucacuacuguguag

SEQ ID NO: 324867 - RNA, 22 nt, Human
aagaaaagguaaccgcuuaucu

SEQ ID NO: 324868 - RNA, 22 nt, Human
gccugcuuccuagccuuccaag

SEQ ID NO: 324869 - RNA, 22 nt, Human
ugauuuacaguagugucuaaac

SEQ ID NO: 324870 - RNA, 22 nt, Human
agccaugcaccuuacucuugcu

SEQ ID NO: 324871 - RNA, 22 nt, Human
uuccuccagccuggagcacuuc

SEQ ID NO: 324872 - RNA, 22 nt, Human
aaagucuuaauguaaguuuagu

SEQ ID NO: 324873 - RNA, 22 nt, Human
gcugcagggagcuggaaggcuc

SEQ ID NO: 324874 - RNA, 22 nt, Human
uugcauauccuccaacacaugg

SEQ ID NO: 324875 - RNA, 22 nt, Human
agcugucuaccugcagaguccu

SEQ ID NO: 324876 - RNA, 20 nt, Human
uuuuccacuccucaaaacag

SEQ ID NO: 324877 - RNA, 22 nt, Human
uagaagaacaugucaaacuaua

SEQ ID NO: 324878 - RNA, 22 nt, Human
gcaguggccacauggaggagga

SEQ ID NO: 324879 - RNA, 22 nt, Human
acuucccacugcagugacugag

SEQ ID NO: 324880 - RNA, 22 nt, Human
guucugucugagcaccacagga

SEQ ID NO: 324881 - RNA, 22 nt, Human
ugcugcucuucaccauggccuc

SEQ ID NO: 324882 - RNA, 22 nt, Human
aaagagcucggaaaguguugaa

SEQ ID NO: 324883 - RNA, 23 nt, Human
gcauccagagcucaguccccuuu

SEQ ID NO: 324884 - RNA, 22 nt, Human
uuucccaggcuggaaugcagug

SEQ ID NO: 324885 - RNA, 22 nt, Human
uccucuucaaaauagcucugaa

SEQ ID NO: 324886 - RNA, 22 nt, Human
gugugcgccgacacagccaggu

SEQ ID NO: 324887 - RNA, 22 nt, Human
aggguccugggugcaguugcuu

SEQ ID NO: 324888 - RNA, 22 nt, Human
caaacauuuguuggaaccccug

SEQ ID NO: 324889 - RNA, 22 nt, Human
uuacaguuuacauaagaauugu

SEQ ID NO: 324890 - RNA, 22 nt, Human
acaguguuucacuuaaccguuu

SEQ ID NO: 324891 - RNA, 19 nt, Human
aaauccaagcucaggccuc

SEQ ID NO: 324892 - RNA, 22 nt, Human
ccuuaauuucuguccuucagau

SEQ ID NO: 324893 - RNA, 22 nt, Human
ucaauuuauguggcuauucauu

SEQ ID NO: 324894 - RNA, 22 nt, Human
ugcagcuucucugcaacaggag

SEQ ID NO: 324895 - RNA, 23 nt, Human
gcugccaaggaggcaggggugcc

SEQ ID NO: 324896 - RNA, 22 nt, Human
ggagaggguguggaaaguuauc

SEQ ID NO: 324897 - RNA, 22 nt, Human
acaguaaucugggaacuuguua

SEQ ID NO: 324898 - RNA, 22 nt, Human
uuggaaagggauaucuguacuu

SEQ ID NO: 324899 - RNA, 22 nt, Human
ggacauggaaguauggagugga

SEQ ID NO: 324900 - RNA, 22 nt, Human
ggcggcacgcaggcugcugucg

SEQ ID NO: 324901 - RNA, 22 nt, Human
uguucaguuugcuaucauaauc

SEQ ID NO: 324902 - RNA, 22 nt, Human
ggcagugaugucaaacagugaa

SEQ ID NO: 324903 - RNA, 22 nt, Human
uagcauuuagaacaccuugaga

SEQ ID NO: 324904 - RNA, 22 nt, Human
ugugguuuugguucagaaacaa

SEQ ID NO: 324905 - RNA, 22 nt, Human
ucuaaagcuccuuccacuaaaa

SEQ ID NO: 324906 - RNA, 22 nt, Human
ugguuuguauauguuugugaga

SEQ ID NO: 324907 - RNA, 20 nt, Human
uugagcagcagugcuguguc

SEQ ID NO: 324908 - RNA, 22 nt, Human
gcaagcagcccagaacagcucu

SEQ ID NO: 324909 - RNA, 22 nt, Human
acucaucuuugaauuuucagua

SEQ ID NO: 324910 - RNA, 22 nt, Human
uguacauacauagauauacaca

SEQ ID NO: 324911 - RNA, 22 nt, Human
uauaugcagauuuucaucaucg

SEQ ID NO: 324912 - RNA, 22 nt, Human
cuggagaggcugggaacagguu

SEQ ID NO: 324913 - RNA, 22 nt, Human
gaaauguuggacacuugaaauu

SEQ ID NO: 324914 - RNA, 22 nt, Human
uuuguaguuguggaugcugaag

SEQ ID NO: 324915 - RNA, 22 nt, Human
guguccagagccgggcugaaug

SEQ ID NO: 324916 - RNA, 22 nt, Human
uaggcagauuccauauuuuggc

SEQ ID NO: 324917 - RNA, 22 nt, Human
aguguugucaaacggcucagca

SEQ ID NO: 324918 - RNA, 22 nt, Human
auauaccucauucuuugagugc

SEQ ID NO: 324919 - RNA, 22 nt, Human
uguuggcagugcuacagucagu

SEQ ID NO: 324920 - RNA, 22 nt, Human
uccucuccaggugagccgaaau

SEQ ID NO: 324921 - RNA, 22 nt, Human
guaaaucagugucauuuuagaa

SEQ ID NO: 324922 - RNA, 18 nt, Human
cuggucucccuucgcuuu

SEQ ID NO: 324923 - RNA, 22 nt, Human
uugaacaguccuaagagacccu

SEQ ID NO: 324924 - RNA, 22 nt, Human
cugggaggcagucucucuagaa

SEQ ID NO: 324925 - RNA, 22 nt, Human
uuucacauacaguguauaguag

SEQ ID NO: 324926 - RNA, 22 nt, Human
agcuccacucccugccuguuuc

SEQ ID NO: 324927 - RNA, 22 nt, Human
gaaaauaguucaucacaaugau

SEQ ID NO: 324928 - RNA, 22 nt, Human
ggugagaggcagugcuguggaa

SEQ ID NO: 324929 - RNA, 20 nt, Human
caucaacaccuugucagccu

SEQ ID NO: 324930 - RNA, 22 nt, Human
ggcaguggugggaggcucgcuc

SEQ ID NO: 324931 - RNA, 22 nt, Human
ugugucuuuggcgaugucugga

SEQ ID NO: 324932 - RNA, 22 nt, Human
ucccagucuagagccggauugg

SEQ ID NO: 324933 - RNA, 22 nt, Human
agcuggugugccaguuccaguu

SEQ ID NO: 324934 - RNA, 22 nt, Human
gucugcugacagagcauggacc

SEQ ID NO: 324935 - RNA, 22 nt, Human
cuggagcucuguguguuccuga

SEQ ID NO: 324936 - RNA, 21 nt, Human
ucuccucccggggagaggccg

SEQ ID NO: 324937 - RNA, 21 nt, Human
uuuguucacacacagggcagc

SEQ ID NO: 324938 - RNA, 21 nt, Human
ggccuuggcgggggccgaauu

SEQ ID NO: 324939 - RNA, 22 nt, Human
cuacuguaguuaaaguuuugua

SEQ ID NO: 324940 - RNA, 22 nt, Human
uuuaauuauaucugggcaguua

SEQ ID NO: 324941 - RNA, 22 nt, Human
ucaguguagcagacuuguagcc

SEQ ID NO: 324942 - RNA, 22 nt, Human
uuuccaaggaugugucucucua

SEQ ID NO: 324943 - RNA, 22 nt, Human
agcagcaccuguccucgcugcu

SEQ ID NO: 324944 - RNA, 22 nt, Human
uucagagcuggugucuacagcu

SEQ ID NO: 324945 - RNA, 22 nt, Human
aguguuugaguuugcggcauug

SEQ ID NO: 324946 - RNA, 22 nt, Human
cucaugucggcaggacucgccc

SEQ ID NO: 324947 - RNA, 22 nt, Human
uggccccugaggagcgucagcc

SEQ ID NO: 324948 - RNA, 22 nt, Human
cuucauuucaggcugaagaaua

SEQ ID NO: 324949 - RNA, 22 nt, Human
ccucuucagcaaaguucggccc

SEQ ID NO: 324950 - RNA, 20 nt, Human
ugugguuuuugccaguugaa

SEQ ID NO: 324951 - RNA, 22 nt, Human
agagaagagucuugucaaauua

SEQ ID NO: 324952 - RNA, 21 nt, Human
uccuccuguagaggguccugg

SEQ ID NO: 324953 - RNA, 22 nt, Human
gcuucccacagcuggacugggg

SEQ ID NO: 324954 - RNA, 22 nt, Human
aacagauuguaaccugauagcc

SEQ ID NO: 324955 - RNA, 23 nt, Human
augccaggcugccuggccagccu

SEQ ID NO: 324956 - RNA, 19 nt, Human
uaugaaguugauaaaaguu

SEQ ID NO: 324957 - RNA, 22 nt, Human
ugcauguuuuauaccaaagcuu

SEQ ID NO: 324958 - RNA, 22 nt, Human
acauuuaaugauccuacuguga

SEQ ID NO: 324959 - RNA, 22 nt, Human
agcuuugggcagaagaggauuc

SEQ ID NO: 324960 - RNA, 22 nt, Human
aauucagguuauauuugcaacu

SEQ ID NO: 324961 - RNA, 22 nt, Human
uucuccucagcaaggcagcuuu

SEQ ID NO: 324962 - RNA, 22 nt, Human
acuuuuaaggggccuugauuua

SEQ ID NO: 324963 - RNA, 22 nt, Human
uucacagcuaagagcuaaguaa

SEQ ID NO: 324964 - RNA, 22 nt, Human
acagccaggaauucuggagaag

SEQ ID NO: 324965 - RNA, 22 nt, Human
uugcugccuuuguacucugaug

SEQ ID NO: 324966 - RNA, 22 nt, Human
ugcccguggccuggggcagcuu

SEQ ID NO: 324967 - RNA, 22 nt, Human
uuuaauuuucugggcccagcag

SEQ ID NO: 324968 - RNA, 22 nt, Human
ucacuaugcccagaauacaguu

SEQ ID NO: 324969 - RNA, 19 nt, Human
ugcagcuguaugagcuuaa

SEQ ID NO: 324970 - RNA, 22 nt, Human
acaucucacuucuuugaaggcu

SEQ ID NO: 324971 - RNA, 20 nt, Human
auuagcuuggagacaguggc

SEQ ID NO: 324972 - RNA, 22 nt, Human
guacuuucaggcuuucccuuaa

SEQ ID NO: 324973 - RNA, 22 nt, Human
accuggaggcagagguugcagu

SEQ ID NO: 324974 - RNA, 22 nt, Human
gugauuuucuccuccuagaagu

SEQ ID NO: 324975 - RNA, 22 nt, Human
caguuuuucaaaauuacaugau

SEQ ID NO: 324976 - RNA, 22 nt, Human
ggaacuccugcuccaagcagcu

SEQ ID NO: 324977 - RNA, 22 nt, Human
uuaccuuguaaaacauauuccu

SEQ ID NO: 324978 - RNA, 22 nt, Human
ccuaggcuaauucaguccagua

SEQ ID NO: 324979 - RNA, 22 nt, Human
caguuaaacagauugaguguua

SEQ ID NO: 324980 - RNA, 22 nt, Human
uugccaggagacaucuggagcc

SEQ ID NO: 324981 - RNA, 22 nt, Human
aaauugcaaaaguacuuuuagg

SEQ ID NO: 324982 - RNA, 22 nt, Human
ccagcagccaccuucucgaaau

SEQ ID NO: 324983 - RNA, 22 nt, Human
cuggaagcgucggaggaagggc

SEQ ID NO: 324984 - RNA, 23 nt, Human
auaugucaugcaccagcacuuua

SEQ ID NO: 324985 - RNA, 22 nt, Human
ugcugcgggacccacugugggc

SEQ ID NO: 324986 - RNA, 22 nt, Human
uacuuucuagcucuccccaguu

SEQ ID NO: 324987 - RNA, 22 nt, Human
augcaguuagguaauagucuca

SEQ ID NO: 324988 - RNA, 23 nt, Human
uggcuugcuaauguuccaaauaa

SEQ ID NO: 324989 - RNA, 22 nt, Human
gccuggcaaggcccuguugacu

SEQ ID NO: 324990 - RNA, 22 nt, Human
ggcuggccuguguggccgccac

SEQ ID NO: 324991 - RNA, 20 nt, Human
uacaauauucccacuuugcu

SEQ ID NO: 324992 - RNA, 22 nt, Human
gguuauuguggagaaguuccgg

SEQ ID NO: 324993 - RNA, 22 nt, Human
uuuguguuggaagaaaugcuac

SEQ ID NO: 324994 - RNA, 22 nt, Human
gagcuuuucccgucuuucucgu

SEQ ID NO: 324995 - RNA, 22 nt, Human
ggaggugacuggaucaugggca

SEQ ID NO: 324996 - RNA, 22 nt, Human
ucuccucuauuucuguauguau

SEQ ID NO: 324997 - RNA, 20 nt, Human
gggugugggcccggccaggc

SEQ ID NO: 324998 - RNA, 22 nt, Human
cuugaaguggagcuuuugaaau

SEQ ID NO: 324999 - RNA, 22 nt, Human
uccaggagggggagccgugccg

SEQ ID NO: 325000 - RNA, 22 nt, Human
ccuucaaucuuaagucagccca

SEQ ID NO: 325001 - RNA, 22 nt, Human
auuuacucgugcuucauugaau

SEQ ID NO: 325002 - RNA, 22 nt, Human
cuggccagccucccagguaccc

SEQ ID NO: 325003 - RNA, 22 nt, Human
gagugugucggucagcguggcg

SEQ ID NO: 325004 - RNA, 22 nt, Human
uaugcuguauucuguauguuag

SEQ ID NO: 325005 - RNA, 22 nt, Human
ugauuugaauuuuaaaacacug

SEQ ID NO: 325006 - RNA, 22 nt, Human
cuuccucuguggccagagugua

SEQ ID NO: 325007 - RNA, 22 nt, Human
uuuuguguugccauguuaagca

SEQ ID NO: 325008 - RNA, 22 nt, Human
uucuuuuaauuucugucugcag

SEQ ID NO: 325009 - RNA, 22 nt, Human
ucaaagaucagaugguuguagg

SEQ ID NO: 325010 - RNA, 22 nt, Human
cuuuauguuggggugucuuagu

SEQ ID NO: 325011 - RNA, 22 nt, Human
cuucuccgacaaccgacgccgg

SEQ ID NO: 325012 - RNA, 22 nt, Human
uacuguauacuacugcuguucu

SEQ ID NO: 325013 - RNA, 22 nt, Human
uuugggaaacuuaggggucaga

SEQ ID NO: 325014 - RNA, 22 nt, Human
acacauggucuacuucuucuca

SEQ ID NO: 325015 - RNA, 22 nt, Human
acuggaaaguauucuuucacug

SEQ ID NO: 325016 - RNA, 22 nt, Human
auuuacagccuugccaucuaua

SEQ ID NO: 325017 - RNA, 22 nt, Human
uugucgggcuuacgcagggcca

SEQ ID NO: 325018 - RNA, 22 nt, Human
gggagcugagcuggaagagaau

SEQ ID NO: 325019 - RNA, 22 nt, Human
uaaguugauuauaaccacugga

SEQ ID NO: 325020 - RNA, 22 nt, Human
cugggcuguuuguucuggucuc

SEQ ID NO: 325021 - RNA, 22 nt, Human
agcauggcuuuggaggauagca

SEQ ID NO: 325022 - RNA, 22 nt, Human
agcuaauguauguugaaagcac

SEQ ID NO: 325023 - RNA, 22 nt, Human
uuccaaguuaggcgagcuggug

SEQ ID NO: 325024 - RNA, 22 nt, Human
gcuuucuuuucaagaauguauu

SEQ ID NO: 325025 - RNA, 22 nt, Human
caaagccaggcuuucuaaugua

SEQ ID NO: 325026 - RNA, 22 nt, Human
gguggcaagggcagccaguaac

SEQ ID NO: 325027 - RNA, 20 nt, Human
uccuccuugcagagcccaga

SEQ ID NO: 325028 - RNA, 22 nt, Human
aagcuguuagggagugguaggu

SEQ ID NO: 325029 - RNA, 22 nt, Human
caagagcuggguggcaagcuag

SEQ ID NO: 325030 - RNA, 22 nt, Human
ucugagugggaacucucaugac

SEQ ID NO: 325031 - RNA, 22 nt, Human
ucaagaaagggcuucaccagga

SEQ ID NO: 325032 - RNA, 22 nt, Human
ccaguucuuucugugugcaaca

SEQ ID NO: 325033 - RNA, 22 nt, Human
cccugacccuaucagagggcca

SEQ ID NO: 325034 - RNA, 20 nt, Human
uuugauugccccucugacuu

SEQ ID NO: 325035 - RNA, 22 nt, Human
ugcuuuauucgacaucugguag

SEQ ID NO: 325036 - RNA, 22 nt, Human
uuuguguuguacuucugugcau

SEQ ID NO: 325037 - RNA, 22 nt, Human
aaaucugagaaauauuguccag

SEQ ID NO: 325038 - RNA, 22 nt, Human
uacauggauguuauccuuacug

SEQ ID NO: 325039 - RNA, 22 nt, Human
uuguacuuaaauaugcaaauag

SEQ ID NO: 325040 - RNA, 22 nt, Human
caggcacaaugagcgccaucuu

SEQ ID NO: 325041 - RNA, 22 nt, Human
aggacaaaggaccagaucugga

SEQ ID NO: 325042 - RNA, 22 nt, Human
cccagccucuggguucugccgg

SEQ ID NO: 325043 - RNA, 22 nt, Human
auggccuuucucaguggugcuu

SEQ ID NO: 325044 - RNA, 22 nt, Human
gcugccuggaauaacggcuggc

SEQ ID NO: 325045 - RNA, 22 nt, Human
ggcugcccucggggucgcaggc

SEQ ID NO: 325046 - RNA, 22 nt, Human
gacagguaaagaugguggcagg

SEQ ID NO: 325047 - RNA, 19 nt, Human
uugcuucaugucuuuugcu

SEQ ID NO: 325048 - RNA, 22 nt, Human
acugguuuuggaaaucaguaca

SEQ ID NO: 325049 - RNA, 16 nt, Human
aggagcuggguaggag

SEQ ID NO: 325050 - RNA, 22 nt, Human
aggacagcagugcuggcacuug

SEQ ID NO: 325051 - RNA, 22 nt, Human
cauuuuccucugcugguguuca

SEQ ID NO: 325052 - RNA, 22 nt, Human
uaaguauuggccuauagcuaga

SEQ ID NO: 325053 - RNA, 22 nt, Human
cuggccucacagaggcuaagcc

SEQ ID NO: 325054 - RNA, 22 nt, Human
gcagcugccgugagcucacgcc

SEQ ID NO: 325055 - RNA, 22 nt, Human
ggcagucuuucccuugagcucu

SEQ ID NO: 325056 - RNA, 18 nt, Human
aguaaauguuaaauauug

SEQ ID NO: 325057 - RNA, 22 nt, Human
aaggaggaauguagccagcucc

SEQ ID NO: 325058 - RNA, 22 nt, Human
agaacaggaggaagccagcucc

SEQ ID NO: 325059 - RNA, 22 nt, Human
caaaugaugcauggcuagugag

SEQ ID NO: 325060 - RNA, 22 nt, Human
gugggcaucuccuuggaagcca

SEQ ID NO: 325061 - RNA, 21 nt, Human
ugcuccaggagggggcagucc

SEQ ID NO: 325062 - RNA, 22 nt, Human
aaacucuacauggucgcaaaaa

SEQ ID NO: 325063 - RNA, 19 nt, Human
ggguccauggugucaagga

SEQ ID NO: 325064 - RNA, 22 nt, Human
agcaauguuggccuauauaccu

SEQ ID NO: 325065 - RNA, 22 nt, Human
uggaggcagccgugaaccaccu

SEQ ID NO: 325066 - RNA, 22 nt, Human
uguuugcucugacuaucuugcg

SEQ ID NO: 325067 - RNA, 22 nt, Human
uuguugcugcucaaccucuaua

SEQ ID NO: 325068 - RNA, 22 nt, Human
aggcucgcaugcccugcaccac

SEQ ID NO: 325069 - RNA, 22 nt, Human
aguacuuuuuguucaauugugc

SEQ ID NO: 325070 - RNA, 22 nt, Human
uuggccguuucacugggcaguu

SEQ ID NO: 325071 - RNA, 22 nt, Human
auuuuagagaaacaaacguagg

SEQ ID NO: 325072 - RNA, 22 nt, Human
acaaacuucccagacaagcucc

SEQ ID NO: 325073 - RNA, 22 nt, Human
ggcagguguggugaccagagau

SEQ ID NO: 325074 - RNA, 22 nt, Human
auguuguugaacucuuugcaug

SEQ ID NO: 325075 - RNA, 21 nt, Human
uugcuguuuucccaaugcagu

SEQ ID NO: 325076 - RNA, 22 nt, Human
uuugacaacugugcaguuugua

SEQ ID NO: 325077 - RNA, 22 nt, Human
ccacugugcccagccucauggg

SEQ ID NO: 325078 - RNA, 21 nt, Human
caagacauaugaguacucugg

SEQ ID NO: 325079 - RNA, 22 nt, Human
cacaguuuugucuugguuucca

SEQ ID NO: 325080 - RNA, 21 nt, Human
aaagugguaaggauuauuuug

SEQ ID NO: 325081 - RNA, 22 nt, Human
caggaaugguuaaucuaaagug

SEQ ID NO: 325082 - RNA, 22 nt, Human
agucaacagaguggccgcagcg

SEQ ID NO: 325083 - RNA, 22 nt, Human
gcuucuggaagcauaugcaaga

SEQ ID NO: 325084 - RNA, 22 nt, Human
agcacuggaaaguuaagaguuu

SEQ ID NO: 325085 - RNA, 22 nt, Human
uuccuuggagucaaacagggag

SEQ ID NO: 325086 - RNA, 22 nt, Human
ggaaggaucuggcugaaaucca

SEQ ID NO: 325087 - RNA, 22 nt, Human
ggaaaaugggaaccugaagcca

SEQ ID NO: 325088 - RNA, 22 nt, Human
accuccuccaaggagccauagg

SEQ ID NO: 325089 - RNA, 22 nt, Human
agcucuuuuaucaugaggagag

SEQ ID NO: 325090 - RNA, 22 nt, Human
ccagacuggggcuccuugaggg

SEQ ID NO: 325091 - RNA, 22 nt, Human
caauguacaaaauaauuacaca

SEQ ID NO: 325092 - RNA, 23 nt, Human
augcaacauugccaguaugggca

SEQ ID NO: 325093 - RNA, 23 nt, Human
aacauuuguaaggugauuuuguu

SEQ ID NO: 325094 - RNA, 22 nt, Human
agcugugaccuucaagagcuac

SEQ ID NO: 325095 - RNA, 22 nt, Human
auuagccuguugcauuuucacu

SEQ ID NO: 325096 - RNA, 18 nt, Human
auuugcaggcaugcaggc

SEQ ID NO: 325097 - RNA, 22 nt, Human
cagcuggacugggauguagcga

SEQ ID NO: 325098 - RNA, 22 nt, Human
aguucugacucugaaucuggga

SEQ ID NO: 325099 - RNA, 22 nt, Human
cacuguuuuacauguuauuuaa

SEQ ID NO: 325100 - RNA, 22 nt, Human
acucagaguuugcguuccauac

SEQ ID NO: 325101 - RNA, 22 nt, Human
uugggauacaucuugcugagcc

SEQ ID NO: 325102 - RNA, 22 nt, Human
cccaggaguuagagguuguggu

SEQ ID NO: 325103 - RNA, 18 nt, Human
gggguagaguguccuauu

SEQ ID NO: 325104 - RNA, 22 nt, Human
gcugucaggaacaugccuuggu

SEQ ID NO: 325105 - RNA, 22 nt, Human
gucuuuuuuacaccuuacauca

SEQ ID NO: 325106 - RNA, 22 nt, Human
ucacaguucaacuaguucagau

SEQ ID NO: 325107 - RNA, 22 nt, Human
uaucuuugguagcuuuccuaag

SEQ ID NO: 325108 - RNA, 22 nt, Human
gucuggagccacugcugcugcu

SEQ ID NO: 325109 - RNA, 22 nt, Human
cuccacagccccuccaguggca

SEQ ID NO: 325110 - RNA, 22 nt, Human
uggaagggagcuggaauuugga

SEQ ID NO: 325111 - RNA, 22 nt, Human
gacaaagcgccugcucgcgggc

SEQ ID NO: 325112 - RNA, 22 nt, Human
ccaggcagccugcuccauucug

SEQ ID NO: 325113 - RNA, 22 nt, Human
gauguggcugcucuaaagccca

SEQ ID NO: 325114 - RNA, 22 nt, Human
ugccugugggugaugauuugau

SEQ ID NO: 325115 - RNA, 22 nt, Human
gggcagcaaaucugagucuggu

SEQ ID NO: 325116 - RNA, 22 nt, Human
ugucuagaaaugcugagucuca

SEQ ID NO: 325117 - RNA, 22 nt, Human
augcaauaguaauucuagucug

SEQ ID NO: 325118 - RNA, 22 nt, Human
agcaggugucacuuucacucca

SEQ ID NO: 325119 - RNA, 22 nt, Human
uguucauaucauuuugaaagcu

SEQ ID NO: 325120 - RNA, 20 nt, Human
ucaggguuucccauucuugg

SEQ ID NO: 325121 - RNA, 22 nt, Human
uccgcgcucucacccgcucccg

SEQ ID NO: 325122 - RNA, 22 nt, Human
auguccaggaagucuuaacuca

SEQ ID NO: 325123 - RNA, 22 nt, Human
aggaaaauggaccagaguuguu

SEQ ID NO: 325124 - RNA, 22 nt, Human
uaggcacugggcuaggacaggu

SEQ ID NO: 325125 - RNA, 22 nt, Human
uguguacauguaucaacuaucg

SEQ ID NO: 325126 - RNA, 22 nt, Human
uuugagaagcauggcuguauuc

SEQ ID NO: 325127 - RNA, 22 nt, Human
ggcugcugcccaccccugcaug

SEQ ID NO: 325128 - RNA, 22 nt, Human
uggaaaauauuuaggugaauga

SEQ ID NO: 325129 - RNA, 22 nt, Human
uguuaguauuggcaaauuuguu

SEQ ID NO: 325130 - RNA, 22 nt, Human
ggcuguggucauuaggagguug

SEQ ID NO: 325131 - RNA, 22 nt, Human
guguuuaaugcagaugugggug

SEQ ID NO: 325132 - RNA, 20 nt, Human
aaaaacaguaaugcugaaga

SEQ ID NO: 325133 - RNA, 22 nt, Human
uauuaugguuguagguuaacaa

SEQ ID NO: 325134 - RNA, 22 nt, Human
uuuauucucuaguuggucagau

SEQ ID NO: 325135 - RNA, 22 nt, Human
gcggcuccgaagccaggccgcg

SEQ ID NO: 325136 - RNA, 22 nt, Human
agggcucagaaagcagguuuuc

SEQ ID NO: 325137 - RNA, 22 nt, Human
accauccuuuaguuugcguuuc

SEQ ID NO: 325138 - RNA, 22 nt, Human
gcacuucaccacuguccugguu

SEQ ID NO: 325139 - RNA, 22 nt, Human
gucucuaucauagcugaacccu

SEQ ID NO: 325140 - RNA, 22 nt, Human
uuuccuacugcccuauacacac

SEQ ID NO: 325141 - RNA, 22 nt, Human
auguaagagcuuugcagggaaa

SEQ ID NO: 325142 - RNA, 22 nt, Human
ccacuuugagaagcugaugaaa

SEQ ID NO: 325143 - RNA, 23 nt, Human
gggcugcuccaggccaaggcugg

SEQ ID NO: 325144 - RNA, 22 nt, Human
uuuggucuggaaucuucagggu

SEQ ID NO: 325145 - RNA, 22 nt, Human
ucaugcaccucuccaugucccc

SEQ ID NO: 325146 - RNA, 22 nt, Human
agcaguuuauccucauaaugga

SEQ ID NO: 325147 - RNA, 22 nt, Human
uuugaaaggagcuuuauccaga

SEQ ID NO: 325148 - RNA, 22 nt, Human
cugacagcgagagaguugcccc

SEQ ID NO: 325149 - RNA, 22 nt, Human
uuccaaggagagcucgaccuca

SEQ ID NO: 325150 - RNA, 22 nt, Human
acccugccucugcuuccuguag

SEQ ID NO: 325151 - RNA, 22 nt, Human
agccacagucuguagccagcuu

SEQ ID NO: 325152 - RNA, 22 nt, Human
gacagcaggaugugaggggaug

SEQ ID NO: 325153 - RNA, 22 nt, Human
uucccuuucuuaaagaguuagg

SEQ ID NO: 325154 - RNA, 22 nt, Human
uucuuuccucccagccuuugga

SEQ ID NO: 325155 - RNA, 22 nt, Human
ggcacugggugagggucacugg

SEQ ID NO: 325156 - RNA, 22 nt, Human
uugcaucagcaggcauaauugg

SEQ ID NO: 325157 - RNA, 22 nt, Human
cccuggcucaggcagcuuuguu

SEQ ID NO: 325158 - RNA, 22 nt, Human
guccguaguggcugaugcuuug

SEQ ID NO: 325159 - RNA, 22 nt, Human
ucacuguuaauaaauagcaaag

SEQ ID NO: 325160 - RNA, 22 nt, Human
ugaacagugugagggugugacc

SEQ ID NO: 325161 - RNA, 22 nt, Human
uuaaguauauccauuugacugg

SEQ ID NO: 325162 - RNA, 22 nt, Human
agaaagcacccugcacuuucug

SEQ ID NO: 325163 - RNA, 22 nt, Human
gugcucacugugagacguccug

SEQ ID NO: 325164 - RNA, 22 nt, Human
gccagguaugaauuacgcacga

SEQ ID NO: 325165 - RNA, 22 nt, Human
gugccuccaggcucgacuaguc

SEQ ID NO: 325166 - RNA, 22 nt, Human
accuggaccugccaccuaugag

SEQ ID NO: 325167 - RNA, 22 nt, Human
gcagcccaggcucgcucacugc

SEQ ID NO: 325168 - RNA, 22 nt, Human
ggagccuggaguuucugauggg

SEQ ID NO: 325169 - RNA, 22 nt, Human
ucugagagcuguagaagccuau

SEQ ID NO: 325170 - RNA, 18 nt, Human
agcugaggggacugaaga

SEQ ID NO: 325171 - RNA, 22 nt, Human
uaacacauagauauuuuaacuu

SEQ ID NO: 325172 - RNA, 22 nt, Human
ggcucuguaaguguugcaggua

SEQ ID NO: 325173 - RNA, 22 nt, Human
cuucucuuggguguggugucuu

SEQ ID NO: 325174 - RNA, 22 nt, Human
gcugcuggcuuccugcuguuuu

SEQ ID NO: 325175 - RNA, 22 nt, Human
auggugguagaagcacuaugug

SEQ ID NO: 325176 - RNA, 22 nt, Human
ugugcuauuuuugcauaugugu

SEQ ID NO: 325177 - RNA, 22 nt, Human
auccauuuuuucagaaugcucu

SEQ ID NO: 325178 - RNA, 22 nt, Human
uccuuucugucuuuacucugga

SEQ ID NO: 325179 - RNA, 22 nt, Human
uugcacagaugcacaugguugc

SEQ ID NO: 325180 - RNA, 22 nt, Human
caugcuggucagccaguggaug

SEQ ID NO: 325181 - RNA, 22 nt, Human
gaauacaaauaauaccaaggug

SEQ ID NO: 325182 - RNA, 22 nt, Human
gggagcugaaggagccggcggg

SEQ ID NO: 325183 - RNA, 22 nt, Human
auguucaaguaccuuugugucu

SEQ ID NO: 325184 - RNA, 17 nt, Human
gagguaggaagugaguc

SEQ ID NO: 325185 - RNA, 22 nt, Human
agcugcugcaaguggugcuaac

SEQ ID NO: 325186 - RNA, 22 nt, Human
auucugcugccuaguuuaugaa

SEQ ID NO: 325187 - RNA, 22 nt, Human
gggagcugaacugcugaaguug

SEQ ID NO: 325188 - RNA, 22 nt, Human
acagcuggaggucugugagcac

SEQ ID NO: 325189 - RNA, 18 nt, Human
auggcuccagugucuucc

SEQ ID NO: 325190 - RNA, 22 nt, Human
acaggaaaugaaaugguaucua

SEQ ID NO: 325191 - RNA, 22 nt, Human
cugccuuggcccuaguucaugg

SEQ ID NO: 325192 - RNA, 22 nt, Human
agucacuguuuaaucuagcuaa

SEQ ID NO: 325193 - RNA, 22 nt, Human
ccgagcuguggucucuuuuacg

SEQ ID NO: 325194 - RNA, 22 nt, Human
cugggaagggacgccagugccu

SEQ ID NO: 325195 - RNA, 22 nt, Human
uggagcugguucuggggaagcu

SEQ ID NO: 325196 - RNA, 22 nt, Human
gagaugaagaggcccuuggagu

SEQ ID NO: 325197 - RNA, 22 nt, Human
uuacaauuacuugaucucagcu

SEQ ID NO: 325198 - RNA, 19 nt, Human
acccucuccccacuggguc

SEQ ID NO: 325199 - RNA, 22 nt, Human
gcugguggcagagcuccgcggc

SEQ ID NO: 325200 - RNA, 22 nt, Human
augcuuucucuuaguucauuga

SEQ ID NO: 325201 - RNA, 22 nt, Human
agguggaguuaagugugaacug

SEQ ID NO: 325202 - RNA, 22 nt, Human
auucccagauuuauauugauag

SEQ ID NO: 325203 - RNA, 21 nt, Human
ugcuuugcagguggauuuagu

SEQ ID NO: 325204 - RNA, 22 nt, Human
auacuaagcucauuacauuuug

SEQ ID NO: 325205 - RNA, 22 nt, Human
gcgacgcaggcacgacguguug

SEQ ID NO: 325206 - RNA, 22 nt, Human
gaccugugcagugacugguggc

SEQ ID NO: 325207 - RNA, 22 nt, Human
uccugucucaguguauuugcag

SEQ ID NO: 325208 - RNA, 22 nt, Human
uuugacucugggugcuuuuucg

SEQ ID NO: 325209 - RNA, 22 nt, Human
cuuuacuucagcaagcuuuccu

SEQ ID NO: 325210 - RNA, 22 nt, Human
aggcuuucgaugaacgcuugcu

SEQ ID NO: 325211 - RNA, 22 nt, Human
ugccuggcugggcugcucaugg

SEQ ID NO: 325212 - RNA, 22 nt, Human
uguguuuuggaaggaacaugca

SEQ ID NO: 325213 - RNA, 22 nt, Human
cugcugagguggagauugcagu

SEQ ID NO: 325214 - RNA, 22 nt, Human
uucagaaagugaaucuuguuau

SEQ ID NO: 325215 - RNA, 22 nt, Human
aggcugcugccuuggagagugu

SEQ ID NO: 325216 - RNA, 22 nt, Human
cacucucacaugcccugucagu

SEQ ID NO: 325217 - RNA, 22 nt, Human
acaauuucuaauauagaucuua

SEQ ID NO: 325218 - RNA, 22 nt, Human
aggcauuuaaagauguaagacu

SEQ ID NO: 325219 - RNA, 17 nt, Human
uuucugcaugauuggac

SEQ ID NO: 325220 - RNA, 22 nt, Human
aaggcaguuaauuuggcuagaa

SEQ ID NO: 325221 - RNA, 22 nt, Human
cuugccaguguugcagaagcuc

SEQ ID NO: 325222 - RNA, 22 nt, Human
gugucccaaagauuagaaauca

SEQ ID NO: 325223 - RNA, 22 nt, Human
caagagcuuuagaaaugcucau

SEQ ID NO: 325224 - RNA, 22 nt, Human
agugauguagguggauucuggc

SEQ ID NO: 325225 - RNA, 22 nt, Human
uugucucuacagagaguaguag

SEQ ID NO: 325226 - RNA, 22 nt, Human
uuuuccuuaacagagggagaaa

SEQ ID NO: 325227 - RNA, 22 nt, Human
gguguuguacauucuguggauu

SEQ ID NO: 325228 - RNA, 23 nt, Human
ugggcagcuucugcaugcccacc

SEQ ID NO: 325229 - RNA, 22 nt, Human
ucugagagccacugaacagcaa

SEQ ID NO: 325230 - RNA, 22 nt, Human
agugggaauuuucucccaggga

SEQ ID NO: 325231 - RNA, 22 nt, Human
gaaacacucaauuuaguaauuc

SEQ ID NO: 325232 - RNA, 22 nt, Human
ucuuuuccuugaugguuaaaua

SEQ ID NO: 325233 - RNA, 22 nt, Human
ucugugggcauuuauaaucugg

SEQ ID NO: 325234 - RNA, 22 nt, Human
augcccugggagugcuguacca

SEQ ID NO: 325235 - RNA, 20 nt, Human
uccaguuuuggagacauucu

SEQ ID NO: 325236 - RNA, 22 nt, Human
uccugaccacuaggaccaggcu

SEQ ID NO: 325237 - RNA, 22 nt, Human
cuugaaagucagcagaguggau

SEQ ID NO: 325238 - RNA, 22 nt, Human
augcacuaugaugagcuagucu

SEQ ID NO: 325239 - RNA, 22 nt, Human
gaaacuguauguaguuuuuggg

SEQ ID NO: 325240 - RNA, 22 nt, Human
uucucaggaacucagugucagc

SEQ ID NO: 325241 - RNA, 22 nt, Human
ggaaacugcuuacacuagaggg

SEQ ID NO: 325242 - RNA, 22 nt, Human
cagcuugcacacauauuagacg

SEQ ID NO: 325243 - RNA, 22 nt, Human
gugcagcugggcgcugaccuuc

SEQ ID NO: 325244 - RNA, 22 nt, Human
uccccaguaagccugcacugug

SEQ ID NO: 325245 - RNA, 22 nt, Human
caguuuuaugaaugcuuauuag

SEQ ID NO: 325246 - RNA, 20 nt, Human
uuucacaaugaacaugucuc

SEQ ID NO: 325247 - RNA, 22 nt, Human
cagaugaaguaggugacgagca

SEQ ID NO: 325248 - RNA, 22 nt, Human
gcugccaauccagcugugggag

SEQ ID NO: 325249 - RNA, 18 nt, Human
ucaugcaaacgcuucaua

SEQ ID NO: 325250 - RNA, 22 nt, Human
aagugcaggucucagcuacucu

SEQ ID NO: 325251 - RNA, 22 nt, Human
uaacauuucggugacaguggga

SEQ ID NO: 325252 - RNA, 22 nt, Human
uuguaagacuguagaaugcaaa

SEQ ID NO: 325253 - RNA, 22 nt, Human
cugcagggcccaaggucaacgg

SEQ ID NO: 325254 - RNA, 22 nt, Human
guaugucuuaggguucaguaac

SEQ ID NO: 325255 - RNA, 22 nt, Human
cuuugcuaauguugcauuuuca

SEQ ID NO: 325256 - RNA, 22 nt, Human
acagcugggaacucacacagca

SEQ ID NO: 325257 - RNA, 22 nt, Human
aauggcagagacuguugaaaua

SEQ ID NO: 325258 - RNA, 22 nt, Human
guuugcaaauuguguuaaagcu

SEQ ID NO: 325259 - RNA, 22 nt, Human
uggcaauguggaaugguccagg

SEQ ID NO: 325260 - RNA, 22 nt, Human
uacucuggaguugagaugcgag

SEQ ID NO: 325261 - RNA, 22 nt, Human
acugcauuugguaaagucaaga

SEQ ID NO: 325262 - RNA, 22 nt, Human
uccagccauaucuuguagcccu

SEQ ID NO: 325263 - RNA, 22 nt, Human
agcucagggccaggcgcguuuc

SEQ ID NO: 325264 - RNA, 22 nt, Human
guugcauuaaucugcucaggcu

SEQ ID NO: 325265 - RNA, 22 nt, Human
guguggcuaggauggcuuugcu

SEQ ID NO: 325266 - RNA, 22 nt, Human
cauguguauuauucuuguggaa

SEQ ID NO: 325267 - RNA, 20 nt, Human
uauuucugggcaaccauuua

SEQ ID NO: 325268 - RNA, 20 nt, Human
ggcagagcuaugucuguugc

SEQ ID NO: 325269 - RNA, 22 nt, Human
cugcugccuuccaaaggccagg

SEQ ID NO: 325270 - RNA, 22 nt, Human
agggggcuccuuggugugcaga

SEQ ID NO: 325271 - RNA, 22 nt, Human
gaugugucccuuucaacucaga

SEQ ID NO: 325272 - RNA, 22 nt, Human
caagcuuguuucuccugggggu

SEQ ID NO: 325273 - RNA, 22 nt, Human
gagcugagggucuaggaggguu

SEQ ID NO: 325274 - RNA, 22 nt, Human
augaugaagcaugguuacacug

SEQ ID NO: 325275 - RNA, 22 nt, Human
cacagaggaugcccaagcgauc

SEQ ID NO: 325276 - RNA, 22 nt, Human
gggaaacuuucacaauguccag

SEQ ID NO: 325277 - RNA, 22 nt, Human
ccuggaaaaugccacuuucaca

SEQ ID NO: 325278 - RNA, 19 nt, Human
ugccuggcaccagcuccac

SEQ ID NO: 325279 - RNA, 22 nt, Human
uggcagugugggaggaagguac

SEQ ID NO: 325280 - RNA, 22 nt, Human
ggcuuuuguuucagcucugcua

SEQ ID NO: 325281 - RNA, 17 nt, Human
agcagcuggguugaucu

SEQ ID NO: 325282 - RNA, 22 nt, Human
gagauuuccauauuuuguaaca

SEQ ID NO: 325283 - RNA, 22 nt, Human
aaguguguauuuuucuucagug

SEQ ID NO: 325284 - RNA, 22 nt, Human
gguuguaguuggagguuguaua

SEQ ID NO: 325285 - RNA, 22 nt, Human adenovirus A
ugccagcguccggguucacuac

SEQ ID NO: 325286 - RNA, 22 nt, Human adenovirus A
uauuugguuacgccgggcucgu

SEQ ID NO: 325287 - RNA, 22 nt, Human adenovirus A
ugaaagcacuggcggguaccaa

SEQ ID NO: 325288 - RNA, 22 nt, Human adenovirus A
uuuacugcuaggggggcgcucc

SEQ ID NO: 325289 - RNA, 22 nt, Human adenovirus A
uugcugcuggcuucugauuugu

SEQ ID NO: 325290 - RNA, 22 nt, Human adenovirus A
augaguguauggaaaauuuggg

SEQ ID NO: 325291 - RNA, 22 nt, Human adenovirus A
gucuacggcuaggggcuguggc

SEQ ID NO: 325292 - RNA, 22 nt, Human adenovirus A
ugugcucauagcggauccugcc

SEQ ID NO: 325293 - RNA, 19 nt, Human adenovirus A
auuaagaugucagcugcga

SEQ ID NO: 325294 - RNA, 23 nt, Human adenovirus A
caaaaaggacgaggugcgauaac

SEQ ID NO: 325295 - RNA, 22 nt, Human adenovirus A
caagcuuggcaagcauaacagu

SEQ ID NO: 325296 - RNA, 22 nt, Human adenovirus A
ccaauguuguaaugacuaagca

SEQ ID NO: 325297 - RNA, 21 nt, Human adenovirus A
ccacgguacccaggcgugggc

SEQ ID NO: 325298 - RNA, 22 nt, Human adenovirus A
caggccaacucacggaggaguc

SEQ ID NO: 325299 - RNA, 22 nt, Human adenovirus A
uccuuagucauauugcauuggg

SEQ ID NO: 325300 - RNA, 22 nt, Human adenovirus A
gggguccggcgcuuaaccaauu

SEQ ID NO: 325301 - RNA, 22 nt, Human adenovirus A
gggguuccucgcuaugguaccc

SEQ ID NO: 325302 - RNA, 22 nt, Human adenovirus A
guacucagccggcuaauguucc

SEQ ID NO: 325303 - RNA, 22 nt, Human adenovirus A
aacaaugcuauuauugagcauu

SEQ ID NO: 325304 - RNA, 22 nt, Human adenovirus A
gcgcucuuguguuaagugugag

SEQ ID NO: 325305 - RNA, 22 nt, Human adenovirus A
acugcggugcgugucacagcau

SEQ ID NO: 325306 - RNA, 22 nt, Human adenovirus A
gggaugcuuuugggacgcuggu

SEQ ID NO: 325307 - RNA, 22 nt, Human adenovirus A
gacaccuucuuaaaaguguggu

SEQ ID NO: 325308 - RNA, 22 nt, Human
cuauuuucccauaugguugaca

SEQ ID NO: 325309 - RNA, 22 nt, Human
uuucgggaaaaacugguaagac

SEQ ID NO: 325310 - RNA, 22 nt, Human
ucugggagaguagauaaaggaa

SEQ ID NO: 325311 - RNA, 22 nt, Human
acgucuucguuggcagagauuu

SEQ ID NO: 325312 - RNA, 19 nt, Human
agcagggagugguuguggg

SEQ ID NO: 325313 - RNA, 22 nt, Human
cuugaaguggagcuuuugaaau

SEQ ID NO: 325314 - RNA, 22 nt, Human
auggccagcaagguagggcaau

SEQ ID NO: 325315 - RNA, 22 nt, Human
cccaggaguaagugacauuguu

SEQ ID NO: 325316 - RNA, 22 nt, Human
caggugggagccacagcguaca

SEQ ID NO: 325317 - RNA, 22 nt, Human
caggccugugacaccgugucug

SEQ ID NO: 325318 - RNA, 22 nt, Human
ggggucugggcuuagcuggaau

SEQ ID NO: 325319 - RNA, 22 nt, Human
ugcugcccacuguauuucucca

SEQ ID NO: 325320 - RNA, 22 nt, Human
gugcugcagagucucgugccgc

SEQ ID NO: 325321 - RNA, 22 nt, Human
uccaagacaagcacauuccugc

SEQ ID NO: 325322 - RNA, 22 nt, Human
cuggccagccucccagguaccc

SEQ ID NO: 325323 - RNA, 22 nt, Human
guucuccaggggcuguucaucu

SEQ ID NO: 325324 - RNA, 22 nt, Human
aggggagguguccccaaaucuc

SEQ ID NO: 325325 - RNA, 22 nt, Human
cuccagauuccguuuauucagg

SEQ ID NO: 325326 - RNA, 22 nt, Human
uuugcuggagaugagcgugggu

SEQ ID NO: 325327 - RNA, 22 nt, Human
ugcuccugaacacagcccuaug

SEQ ID NO: 325328 - RNA, 22 nt, Human
gugguuguuuccagguuugaaa

SEQ ID NO: 325329 - RNA, 22 nt, Human
aucauuugaacagaauuuguuu

SEQ ID NO: 325330 - RNA, 22 nt, Human
aaggccaucuacuuacggaauu

SEQ ID NO: 325331 - RNA, 22 nt, Human
aaaacauuuuacugccaucuca

SEQ ID NO: 325332 - RNA, 20 nt, Human
ggcauggcaaauguucuugc

SEQ ID NO: 325333 - RNA, 22 nt, Human
ucagguagugguuaaguucugu

SEQ ID NO: 325334 - RNA, 22 nt, Human
cuguggccagagcgccguugac

SEQ ID NO: 325335 - RNA, 22 nt, Human
uacugcugagcuggguagaagg

SEQ ID NO: 325336 - RNA, 22 nt, Human
ccuguggccgcgucgggcggcg

SEQ ID NO: 325337 - RNA, 22 nt, Human
cugcugucuuuauuucacugcu

SEQ ID NO: 325338 - RNA, 22 nt, Human
aggcaguguggagggcuguugc

SEQ ID NO: 325339 - RNA, 22 nt, Human
ucaucuccauacggucucgcag

SEQ ID NO: 325340 - RNA, 22 nt, Human
auaggcauaacacugauguccu

SEQ ID NO: 325341 - RNA, 22 nt, Human
uccucuucaaaauagcucugaa

SEQ ID NO: 325342 - RNA, 22 nt, Human
ucaggccaggagaucagauuga

SEQ ID NO: 325343 - RNA, 22 nt, Human
gugggggcaggcagugcuagga

SEQ ID NO: 325344 - RNA, 22 nt, Human
cuggagaggcugggaacagguu

SEQ ID NO: 325345 - RNA, 22 nt, Human
ugugugaacucucugauguaca

SEQ ID NO: 325346 - RNA, 20 nt, Human
uccagccacuuccgcugguc

SEQ ID NO: 325347 - RNA, 22 nt, Human
agauggcagggguaccuggaag

SEQ ID NO: 325348 - RNA, 22 nt, Human
ggcgcggugacucagccucgcu

SEQ ID NO: 325349 - RNA, 22 nt, Human
uuugaaauguaucaguauaggu

SEQ ID NO: 325350 - RNA, 22 nt, Human
gguggcaagggcagccaguaac

SEQ ID NO: 325351 - RNA, 22 nt, Human
gaguuugugggaauggaguauu

SEQ ID NO: 325352 - RNA, 22 nt, Human
cugcccaucuggccacacacag

SEQ ID NO: 325353 - RNA, 22 nt, Human
agucacuguucugucaugucaa

SEQ ID NO: 325354 - RNA, 22 nt, Human
aggagucaccugcccaaaguca

SEQ ID NO: 325355 - RNA, 22 nt, Human
uauaagaaacaaggcaaauuuu

SEQ ID NO: 325356 - RNA, 22 nt, Human
cagcugacaagaguccuuggag

SEQ ID NO: 325357 - RNA, 22 nt, Human
gcucugugccccugccguggac

SEQ ID NO: 325358 - RNA, 22 nt, Human
ugggagcaagcuggugcuggag

SEQ ID NO: 325359 - RNA, 22 nt, Human
gcuuccuucuaccacaucaugc

SEQ ID NO: 325360 - RNA, 20 nt, Human
ugcuggaggcgccggcgcuc

SEQ ID NO: 325361 - RNA, 22 nt, Human
uucacagugguagugcauuuag

SEQ ID NO: 325362 - RNA, 22 nt, Human
auggcugugguaucagacgcag

SEQ ID NO: 325363 - RNA, 20 nt, Human
aucaggcuuucuguugcgau

SEQ ID NO: 325364 - RNA, 22 nt, Human
augcaucaccgaguugcccacc

SEQ ID NO: 325365 - RNA, 22 nt, Human
agugggaauuuucucccaggga

SEQ ID NO: 325366 - RNA, 22 nt, Human
auguaguauuuggaaauguaaa

SEQ ID NO: 325367 - RNA, 22 nt, Human
ugcaggcuggaggagggacuaa

SEQ ID NO: 325368 - RNA, 18 nt, Human
acuguggcucagaguugc

SEQ ID NO: 325369 - RNA, 22 nt, Human
cucugggguggaggaggcugac

SEQ ID NO: 325370 - RNA, 22 nt, Human
agucugaaccagauggcaaggu

SEQ ID NO: 325371 - RNA, 22 nt, Human
agccagucggggccaugcuggg

SEQ ID NO: 325372 - RNA, 22 nt, Human
accaggcccuccagcugcgugg

SEQ ID NO: 325373 - RNA, 22 nt, Human
uuggaaagggauaucuguacuu

SEQ ID NO: 325374 - RNA, 22 nt, Human
ccucuuccuucucacuguggaa

SEQ ID NO: 325375 - RNA, 22 nt, Human
ucugggaguuucugugggagcu

SEQ ID NO: 325376 - RNA, 22 nt, Human
ugcucccaggcauucucuguug

SEQ ID NO: 325377 - RNA, 22 nt, Human
cuucacaaaauauuucauuaua

SEQ ID NO: 325378 - RNA, 22 nt, Human
cucuguccugguuuauacuggc

SEQ ID NO: 325379 - RNA, 22 nt, Human
ggcuuggaaauugcaggacaca

SEQ ID NO: 325380 - RNA, 21 nt, Human
acucugaaaauuaauaguuau

SEQ ID NO: 325381 - RNA, 22 nt, Human
cauuucaaacaguuacagcugc

SEQ ID NO: 325382 - RNA, 22 nt, Human
uguagggaggaaggguuggaaa

SEQ ID NO: 325383 - RNA, 22 nt, Human
uccaggauugucagccagaagg

SEQ ID NO: 325384 - RNA, 22 nt, Human
uuugagaagcauggcuguauuc

SEQ ID NO: 325385 - RNA, 22 nt, Human
cugguggaauggcagagggaac

SEQ ID NO: 325386 - RNA, 22 nt, Human
agcugaacgugcuucugcagca

SEQ ID NO: 325387 - RNA, 22 nt, Human
ugcaucuaaguggcuaacaacc

SEQ ID NO: 325388 - RNA, 22 nt, Human
aagccacugcagcaggagcugc

SEQ ID NO: 325389 - RNA, 22 nt, Human
gcagaagucagaccaucugaau

SEQ ID NO: 325390 - RNA, 22 nt, Human
gauuccugcuauucacagggcu

SEQ ID NO: 325391 - RNA, 22 nt, Human
aagcauuuuagauaaagcauca

SEQ ID NO: 325392 - RNA, 22 nt, Human
ggagaagggaacugaguuuuug

SEQ ID NO: 325393 - RNA, 22 nt, Human
ggugagaggcagugcuguggaa

SEQ ID NO: 325394 - RNA, 22 nt, Human
cuucuggguauuccagauaccu

SEQ ID NO: 325395 - RNA, 22 nt, Human
ucuccucuccuuucauguuguu

SEQ ID NO: 325396 - RNA, 22 nt, Human
gucugcugacagagcauggacc

SEQ ID NO: 325397 - RNA, 22 nt, Human
cccaggucgucagcaguguggu

SEQ ID NO: 325398 - RNA, 22 nt, Human
acauccaguaucagaagcauca

SEQ ID NO: 325399 - RNA, 22 nt, Human
ccucauucucgcguguguuucu

SEQ ID NO: 325400 - RNA, 22 nt, Human
aauagcaaaugcucauuugaaa

SEQ ID NO: 325401 - RNA, 22 nt, Human
aagugauuucugccugcauguu

SEQ ID NO: 325402 - RNA, 22 nt, Human
cuggugcuguagccugauugag

SEQ ID NO: 325403 - RNA, 22 nt, Human
aucauuuaguggggcauuggaa

SEQ ID NO: 325404 - RNA, 22 nt, Human
accuccuccaaggagccauagg

SEQ ID NO: 325405 - RNA, 22 nt, Human
ucaagaaagggcuucaccagga

SEQ ID NO: 325406 - RNA, 22 nt, Human
acaaacuucccagacaagcucc

SEQ ID NO: 325407 - RNA, 22 nt, Human
uuguagucuaggauagauuuuu

SEQ ID NO: 325408 - RNA, 22 nt, Human
auuaaauuggacgcugggggaa

SEQ ID NO: 325409 - RNA, 22 nt, Human
ugguggggccagacuucagcuc

SEQ ID NO: 325410 - RNA, 22 nt, Human
cccuguccugcuaggcccuggu

SEQ ID NO: 325411 - RNA, 22 nt, Human
uuggaaaugcauuuguuauuau

SEQ ID NO: 325412 - RNA, 22 nt, Human
cuuccagugcauagguagauca

SEQ ID NO: 325413 - RNA, 22 nt, Human
gccuucugaucgcuggacugac

SEQ ID NO: 325414 - RNA, 22 nt, Human
uucuuuuaauuucugucugcag

SEQ ID NO: 325415 - RNA, 17 nt, Human
agccugcugaucucaca

SEQ ID NO: 325416 - RNA, 22 nt, Human
cugcaucaguggauaugauggu

SEQ ID NO: 325417 - RNA, 22 nt, Human
cgcugcgaggcgcccuuguugc

SEQ ID NO: 325418 - RNA, 20 nt, Human
uucaugcagugguugcugug

SEQ ID NO: 325419 - RNA, 23 nt, Human
cauuugauccucacaauaaaugg

SEQ ID NO: 325420 - RNA, 22 nt, Human
agauguuuauaacucaugagug

SEQ ID NO: 325421 - RNA, 22 nt, Human
gggagccagcagggcauggagc

SEQ ID NO: 325422 - RNA, 22 nt, Human
ucccagauuccugcucuuauau

SEQ ID NO: 325423 - RNA, 22 nt, Human
gguuguaguuggagguuguaua

SEQ ID NO: 325424 - RNA, 22 nt, Human
auguaugagagauucuuuuauu

SEQ ID NO: 325425 - RNA, 21 nt, Human
uccugcugagaaacagauggu

SEQ ID NO: 325426 - RNA, 22 nt, Human
caggaaugguuaaucuaaagug

SEQ ID NO: 325427 - RNA, 22 nt, Human
uuccuccagccuggagcacuuc

SEQ ID NO: 325428 - RNA, 22 nt, Human
augcaauaguaauucuagucug

SEQ ID NO: 325429 - RNA, 22 nt, Human
cccaggcuggggcuccuccagc

SEQ ID NO: 325430 - RNA, 22 nt, Human
auaguguguaaagugcagugau

SEQ ID NO: 325431 - RNA, 22 nt, Human
caaauguuugguggcauuuugu

SEQ ID NO: 325432 - RNA, 22 nt, Human
caugucacaauucuuaauggga

SEQ ID NO: 325433 - RNA, 22 nt, Human
ccucuucuaggacguccuugug

SEQ ID NO: 325434 - RNA, 22 nt, Human
agcucagaacugcagacaugug

SEQ ID NO: 325435 - RNA, 22 nt, Human
cuuggcugaacuccaggaugca

SEQ ID NO: 325436 - RNA, 19 nt, Human
uuacaugacauaugaagga

SEQ ID NO: 325437 - RNA, 22 nt, Human
gugaccagacagagucuagccc

SEQ ID NO: 325438 - RNA, 22 nt, Human
cugggaggcggagguuguagug

SEQ ID NO: 325439 - RNA, 22 nt, Human
ggugaccagggucaguagcuuu

SEQ ID NO: 325440 - RNA, 22 nt, Human
cacucucacaugcccugucagu

SEQ ID NO: 325441 - RNA, 22 nt, Human
ccgcgagguggagguugcagug

SEQ ID NO: 325442 - RNA, 22 nt, Human
augcacaagguagauuauuauu

SEQ ID NO: 325443 - RNA, 22 nt, Human
agggugugcuguugggucuuuc

SEQ ID NO: 325444 - RNA, 22 nt, Human
cugggaccugugugccugggcc

SEQ ID NO: 325445 - RNA, 22 nt, Human
ggagaguggauuccagcuguau

SEQ ID NO: 325446 - RNA, 22 nt, Human
uacccacugucauauucagggu

SEQ ID NO: 325447 - RNA, 22 nt, Human
ggcagguguggugaccagagau

SEQ ID NO: 325448 - RNA, 22 nt, Human
gcucaugggcccagagcagccc

SEQ ID NO: 325449 - RNA, 22 nt, Human
gccauguuuugguaaauaccau

SEQ ID NO: 325450 - RNA, 22 nt, Human
aaguuugucucauuugaucuuc

SEQ ID NO: 325451 - RNA, 22 nt, Human
aggcugcagaggugcugccaga

SEQ ID NO: 325452 - RNA, 22 nt, Human
gcagaagcugggcagcgaggug

SEQ ID NO: 325453 - RNA, 22 nt, Human
ucuuccagauacuuccugacuu

SEQ ID NO: 325454 - RNA, 22 nt, Human
ggauguuuauccuaucuuaguu

SEQ ID NO: 325455 - RNA, 22 nt, Human
agccacagucuguagccagcuu

SEQ ID NO: 325456 - RNA, 22 nt, Human
acauuugauauggaguugugua

SEQ ID NO: 325457 - RNA, 22 nt, Human
uucugagguccaugcaguacug

SEQ ID NO: 325458 - RNA, 22 nt, Human
gauacuugaggagaucaccaca

SEQ ID NO: 325459 - RNA, 22 nt, Human
caugggaauaaaguuauuucaa

SEQ ID NO: 325460 - RNA, 22 nt, Human
aggcaaucaguguagaguaaca

SEQ ID NO: 325461 - RNA, 22 nt, Human
guacuuucaggcuuucccuuaa

SEQ ID NO: 325462 - RNA, 22 nt, Human
agcugcugcaaguggugcuaac

SEQ ID NO: 325463 - RNA, 22 nt, Human
ggcggugguugagaggacggcg

SEQ ID NO: 325464 - RNA, 22 nt, Human
gggggcuggacuuucccacaca

SEQ ID NO: 325465 - RNA, 22 nt, Human
acacuggacucagaggccagaa

SEQ ID NO: 325466 - RNA, 22 nt, Human
agaguguguggggcugagguca

SEQ ID NO: 325467 - RNA, 22 nt, Human
acuggcuuugagggaauagcua

SEQ ID NO: 325468 - RNA, 22 nt, Human
augaacaguacaaagcacagac

SEQ ID NO: 325469 - RNA, 22 nt, Human
ugacccucuuccccaugcgcuc

SEQ ID NO: 325470 - RNA, 22 nt, Human
ccagagaggccuuggcaagaca

SEQ ID NO: 325471 - RNA, 18 nt, Human
aguaaauguuaaauauug

SEQ ID NO: 325472 - RNA, 19 nt, Human
agcaguggagccaugccug

SEQ ID NO: 325473 - RNA, 22 nt, Human
cuggccagggugcgaucguggu

SEQ ID NO: 325474 - RNA, 22 nt, Human
cacugggagcagcuccaacauu

SEQ ID NO: 325475 - RNA, 22 nt, Human
ucuggaaggggaucugugguca

SEQ ID NO: 325476 - RNA, 22 nt, Human
ugucaaguuguuaaguucuggg

SEQ ID NO: 325477 - RNA, 18 nt, Human
uccaggcuccaggcuaac

SEQ ID NO: 325478 - RNA, 22 nt, Human
gaguggggcccacugcugggug

SEQ ID NO: 325479 - RNA, 22 nt, Human
aaagugacaaccauuuauuaag

SEQ ID NO: 325480 - RNA, 21 nt, Human
gcaggguuugugcugugaguu

SEQ ID NO: 325481 - RNA, 22 nt, Human
ccaggcagccugcuccauucug

SEQ ID NO: 325482 - RNA, 22 nt, Human
aagaugauuauguagauuggga

SEQ ID NO: 325483 - RNA, 22 nt, Human
gguagggaaggucucccacauu

SEQ ID NO: 325484 - RNA, 22 nt, Human
acccggaggcgggggaugcagu

SEQ ID NO: 325485 - RNA, 22 nt, Human
acagagccuccaggagugcugg

SEQ ID NO: 325486 - RNA, 20 nt, Human
ucauccaguugguuuauggu

SEQ ID NO: 325487 - RNA, 22 nt, Human
ggugauuuccuuuugcaaaguc

SEQ ID NO: 325488 - RNA, 19 nt, Human
aaauccaagcucaggccuc

SEQ ID NO: 325489 - RNA, 22 nt, Human
uggaaauacaagaaguauguca

SEQ ID NO: 325490 - RNA, 22 nt, Human
caggcgaccccuaggagcaaca

SEQ ID NO: 325491 - RNA, 22 nt, Human
uucuguaauucuguuaguuuca

SEQ ID NO: 325492 - RNA, 22 nt, Human
uuugcuugauuaggauauggaa

SEQ ID NO: 325493 - RNA, 22 nt, Human
caaacuuacuguguuuaaagag

SEQ ID NO: 325494 - RNA, 18 nt, Human
uccauccucugcucuuca

SEQ ID NO: 325495 - RNA, 22 nt, Human
acuguucacccagcacuagcag

SEQ ID NO: 325496 - RNA, 22 nt, Human
cccagguaaggaugcuccucau

SEQ ID NO: 325497 - RNA, 22 nt, Human
cuccagaggcgacuugcaucac

SEQ ID NO: 325498 - RNA, 22 nt, Human
ucccaaguagaugggaauacag

SEQ ID NO: 325499 - RNA, 22 nt, Human
gccugcacucaaacacucucuu

SEQ ID NO: 325500 - RNA, 22 nt, Human
agguggucuuguggaugccgca

SEQ ID NO: 325501 - RNA, 22 nt, Human
guucugucugagcaccacagga

SEQ ID NO: 325502 - RNA, 22 nt, Human
agccuugcaugauuucauucau

SEQ ID NO: 325503 - RNA, 22 nt, Human
aguucugggaggugcacgucca

SEQ ID NO: 325504 - RNA, 22 nt, Human
uuuuucaagacaaccugcaugu

SEQ ID NO: 325505 - RNA, 22 nt, Human
ugcuggaguggcacuguguggc

SEQ ID NO: 325506 - RNA, 22 nt, Human
acagugcugaucuagacugacc

SEQ ID NO: 325507 - RNA, 23 nt, Human
gguucugccgcuuacugcugugc

SEQ ID NO: 325508 - RNA, 18 nt, Human
ggaaaaggagugucuagc

SEQ ID NO: 325509 - RNA, 22 nt, Human
cagcuuguuuacaugcuuauuc

SEQ ID NO: 325510 - RNA, 22 nt, Human
aggagccauugcaggauggcag

SEQ ID NO: 325511 - RNA, 17 nt, Human
cauucuguaaucuuucu

SEQ ID NO: 325512 - RNA, 22 nt, Human
ugccaggccucaggagucucca

SEQ ID NO: 325513 - RNA, 22 nt, Human
cgugcggccucggggcccggcu

SEQ ID NO: 325514 - RNA, 23 nt, Human
caccccacccugaggaggaggga

SEQ ID NO: 325515 - RNA, 22 nt, Human
aggcucgcaugcccugcaccac

SEQ ID NO: 325516 - RNA, 22 nt, Human
agcaugucuaacucuucagggu

SEQ ID NO: 325517 - RNA, 22 nt, Human
uuguugcaagccuggaaucugg

SEQ ID NO: 325518 - RNA, 22 nt, Human
aauguuugaacuuugcauauuu

SEQ ID NO: 325519 - RNA, 22 nt, Human
aaugaaacuauauuuagagagg

SEQ ID NO: 325520 - RNA, 22 nt, Human
uagcauuuagaacaccuugaga

SEQ ID NO: 325521 - RNA, 22 nt, Human
ugcaugacaauugccgucaagu

SEQ ID NO: 325522 - RNA, 23 nt, Human
acugccugugccgaucucucuca

SEQ ID NO: 325523 - RNA, 22 nt, Human
ccucguccacaauccuugcaca

SEQ ID NO: 325524 - RNA, 22 nt, Human
gugggugucaguaucuuuaacg

SEQ ID NO: 325525 - RNA, 22 nt, Human
ccacugauucugccaggucucu

SEQ ID NO: 325526 - RNA, 22 nt, Human
cuuuauguuggggugucuuagu

SEQ ID NO: 325527 - RNA, 22 nt, Human
uaugcuguauucuguauguuag

SEQ ID NO: 325528 - RNA, 22 nt, Human
acuuugccuucuuacuguguug

SEQ ID NO: 325529 - RNA, 22 nt, Human
gcuggguggaucggaggcucug

SEQ ID NO: 325530 - RNA, 22 nt, Human
cccaggaguuagagguuguggu

SEQ ID NO: 325531 - RNA, 22 nt, Human
agugucugcgggcagaggagcg

SEQ ID NO: 325532 - RNA, 22 nt, Human
cugggagaugacucagagcagg

SEQ ID NO: 325533 - RNA, 22 nt, Human
agugagaguauuaaugugaacu

SEQ ID NO: 325534 - RNA, 22 nt, Human
agguggcagacuaacagaagga

SEQ ID NO: 325535 - RNA, 19 nt, Human
uuugauagggcauaauaua

SEQ ID NO: 325536 - RNA, 22 nt, Human
uaaaguuuauuggcaccaccau

SEQ ID NO: 325537 - RNA, 22 nt, Human
gaugucuucagauggcaagaga

SEQ ID NO: 325538 - RNA, 22 nt, Human
cccugcacagccuggcucucuu

SEQ ID NO: 325539 - RNA, 22 nt, Human
cacagaaucugugacuccaaga

SEQ ID NO: 325540 - RNA, 22 nt, Human
aagcauuucagguagagauauu

SEQ ID NO: 325541 - RNA, 18 nt, Human
ucuuccaacacugacacc

SEQ ID NO: 325542 - RNA, 22 nt, Human
guggggacgggauggcucacug

SEQ ID NO: 325543 - RNA, 22 nt, Human
cugggccacaagccugugugau

SEQ ID NO: 325544 - RNA, 22 nt, Human
uucuguuuauaauuugcaguug

SEQ ID NO: 325545 - RNA, 22 nt, Human
aauucauacucuauauugcuuu

SEQ ID NO: 325546 - RNA, 21 nt, Human
ucauccagguccugcuucuuc

SEQ ID NO: 325547 - RNA, 17 nt, Human
ucuggaugucauggaag

SEQ ID NO: 325548 - RNA, 22 nt, Human
aaaauuaagugucugggaagcc

SEQ ID NO: 325549 - RNA, 19 nt, Human
cucugccauuugcugccug

SEQ ID NO: 325550 - RNA, 22 nt, Human
ucuacaacgugguuuuguugua

SEQ ID NO: 325551 - RNA, 22 nt, Human
uggauguuugaaguugcaugug

SEQ ID NO: 325552 - RNA, 21 nt, Human
uccaaaggagacugagugugu

SEQ ID NO: 325553 - RNA, 22 nt, Human
agaguggcaccuuaccugagac

SEQ ID NO: 325554 - RNA, 22 nt, Human
aaggcaguuaauuuggcuagaa

SEQ ID NO: 325555 - RNA, 22 nt, Human
gguuccaggcauggcaggaugu

SEQ ID NO: 325556 - RNA, 22 nt, Human
ucuuccuggauggggguugaug

SEQ ID NO: 325557 - RNA, 22 nt, Human
gcagcagcggggccccugcgcg

SEQ ID NO: 325558 - RNA, 22 nt, Human
uccucacagcugguucauucag

SEQ ID NO: 325559 - RNA, 22 nt, Human
uuucauguuggauacuguuuca

SEQ ID NO: 325560 - RNA, 22 nt, Human
acagagacacggaagcuaaaga

SEQ ID NO: 325561 - RNA, 22 nt, Human
ccagacuggggcuccuugaggg

SEQ ID NO: 325562 - RNA, 22 nt, Human
gaaaggagaggguuaaggagcu

SEQ ID NO: 325563 - RNA, 22 nt, Human
ugcagcaccuauggacacuugu

SEQ ID NO: 325564 - RNA, 17 nt, Human
cucugggucuccugcuu

SEQ ID NO: 325565 - RNA, 22 nt, Human
uguccagcugaaggcagccuca

SEQ ID NO: 325566 - RNA, 22 nt, Human
aaaugcaugugcuauagaugug

SEQ ID NO: 325567 - RNA, 22 nt, Human
caagaaguugacagccagguga

SEQ ID NO: 325568 - RNA, 22 nt, Human
acuuuuaaggggccuugauuua

SEQ ID NO: 325569 - RNA, 23 nt, Human
gggugcugccuguagucaugcug

SEQ ID NO: 325570 - RNA, 22 nt, Human
uauuuguuucuaguggcagcaa

SEQ ID NO: 325571 - RNA, 22 nt, Human
uccucccugcacucagugaagu

SEQ ID NO: 325572 - RNA, 22 nt, Human
gaauaauugugaugcuugaagu

SEQ ID NO: 325573 - RNA, 22 nt, Human
uaggggugggauccaggaauua

SEQ ID NO: 325574 - RNA, 22 nt, Human
gggaagugcccucuucaggaga

SEQ ID NO: 325575 - RNA, 22 nt, Human
cgcacuggagcuggaacgaguc

SEQ ID NO: 325576 - RNA, 22 nt, Human
gccacaggaaagcacccuggag

SEQ ID NO: 325577 - RNA, 22 nt, Human
cacccugaggccacccagaccu

SEQ ID NO: 325578 - RNA, 22 nt, Human
aucucccaaauuagccucuuga

SEQ ID NO: 325579 - RNA, 22 nt, Human
aguguuaaggcugguugcuaua

SEQ ID NO: 325580 - RNA, 22 nt, Human
gaaagcagaugaaauugcaaca

SEQ ID NO: 325581 - RNA, 22 nt, Human
uuugccaguauuuuauugauga

SEQ ID NO: 325582 - RNA, 23 nt, Human
aggcugcagaagaauagggucau

SEQ ID NO: 325583 - RNA, 22 nt, Human
aggagacaguuuggacguguag

SEQ ID NO: 325584 - RNA, 22 nt, Human
gugauuucaaauauagagugag

SEQ ID NO: 325585 - RNA, 15 nt, Human
gccccaggaaucaaa

SEQ ID NO: 325586 - RNA, 22 nt, Human
gcugggagucgcgucuguggcc

SEQ ID NO: 325587 - RNA, 22 nt, Human
gcuucuggugaggccucaggaa

SEQ ID NO: 325588 - RNA, 21 nt, Human
uccuccuguagaggguccugg

SEQ ID NO: 325589 - RNA, 22 nt, Human
uguggccaccagagcugcuauu

SEQ ID NO: 325590 - RNA, 21 nt, Human
ucucuccucaagcucgacccc

SEQ ID NO: 325591 - RNA, 22 nt, Human
uacuuugucauucuaaccuucc

SEQ ID NO: 325592 - RNA, 22 nt, Human
gguguuguacauucuguggauu

SEQ ID NO: 325593 - RNA, 22 nt, Human
ccauggccugaaggagugcauc

SEQ ID NO: 325594 - RNA, 22 nt, Human
cccaccagaccugcaccggcac

SEQ ID NO: 325595 - RNA, 22 nt, Human
ccagagagggcgccaccuggag

SEQ ID NO: 325596 - RNA, 22 nt, Human
ggcgcucaguguugccccagag

SEQ ID NO: 325597 - RNA, 22 nt, Human
uuucaaguagagggaucgcuag

SEQ ID NO: 325598 - RNA, 22 nt, Human
guccaucuaaguauccagccug

SEQ ID NO: 325599 - RNA, 22 nt, Human
cugaugcucuggauguagucaa

SEQ ID NO: 325600 - RNA, 22 nt, Human
aggguugaagucugguccucau

SEQ ID NO: 325601 - RNA, 21 nt, Human
ucaggaagagccaguucaugc

SEQ ID NO: 325602 - RNA, 22 nt, Human
cgccaguggcagcuggaacagg

SEQ ID NO: 325603 - RNA, 22 nt, Human
agagacuguaaugagagguaca

SEQ ID NO: 325604 - RNA, 22 nt, Human
cuccagcagaaagggcgagugg

SEQ ID NO: 325605 - RNA, 22 nt, Human
ggauguggaccuugccugguga

SEQ ID NO: 325606 - RNA, 22 nt, Human
aggcagugguguuugcuggugg

SEQ ID NO: 325607 - RNA, 22 nt, Human
gugcagcugggcgcugaccuuc

SEQ ID NO: 325608 - RNA, 22 nt, Human
uggggucagcaggccuggccug

SEQ ID NO: 325609 - RNA, 22 nt, Human
uguuaguauuggcaaauuuguu

SEQ ID NO: 325610 - RNA, 22 nt, Human
cuguggaguccuggggaaugga

SEQ ID NO: 325611 - RNA, 22 nt, Human
uugcaguugcuguauuuaagga

SEQ ID NO: 325612 - RNA, 22 nt, Human
aaggcuuguugucacgcucuug

SEQ ID NO: 325613 - RNA, 22 nt, Human
uuuucuaacaucuaguaauuug

SEQ ID NO: 325614 - RNA, 22 nt, Human
accaggaguuuugaccaggggc

SEQ ID NO: 325615 - RNA, 22 nt, Human
cauuguguauuucuguaguacu

SEQ ID NO: 325616 - RNA, 22 nt, Human
ggaagcuguuaucaucuguauc

SEQ ID NO: 325617 - RNA, 22 nt, Human
aacuuucagaauccuaugcauu

SEQ ID NO: 325618 - RNA, 22 nt, Human
gcucugugcaguucagggacac

SEQ ID NO: 325619 - RNA, 22 nt, Human
gauucugaaauuaacagacugg

SEQ ID NO: 325620 - RNA, 22 nt, Human
ugcagcaucuccuugugccaug

SEQ ID NO: 325621 - RNA, 22 nt, Human
aguacuuuuuguucaauugugc

SEQ ID NO: 325622 - RNA, 22 nt, Human
ggcuacagcgggguggagacgg

SEQ ID NO: 325623 - RNA, 22 nt, Human
cccaggaggcagaaguugcagu

SEQ ID NO: 325624 - RNA, 18 nt, Human
ucaugcaaacgcuucaua

SEQ ID NO: 325625 - RNA, 22 nt, Human
ucuguggcaaacacagugacca

SEQ ID NO: 325626 - RNA, 21 nt, Human
agcaucugaggcaguuuccua

SEQ ID NO: 325627 - RNA, 22 nt, Human
ucauccugaagaaccugcuucc

SEQ ID NO: 325628 - RNA, 22 nt, Human
auucucuguacagaagguaccg

SEQ ID NO: 325629 - RNA, 22 nt, Human
cagguugaaaguggaggagcua

SEQ ID NO: 325630 - RNA, 22 nt, Human
acagagggucugggcacaggac

SEQ ID NO: 325631 - RNA, 22 nt, Human
gccuucugauugcuggacugac

SEQ ID NO: 325632 - RNA, 22 nt, Human
ucugcgcccugucgccugcucc

SEQ ID NO: 325633 - RNA, 22 nt, Human
cuguggcuaggaagcuguggga

SEQ ID NO: 325634 - RNA, 22 nt, Human
uguggagcccccaggagugggg

SEQ ID NO: 325635 - RNA, 22 nt, Human
aaagcacauuacaagcucaguc

SEQ ID NO: 325636 - RNA, 22 nt, Human
ugcugcucaagcugcagcaaaa

SEQ ID NO: 325637 - RNA, 22 nt, Human
ggggaagaaauagaacauuuug

SEQ ID NO: 325638 - RNA, 22 nt, Human
ccaucgcuucaaaucucagacu

SEQ ID NO: 325639 - RNA, 22 nt, Human
agcucuuuuaucaugaggagag

SEQ ID NO: 325640 - RNA, 22 nt, Human
ggagaggggaacuuguugcuug

SEQ ID NO: 325641 - RNA, 22 nt, Human
ugauuugaaaccuuuggcaaga

SEQ ID NO: 325642 - RNA, 22 nt, Human
uugcuggaguagaaaacuuaac

SEQ ID NO: 325643 - RNA, 22 nt, Human
aaaguaauugugguucuugcca

SEQ ID NO: 325644 - RNA, 22 nt, Human
aggacagagggaccagagccca

SEQ ID NO: 325645 - RNA, 22 nt, Human
aagcucuuuccacuaaaccacu

SEQ ID NO: 325646 - RNA, 22 nt, Human
acauauuuugaaagcuuucuaa

SEQ ID NO: 325647 - RNA, 22 nt, Human
agcuccugaaaauccagacugg

SEQ ID NO: 325648 - RNA, 22 nt, Human
ggguggaaaguauuuggggacc

SEQ ID NO: 325649 - RNA, 22 nt, Human
aucuuacaauuacaagacacuc

SEQ ID NO: 325650 - RNA, 22 nt, Human
auggcuucugucuuggaaauuu

SEQ ID NO: 325651 - RNA, 22 nt, Human
acacuccagggagggagggaau

SEQ ID NO: 325652 - RNA, 22 nt, Human
uugucucuacagagaguaguag

SEQ ID NO: 325653 - RNA, 18 nt, Human
cagaaaguuauuuacucu

SEQ ID NO: 325654 - RNA, 22 nt, Human
aaagacuaaccaguugucaaaa

SEQ ID NO: 325655 - RNA, 22 nt, Human
uggcaugcaagaggaggcuccc

SEQ ID NO: 325656 - RNA, 22 nt, Human
uccucuccaggugagccgaaau

SEQ ID NO: 325657 - RNA, 22 nt, Human
aaaccggguccagaucuucagg

SEQ ID NO: 325658 - RNA, 22 nt, Human
gaagcuucgaaagagugauuuc

SEQ ID NO: 325659 - RNA, 22 nt, Human
ggcuggacuugguccuguuuug

SEQ ID NO: 325660 - RNA, 22 nt, Human
cugcugagguggagauugcagu

SEQ ID NO: 325661 - RNA, 22 nt, Human
auugagaaggagauuggcaucu

SEQ ID NO: 325662 - RNA, 22 nt, Human
cagcauggagacaaagugggca

SEQ ID NO: 325663 - RNA, 22 nt, Human
gaugugugugcccugggccugc

SEQ ID NO: 325664 - RNA, 22 nt, Human
ugguaccagcuguguguucacu

SEQ ID NO: 325665 - RNA, 21 nt, Human
cccgugccuucagcaguccug

SEQ ID NO: 325666 - RNA, 22 nt, Human
ccuggccauagggcccaggaaa

SEQ ID NO: 325667 - RNA, 22 nt, Human
ggaacuccugcuccaagcagcu

SEQ ID NO: 325668 - RNA, 22 nt, Human
aguucugacucugaaucuggga

SEQ ID NO: 325669 - RNA, 22 nt, Human
uugcuggaagguggcuggaauc

SEQ ID NO: 325670 - RNA, 22 nt, Human
cacucacccgguccuucccagu

SEQ ID NO: 325671 - RNA, 22 nt, Human
caagagcucccagaccugggca

SEQ ID NO: 325672 - RNA, 19 nt, Human
uucacuaggucacaagguc

SEQ ID NO: 325673 - RNA, 22 nt, Human
cguggggcggguggacacuugc

SEQ ID NO: 325674 - RNA, 22 nt, Human
gaugggcaucaaacaugacgug

SEQ ID NO: 325675 - RNA, 21 nt, Human
gccaccucaaucuucuagcgc

SEQ ID NO: 325676 - RNA, 22 nt, Human
agcuccugaaaagcgcuugcuu

SEQ ID NO: 325677 - RNA, 22 nt, Human
ggcagccagagggcagcuggau

SEQ ID NO: 325678 - RNA, 22 nt, Human
uccagguccuacuggcccauag

SEQ ID NO: 325679 - RNA, 22 nt, Human
auuucauccauuaagaguacuc

SEQ ID NO: 325680 - RNA, 22 nt, Human
ucuguggcauguugcacuugua

SEQ ID NO: 325681 - RNA, 22 nt, Human
acaagucaguggaauuaauauu

SEQ ID NO: 325682 - RNA, 20 nt, Human
aggggcaccugcgacggggc

SEQ ID NO: 325683 - RNA, 22 nt, Human
agccagcauauauauaguugaa

SEQ ID NO: 325684 - RNA, 22 nt, Human
cacuuuuaacaggagaauuccc

SEQ ID NO: 325685 - RNA, 22 nt, Human
uggagccagcaggacucagagg

SEQ ID NO: 325686 - RNA, 22 nt, Human
acauuguugagccucuuguuca

SEQ ID NO: 325687 - RNA, 22 nt, Human
acaugcacccaguuacacucuc

SEQ ID NO: 325688 - RNA, 23 nt, Human
uguacacuuggucaagguacuua

SEQ ID NO: 325689 - RNA, 22 nt, Human
auucccagauuuauauugauag

SEQ ID NO: 325690 - RNA, 22 nt, Human
accccagaggcggaggcugcag

SEQ ID NO: 325691 - RNA, 22 nt, Human
uuccaaggcugcuauuuguuuc

SEQ ID NO: 325692 - RNA, 22 nt, Human
uccugagauaggaguugaaggc

SEQ ID NO: 325693 - RNA, 21 nt, Human
uugcuguuuucccaaugcagu

SEQ ID NO: 325694 - RNA, 22 nt, Human
uccuuggcaugccgucuucucc

SEQ ID NO: 325695 - RNA, 22 nt, Human
ugugugcacaaagaguacaugg

SEQ ID NO: 325696 - RNA, 22 nt, Human
uggaucugcucuaugaacugcu

SEQ ID NO: 325697 - RNA, 22 nt, Human
ccuucuagcaaaucaacauaaa

SEQ ID NO: 325698 - RNA, 22 nt, Human
ugcugggauuacagucaugagc

SEQ ID NO: 325699 - RNA, 22 nt, Human
ugcaugcagcuggucgggcgcc

SEQ ID NO: 325700 - RNA, 22 nt, Human
acacaucagaaauaugaaugag

SEQ ID NO: 325701 - RNA, 22 nt, Human
aucuucaaagcacaucguuugu

SEQ ID NO: 325702 - RNA, 22 nt, Human
ggcugcugcccaccccugcaug

SEQ ID NO: 325703 - RNA, 21 nt, Human
ugcuggguuugcccaucaggc

SEQ ID NO: 325704 - RNA, 20 nt, Human
cagcucugggcaggucgagg

SEQ ID NO: 325705 - RNA, 22 nt, Human
ccagcaggagacuagcaacaua

SEQ ID NO: 325706 - RNA, 22 nt, Human
gccccagcguggcuguguuagg

SEQ ID NO: 325707 - RNA, 21 nt, Human
aggcaugagcccugcauggac

SEQ ID NO: 325708 - RNA, 22 nt, Human
cuucucggccguguggaugcgc

SEQ ID NO: 325709 - RNA, 22 nt, Human
ccaccagaccaccaagagcaac

SEQ ID NO: 325710 - RNA, 17 nt, Human
ggccugcaccuccugcu

SEQ ID NO: 325711 - RNA, 22 nt, Human
gagaacuugaacuuuuccucug

SEQ ID NO: 325712 - RNA, 22 nt, Human
aggcaguguguagcuggaagag

SEQ ID NO: 325713 - RNA, 17 nt, Human
uuucugcaugauuggac

SEQ ID NO: 325714 - RNA, 22 nt, Human
uggcaaggccacaggugcaguu

SEQ ID NO: 325715 - RNA, 21 nt, Human
cagagcuguccaaacccugac

SEQ ID NO: 325716 - RNA, 22 nt, Human
gcccugugccagucacgcugug

SEQ ID NO: 325717 - RNA, 22 nt, Human
cugcagccucaaccuccugagc

SEQ ID NO: 325718 - RNA, 22 nt, Human
agagcuggugcauauucagaaa

SEQ ID NO: 325719 - RNA, 22 nt, Human
gccuguggggcugaggcugccu

SEQ ID NO: 325720 - RNA, 22 nt, Human
uaggacauaaguauucuaacuu

SEQ ID NO: 325721 - RNA, 20 nt, Human
cccagcccgggccgcgcucg

SEQ ID NO: 325722 - RNA, 22 nt, Human
gagcugggcgagccggggaagu

SEQ ID NO: 325723 - RNA, 20 nt, Human
acaaaauagguacuggguag

SEQ ID NO: 325724 - RNA, 22 nt, Human
cagccccuuguccgguagccac

SEQ ID NO: 325725 - RNA, 22 nt, Human
cagggagcagcgcuggggccuc

SEQ ID NO: 325726 - RNA, 22 nt, Human
gaucucaaagcaguguggguug

SEQ ID NO: 325727 - RNA, 22 nt, Human
ucagcuucagaucagcuagaga

SEQ ID NO: 325728 - RNA, 22 nt, Human
gagccuggccuccugccucagc

SEQ ID NO: 325729 - RNA, 22 nt, Human
cagagcugcaaaugccccuccg

SEQ ID NO: 325730 - RNA, 22 nt, Human
cugugcccaggccccuggggau

SEQ ID NO: 325731 - RNA, 22 nt, Human
agagcuggggcccguaaagcca

SEQ ID NO: 325732 - RNA, 22 nt, Human
uagcuggggcuuucauucuugc

SEQ ID NO: 325733 - RNA, 22 nt, Human
gcugauagacugaauguuggga

SEQ ID NO: 325734 - RNA, 22 nt, Human
agagcuggggcauaaaugccac

SEQ ID NO: 325735 - RNA, 22 nt, Human
cccuguggcaggaggaggagca

SEQ ID NO: 325736 - RNA, 23 nt, Human
aauuuaguuugagacauuagccu

SEQ ID NO: 325737 - RNA, 22 nt, Human
ggcaccagggcaagggucuuuc

SEQ ID NO: 325738 - RNA, 22 nt, Human
uaggacauguguuuuauauaug

SEQ ID NO: 325739 - RNA, 22 nt, Human
ugcuggggcagaagagccaaga

SEQ ID NO: 325740 - RNA, 22 nt, Human
agcugggguugcacacauuuug

SEQ ID NO: 325741 - RNA, 22 nt, Human
gcaggagcugcucuccugacga

SEQ ID NO: 325742 - RNA, 22 nt, Human
gcugccucaggcaccuccuggc

SEQ ID NO: 325743 - RNA, 22 nt, Human
caggcucagcaggagccugacc

SEQ ID NO: 325744 - RNA, 22 nt, Human
ccaggccccagggcuggcuuuc

SEQ ID NO: 325745 - RNA, 22 nt, Human
aaauauguauggaguucaugaa

SEQ ID NO: 325746 - RNA, 22 nt, Human
aaaauaguuaacguucagagua

SEQ ID NO: 325747 - RNA, 22 nt, Human
gauguuuuaggucccuguagcu

SEQ ID NO: 325748 - RNA, 22 nt, Human
uccacuggcccaccuccucagu

SEQ ID NO: 325749 - RNA, 21 nt, Human
ggagcuggggagcuggcccca

SEQ ID NO: 325750 - RNA, 22 nt, Human
ugggcaccuagcaacccuucuc

SEQ ID NO: 325751 - RNA, 22 nt, Human
gaugcuggaagugcugaucuug

SEQ ID NO: 325752 - RNA, 22 nt, Human
aacuaaaucuggcauuuagagc

SEQ ID NO: 325753 - RNA, 22 nt, Human
gagcugggauuugaaccuggga

SEQ ID NO: 325754 - RNA, 22 nt, Human
gagcuggggcagcuuaggagug

SEQ ID NO: 325755 - RNA, 22 nt, Human
ccaggcccugccugugguuccu

SEQ ID NO: 325756 - RNA, 22 nt, Human
ccuguggagcuuucagcagcuc

SEQ ID NO: 325757 - RNA, 22 nt, Human
agcuccugcaccaggggccccu

SEQ ID NO: 325758 - RNA, 22 nt, Human
agcccugucucucacuccaggu

SEQ ID NO: 325759 - RNA, 22 nt, Human
cucagccugugaagagcagagg

SEQ ID NO: 325760 - RNA, 22 nt, Human
gcccuugggagguuccacuggg

SEQ ID NO: 325761 - RNA, 20 nt, Human
uggcaccaggugguggcccc

SEQ ID NO: 325762 - RNA, 22 nt, Human
ccauggccaauugcaccuugcu

SEQ ID NO: 325763 - RNA, 22 nt, Human
acaacaaaaucacuagucuucc

SEQ ID NO: 325764 - RNA, 22 nt, Human
ccucucccgggugccgcugggc

SEQ ID NO: 325765 - RNA, 22 nt, Human
agagcugggugaagugccauca

SEQ ID NO: 325766 - RNA, 22 nt, Human
gcccugugcuuggauggcagau

SEQ ID NO: 325767 - RNA, 22 nt, Human
cugcaggagugaaagcaggccu

SEQ ID NO: 325768 - RNA, 21 nt, Human
agagcuggccugccaggcccu

SEQ ID NO: 325769 - RNA, 22 nt, Human
agagcuggagcagccccacugg

SEQ ID NO: 325770 - RNA, 17 nt, Human
uggcacagaggugcuau

SEQ ID NO: 325771 - RNA, 22 nt, Human
agcuggggguuggauaagggua

SEQ ID NO: 325772 - RNA, 22 nt, Human
cugucccucaucaccucugggu

SEQ ID NO: 325773 - RNA, 22 nt, Human
cccuggucagggaaggcgccug

SEQ ID NO: 325774 - RNA, 22 nt, Human
ccuggggagccgccugagcccc

SEQ ID NO: 325775 - RNA, 22 nt, Human
gcugggcucuuaucaccuguac

SEQ ID NO: 325776 - RNA, 22 nt, Human
gcccugugagucaugcggcaga

SEQ ID NO: 325777 - RNA, 22 nt, Human
cccacucccugcacgccugccg

SEQ ID NO: 325778 - RNA, 22 nt, Human
ucugcaggucacgcuccagccu

SEQ ID NO: 325779 - RNA, 22 nt, Human
ggcacagggggcugaggacuag

SEQ ID NO: 325780 - RNA, 21 nt, Human
ugggcaccaaaaccuaggagu

SEQ ID NO: 325781 - RNA, 22 nt, Human
uagcuggguugaggucaucuac

SEQ ID NO: 325782 - RNA, 19 nt, Human
ggcagagcuccugcuuucu

SEQ ID NO: 325783 - RNA, 21 nt, Human
ggugacacguggccccgcucu

SEQ ID NO: 325784 - RNA, 22 nt, Human
uccugaggagaagagugcuagg

SEQ ID NO: 325785 - RNA, 22 nt, Human
cccugugggaacuccugaguug

SEQ ID NO: 325786 - RNA, 22 nt, Human
uccugaggcacaauccuagaau

SEQ ID NO: 325787 - RNA, 22 nt, Human
ccugcagggugcugccacagau

SEQ ID NO: 325788 - RNA, 22 nt, Human
agagcuggguggacuuguaguu

SEQ ID NO: 325789 - RNA, 22 nt, Human
uccugcaguuacaucccagcca

SEQ ID NO: 325790 - RNA, 22 nt, Human
ugcugaggcccaggagcacuuu

SEQ ID NO: 325791 - RNA, 21 nt, Human
caggccccaggccuggggugc

SEQ ID NO: 325792 - RNA, 22 nt, Human
agaggacacaucuuuccucaaa

SEQ ID NO: 325793 - RNA, 22 nt, Human
gcagcaggcuuuucauaccuug

SEQ ID NO: 325794 - RNA, 22 nt, Human
gcugggaggaucucucccuguc

SEQ ID NO: 325795 - RNA, 22 nt, Human
cugggauccacgggcucccaag

SEQ ID NO: 325796 - RNA, 22 nt, Human
agguggcagagugacaggcuga

SEQ ID NO: 325797 - RNA, 22 nt, Human
uuucagaucauuuuuuaaguac

SEQ ID NO: 325798 - RNA, 20 nt, Human
agcccuguuuccuggagaga

SEQ ID NO: 325799 - RNA, 19 nt, Human
auccuggguccuccagcug

SEQ ID NO: 325800 - RNA, 22 nt, Human
cugggcucaguggcucauggcu

SEQ ID NO: 325801 - RNA, 22 nt, Human
auauaucaugaguaaaacuuga

SEQ ID NO: 325802 - RNA, 22 nt, Human
agagcugguuuacucaggaauu

SEQ ID NO: 325803 - RNA, 22 nt, Human
gucugggguacuuucaucugau

SEQ ID NO: 325804 - RNA, 22 nt, Human
caugagauaauuuuucuccagu

SEQ ID NO: 325805 - RNA, 22 nt, Human
ugcuggggcucugaccacucca

SEQ ID NO: 325806 - RNA, 22 nt, Human
gagcugggaggacugggaacuu

SEQ ID NO: 325807 - RNA, 22 nt, Human
gcuuggggagcucaguguccuu

SEQ ID NO: 325808 - RNA, 22 nt, Human
uccugcagagacagaggccuca

SEQ ID NO: 325809 - RNA, 22 nt, Human
gagggcacgaaacaaccacuuc

SEQ ID NO: 325810 - RNA, 22 nt, Human
ggcaccaggaucagucugucau

SEQ ID NO: 325811 - RNA, 22 nt, Human
gcaugcugcaccagagccucuc

SEQ ID NO: 325812 - RNA, 22 nt, Human
gcagagcuucuguccuucagga

SEQ ID NO: 325813 - RNA, 22 nt, Human
gcccugugcucaugggaacauc

SEQ ID NO: 325814 - RNA, 22 nt, Human
ggagcuggagagcuagccuagg

SEQ ID NO: 325815 - RNA, 22 nt, Human
cugcagaguggagccucggcug

SEQ ID NO: 325816 - RNA, 22 nt, Human
ucugggguuuucacgcugucuc

SEQ ID NO: 325817 - RNA, 22 nt, Human
cugcaggggcaguccacuuccu

SEQ ID NO: 325818 - RNA, 19 nt, Human
ccuggcccugcugcgcggg

SEQ ID NO: 325819 - RNA, 22 nt, Human
uccugcagaccucagucagguc

SEQ ID NO: 325820 - RNA, 22 nt, Human
gagcugggauucaucuaugucu

SEQ ID NO: 325821 - RNA, 23 nt, Human
ccagcccuccaccagcucuaggc

SEQ ID NO: 325822 - RNA, 22 nt, Human
ccuggguacccuuggcggccuu

SEQ ID NO: 325823 - RNA, 22 nt, Human
agagcuggaaucagaccucagg

SEQ ID NO: 325824 - RNA, 22 nt, Human
ucaaaguauuuuaacuguaucc

SEQ ID NO: 325825 - RNA, 22 nt, Human
gcccuuggaacagccuccugcu

SEQ ID NO: 325826 - RNA, 16 nt, Human
ggcaccagugaacaca

SEQ ID NO: 325827 - RNA, 20 nt, Human
aggcuccuguaccugaggaa

SEQ ID NO: 325828 - RNA, 20 nt, Human
acuuuacugagcuguaauuc

SEQ ID NO: 325829 - RNA, 18 nt, Human
gagcugggagaaggaagg

SEQ ID NO: 325830 - RNA, 17 nt, Human
auguauauuaacucuga

SEQ ID NO: 325831 - RNA, 20 nt, Human
ugcagagcugacauuaccug

SEQ ID NO: 325832 - RNA, 22 nt, Human
ggaggccaccugaccugcuguu

SEQ ID NO: 325833 - RNA, 22 nt, Human
ggcaucccuagaauagccaggu

SEQ ID NO: 325834 - RNA, 22 nt, Human
gaccaggcuuccccagaccuca

SEQ ID NO: 325835 - RNA, 22 nt, Human
agagcuggggcucuggguuuaa

SEQ ID NO: 325836 - RNA, 22 nt, Human
ccuggggagagaaagcccagcc

SEQ ID NO: 325837 - RNA, 22 nt, Human
gcuuccuggagggagagagcug

SEQ ID NO: 325838 - RNA, 22 nt, Human
agagcuggaagcugcucuuaga

SEQ ID NO: 325839 - RNA, 18 nt, Human
ggagcugggccccacucc

SEQ ID NO: 325840 - RNA, 22 nt, Human
cccugguguccacuggaggaag

SEQ ID NO: 325841 - RNA, 22 nt, Human
agagcugggaccgucuggaagu

SEQ ID NO: 325842 - RNA, 22 nt, Human
ggcauccugggacuggcuucuu

SEQ ID NO: 325843 - RNA, 22 nt, Human
cugggcuagaaggaccaggaug

SEQ ID NO: 325844 - RNA, 21 nt, Human
ggcaucccaggccagugacug

SEQ ID NO: 325845 - RNA, 22 nt, Human
cagggagcuggugccagccgac

SEQ ID NO: 325846 - RNA, 22 nt, Human
uuucagaugguauauacaguag

SEQ ID NO: 325847 - RNA, 22 nt, Human
ggagcugggaacuauguaguau

SEQ ID NO: 325848 - RNA, 22 nt, Human
ccagggagcggggcugggucuc

SEQ ID NO: 325849 - RNA, 22 nt, Human
cagaugcuauguauuauguaug

SEQ ID NO: 325850 - RNA, 22 nt, Human
gagguggcgcgccaucccugcc

SEQ ID NO: 325851 - RNA, 22 nt, Human
ccugcagggaaucgaggcagaa

SEQ ID NO: 325852 - RNA, 22 nt, Human
cacuguaauagcauuauaagug

SEQ ID NO: 325853 - RNA, 22 nt, Human
agagcuggcagcagcuucuccu

SEQ ID NO: 325854 - RNA, 20 nt, Human
cugggcucgguggcccuggc

SEQ ID NO: 325855 - RNA, 22 nt, Human
ggcaccagggacaauccucuuc

SEQ ID NO: 325856 - RNA, 22 nt, Human
cagggagcucugggccggacuc

SEQ ID NO: 325857 - RNA, 22 nt, Human
auaugaaaagaagucaccauug

SEQ ID NO: 325858 - RNA, 22 nt, Human
agaggaggccaggcccacaccu

SEQ ID NO: 325859 - RNA, 22 nt, Human
ggcagagccuucuggagcucgc

SEQ ID NO: 325860 - RNA, 22 nt, Human
ggcaccagcacuugggauggcu

SEQ ID NO: 325861 - RNA, 22 nt, Human
ggagcuggucagccuugagcau

SEQ ID NO: 325862 - RNA, 22 nt, Human
ccagcccucgguagucccauag

SEQ ID NO: 325863 - RNA, 22 nt, Human
gagcuccucccaggguagcacu

SEQ ID NO: 325864 - RNA, 22 nt, Human
gccccuggcuggccagcuccuc

SEQ ID NO: 325865 - RNA, 22 nt, Human
cugggcucagaugagaggaagg

SEQ ID NO: 325866 - RNA, 22 nt, Human
acauuucaguaaguguuaauuu

SEQ ID NO: 325867 - RNA, 22 nt, Human
auauaacauacauacagaaaag

SEQ ID NO: 325868 - RNA, 22 nt, Human
aaaaugauauccugacuuuuau

SEQ ID NO: 325869 - RNA, 20 nt, Human
ugcuggggacauacagggug

SEQ ID NO: 325870 - RNA, 22 nt, Human
ugggcaccugaggccuggcagg

SEQ ID NO: 325871 - RNA, 23 nt, Human
gagcugggauacaggcuuacugc

SEQ ID NO: 325872 - RNA, 22 nt, Human
gagggcacaaaggcaacauuca

SEQ ID NO: 325873 - RNA, 20 nt, Human
ccuguggagcugccuccucc

SEQ ID NO: 325874 - RNA, 22 nt, Human
cccugccugugggcaucaacau

SEQ ID NO: 325875 - RNA, 22 nt, Human
cccagcccacgguccugggugg

SEQ ID NO: 325876 - RNA, 22 nt, Human
cccucagcuccacccucagcag

SEQ ID NO: 325877 - RNA, 22 nt, Human
cuccaggauguuagacguccag

SEQ ID NO: 325878 - RNA, 22 nt, Human
agcuggggguagugagaaauaa

SEQ ID NO: 325879 - RNA, 22 nt, Human
aagaaaacaugaucuaauuuaa

SEQ ID NO: 325880 - RNA, 22 nt, Human
uccuguggcucuguggaaccuu

SEQ ID NO: 325881 - RNA, 19 nt, Human
gcugggagcagacccuccc

SEQ ID NO: 325882 - RNA, 22 nt, Human
cagccccuuccuggcaucugga

SEQ ID NO: 325883 - RNA, 22 nt, Human
cucucugaggaaggagcaucug

SEQ ID NO: 325884 - RNA, 22 nt, Human
agccugggcccugccucuucuc

SEQ ID NO: 325885 - RNA, 20 nt, Human
agggcagcuugaggagccgg

SEQ ID NO: 325886 - RNA, 22 nt, Human
gcagagcugggauaugaaccca

SEQ ID NO: 325887 - RNA, 22 nt, Human
ugggcuccggcggccucaggcu

SEQ ID NO: 325888 - RNA, 22 nt, Human
agagcuggcacugacccucacc

SEQ ID NO: 325889 - RNA, 21 nt, Human
gcaaaugaguuaacuaacuca

SEQ ID NO: 325890 - RNA, 22 nt, Human
uaaauguauaggcacuaaaccu

SEQ ID NO: 325891 - RNA, 20 nt, Human
aagcuggguaggagaggagc

SEQ ID NO: 325892 - RNA, 22 nt, Human
augcugggaaguccuaaccaca

SEQ ID NO: 325893 - RNA, 22 nt, Human
gagcugggagcugggauuugga

SEQ ID NO: 325894 - RNA, 22 nt, Human
ccaggcccuugcaagucccacc

SEQ ID NO: 325895 - RNA, 22 nt, Human
cugcaggacgaccgccucaucu

SEQ ID NO: 325896 - RNA, 22 nt, Human
ugagcuggggucagcuccccug

SEQ ID NO: 325897 - RNA, 22 nt, Human
uccugcagccauuagaggucaa

SEQ ID NO: 325898 - RNA, 22 nt, Human
aggcccuggguuagggcccacu

SEQ ID NO: 325899 - RNA, 22 nt, Human
cccgucccuuuugcccgcuggu

SEQ ID NO: 325900 - RNA, 22 nt, Human
cccugugguugcuagggcacag

SEQ ID NO: 325901 - RNA, 22 nt, Human
gagggcacucgagacuacggca

SEQ ID NO: 325902 - RNA, 22 nt, Human
cugggcuccuaaccauccaggu

SEQ ID NO: 325903 - RNA, 22 nt, Human
agcccugugggccuuguggcac

SEQ ID NO: 325904 - RNA, 22 nt, Human
augccuggucccaccucuaggu

SEQ ID NO: 325905 - RNA, 22 nt, Human
gagcugggucuccaccuuggca

SEQ ID NO: 325906 - RNA, 22 nt, Human
aagcugggagggagcccagagu

SEQ ID NO: 325907 - RNA, 22 nt, Human
ccuggugaauguucauggacug

SEQ ID NO: 325908 - RNA, 22 nt, Human
ccugguggccuucagcccacaa

SEQ ID NO: 325909 - RNA, 22 nt, Human
agaagucauuuauguuagauga

SEQ ID NO: 325910 - RNA, 22 nt, Human
cagagcuggagggaacccuggc

SEQ ID NO: 325911 - RNA, 22 nt, Human
gcaggagcucguuuccaggcug

SEQ ID NO: 325912 - RNA, 20 nt, Human
uuucagauuuacagaaaugu

SEQ ID NO: 325913 - RNA, 22 nt, Human
agcaauaacagaaaacuuuccu

SEQ ID NO: 325914 - RNA, 22 nt, Human
gcagagcugcagcgaggccugg

SEQ ID NO: 325915 - RNA, 22 nt, Human
gcagagcuccccaagacaccaa

SEQ ID NO: 325916 - RNA, 22 nt, Human
uccugguggugccggugcccgg

SEQ ID NO: 325917 - RNA, 22 nt, Human
gagcugggacauggguccucuc

SEQ ID NO: 325918 - RNA, 22 nt, Human
ccuguccagggacugagggaga

SEQ ID NO: 325919 - RNA, 22 nt, Human
ugcaggagcaccagcucacccu

SEQ ID NO: 325920 - RNA, 22 nt, Human
cugguggagaugccuggccccu

SEQ ID NO: 325921 - RNA, 22 nt, Human
agagcuggaaaaguuguuuuaa

SEQ ID NO: 325922 - RNA, 22 nt, Human
cugggcucaaauccuggcccug

SEQ ID NO: 325923 - RNA, 22 nt, Human
ccugcaggcugcaggccaguuc

SEQ ID NO: 325924 - RNA, 22 nt, Human
gggcccugugauuucuugagga

SEQ ID NO: 325925 - RNA, 22 nt, Human
cugucccucaguucugggcaaa

SEQ ID NO: 325926 - RNA, 22 nt, Human
ccuggagcuuggucacgcugcg

SEQ ID NO: 325927 - RNA, 18 nt, Human
auccaaaaagauggaagu

SEQ ID NO: 325928 - RNA, 22 nt, Human
cacagcugaaguagccaugugg

SEQ ID NO: 325929 - RNA, 22 nt, Human
augcugggacguacuuguucau

SEQ ID NO: 325930 - RNA, 20 nt, Human
ucccugccuuuuacugcugg

SEQ ID NO: 325931 - RNA, 22 nt, Human
guaucacuuuugagagugagaa

SEQ ID NO: 325932 - RNA, 22 nt, Human
aaaaguauuuuggaucucagau

SEQ ID NO: 325933 - RNA, 22 nt, Human
caccaggcugcccaggacaggg

SEQ ID NO: 325934 - RNA, 22 nt, Human
acaaacuuccaucaugaauuuu

SEQ ID NO: 325935 - RNA, 22 nt, Human
ccugcuggccacugcuccaccu

SEQ ID NO: 325936 - RNA, 17 nt, Human
ggcaccagacggagagu

SEQ ID NO: 325937 - RNA, 22 nt, Human
ccugggcagggagaccaggcuc

SEQ ID NO: 325938 - RNA, 22 nt, Human
ccucagccuuggccccaggcag

SEQ ID NO: 325939 - RNA, 22 nt, Human
ccugucaggguuugccucagaa

SEQ ID NO: 325940 - RNA, 22 nt, Human
cugucuccagggcaggugcagg

SEQ ID NO: 325941 - RNA, 22 nt, Human
cauaaucagauguguacauaag

SEQ ID NO: 325942 - RNA, 19 nt, Human
uguagcuagugucuaucca

SEQ ID NO: 325943 - RNA, 22 nt, Human
ugcugggcuggagcugccaggg

SEQ ID NO: 325944 - RNA, 22 nt, Human
ccugacagcgugucccuggccc

SEQ ID NO: 325945 - RNA, 22 nt, Human
agagcuggagaugcagguuucg

SEQ ID NO: 325946 - RNA, 22 nt, Human
ccuggagcacauggcaggaggc

SEQ ID NO: 325947 - RNA, 22 nt, Human
gcaccaggcagcugagcaggcc

SEQ ID NO: 325948 - RNA, 22 nt, Human
agaugguagguggcaggacuga

SEQ ID NO: 325949 - RNA, 22 nt, Human
ucccugucuaauaugccaugaa

SEQ ID NO: 325950 - RNA, 22 nt, Human
aacuaaaacugguuuguucucu

SEQ ID NO: 325951 - RNA, 22 nt, Human
cugggugagcuggccagagggu

SEQ ID NO: 325952 - RNA, 22 nt, Human
gcccagcccugaggucacagcu

SEQ ID NO: 325953 - RNA, 22 nt, Human
gcccauggcagaacugugagca

SEQ ID NO: 325954 - RNA, 22 nt, Human
caccaggcugaaccagagggga

SEQ ID NO: 325955 - RNA, 23 nt, Human
uggcaccaggcauucuaggggua

SEQ ID NO: 325956 - RNA, 22 nt, Human
uccugcagccacugcaggcaga

SEQ ID NO: 325957 - RNA, 22 nt, Human
aaugauugucauuccaaaaagu

SEQ ID NO: 325958 - RNA, 22 nt, Human
aucauccuagaaggaagcuagg

SEQ ID NO: 325959 - RNA, 22 nt, Human
gagcugggccucagaacacagu

SEQ ID NO: 325960 - RNA, 22 nt, Human
uagcugggucucuguuuucuca

SEQ ID NO: 325961 - RNA, 22 nt, Human
agcuggggcauuuauccacuaa

SEQ ID NO: 325962 - RNA, 22 nt, Human
ccagcccugaacccugcugcau

SEQ ID NO: 325963 - RNA, 22 nt, Human
ccugguggacagcagccagcag

SEQ ID NO: 325964 - RNA, 17 nt, Human
guccuggugugugagga

SEQ ID NO: 325965 - RNA, 22 nt, Human
agcccuguagauuuaggagagu

SEQ ID NO: 325966 - RNA, 22 nt, Human
gcugggcuucacagagccuuua

SEQ ID NO: 325967 - RNA, 22 nt, Human
agagcuggggccagagucaagg

SEQ ID NO: 325968 - RNA, 22 nt, Human
caccagguuccgggcagagcug

SEQ ID NO: 325969 - RNA, 21 nt, Human
agagcugggacuugccugaga

SEQ ID NO: 325970 - RNA, 22 nt, Human
gagcugggaguuauagcauguu

SEQ ID NO: 325971 - RNA, 22 nt, Human
aguaaaauuguauuggaaaaca

SEQ ID NO: 325972 - RNA, 22 nt, Human
ccuggggucagggacgcugugc

SEQ ID NO: 325973 - RNA, 22 nt, Human
aagcugggacuuagcgcagaua

SEQ ID NO: 325974 - RNA, 17 nt, Human
ccagggaggggccgcgc

SEQ ID NO: 325975 - RNA, 22 nt, Human
uucaguaugauuccuccaguag

SEQ ID NO: 325976 - RNA, 22 nt, Human
gacacuccagcuuuuggcucaa

SEQ ID NO: 325977 - RNA, 22 nt, Human
aaauaucauuuauaacuuuuaa

SEQ ID NO: 325978 - RNA, 22 nt, Human
ucccugaggaagggguguggug

SEQ ID NO: 325979 - RNA, 22 nt, Human
gcaccgagaaggaagcaugccu

SEQ ID NO: 325980 - RNA, 22 nt, Human
gcuggggagcuagaccucagca

SEQ ID NO: 325981 - RNA, 22 nt, Human
cugggguuggccagggcccuag

SEQ ID NO: 325982 - RNA, 22 nt, Human
auguaaacucacauuuucuuca

SEQ ID NO: 325983 - RNA, 22 nt, Human
aaacacaauguuucuuuguucu

SEQ ID NO: 325984 - RNA, 22 nt, Human
cagaugcuuggaggacacuugg

SEQ ID NO: 325985 - RNA, 22 nt, Human
ucucagccucaccucuauggag

SEQ ID NO: 325986 - RNA, 22 nt, Human
uguggcacuucucuccuuguaa

SEQ ID NO: 325987 - RNA, 22 nt, Human
caauacaauuaccaguuaauca

SEQ ID NO: 325988 - RNA, 20 nt, Human
ggcaccaggcuaggauugga

SEQ ID NO: 325989 - RNA, 22 nt, Human
uccugcaggccagaggggugag

SEQ ID NO: 325990 - RNA, 22 nt, Human
uuucagaucacuuucaggaaag

SEQ ID NO: 325991 - RNA, 22 nt, Human
cugggcucuaagggagcaccgu

SEQ ID NO: 325992 - RNA, 22 nt, Human
gcaccaggcuuagagccccagg

SEQ ID NO: 325993 - RNA, 22 nt, Human
gagcugggacuuggaauccaca

SEQ ID NO: 325994 - RNA, 22 nt, Human
ggcaccaggacaugacucccag

SEQ ID NO: 325995 - RNA, 23 nt, Human
uccugaggaauggcaucucacau

SEQ ID NO: 325996 - RNA, 22 nt, Human
gcagagcucaugccugcaccuc

SEQ ID NO: 325997 - RNA, 22 nt, Human
ggcaccagggaaggaaggcugg

SEQ ID NO: 325998 - RNA, 22 nt, Human
uccacuggaacaacucugaggc

SEQ ID NO: 325999 - RNA, 22 nt, Human
ccuggagcuuuuccauccugga

SEQ ID NO: 326000 - RNA, 22 nt, Human
uugucuaaugagcuccacuuca

SEQ ID NO: 326001 - RNA, 20 nt, Human
gcugggcuaccacuggcccu

SEQ ID NO: 326002 - RNA, 22 nt, Human
ggagcuggcagcgcaacccaga

SEQ ID NO: 326003 - RNA, 22 nt, Human
cagcuccugccugggcagcugu

SEQ ID NO: 326004 - RNA, 17 nt, Human
ggcagagcugacagggc

SEQ ID NO: 326005 - RNA, 21 nt, Human
gcagagcuggaaccaggaccc

SEQ ID NO: 326006 - RNA, 22 nt, Human
cuggugcacauucgcucucaua

SEQ ID NO: 326007 - RNA, 22 nt, Human
cccuguccuuggcugugaggcu

SEQ ID NO: 326008 - RNA, 22 nt, Human
ggcaucccuucuuccaguguca

SEQ ID NO: 326009 - RNA, 21 nt, Human
ccagccucagaucagggagcu

SEQ ID NO: 326010 - RNA, 22 nt, Human
uuuacugaacugcuaguacagg

SEQ ID NO: 326011 - RNA, 22 nt, Human
gcccaugguuacuuuucuggcu

SEQ ID NO: 326012 - RNA, 22 nt, Human
uucaaaugcaaguuacuacuuu

SEQ ID NO: 326013 - RNA, 17 nt, Human
agcccugugcucuuuuu

SEQ ID NO: 326014 - RNA, 19 nt, Human
cagccucaaucccucgggc

SEQ ID NO: 326015 - RNA, 22 nt, Human
agagcuggcugugggugacuuu

SEQ ID NO: 326016 - RNA, 22 nt, Human
cagcuccugcagcuggcuccca

SEQ ID NO: 326017 - RNA, 19 nt, Human
cagcccucuuaccacugug

SEQ ID NO: 326018 - RNA, 22 nt, Human
ggcaccaggcugggcauaggcc

SEQ ID NO: 326019 - RNA, 22 nt, Human
ggaggccaggaagagccgcccu

SEQ ID NO: 326020 - RNA, 20 nt, Human
agagcugggaagcucccuau

SEQ ID NO: 326021 - RNA, 22 nt, Human
uccugcaggggcugaggaacca

SEQ ID NO: 326022 - RNA, 23 nt, Human
agcuggaggcugucuacucccaa

SEQ ID NO: 326023 - RNA, 22 nt, Human
cugcagaggccucgccuccucu

SEQ ID NO: 326024 - RNA, 22 nt, Human
gagcuggguauauggcuuuaug

SEQ ID NO: 326025 - RNA, 22 nt, Human
uccugcagagccgcccucaggu

SEQ ID NO: 326026 - RNA, 22 nt, Human
uccuguggcguuaucaugugau

SEQ ID NO: 326027 - RNA, 22 nt, Human
gugcugggcuccaccccagagg

SEQ ID NO: 326028 - RNA, 22 nt, Human
ugcugggggugucucaccaggc

SEQ ID NO: 326029 - RNA, 22 nt, Human
cugggcuuguguuagcugacaa

SEQ ID NO: 326030 - RNA, 22 nt, Human
cagcccucaaaccacuuccagg

SEQ ID NO: 326031 - RNA, 23 nt, Human
ccugaagggucaggguccucagc

SEQ ID NO: 326032 - RNA, 22 nt, Human
aaauauguuuuccaguugucau

SEQ ID NO: 326033 - RNA, 16 nt, Human
gcagagcucagggacu

SEQ ID NO: 326034 - RNA, 22 nt, Human
cugucuccuccacugcauggga

SEQ ID NO: 326035 - RNA, 22 nt, Human
uaugauaugcacuuuaucagaa

SEQ ID NO: 326036 - RNA, 22 nt, Human
agagcugggacuuggacucaau

SEQ ID NO: 326037 - RNA, 21 nt, Human
agagcugguagguagguaggu

SEQ ID NO: 326038 - RNA, 22 nt, Human
uagucaaaccucagaauacccc

SEQ ID NO: 326039 - RNA, 22 nt, Human
ucagacaaguaaaauaauguaa

SEQ ID NO: 326040 - RNA, 22 nt, Human
gagggcacuggguuucaauguc

SEQ ID NO: 326041 - RNA, 22 nt, Human
ugaguuauaaugaauauuugaa

SEQ ID NO: 326042 - RNA, 18 nt, Human
ugcugggguagaauccac

SEQ ID NO: 326043 - RNA, 22 nt, Human
ccagccccuauccucgcuccac

SEQ ID NO: 326044 - RNA, 22 nt, Human
caaguaaagaaucacauuucuu

SEQ ID NO: 326045 - RNA, 22 nt, Human
aaguaaaauucaaucuucacug

SEQ ID NO: 326046 - RNA, 21 nt, Human
accaggccaggaggcuggcac

SEQ ID NO: 326047 - RNA, 22 nt, Human
ccuggggucacuugcagccgca

SEQ ID NO: 326048 - RNA, 22 nt, Human
gaggccuggaccagccacagag

SEQ ID NO: 326049 - RNA, 22 nt, Human
gugcaccccggggcccugcucc

SEQ ID NO: 326050 - RNA, 22 nt, Human
ggagcuggccgccuaugugcag

SEQ ID NO: 326051 - RNA, 22 nt, Human
cugggcucaagaagucuucccu

SEQ ID NO: 326052 - RNA, 22 nt, Human
gagcuggggcggauacucagcu

SEQ ID NO: 326053 - RNA, 22 nt, Human
uaggacaugcuacauaaauagg

SEQ ID NO: 326054 - RNA, 22 nt, Human
agcuccugcgcacggugcacac

SEQ ID NO: 326055 - RNA, 22 nt, Human
agcccuguuuaugccacaucau

SEQ ID NO: 326056 - RNA, 22 nt, Human
gagcuggguguuuauuugccaa

SEQ ID NO: 326057 - RNA, 22 nt, Human
ucaaaguagccggauggaauuu

SEQ ID NO: 326058 - RNA, 18 nt, Human
gcagagcugggauuccca

SEQ ID NO: 326059 - RNA, 18 nt, Human
aagcugggaaggagacag

SEQ ID NO: 326060 - RNA, 23 nt, Human
uccuggugacaugccugagcauc

SEQ ID NO: 326061 - RNA, 22 nt, Human
cugcagagcagccaguccccca

SEQ ID NO: 326062 - RNA, 22 nt, Human
acuuuacuccccaacauaaaug

SEQ ID NO: 326063 - RNA, 22 nt, Human
ccccugccagcuaucccugaac

SEQ ID NO: 326064 - RNA, 18 nt, Human
ucuggaacaacuucaugu

SEQ ID NO: 326065 - RNA, 22 nt, Human
ucccugagcucacauggcagga

SEQ ID NO: 326066 - RNA, 22 nt, Human
agagcuggacgucugagcccua

SEQ ID NO: 326067 - RNA, 22 nt, Human
ucccagccuuccagucugguuu

SEQ ID NO: 326068 - RNA, 22 nt, Human
ccugggaccucgcgggaagcgg

SEQ ID NO: 326069 - RNA, 20 nt, Human
cugggcucaagugauccucc

SEQ ID NO: 326070 - RNA, 22 nt, Human
uagcugggaauuaucugguugc

SEQ ID NO: 326071 - RNA, 22 nt, Human
uccugaggcuaaagugcagugg

SEQ ID NO: 326072 - RNA, 22 nt, Human
uauccaaaguuucucagaaacu

SEQ ID NO: 326073 - RNA, 22 nt, Human
agagcugggugguggugacuca

SEQ ID NO: 326074 - RNA, 22 nt, Human
cugucacccacccagccuguca

SEQ ID NO: 326075 - RNA, 22 nt, Human
uccuguggggaaaagccuaucu

SEQ ID NO: 326076 - RNA, 22 nt, Human
gagcugggcuggcuuccucccu

SEQ ID NO: 326077 - RNA, 22 nt, Human
uaguaacccacacaacaguaga

SEQ ID NO: 326078 - RNA, 19 nt, Human
agcuccuguucagcagcuc

SEQ ID NO: 326079 - RNA, 22 nt, Human
ggaggccacgguuuagcaccga

SEQ ID NO: 326080 - RNA, 19 nt, Human
cugcucccuccuucuggca

SEQ ID NO: 326081 - RNA, 22 nt, Human
ccugcagguugcagaggcggaa

SEQ ID NO: 326082 - RNA, 22 nt, Human
cccugccuuguuggagccuaug

SEQ ID NO: 326083 - RNA, 22 nt, Human
gauaauauuagaagauacaaau

SEQ ID NO: 326084 - RNA, 22 nt, Human
gucaaaugcacagaaccauuaa

SEQ ID NO: 326085 - RNA, 22 nt, Human
cccuguccugcuaggcccuggu

SEQ ID NO: 326086 - RNA, 22 nt, Human
cagagcuguccaaacccugaca

SEQ ID NO: 326087 - RNA, 22 nt, Human
agcuccugugugaagccucccu

SEQ ID NO: 326088 - RNA, 20 nt, Human
agcuccugguauaggugccu

SEQ ID NO: 326089 - RNA, 22 nt, Human
ccugggcuuucggcggcuuccu

SEQ ID NO: 326090 - RNA, 22 nt, Human
uccugagggcucggggcucaug

SEQ ID NO: 326091 - RNA, 22 nt, Human
cccuguggaggcagcauccugc

SEQ ID NO: 326092 - RNA, 22 nt, Human
uucuagauugccuguaaguaaa

SEQ ID NO: 326093 - RNA, 22 nt, Human
augcugggagugaagccccugg

SEQ ID NO: 326094 - RNA, 22 nt, Human
agacuuuaaugugcaaaugaaa

SEQ ID NO: 326095 - RNA, 21 nt, Human
gagcugggcgaggcuccgggg

SEQ ID NO: 326096 - RNA, 22 nt, Human
uggcaccaggcgggguggcugu

SEQ ID NO: 326097 - RNA, 22 nt, Human
gagcugggcacacgccacuuga

SEQ ID NO: 326098 - RNA, 22 nt, Human
ggcagagcugcaugagcacuca

SEQ ID NO: 326099 - RNA, 20 nt, Human
ggcagagcuaugucuguugc

SEQ ID NO: 326100 - RNA, 22 nt, Human
caccaggcuggagugcagaggu

SEQ ID NO: 326101 - RNA, 22 nt, Human
uuccugguaaauuauguccagg

SEQ ID NO: 326102 - RNA, 22 nt, Human
gcugggcuugguuucccugcuu

SEQ ID NO: 326103 - RNA, 22 nt, Human
aacugguaucucuucaguguaa

SEQ ID NO: 326104 - RNA, 22 nt, Human
gagcugggaagauagcuugagc

SEQ ID NO: 326105 - RNA, 22 nt, Human
cagcccacugccucugugguag

SEQ ID NO: 326106 - RNA, 22 nt, Human
cacagcugucagcugaccuagg

SEQ ID NO: 326107 - RNA, 22 nt, Human
agguauuauuagcaucucuauu

SEQ ID NO: 326108 - RNA, 22 nt, Human
ccugcagguuucccccggacgg

SEQ ID NO: 326109 - RNA, 22 nt, Human
gcccuguguguuugcacugauu

SEQ ID NO: 326110 - RNA, 22 nt, Human
auaaaugauucagcaggaaaua

SEQ ID NO: 326111 - RNA, 22 nt, Human
cccugccccaggcggcuucacu

SEQ ID NO: 326112 - RNA, 22 nt, Human
ccugcagguccccggaugcgca

SEQ ID NO: 326113 - RNA, 22 nt, Human
cccagcccagcguucgaggggu

SEQ ID NO: 326114 - RNA, 19 nt, Human
agcuggggcgguguguguu

SEQ ID NO: 326115 - RNA, 22 nt, Human
gggcuccuccucugacuguggc

SEQ ID NO: 326116 - RNA, 22 nt, Human
ccacucccuuccgguccagggc

SEQ ID NO: 326117 - RNA, 19 nt, Human
gggcuccuugggccucucu

SEQ ID NO: 326118 - RNA, 22 nt, Human
agagcuggcugcugcggugcuu

SEQ ID NO: 326119 - RNA, 22 nt, Human
agagcuggcugguagcccugau

SEQ ID NO: 326120 - RNA, 22 nt, Human
cccugcagccuugcaugccuuc

SEQ ID NO: 326121 - RNA, 22 nt, Human
cccuguccuggaugggagcacu

SEQ ID NO: 326122 - RNA, 22 nt, Human
ugcagagcuucauugcauaggc

SEQ ID NO: 326123 - RNA, 22 nt, Human
agagcuggccagggaucacucu

SEQ ID NO: 326124 - RNA, 22 nt, Human
gcugggcucuuuaccccuguac

SEQ ID NO: 326125 - RNA, 22 nt, Human
caccaggcacauaguaggcacu

SEQ ID NO: 326126 - RNA, 22 nt, Human
uuaugguaauuaaaacauguau

SEQ ID NO: 326127 - RNA, 22 nt, Human
agagcuggauggucaagauggc

SEQ ID NO: 326128 - RNA, 22 nt, Human
uauaaaugccaggacuuuagau

SEQ ID NO: 326129 - RNA, 22 nt, Human
ccuggcagcaggugggcccgug

SEQ ID NO: 326130 - RNA, 22 nt, Human
agcuggggcugcagagaacagg

SEQ ID NO: 326131 - RNA, 22 nt, Human
ugguauucuuucuguagaucau

SEQ ID NO: 326132 - RNA, 22 nt, Human
ggcaccagcaggcaccgaugcc

SEQ ID NO: 326133 - RNA, 22 nt, Human
agcuccugucucaagggagccu

SEQ ID NO: 326134 - RNA, 22 nt, Human
cccugugggguccgccuguccg

SEQ ID NO: 326135 - RNA, 22 nt, Human
ugaucaaaacauuacuccacca

SEQ ID NO: 326136 - RNA, 22 nt, Human
gggccccugggaauucugugau

SEQ ID NO: 326137 - RNA, 19 nt, Human
uccagccccucugugugug

SEQ ID NO: 326138 - RNA, 18 nt, Human
agcuggggccucuggucc

SEQ ID NO: 326139 - RNA, 22 nt, Human
gugcauccacuagggcucuccc

SEQ ID NO: 326140 - RNA, 22 nt, Human
ccuggagcaaaaaucuaaggag

SEQ ID NO: 326141 - RNA, 22 nt, Human
ccagccucaucgccugccuguc

SEQ ID NO: 326142 - RNA, 22 nt, Human
auggaggaugugcagcaugggc

SEQ ID NO: 326143 - RNA, 20 nt, Human
caauaauuuacuucccuauu

SEQ ID NO: 326144 - RNA, 22 nt, Human
gcuucugcagagccguccugag

SEQ ID NO: 326145 - RNA, 22 nt, Human
gggagaguagcuggaagguucu

SEQ ID NO: 326146 - RNA, 22 nt, Human
cugagcaucauggcagaaucuu

SEQ ID NO: 326147 - RNA, 22 nt, Human
cuggaaggagcccgggcggauc

SEQ ID NO: 326148 - RNA, 22 nt, Human
gcucguacaccagcguggaggu

SEQ ID NO: 326149 - RNA, 19 nt, Human
aucaggcuucuauuuucuc

SEQ ID NO: 326150 - RNA, 22 nt, Human
ucaucuguuaugggaguuuuug

SEQ ID NO: 326151 - RNA, 23 nt, Human
acacauguuuaugcuugggggca

SEQ ID NO: 326152 - RNA, 19 nt, Human
ucuuucauuucuagcucug

SEQ ID NO: 326153 - RNA, 22 nt, Human
agcauggcuuuggaggauagca

SEQ ID NO: 326154 - RNA, 22 nt, Human
cgugaugcucaggaggucauag

SEQ ID NO: 326155 - RNA, 23 nt, Human
auaauaacgucugucuugucucu

SEQ ID NO: 326156 - RNA, 22 nt, Human
uuccuggcagaggccccgacag

SEQ ID NO: 326157 - RNA, 22 nt, Human
auuuccuggaggaauggaagca

SEQ ID NO: 326158 - RNA, 22 nt, Human
guggcccaggcuuggcgcuggc

SEQ ID NO: 326159 - RNA, 22 nt, Human
gggcugagggguaucucauggg

SEQ ID NO: 326160 - RNA, 22 nt, Human
cugcauaucaaauuacuccugg

SEQ ID NO: 326161 - RNA, 21 nt, Human
uuccuccucuggagaagaaga

SEQ ID NO: 326162 - RNA, 21 nt, Human
caggaacauucuuuacauuua

SEQ ID NO: 326163 - RNA, 22 nt, Human
gagagaagggggauaugagccu

SEQ ID NO: 326164 - RNA, 22 nt, Human
gagucacauacuauguaauaga

SEQ ID NO: 326165 - RNA, 22 nt, Human
gcuguauuuauaugaaggcaug

SEQ ID NO: 326166 - RNA, 22 nt, Human
acuggaaaguauucuuucacug

SEQ ID NO: 326167 - RNA, 22 nt, Human
cuguccauggcaaugaugcaga

SEQ ID NO: 326168 - RNA, 22 nt, Human
uggggugugcucagagcagggg

SEQ ID NO: 326169 - RNA, 22 nt, Human
cggcagcgguuggagguuguag

SEQ ID NO: 326170 - RNA, 22 nt, Human
acagacacaggcguggagucgc

SEQ ID NO: 326171 - RNA, 22 nt, Human
ugagcauuaccugaggccacug

SEQ ID NO: 326172 - RNA, 22 nt, Human
cucagucucuugggcugugaag

SEQ ID NO: 326173 - RNA, 22 nt, Human
ccucugcccuuuuccuguauca

SEQ ID NO: 326174 - RNA, 22 nt, Human
ugggaagauaugagugaccaac

SEQ ID NO: 326175 - RNA, 22 nt, Human
cuccugcagcccucagcagcca

SEQ ID NO: 326176 - RNA, 22 nt, Human
uugggacaaagacuccuugaau

SEQ ID NO: 326177 - RNA, 22 nt, Human
gcugugaaagcugccacacugu

SEQ ID NO: 326178 - RNA, 22 nt, Human
cuucaguucuaaaguagaaugu

SEQ ID NO: 326179 - RNA, 22 nt, Human
ugagaagcauuaggaagaacau

SEQ ID NO: 326180 - RNA, 23 nt, Human
ggaagcucacguaguccugcacu

SEQ ID NO: 326181 - RNA, 22 nt, Human
auggaguugagcucuguugucc

SEQ ID NO: 326182 - RNA, 22 nt, Human
cccuggcucaggcagcuuuguu

SEQ ID NO: 326183 - RNA, 22 nt, Human
cagcuccccucuguggggcagu

SEQ ID NO: 326184 - RNA, 22 nt, Human
gccucugcacuguggcacacca

SEQ ID NO: 326185 - RNA, 22 nt, Human
uuuccaaagguggcaggaacaa

SEQ ID NO: 326186 - RNA, 22 nt, Human
ucagugauuucuggggugaggg

SEQ ID NO: 326187 - RNA, 22 nt, Human
uggcagcagggccccuggagga

SEQ ID NO: 326188 - RNA, 22 nt, Human
uuucuggcagcgggacaggggu

SEQ ID NO: 326189 - RNA, 22 nt, Human
guucacauccuugugaggauuu

SEQ ID NO: 326190 - RNA, 22 nt, Human
uaggaaugcagaugcauaauaa

SEQ ID NO: 326191 - RNA, 22 nt, Human
acagcagguuauuguuauggca

SEQ ID NO: 326192 - RNA, 22 nt, Human
ugacauuugagagagauauaca

SEQ ID NO: 326193 - RNA, 22 nt, Human
augaugaagcaugguuacacug

SEQ ID NO: 326194 - RNA, 22 nt, Human
auggccugcagugcugccacag

SEQ ID NO: 326195 - RNA, 22 nt, Human
uugcaaauaauagccugaaacu

SEQ ID NO: 326196 - RNA, 22 nt, Human
ccucuggccuaggccgggagag

SEQ ID NO: 326197 - RNA, 22 nt, Human
ccuguacuuguauuaaaggucc

SEQ ID NO: 326198 - RNA, 22 nt, Human
ugucuucuaccuugacagcauu

SEQ ID NO: 326199 - RNA, 22 nt, Human
agcauggccucccgggccuggc

SEQ ID NO: 326200 - RNA, 22 nt, Human
gugcugccuccauauccgucag

SEQ ID NO: 326201 - RNA, 22 nt, Human
guauuucuuuacauaugcucau

SEQ ID NO: 326202 - RNA, 22 nt, Human
cugugcuggcagaccuggaguu

SEQ ID NO: 326203 - RNA, 22 nt, Human
acccagcucuuugauggucuug

SEQ ID NO: 326204 - RNA, 20 nt, Human
uuuuccacuccucaaaacag

SEQ ID NO: 326205 - RNA, 22 nt, Human
uucucugguuugcuguuucuga

SEQ ID NO: 326206 - RNA, 22 nt, Human
uuugcacuuaaauuuacaacac

SEQ ID NO: 326207 - RNA, 22 nt, Human
auacacauguuauuguggaagc

SEQ ID NO: 326208 - RNA, 22 nt, Human
uggcugaggagagggcggaagu

SEQ ID NO: 326209 - RNA, 22 nt, Human
cagaugaaguaggugacgagca

SEQ ID NO: 326210 - RNA, 22 nt, Human
gaagaccccagagcgagguaag

SEQ ID NO: 326211 - RNA, 18 nt, Human
ugugccucugcaggacgu

SEQ ID NO: 326212 - RNA, 21 nt, Human
aaacugaccuugccugagaca

SEQ ID NO: 326213 - RNA, 22 nt, Human
uucaacaacuugguucaaaugg

SEQ ID NO: 326214 - RNA, 17 nt, Human
ucugccaguuuuagaau

SEQ ID NO: 326215 - RNA, 22 nt, Human
uggcucaggccuacgacgccuu

SEQ ID NO: 326216 - RNA, 22 nt, Human
uuuccagaaauaccauuuggug

SEQ ID NO: 326217 - RNA, 22 nt, Human
uaaaaguuagcuaggacaaagu

SEQ ID NO: 326218 - RNA, 22 nt, Human
gagcacugagcuggaauuggag

SEQ ID NO: 326219 - RNA, 22 nt, Human
ugucacagagcgugcaacagaa

SEQ ID NO: 326220 - RNA, 22 nt, Human
ucccuggcacaagaaggcuguc

SEQ ID NO: 326221 - RNA, 22 nt, Human
gcugauggcuugcuggcugaca

SEQ ID NO: 326222 - RNA, 22 nt, Human
cuccacagccccuccaguggca

SEQ ID NO: 326223 - RNA, 22 nt, Human
cauggaaggcaaaagacacaga

SEQ ID NO: 326224 - RNA, 22 nt, Human
gcagcccaggcucgcucacugc

SEQ ID NO: 326225 - RNA, 22 nt, Human
gaaguucugguguaugugauaa

SEQ ID NO: 326226 - RNA, 22 nt, Human
ggcuguggucauuaggagguug

SEQ ID NO: 326227 - RNA, 22 nt, Human
agugauguagguggauucuggc

SEQ ID NO: 326228 - RNA, 22 nt, Human
ugucuguccaucugucugggac

SEQ ID NO: 326229 - RNA, 22 nt, Human
gcagcugcgcugguguggggca

SEQ ID NO: 326230 - RNA, 22 nt, Human
gugcuggggagauaggaagaga

SEQ ID NO: 326231 - RNA, 22 nt, Human
ggagguggagcuggaaguucca

SEQ ID NO: 326232 - RNA, 22 nt, Human
ggaaugugcugacacgcgagag

SEQ ID NO: 326233 - RNA, 22 nt, Human
guugcagauguggaacucgugc

SEQ ID NO: 326234 - RNA, 20 nt, Human
gaccagaucccuuaccagcu

SEQ ID NO: 326235 - RNA, 22 nt, Human
gccuggaaugcaaugugacgaa

SEQ ID NO: 326236 - RNA, 22 nt, Human
uagaaaagccccagcuggaggg

SEQ ID NO: 326237 - RNA, 22 nt, Human
ucuuucagaaacuuugucugcg

SEQ ID NO: 326238 - RNA, 22 nt, Human
auggaguucugccagcgcugcu

SEQ ID NO: 326239 - RNA, 22 nt, Human
cugggauccacgggcucccaag

SEQ ID NO: 326240 - RNA, 18 nt, Human
uagcucuuguugguccau

SEQ ID NO: 326241 - RNA, 22 nt, Human
ucccagaacccugccagguccu

SEQ ID NO: 326242 - RNA, 22 nt, Human
aaucuucaggguccuggggcuc

SEQ ID NO: 326243 - RNA, 22 nt, Human
ccuugcagcauauagagucccu

SEQ ID NO: 326244 - RNA, 22 nt, Human
uugcaucagcaggcauaauugg

SEQ ID NO: 326245 - RNA, 22 nt, Human
uuuucaguuccaucucugcucu

SEQ ID NO: 326246 - RNA, 22 nt, Human
agcagugugggcugcacgcugg

SEQ ID NO: 326247 - RNA, 22 nt, Human
agcagcaggugaccucgaugcc

SEQ ID NO: 326248 - RNA, 22 nt, Human
gaggaggcuuccgggaggcacg

SEQ ID NO: 326249 - RNA, 21 nt, Human
gcuguucggcggcccucgcgc

SEQ ID NO: 326250 - RNA, 22 nt, Human
ggcagugaugucaaacagugaa

SEQ ID NO: 326251 - RNA, 19 nt, Human
cucugccucuggcuguggc

SEQ ID NO: 326252 - RNA, 22 nt, Human
gccucugcaccaguacugugcc

SEQ ID NO: 326253 - RNA, 22 nt, Human
ccgcuguccuggagcugcugcu

SEQ ID NO: 326254 - RNA, 20 nt, Human
cuugaguucagagcugucau

SEQ ID NO: 326255 - RNA, 22 nt, Human
ugaaagcucugucaucauuccu

SEQ ID NO: 326256 - RNA, 22 nt, Human
augaaacucuagcuuucagcac

SEQ ID NO: 326257 - RNA, 22 nt, Human
gaaacacucaauuuaguaauuc

SEQ ID NO: 326258 - RNA, 22 nt, Human
uaucacauacuucucauccagg

SEQ ID NO: 326259 - RNA, 22 nt, Human
uuucuaguggguauucccuguu

SEQ ID NO: 326260 - RNA, 22 nt, Human
aaagcagcagcacguggaagag

SEQ ID NO: 326261 - RNA, 20 nt, Human
gugcccaguuggugacagac

SEQ ID NO: 326262 - RNA, 22 nt, Human
ggcucuggcgagcuuuaguaca

SEQ ID NO: 326263 - RNA, 22 nt, Human
aauggcaaaguguuuucauacc

SEQ ID NO: 326264 - RNA, 22 nt, Human
ccaggugugcucugcaguggau

SEQ ID NO: 326265 - RNA, 22 nt, Human
agagaauuaacauuccauggcu

SEQ ID NO: 326266 - RNA, 22 nt, Human
uuuccucacacagaagaucuug

SEQ ID NO: 326267 - RNA, 22 nt, Human
cagaaacacuguauuuagggaa

SEQ ID NO: 326268 - RNA, 22 nt, Human
uuccagagaguuauuccccugg

SEQ ID NO: 326269 - RNA, 22 nt, Human
uggcugagugaacauguccauu

SEQ ID NO: 326270 - RNA, 22 nt, Human
gcugcuggcuuccugcuguuuu

SEQ ID NO: 326271 - RNA, 22 nt, Human
gccugcuggcuggaaauucucc

SEQ ID NO: 326272 - RNA, 22 nt, Human
gcacugguuuauuuaagaacaa

SEQ ID NO: 326273 - RNA, 22 nt, Human
cagaaagugauuugcuauucca

SEQ ID NO: 326274 - RNA, 22 nt, Human
agacacauuuucagcucugcca

SEQ ID NO: 326275 - RNA, 22 nt, Human
gcugcaagugcauguugcaacu

SEQ ID NO: 326276 - RNA, 22 nt, Human
gucccucugccugugguucucu

SEQ ID NO: 326277 - RNA, 22 nt, Human
gguggcaccuuacccugcgcag

SEQ ID NO: 326278 - RNA, 22 nt, Human
guggauggagcuggaagccauu

SEQ ID NO: 326279 - RNA, 22 nt, Human
guggcauuugggagaugcgugg

SEQ ID NO: 326280 - RNA, 22 nt, Human
uuguacuuaaauaugcaaauag

SEQ ID NO: 326281 - RNA, 20 nt, Human
uugaggagauauugaauacu

SEQ ID NO: 326282 - RNA, 19 nt, Human
ugguggaggugcaccugac

SEQ ID NO: 326283 - RNA, 22 nt, Human
ugcccauggcaggauuucugaa

SEQ ID NO: 326284 - RNA, 22 nt, Human
cuggccuggcaggggaccucua

SEQ ID NO: 326285 - RNA, 22 nt, Human
ugcauguuuuauaccaaagcuu

SEQ ID NO: 326286 - RNA, 22 nt, Human
gagcaacacauugaaugaggau

SEQ ID NO: 326287 - RNA, 22 nt, Human
ucagagaaguaggcuaauggug

SEQ ID NO: 326288 - RNA, 22 nt, Human
auugagaaaauucgagcaaguu

SEQ ID NO: 326289 - RNA, 22 nt, Human
uaggcagggauuaggguugauu

SEQ ID NO: 326290 - RNA, 21 nt, Human
cuagaaagaauguugucgucu

SEQ ID NO: 326291 - RNA, 22 nt, Human
gcuugcugaacaggaaccuggc

SEQ ID NO: 326292 - RNA, 23 nt, Human
cagcacaguacauuuccugucuc

SEQ ID NO: 326293 - RNA, 22 nt, Human
ugcuggccucggcgcugggccu

SEQ ID NO: 326294 - RNA, 22 nt, Human
ucugguuucccaguuccuccgu

SEQ ID NO: 326295 - RNA, 22 nt, Human
cuuugcuaauguugcauuuuca

SEQ ID NO: 326296 - RNA, 22 nt, Human
aaacuagguucugauuuccaag

SEQ ID NO: 326297 - RNA, 22 nt, Human
ugguggcacugacaucagacac

SEQ ID NO: 326298 - RNA, 22 nt, Human
cugacagcgagagaguugcccc

SEQ ID NO: 326299 - RNA, 22 nt, Human
ucaccucucuggccgucuaccu

SEQ ID NO: 326300 - RNA, 22 nt, Human
cagcaguguacaaggugucaga

SEQ ID NO: 326301 - RNA, 22 nt, Human
gcuguaacuuuuucauuuucaa

SEQ ID NO: 326302 - RNA, 22 nt, Human
agaagagccacuguugacggca

SEQ ID NO: 326303 - RNA, 21 nt, Human
uugauuuagcagaucuagcug

SEQ ID NO: 326304 - RNA, 21 nt, Human
ggcagcucagcagauggggac

SEQ ID NO: 326305 - RNA, 22 nt, Human
ucaggagaguguucaguggagg

SEQ ID NO: 326306 - RNA, 22 nt, Human
aggccagaacagcucugcacca

SEQ ID NO: 326307 - RNA, 22 nt, Human
uucuccagcucaucagggaggg

SEQ ID NO: 326308 - RNA, 22 nt, Human
guggcagagagcaagugucuga

SEQ ID NO: 326309 - RNA, 22 nt, Human
aggaauuugggguuacaugaug

SEQ ID NO: 326310 - RNA, 22 nt, Human
guggaaauuuuaggaucaucuu

SEQ ID NO: 326311 - RNA, 22 nt, Human
gcacuuguuuuauguuccugag

SEQ ID NO: 326312 - RNA, 22 nt, Human
ugaggaaugugacaaaaccaag

SEQ ID NO: 326313 - RNA, 22 nt, Human
ucauuguuucugcuuuucauga

SEQ ID NO: 326314 - RNA, 22 nt, Human
ucaagcggacugagauacucug

SEQ ID NO: 326315 - RNA, 22 nt, Human
uugagcugccuggcuguggcuc

SEQ ID NO: 326316 - RNA, 22 nt, Human
cugccaucugagccaaaagugc

SEQ ID NO: 326317 - RNA, 18 nt, Human
augggcagguaagaucca

SEQ ID NO: 326318 - RNA, 19 nt, Human
acaguuugggaaaugagca

SEQ ID NO: 326319 - RNA, 22 nt, Human
ugcuuucaaugaauuguauacu

SEQ ID NO: 326320 - RNA, 22 nt, Human
agucuggagugauuauguggga

SEQ ID NO: 326321 - RNA, 22 nt, Human
uuaccuuguaaaacauauuccu

SEQ ID NO: 326322 - RNA, 22 nt, Human
uggcucugccccauaccccugc

SEQ ID NO: 326323 - RNA, 22 nt, Human
aucaugcagcaacaagcaaggc

SEQ ID NO: 326324 - RNA, 20 nt, Human
uugcaaagugaauagcaauu

SEQ ID NO: 326325 - RNA, 22 nt, Human
caucagucugaaagccagggag

SEQ ID NO: 326326 - RNA, 22 nt, Human
augccccagugugugcuuccuu

SEQ ID NO: 326327 - RNA, 22 nt, Human
augauacaccuaggagugggag

SEQ ID NO: 326328 - RNA, 22 nt, Human
agaguguggaaauguucagagu

SEQ ID NO: 326329 - RNA, 22 nt, Human
cagagcugucauuugccaguga

SEQ ID NO: 326330 - RNA, 22 nt, Human
uggcagugugggaggaagguac

SEQ ID NO: 326331 - RNA, 23 nt, Human
agugaugucacccacagacaagg

SEQ ID NO: 326332 - RNA, 22 nt, Human
augcccagaacccccuggaugg

SEQ ID NO: 326333 - RNA, 20 nt, Human
ucuggggaugaggucuagga

SEQ ID NO: 326334 - RNA, 22 nt, Human
aauggcuguucucugugauugg

SEQ ID NO: 326335 - RNA, 22 nt, Human
uuugacucugggugcuuuuucg

SEQ ID NO: 326336 - RNA, 22 nt, Human
aaugaacacuuagccuuucuau

SEQ ID NO: 326337 - RNA, 22 nt, Human
aucuuuggguacaaacuugccu

SEQ ID NO: 326338 - RNA, 22 nt, Human
aacuagaaagaacauauuucca

SEQ ID NO: 326339 - RNA, 22 nt, Human
ggccuugggauguggcugcagc

SEQ ID NO: 326340 - RNA, 22 nt, Human
agcuccagggaaagaguggauc

SEQ ID NO: 326341 - RNA, 22 nt, Human
uuuaaacuaacaguacacguug

SEQ ID NO: 326342 - RNA, 22 nt, Human
ccuacucccuuucuagaguaug

SEQ ID NO: 326343 - RNA, 22 nt, Human
ccaugcccuugucaucuccagg

SEQ ID NO: 326344 - RNA, 22 nt, Human
gucuguccacuuggaagcuccc

SEQ ID NO: 326345 - RNA, 22 nt, Human
agcugcaccggcuggaccacug

SEQ ID NO: 326346 - RNA, 22 nt, Human
ccaucuucucuugaaccuccuu

SEQ ID NO: 326347 - RNA, 22 nt, Human
gugagguccucccugcugggag

SEQ ID NO: 326348 - RNA, 22 nt, Human
guuuuguucaugaacauugggu

SEQ ID NO: 326349 - RNA, 22 nt, Human
ggacugucuccuugcugguagg

SEQ ID NO: 326350 - RNA, 22 nt, Human
uuuccaaggaugugucucucua

SEQ ID NO: 326351 - RNA, 19 nt, Human
ugggcagugccagggcuua

SEQ ID NO: 326352 - RNA, 22 nt, Human
cauugcaacuucaaacuccugg

SEQ ID NO: 326353 - RNA, 18 nt, Human
auuugcaggcaugcaggc

SEQ ID NO: 326354 - RNA, 22 nt, Human
gugauuucagguuuuucauacu

SEQ ID NO: 326355 - RNA, 22 nt, Human
aucagagcugcauuuuagagcc

SEQ ID NO: 326356 - RNA, 22 nt, Human
ugugucuuuggcgaugucugga

SEQ ID NO: 326357 - RNA, 22 nt, Human
auguccaggaagucuuaacuca

SEQ ID NO: 326358 - RNA, 22 nt, Human
guggcgcagaggguggcagaga

SEQ ID NO: 326359 - RNA, 22 nt, Human
ucacuuuaccucauucaggcag

SEQ ID NO: 326360 - RNA, 22 nt, Human
agugcuuuauguuguugugcaa

SEQ ID NO: 326361 - RNA, 22 nt, Human
cuggcucgcauuauauuuuggg

SEQ ID NO: 326362 - RNA, 22 nt, Human
ucuguagcauucaccagcccug

SEQ ID NO: 326363 - RNA, 22 nt, Human
uuuccacacucacugcacucau

SEQ ID NO: 326364 - RNA, 22 nt, Human
gaugauuacacuuuuaaaacag

SEQ ID NO: 326365 - RNA, 22 nt, Human
ucugggugucacuccugccugc

SEQ ID NO: 326366 - RNA, 22 nt, Human
caugcaugccgggcugacagag

SEQ ID NO: 326367 - RNA, 22 nt, Human
cugggguuggccagggcccuag

SEQ ID NO: 326368 - RNA, 22 nt, Human
uccuggccaaguagauguggcg

SEQ ID NO: 326369 - RNA, 22 nt, Human
caucuugucuuuuugggccuga

SEQ ID NO: 326370 - RNA, 22 nt, Human
uauucacagcugccgcacucag

SEQ ID NO: 326371 - RNA, 22 nt, Human
ucccacugcuuugcucugcuca

SEQ ID NO: 326372 - RNA, 22 nt, Human
auguaagagcuuugcagggaaa

SEQ ID NO: 326373 - RNA, 18 nt, Human
ucugagggugcgggagcu

SEQ ID NO: 326374 - RNA, 22 nt, Human
cauguguauuauucuuguggaa

SEQ ID NO: 326375 - RNA, 22 nt, Human
uccuggcccuguggccugcagu

SEQ ID NO: 326376 - RNA, 22 nt, Human
aauugguuugaauaaauaaaga

SEQ ID NO: 326377 - RNA, 22 nt, Human
ucuguggcaugguaucuggagg

SEQ ID NO: 326378 - RNA, 22 nt, Human
cucucugggcccaguuggcacc

SEQ ID NO: 326379 - RNA, 22 nt, Human
ucagcacaggucuugcaaaaca

SEQ ID NO: 326380 - RNA, 20 nt, Human
uucacagaggacucagguca

SEQ ID NO: 326381 - RNA, 22 nt, Human
caaagccaggcuuucuaaugua

SEQ ID NO: 326382 - RNA, 22 nt, Human
ccugggacuuggucugggguuu

SEQ ID NO: 326383 - RNA, 18 nt, Human
gaacagcaauuucauguu

SEQ ID NO: 326384 - RNA, 22 nt, Human
aaaacuuucagggauacagaaa

SEQ ID NO: 326385 - RNA, 22 nt, Human
gagauuuccauauuuuguaaca

SEQ ID NO: 326386 - RNA, 21 nt, Human
uuccuggaggcagaaacguga

SEQ ID NO: 326387 - RNA, 22 nt, Human
gaugucuggcuaccacucgcac

SEQ ID NO: 326388 - RNA, 22 nt, Human
agucaagguggaccagaaaaau

SEQ ID NO: 326389 - RNA, 22 nt, Human
aagagcuggcucuugcagcagc

SEQ ID NO: 326390 - RNA, 22 nt, Human
acgugcuggagaagagcucgcc

SEQ ID NO: 326391 - RNA, 19 nt, Human
uccagaacugcccuggccu

SEQ ID NO: 326392 - RNA, 22 nt, Human
gugagagugguuuauguccaug

SEQ ID NO: 326393 - RNA, 22 nt, Human
cugguuuuuagugcuuaggagu

SEQ ID NO: 326394 - RNA, 21 nt, Human
gcucuguguuacaaguugggg

SEQ ID NO: 326395 - RNA, 19 nt, Human
cuucuggauccgcagggcc

SEQ ID NO: 326396 - RNA, 22 nt, Human
ccaggccuguguuguguggagg

SEQ ID NO: 326397 - RNA, 21 nt, Human
ggagucagggucuggcugggg

SEQ ID NO: 326398 - RNA, 22 nt, Human
agcagcaggagccgugggguga

SEQ ID NO: 326399 - RNA, 22 nt, Human
uaguggggaaggaggacaagaa

SEQ ID NO: 326400 - RNA, 20 nt, Human
ucucuggcaagaagcugcag

SEQ ID NO: 326401 - RNA, 22 nt, Human
gggaagugagcuggaaucaagg

SEQ ID NO: 326402 - RNA, 22 nt, Human
uaggauaugcauuuuuauacau

SEQ ID NO: 326403 - RNA, 22 nt, Human
agcuccacucccugccuguuuc

SEQ ID NO: 326404 - RNA, 22 nt, Human
uaaaguauaagcauuggaguau

SEQ ID NO: 326405 - RNA, 22 nt, Human
gcggagaggcagagacuccgcg

SEQ ID NO: 326406 - RNA, 22 nt, Human
uggccaggcagguagaacggcc

SEQ ID NO: 326407 - RNA, 22 nt, Human
uaccaaaaccaagccauuaucu

SEQ ID NO: 326408 - RNA, 22 nt, Human
uaauuucagugcaagcucacgg

SEQ ID NO: 326409 - RNA, 22 nt, Human
ucuccucuauuucuguauguau

SEQ ID NO: 326410 - RNA, 19 nt, Human
cacuguccuagucgaggcc

SEQ ID NO: 326411 - RNA, 22 nt, Human
caggaaugccaaccagugcaug

SEQ ID NO: 326412 - RNA, 22 nt, Human
caugucaagacugaagauccag

SEQ ID NO: 326413 - RNA, 22 nt, Human
ccagucagccaagcugcagcgg

SEQ ID NO: 326414 - RNA, 22 nt, Human
aguccagggcuuagucagcggg

SEQ ID NO: 326415 - RNA, 22 nt, Human
aaggugccacuucccucagacu

SEQ ID NO: 326416 - RNA, 22 nt, Human
gcugcccauugcucucccacuc

SEQ ID NO: 326417 - RNA, 22 nt, Human
aaugagaauguaagugaagaga

SEQ ID NO: 326418 - RNA, 22 nt, Human
ucuggcuucaacuuuacugaaa

SEQ ID NO: 326419 - RNA, 22 nt, Human
caggaacacaaugagucucaaa

SEQ ID NO: 326420 - RNA, 22 nt, Human
uauggcaagaugacauguucuc

SEQ ID NO: 326421 - RNA, 22 nt, Human
cugucuacagaugaaauaagca

SEQ ID NO: 326422 - RNA, 22 nt, Human
ugcaggaacucgaaaacuauag

SEQ ID NO: 326423 - RNA, 22 nt, Human
uuuauccaccuuacccuguucc

SEQ ID NO: 326424 - RNA, 22 nt, Human
cuggcagcugcccgagaugccc

SEQ ID NO: 326425 - RNA, 22 nt, Human
cauugcugugggcauuugcugc

SEQ ID NO: 326426 - RNA, 22 nt, Human
auggcauuugaaucugucuuuu

SEQ ID NO: 326427 - RNA, 22 nt, Human
caauaauugcuuuccagaguua

SEQ ID NO: 326428 - RNA, 22 nt, Human
ggcuggaaggcccuuuguugau

SEQ ID NO: 326429 - RNA, 22 nt, Human
uuuucaguugugcucucuaguu

SEQ ID NO: 326430 - RNA, 22 nt, Human
ucugcuggaaaaccagggaauu

SEQ ID NO: 326431 - RNA, 22 nt, Human
agcaauguuggccuauauaccu

SEQ ID NO: 326432 - RNA, 22 nt, Human
ugcagugaugcuucuggcucag

SEQ ID NO: 326433 - RNA, 22 nt, Human
ugucuuacagcaaucuguucug

SEQ ID NO: 326434 - RNA, 22 nt, Human
cgcaggugccggcagauggggu

SEQ ID NO: 326435 - RNA, 22 nt, Human
ccaggcuccccaggaggcccuu

SEQ ID NO: 326436 - RNA, 22 nt, Human
ucucugccacagcuucugccuu

SEQ ID NO: 326437 - RNA, 22 nt, Human
ggugcccaaggaagguugccgu

SEQ ID NO: 326438 - RNA, 22 nt, Human
aguggcaguagaugagcugguu

SEQ ID NO: 326439 - RNA, 22 nt, Human
cugguuuuccaauguuuugacu

SEQ ID NO: 326440 - RNA, 22 nt, Human
gagugugucggucagcguggcg

SEQ ID NO: 326441 - RNA, 20 nt, Human
aaaaacaguaaugcugaaga

SEQ ID NO: 326442 - RNA, 22 nt, Human
auauacacuguuucaguugaag

SEQ ID NO: 326443 - RNA, 22 nt, Human
gcuuccaaugcuucuaucacau

SEQ ID NO: 326444 - RNA, 22 nt, Human
ccugggcaaaugccagagacaa

SEQ ID NO: 326445 - RNA, 21 nt, Human
cugcacugugauuuaaaaugu

SEQ ID NO: 326446 - RNA, 22 nt, Human
ugucauuggugaucugaugccu

SEQ ID NO: 326447 - RNA, 22 nt, Human
uuggcugacaaauggaaucucu

SEQ ID NO: 326448 - RNA, 22 nt, Human
caagcuuguuucuccugggggu

SEQ ID NO: 326449 - RNA, 22 nt, Human
uugggauuacagguguaagcca

SEQ ID NO: 326450 - RNA, 22 nt, Human
gccuggcaaggcccuguugacu

SEQ ID NO: 326451 - RNA, 22 nt, Human
cagcugcucugguggucucucc

SEQ ID NO: 326452 - RNA, 19 nt, Human
ccauucugucucugccaca

SEQ ID NO: 326453 - RNA, 22 nt, Human
ugggaacuguacugccuugaac

SEQ ID NO: 326454 - RNA, 22 nt, Human
agcagcaccuguccucgcugcu

SEQ ID NO: 326455 - RNA, 22 nt, Human
ucaucaucauucucccccacuu

SEQ ID NO: 326456 - RNA, 22 nt, Human
cugcaucacagcaggaggcaca

SEQ ID NO: 326457 - RNA, 22 nt, Human
uggcacagcuugucauaaacuc

SEQ ID NO: 326458 - RNA, 22 nt, Human
acugggcaaggauaugaugggu

SEQ ID NO: 326459 - RNA, 22 nt, Human
guggccaucuuuggcccugacu

SEQ ID NO: 326460 - RNA, 22 nt, Human
cuccaggacugaggacagagcu

SEQ ID NO: 326461 - RNA, 22 nt, Human
cacacuguccccuucuccccag

SEQ ID NO: 326462 - RNA, 22 nt, Human
cugaaggauguguggugggagu

SEQ ID NO: 326463 - RNA, 22 nt, Human
aaacccugagacuuggggccag

SEQ ID NO: 326464 - RNA, 22 nt, Human
cuuugugauaguguuaagacca

SEQ ID NO: 326465 - RNA, 22 nt, Human
ugggcagacgggagcuugccuu

SEQ ID NO: 326466 - RNA, 22 nt, Human
uugaagcauuugcuauagcauu

SEQ ID NO: 326467 - RNA, 22 nt, Human
cugucuggaaugcaguacauag

SEQ ID NO: 326468 - RNA, 22 nt, Human
gcucugugggggaaauccuggg

SEQ ID NO: 326469 - RNA, 20 nt, Human
ugggaucgaaucaagucugu

SEQ ID NO: 326470 - RNA, 22 nt, Human
gcugugcagaggugagaaucca

SEQ ID NO: 326471 - RNA, 22 nt, Human
ccaggagaaugggauuacccua

SEQ ID NO: 326472 - RNA, 22 nt, Human
gggcuguuugcauauguuuaua

SEQ ID NO: 326473 - RNA, 22 nt, Human
uugaauaguuuuggauagcaua

SEQ ID NO: 326474 - RNA, 22 nt, Human
guugcauuaaucugcucaggcu

SEQ ID NO: 326475 - RNA, 22 nt, Human
uagaucuuucacuacuguguag

SEQ ID NO: 326476 - RNA, 22 nt, Human
cuggcagcucugagucccuucu

SEQ ID NO: 326477 - RNA, 22 nt, Human
ucuguccauucagaauggcccu

SEQ ID NO: 326478 - RNA, 22 nt, Human
aaauugcauuuuaaagguagau

SEQ ID NO: 326479 - RNA, 22 nt, Human
aucugucccuccucacagccuc

SEQ ID NO: 326480 - RNA, 22 nt, Human
ggcuagggaucuagaccaggac

SEQ ID NO: 326481 - RNA, 21 nt, Human
ucugaugguagaugagaugug

SEQ ID NO: 326482 - RNA, 19 nt, Human
ugguucuccuuccacaguc

SEQ ID NO: 326483 - RNA, 22 nt, Human
ggcacagcugaugcagacacac

SEQ ID NO: 326484 - RNA, 22 nt, Human
cugggagggguagccaauccua

SEQ ID NO: 326485 - RNA, 22 nt, Human
ucaccuguuggauguauacugu

SEQ ID NO: 326486 - RNA, 23 nt, Human
guccuagugcuuggugcccaggc

SEQ ID NO: 326487 - RNA, 22 nt, Human
cagugcugcaggcgccugcggu

SEQ ID NO: 326488 - RNA, 22 nt, Human
cuuccugcaacaccuguguugc

SEQ ID NO: 326489 - RNA, 22 nt, Human
cuccuucacgcaggcugccaug

SEQ ID NO: 326490 - RNA, 22 nt, Human
gagcugcuggccuccugcggga

SEQ ID NO: 326491 - RNA, 22 nt, Human
caucugcaggggaagccaguuu

SEQ ID NO: 326492 - RNA, 22 nt, Human
ucauccagccucaucaggagcu

SEQ ID NO: 326493 - RNA, 22 nt, Human
ggcuuuuguuucagcucugcua

SEQ ID NO: 326494 - RNA, 22 nt, Human
agagcuccaggguuuuguagug

SEQ ID NO: 326495 - RNA, 22 nt, Human
ccaggagcccugccacaauggu

SEQ ID NO: 326496 - RNA, 22 nt, Human
uacagcuugauguuuguguguu

SEQ ID NO: 326497 - RNA, 23 nt, Human
guguggccccagggccuccucgc

SEQ ID NO: 326498 - RNA, 22 nt, Human
uauaugcagauuuucaucaucg

SEQ ID NO: 326499 - RNA, 22 nt, Human
aaaucccacucacgaguuuugc

SEQ ID NO: 326500 - RNA, 22 nt, Human
agucaacauuugagaugcaaug

SEQ ID NO: 326501 - RNA, 22 nt, Human
uuucuucucacccaggacagag

SEQ ID NO: 326502 - RNA, 22 nt, Human
ggaccugcucucccaguucucu

SEQ ID NO: 326503 - RNA, 22 nt, Human
aggagcggauguguccugccag

SEQ ID NO: 326504 - RNA, 22 nt, Human
guucucugccggcaccuacccg

SEQ ID NO: 326505 - RNA, 22 nt, Human
uugggagaaauaguugauccgc

SEQ ID NO: 326506 - RNA, 22 nt, Human
gagaauacaaccagaagcugag

SEQ ID NO: 326507 - RNA, 20 nt, Human
gagcagugagccagggaaag

SEQ ID NO: 326508 - RNA, 22 nt, Human
caucaguuccugccccugcccc

SEQ ID NO: 326509 - RNA, 22 nt, Human
ugaugggaggugcugcaggacc

SEQ ID NO: 326510 - RNA, 22 nt, Human
agugaauuagccuauuuguaaa

SEQ ID NO: 326511 - RNA, 20 nt, Human
guggcagugguggcagcagu

SEQ ID NO: 326512 - RNA, 22 nt, Human
gaccaggagauuugagcuaggc

SEQ ID NO: 326513 - RNA, 22 nt, Human
uacaggcucuugucagacguau

SEQ ID NO: 326514 - RNA, 18 nt, Human
cugccagugugcucuccg

SEQ ID NO: 326515 - RNA, 22 nt, Human
ccucccugccggcuggacuagu

SEQ ID NO: 326516 - RNA, 22 nt, Human
auguuguugaacucuuugcaug

SEQ ID NO: 326517 - RNA, 22 nt, Human
aucagagcuaguacuugcaggu

SEQ ID NO: 326518 - RNA, 22 nt, Human
guaaagcaaaauguagagauug

SEQ ID NO: 326519 - RNA, 21 nt, Human
gcugcucgagauccagugcuu

SEQ ID NO: 326520 - RNA, 22 nt, Human
aacaucuagguucucaucgaua

SEQ ID NO: 326521 - RNA, 22 nt, Human
augguuuuguccucuuugguuc

SEQ ID NO: 326522 - RNA, 22 nt, Human
ucuucacaguccuggucagugg

SEQ ID NO: 326523 - RNA, 22 nt, Human
aggaagccuggaguccugccca

SEQ ID NO: 326524 - RNA, 22 nt, Human
uuuuuugucuugaagaaauggu

SEQ ID NO: 326525 - RNA, 22 nt, Human
cucucuguuaugcuuucaugaa

SEQ ID NO: 326526 - RNA, 22 nt, Human
ccugugguuuacucuguggcua

SEQ ID NO: 326527 - RNA, 22 nt, Human
ucuguggcuuucguguaagaug

SEQ ID NO: 326528 - RNA, 22 nt, Human
gggaccuggacaugugugugcu

SEQ ID NO: 326529 - RNA, 17 nt, Human
aaaugguccuagggauu

SEQ ID NO: 326530 - RNA, 22 nt, Human
agcaguuuauccucauaaugga

SEQ ID NO: 326531 - RNA, 22 nt, Human
gcugucugcugggucgcucagg

SEQ ID NO: 326532 - RNA, 22 nt, Human
ggagacucaccccgcauucuag

SEQ ID NO: 326533 - RNA, 22 nt, Human
cagugcagccaaggacaggcac

SEQ ID NO: 326534 - RNA, 22 nt, Human
ccagagacaaggagcuggaguc

SEQ ID NO: 326535 - RNA, 22 nt, Human
guucuucaggcugugcucuaga

SEQ ID NO: 326536 - RNA, 22 nt, Human
gcccucugguggccgccucggc

SEQ ID NO: 326537 - RNA, 22 nt, Human
uccaggagcucauccacgucaa

SEQ ID NO: 326538 - RNA, 21 nt, Human
gcagcaugagaaagccccaaa

SEQ ID NO: 326539 - RNA, 22 nt, Human
ugcuugucacccugccugagug

SEQ ID NO: 326540 - RNA, 18 nt, Human
uccaccgcgugcaccucu

SEQ ID NO: 326541 - RNA, 23 nt, Human
cguuuuuuccucagauguucugg

SEQ ID NO: 326542 - RNA, 22 nt, Human
acugagaacuuggggacagagg

SEQ ID NO: 326543 - RNA, 22 nt, Human
uaagaaacauuuuuaugacagu

SEQ ID NO: 326544 - RNA, 22 nt, Human
uuggaaauguagaaaagcagau

SEQ ID NO: 326545 - RNA, 22 nt, Human
uggcuccguuguacaggcugga

SEQ ID NO: 326546 - RNA, 22 nt, Human
ccugucugaaggcagggggaug

SEQ ID NO: 326547 - RNA, 22 nt, Human
aacacuaaaggucaguuagaag

SEQ ID NO: 326548 - RNA, 22 nt, Human
ccagaacagaccugccugaccu

SEQ ID NO: 326549 - RNA, 22 nt, Human
agacgcgguggugcaugccugu

SEQ ID NO: 326550 - RNA, 22 nt, Human
auggcuguguuguuccucugaa

SEQ ID NO: 326551 - RNA, 22 nt, Human
ccuggccgacauggugaaacgc

SEQ ID NO: 326552 - RNA, 17 nt, Human
gugcuggccuggggcuc

SEQ ID NO: 326553 - RNA, 22 nt, Human
gauccacagcugcgguaggaga

SEQ ID NO: 326554 - RNA, 22 nt, Human
cacagagagcuacgugcagcgu

SEQ ID NO: 326555 - RNA, 22 nt, Human
ccagaucccuguuugccucugg

SEQ ID NO: 326556 - RNA, 22 nt, Human
cuucucaaaguugugaaucagg

SEQ ID NO: 326557 - RNA, 22 nt, Human
cugcggcuggggacagcuguug

SEQ ID NO: 326558 - RNA, 22 nt, Human
ggagaggguguggaaaguuauc

SEQ ID NO: 326559 - RNA, 23 nt, Human
ucuggcugcuccuuucaaugcuc

SEQ ID NO: 326560 - RNA, 22 nt, Human
ugguccagacuuugaccucuca

SEQ ID NO: 326561 - RNA, 22 nt, Human
ccugcgggcugugcugaagccu

SEQ ID NO: 326562 - RNA, 22 nt, Human
uucagaagguaggaaugucccu

SEQ ID NO: 326563 - RNA, 22 nt, Human
cccuggaacccauggccagugu

SEQ ID NO: 326564 - RNA, 22 nt, Human
caaagaagagauuuacagagcu

SEQ ID NO: 326565 - RNA, 22 nt, Human
ugcuggcugggcugcuggagac

SEQ ID NO: 326566 - RNA, 22 nt, Human
ugucugccugcgggccggcaca

SEQ ID NO: 326567 - RNA, 22 nt, Human
uuauuuuguagcucugaucuuu

SEQ ID NO: 326568 - RNA, 22 nt, Human
uguaauguuagaaacaauugcu

SEQ ID NO: 326569 - RNA, 18 nt, Human
ggaaggugcuggagugca

SEQ ID NO: 326570 - RNA, 22 nt, Human
uggcacaguuaaaguuguagaa

SEQ ID NO: 326571 - RNA, 22 nt, Human
gucuuuuuuacaccuuacauca

SEQ ID NO: 326572 - RNA, 22 nt, Human
ccagcagccaccuucucgaaau

SEQ ID NO: 326573 - RNA, 22 nt, Human
ucccacagcuucgugcuucccc

SEQ ID NO: 326574 - RNA, 22 nt, Human
ucccagugggaagcagcacgcu

SEQ ID NO: 326575 - RNA, 22 nt, Human
uggcaggaaaaagggccagagg

SEQ ID NO: 326576 - RNA, 22 nt, Human
ugucauggacuggauuucugcu

SEQ ID NO: 326577 - RNA, 22 nt, Human
ugggaagaguuagagacagcug

SEQ ID NO: 326578 - RNA, 22 nt, Human
agagaagagucuugucaaauua

SEQ ID NO: 326579 - RNA, 22 nt, Human
cuggcccagguggucguugagg

SEQ ID NO: 326580 - RNA, 22 nt, Human
auuccaaagccugaauaaugga

SEQ ID NO: 326581 - RNA, 22 nt, Human
cuccaaaggauaaaagcagagu

SEQ ID NO: 326582 - RNA, 22 nt, Human
gggcacagucugcagcccccca

SEQ ID NO: 326583 - RNA, 22 nt, Human
aggugggacccguggggugcga

SEQ ID NO: 326584 - RNA, 22 nt, Human
gccgugcgugcgcaggugcugu

SEQ ID NO: 326585 - RNA, 22 nt, Human
cauuuacauuuaagguuaauau

SEQ ID NO: 326586 - RNA, 22 nt, Human
aaugguaauauuucauaguugu

SEQ ID NO: 326587 - RNA, 22 nt, Human
cagucccaguuugagacucugg

SEQ ID NO: 326588 - RNA, 22 nt, Human
augauuuguuaacagacuuaau

SEQ ID NO: 326589 - RNA, 22 nt, Human
uaauccaaaacugaaucugugg

SEQ ID NO: 326590 - RNA, 22 nt, Human
cucaugucggcaggacucgccc

SEQ ID NO: 326591 - RNA, 22 nt, Human
ucagagacaucagguuguagca

SEQ ID NO: 326592 - RNA, 22 nt, Human
aggcaguggcuuuuguuguguu

SEQ ID NO: 326593 - RNA, 19 nt, Human
augggaagcggccagcgga

SEQ ID NO: 326594 - RNA, 22 nt, Human
gcagugacagacaacuguuuga

SEQ ID NO: 326595 - RNA, 20 nt, Human
cucaccagguguaggcugag

SEQ ID NO: 326596 - RNA, 22 nt, Human
acagcugugggcucugcauaua

SEQ ID NO: 326597 - RNA, 22 nt, Human
auuuggcauaggcagaggccca

SEQ ID NO: 326598 - RNA, 22 nt, Human
ugugcugcucucagugacagcc

SEQ ID NO: 326599 - RNA, 22 nt, Human
uacugucuuuuccuaaaugggu

SEQ ID NO: 326600 - RNA, 22 nt, Human
ucccuguccugggcaaucccag

SEQ ID NO: 326601 - RNA, 22 nt, Human
ugggucagauugagccccuggu

SEQ ID NO: 326602 - RNA, 22 nt, Human
auuuuguaucuuacggggacua

SEQ ID NO: 326603 - RNA, 22 nt, Human
uuugagaaacagacgaaagaca

SEQ ID NO: 326604 - RNA, 19 nt, Human
ugcuccaggccuugccgca

SEQ ID NO: 326605 - RNA, 22 nt, Human
ucauaggaguagcagugagagg

SEQ ID NO: 326606 - RNA, 22 nt, Human
cggagcagagccacucgggccg

SEQ ID NO: 326607 - RNA, 22 nt, Human
acacugagcuuccaagaugggg

SEQ ID NO: 326608 - RNA, 22 nt, Human
caugaaaugauauuuggguggg

SEQ ID NO: 326609 - RNA, 22 nt, Human
uccagcagguccgagacaaguu

SEQ ID NO: 326610 - RNA, 22 nt, Human
cugcagggcagggccuccuggc

SEQ ID NO: 326611 - RNA, 22 nt, Human
ugcucccaaaccugacaggcuc

SEQ ID NO: 326612 - RNA, 22 nt, Human
uuuauucucuaguuggucagau

SEQ ID NO: 326613 - RNA, 22 nt, Human
ugugaagaauuaaugugaauca

SEQ ID NO: 326614 - RNA, 22 nt, Human
cugggaguugacgaggcuugua

SEQ ID NO: 326615 - RNA, 22 nt, Human
ccugugggcgcagcuggaguca

SEQ ID NO: 326616 - RNA, 22 nt, Human
aauuccagcugauugacuuucc

SEQ ID NO: 326617 - RNA, 21 nt, Human
ucuccucccggggagaggccg

SEQ ID NO: 326618 - RNA, 22 nt, Human
uuucacaugguacugccuguuu

SEQ ID NO: 326619 - RNA, 22 nt, Human
cuucauguacaguuauuggaga

SEQ ID NO: 326620 - RNA, 22 nt, Human
acaugcauaaacuacuucuuau

SEQ ID NO: 326621 - RNA, 22 nt, Human
cuuucuuucgaagacgugauua

SEQ ID NO: 326622 - RNA, 22 nt, Human
aggccugggacgggagccguga

SEQ ID NO: 326623 - RNA, 22 nt, Human
uggcauuggaauuuguguugca

SEQ ID NO: 326624 - RNA, 22 nt, Human
uuuacagcuacuguccuauuuc

SEQ ID NO: 326625 - RNA, 22 nt, Human
cugaaacuauggggaggggagc

SEQ ID NO: 326626 - RNA, 23 nt, Human
aucauagucuuugugacuggccc

SEQ ID NO: 326627 - RNA, 19 nt, Human
cuggcuucaagcaguccuc

SEQ ID NO: 326628 - RNA, 22 nt, Human
uacauguuauuucacuauuggu

SEQ ID NO: 326629 - RNA, 23 nt, Human
ugaaagcaaugggucuauaguau

SEQ ID NO: 326630 - RNA, 22 nt, Human
gccagcagcgagaguuuaaccu

SEQ ID NO: 326631 - RNA, 22 nt, Human
gccagguugcugacgacgaucu

SEQ ID NO: 326632 - RNA, 22 nt, Human
cucaggaaaauauugaagaagu

SEQ ID NO: 326633 - RNA, 22 nt, Human
uucacagaauugucuugacugg

SEQ ID NO: 326634 - RNA, 22 nt, Human
uagcuucccugcuggaucauaa

SEQ ID NO: 326635 - RNA, 22 nt, Human
uggcugaguuacgaacagagca

SEQ ID NO: 326636 - RNA, 23 nt, Human
caaaaugcuaugugcccaaugca

SEQ ID NO: 326637 - RNA, 22 nt, Human
ggagugggaacaaugacauggu

SEQ ID NO: 326638 - RNA, 22 nt, Human
ggcuauguguccagcaucuuug

SEQ ID NO: 326639 - RNA, 22 nt, Human
uugcaggguugacacugccugc

SEQ ID NO: 326640 - RNA, 20 nt, Human
acagaugaggaugcggaggc

SEQ ID NO: 326641 - RNA, 22 nt, Human
ugcaucauuaagguacaguugg

SEQ ID NO: 326642 - RNA, 18 nt, Human
uggcaugcuuugauacau

SEQ ID NO: 326643 - RNA, 22 nt, Human
auguuuguguuucccauucagg

SEQ ID NO: 326644 - RNA, 22 nt, Human
ucauggcacaugcccuccaggg

SEQ ID NO: 326645 - RNA, 22 nt, Human
uugcacagaugcacaugguugc

SEQ ID NO: 326646 - RNA, 22 nt, Human
acacucaugcucagcuggugcu

SEQ ID NO: 326647 - RNA, 19 nt, Human
cuucaguguucaccuggcc

SEQ ID NO: 326648 - RNA, 18 nt, Human
uauaaacacacuuagguu

SEQ ID NO: 326649 - RNA, 22 nt, Human
gcagcagcaggcgcucggccgu

SEQ ID NO: 326650 - RNA, 22 nt, Human
ugagcucaagcaauucacccgc

SEQ ID NO: 326651 - RNA, 22 nt, Human
ugcuccaggcugcugaagaucu

SEQ ID NO: 326652 - RNA, 23 nt, Human
augcuagcugugccaacaccaua

SEQ ID NO: 326653 - RNA, 22 nt, Human
uccuccuuuccccgcuggagcc

SEQ ID NO: 326654 - RNA, 20 nt, Human
uucuccacaggguggaggag

SEQ ID NO: 326655 - RNA, 22 nt, Human
agacagcacuuuuguauggggg

SEQ ID NO: 326656 - RNA, 19 nt, Human
agggaguuuauauuugcac

SEQ ID NO: 326657 - RNA, 22 nt, Human
gaguaauuuucuuaaaacauca

SEQ ID NO: 326658 - RNA, 22 nt, Human
ggcucugcugguaagaugccuc

SEQ ID NO: 326659 - RNA, 22 nt, Human
aucugguuuggggauccuugug

SEQ ID NO: 326660 - RNA, 22 nt, Human
gcugccuggaauaacggcuggc

SEQ ID NO: 326661 - RNA, 22 nt, Human
gcagcagugugggcugaaccua

SEQ ID NO: 326662 - RNA, 20 nt, Human
uggcccagcacgacgaggac

SEQ ID NO: 326663 - RNA, 22 nt, Human
ccuccccacagcccaggagacu

SEQ ID NO: 326664 - RNA, 22 nt, Human
cagguagaggcugccaucagcu

SEQ ID NO: 326665 - RNA, 22 nt, Human
ugcugcucuucaccauggccuc

SEQ ID NO: 326666 - RNA, 22 nt, Human
ugccagcaguagcaguaggcca

SEQ ID NO: 326667 - RNA, 22 nt, Human
gucccugauaagagccaucgau

SEQ ID NO: 326668 - RNA, 22 nt, Human
uccagugguggcucccggaccu

SEQ ID NO: 326669 - RNA, 22 nt, Human
cuguccuaugaguacucacuag

SEQ ID NO: 326670 - RNA, 22 nt, Human
auuuccuguaggggcuugcgaa

SEQ ID NO: 326671 - RNA, 22 nt, Human
caaugggccuggagagagcugg

SEQ ID NO: 326672 - RNA, 22 nt, Human
guugcagcaucacugcugagug

SEQ ID NO: 326673 - RNA, 21 nt, Human
ugcuccaggagggggcagucc

SEQ ID NO: 326674 - RNA, 22 nt, Human
cuguuuauucucaucuaaaaug

SEQ ID NO: 326675 - RNA, 22 nt, Human
ucuacugagugcugagauuuug

SEQ ID NO: 326676 - RNA, 22 nt, Human
augaaaacggaccagagcuauu

SEQ ID NO: 326677 - RNA, 22 nt, Human
acauuuuuggguugaugucuga

SEQ ID NO: 326678 - RNA, 21 nt, Human
agccaggcaagcacccccacu

SEQ ID NO: 326679 - RNA, 22 nt, Human
guagagcagggagcaggaagcu

SEQ ID NO: 326680 - RNA, 22 nt, Human
auguaacauaugugaucgcauu

SEQ ID NO: 326681 - RNA, 22 nt, Human
ccagcugcgggcaucgagaguu

SEQ ID NO: 326682 - RNA, 22 nt, Human
gugccuccaggcucgacuaguc

SEQ ID NO: 326683 - RNA, 22 nt, Human
gguggcagaggugcaucagccc

SEQ ID NO: 326684 - RNA, 22 nt, Human
guuauacuuaugugcaaaaaua

SEQ ID NO: 326685 - RNA, 17 nt, Human
ucugagaaugcuggagg

SEQ ID NO: 326686 - RNA, 22 nt, Human
uccaggcuccccugcgugcucc

SEQ ID NO: 326687 - RNA, 22 nt, Human
uccagcaguccaugugagacac

SEQ ID NO: 326688 - RNA, 22 nt, Human
gccaggucgucuccauguccaa

SEQ ID NO: 326689 - RNA, 20 nt, Human
cagagccaggguuuuguuuu

SEQ ID NO: 326690 - RNA, 22 nt, Human
ugagaagcaguuucaguaagaa

SEQ ID NO: 326691 - RNA, 22 nt, Human
uaggugucuggacaacuuugua

SEQ ID NO: 326692 - RNA, 22 nt, Human
cuagagaaaaagcuuagguacg

SEQ ID NO: 326693 - RNA, 22 nt, Human
cuucuggcguuggaggucugag

SEQ ID NO: 326694 - RNA, 22 nt, Human
cugcagaugguauuguucuggu

SEQ ID NO: 326695 - RNA, 23 nt, Human
agguggagcugugcagccggggc

SEQ ID NO: 326696 - RNA, 22 nt, Human
aaaucaugguggaagaaacaga

SEQ ID NO: 326697 - RNA, 22 nt, Human
ugucacagugcacagcuaagaa

SEQ ID NO: 326698 - RNA, 22 nt, Human
aaaugcacaauaaaguaaaggc

SEQ ID NO: 326699 - RNA, 22 nt, Human
uucagagcuggugucuacagcu

SEQ ID NO: 326700 - RNA, 22 nt, Human
ggcaccuuucaucccaucuaga

SEQ ID NO: 326701 - RNA, 22 nt, Human
ucuccaggcuuaaucucagcuu

SEQ ID NO: 326702 - RNA, 22 nt, Human
ugaagccagggacugacacuuc

SEQ ID NO: 326703 - RNA, 22 nt, Human
aagaagguugaaugacuacuuu

SEQ ID NO: 326704 - RNA, 22 nt, Human
ugugaagaucaggguccuagag

SEQ ID NO: 326705 - RNA, 22 nt, Human
gagguggcugcuugcugggaaa

SEQ ID NO: 326706 - RNA, 22 nt, Human
ucugcucagccgaucugcuccg

SEQ ID NO: 326707 - RNA, 22 nt, Human
gcuugcuuuguaaauaucugug

SEQ ID NO: 326708 - RNA, 22 nt, Human
uggcacugucaccaaugcuguc

SEQ ID NO: 326709 - RNA, 22 nt, Human
cuccagcucgcgagcucugcuc

SEQ ID NO: 326710 - RNA, 22 nt, Human
ucauggcucuaaagacauagau

SEQ ID NO: 326711 - RNA, 22 nt, Human
cacauuggcaaacgggguugca

SEQ ID NO: 326712 - RNA, 22 nt, Human
cuuccagcugauuggcauccag

SEQ ID NO: 326713 - RNA, 22 nt, Human
ggaagcaaauuccagaaccaca

SEQ ID NO: 326714 - RNA, 22 nt, Human
ugggugcucugcgaccguaggg

SEQ ID NO: 326715 - RNA, 22 nt, Human
cugcuguguggauucaauggcu

SEQ ID NO: 326716 - RNA, 22 nt, Human
uuuuguguugccauguuaagca

SEQ ID NO: 326717 - RNA, 18 nt, Human
gaaggcauucaguggcuu

SEQ ID NO: 326718 - RNA, 18 nt, Human
ccucuggguuuuguuccc

SEQ ID NO: 326719 - RNA, 22 nt, Human
uucagaaaggcugugccagcca

SEQ ID NO: 326720 - RNA, 22 nt, Human
gcuguggcuccaauggugagcc

SEQ ID NO: 326721 - RNA, 22 nt, Human
cauuuugugcuagacacuaugg

SEQ ID NO: 326722 - RNA, 22 nt, Human
ucaaaaugccgagugcccaggu

SEQ ID NO: 326723 - RNA, 20 nt, Human
gggugugugcagggccuggu

SEQ ID NO: 326724 - RNA, 22 nt, Human
gugggcaucuccuuggaagcca

SEQ ID NO: 326725 - RNA, 22 nt, Human
gccaccagccccaugcgcugug

SEQ ID NO: 326726 - RNA, 22 nt, Human
aggaaaugccgcggcucucuuu

SEQ ID NO: 326727 - RNA, 22 nt, Human
auacaccaccuuggaucuuuca

SEQ ID NO: 326728 - RNA, 22 nt, Human
gcucguugaaccuguccccgag

SEQ ID NO: 326729 - RNA, 22 nt, Human
gagggugguggcuuaaggugcu

SEQ ID NO: 326730 - RNA, 22 nt, Human
cugcacagucauuuccucucaa

SEQ ID NO: 326731 - RNA, 22 nt, Human
cagcuuugccaaguaaggucuu

SEQ ID NO: 326732 - RNA, 22 nt, Human
ucacuucguaaaccccucccau

SEQ ID NO: 326733 - RNA, 22 nt, Human
uucacguuguugaagaaaauac

SEQ ID NO: 326734 - RNA, 22 nt, Human
cucuggcaauugcugcugacuc

SEQ ID NO: 326735 - RNA, 22 nt, Human
gcugcugcuugaaggcucggag

SEQ ID NO: 326736 - RNA, 22 nt, Human
agcucugcuucuugggaagaug

SEQ ID NO: 326737 - RNA, 22 nt, Human
uuccuguucaggaaaguugugu

SEQ ID NO: 326738 - RNA, 22 nt, Human
uguucaguuugcuaucauaauc

SEQ ID NO: 326739 - RNA, 22 nt, Human
gccggucuuaagcugacuguga

SEQ ID NO: 326740 - RNA, 22 nt, Human
agccagggacgcugcaggcuac

SEQ ID NO: 326741 - RNA, 17 nt, Human
uaaguccuaguuauuuu

SEQ ID NO: 326742 - RNA, 22 nt, Human
ggcagguguuuuuauauuaaag

SEQ ID NO: 326743 - RNA, 19 nt, Human
ugcagcuguaugagcuuaa

SEQ ID NO: 326744 - RNA, 22 nt, Human
gaagaaguguaagucuguuuca

SEQ ID NO: 326745 - RNA, 22 nt, Human
agugaaauaugcccauugcugu

SEQ ID NO: 326746 - RNA, 22 nt, Human
cccaggcacacugaagugacau

SEQ ID NO: 326747 - RNA, 22 nt, Human
aagcagcacagcaaugacucua

SEQ ID NO: 326748 - RNA, 22 nt, Human
ugacauccuacaccccuggguc

SEQ ID NO: 326749 - RNA, 20 nt, Human
caucaacaccuugucagccu

SEQ ID NO: 326750 - RNA, 20 nt, Human
ucagugggaaagugagagug

SEQ ID NO: 326751 - RNA, 22 nt, Human
ugcucuguucaguguaucuugu

SEQ ID NO: 326752 - RNA, 22 nt, Human
auacaugacucacacauucugc

SEQ ID NO: 326753 - RNA, 22 nt, Human
cucaguggggcgacagggugcu

SEQ ID NO: 326754 - RNA, 17 nt, Human
agcagcuggguugaucu

SEQ ID NO: 326755 - RNA, 22 nt, Human
uggcccagaucucugaccuuga

SEQ ID NO: 326756 - RNA, 22 nt, Human
gcaguugcaggauuuguguugu

SEQ ID NO: 326757 - RNA, 22 nt, Human
acuggcaguagagggagcgcau

SEQ ID NO: 326758 - RNA, 22 nt, Human
gucuugcacuuaccuaagaacu

SEQ ID NO: 326759 - RNA, 22 nt, Human
acagagacaauauuuguaaagu

SEQ ID NO: 326760 - RNA, 22 nt, Human
ugggugguugcugaggcuccuu

SEQ ID NO: 326761 - RNA, 22 nt, Human
uggcuuccagaacugagcaaca

SEQ ID NO: 326762 - RNA, 22 nt, Human
ucuccacaccagaaggagcuga

SEQ ID NO: 326763 - RNA, 22 nt, Human
cccuggcucugccucagagccc

SEQ ID NO: 326764 - RNA, 20 nt, Human
cuguuugcuaucaugagcug

SEQ ID NO: 326765 - RNA, 22 nt, Human
agugauaggacauauggauuuu

SEQ ID NO: 326766 - RNA, 22 nt, Human
cccagccuuugcuuccugguuc

SEQ ID NO: 326767 - RNA, 22 nt, Human
ccucuuccacugggccccaucc

SEQ ID NO: 326768 - RNA, 22 nt, Human
agcaggaggagagccuggcggu

SEQ ID NO: 326769 - RNA, 22 nt, Human
guucaguuauuucugaagauau

SEQ ID NO: 326770 - RNA, 22 nt, Human
gaaggagaggauugugaggcug

SEQ ID NO: 326771 - RNA, 22 nt, Human
uccaggcugacgcagcuauuua

SEQ ID NO: 326772 - RNA, 22 nt, Human
ggcagagcuugcagugagccga

SEQ ID NO: 326773 - RNA, 22 nt, Human
uucugauuguuggaggaugcuu

SEQ ID NO: 326774 - RNA, 22 nt, Human
agaagugaguugugacuauggg

SEQ ID NO: 326775 - RNA, 22 nt, Human
uacagcagcccaccuucuucug

SEQ ID NO: 326776 - RNA, 22 nt, Human
ucauuccuccagcgggagucca

SEQ ID NO: 326777 - RNA, 19 nt, Human
agcagccaucgaccaugga

SEQ ID NO: 326778 - RNA, 22 nt, Human
ggcugcccucggggucgcaggc

SEQ ID NO: 326779 - RNA, 22 nt, Human
aaggcagcaugaaucccuguac

SEQ ID NO: 326780 - RNA, 22 nt, Human
uccugccaccggggguggcgau

SEQ ID NO: 326781 - RNA, 22 nt, Human
uauuuggauagacagggagaug

SEQ ID NO: 326782 - RNA, 22 nt, Human
gaacaguuucccuguagaaaau

SEQ ID NO: 326783 - RNA, 22 nt, Human
uugcuugaacccaggaagugga

SEQ ID NO: 326784 - RNA, 22 nt, Human
ccagcaggaaagugacguuuga

SEQ ID NO: 326785 - RNA, 22 nt, Human
ccugugggagggagcggcugga

SEQ ID NO: 326786 - RNA, 22 nt, Human
gcacaguauuuaguagaaugag

SEQ ID NO: 326787 - RNA, 22 nt, Human
uguucugcaaugcugccuccuu

SEQ ID NO: 326788 - RNA, 22 nt, Human
uucuucauucccuuacuuccga

SEQ ID NO: 326789 - RNA, 22 nt, Human
cuuguuuucuucugcagucuau

SEQ ID NO: 326790 - RNA, 22 nt, Human
cugcaccgugucucgggcugcc

SEQ ID NO: 326791 - RNA, 22 nt, Human
guuuacaacaucuuguccuuca

SEQ ID NO: 326792 - RNA, 22 nt, Human
agaaggcaucagaaguguguag

SEQ ID NO: 326793 - RNA, 22 nt, Human
auccauuugccgugcuaugugc

SEQ ID NO: 326794 - RNA, 22 nt, Human
gugacagguauacucaccauug

SEQ ID NO: 326795 - RNA, 22 nt, Human
uauucauguguuggaaaggaac

SEQ ID NO: 326796 - RNA, 22 nt, Human
ugcauguuucuguauguuaaug

SEQ ID NO: 326797 - RNA, 22 nt, Human
uagcugcuugaccaggcagugg

SEQ ID NO: 326798 - RNA, 23 nt, Human
uccaguuaaugguucccagucug

SEQ ID NO: 326799 - RNA, 22 nt, Human
cgucauuuguaaaugaucaaga

SEQ ID NO: 326800 - RNA, 22 nt, Human
cgagagauggguuggcaggggc

SEQ ID NO: 326801 - RNA, 22 nt, Human
cgggcagugcccagcggggcag

SEQ ID NO: 326802 - RNA, 22 nt, Human
uccuuucuucuucugcccaugg

SEQ ID NO: 326803 - RNA, 22 nt, Human
uguguuuuggaaggaacaugca

SEQ ID NO: 326804 - RNA, 22 nt, Human
aagcaaaagguuacacuucugg

SEQ ID NO: 326805 - RNA, 22 nt, Human
guggcauuuuagaacagcugac

SEQ ID NO: 326806 - RNA, 23 nt, Human
augcaacauugccaguaugggca

SEQ ID NO: 326807 - RNA, 22 nt, Human
cagaaccaggaacugauggaga

SEQ ID NO: 326808 - RNA, 22 nt, Human
ggacauggaaguauggagugga

SEQ ID NO: 326809 - RNA, 22 nt, Human
gccauguucuugaaucuggguc

SEQ ID NO: 326810 - RNA, 22 nt, Human
uuauuccauagaagucaaggaa

SEQ ID NO: 326811 - RNA, 19 nt, Human
ugguggaggccccauguuc

SEQ ID NO: 326812 - RNA, 22 nt, Human
agaaacaucgcuuaguccucau

SEQ ID NO: 326813 - RNA, 22 nt, Human
aggcucaguauagcuggcaagu

SEQ ID NO: 326814 - RNA, 22 nt, Human
acugagcaggguuccgcaugga

SEQ ID NO: 326815 - RNA, 19 nt, Human
agugagcauggcuugacug

SEQ ID NO: 326816 - RNA, 22 nt, Human
gugaagaugccucaggugaccc

SEQ ID NO: 326817 - RNA, 22 nt, Human
cucugcaggcacccaggguggg

SEQ ID NO: 326818 - RNA, 22 nt, Human
uguauuucugcuuucucuagua

SEQ ID NO: 326819 - RNA, 22 nt, Human
gcuucuggaagcauaugcaaga

SEQ ID NO: 326820 - RNA, 22 nt, Human
ucacuugaaccugggaggcaga

SEQ ID NO: 326821 - RNA, 22 nt, Human
gugggaguggagcucagcaugu

SEQ ID NO: 326822 - RNA, 22 nt, Human
gcagagauccaggguauagguu

SEQ ID NO: 326823 - RNA, 22 nt, Human
ugcugugcuggcggcagaggcc

SEQ ID NO: 326824 - RNA, 22 nt, Human
cccaggagacugagcuguaacc

SEQ ID NO: 326825 - RNA, 22 nt, Human
ugcauuucccauuguguggcuc

SEQ ID NO: 326826 - RNA, 22 nt, Human
ugcugcacuuauggcucugagg

SEQ ID NO: 326827 - RNA, 18 nt, Human
gguccugggccuggcuca

SEQ ID NO: 326828 - RNA, 22 nt, Human
gugcuggcuggggcaucaggca

SEQ ID NO: 326829 - RNA, 23 nt, Human
uuguccucuggaucgguuugguu

SEQ ID NO: 326830 - RNA, 22 nt, Human
gucuccugaggcauccauugaa

SEQ ID NO: 326831 - RNA, 22 nt, Human
ugagccaaguucacaccauugc

SEQ ID NO: 326832 - RNA, 22 nt, Human
aaagagcucggaaaguguugaa

SEQ ID NO: 326833 - RNA, 22 nt, Human
uaaagcauguuucaguaagguu

SEQ ID NO: 326834 - RNA, 22 nt, Human
uuccaggaagcucucggccucu

SEQ ID NO: 326835 - RNA, 22 nt, Human
uuuguguuguacuucugugcau

SEQ ID NO: 326836 - RNA, 22 nt, Human
acucuguuugcagguagcucag

SEQ ID NO: 326837 - RNA, 22 nt, Human
aaagcugcaagcuccugaggaa

SEQ ID NO: 326838 - RNA, 22 nt, Human
gccggggcuggggagagacaug

SEQ ID NO: 326839 - RNA, 22 nt, Human
cugucucugauaagcucgaggg

SEQ ID NO: 326840 - RNA, 22 nt, Human
guguggcuaggauggcuuugcu

SEQ ID NO: 326841 - RNA, 22 nt, Human
ggucuggccuccgggcaggugg

SEQ ID NO: 326842 - RNA, 22 nt, Human
ugcugcuuguuuuguaaauaaa

SEQ ID NO: 326843 - RNA, 22 nt, Human
auccauuuuuucagaaugcucu

SEQ ID NO: 326844 - RNA, 22 nt, Human
ugacuuuggacuagugauuuaa

SEQ ID NO: 326845 - RNA, 22 nt, Human
guccagaguagucgaguauucu

SEQ ID NO: 326846 - RNA, 22 nt, Human
cuuccucuguggccagagugua

SEQ ID NO: 326847 - RNA, 22 nt, Human
aaugaaacuaguagaaucuuug

SEQ ID NO: 326848 - RNA, 22 nt, Human
uuccuucuucauuguguuacag

SEQ ID NO: 326849 - RNA, 17 nt, Human
ugagcaguagaagaugc

SEQ ID NO: 326850 - RNA, 22 nt, Human
gcaguccuuaggagaggaagua

SEQ ID NO: 326851 - RNA, 22 nt, Human
auccuucaaaaggaauagcagg

SEQ ID NO: 326852 - RNA, 22 nt, Human
auacagguucucuagggaacag

SEQ ID NO: 326853 - RNA, 22 nt, Human
uccuggcaaagauguugguguu

SEQ ID NO: 326854 - RNA, 22 nt, Human
gucauuuuugacuuugaaguga

SEQ ID NO: 326855 - RNA, 22 nt, Human
caggaacagcaccaggagcuag

SEQ ID NO: 326856 - RNA, 22 nt, Human
ccaggcauccauugcuuccucu

SEQ ID NO: 326857 - RNA, 22 nt, Human
ucuguaaacacccguaagcuuu

SEQ ID NO: 326858 - RNA, 22 nt, Human
cuggcaguguccagcucgugau

SEQ ID NO: 326859 - RNA, 22 nt, Human
aacuuucuuugcaucuaaguuu

SEQ ID NO: 326860 - RNA, 22 nt, Human
cugcugccuuccaaaggccagg

SEQ ID NO: 326861 - RNA, 22 nt, Human
gucaggaugagggaugaggagu

SEQ ID NO: 326862 - RNA, 22 nt, Human
gcugcaggcucugcaggaauug

SEQ ID NO: 326863 - RNA, 22 nt, Human
cauggccaaagaauuauauuuu

SEQ ID NO: 326864 - RNA, 22 nt, Human
guuguuuuugaacggugguggc

SEQ ID NO: 326865 - RNA, 22 nt, Human
acugauuucagggaugagaaga

SEQ ID NO: 326866 - RNA, 22 nt, Human
acugugacugugucuucugggc

SEQ ID NO: 326867 - RNA, 22 nt, Human
gccaggcaggccacgcuguguu

SEQ ID NO: 326868 - RNA, 22 nt, Human
cauggcaggugcagauucugug

SEQ ID NO: 326869 - RNA, 22 nt, Human
auuaguagcacacagagaucag

SEQ ID NO: 326870 - RNA, 22 nt, Human
ggaaacugcuuacacuagaggg

SEQ ID NO: 326871 - RNA, 22 nt, Human
aaaugcacugaauauuccaaau

SEQ ID NO: 326872 - RNA, 22 nt, Human
caggguggcaggcaccauggcc

SEQ ID NO: 326873 - RNA, 22 nt, Human
ccuugagacacagccaaagaug

SEQ ID NO: 326874 - RNA, 22 nt, Human
ucccuggcugguguagagggau

SEQ ID NO: 326875 - RNA, 22 nt, Human
uuccaaguuaggcgagcuggug

SEQ ID NO: 326876 - RNA, 22 nt, Human
agccacauggaccugaugcuag

SEQ ID NO: 326877 - RNA, 22 nt, Human
aggaaauuuugaaucagugucu

SEQ ID NO: 326878 - RNA, 22 nt, Human
auagcaaaggacaauagucagu

SEQ ID NO: 326879 - RNA, 22 nt, Human
aaguccagguccucauuccauc

SEQ ID NO: 326880 - RNA, 22 nt, Human
cugagauggaguuucgcucuuc

SEQ ID NO: 326881 - RNA, 22 nt, Human
uuucucagccuccuugcuggag

SEQ ID NO: 326882 - RNA, 22 nt, Human
uauuuggugaaucuauggucag

SEQ ID NO: 326883 - RNA, 23 nt, Human
aacucuggcuagcauagaauaga

SEQ ID NO: 326884 - RNA, 20 nt, Human
ucauccaggacaggaguggc

SEQ ID NO: 326885 - RNA, 22 nt, Human
ugcuuuauucgacaucugguag

SEQ ID NO: 326886 - RNA, 22 nt, Human
ccuguggcacaugcagggauuc

SEQ ID NO: 326887 - RNA, 23 nt, Human
gguuggcuguacccaggcucccu

SEQ ID NO: 326888 - RNA, 23 nt, Human
gggcugcuccaggccaaggcugg

SEQ ID NO: 326889 - RNA, 22 nt, Human
augugaaagagguguucagugg

SEQ ID NO: 326890 - RNA, 22 nt, Human
agauaucuuacacuuugaaguu

SEQ ID NO: 326891 - RNA, 22 nt, Human
ucugcuugugucuguccagccu

SEQ ID NO: 326892 - RNA, 22 nt, Human
gucagaggggcagcugccaggc

SEQ ID NO: 326893 - RNA, 21 nt, Human
gccaucaccaagcucuucccc

SEQ ID NO: 326894 - RNA, 22 nt, Human
ccaggagagcucucguucagug

SEQ ID NO: 326895 - RNA, 22 nt, Human
cucagaguccauaguuuacagu

SEQ ID NO: 326896 - RNA, 22 nt, Human
gccagugccugcugcucagggc

SEQ ID NO: 326897 - RNA, 23 nt, Human
ugucuccaucucauuacuugggg

SEQ ID NO: 326898 - RNA, 22 nt, Human
aucugccuggcuccaggugagc

SEQ ID NO: 326899 - RNA, 22 nt, Human
agccagcuaccggggcuccugg

SEQ ID NO: 326900 - RNA, 22 nt, Human
agauguuuuuccaggucuaauu

SEQ ID NO: 326901 - RNA, 22 nt, Human
guuugagauggguuauugcucu

SEQ ID NO: 326902 - RNA, 22 nt, Human
ggcacuggcaaagcaaagucug

SEQ ID NO: 326903 - RNA, 22 nt, Human
aaggauuuuuggaaugagaugg

SEQ ID NO: 326904 - RNA, 19 nt, Human
cucuggcuccugggcugcc

SEQ ID NO: 326905 - RNA, 15 nt, Human
cccaggaguucgaga

SEQ ID NO: 326906 - RNA, 22 nt, Human
uagauuaucccugauuugucca

SEQ ID NO: 326907 - RNA, 22 nt, Human
uggcagcauuuuuuccagaaca

SEQ ID NO: 326908 - RNA, 22 nt, Human
caggguggaacaggcaauacuu

SEQ ID NO: 326909 - RNA, 22 nt, Human
gccuggcgccgggcugccuguc

SEQ ID NO: 326910 - RNA, 20 nt, Human
uuucacaaugaacaugucuc

SEQ ID NO: 326911 - RNA, 17 nt, Human
uggcacagaggugcuau

SEQ ID NO: 326912 - RNA, 22 nt, Human
gcgguauuugugugggugucga

SEQ ID NO: 326913 - RNA, 21 nt, Human
uccugccuuaguccagagcag

SEQ ID NO: 326914 - RNA, 19 nt, Human
ucaaagucugagucacuuu

SEQ ID NO: 326915 - RNA, 22 nt, Human
augaaaacagccuccugugaua

SEQ ID NO: 326916 - RNA, 22 nt, Human
ucaugcagauaagaauaaguaa

SEQ ID NO: 326917 - RNA, 21 nt, Human
agcugugguuuuacaucuuuu

SEQ ID NO: 326918 - RNA, 22 nt, Human
uguuccucugaacuucuuccaa

SEQ ID NO: 326919 - RNA, 22 nt, Human
acccaggucucucgacuucugg

SEQ ID NO: 326920 - RNA, 22 nt, Human
cuacuucuguggcucuaagaga

SEQ ID NO: 326921 - RNA, 22 nt, Human
aaguguguauuuuucuucagug

SEQ ID NO: 326922 - RNA, 22 nt, Human
ugagacaaagcagcugacagaa

SEQ ID NO: 326923 - RNA, 22 nt, Human
uagaagaacaugucaaacuaua

SEQ ID NO: 326924 - RNA, 22 nt, Human
ccugcacuaccuggggcugcug

SEQ ID NO: 326925 - RNA, 22 nt, Human
uuucugcagcagacucagugug

SEQ ID NO: 326926 - RNA, 22 nt, Human
cuaguauuaagugugaguaaaa

SEQ ID NO: 326927 - RNA, 22 nt, Human
ugccgcugucgccaccauggcu

SEQ ID NO: 326928 - RNA, 22 nt, Human
aacccuggggcugcucugccug

SEQ ID NO: 326929 - RNA, 22 nt, Human
aaagucuuaauguaaguuuagu

SEQ ID NO: 326930 - RNA, 22 nt, Human
uugcaguuuugacagaccaaau

SEQ ID NO: 326931 - RNA, 22 nt, Human
uuucacauacaguguauaguag

SEQ ID NO: 326932 - RNA, 22 nt, Human
uuuggauugcuuggaugcuucg

SEQ ID NO: 326933 - RNA, 22 nt, Human
cagugacguaaacugcaugugc

SEQ ID NO: 326934 - RNA, 22 nt, Human
uuucaugauuaacuuagugaau

SEQ ID NO: 326935 - RNA, 22 nt, Human
uuugagaagauaggggaauacu

SEQ ID NO: 326936 - RNA, 22 nt, Human
gacagcagccacagggagaggg

SEQ ID NO: 326937 - RNA, 22 nt, Human
cugggaagggacgccagugccu

SEQ ID NO: 326938 - RNA, 22 nt, Human
auuacugaggcaaaguaguuuu

SEQ ID NO: 326939 - RNA, 22 nt, Human
cugggcuuguguuagcugacaa

SEQ ID NO: 326940 - RNA, 22 nt, Human
ccagcccucgguagucccauag

SEQ ID NO: 326941 - RNA, 22 nt, Human
gucaaaugcacagaaccauuaa

SEQ ID NO: 326942 - RNA, 22 nt, Human
uccugcagccacugcaggcaga

SEQ ID NO: 326943 - RNA, 22 nt, Human
ccugggaccucgcgggaagcgg

SEQ ID NO: 326944 - RNA, 22 nt, Human
gcuggggagcuagaccucagca

SEQ ID NO: 326945 - RNA, 22 nt, Human
aagaaaacaugaucuaauuuaa

SEQ ID NO: 326946 - RNA, 22 nt, Human
cugggcucaagaagucuucccu

SEQ ID NO: 326947 - RNA, 21 nt, Human
ggagcuggggagcuggcccca

SEQ ID NO: 326948 - RNA, 22 nt, Human
gcagagcugcagcgaggccugg

SEQ ID NO: 326949 - RNA, 22 nt, Human
gcaggagcucguuuccaggcug

SEQ ID NO: 326950 - RNA, 22 nt, Human
cugguggagaugccuggccccu

SEQ ID NO: 326951 - RNA, 22 nt, Human
uccugcaguuacaucccagcca

SEQ ID NO: 326952 - RNA, 22 nt, Human
cccagcccacgguccugggugg

SEQ ID NO: 326953 - RNA, 22 nt, Human
ccugguggccuucagcccacaa

SEQ ID NO: 326954 - RNA, 22 nt, Human
caccaggcacauaguaggcacu

SEQ ID NO: 326955 - RNA, 22 nt, Human
agagcuggauggucaagauggc

SEQ ID NO: 326956 - RNA, 22 nt, Human
ggaggccaggaagagccgcccu

SEQ ID NO: 326957 - RNA, 22 nt, Human
aaacacaauguuucuuuguucu

SEQ ID NO: 326958 - RNA, 22 nt, Human
gcugggcucuuuaccccuguac

SEQ ID NO: 326959 - RNA, 21 nt, Human
agagcugggacuugccugaga

SEQ ID NO: 326960 - RNA, 22 nt, Human
agagcuggggcucuggguuuaa

SEQ ID NO: 326961 - RNA, 22 nt, Human
ccccugccagcuaucccugaac

SEQ ID NO: 326962 - RNA, 22 nt, Human
ccugggcagggagaccaggcuc

SEQ ID NO: 326963 - RNA, 23 nt, Human
agcuggaggcugucuacucccaa

SEQ ID NO: 326964 - RNA, 22 nt, Human
ccagccccuauccucgcuccac

SEQ ID NO: 326965 - RNA, 22 nt, Human
uccugcaggggcugaggaacca

SEQ ID NO: 326966 - RNA, 22 nt, Human
agcuccugcaccaggggccccu

SEQ ID NO: 326967 - RNA, 22 nt, Human
ugcaggagcaccagcucacccu

SEQ ID NO: 326968 - RNA, 22 nt, Human
agcuggggcauuuauccacuaa

SEQ ID NO: 326969 - RNA, 20 nt, Human
ggcaccaggcuaggauugga

SEQ ID NO: 326970 - RNA, 22 nt, Human
gagcugggaagauagcuugagc

SEQ ID NO: 326971 - RNA, 22 nt, Human
gagcuccucccaggguagcacu

SEQ ID NO: 326972 - RNA, 22 nt, Human
gagcugggcuggcuuccucccu

SEQ ID NO: 326973 - RNA, 22 nt, Human
gagcuggguguuuauuugccaa

SEQ ID NO: 326974 - RNA, 22 nt, Human
gggcccugugauuucuugagga

SEQ ID NO: 326975 - RNA, 22 nt, Human
gccccuggcuggccagcuccuc

SEQ ID NO: 326976 - RNA, 22 nt, Human
uugucuaaugagcuccacuuca

SEQ ID NO: 326977 - RNA, 22 nt, Human
gauguuuuaggucccuguagcu

SEQ ID NO: 326978 - RNA, 22 nt, Human
cagcuccugccugggcagcugu

SEQ ID NO: 326979 - RNA, 22 nt, Human
gagcuggggcggauacucagcu

SEQ ID NO: 326980 - RNA, 22 nt, Human
gcccauggcagaacugugagca

SEQ ID NO: 326981 - RNA, 22 nt, Human
cuggugcacauucgcucucaua

SEQ ID NO: 326982 - RNA, 22 nt, Human
cugcaggacgaccgccucaucu

SEQ ID NO: 326983 - RNA, 22 nt, Human
ggcagagcugcaugagcacuca

SEQ ID NO: 326984 - RNA, 22 nt, Human
agguauuauuagcaucucuauu

SEQ ID NO: 326985 - RNA, 19 nt, Human
cagcccucuuaccacugug

SEQ ID NO: 326986 - RNA, 22 nt, Human
cugcagaggccucgccuccucu

SEQ ID NO: 326987 - RNA, 22 nt, Human
agagcuggggccagagucaagg

SEQ ID NO: 326988 - RNA, 22 nt, Human
ccuggagcuuggucacgcugcg

SEQ ID NO: 326989 - RNA, 22 nt, Human
agcuccugugugaagccucccu

SEQ ID NO: 326990 - RNA, 22 nt, Human
agagcuggggcccguaaagcca

SEQ ID NO: 326991 - RNA, 22 nt, Human
ucccugucuaauaugccaugaa

SEQ ID NO: 326992 - RNA, 18 nt, Human
auccaaaaagauggaagu

SEQ ID NO: 326993 - RNA, 22 nt, Human
ugaucaaaacauuacuccacca

SEQ ID NO: 326994 - RNA, 22 nt, Human
uaugauaugcacuuuaucagaa

SEQ ID NO: 326995 - RNA, 22 nt, Human
ccugcagggaaucgaggcagaa

SEQ ID NO: 326996 - RNA, 22 nt, Human
gagcugggauucaucuaugucu

SEQ ID NO: 326997 - RNA, 22 nt, Human
cacagcugaaguagccaugugg

SEQ ID NO: 326998 - RNA, 22 nt, Human
gggccccugggaauucugugau

SEQ ID NO: 326999 - RNA, 22 nt, Human
gcccugugagucaugcggcaga

SEQ ID NO: 327000 - RNA, 22 nt, Human
ggagcuggucagccuugagcau

SEQ ID NO: 327001 - RNA, 22 nt, Human
ugggcuccggcggccucaggcu

SEQ ID NO: 327002 - RNA, 22 nt, Human
ucagcuucagaucagcuagaga

SEQ ID NO: 327003 - RNA, 22 nt, Human
uaaauguauaggcacuaaaccu

SEQ ID NO: 327004 - RNA, 22 nt, Human
ccaggccccagggcuggcuuuc

SEQ ID NO: 327005 - RNA, 22 nt, Human
agccugggcccugccucuucuc

SEQ ID NO: 327006 - RNA, 22 nt, Human
cccuguccuuggcugugaggcu

SEQ ID NO: 327007 - RNA, 22 nt, Human
caccaggcugaaccagagggga

SEQ ID NO: 327008 - RNA, 22 nt, Human
acaaacuuccaucaugaauuuu

SEQ ID NO: 327009 - RNA, 22 nt, Human
ccugcagguuucccccggacgg

SEQ ID NO: 327010 - RNA, 21 nt, Human
ggugacacguggccccgcucu

SEQ ID NO: 327011 - RNA, 22 nt, Human
cccuguccuggaugggagcacu

SEQ ID NO: 327012 - RNA, 22 nt, Human
agagcuggccagggaucacucu

SEQ ID NO: 327013 - RNA, 22 nt, Human
cugucacccacccagccuguca

SEQ ID NO: 327014 - RNA, 22 nt, Human
gugcauccacuagggcucuccc

SEQ ID NO: 327015 - RNA, 22 nt, Human
gugcugggcuccaccccagagg

SEQ ID NO: 327016 - RNA, 20 nt, Human
agcuccugguauaggugccu

SEQ ID NO: 327017 - RNA, 20 nt, Human
agagcugggaagcucccuau

SEQ ID NO: 327018 - RNA, 22 nt, Human
gagggcacgaaacaaccacuuc

SEQ ID NO: 327019 - RNA, 22 nt, Human
gcccaugguuacuuuucuggcu

SEQ ID NO: 327020 - RNA, 22 nt, Human
gcagcaggcuuuucauaccuug

SEQ ID NO: 327021 - RNA, 22 nt, Human
uagcugggaauuaucugguugc

SEQ ID NO: 327022 - RNA, 23 nt, Human
gagcugggauacaggcuuacugc

SEQ ID NO: 327023 - RNA, 22 nt, Human
agcuggggcugcagagaacagg

SEQ ID NO: 327024 - RNA, 19 nt, Human
gcugggagcagacccuccc

SEQ ID NO: 327025 - RNA, 22 nt, Human
agagcuggcagcagcuucuccu

SEQ ID NO: 327026 - RNA, 22 nt, Human
augcugggaaguccuaaccaca

SEQ ID NO: 327027 - RNA, 22 nt, Human
aucauccuagaaggaagcuagg

SEQ ID NO: 327028 - RNA, 22 nt, Human
agcccuguuuaugccacaucau

SEQ ID NO: 327029 - RNA, 22 nt, Human
ccugcagguugcagaggcggaa

SEQ ID NO: 327030 - RNA, 22 nt, Human
ccuguccagggacugagggaga

SEQ ID NO: 327031 - RNA, 22 nt, Human
aagcugggagggagcccagagu

SEQ ID NO: 327032 - RNA, 22 nt, Human
auguaaacucacauuuucuuca

SEQ ID NO: 327033 - RNA, 22 nt, Human
cccugguguccacuggaggaag

SEQ ID NO: 327034 - RNA, 22 nt, Human
gagcugggauuugaaccuggga

SEQ ID NO: 327035 - RNA, 22 nt, Human
aacugguaucucuucaguguaa

SEQ ID NO: 327036 - RNA, 23 nt, Human
uccugaggaauggcaucucacau

SEQ ID NO: 327037 - RNA, 20 nt, Human
ugcagagcugacauuaccug

SEQ ID NO: 327038 - RNA, 22 nt, Human
agaggaggccaggcccacaccu

SEQ ID NO: 327039 - RNA, 22 nt, Human
agagcuggaaaaguuguuuuaa

SEQ ID NO: 327040 - RNA, 22 nt, Human
cauaaucagauguguacauaag

SEQ ID NO: 327041 - RNA, 22 nt, Human
ugguauucuuucuguagaucau

SEQ ID NO: 327042 - RNA, 22 nt, Human
uccuguggcucuguggaaccuu

SEQ ID NO: 327043 - RNA, 22 nt, Human
ugcugaggcccaggagcacuuu

SEQ ID NO: 327044 - RNA, 22 nt, Human
ccugacagcgugucccuggccc

SEQ ID NO: 327045 - RNA, 22 nt, Human
agcugggguugcacacauuuug

SEQ ID NO: 327046 - RNA, 18 nt, Human
aagcugggaaggagacag

SEQ ID NO: 327047 - RNA, 22 nt, Human
gcagagcugggauaugaaccca

SEQ ID NO: 327048 - RNA, 22 nt, Human
caccaggcuggagugcagaggu

SEQ ID NO: 327049 - RNA, 22 nt, Human
uccugcagaccucagucagguc

SEQ ID NO: 327050 - RNA, 22 nt, Human
ugaguuauaaugaauauuugaa

SEQ ID NO: 327051 - RNA, 22 nt, Human
gaugcuggaagugcugaucuug

SEQ ID NO: 327052 - RNA, 22 nt, Human
agagcugguuuacucaggaauu

SEQ ID NO: 327053 - RNA, 22 nt, Human
ucccugaggaagggguguggug

SEQ ID NO: 327054 - RNA, 22 nt, Human
agagcuggacgucugagcccua

SEQ ID NO: 327055 - RNA, 22 nt, Human
cugcagagcagccaguccccca

SEQ ID NO: 327056 - RNA, 22 nt, Human
ggcacagggggcugaggacuag

SEQ ID NO: 327057 - RNA, 22 nt, Human
cccacucccugcacgccugccg

SEQ ID NO: 327058 - RNA, 22 nt, Human
ugcuggggcagaagagccaaga

SEQ ID NO: 327059 - RNA, 22 nt, Human
ggcaccaggcugggcauaggcc

SEQ ID NO: 327060 - RNA, 22 nt, Human
cagaugcuauguauuauguaug

SEQ ID NO: 327061 - RNA, 22 nt, Human
ugggcaccuagcaacccuucuc

SEQ ID NO: 327062 - RNA, 22 nt, Human
aguaaaauuguauuggaaaaca

SEQ ID NO: 327063 - RNA, 22 nt, Human
cugggcuccuaaccauccaggu

SEQ ID NO: 327064 - RNA, 22 nt, Human
uagucaaaccucagaauacccc

SEQ ID NO: 327065 - RNA, 22 nt, Human
ccuggggagccgccugagcccc

SEQ ID NO: 327066 - RNA, 22 nt, Human
gcaccgagaaggaagcaugccu

SEQ ID NO: 327067 - RNA, 22 nt, Human
ccucagccuuggccccaggcag

SEQ ID NO: 327068 - RNA, 22 nt, Human
ccugggcuuucggcggcuuccu

SEQ ID NO: 327069 - RNA, 22 nt, Human
gacacuccagcuuuuggcucaa

SEQ ID NO: 327070 - RNA, 22 nt, Human
agagcugggaccgucuggaagu

SEQ ID NO: 327071 - RNA, 22 nt, Human
agacuuuaaugugcaaaugaaa

SEQ ID NO: 327072 - RNA, 22 nt, Human
cugcaggagugaaagcaggccu

SEQ ID NO: 327073 - RNA, 22 nt, Human
cugucccucaguucugggcaaa

SEQ ID NO: 327074 - RNA, 22 nt, Human
cugggauccacgggcucccaag

SEQ ID NO: 327075 - RNA, 22 nt, Human
cugucccucaucaccucugggu

SEQ ID NO: 327076 - RNA, 22 nt, Human
ccaggcccugccugugguuccu

SEQ ID NO: 327077 - RNA, 22 nt, Human
uguggcacuucucuccuuguaa

SEQ ID NO: 327078 - RNA, 22 nt, Human
ccuggggucagggacgcugugc

SEQ ID NO: 327079 - RNA, 22 nt, Human
cccugccuuguuggagccuaug

SEQ ID NO: 327080 - RNA, 22 nt, Human
agagcuggggcauaaaugccac

SEQ ID NO: 327081 - RNA, 22 nt, Human
caugagauaauuuuucuccagu

SEQ ID NO: 327082 - RNA, 22 nt, Human
gcugggcuucacagagccuuua

SEQ ID NO: 327083 - RNA, 22 nt, Human
uccacuggaacaacucugaggc

SEQ ID NO: 327084 - RNA, 22 nt, Human
cacuguaauagcauuauaagug

SEQ ID NO: 327085 - RNA, 22 nt, Human
cugggcuagaaggaccaggaug

SEQ ID NO: 327086 - RNA, 22 nt, Human
ggcaccagcacuugggauggcu

SEQ ID NO: 327087 - RNA, 22 nt, Human
uucuagauugccuguaaguaaa

SEQ ID NO: 327088 - RNA, 22 nt, Human
gcccugugcuuggauggcagau

SEQ ID NO: 327089 - RNA, 22 nt, Human
acuuuacuccccaacauaaaug

SEQ ID NO: 327090 - RNA, 22 nt, Human
ccagccucaucgccugccuguc

SEQ ID NO: 327091 - RNA, 16 nt, Human
gcagagcucagggacu

SEQ ID NO: 327092 - RNA, 22 nt, Human
auaugaaaagaagucaccauug

SEQ ID NO: 327093 - RNA, 22 nt, Human
ggcaccaggaucagucugucau

SEQ ID NO: 327094 - RNA, 22 nt, Human
ggaggccacgguuuagcaccga

SEQ ID NO: 327095 - RNA, 22 nt, Human
gagccuggccuccugccucagc

SEQ ID NO: 327096 - RNA, 22 nt, Human
ucugcaggucacgcuccagccu

SEQ ID NO: 327097 - RNA, 22 nt, Human
uauccaaaguuucucagaaacu

SEQ ID NO: 327098 - RNA, 22 nt, Human
ggagcuggagagcuagccuagg

SEQ ID NO: 327099 - RNA, 22 nt, Human
agcuccugucucaagggagccu

SEQ ID NO: 327100 - RNA, 22 nt, Human
cucucugaggaaggagcaucug

SEQ ID NO: 327101 - RNA, 22 nt, Human
cugggcucaaauccuggcccug

SEQ ID NO: 327102 - RNA, 22 nt, Human
ggcaccaggacaugacucccag

SEQ ID NO: 327103 - RNA, 22 nt, Human
agaugguagguggcaggacuga

SEQ ID NO: 327104 - RNA, 22 nt, Human
uuucagaucauuuuuuaaguac

SEQ ID NO: 327105 - RNA, 22 nt, Human
gggcuccuccucugacuguggc

SEQ ID NO: 327106 - RNA, 22 nt, Human
cccuguggcaggaggaggagca

SEQ ID NO: 327107 - RNA, 22 nt, Human
ccaggcccuugcaagucccacc

SEQ ID NO: 327108 - RNA, 22 nt, Human
cccagcccagcguucgaggggu

SEQ ID NO: 327109 - RNA, 21 nt, Human
agagcuggccugccaggcccu

SEQ ID NO: 327110 - RNA, 22 nt, Human
gcugauagacugaauguuggga

SEQ ID NO: 327111 - RNA, 22 nt, Human
agcuccugcgcacggugcacac

SEQ ID NO: 327112 - RNA, 22 nt, Human
gagguggcgcgccaucccugcc

SEQ ID NO: 327113 - RNA, 22 nt, Human
cccuguggaggcagcauccugc

SEQ ID NO: 327114 - RNA, 22 nt, Human
uucaaaugcaaguuacuacuuu

SEQ ID NO: 327115 - RNA, 22 nt, Human
ccugcagggugcugccacagau

SEQ ID NO: 327116 - RNA, 22 nt, Human
ccugcagguccccggaugcgca

SEQ ID NO: 327117 - RNA, 22 nt, Human
gcagagcuccccaagacaccaa

SEQ ID NO: 327118 - RNA, 22 nt, Human
uaggacaugcuacauaaauagg

SEQ ID NO: 327119 - RNA, 22 nt, Human
gagcugggcgagccggggaagu

SEQ ID NO: 327120 - RNA, 19 nt, Human
ggcagagcuccugcuuucu

SEQ ID NO: 327121 - RNA, 22 nt, Human
gcugggcuugguuucccugcuu

SEQ ID NO: 327122 - RNA, 22 nt, Human
cccugugggguccgccuguccg

SEQ ID NO: 327123 - RNA, 22 nt, Human
cugggugagcuggccagagggu

SEQ ID NO: 327124 - RNA, 22 nt, Human
caaguaaagaaucacauuucuu

SEQ ID NO: 327125 - RNA, 22 nt, Human
gcagagcuucuguccuucagga

SEQ ID NO: 327126 - RNA, 22 nt, Human
ugcagagcuucauugcauaggc

SEQ ID NO: 327127 - RNA, 20 nt, Human
gcugggcuaccacuggcccu

SEQ ID NO: 327128 - RNA, 22 nt, Human
ggcaccagggaaggaaggcugg

SEQ ID NO: 327129 - RNA, 22 nt, Human
uaggacauguguuuuauauaug

SEQ ID NO: 327130 - RNA, 21 nt, Human
ggcaucccaggccagugacug

SEQ ID NO: 327131 - RNA, 23 nt, Human
ccugaagggucaggguccucagc

SEQ ID NO: 327132 - RNA, 22 nt, Human
ucagacaaguaaaauaauguaa

SEQ ID NO: 327133 - RNA, 22 nt, Human
agagcuggcugcugcggugcuu

SEQ ID NO: 327134 - RNA, 22 nt, Human
guaucacuuuugagagugagaa

SEQ ID NO: 327135 - RNA, 22 nt, Human
agagcuggagcagccccacugg

SEQ ID NO: 327136 - RNA, 21 nt, Human
ccagccucagaucagggagcu

SEQ ID NO: 327137 - RNA, 22 nt, Human
caccagguuccgggcagagcug

SEQ ID NO: 327138 - RNA, 22 nt, Human
agcaauaacagaaaacuuuccu

SEQ ID NO: 327139 - RNA, 20 nt, Human
ggcagagcuaugucuguugc

SEQ ID NO: 327140 - RNA, 22 nt, Human
ggagcugggaacuauguaguau

SEQ ID NO: 327141 - RNA, 21 nt, Human
gagcugggcgaggcuccgggg

SEQ ID NO: 327142 - RNA, 22 nt, Human
uccugguggugccggugcccgg

SEQ ID NO: 327143 - RNA, 18 nt, Human
ucuggaacaacuucaugu

SEQ ID NO: 327144 - RNA, 22 nt, Human
gcccuuggaacagccuccugcu

SEQ ID NO: 327145 - RNA, 22 nt, Human
cugugcccaggccccuggggau

SEQ ID NO: 327146 - RNA, 22 nt, Human
auauaucaugaguaaaacuuga

SEQ ID NO: 327147 - RNA, 22 nt, Human
ugcugggggugucucaccaggc

SEQ ID NO: 327148 - RNA, 22 nt, Human
agaagucauuuauguuagauga

SEQ ID NO: 327149 - RNA, 19 nt, Human
agcuggggcgguguguguu

SEQ ID NO: 327150 - RNA, 22 nt, Human
agaggacacaucuuuccucaaa

SEQ ID NO: 327151 - RNA, 22 nt, Human
ucugggguuuucacgcugucuc

SEQ ID NO: 327152 - RNA, 22 nt, Human
uaggacauaaguauucuaacuu

SEQ ID NO: 327153 - RNA, 17 nt, Human
guccuggugugugagga

SEQ ID NO: 327154 - RNA, 22 nt, Human
gcuuccuggagggagagagcug

SEQ ID NO: 327155 - RNA, 22 nt, Human
ucaaaguagccggauggaauuu

SEQ ID NO: 327156 - RNA, 22 nt, Human
aaauauguuuuccaguugucau

SEQ ID NO: 327157 - RNA, 22 nt, Human
uuucagaucacuuucaggaaag

SEQ ID NO: 327158 - RNA, 22 nt, Human
auauaacauacauacagaaaag

SEQ ID NO: 327159 - RNA, 22 nt, Human
aaguaaaauucaaucuucacug

SEQ ID NO: 327160 - RNA, 22 nt, Human
agagcuggugcauauucagaaa

SEQ ID NO: 327161 - RNA, 22 nt, Human
acauuucaguaaguguuaauuu

SEQ ID NO: 327162 - RNA, 22 nt, Human
gagggcacuggguuucaauguc

SEQ ID NO: 327163 - RNA, 23 nt, Human
aauuuaguuugagacauuagccu

SEQ ID NO: 327164 - RNA, 22 nt, Human
augccuggucccaccucuaggu

SEQ ID NO: 327165 - RNA, 22 nt, Human
uccuguggggaaaagccuaucu

SEQ ID NO: 327166 - RNA, 22 nt, Human
agcccugugggccuuguggcac

SEQ ID NO: 327167 - RNA, 22 nt, Human
gaucucaaagcaguguggguug

SEQ ID NO: 327168 - RNA, 22 nt, Human
cccuggucagggaaggcgccug

SEQ ID NO: 327169 - RNA, 22 nt, Human
aaaaguauuuuggaucucagau

SEQ ID NO: 327170 - RNA, 22 nt, Human
agagcugggacuuggacucaau

SEQ ID NO: 327171 - RNA, 22 nt, Human
gcccagcccugaggucacagcu

SEQ ID NO: 327172 - RNA, 22 nt, Human
ccauggccaauugcaccuugcu

SEQ ID NO: 327173 - RNA, 20 nt, Human
acuuuacugagcuguaauuc

SEQ ID NO: 327174 - RNA, 20 nt, Human
uggcaccaggugguggcccc

SEQ ID NO: 327175 - RNA, 22 nt, Human
aaauauguauggaguucaugaa

SEQ ID NO: 327176 - RNA, 19 nt, Human
uguagcuagugucuaucca

SEQ ID NO: 327177 - RNA, 22 nt, Human
aaauaucauuuauaacuuuuaa

SEQ ID NO: 327178 - RNA, 22 nt, Human
ggcagagccuucuggagcucgc

SEQ ID NO: 327179 - RNA, 22 nt, Human
cugggcucagaugagaggaagg

SEQ ID NO: 327180 - RNA, 22 nt, Human
gcaggagcugcucuccugacga

SEQ ID NO: 327181 - RNA, 19 nt, Human
cugcucccuccuucuggca

SEQ ID NO: 327182 - RNA, 22 nt, Human
ucaaaguauuuuaacuguaucc

SEQ ID NO: 327183 - RNA, 22 nt, Human
cccuguccugcuaggcccuggu

SEQ ID NO: 327184 - RNA, 22 nt, Human
agagcuggaagcugcucuuaga

SEQ ID NO: 327185 - RNA, 22 nt, Human
agagcuggcugguagcccugau

SEQ ID NO: 327186 - RNA, 22 nt, Human
gagcugggucuccaccuuggca

SEQ ID NO: 327187 - RNA, 22 nt, Human
agguggcagagugacaggcuga

SEQ ID NO: 327188 - RNA, 22 nt, Human
cugcagccucaaccuccugagc

SEQ ID NO: 327189 - RNA, 22 nt, Human
gccuguggggcugaggcugccu

SEQ ID NO: 327190 - RNA, 22 nt, Human
ccugcuggccacugcuccaccu

SEQ ID NO: 327191 - RNA, 22 nt, Human
aagcugggacuuagcgcagaua

SEQ ID NO: 327192 - RNA, 22 nt, Human
ccacucccuuccgguccagggc

SEQ ID NO: 327193 - RNA, 22 nt, Human
cucagccugugaagagcagagg

SEQ ID NO: 327194 - RNA, 22 nt, Human
ccugguggacagcagccagcag

SEQ ID NO: 327195 - RNA, 22 nt, Human
gcuuggggagcucaguguccuu

SEQ ID NO: 327196 - RNA, 22 nt, Human
gcccuguguguuugcacugauu

SEQ ID NO: 327197 - RNA, 20 nt, Human
uuucagauuuacagaaaugu

SEQ ID NO: 327198 - RNA, 22 nt, Human
cccugugguugcuagggcacag

SEQ ID NO: 327199 - RNA, 22 nt, Human
uggcaccaggcgggguggcugu

SEQ ID NO: 327200 - RNA, 22 nt, Human
cugggcucaguggcucauggcu

SEQ ID NO: 327201 - RNA, 22 nt, Human
cagagcuggagggaacccuggc

SEQ ID NO: 327202 - RNA, 20 nt, Human
cugggcucgguggcccuggc

SEQ ID NO: 327203 - RNA, 22 nt, Human
gcccuugggagguuccacuggg

SEQ ID NO: 327204 - RNA, 22 nt, Human
uaguaacccacacaacaguaga

SEQ ID NO: 327205 - RNA, 22 nt, Human
gaccaggcuuccccagaccuca

SEQ ID NO: 327206 - RNA, 22 nt, Human
aaaauaguuaacguucagagua

SEQ ID NO: 327207 - RNA, 20 nt, Human
agggcagcuugaggagccgg

SEQ ID NO: 327208 - RNA, 22 nt, Human
uuaugguaauuaaaacauguau

SEQ ID NO: 327209 - RNA, 22 nt, Human
agcccugucucucacuccaggu

SEQ ID NO: 327210 - RNA, 22 nt, Human
ucucagccucaccucuauggag

SEQ ID NO: 327211 - RNA, 21 nt, Human
accaggccaggaggcuggcac

SEQ ID NO: 327212 - RNA, 22 nt, Human
gugcaccccggggcccugcucc

SEQ ID NO: 327213 - RNA, 22 nt, Human
gagcugggccucagaacacagu

SEQ ID NO: 327214 - RNA, 17 nt, Human
ggcaccagacggagagu

SEQ ID NO: 327215 - RNA, 22 nt, Human
ucccugagcucacauggcagga

SEQ ID NO: 327216 - RNA, 22 nt, Human
agagcuggcacugacccucacc

SEQ ID NO: 327217 - RNA, 20 nt, Human
cccagcccgggccgcgcucg

SEQ ID NO: 327218 - RNA, 22 nt, Human
cagagcugcaaaugccccuccg

SEQ ID NO: 327219 - RNA, 22 nt, Human
ggcaucccuucuuccaguguca

SEQ ID NO: 327220 - RNA, 22 nt, Human
cccugccugugggcaucaacau

SEQ ID NO: 327221 - RNA, 22 nt, Human
cccugugggaacuccugaguug

SEQ ID NO: 327222 - RNA, 22 nt, Human
uuucagaugguauauacaguag

SEQ ID NO: 327223 - RNA, 22 nt, Human
cugggcucuaagggagcaccgu

SEQ ID NO: 327224 - RNA, 21 nt, Human
ugggcaccaaaaccuaggagu

SEQ ID NO: 327225 - RNA, 19 nt, Human
uccagccccucugugugug

SEQ ID NO: 327226 - RNA, 22 nt, Human
ccagggagcggggcugggucuc

SEQ ID NO: 327227 - RNA, 22 nt, Human
cugcagaguggagccucggcug

SEQ ID NO: 327228 - RNA, 22 nt, Human
gcugccucaggcaccuccuggc

SEQ ID NO: 327229 - RNA, 22 nt, Human
caccaggcugcccaggacaggg

SEQ ID NO: 327230 - RNA, 22 nt, Human
uccugaggagaagagugcuagg

SEQ ID NO: 327231 - RNA, 22 nt, Human
uccugagggcucggggcucaug

SEQ ID NO: 327232 - RNA, 21 nt, Human
gcaaaugaguuaacuaacuca

SEQ ID NO: 327233 - RNA, 22 nt, Human
cagcuccugcagcuggcuccca

SEQ ID NO: 327234 - RNA, 22 nt, Human
ggcaccagggcaagggucuuuc

SEQ ID NO: 327235 - RNA, 22 nt, Human
gagcugggaguuauagcauguu

SEQ ID NO: 327236 - RNA, 22 nt, Human
uccuguggcguuaucaugugau

SEQ ID NO: 327237 - RNA, 22 nt, Human
auaaaugauucagcaggaaaua

SEQ ID NO: 327238 - RNA, 19 nt, Human
auccuggguccuccagcug

SEQ ID NO: 327239 - RNA, 22 nt, Human
augcugggacguacuuguucau

SEQ ID NO: 327240 - RNA, 22 nt, Human
ugggcaccugaggccuggcagg

SEQ ID NO: 327241 - RNA, 22 nt, Human
cagggagcagcgcuggggccuc

SEQ ID NO: 327242 - RNA, 22 nt, Human
ugcuggggcucugaccacucca

SEQ ID NO: 327243 - RNA, 18 nt, Human
agcuggggccucuggucc

SEQ ID NO: 327244 - RNA, 16 nt, Human
ggcaccagugaacaca

SEQ ID NO: 327245 - RNA, 17 nt, Human
auguauauuaacucuga

SEQ ID NO: 327246 - RNA, 22 nt, Human
gaggccuggaccagccacagag

SEQ ID NO: 327247 - RNA, 22 nt, Human
cugcaggggcaguccacuuccu

SEQ ID NO: 327248 - RNA, 23 nt, Human
uggcaccaggcauucuaggggua

SEQ ID NO: 327249 - RNA, 22 nt, Human
agcccuguagauuuaggagagu

SEQ ID NO: 327250 - RNA, 20 nt, Human
ccuguggagcugccuccucc

SEQ ID NO: 327251 - RNA, 20 nt, Human
aggcuccuguaccugaggaa

SEQ ID NO: 327252 - RNA, 22 nt, Human
aaugauugucauuccaaaaagu

SEQ ID NO: 327253 - RNA, 22 nt, Human
ccugcaggcugcaggccaguuc

SEQ ID NO: 327254 - RNA, 17 nt, Human
agcccugugcucuuuuu

SEQ ID NO: 327255 - RNA, 22 nt, Human
ccuggagcuuuuccauccugga

SEQ ID NO: 327256 - RNA, 22 nt, Human
uagcuggggcuuucauucuugc

SEQ ID NO: 327257 - RNA, 22 nt, Human
caauacaauuaccaguuaauca

SEQ ID NO: 327258 - RNA, 22 nt, Human
agagcugggugaagugccauca

SEQ ID NO: 327259 - RNA, 20 nt, Human
ucccugccuuuuacugcugg

SEQ ID NO: 327260 - RNA, 22 nt, Human
gagcuggguauauggcuuuaug

SEQ ID NO: 327261 - RNA, 22 nt, Human
uccugcagagccgcccucaggu

SEQ ID NO: 327262 - RNA, 22 nt, Human
uuccugguaaauuauguccagg

SEQ ID NO: 327263 - RNA, 22 nt, Human
gcagagcucaugccugcaccuc

SEQ ID NO: 327264 - RNA, 22 nt, Human
gcaccaggcagcugagcaggcc

SEQ ID NO: 327265 - RNA, 22 nt, Human
cccugccccaggcggcuucacu

SEQ ID NO: 327266 - RNA, 22 nt, Human
acaacaaaaucacuagucuucc

SEQ ID NO: 327267 - RNA, 22 nt, Human
gcugggcucuuaucaccuguac

SEQ ID NO: 327268 - RNA, 22 nt, Human
gcugggaggaucucucccuguc

SEQ ID NO: 327269 - RNA, 22 nt, Human
ccuggugaauguucauggacug

SEQ ID NO: 327270 - RNA, 21 nt, Human
caggccccaggccuggggugc

SEQ ID NO: 327271 - RNA, 22 nt, Human
ccuggagcacauggcaggaggc

SEQ ID NO: 327272 - RNA, 22 nt, Human
aacuaaaucuggcauuuagagc

SEQ ID NO: 327273 - RNA, 22 nt, Human
ccuggggagagaaagcccagcc

SEQ ID NO: 327274 - RNA, 22 nt, Human
caggcucagcaggagccugacc

SEQ ID NO: 327275 - RNA, 22 nt, Human
ccuguggagcuuucagcagcuc

SEQ ID NO: 327276 - RNA, 22 nt, Human
ccuggguacccuuggcggccuu

SEQ ID NO: 327277 - RNA, 22 nt, Human
uagcuggguugaggucaucuac

SEQ ID NO: 327278 - RNA, 22 nt, Human
gcccugugccagucacgcugug

SEQ ID NO: 327279 - RNA, 23 nt, Human
ccagcccuccaccagcucuaggc

SEQ ID NO: 327280 - RNA, 22 nt, Human
cuccaggauguuagacguccag

SEQ ID NO: 327281 - RNA, 22 nt, Human
uauaaaugccaggacuuuagau

SEQ ID NO: 327282 - RNA, 18 nt, Human
ugcugggguagaauccac

SEQ ID NO: 327283 - RNA, 22 nt, Human
gagggcacucgagacuacggca

SEQ ID NO: 327284 - RNA, 22 nt, Human
cugucuccuccacugcauggga

SEQ ID NO: 327285 - RNA, 22 nt, Human
cagccccuuccuggcaucugga

SEQ ID NO: 327286 - RNA, 22 nt, Human
uccugcagagacagaggccuca

SEQ ID NO: 327287 - RNA, 22 nt, Human
gagggcacaaaggcaacauuca

SEQ ID NO: 327288 - RNA, 22 nt, Human
augcugggagugaagccccugg

SEQ ID NO: 327289 - RNA, 22 nt, Human
gagcugggcacacgccacuuga

SEQ ID NO: 327290 - RNA, 17 nt, Human
ggcagagcugacagggc

SEQ ID NO: 327291 - RNA, 22 nt, Human
ccuggcagcaggugggcccgug

SEQ ID NO: 327292 - RNA, 20 nt, Human
aagcuggguaggagaggagc

SEQ ID NO: 327293 - RNA, 22 nt, Human
agagcuggaaucagaccucagg

SEQ ID NO: 327294 - RNA, 22 nt, Human
cagagcuguccaaacccugaca

SEQ ID NO: 327295 - RNA, 22 nt, Human
agcuggggguagugagaaauaa

SEQ ID NO: 327296 - RNA, 23 nt, Human
uccuggugacaugccugagcauc

SEQ ID NO: 327297 - RNA, 22 nt, Human
cccugcagccuugcaugccuuc

SEQ ID NO: 327298 - RNA, 22 nt, Human
ggagcuggcagcgcaacccaga

SEQ ID NO: 327299 - RNA, 22 nt, Human
ggcauccugggacuggcuucuu

SEQ ID NO: 327300 - RNA, 21 nt, Human
cagagcuguccaaacccugac

SEQ ID NO: 327301 - RNA, 20 nt, Human
ugcuggggacauacagggug

SEQ ID NO: 327302 - RNA, 22 nt, Human
cagggagcucugggccggacuc

SEQ ID NO: 327303 - RNA, 22 nt, Human
cagcccucaaaccacuuccagg

SEQ ID NO: 327304 - RNA, 22 nt, Human
gagcuggggcagcuuaggagug

SEQ ID NO: 327305 - RNA, 19 nt, Human
cagccucaaucccucgggc

SEQ ID NO: 327306 - RNA, 20 nt, Human
cugggcucaagugauccucc

SEQ ID NO: 327307 - RNA, 22 nt, Human
uucaguaugauuccuccaguag

SEQ ID NO: 327308 - RNA, 22 nt, Human
cugggguuggccagggcccuag

SEQ ID NO: 327309 - RNA, 22 nt, Human
ggcaucccuagaauagccaggu

SEQ ID NO: 327310 - RNA, 21 nt, Human
gcagagcuggaaccaggaccc

SEQ ID NO: 327311 - RNA, 22 nt, Human
gcaugcugcaccagagccucuc

SEQ ID NO: 327312 - RNA, 22 nt, Human
uccugaggcuaaagugcagugg

SEQ ID NO: 327313 - RNA, 22 nt, Human
aaaaugauauccugacuuuuau

SEQ ID NO: 327314 - RNA, 18 nt, Human
ggagcugggccccacucc

SEQ ID NO: 327315 - RNA, 22 nt, Human
uccugcagccauuagaggucaa

SEQ ID NO: 327316 - RNA, 22 nt, Human
cagccccuuguccgguagccac

SEQ ID NO: 327317 - RNA, 22 nt, Human
ggagcuggccgccuaugugcag

SEQ ID NO: 327318 - RNA, 22 nt, Human
cugucuccagggcaggugcagg

SEQ ID NO: 327319 - RNA, 22 nt, Human
gagcugggacauggguccucuc

SEQ ID NO: 327320 - RNA, 22 nt, Human
cagaugcuuggaggacacuugg

SEQ ID NO: 327321 - RNA, 22 nt, Human
ugcugggcuggagcugccaggg

SEQ ID NO: 327322 - RNA, 19 nt, Human
agcuccuguucagcagcuc

SEQ ID NO: 327323 - RNA, 22 nt, Human
ccuggggucacuugcagccgca

SEQ ID NO: 327324 - RNA, 22 nt, Human
agagcuggcugugggugacuuu

SEQ ID NO: 327325 - RNA, 22 nt, Human
ccugucaggguuugccucagaa

SEQ ID NO: 327326 - RNA, 18 nt, Human
gcagagcugggauuccca

SEQ ID NO: 327327 - RNA, 22 nt, Human
gagcugggaggacugggaacuu

SEQ ID NO: 327328 - RNA, 20 nt, Human
agcccuguuuccuggagaga

SEQ ID NO: 327329 - RNA, 22 nt, Human
uccugaggcacaauccuagaau

SEQ ID NO: 327330 - RNA, 22 nt, Human
agagcugggugguggugacuca

SEQ ID NO: 327331 - RNA, 22 nt, Human
uccugcaggccagaggggugag

SEQ ID NO: 327332 - RNA, 22 nt, Human
agagcuggguggacuuguaguu

SEQ ID NO: 327333 - RNA, 22 nt, Human
ccagcccugaacccugcugcau

SEQ ID NO: 327334 - RNA, 22 nt, Human
cacagcugucagcugaccuagg

SEQ ID NO: 327335 - RNA, 22 nt, Human
gagcugggagcugggauuugga

SEQ ID NO: 327336 - RNA, 22 nt, Human
ggcaccagggacaauccucuuc

SEQ ID NO: 327337 - RNA, 22 nt, Human
cccgucccuuuugcccgcuggu

SEQ ID NO: 327338 - RNA, 22 nt, Human
uagcugggucucuguuuucuca

SEQ ID NO: 327339 - RNA, 22 nt, Human
cagggagcuggugccagccgac

SEQ ID NO: 327340 - RNA, 19 nt, Human
gggcuccuugggccucucu

SEQ ID NO: 327341 - RNA, 20 nt, Human
acaaaauagguacuggguag

SEQ ID NO: 327342 - RNA, 19 nt, Human
ccuggcccugcugcgcggg

SEQ ID NO: 327343 - RNA, 22 nt, Human
gcccugugcucaugggaacauc

SEQ ID NO: 327344 - RNA, 22 nt, Human
ucccagccuuccagucugguuu

SEQ ID NO: 327345 - RNA, 21 nt, Human
agagcugguagguagguaggu

SEQ ID NO: 327346 - RNA, 22 nt, Human
aggcccuggguuagggcccacu

SEQ ID NO: 327347 - RNA, 17 nt, Human
ccagggaggggccgcgc

SEQ ID NO: 327348 - RNA, 22 nt, Human
gcaccaggcuuagagccccagg

SEQ ID NO: 327349 - RNA, 22 nt, Human
ugagcuggggucagcuccccug

SEQ ID NO: 327350 - RNA, 22 nt, Human
agcuggggguuggauaagggua

SEQ ID NO: 327351 - RNA, 22 nt, Human
gauaauauuagaagauacaaau

SEQ ID NO: 327352 - RNA, 22 nt, Human
gucugggguacuuucaucugau

SEQ ID NO: 327353 - RNA, 22 nt, Human
ggaggccaccugaccugcuguu

SEQ ID NO: 327354 - RNA, 22 nt, Human
ggcaccagcaggcaccgaugcc

SEQ ID NO: 327355 - RNA, 22 nt, Human
uccacuggcccaccuccucagu

SEQ ID NO: 327356 - RNA, 22 nt, Human
ccucucccgggugccgcugggc

SEQ ID NO: 327357 - RNA, 22 nt, Human
ccuggagcaaaaaucuaaggag

SEQ ID NO: 327358 - RNA, 22 nt, Human
aacuaaaacugguuuguucucu

SEQ ID NO: 327359 - RNA, 22 nt, Human
uuuacugaacugcuaguacagg

SEQ ID NO: 327360 - RNA, 18 nt, Human
gagcugggagaaggaagg

SEQ ID NO: 327361 - RNA, 22 nt, Human
gagcugggacuuggaauccaca

SEQ ID NO: 327362 - RNA, 22 nt, Human
agagcuggagaugcagguuucg

SEQ ID NO: 327363 - RNA, 17 nt, Human
uggcacagaggugcuau

SEQ ID NO: 327364 - RNA, 22 nt, Human
cccucagcuccacccucagcag

SEQ ID NO: 327365 - RNA, 22 nt, Human
cagcccacugccucugugguag

SEQ ID NO: 327366 - RNA, 21 nt, Human
agaugcagugacccacugggg

SEQ ID NO: 327367 - RNA, 22 nt, Human
aaggggaguuagugauaaaacc

SEQ ID NO: 327368 - RNA, 22 nt, Human
cugaccaguccuuagcaccugg

SEQ ID NO: 327369 - RNA, 22 nt, Human
acaaacagaguugaaaaauagg

SEQ ID NO: 327370 - RNA, 22 nt, Human
caugcauuucuaccaaggaaua

SEQ ID NO: 327371 - RNA, 22 nt, Human
gcaccgagaaggaagcaugccu

SEQ ID NO: 327372 - RNA, 22 nt, Human
ugcuccaucuagagcucugcag

SEQ ID NO: 327373 - RNA, 22 nt, Human
cuggcccagguggucguugagg

SEQ ID NO: 327374 - RNA, 22 nt, Human
uugaguuuccugacagcgaagg

SEQ ID NO: 327375 - RNA, 22 nt, Human
gugccacugcacucuagccuag

SEQ ID NO: 327376 - RNA, 22 nt, Human
auuucagcagcccauguuugga

SEQ ID NO: 327377 - RNA, 22 nt, Human
acugauuucagggaugagaaga

SEQ ID NO: 327378 - RNA, 22 nt, Human
uuuucuuggaguggcuguccuu

SEQ ID NO: 327379 - RNA, 22 nt, Human
cuucucuuggguguggugucuu

SEQ ID NO: 327380 - RNA, 22 nt, Human
uauggcaagaugacauguucuc

SEQ ID NO: 327381 - RNA, 22 nt, Human
ucgggguagacgccagcucgga

SEQ ID NO: 327382 - RNA, 22 nt, Human
aagggugguguaggagaucaaa

SEQ ID NO: 327383 - RNA, 22 nt, Human
uuuguagauuuucucuccagua

SEQ ID NO: 327384 - RNA, 22 nt, Human
agaugcugccaggccccucagu

SEQ ID NO: 327385 - RNA, 22 nt, Human
agcugggcuggagcuccaagcg

SEQ ID NO: 327386 - RNA, 22 nt, Human
ggaggugacuggaucaugggca

SEQ ID NO: 327387 - RNA, 22 nt, Human
aagccagguguuuaggccagcg

SEQ ID NO: 327388 - RNA, 22 nt, Human
ggaagaggcugaggccaugcug

SEQ ID NO: 327389 - RNA, 22 nt, Human
ugugaggaccucagcagagucu

SEQ ID NO: 327390 - RNA, 22 nt, Human
uggcucugccccauaccccugc

SEQ ID NO: 327391 - RNA, 22 nt, Human
cccaggucgucagcaguguggu

SEQ ID NO: 327392 - RNA, 22 nt, Human
uccaggcugacgcagcuauuua

SEQ ID NO: 327393 - RNA, 22 nt, Human
uccucauucuuggugcaucaaa

SEQ ID NO: 327394 - RNA, 22 nt, Human
cucucuccuuagcugcagacca

SEQ ID NO: 327395 - RNA, 22 nt, Human
ugagccuggagucguggagggg

SEQ ID NO: 327396 - RNA, 22 nt, Human
agcucugcuucuugggaagaug

SEQ ID NO: 327397 - RNA, 23 nt, Human
gggcagcuuaagcuuguuuuucu

SEQ ID NO: 327398 - RNA, 22 nt, Human
agccagcuaccggggcuccugg

SEQ ID NO: 327399 - RNA, 22 nt, Human
ccucugcccuuuuccuguauca

SEQ ID NO: 327400 - RNA, 21 nt, Human
ugcuccaggagggggcagucc

SEQ ID NO: 327401 - RNA, 22 nt, Human
gcgcuccucccggcccuggugg

SEQ ID NO: 327402 - RNA, 21 nt, Human
agucuacaacuagggaagcug

SEQ ID NO: 327403 - RNA, 22 nt, Human
cucacagcugcuucaggaucca

SEQ ID NO: 327404 - RNA, 21 nt, Human
ccaugucagaugugggcugug

SEQ ID NO: 327405 - RNA, 19 nt, Human
ugggcagugccagggcuua

SEQ ID NO: 327406 - RNA, 22 nt, Human
ccuggcagaauauuaaagugca

SEQ ID NO: 327407 - RNA, 22 nt, Human
agcuccagggaaagaguggauc

SEQ ID NO: 327408 - RNA, 22 nt, Human
aacaucuagguucucaucgaua

SEQ ID NO: 327409 - RNA, 22 nt, Human
gggcagcaaaucugagucuggu

SEQ ID NO: 327410 - RNA, 22 nt, Human
gcuguccugggaacaggcacua

SEQ ID NO: 327411 - RNA, 22 nt, Human
uccagcuccugaguucacugcu

SEQ ID NO: 327412 - RNA, 22 nt, Human
cggcagagcccugagucagccu

SEQ ID NO: 327413 - RNA, 22 nt, Human
gcucugugccccugccguggac

SEQ ID NO: 327414 - RNA, 22 nt, Human
agcaguuuauccucauaaugga

SEQ ID NO: 327415 - RNA, 22 nt, Human
uucuggaguuugaagaucaggu

SEQ ID NO: 327416 - RNA, 22 nt, Human
uaaccaagcaaacuuucauugu

SEQ ID NO: 327417 - RNA, 22 nt, Human
guccaggccugccucugaggag

SEQ ID NO: 327418 - RNA, 22 nt, Human
gcaagcagcccagaacagcucu

SEQ ID NO: 327419 - RNA, 22 nt, Human
uugauggacagggaccacuguc

SEQ ID NO: 327420 - RNA, 17 nt, Human
ggccugcaccuccugcu

SEQ ID NO: 327421 - RNA, 22 nt, Human
cugucaaauggaaacuuauccu

SEQ ID NO: 327422 - RNA, 22 nt, Human
gguuguaguuggagguuguaua

SEQ ID NO: 327423 - RNA, 22 nt, Human
ccacucaggagcuuaucuaugc

SEQ ID NO: 327424 - RNA, 22 nt, Human
aaauugcuugagauuagucucc

SEQ ID NO: 327425 - RNA, 22 nt, Human
ccaggcauccauugcuuccucu

SEQ ID NO: 327426 - RNA, 23 nt, Human
gguucugccgcuuacugcugugc

SEQ ID NO: 327427 - RNA, 22 nt, Human
aagcagaaaaacugagcuccaa

SEQ ID NO: 327428 - RNA, 22 nt, Human
cagcugcucugguggucucucc

SEQ ID NO: 327429 - RNA, 22 nt, Human
gggauaagagaguauuuaugca

SEQ ID NO: 327430 - RNA, 22 nt, Human
aaucuucaggguccuggggcuc

SEQ ID NO: 327431 - RNA, 22 nt, Human
auccaggcgaaugcagaaggcc

SEQ ID NO: 327432 - RNA, 17 nt, Human
gagguaggaagugaguc

SEQ ID NO: 327433 - RNA, 22 nt, Human
cuccaggacugaggacagagcu

SEQ ID NO: 327434 - RNA, 22 nt, Human
ggaccugcucucccaguucucu

SEQ ID NO: 327435 - RNA, 22 nt, Human
cagggcucacucggcuggcguc

SEQ ID NO: 327436 - RNA, 22 nt, Human
cucuggcaauugcugcugacuc

SEQ ID NO: 327437 - RNA, 22 nt, Human
aaagcugcaagcuccugaggaa

SEQ ID NO: 327438 - RNA, 22 nt, Human
agcuauggguguggguuccauu

SEQ ID NO: 327439 - RNA, 22 nt, Human
uuggaaagggauaucuguacuu

SEQ ID NO: 327440 - RNA, 20 nt, Human
ucacuguaauugccuacauu

SEQ ID NO: 327441 - RNA, 22 nt, Human
ggcugagcuuuucaugaugguu

SEQ ID NO: 327442 - RNA, 22 nt, Human
ugagaugaagugauguaaaaca

SEQ ID NO: 327443 - RNA, 22 nt, Human
uucagaagguaggaaugucccu

SEQ ID NO: 327444 - RNA, 22 nt, Human
gcaugcaggaagggcuugggga

SEQ ID NO: 327445 - RNA, 22 nt, Human
caguuuuucaaaauuacaugau

SEQ ID NO: 327446 - RNA, 22 nt, Human
agacacauuuucagcucugcca

SEQ ID NO: 327447 - RNA, 22 nt, Human
gcuggccugaccugaggcuggg

SEQ ID NO: 327448 - RNA, 23 nt, Human
agcaacagugggugaguguugcu

SEQ ID NO: 327449 - RNA, 22 nt, Human
ccaagcuggacagcagcaagga

SEQ ID NO: 327450 - RNA, 22 nt, Human
caagccaggaaggauccagcac

SEQ ID NO: 327451 - RNA, 22 nt, Human
cccuggaacccauggccagugu

SEQ ID NO: 327452 - RNA, 22 nt, Human
gcuggccugcgagggcaggcug

SEQ ID NO: 327453 - RNA, 22 nt, Human
gcgagucgccgcugcagcccua

SEQ ID NO: 327454 - RNA, 22 nt, Human
uuguagucuaggauagauuuuu

SEQ ID NO: 327455 - RNA, 22 nt, Human
agugaauuagccuauuuguaaa

SEQ ID NO: 327456 - RNA, 22 nt, Human
ucaaaggcuugugguucuggga

SEQ ID NO: 327457 - RNA, 22 nt, Human
ucuuucagaaacuuugucugcg

SEQ ID NO: 327458 - RNA, 22 nt, Human
ucuccaggcuuaaucucagcuu

SEQ ID NO: 327459 - RNA, 22 nt, Human
ucagucucuggggcuucuguuu

SEQ ID NO: 327460 - RNA, 22 nt, Human
ccagcagcgauagggugagugc

SEQ ID NO: 327461 - RNA, 22 nt, Human
cuugggcuuagaagguaaguga

SEQ ID NO: 327462 - RNA, 19 nt, Human
ugcuugccugccuuuccca

SEQ ID NO: 327463 - RNA, 22 nt, Human
gugagcugggugaaugguaggg

SEQ ID NO: 327464 - RNA, 22 nt, Human
caaugcacauggacaucaggcu

SEQ ID NO: 327465 - RNA, 22 nt, Human
ugccuguggaaaggcuggugcu

SEQ ID NO: 327466 - RNA, 22 nt, Human
guugaguguugugcaugcacca

SEQ ID NO: 327467 - RNA, 22 nt, Human
agugggaauuuucucccaggga

SEQ ID NO: 327468 - RNA, 22 nt, Human
cgugcggccucggggcccggcu

SEQ ID NO: 327469 - RNA, 22 nt, Human
aggggcacgaguagagcucuag

SEQ ID NO: 327470 - RNA, 22 nt, Human
aguggcaguagaugagcugguu

SEQ ID NO: 327471 - RNA, 22 nt, Human
guugguccuuugagcaagaucc

SEQ ID NO: 327472 - RNA, 22 nt, Human
agggaggucuggcugcccugag

SEQ ID NO: 327473 - RNA, 22 nt, Human
uccagcugugcuccaggaggug

SEQ ID NO: 327474 - RNA, 22 nt, Human
ggacauggaaguauggagugga

SEQ ID NO: 327475 - RNA, 22 nt, Human
ggagcagggaauuacagcgcag

SEQ ID NO: 327476 - RNA, 22 nt, Human
ggucccugcccaaagcccuugg

SEQ ID NO: 327477 - RNA, 22 nt, Human
gucaucaucaggcagaugcugc

SEQ ID NO: 327478 - RNA, 19 nt, Human
cucugccucuggcuguggc

SEQ ID NO: 327479 - RNA, 23 nt, Human
aggcagguuugggcucuucuugu

SEQ ID NO: 327480 - RNA, 22 nt, Human
auggacagcucuuaugugggca

SEQ ID NO: 327481 - RNA, 22 nt, Human
aaugguaauauuucauaguugu

SEQ ID NO: 327482 - RNA, 22 nt, Human
uccaaggacauuguucuaguug

SEQ ID NO: 327483 - RNA, 22 nt, Human
cugggaggcccacguugggaag

SEQ ID NO: 327484 - RNA, 22 nt, Human
gggcggggcuuccguccuccac

SEQ ID NO: 327485 - RNA, 22 nt, Human
ucccagauuccugcucuuauau

SEQ ID NO: 327486 - RNA, 22 nt, Human
acacggcacuuuaggaaggggc

SEQ ID NO: 327487 - RNA, 21 nt, Human
cugcacugugauuuaaaaugu

SEQ ID NO: 327488 - RNA, 22 nt, Human
cccugcacagccuggcucucuu

SEQ ID NO: 327489 - RNA, 20 nt, Human
ggcagcaaccauaugcuaca

SEQ ID NO: 327490 - RNA, 22 nt, Human
cagugcugcaggcgccugcggu

SEQ ID NO: 327491 - RNA, 22 nt, Human
cgcgcugcagacagcggaggcc

SEQ ID NO: 327492 - RNA, 22 nt, Human
uguccuuaucuccaaacaauca

SEQ ID NO: 327493 - RNA, 22 nt, Human
aagaagguugaaugacuacuuu

SEQ ID NO: 327494 - RNA, 22 nt, Human
aucauuaacccuugaugcuggg

SEQ ID NO: 327495 - RNA, 23 nt, Human
aucuguguguggguagggaugau

SEQ ID NO: 327496 - RNA, 22 nt, Human
agaagugaguugugacuauggg

SEQ ID NO: 327497 - RNA, 22 nt, Human
ggaaugugcugacacgcgagag

SEQ ID NO: 327498 - RNA, 22 nt, Human
gcagagcugucuaagucacuuc

SEQ ID NO: 327499 - RNA, 22 nt, Human
uccaggagugauaaggccacug

SEQ ID NO: 327500 - RNA, 22 nt, Human
ucuccuggcauuugguugagua

SEQ ID NO: 327501 - RNA, 20 nt, Human
cugcuccacccggcucucag

SEQ ID NO: 327502 - RNA, 22 nt, Human
agcuggugugccaguuccaguu

SEQ ID NO: 327503 - RNA, 22 nt, Human
auggaggaugugcagcaugggc

SEQ ID NO: 327504 - RNA, 22 nt, Human
gcggcccgagcaggacgggugg

SEQ ID NO: 327505 - RNA, 22 nt, Human
agcugucuaccugcagaguccu

SEQ ID NO: 327506 - RNA, 22 nt, Human
aggcaguggcuuuuguuguguu

SEQ ID NO: 327507 - RNA, 22 nt, Human
uuagccaugcccuagaagagga

SEQ ID NO: 327508 - RNA, 22 nt, Human
uggaaagaggaagugcccagca

SEQ ID NO: 327509 - RNA, 22 nt, Human
ugcugcuuguuuuguaaauaaa

SEQ ID NO: 327510 - RNA, 22 nt, Human
ucaccgccuugcccggccgggc

SEQ ID NO: 327511 - RNA, 22 nt, Human
ucaaagcacuggggaaagccug

SEQ ID NO: 327512 - RNA, 22 nt, Human
ugcuggaagggucggcgugggc

SEQ ID NO: 327513 - RNA, 22 nt, Human
cagagccuuaguucuccuagaa

SEQ ID NO: 327514 - RNA, 18 nt, Human
gccuggcuucggagccgc

SEQ ID NO: 327515 - RNA, 19 nt, Human
aggugaugugacucuagaa

SEQ ID NO: 327516 - RNA, 22 nt, Human
uccuccuuuccccgcuggagcc

SEQ ID NO: 327517 - RNA, 22 nt, Human
acccugccucugcuuccuguag

SEQ ID NO: 327518 - RNA, 22 nt, Human
ccucuucuaggacguccuugug

SEQ ID NO: 327519 - RNA, 21 nt, Human
ugucagcaacaauacuuucuc

SEQ ID NO: 327520 - RNA, 22 nt, Human
cugccaggauucugugaacccc

SEQ ID NO: 327521 - RNA, 22 nt, Human
ugccgcugucgccaccauggcu

SEQ ID NO: 327522 - RNA, 22 nt, Human
uugagcagaucgggcugugggg

SEQ ID NO: 327523 - RNA, 22 nt, Human
uucagcacuggacagcgagucu

SEQ ID NO: 327524 - RNA, 22 nt, Human
uucagguuuuuaaguucugccu

SEQ ID NO: 327525 - RNA, 22 nt, Human
ccaggcaaagcccaugcaagag

SEQ ID NO: 327526 - RNA, 22 nt, Human
cucuggagggaggcugagcugg

SEQ ID NO: 327527 - RNA, 22 nt, Human
gacggggcagccagcugguggc

SEQ ID NO: 327528 - RNA, 22 nt, Human
cagcuccccucuguggggcagu

SEQ ID NO: 327529 - RNA, 22 nt, Human
gcggggggcagcagucgcucag

SEQ ID NO: 327530 - RNA, 22 nt, Human
uggauguuugaaguugcaugug

SEQ ID NO: 327531 - RNA, 22 nt, Human
ggggcccagcaccccuccucgc

SEQ ID NO: 327532 - RNA, 22 nt, Human
auuggccagacuuauccuucag

SEQ ID NO: 327533 - RNA, 20 nt, Human
ggccggggagcucuccaggg

SEQ ID NO: 327534 - RNA, 22 nt, Human
augcugccuccucuucagccgc

SEQ ID NO: 327535 - RNA, 22 nt, Human
gugccuccaggcucgacuaguc

SEQ ID NO: 327536 - RNA, 22 nt, Human
gggcuuuaggggccagugacca

SEQ ID NO: 327537 - RNA, 22 nt, Human
uguggugccgagagucuggacg

SEQ ID NO: 327538 - RNA, 22 nt, Human
cugcgggcugucaggcgugcca

SEQ ID NO: 327539 - RNA, 22 nt, Human
caggguggaacaggcaauacuu

SEQ ID NO: 327540 - RNA, 22 nt, Human
agcuggguacacguugucacaa

SEQ ID NO: 327541 - RNA, 22 nt, Human
uuccuguucaggaaaguugugu

SEQ ID NO: 327542 - RNA, 22 nt, Human
cagagcugacccaaggauugaa

SEQ ID NO: 327543 - RNA, 22 nt, Human
uuugacaugugcuuauaacuuu

SEQ ID NO: 327544 - RNA, 22 nt, Human
cccaggcuggggcuccuccagc

SEQ ID NO: 327545 - RNA, 22 nt, Human
cccagccuuugcuuccugguuc

SEQ ID NO: 327546 - RNA, 22 nt, Human
ugggcaaaugcuuuuuagucaa

SEQ ID NO: 327547 - RNA, 22 nt, Human
aggagcagaacuguuguggagg

SEQ ID NO: 327548 - RNA, 22 nt, Human
ucaguaaaugagcaaaaauuuc

SEQ ID NO: 327549 - RNA, 19 nt, Human
ucuuucauuucuagcucug

SEQ ID NO: 327550 - RNA, 20 nt, Human
auuugcuuaccuuguuucua

SEQ ID NO: 327551 - RNA, 22 nt, Human
aggggcagccucacaauccucu

SEQ ID NO: 327552 - RNA, 22 nt, Human
gccagagggauuccuggugugu

SEQ ID NO: 327553 - RNA, 22 nt, Human
ugcugugcuggcggcagaggcc

SEQ ID NO: 327554 - RNA, 22 nt, Human
ugugacguuguucuggauuccc

SEQ ID NO: 327555 - RNA, 21 nt, Human
gcccacagugaggaggauccc

SEQ ID NO: 327556 - RNA, 22 nt, Human
cugggaguugacgaggcuugua

SEQ ID NO: 327557 - RNA, 22 nt, Human
agcaggccugccaccucggggu

SEQ ID NO: 327558 - RNA, 22 nt, Human
gcgcugccucugcucuccccac

SEQ ID NO: 327559 - RNA, 22 nt, Human
cuccaggacaugacuuucuugc

SEQ ID NO: 327560 - RNA, 22 nt, Human
agcauggcuuuggaggauagca

SEQ ID NO: 327561 - RNA, 22 nt, Human
ugugcccuccugccaggggcug

SEQ ID NO: 327562 - RNA, 20 nt, Human
ucucuggcaagaagcugcag

SEQ ID NO: 327563 - RNA, 22 nt, Human
gugugcgccgacacagccaggu

SEQ ID NO: 327564 - RNA, 22 nt, Human
ccaguucuuucugugugcaaca

SEQ ID NO: 327565 - RNA, 22 nt, Human
ucggugcgcgaggcgcgguccc

SEQ ID NO: 327566 - RNA, 22 nt, Human
uagaagaacaugucaaacuaua

SEQ ID NO: 327567 - RNA, 22 nt, Human
gccucugcacuguggcacacca

SEQ ID NO: 327568 - RNA, 18 nt, Human
ucugaaggaaugauucca

SEQ ID NO: 327569 - RNA, 22 nt, Human
acagcuggccgaggcucaggga

SEQ ID NO: 327570 - RNA, 21 nt, Human
gucuuuuuaauugcgauuucc

SEQ ID NO: 327571 - RNA, 22 nt, Human
ucuguggcauguugcacuugua

SEQ ID NO: 327572 - RNA, 22 nt, Human
aagcccucagagccucuuugac

SEQ ID NO: 327573 - RNA, 22 nt, Human
agcgcuugccgcacuccaagca

SEQ ID NO: 327574 - RNA, 22 nt, Human
ugggguccucucacuuggaggg

SEQ ID NO: 327575 - RNA, 22 nt, Human
gccugccuucggugcgcagcgg

SEQ ID NO: 327576 - RNA, 22 nt, Human
caaggcuaagcuuuggcuuucu

SEQ ID NO: 327577 - RNA, 22 nt, Human
uagcugggacuacuggcccugc

SEQ ID NO: 327578 - RNA, 22 nt, Human
gccaaaguccuccagccaugca

SEQ ID NO: 327579 - RNA, 22 nt, Human
cugcaucacagcaggaggcaca

SEQ ID NO: 327580 - RNA, 22 nt, Human
ugcuucucucuaggaagacgcu

SEQ ID NO: 327581 - RNA, 22 nt, Human
ucugcacccugugguccucuag

SEQ ID NO: 327582 - RNA, 22 nt, Human
gcucagagauguucaguagcuu

SEQ ID NO: 327583 - RNA, 22 nt, Human
ggccuuggaguccuccacugga

SEQ ID NO: 327584 - RNA, 22 nt, Human
aggggaauggguagacuguuga

SEQ ID NO: 327585 - RNA, 22 nt, Human
ugucccuggacuccaggagcca

SEQ ID NO: 327586 - RNA, 22 nt, Human
cucgccccggcacaguguccgu

SEQ ID NO: 327587 - RNA, 22 nt, Human
uccagguccuacuggcccauag

SEQ ID NO: 327588 - RNA, 22 nt, Human
agcaggaggagagccuggcggu

SEQ ID NO: 327589 - RNA, 22 nt, Human
ggccccagggauuaggccaacc

SEQ ID NO: 327590 - RNA, 22 nt, Human
cccaggaggcagaaguugcagu

SEQ ID NO: 327591 - RNA, 17 nt, Human
ucuccuggcucuaucag

SEQ ID NO: 327592 - RNA, 22 nt, Human
ccaggugugcucugcaguggau

SEQ ID NO: 327593 - RNA, 22 nt, Human
agacgcgguggugcaugccugu

SEQ ID NO: 327594 - RNA, 22 nt, Human
cugacucccaaagaggacgcgu

SEQ ID NO: 327595 - RNA, 22 nt, Human
uuugacaacugugcaguuugua

SEQ ID NO: 327596 - RNA, 22 nt, Human
agcuccacucccugccuguuuc

SEQ ID NO: 327597 - RNA, 22 nt, Human
aucucccaaauuagccucuuga

SEQ ID NO: 327598 - RNA, 22 nt, Human
cagccggaccugagggauuccu

SEQ ID NO: 327599 - RNA, 22 nt, Human
ggcaguggugggaggcucgcuc

SEQ ID NO: 327600 - RNA, 22 nt, Human
gcuucugcagagccguccugag

SEQ ID NO: 327601 - RNA, 22 nt, Human
gcagaggggaagcugaggaauu

SEQ ID NO: 327602 - RNA, 22 nt, Human
cuugucuaguuccuggugaugu

SEQ ID NO: 327603 - RNA, 22 nt, Human
caccugagcaacccugugcggg

SEQ ID NO: 327604 - RNA, 22 nt, Human
ucaaaaugccgagugcccaggu

SEQ ID NO: 327605 - RNA, 21 nt, Human
acuguauuguuuucaaggauc

SEQ ID NO: 327606 - RNA, 22 nt, Human
aggguugaagucugguccucau

SEQ ID NO: 327607 - RNA, 22 nt, Human
gagcugcagcggcugacgcaac

SEQ ID NO: 327608 - RNA, 20 nt, Human
gggugugggcccggccaggc

SEQ ID NO: 327609 - RNA, 22 nt, Human
aggcucccaagcacugacccca

SEQ ID NO: 327610 - RNA, 20 nt, Human
aggaaggagaaucugagcaa

SEQ ID NO: 327611 - RNA, 20 nt, Human
gcuccccuucucugggccuc

SEQ ID NO: 327612 - RNA, 22 nt, Human
uacaguaaccagucuacuuaga

SEQ ID NO: 327613 - RNA, 22 nt, Human
agcaaggcagcuuucacugcuu

SEQ ID NO: 327614 - RNA, 23 nt, Human
cuguuauauggguguuaugugcu

SEQ ID NO: 327615 - RNA, 22 nt, Human
ggggaagaaauagaacauuuug

SEQ ID NO: 327616 - RNA, 22 nt, Human
gcacguguucuguggcaugggu

SEQ ID NO: 327617 - RNA, 22 nt, Human
guaaacugaauuggauacugug

SEQ ID NO: 327618 - RNA, 22 nt, Human
cucagcaacccacacacggucu

SEQ ID NO: 327619 - RNA, 22 nt, Human
uaagucauagauuaauggccac

SEQ ID NO: 327620 - RNA, 22 nt, Human
ugugcccuguuaaaugcacagu

SEQ ID NO: 327621 - RNA, 22 nt, Human
uccuggguccauggcagccgaa

SEQ ID NO: 327622 - RNA, 22 nt, Human
uaguggggaaggaggacaagaa

SEQ ID NO: 327623 - RNA, 22 nt, Human
cucaggaaaauauugaagaagu

SEQ ID NO: 327624 - RNA, 22 nt, Human
cugggcuccuaaccauccaggu

SEQ ID NO: 327625 - RNA, 22 nt, Human
ucccaggauguuuauggcuggu

SEQ ID NO: 327626 - RNA, 22 nt, Human
ugcugcucuucaccauggccuc

SEQ ID NO: 327627 - RNA, 22 nt, Human
cagagcagcagagcuuccaugg

SEQ ID NO: 327628 - RNA, 22 nt, Human
cuuccucuguggccagagugua

SEQ ID NO: 327629 - RNA, 22 nt, Human
uggcugaggcacagcugccgcc

SEQ ID NO: 327630 - RNA, 22 nt, Human
uugcaguugcuguauuuaagga

SEQ ID NO: 327631 - RNA, 22 nt, Human
ggagaagggaacugaguuuuug

SEQ ID NO: 327632 - RNA, 18 nt, Human
agcugaggggacugaaga

SEQ ID NO: 327633 - RNA, 22 nt, Human
cugggaggcagucucucuagaa

SEQ ID NO: 327634 - RNA, 20 nt, Human
ccuggagccuggaaggaguc

SEQ ID NO: 327635 - RNA, 22 nt, Human
uccaaggucagcgagagucacu

SEQ ID NO: 327636 - RNA, 22 nt, Human
ugugcugcucucagugacagcc

SEQ ID NO: 327637 - RNA, 22 nt, Human
gaagcgcggcgucggcgugggu

SEQ ID NO: 327638 - RNA, 19 nt, Human
uuuaaugugugcugcaauc

SEQ ID NO: 327639 - RNA, 22 nt, Human
uaaaaucaugacagauugacau

SEQ ID NO: 327640 - RNA, 22 nt, Human
gauugcugccagcguguccgug

SEQ ID NO: 327641 - RNA, 22 nt, Human
ccaggagaaugggauuacccua

SEQ ID NO: 327642 - RNA, 22 nt, Human
uuccuggggacuuaccgucauu

SEQ ID NO: 327643 - RNA, 22 nt, Human
ggcucugcugguaagaugccuc

SEQ ID NO: 327644 - RNA, 22 nt, Human
ccucagucuauuuccagcaggu

SEQ ID NO: 327645 - RNA, 22 nt, Human
agugggagcggcagucggggac

SEQ ID NO: 327646 - RNA, 17 nt, Human
ugggggcccuguguaga

SEQ ID NO: 327647 - RNA, 22 nt, Human
auggccagcaagguagggcaau

SEQ ID NO: 327648 - RNA, 22 nt, Human
ugugagauuuuauuugauaugc

SEQ ID NO: 327649 - RNA, 22 nt, Human
aaguuugucucauuugaucuuc

SEQ ID NO: 327650 - RNA, 22 nt, Human
agccccaguccgcugcgggcgg

SEQ ID NO: 327651 - RNA, 22 nt, Human
acuuuuaaggggccuugauuua

SEQ ID NO: 327652 - RNA, 22 nt, Human
ugggcaaggcuggagccugcag

SEQ ID NO: 327653 - RNA, 22 nt, Human
guauuucuuuacauaugcucau

SEQ ID NO: 327654 - RNA, 22 nt, Human
uccagagaacgaugaaagcugg

SEQ ID NO: 327655 - RNA, 22 nt, Human
gcagcccaggcucgcucacugc

SEQ ID NO: 327656 - RNA, 22 nt, Human
caucugcaggggaagccaguuu

SEQ ID NO: 327657 - RNA, 22 nt, Human
cugcccugcagcuccacggacu

SEQ ID NO: 327658 - RNA, 22 nt, Human
cugcggcuggggacagcuguug

SEQ ID NO: 327659 - RNA, 22 nt, Human
caguguuuagcacagugcuugg

SEQ ID NO: 327660 - RNA, 22 nt, Human
uggaagguguggcaggucuagu

SEQ ID NO: 327661 - RNA, 22 nt, Human
gaggcugugugucccucuggac

SEQ ID NO: 327662 - RNA, 22 nt, Human
ucugcgcccugucgccugcucc

SEQ ID NO: 327663 - RNA, 22 nt, Human
ggugcccaaggaagguugccgu

SEQ ID NO: 327664 - RNA, 22 nt, Human
uguguuucugagaaucccaccu

SEQ ID NO: 327665 - RNA, 22 nt, Human
ccucguccacaauccuugcaca

SEQ ID NO: 327666 - RNA, 22 nt, Human
uuuuuggguccaggcuguaucu

SEQ ID NO: 327667 - RNA, 22 nt, Human
ucugcuguuuacugugugauau

SEQ ID NO: 327668 - RNA, 20 nt, Human
uucaugcagugguugcugug

SEQ ID NO: 327669 - RNA, 22 nt, Human
gacagcagccacagggagaggg

SEQ ID NO: 327670 - RNA, 22 nt, Human
ucccuggcacaagaaggcuguc

SEQ ID NO: 327671 - RNA, 22 nt, Human
ucagccagaggcuucuugguuu

SEQ ID NO: 327672 - RNA, 22 nt, Human
uuuggagagaugaaguucugug

SEQ ID NO: 327673 - RNA, 22 nt, Human
cuguccauggcaaugaugcaga

SEQ ID NO: 327674 - RNA, 22 nt, Human
uccgcgcucucacccgcucccg

SEQ ID NO: 327675 - RNA, 22 nt, Human
agcuaguauuucauugaggauu

SEQ ID NO: 327676 - RNA, 22 nt, Human
gcugcaggcucugcaggaauug

SEQ ID NO: 327677 - RNA, 22 nt, Human
cugggaggcggagguuguagug

SEQ ID NO: 327678 - RNA, 22 nt, Human
aacccuggggcugcucugccug

SEQ ID NO: 327679 - RNA, 22 nt, Human
cagggagcuggugccagccgac

SEQ ID NO: 327680 - RNA, 22 nt, Human
gccuguuucuccuccuuggccc

SEQ ID NO: 327681 - RNA, 22 nt, Human
gggcagcaucaggaggggcuuu

SEQ ID NO: 327682 - RNA, 22 nt, Human
ugggcacacugaaucugcuauu

SEQ ID NO: 327683 - RNA, 22 nt, Human
uuuuuugucuugaagaaauggu

SEQ ID NO: 327684 - RNA, 22 nt, Human
cuuggcauguucaucugcuugg

SEQ ID NO: 327685 - RNA, 19 nt, Human
uggugcgcuguuccugagc

SEQ ID NO: 327686 - RNA, 22 nt, Human
aauggcugccagggcaggaggu

SEQ ID NO: 327687 - RNA, 22 nt, Human
aggggagccagggcugcgaguu

SEQ ID NO: 327688 - RNA, 22 nt, Human
caagggcagaggcagggccccg

SEQ ID NO: 327689 - RNA, 22 nt, Human
gaggugaguggggucuccaggg

SEQ ID NO: 327690 - RNA, 22 nt, Human
uggcccaggugcacccagaggc

SEQ ID NO: 327691 - RNA, 22 nt, Human
ggggugaagguuuucugaaagc

SEQ ID NO: 327692 - RNA, 22 nt, Human
ucugcucagccgaucugcuccg

SEQ ID NO: 327693 - RNA, 19 nt, Human
cuucuggauccgcagggcc

SEQ ID NO: 327694 - RNA, 18 nt, Human
gcugaaauucuaaacaaa

SEQ ID NO: 327695 - RNA, 22 nt, Human
auacaugugugugcauacaugu

SEQ ID NO: 327696 - RNA, 22 nt, Human
gggagaguagcuggaagguucu

SEQ ID NO: 327697 - RNA, 22 nt, Human
uucaacaacuugguucaaaugg

SEQ ID NO: 327698 - RNA, 22 nt, Human
uuucuuggucuucccgaccugg

SEQ ID NO: 327699 - RNA, 22 nt, Human
cuccacagccccuccaguggca

SEQ ID NO: 327700 - RNA, 22 nt, Human
ccuggguccaauucuggcuugu

SEQ ID NO: 327701 - RNA, 22 nt, Human
uucuuggcacagaugagauucu

SEQ ID NO: 327702 - RNA, 22 nt, Human
caaugggccuggagagagcugg

SEQ ID NO: 327703 - RNA, 22 nt, Human
agccacccuaccagcccugaaa

SEQ ID NO: 327704 - RNA, 22 nt, Human
uugcuucacuacuucuaggcuc

SEQ ID NO: 327705 - RNA, 20 nt, Human
ugcuggaggcgccggcgcuc

SEQ ID NO: 327706 - RNA, 22 nt, Human
cucagcaacagcgacuuaaggg

SEQ ID NO: 327707 - RNA, 19 nt, Human
agcagagcagggccguggg

SEQ ID NO: 327708 - RNA, 22 nt, Human
aguccagggcuuagucagcggg

SEQ ID NO: 327709 - RNA, 22 nt, Human
uuaagagaagaguaucuagaac

SEQ ID NO: 327710 - RNA, 20 nt, Human
uggcccagcacgacgaggac

SEQ ID NO: 327711 - RNA, 22 nt, Human
cagaaccaggaacugauggaga

SEQ ID NO: 327712 - RNA, 22 nt, Human
caguauuucauucagaauuguu

SEQ ID NO: 327713 - RNA, 22 nt, Human
aggaagagcuggaccagaggac

SEQ ID NO: 327714 - RNA, 22 nt, Human
gcagcagcggggccccugcgcg

SEQ ID NO: 327715 - RNA, 21 nt, Human
agcaucugaggcaguuuccua

SEQ ID NO: 327716 - RNA, 22 nt, Human
aggccugggacgggagccguga

SEQ ID NO: 327717 - RNA, 22 nt, Human
aaggcuguuugagcacuggagc

SEQ ID NO: 327718 - RNA, 20 nt, Human
auuagcuuggagacaguggc

SEQ ID NO: 327719 - RNA, 21 nt, Human
gcucuguguuacaaguugggg

SEQ ID NO: 327720 - RNA, 23 nt, Human
agcccagcagagaaccuaggucc

SEQ ID NO: 327721 - RNA, 22 nt, Human
uccacccugcuuuugucuuuga

SEQ ID NO: 327722 - RNA, 22 nt, Human
agccugugcuguguuugcucca

SEQ ID NO: 327723 - RNA, 22 nt, Human
gcaccagccugagccucuugca

SEQ ID NO: 327724 - RNA, 22 nt, Human
uggaaauaguugugagucaggc

SEQ ID NO: 327725 - RNA, 22 nt, Human
cccaccacgugcuuugcuggag

SEQ ID NO: 327726 - RNA, 22 nt, Human
acucacagggccucaguuuucc

SEQ ID NO: 327727 - RNA, 22 nt, Human
gccuggaaugcaaugugacgaa

SEQ ID NO: 327728 - RNA, 22 nt, Human
uucucugguuugcuguuucuga

SEQ ID NO: 327729 - RNA, 22 nt, Human
cucaggcuaagaaggccaagug

SEQ ID NO: 327730 - RNA, 19 nt, Human
gcuuccagcacugcaggag

SEQ ID NO: 327731 - RNA, 22 nt, Human
cuucuccgacaaccgacgccgg

SEQ ID NO: 327732 - RNA, 22 nt, Human
agcuccugaaaagcgcuugcuu

SEQ ID NO: 327733 - RNA, 22 nt, Human
gguccagcacaacacuggcaug

SEQ ID NO: 327734 - RNA, 22 nt, Human
gcagcugcgaagaagucuaucu

SEQ ID NO: 327735 - RNA, 22 nt, Human
augaggagucaaggagucggag

SEQ ID NO: 327736 - RNA, 21 nt, Human
ucugugcuuuuuuggcuccua

SEQ ID NO: 327737 - RNA, 19 nt, Human
uggcagcauugguaccuug

SEQ ID NO: 327738 - RNA, 22 nt, Human
ggaagccaguugcuuggugugg

SEQ ID NO: 327739 - RNA, 22 nt, Human
cugguuuuccaauguuuugacu

SEQ ID NO: 327740 - RNA, 22 nt, Human
caguuuuacccaagcuuauuuu

SEQ ID NO: 327741 - RNA, 22 nt, Human
acccggagucggagguugcagu

SEQ ID NO: 327742 - RNA, 22 nt, Human
gccauguucuugaaucuggguc

SEQ ID NO: 327743 - RNA, 22 nt, Human
ccuccccacagcccaggagacu

SEQ ID NO: 327744 - RNA, 22 nt, Human
aggugacaucccggcagcagag

SEQ ID NO: 327745 - RNA, 22 nt, Human
aucuaugugggaaucauaauag

SEQ ID NO: 327746 - RNA, 22 nt, Human
cuccuuaaagggagcagcagcu

SEQ ID NO: 327747 - RNA, 22 nt, Human
uagaaaagccccagcuggaggg

SEQ ID NO: 327748 - RNA, 22 nt, Human
cccccagcucugcugggucccg

SEQ ID NO: 327749 - RNA, 20 nt, Human
uccagccacuuccgcugguc

SEQ ID NO: 327750 - RNA, 22 nt, Human
agccacauggaccugaugcuag

SEQ ID NO: 327751 - RNA, 22 nt, Human
gcccagcugagaagcgcggggc

SEQ ID NO: 327752 - RNA, 22 nt, Human
uguguuucucugaggggucccu

SEQ ID NO: 327753 - RNA, 22 nt, Human
ggccgugcuccaaagucaucgu

SEQ ID NO: 327754 - RNA, 22 nt, Human
ucuggaaggggaucugugguca

SEQ ID NO: 327755 - RNA, 19 nt, Human
ugccuggcaccagcuccac

SEQ ID NO: 327756 - RNA, 22 nt, Human
gcugucucauacaaggcccugc

SEQ ID NO: 327757 - RNA, 20 nt, Human
ccagagcugauggcugcccg

SEQ ID NO: 327758 - RNA, 22 nt, Human
agcagugugggcugcacgcugg

SEQ ID NO: 327759 - RNA, 22 nt, Human
cugagcugguucucuugugaaa

SEQ ID NO: 327760 - RNA, 22 nt, Human
ugcuggccucggcgcugggccu

SEQ ID NO: 327761 - RNA, 22 nt, Human
uggccaggcagguagaacggcc

SEQ ID NO: 327762 - RNA, 22 nt, Human
uggcccugccgccacgacgucu

SEQ ID NO: 327763 - RNA, 22 nt, Human
gucugcacgugccagggagggg

SEQ ID NO: 327764 - RNA, 22 nt, Human
gcucuggcuacuguggcuaccg

SEQ ID NO: 327765 - RNA, 22 nt, Human
gggagccagcagggcauggagc

SEQ ID NO: 327766 - RNA, 20 nt, Human
aucagguguucagccacugc

SEQ ID NO: 327767 - RNA, 22 nt, Human
uggcagaaugaagacuggggcc

SEQ ID NO: 327768 - RNA, 22 nt, Human
cgccccagccaguugagcggcg

SEQ ID NO: 327769 - RNA, 23 nt, Human
aacugcaagguugcugggaagua

SEQ ID NO: 327770 - RNA, 22 nt, Human
uuuccaguuguucuagaaagcu

SEQ ID NO: 327771 - RNA, 22 nt, Human
gccagagaggccuuagaaucca

SEQ ID NO: 327772 - RNA, 22 nt, Human
gacggagcugguugcugcggcu

SEQ ID NO: 327773 - RNA, 22 nt, Human
uccucagcaaacacuucacucu

SEQ ID NO: 327774 - RNA, 22 nt, Human
uuuggucuggaaucuucagggu

SEQ ID NO: 327775 - RNA, 22 nt, Human
aggcugcugccuuggagagugu

SEQ ID NO: 327776 - RNA, 22 nt, Human
agguccugucuuaucucuguaa

SEQ ID NO: 327777 - RNA, 22 nt, Human
ugccuggcugggcugcucaugg

SEQ ID NO: 327778 - RNA, 22 nt, Human
ucaggaugagucaucaagcugc

SEQ ID NO: 327779 - RNA, 22 nt, Human
uucucuucacagggaucauccu

SEQ ID NO: 327780 - RNA, 22 nt, Human
ugcugcacuuauggcucugagg

SEQ ID NO: 327781 - RNA, 22 nt, Human
ucccucugcuagugcuugagcu

SEQ ID NO: 327782 - RNA, 22 nt, Human
gccucugcaccaguacugugcc

SEQ ID NO: 327783 - RNA, 22 nt, Human
ggugggucuuguggggcagcuu

SEQ ID NO: 327784 - RNA, 23 nt, Human
uggcucugagcuuccugguggcc

SEQ ID NO: 327785 - RNA, 22 nt, Human
uggugcagacaggagccccgcu

SEQ ID NO: 327786 - RNA, 22 nt, Human
ccugggaaggugaggcccugga

SEQ ID NO: 327787 - RNA, 22 nt, Human
gacagcaggaugugaggggaug

SEQ ID NO: 327788 - RNA, 22 nt, Human
ccugcgcgucugggucugucuc

SEQ ID NO: 327789 - RNA, 22 nt, Human
ggggaggaagcuggaacacggg

SEQ ID NO: 327790 - RNA, 22 nt, Human
uucuguuuauaauuugcaguug

SEQ ID NO: 327791 - RNA, 22 nt, Human
agcagugccgcaucuugugacc

SEQ ID NO: 327792 - RNA, 22 nt, Human
gucuuuuuuacaccuuacauca

SEQ ID NO: 327793 - RNA, 22 nt, Human
gcugguggcagagcuccgcggc

SEQ ID NO: 327794 - RNA, 22 nt, Human
ccauggccugaaggagugcauc

SEQ ID NO: 327795 - RNA, 22 nt, Human
aagaaaagguaaccgcuuaucu

SEQ ID NO: 327796 - RNA, 22 nt, Human
ugacagcuuggacaggucccuc

SEQ ID NO: 327797 - RNA, 22 nt, Human
gcugggugauucauuuccauaa

SEQ ID NO: 327798 - RNA, 22 nt, Human
aggccagugguucucugugucc

SEQ ID NO: 327799 - RNA, 22 nt, Human
ggcuguggucauuaggagguug

SEQ ID NO: 327800 - RNA, 22 nt, Human
agccagucggggccaugcuggg

SEQ ID NO: 327801 - RNA, 22 nt, Human
auuaauaucccccgccguucug

SEQ ID NO: 327802 - RNA, 23 nt, Human
acagaagccaggagccgcugggc

SEQ ID NO: 327803 - RNA, 22 nt, Human
ccaugcccuugucaucuccagg

SEQ ID NO: 327804 - RNA, 20 nt, Human
uugagcagcagugcuguguc

SEQ ID NO: 327805 - RNA, 22 nt, Human
ggccauggcgggagccggcguc

SEQ ID NO: 327806 - RNA, 22 nt, Human
cuguggaguccuggggaaugga

SEQ ID NO: 327807 - RNA, 22 nt, Human
cugagcugcucccgcugcagcg

SEQ ID NO: 327808 - RNA, 22 nt, Human
aggcuguagaucuagacaugua

SEQ ID NO: 327809 - RNA, 22 nt, Human
agaaacaucgcuuaguccucau

SEQ ID NO: 327810 - RNA, 22 nt, Human
ugcugaggagguggcugugcuu

SEQ ID NO: 327811 - RNA, 22 nt, Human
gaguggggcccacugcugggug

SEQ ID NO: 327812 - RNA, 22 nt, Human
cggcgcaggcagaccgcgggcu

SEQ ID NO: 327813 - RNA, 22 nt, Human
ggcggcacgcaggcugcugucg

SEQ ID NO: 327814 - RNA, 22 nt, Human
guccuggggauuauagaguguu

SEQ ID NO: 327815 - RNA, 22 nt, Human
uuuccaaggaugugucucucua

SEQ ID NO: 327816 - RNA, 22 nt, Human
agcagcaccuguccucgcugcu

SEQ ID NO: 327817 - RNA, 22 nt, Human
auguaagagcuuugcagggaaa

SEQ ID NO: 327818 - RNA, 22 nt, Human
gaccuccguguacaccucccag

SEQ ID NO: 327819 - RNA, 22 nt, Human
gggcauuucuugucaauguagg

SEQ ID NO: 327820 - RNA, 22 nt, Human
uuucucuuucaaucugcaguac

SEQ ID NO: 327821 - RNA, 22 nt, Human
cagaguccugcaccagcuccag

SEQ ID NO: 327822 - RNA, 22 nt, Human
gaagcccuggggucagugucgu

SEQ ID NO: 327823 - RNA, 22 nt, Human
uguuggcagugcuacagucagu

SEQ ID NO: 327824 - RNA, 21 nt, Human
uccugcugagaaacagauggu

SEQ ID NO: 327825 - RNA, 22 nt, Human
ucucugguuaugucauuaagca

SEQ ID NO: 327826 - RNA, 22 nt, Human
aggcagugguguuugcuggugg

SEQ ID NO: 327827 - RNA, 19 nt, Human
cacuguccuagucgaggcc

SEQ ID NO: 327828 - RNA, 22 nt, Human
aucugucccuccucacagccuc

SEQ ID NO: 327829 - RNA, 22 nt, Human
agguuuggguucauugcuggcu

SEQ ID NO: 327830 - RNA, 22 nt, Human
guucuucaaagugacaacuaaa

SEQ ID NO: 327831 - RNA, 22 nt, Human
uggguagggagcuggaauccua

SEQ ID NO: 327832 - RNA, 22 nt, Human
aggcuguccucucuugcucagu

SEQ ID NO: 327833 - RNA, 22 nt, Human
cagugcagccaaggacaggcac

SEQ ID NO: 327834 - RNA, 22 nt, Human
ucccugagugggcugguaguau

SEQ ID NO: 327835 - RNA, 22 nt, Human
ucuacaacgugguuuuguugua

SEQ ID NO: 327836 - RNA, 20 nt, Human
agcuugccccugucuuugcc

SEQ ID NO: 327837 - RNA, 22 nt, Human
guuuuaguggguggccacugau

SEQ ID NO: 327838 - RNA, 22 nt, Human
gcaguccuguagcgacuuuuuu

SEQ ID NO: 327839 - RNA, 22 nt, Human
uccugggcccuccggaucaggu

SEQ ID NO: 327840 - RNA, 22 nt, Human
cuccagcagaaagggcgagugg

SEQ ID NO: 327841 - RNA, 22 nt, Human
uucuccccgucucucugaggcc

SEQ ID NO: 327842 - RNA, 22 nt, Human
gcugggcccugggugcccuagc

SEQ ID NO: 327843 - RNA, 22 nt, Human
cuuccugcaacaccuguguugc

SEQ ID NO: 327844 - RNA, 22 nt, Human
ucacaguucaacuaguucagau

SEQ ID NO: 327845 - RNA, 22 nt, Human
ccugguuugggugccagugagu

SEQ ID NO: 327846 - RNA, 22 nt, Human
ugccgcgcgcccagguuaggug

SEQ ID NO: 327847 - RNA, 22 nt, Human
ugaggcuggaugggaugccucc

SEQ ID NO: 327848 - RNA, 22 nt, Human
aaggaccaguuuugcagaauug

SEQ ID NO: 327849 - RNA, 22 nt, Human
gcugucaggaacaugccuuggu

SEQ ID NO: 327850 - RNA, 22 nt, Human
gucuugcacuuaccuaagaacu

SEQ ID NO: 327851 - RNA, 22 nt, Human
aaacaucuucucuugauucuuu

SEQ ID NO: 327852 - RNA, 22 nt, Human
gcaguaaauugagagucauguu

SEQ ID NO: 327853 - RNA, 22 nt, Human
cuuugcagagggggugggagcu

SEQ ID NO: 327854 - RNA, 22 nt, Human
ggccgcggauuuucccgcuggc

SEQ ID NO: 327855 - RNA, 22 nt, Human
gcaggccuccccugcuggagcu

SEQ ID NO: 327856 - RNA, 22 nt, Human
uugcaaauaauagccugaaacu

SEQ ID NO: 327857 - RNA, 22 nt, Human
cagcugacaagaguccuuggag

SEQ ID NO: 327858 - RNA, 22 nt, Human
uaaagacaauuucgagcuguag

SEQ ID NO: 327859 - RNA, 22 nt, Human
aaagcugggcuggccaacccag

SEQ ID NO: 327860 - RNA, 22 nt, Human
uguuucaggcuucugggauuuu

SEQ ID NO: 327861 - RNA, 16 nt, Human
aggcucagaggcugga

SEQ ID NO: 327862 - RNA, 22 nt, Human
cgcagcugcugcucugaaacag

SEQ ID NO: 327863 - RNA, 22 nt, Human
cugagcaugcuacaugcagcac

SEQ ID NO: 327864 - RNA, 22 nt, Human
caugcuggucagccaguggaug

SEQ ID NO: 327865 - RNA, 22 nt, Human
gugcagcugggcgcugaccuuc

SEQ ID NO: 327866 - RNA, 22 nt, Human
cuggcagcugcccgagaugccc

SEQ ID NO: 327867 - RNA, 22 nt, Human
ugcacagagggaggcauaaaau

SEQ ID NO: 327868 - RNA, 22 nt, Human
uguguuuuggaaggaacaugca

SEQ ID NO: 327869 - RNA, 22 nt, Human
uuugcagagugcagaagcaucu

SEQ ID NO: 327870 - RNA, 15 nt, Human
uggugguguugagac

SEQ ID NO: 327871 - RNA, 22 nt, Human
cugcaccgugucucgggcugcc

SEQ ID NO: 327872 - RNA, 22 nt, Human
ccugggugaugugcugcccucg

SEQ ID NO: 327873 - RNA, 22 nt, Human
uggccuuggcagugagaagagu

SEQ ID NO: 327874 - RNA, 22 nt, Human
agcagcaggugaccucgaugcc

SEQ ID NO: 327875 - RNA, 22 nt, Human
uccagcucugcugugcgccggu

SEQ ID NO: 327876 - RNA, 22 nt, Human
cagcucugguuccugggcccag

SEQ ID NO: 327877 - RNA, 22 nt, Human
cucugcaggcacccaggguggg

SEQ ID NO: 327878 - RNA, 22 nt, Human
cccacucccugcacgccugccg

SEQ ID NO: 327879 - RNA, 22 nt, Human
cuuguuuucuucugcagucuau

SEQ ID NO: 327880 - RNA, 23 nt, Human
aagaaugcuucugaagagcugcc

SEQ ID NO: 327881 - RNA, 22 nt, Human
cuccugcagcccucagcagcca

SEQ ID NO: 327882 - RNA, 22 nt, Human
ggcagcugaagaggaacuuugg

SEQ ID NO: 327883 - RNA, 22 nt, Human
ggccugcuucucugggcuuucu

SEQ ID NO: 327884 - RNA, 22 nt, Human
uagcugcuugaccaggcagugg

SEQ ID NO: 327885 - RNA, 22 nt, Human
gauguggcugcucuaaagccca

SEQ ID NO: 327886 - RNA, 22 nt, Human
ugguaaaugucuaacaaucacu

SEQ ID NO: 327887 - RNA, 22 nt, Human
auggcagcggagcuggaaauga

SEQ ID NO: 327888 - RNA, 22 nt, Human
ugggaagauaugagugaccaac

SEQ ID NO: 327889 - RNA, 20 nt, Human
acguggccaccaguggcuua

SEQ ID NO: 327890 - RNA, 22 nt, Human
gccuggcaaggcccuguugacu

SEQ ID NO: 327891 - RNA, 22 nt, Human
cagcuggaggagcagcuuccag

SEQ ID NO: 327892 - RNA, 22 nt, Human
cuugccaguguugcagaagcuc

SEQ ID NO: 327893 - RNA, 22 nt, Human
caucccugauuccuaguacagu

SEQ ID NO: 327894 - RNA, 22 nt, Human
gcggcccggguccccagcagca

SEQ ID NO: 327895 - RNA, 22 nt, Human
agccugugaaaucucugccacu

SEQ ID NO: 327896 - RNA, 22 nt, Human
ugccuggauggcucugagcagg

SEQ ID NO: 327897 - RNA, 22 nt, Human
aucauccuagaaggaagcuagg

SEQ ID NO: 327898 - RNA, 22 nt, Human
uuuuguguugccauguuaagca

SEQ ID NO: 327899 - RNA, 22 nt, Human
gccuucugaucgcuggacugac

SEQ ID NO: 327900 - RNA, 22 nt, Human
ucugggugucacuccugccugc

SEQ ID NO: 327901 - RNA, 19 nt, Human
ugcuccaggccuugccgca

SEQ ID NO: 327902 - RNA, 22 nt, Human
cagacagagucuucccaucagu

SEQ ID NO: 327903 - RNA, 22 nt, Human
cuggcagcucugagucccuucu

SEQ ID NO: 327904 - RNA, 22 nt, Human
gagcuccugaaacguuccugcc

SEQ ID NO: 327905 - RNA, 22 nt, Human
ugucuucauuccccaugaaguc

SEQ ID NO: 327906 - RNA, 22 nt, Human
uuuccuguccugguacuuggca

SEQ ID NO: 327907 - RNA, 22 nt, Human
ggcacagcugaugcagacacac

SEQ ID NO: 327908 - RNA, 22 nt, Human
acacuggagauggaccucacaa

SEQ ID NO: 327909 - RNA, 22 nt, Human
gaauguuuaaaaggugcaguuu

SEQ ID NO: 327910 - RNA, 20 nt, Human
gacuucaauuucuaucuuuu

SEQ ID NO: 327911 - RNA, 22 nt, Human
caggacccaaccucccugcucu

SEQ ID NO: 327912 - RNA, 22 nt, Human
gaccacuggggugagggccauc

SEQ ID NO: 327913 - RNA, 22 nt, Human
ccuuggcuuaccuucugugugg

SEQ ID NO: 327914 - RNA, 20 nt, Human
caucaacaccuugucagccu

SEQ ID NO: 327915 - RNA, 22 nt, Human
caggccacacggcggcucccug

SEQ ID NO: 327916 - RNA, 22 nt, Human
augugggccgugcggguguccu

SEQ ID NO: 327917 - RNA, 18 nt, Human
gggcuuuacagaguggag

SEQ ID NO: 327918 - RNA, 22 nt, Human
uuucuggcagcgggacaggggu

SEQ ID NO: 327919 - RNA, 22 nt, Human
uggcugaguuacgaacagagca

SEQ ID NO: 327920 - RNA, 22 nt, Human
gagaagguggaccugaaggagc

SEQ ID NO: 327921 - RNA, 22 nt, Human
agcugcugcaaguggugcuaac

SEQ ID NO: 327922 - RNA, 22 nt, Human
cauuucaaacaguuacagcugc

SEQ ID NO: 327923 - RNA, 22 nt, Human
auggaguugagcucuguugucc

SEQ ID NO: 327924 - RNA, 22 nt, Human
uuaaguauauccauuugacugg

SEQ ID NO: 327925 - RNA, 22 nt, Human
aguaacuuaagcaauuguguau

SEQ ID NO: 327926 - RNA, 22 nt, Human
agagcagaggcauggccguggg

SEQ ID NO: 327927 - RNA, 22 nt, Human
ccaaggcuggagggcuuaugua

SEQ ID NO: 327928 - RNA, 22 nt, Human
agagcgagucuggggcucggau

SEQ ID NO: 327929 - RNA, 22 nt, Human
uuuccacacucacugcacucau

SEQ ID NO: 327930 - RNA, 22 nt, Human
gccccgucguggggccagggau

SEQ ID NO: 327931 - RNA, 22 nt, Human
uuuugucagugagaacagaguu

SEQ ID NO: 327932 - RNA, 21 nt, Human
cccgugccuucagcaguccug

SEQ ID NO: 327933 - RNA, 22 nt, Human
auuuuagagaaacaaacguagg

SEQ ID NO: 327934 - RNA, 23 nt, Human
ggucccaguggagaggccucacc

SEQ ID NO: 327935 - RNA, 17 nt, Human
gugcuggccuggggcuc

SEQ ID NO: 327936 - RNA, 22 nt, Human
uccugucucaguguauuugcag

SEQ ID NO: 327937 - RNA, 23 nt, Human
uggaaacauucugaauguccauc

SEQ ID NO: 327938 - RNA, 22 nt, Human
ggaaggaucuggcugaaaucca

SEQ ID NO: 327939 - RNA, 21 nt, Human
caaaagagacugauucuugga

SEQ ID NO: 327940 - RNA, 22 nt, Human
gggagguucuguucgcacuuga

SEQ ID NO: 327941 - RNA, 22 nt, Human
cagcauggagacaaagugggca

SEQ ID NO: 327942 - RNA, 22 nt, Human
gucccugauaagagccaucgau

SEQ ID NO: 327943 - RNA, 22 nt, Human
ucaugucccguugcuggcugcc

SEQ ID NO: 327944 - RNA, 22 nt, Human
ugcaugguuauauacuacuagu

SEQ ID NO: 327945 - RNA, 22 nt, Human
uuggggccgggauaagguuguu

SEQ ID NO: 327946 - RNA, 22 nt, Human
aggcugcagaggugcugccaga

SEQ ID NO: 327947 - RNA, 22 nt, Human
agccccaggcccggacgccucu

SEQ ID NO: 327948 - RNA, 18 nt, Human
gaaggcauucaguggcuu

SEQ ID NO: 327949 - RNA, 22 nt, Human
ccagcaggagacuagcaacaua

SEQ ID NO: 327950 - RNA, 22 nt, Human
agcuuugggcagaagaggauuc

SEQ ID NO: 327951 - RNA, 22 nt, Human
gccagguaugaauuacgcacga

SEQ ID NO: 327952 - RNA, 22 nt, Human
ugguccugagcaccagccugac

SEQ ID NO: 327953 - RNA, 22 nt, Human
uuaccacagugccugucuaaug

SEQ ID NO: 327954 - RNA, 22 nt, Human
gugcgccagcucaaggggaggc

SEQ ID NO: 327955 - RNA, 22 nt, Human
gucuguggaguugcuugcugga

SEQ ID NO: 327956 - RNA, 22 nt, Human
ugaggaaugugacaaaaccaag

SEQ ID NO: 327957 - RNA, 20 nt, Human
cgggacacucaagcucuggg

SEQ ID NO: 327958 - RNA, 22 nt, Human
acagcugggaacucacacagca

SEQ ID NO: 327959 - RNA, 22 nt, Human
ccaggcuccccaggaggcccuu

SEQ ID NO: 327960 - RNA, 22 nt, Human
cuugucugcuauaaaaauccag

SEQ ID NO: 327961 - RNA, 22 nt, Human
uccuggcucaggccccuggugc

SEQ ID NO: 327962 - RNA, 22 nt, Human
gcggcuccgaagccaggccgcg

SEQ ID NO: 327963 - RNA, 22 nt, Human
cauggccaaagaauuauauuuu

SEQ ID NO: 327964 - RNA, 22 nt, Human
cagcuuguuuacaugcuuauuc

SEQ ID NO: 327965 - RNA, 23 nt, Human
gcauccagagcucaguccccuuu

SEQ ID NO: 327966 - RNA, 22 nt, Human
aggcagccuauggggagcucag

SEQ ID NO: 327967 - RNA, 22 nt, Human
uggucaggcugcucugcggcgu

SEQ ID NO: 327968 - RNA, 22 nt, Human
aggggagguggcagaaaugugc

SEQ ID NO: 327969 - RNA, 22 nt, Human
agcaugucuaacucuucagggu

SEQ ID NO: 327970 - RNA, 22 nt, Human
ugaaucaaugaauugcacuuca

SEQ ID NO: 327971 - RNA, 22 nt, Human
cccuggcucaggcagcuuuguu

SEQ ID NO: 327972 - RNA, 22 nt, Human
ugucuuggccacuaggagugcc

SEQ ID NO: 327973 - RNA, 22 nt, Human
ccagagaggccuuggcaagaca

SEQ ID NO: 327974 - RNA, 22 nt, Human
gucaccuugaacaggcuacuca

SEQ ID NO: 327975 - RNA, 22 nt, Human
gccaccagccccaugcgcugug

SEQ ID NO: 327976 - RNA, 22 nt, Human
gccggggcuggggagagacaug

SEQ ID NO: 327977 - RNA, 22 nt, Human
gccugaucagguccucggcaua

SEQ ID NO: 327978 - RNA, 22 nt, Human
accccagaggcggaggcugcag

SEQ ID NO: 327979 - RNA, 22 nt, Human
gaugucuucagauggcaagaga

SEQ ID NO: 327980 - RNA, 22 nt, Human
cccucucgcggggcagcggagg

SEQ ID NO: 327981 - RNA, 22 nt, Human
uaaggacagcagcuacuuuucc

SEQ ID NO: 327982 - RNA, 22 nt, Human
agcuggguguagggcuggacaa

SEQ ID NO: 327983 - RNA, 22 nt, Human
uagcaucuguacugacauaauc

SEQ ID NO: 327984 - RNA, 22 nt, Human
gaugucuggcuaccacucgcac

SEQ ID NO: 327985 - RNA, 22 nt, Human
ccagcagcucccucaggguccg

SEQ ID NO: 327986 - RNA, 22 nt, Human
gagggcucaacuacuacuaggc

SEQ ID NO: 327987 - RNA, 22 nt, Human
cuggagaacagagcuguuuaga

SEQ ID NO: 327988 - RNA, 22 nt, Human
uuggaaauguagaaaagcagau

SEQ ID NO: 327989 - RNA, 22 nt, Human
ccagcagccaccuucucgaaau

SEQ ID NO: 327990 - RNA, 20 nt, Human
ccacccuguccggggcggag

SEQ ID NO: 327991 - RNA, 22 nt, Human
gcagccuccgcacugcgagucc

SEQ ID NO: 327992 - RNA, 22 nt, Human
gcaguggccacauggaggagga

SEQ ID NO: 327993 - RNA, 22 nt, Human
uggcaaggccacaggugcaguu

SEQ ID NO: 327994 - RNA, 22 nt, Human
cauggggcccaugugcuccaag

SEQ ID NO: 327995 - RNA, 22 nt, Human
gcccagcccagaaagguucgga

SEQ ID NO: 327996 - RNA, 22 nt, Human
accuggaggcagagguugcagu

SEQ ID NO: 327997 - RNA, 22 nt, Human
ggucccagucccuuuccaccgu

SEQ ID NO: 327998 - RNA, 22 nt, Human
acagcuggaggucugugagcac

SEQ ID NO: 327999 - RNA, 22 nt, Human
uuugugcaagagggccaccuua

SEQ ID NO: 328000 - RNA, 22 nt, Human
cuggcuccauccuugagcucug

SEQ ID NO: 328001 - RNA, 22 nt, Human
cugggaagggacgccagugccu

SEQ ID NO: 328002 - RNA, 22 nt, Human
guuguuuuugaacggugguggc

SEQ ID NO: 328003 - RNA, 22 nt, Human
gcacccagggcaggaagugagg

SEQ ID NO: 328004 - RNA, 20 nt, Human
agcuuugguuaagccagugg

SEQ ID NO: 328005 - RNA, 21 nt, Human
ccacaauucuaguuacauaug

SEQ ID NO: 328006 - RNA, 22 nt, Human
ucagguccaagauggccaucca

SEQ ID NO: 328007 - RNA, 22 nt, Human
ccagcagaagcucccgcugggu

SEQ ID NO: 328008 - RNA, 22 nt, Human
aucauccauggcugaucauaaa

SEQ ID NO: 328009 - RNA, 22 nt, Human
uuuagcaaggagaaauaauccu

SEQ ID NO: 328010 - RNA, 22 nt, Human
auggguggccccgugugcaguc

SEQ ID NO: 328011 - RNA, 22 nt, Human
agaggcucuuugagcugggaga

SEQ ID NO: 328012 - RNA, 22 nt, Human
ggcugcugcccaccccugcaug

SEQ ID NO: 328013 - RNA, 22 nt, Human
cagcgguggcaaggugacugug

SEQ ID NO: 328014 - RNA, 22 nt, Human
gugggaguggagcucagcaugu

SEQ ID NO: 328015 - RNA, 22 nt, Human
cccacaggcaggugcaugggcu

SEQ ID NO: 328016 - RNA, 22 nt, Human
uauaagaaacaaggcaaauuuu

SEQ ID NO: 328017 - RNA, 22 nt, Human
gccauguuuugguaaauaccau

SEQ ID NO: 328018 - RNA, 22 nt, Human
cucugggguggaggaggcugac

SEQ ID NO: 328019 - RNA, 22 nt, Human
gcuucuggugaggccucaggaa

SEQ ID NO: 328020 - RNA, 22 nt, Human
ugcccugcagacccugcagugu

SEQ ID NO: 328021 - RNA, 18 nt, Human
auuugcaggcaugcaggc

SEQ ID NO: 328022 - RNA, 20 nt, Human
gggugugugcagggccuggu

SEQ ID NO: 328023 - RNA, 22 nt, Human
agucaacagaguggccgcagcg

SEQ ID NO: 328024 - RNA, 22 nt, Human
ggcugcccucggggucgcaggc

SEQ ID NO: 328025 - RNA, 22 nt, Human
gccaggaugacuauacaacagc

SEQ ID NO: 328026 - RNA, 22 nt, Human
augggagugacagggccacugg

SEQ ID NO: 328027 - RNA, 22 nt, Human
gucuccugaggcauccauugaa

SEQ ID NO: 328028 - RNA, 22 nt, Human
ugcuaauaaacuccaggcugag

SEQ ID NO: 328029 - RNA, 22 nt, Human
ucugagcuggagcccaucaccu

SEQ ID NO: 328030 - RNA, 22 nt, Human
uuuggaaaugagaagccaccuu

SEQ ID NO: 328031 - RNA, 22 nt, Human
agagaccuuuugccuucuaguu

SEQ ID NO: 328032 - RNA, 22 nt, Human
uguucuggugaggccauggggu

SEQ ID NO: 328033 - RNA, 22 nt, Human
ucccugagcucacauggcagga

SEQ ID NO: 328034 - RNA, 22 nt, Human
gcugccgacccacagggguuaa

SEQ ID NO: 328035 - RNA, 23 nt, Human
uuguucuuggaucuuccugaagc

SEQ ID NO: 328036 - RNA, 22 nt, Human
acaguuaguugaggaguguuug

SEQ ID NO: 328037 - RNA, 22 nt, Human
agggccacgugcaccgcggucu

SEQ ID NO: 328038 - RNA, 22 nt, Human
ugcauuaagaauuucugaggau

SEQ ID NO: 328039 - RNA, 22 nt, Human
gcccagcugcacccuggugggu

SEQ ID NO: 328040 - RNA, 22 nt, Human
uggcccagaucucugaccuuga

SEQ ID NO: 328041 - RNA, 22 nt, Human
gccagcuggcugcaggucccag

SEQ ID NO: 328042 - RNA, 22 nt, Human
ucuuccagauacuuccugacuu

SEQ ID NO: 328043 - RNA, 22 nt, Human
cccugacccuaucagagggcca

SEQ ID NO: 328044 - RNA, 18 nt, Human
gggguagaguguccuauu

SEQ ID NO: 328045 - RNA, 22 nt, Human
cugcaucaguggauaugauggu

SEQ ID NO: 328046 - RNA, 22 nt, Human
ugggccaggauuucaagacccu

SEQ ID NO: 328047 - RNA, 22 nt, Human
gagcugggaagauagcuugagc

SEQ ID NO: 328048 - RNA, 22 nt, Human
cacgugcaggucuuaggagaca

SEQ ID NO: 328049 - RNA, 22 nt, Human
uccaguggugguuugaagggca

SEQ ID NO: 328050 - RNA, 22 nt, Human
cuggccuggcaggggaccucua

SEQ ID NO: 328051 - RNA, 22 nt, Human
uaaaguuuauuggcaccaccau

SEQ ID NO: 328052 - RNA, 22 nt, Human
gccagaggggcucgaaggcgcg

SEQ ID NO: 328053 - RNA, 22 nt, Human
cuggagauaagcagucccaggc

SEQ ID NO: 328054 - RNA, 22 nt, Human
uguuccucugaacuucuuccaa

SEQ ID NO: 328055 - RNA, 22 nt, Human
guggcgcagaggguggcagaga

SEQ ID NO: 328056 - RNA, 22 nt, Human
gcucguugaaccuguccccgag

SEQ ID NO: 328057 - RNA, 22 nt, Human
cagggccucugugggcucucuc

SEQ ID NO: 328058 - RNA, 22 nt, Human
ggcgcggugacucagccucgcu

SEQ ID NO: 328059 - RNA, 22 nt, Human
gcagcagugugggcugaaccua

SEQ ID NO: 328060 - RNA, 22 nt, Human
uuccugcaggccauagagccug

SEQ ID NO: 328061 - RNA, 22 nt, Human
gcaguugcaggauuuguguugu

SEQ ID NO: 328062 - RNA, 22 nt, Human
ggagcugcucagagccaguccc

SEQ ID NO: 328063 - RNA, 22 nt, Human
gugauuuucuccuccuagaagu

SEQ ID NO: 328064 - RNA, 22 nt, Human
gauuuucauuauagcuaguuuc

SEQ ID NO: 328065 - RNA, 22 nt, Human
cccagagcaugugcugccuuug

SEQ ID NO: 328066 - RNA, 22 nt, Human
aagugucuucugauggggugug

SEQ ID NO: 328067 - RNA, 22 nt, Human
ucagaagcauccauuucaccac

SEQ ID NO: 328068 - RNA, 22 nt, Human
ucugggccggagccgacggcag

SEQ ID NO: 328069 - RNA, 22 nt, Human
acgugcaggaucugguuggcga

SEQ ID NO: 328070 - RNA, 22 nt, Human
gggaggugauuaggaccaugua

SEQ ID NO: 328071 - RNA, 22 nt, Human
gaggagcuucagaggaaucuua

SEQ ID NO: 328072 - RNA, 22 nt, Human
cugagguagaggaaauguagcu

SEQ ID NO: 328073 - RNA, 19 nt, Human
aguguuuauguagugccua

SEQ ID NO: 328074 - RNA, 22 nt, Human
uagaucuuucacuacuguguag

SEQ ID NO: 328075 - RNA, 22 nt, Human
cuaguagcccauuuuggauacc

SEQ ID NO: 328076 - RNA, 22 nt, Human
gcugauggcuugcuggcugaca

SEQ ID NO: 328077 - RNA, 22 nt, Human
ccuggggaccugccucagcccu

SEQ ID NO: 328078 - RNA, 22 nt, Human
agugccucugcagguccgaguu

SEQ ID NO: 328079 - RNA, 22 nt, Human
acaggcgcacaugagggccgug

SEQ ID NO: 328080 - RNA, 22 nt, Human
uggcacaguuaaaguuguagaa

SEQ ID NO: 328081 - RNA, 22 nt, Human
ucaccggcagacguggccugau

SEQ ID NO: 328082 - RNA, 22 nt, Human
acagccaggaauucuggagaag

SEQ ID NO: 328083 - RNA, 22 nt, Human
ucuugccgcgcaggcgcaguuc

SEQ ID NO: 328084 - RNA, 22 nt, Human
ggucuggccuccgggcaggugg

SEQ ID NO: 328085 - RNA, 23 nt, Human
agguggagcugugcagccggggc

SEQ ID NO: 328086 - RNA, 22 nt, Human
cugcugccuuccaaaggccagg

SEQ ID NO: 328087 - RNA, 20 nt, Human
ugugguuuuugccaguugaa

SEQ ID NO: 328088 - RNA, 20 nt, Human
uccaguuuuggagacauucu

SEQ ID NO: 328089 - RNA, 22 nt, Human
gcugccaccguggagaugagug

SEQ ID NO: 328090 - RNA, 22 nt, Human
gagcagcuguucugacuugucu

SEQ ID NO: 328091 - RNA, 22 nt, Human
uguuugcucugacuaucuugcg

SEQ ID NO: 328092 - RNA, 21 nt, Human
uuccuccucuggagaagaaga

SEQ ID NO: 328093 - RNA, 19 nt, Human
gggugaggaagagcguugc

SEQ ID NO: 328094 - RNA, 22 nt, Human
gcagcagcaggcgcucggccgu

SEQ ID NO: 328095 - RNA, 23 nt, Human
aaguaccuacacauuauuucaga

SEQ ID NO: 328096 - RNA, 22 nt, Human
auauaugaagaagucuugauua

SEQ ID NO: 328097 - RNA, 19 nt, Human
ucaaagucugagucacuuu

SEQ ID NO: 328098 - RNA, 22 nt, Human
gaggggcugggguugacuccaa

SEQ ID NO: 328099 - RNA, 19 nt, Human
guuggcacugaaaauggcu

SEQ ID NO: 328100 - RNA, 20 nt, Human
guccugggagccacagcaca

SEQ ID NO: 328101 - RNA, 22 nt, Human
aagcccgguugggaacguggug

SEQ ID NO: 328102 - RNA, 22 nt, Human
gggaagugagcuggaaucaagg

SEQ ID NO: 328103 - RNA, 22 nt, Human
uuggauggagguucaagcacua

SEQ ID NO: 328104 - RNA, 22 nt, Human
uugcuggaagguggcuggaauc

SEQ ID NO: 328105 - RNA, 18 nt, Human
uccaggcuccaggcuaac

SEQ ID NO: 328106 - RNA, 22 nt, Human
aguggcuguuccaggugaggac

SEQ ID NO: 328107 - RNA, 22 nt, Human
augaggccacaguuauagauuu

SEQ ID NO: 328108 - RNA, 23 nt, Human
augcuagcugugccaacaccaua

SEQ ID NO: 328109 - RNA, 22 nt, Human
cagcugccuaugaccuagccuc

SEQ ID NO: 328110 - RNA, 22 nt, Human
ccugcgggcugugcugaagccu

SEQ ID NO: 328111 - RNA, 22 nt, Human
agguggagaagagaugggcagu

SEQ ID NO: 328112 - RNA, 22 nt, Human
ugucauggacuggauuucugcu

SEQ ID NO: 328113 - RNA, 22 nt, Human
acauagcuuaaaugagaagaua

SEQ ID NO: 328114 - RNA, 22 nt, Human
uuugacucugggugcuuuuucg

SEQ ID NO: 328115 - RNA, 21 nt, Human
gcuccuggugcugcguggcgc

SEQ ID NO: 328116 - RNA, 22 nt, Human
gcugccuggaauaacggcuggc

SEQ ID NO: 328117 - RNA, 22 nt, Human
uucaccugugacagguagaguu

SEQ ID NO: 328118 - RNA, 22 nt, Human
cugcugucuuuauuucacugcu

SEQ ID NO: 328119 - RNA, 22 nt, Human
guugcagauguggaacucgugc

SEQ ID NO: 328120 - RNA, 22 nt, Human
cuucuggguauuccagauaccu

SEQ ID NO: 328121 - RNA, 22 nt, Human
aggaaagcucccaguagggcuc

SEQ ID NO: 328122 - RNA, 22 nt, Human
guuaaugcaaagcagagggcaa

SEQ ID NO: 328123 - RNA, 22 nt, Human
cagcccaggacugcagguguuu

SEQ ID NO: 328124 - RNA, 22 nt, Human
cacccucaagcaguggcacgug

SEQ ID NO: 328125 - RNA, 22 nt, Human
gcggccugcgcugcucccgacg

SEQ ID NO: 328126 - RNA, 22 nt, Human
cuugccagggacucagucaggg

SEQ ID NO: 328127 - RNA, 22 nt, Human
uggcugggagcuggaacugggc

SEQ ID NO: 328128 - RNA, 22 nt, Human
gcccagcaccucucucaggguu

SEQ ID NO: 328129 - RNA, 22 nt, Human
agucauguguucaucuuucauu

SEQ ID NO: 328130 - RNA, 21 nt, Human
ugcuggguuugcccaucaggc

SEQ ID NO: 328131 - RNA, 22 nt, Human
gccuucugauugcuggacugac

SEQ ID NO: 328132 - RNA, 21 nt, Human
ucgaccugcugggcucgggcu

SEQ ID NO: 328133 - RNA, 21 nt, Human
ugugacagaggcggugccuac

SEQ ID NO: 328134 - RNA, 22 nt, Human
cucugcguggcugggcccaggg

SEQ ID NO: 328135 - RNA, 22 nt, Human
ggcggcgcguagccggagacuu

SEQ ID NO: 328136 - RNA, 22 nt, Human
agcugcaccggcuggaccacug

SEQ ID NO: 328137 - RNA, 17 nt, Human
ucugcagggggccgugu

SEQ ID NO: 328138 - RNA, 22 nt, Human
gccccagcagcaaugcgguuga

SEQ ID NO: 328139 - RNA, 22 nt, Human
uggugcaggccaagcugcgagc

SEQ ID NO: 328140 - RNA, 22 nt, Human
uuucccaggcuggaaugcagug

SEQ ID NO: 328141 - RNA, 22 nt, Human
agccugugagggaugcugcagu

SEQ ID NO: 328142 - RNA, 22 nt, Human
uguggagcccccaggagugggg

SEQ ID NO: 328143 - RNA, 22 nt, Human
cugcucaauuccggcacgcugg

SEQ ID NO: 328144 - RNA, 22 nt, Human
ucccagccugacagugcaucaa

SEQ ID NO: 328145 - RNA, 18 nt, Human
cuuuagcugucaucuuug

SEQ ID NO: 328146 - RNA, 22 nt, Human
aucucaguucaggcuccacugu

SEQ ID NO: 328147 - RNA, 22 nt, Human
ucccaaguagaugggaauacag

SEQ ID NO: 328148 - RNA, 22 nt, Human
cagcuuuugcagacuucuugcc

SEQ ID NO: 328149 - RNA, 22 nt, Human
gggggcuggacuuucccacaca

SEQ ID NO: 328150 - RNA, 22 nt, Human
gcagcccucuuggucacuaggc

SEQ ID NO: 328151 - RNA, 22 nt, Human
ugccagagaggagaaagcauuu

SEQ ID NO: 328152 - RNA, 22 nt, Human
gcagaagucagaccaucugaau

SEQ ID NO: 328153 - RNA, 22 nt, Human
ugcuugcugaaaggcauuuaga

SEQ ID NO: 328154 - RNA, 22 nt, Human
agaagcagaaggaagcagggcc

SEQ ID NO: 328155 - RNA, 22 nt, Human
cggagcagagccacucgggccg

SEQ ID NO: 328156 - RNA, 22 nt, Human
cuggucaauaaucauguaguac

SEQ ID NO: 328157 - RNA, 22 nt, Human
uccaggagggggagccgugccg

SEQ ID NO: 328158 - RNA, 22 nt, Human
uggagcugguucuggggaagcu

SEQ ID NO: 328159 - RNA, 22 nt, Human
uccucuucaaaauagcucugaa

SEQ ID NO: 328160 - RNA, 22 nt, Human
gagcagcaggccagguugcagg

SEQ ID NO: 328161 - RNA, 22 nt, Human
uuuuucaagacaaccugcaugu

SEQ ID NO: 328162 - RNA, 22 nt, Human
gggcuucuugagcugccggccc

SEQ ID NO: 328163 - RNA, 23 nt, Human
uggugggcccugcuugcucacug

SEQ ID NO: 328164 - RNA, 22 nt, Human
ucccugccuccuggcagugcca

SEQ ID NO: 328165 - RNA, 22 nt, Human
augcaucaccgaguugcccacc

SEQ ID NO: 328166 - RNA, 22 nt, Human
ucuccucuccuuucauguuguu

SEQ ID NO: 328167 - RNA, 22 nt, Human
ugcuugucucucugugcccacu

SEQ ID NO: 328168 - RNA, 22 nt, Human
gggcugcacuagggcaagguga

SEQ ID NO: 328169 - RNA, 22 nt, Human
ggccaaggcucuugagggcuga

SEQ ID NO: 328170 - RNA, 22 nt, Human
gcugucccgaaccccugguaau

SEQ ID NO: 328171 - RNA, 22 nt, Human
gcuuucuuuucaagaauguauu

SEQ ID NO: 328172 - RNA, 22 nt, Human
gggcucaucaagccucuccgcc

SEQ ID NO: 328173 - RNA, 22 nt, Human
aauuccagcugauugacuuucc

SEQ ID NO: 328174 - RNA, 22 nt, Human
ggcgagcaugagucacucuggg

SEQ ID NO: 328175 - RNA, 20 nt, Human
cuuguuaaauaugcagguag

SEQ ID NO: 328176 - RNA, 22 nt, Human
guggcccaggcuuggcgcuggc

SEQ ID NO: 328177 - RNA, 22 nt, Human
ugaccuucgagcugcggguugu

SEQ ID NO: 328178 - RNA, 18 nt, Human
cugccagugugcucuccg

SEQ ID NO: 328179 - RNA, 21 nt, Human
uccagcacagaugaccucccc

SEQ ID NO: 328180 - RNA, 20 nt, Human
ucaggguuucccauucuugg

SEQ ID NO: 328181 - RNA, 22 nt, Human
guugcagcaucacugcugagug

SEQ ID NO: 328182 - RNA, 22 nt, Human
cagggcucgcucgcucgcucgc

SEQ ID NO: 328183 - RNA, 18 nt, Human
ggaaggugcuggagugca

SEQ ID NO: 328184 - RNA, 22 nt, Human
aaucacagccacaaccuggggg

SEQ ID NO: 328185 - RNA, 22 nt, Human
guggacagacauaauccuaauu

SEQ ID NO: 328186 - RNA, 22 nt, Human
uccaggagcucauccacgucaa

SEQ ID NO: 328187 - RNA, 22 nt, Human
guggucaucuaacuaaauuuuc

SEQ ID NO: 328188 - RNA, 22 nt, Human
cacugcccuggggguugccauc

SEQ ID NO: 328189 - RNA, 22 nt, Human
gcaguuaccuauuuuguagaaa

SEQ ID NO: 328190 - RNA, 22 nt, Human
cuaggugauccacugcucucuu

SEQ ID NO: 328191 - RNA, 22 nt, Human
ccgcgagguggagguugcagug

SEQ ID NO: 328192 - RNA, 22 nt, Human
ucagccaggccaggcauucaca

SEQ ID NO: 328193 - RNA, 22 nt, Human
ucaugcagauaagaauaaguaa

SEQ ID NO: 328194 - RNA, 22 nt, Human
caggccgggcacugcgcuaggu

SEQ ID NO: 328195 - RNA, 22 nt, Human
guuucuccucugugucuuguuu

SEQ ID NO: 328196 - RNA, 22 nt, Human
uccugccaccggggguggcgau

SEQ ID NO: 328197 - RNA, 22 nt, Human
uuucaugauuaacuuagugaau

SEQ ID NO: 328198 - RNA, 22 nt, Human
acaccuuuuauucgccaggcac

SEQ ID NO: 328199 - RNA, 22 nt, Human
gccuggcuucccuuggagcauu

SEQ ID NO: 328200 - RNA, 22 nt, Human
guggauggagcuggaagccauu

SEQ ID NO: 328201 - RNA, 22 nt, Human
ccgcuguccuggagcugcugcu

SEQ ID NO: 328202 - RNA, 22 nt, Human
uuggcagugacugcgggccccg

SEQ ID NO: 328203 - RNA, 22 nt, Human
guucuucagauuccauuucagu

SEQ ID NO: 328204 - RNA, 19 nt, Human
ugguggaggugcaccugac

SEQ ID NO: 328205 - RNA, 22 nt, Human
cagagguagccgagugcaaucg

SEQ ID NO: 328206 - RNA, 22 nt, Human
gcugcuccgcagagugugugug

SEQ ID NO: 328207 - RNA, 22 nt, Human
uggaaauacaagaaguauguca

SEQ ID NO: 328208 - RNA, 22 nt, Human
cugggcccacgagggcucuggg

SEQ ID NO: 328209 - RNA, 22 nt, Human
augcugugccuggaaagcggcu

SEQ ID NO: 328210 - RNA, 22 nt, Human
cuggagcucuccagagccccgu

SEQ ID NO: 328211 - RNA, 22 nt, Human
uugagacugagucucgcccugu

SEQ ID NO: 328212 - RNA, 22 nt, Human
guuuauuggguauuguggagcc

SEQ ID NO: 328213 - RNA, 22 nt, Human
uuuaggcucaaaagaguuggug

SEQ ID NO: 328214 - RNA, 22 nt, Human
ugcagcaccuauggacacuugu

SEQ ID NO: 328215 - RNA, 22 nt, Human
gacaaauguaccccuagagucu

SEQ ID NO: 328216 - RNA, 22 nt, Human
aagggggaaauccuagcgccgc

SEQ ID NO: 328217 - RNA, 21 nt, Human
uggcaggcagcuggaagcuug

SEQ ID NO: 328218 - RNA, 19 nt, Human
gagcagcuuccuaucuggu

SEQ ID NO: 328219 - RNA, 22 nt, Human
acccagcucuuugauggucuug

SEQ ID NO: 328220 - RNA, 22 nt, Human
gcucagguagaugggguugucc

SEQ ID NO: 328221 - RNA, 22 nt, Human
caacagcuggaggcuuggcccg

SEQ ID NO: 328222 - RNA, 22 nt, Human
ggugcggagacuccaugaggcc

SEQ ID NO: 328223 - RNA, 22 nt, Human
agcagcaggagccgugggguga

SEQ ID NO: 328224 - RNA, 22 nt, Human
uagcauuucacugaucuucacu

SEQ ID NO: 328225 - RNA, 22 nt, Human
ggcagguguuuuuauauuaaag

SEQ ID NO: 328226 - RNA, 22 nt, Human
ugguacauggguagguaucucu

SEQ ID NO: 328227 - RNA, 22 nt, Human
acucgcggcggacggcggccag

SEQ ID NO: 328228 - RNA, 17 nt, Human
gccuggcccagccuggc

SEQ ID NO: 328229 - RNA, 22 nt, Human
gaguuucuucauggugcagagg

SEQ ID NO: 328230 - RNA, 19 nt, Human
agcagccaucgaccaugga

SEQ ID NO: 328231 - RNA, 19 nt, Human
ggggcccggggucugcgag

SEQ ID NO: 328232 - RNA, 22 nt, Human
ugggaugggaucucgcuguguc

SEQ ID NO: 328233 - RNA, 22 nt, Human
gcagcugccgugagcucacgcc

SEQ ID NO: 328234 - RNA, 22 nt, Human
uccuggccaaguagauguggcg

SEQ ID NO: 328235 - RNA, 20 nt, Human
gcagcagacagacaggggac

SEQ ID NO: 328236 - RNA, 22 nt, Human
gugacagaaacagggcuagaau

SEQ ID NO: 328237 - RNA, 22 nt, Human
uuugcaaaguccauugaaguua

SEQ ID NO: 328238 - RNA, 22 nt, Human
cugcugagguggagauugcagu

SEQ ID NO: 328239 - RNA, 22 nt, Human
gucagcaggguccccuugagug

SEQ ID NO: 328240 - RNA, 22 nt, Human
gguggcaccuuacccugcgcag

SEQ ID NO: 328241 - RNA, 22 nt, Human
uccuuagccagggcagcucaaa

SEQ ID NO: 328242 - RNA, 22 nt, Human
uucaaacaguguagaauauaug

SEQ ID NO: 328243 - RNA, 22 nt, Human
agccaccaccacugaaagguua

SEQ ID NO: 328244 - RNA, 22 nt, Human
cguggcucugggcuccuuugcc

SEQ ID NO: 328245 - RNA, 22 nt, Human
cuggagccggcgagccccagcc

SEQ ID NO: 328246 - RNA, 21 nt, Human
uggcccuggccacggcugcca

SEQ ID NO: 328247 - RNA, 22 nt, Human
uuuuuaagagucuggaaauagu

SEQ ID NO: 328248 - RNA, 22 nt, Human
cugaugcucuggauguagucaa

SEQ ID NO: 328249 - RNA, 22 nt, Human
cugggguuggccagggcccuag

SEQ ID NO: 328250 - RNA, 22 nt, Human
gccgugcgugcgcaggugcugu

SEQ ID NO: 328251 - RNA, 22 nt, Human
acccaggucucucgacuucugg

SEQ ID NO: 328252 - RNA, 22 nt, Human
uucuuuuaauuucugucugcag

SEQ ID NO: 328253 - RNA, 22 nt, Human
auggugguagaagcacuaugug

SEQ ID NO: 328254 - RNA, 22 nt, Human
uuuguaguuguggaugcugaag

SEQ ID NO: 328255 - RNA, 22 nt, Human
ugagcucaagcaauucacccgc

SEQ ID NO: 328256 - RNA, 22 nt, Human
uggcucaggccuacgacgccuu

SEQ ID NO: 328257 - RNA, 19 nt, Human
ugcucucuggugcuucaug

SEQ ID NO: 328258 - RNA, 22 nt, Human
uugaacaguuuugucagguuca

SEQ ID NO: 328259 - RNA, 22 nt, Human
aggugccugucgucucugguua

SEQ ID NO: 328260 - RNA, 22 nt, Human
gcagugacagacaacuguuuga

SEQ ID NO: 328261 - RNA, 22 nt, Human
cccgggaggaggaaguugcagu

SEQ ID NO: 328262 - RNA, 22 nt, Human
ggucuggagcuaaucuuguugg

SEQ ID NO: 328263 - RNA, 22 nt, Human
gugcagcugguggagucugggg

SEQ ID NO: 328264 - RNA, 22 nt, Human
gggccuuggcgaaguguggugg

SEQ ID NO: 328265 - RNA, 22 nt, Human
auugaagcauggagaugaggca

SEQ ID NO: 328266 - RNA, 20 nt, Human
acacugugcuaaggauuuuc

SEQ ID NO: 328267 - RNA, 22 nt, Human
aggugcugccccgagaaggaug

SEQ ID NO: 328268 - RNA, 22 nt, Human
gugcugagugcagagugcagag

SEQ ID NO: 328269 - RNA, 22 nt, Human
gcugcuuugucuguaaaaugga

SEQ ID NO: 328270 - RNA, 22 nt, Human
acccggaggcgggggaugcagu

SEQ ID NO: 328271 - RNA, 22 nt, Human
guggaaggaauuaacagacuag

SEQ ID NO: 328272 - RNA, 21 nt, Human
ucuccucccggggagaggccg

SEQ ID NO: 328273 - RNA, 22 nt, Human
agccuugcaugauuucauucau

SEQ ID NO: 328274 - RNA, 22 nt, Human
ucuucaugucucugcuugaguc

SEQ ID NO: 328275 - RNA, 22 nt, Human
cuggucagggcucuuugggagc

SEQ ID NO: 328276 - RNA, 22 nt, Human
uauggauauaaucagacuggaa

SEQ ID NO: 328277 - RNA, 22 nt, Human
ugcccuggcuccucccacgcug

SEQ ID NO: 328278 - RNA, 19 nt, Human
gaugcucauucagguggaa

SEQ ID NO: 328279 - RNA, 22 nt, Human
uuugcuugauuaggauauggaa

SEQ ID NO: 328280 - RNA, 22 nt, Human
gccuggcuaagcagaaggaccc

SEQ ID NO: 328281 - RNA, 22 nt, Human
accuggaccugccaccuaugag

SEQ ID NO: 328282 - RNA, 22 nt, Human
agcuccugaaaauccagacugg

SEQ ID NO: 328283 - RNA, 22 nt, Human
aagguggcggcugccagguccu

SEQ ID NO: 328284 - RNA, 22 nt, Human
cugcagaugguauuguucuggu

SEQ ID NO: 328285 - RNA, 22 nt, Human
ugggugugagcccgggagccgc

SEQ ID NO: 328286 - RNA, 22 nt, Human
caggacccaucagccaggcacu

SEQ ID NO: 328287 - RNA, 22 nt, Human
uugggcccugcucugaguugcu

SEQ ID NO: 328288 - RNA, 22 nt, Human
cagugccagcugcuuggccuac

SEQ ID NO: 328289 - RNA, 19 nt, Human
gggccucacccacaccucc

SEQ ID NO: 328290 - RNA, 19 nt, Human
agcucaggcccaucguccc

SEQ ID NO: 328291 - RNA, 22 nt, Human
cauuuacauuuaagguuaauau

SEQ ID NO: 328292 - RNA, 22 nt, Human
ugggaaggggagcuggaaagga

SEQ ID NO: 328293 - RNA, 22 nt, Human
aaacccugagacuuggggccag

SEQ ID NO: 328294 - RNA, 22 nt, Human
aggccgugugagcaugugugag

SEQ ID NO: 328295 - RNA, 21 nt, Human
ugacaguguggcauggaaggu

SEQ ID NO: 328296 - RNA, 22 nt, Human
uggcuggcuguccagcugggca

SEQ ID NO: 328297 - RNA, 22 nt, Human
gcuagaaacuguuuaaucucuu

SEQ ID NO: 328298 - RNA, 22 nt, Human
gguggcaagggcagccaguaac

SEQ ID NO: 328299 - RNA, 22 nt, Human
cuucaugcugauauccucgaug

SEQ ID NO: 328300 - RNA, 22 nt, Human
cuccagaggcgacuugcaucac

SEQ ID NO: 328301 - RNA, 22 nt, Human
ggagagagaccuccaugcccag

SEQ ID NO: 328302 - RNA, 22 nt, Human
cuuuaguucuagaaagugaaac

SEQ ID NO: 328303 - RNA, 22 nt, Human
gccccuucguggaagugcauuc

SEQ ID NO: 328304 - RNA, 22 nt, Human
uucuucauucccuuacuuccga

SEQ ID NO: 328305 - RNA, 22 nt, Human
ggcacugggugagggucacugg

SEQ ID NO: 328306 - RNA, 22 nt, Human
uugcaggucuggggguccuggu

SEQ ID NO: 328307 - RNA, 22 nt, Human
ccuggccuccuggccuucucau

SEQ ID NO: 328308 - RNA, 22 nt, Human
agaguggagagaaacaacucug

SEQ ID NO: 328309 - RNA, 22 nt, Human
cuggagcuggcccaggcuggcc

SEQ ID NO: 328310 - RNA, 21 nt, Human
agcgucaauaucgucaacagg

SEQ ID NO: 328311 - RNA, 22 nt, Human
uugcugccagcgcccugcaggg

SEQ ID NO: 328312 - RNA, 22 nt, Human
gguagccaauuuaaacauuucc

SEQ ID NO: 328313 - RNA, 22 nt, Human
agcaccagcucaaggugcaccu

SEQ ID NO: 328314 - RNA, 22 nt, Human
aggacagcagugcuggcacuug

SEQ ID NO: 328315 - RNA, 22 nt, Human
accaggcccuccagcugcgugg

SEQ ID NO: 328316 - RNA, 22 nt, Human
ugcagggcagcuagggagcuuu

SEQ ID NO: 328317 - RNA, 22 nt, Human
cuuuauguuggggugucuuagu

SEQ ID NO: 328318 - RNA, 20 nt, Human
ucagugggaaagugagagug

SEQ ID NO: 328319 - RNA, 22 nt, Human
cauggaaggcaaaagacacaga

SEQ ID NO: 328320 - RNA, 22 nt, Human
uggagcagccuuuucuaagcaa

SEQ ID NO: 328321 - RNA, 22 nt, Human
gcugcagggagcuggaaggcuc

SEQ ID NO: 328322 - RNA, 23 nt, Human
uccugcagauaagcugguugaca

SEQ ID NO: 328323 - RNA, 22 nt, Human
cugccguguuuuucauguuaaa

SEQ ID NO: 328324 - RNA, 22 nt, Human
uccacagggaugccugcggcuu

SEQ ID NO: 328325 - RNA, 22 nt, Human
cagggccugccugguuccugga

SEQ ID NO: 328326 - RNA, 22 nt, Human
uaagccugcaugaaccaugaga

SEQ ID NO: 328327 - RNA, 22 nt, Human
uugauuugauuguaauggcucu

SEQ ID NO: 328328 - RNA, 22 nt, Human
acgccucugcagcugccgggcc

SEQ ID NO: 328329 - RNA, 20 nt, Human
ggcauggcaaauguucuugc

SEQ ID NO: 328330 - RNA, 22 nt, Human
agggugcccaccgcuucugccc

SEQ ID NO: 328331 - RNA, 22 nt, Human
guagcagagggcccagguaacu

SEQ ID NO: 328332 - RNA, 22 nt, Human
gccagcagcucuugggcgggca

SEQ ID NO: 328333 - RNA, 20 nt, Human
ugagccugcuguaggaggcc

SEQ ID NO: 328334 - RNA, 22 nt, Human
gcugaagagagaugcguccagc

SEQ ID NO: 328335 - RNA, 22 nt, Human
uuugucaccaguggcuuuggua

SEQ ID NO: 328336 - RNA, 22 nt, Human
ccuuccaguucuugguuguaau

SEQ ID NO: 328337 - RNA, 22 nt, Human
cucucugggcccaguuggcacc

SEQ ID NO: 328338 - RNA, 23 nt, Human
gggugcugccuguagucaugcug

SEQ ID NO: 328339 - RNA, 22 nt, Human
uccucccugcacucagugaagu

SEQ ID NO: 328340 - RNA, 22 nt, Human
ggagccuggaguuucugauggg

SEQ ID NO: 328341 - RNA, 22 nt, Human
gcaggguaggugacagguaguc

SEQ ID NO: 328342 - RNA, 18 nt, Human
uccauccucugcucuuca

SEQ ID NO: 328343 - RNA, 22 nt, Human
ccgagcuguggucucuuuuacg

SEQ ID NO: 328344 - RNA, 22 nt, Human
ucugggaguuucugugggagcu

SEQ ID NO: 328345 - RNA, 17 nt, Human
gcaggcacugcugccug

SEQ ID NO: 328346 - RNA, 22 nt, Human
ugcuuguauucauaucacagcu

SEQ ID NO: 328347 - RNA, 23 nt, Human
gcacagagcaguuaggggaagau

SEQ ID NO: 328348 - RNA, 22 nt, Human
aggcggcuccgggagugugggc

SEQ ID NO: 328349 - RNA, 22 nt, Human
guuuuguucaugaacauugggu

SEQ ID NO: 328350 - RNA, 22 nt, Human
acucuguuugcagguagcucag

SEQ ID NO: 328351 - RNA, 22 nt, Human
gcuuccuucuaccacaucaugc

SEQ ID NO: 328352 - RNA, 22 nt, Human
guugcauuaaucugcucaggcu

SEQ ID NO: 328353 - RNA, 22 nt, Human
gaauacaaauaauaccaaggug

SEQ ID NO: 328354 - RNA, 22 nt, Human
cugucaccucugcccuuugccc

SEQ ID NO: 328355 - RNA, 22 nt, Human
agcugccgaugcccagcugcau

SEQ ID NO: 328356 - RNA, 18 nt, Human
ucugugggaucagugagg

SEQ ID NO: 328357 - RNA, 22 nt, Human
uggguucgauguauauguagcc

SEQ ID NO: 328358 - RNA, 22 nt, Human
gaggcuguaacuugggcacugg

SEQ ID NO: 328359 - RNA, 22 nt, Human
auuugugggacuauaaugcagg

SEQ ID NO: 328360 - RNA, 18 nt, Human
cccacggugcuguagggc

SEQ ID NO: 328361 - RNA, 22 nt, Human
aggcucagugauguaaaauaua

SEQ ID NO: 328362 - RNA, 23 nt, Human
agccucuuguggauggucagcga

SEQ ID NO: 328363 - RNA, 22 nt, Human
ccagcuggaacggcagcccagc

SEQ ID NO: 328364 - RNA, 22 nt, Human
uguccugugcacuguagcaugu

SEQ ID NO: 328365 - RNA, 22 nt, Human
gaggcucagagggacuuucaag

SEQ ID NO: 328366 - RNA, 22 nt, Human
auagucuuagaaucuugagugu

SEQ ID NO: 328367 - RNA, 19 nt, Human
gcacacccugcaccaccau

SEQ ID NO: 328368 - RNA, 22 nt, Human
ggaaggggagcuggaaagggua

SEQ ID NO: 328369 - RNA, 22 nt, Human
gcccagcgagcagagguggacg

SEQ ID NO: 328370 - RNA, 22 nt, Human
gaugaaggggcuggugcccucu

SEQ ID NO: 328371 - RNA, 22 nt, Human
uuuacuguuuacagcuaaugca

SEQ ID NO: 328372 - RNA, 22 nt, Human
gucauuuuugacuuugaaguga

SEQ ID NO: 328373 - RNA, 22 nt, Human
gguggcugugagcauuauguga

SEQ ID NO: 328374 - RNA, 22 nt, Human
ucaugcaccucuccaugucccc

SEQ ID NO: 328375 - RNA, 22 nt, Human
agggggcuccuuggugugcaga

SEQ ID NO: 328376 - RNA, 23 nt, Human
ugucuccaucucauuacuugggg

SEQ ID NO: 328377 - RNA, 19 nt, Human
cuccacagggauugugauu

SEQ ID NO: 328378 - RNA, 22 nt, Human
cuggagcagcagguggccaggg

SEQ ID NO: 328379 - RNA, 22 nt, Human
ggcucacgcaauuaucccggcc

SEQ ID NO: 328380 - RNA, 22 nt, Human
ggcgcucaguguugccccagag

SEQ ID NO: 328381 - RNA, 22 nt, Human
gagagaagggggauaugagccu

SEQ ID NO: 328382 - RNA, 22 nt, Human
cacgccuggacggcggagggug

SEQ ID NO: 328383 - RNA, 22 nt, Human
gcagcucacagucuccgccauc

SEQ ID NO: 328384 - RNA, 22 nt, Human
ugggcagggagcuggaaccaca

SEQ ID NO: 328385 - RNA, 22 nt, Human
gauggcgguggccaccuccuug

SEQ ID NO: 328386 - RNA, 22 nt, Human
ugacuuuggacuagugauuuaa

SEQ ID NO: 328387 - RNA, 21 nt, Human
uaccaagaaguuugggaaagc

SEQ ID NO: 328388 - RNA, 22 nt, Human
agaauaagccugacgaaaccua

SEQ ID NO: 328389 - RNA, 22 nt, Human
ccuguaccgcgaucugcugcgc

SEQ ID NO: 328390 - RNA, 22 nt, Human
cucagcacauuccuaagggaug

SEQ ID NO: 328391 - RNA, 22 nt, Human
cccagguaaggaugcuccucau

SEQ ID NO: 328392 - RNA, 22 nt, Human
aagcacagggacucaggaccgg

SEQ ID NO: 328393 - RNA, 22 nt, Human
auuuccuguaggggcuugcgaa

SEQ ID NO: 328394 - RNA, 22 nt, Human
ugcugcgggacccacugugggc

SEQ ID NO: 328395 - RNA, 22 nt, Human
gugucccaaagauuagaaauca

SEQ ID NO: 328396 - RNA, 22 nt, Human
aggcugucucaccucaggaggg

SEQ ID NO: 328397 - RNA, 22 nt, Human
gcgacgcaggcacgacguguug

SEQ ID NO: 328398 - RNA, 22 nt, Human
cucgcggcgcccgaagcccuug

SEQ ID NO: 328399 - RNA, 22 nt, Human
gccagcagcgagaguuuaaccu

SEQ ID NO: 328400 - RNA, 22 nt, Human
ggcuagcuccuccgcgcaucca

SEQ ID NO: 328401 - RNA, 22 nt, Human
cgggcuccgggucuuugcaguc

SEQ ID NO: 328402 - RNA, 22 nt, Human
gcuguauuuauaugaaggcaug

SEQ ID NO: 328403 - RNA, 22 nt, Human
acgucuucguuggcagagauuu

SEQ ID NO: 328404 - RNA, 22 nt, Human
cuggccagggugcgaucguggu

SEQ ID NO: 328405 - RNA, 22 nt, Human
gcucagugaagggugccaagua

SEQ ID NO: 328406 - RNA, 22 nt, Human
aaauugcauuuuaaagguagau

SEQ ID NO: 328407 - RNA, 18 nt, Human
agguguguuucuaggagc

SEQ ID NO: 328408 - RNA, 22 nt, Human
guggcagcggcccaggccgucu

SEQ ID NO: 328409 - RNA, 22 nt, Human
ugggcccaucauugcugugggc

SEQ ID NO: 328410 - RNA, 19 nt, Human
cgcacagccugccaggcgc

SEQ ID NO: 328411 - RNA, 22 nt, Human
cagcuggcgacucuccucgaug

SEQ ID NO: 328412 - RNA, 18 nt, Human
aggagcggcugcggcugc

SEQ ID NO: 328413 - RNA, 22 nt, Human
cgaggagugugaaggcuugucg

SEQ ID NO: 328414 - RNA, 22 nt, Human
ugugucuuuggcgaugucugga

SEQ ID NO: 328415 - RNA, 22 nt, Human
uaggugucuggacaacuuugua

SEQ ID NO: 328416 - RNA, 22 nt, Human
ugucaccuugcucauccucgga

SEQ ID NO: 328417 - RNA, 22 nt, Human
gaggugggaugugugugcuacu

SEQ ID NO: 328418 - RNA, 22 nt, Human
guguguggaaugcucauuuauu

SEQ ID NO: 328419 - RNA, 22 nt, Human
cagcuugcacacauauuagacg

SEQ ID NO: 328420 - RNA, 20 nt, Human
uucuccacaggguggaggag

SEQ ID NO: 328421 - RNA, 22 nt, Human
augggaggcagacacuaaguuc

SEQ ID NO: 328422 - RNA, 22 nt, Human
uuauuuuguagcucugaucuuu

SEQ ID NO: 328423 - RNA, 22 nt, Human
caaagaagagauuuacagagcu

SEQ ID NO: 328424 - RNA, 22 nt, Human
uccuggcccuguggccugcagu

SEQ ID NO: 328425 - RNA, 20 nt, Human
cucaccagguguaggcugag

SEQ ID NO: 328426 - RNA, 22 nt, Human
ccugggacuuggucugggguuu

SEQ ID NO: 328427 - RNA, 22 nt, Human
ugcgcaugcguggcucuccggc

SEQ ID NO: 328428 - RNA, 22 nt, Human
ccagguggacggcgaguacagg

SEQ ID NO: 328429 - RNA, 22 nt, Human
uccugaccacuaggaccaggcu

SEQ ID NO: 328430 - RNA, 22 nt, Human
ggcagcagaacuggcccuguau

SEQ ID NO: 328431 - RNA, 22 nt, Human
ucucugagguuguuuccagcac

SEQ ID NO: 328432 - RNA, 22 nt, Human
ugcauguuucuguauguuaaug

SEQ ID NO: 328433 - RNA, 22 nt, Human
agugcguggaccccuggcugcu

SEQ ID NO: 328434 - RNA, 22 nt, Human
ugcagcugccuagggcuggcuu

SEQ ID NO: 328435 - RNA, 22 nt, Human
aagcagccagccaucaugcccg

SEQ ID NO: 328436 - RNA, 22 nt, Human
uacuuucuagcucuccccaguu

SEQ ID NO: 328437 - RNA, 22 nt, Human
gauggaggagauggcagggugc

SEQ ID NO: 328438 - RNA, 22 nt, Human
uuaagguucagaaaucaauacc

SEQ ID NO: 328439 - RNA, 22 nt, Human
aagccugagccaugcuuuacug

SEQ ID NO: 328440 - RNA, 22 nt, Human
gggaagugcccucuucaggaga

SEQ ID NO: 328441 - RNA, 20 nt, Human
cagagccaggguuuuguuuu

SEQ ID NO: 328442 - RNA, 22 nt, Human
cagaccagccauuugccucuuc

SEQ ID NO: 328443 - RNA, 22 nt, Human
cggcagcgguuggagguuguag

SEQ ID NO: 328444 - RNA, 23 nt, Human
augcaacauugccaguaugggca

SEQ ID NO: 328445 - RNA, 18 nt, Human
ucaugcaaacgcuucaua

SEQ ID NO: 328446 - RNA, 22 nt, Human
ccuaggccgcccggugcguggg

SEQ ID NO: 328447 - RNA, 22 nt, Human
cacauuuaaagguugaagcuga

SEQ ID NO: 328448 - RNA, 22 nt, Human
aggacagagggaccagagccca

SEQ ID NO: 328449 - RNA, 22 nt, Human
acagcaucccugaagauaacca

SEQ ID NO: 328450 - RNA, 22 nt, Human
cuccagagagaaaggaggccgc

SEQ ID NO: 328451 - RNA, 20 nt, Human
gcucagggccugggucugga

SEQ ID NO: 328452 - RNA, 22 nt, Human
ccaggagagcucucguucagug

SEQ ID NO: 328453 - RNA, 22 nt, Human
ucucgugcaggccuugcucgga

SEQ ID NO: 328454 - RNA, 22 nt, Human
cugucuggaaugcaguacauag

SEQ ID NO: 328455 - RNA, 22 nt, Human
cacauuggcaaacgggguugca

SEQ ID NO: 328456 - RNA, 20 nt, Human
ccagguggugccuggagagg

SEQ ID NO: 328457 - RNA, 22 nt, Human
uggccugauuuugcuaagagaa

SEQ ID NO: 328458 - RNA, 23 nt, Human
uugcauuaauguggaggcacagg

SEQ ID NO: 328459 - RNA, 22 nt, Human
uggaggcagccgugaaccaccu

SEQ ID NO: 328460 - RNA, 22 nt, Human
accuccuccaaggagccauagg

SEQ ID NO: 328461 - RNA, 22 nt, Human
ucccugggguaucgcugaggca

SEQ ID NO: 328462 - RNA, 22 nt, Human
ccaggcccugccugugguuccu

SEQ ID NO: 328463 - RNA, 22 nt, Human
agcgggucugcaagccuucccu

SEQ ID NO: 328464 - RNA, 22 nt, Human
uggcuccuuccgcagcaugccu

SEQ ID NO: 328465 - RNA, 22 nt, Human
gucuggagccacugcugcugcu

SEQ ID NO: 328466 - RNA, 22 nt, Human
cucagcucauuguggauccggu

SEQ ID NO: 328467 - RNA, 22 nt, Human
ggugggugagcccugggagcug

SEQ ID NO: 328468 - RNA, 22 nt, Human
ccugggcaaaugccagagacaa

SEQ ID NO: 328469 - RNA, 22 nt, Human
gcccucugccacaggacgccag

SEQ ID NO: 328470 - RNA, 22 nt, Human
auuaguagcacacagagaucag

SEQ ID NO: 328471 - RNA, 22 nt, Human
gugcugccuccauauccgucag

SEQ ID NO: 328472 - RNA, 22 nt, Human
ccagcugggucccugcuggggc

SEQ ID NO: 328473 - RNA, 22 nt, Human
uuugcacuuaaauuuacaacac

SEQ ID NO: 328474 - RNA, 22 nt, Human
ccagagacaaggagcuggaguc

SEQ ID NO: 328475 - RNA, 22 nt, Human
ugggcugcuuccucagcugaga

SEQ ID NO: 328476 - RNA, 22 nt, Human
gaaacacucaauuuaguaauuc

SEQ ID NO: 328477 - RNA, 22 nt, Human
gcaggggcugagcaccagcggg

SEQ ID NO: 328478 - RNA, 22 nt, Human
uggcuuccagaacugagcaaca

SEQ ID NO: 328479 - RNA, 22 nt, Human
gcaggaguguggugggacaucc

SEQ ID NO: 328480 - RNA, 22 nt, Human
cugccaucugagccaaaagugc

SEQ ID NO: 328481 - RNA, 22 nt, Human
ccccagcagacucagggcaggu

SEQ ID NO: 328482 - RNA, 22 nt, Human
uccagcagguccgagacaaguu

SEQ ID NO: 328483 - RNA, 22 nt, Human
ugguuacccagucgcuggaguu

SEQ ID NO: 328484 - RNA, 21 nt, Human
uugcuguuuucccaaugcagu

SEQ ID NO: 328485 - RNA, 19 nt, Human
ccugcugaagugaugcagc

SEQ ID NO: 328486 - RNA, 22 nt, Human
caagggcagcagccucaagcgg

SEQ ID NO: 328487 - RNA, 22 nt, Human
uuguacuuaaauaugcaaauag

SEQ ID NO: 328488 - RNA, 22 nt, Human
agguggcagacuaacagaagga

SEQ ID NO: 328489 - RNA, 22 nt, Human
ccacugcuaacuugcugcagcu

SEQ ID NO: 328490 - RNA, 22 nt, Human
acagugcaaauaggacugucuu

SEQ ID NO: 328491 - RNA, 17 nt, Human
uccuggccuggugugug

SEQ ID NO: 328492 - RNA, 23 nt, Human
uggcucuguggaucccucaggag

SEQ ID NO: 328493 - RNA, 21 nt, Human
agccugcaauguagguaccgg

SEQ ID NO: 328494 - RNA, 22 nt, Human
uuugccaguauuuuauugauga

SEQ ID NO: 328495 - RNA, 22 nt, Human
ugccagcaguagcaguaggcca

SEQ ID NO: 328496 - RNA, 21 nt, Human
guuaagccuugaggugauugu

SEQ ID NO: 328497 - RNA, 22 nt, Human
gcacugagcuuuggaggagcag

SEQ ID NO: 328498 - RNA, 22 nt, Human
gggcucuguuuagaccagagau

SEQ ID NO: 328499 - RNA, 22 nt, Human
ggcuggccuguguggccgccac

SEQ ID NO: 328500 - RNA, 22 nt, Human
auguuugaaauuguaaguauau

SEQ ID NO: 328501 - RNA, 22 nt, Human
ccagcuggcccagcugugcucc

SEQ ID NO: 328502 - RNA, 22 nt, Human
ugcuggcugggcugcuggagac

SEQ ID NO: 328503 - RNA, 22 nt, Human
guucuucagcccucagguccua

SEQ ID NO: 328504 - RNA, 22 nt, Human
aggagggagcuuaagccaggca

SEQ ID NO: 328505 - RNA, 22 nt, Human
gaggcaaagcauguggcucagg

SEQ ID NO: 328506 - RNA, 22 nt, Human
uagcccauggacuggucagcug

SEQ ID NO: 328507 - RNA, 22 nt, Human
auguggcuuucugcguuuucuc

SEQ ID NO: 328508 - RNA, 22 nt, Human
gagccugagcaaugugauguuu

SEQ ID NO: 328509 - RNA, 22 nt, Human
agucacuguuuaaucuagcuaa

SEQ ID NO: 328510 - RNA, 22 nt, Human
guggcauugccuucugcaggaa

SEQ ID NO: 328511 - RNA, 22 nt, Human
auguuguugaacucuuugcaug

SEQ ID NO: 328512 - RNA, 22 nt, Human
ggcaguggcuccucucuacucc

SEQ ID NO: 328513 - RNA, 20 nt, Human
gcucaguggagaaaugcacc

SEQ ID NO: 328514 - RNA, 22 nt, Human
gccagguugcugacgacgaucu

SEQ ID NO: 328515 - RNA, 22 nt, Human
gguguuguacauucuguggauu

SEQ ID NO: 328516 - RNA, 22 nt, Human
cugggagggguagccaauccua

SEQ ID NO: 328517 - RNA, 22 nt, Human
aagcuggccuguaccugcugag

SEQ ID NO: 328518 - RNA, 22 nt, Human
gagcaacacauugaaugaggau

SEQ ID NO: 328519 - RNA, 22 nt, Human
ccagcugcugcaccgugcaugg

SEQ ID NO: 328520 - RNA, 22 nt, Human
augcaggaagagcccuggagcu

SEQ ID NO: 328521 - RNA, 22 nt, Human
ugcuccguucuucugcuucuug

SEQ ID NO: 328522 - RNA, 22 nt, Human
gccaggucgucuccauguccaa

SEQ ID NO: 328523 - RNA, 22 nt, Human
gacaguggagccacguugggag

SEQ ID NO: 328524 - RNA, 22 nt, Human
gagcagcagcugggccagguuc

SEQ ID NO: 328525 - RNA, 22 nt, Human
guccacauaggaacccagcuuc

SEQ ID NO: 328526 - RNA, 22 nt, Human
caggaacacaaugagucucaaa

SEQ ID NO: 328527 - RNA, 22 nt, Human
gcccucugguggccgccucggc

SEQ ID NO: 328528 - RNA, 22 nt, Human
aaagaugucauacacauuaaga

SEQ ID NO: 328529 - RNA, 22 nt, Human
gugcuuuaccuuauuggucucg

SEQ ID NO: 328530 - RNA, 22 nt, Human
cugggcccaggcggcucucgga

SEQ ID NO: 328531 - RNA, 22 nt, Human
cacucacccgguccuucccagu

SEQ ID NO: 328532 - RNA, 22 nt, Human
uggccccugaggagcgucagcc

SEQ ID NO: 328533 - RNA, 22 nt, Human
cugagguagggacgugccguag

SEQ ID NO: 328534 - RNA, 22 nt, Human
gaaugcuggcuuacaggcaguu

SEQ ID NO: 328535 - RNA, 22 nt, Human
ccacccuuccauucuuccucuu

SEQ ID NO: 328536 - RNA, 22 nt, Human
accuggccaguggggccgcgcu

SEQ ID NO: 328537 - RNA, 22 nt, Human
gaggagaggcuggacgcgguga

SEQ ID NO: 328538 - RNA, 22 nt, Human
cuggccgcaguguggaguugug

SEQ ID NO: 328539 - RNA, 22 nt, Human
uucuccacccacucuuuuguug

SEQ ID NO: 328540 - RNA, 20 nt, Human
cuguuugcuaucaugagcug

SEQ ID NO: 328541 - RNA, 22 nt, Human
ccuuaauuucuguccuucagau

SEQ ID NO: 328542 - RNA, 22 nt, Human
ugggugccaaccucugguggcc

SEQ ID NO: 328543 - RNA, 23 nt, Human
uggggcugauggagacggaccag

SEQ ID NO: 328544 - RNA, 20 nt, Human
ccuguucacugcgcaguuuc

SEQ ID NO: 328545 - RNA, 22 nt, Human
cuccuucacgcaggcugccaug

SEQ ID NO: 328546 - RNA, 22 nt, Human
uuccagaacaauguggacguau

SEQ ID NO: 328547 - RNA, 22 nt, Human
gcagcccaggaggcgggagccc

SEQ ID NO: 328548 - RNA, 22 nt, Human
ucuguccauucagaauggcccu

SEQ ID NO: 328549 - RNA, 22 nt, Human
uucaaacacugcuuugagaggg

SEQ ID NO: 328550 - RNA, 22 nt, Human
gggaggaaggcuugggugagua

SEQ ID NO: 328551 - RNA, 22 nt, Human
agagcuccaggguuuuguagug

SEQ ID NO: 328552 - RNA, 22 nt, Human
agagaagagucuugucaaauua

SEQ ID NO: 328553 - RNA, 22 nt, Human
uugggauuacagguguaagcca

SEQ ID NO: 328554 - RNA, 22 nt, Human
agccccaguucccuggaagucu

SEQ ID NO: 328555 - RNA, 22 nt, Human
uacagcuugauguuuguguguu

SEQ ID NO: 328556 - RNA, 22 nt, Human
aaagagcucggaaaguguugaa

SEQ ID NO: 328557 - RNA, 22 nt, Human
gugcugucguggaacugggcug

SEQ ID NO: 328558 - RNA, 22 nt, Human
ugguccagacuuugaccucuca

SEQ ID NO: 328559 - RNA, 22 nt, Human
cccucucccugcagaauguggc

SEQ ID NO: 328560 - RNA, 22 nt, Human
caggguggcaggcaccauggcc

SEQ ID NO: 328561 - RNA, 17 nt, Human
cucugggucuccugcuu

SEQ ID NO: 328562 - RNA, 22 nt, Human
aaggcacauauuuuagagucac

SEQ ID NO: 328563 - RNA, 22 nt, Human
uaguauuuccuguaagcuauag

SEQ ID NO: 328564 - RNA, 22 nt, Human
gugcucuggccaagcgcgugcg

SEQ ID NO: 328565 - RNA, 22 nt, Human
ggagaugccuuguuucaggaac

SEQ ID NO: 328566 - RNA, 22 nt, Human
gcugcugcuugaaggcucggag

SEQ ID NO: 328567 - RNA, 22 nt, Human
gggcccugcgacucgcggcgga

SEQ ID NO: 328568 - RNA, 18 nt, Human
ggccucagccuggccgga

SEQ ID NO: 328569 - RNA, 22 nt, Human
ggcgaggugucugccaucaagc

SEQ ID NO: 328570 - RNA, 22 nt, Human
ucaccuguuggauguauacugu

SEQ ID NO: 328571 - RNA, 22 nt, Human
ggcagccagagggcagcuggau

SEQ ID NO: 328572 - RNA, 22 nt, Human
ccuggaaaaugccacuuucaca

SEQ ID NO: 328573 - RNA, 22 nt, Human
aaagugcugggauuacaggugu

SEQ ID NO: 328574 - RNA, 22 nt, Human
guggcuaggcccaacggcagga

SEQ ID NO: 328575 - RNA, 22 nt, Human
gggcugaauuuguugcauguaa

SEQ ID NO: 328576 - RNA, 22 nt, Human
aaaucaugguggaagaaacaga

SEQ ID NO: 328577 - RNA, 22 nt, Human
cagaggccuggcuuggacaccu

SEQ ID NO: 328578 - RNA, 22 nt, Human
ugcucgagguccccaccggcuc

SEQ ID NO: 328579 - RNA, 21 nt, Human
agcugugguuuuacaucuuuu

SEQ ID NO: 328580 - RNA, 22 nt, Human
ccccaacccugguuccguggcg

SEQ ID NO: 328581 - RNA, 22 nt, Human
guccuggugcuggucauugucg

SEQ ID NO: 328582 - RNA, 22 nt, Human
ggagggaguuucauuccugccc

SEQ ID NO: 328583 - RNA, 22 nt, Human
uguaaagaaagacgcagaguua

SEQ ID NO: 328584 - RNA, 22 nt, Human
ggugucagugaagguagaguuu

SEQ ID NO: 328585 - RNA, 22 nt, Human
aggccacaggaguacugucggu

SEQ ID NO: 328586 - RNA, 19 nt, Human
uuugauagggcauaauaua

SEQ ID NO: 328587 - RNA, 22 nt, Human
aaggcaguuaauuuggcuagaa

SEQ ID NO: 328588 - RNA, 22 nt, Human
aggaggguggggucugccuguc

SEQ ID NO: 328589 - RNA, 22 nt, Human
aagcaccuggguuauaucuuag

SEQ ID NO: 328590 - RNA, 22 nt, Human
gggcuggagagucccacguggg

SEQ ID NO: 328591 - RNA, 22 nt, Human
auuuccuggaggaauggaagca

SEQ ID NO: 328592 - RNA, 22 nt, Human
cucuccaggcgagguccuacug

SEQ ID NO: 328593 - RNA, 22 nt, Human
ucuugggcaauuucucuagagg

SEQ ID NO: 328594 - RNA, 22 nt, Human
cugucacagcccgcgucuccuc

SEQ ID NO: 328595 - RNA, 22 nt, Human
cagcugccuguauuguccucau

SEQ ID NO: 328596 - RNA, 22 nt, Human
agccacagucuguagccagcuu

SEQ ID NO: 328597 - RNA, 22 nt, Human
uucccagauuggagggcagggg

SEQ ID NO: 328598 - RNA, 22 nt, Human
gacaagaugacaucauggcuuc

SEQ ID NO: 328599 - RNA, 21 nt, Human
gccaccucaaucuucuagcgc

SEQ ID NO: 328600 - RNA, 22 nt, Human
ggaagcuguuaucaucuguauc

SEQ ID NO: 328601 - RNA, 22 nt, Human
acccgcuuccggagcugcagug

SEQ ID NO: 328602 - RNA, 22 nt, Human
agcggcgccgagcuuggccagg

SEQ ID NO: 328603 - RNA, 18 nt, Human
ggugagggagcuggaagc

SEQ ID NO: 328604 - RNA, 22 nt, Human
aauguuugaacuuugcauauuu

SEQ ID NO: 328605 - RNA, 22 nt, Human
cucccagccuucgccagucuga

SEQ ID NO: 328606 - RNA, 22 nt, Human
cccagccugaucucggccagcu

SEQ ID NO: 328607 - RNA, 22 nt, Human
auggccugcagugcugccacag

SEQ ID NO: 328608 - RNA, 22 nt, Human
ugcccguggccuggggcagcuu

SEQ ID NO: 328609 - RNA, 22 nt, Human
ugcccuccacaguggcuccacc

SEQ ID NO: 328610 - RNA, 17 nt, Human
aaaugguccuagggauu

SEQ ID NO: 328611 - RNA, 22 nt, Human
ugggugguugcugaggcuccuu

SEQ ID NO: 328612 - RNA, 22 nt, Human
cugggaccugugugccugggcc

SEQ ID NO: 328613 - RNA, 22 nt, Human
uccacagguccucuuugcaaag

SEQ ID NO: 328614 - RNA, 22 nt, Human
uuguccuuaccucaaucuggaa

SEQ ID NO: 328615 - RNA, 22 nt, Human
cagggaugggauggagucaguu

SEQ ID NO: 328616 - RNA, 22 nt, Human
uggcacagcuugucauaaacuc

SEQ ID NO: 328617 - RNA, 20 nt, Human
uuuuccacuccucaaaacag

SEQ ID NO: 328618 - RNA, 22 nt, Human
ucaccggugacccucggcucgc

SEQ ID NO: 328619 - RNA, 22 nt, Human
cuggaaggagcccgggcggauc

SEQ ID NO: 328620 - RNA, 22 nt, Human
ugggaagaguuagagacagcug

SEQ ID NO: 328621 - RNA, 22 nt, Human
cuuccagcugauuggcauccag

SEQ ID NO: 328622 - RNA, 22 nt, Human
cuguuuauucucaucuaaaaug

SEQ ID NO: 328623 - RNA, 20 nt, Human
ccacaguggagacuggagac

SEQ ID NO: 328624 - RNA, 22 nt, Human
agggccagcagcuuggccaacc

SEQ ID NO: 328625 - RNA, 22 nt, Human
uaaagugaaguucagaauggcu

SEQ ID NO: 328626 - RNA, 22 nt, Human
gggacagcuguagugcuuggcu

SEQ ID NO: 328627 - RNA, 22 nt, Human
ccugaguucuuauuuccaguca

SEQ ID NO: 328628 - RNA, 22 nt, Human
ugcuugucacccugccugagug

SEQ ID NO: 328629 - RNA, 22 nt, Human
auuuccagcagcauauuugucu

SEQ ID NO: 328630 - RNA, 22 nt, Human
cacaguuuugucuugguuucca

SEQ ID NO: 328631 - RNA, 22 nt, Human
gccacccuggacgcacuguucg

SEQ ID NO: 328632 - RNA, 22 nt, Human
agccagggacgcugcaggcuac

SEQ ID NO: 328633 - RNA, 22 nt, Human
ucaguguagcagacuuguagcc

SEQ ID NO: 328634 - RNA, 22 nt, Human
gcuuccaaugcuucuaucacau

SEQ ID NO: 328635 - RNA, 22 nt, Human
gcucguacaccagcguggaggu

SEQ ID NO: 328636 - RNA, 22 nt, Human
gagguuggagggcuggccugca

SEQ ID NO: 328637 - RNA, 22 nt, Human
acacugguucucuuaacccuau

SEQ ID NO: 328638 - RNA, 22 nt, Human
agcuuuggcaucugacuagccg

SEQ ID NO: 328639 - RNA, 22 nt, Human
uugcuggaguagaaaacuuaac

SEQ ID NO: 328640 - RNA, 22 nt, Human
aaggugccacuucccucagacu

SEQ ID NO: 328641 - RNA, 22 nt, Human
gggcagcaggcuccacguuccu

SEQ ID NO: 328642 - RNA, 22 nt, Human
cugcaguucuucuccucaaggc

SEQ ID NO: 328643 - RNA, 22 nt, Human
agccagcauauauauaguugaa

SEQ ID NO: 328644 - RNA, 22 nt, Human
cagggucuuggcgccaucaccc

SEQ ID NO: 328645 - RNA, 22 nt, Human
cauuguguauuucuguaguacu

SEQ ID NO: 328646 - RNA, 22 nt, Human
ugaggagcaggguggcuuacuc

SEQ ID NO: 328647 - RNA, 21 nt, Human
ccaccaggucuucugcucggg

SEQ ID NO: 328648 - RNA, 22 nt, Human
gcugucugcugggucgcucagg

SEQ ID NO: 328649 - RNA, 21 nt, Human
ccuguggugccagaucgccag

SEQ ID NO: 328650 - RNA, 22 nt, Human
cacuguugagcaauguacagug

SEQ ID NO: 328651 - RNA, 22 nt, Human
ugcuucucaaaaggagguaggu

SEQ ID NO: 328652 - RNA, 22 nt, Human
gugccgcuggagcuggaauuga

SEQ ID NO: 328653 - RNA, 23 nt, Human
aacauuuguaaggugauuuuguu

SEQ ID NO: 328654 - RNA, 22 nt, Human
caaguaugagaaagcuauuacc

SEQ ID NO: 328655 - RNA, 22 nt, Human
acggagcccgugucagguggga

SEQ ID NO: 328656 - RNA, 22 nt, Human
gaaggagaggauugugaggcug

SEQ ID NO: 328657 - RNA, 22 nt, Human
cugcuguguggauucaauggcu

SEQ ID NO: 328658 - RNA, 22 nt, Human
caagagcuuuagaaaugcucau

SEQ ID NO: 328659 - RNA, 22 nt, Human
gagguccacugaggcaacaggg

SEQ ID NO: 328660 - RNA, 22 nt, Human
ccauggccaggaaagccaaggu

SEQ ID NO: 328661 - RNA, 21 nt, Human
ugcaaugcauugacagcagca

SEQ ID NO: 328662 - RNA, 22 nt, Human
ucugaggucauuccaaggacau

SEQ ID NO: 328663 - RNA, 22 nt, Human
uggucccugaagagagaccuug

SEQ ID NO: 328664 - RNA, 22 nt, Human
aggggagguguccccaaaucuc

SEQ ID NO: 328665 - RNA, 22 nt, Human
cuggccagccucccagguaccc

SEQ ID NO: 328666 - RNA, 22 nt, Human
gcaggaguuagagguuuaaucu

SEQ ID NO: 328667 - RNA, 22 nt, Human
uggcaguagagcuggaacuuga

SEQ ID NO: 328668 - RNA, 22 nt, Human
acuuccagaaaugauuuaauuu

SEQ ID NO: 328669 - RNA, 22 nt, Human
cagugccaaggauggccuggga

SEQ ID NO: 328670 - RNA, 22 nt, Human
ugcgggucccagggucacaggc

SEQ ID NO: 328671 - RNA, 22 nt, Human
ucauggcacaugcccuccaggg

SEQ ID NO: 328672 - RNA, 22 nt, Human
uuuguguuguacuucugugcau

SEQ ID NO: 328673 - RNA, 22 nt, Human
ucacccagacugucugacucuu

SEQ ID NO: 328674 - RNA, 22 nt, Human
uggucccuagugugggagcuug

SEQ ID NO: 328675 - RNA, 22 nt, Human
uuuaaacuaacaguacacguug

SEQ ID NO: 328676 - RNA, 22 nt, Human
auuuugacauugcggcauugcu

SEQ ID NO: 328677 - RNA, 22 nt, Human
cagcuccagcccaggcagcucc

SEQ ID NO: 328678 - RNA, 22 nt, Human
caggccugugacaccgugucug

SEQ ID NO: 328679 - RNA, 22 nt, Human
uggcccagcucagggugggcgg

SEQ ID NO: 328680 - RNA, 23 nt, Human
uccaguuaaugguucccagucug

SEQ ID NO: 328681 - RNA, 22 nt, Human
gcugcagugagccaagaucgug

SEQ ID NO: 328682 - RNA, 22 nt, Human
uggcagcauuuuuuccagaaca

SEQ ID NO: 328683 - RNA, 22 nt, Human
caugucacaauucuuaauggga

SEQ ID NO: 328684 - RNA, 22 nt, Human
cucugguuucgcaggaaauaga

SEQ ID NO: 328685 - RNA, 22 nt, Human
ugagcugcuucuuauaaugugu

SEQ ID NO: 328686 - RNA, 22 nt, Human
aggcugagccugggcguggugg

SEQ ID NO: 328687 - RNA, 22 nt, Human
ccagucagccaagcugcagcgg

SEQ ID NO: 328688 - RNA, 22 nt, Human
ucucagaguuccucuggagucc

SEQ ID NO: 328689 - RNA, 22 nt, Human
cggagaggugggggcagcaucu

SEQ ID NO: 328690 - RNA, 21 nt, Human
uaaagcucguucaggaaaguc

SEQ ID NO: 328691 - RNA, 22 nt, Human
cugaggagauccccccagaagu

SEQ ID NO: 328692 - RNA, 22 nt, Human
gcacugccugugagcccugguu

SEQ ID NO: 328693 - RNA, 22 nt, Human
gcggggacagaaggcgguucuc

SEQ ID NO: 328694 - RNA, 18 nt, Human
uccaccgcgugcaccucu

SEQ ID NO: 328695 - RNA, 22 nt, Human
ucaguuacucugauguccugug

SEQ ID NO: 328696 - RNA, 22 nt, Human
aaggcuuguugucacgcucuug

SEQ ID NO: 328697 - RNA, 22 nt, Human
uugaggagucaggggcacggaa

SEQ ID NO: 328698 - RNA, 22 nt, Human
ggcggugguugagaggacggcg

SEQ ID NO: 328699 - RNA, 22 nt, Human
ggagaggguagggguccugccc

SEQ ID NO: 328700 - RNA, 22 nt, Human
aaagccauaucuauucuauucu

SEQ ID NO: 328701 - RNA, 22 nt, Human
gcucugugcaguucagggacac

SEQ ID NO: 328702 - RNA, 22 nt, Human
auacagguucucuagggaacag

SEQ ID NO: 328703 - RNA, 22 nt, Human
ucgcagcacuagcccugcauug

SEQ ID NO: 328704 - RNA, 22 nt, Human
cacccugaggccacccagaccu

SEQ ID NO: 328705 - RNA, 17 nt, Human
gcccgugggcuacggua

SEQ ID NO: 328706 - RNA, 22 nt, Human
uuccaggcgcacgucggccuua

SEQ ID NO: 328707 - RNA, 22 nt, Human
uacagcagcccaccuucuucug

SEQ ID NO: 328708 - RNA, 19 nt, Human
agcaguggagccaugccug

SEQ ID NO: 328709 - RNA, 22 nt, Human
gccccagcguggcuguguuagg

SEQ ID NO: 328710 - RNA, 22 nt, Human
ucccacugucuucucgugcucg

SEQ ID NO: 328711 - RNA, 22 nt, Human
uaggggugggauccaggaauua

SEQ ID NO: 328712 - RNA, 22 nt, Human
cagguguugcaguugaagacug

SEQ ID NO: 328713 - RNA, 22 nt, Human
cgcuuuggagucccugcuuuac

SEQ ID NO: 328714 - RNA, 22 nt, Human
uccagcaguccaugugagacac

SEQ ID NO: 328715 - RNA, 22 nt, Human
uucuccucagcaaggcagcuuu

SEQ ID NO: 328716 - RNA, 22 nt, Human
ugggccagauccauggcaauaa

SEQ ID NO: 328717 - RNA, 22 nt, Human
ccuuugagccugggcgcggacc

SEQ ID NO: 328718 - RNA, 22 nt, Human
gcaguccuuaggagaggaagua

SEQ ID NO: 328719 - RNA, 20 nt, Human
ggacccuggguucuucugag

SEQ ID NO: 328720 - RNA, 22 nt, Human
agccagugcagcuggaaauuca

SEQ ID NO: 328721 - RNA, 19 nt, Human
augggaagcggccagcgga

SEQ ID NO: 328722 - RNA, 22 nt, Human
aggcaguuguugcugagcagcu

SEQ ID NO: 328723 - RNA, 22 nt, Human
ucacuagugguuucuggugguu

SEQ ID NO: 328724 - RNA, 22 nt, Human
cagcagcucaggcuccuuccca

SEQ ID NO: 328725 - RNA, 22 nt, Human
caggccuugaaggccugcggga

SEQ ID NO: 328726 - RNA, 22 nt, Human
ggcccucucuacauguuagacg

SEQ ID NO: 328727 - RNA, 17 nt, Human
agcagcuggguugaucu

SEQ ID NO: 328728 - RNA, 22 nt, Human
ccgugugcacgcgccggugcug

SEQ ID NO: 328729 - RNA, 22 nt, Human
gagcuguguaugcaucauucug

SEQ ID NO: 328730 - RNA, 22 nt, Human
ugcuagguaagaagggggcucc

SEQ ID NO: 328731 - RNA, 18 nt, Human
ugugccucugcaggacgu

SEQ ID NO: 328732 - RNA, 22 nt, Human
gaggggcucuugggcaugaagg

SEQ ID NO: 328733 - RNA, 22 nt, Human
gaggucaggggagaggcugaug

SEQ ID NO: 328734 - RNA, 22 nt, Human
ugggugaagaggcuaugcuacu

SEQ ID NO: 328735 - RNA, 22 nt, Human
aggugggacccguggggugcga

SEQ ID NO: 328736 - RNA, 22 nt, Human
gugcagcugugguggagccagg

SEQ ID NO: 328737 - RNA, 21 nt, Human
uccuccuguagaggguccugg

SEQ ID NO: 328738 - RNA, 22 nt, Human
agcggcgccggagggaggugcg

SEQ ID NO: 328739 - RNA, 22 nt, Human
ggcagcaggguagccauuucuc

SEQ ID NO: 328740 - RNA, 22 nt, Human
gagaugugucagguccuggggg

SEQ ID NO: 328741 - RNA, 22 nt, Human
acauucaugcaccuuccuaucc

SEQ ID NO: 328742 - RNA, 22 nt, Human
ugggagagauaggcuucuggac

SEQ ID NO: 328743 - RNA, 22 nt, Human
gucugcccuuggccugggacuu

SEQ ID NO: 328744 - RNA, 22 nt, Human
ugacccucuuccccaugcgcuc

SEQ ID NO: 328745 - RNA, 22 nt, Human
ggcaagagggcagauggagugc

SEQ ID NO: 328746 - RNA, 22 nt, Human
cauuguccucugaugccuuccc

SEQ ID NO: 328747 - RNA, 22 nt, Human
cacagagagcuacgugcagcgu

SEQ ID NO: 328748 - RNA, 22 nt, Human
cucaggucuuaguucugucauc

SEQ ID NO: 328749 - RNA, 22 nt, Human
aaugacaguggcacagucacuu

SEQ ID NO: 328750 - RNA, 22 nt, Human
gcugcuggcuuccugcuguuuu

SEQ ID NO: 328751 - RNA, 20 nt, Human
aggggcaccugcgacggggc

SEQ ID NO: 328752 - RNA, 23 nt, Human
uuguccucuggaucgguuugguu

SEQ ID NO: 328753 - RNA, 22 nt, Human
augaauaaaacauuuuaaucag

SEQ ID NO: 328754 - RNA, 18 nt, Human
uggggggcuugucugaag

SEQ ID NO: 328755 - RNA, 22 nt, Human
cugggguccuugccauguguca

SEQ ID NO: 328756 - RNA, 22 nt, Human
ucugugggcauuuauaaucugg

SEQ ID NO: 328757 - RNA, 22 nt, Human
cccuggcucugccucagagccc

SEQ ID NO: 328758 - RNA, 22 nt, Human
caguuuuaugaaugcuuauuag

SEQ ID NO: 328759 - RNA, 22 nt, Human
gaagagguucaacguggucauc

SEQ ID NO: 328760 - RNA, 22 nt, Human
ucugaauucuuagaauuaaagg

SEQ ID NO: 328761 - RNA, 22 nt, Human
ugcaaggcacccacucugcuuu

SEQ ID NO: 328762 - RNA, 22 nt, Human
gugccugguuuggggaauguuc

SEQ ID NO: 328763 - RNA, 22 nt, Human
uugcugccuuuguacucugaug

SEQ ID NO: 328764 - RNA, 22 nt, Human
cagcaguacuucucagagguau

SEQ ID NO: 328765 - RNA, 22 nt, Human
agggcccuagggaaugagacau

SEQ ID NO: 328766 - RNA, 22 nt, Human
uuucugaggaauuaauacagaa

SEQ ID NO: 328767 - RNA, 22 nt, Human
acuggcaguagagggagcgcau

SEQ ID NO: 328768 - RNA, 22 nt, Human
cgggagccucugggucacacug

SEQ ID NO: 328769 - RNA, 22 nt, Human
ugggagcaagcuggugcuggag

SEQ ID NO: 328770 - RNA, 22 nt, Human
cauugcuguuaauugucucuag

SEQ ID NO: 328771 - RNA, 22 nt, Human
uggaagggguuacgcagcagga

SEQ ID NO: 328772 - RNA, 22 nt, Human
aaggggggcaccugcaugcccg

SEQ ID NO: 328773 - RNA, 22 nt, Human
auuucauccauuaagaguacuc

SEQ ID NO: 328774 - RNA, 20 nt, Human
gugcccaguuggugacagac

SEQ ID NO: 328775 - RNA, 22 nt, Human
gccugugcuuaacugacgugag

SEQ ID NO: 328776 - RNA, 22 nt, Human
ggcagaggagcuggaaacaugg

SEQ ID NO: 328777 - RNA, 22 nt, Human
gcuucuggaagcauaugcaaga

SEQ ID NO: 328778 - RNA, 22 nt, Human
gccagugccugcugcucagggc

SEQ ID NO: 328779 - RNA, 22 nt, Human
gcugggagucgcgucuguggcc

SEQ ID NO: 328780 - RNA, 22 nt, Human
ccugaggaugccagcaugggug

SEQ ID NO: 328781 - RNA, 22 nt, Human
ucucuuugacccuuuagcucca

SEQ ID NO: 328782 - RNA, 22 nt, Human
cacggccacugcagcaccccag

SEQ ID NO: 328783 - RNA, 22 nt, Human
uguccagcugaaggcagccuca

SEQ ID NO: 328784 - RNA, 19 nt, Human
ccuggcccugcugcgcggg

SEQ ID NO: 328785 - RNA, 22 nt, Human
uuguccagcgaccaggcucugu

SEQ ID NO: 328786 - RNA, 22 nt, Human
uuaagugcuucaagggaagcuc

SEQ ID NO: 328787 - RNA, 22 nt, Human
uuuggauugcuuggaugcuucg

SEQ ID NO: 328788 - RNA, 22 nt, Human
cgcugccuucaucccacgccua

SEQ ID NO: 328789 - RNA, 22 nt, Human
agguggcuaugaggaugcaguc

SEQ ID NO: 328790 - RNA, 22 nt, Human
agucuggagugauuauguggga

SEQ ID NO: 328791 - RNA, 23 nt, Human
aggcugcagaagaauagggucau

SEQ ID NO: 328792 - RNA, 22 nt, Human
ucaccucucuggccgucuaccu

SEQ ID NO: 328793 - RNA, 22 nt, Human
gagggugguggcuuaaggugcu

SEQ ID NO: 328794 - RNA, 22 nt, Human
gguggcagaggugcaucagccc

SEQ ID NO: 328795 - RNA, 22 nt, Human
cccagcauuucugggcugcacu

SEQ ID NO: 328796 - RNA, 22 nt, Human
gcggcgccugggacccgccagc

SEQ ID NO: 328797 - RNA, 22 nt, Human
auguuuguguuucccauucagg

SEQ ID NO: 328798 - RNA, 22 nt, Human
agagcaccaaggugguuuggac

SEQ ID NO: 328799 - RNA, 22 nt, Human
uauugccaaaugucugcuggaa

SEQ ID NO: 328800 - RNA, 22 nt, Human
ccuccugggccuugcucuguga

SEQ ID NO: 328801 - RNA, 22 nt, Human
ggcaucagcccgguccugggcu

SEQ ID NO: 328802 - RNA, 22 nt, Human
aggccagggcacugcucuuuag

SEQ ID NO: 328803 - RNA, 22 nt, Human
gucugcugacagagcauggacc

SEQ ID NO: 328804 - RNA, 22 nt, Human
cauugcugugggcauuugcugc

SEQ ID NO: 328805 - RNA, 22 nt, Human
ugcuggaguggcacuguguggc

SEQ ID NO: 328806 - RNA, 22 nt, Human
uuggcgcccaggacgccgccgc

SEQ ID NO: 328807 - RNA, 22 nt, Human
ucaggggcuugaggugcauguc

SEQ ID NO: 328808 - RNA, 22 nt, Human
agccuggacagcuacggagaac

SEQ ID NO: 328809 - RNA, 22 nt, Human
caggaggaaaguuccacucaac

SEQ ID NO: 328810 - RNA, 22 nt, Human
gccuggcucugaguuucucucc

SEQ ID NO: 328811 - RNA, 22 nt, Human
gagcuccuauggucgguggcuc

SEQ ID NO: 328812 - RNA, 22 nt, Human
uguguggcaagcuguaugcuag

SEQ ID NO: 328813 - RNA, 21 nt, Human
uguguucuucuaggucagcua

SEQ ID NO: 328814 - RNA, 22 nt, Human
uccuggccucugagucaagaac

SEQ ID NO: 328815 - RNA, 22 nt, Human
cagcaguguacaaggugucaga

SEQ ID NO: 328816 - RNA, 21 nt, Human
gcugcucgagauccagugcuu

SEQ ID NO: 328817 - RNA, 22 nt, Human
caagcuuguuucuccugggggu

SEQ ID NO: 328818 - RNA, 22 nt, Human
agagaccuuccugacuccagag

SEQ ID NO: 328819 - RNA, 22 nt, Human
ggagguggagcuggaaguucca

SEQ ID NO: 328820 - RNA, 19 nt, Human
caucuggaugauucuccug

SEQ ID NO: 328821 - RNA, 22 nt, Human
gcuggguggaucggaggcucug

SEQ ID NO: 328822 - RNA, 22 nt, Human
ggagaggggaacuuguugcuug

SEQ ID NO: 328823 - RNA, 22 nt, Human
ugccaggccucaggagucucca

SEQ ID NO: 328824 - RNA, 22 nt, Human
ggccucugccccgcggggcucg

SEQ ID NO: 328825 - RNA, 22 nt, Human
gcccuguuuucuggguuccuug

SEQ ID NO: 328826 - RNA, 22 nt, Human
cuggcaguguccagcucgugau

SEQ ID NO: 328827 - RNA, 22 nt, Human
ccuggccauagggcccaggaaa

SEQ ID NO: 328828 - RNA, 22 nt, Human
agcucagggccaggcgcguuuc

SEQ ID NO: 328829 - RNA, 21 nt, Human
cuuuggcaagggagaagucac

SEQ ID NO: 328830 - RNA, 22 nt, Human
gguguggcaguggaccugugaa

SEQ ID NO: 328831 - RNA, 22 nt, Human
gagguggcugcuugcugggaaa

SEQ ID NO: 328832 - RNA, 20 nt, Human
acagagauccucucuuuauc

SEQ ID NO: 328833 - RNA, 21 nt, Human
caggaacauucuuuacauuua

SEQ ID NO: 328834 - RNA, 22 nt, Human
gugccaccagaugcuguugcua

SEQ ID NO: 328835 - RNA, 22 nt, Human
ggaggaggggugacugaaugcu

SEQ ID NO: 328836 - RNA, 22 nt, Human
gugcugcagagucucgugccgc

SEQ ID NO: 328837 - RNA, 22 nt, Human
uccuggcaaagauguugguguu

SEQ ID NO: 328838 - RNA, 22 nt, Human
cacaucauguuaauucauuaca

SEQ ID NO: 328839 - RNA, 22 nt, Human
agagccuguucggaggcgcccc

SEQ ID NO: 328840 - RNA, 22 nt, Human
aggauugugccuccagucagaa

SEQ ID NO: 328841 - RNA, 22 nt, Human
gugcuggcuggggcaucaggca

SEQ ID NO: 328842 - RNA, 22 nt, Human
gugcaggacagcacaucuccug

SEQ ID NO: 328843 - RNA, 22 nt, Human
gggucugcuccaccugcagccc

SEQ ID NO: 328844 - RNA, 22 nt, Human
aaccauucacugaacaguucaa

SEQ ID NO: 328845 - RNA, 22 nt, Human
ucaggagaguguucaguggagg

SEQ ID NO: 328846 - RNA, 22 nt, Human
uuucugugauaggcugcgacgc

SEQ ID NO: 328847 - RNA, 22 nt, Human
uaggccacagagaggagauuuc

SEQ ID NO: 328848 - RNA, 22 nt, Human
ugucugccugcgggccggcaca

SEQ ID NO: 328849 - RNA, 22 nt, Human
agcuggugauguggucccucac

SEQ ID NO: 328850 - RNA, 22 nt, Human
ugguggggccagacuucagcuc

SEQ ID NO: 328851 - RNA, 22 nt, Human
cggggccuagucuaccucggca

SEQ ID NO: 328852 - RNA, 23 nt, Human
ggaagcucacguaguccugcacu

SEQ ID NO: 328853 - RNA, 22 nt, Human
ugcagguggcagcggggcacca

SEQ ID NO: 328854 - RNA, 22 nt, Human
uuuccagggaggaauguggggu

SEQ ID NO: 328855 - RNA, 22 nt, Human
ccgcguggcacccuccuggagg

SEQ ID NO: 328856 - RNA, 17 nt, Human
uuucugcaugauuggac

SEQ ID NO: 328857 - RNA, 22 nt, Human
ggcuuccuccuuccugcuguca

SEQ ID NO: 328858 - RNA, 22 nt, Human
ggcuuuuguuucagcucugcua

SEQ ID NO: 328859 - RNA, 22 nt, Human
gagcucauccccaugguccguc

SEQ ID NO: 328860 - RNA, 22 nt, Human
agcugggugcccgaagccacgu

SEQ ID NO: 328861 - RNA, 22 nt, Human
ucuggggucaccuggggugcuu

SEQ ID NO: 328862 - RNA, 22 nt, Human
ucccuggcugguguagagggau

SEQ ID NO: 328863 - RNA, 22 nt, Human
caaacuuacuguguuuaaagag

SEQ ID NO: 328864 - RNA, 18 nt, Human
gccagcccuccaaccucc

SEQ ID NO: 328865 - RNA, 22 nt, Human
uggcggugacggcggcgccugg

SEQ ID NO: 328866 - RNA, 22 nt, Human
gaccacaguccagucaucaugg

SEQ ID NO: 328867 - RNA, 22 nt, Human
aguuuccacuggagacacugug

SEQ ID NO: 328868 - RNA, 22 nt, Human
aguuggcauuuuauuuaaguau

SEQ ID NO: 328869 - RNA, 22 nt, Human
ccacagcaugcaggccugacac

SEQ ID NO: 328870 - RNA, 22 nt, Human
ugcugggauuacagucaugagc

SEQ ID NO: 328871 - RNA, 22 nt, Human
uggcaugcaagaggaggcuccc

SEQ ID NO: 328872 - RNA, 22 nt, Human
ccucaaaggccuggcaccagaa

SEQ ID NO: 328873 - RNA, 22 nt, Human
ccagccagcugcccuuggggcc

SEQ ID NO: 328874 - RNA, 22 nt, Human
ccagcugcgggcaucgagaguu

SEQ ID NO: 328875 - RNA, 22 nt, Human
gugggugucaguaucuuuaacg

SEQ ID NO: 328876 - RNA, 22 nt, Human
ugagccuggccugcagagacca

SEQ ID NO: 328877 - RNA, 22 nt, Human
uugcaucagcaggcauaauugg

SEQ ID NO: 328878 - RNA, 22 nt, Human
ugcgccugcgcaaagguuucug

SEQ ID NO: 328879 - RNA, 22 nt, Human
ugcaugguguaauucuaaugcu

SEQ ID NO: 328880 - RNA, 22 nt, Human
gccccucuccuugugcaccugc

SEQ ID NO: 328881 - RNA, 22 nt, Human
ccaucuucucuugaaccuccuu

SEQ ID NO: 328882 - RNA, 22 nt, Human
caggccacagcuaaagaggauu

SEQ ID NO: 328883 - RNA, 22 nt, Human
gcagcagaaggccaaggggagc

SEQ ID NO: 328884 - RNA, 22 nt, Human
gcggggccauguccaacggccu

SEQ ID NO: 328885 - RNA, 21 nt, Human
aggcagcgauuuucauauugc

SEQ ID NO: 328886 - RNA, 22 nt, Human
cgucaggguugagcagguagau

SEQ ID NO: 328887 - RNA, 22 nt, Human
uggccgggaagggacagugugg

SEQ ID NO: 328888 - RNA, 22 nt, Human
guucaaccaugauuaggaacug

SEQ ID NO: 328889 - RNA, 22 nt, Human
gccaggcaggccacgcuguguu

SEQ ID NO: 328890 - RNA, 22 nt, Human
cugaacaucccgcagugcacga

SEQ ID NO: 328891 - RNA, 22 nt, Human
uggccuuggucacaaugcaaac

SEQ ID NO: 328892 - RNA, 22 nt, Human
aagugcaggucucagcuacucu

SEQ ID NO: 328893 - RNA, 22 nt, Human
uguucauaucauuuugaaagcu

SEQ ID NO: 328894 - RNA, 19 nt, Human
acacaccagugccugugac

SEQ ID NO: 328895 - RNA, 22 nt, Human
gccugcacucaaacacucucuu

SEQ ID NO: 328896 - RNA, 22 nt, Human
uuguaagacuguagaaugcaaa

SEQ ID NO: 328897 - RNA, 22 nt, Human
cugguuuuuagugcuuaggagu

SEQ ID NO: 328898 - RNA, 22 nt, Human
gugggggcaggcagugcuagga

SEQ ID NO: 328899 - RNA, 22 nt, Human
gcagggcagggcaagaacuggg

SEQ ID NO: 328900 - RNA, 19 nt, Human
uccugcccaccagccaggg

SEQ ID NO: 328901 - RNA, 22 nt, Human
ugcaucauuaagguacaguugg

SEQ ID NO: 328902 - RNA, 22 nt, Human
cuguggcuaggaagcuguggga

SEQ ID NO: 328903 - RNA, 16 nt, Human
ggcagcagcuccgugc

SEQ ID NO: 328904 - RNA, 22 nt, Human
gguuccaggcauggcaggaugu

SEQ ID NO: 328905 - RNA, 22 nt, Human
guccuggugccaccugcgggau

SEQ ID NO: 328906 - RNA, 22 nt, Human
gagcugcuggccuccugcggga

SEQ ID NO: 328907 - RNA, 22 nt, Human
uugcugugucauuuguuuaauc

SEQ ID NO: 328908 - RNA, 22 nt, Human
ugcagaauauucuggugacaau

SEQ ID NO: 328909 - RNA, 22 nt, Human
agucuuagaacuacagugccua

SEQ ID NO: 328910 - RNA, 22 nt, Human
gugcaggugguuggcccagccg

SEQ ID NO: 328911 - RNA, 22 nt, Human
acugguuuuggaaaucaguaca

SEQ ID NO: 328912 - RNA, 22 nt, Human
uggggugccgacagggagggca

SEQ ID NO: 328913 - RNA, 22 nt, Human
cugcuuuaaaacugauacauga

SEQ ID NO: 328914 - RNA, 22 nt, Human
ccagaacagaccugccugaccu

SEQ ID NO: 328915 - RNA, 22 nt, Human
gcggggggcaggcaguacguug

SEQ ID NO: 328916 - RNA, 22 nt, Human
ccugcagacacuuguccagcaa

SEQ ID NO: 328917 - RNA, 22 nt, Human
ugcauguuuuauaccaaagcuu

SEQ ID NO: 328918 - RNA, 22 nt, Human
gcccuguguguuugcacugauu

SEQ ID NO: 328919 - RNA, 21 nt, Human
acagaagcggcgaguggcccc

SEQ ID NO: 328920 - RNA, 22 nt, Human
gcucaugggcccagagcagccc

SEQ ID NO: 328921 - RNA, 22 nt, Human
uucacagcucauacuguucuca

SEQ ID NO: 328922 - RNA, 22 nt, Human
acuggcccuggcugcuaggcug

SEQ ID NO: 328923 - RNA, 22 nt, Human
cucagaguccauaguuuacagu

SEQ ID NO: 328924 - RNA, 22 nt, Human
ccaggcccugcuccucacacca

SEQ ID NO: 328925 - RNA, 22 nt, Human
uuucucagccuccuugcuggag

SEQ ID NO: 328926 - RNA, 22 nt, Human
ucugccaucaagaugcucuggc

SEQ ID NO: 328927 - RNA, 22 nt, Human
cagcugcuguucaguuuuguuu

SEQ ID NO: 328928 - RNA, 22 nt, Human
cagggccagggcuauggugaag

SEQ ID NO: 328929 - RNA, 22 nt, Human
ggcagguguggugaccagagau

SEQ ID NO: 328930 - RNA, 22 nt, Human
augugagcuggggcccggccag

SEQ ID NO: 328931 - RNA, 22 nt, Human
uggcugcccccucccguggaca

SEQ ID NO: 328932 - RNA, 22 nt, Human
gcagcucucuggccugcccugg

SEQ ID NO: 328933 - RNA, 22 nt, Human
gcccagggcugcaaguggacgc

SEQ ID NO: 328934 - RNA, 19 nt, Human
ugcagcuguaugagcuuaa

SEQ ID NO: 328935 - RNA, 22 nt, Human
ccagagcugcagguaaaaugcu

SEQ ID NO: 328936 - RNA, 22 nt, Human
uggcagcagggccccuggagga

SEQ ID NO: 328937 - RNA, 22 nt, Human
ccugguccccaucggcccagcg

SEQ ID NO: 328938 - RNA, 22 nt, Human
aggaaaauggaccagaguuguu

SEQ ID NO: 328939 - RNA, 20 nt, Human
ugugcccaauguccagguuc

SEQ ID NO: 328940 - RNA, 22 nt, Human
cagaggccccauuggcugugcg

SEQ ID NO: 328941 - RNA, 22 nt, Human
cauagacauugauagguuauau

SEQ ID NO: 328942 - RNA, 22 nt, Human
uggugcugccaccuccucugcu

SEQ ID NO: 328943 - RNA, 22 nt, Human
ccuggccugugaaucugagagc

SEQ ID NO: 328944 - RNA, 17 nt, Human
ccuuucuucccagaggg

SEQ ID NO: 328945 - RNA, 22 nt, Human
cgugcagcggagcuggucacug

SEQ ID NO: 328946 - RNA, 22 nt, Human
agagucaguuaugucaagugcu

SEQ ID NO: 328947 - RNA, 22 nt, Human
aaggaggaauguagccagcucc

SEQ ID NO: 328948 - RNA, 22 nt, Human
ccugaggcccuggcugugcuga

SEQ ID NO: 328949 - RNA, 22 nt, Human
gccagccccagacauccuaucg

SEQ ID NO: 328950 - RNA, 22 nt, Human
gcaggccugucuugcucgcccu

SEQ ID NO: 328951 - RNA, 21 nt, Human
acccugcuuuaugccguccuc

SEQ ID NO: 328952 - RNA, 22 nt, Human
ccagcuugcuccucugcaaugg

SEQ ID NO: 328953 - RNA, 22 nt, Human
ugugugcucgauggcccugcag

SEQ ID NO: 328954 - RNA, 22 nt, Human
ucaggcuagcccagugcuuggg

SEQ ID NO: 328955 - RNA, 22 nt, Human
guugggcugaagugugugcuua

SEQ ID NO: 328956 - RNA, 22 nt, Human
augaacaguacaaagcacagac

SEQ ID NO: 328957 - RNA, 22 nt, Human
aagggccagggcucuagagaua

SEQ ID NO: 328958 - RNA, 22 nt, Human
augucccugagggucucucuga

SEQ ID NO: 328959 - RNA, 22 nt, Human
ucagauggaaugaugccacugc

SEQ ID NO: 328960 - RNA, 19 nt, Human
gcagcugugggaagagcca

SEQ ID NO: 328961 - RNA, 22 nt, Human
gcucccugguauugcugccacu

SEQ ID NO: 328962 - RNA, 22 nt, Human
ugcugcucaagcugcagcaaaa

SEQ ID NO: 328963 - RNA, 22 nt, Human
uuucuacacuucgugguguuuu

SEQ ID NO: 328964 - RNA, 16 nt, Human
gcagguggggcgcgca

SEQ ID NO: 328965 - RNA, 21 nt, Human
ucucuccucaagcucgacccc

SEQ ID NO: 328966 - RNA, 22 nt, Human
ugaagacaguuuuacucaugag

SEQ ID NO: 328967 - RNA, 22 nt, Human
agaggaaguaaucaggaccugc

SEQ ID NO: 328968 - RNA, 22 nt, Human
ggcgcaguugagcgugcuguuc

SEQ ID NO: 328969 - RNA, 18 nt, Human
ggaggcucugugguuucc

SEQ ID NO: 328970 - RNA, 22 nt, Human
ggagcggagggagggccacugu

SEQ ID NO: 328971 - RNA, 22 nt, Human
uauacuacgcaccaaacaaagg

SEQ ID NO: 328972 - RNA, 22 nt, Human
cgcaggugccggcagauggggu

SEQ ID NO: 328973 - RNA, 22 nt, Human
acauuugauauggaguugugua

SEQ ID NO: 328974 - RNA, 22 nt, Human
ucaugcagaguagaaagggcaa

SEQ ID NO: 328975 - RNA, 22 nt, Human
gagcaccgccuccacgaugccc

SEQ ID NO: 328976 - RNA, 22 nt, Human
aagcccagcaucccugcaccag

SEQ ID NO: 328977 - RNA, 22 nt, Human
gccuggcgccgggcugccuguc

SEQ ID NO: 328978 - RNA, 22 nt, Human
uggccuugcccagcgccuaggu

SEQ ID NO: 328979 - RNA, 23 nt, Human
cguuuuuuccucagauguucugg

SEQ ID NO: 328980 - RNA, 22 nt, Human
caggaacagcaccaggagcuag

SEQ ID NO: 328981 - RNA, 22 nt, Human
uggcacguuggauugggaguuc

SEQ ID NO: 328982 - RNA, 19 nt, Human
ggauaagguuggagugauc

SEQ ID NO: 328983 - RNA, 22 nt, Human
gcagcugcgcugguguggggca

SEQ ID NO: 328984 - RNA, 22 nt, Human
cuguccuaugaguacucacuag

SEQ ID NO: 328985 - RNA, 17 nt, Human
agcuuggagcagcauga

SEQ ID NO: 328986 - RNA, 22 nt, Human
cagcccuguugcgcuuccggcg

SEQ ID NO: 328987 - RNA, 22 nt, Human
agcaccaggucgcuggcacgcu

SEQ ID NO: 328988 - RNA, 22 nt, Human
ggugcaauaaaguuguagaacc

SEQ ID NO: 328989 - RNA, 22 nt, Human
ccugcucaacgaauauggcgau

SEQ ID NO: 328990 - RNA, 22 nt, Human
uuccaaguuaggcgagcuggug

SEQ ID NO: 328991 - RNA, 18 nt, Human
ucagggaaucuuggccuu

SEQ ID NO: 328992 - RNA, 22 nt, Human
ccuuuguucacuggagagugga

SEQ ID NO: 328993 - RNA, 22 nt, Human
cgggaagguggagguugcagug

SEQ ID NO: 328994 - RNA, 22 nt, Human
ggaaggggagcuaaaucuacug

SEQ ID NO: 328995 - RNA, 22 nt, Human
uuccaggccgggcaggaaacac

SEQ ID NO: 328996 - RNA, 22 nt, Human
agccucucuguuagucacuggg

SEQ ID NO: 328997 - RNA, 22 nt, Human
uccacagugguggaauuguuca

SEQ ID NO: 328998 - RNA, 17 nt, Human adenovirus C
acccaacauagcuuuag

SEQ ID NO: 328999 - RNA, 22 nt, Human adenovirus C
cacuccaguaggccgucaccgc

SEQ ID NO: 329000 - RNA, 22 nt, Human adenovirus C
cgcccgcgaugccgaagggggc

SEQ ID NO: 329001 - RNA, 22 nt, Human adenovirus C
uuuuccgcuugcuuguauuccc

SEQ ID NO: 329002 - RNA, 22 nt, Human adenovirus C
agguagugccgggcccggcgcc

SEQ ID NO: 329003 - RNA, 22 nt, Human adenovirus C
ggcggacggaagacaacaguag

SEQ ID NO: 329004 - RNA, 22 nt, Human adenovirus C
gcugggcguuaccccgucgcgc

SEQ ID NO: 329005 - RNA, 22 nt, Human adenovirus C
gcauggaucacggcggacggcc

SEQ ID NO: 329006 - RNA, 22 nt, Human adenovirus C
cuguuagagcucuguuccagca

SEQ ID NO: 329007 - RNA, 22 nt, Human adenovirus C
cuccugcuguugcuccuccguc

SEQ ID NO: 329008 - RNA, 22 nt, Human adenovirus C
cuccgggcugcgcgcuggccag

SEQ ID NO: 329009 - RNA, 22 nt, Human adenovirus C
cugaaagcaauguaauuggguc

SEQ ID NO: 329010 - RNA, 22 nt, Human adenovirus C
ugucauaaucaguguggguucu

SEQ ID NO: 329011 - RNA, 22 nt, Human adenovirus C
cauccccgcccuguucgguguc

SEQ ID NO: 329012 - RNA, 22 nt, Human adenovirus C
auuguuccagucccgguucccu

SEQ ID NO: 329013 - RNA, 22 nt, Human adenovirus C
cacuccaguaggccgucaccgc

SEQ ID NO: 329014 - RNA, 22 nt, Human adenovirus C
guacuucccagagacgcccagg

SEQ ID NO: 329015 - RNA, 20 nt, Human adenovirus C
gguugccucggcgguggcag

SEQ ID NO: 329016 - RNA, 22 nt, Human adenovirus C
ggucguccgccaugauacccuu

SEQ ID NO: 329017 - RNA, 22 nt, Human adenovirus C
ucgcgguacagugucagcaagu

SEQ ID NO: 329018 - RNA, 22 nt, Human adenovirus C
ggcgccgggcccggcacuaccu

SEQ ID NO: 329019 - RNA, 22 nt, Human adenovirus C
gcgcguuucucgucgcguccaa

SEQ ID NO: 329020 - RNA, 22 nt, Human adenovirus C
aagcaagggcccgcggcugcug

SEQ ID NO: 329021 - RNA, 22 nt, Human adenovirus C
aaugauaggccuauagaugggg

SEQ ID NO: 329022 - RNA, 21 nt, Human adenovirus C
acauccaacagugcgggaaug

SEQ ID NO: 329023 - RNA, 17 nt, Human adenovirus C
acccaacauagcuuuag

SEQ ID NO: 329024 - RNA, 22 nt, Human adenovirus C
acgcugccacuguccgugaagg

SEQ ID NO: 329025 - RNA, 20 nt, Human adenovirus C
uccacguuggaaauuuugca

SEQ ID NO: 329026 - RNA, 22 nt, Human adenovirus C
uccccgcggcgacggcgcaugg

SEQ ID NO: 329027 - RNA, 22 nt, Human adenovirus C
uccggccguccgccgugaucca

SEQ ID NO: 329028 - RNA, 22 nt, Human adenovirus C
ugcaaaauuccaagguaggaga

SEQ ID NO: 329029 - RNA, 22 nt, Human adenovirus C
ugcagagcuucaugcugcgggg

SEQ ID NO: 329030 - RNA, 22 nt, Human adenovirus C
gaucaugucuaccugcggggcg

SEQ ID NO: 329031 - RNA, 22 nt, Human adenovirus C
gagcggugcggggugcauaggu

SEQ ID NO: 329032 - RNA, 22 nt, Human adenovirus C
cggcacguggagcucaaucucg

SEQ ID NO: 329033 - RNA, 22 nt, Human adenovirus C
cggcagcugcagcuucuuuuug

SEQ ID NO: 329034 - RNA, 22 nt, Human adenovirus C
augcgccaaagggugcgaucgc

SEQ ID NO: 329035 - RNA, 22 nt, Human adenovirus C
augaaaaaauucauagauugga

SEQ ID NO: 329036 - RNA, 22 nt, Human adenovirus C
agguuuuggccagcugguuuag

SEQ ID NO: 329037 - RNA, 22 nt, Human adenovirus C
auaggggcuacgcugguuagca

SEQ ID NO: 329038 - RNA, 22 nt, Human adenovirus C
uuggcacuucgucgagcgaggc

SEQ ID NO: 329039 - RNA, 22 nt, Human adenovirus C
uugccacugccacagagggcau

SEQ ID NO: 329040 - RNA, 22 nt, Human adenovirus C
uugccugggaggagccccacag

SEQ ID NO: 329041 - RNA, 22 nt, Human adenovirus C
gugagugcgcccauggacauaa

SEQ ID NO: 329042 - RNA, 22 nt, Human adenovirus C
guccucgucagcguagucuggg

SEQ ID NO: 329043 - RNA, 22 nt, Human adenovirus C
guggaagccuggaccgauguaa

SEQ ID NO: 329044 - RNA, 22 nt, Human adenovirus C
guugcgcgcggucauguccagc

SEQ ID NO: 329045 - RNA, 22 nt, Human
gcagagcugcagcgaggccugg

SEQ ID NO: 329046 - RNA, 22 nt, Human
aaguaaaauucaaucuucacug

SEQ ID NO: 329047 - RNA, 22 nt, Human
acaaacuuccaucaugaauuuu

SEQ ID NO: 329048 - RNA, 22 nt, Human
agcuccugugugaagccucccu

SEQ ID NO: 329049 - RNA, 22 nt, Human
uguggcacuucucuccuuguaa

SEQ ID NO: 329050 - RNA, 22 nt, Human
gagcugggaggacugggaacuu

SEQ ID NO: 329051 - RNA, 22 nt, Human
ccugcuggccacugcuccaccu

SEQ ID NO: 329052 - RNA, 21 nt, Human
ggcaucccaggccagugacug

SEQ ID NO: 329053 - RNA, 22 nt, Human
uccugguggugccggugcccgg

SEQ ID NO: 329054 - RNA, 22 nt, Human
gcccugugagucaugcggcaga

SEQ ID NO: 329055 - RNA, 22 nt, Human
aaacacaauguuucuuuguucu

SEQ ID NO: 329056 - RNA, 22 nt, Human
gcuggggagcuagaccucagca

SEQ ID NO: 329057 - RNA, 22 nt, Human
agagcuggggcccguaaagcca

SEQ ID NO: 329058 - RNA, 21 nt, Human
gagcugggcgaggcuccgggg

SEQ ID NO: 329059 - RNA, 22 nt, Human
gcuuggggagcucaguguccuu

SEQ ID NO: 329060 - RNA, 22 nt, Human
ggaggccaggaagagccgcccu

SEQ ID NO: 329061 - RNA, 22 nt, Human
agcccugugggccuuguggcac

SEQ ID NO: 329062 - RNA, 22 nt, Human
ucugcaggucacgcuccagccu

SEQ ID NO: 329063 - RNA, 20 nt, Human
agagcugggaagcucccuau

SEQ ID NO: 329064 - RNA, 22 nt, Human
cccgucccuuuugcccgcuggu

SEQ ID NO: 329065 - RNA, 22 nt, Human
gaugcuggaagugcugaucuug

SEQ ID NO: 329066 - RNA, 22 nt, Human
cccugugggaacuccugaguug

SEQ ID NO: 329067 - RNA, 19 nt, Human
ggcagagcuccugcuuucu

SEQ ID NO: 329068 - RNA, 22 nt, Human
auguaaacucacauuuucuuca

SEQ ID NO: 329069 - RNA, 22 nt, Human
cagcuccugcagcuggcuccca

SEQ ID NO: 329070 - RNA, 22 nt, Human
auaugaaaagaagucaccauug

SEQ ID NO: 329071 - RNA, 22 nt, Human
agagcuggggccagagucaagg

SEQ ID NO: 329072 - RNA, 22 nt, Human
ccugcagguugcagaggcggaa

SEQ ID NO: 329073 - RNA, 22 nt, Human
ccaggccccagggcuggcuuuc

SEQ ID NO: 329074 - RNA, 22 nt, Human
augcugggaaguccuaaccaca

SEQ ID NO: 329075 - RNA, 22 nt, Human
gagcuggggcagcuuaggagug

SEQ ID NO: 329076 - RNA, 21 nt, Human
ggugacacguggccccgcucu

SEQ ID NO: 329077 - RNA, 22 nt, Human
ggcaucccuagaauagccaggu

SEQ ID NO: 329078 - RNA, 20 nt, Human
acaaaauagguacuggguag

SEQ ID NO: 329079 - RNA, 22 nt, Human
agcugggguugcacacauuuug

SEQ ID NO: 329080 - RNA, 22 nt, Human
gagcugggucuccaccuuggca

SEQ ID NO: 329081 - RNA, 22 nt, Human
caccaggcuggagugcagaggu

SEQ ID NO: 329082 - RNA, 22 nt, Human
auauaucaugaguaaaacuuga

SEQ ID NO: 329083 - RNA, 22 nt, Human
gagggcacuggguuucaauguc

SEQ ID NO: 329084 - RNA, 19 nt, Human
gcugggagcagacccuccc

SEQ ID NO: 329085 - RNA, 20 nt, Human
ugcuggggacauacagggug

SEQ ID NO: 329086 - RNA, 22 nt, Human
uagucaaaccucagaauacccc

SEQ ID NO: 329087 - RNA, 22 nt, Human
ccagcccucgguagucccauag

SEQ ID NO: 329088 - RNA, 16 nt, Human
gcagagcucagggacu

SEQ ID NO: 329089 - RNA, 22 nt, Human
cagcccucaaaccacuuccagg

SEQ ID NO: 329090 - RNA, 22 nt, Human
cagaugcuuggaggacacuugg

SEQ ID NO: 329091 - RNA, 22 nt, Human
ccugggcagggagaccaggcuc

SEQ ID NO: 329092 - RNA, 22 nt, Human
uaugauaugcacuuuaucagaa

SEQ ID NO: 329093 - RNA, 22 nt, Human
caauacaauuaccaguuaauca

SEQ ID NO: 329094 - RNA, 22 nt, Human
ccuggggucagggacgcugugc

SEQ ID NO: 329095 - RNA, 22 nt, Human
ccuggagcacauggcaggaggc

SEQ ID NO: 329096 - RNA, 22 nt, Human
ggcaccagggcaagggucuuuc

SEQ ID NO: 329097 - RNA, 22 nt, Human
gcccugugccagucacgcugug

SEQ ID NO: 329098 - RNA, 22 nt, Human
agagcuggagcagccccacugg

SEQ ID NO: 329099 - RNA, 22 nt, Human
augccuggucccaccucuaggu

SEQ ID NO: 329100 - RNA, 22 nt, Human
agagcuggguggacuuguaguu

SEQ ID NO: 329101 - RNA, 22 nt, Human
ccugcagguccccggaugcgca

SEQ ID NO: 329102 - RNA, 22 nt, Human
ucccagccuuccagucugguuu

SEQ ID NO: 329103 - RNA, 22 nt, Human
agcaauaacagaaaacuuuccu

SEQ ID NO: 329104 - RNA, 22 nt, Human
gaggccuggaccagccacagag

SEQ ID NO: 329105 - RNA, 22 nt, Human
acauuucaguaaguguuaauuu

SEQ ID NO: 329106 - RNA, 22 nt, Human
cagagcuggagggaacccuggc

SEQ ID NO: 329107 - RNA, 23 nt, Human
agcuggaggcugucuacucccaa

SEQ ID NO: 329108 - RNA, 21 nt, Human
gcagagcuggaaccaggaccc

SEQ ID NO: 329109 - RNA, 22 nt, Human
uucuagauugccuguaaguaaa

SEQ ID NO: 329110 - RNA, 19 nt, Human
agcuggggcgguguguguu

SEQ ID NO: 329111 - RNA, 22 nt, Human
gcccugugcucaugggaacauc

SEQ ID NO: 329112 - RNA, 22 nt, Human
gagcuggggcggauacucagcu

SEQ ID NO: 329113 - RNA, 22 nt, Human
cagggagcuggugccagccgac

SEQ ID NO: 329114 - RNA, 22 nt, Human
aacugguaucucuucaguguaa

SEQ ID NO: 329115 - RNA, 22 nt, Human
gagcugggcgagccggggaagu

SEQ ID NO: 329116 - RNA, 22 nt, Human
agcccuguagauuuaggagagu

SEQ ID NO: 329117 - RNA, 22 nt, Human
gggccccugggaauucugugau

SEQ ID NO: 329118 - RNA, 22 nt, Human
cugggauccacgggcucccaag

SEQ ID NO: 329119 - RNA, 22 nt, Human
ugguauucuuucuguagaucau

SEQ ID NO: 329120 - RNA, 22 nt, Human
uccugcagccauuagaggucaa

SEQ ID NO: 329121 - RNA, 22 nt, Human
cccuguccugcuaggcccuggu

SEQ ID NO: 329122 - RNA, 22 nt, Human
cccugccuuguuggagccuaug

SEQ ID NO: 329123 - RNA, 22 nt, Human
gcccuuggaacagccuccugcu

SEQ ID NO: 329124 - RNA, 22 nt, Human
cagggagcagcgcuggggccuc

SEQ ID NO: 329125 - RNA, 22 nt, Human
ggaggccaccugaccugcuguu

SEQ ID NO: 329126 - RNA, 22 nt, Human
gcccuugggagguuccacuggg

SEQ ID NO: 329127 - RNA, 22 nt, Human
ccuguccagggacugagggaga

SEQ ID NO: 329128 - RNA, 20 nt, Human
ugcagagcugacauuaccug

SEQ ID NO: 329129 - RNA, 18 nt, Human
ugcugggguagaauccac

SEQ ID NO: 329130 - RNA, 22 nt, Human
agcuggggguagugagaaauaa

SEQ ID NO: 329131 - RNA, 22 nt, Human
ucccugucuaauaugccaugaa

SEQ ID NO: 329132 - RNA, 22 nt, Human
agagcuggauggucaagauggc

SEQ ID NO: 329133 - RNA, 18 nt, Human
gcagagcugggauuccca

SEQ ID NO: 329134 - RNA, 22 nt, Human
caugagauaauuuuucuccagu

SEQ ID NO: 329135 - RNA, 22 nt, Human
aacuaaaacugguuuguucucu

SEQ ID NO: 329136 - RNA, 23 nt, Human
uggcaccaggcauucuaggggua

SEQ ID NO: 329137 - RNA, 20 nt, Human
ccuguggagcugccuccucc

SEQ ID NO: 329138 - RNA, 22 nt, Human
cugggcuuguguuagcugacaa

SEQ ID NO: 329139 - RNA, 22 nt, Human
ugcugggggugucucaccaggc

SEQ ID NO: 329140 - RNA, 20 nt, Human
gcugggcuaccacuggcccu

SEQ ID NO: 329141 - RNA, 22 nt, Human
uuucagaucacuuucaggaaag

SEQ ID NO: 329142 - RNA, 22 nt, Human
aagcugggacuuagcgcagaua

SEQ ID NO: 329143 - RNA, 22 nt, Human
gagccuggccuccugccucagc

SEQ ID NO: 329144 - RNA, 22 nt, Human
gagggcacgaaacaaccacuuc

SEQ ID NO: 329145 - RNA, 22 nt, Human
agcuggggcugcagagaacagg

SEQ ID NO: 329146 - RNA, 22 nt, Human
cacuguaauagcauuauaagug

SEQ ID NO: 329147 - RNA, 22 nt, Human
uccugcaggccagaggggugag

SEQ ID NO: 329148 - RNA, 22 nt, Human
gcaugcugcaccagagccucuc

SEQ ID NO: 329149 - RNA, 22 nt, Human
uaguaacccacacaacaguaga

SEQ ID NO: 329150 - RNA, 22 nt, Human
gcugccucaggcaccuccuggc

SEQ ID NO: 329151 - RNA, 22 nt, Human
aaaauaguuaacguucagagua

SEQ ID NO: 329152 - RNA, 22 nt, Human
cugcagaggccucgccuccucu

SEQ ID NO: 329153 - RNA, 21 nt, Human
ccagccucagaucagggagcu

SEQ ID NO: 329154 - RNA, 22 nt, Human
aaauaucauuuauaacuuuuaa

SEQ ID NO: 329155 - RNA, 22 nt, Human
aaauauguauggaguucaugaa

SEQ ID NO: 329156 - RNA, 18 nt, Human
ggagcugggccccacucc

SEQ ID NO: 329157 - RNA, 19 nt, Human
ccuggcccugcugcgcggg

SEQ ID NO: 329158 - RNA, 22 nt, Human
ucugggguuuucacgcugucuc

SEQ ID NO: 329159 - RNA, 22 nt, Human
ggaggccacgguuuagcaccga

SEQ ID NO: 329160 - RNA, 22 nt, Human
cucagccugugaagagcagagg

SEQ ID NO: 329161 - RNA, 22 nt, Human
gagcugggccucagaacacagu

SEQ ID NO: 329162 - RNA, 22 nt, Human
cccugugggguccgccuguccg

SEQ ID NO: 329163 - RNA, 22 nt, Human
ggcaccaggaucagucugucau

SEQ ID NO: 329164 - RNA, 22 nt, Human
cagagcugcaaaugccccuccg

SEQ ID NO: 329165 - RNA, 22 nt, Human
aggcccuggguuagggcccacu

SEQ ID NO: 329166 - RNA, 22 nt, Human
cagggagcucugggccggacuc

SEQ ID NO: 329167 - RNA, 22 nt, Human
uaggacaugcuacauaaauagg

SEQ ID NO: 329168 - RNA, 22 nt, Human
aaugauugucauuccaaaaagu

SEQ ID NO: 329169 - RNA, 22 nt, Human
ccagccucaucgccugccuguc

SEQ ID NO: 329170 - RNA, 22 nt, Human
uucaaaugcaaguuacuacuuu

SEQ ID NO: 329171 - RNA, 22 nt, Human
caccaggcugaaccagagggga

SEQ ID NO: 329172 - RNA, 22 nt, Human
cccagcccacgguccugggugg

SEQ ID NO: 329173 - RNA, 22 nt, Human
guaucacuuuugagagugagaa

SEQ ID NO: 329174 - RNA, 22 nt, Human
caccaggcugcccaggacaggg

SEQ ID NO: 329175 - RNA, 22 nt, Human
uaaauguauaggcacuaaaccu

SEQ ID NO: 329176 - RNA, 22 nt, Human
agagcuggcacugacccucacc

SEQ ID NO: 329177 - RNA, 22 nt, Human
gcugggcuucacagagccuuua

SEQ ID NO: 329178 - RNA, 22 nt, Human
cagaugcuauguauuauguaug

SEQ ID NO: 329179 - RNA, 22 nt, Human
ccauggccaauugcaccuugcu

SEQ ID NO: 329180 - RNA, 22 nt, Human
aagaaaacaugaucuaauuuaa

SEQ ID NO: 329181 - RNA, 19 nt, Human
auccuggguccuccagcug

SEQ ID NO: 329182 - RNA, 22 nt, Human
aguaaaauuguauuggaaaaca

SEQ ID NO: 329183 - RNA, 17 nt, Human
guccuggugugugagga

SEQ ID NO: 329184 - RNA, 22 nt, Human
gagggcacaaaggcaacauuca

SEQ ID NO: 329185 - RNA, 22 nt, Human
ccugggaccucgcgggaagcgg

SEQ ID NO: 329186 - RNA, 18 nt, Human
auccaaaaagauggaagu

SEQ ID NO: 329187 - RNA, 22 nt, Human
uaggacauaaguauucuaacuu

SEQ ID NO: 329188 - RNA, 22 nt, Human
agcuccugcaccaggggccccu

SEQ ID NO: 329189 - RNA, 22 nt, Human
cacagcugaaguagccaugugg

SEQ ID NO: 329190 - RNA, 22 nt, Human
agagcuggagaugcagguuucg

SEQ ID NO: 329191 - RNA, 22 nt, Human
cagccccuuguccgguagccac

SEQ ID NO: 329192 - RNA, 22 nt, Human
cugggcucuaagggagcaccgu

SEQ ID NO: 329193 - RNA, 22 nt, Human
agagcugggacuuggacucaau

SEQ ID NO: 329194 - RNA, 22 nt, Human
ccucagccuuggccccaggcag

SEQ ID NO: 329195 - RNA, 22 nt, Human
ugggcaccugaggccuggcagg

SEQ ID NO: 329196 - RNA, 22 nt, Human
ugagcuggggucagcuccccug

SEQ ID NO: 329197 - RNA, 23 nt, Human
gagcugggauacaggcuuacugc

SEQ ID NO: 329198 - RNA, 22 nt, Human
augcugggacguacuuguucau

SEQ ID NO: 329199 - RNA, 22 nt, Human
ccuggggagccgccugagcccc

SEQ ID NO: 329200 - RNA, 22 nt, Human
ggcaccagcacuugggauggcu

SEQ ID NO: 329201 - RNA, 22 nt, Human
gagcugggagcugggauuugga

SEQ ID NO: 329202 - RNA, 22 nt, Human
ugcaggagcaccagcucacccu

SEQ ID NO: 329203 - RNA, 22 nt, Human
cccugccugugggcaucaacau

SEQ ID NO: 329204 - RNA, 20 nt, Human
aagcuggguaggagaggagc

SEQ ID NO: 329205 - RNA, 17 nt, Human
auguauauuaacucuga

SEQ ID NO: 329206 - RNA, 22 nt, Human
ggcagagcugcaugagcacuca

SEQ ID NO: 329207 - RNA, 22 nt, Human
cccagcccagcguucgaggggu

SEQ ID NO: 329208 - RNA, 17 nt, Human
agcccugugcucuuuuu

SEQ ID NO: 329209 - RNA, 22 nt, Human
uccugaggagaagagugcuagg

SEQ ID NO: 329210 - RNA, 19 nt, Human
uccagccccucugugugug

SEQ ID NO: 329211 - RNA, 22 nt, Human
agcccuguuuaugccacaucau

SEQ ID NO: 329212 - RNA, 22 nt, Human
cauaaucagauguguacauaag

SEQ ID NO: 329213 - RNA, 22 nt, Human
gcugauagacugaauguuggga

SEQ ID NO: 329214 - RNA, 22 nt, Human
cugggcucagaugagaggaagg

SEQ ID NO: 329215 - RNA, 20 nt, Human
cccagcccgggccgcgcucg

SEQ ID NO: 329216 - RNA, 22 nt, Human
cccugccccaggcggcuucacu

SEQ ID NO: 329217 - RNA, 22 nt, Human
agagcugggugaagugccauca

SEQ ID NO: 329218 - RNA, 17 nt, Human
ggcaccagacggagagu

SEQ ID NO: 329219 - RNA, 22 nt, Human
gacacuccagcuuuuggcucaa

SEQ ID NO: 329220 - RNA, 22 nt, Human
cccuguggcaggaggaggagca

SEQ ID NO: 329221 - RNA, 22 nt, Human
gucaaaugcacagaaccauuaa

SEQ ID NO: 329222 - RNA, 22 nt, Human
uccugcagaccucagucagguc

SEQ ID NO: 329223 - RNA, 22 nt, Human
ucccugagcucacauggcagga

SEQ ID NO: 329224 - RNA, 20 nt, Human
agggcagcuugaggagccgg

SEQ ID NO: 329225 - RNA, 17 nt, Human
ggcagagcugacagggc

SEQ ID NO: 329226 - RNA, 22 nt, Human
cugucuccuccacugcauggga

SEQ ID NO: 329227 - RNA, 22 nt, Human
cugucuccagggcaggugcagg

SEQ ID NO: 329228 - RNA, 22 nt, Human
uagcuggguugaggucaucuac

SEQ ID NO: 329229 - RNA, 22 nt, Human
gagcugggcacacgccacuuga

SEQ ID NO: 329230 - RNA, 22 nt, Human
cagcccacugccucugugguag

SEQ ID NO: 329231 - RNA, 22 nt, Human
ggagcuggucagccuugagcau

SEQ ID NO: 329232 - RNA, 22 nt, Human
cugugcccaggccccuggggau

SEQ ID NO: 329233 - RNA, 22 nt, Human
ggcaccaggacaugacucccag

SEQ ID NO: 329234 - RNA, 21 nt, Human
agagcugguagguagguaggu

SEQ ID NO: 329235 - RNA, 22 nt, Human
auauaacauacauacagaaaag

SEQ ID NO: 329236 - RNA, 22 nt, Human
cugguggagaugccuggccccu

SEQ ID NO: 329237 - RNA, 22 nt, Human
gagcugggacuuggaauccaca

SEQ ID NO: 329238 - RNA, 22 nt, Human
cuccaggauguuagacguccag

SEQ ID NO: 329239 - RNA, 21 nt, Human
caggccccaggccuggggugc

SEQ ID NO: 329240 - RNA, 22 nt, Human
ucccugaggaagggguguggug

SEQ ID NO: 329241 - RNA, 22 nt, Human
uccugcagagccgcccucaggu

SEQ ID NO: 329242 - RNA, 22 nt, Human
aagcugggagggagcccagagu

SEQ ID NO: 329243 - RNA, 22 nt, Human
cugcaggagugaaagcaggccu

SEQ ID NO: 329244 - RNA, 22 nt, Human
ccuggugaauguucauggacug

SEQ ID NO: 329245 - RNA, 22 nt, Human
ggcacagggggcugaggacuag

SEQ ID NO: 329246 - RNA, 22 nt, Human
uccacuggcccaccuccucagu

SEQ ID NO: 329247 - RNA, 22 nt, Human
uagcugggucucuguuuucuca

SEQ ID NO: 329248 - RNA, 22 nt, Human
ucucagccucaccucuauggag

SEQ ID NO: 329249 - RNA, 22 nt, Human
gagcugggauucaucuaugucu

SEQ ID NO: 329250 - RNA, 22 nt, Human
gagcuccucccaggguagcacu

SEQ ID NO: 329251 - RNA, 22 nt, Human
cugcagagcagccaguccccca

SEQ ID NO: 329252 - RNA, 19 nt, Human
agcuccuguucagcagcuc

SEQ ID NO: 329253 - RNA, 19 nt, Human
cugcucccuccuucuggca

SEQ ID NO: 329254 - RNA, 22 nt, Human
ccugcaggcugcaggccaguuc

SEQ ID NO: 329255 - RNA, 22 nt, Human
cugggcuagaaggaccaggaug

SEQ ID NO: 329256 - RNA, 22 nt, Human
cugggcucaagaagucuucccu

SEQ ID NO: 329257 - RNA, 22 nt, Human
agaagucauuuauguuagauga

SEQ ID NO: 329258 - RNA, 22 nt, Human
gugcugggcuccaccccagagg

SEQ ID NO: 329259 - RNA, 22 nt, Human
agagcuggcugcugcggugcuu

SEQ ID NO: 329260 - RNA, 22 nt, Human
aaaaugauauccugacuuuuau

SEQ ID NO: 329261 - RNA, 22 nt, Human
gagcugggaagauagcuugagc

SEQ ID NO: 329262 - RNA, 22 nt, Human
uuaugguaauuaaaacauguau

SEQ ID NO: 329263 - RNA, 22 nt, Human
ucagacaaguaaaauaauguaa

SEQ ID NO: 329264 - RNA, 22 nt, Human
gcugggcucuuaucaccuguac

SEQ ID NO: 329265 - RNA, 22 nt, Human
gaccaggcuuccccagaccuca

SEQ ID NO: 329266 - RNA, 22 nt, Human
gcugggcucuuuaccccuguac

SEQ ID NO: 329267 - RNA, 22 nt, Human
ccugguggccuucagcccacaa

SEQ ID NO: 329268 - RNA, 22 nt, Human
ccugguggacagcagccagcag

SEQ ID NO: 329269 - RNA, 22 nt, Human
agagcuggggcauaaaugccac

SEQ ID NO: 329270 - RNA, 22 nt, Human
cugggguuggccagggcccuag

SEQ ID NO: 329271 - RNA, 22 nt, Human
aacuaaaucuggcauuuagagc

SEQ ID NO: 329272 - RNA, 22 nt, Human
gaucucaaagcaguguggguug

SEQ ID NO: 329273 - RNA, 22 nt, Human
cugcaggacgaccgccucaucu

SEQ ID NO: 329274 - RNA, 22 nt, Human
agagcuggcugguagcccugau

SEQ ID NO: 329275 - RNA, 22 nt, Human
acaacaaaaucacuagucuucc

SEQ ID NO: 329276 - RNA, 22 nt, Human
ccagggagcggggcugggucuc

SEQ ID NO: 329277 - RNA, 22 nt, Human
cccuguccuggaugggagcacu

SEQ ID NO: 329278 - RNA, 22 nt, Human
ggcaccagggacaauccucuuc

SEQ ID NO: 329279 - RNA, 22 nt, Human
cagcuccugccugggcagcugu

SEQ ID NO: 329280 - RNA, 22 nt, Human
uaggacauguguuuuauauaug

SEQ ID NO: 329281 - RNA, 22 nt, Human
ccaggcccuugcaagucccacc

SEQ ID NO: 329282 - RNA, 22 nt, Human
uuccugguaaauuauguccagg

SEQ ID NO: 329283 - RNA, 22 nt, Human
cugggugagcuggccagagggu

SEQ ID NO: 329284 - RNA, 22 nt, Human
cccugugguugcuagggcacag

SEQ ID NO: 329285 - RNA, 22 nt, Human
gauaauauuagaagauacaaau

SEQ ID NO: 329286 - RNA, 19 nt, Human
gggcuccuugggccucucu

SEQ ID NO: 329287 - RNA, 22 nt, Human
cugcagaguggagccucggcug

SEQ ID NO: 329288 - RNA, 22 nt, Human
gcagagcugggauaugaaccca

SEQ ID NO: 329289 - RNA, 20 nt, Human
acuuuacugagcuguaauuc

SEQ ID NO: 329290 - RNA, 22 nt, Human
ucagcuucagaucagcuagaga

SEQ ID NO: 329291 - RNA, 22 nt, Human
ggagcuggcagcgcaacccaga

SEQ ID NO: 329292 - RNA, 22 nt, Human
cccuggucagggaaggcgccug

SEQ ID NO: 329293 - RNA, 23 nt, Human
aauuuaguuugagacauuagccu

SEQ ID NO: 329294 - RNA, 22 nt, Human
ccuggggagagaaagcccagcc

SEQ ID NO: 329295 - RNA, 22 nt, Human
agcuccugucucaagggagccu

SEQ ID NO: 329296 - RNA, 22 nt, Human
cugcaggggcaguccacuuccu

SEQ ID NO: 329297 - RNA, 22 nt, Human
ccugggcuuucggcggcuuccu

SEQ ID NO: 329298 - RNA, 23 nt, Human
uccuggugacaugccugagcauc

SEQ ID NO: 329299 - RNA, 22 nt, Human
ccuggagcuuggucacgcugcg

SEQ ID NO: 329300 - RNA, 23 nt, Human
ccugaagggucaggguccucagc

SEQ ID NO: 329301 - RNA, 22 nt, Human
gcugggaggaucucucccuguc

SEQ ID NO: 329302 - RNA, 22 nt, Human
cucucugaggaaggagcaucug

SEQ ID NO: 329303 - RNA, 22 nt, Human
cugucccucaguucugggcaaa

SEQ ID NO: 329304 - RNA, 22 nt, Human
ccccugccagcuaucccugaac

SEQ ID NO: 329305 - RNA, 22 nt, Human
gccccuggcuggccagcuccuc

SEQ ID NO: 329306 - RNA, 19 nt, Human
uguagcuagugucuaucca

SEQ ID NO: 329307 - RNA, 22 nt, Human
agaggacacaucuuuccucaaa

SEQ ID NO: 329308 - RNA, 20 nt, Human
uggcaccaggugguggcccc

SEQ ID NO: 329309 - RNA, 17 nt, Human
uggcacagaggugcuau

SEQ ID NO: 329310 - RNA, 22 nt, Human
ccugacagcgugucccuggccc

SEQ ID NO: 329311 - RNA, 22 nt, Human
uauccaaaguuucucagaaacu

SEQ ID NO: 329312 - RNA, 21 nt, Human
gcaaaugaguuaacuaacuca

SEQ ID NO: 329313 - RNA, 22 nt, Human
gucugggguacuuucaucugau

SEQ ID NO: 329314 - RNA, 22 nt, Human
uagcuggggcuuucauucuugc

SEQ ID NO: 329315 - RNA, 22 nt, Human
ugcuggggcagaagagccaaga

SEQ ID NO: 329316 - RNA, 22 nt, Human
ccugcagguuucccccggacgg

SEQ ID NO: 329317 - RNA, 22 nt, Human
auaaaugauucagcaggaaaua

SEQ ID NO: 329318 - RNA, 22 nt, Human
ugcuggggcucugaccacucca

SEQ ID NO: 329319 - RNA, 22 nt, Human
gugcauccacuagggcucuccc

SEQ ID NO: 329320 - RNA, 22 nt, Human
aaaaguauuuuggaucucagau

SEQ ID NO: 329321 - RNA, 22 nt, Human
agagcuggacgucugagcccua

SEQ ID NO: 329322 - RNA, 22 nt, Human
cccuguggaggcagcauccugc

SEQ ID NO: 329323 - RNA, 18 nt, Human
agcuggggccucuggucc

SEQ ID NO: 329324 - RNA, 22 nt, Human
uccugagggcucggggcucaug

SEQ ID NO: 329325 - RNA, 20 nt, Human
ggcagagcuaugucuguugc

SEQ ID NO: 329326 - RNA, 22 nt, Human
agcuggggguuggauaagggua

SEQ ID NO: 329327 - RNA, 22 nt, Human
gcugggcuugguuucccugcuu

SEQ ID NO: 329328 - RNA, 22 nt, Human
gagguggcgcgccaucccugcc

SEQ ID NO: 329329 - RNA, 22 nt, Human
agacuuuaaugugcaaaugaaa

SEQ ID NO: 329330 - RNA, 22 nt, Human
ccuggagcaaaaaucuaaggag

SEQ ID NO: 329331 - RNA, 22 nt, Human
agcuccugcgcacggugcacac

SEQ ID NO: 329332 - RNA, 22 nt, Human
agguauuauuagcaucucuauu

SEQ ID NO: 329333 - RNA, 22 nt, Human
cugggcucaaauccuggcccug

SEQ ID NO: 329334 - RNA, 22 nt, Human
uuuacugaacugcuaguacagg

SEQ ID NO: 329335 - RNA, 22 nt, Human
cccuguccuuggcugugaggcu

SEQ ID NO: 329336 - RNA, 22 nt, Human
gauguuuuaggucccuguagcu

SEQ ID NO: 329337 - RNA, 22 nt, Human
gagcugggcuggcuuccucccu

SEQ ID NO: 329338 - RNA, 21 nt, Human
agagcuggccugccaggcccu

SEQ ID NO: 329339 - RNA, 22 nt, Human
agagcuggcugugggugacuuu

SEQ ID NO: 329340 - RNA, 19 nt, Human
cagccucaaucccucgggc

SEQ ID NO: 329341 - RNA, 22 nt, Human
agcccugucucucacuccaggu

SEQ ID NO: 329342 - RNA, 22 nt, Human
agagcuggaaucagaccucagg

SEQ ID NO: 329343 - RNA, 20 nt, Human
ucccugccuuuuacugcugg

SEQ ID NO: 329344 - RNA, 22 nt, Human
caggcucagcaggagccugacc

SEQ ID NO: 329345 - RNA, 18 nt, Human
aagcugggaaggagacag

SEQ ID NO: 329346 - RNA, 22 nt, Human
uuucagaucauuuuuuaaguac

SEQ ID NO: 329347 - RNA, 22 nt, Human
agaggaggccaggcccacaccu

SEQ ID NO: 329348 - RNA, 22 nt, Human
ugggcuccggcggccucaggcu

SEQ ID NO: 329349 - RNA, 21 nt, Human
accaggccaggaggcuggcac

SEQ ID NO: 329350 - RNA, 22 nt, Human
gcuuccuggagggagagagcug

SEQ ID NO: 329351 - RNA, 22 nt, Human
ugaguuauaaugaauauuugaa

SEQ ID NO: 329352 - RNA, 22 nt, Human
uccuguggggaaaagccuaucu

SEQ ID NO: 329353 - RNA, 20 nt, Human
agcuccugguauaggugccu

SEQ ID NO: 329354 - RNA, 22 nt, Human
uccugcagagacagaggccuca

SEQ ID NO: 329355 - RNA, 22 nt, Human
agaugguagguggcaggacuga

SEQ ID NO: 329356 - RNA, 22 nt, Human
ccuguggagcuuucagcagcuc

SEQ ID NO: 329357 - RNA, 22 nt, Human
ggcauccugggacuggcuucuu

SEQ ID NO: 329358 - RNA, 22 nt, Human
ccuggcagcaggugggcccgug

SEQ ID NO: 329359 - RNA, 22 nt, Human
ccaggcccugccugugguuccu

SEQ ID NO: 329360 - RNA, 18 nt, Human
gagcugggagaaggaagg

SEQ ID NO: 329361 - RNA, 22 nt, Human
gagcugggacauggguccucuc

SEQ ID NO: 329362 - RNA, 22 nt, Human
gagcugggauuugaaccuggga

SEQ ID NO: 329363 - RNA, 22 nt, Human
ggcagagccuucuggagcucgc

SEQ ID NO: 329364 - RNA, 22 nt, Human
uggcaccaggcgggguggcugu

SEQ ID NO: 329365 - RNA, 22 nt, Human
gagcuggguauauggcuuuaug

SEQ ID NO: 329366 - RNA, 22 nt, Human
uucaguaugauuccuccaguag

SEQ ID NO: 329367 - RNA, 22 nt, Human
agagcuggaaaaguuguuuuaa

SEQ ID NO: 329368 - RNA, 21 nt, Human
ggagcuggggagcuggcccca

SEQ ID NO: 329369 - RNA, 21 nt, Human
cagagcuguccaaacccugac

SEQ ID NO: 329370 - RNA, 22 nt, Human
cccacucccugcacgccugccg

SEQ ID NO: 329371 - RNA, 22 nt, Human
caccagguuccgggcagagcug

SEQ ID NO: 329372 - RNA, 22 nt, Human
agagcuggugcauauucagaaa

SEQ ID NO: 329373 - RNA, 22 nt, Human
cugggcuccuaaccauccaggu

SEQ ID NO: 329374 - RNA, 22 nt, Human
ccagccccuauccucgcuccac

SEQ ID NO: 329375 - RNA, 22 nt, Human
gcaccaggcagcugagcaggcc

SEQ ID NO: 329376 - RNA, 22 nt, Human
gcagagcuucuguccuucagga

SEQ ID NO: 329377 - RNA, 22 nt, Human
ugggcaccuagcaacccuucuc

SEQ ID NO: 329378 - RNA, 22 nt, Human
gcagcaggcuuuucauaccuug

SEQ ID NO: 329379 - RNA, 22 nt, Human
agagcugguuuacucaggaauu

SEQ ID NO: 329380 - RNA, 20 nt, Human
ggcaccaggcuaggauugga

SEQ ID NO: 329381 - RNA, 22 nt, Human
ggcaccagggaaggaaggcugg

SEQ ID NO: 329382 - RNA, 22 nt, Human
cagccccuuccuggcaucugga

SEQ ID NO: 329383 - RNA, 22 nt, Human
gggcccugugauuucuugagga

SEQ ID NO: 329384 - RNA, 17 nt, Human
ccagggaggggccgcgc

SEQ ID NO: 329385 - RNA, 22 nt, Human
ugcagagcuucauugcauaggc

SEQ ID NO: 329386 - RNA, 22 nt, Human
cagagcuguccaaacccugaca

SEQ ID NO: 329387 - RNA, 22 nt, Human
uccugcagccacugcaggcaga

SEQ ID NO: 329388 - RNA, 22 nt, Human
gagggcacucgagacuacggca

SEQ ID NO: 329389 - RNA, 22 nt, Human
gcaccaggcuuagagccccagg

SEQ ID NO: 329390 - RNA, 22 nt, Human
ggagcuggccgccuaugugcag

SEQ ID NO: 329391 - RNA, 22 nt, Human
cugucccucaucaccucugggu

SEQ ID NO: 329392 - RNA, 18 nt, Human
ucuggaacaacuucaugu

SEQ ID NO: 329393 - RNA, 23 nt, Human
ccagcccuccaccagcucuaggc

SEQ ID NO: 329394 - RNA, 22 nt, Human
ccugcagggugcugccacagau

SEQ ID NO: 329395 - RNA, 20 nt, Human
agcccuguuuccuggagaga

SEQ ID NO: 329396 - RNA, 22 nt, Human
ggcaccagcaggcaccgaugcc

SEQ ID NO: 329397 - RNA, 22 nt, Human
cccucagcuccacccucagcag

SEQ ID NO: 329398 - RNA, 22 nt, Human
aaauauguuuuccaguugucau

SEQ ID NO: 329399 - RNA, 22 nt, Human
ucaaaguagccggauggaauuu

SEQ ID NO: 329400 - RNA, 22 nt, Human
uccugaggcuaaagugcagugg

SEQ ID NO: 329401 - RNA, 22 nt, Human
agagcugggaccgucuggaagu

SEQ ID NO: 329402 - RNA, 22 nt, Human
gggcuccuccucugacuguggc

SEQ ID NO: 329403 - RNA, 22 nt, Human
gcccauggcagaacugugagca

SEQ ID NO: 329404 - RNA, 22 nt, Human
ggcaccaggcugggcauaggcc

SEQ ID NO: 329405 - RNA, 19 nt, Human
cagcccucuuaccacugug

SEQ ID NO: 329406 - RNA, 22 nt, Human
uccugaggcacaauccuagaau

SEQ ID NO: 329407 - RNA, 22 nt, Human
gccuguggggcugaggcugccu

SEQ ID NO: 329408 - RNA, 22 nt, Human
ccuggguacccuuggcggccuu

SEQ ID NO: 329409 - RNA, 22 nt, Human
agguggcagagugacaggcuga

SEQ ID NO: 329410 - RNA, 22 nt, Human
gcagagcucaugccugcaccuc

SEQ ID NO: 329411 - RNA, 22 nt, Human
agagcuggccagggaucacucu

SEQ ID NO: 329412 - RNA, 22 nt, Human
gcccagcccugaggucacagcu

SEQ ID NO: 329413 - RNA, 23 nt, Human
uccugaggaauggcaucucacau

SEQ ID NO: 329414 - RNA, 22 nt, Human
cccugcagccuugcaugccuuc

SEQ ID NO: 329415 - RNA, 22 nt, Human
gcaccgagaaggaagcaugccu

SEQ ID NO: 329416 - RNA, 22 nt, Human
agagcuggggcucuggguuuaa

SEQ ID NO: 329417 - RNA, 22 nt, Human
acuuuacuccccaacauaaaug

SEQ ID NO: 329418 - RNA, 22 nt, Human
gagcuggguguuuauuugccaa

SEQ ID NO: 329419 - RNA, 22 nt, Human
gcccaugguuacuuuucuggcu

SEQ ID NO: 329420 - RNA, 21 nt, Human
agagcugggacuugccugaga

SEQ ID NO: 329421 - RNA, 22 nt, Human
ccacucccuuccgguccagggc

SEQ ID NO: 329422 - RNA, 22 nt, Human
gcccuguguguuugcacugauu

SEQ ID NO: 329423 - RNA, 22 nt, Human
uccuguggcguuaucaugugau

SEQ ID NO: 329424 - RNA, 22 nt, Human
cugcagccucaaccuccugagc

SEQ ID NO: 329425 - RNA, 22 nt, Human
gcaggagcugcucuccugacga

SEQ ID NO: 329426 - RNA, 22 nt, Human
agccugggcccugccucuucuc

SEQ ID NO: 329427 - RNA, 22 nt, Human
ccagcccugaacccugcugcau

SEQ ID NO: 329428 - RNA, 22 nt, Human
uccugcaggggcugaggaacca

SEQ ID NO: 329429 - RNA, 20 nt, Human
cugggcucaagugauccucc

SEQ ID NO: 329430 - RNA, 22 nt, Human
uagcugggaauuaucugguugc

SEQ ID NO: 329431 - RNA, 22 nt, Human
aucauccuagaaggaagcuagg

SEQ ID NO: 329432 - RNA, 22 nt, Human
agagcuggcagcagcuucuccu

SEQ ID NO: 329433 - RNA, 22 nt, Human
agagcugggugguggugacuca

SEQ ID NO: 329434 - RNA, 22 nt, Human
agagcuggaagcugcucuuaga

SEQ ID NO: 329435 - RNA, 16 nt, Human
ggcaccagugaacaca

SEQ ID NO: 329436 - RNA, 22 nt, Human
ggcaucccuucuuccaguguca

SEQ ID NO: 329437 - RNA, 22 nt, Human
cuggugcacauucgcucucaua

SEQ ID NO: 329438 - RNA, 22 nt, Human
cacagcugucagcugaccuagg

SEQ ID NO: 329439 - RNA, 22 nt, Human
uuucagaugguauauacaguag

SEQ ID NO: 329440 - RNA, 22 nt, Human
agcuggggcauuuauccacuaa

SEQ ID NO: 329441 - RNA, 22 nt, Human
caccaggcacauaguaggcacu

SEQ ID NO: 329442 - RNA, 22 nt, Human
cugucacccacccagccuguca

SEQ ID NO: 329443 - RNA, 21 nt, Human
ugggcaccaaaaccuaggagu

SEQ ID NO: 329444 - RNA, 22 nt, Human
ccugucaggguuugccucagaa

SEQ ID NO: 329445 - RNA, 22 nt, Human
ugcugggcuggagcugccaggg

SEQ ID NO: 329446 - RNA, 22 nt, Human
gagcugggaguuauagcauguu

SEQ ID NO: 329447 - RNA, 22 nt, Human
ccuggggucacuugcagccgca

SEQ ID NO: 329448 - RNA, 22 nt, Human
ggagcuggagagcuagccuagg

SEQ ID NO: 329449 - RNA, 22 nt, Human
ccugcagggaaucgaggcagaa

SEQ ID NO: 329450 - RNA, 22 nt, Human
ucaaaguauuuuaacuguaucc

SEQ ID NO: 329451 - RNA, 20 nt, Human
cugggcucgguggcccuggc

SEQ ID NO: 329452 - RNA, 22 nt, Human
ccucucccgggugccgcugggc

SEQ ID NO: 329453 - RNA, 20 nt, Human
aggcuccuguaccugaggaa

SEQ ID NO: 329454 - RNA, 22 nt, Human
ggagcugggaacuauguaguau

SEQ ID NO: 329455 - RNA, 22 nt, Human
cugggcucaguggcucauggcu

SEQ ID NO: 329456 - RNA, 22 nt, Human
uccugcaguuacaucccagcca

SEQ ID NO: 329457 - RNA, 22 nt, Human
ugcugaggcccaggagcacuuu

SEQ ID NO: 329458 - RNA, 22 nt, Human
uauaaaugccaggacuuuagau

SEQ ID NO: 329459 - RNA, 22 nt, Human
gugcaccccggggcccugcucc

SEQ ID NO: 329460 - RNA, 22 nt, Human
ugaucaaaacauuacuccacca

SEQ ID NO: 329461 - RNA, 22 nt, Human
gcaggagcucguuuccaggcug

SEQ ID NO: 329462 - RNA, 20 nt, Human
uuucagauuuacagaaaugu

SEQ ID NO: 329463 - RNA, 22 nt, Human
gcagagcuccccaagacaccaa

SEQ ID NO: 329464 - RNA, 22 nt, Human
uccacuggaacaacucugaggc

SEQ ID NO: 329465 - RNA, 22 nt, Human
ccuggagcuuuuccauccugga

SEQ ID NO: 329466 - RNA, 22 nt, Human
caaguaaagaaucacauuucuu

SEQ ID NO: 329467 - RNA, 22 nt, Human
cccugguguccacuggaggaag

SEQ ID NO: 329468 - RNA, 22 nt, Human
uccuguggcucuguggaaccuu

SEQ ID NO: 329469 - RNA, 22 nt, Human
augcugggagugaagccccugg

SEQ ID NO: 329470 - RNA, 22 nt, Human
gcccugugcuuggauggcagau

SEQ ID NO: 329471 - RNA, 22 nt, Human
uugucuaaugagcuccacuuca

SEQ ID NO: 329472 - RNA, 22 nt, Human
ugggggagccuucacaguagcu

SEQ ID NO: 329473 - RNA, 22 nt, Human
cuggagcagcagguggccaggg

SEQ ID NO: 329474 - RNA, 22 nt, Human
guguggucgaaguucucccgga

SEQ ID NO: 329475 - RNA, 22 nt, Human
ucccugccuccuggcagugcca

SEQ ID NO: 329476 - RNA, 22 nt, Human
gcccagcaccucucucaggguu

SEQ ID NO: 329477 - RNA, 22 nt, Human
ggugauuuccuuuugcaaaguc

SEQ ID NO: 329478 - RNA, 22 nt, Human
ccuggagacccacuucugccaa

SEQ ID NO: 329479 - RNA, 22 nt, Human
uuugaaauguaucaguauaggu

SEQ ID NO: 329480 - RNA, 22 nt, Human
ggcucuggcgagcuuuaguaca

SEQ ID NO: 329481 - RNA, 21 nt, Human
gccaucaccaagcucuucccc

SEQ ID NO: 329482 - RNA, 22 nt, Human
gaaggacccucuggggucucag

SEQ ID NO: 329483 - RNA, 22 nt, Human
ccuggggagaagagcuuccccc

SEQ ID NO: 329484 - RNA, 22 nt, Human
aggggagguguccccaaaucuc

SEQ ID NO: 329485 - RNA, 22 nt, Human
gcuugcugaacaggaaccuggc

SEQ ID NO: 329486 - RNA, 20 nt, Human
ugggguccuggaggggaucc

SEQ ID NO: 329487 - RNA, 22 nt, Human
ugugagauuuuauuugauaugc

SEQ ID NO: 329488 - RNA, 22 nt, Human
ggaaggggagcuaaaucuacug

SEQ ID NO: 329489 - RNA, 16 nt, Human
gcagguggggcgcgca

SEQ ID NO: 329490 - RNA, 22 nt, Human
cagugccaaggauggccuggga

SEQ ID NO: 329491 - RNA, 22 nt, Human
ucgggacgguggcauuugugcc

SEQ ID NO: 329492 - RNA, 22 nt, Human
uccaggagggggagccgugccg

SEQ ID NO: 329493 - RNA, 22 nt, Human
gcaugcaggaagggcuugggga

SEQ ID NO: 329494 - RNA, 22 nt, Human
ucccuggcugguguagagggau

SEQ ID NO: 329495 - RNA, 20 nt, Human
guggcagugguggcagcagu

SEQ ID NO: 329496 - RNA, 22 nt, Human
cucugggguggaggaggcugac

SEQ ID NO: 329497 - RNA, 22 nt, Human
gacuguggacucucaugauaga

SEQ ID NO: 329498 - RNA, 22 nt, Human
gagcugcuggccuccugcggga

SEQ ID NO: 329499 - RNA, 23 nt, Human
ugucuugguuucuucacccuagu

SEQ ID NO: 329500 - RNA, 22 nt, Human
ccuggccgacauggugaaacgc

SEQ ID NO: 329501 - RNA, 22 nt, Human
ggcuuuuguuucagcucugcua

SEQ ID NO: 329502 - RNA, 22 nt, Human
caagagcuuuagaaaugcucau

SEQ ID NO: 329503 - RNA, 22 nt, Human
cuggcuuugaucagagugaccu

SEQ ID NO: 329504 - RNA, 22 nt, Human
ugggccagauccauggcaauaa

SEQ ID NO: 329505 - RNA, 22 nt, Human
guuuugaauacuacuagaacuu

SEQ ID NO: 329506 - RNA, 22 nt, Human
cucugccagccaaagucaucac

SEQ ID NO: 329507 - RNA, 22 nt, Human
aaguuugucucauuugaucuuc

SEQ ID NO: 329508 - RNA, 22 nt, Human
gaggcuguaacuugggcacugg

SEQ ID NO: 329509 - RNA, 19 nt, Human
cgcacagccugccaggcgc

SEQ ID NO: 329510 - RNA, 21 nt, Human
gcugcucgagauccagugcuu

SEQ ID NO: 329511 - RNA, 22 nt, Human
ucuccuggcauuugguugagua

SEQ ID NO: 329512 - RNA, 22 nt, Human
agugauguagguggauucuggc

SEQ ID NO: 329513 - RNA, 22 nt, Human
uggcuguagaaucagagacuug

SEQ ID NO: 329514 - RNA, 22 nt, Human
uagcugcuugaccaggcagugg

SEQ ID NO: 329515 - RNA, 22 nt, Human
cugagcagucuagccagguguu

SEQ ID NO: 329516 - RNA, 22 nt, Human
ccugugucaucagcuguggcua

SEQ ID NO: 329517 - RNA, 22 nt, Human
uucuuuuaauuucugucugcag

SEQ ID NO: 329518 - RNA, 22 nt, Human
ucauccugaagaaccugcuucc

SEQ ID NO: 329519 - RNA, 22 nt, Human
gaaaauaguucaucacaaugau

SEQ ID NO: 329520 - RNA, 22 nt, Human
cuucuucagaggccagccucug

SEQ ID NO: 329521 - RNA, 22 nt, Human
agggcuccuaugccccauggac

SEQ ID NO: 329522 - RNA, 22 nt, Human
ccagugugcauuaucauguguc

SEQ ID NO: 329523 - RNA, 22 nt, Human
cucugaauggacacuccagugu

SEQ ID NO: 329524 - RNA, 21 nt, Human
agaugcaguuugcaggugggu

SEQ ID NO: 329525 - RNA, 22 nt, Human
gagcagcagcugggccagguuc

SEQ ID NO: 329526 - RNA, 22 nt, Human
aggcucaguauagcuggcaagu

SEQ ID NO: 329527 - RNA, 18 nt, Human
ucagaggagauaccuaaa

SEQ ID NO: 329528 - RNA, 19 nt, Human
ggcugccuucugcucaucu

SEQ ID NO: 329529 - RNA, 22 nt, Human
ggagaguggauuccagcuguau

SEQ ID NO: 329530 - RNA, 22 nt, Human
gucugcccuuggccugggacuu

SEQ ID NO: 329531 - RNA, 22 nt, Human
agcaccagcucaaggugcaccu

SEQ ID NO: 329532 - RNA, 22 nt, Human
caauuuuuaaacuaugaaguug

SEQ ID NO: 329533 - RNA, 23 nt, Human
gcacagagcaguuaggggaagau

SEQ ID NO: 329534 - RNA, 22 nt, Human
uaagggcugacuuggaacuguc

SEQ ID NO: 329535 - RNA, 22 nt, Human
agucauguguucaucuuucauu

SEQ ID NO: 329536 - RNA, 22 nt, Human
ucaggccaggagaucagauuga

SEQ ID NO: 329537 - RNA, 22 nt, Human
agcgcuugccgcacuccaagca

SEQ ID NO: 329538 - RNA, 22 nt, Human
ggccacuguuuccugggcaguu

SEQ ID NO: 329539 - RNA, 22 nt, Human
cugguuuuccaauguuuugacu

SEQ ID NO: 329540 - RNA, 22 nt, Human
auucccauagccauccggagag

SEQ ID NO: 329541 - RNA, 22 nt, Human
aacccaggaguuggaggcugug

SEQ ID NO: 329542 - RNA, 22 nt, Human
cgccccagccaguugagcggcg

SEQ ID NO: 329543 - RNA, 22 nt, Human
guccacauaggaacccagcuuc

SEQ ID NO: 329544 - RNA, 22 nt, Human
ucuucaugucaugguauauuga

SEQ ID NO: 329545 - RNA, 22 nt, Human
cgggaagguggagguugcagug

SEQ ID NO: 329546 - RNA, 22 nt, Human
gucugcugacagagcauggacc

SEQ ID NO: 329547 - RNA, 22 nt, Human
ugcugcucuucaccauggccuc

SEQ ID NO: 329548 - RNA, 22 nt, Human
cagcugcucugguggucucucc

SEQ ID NO: 329549 - RNA, 22 nt, Human
cuucagagugacucagcaucuu

SEQ ID NO: 329550 - RNA, 22 nt, Human
aggacaggauugagcugaacug

SEQ ID NO: 329551 - RNA, 22 nt, Human
gccccagcguggcuguguuagg

SEQ ID NO: 329552 - RNA, 22 nt, Human
aaacccaggguuuugucuuccc

SEQ ID NO: 329553 - RNA, 22 nt, Human
uuuccaaggaugugucucucua

SEQ ID NO: 329554 - RNA, 22 nt, Human
gucugcccugcagacaugccuc

SEQ ID NO: 329555 - RNA, 22 nt, Human
ucucugagguuguuuccagcac

SEQ ID NO: 329556 - RNA, 22 nt, Human
agugcguggaccccuggcugcu

SEQ ID NO: 329557 - RNA, 22 nt, Human
augcccagaacccccuggaugg

SEQ ID NO: 329558 - RNA, 22 nt, Human
aagcagccagccaucaugcccg

SEQ ID NO: 329559 - RNA, 22 nt, Human
cuggccagccucccagguaccc

SEQ ID NO: 329560 - RNA, 22 nt, Human
cagcuggaggagcagcuuccag

SEQ ID NO: 329561 - RNA, 22 nt, Human
cugggcccaggcggcucucgga

SEQ ID NO: 329562 - RNA, 22 nt, Human
uggaagggguuacgcagcagga

SEQ ID NO: 329563 - RNA, 22 nt, Human
ccauggccugaaggagugcauc

SEQ ID NO: 329564 - RNA, 22 nt, Human
cccaccagaccugcaccggcac

SEQ ID NO: 329565 - RNA, 22 nt, Human
ugaaguuguuaagguugccauu

SEQ ID NO: 329566 - RNA, 22 nt, Human
ccaggcagccugcuccauucug

SEQ ID NO: 329567 - RNA, 22 nt, Human
ugagcucaagcaauucacccgc

SEQ ID NO: 329568 - RNA, 22 nt, Human
uggagccagcaggacucagagg

SEQ ID NO: 329569 - RNA, 22 nt, Human
agccagcauauauauaguugaa

SEQ ID NO: 329570 - RNA, 22 nt, Human
uccuggcucaggccccuggugc

SEQ ID NO: 329571 - RNA, 22 nt, Human
gagagaagggggauaugagccu

SEQ ID NO: 329572 - RNA, 22 nt, Human
uggggcuccuccuggcaggagg

SEQ ID NO: 329573 - RNA, 22 nt, Human
uaauuuugucacagugacaugc

SEQ ID NO: 329574 - RNA, 22 nt, Human
ucacagcucacuguagccucga

SEQ ID NO: 329575 - RNA, 22 nt, Human
cugcucucuguuccccuggauc

SEQ ID NO: 329576 - RNA, 22 nt, Human
aguggcaguagaugagcugguu

SEQ ID NO: 329577 - RNA, 22 nt, Human
auggccagcaagguagggcaau

SEQ ID NO: 329578 - RNA, 22 nt, Human
uuuacuguuuacagcuaaugca

SEQ ID NO: 329579 - RNA, 22 nt, Human
uugcacgcuugcgguuccugcc

SEQ ID NO: 329580 - RNA, 22 nt, Human
cuggccagggugcgaucguggu

SEQ ID NO: 329581 - RNA, 22 nt, Human
agaaaagaggcuuucuaagcau

SEQ ID NO: 329582 - RNA, 22 nt, Human
ugggaagauaugagugaccaac

SEQ ID NO: 329583 - RNA, 22 nt, Human
cucucuccuuagcugcagacca

SEQ ID NO: 329584 - RNA, 22 nt, Human
cgggagccucugggucacacug

SEQ ID NO: 329585 - RNA, 22 nt, Human
cuuuauguuggggugucuuagu

SEQ ID NO: 329586 - RNA, 22 nt, Human
uucugugcucaaaacuuuccaa

SEQ ID NO: 329587 - RNA, 22 nt, Human
cgggcuccgggucuuugcaguc

SEQ ID NO: 329588 - RNA, 22 nt, Human
agcugggcuggagcuccaagcg

SEQ ID NO: 329589 - RNA, 23 nt, Human
agcccagcagagaaccuaggucc

SEQ ID NO: 329590 - RNA, 22 nt, Human
gugauugugaaaacauuaagaa

SEQ ID NO: 329591 - RNA, 22 nt, Human
ugcugguucuuaggagagagau

SEQ ID NO: 329592 - RNA, 18 nt, Human
cuggucucccuucgcuuu

SEQ ID NO: 329593 - RNA, 22 nt, Human
ccggcgucucuuccacuuccua

SEQ ID NO: 329594 - RNA, 20 nt, Human
aggaaggagaaucugagcaa

SEQ ID NO: 329595 - RNA, 22 nt, Human
ugcauguuuuauaccaaagcuu

SEQ ID NO: 329596 - RNA, 22 nt, Human
ugaggccugaagccuggagccu

SEQ ID NO: 329597 - RNA, 22 nt, Human
uguauuucugcuuucucuagua

SEQ ID NO: 329598 - RNA, 22 nt, Human
caggccuugaaggccugcggga

SEQ ID NO: 329599 - RNA, 22 nt, Human
uacuuugagaugaugcugaucg

SEQ ID NO: 329600 - RNA, 22 nt, Human
gagcucagccugaggccuggcu

SEQ ID NO: 329601 - RNA, 22 nt, Human
gucaucaucaggcagaugcugc

SEQ ID NO: 329602 - RNA, 22 nt, Human
uuuguucaccuagcaaacuuuu

SEQ ID NO: 329603 - RNA, 22 nt, Human
guccuguguaaguacuugcuca

SEQ ID NO: 329604 - RNA, 22 nt, Human
gaggggcugggguugacuccaa

SEQ ID NO: 329605 - RNA, 20 nt, Human
uggcccagcacgacgaggac

SEQ ID NO: 329606 - RNA, 22 nt, Human
cugcgggcugucaggcgugcca

SEQ ID NO: 329607 - RNA, 19 nt, Human
gcuuccagcacugcaggag

SEQ ID NO: 329608 - RNA, 22 nt, Human
uuguaagacuguagaaugcaaa

SEQ ID NO: 329609 - RNA, 22 nt, Human
ugggagcaagcuggugcuggag

SEQ ID NO: 329610 - RNA, 22 nt, Human
ugcccugcagacccugcagugu

SEQ ID NO: 329611 - RNA, 22 nt, Human
cgaggaggaaacgcggagaacu

SEQ ID NO: 329612 - RNA, 22 nt, Human
cuugccaguguugcagaagcuc

SEQ ID NO: 329613 - RNA, 22 nt, Human
cuggagaggcugggaacagguu

SEQ ID NO: 329614 - RNA, 22 nt, Human
cagggcuccccagagagccucu

SEQ ID NO: 329615 - RNA, 22 nt, Human
gaccugguccuuguacuuugaa

SEQ ID NO: 329616 - RNA, 22 nt, Human
caagggcagcagccucaagcgg

SEQ ID NO: 329617 - RNA, 22 nt, Human
auuuccagcagcauauuugucu

SEQ ID NO: 329618 - RNA, 22 nt, Human
guaugucaugagccuugugcgu

SEQ ID NO: 329619 - RNA, 20 nt, Human
cugaccagcagccugucucc

SEQ ID NO: 329620 - RNA, 23 nt, Human
cagcugguugugggaguggcugc

SEQ ID NO: 329621 - RNA, 22 nt, Human
ucagcacaggucuugcaaaaca

SEQ ID NO: 329622 - RNA, 22 nt, Human
cugggccacaagccugugugau

SEQ ID NO: 329623 - RNA, 22 nt, Human
uuuggagagaugaaguucugug

SEQ ID NO: 329624 - RNA, 22 nt, Human
uugagacugagucucgcccugu

SEQ ID NO: 329625 - RNA, 22 nt, Human
uuccaggaagcucucggccucu

SEQ ID NO: 329626 - RNA, 22 nt, Human
accagagcuggcagaguaucaa

SEQ ID NO: 329627 - RNA, 22 nt, Human
gcucuaugaaccugaaucucac

SEQ ID NO: 329628 - RNA, 22 nt, Human
cggcuggagcugagaaaggagc

SEQ ID NO: 329629 - RNA, 22 nt, Human
ugguccugagcaccagccugac

SEQ ID NO: 329630 - RNA, 22 nt, Human
agccaccaccacugaaagguua

SEQ ID NO: 329631 - RNA, 23 nt, Human
gguucugccgcuuacugcugugc

SEQ ID NO: 329632 - RNA, 22 nt, Human
agcaggaggagagccuggcggu

SEQ ID NO: 329633 - RNA, 19 nt, Human
ugguggaggugcaccugac

SEQ ID NO: 329634 - RNA, 22 nt, Human
ugcccucagcagcagcuccugc

SEQ ID NO: 329635 - RNA, 22 nt, Human
uaaccaagcaaacuuucauugu

SEQ ID NO: 329636 - RNA, 22 nt, Human
cugaaggacacgugaggagcca

SEQ ID NO: 329637 - RNA, 19 nt, Human
ccuggcccugcugcgcggg

SEQ ID NO: 329638 - RNA, 22 nt, Human
gcugccuggaauaacggcuggc

SEQ ID NO: 329639 - RNA, 23 nt, Human
gcauccagagcucaguccccuuu

SEQ ID NO: 329640 - RNA, 22 nt, Human
gggcuccagccaggugucccca

SEQ ID NO: 329641 - RNA, 22 nt, Human
cuggagcucuccagagccccgu

SEQ ID NO: 329642 - RNA, 22 nt, Human
ccagcugcugcaccgugcaugg

SEQ ID NO: 329643 - RNA, 22 nt, Human
uuuuccuucugauacuccauuu

SEQ ID NO: 329644 - RNA, 22 nt, Human
cggcagagcccugagucagccu

SEQ ID NO: 329645 - RNA, 20 nt, Human
cucaccagguguaggcugag

SEQ ID NO: 329646 - RNA, 22 nt, Human
uggcuccguuguacaggcugga

SEQ ID NO: 329647 - RNA, 22 nt, Human
ccucuggccuaggccgggagag

SEQ ID NO: 329648 - RNA, 22 nt, Human
ugggucagauugagccccuggu

SEQ ID NO: 329649 - RNA, 22 nt, Human
cuaguuuuaagcuccuugaggu

SEQ ID NO: 329650 - RNA, 20 nt, Human
ucacuguaauugccuacauu

SEQ ID NO: 329651 - RNA, 22 nt, Human
uauagcagcaugauuuauaguc

SEQ ID NO: 329652 - RNA, 22 nt, Human
cuugccagggacucagucaggg

SEQ ID NO: 329653 - RNA, 22 nt, Human
cacagaaucugugacuccaaga

SEQ ID NO: 329654 - RNA, 22 nt, Human
cugaagcugggcacuuccuuuu

SEQ ID NO: 329655 - RNA, 22 nt, Human
uggcugggagcuggaacugggc

SEQ ID NO: 329656 - RNA, 18 nt, Human
uggguggcuagggaguuu

SEQ ID NO: 329657 - RNA, 22 nt, Human
gugcagcugguggagucugggg

SEQ ID NO: 329658 - RNA, 21 nt, Human
ucagcuugcuucauuauuaug

SEQ ID NO: 329659 - RNA, 22 nt, Human
ggcggcgcguagccggagacuu

SEQ ID NO: 329660 - RNA, 22 nt, Human
agagacuguaaugagagguaca

SEQ ID NO: 329661 - RNA, 22 nt, Human
ggcagguguuuuuauauuaaag

SEQ ID NO: 329662 - RNA, 22 nt, Human
cugguggaauggcagagggaac

SEQ ID NO: 329663 - RNA, 22 nt, Human
gguuuguugggguccaggccca

SEQ ID NO: 329664 - RNA, 17 nt, Human
agcagcuggguugaucu

SEQ ID NO: 329665 - RNA, 22 nt, Human
uccguggggccuguggcuuccg

SEQ ID NO: 329666 - RNA, 22 nt, Human
uuccagaacaauguggacguau

SEQ ID NO: 329667 - RNA, 22 nt, Human
gagguccacugaggcaacaggg

SEQ ID NO: 329668 - RNA, 21 nt, Human
ugcaaugcauugacagcagca

SEQ ID NO: 329669 - RNA, 22 nt, Human
guccuggugccaccugcgggau

SEQ ID NO: 329670 - RNA, 17 nt, Human
ucuggaugucauggaag

SEQ ID NO: 329671 - RNA, 22 nt, Human
ccgcgagguggagguugcagug

SEQ ID NO: 329672 - RNA, 18 nt, Human
ucuuccaacacugacacc

SEQ ID NO: 329673 - RNA, 22 nt, Human
gccccacuguggaaccuaaguc

SEQ ID NO: 329674 - RNA, 22 nt, Human
ccagcuggcccagcugugcucc

SEQ ID NO: 329675 - RNA, 22 nt, Human
ugcuggccucggcgcugggccu

SEQ ID NO: 329676 - RNA, 22 nt, Human
accauccaaacugcuuucugug

SEQ ID NO: 329677 - RNA, 22 nt, Human
uggcuccuuccgcagcaugccu

SEQ ID NO: 329678 - RNA, 22 nt, Human
uuuggcgucucucaggagcuca

SEQ ID NO: 329679 - RNA, 18 nt, Human
gagagcccagcagguggu

SEQ ID NO: 329680 - RNA, 22 nt, Human
gcggggggcagcagucgcucag

SEQ ID NO: 329681 - RNA, 21 nt, Human
ggcagcucagcagauggggac

SEQ ID NO: 329682 - RNA, 22 nt, Human
cagcagcaggcgcacggccguc

SEQ ID NO: 329683 - RNA, 22 nt, Human
cucagcaacccacacacggucu

SEQ ID NO: 329684 - RNA, 22 nt, Human
cgcgcugcagacagcggaggcc

SEQ ID NO: 329685 - RNA, 22 nt, Human
gcaggccugucuugcucgcccu

SEQ ID NO: 329686 - RNA, 22 nt, Human
ucaugcagaguagaaagggcaa

SEQ ID NO: 329687 - RNA, 22 nt, Human
auggcuguguuguuccucugaa

SEQ ID NO: 329688 - RNA, 22 nt, Human
cuggcaguguccagcucgugau

SEQ ID NO: 329689 - RNA, 22 nt, Human
ucacccagacugucugacucuu

SEQ ID NO: 329690 - RNA, 22 nt, Human
gccuggcgccgggcugccuguc

SEQ ID NO: 329691 - RNA, 22 nt, Human
ucugcuguuuacugugugauau

SEQ ID NO: 329692 - RNA, 22 nt, Human
uggcacguuggauugggaguuc

SEQ ID NO: 329693 - RNA, 22 nt, Human
ggacauggaaguauggagugga

SEQ ID NO: 329694 - RNA, 22 nt, Human
gcugaaguugccuauuuuaaua

SEQ ID NO: 329695 - RNA, 22 nt, Human
ggcuagcuuagagucaugcuag

SEQ ID NO: 329696 - RNA, 19 nt, Human
uccugcccaccagccaggg

SEQ ID NO: 329697 - RNA, 22 nt, Human
ggagccaguuuagaccucaguu

SEQ ID NO: 329698 - RNA, 22 nt, Human
agaguguggaaauguucagagu

SEQ ID NO: 329699 - RNA, 22 nt, Human
caucaguuccugccccugcccc

SEQ ID NO: 329700 - RNA, 22 nt, Human
aaggcagcaugaaucccuguac

SEQ ID NO: 329701 - RNA, 22 nt, Human
gcuuccaaugcuucuaucacau

SEQ ID NO: 329702 - RNA, 22 nt, Human
ugucauauagaauguucuauga

SEQ ID NO: 329703 - RNA, 22 nt, Human
cccaggaggcagaaguugcagu

SEQ ID NO: 329704 - RNA, 22 nt, Human
uuugcuggagaugagcgugggu

SEQ ID NO: 329705 - RNA, 22 nt, Human
cucuccaggcgagguccuacug

SEQ ID NO: 329706 - RNA, 21 nt, Human
acccugcuuuaugccguccuc

SEQ ID NO: 329707 - RNA, 22 nt, Human
gugcagcugugguggagccagg

SEQ ID NO: 329708 - RNA, 22 nt, Human
ggggaggaagcuggaacacggg

SEQ ID NO: 329709 - RNA, 22 nt, Human
ucucugccacagcuucugccuu

SEQ ID NO: 329710 - RNA, 22 nt, Human
uccuggguccauggcagccgaa

SEQ ID NO: 329711 - RNA, 22 nt, Human
acucgcggcggacggcggccag

SEQ ID NO: 329712 - RNA, 22 nt, Human
acuguucacccagcacuagcag

SEQ ID NO: 329713 - RNA, 18 nt, Human
aggagcggcugcggcugc

SEQ ID NO: 329714 - RNA, 22 nt, Human
agccccaggcccggacgccucu

SEQ ID NO: 329715 - RNA, 21 nt, Human
uuccuccucuggagaagaaga

SEQ ID NO: 329716 - RNA, 22 nt, Human
uugaugcugucuuucagaauca

SEQ ID NO: 329717 - RNA, 22 nt, Human
gccagugccugcugcucagggc

SEQ ID NO: 329718 - RNA, 22 nt, Human
cggcagcgguuggagguuguag

SEQ ID NO: 329719 - RNA, 22 nt, Human
agcuuuggcaucugacuagccg

SEQ ID NO: 329720 - RNA, 22 nt, Human
ccagcagcucccucaggguccg

SEQ ID NO: 329721 - RNA, 22 nt, Human
ccugcgggcugugcugaagccu

SEQ ID NO: 329722 - RNA, 22 nt, Human
ucugcucagccgaucugcuccg

SEQ ID NO: 329723 - RNA, 22 nt, Human
ugggugccaaccucugguggcc

SEQ ID NO: 329724 - RNA, 22 nt, Human
acgugcuggagaagagcucgcc

SEQ ID NO: 329725 - RNA, 22 nt, Human
aggcagaugggagcuggaaguu

SEQ ID NO: 329726 - RNA, 22 nt, Human
uugucucuacagagaguaguag

SEQ ID NO: 329727 - RNA, 22 nt, Human
gggccccaagaaccuccuccug

SEQ ID NO: 329728 - RNA, 22 nt, Human
ugcagcugccuagggcuggcuu

SEQ ID NO: 329729 - RNA, 22 nt, Human
ugggcugcuucuauuggugguc

SEQ ID NO: 329730 - RNA, 22 nt, Human
aaagcagcagcacguggaagag

SEQ ID NO: 329731 - RNA, 22 nt, Human
uccagcucugcugugcgccggu

SEQ ID NO: 329732 - RNA, 22 nt, Human
gcucaugggcccagagcagccc

SEQ ID NO: 329733 - RNA, 22 nt, Human
uccggcggccggccugagcccg

SEQ ID NO: 329734 - RNA, 22 nt, Human
ugcugugcuggcggcagaggcc

SEQ ID NO: 329735 - RNA, 22 nt, Human
agaugacuaacauaguauugcu

SEQ ID NO: 329736 - RNA, 22 nt, Human
caaaauuguugaugcugcuuug

SEQ ID NO: 329737 - RNA, 22 nt, Human
caugcuggucagccaguggaug

SEQ ID NO: 329738 - RNA, 22 nt, Human
gugugcgccgacacagccaggu

SEQ ID NO: 329739 - RNA, 22 nt, Human
caggccacacggcggcucccug

SEQ ID NO: 329740 - RNA, 18 nt, Human
ucugaaggaaugauucca

SEQ ID NO: 329741 - RNA, 22 nt, Human
uugaagcauuugcuauagcauu

SEQ ID NO: 329742 - RNA, 22 nt, Human
uaggauaugcauuuuuauacau

SEQ ID NO: 329743 - RNA, 22 nt, Human
aacaugaugacauuguaagcuu

SEQ ID NO: 329744 - RNA, 22 nt, Human
gcccagcugcacccuggugggu

SEQ ID NO: 329745 - RNA, 22 nt, Human
aaugagauggaggacucuuaau

SEQ ID NO: 329746 - RNA, 22 nt, Human
ugcuggaagggucggcgugggc

SEQ ID NO: 329747 - RNA, 22 nt, Human
gcagggcagggcaagaacuggg

SEQ ID NO: 329748 - RNA, 22 nt, Human
cauccauagauugagagauggu

SEQ ID NO: 329749 - RNA, 22 nt, Human
cugaacaucccgcagugcacga

SEQ ID NO: 329750 - RNA, 22 nt, Human
uugccaggggacaucuggagcc

SEQ ID NO: 329751 - RNA, 22 nt, Human
cucaugucggcaggacucgccc

SEQ ID NO: 329752 - RNA, 22 nt, Human
uccgcgcucucacccgcucccg

SEQ ID NO: 329753 - RNA, 21 nt, Human
gcuggcugucucuuacacggu

SEQ ID NO: 329754 - RNA, 22 nt, Human
uggccgggaagggacagugugg

SEQ ID NO: 329755 - RNA, 22 nt, Human
cugugcuggcagaccuggaguu

SEQ ID NO: 329756 - RNA, 22 nt, Human
aaggaucauguauauguuuaag

SEQ ID NO: 329757 - RNA, 22 nt, Human
caaaugaugcauggcuagugag

SEQ ID NO: 329758 - RNA, 22 nt, Human
agcuggugugccaguuccaguu

SEQ ID NO: 329759 - RNA, 22 nt, Human
ggagguggagcuggaaguucca

SEQ ID NO: 329760 - RNA, 22 nt, Human
gugcuggcuggggcaucaggca

SEQ ID NO: 329761 - RNA, 22 nt, Human
cucugcaggcacccaggguggg

SEQ ID NO: 329762 - RNA, 19 nt, Human
ucuggcugccaaggauuga

SEQ ID NO: 329763 - RNA, 22 nt, Human
aacccuggggcugcucugccug

SEQ ID NO: 329764 - RNA, 22 nt, Human
ugggaagaguuagagacagcug

SEQ ID NO: 329765 - RNA, 21 nt, Human
gcuccuggugcugcguggcgc

SEQ ID NO: 329766 - RNA, 22 nt, Human
gcugcaagugcauguugcaacu

SEQ ID NO: 329767 - RNA, 22 nt, Human
gcagaagcugggcagcgaggug

SEQ ID NO: 329768 - RNA, 22 nt, Human
uuuacuuuugguaaggucauuu

SEQ ID NO: 329769 - RNA, 22 nt, Human
gcugcaggcucugcaggaauug

SEQ ID NO: 329770 - RNA, 22 nt, Human
auggguggccccgugugcaguc

SEQ ID NO: 329771 - RNA, 22 nt, Human
cagggagcuggugccagccgac

SEQ ID NO: 329772 - RNA, 21 nt, Human
caggccaaaagguucaacauu

SEQ ID NO: 329773 - RNA, 22 nt, Human
ccaggcccugccugugguuccu

SEQ ID NO: 329774 - RNA, 22 nt, Human
uugcaaauaauagccugaaacu

SEQ ID NO: 329775 - RNA, 22 nt, Human
ugaguggacgugaggcugagua

SEQ ID NO: 329776 - RNA, 22 nt, Human
augcaguggcagcuccuggugu

SEQ ID NO: 329777 - RNA, 22 nt, Human
gcagcucacagucuccgccauc

SEQ ID NO: 329778 - RNA, 22 nt, Human
gcggcccgagcaggacgggugg

SEQ ID NO: 329779 - RNA, 22 nt, Human
caagggcagaggcagggccccg

SEQ ID NO: 329780 - RNA, 19 nt, Human
auagaguagaguaucuguu

SEQ ID NO: 329781 - RNA, 22 nt, Human
cugggaagggacgccagugccu

SEQ ID NO: 329782 - RNA, 22 nt, Human
uccaggaguccuggguggcccc

SEQ ID NO: 329783 - RNA, 22 nt, Human
aagggccagggcucuagagaua

SEQ ID NO: 329784 - RNA, 22 nt, Human
cgugcggccucggggcccggcu

SEQ ID NO: 329785 - RNA, 20 nt, Human
ccuguucacugcgcaguuuc

SEQ ID NO: 329786 - RNA, 22 nt, Human
guugggcugaagugugugcuua

SEQ ID NO: 329787 - RNA, 22 nt, Human
aggugcugccccgagaaggaug

SEQ ID NO: 329788 - RNA, 22 nt, Human
ggcaguggcuccucucuacucc

SEQ ID NO: 329789 - RNA, 22 nt, Human
cuaggugauccacugcucucuu

SEQ ID NO: 329790 - RNA, 21 nt, Human
uugauuuagcagaucuagcug

SEQ ID NO: 329791 - RNA, 22 nt, Human
aagcagcauaugacagcaucca

SEQ ID NO: 329792 - RNA, 22 nt, Human
uguggagcccccaggagugggg

SEQ ID NO: 329793 - RNA, 21 nt, Human
ucaggaagagccaguucaugc

SEQ ID NO: 329794 - RNA, 22 nt, Human
gcucccugguauugcugccacu

SEQ ID NO: 329795 - RNA, 22 nt, Human
ccaggcaaagcccaugcaagag

SEQ ID NO: 329796 - RNA, 22 nt, Human
uggugcaggccaagcugcgagc

SEQ ID NO: 329797 - RNA, 22 nt, Human
aggggaauggguagacuguuga

SEQ ID NO: 329798 - RNA, 22 nt, Human
cggagcagagccacucgggccg

SEQ ID NO: 329799 - RNA, 22 nt, Human
auucuugauauagauaguuaau

SEQ ID NO: 329800 - RNA, 22 nt, Human
agccucucuguuagucacuggg

SEQ ID NO: 329801 - RNA, 22 nt, Human
aagcuggccuguaccugcugag

SEQ ID NO: 329802 - RNA, 22 nt, Human
agcuuugggcagaagaggauuc

SEQ ID NO: 329803 - RNA, 22 nt, Human
guucaaccaugauuaggaacug

SEQ ID NO: 329804 - RNA, 18 nt, Human
cagaaaguuauuuacucu

SEQ ID NO: 329805 - RNA, 22 nt, Human
cagcuccagcccaggcagcucc

SEQ ID NO: 329806 - RNA, 22 nt, Human
caggccugugacaccgugucug

SEQ ID NO: 329807 - RNA, 22 nt, Human
augggaggcagacacuaaguuc

SEQ ID NO: 329808 - RNA, 22 nt, Human
gccagcuagaggcugcagugca

SEQ ID NO: 329809 - RNA, 22 nt, Human
ccagcuugcuccucugcaaugg

SEQ ID NO: 329810 - RNA, 22 nt, Human
cccaggaacagcacagaacagc

SEQ ID NO: 329811 - RNA, 22 nt, Human
gauauucauaggcagguauuua

SEQ ID NO: 329812 - RNA, 22 nt, Human
ugagcauuaccugaggccacug

SEQ ID NO: 329813 - RNA, 22 nt, Human
uccuggccaaguagauguggcg

SEQ ID NO: 329814 - RNA, 22 nt, Human
uuguuuguaaggcucuuagaau

SEQ ID NO: 329815 - RNA, 22 nt, Human
ugggaugagcuauauagaaagu

SEQ ID NO: 329816 - RNA, 22 nt, Human
gcccagcgagcagagguggacg

SEQ ID NO: 329817 - RNA, 22 nt, Human
agggggcuccuuggugugcaga

SEQ ID NO: 329818 - RNA, 22 nt, Human
gcagaagcccggucagcgcacg

SEQ ID NO: 329819 - RNA, 22 nt, Human
caugagaucugcagggaugggc

SEQ ID NO: 329820 - RNA, 22 nt, Human
agcucaguggcuggggcgcugc

SEQ ID NO: 329821 - RNA, 22 nt, Human
aaugcuuuuugcgaaaugugca

SEQ ID NO: 329822 - RNA, 22 nt, Human
cugcugagguggagauugcagu

SEQ ID NO: 329823 - RNA, 22 nt, Human
uguuggcagugcuacagucagu

SEQ ID NO: 329824 - RNA, 22 nt, Human
uccucuccaggugagccgaaau

SEQ ID NO: 329825 - RNA, 22 nt, Human
gaggagaggcuggacgcgguga

SEQ ID NO: 329826 - RNA, 22 nt, Human
guucugucugagcaccacagga

SEQ ID NO: 329827 - RNA, 22 nt, Human
ggcggugguugagaggacggcg

SEQ ID NO: 329828 - RNA, 22 nt, Human
cagggugacugcccuggccacu

SEQ ID NO: 329829 - RNA, 22 nt, Human
caccugagcaacccugugcggg

SEQ ID NO: 329830 - RNA, 22 nt, Human
caacauggcgaaaccccaucuc

SEQ ID NO: 329831 - RNA, 22 nt, Human
ccauccaugguguugguuguau

SEQ ID NO: 329832 - RNA, 22 nt, Human
uggccuuggucacaaugcaaac

SEQ ID NO: 329833 - RNA, 22 nt, Human
caggaagucgcagagcuggggg

SEQ ID NO: 329834 - RNA, 22 nt, Human
ccacuuugagaagcugaugaaa

SEQ ID NO: 329835 - RNA, 22 nt, Human
ggcagcaggguagccauuucuc

SEQ ID NO: 329836 - RNA, 22 nt, Human
ggcugcccucggggucgcaggc

SEQ ID NO: 329837 - RNA, 22 nt, Human
aggagcagaacuguuguggagg

SEQ ID NO: 329838 - RNA, 22 nt, Human
uaacuucucugagccucauucc

SEQ ID NO: 329839 - RNA, 22 nt, Human
uggcucaggccuacgacgccuu

SEQ ID NO: 329840 - RNA, 23 nt, Human
ggaggcacuuaggcagagcagag

SEQ ID NO: 329841 - RNA, 22 nt, Human
uggcuccaggggacacgcagua

SEQ ID NO: 329842 - RNA, 22 nt, Human
uggcugaguuacgaacagagca

SEQ ID NO: 329843 - RNA, 22 nt, Human
gcuggguggaucggaggcucug

SEQ ID NO: 329844 - RNA, 22 nt, Human
uccuggggaggucgaggcugag

SEQ ID NO: 329845 - RNA, 22 nt, Human
gaaaccuuugccgauggggucc

SEQ ID NO: 329846 - RNA, 23 nt, Human
cauuugauccucacaauaaaugg

SEQ ID NO: 329847 - RNA, 22 nt, Human
ucagugcagggugggagagaga

SEQ ID NO: 329848 - RNA, 22 nt, Human
agcaccaggucgcuggcacgcu

SEQ ID NO: 329849 - RNA, 22 nt, Human
ccugcucaacgaauauggcgau

SEQ ID NO: 329850 - RNA, 23 nt, Human
guguggccccagggccuccucgc

SEQ ID NO: 329851 - RNA, 22 nt, Human
gugcuccaggucgcucagagag

SEQ ID NO: 329852 - RNA, 22 nt, Human
uagcagcacuauuuguuguagu

SEQ ID NO: 329853 - RNA, 22 nt, Human
cuggugcuguagccugauugag

SEQ ID NO: 329854 - RNA, 22 nt, Human
uuuccacacucacugcacucau

SEQ ID NO: 329855 - RNA, 22 nt, Human
ggcggcacgcaggcugcugucg

SEQ ID NO: 329856 - RNA, 22 nt, Human
gaaggcaagugagccaagagaa

SEQ ID NO: 329857 - RNA, 22 nt, Human
ccuggaaaaugccacuuucaca

SEQ ID NO: 329858 - RNA, 22 nt, Human
aagugacuuaaucuccucucag

SEQ ID NO: 329859 - RNA, 21 nt, Human
gugugucuaauguaguggaaa

SEQ ID NO: 329860 - RNA, 22 nt, Human
ccaggccuguguuguguggagg

SEQ ID NO: 329861 - RNA, 22 nt, Human
gucugugcaguuacuagcuggu

SEQ ID NO: 329862 - RNA, 22 nt, Human
cccucuggcucuucucaggccg

SEQ ID NO: 329863 - RNA, 22 nt, Human
gauggaggagauggcagggugc

SEQ ID NO: 329864 - RNA, 20 nt, Human
cagcucugggcaggucgagg

SEQ ID NO: 329865 - RNA, 22 nt, Human
cacggccacugcagcaccccag

SEQ ID NO: 329866 - RNA, 22 nt, Human
uaacauuucggugacaguggga

SEQ ID NO: 329867 - RNA, 22 nt, Human
aucauuuaguggggcauuggaa

SEQ ID NO: 329868 - RNA, 22 nt, Human
gggcuguaggagcuggaauggg

SEQ ID NO: 329869 - RNA, 22 nt, Human
agcacguucuucauuacuucac

SEQ ID NO: 329870 - RNA, 22 nt, Human
ccagcagccaccuucucgaaau

SEQ ID NO: 329871 - RNA, 22 nt, Human
aagcagcacagcaaugacucua

SEQ ID NO: 329872 - RNA, 22 nt, Human
uccaggcuccccugcgugcucc

SEQ ID NO: 329873 - RNA, 20 nt, Human
ucagugggaaagugagagug

SEQ ID NO: 329874 - RNA, 22 nt, Human
cagugcagccaaggacaggcac

SEQ ID NO: 329875 - RNA, 22 nt, Human
auagucuuagaaucuugagugu

SEQ ID NO: 329876 - RNA, 22 nt, Human
cauugggcggggaccucggcug

SEQ ID NO: 329877 - RNA, 22 nt, Human
cagagcugucauuugccaguga

SEQ ID NO: 329878 - RNA, 22 nt, Human
ugaaaacacuuuaguuuagguc

SEQ ID NO: 329879 - RNA, 22 nt, Human
ucgcagcacuagcccugcauug

SEQ ID NO: 329880 - RNA, 22 nt, Human
aagugauuucugccugcauguu

SEQ ID NO: 329881 - RNA, 22 nt, Human
ggcuggccuguguggccgccac

SEQ ID NO: 329882 - RNA, 21 nt, Human
gcccacagugaggaggauccc

SEQ ID NO: 329883 - RNA, 22 nt, Human
ggcucacgcaauuaucccggcc

SEQ ID NO: 329884 - RNA, 22 nt, Human
gagaugaagaggcccuuggagu

SEQ ID NO: 329885 - RNA, 22 nt, Human
gucauggaggauugugaguggu

SEQ ID NO: 329886 - RNA, 22 nt, Human
ggccuuggaguccuccacugga

SEQ ID NO: 329887 - RNA, 22 nt, Human
gaggugggaugugugugcuacu

SEQ ID NO: 329888 - RNA, 18 nt, Human
uggcagccagcugcuccu

SEQ ID NO: 329889 - RNA, 20 nt, Human
cuguuugcuaucaugagcug

SEQ ID NO: 329890 - RNA, 22 nt, Human
agcuccagggaaagaguggauc

SEQ ID NO: 329891 - RNA, 22 nt, Human
ccugugggagggagcggcugga

SEQ ID NO: 329892 - RNA, 22 nt, Human
cugcuguguggauucaauggcu

SEQ ID NO: 329893 - RNA, 22 nt, Human
ugcugggauuacagucaugagc

SEQ ID NO: 329894 - RNA, 22 nt, Human
ggacagacuuuacagccccggg

SEQ ID NO: 329895 - RNA, 22 nt, Human
ugcugugagaccauuuguugag

SEQ ID NO: 329896 - RNA, 22 nt, Human
accccagaggcggaggcugcag

SEQ ID NO: 329897 - RNA, 22 nt, Human
augaggagucaaggagucggag

SEQ ID NO: 329898 - RNA, 22 nt, Human
ugcuggcugggcugcuggagac

SEQ ID NO: 329899 - RNA, 22 nt, Human
ccucuucuaggacguccuugug

SEQ ID NO: 329900 - RNA, 22 nt, Human
ucuccucuauuucuguauguau

SEQ ID NO: 329901 - RNA, 22 nt, Human
gcgacgcaggcacgacguguug

SEQ ID NO: 329902 - RNA, 22 nt, Human
gggcagagguucaacuucaaca

SEQ ID NO: 329903 - RNA, 18 nt, Human
gggguagaguguccuauu

SEQ ID NO: 329904 - RNA, 22 nt, Human
ucuuccagauacuuccugacuu

SEQ ID NO: 329905 - RNA, 22 nt, Human
cucaggucuuaguucugucauc

SEQ ID NO: 329906 - RNA, 22 nt, Human
gccaggucgucuccauguccaa

SEQ ID NO: 329907 - RNA, 22 nt, Human
gaguggggcccacugcugggug

SEQ ID NO: 329908 - RNA, 22 nt, Human
cuccaggacaugacuuucuugc

SEQ ID NO: 329909 - RNA, 22 nt, Human
ccgcguggcacccuccuggagg

SEQ ID NO: 329910 - RNA, 21 nt, Human
gcagcaugagaaagccccaaa

SEQ ID NO: 329911 - RNA, 22 nt, Human
uggauaaaaugacauuaccuga

SEQ ID NO: 329912 - RNA, 22 nt, Human
gguggcugugagcauuauguga

SEQ ID NO: 329913 - RNA, 22 nt, Human
cugcagggcccaaggucaacgg

SEQ ID NO: 329914 - RNA, 22 nt, Human
accuggaggcagagguugcagu

SEQ ID NO: 329915 - RNA, 18 nt, Human
cuuuagcugucaucuuug

SEQ ID NO: 329916 - RNA, 22 nt, Human
gggagccccaccucggugcccg

SEQ ID NO: 329917 - RNA, 22 nt, Human
uuuccuacugcccuauacacac

SEQ ID NO: 329918 - RNA, 22 nt, Human
ugggcaaggcuggagccugcag

SEQ ID NO: 329919 - RNA, 22 nt, Human
ucugggagaguagauaaaggaa

SEQ ID NO: 329920 - RNA, 22 nt, Human
auucuggacaaggcaagcuccu

SEQ ID NO: 329921 - RNA, 22 nt, Human
aucugguuuggggauccuugug

SEQ ID NO: 329922 - RNA, 22 nt, Human
gcuggccugaccugaggcuggg

SEQ ID NO: 329923 - RNA, 22 nt, Human
acagugugcaagaaauggggga

SEQ ID NO: 329924 - RNA, 22 nt, Human
acacauggucuacuucuucuca

SEQ ID NO: 329925 - RNA, 22 nt, Human
ugccagagaggagaaagcauuu

SEQ ID NO: 329926 - RNA, 22 nt, Human
uuugucaccaguggcuuuggua

SEQ ID NO: 329927 - RNA, 22 nt, Human
ccccagugguugcaacagcaga

SEQ ID NO: 329928 - RNA, 22 nt, Human
uggcuacauuuauacucucauu

SEQ ID NO: 329929 - RNA, 22 nt, Human
gccccuucguggaagugcauuc

SEQ ID NO: 329930 - RNA, 22 nt, Human
gggcaugguggcaggcaccugu

SEQ ID NO: 329931 - RNA, 22 nt, Human
agcaauguuggccuauauaccu

SEQ ID NO: 329932 - RNA, 22 nt, Human
aucuucaaagcacaucguuugu

SEQ ID NO: 329933 - RNA, 22 nt, Human
ucugggugucacuccugccugc

SEQ ID NO: 329934 - RNA, 22 nt, Human
ucuguggcaaacacagugacca

SEQ ID NO: 329935 - RNA, 22 nt, Human
acggagcccgugucagguggga

SEQ ID NO: 329936 - RNA, 22 nt, Human
agcagggagaccaucucuuccu

SEQ ID NO: 329937 - RNA, 22 nt, Human
caggacccaaccucccugcucu

SEQ ID NO: 329938 - RNA, 22 nt, Human
uuugggcaggcuuuucccuaga

SEQ ID NO: 329939 - RNA, 22 nt, Human
uuccugcaggccauagagccug

SEQ ID NO: 329940 - RNA, 20 nt, Human
ucauccaggacaggaguggc

SEQ ID NO: 329941 - RNA, 21 nt, Human
uugcuguuuucccaaugcagu

SEQ ID NO: 329942 - RNA, 22 nt, Human
gaacuuuaauuagcuuuugucu

SEQ ID NO: 329943 - RNA, 22 nt, Human
agcgggucugcaagccuucccu

SEQ ID NO: 329944 - RNA, 19 nt, Human
gcagcugugggaagagcca

SEQ ID NO: 329945 - RNA, 22 nt, Human
ccagagacaaggagcuggaguc

SEQ ID NO: 329946 - RNA, 22 nt, Human
ggcaccuuucaucccaucuaga

SEQ ID NO: 329947 - RNA, 22 nt, Human
gagcaccgccuccacgaugccc

SEQ ID NO: 329948 - RNA, 22 nt, Human
agggcacucugcagggaccacc

SEQ ID NO: 329949 - RNA, 22 nt, Human
ugucauuggugaucugaugccu

SEQ ID NO: 329950 - RNA, 22 nt, Human
uuugccaguauuuuauugauga

SEQ ID NO: 329951 - RNA, 22 nt, Human
agcuccugaaaauccagacugg

SEQ ID NO: 329952 - RNA, 22 nt, Human
gccuggcuaagcagaaggaccc

SEQ ID NO: 329953 - RNA, 22 nt, Human
ccacugcuaacuugcugcagcu

SEQ ID NO: 329954 - RNA, 22 nt, Human
ccauggccaggaaagccaaggu

SEQ ID NO: 329955 - RNA, 22 nt, Human
accagagucaauuauuuugcca

SEQ ID NO: 329956 - RNA, 22 nt, Human
ggaagcaaauuccagaaccaca

SEQ ID NO: 329957 - RNA, 22 nt, Human
ucucgugcaggccuugcucgga

SEQ ID NO: 329958 - RNA, 22 nt, Human
cugcagggcagggccuccuggc

SEQ ID NO: 329959 - RNA, 22 nt, Human
gcucguugaaccuguccccgag

SEQ ID NO: 329960 - RNA, 22 nt, Human
aacuuucagaauccuaugcauu

SEQ ID NO: 329961 - RNA, 22 nt, Human
guugcagcaucacugcugagug

SEQ ID NO: 329962 - RNA, 22 nt, Human
agcugcugcaaguggugcuaac

SEQ ID NO: 329963 - RNA, 22 nt, Human
ccaggugugcucugcaguggau

SEQ ID NO: 329964 - RNA, 22 nt, Human
uuuuggcucugcagguuugcac

SEQ ID NO: 329965 - RNA, 22 nt, Human
cuggucaauaaucauguaguac

SEQ ID NO: 329966 - RNA, 22 nt, Human
cccugauguuuucucugccuuu

SEQ ID NO: 329967 - RNA, 19 nt, Human
ugcucucuggugcuucaug

SEQ ID NO: 329968 - RNA, 20 nt, Human
uccugggguaagccaugguc

SEQ ID NO: 329969 - RNA, 22 nt, Human
gcccucugccacaggacgccag

SEQ ID NO: 329970 - RNA, 22 nt, Human
aggagcggauguguccugccag

SEQ ID NO: 329971 - RNA, 22 nt, Human
gccaaaguccuccagccaugca

SEQ ID NO: 329972 - RNA, 22 nt, Human
acaaguuucauuguuuagaacc

SEQ ID NO: 329973 - RNA, 22 nt, Human
acagaguaucuaucaggaguau

SEQ ID NO: 329974 - RNA, 22 nt, Human
uggcuggcuguccagcugggca

SEQ ID NO: 329975 - RNA, 22 nt, Human
gagcucauccccaugguccguc

SEQ ID NO: 329976 - RNA, 22 nt, Human
ggcaagaaccucaauuaccuuu

SEQ ID NO: 329977 - RNA, 22 nt, Human
ccagcagcgauagggugagugc

SEQ ID NO: 329978 - RNA, 22 nt, Human
caccucucauuucuacagauuc

SEQ ID NO: 329979 - RNA, 22 nt, Human
cugggcuguuuguucuggucuc

SEQ ID NO: 329980 - RNA, 22 nt, Human
ccaggagaaugggauuacccua

SEQ ID NO: 329981 - RNA, 22 nt, Human
gcugcagggagcuggaaggcuc

SEQ ID NO: 329982 - RNA, 22 nt, Human
guggcccaggcuuggcgcuggc

SEQ ID NO: 329983 - RNA, 22 nt, Human
gacaggugcuaagggaccuggc

SEQ ID NO: 329984 - RNA, 22 nt, Human
agccagcuaccggggcuccugg

SEQ ID NO: 329985 - RNA, 22 nt, Human
cugagcugcucccgcugcagcg

SEQ ID NO: 329986 - RNA, 22 nt, Human
aggggcagccucacaauccucu

SEQ ID NO: 329987 - RNA, 21 nt, Human
uggcccuggccacggcugcca

SEQ ID NO: 329988 - RNA, 22 nt, Human
uucuucauucccuuacuuccga

SEQ ID NO: 329989 - RNA, 22 nt, Human
agagaccuuuugccuucuaguu

SEQ ID NO: 329990 - RNA, 22 nt, Human
acccggagucggagguugcagu

SEQ ID NO: 329991 - RNA, 22 nt, Human
acagugcuaucaauagcuagaa

SEQ ID NO: 329992 - RNA, 20 nt, Human
ucuuuuauuggcagauccug

SEQ ID NO: 329993 - RNA, 22 nt, Human
cuggcuuuuggaggagggucag

SEQ ID NO: 329994 - RNA, 22 nt, Human
gccuggcucugaguuucucucc

SEQ ID NO: 329995 - RNA, 22 nt, Human
auuugugggacuauaaugcagg

SEQ ID NO: 329996 - RNA, 22 nt, Human
agaauccuggagaagcuguacc

SEQ ID NO: 329997 - RNA, 22 nt, Human
uccucauucuuggugcaucaaa

SEQ ID NO: 329998 - RNA, 22 nt, Human
uaguggauguucagagauuuga

SEQ ID NO: 329999 - RNA, 22 nt, Human
ccaugcccuugucaucuccagg

SEQ ID NO: 330000 - RNA, 22 nt, Human
aaggagcuuucauuacagccuu

SEQ ID NO: 330001 - RNA, 22 nt, Human
uguguccuucugggagucccag

SEQ ID NO: 330002 - RNA, 22 nt, Human
gcagcagaaggccaaggggagc

SEQ ID NO: 330003 - RNA, 22 nt, Human
uccucuucaaaauagcucugaa

SEQ ID NO: 330004 - RNA, 21 nt, Human
uccuccuguagaggguccugg

SEQ ID NO: 330005 - RNA, 21 nt, Human
uaaaagaugacaagacagcuc

SEQ ID NO: 330006 - RNA, 22 nt, Human
ccucccugccggcuggacuagu

SEQ ID NO: 330007 - RNA, 22 nt, Human
ucuuuuaucuguuguguaacaa

SEQ ID NO: 330008 - RNA, 22 nt, Human
cagcuggcgacucuccucgaug

SEQ ID NO: 330009 - RNA, 22 nt, Human
gcggagaggcagagacuccgcg

SEQ ID NO: 330010 - RNA, 22 nt, Human
acagcuggccgaggcucaggga

SEQ ID NO: 330011 - RNA, 22 nt, Human
cacccugaggccacccagaccu

SEQ ID NO: 330012 - RNA, 22 nt, Human
ucauccagccucaucaggagcu

SEQ ID NO: 330013 - RNA, 22 nt, Human
gcuucuggugaggccucaggaa

SEQ ID NO: 330014 - RNA, 22 nt, Human
gugcugauugggagcugggauu

SEQ ID NO: 330015 - RNA, 22 nt, Human
caugaccagagaggacggccag

SEQ ID NO: 330016 - RNA, 22 nt, Human
auggccugcagugcugccacag

SEQ ID NO: 330017 - RNA, 22 nt, Human
acugugugccaggcgcuggucu

SEQ ID NO: 330018 - RNA, 22 nt, Human
aaccccgcucaggcugggugag

SEQ ID NO: 330019 - RNA, 20 nt, Human
agugauuuguuaguacauug

SEQ ID NO: 330020 - RNA, 20 nt, Human
gcugugccaugacccucgag

SEQ ID NO: 330021 - RNA, 22 nt, Human
cgcacuggagcuggaacgaguc

SEQ ID NO: 330022 - RNA, 22 nt, Human
aguguguccaggaagcagaugg

SEQ ID NO: 330023 - RNA, 22 nt, Human
agcaugucuaacucuucagggu

SEQ ID NO: 330024 - RNA, 22 nt, Human
cuugaaagucagcagaguggau

SEQ ID NO: 330025 - RNA, 22 nt, Human
uggaagggagcuggaauuugga

SEQ ID NO: 330026 - RNA, 22 nt, Human
gcucuagcuggcgcugaccugg

SEQ ID NO: 330027 - RNA, 22 nt, Human
agaggaaguaaucaggaccugc

SEQ ID NO: 330028 - RNA, 22 nt, Human
caugggaauaaaguuauuucaa

SEQ ID NO: 330029 - RNA, 22 nt, Human
aguggguguagucuuccuccug

SEQ ID NO: 330030 - RNA, 22 nt, Human
gcagcccucuuggucacuaggc

SEQ ID NO: 330031 - RNA, 21 nt, Human
gcacuucugcagggcugcugg

SEQ ID NO: 330032 - RNA, 22 nt, Human
ugcauggacgugacuuggccaa

SEQ ID NO: 330033 - RNA, 22 nt, Human
cuccaggacugaggacagagcu

SEQ ID NO: 330034 - RNA, 19 nt, Human
gaacugaggucugaggcuu

SEQ ID NO: 330035 - RNA, 22 nt, Human
cagggcucacucggcuggcguc

SEQ ID NO: 330036 - RNA, 22 nt, Human
cacuguugaagauacuuccucu

SEQ ID NO: 330037 - RNA, 22 nt, Human
cucgcggcgcccgaagcccuug

SEQ ID NO: 330038 - RNA, 22 nt, Human
ugcucccaggcauucucuguug

SEQ ID NO: 330039 - RNA, 22 nt, Human
aggcccugcugaggccucccuc

SEQ ID NO: 330040 - RNA, 19 nt, Human
gggugaggaagagcguugc

SEQ ID NO: 330041 - RNA, 22 nt, Human
ugagcugcuucuuauaaugugu

SEQ ID NO: 330042 - RNA, 22 nt, Human
uugcaggguugacacugccugc

SEQ ID NO: 330043 - RNA, 22 nt, Human
cugcugucuuuauuucacugcu

SEQ ID NO: 330044 - RNA, 22 nt, Human
cgcaggugccggcagauggggu

SEQ ID NO: 330045 - RNA, 22 nt, Human
ugcagggcagcuagggagcuuu

SEQ ID NO: 330046 - RNA, 22 nt, Human
auggagcagcagaaggggcuug

SEQ ID NO: 330047 - RNA, 20 nt, Human
acguggccaccaguggcuua

SEQ ID NO: 330048 - RNA, 22 nt, Human
ccagcuggaacggcagcccagc

SEQ ID NO: 330049 - RNA, 22 nt, Human
uggagugcaguugggaggacac

SEQ ID NO: 330050 - RNA, 22 nt, Human
uuugagugcccauguuucccag

SEQ ID NO: 330051 - RNA, 22 nt, Human
ggcagagcuugcagugagccga

SEQ ID NO: 330052 - RNA, 22 nt, Human
cagcuccagccaccggggggug

SEQ ID NO: 330053 - RNA, 22 nt, Human
cccagagcaugugcugccuuug

SEQ ID NO: 330054 - RNA, 22 nt, Human
cccaugcacccucuaagaagga

SEQ ID NO: 330055 - RNA, 22 nt, Human
gcagcagcggggccccugcgcg

SEQ ID NO: 330056 - RNA, 22 nt, Human
accacaucgggcggacacuggg

SEQ ID NO: 330057 - RNA, 22 nt, Human
ccugaccaacguggugaaaccc

SEQ ID NO: 330058 - RNA, 22 nt, Human
gcggcgccugggacccgccagc

SEQ ID NO: 330059 - RNA, 22 nt, Human
aggccagaacagcucugcacca

SEQ ID NO: 330060 - RNA, 21 nt, Human
ggucaggcaugugcccugagc

SEQ ID NO: 330061 - RNA, 22 nt, Human
agugugaguuacaaagugugaa

SEQ ID NO: 330062 - RNA, 18 nt, Human
cugccagugugcucuccg

SEQ ID NO: 330063 - RNA, 19 nt, Human
ugguucuccuuccacaguc

SEQ ID NO: 330064 - RNA, 22 nt, Human
uccagcuccugaguucacugcu

SEQ ID NO: 330065 - RNA, 22 nt, Human
accuggccaguggggccgcgcu

SEQ ID NO: 330066 - RNA, 22 nt, Human
uacaucucaucugugcucuccg

SEQ ID NO: 330067 - RNA, 22 nt, Human
ucacacuuuauuuauuucaugc

SEQ ID NO: 330068 - RNA, 22 nt, Human
ccuuuuaagggagacuagagau

SEQ ID NO: 330069 - RNA, 22 nt, Human
ggcagguguggugaccagagau

SEQ ID NO: 330070 - RNA, 22 nt, Human
caucucccacuuccuugggggu

SEQ ID NO: 330071 - RNA, 22 nt, Human
uguucugcaaugcugccuccuu

SEQ ID NO: 330072 - RNA, 22 nt, Human
agcuuucuauauaugaguugcu

SEQ ID NO: 330073 - RNA, 22 nt, Human
ugcagcaccuauggacacuugu

SEQ ID NO: 330074 - RNA, 22 nt, Human
guccaucuaaguauccagccug

SEQ ID NO: 330075 - RNA, 22 nt, Human
uuccaggcgcacgucggccuua

SEQ ID NO: 330076 - RNA, 22 nt, Human
uagauacauacauuuuaaaaug

SEQ ID NO: 330077 - RNA, 22 nt, Human
ccaccagaccaccaagagcaac

SEQ ID NO: 330078 - RNA, 22 nt, Human
uucuccagcucaucagggaggg

SEQ ID NO: 330079 - RNA, 22 nt, Human
ggaaccuuaguguucuuuuacc

SEQ ID NO: 330080 - RNA, 22 nt, Human
cucacagcugcuucaggaucca

SEQ ID NO: 330081 - RNA, 20 nt, Human
ggccggggagcucuccaggg

SEQ ID NO: 330082 - RNA, 22 nt, Human
gcagacccugaacugggcaugg

SEQ ID NO: 330083 - RNA, 22 nt, Human
gcugggcaggccucgugagggc

SEQ ID NO: 330084 - RNA, 17 nt, Human
gcccgugggcuacggua

SEQ ID NO: 330085 - RNA, 19 nt, Human
agcagggagugguuguggg

SEQ ID NO: 330086 - RNA, 19 nt, Human
ucuuucauuucuagcucug

SEQ ID NO: 330087 - RNA, 22 nt, Human
gaggggccuggcgaggacaugu

SEQ ID NO: 330088 - RNA, 22 nt, Human
agcaaggcagcuuucacugcuu

SEQ ID NO: 330089 - RNA, 22 nt, Human
uguccagaucaaugcccacaug

SEQ ID NO: 330090 - RNA, 22 nt, Human
caaugggccuggagagagcugg

SEQ ID NO: 330091 - RNA, 22 nt, Human
guccuaaauauagugauucaug

SEQ ID NO: 330092 - RNA, 22 nt, Human
ucuggauggucagcucuuccug

SEQ ID NO: 330093 - RNA, 22 nt, Human
uucaccugugacagguagaguu

SEQ ID NO: 330094 - RNA, 23 nt, Human
auagaccauugucucacacuuca

SEQ ID NO: 330095 - RNA, 22 nt, Human
uugggugcugucauggggcacg

SEQ ID NO: 330096 - RNA, 21 nt, Human
ccaccaggucuucugcucggg

SEQ ID NO: 330097 - RNA, 22 nt, Human
caacagcuggaggcuuggcccg

SEQ ID NO: 330098 - RNA, 22 nt, Human
ggagcgugcacuccaggcccuu

SEQ ID NO: 330099 - RNA, 22 nt, Human
uggccucuccuggcagcaucca

SEQ ID NO: 330100 - RNA, 22 nt, Human
gcagcucucuggccugcccugg

SEQ ID NO: 330101 - RNA, 19 nt, Human
ugcagcuguaugagcuuaa

SEQ ID NO: 330102 - RNA, 22 nt, Human
acagcugugggcucugcauaua

SEQ ID NO: 330103 - RNA, 22 nt, Human
uggcugaggagagggcggaagu

SEQ ID NO: 330104 - RNA, 22 nt, Human
ccugcugaggucagccacccaa

SEQ ID NO: 330105 - RNA, 22 nt, Human
gcugucugcugggucgcucagg

SEQ ID NO: 330106 - RNA, 22 nt, Human
cugggccucacccuagaccaau

SEQ ID NO: 330107 - RNA, 22 nt, Human
gggcagcaaaucugagucuggu

SEQ ID NO: 330108 - RNA, 22 nt, Human
cacuuuuaacaggagaauuccc

SEQ ID NO: 330109 - RNA, 23 nt, Human
ucuggcugcuccuuucaaugcuc

SEQ ID NO: 330110 - RNA, 22 nt, Human
cucuggucaagcaaagagguuu

SEQ ID NO: 330111 - RNA, 19 nt, Human
aggaaggcggcggcugccc

SEQ ID NO: 330112 - RNA, 22 nt, Human
cagugacguaaacugcaugugc

SEQ ID NO: 330113 - RNA, 22 nt, Human
ggcuggaaggcccuuuguugau

SEQ ID NO: 330114 - RNA, 23 nt, Human
cucaacccuaguaagggaguagg

SEQ ID NO: 330115 - RNA, 22 nt, Human
gcuguggcuccaauggugagcc

SEQ ID NO: 330116 - RNA, 22 nt, Human
ugggcacacugaaucugcuauu

SEQ ID NO: 330117 - RNA, 22 nt, Human
ccacccagccagaugcaggaag

SEQ ID NO: 330118 - RNA, 22 nt, Human
uuugacucugggugcuuuuucg

SEQ ID NO: 330119 - RNA, 22 nt, Human
uucugauugcugaugaggccca

SEQ ID NO: 330120 - RNA, 22 nt, Human
agauaaaguccaaacuguguag

SEQ ID NO: 330121 - RNA, 22 nt, Human
uuugcaaaguccauugaaguua

SEQ ID NO: 330122 - RNA, 22 nt, Human
gccagcuggcugcaggucccag

SEQ ID NO: 330123 - RNA, 22 nt, Human
gcagauggauguggacggcgcc

SEQ ID NO: 330124 - RNA, 22 nt, Human
augaugaagcaugguuacacug

SEQ ID NO: 330125 - RNA, 22 nt, Human
gcucugagucacacugcccugu

SEQ ID NO: 330126 - RNA, 22 nt, Human
gcugggagucgcgucuguggcc

SEQ ID NO: 330127 - RNA, 22 nt, Human
gagcacucuggcauguaaccuu

SEQ ID NO: 330128 - RNA, 22 nt, Human
aggccgugugagcaugugugag

SEQ ID NO: 330129 - RNA, 22 nt, Human
cagaguccugcaccagcuccag

SEQ ID NO: 330130 - RNA, 22 nt, Human
ugcauuucccauuguguggcuc

SEQ ID NO: 330131 - RNA, 23 nt, Human
gggcugcuccaggccaaggcugg

SEQ ID NO: 330132 - RNA, 22 nt, Human
gcagagcugucuaagucacuuc

SEQ ID NO: 330133 - RNA, 22 nt, Human
aggcagccuauggggagcucag

SEQ ID NO: 330134 - RNA, 22 nt, Human
ugagaauacugcauuguuagga

SEQ ID NO: 330135 - RNA, 22 nt, Human
uuugacaugugcuuauaacuuu

SEQ ID NO: 330136 - RNA, 17 nt, Human
cucugggucuccugcuu

SEQ ID NO: 330137 - RNA, 22 nt, Human
uugcuggaagguggcuggaauc

SEQ ID NO: 330138 - RNA, 22 nt, Human
cugucuggaaugcaguacauag

SEQ ID NO: 330139 - RNA, 22 nt, Human
ggugaccucaccuggucccacc

SEQ ID NO: 330140 - RNA, 22 nt, Human
ccaguucuuucugugugcaaca

SEQ ID NO: 330141 - RNA, 21 nt, Human
ugucagcaacaauacuuucuc

SEQ ID NO: 330142 - RNA, 22 nt, Human
agcagcaggagccgugggguga

SEQ ID NO: 330143 - RNA, 22 nt, Human
aggcaguggcuuuuguuguguu

SEQ ID NO: 330144 - RNA, 22 nt, Human
ucagcccggguucgcaaacacu

SEQ ID NO: 330145 - RNA, 22 nt, Human
uuucuuggucuucccgaccugg

SEQ ID NO: 330146 - RNA, 22 nt, Human
uggcacaguuaaaguuguagaa

SEQ ID NO: 330147 - RNA, 22 nt, Human
aaggaggaauguagccagcucc

SEQ ID NO: 330148 - RNA, 22 nt, Human
uggcagcagggccccuggagga

SEQ ID NO: 330149 - RNA, 22 nt, Human
ccaucgcuucaaaucucagacu

SEQ ID NO: 330150 - RNA, 22 nt, Human
uuuguguuguacuucugugcau

SEQ ID NO: 330151 - RNA, 22 nt, Human
ugcaggcuggaggagggacuaa

SEQ ID NO: 330152 - RNA, 22 nt, Human
ucuugccgcgcaggcgcaguuc

SEQ ID NO: 330153 - RNA, 21 nt, Human
uccugccuuaguccagagcag

SEQ ID NO: 330154 - RNA, 22 nt, Human
ggucuggccuccgggcaggugg

SEQ ID NO: 330155 - RNA, 22 nt, Human
aggcuguagaucuagacaugua

SEQ ID NO: 330156 - RNA, 22 nt, Human
gagaagguggaccugaaggagc

SEQ ID NO: 330157 - RNA, 22 nt, Human
agggaagcagcagccgccuguc

SEQ ID NO: 330158 - RNA, 22 nt, Human
ugcugaggagguggcugugcuu

SEQ ID NO: 330159 - RNA, 22 nt, Human
gcacccagggcaggaagugagg

SEQ ID NO: 330160 - RNA, 22 nt, Human
ggccauggcgggagccggcguc

SEQ ID NO: 330161 - RNA, 22 nt, Human
gugcaggacagcacaucuccug

SEQ ID NO: 330162 - RNA, 22 nt, Human
guccuggugcuggucauugucg

SEQ ID NO: 330163 - RNA, 22 nt, Human
ugucuuuagccacuugccucuu

SEQ ID NO: 330164 - RNA, 22 nt, Human
caggcccuuuccugggcauagg

SEQ ID NO: 330165 - RNA, 22 nt, Human
cgcugccuucaucccacgccua

SEQ ID NO: 330166 - RNA, 22 nt, Human
ucccuggcacaagaaggcuguc

SEQ ID NO: 330167 - RNA, 17 nt, Human
ugagcaguagaagaugc

SEQ ID NO: 330168 - RNA, 22 nt, Human
gcucugugcaguucagggacac

SEQ ID NO: 330169 - RNA, 22 nt, Human
gccaaaguaccuagcccucugc

SEQ ID NO: 330170 - RNA, 22 nt, Human
aaaggugccucuuacaaggcuu

SEQ ID NO: 330171 - RNA, 22 nt, Human
gcaggggcugagcaccagcggg

SEQ ID NO: 330172 - RNA, 22 nt, Human
aagcccgguugggaacguggug

SEQ ID NO: 330173 - RNA, 22 nt, Human
cccugcacagccuggcucucuu

SEQ ID NO: 330174 - RNA, 22 nt, Human
gcaguggccacauggaggagga

SEQ ID NO: 330175 - RNA, 20 nt, Human
ucugccacuuuuucugucac

SEQ ID NO: 330176 - RNA, 22 nt, Human
aguguccaacucagcuugucaa

SEQ ID NO: 330177 - RNA, 17 nt, Human
gugcuggccuggggcuc

SEQ ID NO: 330178 - RNA, 22 nt, Human
agggcagagauuaauuaagaca

SEQ ID NO: 330179 - RNA, 20 nt, Human
ugcuggaggcgccggcgcuc

SEQ ID NO: 330180 - RNA, 22 nt, Human
gugccuccaggcucgacuaguc

SEQ ID NO: 330181 - RNA, 22 nt, Human
gcuucuggaagcauaugcaaga

SEQ ID NO: 330182 - RNA, 22 nt, Human
ucuuugcagaauuuaacuuugc

SEQ ID NO: 330183 - RNA, 22 nt, Human
ggagaggguagggguccugccc

SEQ ID NO: 330184 - RNA, 22 nt, Human
gccaggaccucagaugcagggc

SEQ ID NO: 330185 - RNA, 22 nt, Human
uuuugucagugagaacagaguu

SEQ ID NO: 330186 - RNA, 22 nt, Human
cuggccgcaguguggaguugug

SEQ ID NO: 330187 - RNA, 22 nt, Human
aaucuguuuuaaaguuugugcc

SEQ ID NO: 330188 - RNA, 22 nt, Human
ggcucuccacuauggaugagaa

SEQ ID NO: 330189 - RNA, 22 nt, Human
agccccaguucccuggaagucu

SEQ ID NO: 330190 - RNA, 22 nt, Human
gugcugccuccauauccgucag

SEQ ID NO: 330191 - RNA, 22 nt, Human
ucugcuggaaaaccagggaauu

SEQ ID NO: 330192 - RNA, 22 nt, Human
uguggugccgagagucuggacg

SEQ ID NO: 330193 - RNA, 22 nt, Human
gugggggcaggcagugcuagga

SEQ ID NO: 330194 - RNA, 22 nt, Human
ggugugucugccaggaacugca

SEQ ID NO: 330195 - RNA, 22 nt, Human
aucauuaacccuugaugcuggg

SEQ ID NO: 330196 - RNA, 22 nt, Human
ugggcugcuuccucagcugaga

SEQ ID NO: 330197 - RNA, 20 nt, Human
cagugcccguggaaaagaug

SEQ ID NO: 330198 - RNA, 22 nt, Human
ggagaggggaacuuguugcuug

SEQ ID NO: 330199 - RNA, 22 nt, Human
acaugggcaucuaugaggcucu

SEQ ID NO: 330200 - RNA, 22 nt, Human
cuccugcagcccucagcagcca

SEQ ID NO: 330201 - RNA, 22 nt, Human
ugaggagcaggguggcuuacuc

SEQ ID NO: 330202 - RNA, 22 nt, Human
ccagcagaagcucccgcugggu

SEQ ID NO: 330203 - RNA, 22 nt, Human
ggcugcugcccaccccugcaug

SEQ ID NO: 330204 - RNA, 23 nt, Human
cagcacaguacauuuccugucuc

SEQ ID NO: 330205 - RNA, 22 nt, Human
caagagcuggguggcaagcuag

SEQ ID NO: 330206 - RNA, 22 nt, Human
ugucccuggacuccaggagcca

SEQ ID NO: 330207 - RNA, 22 nt, Human
gccuggcuucccuuggagcauu

SEQ ID NO: 330208 - RNA, 22 nt, Human
uuccagcuaacucacaucccuu

SEQ ID NO: 330209 - RNA, 22 nt, Human
gggagccagcagggcauggagc

SEQ ID NO: 330210 - RNA, 22 nt, Human
gugagcugggugaaugguaggg

SEQ ID NO: 330211 - RNA, 22 nt, Human
ggagugggaacaaugacauggu

SEQ ID NO: 330212 - RNA, 22 nt, Human
caugcagugcuuugcgccgggc

SEQ ID NO: 330213 - RNA, 22 nt, Human
gcagagcacccugcagugguau

SEQ ID NO: 330214 - RNA, 22 nt, Human
gccugcacucaaacacucucuu

SEQ ID NO: 330215 - RNA, 21 nt, Human
agggccucuguguacuggggg

SEQ ID NO: 330216 - RNA, 22 nt, Human
gcugcucucucccuaaguuggg

SEQ ID NO: 330217 - RNA, 22 nt, Human
ggccaaggcucuugagggcuga

SEQ ID NO: 330218 - RNA, 22 nt, Human
agcagugugggcugcacgcugg

SEQ ID NO: 330219 - RNA, 22 nt, Human
ugcuugcugaaaggcauuuaga

SEQ ID NO: 330220 - RNA, 22 nt, Human
uggcaugcaagaggaggcuccc

SEQ ID NO: 330221 - RNA, 22 nt, Human
uucuguuuauaauuugcaguug

SEQ ID NO: 330222 - RNA, 22 nt, Human
cuguccauggcaaugaugcaga

SEQ ID NO: 330223 - RNA, 22 nt, Human
ugugcccuccugccaggggcug

SEQ ID NO: 330224 - RNA, 22 nt, Human
cagggccugccugguuccugga

SEQ ID NO: 330225 - RNA, 21 nt, Human
uagaccagcugugcuccucgg

SEQ ID NO: 330226 - RNA, 22 nt, Human
uucuccucagcaaggcagcuuu

SEQ ID NO: 330227 - RNA, 22 nt, Human
gucccaggggagcucucugauu

SEQ ID NO: 330228 - RNA, 19 nt, Human
agcucaggcccaucguccc

SEQ ID NO: 330229 - RNA, 22 nt, Human
agcuggugauguggucccucac

SEQ ID NO: 330230 - RNA, 22 nt, Human
cagggacucgcuggacauaccg

SEQ ID NO: 330231 - RNA, 22 nt, Human
acagccaggaauucuggagaag

SEQ ID NO: 330232 - RNA, 22 nt, Human
cuuugcagagggggugggagcu

SEQ ID NO: 330233 - RNA, 22 nt, Human
gacggagcugguugcugcggcu

SEQ ID NO: 330234 - RNA, 22 nt, Human
ccaugcagugcuggagcugauu

SEQ ID NO: 330235 - RNA, 22 nt, Human
guggcagagagcaagugucuga

SEQ ID NO: 330236 - RNA, 22 nt, Human
ugcccuggcuccucccacgcug

SEQ ID NO: 330237 - RNA, 22 nt, Human
cuccccacgccuggacuaagag

SEQ ID NO: 330238 - RNA, 19 nt, Human
auucuucucuuccugcugu

SEQ ID NO: 330239 - RNA, 22 nt, Human
auguaugagagauucuuuuauu

SEQ ID NO: 330240 - RNA, 23 nt, Human
acugccugugccgaucucucuca

SEQ ID NO: 330241 - RNA, 22 nt, Human
uggcagugugggaggaagguac

SEQ ID NO: 330242 - RNA, 22 nt, Human
cuuuacagauggauaauuguuu

SEQ ID NO: 330243 - RNA, 20 nt, Human
ccacaguggagacuggagac

SEQ ID NO: 330244 - RNA, 22 nt, Human
uggcuccacaggccagggugug

SEQ ID NO: 330245 - RNA, 22 nt, Human
ggaaggggagcuggaaagggua

SEQ ID NO: 330246 - RNA, 22 nt, Human
ucuucaugaaauugauugcuua

SEQ ID NO: 330247 - RNA, 22 nt, Human
ggcggccugugggucggccuca

SEQ ID NO: 330248 - RNA, 22 nt, Human
cagcccaggacugcagguguuu

SEQ ID NO: 330249 - RNA, 22 nt, Human
ucuggaaggggaucugugguca

SEQ ID NO: 330250 - RNA, 22 nt, Human
ugugucuuuggcgaugucugga

SEQ ID NO: 330251 - RNA, 22 nt, Human
ggugagaggcagugcuguggaa

SEQ ID NO: 330252 - RNA, 22 nt, Human
aucaugcagcaacaagcaaggc

SEQ ID NO: 330253 - RNA, 20 nt, Human
gcuccccuucucugggccuc

SEQ ID NO: 330254 - RNA, 22 nt, Human
auuucagaguagaucguuauuu

SEQ ID NO: 330255 - RNA, 17 nt, Human
auucaugaacauguccu

SEQ ID NO: 330256 - RNA, 20 nt, Human
cgggacacucaagcucuggg

SEQ ID NO: 330257 - RNA, 22 nt, Human
gcauaaaggacuauaaggauca

SEQ ID NO: 330258 - RNA, 22 nt, Human
aaugauguuuuuaaagaacaua

SEQ ID NO: 330259 - RNA, 22 nt, Human
ugggaugggaucucgcuguguc

SEQ ID NO: 330260 - RNA, 22 nt, Human
cccucucgcggggcagcggagg

SEQ ID NO: 330261 - RNA, 22 nt, Human
aacaucuagguucucaucgaua

SEQ ID NO: 330262 - RNA, 22 nt, Human
ccuccugggccuugcucuguga

SEQ ID NO: 330263 - RNA, 22 nt, Human
cugaccaguccuuagcaccugg

SEQ ID NO: 330264 - RNA, 22 nt, Human
ggcuggcuggcuuagcagagga

SEQ ID NO: 330265 - RNA, 22 nt, Human
augaacugcaguauaaacuugg

SEQ ID NO: 330266 - RNA, 22 nt, Human
ugcucgagguccccaccggcuc

SEQ ID NO: 330267 - RNA, 22 nt, Human
ccaggcccugcuccucacacca

SEQ ID NO: 330268 - RNA, 22 nt, Human
gucuguggaguugcuugcugga

SEQ ID NO: 330269 - RNA, 22 nt, Human
uugggauacaucuugcugagcc

SEQ ID NO: 330270 - RNA, 22 nt, Human
cccuggcucaggcagcuuuguu

SEQ ID NO: 330271 - RNA, 22 nt, Human
ugucauggacuggauuucugcu

SEQ ID NO: 330272 - RNA, 22 nt, Human
auuucagcagcccauguuugga

SEQ ID NO: 330273 - RNA, 22 nt, Human
agguggucuuguggaugccgca

SEQ ID NO: 330274 - RNA, 22 nt, Human
cugaugcucuggauguagucaa

SEQ ID NO: 330275 - RNA, 22 nt, Human
cacugcccuggggguugccauc

SEQ ID NO: 330276 - RNA, 22 nt, Human
ugcccuccacaguggcuccacc

SEQ ID NO: 330277 - RNA, 22 nt, Human
accagaagcuggagcacaagga

SEQ ID NO: 330278 - RNA, 22 nt, Human
acugggcaaggauaugaugggu

SEQ ID NO: 330279 - RNA, 22 nt, Human
uucugggcacacaggcccuggu

SEQ ID NO: 330280 - RNA, 22 nt, Human
gggcucggcaucuguggacucu

SEQ ID NO: 330281 - RNA, 22 nt, Human
gaugucuggcuaccacucgcac

SEQ ID NO: 330282 - RNA, 22 nt, Human
gugcugcagagucucgugccgc

SEQ ID NO: 330283 - RNA, 22 nt, Human
cuggcuaaagagcaagaagaug

SEQ ID NO: 330284 - RNA, 22 nt, Human
uggaaggggagcuggaaagggg

SEQ ID NO: 330285 - RNA, 22 nt, Human
augccaucaaugacagaguuag

SEQ ID NO: 330286 - RNA, 22 nt, Human
cuggccuggcaggggaccucua

SEQ ID NO: 330287 - RNA, 22 nt, Human
gcugugaaagcugccacacugu

SEQ ID NO: 330288 - RNA, 22 nt, Human
gcagacaucaagcacaggccca

SEQ ID NO: 330289 - RNA, 22 nt, Human
gcucccuggaauguuggcugcc

SEQ ID NO: 330290 - RNA, 22 nt, Human
ugucuuggccacuaggagugcc

SEQ ID NO: 330291 - RNA, 19 nt, Human
cucugccucuggcuguggc

SEQ ID NO: 330292 - RNA, 22 nt, Human
augacuuaaucauacuugcauu

SEQ ID NO: 330293 - RNA, 22 nt, Human
caguggguccugcgucugccag

SEQ ID NO: 330294 - RNA, 22 nt, Human
ugcugcuuguuuuguaaauaaa

SEQ ID NO: 330295 - RNA, 22 nt, Human
agcugccgaugcccagcugcau

SEQ ID NO: 330296 - RNA, 22 nt, Human
ggcaucagcccgguccugggcu

SEQ ID NO: 330297 - RNA, 22 nt, Human
caggcucgguccaguggcaccc

SEQ ID NO: 330298 - RNA, 22 nt, Human
augccuguuugaaauuggaccu

SEQ ID NO: 330299 - RNA, 20 nt, Human
gggugugggcccggccaggc

SEQ ID NO: 330300 - RNA, 22 nt, Human
cuugggcaggggaaacagcugc

SEQ ID NO: 330301 - RNA, 22 nt, Human
cagagcagcagagcuuccaugg

SEQ ID NO: 330302 - RNA, 22 nt, Human
cugggaccugugugccugggcc

SEQ ID NO: 330303 - RNA, 22 nt, Human
ucccagaacccugccagguccu

SEQ ID NO: 330304 - RNA, 22 nt, Human
ggccucugccccgcggggcucg

SEQ ID NO: 330305 - RNA, 20 nt, Human
agcuggcccccgguggccug

SEQ ID NO: 330306 - RNA, 22 nt, Human
ccugggugaugugcugcccucg

SEQ ID NO: 330307 - RNA, 22 nt, Human
ggcuguggucauuaggagguug

SEQ ID NO: 330308 - RNA, 22 nt, Human
cugggguuggccagggcccuag

SEQ ID NO: 330309 - RNA, 22 nt, Human
acagugcaaauaggacugucuu

SEQ ID NO: 330310 - RNA, 22 nt, Human
ccaggaggaaagaccagcccau

SEQ ID NO: 330311 - RNA, 22 nt, Human
ugcauguuucuguauguuaaug

SEQ ID NO: 330312 - RNA, 22 nt, Human
gcuuucagggucacugucaaca

SEQ ID NO: 330313 - RNA, 22 nt, Human
gagcacugagcuggaauuggag

SEQ ID NO: 330314 - RNA, 22 nt, Human
gcuucugcagagccguccugag

SEQ ID NO: 330315 - RNA, 22 nt, Human
uacaaagugauuuuggaauuga

SEQ ID NO: 330316 - RNA, 22 nt, Human
ccagcaggaaagugacguuuga

SEQ ID NO: 330317 - RNA, 22 nt, Human
cugagguagggacgugccguag

SEQ ID NO: 330318 - RNA, 22 nt, Human
caaagccaggcuuucuaaugua

SEQ ID NO: 330319 - RNA, 22 nt, Human
gcgcuccucccggcccuggugg

SEQ ID NO: 330320 - RNA, 22 nt, Human
ccacugcuguuacuuacgcaaa

SEQ ID NO: 330321 - RNA, 22 nt, Human
uuccuggugguggugacagcac

SEQ ID NO: 330322 - RNA, 22 nt, Human
augcuugaaaguuauuucauuu

SEQ ID NO: 330323 - RNA, 22 nt, Human
uguggccaccagagcugcuauu

SEQ ID NO: 330324 - RNA, 19 nt, Human
agcaguggagccaugccug

SEQ ID NO: 330325 - RNA, 22 nt, Human
uggugaagucagcggagcccgg

SEQ ID NO: 330326 - RNA, 22 nt, Human
gugccugguuuggggaauguuc

SEQ ID NO: 330327 - RNA, 22 nt, Human
caucaggaauaaaugaggcugu

SEQ ID NO: 330328 - RNA, 22 nt, Human
gaguguuccagaaacuggcccu

SEQ ID NO: 330329 - RNA, 22 nt, Human
gcugguggcagagcuccgcggc

SEQ ID NO: 330330 - RNA, 23 nt, Human
ggucccaguggagaggccucacc

SEQ ID NO: 330331 - RNA, 22 nt, Human
cccuggaacccauggccagugu

SEQ ID NO: 330332 - RNA, 22 nt, Human
cccaggucgucagcaguguggu

SEQ ID NO: 330333 - RNA, 22 nt, Human
ggggucccugcaccagcauguc

SEQ ID NO: 330334 - RNA, 22 nt, Human
cuggcuuuuuucccauuaugca

SEQ ID NO: 330335 - RNA, 22 nt, Human
ggcuuccuccuuccugcuguca

SEQ ID NO: 330336 - RNA, 22 nt, Human
ucauggaugauagcuucauugc

SEQ ID NO: 330337 - RNA, 22 nt, Human
acaaagugaaaagcaucgaauu

SEQ ID NO: 330338 - RNA, 18 nt, Human
ugugccucugcaggacgu

SEQ ID NO: 330339 - RNA, 22 nt, Human
gucacccguuugacuauccacc

SEQ ID NO: 330340 - RNA, 22 nt, Human
gaggcagagacuccaccuucag

SEQ ID NO: 330341 - RNA, 22 nt, Human
ggcucugcugguaagaugccuc

SEQ ID NO: 330342 - RNA, 22 nt, Human
gggcuggagagucccacguggg

SEQ ID NO: 330343 - RNA, 22 nt, Human
cagcugccuaugaccuagccuc

SEQ ID NO: 330344 - RNA, 22 nt, Human
agguggagaagagaugggcagu

SEQ ID NO: 330345 - RNA, 18 nt, Human
guagauccuugagcuacc

SEQ ID NO: 330346 - RNA, 22 nt, Human
gggcucaucaagccucuccgcc

SEQ ID NO: 330347 - RNA, 22 nt, Human
aggucccugcagcagacugcca

SEQ ID NO: 330348 - RNA, 22 nt, Human
ccaggagcccugccacaauggu

SEQ ID NO: 330349 - RNA, 20 nt, Human
cagagcagugcccaggcggc

SEQ ID NO: 330350 - RNA, 22 nt, Human
uuauugagcacauaguaugugg

SEQ ID NO: 330351 - RNA, 22 nt, Human
gcucuggcuacuguggcuaccg

SEQ ID NO: 330352 - RNA, 22 nt, Human
uggaucugcucuaugaacugcu

SEQ ID NO: 330353 - RNA, 22 nt, Human
agcuccacucccugccuguuuc

SEQ ID NO: 330354 - RNA, 22 nt, Human
ugaacaugcuguugauggccug

SEQ ID NO: 330355 - RNA, 22 nt, Human
gggcuuuaggggccagugacca

SEQ ID NO: 330356 - RNA, 22 nt, Human
aggcagugguguuugcuggugg

SEQ ID NO: 330357 - RNA, 22 nt, Human
cugcaccgugucucgggcugcc

SEQ ID NO: 330358 - RNA, 18 nt, Human
cccacggugcuguagggc

SEQ ID NO: 330359 - RNA, 19 nt, Human
caucuggaugauucuccug

SEQ ID NO: 330360 - RNA, 15 nt, Human
uggugguguugagac

SEQ ID NO: 330361 - RNA, 22 nt, Human
agcgcuggugaucucuauuuug

SEQ ID NO: 330362 - RNA, 22 nt, Human
uuuguaguuguggaugcugaag

SEQ ID NO: 330363 - RNA, 22 nt, Human
uccagcugugcuccaggaggug

SEQ ID NO: 330364 - RNA, 23 nt, Human
agugaugucacccacagacaagg

SEQ ID NO: 330365 - RNA, 22 nt, Human
acuggaaaguauucuuucacug

SEQ ID NO: 330366 - RNA, 22 nt, Human
gaccaggagauuugagcuaggc

SEQ ID NO: 330367 - RNA, 22 nt, Human
ggcuagcuccuccgcgcaucca

SEQ ID NO: 330368 - RNA, 22 nt, Human
ugggguccucucacuuggaggg

SEQ ID NO: 330369 - RNA, 22 nt, Human
cuucuccgacaaccgacgccgg

SEQ ID NO: 330370 - RNA, 22 nt, Human
agugaaauaugcccauugcugu

SEQ ID NO: 330371 - RNA, 22 nt, Human
gggaggugauuaggaccaugua

SEQ ID NO: 330372 - RNA, 22 nt, Human
acauccaguaucagaagcauca

SEQ ID NO: 330373 - RNA, 22 nt, Human
uuuggcaagcgaguacuuucug

SEQ ID NO: 330374 - RNA, 20 nt, Human
gcagcagacagacaggggac

SEQ ID NO: 330375 - RNA, 22 nt, Human
ccugggacuuggucugggguuu

SEQ ID NO: 330376 - RNA, 22 nt, Human
cucucugggcccaguuggcacc

SEQ ID NO: 330377 - RNA, 22 nt, Human
guuuauuggguauuguggagcc

SEQ ID NO: 330378 - RNA, 22 nt, Human
ugacagcuuggacaggucccuc

SEQ ID NO: 330379 - RNA, 22 nt, Human
ugcugcgggacccacugugggc

SEQ ID NO: 330380 - RNA, 21 nt, Human
ccaugucagaugugggcugug

SEQ ID NO: 330381 - RNA, 19 nt, Human
uugcuucaugucuuuugcu

SEQ ID NO: 330382 - RNA, 22 nt, Human
ucuccagaguaaccuuggagca

SEQ ID NO: 330383 - RNA, 22 nt, Human
cucaggcuaagaaggccaagug

SEQ ID NO: 330384 - RNA, 22 nt, Human
uuguccagcgaccaggcucugu

SEQ ID NO: 330385 - RNA, 22 nt, Human
agccaggucaggaaagguccca

SEQ ID NO: 330386 - RNA, 22 nt, Human
cuccuuccugguuagcaccuua

SEQ ID NO: 330387 - RNA, 22 nt, Human
auuuuguaucuuacggggacua

SEQ ID NO: 330388 - RNA, 22 nt, Human
ggccgggcuguggagaaggggu

SEQ ID NO: 330389 - RNA, 22 nt, Human
aaggagucugggccauucagag

SEQ ID NO: 330390 - RNA, 22 nt, Human
guucucugccggcaccuacccg

SEQ ID NO: 330391 - RNA, 22 nt, Human
ggagaagggaacugaguuuuug

SEQ ID NO: 330392 - RNA, 22 nt, Human
acggccgaugacuccagcaugg

SEQ ID NO: 330393 - RNA, 22 nt, Human
ugaggaggugggcacacagagu

SEQ ID NO: 330394 - RNA, 22 nt, Human
agcggcgccggagggaggugcg

SEQ ID NO: 330395 - RNA, 22 nt, Human
aggagccauugcaggauggcag

SEQ ID NO: 330396 - RNA, 22 nt, Human
gacggggcagccagcugguggc

SEQ ID NO: 330397 - RNA, 22 nt, Human
ugcagcaucuccuugugccaug

SEQ ID NO: 330398 - RNA, 22 nt, Human
cugggaguugacgaggcuugua

SEQ ID NO: 330399 - RNA, 22 nt, Human
ccagucagccaagcugcagcgg

SEQ ID NO: 330400 - RNA, 21 nt, Human
uccagcacagaugaccucccc

SEQ ID NO: 330401 - RNA, 22 nt, Human
ugcuggaguggcacuguguggc

SEQ ID NO: 330402 - RNA, 22 nt, Human
ugggcacagugaguugccuuua

SEQ ID NO: 330403 - RNA, 22 nt, Human
uugcaguugcuguauuuaagga

SEQ ID NO: 330404 - RNA, 22 nt, Human
caaucaaugcugcuaguuccuu

SEQ ID NO: 330405 - RNA, 22 nt, Human
uggcugaggcacagcugccgcc

SEQ ID NO: 330406 - RNA, 17 nt, Human
uguguaaguugcauaga

SEQ ID NO: 330407 - RNA, 22 nt, Human
aggagacaguuuggacguguag

SEQ ID NO: 330408 - RNA, 22 nt, Human
cucguugcugaagccaaaguca

SEQ ID NO: 330409 - RNA, 18 nt, Human
agguguguuucuaggagc

SEQ ID NO: 330410 - RNA, 23 nt, Human
augcaacauugccaguaugggca

SEQ ID NO: 330411 - RNA, 20 nt, Human
agcuuugguuaagccagugg

SEQ ID NO: 330412 - RNA, 21 nt, Human
aaacugaccuugccugagaca

SEQ ID NO: 330413 - RNA, 22 nt, Human
uagugucucuuccuguuugaaa

SEQ ID NO: 330414 - RNA, 22 nt, Human
cggucaggugcagcguuggcac

SEQ ID NO: 330415 - RNA, 22 nt, Human
auuuccuguaggggcuugcgaa

SEQ ID NO: 330416 - RNA, 22 nt, Human
gguguggcaguggaccugugaa

SEQ ID NO: 330417 - RNA, 22 nt, Human
caaauguuugguggcauuuugu

SEQ ID NO: 330418 - RNA, 18 nt, Human
ucaugcaaacgcuucaua

SEQ ID NO: 330419 - RNA, 22 nt, Human
cuguggcuaggaagcuguggga

SEQ ID NO: 330420 - RNA, 22 nt, Human
ggugcccaaggaagguugccgu

SEQ ID NO: 330421 - RNA, 22 nt, Human
cagcaugaauguguucguaggg

SEQ ID NO: 330422 - RNA, 21 nt, Human
agagacugucacugcaguacc

SEQ ID NO: 330423 - RNA, 22 nt, Human
ccagcugggucccugcuggggc

SEQ ID NO: 330424 - RNA, 22 nt, Human
cuucuggcguuggaggucugag

SEQ ID NO: 330425 - RNA, 22 nt, Human
gaagcgcggcgucggcgugggu

SEQ ID NO: 330426 - RNA, 22 nt, Human
agugccucugcagguccgaguu

SEQ ID NO: 330427 - RNA, 22 nt, Human
ucugcuugugucuguccagccu

SEQ ID NO: 330428 - RNA, 22 nt, Human
aggcuccaugguucucccucag

SEQ ID NO: 330429 - RNA, 22 nt, Human
ucagucucuggggcuucuguuu

SEQ ID NO: 330430 - RNA, 19 nt, Human
uccagaacugcccuggccu

SEQ ID NO: 330431 - RNA, 22 nt, Human
caggguggcaggcaccauggcc

SEQ ID NO: 330432 - RNA, 22 nt, Human
gagccauacaaccuauaaagug

SEQ ID NO: 330433 - RNA, 22 nt, Human
gugcucuggccaagcgcgugcg

SEQ ID NO: 330434 - RNA, 19 nt, Human
uggcagcauugguaccuug

SEQ ID NO: 330435 - RNA, 22 nt, Human
ugagaugaagugauguaaaaca

SEQ ID NO: 330436 - RNA, 22 nt, Human
agagcgagucuggggcucggau

SEQ ID NO: 330437 - RNA, 22 nt, Human
gucuccugaggcauccauugaa

SEQ ID NO: 330438 - RNA, 22 nt, Human
augcccugggagugcuguacca

SEQ ID NO: 330439 - RNA, 22 nt, Human
cauaaauuguacccauuccaac

SEQ ID NO: 330440 - RNA, 22 nt, Human
gguuccaggcauggcaggaugu

SEQ ID NO: 330441 - RNA, 22 nt, Human
gugcaggugguuggcccagccg

SEQ ID NO: 330442 - RNA, 22 nt, Human
gcggcuccgaagccaggccgcg

SEQ ID NO: 330443 - RNA, 22 nt, Human
ucaccggugacccucggcucgc

SEQ ID NO: 330444 - RNA, 22 nt, Human
cagagcagaaaccugggugauu

SEQ ID NO: 330445 - RNA, 22 nt, Human
aucucccaaauuagccucuuga

SEQ ID NO: 330446 - RNA, 23 nt, Human
uggcucugagcuuccugguggcc

SEQ ID NO: 330447 - RNA, 22 nt, Human
cagugcccuuccaggacugcag

SEQ ID NO: 330448 - RNA, 22 nt, Human
ucggagcgucacuggcuggagg

SEQ ID NO: 330449 - RNA, 22 nt, Human
uguguuuuggaaggaacaugca

SEQ ID NO: 330450 - RNA, 22 nt, Human
ugguggggccagacuucagcuc

SEQ ID NO: 330451 - RNA, 22 nt, Human
cccucucccugcagaauguggc

SEQ ID NO: 330452 - RNA, 22 nt, Human
cuucuggguauuccagauaccu

SEQ ID NO: 330453 - RNA, 22 nt, Human
gagguuggagggcuggccugca

SEQ ID NO: 330454 - RNA, 22 nt, Human
agggcacuuccucugggucccu

SEQ ID NO: 330455 - RNA, 22 nt, Human
gugauuuucuccuccuagaagu

SEQ ID NO: 330456 - RNA, 22 nt, Human
gccugagccgccugagcggcgg

SEQ ID NO: 330457 - RNA, 22 nt, Human
acauuguugagccucuuguuca

SEQ ID NO: 330458 - RNA, 22 nt, Human
gcuguccugggaacaggcacua

SEQ ID NO: 330459 - RNA, 20 nt, Human
auuagcuuggagacaguggc

SEQ ID NO: 330460 - RNA, 22 nt, Human
gcgagucgccgcugcagcccua

SEQ ID NO: 330461 - RNA, 22 nt, Human
cuuuacagugaacuugcuuguc

SEQ ID NO: 330462 - RNA, 19 nt, Human
agcagccaucgaccaugga

SEQ ID NO: 330463 - RNA, 22 nt, Human
cauggccagauucuuucuucuc

SEQ ID NO: 330464 - RNA, 22 nt, Human
gcaagcagcccagaacagcucu

SEQ ID NO: 330465 - RNA, 22 nt, Human
aaggggggcaccugcaugcccg

SEQ ID NO: 330466 - RNA, 22 nt, Human
ggggagaguauuuuauucaagu

SEQ ID NO: 330467 - RNA, 17 nt, Human
gcuccagaauucuaguc

SEQ ID NO: 330468 - RNA, 22 nt, Human
agcagcaggugaccucgaugcc

SEQ ID NO: 330469 - RNA, 17 nt, Human
aguuuuuggaccugugu

SEQ ID NO: 330470 - RNA, 22 nt, Human
ugccgcugucgccaccauggcu

SEQ ID NO: 330471 - RNA, 22 nt, Human
aggcucugucaggcggagcagc

SEQ ID NO: 330472 - RNA, 22 nt, Human
ccaggagagcucucguucagug

SEQ ID NO: 330473 - RNA, 19 nt, Human
ccauucugucucugccaca

SEQ ID NO: 330474 - RNA, 22 nt, Human
ucuggcuucaacuuuacugaaa

SEQ ID NO: 330475 - RNA, 22 nt, Human
uuuauucucuaguuggucagau

SEQ ID NO: 330476 - RNA, 22 nt, Human
cugcaucacagcaggaggcaca

SEQ ID NO: 330477 - RNA, 22 nt, Human
uggauguuugaaguugcaugug

SEQ ID NO: 330478 - RNA, 22 nt, Human
accaggcccuccagcugcgugg

SEQ ID NO: 330479 - RNA, 22 nt, Human
ggcuggaacuucuucuggcauu

SEQ ID NO: 330480 - RNA, 22 nt, Human
acagagacaauauuuguaaagu

SEQ ID NO: 330481 - RNA, 22 nt, Human
guugaguguugugcaugcacca

SEQ ID NO: 330482 - RNA, 22 nt, Human
uggugcugccaccuccucugcu

SEQ ID NO: 330483 - RNA, 22 nt, Human
uccucacagcugguucauucag

SEQ ID NO: 330484 - RNA, 22 nt, Human
gugauuucagguuuuucauacu

SEQ ID NO: 330485 - RNA, 17 nt, Human
ggugaguguccaggugg

SEQ ID NO: 330486 - RNA, 22 nt, Human
ccccaacccugguuccguggcg

SEQ ID NO: 330487 - RNA, 17 nt, Human
gccuggcccagccuggc

SEQ ID NO: 330488 - RNA, 22 nt, Human
gcucugugccccugccguggac

SEQ ID NO: 330489 - RNA, 22 nt, Human
gagcuccuauggucgguggcuc

SEQ ID NO: 330490 - RNA, 22 nt, Human
cagcagcucaggcuccuuccca

SEQ ID NO: 330491 - RNA, 22 nt, Human
ccaggacacgauuuuuagucug

SEQ ID NO: 330492 - RNA, 22 nt, Human
cgcagcugcugcucugaaacag

SEQ ID NO: 330493 - RNA, 22 nt, Human
ugcuccaggcugcugaagaucu

SEQ ID NO: 330494 - RNA, 22 nt, Human
uuuggucuggaaucuucagggu

SEQ ID NO: 330495 - RNA, 22 nt, Human
guuuuguucaugaacauugggu

SEQ ID NO: 330496 - RNA, 22 nt, Human
uggcagcauuuuuuccagaaca

SEQ ID NO: 330497 - RNA, 22 nt, Human
acaugcuuucuagguccuucug

SEQ ID NO: 330498 - RNA, 22 nt, Human
aggguugaagucugguccucau

SEQ ID NO: 330499 - RNA, 22 nt, Human
caggaugccuuugaacucugga

SEQ ID NO: 330500 - RNA, 22 nt, Human
ucugcgcccugucgccugcucc

SEQ ID NO: 330501 - RNA, 22 nt, Human
cccaggacucugacacccccaa

SEQ ID NO: 330502 - RNA, 22 nt, Human
gcggggacagaaggcgguucuc

SEQ ID NO: 330503 - RNA, 22 nt, Human
ccugugggcgcagcuggaguca

SEQ ID NO: 330504 - RNA, 18 nt, Human
uccaccgcgugcaccucu

SEQ ID NO: 330505 - RNA, 22 nt, Human
uccugggcccuccggaucaggu

SEQ ID NO: 330506 - RNA, 16 nt, Human
ucucuggguugcacag

SEQ ID NO: 330507 - RNA, 22 nt, Human
ucgggcugcucgcugcggaacu

SEQ ID NO: 330508 - RNA, 22 nt, Human
aaagagcucggaaaguguugaa

SEQ ID NO: 330509 - RNA, 22 nt, Human
gccugaucagguccucggcaua

SEQ ID NO: 330510 - RNA, 19 nt, Human
gagcagcuuccuaucuggu

SEQ ID NO: 330511 - RNA, 22 nt, Human
uaugcuagauggaaaaauauug

SEQ ID NO: 330512 - RNA, 22 nt, Human
gcuuuugagguccugcucagcc

SEQ ID NO: 330513 - RNA, 15 nt, Human
gccccaggaaucaaa

SEQ ID NO: 330514 - RNA, 22 nt, Human
aaggugccacuucccucagacu

SEQ ID NO: 330515 - RNA, 22 nt, Human
cuggcagcugcccgagaugccc

SEQ ID NO: 330516 - RNA, 22 nt, Human
cacaucauguuaauucauuaca

SEQ ID NO: 330517 - RNA, 22 nt, Human
ucagguccaagauggccaucca

SEQ ID NO: 330518 - RNA, 22 nt, Human
agccccaguccgcugcgggcgg

SEQ ID NO: 330519 - RNA, 22 nt, Human
gguuguaguuggagguuguaua

SEQ ID NO: 330520 - RNA, 22 nt, Human
gcuggccugcgagggcaggcug

SEQ ID NO: 330521 - RNA, 22 nt, Human
gagugugucggucagcguggcg

SEQ ID NO: 330522 - RNA, 22 nt, Human
ccuggguccaauucuggcuugu

SEQ ID NO: 330523 - RNA, 22 nt, Human
uacauguacaugcauagguaga

SEQ ID NO: 330524 - RNA, 22 nt, Human
cugcugccuuccaaaggccagg

SEQ ID NO: 330525 - RNA, 22 nt, Human
cccaccacgugcuuugcuggag

SEQ ID NO: 330526 - RNA, 22 nt, Human
agggcccaccuuggugcugagg

SEQ ID NO: 330527 - RNA, 22 nt, Human
aucauccauggcugaucauaaa

SEQ ID NO: 330528 - RNA, 22 nt, Human
ugcgccugcgcaaagguuucug

SEQ ID NO: 330529 - RNA, 19 nt, Human
ccugugucccacguagaug

SEQ ID NO: 330530 - RNA, 22 nt, Human
cacagcuucuccccgcugcggc

SEQ ID NO: 330531 - RNA, 22 nt, Human
aggacagagggaccagagccca

SEQ ID NO: 330532 - RNA, 22 nt, Human
ucaccggcagacguggccugau

SEQ ID NO: 330533 - RNA, 22 nt, Human
aguggcugugaaauacauggga

SEQ ID NO: 330534 - RNA, 22 nt, Human
gaggcucagagggacuuucaag

SEQ ID NO: 330535 - RNA, 22 nt, Human
agccaugcaccuuacucuugcu

SEQ ID NO: 330536 - RNA, 22 nt, Human
aaucuguugucaggaauccaca

SEQ ID NO: 330537 - RNA, 22 nt, Human
ucuguggcauguugcacuugua

SEQ ID NO: 330538 - RNA, 22 nt, Human
augcaguuagguaauagucuca

SEQ ID NO: 330539 - RNA, 22 nt, Human
gguggcaccuuacccugcgcag

SEQ ID NO: 330540 - RNA, 18 nt, Human
gacaaaaguacagacaga

SEQ ID NO: 330541 - RNA, 22 nt, Human
agcccuugguauuuuccgaucc

SEQ ID NO: 330542 - RNA, 19 nt, Human
cuucuggauccgcagggcc

SEQ ID NO: 330543 - RNA, 22 nt, Human
ucccgggcaggucgagcgagcc

SEQ ID NO: 330544 - RNA, 22 nt, Human
ggccgcggauuuucccgcuggc

SEQ ID NO: 330545 - RNA, 22 nt, Human
uccugagauaggaguugaaggc

SEQ ID NO: 330546 - RNA, 22 nt, Human
acuucacagauauuuauuuggu

SEQ ID NO: 330547 - RNA, 22 nt, Human
cccugccuacaggguuuucuuu

SEQ ID NO: 330548 - RNA, 22 nt, Human
ucagaggagcaaaagaggggau

SEQ ID NO: 330549 - RNA, 22 nt, Human
aggccugggacgggagccguga

SEQ ID NO: 330550 - RNA, 22 nt, Human
gggcagcaucaggaggggcuuu

SEQ ID NO: 330551 - RNA, 22 nt, Human
ggcuggacuugguccuguuuug

SEQ ID NO: 330552 - RNA, 16 nt, Human
ggcagcagcuccgugc

SEQ ID NO: 330553 - RNA, 22 nt, Human
cgcugggcgcgcuccgaacccg

SEQ ID NO: 330554 - RNA, 22 nt, Human
agcagcaccuguccucgcugcu

SEQ ID NO: 330555 - RNA, 22 nt, Human
ugcuucucaaaaggagguaggu

SEQ ID NO: 330556 - RNA, 22 nt, Human
aggaagagcuggaccagaggac

SEQ ID NO: 330557 - RNA, 22 nt, Human
agguucccagagauagagcugu

SEQ ID NO: 330558 - RNA, 20 nt, Human
caucaacaccuugucagccu

SEQ ID NO: 330559 - RNA, 22 nt, Human
cacgccuggacggcggagggug

SEQ ID NO: 330560 - RNA, 22 nt, Human
ggaggaggggugacugaaugcu

SEQ ID NO: 330561 - RNA, 22 nt, Human
uuauuccauagaagucaaggaa

SEQ ID NO: 330562 - RNA, 22 nt, Human
ugcccuguuccugccuccagcu

SEQ ID NO: 330563 - RNA, 22 nt, Human
aagagcuggcucuugcagcagc

SEQ ID NO: 330564 - RNA, 21 nt, Human
ucauccagguccugcuucuuc

SEQ ID NO: 330565 - RNA, 22 nt, Human
guuugcaaauuguguuaaagcu

SEQ ID NO: 330566 - RNA, 22 nt, Human
agucacuguuuaaucuagcuaa

SEQ ID NO: 330567 - RNA, 18 nt, Human
gggcuuuacagaguggag

SEQ ID NO: 330568 - RNA, 22 nt, Human
gccuggggaacuugauccuguc

SEQ ID NO: 330569 - RNA, 20 nt, Human
ucauccaguugguuuauggu

SEQ ID NO: 330570 - RNA, 22 nt, Human
cagcuuuugcagacuucuugcc

SEQ ID NO: 330571 - RNA, 22 nt, Human
gcaucugauccaauagauauau

SEQ ID NO: 330572 - RNA, 22 nt, Human
ccugucugaaggcagggggaug

SEQ ID NO: 330573 - RNA, 22 nt, Human
ggugaccagggucaguagcuuu

SEQ ID NO: 330574 - RNA, 22 nt, Human
cuuucuuucgaagacgugauua

SEQ ID NO: 330575 - RNA, 22 nt, Human
ugcuccugaacacagcccuaug

SEQ ID NO: 330576 - RNA, 22 nt, Human
cccuggcucugccucagagccc

SEQ ID NO: 330577 - RNA, 22 nt, Human
ccagcugcgggcaucgagaguu

SEQ ID NO: 330578 - RNA, 22 nt, Human
ucucucugcagcccgggacacu

SEQ ID NO: 330579 - RNA, 22 nt, Human
ucucaucugccauuugcaggag

SEQ ID NO: 330580 - RNA, 22 nt, Human
guggccuccuccguccgccucu

SEQ ID NO: 330581 - RNA, 15 nt, Human
gccuugaaugugaau

SEQ ID NO: 330582 - RNA, 22 nt, Human
ucaucuccauacggucucgcag

SEQ ID NO: 330583 - RNA, 22 nt, Human
ugcgcaugcguggcucuccggc

SEQ ID NO: 330584 - RNA, 22 nt, Human
acccaggucucucgacuucugg

SEQ ID NO: 330585 - RNA, 22 nt, Human
agugggagcggcagucggggac

SEQ ID NO: 330586 - RNA, 22 nt, Human
gccgugcgugcgcaggugcugu

SEQ ID NO: 330587 - RNA, 22 nt, Human
cauggaaggcaaaagacacaga

SEQ ID NO: 330588 - RNA, 22 nt, Human
gagcuguguaugcaucauucug

SEQ ID NO: 330589 - RNA, 22 nt, Human
cucugguuucgcaggaaauaga

SEQ ID NO: 330590 - RNA, 21 nt, Human
uccugcugagaaacagauggu

SEQ ID NO: 330591 - RNA, 22 nt, Human
ucauacauguuguguucaaaug

SEQ ID NO: 330592 - RNA, 22 nt, Human
ccugcgcgucugggucugucuc

SEQ ID NO: 330593 - RNA, 22 nt, Human
uguuugcucugacuaucuugcg

SEQ ID NO: 330594 - RNA, 22 nt, Human
ugaaggccagggauuugcagcc

SEQ ID NO: 330595 - RNA, 22 nt, Human
ggcgaggugucugccaucaagc

SEQ ID NO: 330596 - RNA, 22 nt, Human
agccacccuaccagcccugaaa

SEQ ID NO: 330597 - RNA, 22 nt, Human
cagugcugcaggcgccugcggu

SEQ ID NO: 330598 - RNA, 22 nt, Human
cuguuccuccaccucaacaaac

SEQ ID NO: 330599 - RNA, 22 nt, Human
uguccagcugaaggcagccuca

SEQ ID NO: 330600 - RNA, 22 nt, Human
aggcggguuuaggacaaugcuu

SEQ ID NO: 330601 - RNA, 20 nt, Human
uccagccacuuccgcugguc

SEQ ID NO: 330602 - RNA, 22 nt, Human
uuuuucaagacaaccugcaugu

SEQ ID NO: 330603 - RNA, 22 nt, Human
cccccagcucugcugggucccg

SEQ ID NO: 330604 - RNA, 22 nt, Human
auggcugugguaucagacgcag

SEQ ID NO: 330605 - RNA, 19 nt, Human
ccugcugaagugaugcagc

SEQ ID NO: 330606 - RNA, 18 nt, Human
augggcagguaagaucca

SEQ ID NO: 330607 - RNA, 22 nt, Human
gcuagagaccagaggccuugaa

SEQ ID NO: 330608 - RNA, 22 nt, Human
gcccagcugagaagcgcggggc

SEQ ID NO: 330609 - RNA, 22 nt, Human
cagggccucugugggcucucuc

SEQ ID NO: 330610 - RNA, 20 nt, Human
gugugaccuccuguggaugc

SEQ ID NO: 330611 - RNA, 22 nt, Human
auggaguugagcucuguugucc

SEQ ID NO: 330612 - RNA, 22 nt, Human
gagcagcaggccagguugcagg

SEQ ID NO: 330613 - RNA, 22 nt, Human
gucuugcacuuaccuaagaacu

SEQ ID NO: 330614 - RNA, 22 nt, Human
ggcgcggugacucagccucgcu

SEQ ID NO: 330615 - RNA, 22 nt, Human
ucaggaugagucaucaagcugc

SEQ ID NO: 330616 - RNA, 22 nt, Human
ccaggcagccaagugugugugu

SEQ ID NO: 330617 - RNA, 22 nt, Human
gagggccaaugugucccugagc

SEQ ID NO: 330618 - RNA, 22 nt, Human
ggcaguggugggaggcucgcuc

SEQ ID NO: 330619 - RNA, 22 nt, Human
cuccagaggcgacuugcaucac

SEQ ID NO: 330620 - RNA, 22 nt, Human
cucucuguuaugcuuucaugaa

SEQ ID NO: 330621 - RNA, 20 nt, Human
ccagagcugauggcugcccg

SEQ ID NO: 330622 - RNA, 22 nt, Human
guuaaaugcagauucugacuca

SEQ ID NO: 330623 - RNA, 22 nt, Human
aggaggguggggucugccuguc

SEQ ID NO: 330624 - RNA, 22 nt, Human
cagugccagcugcuuggccuac

SEQ ID NO: 330625 - RNA, 22 nt, Human
ggccagccuggggcucccagac

SEQ ID NO: 330626 - RNA, 22 nt, Human
ccgcuguccuggagcugcugcu

SEQ ID NO: 330627 - RNA, 22 nt, Human
ccucuuccuucucacuguggaa

SEQ ID NO: 330628 - RNA, 19 nt, Human
gaugcucauucagguggaa

SEQ ID NO: 330629 - RNA, 22 nt, Human
cugugaauguuauaucucaaug

SEQ ID NO: 330630 - RNA, 22 nt, Human
cacauuuaaagguugaagcuga

SEQ ID NO: 330631 - RNA, 22 nt, Human
ccugugcuucacucaacaagcc

SEQ ID NO: 330632 - RNA, 22 nt, Human
uccaggaggacugagggggcug

SEQ ID NO: 330633 - RNA, 22 nt, Human
ucccggcgcugggagguggguc

SEQ ID NO: 330634 - RNA, 22 nt, Human
guggauggagcuggaagccauu

SEQ ID NO: 330635 - RNA, 22 nt, Human
agcugugaccuucaagagcuac

SEQ ID NO: 330636 - RNA, 22 nt, Human
aggggagguggcagaaaugugc

SEQ ID NO: 330637 - RNA, 22 nt, Human
uccuggccucugagucaagaac

SEQ ID NO: 330638 - RNA, 22 nt, Human
ugcuuucaaugaauuguauacu

SEQ ID NO: 330639 - RNA, 22 nt, Human
acauuuuuggguugaugucuga

SEQ ID NO: 330640 - RNA, 22 nt, Human
gagggugguggcuuaaggugcu

SEQ ID NO: 330641 - RNA, 22 nt, Human
cagcgguggcaaggugacugug

SEQ ID NO: 330642 - RNA, 22 nt, Human
auggccuuucucaguggugcuu

SEQ ID NO: 330643 - RNA, 22 nt, Human
ucacauguguggcagugcaagu

SEQ ID NO: 330644 - RNA, 22 nt, Human
gugagguccucccugcugggag

SEQ ID NO: 330645 - RNA, 22 nt, Human
guggccaucuuuggcccugacu

SEQ ID NO: 330646 - RNA, 22 nt, Human
ucagagacaucagguuguagca

SEQ ID NO: 330647 - RNA, 22 nt, Human
gcugggcccugggugcccuagc

SEQ ID NO: 330648 - RNA, 22 nt, Human
ugccuggcugggcugcucaugg

SEQ ID NO: 330649 - RNA, 23 nt, Human
acucugacuuaguuauagcuauu

SEQ ID NO: 330650 - RNA, 22 nt, Human
aagauuuaccacuuuauucaag

SEQ ID NO: 330651 - RNA, 22 nt, Human
uucaguuuugcuuuuaaucaug

SEQ ID NO: 330652 - RNA, 22 nt, Human
gacgugggucgccaucgauaug

SEQ ID NO: 330653 - RNA, 20 nt, Human
ucucccugcccaucucagau

SEQ ID NO: 330654 - RNA, 22 nt, Human
gucccugauaagagccaucgau

SEQ ID NO: 330655 - RNA, 22 nt, Human
uaaagugaaguucagaauggcu

SEQ ID NO: 330656 - RNA, 22 nt, Human
cccaggcacacugaagugacau

SEQ ID NO: 330657 - RNA, 17 nt, Human
ggccugcaccuccugcu

SEQ ID NO: 330658 - RNA, 22 nt, Human
caaagaagagauuuacagagcu

SEQ ID NO: 330659 - RNA, 22 nt, Human
gcuccugggcccugggcuaacu

SEQ ID NO: 330660 - RNA, 22 nt, Human
uggccuugcccagcgccuaggu

SEQ ID NO: 330661 - RNA, 22 nt, Human
cucgccccggcacaguguccgu

SEQ ID NO: 330662 - RNA, 22 nt, Human
accuccuccaaggagccauagg

SEQ ID NO: 330663 - RNA, 22 nt, Human
acaugaggaacucaggagucac

SEQ ID NO: 330664 - RNA, 22 nt, Human
augauuuguuaacagacuuaau

SEQ ID NO: 330665 - RNA, 20 nt, Human
gggugugugcagggccuggu

SEQ ID NO: 330666 - RNA, 22 nt, Human
gagcugagggucuaggaggguu

SEQ ID NO: 330667 - RNA, 18 nt, Human
gccuggcuucggagccgc

SEQ ID NO: 330668 - RNA, 22 nt, Human
uccagguccuacuggcccauag

SEQ ID NO: 330669 - RNA, 22 nt, Human
gccagcagcucuugggcgggca

SEQ ID NO: 330670 - RNA, 22 nt, Human
gguggcagaggugcaucagccc

SEQ ID NO: 330671 - RNA, 22 nt, Human
cuguggguggcugugccccagg

SEQ ID NO: 330672 - RNA, 22 nt, Human
auaucuaggcugaauguaaaau

SEQ ID NO: 330673 - RNA, 22 nt, Human
aaguuacacauuuucauuguaa

SEQ ID NO: 330674 - RNA, 22 nt, Human
caggcuacauuugcucugagaa

SEQ ID NO: 330675 - RNA, 22 nt, Human
uuuuguguugccauguuaagca

SEQ ID NO: 330676 - RNA, 22 nt, Human
gggugcaaacccguucugcacc

SEQ ID NO: 330677 - RNA, 22 nt, Human
cagguuccaguugcagggacuu

SEQ ID NO: 330678 - RNA, 19 nt, Human
cucugccauuugcugccug

SEQ ID NO: 330679 - RNA, 22 nt, Human
gcugcccauugcucucccacuc

SEQ ID NO: 330680 - RNA, 22 nt, Human
uggcauuuuguagcuguguauc

SEQ ID NO: 330681 - RNA, 22 nt, Human
agccagucggggccaugcuggg

SEQ ID NO: 330682 - RNA, 22 nt, Human
uuugacuccuguguuucuggaa

SEQ ID NO: 330683 - RNA, 22 nt, Human
gcgcugccucugcucuccccac

SEQ ID NO: 330684 - RNA, 22 nt, Human
aggugccugucgucucugguua

SEQ ID NO: 330685 - RNA, 22 nt, Human
agcaggccugccaccucggggu

SEQ ID NO: 330686 - RNA, 22 nt, Human
ggccuugggauguggcugcagc

SEQ ID NO: 330687 - RNA, 22 nt, Human
aaguuacaggagaaagagauca

SEQ ID NO: 330688 - RNA, 22 nt, Human
ugaguccagaugggccagcagg

SEQ ID NO: 330689 - RNA, 22 nt, Human
gccagcagcgagaguuuaaccu

SEQ ID NO: 330690 - RNA, 22 nt, Human
ucagccaggccaggcauucaca

SEQ ID NO: 330691 - RNA, 22 nt, Human
ccucguccacaauccuugcaca

SEQ ID NO: 330692 - RNA, 18 nt, Human
aaacauggcuuaaaggcu

SEQ ID NO: 330693 - RNA, 22 nt, Human
cagcaguacuucucagagguau

SEQ ID NO: 330694 - RNA, 22 nt, Human
cagggagaucuuggcuccuggu

SEQ ID NO: 330695 - RNA, 20 nt, Human
aggcccuccccacuguugcu

SEQ ID NO: 330696 - RNA, 22 nt, Human
agggccacgugcaccgcggucu

SEQ ID NO: 330697 - RNA, 22 nt, Human
cgucaggguugagcagguagau

SEQ ID NO: 330698 - RNA, 22 nt, Human
gagaggaagccuucuguacuug

SEQ ID NO: 330699 - RNA, 22 nt, Human
ccagcaggagacuagcaacaua

SEQ ID NO: 330700 - RNA, 22 nt, Human
gcggggccauguccaacggccu

SEQ ID NO: 330701 - RNA, 19 nt, Human
acugcagggaggaggugug

SEQ ID NO: 330702 - RNA, 22 nt, Human
uccagcaguccaugugagacac

SEQ ID NO: 330703 - RNA, 22 nt, Human
gcugucccgaaccccugguaau

SEQ ID NO: 330704 - RNA, 22 nt, Human
ggucuccugaccuuuagucccu

SEQ ID NO: 330705 - RNA, 22 nt, Human
ggcagcagaacuggcccuguau

SEQ ID NO: 330706 - RNA, 22 nt, Human
uacuguauacuacugcuguucu

SEQ ID NO: 330707 - RNA, 22 nt, Human
gcacguguucuguggcaugggu

SEQ ID NO: 330708 - RNA, 22 nt, Human
gcccagccccuggguggacgug

SEQ ID NO: 330709 - RNA, 22 nt, Human
cccuucagcugagugggacagc

SEQ ID NO: 330710 - RNA, 22 nt, Human
caagccaggaaggauccagcac

SEQ ID NO: 330711 - RNA, 22 nt, Human
caggccagcagggccuccgugg

SEQ ID NO: 330712 - RNA, 22 nt, Human
acgcggugcggcaaguucaugg

SEQ ID NO: 330713 - RNA, 22 nt, Human
aggcaguguggagggcuguugc

SEQ ID NO: 330714 - RNA, 22 nt, Human
gcaccgagaaggaagcaugccu

SEQ ID NO: 330715 - RNA, 22 nt, Human
aaagaggcucaaggugggccag

SEQ ID NO: 330716 - RNA, 22 nt, Human
cuucaugcugauauccucgaug

SEQ ID NO: 330717 - RNA, 22 nt, Human
aucuaugugggaaucauaauag

SEQ ID NO: 330718 - RNA, 22 nt, Human
ggcgagcaugagucacucuggg

SEQ ID NO: 330719 - RNA, 21 nt, Human
ucuccucccggggagaggccg

SEQ ID NO: 330720 - RNA, 22 nt, Human
ugaggccaagccuccucugcca

SEQ ID NO: 330721 - RNA, 22 nt, Human
agaguggcaccuuaccugagac

SEQ ID NO: 330722 - RNA, 20 nt, Human
acacugugcuaaggauuuuc

SEQ ID NO: 330723 - RNA, 22 nt, Human
gcugucaggaacaugccuuggu

SEQ ID NO: 330724 - RNA, 22 nt, Human
cagggcucgcucgcucgcucgc

SEQ ID NO: 330725 - RNA, 22 nt, Human
ucuccucuccuuucauguuguu

SEQ ID NO: 330726 - RNA, 22 nt, Human
augcuuucucuuaguucauuga

SEQ ID NO: 330727 - RNA, 22 nt, Human
ccggcucggcgaccaggcugaa

SEQ ID NO: 330728 - RNA, 22 nt, Human
cccagcugaacuugcauuccaa

SEQ ID NO: 330729 - RNA, 22 nt, Human
uggaaauacaagaaguauguca

SEQ ID NO: 330730 - RNA, 22 nt, Human
cgugcagcggagcuggucacug

SEQ ID NO: 330731 - RNA, 22 nt, Human
ugguuacccagucgcuggaguu

SEQ ID NO: 330732 - RNA, 21 nt, Human
ucugugcuuuuuuggcuccua

SEQ ID NO: 330733 - RNA, 22 nt, Human
uuucuucucacccaggacagag

SEQ ID NO: 330734 - RNA, 22 nt, Human
caggacccaucagccaggcacu

SEQ ID NO: 330735 - RNA, 22 nt, Human
agugaauuagccuauuuguaaa

SEQ ID NO: 330736 - RNA, 19 nt, Human
ugccuggcaccagcuccac

SEQ ID NO: 330737 - RNA, 18 nt, Human
accugauuggcgcagccc

SEQ ID NO: 330738 - RNA, 22 nt, Human
ucuuucagaaacuuugucugcg

SEQ ID NO: 330739 - RNA, 22 nt, Human
aggcucccaagcacugacccca

SEQ ID NO: 330740 - RNA, 22 nt, Human
gccaaucaggaggcuguacauc

SEQ ID NO: 330741 - RNA, 22 nt, Human
ugccucugcugcauauucaccu

SEQ ID NO: 330742 - RNA, 19 nt, Human
aggugaugugacucuagaa

SEQ ID NO: 330743 - RNA, 22 nt, Human
ugucuucauuccccaugaaguc

SEQ ID NO: 330744 - RNA, 22 nt, Human
ugcugcucaagcugcagcaaaa

SEQ ID NO: 330745 - RNA, 22 nt, Human
guauuaugaaugccgaggcggc

SEQ ID NO: 330746 - RNA, 22 nt, Human
ucaccgccuugcccggccgggc

SEQ ID NO: 330747 - RNA, 22 nt, Human
uacugcugagcuggguagaagg

SEQ ID NO: 330748 - RNA, 22 nt, Human
accagucauagaaagcaguggu

SEQ ID NO: 330749 - RNA, 22 nt, Human
gccacccuggacgcacuguucg

SEQ ID NO: 330750 - RNA, 22 nt, Human
ugccuggauggcucugagcagg

SEQ ID NO: 330751 - RNA, 22 nt, Human
uggaaggggccaggcgcggagu

SEQ ID NO: 330752 - RNA, 18 nt, Human
ggaaggugcuggagugca

SEQ ID NO: 330753 - RNA, 21 nt, Human
ugcuccaggagggggcagucc

SEQ ID NO: 330754 - RNA, 22 nt, Human
uguagcucuccagccagcaagg

SEQ ID NO: 330755 - RNA, 22 nt, Human
gggcucuguuuagaccagagau

SEQ ID NO: 330756 - RNA, 22 nt, Human
uucaaugcaagggaggucugaa

SEQ ID NO: 330757 - RNA, 22 nt, Human
ccucuuccacugggccccaucc

SEQ ID NO: 330758 - RNA, 22 nt, Human
uggccccugaggagcgucagcc

SEQ ID NO: 330759 - RNA, 22 nt, Human
cugggauccacgggcucccaag

SEQ ID NO: 330760 - RNA, 17 nt, Human
gcguguccccgcgucuc

SEQ ID NO: 330761 - RNA, 22 nt, Human
agcuggguguagggcuggacaa

SEQ ID NO: 330762 - RNA, 22 nt, Human
agaagcagaaggaagcagggcc

SEQ ID NO: 330763 - RNA, 22 nt, Human
ugggcagggagcuggaaccaca

SEQ ID NO: 330764 - RNA, 22 nt, Human
cgccaguggcagcuggaacagg

SEQ ID NO: 330765 - RNA, 22 nt, Human
caggagcucaagaccacccugg

SEQ ID NO: 330766 - RNA, 22 nt, Human
cugucaaauggaaacuuauccu

SEQ ID NO: 330767 - RNA, 22 nt, Human
cugaauucugccuugaggccuu

SEQ ID NO: 330768 - RNA, 22 nt, Human
ccaggacaagccagagggacag

SEQ ID NO: 330769 - RNA, 22 nt, Human
gagaguuaguugagcagucuga

SEQ ID NO: 330770 - RNA, 22 nt, Human
augcuuuauuggagacagucau

SEQ ID NO: 330771 - RNA, 22 nt, Human
aauggcuguucucugugauugg

SEQ ID NO: 330772 - RNA, 22 nt, Human
ucugcacccugugguccucuag

SEQ ID NO: 330773 - RNA, 22 nt, Human
gggcagcaggcuccacguuccu

SEQ ID NO: 330774 - RNA, 21 nt, Human
gggcuggauauuggaaagagg

SEQ ID NO: 330775 - RNA, 20 nt, Human
augcacccucagggucccug

SEQ ID NO: 330776 - RNA, 22 nt, Human
cgcccacgaaguagguggcauu

SEQ ID NO: 330777 - RNA, 22 nt, Human
gcucagugaagggugccaagua

SEQ ID NO: 330778 - RNA, 21 nt, Human
uuuguucaggggcaaaguuaa

SEQ ID NO: 330779 - RNA, 22 nt, Human
acauuugauauggaguugugua

SEQ ID NO: 330780 - RNA, 22 nt, Human
gcagcugcgaagaagucuaucu

SEQ ID NO: 330781 - RNA, 17 nt, Human
ucugcagggggccgugu

SEQ ID NO: 330782 - RNA, 22 nt, Human
gggcuucuugagcugccggccc

SEQ ID NO: 330783 - RNA, 22 nt, Human
agcuccugaaaagcgcuugcuu

SEQ ID NO: 330784 - RNA, 18 nt, Human
auuugcaggcaugcaggc

SEQ ID NO: 330785 - RNA, 22 nt, Human
cagacaggguccuguccgucac

SEQ ID NO: 330786 - RNA, 22 nt, Human
agcggcgccgagcuuggccagg

SEQ ID NO: 330787 - RNA, 22 nt, Human
ccucucauagucuguauccuuu

SEQ ID NO: 330788 - RNA, 22 nt, Human
gccuguuucuccuccuuggccc

SEQ ID NO: 330789 - RNA, 21 nt, Human
ugcuggguuugcccaucaggc

SEQ ID NO: 330790 - RNA, 17 nt, Human
gagguaggaagugaguc

SEQ ID NO: 330791 - RNA, 19 nt, Human
ugcuccaggccuugccgca

SEQ ID NO: 330792 - RNA, 22 nt, Human
uucuuugcccauguuuccuaag

SEQ ID NO: 330793 - RNA, 22 nt, Human
ugaugggaggugcugcaggacc

SEQ ID NO: 330794 - RNA, 22 nt, Human
aagguggcggcugccagguccu

SEQ ID NO: 330795 - RNA, 22 nt, Human
gccuggaaugcaaugugacgaa

SEQ ID NO: 330796 - RNA, 22 nt, Human
cauagacauugauagguuauau

SEQ ID NO: 330797 - RNA, 22 nt, Human
ggggaagaaauagaacauuuug

SEQ ID NO: 330798 - RNA, 22 nt, Human
ucgccccgaggcagcccuaugc

SEQ ID NO: 330799 - RNA, 22 nt, Human
gcagcagcaggcgcucggccgu

SEQ ID NO: 330800 - RNA, 22 nt, Human
ccugggcaaaugccagagacaa

SEQ ID NO: 330801 - RNA, 22 nt, Human
ggucagugccuaucaugugggc

SEQ ID NO: 330802 - RNA, 22 nt, Human
gggcuccagaggcucacccugg

SEQ ID NO: 330803 - RNA, 22 nt, Human
acauucaugcaccuuccuaucc

SEQ ID NO: 330804 - RNA, 22 nt, Human
aagggccacaugccauuuaaaa

SEQ ID NO: 330805 - RNA, 22 nt, Human
gccccagcagcaaugcgguuga

SEQ ID NO: 330806 - RNA, 22 nt, Human
guggcgcagaggguggcagaga

SEQ ID NO: 330807 - RNA, 22 nt, Human
caugcaugccgggcugacagag

SEQ ID NO: 330808 - RNA, 22 nt, Human
gacuuugccacugaccuccaac

SEQ ID NO: 330809 - RNA, 22 nt, Human
cuggaagcgucggaggaagggc

SEQ ID NO: 330810 - RNA, 22 nt, Human
ccaagcuggacagcagcaagga

SEQ ID NO: 330811 - RNA, 22 nt, Human
gcugauggcuugcuggcugaca

SEQ ID NO: 330812 - RNA, 19 nt, Human
ggaggcuucuuggggucgg

SEQ ID NO: 330813 - RNA, 22 nt, Human
auuccaaagccugaauaaugga

SEQ ID NO: 330814 - RNA, 22 nt, Human
ucagagccccuccgcuguccca

SEQ ID NO: 330815 - RNA, 22 nt, Human
auggcucugcugggcaaagcaa

SEQ ID NO: 330816 - RNA, 22 nt, Human
caugugaauuccaaagcuaggu

SEQ ID NO: 330817 - RNA, 22 nt, Human
cugcccaucuggccacacacag

SEQ ID NO: 330818 - RNA, 23 nt, Human
ugggcagcuucugcaugcccacc

SEQ ID NO: 330819 - RNA, 22 nt, Human
uugcaggucuggggguccuggu

SEQ ID NO: 330820 - RNA, 23 nt, Human
uggugggcccugcuugcucacug

SEQ ID NO: 330821 - RNA, 22 nt, Human
accaggaguuuugaccaggggc

SEQ ID NO: 330822 - RNA, 22 nt, Human
gcggccugcgcugcucccgacg

SEQ ID NO: 330823 - RNA, 19 nt, Human
agcagagcagggccguggg

SEQ ID NO: 330824 - RNA, 22 nt, Human
ugggugguugcugaggcuccuu

SEQ ID NO: 330825 - RNA, 22 nt, Human
cagggccagggcuauggugaag

SEQ ID NO: 330826 - RNA, 22 nt, Human
ugcccagucuccgggccagccc

SEQ ID NO: 330827 - RNA, 22 nt, Human
ugccgcgcgcccagguuaggug

SEQ ID NO: 330828 - RNA, 22 nt, Human
uggcugagugaacauguccauu

SEQ ID NO: 330829 - RNA, 22 nt, Human
cccaggcuggggcuccuccagc

SEQ ID NO: 330830 - RNA, 21 nt, Human
ucgaccugcugggcucgggcu

SEQ ID NO: 330831 - RNA, 22 nt, Human
cuggcuccucaggacugcggga

SEQ ID NO: 330832 - RNA, 22 nt, Human
ugggagagauaggcuucuggac

SEQ ID NO: 330833 - RNA, 22 nt, Human
cugcacagucauuuccucucaa

SEQ ID NO: 330834 - RNA, 22 nt, Human
uuucacauacaguguauaguag

SEQ ID NO: 330835 - RNA, 22 nt, Human
uccuugcagcaggaacccacuu

SEQ ID NO: 330836 - RNA, 23 nt, Human
gggugcugccuguagucaugcug

SEQ ID NO: 330837 - RNA, 22 nt, Human
agaagagccacuguugacggca

SEQ ID NO: 330838 - RNA, 22 nt, Human
auccugggaaguggccuccucc

SEQ ID NO: 330839 - RNA, 22 nt, Human
cugggugagcuggccagagggu

SEQ ID NO: 330840 - RNA, 22 nt, Human
uucucaaagugugcucccugga

SEQ ID NO: 330841 - RNA, 22 nt, Human
cuccguggcuguggacgcagcc

SEQ ID NO: 330842 - RNA, 22 nt, Human
gugcaugucuuuggaggccucc

SEQ ID NO: 330843 - RNA, 22 nt, Human
ugugaacuggcagguggacggg

SEQ ID NO: 330844 - RNA, 22 nt, Human
uggcaaggccacaggugcaguu

SEQ ID NO: 330845 - RNA, 22 nt, Human
gcggccuuguggcggagcaggc

SEQ ID NO: 330846 - RNA, 22 nt, Human
gaggaggcuuccgggaggcacg

SEQ ID NO: 330847 - RNA, 22 nt, Human
ugcugcacuuauggcucugagg

SEQ ID NO: 330848 - RNA, 22 nt, Human
gcaccagccugagccucuugca

SEQ ID NO: 330849 - RNA, 22 nt, Human
aucuguucuucaaaauauuaca

SEQ ID NO: 330850 - RNA, 22 nt, Human
uguucuggugaggccauggggu

SEQ ID NO: 330851 - RNA, 19 nt, Human
uggugcgcuguuccugagc

SEQ ID NO: 330852 - RNA, 22 nt, Human
cccaggaguaagugacauuguu

SEQ ID NO: 330853 - RNA, 22 nt, Human
cacaccuuaggccugagcgcuu

SEQ ID NO: 330854 - RNA, 22 nt, Human
gcuugcuuuguaaauaucugug

SEQ ID NO: 330855 - RNA, 22 nt, Human
ucaggccccaucccagacuuau

SEQ ID NO: 330856 - RNA, 22 nt, Human
cuccagcagaaagggcgagugg

SEQ ID NO: 330857 - RNA, 20 nt, Human
ccacccuguccggggcggag

SEQ ID NO: 330858 - RNA, 22 nt, Human
cuggagggcugcagcgaggcug

SEQ ID NO: 330859 - RNA, 22 nt, Human
gggaccuggacaugugugugcu

SEQ ID NO: 330860 - RNA, 22 nt, Human
ucuggcccaucuucugccacca

SEQ ID NO: 330861 - RNA, 22 nt, Human
cuggcuuucauggcgcaguuga

SEQ ID NO: 330862 - RNA, 22 nt, Human
ucaucaucauucucccccacuu

SEQ ID NO: 330863 - RNA, 22 nt, Human
ggcgcucaguguugccccagag

SEQ ID NO: 330864 - RNA, 22 nt, Human
agguggaguuaagugugaacug

SEQ ID NO: 330865 - RNA, 22 nt, Human
uccuggcccuguggccugcagu

SEQ ID NO: 330866 - RNA, 22 nt, Human
ucaaagaucagaugguuguagg

SEQ ID NO: 330867 - RNA, 22 nt, Human
cuucucaaaguugugaaucagg

SEQ ID NO: 330868 - RNA, 22 nt, Human
ccaucuucucuugaaccuccuu

SEQ ID NO: 330869 - RNA, 22 nt, Human
ggccccagggauuaggccaacc

SEQ ID NO: 330870 - RNA, 22 nt, Human
guugcaaaugggaagaugguua

SEQ ID NO: 330871 - RNA, 22 nt, Human
cugucaccucugcccuuugccc

SEQ ID NO: 330872 - RNA, 20 nt, Human
cugcuccacccggcucucag

SEQ ID NO: 330873 - RNA, 22 nt, Human
gcacugccugugagcccugguu

SEQ ID NO: 330874 - RNA, 22 nt, Human
cagagccacugucugccaggca

SEQ ID NO: 330875 - RNA, 20 nt, Human
guccugggagccacagcaca

SEQ ID NO: 330876 - RNA, 22 nt, Human
gggaugagagcugggacagaag

SEQ ID NO: 330877 - RNA, 22 nt, Human
uuucuggcagcgggacaggggu

SEQ ID NO: 330878 - RNA, 22 nt, Human
cucccucaggccuuagcccugc

SEQ ID NO: 330879 - RNA, 22 nt, Human
cucuguccugguuuauacuggc

SEQ ID NO: 330880 - RNA, 22 nt, Human
gagugggugaaugugcucauaa

SEQ ID NO: 330881 - RNA, 22 nt, Human
cugucucugauaagcucgaggg

SEQ ID NO: 330882 - RNA, 22 nt, Human
gcggcccggguccccagcagca

SEQ ID NO: 330883 - RNA, 22 nt, Human
uugggucaugggaucccagcau

SEQ ID NO: 330884 - RNA, 22 nt, Human
gggacagcuguagugcuuggcu

SEQ ID NO: 330885 - RNA, 22 nt, Human
cagggucuuggcgccaucaccc

SEQ ID NO: 330886 - RNA, 22 nt, Human
ucugggaguuucugugggagcu

SEQ ID NO: 330887 - RNA, 22 nt, Human
aaggccaucuacuuacggaauu

SEQ ID NO: 330888 - RNA, 19 nt, Human
uccuggggaggggcauggc

SEQ ID NO: 330889 - RNA, 22 nt, Human
gugcugucguggaacugggcug

SEQ ID NO: 330890 - RNA, 22 nt, Human
cugggcuccuaaccauccaggu

SEQ ID NO: 330891 - RNA, 23 nt, Human
cguuuuuuccucagauguucugg

SEQ ID NO: 330892 - RNA, 22 nt, Human
gcagcccaggaggcgggagccc

SEQ ID NO: 330893 - RNA, 22 nt, Human
uugcuggaguagaaaacuuaac

SEQ ID NO: 330894 - RNA, 17 nt, Human
gcaggcacugcugccug

SEQ ID NO: 330895 - RNA, 22 nt, Human
cacugggagcagcuccaacauu

SEQ ID NO: 330896 - RNA, 22 nt, Human
ggcagccagagggcagcuggau

SEQ ID NO: 330897 - RNA, 22 nt, Human
uaccugggcccaccagugccug

SEQ ID NO: 330898 - RNA, 22 nt, Human
ccaggcuccccaggaggcccuu

SEQ ID NO: 330899 - RNA, 20 nt, Human
ggucacuguggcugcaggau

SEQ ID NO: 330900 - RNA, 22 nt, Human
ccgaggcuggccucagggcugu

SEQ ID NO: 330901 - RNA, 23 nt, Human
uggggcugauggagacggaccag

SEQ ID NO: 330902 - RNA, 22 nt, Human
aaagugacaaccauuuauuaag

SEQ ID NO: 330903 - RNA, 22 nt, Human
ucaggggacagccagcuggagg

SEQ ID NO: 330904 - RNA, 22 nt, Human
ugcacaguuggcuacaucgugg

SEQ ID NO: 330905 - RNA, 22 nt, Human
gagguggcugcuugcugggaaa

SEQ ID NO: 330906 - RNA, 22 nt, Human
ugcucuguucaguguaucuugu

SEQ ID NO: 330907 - RNA, 22 nt, Human
ugcagguggcagcggggcacca

SEQ ID NO: 330908 - RNA, 22 nt, Human
ucuuggcaguucuugugcuuuu

SEQ ID NO: 330909 - RNA, 22 nt, Human
cugacucccaaagaggacgcgu

SEQ ID NO: 330910 - RNA, 23 nt, Human
ggaagcucacguaguccugcacu

SEQ ID NO: 330911 - RNA, 22 nt, Human
gagcagcaucuccggcuuaaag

SEQ ID NO: 330912 - RNA, 22 nt, Human
aucugucccuccucacagccuc

SEQ ID NO: 330913 - RNA, 22 nt, Human
ggugcggagacuccaugaggcc

SEQ ID NO: 330914 - RNA, 22 nt, Human
ucaguguagcagacuuguagcc

SEQ ID NO: 330915 - RNA, 22 nt, Human
guugugcaaacacuggggucug

SEQ ID NO: 330916 - RNA, 18 nt, Human
ggccucagccuggccgga

SEQ ID NO: 330917 - RNA, 22 nt, Human
aaauugcaaaaguacuuuuagg

SEQ ID NO: 330918 - RNA, 22 nt, Human
auuuccuggaggaauggaagca

SEQ ID NO: 330919 - RNA, 20 nt, Human
gugcuaaguacugugaaggg

SEQ ID NO: 330920 - RNA, 22 nt, Human
caaagaugccaaaaggaagaca

SEQ ID NO: 330921 - RNA, 22 nt, Human
gccaccagccccaugcgcugug

SEQ ID NO: 330922 - RNA, 23 nt, Human
aaugaguugggcagcauacaggc

SEQ ID NO: 330923 - RNA, 22 nt, Human
uuuuaauccucuugguaucuua

SEQ ID NO: 330924 - RNA, 23 nt, Human
aaacuacauuuauaguuuuucuc

SEQ ID NO: 330925 - RNA, 22 nt, Human
ggaaacugcuuacacuagaggg

SEQ ID NO: 330926 - RNA, 22 nt, Human
aguucugggaggugcacgucca

SEQ ID NO: 330927 - RNA, 22 nt, Human
cucagcucauuguggauccggu

SEQ ID NO: 330928 - RNA, 22 nt, Human
ucucaggcuuccuggugcugug

SEQ ID NO: 330929 - RNA, 22 nt, Human
ugcccauggcaggauuucugaa

SEQ ID NO: 330930 - RNA, 22 nt, Human
ucgggguagacgccagcucgga

SEQ ID NO: 330931 - RNA, 22 nt, Human
ggugggugagcccugggagcug

SEQ ID NO: 330932 - RNA, 17 nt, Human
gugagcugagucaggac

SEQ ID NO: 330933 - RNA, 20 nt, Human
gcucagggccugggucugga

SEQ ID NO: 330934 - RNA, 22 nt, Human
cuccagcucgcgagcucugcuc

SEQ ID NO: 330935 - RNA, 22 nt, Human
gcagcccaggcucgcucacugc

SEQ ID NO: 330936 - RNA, 22 nt, Human
ugucugccugcgggccggcaca

SEQ ID NO: 330937 - RNA, 22 nt, Human
gcagcugccgugagcucacgcc

SEQ ID NO: 330938 - RNA, 22 nt, Human
uugccaggagacaucuggagcc

SEQ ID NO: 330939 - RNA, 22 nt, Human
agcacuggaaaguuaagaguuu

SEQ ID NO: 330940 - RNA, 22 nt, Human
uugacguccucgauggggaacu

SEQ ID NO: 330941 - RNA, 22 nt, Human
cugggagaugacucagagcagg

SEQ ID NO: 330942 - RNA, 22 nt, Human
ggagcggagggagggccacugu

SEQ ID NO: 330943 - RNA, 22 nt, Human
ccugugcaugccaggguacacc

SEQ ID NO: 330944 - RNA, 22 nt, Human
uaguggguuuauacaauuuaaa

SEQ ID NO: 330945 - RNA, 22 nt, Human
uuggauggagguucaagcacua

SEQ ID NO: 330946 - RNA, 22 nt, Human
cuuccucuguggccagagugua

SEQ ID NO: 330947 - RNA, 22 nt, Human
ccaggcuaggaccgauuucccu

SEQ ID NO: 330948 - RNA, 22 nt, Human
gugcuggggagauaggaagaga

SEQ ID NO: 330949 - RNA, 22 nt, Human
uuaagguucagaaaucaauacc

SEQ ID NO: 330950 - RNA, 22 nt, Human
agccagugucgugugacaugag

SEQ ID NO: 330951 - RNA, 22 nt, Human
gggucugcuccaccugcagccc

SEQ ID NO: 330952 - RNA, 22 nt, Human
acccagcucuuugauggucuug

SEQ ID NO: 330953 - RNA, 22 nt, Human
cggcgcaggcagaccgcgggcu

SEQ ID NO: 330954 - RNA, 22 nt, Human
agguagcuggugcugggcuccu

SEQ ID NO: 330955 - RNA, 22 nt, Human
aaagaugucauacacauuaaga

SEQ ID NO: 330956 - RNA, 22 nt, Human
gccugugcuuaacugacgugag

SEQ ID NO: 330957 - RNA, 22 nt, Human
cccagccuuugcuuccugguuc

SEQ ID NO: 330958 - RNA, 22 nt, Human
ucaucuguuaugggaguuuuug

SEQ ID NO: 330959 - RNA, 21 nt, Human
uggagagugauuucagugugg

SEQ ID NO: 330960 - RNA, 22 nt, Human
gcucguacaccagcguggaggu

SEQ ID NO: 330961 - RNA, 22 nt, Human
guggcagcggcccaggccgucu

SEQ ID NO: 330962 - RNA, 22 nt, Human
cccagguaaggaugcuccucau

SEQ ID NO: 330963 - RNA, 22 nt, Human
cugcaucaguggauaugauggu

SEQ ID NO: 330964 - RNA, 22 nt, Human
uggcccagaucucugaccuuga

SEQ ID NO: 330965 - RNA, 22 nt, Human
cccagccucuggguucugccgg

SEQ ID NO: 330966 - RNA, 22 nt, Human
ccugcacuaccuggggcugcug

SEQ ID NO: 330967 - RNA, 22 nt, Human
uggaucuugaugcuccaagagu

SEQ ID NO: 330968 - RNA, 22 nt, Human
ggagcagggaauuacagcgcag

SEQ ID NO: 330969 - RNA, 22 nt, Human
gccggucuuaagcugacuguga

SEQ ID NO: 330970 - RNA, 22 nt, Human
agaguguguggggcugagguca

SEQ ID NO: 330971 - RNA, 22 nt, Human
ggaagaggcugaggccaugcug

SEQ ID NO: 330972 - RNA, 22 nt, Human
uucucuucacagggaucauccu

SEQ ID NO: 330973 - RNA, 22 nt, Human
cagcugccuguauuguccucau

SEQ ID NO: 330974 - RNA, 22 nt, Human
acugauuucagggaugagaaga

SEQ ID NO: 330975 - RNA, 22 nt, Human
agcagccuugugacuccggggu

SEQ ID NO: 330976 - RNA, 22 nt, Human
cauguguauuauucuuguggaa

SEQ ID NO: 330977 - RNA, 22 nt, Human
caugggcucuucuggacugcac

SEQ ID NO: 330978 - RNA, 22 nt, Human
auuuugacauugcggcauugcu

SEQ ID NO: 330979 - RNA, 18 nt, Human
ccucuggguuuuguuccc

SEQ ID NO: 330980 - RNA, 22 nt, Human
gggagcugaaggagccggcggg

SEQ ID NO: 330981 - RNA, 22 nt, Human
gcagcugcgcugguguggggca

SEQ ID NO: 330982 - RNA, 22 nt, Human
gcagggcugauggcuucccuca

SEQ ID NO: 330983 - RNA, 22 nt, Human
ucuccaggggcagggucuggag

SEQ ID NO: 330984 - RNA, 22 nt, Human
cugcggcuggggacagcuguug

SEQ ID NO: 330985 - RNA, 22 nt, Human
uuccuucuucauuguguuacag

SEQ ID NO: 330986 - RNA, 22 nt, Human
acuuggucguggugcagcaugg

SEQ ID NO: 330987 - RNA, 18 nt, Human
gguccugggccuggcuca

SEQ ID NO: 330988 - RNA, 22 nt, Human
gcccagggcugcaaguggacgc

SEQ ID NO: 330989 - RNA, 21 nt, Human
ccuguggugccagaucgccag

SEQ ID NO: 330990 - RNA, 22 nt, Human
gcucuccacugaccacggggca

SEQ ID NO: 330991 - RNA, 22 nt, Human
cugugugcagggcacaauggaa

SEQ ID NO: 330992 - RNA, 18 nt, Human
uccauccucugcucuuca

SEQ ID NO: 330993 - RNA, 22 nt, Human
gugcucacugugagacguccug

SEQ ID NO: 330994 - RNA, 22 nt, Human
uugcuucacuacuucuaggcuc

SEQ ID NO: 330995 - RNA, 22 nt, Human
aagcugccugggaggaagggcu

SEQ ID NO: 330996 - RNA, 22 nt, Human
aaaguaauugugguucuugcca

SEQ ID NO: 330997 - RNA, 22 nt, Human
gcugcuggcuuccugcuguuuu

SEQ ID NO: 330998 - RNA, 22 nt, Human
acuugcaucuuagagacucacc

SEQ ID NO: 330999 - RNA, 22 nt, Human
gcugcugcuugaaggcucggag

SEQ ID NO: 331000 - RNA, 18 nt, Human
ucagacaaguuagacagg

SEQ ID NO: 331001 - RNA, 22 nt, Human
caggcacaaugagcgccaucuu

SEQ ID NO: 331002 - RNA, 22 nt, Human
gagcugcagcggcugacgcaac

SEQ ID NO: 331003 - RNA, 22 nt, Human
cuucauuucaggcugaagaaua

SEQ ID NO: 331004 - RNA, 22 nt, Human
gcagagcugguacuugagccug

SEQ ID NO: 331005 - RNA, 22 nt, Human
ccugugguuuacucuguggcua

SEQ ID NO: 331006 - RNA, 22 nt, Human
cucccugggccucaguuucucu

SEQ ID NO: 331007 - RNA, 22 nt, Human
gcugcuccgcagagugugugug

SEQ ID NO: 331008 - RNA, 22 nt, Human
aggcucgcaugcccugcaccac

SEQ ID NO: 331009 - RNA, 22 nt, Human
aagcccagcaucccugcaccag

SEQ ID NO: 331010 - RNA, 22 nt, Human
uuuucaguugugcucucuaguu

SEQ ID NO: 331011 - RNA, 22 nt, Human
gugaccagacagagucuagccc

SEQ ID NO: 331012 - RNA, 22 nt, Human
acccggaggcgggggaugcagu

SEQ ID NO: 331013 - RNA, 22 nt, Human
ggugggucuuguggggcagcuu

SEQ ID NO: 331014 - RNA, 22 nt, Human
uaucuguuuuuacagugucuuu

SEQ ID NO: 331015 - RNA, 22 nt, Human
aaaccggguccagaucuucagg

SEQ ID NO: 331016 - RNA, 22 nt, Human
ucauggcucuaaagacauagau

SEQ ID NO: 331017 - RNA, 22 nt, Human
uggccuuggcagugagaagagu

SEQ ID NO: 331018 - RNA, 22 nt, Human
gggaagugcccucuucaggaga

SEQ ID NO: 331019 - RNA, 22 nt, Human
cugcauaucaaauuacuccugg

SEQ ID NO: 331020 - RNA, 22 nt, Human
cugggaggcagucucucuagaa

SEQ ID NO: 331021 - RNA, 22 nt, Human
gucugcacgugccagggagggg

SEQ ID NO: 331022 - RNA, 23 nt, Human
uggccucuccccaccuggcagaa

SEQ ID NO: 331023 - RNA, 22 nt, Human
ugugcugcucucagugacagcc

SEQ ID NO: 331024 - RNA, 22 nt, Human
ccagcaugcucagucuaaauug

SEQ ID NO: 331025 - RNA, 22 nt, Human
augcaggaagagcccuggagcu

SEQ ID NO: 331026 - RNA, 22 nt, Human
guggccuuuucaaguaggguau

SEQ ID NO: 331027 - RNA, 20 nt, Human
aaagauacuuuuuguaaugg

SEQ ID NO: 331028 - RNA, 22 nt, Human
uugaacaguuuugucagguuca

SEQ ID NO: 331029 - RNA, 22 nt, Human
ggcucuguaaguguugcaggua

SEQ ID NO: 331030 - RNA, 22 nt, Human
cagcagcaacaacggaagccuu

SEQ ID NO: 331031 - RNA, 22 nt, Human
uccaggagcucauccacgucaa

SEQ ID NO: 331032 - RNA, 22 nt, Human
uggccaggcagguagaacggcc

SEQ ID NO: 331033 - RNA, 22 nt, Human
uuuugaauaauucagaaacagc

SEQ ID NO: 331034 - RNA, 22 nt, Human
uugcugccagcgcccugcaggg

SEQ ID NO: 331035 - RNA, 22 nt, Human
cuuggcugaacuccaggaugca

SEQ ID NO: 331036 - RNA, 22 nt, Human
auggugguagaagcacuaugug

SEQ ID NO: 331037 - RNA, 22 nt, Human
ucaggggcuugaggugcauguc

SEQ ID NO: 331038 - RNA, 22 nt, Human
ucuccaggcuuaaucucagcuu

SEQ ID NO: 331039 - RNA, 20 nt, Human
cuuguuaaauaugcagguag

SEQ ID NO: 331040 - RNA, 22 nt, Human
cuguguacccacgugggcaccc

SEQ ID NO: 331041 - RNA, 22 nt, Human
augaaaacggaccagagcuauu

SEQ ID NO: 331042 - RNA, 22 nt, Human
uggcggugacggcggcgccugg

SEQ ID NO: 331043 - RNA, 22 nt, Human
agcaggugucacuuucacucca

SEQ ID NO: 331044 - RNA, 21 nt, Human
gcaggguuugugcugugaguu

SEQ ID NO: 331045 - RNA, 22 nt, Human
cagcugcuguucaguuuuguuu

SEQ ID NO: 331046 - RNA, 22 nt, Human
cacccucaagcaguggcacgug

SEQ ID NO: 331047 - RNA, 22 nt, Human
agacugugagaagauggcugcg

SEQ ID NO: 331048 - RNA, 22 nt, Human
gagcuccugaaacguuccugcc

SEQ ID NO: 331049 - RNA, 21 nt, Human
agaugaggauacugaggccua

SEQ ID NO: 331050 - RNA, 22 nt, Human
ugcccguggccuggggcagcuu

SEQ ID NO: 331051 - RNA, 18 nt, Human
ggugagggagcuggaagc

SEQ ID NO: 331052 - RNA, 22 nt, Human
gggccuuggcgaaguguggugg

SEQ ID NO: 331053 - RNA, 22 nt, Human
ucgcuugaacccaggaagugga

SEQ ID NO: 331054 - RNA, 22 nt, Human
acuuugccuucuuacuguguug

SEQ ID NO: 331055 - RNA, 23 nt, Human
gccagagcugccugcccuugcug

SEQ ID NO: 331056 - RNA, 22 nt, Human
uugcugugucauuuguuuaauc

SEQ ID NO: 331057 - RNA, 18 nt, Human
gccugccagccgagggac

SEQ ID NO: 331058 - RNA, 22 nt, Human
cucccagccuucgccagucuga

SEQ ID NO: 331059 - RNA, 22 nt, Human
aggcagagaaaaaccagauaug

SEQ ID NO: 331060 - RNA, 22 nt, Human
cuggaaggagcccgggcggauc

SEQ ID NO: 331061 - RNA, 22 nt, Human
gggcugacaccacccaggcgca

SEQ ID NO: 331062 - RNA, 22 nt, Human
ugguggcacugacaucagacac

SEQ ID NO: 331063 - RNA, 22 nt, Human
ugggcagacgggagcuugccuu

SEQ ID NO: 331064 - RNA, 22 nt, Human
agcuuuauuugucauucacggc

SEQ ID NO: 331065 - RNA, 22 nt, Human
agcaggggcaggguuuugugcu

SEQ ID NO: 331066 - RNA, 22 nt, Human
aguccggggucuggacaccugg

SEQ ID NO: 331067 - RNA, 22 nt, Human
ugauauccuuuaaccuggaccg

SEQ ID NO: 331068 - RNA, 22 nt, Human
uuucugcagcagacucagugug

SEQ ID NO: 331069 - RNA, 22 nt, Human
gauguaucugagcugcuuaggu

SEQ ID NO: 331070 - RNA, 22 nt, Human
cucccagggucuaggcugcugg

SEQ ID NO: 331071 - RNA, 22 nt, Human
gcccaguggcaucuucacugcu

SEQ ID NO: 331072 - RNA, 22 nt, Human
cugcaguucuucuccucaaggc

SEQ ID NO: 331073 - RNA, 22 nt, Human
gggacuggaguagaggccggug

SEQ ID NO: 331074 - RNA, 22 nt, Human
gcucagguagaugggguugucc

SEQ ID NO: 331075 - RNA, 22 nt, Human
gggcggggcuuccguccuccac

SEQ ID NO: 331076 - RNA, 22 nt, Human
uccagcagguccgagacaaguu

SEQ ID NO: 331077 - RNA, 22 nt, Human
ggcuaaggacgggcaaguccca

SEQ ID NO: 331078 - RNA, 22 nt, Human
uuuccaguuguucuagaaagcu

SEQ ID NO: 331079 - RNA, 22 nt, Human
gugguuguuuccagguuugaaa

SEQ ID NO: 331080 - RNA, 22 nt, Human
agaaacaucgcuuaguccucau

SEQ ID NO: 331081 - RNA, 22 nt, Human
aagcccucagagccucuuugac

SEQ ID NO: 331082 - RNA, 22 nt, Human
ucuuugcauggacauguguuuu

SEQ ID NO: 331083 - RNA, 22 nt, Human
uuggcugacaaauggaaucucu

SEQ ID NO: 331084 - RNA, 21 nt, Human
cccgugccuucagcaguccug

SEQ ID NO: 331085 - RNA, 22 nt, Human
gccauguucuugaaucuggguc

SEQ ID NO: 331086 - RNA, 22 nt, Human
aggcucucucugccagccgugc

SEQ ID NO: 331087 - RNA, 22 nt, Human adenovirus D
ccguggccucuucgcccgaccg

SEQ ID NO: 331088 - RNA, 22 nt, Human adenovirus D
uuggcggcacgcuccugcugcu

SEQ ID NO: 331089 - RNA, 22 nt, Human adenovirus D
aguugcaggaugcgcugcucgg

SEQ ID NO: 331090 - RNA, 22 nt, Human adenovirus D
guuggacugcacguuugugcug

SEQ ID NO: 331091 - RNA, 22 nt, Human adenovirus D
accaacuaaaguuacguuugac

SEQ ID NO: 331092 - RNA, 22 nt, Human adenovirus D
acauguaacuuagucguagggc

SEQ ID NO: 331093 - RNA, 22 nt, Human adenovirus D
ugagaggagugugauaugcaca

SEQ ID NO: 331094 - RNA, 22 nt, Human adenovirus D
ucaggaaguugcuguggucguu

SEQ ID NO: 331095 - RNA, 22 nt, Human adenovirus D
gaggaugagggacuggcgcugc

SEQ ID NO: 331096 - RNA, 18 nt, Human adenovirus D
gacuggugcugcgcgcgc

SEQ ID NO: 331097 - RNA, 22 nt, Human adenovirus D
gacugcgauuggcuagacgcuu

SEQ ID NO: 331098 - RNA, 23 nt, Human adenovirus D
cgucacgacgcacggcuaacggu

SEQ ID NO: 331099 - RNA, 22 nt, Human adenovirus D
gauuggccgagaaacguugaug

SEQ ID NO: 331100 - RNA, 22 nt, Human adenovirus D
cgggguuguggacuuccgcgua

SEQ ID NO: 331101 - RNA, 22 nt, Human adenovirus D
cagcagggcguuguacacuagc

SEQ ID NO: 331102 - RNA, 22 nt, Human adenovirus D
ccaguucugggccuggcggcgg

SEQ ID NO: 331103 - RNA, 22 nt, Human adenovirus D
ucggccagguccgaggcgacgg

SEQ ID NO: 331104 - RNA, 22 nt, Human adenovirus D
gucagguguguuuggcuuuagu

SEQ ID NO: 331105 - RNA, 22 nt, Human adenovirus D
ggagggcauaucaauuuucucc

SEQ ID NO: 331106 - RNA, 22 nt, Human adenovirus D
aagauucuccgauccggucgau

SEQ ID NO: 331107 - RNA, 20 nt, Human adenovirus D
aaggcggcucguccaccugc

SEQ ID NO: 331108 - RNA, 22 nt, Human adenovirus D
cgcaccgcggcacggucguggc

SEQ ID NO: 331109 - RNA, 20 nt, Human adenovirus D
agaaauuccauauguccgcc

SEQ ID NO: 331110 - RNA, 22 nt, Human adenovirus D
agcgauguccgccgacuuguug

SEQ ID NO: 331111 - RNA, 22 nt, Human adenovirus D
agcgccagucccucauccuccg

SEQ ID NO: 331112 - RNA, 22 nt, Human adenovirus D
agcgucugccucaggcgcucgg

SEQ ID NO: 331113 - RNA, 21 nt, Human adenovirus D
gggccugcaaacggugaaccu

SEQ ID NO: 331114 - RNA, 22 nt, Human adenovirus D
cucccaggcccacaauacugug

SEQ ID NO: 331115 - RNA, 22 nt, Human adenovirus D
gcagcacauccuccucuccucc

SEQ ID NO: 331116 - RNA, 22 nt, Human adenovirus D
gcuggcuggugccgaucucguu

SEQ ID NO: 331117 - RNA, 22 nt, Human adenovirus D
gcgucugcagcauugucugccu

SEQ ID NO: 331118 - RNA, 22 nt, Human adenovirus D
gcguggugggcaugccggccuu

SEQ ID NO: 331119 - RNA, 20 nt, Human adenovirus D
gggaauccucgaucguccgc

SEQ ID NO: 331120 - RNA, 22 nt, Human
gggcccugugauuucuugagga

SEQ ID NO: 331121 - RNA, 19 nt, Human
cagcccucuuaccacugug

SEQ ID NO: 331122 - RNA, 22 nt, Human
augcugggagugaagccccugg

SEQ ID NO: 331123 - RNA, 22 nt, Human
aaauauguauggaguucaugaa

SEQ ID NO: 331124 - RNA, 22 nt, Human
gcccuuggaacagccuccugcu

SEQ ID NO: 331125 - RNA, 20 nt, Human
agagcugggaagcucccuau

SEQ ID NO: 331126 - RNA, 23 nt, Human
ccagcccuccaccagcucuaggc

SEQ ID NO: 331127 - RNA, 22 nt, Human
gugcaccccggggcccugcucc

SEQ ID NO: 331128 - RNA, 22 nt, Human
cagcuccugcagcuggcuccca

SEQ ID NO: 331129 - RNA, 22 nt, Human
cugucccucaucaccucugggu

SEQ ID NO: 331130 - RNA, 22 nt, Human
cugggcucaguggcucauggcu

SEQ ID NO: 331131 - RNA, 22 nt, Human
agcuggggcauuuauccacuaa

SEQ ID NO: 331132 - RNA, 22 nt, Human
cauaaucagauguguacauaag

SEQ ID NO: 331133 - RNA, 22 nt, Human
ccuggugaauguucauggacug

SEQ ID NO: 331134 - RNA, 22 nt, Human
gagcugggaggacugggaacuu

SEQ ID NO: 331135 - RNA, 21 nt, Human
cagagcuguccaaacccugac

SEQ ID NO: 331136 - RNA, 22 nt, Human
gcccugugagucaugcggcaga

SEQ ID NO: 331137 - RNA, 22 nt, Human
cugcagaggccucgccuccucu

SEQ ID NO: 331138 - RNA, 21 nt, Human
ccagccucagaucagggagcu

SEQ ID NO: 331139 - RNA, 22 nt, Human
auauaucaugaguaaaacuuga

SEQ ID NO: 331140 - RNA, 22 nt, Human
cugggcucaaauccuggcccug

SEQ ID NO: 331141 - RNA, 22 nt, Human
gagcugggcuggcuuccucccu

SEQ ID NO: 331142 - RNA, 22 nt, Human
ccaggcccugccugugguuccu

SEQ ID NO: 331143 - RNA, 22 nt, Human
cagccccuuccuggcaucugga

SEQ ID NO: 331144 - RNA, 23 nt, Human
agcuggaggcugucuacucccaa

SEQ ID NO: 331145 - RNA, 22 nt, Human
gagcuggggcggauacucagcu

SEQ ID NO: 331146 - RNA, 22 nt, Human
ggcagagcugcaugagcacuca

SEQ ID NO: 331147 - RNA, 22 nt, Human
ggaggccacgguuuagcaccga

SEQ ID NO: 331148 - RNA, 22 nt, Human
ugcuggggcucugaccacucca

SEQ ID NO: 331149 - RNA, 22 nt, Human
ggcaccagggacaauccucuuc

SEQ ID NO: 331150 - RNA, 22 nt, Human
uauccaaaguuucucagaaacu

SEQ ID NO: 331151 - RNA, 22 nt, Human
gcccugugcucaugggaacauc

SEQ ID NO: 331152 - RNA, 22 nt, Human
gcuuggggagcucaguguccuu

SEQ ID NO: 331153 - RNA, 22 nt, Human
ccugcagggugcugccacagau

SEQ ID NO: 331154 - RNA, 22 nt, Human
cagagcuggagggaacccuggc

SEQ ID NO: 331155 - RNA, 22 nt, Human
gagcuccucccaggguagcacu

SEQ ID NO: 331156 - RNA, 20 nt, Human
cccagcccgggccgcgcucg

SEQ ID NO: 331157 - RNA, 22 nt, Human
cugggauccacgggcucccaag

SEQ ID NO: 331158 - RNA, 20 nt, Human
agcuccugguauaggugccu

SEQ ID NO: 331159 - RNA, 22 nt, Human
ggcaucccuucuuccaguguca

SEQ ID NO: 331160 - RNA, 19 nt, Human
cagccucaaucccucgggc

SEQ ID NO: 331161 - RNA, 22 nt, Human
agagcuggaaaaguuguuuuaa

SEQ ID NO: 331162 - RNA, 22 nt, Human
ccucagccuuggccccaggcag

SEQ ID NO: 331163 - RNA, 19 nt, Human
uccagccccucugugugug

SEQ ID NO: 331164 - RNA, 22 nt, Human
caggcucagcaggagccugacc

SEQ ID NO: 331165 - RNA, 22 nt, Human
caccagguuccgggcagagcug

SEQ ID NO: 331166 - RNA, 22 nt, Human
cccucagcuccacccucagcag

SEQ ID NO: 331167 - RNA, 19 nt, Human
ggcagagcuccugcuuucu

SEQ ID NO: 331168 - RNA, 22 nt, Human
cccagcccacgguccugggugg

SEQ ID NO: 331169 - RNA, 22 nt, Human
ccuggggucacuugcagccgca

SEQ ID NO: 331170 - RNA, 22 nt, Human
cccugcagccuugcaugccuuc

SEQ ID NO: 331171 - RNA, 22 nt, Human
agcuggggcugcagagaacagg

SEQ ID NO: 331172 - RNA, 22 nt, Human
gcugggcucuuaucaccuguac

SEQ ID NO: 331173 - RNA, 22 nt, Human
ggagcuggagagcuagccuagg

SEQ ID NO: 331174 - RNA, 22 nt, Human
ccugggcagggagaccaggcuc

SEQ ID NO: 331175 - RNA, 20 nt, Human
aagcuggguaggagaggagc

SEQ ID NO: 331176 - RNA, 22 nt, Human
gaugcuggaagugcugaucuug

SEQ ID NO: 331177 - RNA, 22 nt, Human
cccacucccugcacgccugccg

SEQ ID NO: 331178 - RNA, 22 nt, Human
cugggugagcuggccagagggu

SEQ ID NO: 331179 - RNA, 22 nt, Human
uugucuaaugagcuccacuuca

SEQ ID NO: 331180 - RNA, 20 nt, Human
aggcuccuguaccugaggaa

SEQ ID NO: 331181 - RNA, 22 nt, Human
cugucuccagggcaggugcagg

SEQ ID NO: 331182 - RNA, 17 nt, Human
ggcaccagacggagagu

SEQ ID NO: 331183 - RNA, 22 nt, Human
ccugcuggccacugcuccaccu

SEQ ID NO: 331184 - RNA, 16 nt, Human
ggcaccagugaacaca

SEQ ID NO: 331185 - RNA, 22 nt, Human
ucccugaggaagggguguggug

SEQ ID NO: 331186 - RNA, 22 nt, Human
agagcugggaccgucuggaagu

SEQ ID NO: 331187 - RNA, 22 nt, Human
aaauaucauuuauaacuuuuaa

SEQ ID NO: 331188 - RNA, 17 nt, Human
ccagggaggggccgcgc

SEQ ID NO: 331189 - RNA, 22 nt, Human
uccuguggcucuguggaaccuu

SEQ ID NO: 331190 - RNA, 22 nt, Human
gagcugggagcugggauuugga

SEQ ID NO: 331191 - RNA, 20 nt, Human
acaaaauagguacuggguag

SEQ ID NO: 331192 - RNA, 22 nt, Human
agaggacacaucuuuccucaaa

SEQ ID NO: 331193 - RNA, 22 nt, Human
cugucuccuccacugcauggga

SEQ ID NO: 331194 - RNA, 22 nt, Human
agcccugucucucacuccaggu

SEQ ID NO: 331195 - RNA, 20 nt, Human
ggcaccaggcuaggauugga

SEQ ID NO: 331196 - RNA, 19 nt, Human
gggcuccuugggccucucu

SEQ ID NO: 331197 - RNA, 22 nt, Human
aagcugggagggagcccagagu

SEQ ID NO: 331198 - RNA, 22 nt, Human
ggaggccaggaagagccgcccu

SEQ ID NO: 331199 - RNA, 22 nt, Human
gcaugcugcaccagagccucuc

SEQ ID NO: 331200 - RNA, 22 nt, Human
gggccccugggaauucugugau

SEQ ID NO: 331201 - RNA, 22 nt, Human
agagcuggauggucaagauggc

SEQ ID NO: 331202 - RNA, 23 nt, Human
ccugaagggucaggguccucagc

SEQ ID NO: 331203 - RNA, 22 nt, Human
ccugucaggguuugccucagaa

SEQ ID NO: 331204 - RNA, 22 nt, Human
gcugggcuucacagagccuuua

SEQ ID NO: 331205 - RNA, 22 nt, Human
cccugugggaacuccugaguug

SEQ ID NO: 331206 - RNA, 22 nt, Human
gagcugggaguuauagcauguu

SEQ ID NO: 331207 - RNA, 22 nt, Human
uuuacugaacugcuaguacagg

SEQ ID NO: 331208 - RNA, 22 nt, Human
gagcugggcacacgccacuuga

SEQ ID NO: 331209 - RNA, 22 nt, Human
aacuaaaucuggcauuuagagc

SEQ ID NO: 331210 - RNA, 22 nt, Human
gagccuggccuccugccucagc

SEQ ID NO: 331211 - RNA, 22 nt, Human
ggagcugggaacuauguaguau

SEQ ID NO: 331212 - RNA, 22 nt, Human
gcaccaggcagcugagcaggcc

SEQ ID NO: 331213 - RNA, 22 nt, Human
ucugggguuuucacgcugucuc

SEQ ID NO: 331214 - RNA, 22 nt, Human
cagaugcuuggaggacacuugg

SEQ ID NO: 331215 - RNA, 22 nt, Human
ccuggggucagggacgcugugc

SEQ ID NO: 331216 - RNA, 22 nt, Human
uauaaaugccaggacuuuagau

SEQ ID NO: 331217 - RNA, 22 nt, Human
ugcuggggcagaagagccaaga

SEQ ID NO: 331218 - RNA, 18 nt, Human
ugcugggguagaauccac

SEQ ID NO: 331219 - RNA, 22 nt, Human
cagagcugcaaaugccccuccg

SEQ ID NO: 331220 - RNA, 22 nt, Human
cugcagagcagccaguccccca

SEQ ID NO: 331221 - RNA, 22 nt, Human
ccugcagguccccggaugcgca

SEQ ID NO: 331222 - RNA, 22 nt, Human
gcccugugccagucacgcugug

SEQ ID NO: 331223 - RNA, 22 nt, Human
aaaauaguuaacguucagagua

SEQ ID NO: 331224 - RNA, 22 nt, Human
ugaucaaaacauuacuccacca

SEQ ID NO: 331225 - RNA, 22 nt, Human
caccaggcacauaguaggcacu

SEQ ID NO: 331226 - RNA, 17 nt, Human
uggcacagaggugcuau

SEQ ID NO: 331227 - RNA, 22 nt, Human
agcuccugcgcacggugcacac

SEQ ID NO: 331228 - RNA, 20 nt, Human
acuuuacugagcuguaauuc

SEQ ID NO: 331229 - RNA, 22 nt, Human
gcccugugcuuggauggcagau

SEQ ID NO: 331230 - RNA, 22 nt, Human
uagcugggaauuaucugguugc

SEQ ID NO: 331231 - RNA, 22 nt, Human
ccugggaccucgcgggaagcgg

SEQ ID NO: 331232 - RNA, 22 nt, Human
agcuggggguagugagaaauaa

SEQ ID NO: 331233 - RNA, 22 nt, Human
ccugcagguugcagaggcggaa

SEQ ID NO: 331234 - RNA, 22 nt, Human
ggcaucccuagaauagccaggu

SEQ ID NO: 331235 - RNA, 22 nt, Human
gcccauggcagaacugugagca

SEQ ID NO: 331236 - RNA, 22 nt, Human
ggcagagccuucuggagcucgc

SEQ ID NO: 331237 - RNA, 22 nt, Human
agcccuguuuaugccacaucau

SEQ ID NO: 331238 - RNA, 22 nt, Human
ucagcuucagaucagcuagaga

SEQ ID NO: 331239 - RNA, 22 nt, Human
aagaaaacaugaucuaauuuaa

SEQ ID NO: 331240 - RNA, 22 nt, Human
cugucacccacccagccuguca

SEQ ID NO: 331241 - RNA, 22 nt, Human
gcugauagacugaauguuggga

SEQ ID NO: 331242 - RNA, 22 nt, Human
ccuggagcuuggucacgcugcg

SEQ ID NO: 331243 - RNA, 22 nt, Human
agcuccugucucaagggagccu

SEQ ID NO: 331244 - RNA, 22 nt, Human
agacuuuaaugugcaaaugaaa

SEQ ID NO: 331245 - RNA, 22 nt, Human
cccugugguugcuagggcacag

SEQ ID NO: 331246 - RNA, 22 nt, Human
cccuguggaggcagcauccugc

SEQ ID NO: 331247 - RNA, 20 nt, Human
ugcuggggacauacagggug

SEQ ID NO: 331248 - RNA, 22 nt, Human
cccuggucagggaaggcgccug

SEQ ID NO: 331249 - RNA, 22 nt, Human
uggcaccaggcgggguggcugu

SEQ ID NO: 331250 - RNA, 22 nt, Human
ccagccccuauccucgcuccac

SEQ ID NO: 331251 - RNA, 22 nt, Human
ucccagccuuccagucugguuu

SEQ ID NO: 331252 - RNA, 22 nt, Human
ccucucccgggugccgcugggc

SEQ ID NO: 331253 - RNA, 19 nt, Human
agcuggggcgguguguguu

SEQ ID NO: 331254 - RNA, 22 nt, Human
ugguauucuuucuguagaucau

SEQ ID NO: 331255 - RNA, 22 nt, Human
ccagccucaucgccugccuguc

SEQ ID NO: 331256 - RNA, 22 nt, Human
cugguggagaugccuggccccu

SEQ ID NO: 331257 - RNA, 22 nt, Human
augcugggaaguccuaaccaca

SEQ ID NO: 331258 - RNA, 22 nt, Human
agcccugugggccuuguggcac

SEQ ID NO: 331259 - RNA, 19 nt, Human
cugcucccuccuucuggca

SEQ ID NO: 331260 - RNA, 22 nt, Human
gagggcacaaaggcaacauuca

SEQ ID NO: 331261 - RNA, 19 nt, Human
ccuggcccugcugcgcggg

SEQ ID NO: 331262 - RNA, 22 nt, Human
ggcaccagcacuugggauggcu

SEQ ID NO: 331263 - RNA, 20 nt, Human
ggcagagcuaugucuguugc

SEQ ID NO: 331264 - RNA, 22 nt, Human
cuggugcacauucgcucucaua

SEQ ID NO: 331265 - RNA, 22 nt, Human
gcccagcccugaggucacagcu

SEQ ID NO: 331266 - RNA, 22 nt, Human
cugcaggggcaguccacuuccu

SEQ ID NO: 331267 - RNA, 22 nt, Human
uaggacauaaguauucuaacuu

SEQ ID NO: 331268 - RNA, 22 nt, Human
caaguaaagaaucacauuucuu

SEQ ID NO: 331269 - RNA, 22 nt, Human
ccuggagcuuuuccauccugga

SEQ ID NO: 331270 - RNA, 22 nt, Human
ggcauccugggacuggcuucuu

SEQ ID NO: 331271 - RNA, 22 nt, Human
cugggcucaagaagucuucccu

SEQ ID NO: 331272 - RNA, 22 nt, Human
gucaaaugcacagaaccauuaa

SEQ ID NO: 331273 - RNA, 22 nt, Human
agagcugguuuacucaggaauu

SEQ ID NO: 331274 - RNA, 22 nt, Human
agaagucauuuauguuagauga

SEQ ID NO: 331275 - RNA, 22 nt, Human
ccuggagcaaaaaucuaaggag

SEQ ID NO: 331276 - RNA, 22 nt, Human
agagcuggaaucagaccucagg

SEQ ID NO: 331277 - RNA, 22 nt, Human
gagggcacuggguuucaauguc

SEQ ID NO: 331278 - RNA, 22 nt, Human
ccugcagggaaucgaggcagaa

SEQ ID NO: 331279 - RNA, 22 nt, Human
ccaggcccuugcaagucccacc

SEQ ID NO: 331280 - RNA, 22 nt, Human
gggcuccuccucugacuguggc

SEQ ID NO: 331281 - RNA, 22 nt, Human
uccugcagaccucagucagguc

SEQ ID NO: 331282 - RNA, 22 nt, Human
gagcugggacuuggaauccaca

SEQ ID NO: 331283 - RNA, 22 nt, Human
acauuucaguaaguguuaauuu

SEQ ID NO: 331284 - RNA, 22 nt, Human
ggagcuggccgccuaugugcag

SEQ ID NO: 331285 - RNA, 20 nt, Human
agggcagcuugaggagccgg

SEQ ID NO: 331286 - RNA, 22 nt, Human
ugggcaccuagcaacccuucuc

SEQ ID NO: 331287 - RNA, 22 nt, Human
ggaggccaccugaccugcuguu

SEQ ID NO: 331288 - RNA, 22 nt, Human
uagcuggguugaggucaucuac

SEQ ID NO: 331289 - RNA, 22 nt, Human
agagcuggguggacuuguaguu

SEQ ID NO: 331290 - RNA, 22 nt, Human
uuccugguaaauuauguccagg

SEQ ID NO: 331291 - RNA, 22 nt, Human
gagcugggcgagccggggaagu

SEQ ID NO: 331292 - RNA, 22 nt, Human
agguggcagagugacaggcuga

SEQ ID NO: 331293 - RNA, 22 nt, Human
uccugaggcuaaagugcagugg

SEQ ID NO: 331294 - RNA, 22 nt, Human
ugcagagcuucauugcauaggc

SEQ ID NO: 331295 - RNA, 22 nt, Human
uaguaacccacacaacaguaga

SEQ ID NO: 331296 - RNA, 22 nt, Human
auguaaacucacauuuucuuca

SEQ ID NO: 331297 - RNA, 22 nt, Human
caccaggcugcccaggacaggg

SEQ ID NO: 331298 - RNA, 18 nt, Human
gagcugggagaaggaagg

SEQ ID NO: 331299 - RNA, 22 nt, Human
cagccccuuguccgguagccac

SEQ ID NO: 331300 - RNA, 22 nt, Human
cagcccacugccucugugguag

SEQ ID NO: 331301 - RNA, 22 nt, Human
ggagcuggucagccuugagcau

SEQ ID NO: 331302 - RNA, 21 nt, Human
ggagcuggggagcuggcccca

SEQ ID NO: 331303 - RNA, 22 nt, Human
agaugguagguggcaggacuga

SEQ ID NO: 331304 - RNA, 22 nt, Human
aaacacaauguuucuuuguucu

SEQ ID NO: 331305 - RNA, 21 nt, Human
agagcugguagguagguaggu

SEQ ID NO: 331306 - RNA, 20 nt, Human
ucccugccuuuuacugcugg

SEQ ID NO: 331307 - RNA, 22 nt, Human
cacagcugaaguagccaugugg

SEQ ID NO: 331308 - RNA, 22 nt, Human
gaucucaaagcaguguggguug

SEQ ID NO: 331309 - RNA, 22 nt, Human
uccugcaggccagaggggugag

SEQ ID NO: 331310 - RNA, 22 nt, Human
ggcaccagcaggcaccgaugcc

SEQ ID NO: 331311 - RNA, 22 nt, Human
caccaggcugaaccagagggga

SEQ ID NO: 331312 - RNA, 22 nt, Human
gagcuggggcagcuuaggagug

SEQ ID NO: 331313 - RNA, 21 nt, Human
caggccccaggccuggggugc

SEQ ID NO: 331314 - RNA, 22 nt, Human
agagcugggacuuggacucaau

SEQ ID NO: 331315 - RNA, 22 nt, Human
ucccugucuaauaugccaugaa

SEQ ID NO: 331316 - RNA, 22 nt, Human
auauaacauacauacagaaaag

SEQ ID NO: 331317 - RNA, 21 nt, Human
gagcugggcgaggcuccgggg

SEQ ID NO: 331318 - RNA, 22 nt, Human
ggcaccaggaucagucugucau

SEQ ID NO: 331319 - RNA, 20 nt, Human
ccuguggagcugccuccucc

SEQ ID NO: 331320 - RNA, 22 nt, Human
ugcugaggcccaggagcacuuu

SEQ ID NO: 331321 - RNA, 22 nt, Human
gacacuccagcuuuuggcucaa

SEQ ID NO: 331322 - RNA, 22 nt, Human
gagcugggucuccaccuuggca

SEQ ID NO: 331323 - RNA, 22 nt, Human
gagcugggacauggguccucuc

SEQ ID NO: 331324 - RNA, 22 nt, Human
ugggcuccggcggccucaggcu

SEQ ID NO: 331325 - RNA, 22 nt, Human
gcagagcugcagcgaggccugg

SEQ ID NO: 331326 - RNA, 22 nt, Human
cugugcccaggccccuggggau

SEQ ID NO: 331327 - RNA, 22 nt, Human
gcccaugguuacuuuucuggcu

SEQ ID NO: 331328 - RNA, 22 nt, Human
cagggagcagcgcuggggccuc

SEQ ID NO: 331329 - RNA, 22 nt, Human
ccuguccagggacugagggaga

SEQ ID NO: 331330 - RNA, 22 nt, Human
gcagagcuucuguccuucagga

SEQ ID NO: 331331 - RNA, 19 nt, Human
uguagcuagugucuaucca

SEQ ID NO: 331332 - RNA, 22 nt, Human
agagcuggcugcugcggugcuu

SEQ ID NO: 331333 - RNA, 22 nt, Human
cugcaggacgaccgccucaucu

SEQ ID NO: 331334 - RNA, 22 nt, Human
gcccuugggagguuccacuggg

SEQ ID NO: 331335 - RNA, 22 nt, Human
gcagagcucaugccugcaccuc

SEQ ID NO: 331336 - RNA, 22 nt, Human
agcccuguagauuuaggagagu

SEQ ID NO: 331337 - RNA, 22 nt, Human
cccgucccuuuugcccgcuggu

SEQ ID NO: 331338 - RNA, 22 nt, Human
uccacuggaacaacucugaggc

SEQ ID NO: 331339 - RNA, 22 nt, Human
uccugcaggggcugaggaacca

SEQ ID NO: 331340 - RNA, 22 nt, Human
ucaaaguagccggauggaauuu

SEQ ID NO: 331341 - RNA, 22 nt, Human
cccuguccuggaugggagcacu

SEQ ID NO: 331342 - RNA, 22 nt, Human
uaggacaugcuacauaaauagg

SEQ ID NO: 331343 - RNA, 22 nt, Human
uccuguggggaaaagccuaucu

SEQ ID NO: 331344 - RNA, 22 nt, Human
uccugcagagccgcccucaggu

SEQ ID NO: 331345 - RNA, 22 nt, Human
cccugccccaggcggcuucacu

SEQ ID NO: 331346 - RNA, 22 nt, Human
ggagcuggcagcgcaacccaga

SEQ ID NO: 331347 - RNA, 22 nt, Human
ccuggggagagaaagcccagcc

SEQ ID NO: 331348 - RNA, 22 nt, Human
gagguggcgcgccaucccugcc

SEQ ID NO: 331349 - RNA, 22 nt, Human
agagcuggacgucugagcccua

SEQ ID NO: 331350 - RNA, 22 nt, Human
ccauggccaauugcaccuugcu

SEQ ID NO: 331351 - RNA, 22 nt, Human
uagcugggucucuguuuucuca

SEQ ID NO: 331352 - RNA, 17 nt, Human
ggcagagcugacagggc

SEQ ID NO: 331353 - RNA, 22 nt, Human
gagggcacgaaacaaccacuuc

SEQ ID NO: 331354 - RNA, 22 nt, Human
agagcuggggcccguaaagcca

SEQ ID NO: 331355 - RNA, 22 nt, Human
gcugggaggaucucucccuguc

SEQ ID NO: 331356 - RNA, 22 nt, Human
agagcuggugcauauucagaaa

SEQ ID NO: 331357 - RNA, 22 nt, Human
agcuggggguuggauaagggua

SEQ ID NO: 331358 - RNA, 22 nt, Human
aggcccuggguuagggcccacu

SEQ ID NO: 331359 - RNA, 22 nt, Human
cugcagccucaaccuccugagc

SEQ ID NO: 331360 - RNA, 22 nt, Human
gagggcacucgagacuacggca

SEQ ID NO: 331361 - RNA, 21 nt, Human
ugggcaccaaaaccuaggagu

SEQ ID NO: 331362 - RNA, 22 nt, Human
agagcuggaagcugcucuuaga

SEQ ID NO: 331363 - RNA, 21 nt, Human
ggugacacguggccccgcucu

SEQ ID NO: 331364 - RNA, 22 nt, Human
ucugcaggucacgcuccagccu

SEQ ID NO: 331365 - RNA, 22 nt, Human
aaaaguauuuuggaucucagau

SEQ ID NO: 331366 - RNA, 22 nt, Human
ugcugggggugucucaccaggc

SEQ ID NO: 331367 - RNA, 22 nt, Human
cccuguccuuggcugugaggcu

SEQ ID NO: 331368 - RNA, 22 nt, Human
gccccuggcuggccagcuccuc

SEQ ID NO: 331369 - RNA, 22 nt, Human
ccacucccuuccgguccagggc

SEQ ID NO: 331370 - RNA, 22 nt, Human
gcuggggagcuagaccucagca

SEQ ID NO: 331371 - RNA, 22 nt, Human
gcccuguguguuugcacugauu

SEQ ID NO: 331372 - RNA, 22 nt, Human
gaccaggcuuccccagaccuca

SEQ ID NO: 331373 - RNA, 22 nt, Human
ccuggcagcaggugggcccgug

SEQ ID NO: 331374 - RNA, 22 nt, Human
cugggcucagaugagaggaagg

SEQ ID NO: 331375 - RNA, 22 nt, Human
cucucugaggaaggagcaucug

SEQ ID NO: 331376 - RNA, 22 nt, Human
gagcugggccucagaacacagu

SEQ ID NO: 331377 - RNA, 16 nt, Human
gcagagcucagggacu

SEQ ID NO: 331378 - RNA, 22 nt, Human
aaugauugucauuccaaaaagu

SEQ ID NO: 331379 - RNA, 22 nt, Human
cuccaggauguuagacguccag

SEQ ID NO: 331380 - RNA, 22 nt, Human
aacuaaaacugguuuguucucu

SEQ ID NO: 331381 - RNA, 22 nt, Human
agcugggguugcacacauuuug

SEQ ID NO: 331382 - RNA, 22 nt, Human
agaggaggccaggcccacaccu

SEQ ID NO: 331383 - RNA, 19 nt, Human
gcugggagcagacccuccc

SEQ ID NO: 331384 - RNA, 22 nt, Human
augcugggacguacuuguucau

SEQ ID NO: 331385 - RNA, 22 nt, Human
aaguaaaauucaaucuucacug

SEQ ID NO: 331386 - RNA, 22 nt, Human
gcaggagcugcucuccugacga

SEQ ID NO: 331387 - RNA, 22 nt, Human
agagcuggcacugacccucacc

SEQ ID NO: 331388 - RNA, 22 nt, Human
ccugcagguuucccccggacgg

SEQ ID NO: 331389 - RNA, 22 nt, Human
ccccugccagcuaucccugaac

SEQ ID NO: 331390 - RNA, 22 nt, Human
ucucagccucaccucuauggag

SEQ ID NO: 331391 - RNA, 22 nt, Human
ccaggccccagggcuggcuuuc

SEQ ID NO: 331392 - RNA, 22 nt, Human
ggcaccagggcaagggucuuuc

SEQ ID NO: 331393 - RNA, 22 nt, Human
ugggcaccugaggccuggcagg

SEQ ID NO: 331394 - RNA, 23 nt, Human
gagcugggauacaggcuuacugc

SEQ ID NO: 331395 - RNA, 22 nt, Human
ucaaaguauuuuaacuguaucc

SEQ ID NO: 331396 - RNA, 22 nt, Human
cagcccucaaaccacuuccagg

SEQ ID NO: 331397 - RNA, 22 nt, Human
agagcugggugguggugacuca

SEQ ID NO: 331398 - RNA, 22 nt, Human
cugggcuuguguuagcugacaa

SEQ ID NO: 331399 - RNA, 20 nt, Human
cugggcucaagugauccucc

SEQ ID NO: 331400 - RNA, 22 nt, Human
aguaaaauuguauuggaaaaca

SEQ ID NO: 331401 - RNA, 22 nt, Human
acuuuacuccccaacauaaaug

SEQ ID NO: 331402 - RNA, 18 nt, Human
ggagcugggccccacucc

SEQ ID NO: 331403 - RNA, 22 nt, Human
agcuccugcaccaggggccccu

SEQ ID NO: 331404 - RNA, 22 nt, Human
agguauuauuagcaucucuauu

SEQ ID NO: 331405 - RNA, 22 nt, Human
cagaugcuauguauuauguaug

SEQ ID NO: 331406 - RNA, 22 nt, Human
gcaggagcucguuuccaggcug

SEQ ID NO: 331407 - RNA, 22 nt, Human
gagcuggguguuuauuugccaa

SEQ ID NO: 331408 - RNA, 22 nt, Human
acaaacuuccaucaugaauuuu

SEQ ID NO: 331409 - RNA, 22 nt, Human
ccuggagcacauggcaggaggc

SEQ ID NO: 331410 - RNA, 22 nt, Human
caauacaauuaccaguuaauca

SEQ ID NO: 331411 - RNA, 20 nt, Human
agcccuguuuccuggagaga

SEQ ID NO: 331412 - RNA, 22 nt, Human
uccugcagccacugcaggcaga

SEQ ID NO: 331413 - RNA, 22 nt, Human
cugggcuagaaggaccaggaug

SEQ ID NO: 331414 - RNA, 22 nt, Human
ccugggcuuucggcggcuuccu

SEQ ID NO: 331415 - RNA, 22 nt, Human
ucccugagcucacauggcagga

SEQ ID NO: 331416 - RNA, 22 nt, Human
cucagccugugaagagcagagg

SEQ ID NO: 331417 - RNA, 21 nt, Human
agagcuggccugccaggcccu

SEQ ID NO: 331418 - RNA, 22 nt, Human
gcaccaggcuuagagccccagg

SEQ ID NO: 331419 - RNA, 22 nt, Human
gcugccucaggcaccuccuggc

SEQ ID NO: 331420 - RNA, 19 nt, Human
agcuccuguucagcagcuc

SEQ ID NO: 331421 - RNA, 22 nt, Human
ggcaccagggaaggaaggcugg

SEQ ID NO: 331422 - RNA, 22 nt, Human
uagcuggggcuuucauucuugc

SEQ ID NO: 331423 - RNA, 22 nt, Human
agagcuggagaugcagguuucg

SEQ ID NO: 331424 - RNA, 22 nt, Human
ggcaccaggcugggcauaggcc

SEQ ID NO: 331425 - RNA, 20 nt, Human
ugcagagcugacauuaccug

SEQ ID NO: 331426 - RNA, 22 nt, Human
ccugcaggcugcaggccaguuc

SEQ ID NO: 331427 - RNA, 22 nt, Human
uguggcacuucucuccuuguaa

SEQ ID NO: 331428 - RNA, 22 nt, Human
agcaauaacagaaaacuuuccu

SEQ ID NO: 331429 - RNA, 22 nt, Human
ccagcccucgguagucccauag

SEQ ID NO: 331430 - RNA, 22 nt, Human
ggcaccaggacaugacucccag

SEQ ID NO: 331431 - RNA, 22 nt, Human
uagucaaaccucagaauacccc

SEQ ID NO: 331432 - RNA, 23 nt, Human
uccuggugacaugccugagcauc

SEQ ID NO: 331433 - RNA, 20 nt, Human
gcugggcuaccacuggcccu

SEQ ID NO: 331434 - RNA, 22 nt, Human
cugcaggagugaaagcaggccu

SEQ ID NO: 331435 - RNA, 22 nt, Human
augccuggucccaccucuaggu

SEQ ID NO: 331436 - RNA, 22 nt, Human
cccugugggguccgccuguccg

SEQ ID NO: 331437 - RNA, 22 nt, Human
uucaaaugcaaguuacuacuuu

SEQ ID NO: 331438 - RNA, 22 nt, Human
agagcuggcagcagcuucuccu

SEQ ID NO: 331439 - RNA, 22 nt, Human
uccugaggagaagagugcuagg

SEQ ID NO: 331440 - RNA, 22 nt, Human
uccugagggcucggggcucaug

SEQ ID NO: 331441 - RNA, 22 nt, Human
aacugguaucucuucaguguaa

SEQ ID NO: 331442 - RNA, 22 nt, Human
cagggagcucugggccggacuc

SEQ ID NO: 331443 - RNA, 22 nt, Human
uuucagaugguauauacaguag

SEQ ID NO: 331444 - RNA, 22 nt, Human
ccugacagcgugucccuggccc

SEQ ID NO: 331445 - RNA, 22 nt, Human
cccuguccugcuaggcccuggu

SEQ ID NO: 331446 - RNA, 22 nt, Human
ucagacaaguaaaauaauguaa

SEQ ID NO: 331447 - RNA, 22 nt, Human
uucaguaugauuccuccaguag

SEQ ID NO: 331448 - RNA, 22 nt, Human
agagcugggugaagugccauca

SEQ ID NO: 331449 - RNA, 22 nt, Human
ugaguuauaaugaauauuugaa

SEQ ID NO: 331450 - RNA, 22 nt, Human
gcuuccuggagggagagagcug

SEQ ID NO: 331451 - RNA, 21 nt, Human
accaggccaggaggcuggcac

SEQ ID NO: 331452 - RNA, 22 nt, Human
cccugccuuguuggagccuaug

SEQ ID NO: 331453 - RNA, 22 nt, Human
uccugaggcacaauccuagaau

SEQ ID NO: 331454 - RNA, 23 nt, Human
uggcaccaggcauucuaggggua

SEQ ID NO: 331455 - RNA, 22 nt, Human
uccugcaguuacaucccagcca

SEQ ID NO: 331456 - RNA, 22 nt, Human
aucauccuagaaggaagcuagg

SEQ ID NO: 331457 - RNA, 22 nt, Human
ugcaggagcaccagcucacccu

SEQ ID NO: 331458 - RNA, 21 nt, Human
ggcaucccaggccagugacug

SEQ ID NO: 331459 - RNA, 22 nt, Human
gugcauccacuagggcucuccc

SEQ ID NO: 331460 - RNA, 22 nt, Human
cagcuccugccugggcagcugu

SEQ ID NO: 331461 - RNA, 18 nt, Human
aagcugggaaggagacag

SEQ ID NO: 331462 - RNA, 22 nt, Human
gagcuggguauauggcuuuaug

SEQ ID NO: 331463 - RNA, 20 nt, Human
cugggcucgguggcccuggc

SEQ ID NO: 331464 - RNA, 21 nt, Human
gcaaaugaguuaacuaacuca

SEQ ID NO: 331465 - RNA, 22 nt, Human
gucugggguacuuucaucugau

SEQ ID NO: 331466 - RNA, 22 nt, Human
aagcugggacuuagcgcagaua

SEQ ID NO: 331467 - RNA, 22 nt, Human
gcaccgagaaggaagcaugccu

SEQ ID NO: 331468 - RNA, 22 nt, Human
ccuguggagcuuucagcagcuc

SEQ ID NO: 331469 - RNA, 22 nt, Human
caugagauaauuuuucuccagu

SEQ ID NO: 331470 - RNA, 22 nt, Human
cugggcucuaagggagcaccgu

SEQ ID NO: 331471 - RNA, 18 nt, Human
agcuggggccucuggucc

SEQ ID NO: 331472 - RNA, 22 nt, Human
ugagcuggggucagcuccccug

SEQ ID NO: 331473 - RNA, 23 nt, Human
uccugaggaauggcaucucacau

SEQ ID NO: 331474 - RNA, 22 nt, Human
cacagcugucagcugaccuagg

SEQ ID NO: 331475 - RNA, 22 nt, Human
uuucagaucacuuucaggaaag

SEQ ID NO: 331476 - RNA, 22 nt, Human
aaaaugauauccugacuuuuau

SEQ ID NO: 331477 - RNA, 22 nt, Human
gauguuuuaggucccuguagcu

SEQ ID NO: 331478 - RNA, 22 nt, Human
cccugccugugggcaucaacau

SEQ ID NO: 331479 - RNA, 22 nt, Human
uccacuggcccaccuccucagu

SEQ ID NO: 331480 - RNA, 22 nt, Human
gcugggcucuuuaccccuguac

SEQ ID NO: 331481 - RNA, 18 nt, Human
auccaaaaagauggaagu

SEQ ID NO: 331482 - RNA, 22 nt, Human
uaggacauguguuuuauauaug

SEQ ID NO: 331483 - RNA, 22 nt, Human
agagcuggccagggaucacucu

SEQ ID NO: 331484 - RNA, 22 nt, Human
gcagagcuccccaagacaccaa

SEQ ID NO: 331485 - RNA, 21 nt, Human
gcagagcuggaaccaggaccc

SEQ ID NO: 331486 - RNA, 22 nt, Human
cagggagcuggugccagccgac

SEQ ID NO: 331487 - RNA, 22 nt, Human
uccugcagccauuagaggucaa

SEQ ID NO: 331488 - RNA, 22 nt, Human
agagcuggggcucuggguuuaa

SEQ ID NO: 331489 - RNA, 22 nt, Human
agccugggcccugccucuucuc

SEQ ID NO: 331490 - RNA, 22 nt, Human
ggcacagggggcugaggacuag

SEQ ID NO: 331491 - RNA, 22 nt, Human
uccugcagagacagaggccuca

SEQ ID NO: 331492 - RNA, 22 nt, Human
caccaggcuggagugcagaggu

SEQ ID NO: 331493 - RNA, 22 nt, Human
aaauauguuuuccaguugucau

SEQ ID NO: 331494 - RNA, 22 nt, Human
uuucagaucauuuuuuaaguac

SEQ ID NO: 331495 - RNA, 22 nt, Human
cugggcuccuaaccauccaggu

SEQ ID NO: 331496 - RNA, 22 nt, Human
uccugguggugccggugcccgg

SEQ ID NO: 331497 - RNA, 22 nt, Human
cccugguguccacuggaggaag

SEQ ID NO: 331498 - RNA, 22 nt, Human
ugcugggcuggagcugccaggg

SEQ ID NO: 331499 - RNA, 22 nt, Human
ccuggguacccuuggcggccuu

SEQ ID NO: 331500 - RNA, 22 nt, Human
cccuguggcaggaggaggagca

SEQ ID NO: 331501 - RNA, 22 nt, Human
uucuagauugccuguaaguaaa

SEQ ID NO: 331502 - RNA, 22 nt, Human
uaaauguauaggcacuaaaccu

SEQ ID NO: 331503 - RNA, 22 nt, Human
cccagcccagcguucgaggggu

SEQ ID NO: 331504 - RNA, 23 nt, Human
aauuuaguuugagacauuagccu

SEQ ID NO: 331505 - RNA, 22 nt, Human
auaaaugauucagcaggaaaua

SEQ ID NO: 331506 - RNA, 22 nt, Human
cugggguuggccagggcccuag

SEQ ID NO: 331507 - RNA, 22 nt, Human
cugucccucaguucugggcaaa

SEQ ID NO: 331508 - RNA, 22 nt, Human
gaggccuggaccagccacagag

SEQ ID NO: 331509 - RNA, 22 nt, Human
gagcugggauucaucuaugucu

SEQ ID NO: 331510 - RNA, 22 nt, Human
ccugguggacagcagccagcag

SEQ ID NO: 331511 - RNA, 22 nt, Human
gccuguggggcugaggcugccu

SEQ ID NO: 331512 - RNA, 22 nt, Human
gauaauauuagaagauacaaau

SEQ ID NO: 331513 - RNA, 22 nt, Human
gugcugggcuccaccccagagg

SEQ ID NO: 331514 - RNA, 22 nt, Human
ccagggagcggggcugggucuc

SEQ ID NO: 331515 - RNA, 22 nt, Human
ccagcccugaacccugcugcau

SEQ ID NO: 331516 - RNA, 17 nt, Human
auguauauuaacucuga

SEQ ID NO: 331517 - RNA, 22 nt, Human
gcagcaggcuuuucauaccuug

SEQ ID NO: 331518 - RNA, 17 nt, Human
agcccugugcucuuuuu

SEQ ID NO: 331519 - RNA, 22 nt, Human
ccugguggccuucagcccacaa

SEQ ID NO: 331520 - RNA, 22 nt, Human
agagcuggcugguagcccugau

SEQ ID NO: 331521 - RNA, 22 nt, Human
agagcuggcugugggugacuuu

SEQ ID NO: 331522 - RNA, 20 nt, Human
uggcaccaggugguggcccc

SEQ ID NO: 331523 - RNA, 22 nt, Human
uuaugguaauuaaaacauguau

SEQ ID NO: 331524 - RNA, 19 nt, Human
auccuggguccuccagcug

SEQ ID NO: 331525 - RNA, 21 nt, Human
agagcugggacuugccugaga

SEQ ID NO: 331526 - RNA, 22 nt, Human
guaucacuuuugagagugagaa

SEQ ID NO: 331527 - RNA, 22 nt, Human
uaugauaugcacuuuaucagaa

SEQ ID NO: 331528 - RNA, 17 nt, Human
guccuggugugugagga

SEQ ID NO: 331529 - RNA, 22 nt, Human
cacuguaauagcauuauaagug

SEQ ID NO: 331530 - RNA, 22 nt, Human
cugcagaguggagccucggcug

SEQ ID NO: 331531 - RNA, 22 nt, Human
gcagagcugggauaugaaccca

SEQ ID NO: 331532 - RNA, 22 nt, Human
agagcuggggccagagucaagg

SEQ ID NO: 331533 - RNA, 22 nt, Human
acaacaaaaucacuagucuucc

SEQ ID NO: 331534 - RNA, 22 nt, Human
uccuguggcguuaucaugugau

SEQ ID NO: 331535 - RNA, 22 nt, Human
ccuggggagccgccugagcccc

SEQ ID NO: 331536 - RNA, 22 nt, Human
auaugaaaagaagucaccauug

SEQ ID NO: 331537 - RNA, 22 nt, Human
gagcugggauuugaaccuggga

SEQ ID NO: 331538 - RNA, 22 nt, Human
cagagcuguccaaacccugaca

SEQ ID NO: 331539 - RNA, 18 nt, Human
ucuggaacaacuucaugu

SEQ ID NO: 331540 - RNA, 18 nt, Human
gcagagcugggauuccca

SEQ ID NO: 331541 - RNA, 20 nt, Human
uuucagauuuacagaaaugu

SEQ ID NO: 331542 - RNA, 22 nt, Human
agagcuggagcagccccacugg

SEQ ID NO: 331543 - RNA, 22 nt, Human
agcuccugugugaagccucccu

SEQ ID NO: 331544 - RNA, 22 nt, Human
gagcugggaagauagcuugagc

SEQ ID NO: 331545 - RNA, 22 nt, Human
agagcuggggcauaaaugccac

SEQ ID NO: 331546 - RNA, 22 nt, Human
gcugggcuugguuucccugcuu

SEQ ID NO: 331547 - RNA, 22 nt, Human
cagcuauuguucuguauaauga

SEQ ID NO: 331548 - RNA, 22 nt, Human
guggcagcggcccaggccgucu

SEQ ID NO: 331549 - RNA, 21 nt, Human
uccugccuuaguccagagcag

SEQ ID NO: 331550 - RNA, 22 nt, Human
ggaagaggcugaggccaugcug

SEQ ID NO: 331551 - RNA, 22 nt, Human
caggguggcaggcaccauggcc

SEQ ID NO: 331552 - RNA, 22 nt, Human
gugcaugucuuuggaggccucc

SEQ ID NO: 331553 - RNA, 22 nt, Human
uuuggcgucucucaggagcuca

SEQ ID NO: 331554 - RNA, 22 nt, Human
cucauagguuuggaaccaggua

SEQ ID NO: 331555 - RNA, 23 nt, Human
ggaagcucacguaguccugcacu

SEQ ID NO: 331556 - RNA, 22 nt, Human
gcggggggcagcagucgcucag

SEQ ID NO: 331557 - RNA, 22 nt, Human
uguccagcugaaggcagccuca

SEQ ID NO: 331558 - RNA, 21 nt, Human
cuguccccagugagcaccccc

SEQ ID NO: 331559 - RNA, 22 nt, Human
cuccacagccccuccaguggca

SEQ ID NO: 331560 - RNA, 22 nt, Human
ggagccaguuuagaccucaguu

SEQ ID NO: 331561 - RNA, 19 nt, Human
cucuggcuccugggcugcc

SEQ ID NO: 331562 - RNA, 22 nt, Human
gccagccccagacauccuaucg

SEQ ID NO: 331563 - RNA, 22 nt, Human
gaugcgggcccgcuccacugcc

SEQ ID NO: 331564 - RNA, 22 nt, Human
cccacucccugcacgccugccg

SEQ ID NO: 331565 - RNA, 22 nt, Human
ccuguacuuguauuaaaggucc

SEQ ID NO: 331566 - RNA, 22 nt, Human
uggcccagcucagggugggcgg

SEQ ID NO: 331567 - RNA, 22 nt, Human
agcuccagggaaagaguggauc

SEQ ID NO: 331568 - RNA, 22 nt, Human
accuggaggcagagguugcagu

SEQ ID NO: 331569 - RNA, 22 nt, Human
cccuugagccuggaggagcucu

SEQ ID NO: 331570 - RNA, 22 nt, Human
ugacaggcuugcuaagacauag

SEQ ID NO: 331571 - RNA, 22 nt, Human
gcuugcugaacaggaaccuggc

SEQ ID NO: 331572 - RNA, 22 nt, Human
ugacucauauuucauggauacg

SEQ ID NO: 331573 - RNA, 22 nt, Human
accaggcccuccagcugcgugg

SEQ ID NO: 331574 - RNA, 22 nt, Human
gcuggccugaccugaggcuggg

SEQ ID NO: 331575 - RNA, 22 nt, Human
gcgcuccucccggcccuggugg

SEQ ID NO: 331576 - RNA, 22 nt, Human
cgcccacgaaguagguggcauu

SEQ ID NO: 331577 - RNA, 22 nt, Human
ggcuggccuguguggccgccac

SEQ ID NO: 331578 - RNA, 22 nt, Human
agcuauggguguggguuccauu

SEQ ID NO: 331579 - RNA, 22 nt, Human
uggcucaggccuacgacgccuu

SEQ ID NO: 331580 - RNA, 22 nt, Human
gccagguugcugacgacgaucu

SEQ ID NO: 331581 - RNA, 21 nt, Human
ucuccucccggggagaggccg

SEQ ID NO: 331582 - RNA, 22 nt, Human
uucucugaguacguuucagugu

SEQ ID NO: 331583 - RNA, 22 nt, Human
guguggcuaggauggcuuugcu

SEQ ID NO: 331584 - RNA, 22 nt, Human
gucuugcacuuaccuaagaacu

SEQ ID NO: 331585 - RNA, 22 nt, Human
ggacuggucugagagggauuca

SEQ ID NO: 331586 - RNA, 22 nt, Human
ccaggagcccugccacaauggu

SEQ ID NO: 331587 - RNA, 22 nt, Human
aaccauggauuucaguucaccu

SEQ ID NO: 331588 - RNA, 22 nt, Human
uguuccucugaacuucuuccaa

SEQ ID NO: 331589 - RNA, 19 nt, Human
ugcuccaggccuugccgca

SEQ ID NO: 331590 - RNA, 22 nt, Human
cuaguauuaagugugaguaaaa

SEQ ID NO: 331591 - RNA, 19 nt, Human
gaugcucauucagguggaa

SEQ ID NO: 331592 - RNA, 22 nt, Human
augcccucuguuucccaaggcc

SEQ ID NO: 331593 - RNA, 21 nt, Human
gccaucaccaagcucuucccc

SEQ ID NO: 331594 - RNA, 20 nt, Human
gucagaggacccuagagcga

SEQ ID NO: 331595 - RNA, 17 nt, Human
uuucugcaugauuggac

SEQ ID NO: 331596 - RNA, 22 nt, Human
gcccagccccuggguggacgug

SEQ ID NO: 331597 - RNA, 22 nt, Human
cugagcacguaguuagggucca

SEQ ID NO: 331598 - RNA, 22 nt, Human
cucccagccuucgccagucuga

SEQ ID NO: 331599 - RNA, 20 nt, Human
gcugugccaugacccucgag

SEQ ID NO: 331600 - RNA, 19 nt, Human
ccuggcccugcugcgcggg

SEQ ID NO: 331601 - RNA, 22 nt, Human
cuggcccugucagcacagaauc

SEQ ID NO: 331602 - RNA, 22 nt, Human
ccagcugggucccugcuggggc

SEQ ID NO: 331603 - RNA, 22 nt, Human
ggcuggacuugguccuguuuug

SEQ ID NO: 331604 - RNA, 22 nt, Human
accuggccaguggggccgcgcu

SEQ ID NO: 331605 - RNA, 22 nt, Human
cugugcuggcagaccuggaguu

SEQ ID NO: 331606 - RNA, 22 nt, Human
auguggcuuucugcguuuucuc

SEQ ID NO: 331607 - RNA, 22 nt, Human
gugcugagugcagagugcagag

SEQ ID NO: 331608 - RNA, 22 nt, Human
aagcagcauaugacagcaucca

SEQ ID NO: 331609 - RNA, 22 nt, Human
uuugcuggagaugagcgugggu

SEQ ID NO: 331610 - RNA, 22 nt, Human
gucaggaugagggaugaggagu

SEQ ID NO: 331611 - RNA, 22 nt, Human
cccagguaaggaugcuccucau

SEQ ID NO: 331612 - RNA, 21 nt, Human
uuccuccucuggagaagaaga

SEQ ID NO: 331613 - RNA, 21 nt, Human
cugugauguugccgggguagg

SEQ ID NO: 331614 - RNA, 22 nt, Human
gccagcuggcugcaggucccag

SEQ ID NO: 331615 - RNA, 22 nt, Human
ugccgcgcgcccagguuaggug

SEQ ID NO: 331616 - RNA, 22 nt, Human
aggugggacccguggggugcga

SEQ ID NO: 331617 - RNA, 21 nt, Human
ccaccaggucuucugcucggg

SEQ ID NO: 331618 - RNA, 22 nt, Human
ugaucagcaucuucccagcucg

SEQ ID NO: 331619 - RNA, 22 nt, Human
ggcugcugcccaccccugcaug

SEQ ID NO: 331620 - RNA, 22 nt, Human
guagcagagggcccagguaacu

SEQ ID NO: 331621 - RNA, 22 nt, Human
ugaggaggugggcacacagagu

SEQ ID NO: 331622 - RNA, 22 nt, Human
acggugcuggguauugggguuc

SEQ ID NO: 331623 - RNA, 22 nt, Human
ggggaggaagcuggaacacggg

SEQ ID NO: 331624 - RNA, 22 nt, Human
gccuggcgccgggcugccuguc

SEQ ID NO: 331625 - RNA, 22 nt, Human
aucugccuggcuccaggugagc

SEQ ID NO: 331626 - RNA, 22 nt, Human
gccugccuucggugcgcagcgg

SEQ ID NO: 331627 - RNA, 21 nt, Human
ugcuuugcagguggauuuagu

SEQ ID NO: 331628 - RNA, 22 nt, Human
uugccaggagacaucuggagcc

SEQ ID NO: 331629 - RNA, 22 nt, Human
guccacauaggaacccagcuuc

SEQ ID NO: 331630 - RNA, 22 nt, Human
cgggaagguggagguugcagug

SEQ ID NO: 331631 - RNA, 22 nt, Human
gccugagccgccugagcggcgg

SEQ ID NO: 331632 - RNA, 21 nt, Human
ccuguggugccagaucgccag

SEQ ID NO: 331633 - RNA, 22 nt, Human
ccagucagccaagcugcagcgg

SEQ ID NO: 331634 - RNA, 22 nt, Human
gagcuguucugugauugaucua

SEQ ID NO: 331635 - RNA, 22 nt, Human
aagcccagcaucccugcaccag

SEQ ID NO: 331636 - RNA, 22 nt, Human
ggccucugccccgcggggcucg

SEQ ID NO: 331637 - RNA, 22 nt, Human
gcugcaagugcauguugcaacu

SEQ ID NO: 331638 - RNA, 18 nt, Human
guagauccuugagcuacc

SEQ ID NO: 331639 - RNA, 22 nt, Human
ccucuuccuucucacuguggaa

SEQ ID NO: 331640 - RNA, 22 nt, Human
ugcccacaggaagacaccagcg

SEQ ID NO: 331641 - RNA, 22 nt, Human
uccuggguccauggcagccgaa

SEQ ID NO: 331642 - RNA, 22 nt, Human
cuggcccagguggucguugagg

SEQ ID NO: 331643 - RNA, 19 nt, Human
ucuggcugccaaggauuga

SEQ ID NO: 331644 - RNA, 22 nt, Human
gucuguggaguugcuugcugga

SEQ ID NO: 331645 - RNA, 22 nt, Human
aaauguucccaauaugaagcug

SEQ ID NO: 331646 - RNA, 22 nt, Human
gugaccagacagagucuagccc

SEQ ID NO: 331647 - RNA, 22 nt, Human
gcucgguggccagccugaggcc

SEQ ID NO: 331648 - RNA, 22 nt, Human
ugcuugucacccugccugagug

SEQ ID NO: 331649 - RNA, 22 nt, Human
uccuggccucugagucaagaac

SEQ ID NO: 331650 - RNA, 22 nt, Human
cugagcaggacagugggagacc

SEQ ID NO: 331651 - RNA, 22 nt, Human
ugugugcucgauggcccugcag

SEQ ID NO: 331652 - RNA, 22 nt, Human
ccugugcuucacucaacaagcc

SEQ ID NO: 331653 - RNA, 18 nt, Human
auggcuccagugucuucc

SEQ ID NO: 331654 - RNA, 21 nt, Human
uggcccuggccacggcugcca

SEQ ID NO: 331655 - RNA, 22 nt, Human
cccugcacagccuggcucucuu

SEQ ID NO: 331656 - RNA, 22 nt, Human
ggcuggaacuucuucuggcauu

SEQ ID NO: 331657 - RNA, 22 nt, Human
cggcagcgguuggagguuguag

SEQ ID NO: 331658 - RNA, 22 nt, Human
agccugugaaaucucugccacu

SEQ ID NO: 331659 - RNA, 22 nt, Human
ggggaccuggccacccauccuu

SEQ ID NO: 331660 - RNA, 22 nt, Human
ggcagguguggugaccagagau

SEQ ID NO: 331661 - RNA, 22 nt, Human
ggagcagggaauuacagcgcag

SEQ ID NO: 331662 - RNA, 22 nt, Human
agggccacgugcaccgcggucu

SEQ ID NO: 331663 - RNA, 22 nt, Human
ccggcucggcgaccaggcugaa

SEQ ID NO: 331664 - RNA, 19 nt, Human
uugcuucaugucuuuugcu

SEQ ID NO: 331665 - RNA, 22 nt, Human
uuccaggcgcacgucggccuua

SEQ ID NO: 331666 - RNA, 22 nt, Human
ccaucuucucuugaaccuccuu

SEQ ID NO: 331667 - RNA, 22 nt, Human
ccucuuccacugggccccaucc

SEQ ID NO: 331668 - RNA, 22 nt, Human
gaaaugucaagauauguuugga

SEQ ID NO: 331669 - RNA, 17 nt, Human
ccuuucuucccagaggg

SEQ ID NO: 331670 - RNA, 22 nt, Human
cccugacccuaucagagggcca

SEQ ID NO: 331671 - RNA, 22 nt, Human
aagucuucagacuggagagauu

SEQ ID NO: 331672 - RNA, 22 nt, Human
cagcgguggcaaggugacugug

SEQ ID NO: 331673 - RNA, 22 nt, Human
gcuccugggcccugggcuaacu

SEQ ID NO: 331674 - RNA, 22 nt, Human
aggcggcuccgggagugugggc

SEQ ID NO: 331675 - RNA, 22 nt, Human
ggaccugcucucccaguucucu

SEQ ID NO: 331676 - RNA, 22 nt, Human
acaugcuuucuagguccuucug

SEQ ID NO: 331677 - RNA, 22 nt, Human
ucaagcggacugagauacucug

SEQ ID NO: 331678 - RNA, 22 nt, Human
gccccgucguggggccagggau

SEQ ID NO: 331679 - RNA, 22 nt, Human
gggauaagagaguauuuaugca

SEQ ID NO: 331680 - RNA, 23 nt, Human
gcacagagcaguuaggggaagau

SEQ ID NO: 331681 - RNA, 22 nt, Human
uugcaucagcaggcauaauugg

SEQ ID NO: 331682 - RNA, 22 nt, Human
uggcccagaucucugaccuuga

SEQ ID NO: 331683 - RNA, 22 nt, Human
gccucugcaccaguacugugcc

SEQ ID NO: 331684 - RNA, 22 nt, Human
cgcagcugcugcucugaaacag

SEQ ID NO: 331685 - RNA, 22 nt, Human
cgccaguggcagcuggaacagg

SEQ ID NO: 331686 - RNA, 22 nt, Human
caugcaugccgggcugacagag

SEQ ID NO: 331687 - RNA, 22 nt, Human
gacggggcagccagcugguggc

SEQ ID NO: 331688 - RNA, 22 nt, Human
ugaggagcaggguggcuuacuc

SEQ ID NO: 331689 - RNA, 22 nt, Human
gagugugucggucagcguggcg

SEQ ID NO: 331690 - RNA, 22 nt, Human
auagcaaaggacaauagucagu

SEQ ID NO: 331691 - RNA, 22 nt, Human
cugggcccacgagggcucuggg

SEQ ID NO: 331692 - RNA, 18 nt, Human
ggaaggugcuggagugca

SEQ ID NO: 331693 - RNA, 22 nt, Human
cccaccacgugcuuugcuggag

SEQ ID NO: 331694 - RNA, 22 nt, Human
uucaguuuugcuuuuaaucaug

SEQ ID NO: 331695 - RNA, 22 nt, Human
gcccucugguggccgccucggc

SEQ ID NO: 331696 - RNA, 22 nt, Human
cuggagcucuccagagccccgu

SEQ ID NO: 331697 - RNA, 21 nt, Human
uccaggagcacgggacuagga

SEQ ID NO: 331698 - RNA, 22 nt, Human
cugggcccaggcggcucucgga

SEQ ID NO: 331699 - RNA, 22 nt, Human
gugcugauugggagcugggauu

SEQ ID NO: 331700 - RNA, 22 nt, Human
gguuauuguggagaaguuccgg

SEQ ID NO: 331701 - RNA, 22 nt, Human
uucugagguccaugcaguacug

SEQ ID NO: 331702 - RNA, 22 nt, Human
agcugcaccggcuggaccacug

SEQ ID NO: 331703 - RNA, 20 nt, Human
gggcucugcauccaucagcc

SEQ ID NO: 331704 - RNA, 22 nt, Human
cugcugccuuccaaaggccagg

SEQ ID NO: 331705 - RNA, 22 nt, Human
gcagccuccgcacugcgagucc

SEQ ID NO: 331706 - RNA, 22 nt, Human
cagaguggugcaagggcagugu

SEQ ID NO: 331707 - RNA, 22 nt, Human
ggcgaggugucugccaucaagc

SEQ ID NO: 331708 - RNA, 19 nt, Human
cgcacagccugccaggcgc

SEQ ID NO: 331709 - RNA, 22 nt, Human
guccaucuaaguauccagccug

SEQ ID NO: 331710 - RNA, 22 nt, Human
ucccagucuagagccggauugg

SEQ ID NO: 331711 - RNA, 22 nt, Human
cagcaguguacaaggugucaga

SEQ ID NO: 331712 - RNA, 22 nt, Human
acuugguggcgaacgaggguca

SEQ ID NO: 331713 - RNA, 22 nt, Human
uugccaggggacaucuggagcc

SEQ ID NO: 331714 - RNA, 22 nt, Human
aguaacagguguacagacuauc

SEQ ID NO: 331715 - RNA, 22 nt, Human
aggcugagccugggcguggugg

SEQ ID NO: 331716 - RNA, 22 nt, Human
cagcuggacugggauguagcga

SEQ ID NO: 331717 - RNA, 22 nt, Human
ucaccgccuugcccggccgggc

SEQ ID NO: 331718 - RNA, 20 nt, Human
aggggcaccugcgacggggc

SEQ ID NO: 331719 - RNA, 22 nt, Human
gggcucggcaucuguggacucu

SEQ ID NO: 331720 - RNA, 22 nt, Human
cugaaacuauggggaggggagc

SEQ ID NO: 331721 - RNA, 22 nt, Human
aagccuuccugagugcaaggcc

SEQ ID NO: 331722 - RNA, 22 nt, Human
uggcaggaaaaagggccagagg

SEQ ID NO: 331723 - RNA, 22 nt, Human
caggacccaucagccaggcacu

SEQ ID NO: 331724 - RNA, 22 nt, Human
acagcagguuauuguuauggca

SEQ ID NO: 331725 - RNA, 22 nt, Human
ggagcugcucagagccaguccc

SEQ ID NO: 331726 - RNA, 22 nt, Human
gaaaccuuugccgauggggucc

SEQ ID NO: 331727 - RNA, 22 nt, Human
aagguggcggcugccagguccu

SEQ ID NO: 331728 - RNA, 22 nt, Human
guggccuccuccguccgccucu

SEQ ID NO: 331729 - RNA, 22 nt, Human
gcccagggcugcaaguggacgc

SEQ ID NO: 331730 - RNA, 22 nt, Human
uuccaaggagagcucgaccuca

SEQ ID NO: 331731 - RNA, 22 nt, Human
ugcaggccuggacugauguggu

SEQ ID NO: 331732 - RNA, 22 nt, Human
gcagcugcgcugguguggggca

SEQ ID NO: 331733 - RNA, 22 nt, Human
cgccccagccaguugagcggcg

SEQ ID NO: 331734 - RNA, 18 nt, Human
gaucgggggcgccccaag

SEQ ID NO: 331735 - RNA, 18 nt, Human
gccagcccuccaaccucc

SEQ ID NO: 331736 - RNA, 22 nt, Human
gggcagcaggcuccacguuccu

SEQ ID NO: 331737 - RNA, 22 nt, Human
auggccugcagugcugccacag

SEQ ID NO: 331738 - RNA, 22 nt, Human
gcagacccugaacugggcaugg

SEQ ID NO: 331739 - RNA, 22 nt, Human
caguggguccugcgucugccag

SEQ ID NO: 331740 - RNA, 22 nt, Human
agaggaaguaaucaggaccugc

SEQ ID NO: 331741 - RNA, 22 nt, Human
guugggcugaagugugugcuua

SEQ ID NO: 331742 - RNA, 22 nt, Human
ugccuggauggcucugagcagg

SEQ ID NO: 331743 - RNA, 22 nt, Human
uacugcugagcuggguagaagg

SEQ ID NO: 331744 - RNA, 22 nt, Human
guggcagagagcaagugucuga

SEQ ID NO: 331745 - RNA, 23 nt, Human
gggugcugccuguagucaugcug

SEQ ID NO: 331746 - RNA, 22 nt, Human
cugcagggcagggccuccuggc

SEQ ID NO: 331747 - RNA, 22 nt, Human
ggcuagggagacagagggcaug

SEQ ID NO: 331748 - RNA, 22 nt, Human
gcugcugcuugaaggcucggag

SEQ ID NO: 331749 - RNA, 22 nt, Human
gcagagcacccugcagugguau

SEQ ID NO: 331750 - RNA, 22 nt, Human
uuugaagauaaauauggagaaa

SEQ ID NO: 331751 - RNA, 22 nt, Human
agucaggaagcuggagcugggg

SEQ ID NO: 331752 - RNA, 22 nt, Human
cuugcuuuaucugguuucucau

SEQ ID NO: 331753 - RNA, 19 nt, Human
caucuggaugauucuccug

SEQ ID NO: 331754 - RNA, 23 nt, Human
acugccugugccgaucucucuca

SEQ ID NO: 331755 - RNA, 22 nt, Human
ccuggccgacauggugaaacgc

SEQ ID NO: 331756 - RNA, 22 nt, Human
cgucaggguugagcagguagau

SEQ ID NO: 331757 - RNA, 22 nt, Human
ccagguaggagagucaacaugu

SEQ ID NO: 331758 - RNA, 22 nt, Human
gggcugcacuagggcaagguga

SEQ ID NO: 331759 - RNA, 19 nt, Human
ugccuggcaccagcuccac

SEQ ID NO: 331760 - RNA, 22 nt, Human
ccaggcccugcuccucacacca

SEQ ID NO: 331761 - RNA, 22 nt, Human
caggaagucgcagagcuggggg

SEQ ID NO: 331762 - RNA, 19 nt, Human
ggcugccuucugcucaucu

SEQ ID NO: 331763 - RNA, 22 nt, Human
ucuccaggcuuaaucucagcuu

SEQ ID NO: 331764 - RNA, 22 nt, Human
gguguggcaguggaccugugaa

SEQ ID NO: 331765 - RNA, 22 nt, Human
cugcucaauuccggcacgcugg

SEQ ID NO: 331766 - RNA, 22 nt, Human
cccagccucuggguucugccgg

SEQ ID NO: 331767 - RNA, 22 nt, Human
gcacaaaagguacuucauguag

SEQ ID NO: 331768 - RNA, 22 nt, Human
gggcuuuaggggccagugacca

SEQ ID NO: 331769 - RNA, 22 nt, Human
aagcagggugucuugacccaug

SEQ ID NO: 331770 - RNA, 22 nt, Human
cugcaccgugucucgggcugcc

SEQ ID NO: 331771 - RNA, 20 nt, Human
uccagccacuuccgcugguc

SEQ ID NO: 331772 - RNA, 22 nt, Human
gcucagguagaugggguugucc

SEQ ID NO: 331773 - RNA, 22 nt, Human
ucugagagccacugaacagcaa

SEQ ID NO: 331774 - RNA, 22 nt, Human
uucagcacuggacagcgagucu

SEQ ID NO: 331775 - RNA, 19 nt, Human
aacuacagcgcacuguccu

SEQ ID NO: 331776 - RNA, 22 nt, Human
uccucuucaaaauagcucugaa

SEQ ID NO: 331777 - RNA, 22 nt, Human
ccagcuggcccagcugugcucc

SEQ ID NO: 331778 - RNA, 22 nt, Human
aggggcacgaguagagcucuag

SEQ ID NO: 331779 - RNA, 21 nt, Human
ugagcaccagcugcaugcccc

SEQ ID NO: 331780 - RNA, 22 nt, Human
gagcaacacauugaaugaggau

SEQ ID NO: 331781 - RNA, 22 nt, Human
ggcugagucugugacccaugcg

SEQ ID NO: 331782 - RNA, 23 nt, Human
gguucugccgcuuacugcugugc

SEQ ID NO: 331783 - RNA, 22 nt, Human
ucauuguuucugcuuuucauga

SEQ ID NO: 331784 - RNA, 22 nt, Human
cugauccagagccaaccaaggc

SEQ ID NO: 331785 - RNA, 20 nt, Human
gcuccccuucucugggccuc

SEQ ID NO: 331786 - RNA, 22 nt, Human
gcucugagucacacugcccugu

SEQ ID NO: 331787 - RNA, 18 nt, Human
aggagcggcugcggcugc

SEQ ID NO: 331788 - RNA, 22 nt, Human
acugauuucagggaugagaaga

SEQ ID NO: 331789 - RNA, 20 nt, Human
gcagcagacagacaggggac

SEQ ID NO: 331790 - RNA, 22 nt, Human
caggguggaacaggcaauacuu

SEQ ID NO: 331791 - RNA, 22 nt, Human
gcagcugccgugagcucacgcc

SEQ ID NO: 331792 - RNA, 22 nt, Human
uccuggccaaguagauguggcg

SEQ ID NO: 331793 - RNA, 22 nt, Human
ucucaagaucucaagauggccc

SEQ ID NO: 331794 - RNA, 18 nt, Human
ucugugggaucagugagg

SEQ ID NO: 331795 - RNA, 22 nt, Human
ccaggcuccccaggaggcccuu

SEQ ID NO: 331796 - RNA, 22 nt, Human
uggccaggcagguagaacggcc

SEQ ID NO: 331797 - RNA, 22 nt, Human
cugcugagguggagauugcagu

SEQ ID NO: 331798 - RNA, 22 nt, Human
ucuccaggggcagggucuggag

SEQ ID NO: 331799 - RNA, 22 nt, Human
ugcagcaccuauggacacuugu

SEQ ID NO: 331800 - RNA, 22 nt, Human
guggauggagcuggaagccauu

SEQ ID NO: 331801 - RNA, 22 nt, Human
aggcccugcugaggccucccuc

SEQ ID NO: 331802 - RNA, 21 nt, Human
aaagugguaaggauuauuuug

SEQ ID NO: 331803 - RNA, 22 nt, Human
ggugcccaaggaagguugccgu

SEQ ID NO: 331804 - RNA, 22 nt, Human
ugugaggaccucagcagagucu

SEQ ID NO: 331805 - RNA, 20 nt, Human
gacuucaauuucuaucuuuu

SEQ ID NO: 331806 - RNA, 22 nt, Human
gccccuucguggaagugcauuc

SEQ ID NO: 331807 - RNA, 21 nt, Human
cuggagcuuggugagaagugu

SEQ ID NO: 331808 - RNA, 22 nt, Human
ugcugcacuuauggcucugagg

SEQ ID NO: 331809 - RNA, 22 nt, Human
agcugcugcaaguggugcuaac

SEQ ID NO: 331810 - RNA, 22 nt, Human
cacgcacgcuggguggaggcgc

SEQ ID NO: 331811 - RNA, 22 nt, Human
ucuguccauucagaauggcccu

SEQ ID NO: 331812 - RNA, 22 nt, Human
gccggucuuaagcugacuguga

SEQ ID NO: 331813 - RNA, 22 nt, Human
acgugcaggaucugguuggcga

SEQ ID NO: 331814 - RNA, 22 nt, Human
gggcuguaggagcuggaauggg

SEQ ID NO: 331815 - RNA, 21 nt, Human
gccaccucaaucuucuagcgc

SEQ ID NO: 331816 - RNA, 17 nt, Human
gagguaggaagugaguc

SEQ ID NO: 331817 - RNA, 22 nt, Human
agccaggucaggaaagguccca

SEQ ID NO: 331818 - RNA, 22 nt, Human
gaauucggguacucuaggccag

SEQ ID NO: 331819 - RNA, 19 nt, Human
cucugccucuggcuguggc

SEQ ID NO: 331820 - RNA, 22 nt, Human
ccugggugaugugcugcccucg

SEQ ID NO: 331821 - RNA, 22 nt, Human
gaagcgcggcgucggcgugggu

SEQ ID NO: 331822 - RNA, 22 nt, Human
uacagcuugauguuuguguguu

SEQ ID NO: 331823 - RNA, 22 nt, Human
accuccuccaaggagccauagg

SEQ ID NO: 331824 - RNA, 22 nt, Human
ugcccuguuccugccuccagcu

SEQ ID NO: 331825 - RNA, 19 nt, Human
ugguggaggccccauguuc

SEQ ID NO: 331826 - RNA, 22 nt, Human
uccacagguccucuuugcaaag

SEQ ID NO: 331827 - RNA, 22 nt, Human
cugcuucacccugccugagaac

SEQ ID NO: 331828 - RNA, 22 nt, Human
acacaucagaaauaugaaugag

SEQ ID NO: 331829 - RNA, 22 nt, Human
ucuaugaaccucugcaaugaca

SEQ ID NO: 331830 - RNA, 22 nt, Human
ggcuuccuccuuccugcuguca

SEQ ID NO: 331831 - RNA, 22 nt, Human
gguguuguacauucuguggauu

SEQ ID NO: 331832 - RNA, 22 nt, Human
cccuggaacccauggccagugu

SEQ ID NO: 331833 - RNA, 22 nt, Human
ucggggauggugucugagggag

SEQ ID NO: 331834 - RNA, 22 nt, Human
gagcugcuggccuccugcggga

SEQ ID NO: 331835 - RNA, 22 nt, Human
agcgcuugccgcacuccaagca

SEQ ID NO: 331836 - RNA, 22 nt, Human
uguggugccgagagucuggacg

SEQ ID NO: 331837 - RNA, 20 nt, Human
uccuccuugcagagcccaga

SEQ ID NO: 331838 - RNA, 22 nt, Human
agcagcaccuguccucgcugcu

SEQ ID NO: 331839 - RNA, 22 nt, Human
cugcaucacagcaggaggcaca

SEQ ID NO: 331840 - RNA, 21 nt, Human
ucucuccucaagcucgacccc

SEQ ID NO: 331841 - RNA, 22 nt, Human
cuugggcaggggaaacagcugc

SEQ ID NO: 331842 - RNA, 22 nt, Human
uguaucauauggggaagcuuca

SEQ ID NO: 331843 - RNA, 22 nt, Human
ugcaaggcacccacucugcuuu

SEQ ID NO: 331844 - RNA, 22 nt, Human
aggggagccagggcugcgaguu

SEQ ID NO: 331845 - RNA, 23 nt, Human
uccugcagauaagcugguugaca

SEQ ID NO: 331846 - RNA, 22 nt, Human
aguguauucugcaugggagacu

SEQ ID NO: 331847 - RNA, 22 nt, Human
gcugauggcuugcuggcugaca

SEQ ID NO: 331848 - RNA, 22 nt, Human
aaaagagccacuuaugaccuca

SEQ ID NO: 331849 - RNA, 22 nt, Human
cccagccuuugcuuccugguuc

SEQ ID NO: 331850 - RNA, 22 nt, Human
agcuccugaaaagcgcuugcuu

SEQ ID NO: 331851 - RNA, 22 nt, Human
cuggagaggcugggaacagguu

SEQ ID NO: 331852 - RNA, 22 nt, Human
cuggagcagcagguggccaggg

SEQ ID NO: 331853 - RNA, 22 nt, Human
ggaggugacuggaucaugggca

SEQ ID NO: 331854 - RNA, 22 nt, Human
ggugagaggcagugcuguggaa

SEQ ID NO: 331855 - RNA, 22 nt, Human
uguuggcagugcuacagucagu

SEQ ID NO: 331856 - RNA, 22 nt, Human
aguggcaguagaugagcugguu

SEQ ID NO: 331857 - RNA, 22 nt, Human
ggcuagcuccuccgcgcaucca

SEQ ID NO: 331858 - RNA, 21 nt, Human
uccaaaggagacugagugugu

SEQ ID NO: 331859 - RNA, 22 nt, Human
aucucuguaaaccauaaauuga

SEQ ID NO: 331860 - RNA, 21 nt, Human
gcugcucgagauccagugcuu

SEQ ID NO: 331861 - RNA, 22 nt, Human
aagaugauuauguagauuggga

SEQ ID NO: 331862 - RNA, 22 nt, Human
cccucucgcggggcagcggagg

SEQ ID NO: 331863 - RNA, 22 nt, Human
auggcuccagcuuggcuucacc

SEQ ID NO: 331864 - RNA, 22 nt, Human
aggcaguguggagggcuguugc

SEQ ID NO: 331865 - RNA, 22 nt, Human
cgaggaggaaacgcggagaacu

SEQ ID NO: 331866 - RNA, 22 nt, Human
uugauggacagggaccacuguc

SEQ ID NO: 331867 - RNA, 22 nt, Human
aggcugcagaggugcugccaga

SEQ ID NO: 331868 - RNA, 22 nt, Human
cuuccagcugauuggcauccag

SEQ ID NO: 331869 - RNA, 22 nt, Human
augaagcauuacaggaugacag

SEQ ID NO: 331870 - RNA, 23 nt, Human
aucuguguguggguagggaugau

SEQ ID NO: 331871 - RNA, 20 nt, Human
ugagccugcuguaggaggcc

SEQ ID NO: 331872 - RNA, 22 nt, Human
ucuuucagaaacuuugucugcg

SEQ ID NO: 331873 - RNA, 16 nt, Human
gcagguggggcgcgca

SEQ ID NO: 331874 - RNA, 22 nt, Human
uucuucauucccuuacuuccga

SEQ ID NO: 331875 - RNA, 22 nt, Human
ucauccagccucaucaggagcu

SEQ ID NO: 331876 - RNA, 21 nt, Human
cagggcacacagaggauggua

SEQ ID NO: 331877 - RNA, 22 nt, Human
ucaaagaucagaugguuguagg

SEQ ID NO: 331878 - RNA, 19 nt, Human
ucuuucauuucuagcucug

SEQ ID NO: 331879 - RNA, 22 nt, Human
gaugaguucuuucuauucuauu

SEQ ID NO: 331880 - RNA, 22 nt, Human
gaggagcuucagaggaaucuua

SEQ ID NO: 331881 - RNA, 22 nt, Human
agaaggcaucagaaguguguag

SEQ ID NO: 331882 - RNA, 22 nt, Human
gaggugggaugugugugcuacu

SEQ ID NO: 331883 - RNA, 22 nt, Human
ccgcguggcacccuccuggagg

SEQ ID NO: 331884 - RNA, 21 nt, Human
ggucaggcaugugcccugagc

SEQ ID NO: 331885 - RNA, 22 nt, Human
gagcugcagcggcugacgcaac

SEQ ID NO: 331886 - RNA, 22 nt, Human
ugugcugcucucagugacagcc

SEQ ID NO: 331887 - RNA, 22 nt, Human
gggggcuggacuuucccacaca

SEQ ID NO: 331888 - RNA, 22 nt, Human
acagcuggaggucugugagcac

SEQ ID NO: 331889 - RNA, 22 nt, Human
ucaccggcagacguggccugau

SEQ ID NO: 331890 - RNA, 22 nt, Human
cucagcacauuccuaagggaug

SEQ ID NO: 331891 - RNA, 22 nt, Human
caggcacaaugagcgccaucuu

SEQ ID NO: 331892 - RNA, 22 nt, Human
cucagucucuugggcugugaag

SEQ ID NO: 331893 - RNA, 22 nt, Human
uccugugccuccaccugcuccg

SEQ ID NO: 331894 - RNA, 22 nt, Human
ccgugugcacgcgccggugcug

SEQ ID NO: 331895 - RNA, 22 nt, Human
uggcccaggugcacccagaggc

SEQ ID NO: 331896 - RNA, 22 nt, Human
gggcccugcgacucgcggcgga

SEQ ID NO: 331897 - RNA, 22 nt, Human
cacuguugaagauacuuccucu

SEQ ID NO: 331898 - RNA, 22 nt, Human
cccacaggcaggugcaugggcu

SEQ ID NO: 331899 - RNA, 21 nt, Human
uccagcacagaugaccucccc

SEQ ID NO: 331900 - RNA, 22 nt, Human
uccaggagcucauccacgucaa

SEQ ID NO: 331901 - RNA, 22 nt, Human
gugcagcugugguggagccagg

SEQ ID NO: 331902 - RNA, 22 nt, Human
uuccugagucgccgagucuaug

SEQ ID NO: 331903 - RNA, 22 nt, Human
uguggguccuccugugugcccg

SEQ ID NO: 331904 - RNA, 22 nt, Human
cauugcaacuucaaacuccugg

SEQ ID NO: 331905 - RNA, 22 nt, Human
aauggcugccagggcaggaggu

SEQ ID NO: 331906 - RNA, 22 nt, Human
uuuuuugucuugaagaaauggu

SEQ ID NO: 331907 - RNA, 22 nt, Human
cuuugggcacugaaguaugggu

SEQ ID NO: 331908 - RNA, 22 nt, Human
uuccaggaagcucucggccucu

SEQ ID NO: 331909 - RNA, 22 nt, Human
uugcugccagcgcccugcaggg

SEQ ID NO: 331910 - RNA, 22 nt, Human
cucacagcugcuucaggaucca

SEQ ID NO: 331911 - RNA, 22 nt, Human
ugcaucauuaagguacaguugg

SEQ ID NO: 331912 - RNA, 22 nt, Human
gcccucugccacaggacgccag

SEQ ID NO: 331913 - RNA, 22 nt, Human
caugugguauugugagauccac

SEQ ID NO: 331914 - RNA, 22 nt, Human
cgugcagcggagcuggucacug

SEQ ID NO: 331915 - RNA, 22 nt, Human
gcagcagcggggccccugcgcg

SEQ ID NO: 331916 - RNA, 22 nt, Human
cagggcuccccagagagccucu

SEQ ID NO: 331917 - RNA, 22 nt, Human
acacuggacucagaggccagaa

SEQ ID NO: 331918 - RNA, 22 nt, Human
cuguggcugcgcccugggggag

SEQ ID NO: 331919 - RNA, 22 nt, Human
ugaacaugcuguugauggccug

SEQ ID NO: 331920 - RNA, 22 nt, Human
cccaggaguuagagguuguggu

SEQ ID NO: 331921 - RNA, 22 nt, Human
ggugggugagcccugggagcug

SEQ ID NO: 331922 - RNA, 22 nt, Human
ugcucgagguccccaccggcuc

SEQ ID NO: 331923 - RNA, 22 nt, Human
ugccuggcugggcugcucaugg

SEQ ID NO: 331924 - RNA, 22 nt, Human
agcuuugcugcuggagaagggu

SEQ ID NO: 331925 - RNA, 22 nt, Human
gcaugcaggaagggcuugggga

SEQ ID NO: 331926 - RNA, 21 nt, Human
uaaaagaugacaagacagcuc

SEQ ID NO: 331927 - RNA, 22 nt, Human
accagagcuggcagaguaucaa

SEQ ID NO: 331928 - RNA, 22 nt, Human
guggcuaggcccaacggcagga

SEQ ID NO: 331929 - RNA, 22 nt, Human
cagcuggcgacucuccucgaug

SEQ ID NO: 331930 - RNA, 22 nt, Human
agcagggagaccaucucuuccu

SEQ ID NO: 331931 - RNA, 22 nt, Human
guaugugucuuagaacuuggga

SEQ ID NO: 331932 - RNA, 22 nt, Human
augcuuccagauugguaggggu

SEQ ID NO: 331933 - RNA, 22 nt, Human
cagggcucacucggcuggcguc

SEQ ID NO: 331934 - RNA, 22 nt, Human
agcuccugaaaauccagacugg

SEQ ID NO: 331935 - RNA, 22 nt, Human
auggcuguguuguuccucugaa

SEQ ID NO: 331936 - RNA, 22 nt, Human
guccuaaauauagugauucaug

SEQ ID NO: 331937 - RNA, 22 nt, Human
ggcggugguugagaggacggcg

SEQ ID NO: 331938 - RNA, 22 nt, Human
augcacacguacccuacaaggc

SEQ ID NO: 331939 - RNA, 22 nt, Human
aguucaauuguuuuguaaaagu

SEQ ID NO: 331940 - RNA, 22 nt, Human
cagagccaaaccucagggcccg

SEQ ID NO: 331941 - RNA, 22 nt, Human
gcugcaggcucugcaggaauug

SEQ ID NO: 331942 - RNA, 22 nt, Human
cuguggguggcugugccccagg

SEQ ID NO: 331943 - RNA, 22 nt, Human
uggugcaggccaagcugcgagc

SEQ ID NO: 331944 - RNA, 22 nt, Human
cuauuuucccauaugguugaca

SEQ ID NO: 331945 - RNA, 19 nt, Human
auucuucucuuccugcugu

SEQ ID NO: 331946 - RNA, 19 nt, Human
agcagagcagggccguggg

SEQ ID NO: 331947 - RNA, 22 nt, Human
gaaggacccucuggggucucag

SEQ ID NO: 331948 - RNA, 22 nt, Human
gcuuucuuuucaagaauguauu

SEQ ID NO: 331949 - RNA, 22 nt, Human
uggcugggagcuggaacugggc

SEQ ID NO: 331950 - RNA, 22 nt, Human
cccaggcuggggcuccuccagc

SEQ ID NO: 331951 - RNA, 18 nt, Human
ggcggguguuuuauucac

SEQ ID NO: 331952 - RNA, 22 nt, Human
ugagcagacuugaugaggcagc

SEQ ID NO: 331953 - RNA, 22 nt, Human
cagcugcucugguggucucucc

SEQ ID NO: 331954 - RNA, 22 nt, Human
gcggccugcgcugcucccgacg

SEQ ID NO: 331955 - RNA, 22 nt, Human
acagcugggaacucacacagca

SEQ ID NO: 331956 - RNA, 22 nt, Human
gccuggaaugcaaugugacgaa

SEQ ID NO: 331957 - RNA, 18 nt, Human
ucuuccaacacugacacc

SEQ ID NO: 331958 - RNA, 22 nt, Human
agcuggguguagggcuggacaa

SEQ ID NO: 331959 - RNA, 20 nt, Human
aaaaacaguaaugcugaaga

SEQ ID NO: 331960 - RNA, 22 nt, Human
gcucugugccccugccguggac

SEQ ID NO: 331961 - RNA, 22 nt, Human
uuuacuguuuacagcuaaugca

SEQ ID NO: 331962 - RNA, 22 nt, Human
auugaagacuugguauccgugg

SEQ ID NO: 331963 - RNA, 22 nt, Human
uggugcugccaccuccucugcu

SEQ ID NO: 331964 - RNA, 22 nt, Human
gagaugggcgagaagguggacu

SEQ ID NO: 331965 - RNA, 22 nt, Human
ggagaggguguggaaaguuauc

SEQ ID NO: 331966 - RNA, 22 nt, Human
cccagcauuucugggcugcacu

SEQ ID NO: 331967 - RNA, 22 nt, Human
ggcagccagagggcagcuggau

SEQ ID NO: 331968 - RNA, 22 nt, Human
agguuuggguucauugcuggcu

SEQ ID NO: 331969 - RNA, 22 nt, Human
ggcagagcuugcagugagccga

SEQ ID NO: 331970 - RNA, 22 nt, Human
ugaaaugccuaugaagucagga

SEQ ID NO: 331971 - RNA, 21 nt, Human
aaacugaccuugccugagaca

SEQ ID NO: 331972 - RNA, 22 nt, Human
ccucuucuaggacguccuugug

SEQ ID NO: 331973 - RNA, 22 nt, Human
gcagcagcaggcgcucggccgu

SEQ ID NO: 331974 - RNA, 22 nt, Human
agggggcuccuuggugugcaga

SEQ ID NO: 331975 - RNA, 22 nt, Human
uccagcuccugaguucacugcu

SEQ ID NO: 331976 - RNA, 22 nt, Human
uuugaacuucuaccugucauau

SEQ ID NO: 331977 - RNA, 22 nt, Human
ggagggaaccuuggcuggauug

SEQ ID NO: 331978 - RNA, 22 nt, Human
cugcacagccugucugggggcc

SEQ ID NO: 331979 - RNA, 22 nt, Human
auggaggaugugcagcaugggc

SEQ ID NO: 331980 - RNA, 22 nt, Human
cccaggacucugacacccccaa

SEQ ID NO: 331981 - RNA, 22 nt, Human
accacaucgggcggacacuggg

SEQ ID NO: 331982 - RNA, 22 nt, Human
gaagagguucaacguggucauc

SEQ ID NO: 331983 - RNA, 22 nt, Human
ccagcugcugcaccgugcaugg

SEQ ID NO: 331984 - RNA, 22 nt, Human
gggcagcaaaucugagucuggu

SEQ ID NO: 331985 - RNA, 22 nt, Human
cggcagagcccugagucagccu

SEQ ID NO: 331986 - RNA, 22 nt, Human
cgcaggugccggcagauggggu

SEQ ID NO: 331987 - RNA, 22 nt, Human
ggaaacuuggaugccagcacuc

SEQ ID NO: 331988 - RNA, 22 nt, Human
aacugguucuggaggcugcagg

SEQ ID NO: 331989 - RNA, 22 nt, Human
aauagcaaaugcucauuugaaa

SEQ ID NO: 331990 - RNA, 22 nt, Human
agcggcgccggagggaggugcg

SEQ ID NO: 331991 - RNA, 22 nt, Human
gaccuccguguacaccucccag

SEQ ID NO: 331992 - RNA, 22 nt, Human
ugccuguguccccuucuuggca

SEQ ID NO: 331993 - RNA, 22 nt, Human
ugcccguggccuggggcagcuu

SEQ ID NO: 331994 - RNA, 23 nt, Human
gcauccagagcucaguccccuuu

SEQ ID NO: 331995 - RNA, 22 nt, Human
cuccaggacaugacuuucuugc

SEQ ID NO: 331996 - RNA, 22 nt, Human
agagcaccaaggugguuuggac

SEQ ID NO: 331997 - RNA, 22 nt, Human
gcaccagccugagccucuugca

SEQ ID NO: 331998 - RNA, 20 nt, Human
cucaccagguguaggcugag

SEQ ID NO: 331999 - RNA, 22 nt, Human
ugcagguggcagcggggcacca

SEQ ID NO: 332000 - RNA, 20 nt, Human
uucuccacaggguggaggag

SEQ ID NO: 332001 - RNA, 22 nt, Human
ucgccccgaggcagcccuaugc

SEQ ID NO: 332002 - RNA, 22 nt, Human
agccagugucgugugacaugag

SEQ ID NO: 332003 - RNA, 22 nt, Human
caggccacacggcggcucccug

SEQ ID NO: 332004 - RNA, 22 nt, Human
ccucagucuauuuccagcaggu

SEQ ID NO: 332005 - RNA, 19 nt, Human
cucucagccugucuccuug

SEQ ID NO: 332006 - RNA, 22 nt, Human
uuccuccagccuggagcacuuc

SEQ ID NO: 332007 - RNA, 22 nt, Human
gcgcugccucugcucuccccac

SEQ ID NO: 332008 - RNA, 22 nt, Human
agcaggccugccaccucggggu

SEQ ID NO: 332009 - RNA, 23 nt, Human
gggcugcuccaggccaaggcugg

SEQ ID NO: 332010 - RNA, 22 nt, Human
ccuggaaaaugccacuuucaca

SEQ ID NO: 332011 - RNA, 22 nt, Human
aggcagccuauggggagcucag

SEQ ID NO: 332012 - RNA, 22 nt, Human
uaaaugaaaggguuuaauuuau

SEQ ID NO: 332013 - RNA, 22 nt, Human
ucuuccagauacuuccugacuu

SEQ ID NO: 332014 - RNA, 22 nt, Human
cccaggagacugagcuguaacc

SEQ ID NO: 332015 - RNA, 23 nt, Human
cagcugguugugggaguggcugc

SEQ ID NO: 332016 - RNA, 22 nt, Human
ucaugucccguugcuggcugcc

SEQ ID NO: 332017 - RNA, 18 nt, Human
uccauccucugcucuuca

SEQ ID NO: 332018 - RNA, 22 nt, Human
agagcagaggcauggccguggg

SEQ ID NO: 332019 - RNA, 22 nt, Human
ugaggcuggaugggaugccucc

SEQ ID NO: 332020 - RNA, 22 nt, Human
cucgcggcgcccgaagcccuug

SEQ ID NO: 332021 - RNA, 22 nt, Human
cuuuauguuggggugucuuagu

SEQ ID NO: 332022 - RNA, 22 nt, Human
guguguggaaugcucauuuauu

SEQ ID NO: 332023 - RNA, 19 nt, Human
cucugccauuugcugccug

SEQ ID NO: 332024 - RNA, 22 nt, Human
gcugcuggcuuccugcuguuuu

SEQ ID NO: 332025 - RNA, 22 nt, Human
ccucccugccggcuggacuagu

SEQ ID NO: 332026 - RNA, 22 nt, Human
agggcuccuaugccccauggac

SEQ ID NO: 332027 - RNA, 22 nt, Human
cucgccccggcacaguguccgu

SEQ ID NO: 332028 - RNA, 22 nt, Human
ugcugugcuggcggcagaggcc

SEQ ID NO: 332029 - RNA, 22 nt, Human
ggccgggcuguggagaaggggu

SEQ ID NO: 332030 - RNA, 22 nt, Human
gggaggugauuaggaccaugua

SEQ ID NO: 332031 - RNA, 22 nt, Human
auguaugagagauucuuuuauu

SEQ ID NO: 332032 - RNA, 22 nt, Human
cggagaggugggggcagcaucu

SEQ ID NO: 332033 - RNA, 22 nt, Human
ucugcacccugugguccucuag

SEQ ID NO: 332034 - RNA, 22 nt, Human
aggugcugccccgagaaggaug

SEQ ID NO: 332035 - RNA, 22 nt, Human
cugaggaucuaauuauuggguc

SEQ ID NO: 332036 - RNA, 21 nt, Human
ucugugcuuuuuuggcuccua

SEQ ID NO: 332037 - RNA, 22 nt, Human
ggcucucuuaacuggccauccu

SEQ ID NO: 332038 - RNA, 22 nt, Human
ucuggaaggggaucugugguca

SEQ ID NO: 332039 - RNA, 22 nt, Human
gcaguccuuaggagaggaagua

SEQ ID NO: 332040 - RNA, 20 nt, Human
cuuguuaaauaugcagguag

SEQ ID NO: 332041 - RNA, 22 nt, Human
gccucugcacuguggcacacca

SEQ ID NO: 332042 - RNA, 22 nt, Human
gcugucucauacaaggcccugc

SEQ ID NO: 332043 - RNA, 22 nt, Human
ggggucccugcaccagcauguc

SEQ ID NO: 332044 - RNA, 22 nt, Human
uccucauucuuggugcaucaaa

SEQ ID NO: 332045 - RNA, 22 nt, Human
caggccugugacaccgugucug

SEQ ID NO: 332046 - RNA, 22 nt, Human
cuagcagaagcuccuugagggu

SEQ ID NO: 332047 - RNA, 22 nt, Human
uagauacauacauuuuaaaaug

SEQ ID NO: 332048 - RNA, 22 nt, Human
gccgugcgugcgcaggugcugu

SEQ ID NO: 332049 - RNA, 22 nt, Human
gccugugcuuaacugacgugag

SEQ ID NO: 332050 - RNA, 21 nt, Human
ucgaccugcugggcucgggcu

SEQ ID NO: 332051 - RNA, 22 nt, Human
ggccugcuucucugggcuuucu

SEQ ID NO: 332052 - RNA, 22 nt, Human
gggugcaaacccguucugcacc

SEQ ID NO: 332053 - RNA, 22 nt, Human
cucucuccuuagcugcagacca

SEQ ID NO: 332054 - RNA, 22 nt, Human
gucuguccacuuggaagcuccc

SEQ ID NO: 332055 - RNA, 22 nt, Human
ucacccagacugucugacucuu

SEQ ID NO: 332056 - RNA, 19 nt, Human
augagcuggcauuucaggu

SEQ ID NO: 332057 - RNA, 22 nt, Human
agaggagguccuuuucugaugu

SEQ ID NO: 332058 - RNA, 22 nt, Human
ugggccaggauuucaagacccu

SEQ ID NO: 332059 - RNA, 22 nt, Human
cgggcagugcccagcggggcag

SEQ ID NO: 332060 - RNA, 22 nt, Human
auguccagaguaaagcacauuc

SEQ ID NO: 332061 - RNA, 23 nt, Human
agguggagcugugcagccggggc

SEQ ID NO: 332062 - RNA, 22 nt, Human
cuggagcucuguguguuccuga

SEQ ID NO: 332063 - RNA, 22 nt, Human
ccugcagacacuuguccagcaa

SEQ ID NO: 332064 - RNA, 22 nt, Human
gagugggugaaugugcucauaa

SEQ ID NO: 332065 - RNA, 22 nt, Human
uuggaggacuaguuaagagacc

SEQ ID NO: 332066 - RNA, 22 nt, Human
cauuuugugcuagacacuaugg

SEQ ID NO: 332067 - RNA, 22 nt, Human
gggcccuggacguggcggcaga

SEQ ID NO: 332068 - RNA, 22 nt, Human
agagaugcuguggguagaggca

SEQ ID NO: 332069 - RNA, 22 nt, Human
agguggagaagagaugggcagu

SEQ ID NO: 332070 - RNA, 22 nt, Human
gcggggacagaaggcgguucuc

SEQ ID NO: 332071 - RNA, 22 nt, Human
uugcuggaagguggcuggaauc

SEQ ID NO: 332072 - RNA, 22 nt, Human
aguguccaacucagcuugucaa

SEQ ID NO: 332073 - RNA, 22 nt, Human
caggaggaaaguuccacucaac

SEQ ID NO: 332074 - RNA, 22 nt, Human
guccuguguaaguacuugcuca

SEQ ID NO: 332075 - RNA, 22 nt, Human
aagcagaaaaacugagcuccaa

SEQ ID NO: 332076 - RNA, 22 nt, Human
cagggagccccaauuccaugcc

SEQ ID NO: 332077 - RNA, 22 nt, Human
gcuggccugcgagggcaggcug

SEQ ID NO: 332078 - RNA, 22 nt, Human
ugcugugagaccauuuguugag

SEQ ID NO: 332079 - RNA, 22 nt, Human
gucccugauaagagccaucgau

SEQ ID NO: 332080 - RNA, 23 nt, Human
ucuggcugcuccuuucaaugcuc

SEQ ID NO: 332081 - RNA, 22 nt, Human
uaccugagaagaaacccguguu

SEQ ID NO: 332082 - RNA, 22 nt, Human
agcuggugugccaguuccaguu

SEQ ID NO: 332083 - RNA, 22 nt, Human
ugccauagcaaugguaagcuga

SEQ ID NO: 332084 - RNA, 22 nt, Human
aggccagggcacugcucuuuag

SEQ ID NO: 332085 - RNA, 22 nt, Human
uuguaacaguagcugucagcuc

SEQ ID NO: 332086 - RNA, 22 nt, Human
ugcgccugcgcaaagguuucug

SEQ ID NO: 332087 - RNA, 22 nt, Human
ugcuccaggcugcugaagaucu

SEQ ID NO: 332088 - RNA, 22 nt, Human
gcugcccauugcucucccacuc

SEQ ID NO: 332089 - RNA, 22 nt, Human
ggggucugggcuuagcuggaau

SEQ ID NO: 332090 - RNA, 22 nt, Human
ugccugugggugaugauuugau

SEQ ID NO: 332091 - RNA, 22 nt, Human
aagggugguguaggagaucaaa

SEQ ID NO: 332092 - RNA, 19 nt, Human
uccuggggaggggcauggc

SEQ ID NO: 332093 - RNA, 22 nt, Human
ggagggaguuucauuccugccc

SEQ ID NO: 332094 - RNA, 22 nt, Human
aagcaaaagguuacacuucugg

SEQ ID NO: 332095 - RNA, 22 nt, Human
ccccaacccugguuccguggcg

SEQ ID NO: 332096 - RNA, 22 nt, Human
gcugucccgaaccccugguaau

SEQ ID NO: 332097 - RNA, 20 nt, Human
uugagcagcagugcuguguc

SEQ ID NO: 332098 - RNA, 22 nt, Human
cuugaugaaugaccuggguggu

SEQ ID NO: 332099 - RNA, 22 nt, Human
ugggcagggagcuggaaccaca

SEQ ID NO: 332100 - RNA, 22 nt, Human
ucggagcgucacuggcuggagg

SEQ ID NO: 332101 - RNA, 22 nt, Human
ucagguccaagauggccaucca

SEQ ID NO: 332102 - RNA, 18 nt, Human
uggggggcuugucugaag

SEQ ID NO: 332103 - RNA, 22 nt, Human
gcccuguuuucuggguuccuug

SEQ ID NO: 332104 - RNA, 22 nt, Human
uucugauugcugaugaggccca

SEQ ID NO: 332105 - RNA, 22 nt, Human
ucucuccuccacaccgggugcu

SEQ ID NO: 332106 - RNA, 22 nt, Human
gccagguaugaauuacgcacga

SEQ ID NO: 332107 - RNA, 22 nt, Human
ccagcagcucccucaggguccg

SEQ ID NO: 332108 - RNA, 22 nt, Human
agguggaguuaagugugaacug

SEQ ID NO: 332109 - RNA, 22 nt, Human
aggcuuucgaugaacgcuugcu

SEQ ID NO: 332110 - RNA, 22 nt, Human
ugccuaggcuggaaugcagugg

SEQ ID NO: 332111 - RNA, 22 nt, Human
gccuggagcucggcugagggcg

SEQ ID NO: 332112 - RNA, 22 nt, Human
aaucuucaggguccuggggcuc

SEQ ID NO: 332113 - RNA, 22 nt, Human
auugcacaucugcacuacagcc

SEQ ID NO: 332114 - RNA, 22 nt, Human
ggccuugggauguggcugcagc

SEQ ID NO: 332115 - RNA, 22 nt, Human
augccccagugugugcuuccuu

SEQ ID NO: 332116 - RNA, 22 nt, Human
cgcggucucuuuaaggcggguc

SEQ ID NO: 332117 - RNA, 22 nt, Human
gugcuggggagauaggaagaga

SEQ ID NO: 332118 - RNA, 22 nt, Human
agccaccaccacugaaagguua

SEQ ID NO: 332119 - RNA, 22 nt, Human
aguacuuuuuguucaauugugc

SEQ ID NO: 332120 - RNA, 22 nt, Human
gcucccugguauugcugccacu

SEQ ID NO: 332121 - RNA, 22 nt, Human
ucaucuccauacggucucgcag

SEQ ID NO: 332122 - RNA, 22 nt, Human
auuucagcagcccauguuugga

SEQ ID NO: 332123 - RNA, 22 nt, Human
aucaugugacuagguuuggcca

SEQ ID NO: 332124 - RNA, 22 nt, Human
caggccgggcacugcgcuaggu

SEQ ID NO: 332125 - RNA, 21 nt, Human
cccgugccuucagcaguccug

SEQ ID NO: 332126 - RNA, 18 nt, Human
cugccuguugcugagagg

SEQ ID NO: 332127 - RNA, 22 nt, Human
ggugucagugaagguagaguuu

SEQ ID NO: 332128 - RNA, 22 nt, Human
cuucuccgacaaccgacgccgg

SEQ ID NO: 332129 - RNA, 22 nt, Human
uuuuguguugccauguuaagca

SEQ ID NO: 332130 - RNA, 22 nt, Human
cagcuccagcccaggcagcucc

SEQ ID NO: 332131 - RNA, 22 nt, Human
cagcagcucaggcuccuuccca

SEQ ID NO: 332132 - RNA, 22 nt, Human
ucuguggcaugguaucuggagg

SEQ ID NO: 332133 - RNA, 22 nt, Human
cagggcacaguuauggaggugg

SEQ ID NO: 332134 - RNA, 22 nt, Human
gagcagcaucuccggcuuaaag

SEQ ID NO: 332135 - RNA, 22 nt, Human
ggccgugcuccaaagucaucgu

SEQ ID NO: 332136 - RNA, 22 nt, Human
ggggucacacuguggugacugg

SEQ ID NO: 332137 - RNA, 22 nt, Human
cccuguccugcuaggcccuggu

SEQ ID NO: 332138 - RNA, 22 nt, Human
ugcauuugcaauggguacacaa

SEQ ID NO: 332139 - RNA, 22 nt, Human
agguggcagacuaacagaagga

SEQ ID NO: 332140 - RNA, 19 nt, Human
ccugcugaagugaugcagc

SEQ ID NO: 332141 - RNA, 22 nt, Human
cccaggucgucagcaguguggu

SEQ ID NO: 332142 - RNA, 22 nt, Human
gggcucuguuuagaccagagau

SEQ ID NO: 332143 - RNA, 22 nt, Human
cuggaagcgucggaggaagggc

SEQ ID NO: 332144 - RNA, 22 nt, Human
cugcgggcugucaggcgugcca

SEQ ID NO: 332145 - RNA, 22 nt, Human
cuggcuccucaggacugcggga

SEQ ID NO: 332146 - RNA, 22 nt, Human
cuuguauuaggaagaaugcuuu

SEQ ID NO: 332147 - RNA, 22 nt, Human
ugcuggcugggcugcuggagac

SEQ ID NO: 332148 - RNA, 22 nt, Human
cugagggccuucuaugcugagc

SEQ ID NO: 332149 - RNA, 21 nt, Human
ggcagcucagcagauggggac

SEQ ID NO: 332150 - RNA, 22 nt, Human
caucagucugaaagccagggag

SEQ ID NO: 332151 - RNA, 22 nt, Human
gccaggaccucagaugcagggc

SEQ ID NO: 332152 - RNA, 22 nt, Human
ccaggacaagccagagggacag

SEQ ID NO: 332153 - RNA, 22 nt, Human
ucaggggcuugaggugcauguc

SEQ ID NO: 332154 - RNA, 22 nt, Human
gaugcugauuuuacuguuuucu

SEQ ID NO: 332155 - RNA, 22 nt, Human
agcugccgaugcccagcugcau

SEQ ID NO: 332156 - RNA, 22 nt, Human
ucuccacaccagaaggagcuga

SEQ ID NO: 332157 - RNA, 22 nt, Human
gcagcucacagucuccgccauc

SEQ ID NO: 332158 - RNA, 22 nt, Human
cggcgcaggcagaccgcgggcu

SEQ ID NO: 332159 - RNA, 22 nt, Human
cccgaccucgcaaagcgcacuc

SEQ ID NO: 332160 - RNA, 22 nt, Human
gcugggagucgcgucuguggcc

SEQ ID NO: 332161 - RNA, 22 nt, Human
guccuggggauuauagaguguu

SEQ ID NO: 332162 - RNA, 19 nt, Human
agcucaggcccaucguccc

SEQ ID NO: 332163 - RNA, 22 nt, Human
caccugagcaacccugugcggg

SEQ ID NO: 332164 - RNA, 18 nt, Human
ucugagggugcgggagcu

SEQ ID NO: 332165 - RNA, 22 nt, Human
ucugcucagccgaucugcuccg

SEQ ID NO: 332166 - RNA, 22 nt, Human
acaugggcaucuaugaggcucu

SEQ ID NO: 332167 - RNA, 22 nt, Human
aaagcagaacugagagagcugg

SEQ ID NO: 332168 - RNA, 22 nt, Human
gcugggcugcgucggggaagcc

SEQ ID NO: 332169 - RNA, 22 nt, Human
agcacauucccaccuguacuuc

SEQ ID NO: 332170 - RNA, 22 nt, Human
uggcugcccccucccguggaca

SEQ ID NO: 332171 - RNA, 22 nt, Human
ccugaggcccuggcugugcuga

SEQ ID NO: 332172 - RNA, 22 nt, Human
gccaagaaugcgacagccguca

SEQ ID NO: 332173 - RNA, 22 nt, Human
guagagcagggagcaggaagcu

SEQ ID NO: 332174 - RNA, 22 nt, Human
caaaugaugcauggcuagugag

SEQ ID NO: 332175 - RNA, 22 nt, Human
ggcgcggugacucagccucgcu

SEQ ID NO: 332176 - RNA, 22 nt, Human
gcaguggccacauggaggagga

SEQ ID NO: 332177 - RNA, 20 nt, Human
uggcccagcacgacgaggac

SEQ ID NO: 332178 - RNA, 22 nt, Human
cuccguggcuguggacgcagcc

SEQ ID NO: 332179 - RNA, 20 nt, Human
ugcuggaggcgccggcgcuc

SEQ ID NO: 332180 - RNA, 22 nt, Human
gucugcacgugccagggagggg

SEQ ID NO: 332181 - RNA, 22 nt, Human
gguggcaccuuacccugcgcag

SEQ ID NO: 332182 - RNA, 22 nt, Human
uugcuucacuacuucuaggcuc

SEQ ID NO: 332183 - RNA, 22 nt, Human
acagagguuaggauggguugua

SEQ ID NO: 332184 - RNA, 22 nt, Human
cuucucggccguguggaugcgc

SEQ ID NO: 332185 - RNA, 22 nt, Human
augaacugcaguauaaacuugg

SEQ ID NO: 332186 - RNA, 22 nt, Human
cccccagcucugcugggucccg

SEQ ID NO: 332187 - RNA, 22 nt, Human
uccaagaagcuuacaaucuaau

SEQ ID NO: 332188 - RNA, 22 nt, Human
augcugccuccucuucagccgc

SEQ ID NO: 332189 - RNA, 20 nt, Human
ugugugaauuagggcauguu

SEQ ID NO: 332190 - RNA, 22 nt, Human
cucgagagauccucuugccacc

SEQ ID NO: 332191 - RNA, 22 nt, Human
aggagcggauguguccugccag

SEQ ID NO: 332192 - RNA, 22 nt, Human
aaccccgcucaggcugggugag

SEQ ID NO: 332193 - RNA, 22 nt, Human
uccuggcccuguggccugcagu

SEQ ID NO: 332194 - RNA, 22 nt, Human
gagccugagcaaugugauguuu

SEQ ID NO: 332195 - RNA, 22 nt, Human
ggcugcccucggggucgcaggc

SEQ ID NO: 332196 - RNA, 22 nt, Human
cuccagagagaaaggaggccgc

SEQ ID NO: 332197 - RNA, 22 nt, Human
cccaggaggcagaaguugcagu

SEQ ID NO: 332198 - RNA, 21 nt, Human
gugugucuaauguaguggaaa

SEQ ID NO: 332199 - RNA, 22 nt, Human
cuuccugcaacaccuguguugc

SEQ ID NO: 332200 - RNA, 20 nt, Human
gccaagaauaugcccgacuc

SEQ ID NO: 332201 - RNA, 22 nt, Human
cagggugacugcccuggccacu

SEQ ID NO: 332202 - RNA, 22 nt, Human
gccaggucgucuccauguccaa

SEQ ID NO: 332203 - RNA, 23 nt, Human
aaauugucguaagguggagaugu

SEQ ID NO: 332204 - RNA, 20 nt, Human
guggcagugguggcagcagu

SEQ ID NO: 332205 - RNA, 22 nt, Human
ggcucugcugguaagaugccuc

SEQ ID NO: 332206 - RNA, 22 nt, Human
augaaacucuagcuuucagcac

SEQ ID NO: 332207 - RNA, 22 nt, Human
auccugggaaguggccuccucc

SEQ ID NO: 332208 - RNA, 22 nt, Human
gacuuugguucagggcucagag

SEQ ID NO: 332209 - RNA, 22 nt, Human
uccaggaguccuggguggcccc

SEQ ID NO: 332210 - RNA, 22 nt, Human
gggacuggaguagaggccggug

SEQ ID NO: 332211 - RNA, 18 nt, Human
cccacggugcuguagggc

SEQ ID NO: 332212 - RNA, 22 nt, Human
gcugggucucucccugguccug

SEQ ID NO: 332213 - RNA, 22 nt, Human
uggcggugacggcggcgccugg

SEQ ID NO: 332214 - RNA, 22 nt, Human
cagacaggguccuguccgucac

SEQ ID NO: 332215 - RNA, 22 nt, Human
ugcuggccucggcgcugggccu

SEQ ID NO: 332216 - RNA, 22 nt, Human
cuguccagcgacuaggggaugg

SEQ ID NO: 332217 - RNA, 22 nt, Human
uccaggagggggagccgugccg

SEQ ID NO: 332218 - RNA, 22 nt, Human
ggaguucaaaucuuuuggaucu

SEQ ID NO: 332219 - RNA, 22 nt, Human
ggagcugugcugggugaucagg

SEQ ID NO: 332220 - RNA, 22 nt, Human
ccagagacaaggagcuggaguc

SEQ ID NO: 332221 - RNA, 22 nt, Human
ccucguccacaauccuugcaca

SEQ ID NO: 332222 - RNA, 22 nt, Human
ugcaagagcccaaacuauauac

SEQ ID NO: 332223 - RNA, 22 nt, Human
cgggcuccgggucuuugcaguc

SEQ ID NO: 332224 - RNA, 22 nt, Human
aggcuguagaucuagacaugua

SEQ ID NO: 332225 - RNA, 22 nt, Human
ucccuggcacaagaaggcuguc

SEQ ID NO: 332226 - RNA, 22 nt, Human
uuuauucucuaguuggucagau

SEQ ID NO: 332227 - RNA, 22 nt, Human
cccgggaggaggaaguugcagu

SEQ ID NO: 332228 - RNA, 22 nt, Human
agaaagcacccugcacuuucug

SEQ ID NO: 332229 - RNA, 22 nt, Human
gccagaggggcucgaaggcgcg

SEQ ID NO: 332230 - RNA, 22 nt, Human
uccguggggccuguggcuuccg

SEQ ID NO: 332231 - RNA, 23 nt, Human
uggcucuguggaucccucaggag

SEQ ID NO: 332232 - RNA, 22 nt, Human
cagggagcuggugccagccgac

SEQ ID NO: 332233 - RNA, 22 nt, Human
cccaccagaccugcaccggcac

SEQ ID NO: 332234 - RNA, 22 nt, Human
cucagcugucucaugggucugu

SEQ ID NO: 332235 - RNA, 22 nt, Human
cccagcugaacuugcauuccaa

SEQ ID NO: 332236 - RNA, 22 nt, Human
cauuucaaacaguuacagcugc

SEQ ID NO: 332237 - RNA, 22 nt, Human
cuccuuccugguuagcaccuua

SEQ ID NO: 332238 - RNA, 22 nt, Human
acccggaggcgggggaugcagu

SEQ ID NO: 332239 - RNA, 22 nt, Human
acccggagucggagguugcagu

SEQ ID NO: 332240 - RNA, 22 nt, Human
uggccccugaggagcgucagcc

SEQ ID NO: 332241 - RNA, 22 nt, Human
cuggccgcaguguggaguugug

SEQ ID NO: 332242 - RNA, 20 nt, Human
ggccugagcauggcuggcag

SEQ ID NO: 332243 - RNA, 22 nt, Human
augcaggaagagcccuggagcu

SEQ ID NO: 332244 - RNA, 22 nt, Human
uugcacgcuugcgguuccugcc

SEQ ID NO: 332245 - RNA, 22 nt, Human
gccacguagaagugccgcgaga

SEQ ID NO: 332246 - RNA, 22 nt, Human
ggcuguggucauuaggagguug

SEQ ID NO: 332247 - RNA, 22 nt, Human
ccucugcccuuuuccuguauca

SEQ ID NO: 332248 - RNA, 22 nt, Human
cagaugaggcaaccucauugcu

SEQ ID NO: 332249 - RNA, 22 nt, Human
cuccuucacgcaggcugccaug

SEQ ID NO: 332250 - RNA, 22 nt, Human
gagguuggagggcuggccugca

SEQ ID NO: 332251 - RNA, 22 nt, Human
gcuaugggaugugcuguggaug

SEQ ID NO: 332252 - RNA, 22 nt, Human
ccugcgggcugugcugaagccu

SEQ ID NO: 332253 - RNA, 20 nt, Human
cugggcagguguuugaucuc

SEQ ID NO: 332254 - RNA, 22 nt, Human
gcucguacaccagcguggaggu

SEQ ID NO: 332255 - RNA, 21 nt, Human
agagacugucacugcaguacc

SEQ ID NO: 332256 - RNA, 22 nt, Human
ucacauguguggcagugcaagu

SEQ ID NO: 332257 - RNA, 21 nt, Human
cccagaaguuccauggggggc

SEQ ID NO: 332258 - RNA, 21 nt, Human
agaaggcaaaagcagacaucu

SEQ ID NO: 332259 - RNA, 20 nt, Human
ccagguggugccuggagagg

SEQ ID NO: 332260 - RNA, 22 nt, Human
gcugccuggaauaacggcuggc

SEQ ID NO: 332261 - RNA, 22 nt, Human
gucacccguuugacuauccacc

SEQ ID NO: 332262 - RNA, 22 nt, Human
ucacaugcucaccuaagccaca

SEQ ID NO: 332263 - RNA, 22 nt, Human
gcugucugcugggucgcucagg

SEQ ID NO: 332264 - RNA, 22 nt, Human
caucucccacuuccuugggggu

SEQ ID NO: 332265 - RNA, 22 nt, Human
uaaagcaaugaaaguuuugcag

SEQ ID NO: 332266 - RNA, 22 nt, Human
cuucaugcugauauccucgaug

SEQ ID NO: 332267 - RNA, 22 nt, Human
cagucucuggugaguugacagu

SEQ ID NO: 332268 - RNA, 22 nt, Human
uuugagaagcauggcuguauuc

SEQ ID NO: 332269 - RNA, 22 nt, Human
ggagugggaacaaugacauggu

SEQ ID NO: 332270 - RNA, 22 nt, Human
cugcccugcagcuccacggacu

SEQ ID NO: 332271 - RNA, 22 nt, Human
gugcaggacagcacaucuccug

SEQ ID NO: 332272 - RNA, 17 nt, Human
ucugcagggggccgugu

SEQ ID NO: 332273 - RNA, 22 nt, Human
gagcagcaggccagguugcagg

SEQ ID NO: 332274 - RNA, 19 nt, Human
ugguggaggugcaccugac

SEQ ID NO: 332275 - RNA, 22 nt, Human
auccucagagaacgaacacaau

SEQ ID NO: 332276 - RNA, 22 nt, Human
agacacauuuucagcucugcca

SEQ ID NO: 332277 - RNA, 22 nt, Human
ggccuugguaaauuggcauuug

SEQ ID NO: 332278 - RNA, 22 nt, Human
ccacuuugagaagcugaugaaa

SEQ ID NO: 332279 - RNA, 18 nt, Human
ggccucagccuggccgga

SEQ ID NO: 332280 - RNA, 22 nt, Human
ugauuuacaguagugucuaaac

SEQ ID NO: 332281 - RNA, 22 nt, Human
caguauuucauucagaauuguu

SEQ ID NO: 332282 - RNA, 19 nt, Human
ugcagcuguaugagcuuaa

SEQ ID NO: 332283 - RNA, 22 nt, Human
gaacugcauugugguauauguu

SEQ ID NO: 332284 - RNA, 22 nt, Human
ccauggccaggaaagccaaggu

SEQ ID NO: 332285 - RNA, 22 nt, Human
gcagggcagggcaagaacuggg

SEQ ID NO: 332286 - RNA, 19 nt, Human
uggcucugucgaaggcaca

SEQ ID NO: 332287 - RNA, 22 nt, Human
cuguggcuaggaagcuguggga

SEQ ID NO: 332288 - RNA, 22 nt, Human
uggcacguuggauugggaguuc

SEQ ID NO: 332289 - RNA, 22 nt, Human
cgcugccuucaucccacgccua

SEQ ID NO: 332290 - RNA, 22 nt, Human
ugucauuggugaucugaugccu

SEQ ID NO: 332291 - RNA, 22 nt, Human
aaauugcauuuuaaagguagau

SEQ ID NO: 332292 - RNA, 22 nt, Human
auugagaaaauucgagcaaguu

SEQ ID NO: 332293 - RNA, 22 nt, Human
aaaauuaagugucugggaagcc

SEQ ID NO: 332294 - RNA, 20 nt, Human
ggccggggagcucuccaggg

SEQ ID NO: 332295 - RNA, 22 nt, Human
ccaggugugcucugcaguggau

SEQ ID NO: 332296 - RNA, 17 nt, Human
uccuggccuggugugug

SEQ ID NO: 332297 - RNA, 22 nt, Human
uccaggaggacugagggggcug

SEQ ID NO: 332298 - RNA, 22 nt, Human
uagcugucagcaaucaaguggu

SEQ ID NO: 332299 - RNA, 22 nt, Human
gcaggccuccccugcuggagcu

SEQ ID NO: 332300 - RNA, 22 nt, Human
gauccacaggaaccaaaacgca

SEQ ID NO: 332301 - RNA, 22 nt, Human
gggagcugaaggagccggcggg

SEQ ID NO: 332302 - RNA, 22 nt, Human
ucaggccccaucccagacuuau

SEQ ID NO: 332303 - RNA, 22 nt, Human
agcugggcuggagcuccaagcg

SEQ ID NO: 332304 - RNA, 22 nt, Human
uaaaacuagugguugggacuaa

SEQ ID NO: 332305 - RNA, 22 nt, Human
uccagcucugcugugcgccggu

SEQ ID NO: 332306 - RNA, 22 nt, Human
agcagcaggugaccucgaugcc

SEQ ID NO: 332307 - RNA, 22 nt, Human
uguaagcuucaaauaucuguga

SEQ ID NO: 332308 - RNA, 22 nt, Human
cugcugucuuuauuucacugcu

SEQ ID NO: 332309 - RNA, 18 nt, Human
agcugaggggacugaaga

SEQ ID NO: 332310 - RNA, 22 nt, Human
auuuugacauugcggcauugcu

SEQ ID NO: 332311 - RNA, 22 nt, Human
cagagcagcagagcuuccaugg

SEQ ID NO: 332312 - RNA, 23 nt, Human
ccacuggagaaaguggcaggugg

SEQ ID NO: 332313 - RNA, 22 nt, Human
cugcggcuggggacagcuguug

SEQ ID NO: 332314 - RNA, 22 nt, Human
uuggaggaagcucaugggggau

SEQ ID NO: 332315 - RNA, 22 nt, Human
ucugcgcccugucgccugcucc

SEQ ID NO: 332316 - RNA, 22 nt, Human
ugcgcaugcguggcucuccggc

SEQ ID NO: 332317 - RNA, 20 nt, Human
ucugugugccaucaccuaac

SEQ ID NO: 332318 - RNA, 17 nt, Human
ggccugcaccuccugcu

SEQ ID NO: 332319 - RNA, 21 nt, Human
gccugggaagagaaagguaag

SEQ ID NO: 332320 - RNA, 22 nt, Human
uuuucuaacaucuaguaauuug

SEQ ID NO: 332321 - RNA, 22 nt, Human
uccagcagguccgagacaaguu

SEQ ID NO: 332322 - RNA, 22 nt, Human
uccuucagaggacggcagccag

SEQ ID NO: 332323 - RNA, 22 nt, Human
ugggggagccuucacaguagcu

SEQ ID NO: 332324 - RNA, 22 nt, Human
ucuguggcuuucguguaagaug

SEQ ID NO: 332325 - RNA, 22 nt, Human
ggguggaaaguauuuggggacc

SEQ ID NO: 332326 - RNA, 22 nt, Human
caaagcccagaggccucacuuu

SEQ ID NO: 332327 - RNA, 22 nt, Human
caggccagcagggccuccgugg

SEQ ID NO: 332328 - RNA, 22 nt, Human
gucugcugacagagcauggacc

SEQ ID NO: 332329 - RNA, 22 nt, Human
acguagcacugagagaugcagg

SEQ ID NO: 332330 - RNA, 22 nt, Human
cuccagcucgcgagcucugcuc

SEQ ID NO: 332331 - RNA, 22 nt, Human
uuuggauugcuuggaugcuucg

SEQ ID NO: 332332 - RNA, 22 nt, Human
uuuuuggguccaggcuguaucu

SEQ ID NO: 332333 - RNA, 22 nt, Human
gcuggguggaucggaggcucug

SEQ ID NO: 332334 - RNA, 22 nt, Human
uugggauuacagguguaagcca

SEQ ID NO: 332335 - RNA, 22 nt, Human
auggguggccccgugugcaguc

SEQ ID NO: 332336 - RNA, 22 nt, Human
gcggagaggcagagacuccgcg

SEQ ID NO: 332337 - RNA, 22 nt, Human
gcugcagggagcuggaaggcuc

SEQ ID NO: 332338 - RNA, 21 nt, Human
agaugaggauacugaggccua

SEQ ID NO: 332339 - RNA, 22 nt, Human
agcuggugauguggucccucac

SEQ ID NO: 332340 - RNA, 22 nt, Human
ccagcaggagacuagcaacaua

SEQ ID NO: 332341 - RNA, 22 nt, Human
ugguccugagcaccagccugac

SEQ ID NO: 332342 - RNA, 22 nt, Human
gcacugggggcagcagugaggg

SEQ ID NO: 332343 - RNA, 22 nt, Human
cagcugccuguauuguccucau

SEQ ID NO: 332344 - RNA, 21 nt, Human
uuggccgugcagaugaacagc

SEQ ID NO: 332345 - RNA, 22 nt, Human
gagcugcauagcugggauccuc

SEQ ID NO: 332346 - RNA, 22 nt, Human
cuggagcucagcccagguucca

SEQ ID NO: 332347 - RNA, 22 nt, Human
uugcugccuuuguacucugaug

SEQ ID NO: 332348 - RNA, 22 nt, Human
gagggugguggcuuaaggugcu

SEQ ID NO: 332349 - RNA, 22 nt, Human
uggccuugcccagcgccuaggu

SEQ ID NO: 332350 - RNA, 22 nt, Human
ccaccacugaggcacaggagcc

SEQ ID NO: 332351 - RNA, 22 nt, Human
uggcugaggcacagcugccgcc

SEQ ID NO: 332352 - RNA, 17 nt, Human
gcuccagaauucuaguc

SEQ ID NO: 332353 - RNA, 22 nt, Human
uccacagggaugccugcggcuu

SEQ ID NO: 332354 - RNA, 22 nt, Human
acgggcugggacggggaagcuc

SEQ ID NO: 332355 - RNA, 22 nt, Human
ugccgcugucgccaccauggcu

SEQ ID NO: 332356 - RNA, 21 nt, Human
gcuccuggugcugcguggcgc

SEQ ID NO: 332357 - RNA, 22 nt, Human
agccccaggcccggacgccucu

SEQ ID NO: 332358 - RNA, 22 nt, Human
accagaagcuggagcacaagga

SEQ ID NO: 332359 - RNA, 22 nt, Human
ggcagaggaagcuggaaguggg

SEQ ID NO: 332360 - RNA, 22 nt, Human
ugcugcuuguuuuguaaauaaa

SEQ ID NO: 332361 - RNA, 22 nt, Human
gcgagucgccgcugcagcccua

SEQ ID NO: 332362 - RNA, 22 nt, Human
agcaaggcagcuuucacugcuu

SEQ ID NO: 332363 - RNA, 22 nt, Human
gggacagcuguagugcuuggcu

SEQ ID NO: 332364 - RNA, 22 nt, Human
ccagcagccaccuucucgaaau

SEQ ID NO: 332365 - RNA, 22 nt, Human
auggugguagaagcacuaugug

SEQ ID NO: 332366 - RNA, 18 nt, Human
gagaggagccagaauuuu

SEQ ID NO: 332367 - RNA, 22 nt, Human
cuccagcagaaagggcgagugg

SEQ ID NO: 332368 - RNA, 22 nt, Human
uccuccuuuccccgcuggagcc

SEQ ID NO: 332369 - RNA, 22 nt, Human
cuggagggcugcagcgaggcug

SEQ ID NO: 332370 - RNA, 22 nt, Human
uccagcugugcuccaggaggug

SEQ ID NO: 332371 - RNA, 22 nt, Human
gcggggccauguccaacggccu

SEQ ID NO: 332372 - RNA, 22 nt, Human
ccagguggacggcgaguacagg

SEQ ID NO: 332373 - RNA, 20 nt, Human
cugcuccacccggcucucag

SEQ ID NO: 332374 - RNA, 22 nt, Human
gaggagaggcuggacgcgguga

SEQ ID NO: 332375 - RNA, 22 nt, Human
gcggcccgagcaggacgggugg

SEQ ID NO: 332376 - RNA, 22 nt, Human
uaaaaucaugacagauugacau

SEQ ID NO: 332377 - RNA, 22 nt, Human
aguuauugagugcagagcaggg

SEQ ID NO: 332378 - RNA, 22 nt, Human
ggccauggcgggagccggcguc

SEQ ID NO: 332379 - RNA, 22 nt, Human
cugggaggcagucucucuagaa

SEQ ID NO: 332380 - RNA, 22 nt, Human
agccagggacgcugcaggcuac

SEQ ID NO: 332381 - RNA, 22 nt, Human
ugguggggccagacuucagcuc

SEQ ID NO: 332382 - RNA, 22 nt, Human
agucagcuugucucuaggguug

SEQ ID NO: 332383 - RNA, 22 nt, Human
guggcaggagggcaucacuugg

SEQ ID NO: 332384 - RNA, 20 nt, Human
gggugugggcccggccaggc

SEQ ID NO: 332385 - RNA, 22 nt, Human
ccaugcccuugucaucuccagg

SEQ ID NO: 332386 - RNA, 22 nt, Human
ggcuggaaggcccuuuguugau

SEQ ID NO: 332387 - RNA, 22 nt, Human
ggaggaggggugacugaaugcu

SEQ ID NO: 332388 - RNA, 22 nt, Human
uguuugcucugacuaucuugcg

SEQ ID NO: 332389 - RNA, 22 nt, Human
ggagaggguagggguccugccc

SEQ ID NO: 332390 - RNA, 22 nt, Human
cuucauuucaggcugaagaaua

SEQ ID NO: 332391 - RNA, 22 nt, Human
cagaggauauaugguuuguaug

SEQ ID NO: 332392 - RNA, 22 nt, Human
acucgcggcggacggcggccag

SEQ ID NO: 332393 - RNA, 22 nt, Human
cggagcagagccacucgggccg

SEQ ID NO: 332394 - RNA, 22 nt, Human
gggagggucugagagcugcacc

SEQ ID NO: 332395 - RNA, 22 nt, Human
aagccuucaguccguugcagag

SEQ ID NO: 332396 - RNA, 22 nt, Human
acgugcuggagaagagcucgcc

SEQ ID NO: 332397 - RNA, 22 nt, Human
accaggaguuuugaccaggggc

SEQ ID NO: 332398 - RNA, 23 nt, Human
ugggcagcuucugcaugcccacc

SEQ ID NO: 332399 - RNA, 22 nt, Human
ccccagcagacucagggcaggu

SEQ ID NO: 332400 - RNA, 22 nt, Human
uaguauuuccuguaagcuauag

SEQ ID NO: 332401 - RNA, 22 nt, Human
ugggcugcuucuauuggugguc

SEQ ID NO: 332402 - RNA, 22 nt, Human
ggcggcacgcaggcugcugucg

SEQ ID NO: 332403 - RNA, 22 nt, Human
ucugcuguuuacugugugauau

SEQ ID NO: 332404 - RNA, 22 nt, Human
agccagcuaccggggcuccugg

SEQ ID NO: 332405 - RNA, 22 nt, Human
gcgguauuugugugggugucga

SEQ ID NO: 332406 - RNA, 22 nt, Human
gugguuguuuccagguuugaaa

SEQ ID NO: 332407 - RNA, 15 nt, Human
uggugguguugagac

SEQ ID NO: 332408 - RNA, 22 nt, Human
acgucuucguuggcagagauuu

SEQ ID NO: 332409 - RNA, 22 nt, Human
ggcucacgcaauuaucccggcc

SEQ ID NO: 332410 - RNA, 22 nt, Human
uuccuggcagaggccccgacag

SEQ ID NO: 332411 - RNA, 22 nt, Human
uguaccgccuugugggguuggg

SEQ ID NO: 332412 - RNA, 22 nt, Human
ugaaguuguuaagguugccauu

SEQ ID NO: 332413 - RNA, 22 nt, Human
ccagcuggaacggcagcccagc

SEQ ID NO: 332414 - RNA, 22 nt, Human
ggcaguggugggaggcucgcuc

SEQ ID NO: 332415 - RNA, 22 nt, Human
ccggcgucucuuccacuuccua

SEQ ID NO: 332416 - RNA, 17 nt, Human
gugcuggccuggggcuc

SEQ ID NO: 332417 - RNA, 18 nt, Human
uggcagccagcugcuccu

SEQ ID NO: 332418 - RNA, 22 nt, Human
uguguggcaagcuguaugcuag

SEQ ID NO: 332419 - RNA, 19 nt, Human
agcaguggagccaugccug

SEQ ID NO: 332420 - RNA, 22 nt, Human
ccaguucuuucugugugcaaca

SEQ ID NO: 332421 - RNA, 22 nt, Human
agguagcuggugcugggcuccu

SEQ ID NO: 332422 - RNA, 22 nt, Human
gugugcgccgacacagccaggu

SEQ ID NO: 332423 - RNA, 20 nt, Human
ccacccuguccggggcggag

SEQ ID NO: 332424 - RNA, 22 nt, Human
ugcugcucuucaccauggccuc

SEQ ID NO: 332425 - RNA, 22 nt, Human
uccagcaguccaugugagacac

SEQ ID NO: 332426 - RNA, 22 nt, Human
uucugggcacacaggcccuggu

SEQ ID NO: 332427 - RNA, 22 nt, Human
ucugcccaggaggucccauggg

SEQ ID NO: 332428 - RNA, 21 nt, Human
agaugcagugacccacugggg

SEQ ID NO: 332429 - RNA, 22 nt, Human
augauccagauuuugggcaguu

SEQ ID NO: 332430 - RNA, 22 nt, Human
ugagcaccaggcaccacagcuc

SEQ ID NO: 332431 - RNA, 22 nt, Human
aaggcccacagaacugucucca

SEQ ID NO: 332432 - RNA, 22 nt, Human
gccccucuccuugugcaccugc

SEQ ID NO: 332433 - RNA, 22 nt, Human
gcggcccggguccccagcagca

SEQ ID NO: 332434 - RNA, 22 nt, Human
ucuccucuauuucuguauguau

SEQ ID NO: 332435 - RNA, 22 nt, Human
cugagcugguucucuugugaaa

SEQ ID NO: 332436 - RNA, 17 nt, Human
aguuggcagccguugcu

SEQ ID NO: 332437 - RNA, 22 nt, Human
ugcugcucaagcugcagcaaaa

SEQ ID NO: 332438 - RNA, 22 nt, Human
augcugagugagugaaacccag

SEQ ID NO: 332439 - RNA, 22 nt, Human
cugcaucaguggauaugauggu

SEQ ID NO: 332440 - RNA, 22 nt, Human
ccugcgcgucugggucugucuc

SEQ ID NO: 332441 - RNA, 22 nt, Human
ucugagggauuugucccuuauc

SEQ ID NO: 332442 - RNA, 22 nt, Human
uaucuguauucugacagucacu

SEQ ID NO: 332443 - RNA, 22 nt, Human
guucucugccggcaccuacccg

SEQ ID NO: 332444 - RNA, 22 nt, Human
ugcugcgggacccacugugggc

SEQ ID NO: 332445 - RNA, 22 nt, Human
gcacugggagucuguggggguu

SEQ ID NO: 332446 - RNA, 22 nt, Human
agcggcgccgagcuuggccagg

SEQ ID NO: 332447 - RNA, 22 nt, Human
ccagcugcgggcaucgagaguu

SEQ ID NO: 332448 - RNA, 22 nt, Human
cugagggagcugcuggccuugg

SEQ ID NO: 332449 - RNA, 22 nt, Human
uugcuggaguagaaaacuuaac

SEQ ID NO: 332450 - RNA, 23 nt, Human
agcccagcagagaaccuaggucc

SEQ ID NO: 332451 - RNA, 22 nt, Human
gcuucugcagagccguccugag

SEQ ID NO: 332452 - RNA, 22 nt, Human
gcagaagcccggucagcgcacg

SEQ ID NO: 332453 - RNA, 22 nt, Human
ggagguggagcuggaaguucca

SEQ ID NO: 332454 - RNA, 22 nt, Human
gcucaugggcccagagcagccc

SEQ ID NO: 332455 - RNA, 22 nt, Human
guggcauugccuucugcaggaa

SEQ ID NO: 332456 - RNA, 22 nt, Human
cagcugccuaugaccuagccuc

SEQ ID NO: 332457 - RNA, 22 nt, Human
gccaugaacucgggcauggaga

SEQ ID NO: 332458 - RNA, 22 nt, Human
cucagcucauuguggauccggu

SEQ ID NO: 332459 - RNA, 22 nt, Human
gcaggggcugagcaccagcggg

SEQ ID NO: 332460 - RNA, 22 nt, Human
agccacccuaccagcccugaaa

SEQ ID NO: 332461 - RNA, 22 nt, Human
ucuggcccaucuucugccacca

SEQ ID NO: 332462 - RNA, 22 nt, Human
ugguccagacuuugaccucuca

SEQ ID NO: 332463 - RNA, 22 nt, Human
gauggugcaggugaagugcugg

SEQ ID NO: 332464 - RNA, 22 nt, Human
gugcaggugguuggcccagccg

SEQ ID NO: 332465 - RNA, 22 nt, Human
cugagcugcucccgcugcagcg

SEQ ID NO: 332466 - RNA, 22 nt, Human
ugagcucaagcaauucacccgc

SEQ ID NO: 332467 - RNA, 22 nt, Human
uugaacaguuuugucagguuca

SEQ ID NO: 332468 - RNA, 22 nt, Human
aggccugggacgggagccguga

SEQ ID NO: 332469 - RNA, 22 nt, Human
gggucugcuccaccugcagccc

SEQ ID NO: 332470 - RNA, 22 nt, Human
ugcagcugccuagggcuggcuu

SEQ ID NO: 332471 - RNA, 18 nt, Human
gguccugggccuggcuca

SEQ ID NO: 332472 - RNA, 22 nt, Human
ccuaggccgcccggugcguggg

SEQ ID NO: 332473 - RNA, 22 nt, Human
cuggaaggagcccgggcggauc

SEQ ID NO: 332474 - RNA, 21 nt, Human
gggcuggauauuggaaagagg

SEQ ID NO: 332475 - RNA, 22 nt, Human
ggcaguggcuccucucuacucc

SEQ ID NO: 332476 - RNA, 22 nt, Human
uugaguuuccugacagcgaagg

SEQ ID NO: 332477 - RNA, 22 nt, Human
augcccugggagugcuguacca

SEQ ID NO: 332478 - RNA, 23 nt, Human
uggcucugagcuuccugguggcc

SEQ ID NO: 332479 - RNA, 22 nt, Human
gaggcaaagcauguggcucagg

SEQ ID NO: 332480 - RNA, 22 nt, Human
uggggcuccuccuggcaggagg

SEQ ID NO: 332481 - RNA, 22 nt, Human
aggcggguuuaggacaaugcuu

SEQ ID NO: 332482 - RNA, 22 nt, Human
gggcugagggguaucucauggg

SEQ ID NO: 332483 - RNA, 22 nt, Human
gggcucaucaagccucuccgcc

SEQ ID NO: 332484 - RNA, 22 nt, Human
ccuggagacccacuucugccaa

SEQ ID NO: 332485 - RNA, 22 nt, Human
acagcaucccugaagauaacca

SEQ ID NO: 332486 - RNA, 22 nt, Human
uugaugagaccauugccgcguc

SEQ ID NO: 332487 - RNA, 22 nt, Human
uugcaggucuggggguccuggu

SEQ ID NO: 332488 - RNA, 22 nt, Human
cagugcagccaaggacaggcac

SEQ ID NO: 332489 - RNA, 22 nt, Human
gggcggggcuuccguccuccac

SEQ ID NO: 332490 - RNA, 22 nt, Human
uggaucugcucuaugaacugcu

SEQ ID NO: 332491 - RNA, 22 nt, Human
ucucgugcaggccuugcucgga

SEQ ID NO: 332492 - RNA, 22 nt, Human
gagaugugucagguccuggggg

SEQ ID NO: 332493 - RNA, 22 nt, Human
ugccaggcugcccuccagucug

SEQ ID NO: 332494 - RNA, 22 nt, Human
cggggccuagucuaccucggca

SEQ ID NO: 332495 - RNA, 20 nt, Human
ucagugggaaagugagagug

SEQ ID NO: 332496 - RNA, 22 nt, Human
uuguugcugcucaaccucuaua

SEQ ID NO: 332497 - RNA, 22 nt, Human
ccagcagcgauagggugagugc

SEQ ID NO: 332498 - RNA, 22 nt, Human
uuucugugauaggcugcgacgc

SEQ ID NO: 332499 - RNA, 22 nt, Human
ucugcuggaaaaccagggaauu

SEQ ID NO: 332500 - RNA, 22 nt, Human
cugggcuguuuguucuggucuc

SEQ ID NO: 332501 - RNA, 22 nt, Human
gcagauggauguggacggcgcc

SEQ ID NO: 332502 - RNA, 22 nt, Human
agcaccaggucgcuggcacgcu

SEQ ID NO: 332503 - RNA, 22 nt, Human
gugcugccuccauauccgucag

SEQ ID NO: 332504 - RNA, 22 nt, Human
ugccuguggaaaggcuggugcu

SEQ ID NO: 332505 - RNA, 22 nt, Human
ccuggguccaauucuggcuugu

SEQ ID NO: 332506 - RNA, 22 nt, Human
gucuggagccacugcugcugcu

SEQ ID NO: 332507 - RNA, 22 nt, Human
aaauugcaaaaguacuuuuagg

SEQ ID NO: 332508 - RNA, 19 nt, Human
cuccacagggauugugauu

SEQ ID NO: 332509 - RNA, 21 nt, Human
gcaggguuugugcugugaguu

SEQ ID NO: 332510 - RNA, 22 nt, Human
gugggggcaggcagugcuagga

SEQ ID NO: 332511 - RNA, 22 nt, Human
uccugcagccauuagaggucaa

SEQ ID NO: 332512 - RNA, 22 nt, Human
uguucauucugugaccugguuc

SEQ ID NO: 332513 - RNA, 22 nt, Human
cuggccagccucccagguaccc

SEQ ID NO: 332514 - RNA, 22 nt, Human
gauugcugccagcguguccgug

SEQ ID NO: 332515 - RNA, 22 nt, Human
caauuaccaguaauugagguuu

SEQ ID NO: 332516 - RNA, 22 nt, Human
ggagaguggauuccagcuguau

SEQ ID NO: 332517 - RNA, 22 nt, Human
cugcuguguggauucaauggcu

SEQ ID NO: 332518 - RNA, 22 nt, Human
ggagaugccuuguuucaggaac

SEQ ID NO: 332519 - RNA, 22 nt, Human
aggcugcugccuuggagagugu

SEQ ID NO: 332520 - RNA, 19 nt, Human
uccugcccaccagccaggg

SEQ ID NO: 332521 - RNA, 22 nt, Human
gagcuccugaaacguuccugcc

SEQ ID NO: 332522 - RNA, 22 nt, Human
gcuuccuucuaccacaucaugc

SEQ ID NO: 332523 - RNA, 22 nt, Human
gacggagcugguugcugcggcu

SEQ ID NO: 332524 - RNA, 22 nt, Human
gcagcucucuggccugcccugg

SEQ ID NO: 332525 - RNA, 22 nt, Human
ucaggaugagucaucaagcugc

SEQ ID NO: 332526 - RNA, 22 nt, Human
ucccagugggaagcagcacgcu

SEQ ID NO: 332527 - RNA, 22 nt, Human
ucugccaucaagaugcucuggc

SEQ ID NO: 332528 - RNA, 22 nt, Human
gcccagcugcacccuggugggu

SEQ ID NO: 332529 - RNA, 22 nt, Human
uggguguguccauauuuugacu

SEQ ID NO: 332530 - RNA, 22 nt, Human
uauuuguuucuaguggcagcaa

SEQ ID NO: 332531 - RNA, 20 nt, Human
cgggacacucaagcucuggg

SEQ ID NO: 332532 - RNA, 22 nt, Human
gcugcuccgcagagugugugug

SEQ ID NO: 332533 - RNA, 17 nt, Human
gccuggcccagccuggc

SEQ ID NO: 332534 - RNA, 22 nt, Human
gcggggggcaggcaguacguug

SEQ ID NO: 332535 - RNA, 22 nt, Human
uggcccugccgccacgacgucu

SEQ ID NO: 332536 - RNA, 22 nt, Human
uggcuggcuguccagcugggca

SEQ ID NO: 332537 - RNA, 22 nt, Human
cuagcagcauucuucuaguuag

SEQ ID NO: 332538 - RNA, 22 nt, Human
auggauggaacucugcuguggu

SEQ ID NO: 332539 - RNA, 22 nt, Human
ucccgggcaggucgagcgagcc

SEQ ID NO: 332540 - RNA, 23 nt, Human
guguggccccagggccuccucgc

SEQ ID NO: 332541 - RNA, 22 nt, Human
acugagggacucccaccuggca

SEQ ID NO: 332542 - RNA, 22 nt, Human
cauagacauugauagguuauau

SEQ ID NO: 332543 - RNA, 22 nt, Human
uggcuggggccugaauccugca

SEQ ID NO: 332544 - RNA, 20 nt, Human
cagagccaggguuuuguuuu

SEQ ID NO: 332545 - RNA, 19 nt, Human
gggugaggaagagcguugc

SEQ ID NO: 332546 - RNA, 22 nt, Human
ccugguccccaucggcccagcg

SEQ ID NO: 332547 - RNA, 22 nt, Human
uucuccucagcaaggcagcuuu

SEQ ID NO: 332548 - RNA, 21 nt, Human
acauguccccuaugcuuaagg

SEQ ID NO: 332549 - RNA, 22 nt, Human
gcugaagagagaugcguccagc

SEQ ID NO: 332550 - RNA, 22 nt, Human
caugggcucuucuggacugcac

SEQ ID NO: 332551 - RNA, 22 nt, Human
acaaagugaaaagcaucgaauu

SEQ ID NO: 332552 - RNA, 22 nt, Human
caguauuuaggauuaggagaga

SEQ ID NO: 332553 - RNA, 22 nt, Human
gaggugaguggggucuccaggg

SEQ ID NO: 332554 - RNA, 22 nt, Human
aguccagggcuuagucagcggg

SEQ ID NO: 332555 - RNA, 22 nt, Human
gggagcuggagcuggaagacuc

SEQ ID NO: 332556 - RNA, 17 nt, Human
ucugccaguuuuagaau

SEQ ID NO: 332557 - RNA, 22 nt, Human
ggcuuucugucugcgucugugu

SEQ ID NO: 332558 - RNA, 22 nt, Human
gagguggcugcuugcugggaaa

SEQ ID NO: 332559 - RNA, 22 nt, Human
acaggcgcacaugagggccgug

SEQ ID NO: 332560 - RNA, 22 nt, Human
gcaggccugucuugcucgcccu

SEQ ID NO: 332561 - RNA, 22 nt, Human
gguuccaggcauggcaggaugu

SEQ ID NO: 332562 - RNA, 22 nt, Human
uuucuuggucuucccgaccugg

SEQ ID NO: 332563 - RNA, 22 nt, Human
aggccagaacagcucugcacca

SEQ ID NO: 332564 - RNA, 22 nt, Human
cgugcggccucggggcccggcu

SEQ ID NO: 332565 - RNA, 22 nt, Human
uguccuguccuuccuggaaguc

SEQ ID NO: 332566 - RNA, 22 nt, Human
ggcgcucaguguugccccagag

SEQ ID NO: 332567 - RNA, 22 nt, Human
aggagccauugcaggauggcag

SEQ ID NO: 332568 - RNA, 22 nt, Human
cagugcugcaggcgccugcggu

SEQ ID NO: 332569 - RNA, 22 nt, Human
cgcgcugcagacagcggaggcc

SEQ ID NO: 332570 - RNA, 19 nt, Human
cccagaggaaugccuggaa

SEQ ID NO: 332571 - RNA, 22 nt, Human
augguuuuguccucuuugguuc

SEQ ID NO: 332572 - RNA, 22 nt, Human
ucccacagcuucgugcuucccc

SEQ ID NO: 332573 - RNA, 22 nt, Human
aggacagcagugcuggcacuug

SEQ ID NO: 332574 - RNA, 22 nt, Human
ccagcuugcuccucugcaaugg

SEQ ID NO: 332575 - RNA, 22 nt, Human
caggugggagccacagcguaca

SEQ ID NO: 332576 - RNA, 22 nt, Human
cccaggaguaagugacauuguu

SEQ ID NO: 332577 - RNA, 22 nt, Human
cauggccagauucuuucuucuc

SEQ ID NO: 332578 - RNA, 22 nt, Human
acuguagucuaaauauagucuu

SEQ ID NO: 332579 - RNA, 22 nt, Human
cugggaggcggagguuguagug

SEQ ID NO: 332580 - RNA, 22 nt, Human
gugcuuccuguauugauuccau

SEQ ID NO: 332581 - RNA, 22 nt, Human
uggagugcaguugggaggacac

SEQ ID NO: 332582 - RNA, 22 nt, Human
cucuccaggcgagguccuacug

SEQ ID NO: 332583 - RNA, 22 nt, Human
ccuugcagcauauagagucccu

SEQ ID NO: 332584 - RNA, 20 nt, Human
gcucagggccugggucugga

SEQ ID NO: 332585 - RNA, 22 nt, Human
cuccaggacugaggacagagcu

SEQ ID NO: 332586 - RNA, 22 nt, Human
uguucugcaaugcugccuccuu

SEQ ID NO: 332587 - RNA, 17 nt, Human
ggugaguguccaggugg

SEQ ID NO: 332588 - RNA, 22 nt, Human
guggcauuugggagaugcgugg

SEQ ID NO: 332589 - RNA, 22 nt, Human
gugccuccaggcucgacuaguc

SEQ ID NO: 332590 - RNA, 21 nt, Human
uggcaggcagcuggaagcuug

SEQ ID NO: 332591 - RNA, 22 nt, Human
ggguucagugaugccuucagga

SEQ ID NO: 332592 - RNA, 22 nt, Human
ggggagaguauuuuauucaagu

SEQ ID NO: 332593 - RNA, 22 nt, Human
gggaggaaggcuugggugagua

SEQ ID NO: 332594 - RNA, 23 nt, Human
ugaaagcaaugggucuauaguau

SEQ ID NO: 332595 - RNA, 22 nt, Human
cuggagcuggcccaggcuggcc

SEQ ID NO: 332596 - RNA, 22 nt, Human
cuucacugcagucauggcucug

SEQ ID NO: 332597 - RNA, 22 nt, Human
gucagcaggguccccuugagug

SEQ ID NO: 332598 - RNA, 23 nt, Human
ggucccaguggagaggccucacc

SEQ ID NO: 332599 - RNA, 22 nt, Human
cacuguugagcaauguacagug

SEQ ID NO: 332600 - RNA, 22 nt, Human
aaugaaacuauauuuagagagg

SEQ ID NO: 332601 - RNA, 18 nt, Human
uccaccgcgugcaccucu

SEQ ID NO: 332602 - RNA, 22 nt, Human
auuccucagcaggccuuuuguu

SEQ ID NO: 332603 - RNA, 17 nt, Human
gcaggcacugcugccug

SEQ ID NO: 332604 - RNA, 22 nt, Human
gagccucguggcggccacugcg

SEQ ID NO: 332605 - RNA, 22 nt, Human
cagaggccccauuggcugugcg

SEQ ID NO: 332606 - RNA, 22 nt, Human
gccaccagccccaugcgcugug

SEQ ID NO: 332607 - RNA, 23 nt, Human
aggcugcagaagaauagggucau

SEQ ID NO: 332608 - RNA, 22 nt, Human
cggucaggugcagcguuggcac

SEQ ID NO: 332609 - RNA, 22 nt, Human
cugagcagaagggugcacgugc

SEQ ID NO: 332610 - RNA, 22 nt, Human
ugcccugcagacccugcagugu

SEQ ID NO: 332611 - RNA, 22 nt, Human
ccuccugggccuugcucuguga

SEQ ID NO: 332612 - RNA, 22 nt, Human
cuggccuggcaggggaccucua

SEQ ID NO: 332613 - RNA, 22 nt, Human
agccacugugugaccagcuguc

SEQ ID NO: 332614 - RNA, 20 nt, Human
ucucccugcccaucucagau

SEQ ID NO: 332615 - RNA, 22 nt, Human
ugucccuggacuccaggagcca

SEQ ID NO: 332616 - RNA, 22 nt, Human
gcugacugguucaggucccgcu

SEQ ID NO: 332617 - RNA, 22 nt, Human
acggccgaugacuccagcaugg

SEQ ID NO: 332618 - RNA, 22 nt, Human
ugcuggaagggucggcgugggc

SEQ ID NO: 332619 - RNA, 22 nt, Human
agcaggaggagagccuggcggu

SEQ ID NO: 332620 - RNA, 22 nt, Human
uggucaggcugcucugcggcgu

SEQ ID NO: 332621 - RNA, 22 nt, Human
uuuccaaggaugugucucucua

SEQ ID NO: 332622 - RNA, 22 nt, Human
aaaccggguccagaucuucagg

SEQ ID NO: 332623 - RNA, 22 nt, Human
gcuguggcuccaauggugagcc

SEQ ID NO: 332624 - RNA, 22 nt, Human
ugcugcccacuguauuucucca

SEQ ID NO: 332625 - RNA, 20 nt, Human
auacuuguuuucaggcuuuu

SEQ ID NO: 332626 - RNA, 22 nt, Human
ccugugguuuacucuguggcua

SEQ ID NO: 332627 - RNA, 22 nt, Human
guggcauuuuagaacagcugac

SEQ ID NO: 332628 - RNA, 22 nt, Human
aaagcacauuacaagcucaguc

SEQ ID NO: 332629 - RNA, 22 nt, Human
gguguugcaguugaagacuggu

SEQ ID NO: 332630 - RNA, 22 nt, Human
ggugugucugccaggaacugca

SEQ ID NO: 332631 - RNA, 22 nt, Human
gccuggggaacuugauccuguc

SEQ ID NO: 332632 - RNA, 22 nt, Human
cugggaccugugugccugggcc

SEQ ID NO: 332633 - RNA, 20 nt, Human
agcuuugguuaagccagugg

SEQ ID NO: 332634 - RNA, 22 nt, Human
ugcaaaaagagcgaggagcccu

SEQ ID NO: 332635 - RNA, 22 nt, Human
gugcuggcuggggcaucaggca

SEQ ID NO: 332636 - RNA, 22 nt, Human
ccuggccauagggcccaggaaa

SEQ ID NO: 332637 - RNA, 19 nt, Human
uaugacaaguacuaguucu

SEQ ID NO: 332638 - RNA, 22 nt, Human
cagcuccaucuugcuuauacca

SEQ ID NO: 332639 - RNA, 22 nt, Human
guuuccaagucucucaacaccc

SEQ ID NO: 332640 - RNA, 22 nt, Human
ggcggcgcguagccggagacuu

SEQ ID NO: 332641 - RNA, 22 nt, Human
acagacacaggcguggagucgc

SEQ ID NO: 332642 - RNA, 22 nt, Human
ucccugccuccuggcagugcca

SEQ ID NO: 332643 - RNA, 22 nt, Human
cuugccagggacucagucaggg

SEQ ID NO: 332644 - RNA, 22 nt, Human
gagcagcagcugggccagguuc

SEQ ID NO: 332645 - RNA, 20 nt, Human
ucuggggaugaggucuagga

SEQ ID NO: 332646 - RNA, 22 nt, Human
augcaucaccgaguugcccacc

SEQ ID NO: 332647 - RNA, 22 nt, Human
ucuccucuccuuucauguuguu

SEQ ID NO: 332648 - RNA, 22 nt, Human
aaggaucauguauauguuuaag

SEQ ID NO: 332649 - RNA, 21 nt, Human
agcugugguuuuacaucuuuu

SEQ ID NO: 332650 - RNA, 22 nt, Human
uccagguccuacuggcccauag

SEQ ID NO: 332651 - RNA, 22 nt, Human
gugggcaucuccuuggaagcca

SEQ ID NO: 332652 - RNA, 22 nt, Human
ggugggucuuguggggcagcuu

SEQ ID NO: 332653 - RNA, 22 nt, Human
ccgcuguccuggagcugcugcu

SEQ ID NO: 332654 - RNA, 22 nt, Human
cagcugcuguucaguuuuguuu

SEQ ID NO: 332655 - RNA, 22 nt, Human
ugcagggcagcuagggagcuuu

SEQ ID NO: 332656 - RNA, 22 nt, Human
ucaucaucauucucccccacuu

SEQ ID NO: 332657 - RNA, 22 nt, Human
acaugcacccaguuacacucuc

SEQ ID NO: 332658 - RNA, 22 nt, Human
cugagaggcacaaggcauuucg

SEQ ID NO: 332659 - RNA, 22 nt, Human
auauggcuguugcacaucuaag

SEQ ID NO: 332660 - RNA, 22 nt, Human
gcccagcugagaagcgcggggc

SEQ ID NO: 332661 - RNA, 22 nt, Human
gagcaccgccuccacgaugccc

SEQ ID NO: 332662 - RNA, 22 nt, Human
ugcugaggagguggcugugcuu

SEQ ID NO: 332663 - RNA, 21 nt, Human
uugcuguuuucccaaugcagu

SEQ ID NO: 332664 - RNA, 22 nt, Human
cuccugcagcccucagcagcca

SEQ ID NO: 332665 - RNA, 22 nt, Human
ggucuggccuccgggcaggugg

SEQ ID NO: 332666 - RNA, 22 nt, Human
gcucuccacugaccacggggca

SEQ ID NO: 332667 - RNA, 22 nt, Human
ucucugccacagcuucugccuu

SEQ ID NO: 332668 - RNA, 22 nt, Human
uggaagggguuacgcagcagga

SEQ ID NO: 332669 - RNA, 22 nt, Human
gguuguaguuggagguuguaua

SEQ ID NO: 332670 - RNA, 20 nt, Human
ucauccaguugguuuauggu

SEQ ID NO: 332671 - RNA, 22 nt, Human
cagagccacugucugccaggca

SEQ ID NO: 332672 - RNA, 22 nt, Human
aagcagcacagcaaugacucua

SEQ ID NO: 332673 - RNA, 22 nt, Human
uagcugcuugaccaggcagugg

SEQ ID NO: 332674 - RNA, 22 nt, Human
aggcucucucugccagccgugc

SEQ ID NO: 332675 - RNA, 21 nt, Human
gcuggcugucucuuacacggu

SEQ ID NO: 332676 - RNA, 22 nt, Human
uuauugcuaugaugauguguag

SEQ ID NO: 332677 - RNA, 20 nt, Human
acguggccaccaguggcuua

SEQ ID NO: 332678 - RNA, 22 nt, Human
ucuugccgcgcaggcgcaguuc

SEQ ID NO: 332679 - RNA, 22 nt, Human
cuggccucacagaggcuaagcc

SEQ ID NO: 332680 - RNA, 22 nt, Human
gaacuuuaauuagcuuuugucu

SEQ ID NO: 332681 - RNA, 20 nt, Human
ggucacuguggcugcaggau

SEQ ID NO: 332682 - RNA, 20 nt, Human
aggaaggagaaucugagcaa

SEQ ID NO: 332683 - RNA, 22 nt, Human
ucggugcgcgaggcgcgguccc

SEQ ID NO: 332684 - RNA, 22 nt, Human
uaguggguuuauacaauuuaaa

SEQ ID NO: 332685 - RNA, 22 nt, Human
ugcuccaucuagagcucugcag

SEQ ID NO: 332686 - RNA, 22 nt, Human
acagcuggccgaggcucaggga

SEQ ID NO: 332687 - RNA, 22 nt, Human
aaggaggaauguagccagcucc

SEQ ID NO: 332688 - RNA, 22 nt, Human
uuggccguuucacugggcaguu

SEQ ID NO: 332689 - RNA, 17 nt, Human
gcccgugggcuacggua

SEQ ID NO: 332690 - RNA, 22 nt, Human
ugcccauggcaggauuucugaa

SEQ ID NO: 332691 - RNA, 22 nt, Human
ggugcggagacuccaugaggcc

SEQ ID NO: 332692 - RNA, 22 nt, Human
ugcuggaguggcacuguguggc

SEQ ID NO: 332693 - RNA, 22 nt, Human
ccaggaugacccccacuuuccu

SEQ ID NO: 332694 - RNA, 22 nt, Human
uuggcgcccaggacgccgccgc

SEQ ID NO: 332695 - RNA, 22 nt, Human
agcuccacucccugccuguuuc

SEQ ID NO: 332696 - RNA, 22 nt, Human
ugaggaaugugacaaaaccaag

SEQ ID NO: 332697 - RNA, 22 nt, Human
uuugcaaaguccauugaaguua

SEQ ID NO: 332698 - RNA, 20 nt, Human
caucaacaccuugucagccu

SEQ ID NO: 332699 - RNA, 22 nt, Human
cugggcuccuaaccauccaggu

SEQ ID NO: 332700 - RNA, 22 nt, Human
acaugcacagcaagggugagag

SEQ ID NO: 332701 - RNA, 22 nt, Human
caugcuggucagccaguggaug

SEQ ID NO: 332702 - RNA, 22 nt, Human
aagaguggagcuggaaaguggg

SEQ ID NO: 332703 - RNA, 22 nt, Human
ggauguggaccuugccugguga

SEQ ID NO: 332704 - RNA, 22 nt, Human
gagcuccuauggucgguggcuc

SEQ ID NO: 332705 - RNA, 22 nt, Human
cgcugggcgcgcuccgaacccg

SEQ ID NO: 332706 - RNA, 20 nt, Human
agcuggcccccgguggccug

SEQ ID NO: 332707 - RNA, 22 nt, Human
gcaccgagaaggaagcaugccu

SEQ ID NO: 332708 - RNA, 22 nt, Human
ggcgagcaugagucacucuggg

SEQ ID NO: 332709 - RNA, 22 nt, Human
gcuuccaaugcuucuaucacau

SEQ ID NO: 332710 - RNA, 22 nt, Human
ggccgcggauuuucccgcuggc

SEQ ID NO: 332711 - RNA, 22 nt, Human
gacgugggucgccaucgauaug

SEQ ID NO: 332712 - RNA, 22 nt, Human
ugucugccugcgggccggcaca

SEQ ID NO: 332713 - RNA, 20 nt, Human
ggacccuggguucuucugag

SEQ ID NO: 332714 - RNA, 22 nt, Human
gcggcgccugggacccgccagc

SEQ ID NO: 332715 - RNA, 22 nt, Human
gcugggcaggccucgugagggc

SEQ ID NO: 332716 - RNA, 22 nt, Human
acuggcaguagagggagcgcau

SEQ ID NO: 332717 - RNA, 22 nt, Human
uccuggcaaagauguugguguu

SEQ ID NO: 332718 - RNA, 22 nt, Human
cuggugcuguagccugauugag

SEQ ID NO: 332719 - RNA, 22 nt, Human
aagcuggccuguaccugcugag

SEQ ID NO: 332720 - RNA, 22 nt, Human
gcggcuccgaagccaggccgcg

SEQ ID NO: 332721 - RNA, 21 nt, Human
uccuccuguagaggguccugg

SEQ ID NO: 332722 - RNA, 23 nt, Human
cauuugauccucacaauaaaugg

SEQ ID NO: 332723 - RNA, 22 nt, Human
cuugucugcuauaaaaauccag

SEQ ID NO: 332724 - RNA, 22 nt, Human
gccagagggauuccuggugugu

SEQ ID NO: 332725 - RNA, 21 nt, Human
uccugcugagaaacagauggu

SEQ ID NO: 332726 - RNA, 22 nt, Human
gccacaggaaagcacccuggag

SEQ ID NO: 332727 - RNA, 22 nt, Human
uggaaggggccaggcgcggagu

SEQ ID NO: 332728 - RNA, 22 nt, Human
aucuucaaagcacaucguuugu

SEQ ID NO: 332729 - RNA, 22 nt, Human
gcagaggggaagcugaggaauu

SEQ ID NO: 332730 - RNA, 22 nt, Human
gggagcugagcuggaagagaau

SEQ ID NO: 332731 - RNA, 22 nt, Human
ugggugguugcugaggcuccuu

SEQ ID NO: 332732 - RNA, 22 nt, Human
ccaggcccugccugugguuccu

SEQ ID NO: 332733 - RNA, 22 nt, Human
gagcucagccugaggccuggcu

SEQ ID NO: 332734 - RNA, 22 nt, Human
gcucgcuuagauuuuccucuga

SEQ ID NO: 332735 - RNA, 22 nt, Human
aagccgggccugagaaaugaca

SEQ ID NO: 332736 - RNA, 22 nt, Human
ggccagccuggggcucccagac

SEQ ID NO: 332737 - RNA, 23 nt, Human
caccccacccugaggaggaggga

SEQ ID NO: 332738 - RNA, 22 nt, Human
uucugauuguuggaggaugcuu

SEQ ID NO: 332739 - RNA, 22 nt, Human
auguucaaguaccuuugugucu

SEQ ID NO: 332740 - RNA, 22 nt, Human
cucugggguggaggaggcugac

SEQ ID NO: 332741 - RNA, 22 nt, Human
cccacugcugcucuccauggca

SEQ ID NO: 332742 - RNA, 22 nt, Human
uccaggagugauaaggccacug

SEQ ID NO: 332743 - RNA, 22 nt, Human
uauggcuucugggccaaauuua

SEQ ID NO: 332744 - RNA, 22 nt, Human
ggcacagcugaugcagacacac

SEQ ID NO: 332745 - RNA, 22 nt, Human
ccugggcugcucauggggauga

SEQ ID NO: 332746 - RNA, 22 nt, Human
augcccagaacccccuggaugg

SEQ ID NO: 332747 - RNA, 22 nt, Human
ucuccuggcauuugguugagua

SEQ ID NO: 332748 - RNA, 22 nt, Human
acccugccucugcuuccuguag

SEQ ID NO: 332749 - RNA, 22 nt, Human
acaagauagcuuagaagauuca

SEQ ID NO: 332750 - RNA, 22 nt, Human
cacauuggcaaacgggguugca

SEQ ID NO: 332751 - RNA, 22 nt, Human
ucugggccggagccgacggcag

SEQ ID NO: 332752 - RNA, 23 nt, Human
uggggcugauggagacggaccag

SEQ ID NO: 332753 - RNA, 22 nt, Human
gaggaggcuuccgggaggcacg

SEQ ID NO: 332754 - RNA, 22 nt, Human
gugcugcagagucucgugccgc

SEQ ID NO: 332755 - RNA, 22 nt, Human
uaaagcauguuucaguaagguu

SEQ ID NO: 332756 - RNA, 22 nt, Human
cagaguccugcaccagcuccag

SEQ ID NO: 332757 - RNA, 22 nt, Human
ccauggccugaaggagugcauc

SEQ ID NO: 332758 - RNA, 22 nt, Human
gcugguggcagagcuccgcggc

SEQ ID NO: 332759 - RNA, 22 nt, Human
gguggcagaggugcaucagccc

SEQ ID NO: 332760 - RNA, 22 nt, Human
gcagcugcgaagaagucuaucu

SEQ ID NO: 332761 - RNA, 19 nt, Human
gcuuccagcacugcaggag

SEQ ID NO: 332762 - RNA, 22 nt, Human
agggccagcagcuuggccaacc

SEQ ID NO: 332763 - RNA, 22 nt, Human
guccuggugccaccugcgggau

SEQ ID NO: 332764 - RNA, 22 nt, Human
gccugcacucaaacacucucuu

SEQ ID NO: 332765 - RNA, 21 nt, Human
ugcuccaggagggggcagucc

SEQ ID NO: 332766 - RNA, 22 nt, Human
cugggguuggccagggcccuag

SEQ ID NO: 332767 - RNA, 22 nt, Human
cuggccagggugcgaucguggu

SEQ ID NO: 332768 - RNA, 22 nt, Human
auccgggguucauuuucacuga

SEQ ID NO: 332769 - RNA, 22 nt, Human
ggcgcaguugagcgugcuguuc

SEQ ID NO: 332770 - RNA, 22 nt, Human
gcucugugcaguucagggacac

SEQ ID NO: 332771 - RNA, 22 nt, Human
gguucaguggaauguguugacc

SEQ ID NO: 332772 - RNA, 22 nt, Human
gucauuuuugacuuugaaguga

SEQ ID NO: 332773 - RNA, 22 nt, Human
cgaggagugugaaggcuugucg

SEQ ID NO: 332774 - RNA, 22 nt, Human
uucuuggcacagaugagauucu

SEQ ID NO: 332775 - RNA, 22 nt, Human
gcacuucaccacuguccugguu

SEQ ID NO: 332776 - RNA, 22 nt, Human
cagcuccagccaccggggggug

SEQ ID NO: 332777 - RNA, 22 nt, Human
ucccacugucuucucgugcucg

SEQ ID NO: 332778 - RNA, 22 nt, Human
ugcuccugaacacagcccuaug

SEQ ID NO: 332779 - RNA, 22 nt, Human
gaguggggcccacugcugggug

SEQ ID NO: 332780 - RNA, 22 nt, Human
gggcagcaucaggaggggcuuu

SEQ ID NO: 332781 - RNA, 22 nt, Human
cucugccagccaaagucaucac

SEQ ID NO: 332782 - RNA, 22 nt, Human
agaauccuggagaagcuguacc

SEQ ID NO: 332783 - RNA, 22 nt, Human
gaccaggagauuugagcuaggc

SEQ ID NO: 332784 - RNA, 22 nt, Human
ugcccuggcuccucccacgcug

SEQ ID NO: 332785 - RNA, 22 nt, Human
uguccugugcacuguagcaugu

SEQ ID NO: 332786 - RNA, 22 nt, Human
guucugucugagcaccacagga

SEQ ID NO: 332787 - RNA, 22 nt, Human adenovirus E
ccgugggcaucaugcugaggga

SEQ ID NO: 332788 - RNA, 22 nt, Human adenovirus E
uuucaguauguggaaucaggcg

SEQ ID NO: 332789 - RNA, 22 nt, Human adenovirus E
gugauuuccccguucuuggugg

SEQ ID NO: 332790 - RNA, 22 nt, Human adenovirus E
cccgaggaaucgagguccaccc

SEQ ID NO: 332791 - RNA, 21 nt, Human adenovirus E
cccugagcagcagcuugacgg

SEQ ID NO: 332792 - RNA, 22 nt, Human adenovirus E
ccgcgucugcuccugcagcuga

SEQ ID NO: 332793 - RNA, 22 nt, Human adenovirus E
ccgugggcaucaugcugaggga

SEQ ID NO: 332794 - RNA, 22 nt, Human adenovirus E
ccugaagagguagugcagguuc

SEQ ID NO: 332795 - RNA, 22 nt, Human adenovirus E
ccucgggcucggugauauucag

SEQ ID NO: 332796 - RNA, 22 nt, Human adenovirus E
accugguggacaacaagucggc

SEQ ID NO: 332797 - RNA, 23 nt, Human adenovirus E
ucagcucgcccaggcgcuggguc

SEQ ID NO: 332798 - RNA, 22 nt, Human adenovirus E
gaggacgacggucuggcggcgg

SEQ ID NO: 332799 - RNA, 22 nt, Human adenovirus E
cgcuggcuccuggaccugguga

SEQ ID NO: 332800 - RNA, 22 nt, Human adenovirus E
cgccucagcaaccugcugggca

SEQ ID NO: 332801 - RNA, 22 nt, Human adenovirus E
ccugcaagaucuccaacgugga

SEQ ID NO: 332802 - RNA, 20 nt, Human adenovirus E
caucguggugcaggagcgcg

SEQ ID NO: 332803 - RNA, 22 nt, Human adenovirus E
cagaauguucaccagguccagg

SEQ ID NO: 332804 - RNA, 22 nt, Human adenovirus E
ggagaucuugcaggccuggcgc

SEQ ID NO: 332805 - RNA, 22 nt, Human
ugggcaccuagcaacccuucuc

SEQ ID NO: 332806 - RNA, 22 nt, Human
ccuggggucagggacgcugugc

SEQ ID NO: 332807 - RNA, 22 nt, Human
ccuggagcacauggcaggaggc

SEQ ID NO: 332808 - RNA, 22 nt, Human
agcuggggguagugagaaauaa

SEQ ID NO: 332809 - RNA, 22 nt, Human
caauacaauuaccaguuaauca

SEQ ID NO: 332810 - RNA, 22 nt, Human
ucugggguuuucacgcugucuc

SEQ ID NO: 332811 - RNA, 22 nt, Human
gcuuccuggagggagagagcug

SEQ ID NO: 332812 - RNA, 22 nt, Human
cugggcuuguguuagcugacaa

SEQ ID NO: 332813 - RNA, 22 nt, Human
uuuacugaacugcuaguacagg

SEQ ID NO: 332814 - RNA, 22 nt, Human
ccuguccagggacugagggaga

SEQ ID NO: 332815 - RNA, 22 nt, Human
agcccugugggccuuguggcac

SEQ ID NO: 332816 - RNA, 22 nt, Human
uagcugggaauuaucugguugc

SEQ ID NO: 332817 - RNA, 22 nt, Human
agagcuggcacugacccucacc

SEQ ID NO: 332818 - RNA, 22 nt, Human
cccugugggguccgccuguccg

SEQ ID NO: 332819 - RNA, 22 nt, Human
cugggauccacgggcucccaag

SEQ ID NO: 332820 - RNA, 22 nt, Human
ggcauccugggacuggcuucuu

SEQ ID NO: 332821 - RNA, 22 nt, Human
uccuguggcucuguggaaccuu

SEQ ID NO: 332822 - RNA, 22 nt, Human
uccugcaggggcugaggaacca

SEQ ID NO: 332823 - RNA, 22 nt, Human
agagcuggaagcugcucuuaga

SEQ ID NO: 332824 - RNA, 22 nt, Human
uccugguggugccggugcccgg

SEQ ID NO: 332825 - RNA, 22 nt, Human
agguggcagagugacaggcuga

SEQ ID NO: 332826 - RNA, 22 nt, Human
gauaauauuagaagauacaaau

SEQ ID NO: 332827 - RNA, 22 nt, Human
gagcugggaguuauagcauguu

SEQ ID NO: 332828 - RNA, 22 nt, Human
gcagagcugggauaugaaccca

SEQ ID NO: 332829 - RNA, 22 nt, Human
augccuggucccaccucuaggu

SEQ ID NO: 332830 - RNA, 22 nt, Human
gcagagcuucuguccuucagga

SEQ ID NO: 332831 - RNA, 22 nt, Human
ggcagagccuucuggagcucgc

SEQ ID NO: 332832 - RNA, 22 nt, Human
uuucagaucacuuucaggaaag

SEQ ID NO: 332833 - RNA, 22 nt, Human
ccugacagcgugucccuggccc

SEQ ID NO: 332834 - RNA, 22 nt, Human
ggcaucccuucuuccaguguca

SEQ ID NO: 332835 - RNA, 22 nt, Human
ccuggugaauguucauggacug

SEQ ID NO: 332836 - RNA, 22 nt, Human
caccaggcugcccaggacaggg

SEQ ID NO: 332837 - RNA, 22 nt, Human
gcuuggggagcucaguguccuu

SEQ ID NO: 332838 - RNA, 22 nt, Human
gagcuccucccaggguagcacu

SEQ ID NO: 332839 - RNA, 22 nt, Human
ggcaccaggaucagucugucau

SEQ ID NO: 332840 - RNA, 22 nt, Human
uccugcaggccagaggggugag

SEQ ID NO: 332841 - RNA, 22 nt, Human
ccugggcagggagaccaggcuc

SEQ ID NO: 332842 - RNA, 22 nt, Human
gcaggagcugcucuccugacga

SEQ ID NO: 332843 - RNA, 22 nt, Human
gcccaugguuacuuuucuggcu

SEQ ID NO: 332844 - RNA, 23 nt, Human
ccugaagggucaggguccucagc

SEQ ID NO: 332845 - RNA, 22 nt, Human
gcccuuggaacagccuccugcu

SEQ ID NO: 332846 - RNA, 20 nt, Human
uggcaccaggugguggcccc

SEQ ID NO: 332847 - RNA, 22 nt, Human
ugguauucuuucuguagaucau

SEQ ID NO: 332848 - RNA, 20 nt, Human
aggcuccuguaccugaggaa

SEQ ID NO: 332849 - RNA, 22 nt, Human
cugggcuccuaaccauccaggu

SEQ ID NO: 332850 - RNA, 22 nt, Human
ccagcccucgguagucccauag

SEQ ID NO: 332851 - RNA, 22 nt, Human
caccaggcacauaguaggcacu

SEQ ID NO: 332852 - RNA, 22 nt, Human
uagucaaaccucagaauacccc

SEQ ID NO: 332853 - RNA, 22 nt, Human
caccaggcuggagugcagaggu

SEQ ID NO: 332854 - RNA, 22 nt, Human
cugcaggagugaaagcaggccu

SEQ ID NO: 332855 - RNA, 19 nt, Human
gcugggagcagacccuccc

SEQ ID NO: 332856 - RNA, 22 nt, Human
cagccccuuccuggcaucugga

SEQ ID NO: 332857 - RNA, 21 nt, Human
ggcaucccaggccagugacug

SEQ ID NO: 332858 - RNA, 22 nt, Human
cccgucccuuuugcccgcuggu

SEQ ID NO: 332859 - RNA, 22 nt, Human
auauaucaugaguaaaacuuga

SEQ ID NO: 332860 - RNA, 22 nt, Human
cccugcagccuugcaugccuuc

SEQ ID NO: 332861 - RNA, 22 nt, Human
uccugcagagccgcccucaggu

SEQ ID NO: 332862 - RNA, 22 nt, Human
ugaucaaaacauuacuccacca

SEQ ID NO: 332863 - RNA, 22 nt, Human
cacagcugaaguagccaugugg

SEQ ID NO: 332864 - RNA, 22 nt, Human
ccugguggccuucagcccacaa

SEQ ID NO: 332865 - RNA, 22 nt, Human
agagcugggacuuggacucaau

SEQ ID NO: 332866 - RNA, 22 nt, Human
gagcugggagcugggauuugga

SEQ ID NO: 332867 - RNA, 20 nt, Human
ucccugccuuuuacugcugg

SEQ ID NO: 332868 - RNA, 22 nt, Human
cagcuccugcagcuggcuccca

SEQ ID NO: 332869 - RNA, 22 nt, Human
aaguaaaauucaaucuucacug

SEQ ID NO: 332870 - RNA, 22 nt, Human
uucuagauugccuguaaguaaa

SEQ ID NO: 332871 - RNA, 22 nt, Human
gcagagcugcagcgaggccugg

SEQ ID NO: 332872 - RNA, 22 nt, Human
uccacuggcccaccuccucagu

SEQ ID NO: 332873 - RNA, 22 nt, Human
cagggagcucugggccggacuc

SEQ ID NO: 332874 - RNA, 22 nt, Human
agcccugucucucacuccaggu

SEQ ID NO: 332875 - RNA, 22 nt, Human
gcagcaggcuuuucauaccuug

SEQ ID NO: 332876 - RNA, 20 nt, Human
gcugggcuaccacuggcccu

SEQ ID NO: 332877 - RNA, 20 nt, Human
agcuccugguauaggugccu

SEQ ID NO: 332878 - RNA, 22 nt, Human
agcuggggguuggauaagggua

SEQ ID NO: 332879 - RNA, 22 nt, Human
augcugggaaguccuaaccaca

SEQ ID NO: 332880 - RNA, 20 nt, Human
cugggcucaagugauccucc

SEQ ID NO: 332881 - RNA, 22 nt, Human
cugggcuagaaggaccaggaug

SEQ ID NO: 332882 - RNA, 21 nt, Human
gcaaaugaguuaacuaacuca

SEQ ID NO: 332883 - RNA, 22 nt, Human
ccugcagggaaucgaggcagaa

SEQ ID NO: 332884 - RNA, 22 nt, Human
gaggccuggaccagccacagag

SEQ ID NO: 332885 - RNA, 22 nt, Human
agagcuggggcauaaaugccac

SEQ ID NO: 332886 - RNA, 22 nt, Human
ccugguggacagcagccagcag

SEQ ID NO: 332887 - RNA, 20 nt, Human
agggcagcuugaggagccgg

SEQ ID NO: 332888 - RNA, 22 nt, Human
gccccuggcuggccagcuccuc

SEQ ID NO: 332889 - RNA, 20 nt, Human
aagcuggguaggagaggagc

SEQ ID NO: 332890 - RNA, 22 nt, Human
ugcaggagcaccagcucacccu

SEQ ID NO: 332891 - RNA, 22 nt, Human
ccaggcccugccugugguuccu

SEQ ID NO: 332892 - RNA, 22 nt, Human
gaccaggcuuccccagaccuca

SEQ ID NO: 332893 - RNA, 22 nt, Human
ccuggagcaaaaaucuaaggag

SEQ ID NO: 332894 - RNA, 22 nt, Human
cauaaucagauguguacauaag

SEQ ID NO: 332895 - RNA, 23 nt, Human
aauuuaguuugagacauuagccu

SEQ ID NO: 332896 - RNA, 22 nt, Human
agcugggguugcacacauuuug

SEQ ID NO: 332897 - RNA, 22 nt, Human
cugucuccagggcaggugcagg

SEQ ID NO: 332898 - RNA, 17 nt, Human
guccuggugugugagga

SEQ ID NO: 332899 - RNA, 22 nt, Human
ggagcuggagagcuagccuagg

SEQ ID NO: 332900 - RNA, 22 nt, Human
cuccaggauguuagacguccag

SEQ ID NO: 332901 - RNA, 22 nt, Human
gucugggguacuuucaucugau

SEQ ID NO: 332902 - RNA, 22 nt, Human
ugcuggggcucugaccacucca

SEQ ID NO: 332903 - RNA, 22 nt, Human
gcugggcuugguuucccugcuu

SEQ ID NO: 332904 - RNA, 22 nt, Human
cccacucccugcacgccugccg

SEQ ID NO: 332905 - RNA, 22 nt, Human
cugggcucaguggcucauggcu

SEQ ID NO: 332906 - RNA, 22 nt, Human
uauaaaugccaggacuuuagau

SEQ ID NO: 332907 - RNA, 22 nt, Human
cagcccacugccucugugguag

SEQ ID NO: 332908 - RNA, 22 nt, Human
gcugggaggaucucucccuguc

SEQ ID NO: 332909 - RNA, 22 nt, Human
agcaauaacagaaaacuuuccu

SEQ ID NO: 332910 - RNA, 22 nt, Human
ugcugaggcccaggagcacuuu

SEQ ID NO: 332911 - RNA, 22 nt, Human
ggcaccaggcugggcauaggcc

SEQ ID NO: 332912 - RNA, 19 nt, Human
uguagcuagugucuaucca

SEQ ID NO: 332913 - RNA, 22 nt, Human
gagcugggucuccaccuuggca

SEQ ID NO: 332914 - RNA, 22 nt, Human
agcuccugcgcacggugcacac

SEQ ID NO: 332915 - RNA, 22 nt, Human
agagcugggaccgucuggaagu

SEQ ID NO: 332916 - RNA, 22 nt, Human
acaaacuuccaucaugaauuuu

SEQ ID NO: 332917 - RNA, 22 nt, Human
cacuguaauagcauuauaagug

SEQ ID NO: 332918 - RNA, 22 nt, Human
ccugcuggccacugcuccaccu

SEQ ID NO: 332919 - RNA, 19 nt, Human
cagcccucuuaccacugug

SEQ ID NO: 332920 - RNA, 22 nt, Human
gagcugggaagauagcuugagc

SEQ ID NO: 332921 - RNA, 22 nt, Human
ucucagccucaccucuauggag

SEQ ID NO: 332922 - RNA, 22 nt, Human
gagcuggggcggauacucagcu

SEQ ID NO: 332923 - RNA, 22 nt, Human
gagcugggacauggguccucuc

SEQ ID NO: 332924 - RNA, 22 nt, Human
ccccugccagcuaucccugaac

SEQ ID NO: 332925 - RNA, 22 nt, Human
caggcucagcaggagccugacc

SEQ ID NO: 332926 - RNA, 19 nt, Human
ccuggcccugcugcgcggg

SEQ ID NO: 332927 - RNA, 22 nt, Human
uagcuggggcuuucauucuugc

SEQ ID NO: 332928 - RNA, 22 nt, Human
ccuggagcuuuuccauccugga

SEQ ID NO: 332929 - RNA, 22 nt, Human
agagcuggaaaaguuguuuuaa

SEQ ID NO: 332930 - RNA, 22 nt, Human
cuggugcacauucgcucucaua

SEQ ID NO: 332931 - RNA, 22 nt, Human
agcuccugcaccaggggccccu

SEQ ID NO: 332932 - RNA, 22 nt, Human
gagcuggguauauggcuuuaug

SEQ ID NO: 332933 - RNA, 22 nt, Human
agagcuggagcagccccacugg

SEQ ID NO: 332934 - RNA, 21 nt, Human
ccagccucagaucagggagcu

SEQ ID NO: 332935 - RNA, 22 nt, Human
gcugggcucuuaucaccuguac

SEQ ID NO: 332936 - RNA, 23 nt, Human
uccuggugacaugccugagcauc

SEQ ID NO: 332937 - RNA, 20 nt, Human
ggcagagcuaugucuguugc

SEQ ID NO: 332938 - RNA, 22 nt, Human
cccuguccugcuaggcccuggu

SEQ ID NO: 332939 - RNA, 22 nt, Human
gcaccaggcuuagagccccagg

SEQ ID NO: 332940 - RNA, 22 nt, Human
gcagagcuccccaagacaccaa

SEQ ID NO: 332941 - RNA, 20 nt, Human
ugcagagcugacauuaccug

SEQ ID NO: 332942 - RNA, 22 nt, Human
agagcuggagaugcagguuucg

SEQ ID NO: 332943 - RNA, 22 nt, Human
gcccuguguguuugcacugauu

SEQ ID NO: 332944 - RNA, 20 nt, Human
acaaaauagguacuggguag

SEQ ID NO: 332945 - RNA, 17 nt, Human
auguauauuaacucuga

SEQ ID NO: 332946 - RNA, 22 nt, Human
gagcuggggcagcuuaggagug

SEQ ID NO: 332947 - RNA, 22 nt, Human
uccugaggcacaauccuagaau

SEQ ID NO: 332948 - RNA, 22 nt, Human
gagggcacgaaacaaccacuuc

SEQ ID NO: 332949 - RNA, 22 nt, Human
cugucccucaguucugggcaaa

SEQ ID NO: 332950 - RNA, 16 nt, Human
gcagagcucagggacu

SEQ ID NO: 332951 - RNA, 22 nt, Human
guaucacuuuugagagugagaa

SEQ ID NO: 332952 - RNA, 22 nt, Human
aagcugggacuuagcgcagaua

SEQ ID NO: 332953 - RNA, 22 nt, Human
gagcugggauucaucuaugucu

SEQ ID NO: 332954 - RNA, 22 nt, Human
ccuggagcuuggucacgcugcg

SEQ ID NO: 332955 - RNA, 22 nt, Human
cccugugguugcuagggcacag

SEQ ID NO: 332956 - RNA, 18 nt, Human
ggagcugggccccacucc

SEQ ID NO: 332957 - RNA, 22 nt, Human
uccugagggcucggggcucaug

SEQ ID NO: 332958 - RNA, 22 nt, Human
ccauggccaauugcaccuugcu

SEQ ID NO: 332959 - RNA, 22 nt, Human
gagcugggcacacgccacuuga

SEQ ID NO: 332960 - RNA, 22 nt, Human
ggaggccacgguuuagcaccga

SEQ ID NO: 332961 - RNA, 22 nt, Human
cugucccucaucaccucugggu

SEQ ID NO: 332962 - RNA, 22 nt, Human
cugggcucaagaagucuucccu

SEQ ID NO: 332963 - RNA, 22 nt, Human
cccagcccacgguccugggugg

SEQ ID NO: 332964 - RNA, 22 nt, Human
aaaauaguuaacguucagagua

SEQ ID NO: 332965 - RNA, 22 nt, Human
cugcagagcagccaguccccca

SEQ ID NO: 332966 - RNA, 22 nt, Human
aacuaaaacugguuuguucucu

SEQ ID NO: 332967 - RNA, 22 nt, Human
caaguaaagaaucacauuucuu

SEQ ID NO: 332968 - RNA, 22 nt, Human
augcugggagugaagccccugg

SEQ ID NO: 332969 - RNA, 22 nt, Human
agcuggggcauuuauccacuaa

SEQ ID NO: 332970 - RNA, 22 nt, Human
auguaaacucacauuuucuuca

SEQ ID NO: 332971 - RNA, 22 nt, Human
ggcaccagggacaauccucuuc

SEQ ID NO: 332972 - RNA, 22 nt, Human
cagaugcuauguauuauguaug

SEQ ID NO: 332973 - RNA, 22 nt, Human
agcuccugugugaagccucccu

SEQ ID NO: 332974 - RNA, 22 nt, Human
gcaccgagaaggaagcaugccu

SEQ ID NO: 332975 - RNA, 22 nt, Human
acauuucaguaaguguuaauuu

SEQ ID NO: 332976 - RNA, 22 nt, Human
agguauuauuagcaucucuauu

SEQ ID NO: 332977 - RNA, 22 nt, Human
cugcaggacgaccgccucaucu

SEQ ID NO: 332978 - RNA, 22 nt, Human
uucaguaugauuccuccaguag

SEQ ID NO: 332979 - RNA, 22 nt, Human
ggcaucccuagaauagccaggu

SEQ ID NO: 332980 - RNA, 23 nt, Human
gagcugggauacaggcuuacugc

SEQ ID NO: 332981 - RNA, 22 nt, Human
cccugccccaggcggcuucacu

SEQ ID NO: 332982 - RNA, 22 nt, Human
ccacucccuuccgguccagggc

SEQ ID NO: 332983 - RNA, 21 nt, Human
ggugacacguggccccgcucu

SEQ ID NO: 332984 - RNA, 22 nt, Human
gcugccucaggcaccuccuggc

SEQ ID NO: 332985 - RNA, 22 nt, Human
agagcuggggccagagucaagg

SEQ ID NO: 332986 - RNA, 22 nt, Human
ugggcaccugaggccuggcagg

SEQ ID NO: 332987 - RNA, 22 nt, Human
ccugcagguuucccccggacgg

SEQ ID NO: 332988 - RNA, 22 nt, Human
cugggcucaaauccuggcccug

SEQ ID NO: 332989 - RNA, 22 nt, Human
ccaggccccagggcuggcuuuc

SEQ ID NO: 332990 - RNA, 22 nt, Human
gauguuuuaggucccuguagcu

SEQ ID NO: 332991 - RNA, 20 nt, Human
cugggcucgguggcccuggc

SEQ ID NO: 332992 - RNA, 22 nt, Human
gugcaccccggggcccugcucc

SEQ ID NO: 332993 - RNA, 17 nt, Human
ggcagagcugacagggc

SEQ ID NO: 332994 - RNA, 22 nt, Human
cagagcugcaaaugccccuccg

SEQ ID NO: 332995 - RNA, 22 nt, Human
aaauaucauuuauaacuuuuaa

SEQ ID NO: 332996 - RNA, 22 nt, Human
ucccugagcucacauggcagga

SEQ ID NO: 332997 - RNA, 22 nt, Human
ccuggggagagaaagcccagcc

SEQ ID NO: 332998 - RNA, 22 nt, Human
ggagcuggcagcgcaacccaga

SEQ ID NO: 332999 - RNA, 23 nt, Human
ccagcccuccaccagcucuaggc

SEQ ID NO: 333000 - RNA, 22 nt, Human
uaugauaugcacuuuaucagaa

SEQ ID NO: 333001 - RNA, 22 nt, Human
gcugauagacugaauguuggga

SEQ ID NO: 333002 - RNA, 22 nt, Human
aagaaaacaugaucuaauuuaa

SEQ ID NO: 333003 - RNA, 22 nt, Human
uaggacauaaguauucuaacuu

SEQ ID NO: 333004 - RNA, 21 nt, Human
accaggccaggaggcuggcac

SEQ ID NO: 333005 - RNA, 22 nt, Human
agagcugguuuacucaggaauu

SEQ ID NO: 333006 - RNA, 22 nt, Human
gacacuccagcuuuuggcucaa

SEQ ID NO: 333007 - RNA, 20 nt, Human
ugcuggggacauacagggug

SEQ ID NO: 333008 - RNA, 22 nt, Human
gaugcuggaagugcugaucuug

SEQ ID NO: 333009 - RNA, 22 nt, Human
gcagagcucaugccugcaccuc

SEQ ID NO: 333010 - RNA, 22 nt, Human
agagcuggggcccguaaagcca

SEQ ID NO: 333011 - RNA, 22 nt, Human
cagagcuggagggaacccuggc

SEQ ID NO: 333012 - RNA, 22 nt, Human
gggcccugugauuucuugagga

SEQ ID NO: 333013 - RNA, 22 nt, Human
agcccuguuuaugccacaucau

SEQ ID NO: 333014 - RNA, 22 nt, Human
cagccccuuguccgguagccac

SEQ ID NO: 333015 - RNA, 22 nt, Human
ugcuggggcagaagagccaaga

SEQ ID NO: 333016 - RNA, 22 nt, Human
gcaggagcucguuuccaggcug

SEQ ID NO: 333017 - RNA, 20 nt, Human
agagcugggaagcucccuau

SEQ ID NO: 333018 - RNA, 22 nt, Human
agcccuguagauuuaggagagu

SEQ ID NO: 333019 - RNA, 22 nt, Human
agaggaggccaggcccacaccu

SEQ ID NO: 333020 - RNA, 21 nt, Human
caggccccaggccuggggugc

SEQ ID NO: 333021 - RNA, 22 nt, Human
cugcagaggccucgccuccucu

SEQ ID NO: 333022 - RNA, 22 nt, Human
ccagggagcggggcugggucuc

SEQ ID NO: 333023 - RNA, 22 nt, Human
agcuggggcugcagagaacagg

SEQ ID NO: 333024 - RNA, 22 nt, Human
ccugcagguugcagaggcggaa

SEQ ID NO: 333025 - RNA, 22 nt, Human
uccugcagagacagaggccuca

SEQ ID NO: 333026 - RNA, 22 nt, Human
caugagauaauuuuucuccagu

SEQ ID NO: 333027 - RNA, 22 nt, Human
ugcugggggugucucaccaggc

SEQ ID NO: 333028 - RNA, 22 nt, Human
ccagcccugaacccugcugcau

SEQ ID NO: 333029 - RNA, 22 nt, Human
ccagccucaucgccugccuguc

SEQ ID NO: 333030 - RNA, 22 nt, Human
cagcuccugccugggcagcugu

SEQ ID NO: 333031 - RNA, 22 nt, Human
ggcacagggggcugaggacuag

SEQ ID NO: 333032 - RNA, 22 nt, Human
gagccuggccuccugccucagc

SEQ ID NO: 333033 - RNA, 22 nt, Human
ccaggcccuugcaagucccacc

SEQ ID NO: 333034 - RNA, 22 nt, Human
uauccaaaguuucucagaaacu

SEQ ID NO: 333035 - RNA, 22 nt, Human
gcccugugccagucacgcugug

SEQ ID NO: 333036 - RNA, 22 nt, Human
cacagcugucagcugaccuagg

SEQ ID NO: 333037 - RNA, 18 nt, Human
auccaaaaagauggaagu

SEQ ID NO: 333038 - RNA, 22 nt, Human
ccucagccuuggccccaggcag

SEQ ID NO: 333039 - RNA, 22 nt, Human
ccugcaggcugcaggccaguuc

SEQ ID NO: 333040 - RNA, 21 nt, Human
agagcugguagguagguaggu

SEQ ID NO: 333041 - RNA, 22 nt, Human
uucaaaugcaaguuacuacuuu

SEQ ID NO: 333042 - RNA, 22 nt, Human
agagcuggcagcagcuucuccu

SEQ ID NO: 333043 - RNA, 22 nt, Human
cagggagcuggugccagccgac

SEQ ID NO: 333044 - RNA, 22 nt, Human
gcccugugcucaugggaacauc

SEQ ID NO: 333045 - RNA, 22 nt, Human
gcaugcugcaccagagccucuc

SEQ ID NO: 333046 - RNA, 22 nt, Human
cccuguccuuggcugugaggcu

SEQ ID NO: 333047 - RNA, 22 nt, Human
uugucuaaugagcuccacuuca

SEQ ID NO: 333048 - RNA, 22 nt, Human
cccucagcuccacccucagcag

SEQ ID NO: 333049 - RNA, 21 nt, Human
agagcuggccugccaggcccu

SEQ ID NO: 333050 - RNA, 22 nt, Human
uuccugguaaauuauguccagg

SEQ ID NO: 333051 - RNA, 18 nt, Human
agcuggggccucuggucc

SEQ ID NO: 333052 - RNA, 16 nt, Human
ggcaccagugaacaca

SEQ ID NO: 333053 - RNA, 22 nt, Human
uaggacaugcuacauaaauagg

SEQ ID NO: 333054 - RNA, 22 nt, Human
cucagccugugaagagcagagg

SEQ ID NO: 333055 - RNA, 22 nt, Human
ggagcuggccgccuaugugcag

SEQ ID NO: 333056 - RNA, 22 nt, Human
uuucagaugguauauacaguag

SEQ ID NO: 333057 - RNA, 19 nt, Human
agcuggggcgguguguguu

SEQ ID NO: 333058 - RNA, 22 nt, Human
cugggcucuaagggagcaccgu

SEQ ID NO: 333059 - RNA, 22 nt, Human
ccugcagguccccggaugcgca

SEQ ID NO: 333060 - RNA, 22 nt, Human
gcccauggcagaacugugagca

SEQ ID NO: 333061 - RNA, 22 nt, Human
gagggcacaaaggcaacauuca

SEQ ID NO: 333062 - RNA, 22 nt, Human
ggcaccaggacaugacucccag

SEQ ID NO: 333063 - RNA, 22 nt, Human
cagagcuguccaaacccugaca

SEQ ID NO: 333064 - RNA, 22 nt, Human
gggccccugggaauucugugau

SEQ ID NO: 333065 - RNA, 22 nt, Human
ggagcuggucagccuugagcau

SEQ ID NO: 333066 - RNA, 21 nt, Human
cagagcuguccaaacccugac

SEQ ID NO: 333067 - RNA, 22 nt, Human
gugcauccacuagggcucuccc

SEQ ID NO: 333068 - RNA, 22 nt, Human
ucccagccuuccagucugguuu

SEQ ID NO: 333069 - RNA, 22 nt, Human
gagcugggaggacugggaacuu

SEQ ID NO: 333070 - RNA, 22 nt, Human
gagguggcgcgccaucccugcc

SEQ ID NO: 333071 - RNA, 22 nt, Human
uuaugguaauuaaaacauguau

SEQ ID NO: 333072 - RNA, 22 nt, Human
uagcuggguugaggucaucuac

SEQ ID NO: 333073 - RNA, 22 nt, Human
uaguaacccacacaacaguaga

SEQ ID NO: 333074 - RNA, 22 nt, Human
ccuggcagcaggugggcccgug

SEQ ID NO: 333075 - RNA, 22 nt, Human
gcccugugcuuggauggcagau

SEQ ID NO: 333076 - RNA, 22 nt, Human
agagcuggacgucugagcccua

SEQ ID NO: 333077 - RNA, 19 nt, Human
uccagccccucugugugug

SEQ ID NO: 333078 - RNA, 20 nt, Human
ccuguggagcugccuccucc

SEQ ID NO: 333079 - RNA, 22 nt, Human
gcuggggagcuagaccucagca

SEQ ID NO: 333080 - RNA, 22 nt, Human
cccugguguccacuggaggaag

SEQ ID NO: 333081 - RNA, 22 nt, Human
ggcagagcugcaugagcacuca

SEQ ID NO: 333082 - RNA, 22 nt, Human
gcccuugggagguuccacuggg

SEQ ID NO: 333083 - RNA, 22 nt, Human
aggcccuggguuagggcccacu

SEQ ID NO: 333084 - RNA, 22 nt, Human
ucugcaggucacgcuccagccu

SEQ ID NO: 333085 - RNA, 22 nt, Human
gugcugggcuccaccccagagg

SEQ ID NO: 333086 - RNA, 22 nt, Human
aaugauugucauuccaaaaagu

SEQ ID NO: 333087 - RNA, 22 nt, Human
uccacuggaacaacucugaggc

SEQ ID NO: 333088 - RNA, 22 nt, Human
gcccagcccugaggucacagcu

SEQ ID NO: 333089 - RNA, 22 nt, Human
cugggcucagaugagaggaagg

SEQ ID NO: 333090 - RNA, 22 nt, Human
acaacaaaaucacuagucuucc

SEQ ID NO: 333091 - RNA, 22 nt, Human
agagcuggcugguagcccugau

SEQ ID NO: 333092 - RNA, 22 nt, Human
gcugggcucuuuaccccuguac

SEQ ID NO: 333093 - RNA, 22 nt, Human
ggcaccagggcaagggucuuuc

SEQ ID NO: 333094 - RNA, 22 nt, Human
aaaaugauauccugacuuuuau

SEQ ID NO: 333095 - RNA, 22 nt, Human
cccugugggaacuccugaguug

SEQ ID NO: 333096 - RNA, 22 nt, Human
aguaaaauuguauuggaaaaca

SEQ ID NO: 333097 - RNA, 22 nt, Human
ugagcuggggucagcuccccug

SEQ ID NO: 333098 - RNA, 22 nt, Human
ccuguggagcuuucagcagcuc

SEQ ID NO: 333099 - RNA, 23 nt, Human
uccugaggaauggcaucucacau

SEQ ID NO: 333100 - RNA, 22 nt, Human
gagcugggccucagaacacagu

SEQ ID NO: 333101 - RNA, 22 nt, Human
gagcugggacuuggaauccaca

SEQ ID NO: 333102 - RNA, 22 nt, Human
cugggguuggccagggcccuag

SEQ ID NO: 333103 - RNA, 22 nt, Human
cagaugcuuggaggacacuugg

SEQ ID NO: 333104 - RNA, 22 nt, Human
cagggagcagcgcuggggccuc

SEQ ID NO: 333105 - RNA, 22 nt, Human
cccuguggcaggaggaggagca

SEQ ID NO: 333106 - RNA, 22 nt, Human
agagcuggaaucagaccucagg

SEQ ID NO: 333107 - RNA, 22 nt, Human
agagcuggcugugggugacuuu

SEQ ID NO: 333108 - RNA, 22 nt, Human
cugucuccuccacugcauggga

SEQ ID NO: 333109 - RNA, 22 nt, Human
ccagccccuauccucgcuccac

SEQ ID NO: 333110 - RNA, 23 nt, Human
uggcaccaggcauucuaggggua

SEQ ID NO: 333111 - RNA, 21 nt, Human
gagcugggcgaggcuccgggg

SEQ ID NO: 333112 - RNA, 22 nt, Human
ugaguuauaaugaauauuugaa

SEQ ID NO: 333113 - RNA, 18 nt, Human
aagcugggaaggagacag

SEQ ID NO: 333114 - RNA, 20 nt, Human
uuucagauuuacagaaaugu

SEQ ID NO: 333115 - RNA, 22 nt, Human
cccuggucagggaaggcgccug

SEQ ID NO: 333116 - RNA, 22 nt, Human
cugugcccaggccccuggggau

SEQ ID NO: 333117 - RNA, 22 nt, Human
uuucagaucauuuuuuaaguac

SEQ ID NO: 333118 - RNA, 22 nt, Human
ucagcuucagaucagcuagaga

SEQ ID NO: 333119 - RNA, 22 nt, Human
aaauauguuuuccaguugucau

SEQ ID NO: 333120 - RNA, 22 nt, Human
agagcuggauggucaagauggc

SEQ ID NO: 333121 - RNA, 18 nt, Human
ugcugggguagaauccac

SEQ ID NO: 333122 - RNA, 22 nt, Human
ggagcugggaacuauguaguau

SEQ ID NO: 333123 - RNA, 22 nt, Human
auaugaaaagaagucaccauug

SEQ ID NO: 333124 - RNA, 21 nt, Human
ggagcuggggagcuggcccca

SEQ ID NO: 333125 - RNA, 22 nt, Human
uccugcagccauuagaggucaa

SEQ ID NO: 333126 - RNA, 22 nt, Human
cugcagccucaaccuccugagc

SEQ ID NO: 333127 - RNA, 22 nt, Human
aacuaaaucuggcauuuagagc

SEQ ID NO: 333128 - RNA, 22 nt, Human
uccugcaguuacaucccagcca

SEQ ID NO: 333129 - RNA, 19 nt, Human
cagccucaaucccucgggc

SEQ ID NO: 333130 - RNA, 20 nt, Human
acuuuacugagcuguaauuc

SEQ ID NO: 333131 - RNA, 22 nt, Human
uccugcagaccucagucagguc

SEQ ID NO: 333132 - RNA, 22 nt, Human
gggcuccuccucugacuguggc

SEQ ID NO: 333133 - RNA, 22 nt, Human
cccagcccagcguucgaggggu

SEQ ID NO: 333134 - RNA, 22 nt, Human
ucaaaguauuuuaacuguaucc

SEQ ID NO: 333135 - RNA, 22 nt, Human
aagcugggagggagcccagagu

SEQ ID NO: 333136 - RNA, 22 nt, Human
acuuuacuccccaacauaaaug

SEQ ID NO: 333137 - RNA, 19 nt, Human
ggcagagcuccugcuuucu

SEQ ID NO: 333138 - RNA, 22 nt, Human
uggcaccaggcgggguggcugu

SEQ ID NO: 333139 - RNA, 22 nt, Human
gcccugugagucaugcggcaga

SEQ ID NO: 333140 - RNA, 22 nt, Human
agagcuggggcucuggguuuaa

SEQ ID NO: 333141 - RNA, 22 nt, Human
ccuggggucacuugcagccgca

SEQ ID NO: 333142 - RNA, 22 nt, Human
ccuggggagccgccugagcccc

SEQ ID NO: 333143 - RNA, 22 nt, Human
agacuuuaaugugcaaaugaaa

SEQ ID NO: 333144 - RNA, 22 nt, Human
augcugggacguacuuguucau

SEQ ID NO: 333145 - RNA, 21 nt, Human
ugggcaccaaaaccuaggagu

SEQ ID NO: 333146 - RNA, 22 nt, Human
ugcagagcuucauugcauaggc

SEQ ID NO: 333147 - RNA, 23 nt, Human
agcuggaggcugucuacucccaa

SEQ ID NO: 333148 - RNA, 22 nt, Human
cugucacccacccagccuguca

SEQ ID NO: 333149 - RNA, 22 nt, Human
gcugggcuucacagagccuuua

SEQ ID NO: 333150 - RNA, 22 nt, Human
cugggugagcuggccagagggu

SEQ ID NO: 333151 - RNA, 22 nt, Human
gcaccaggcagcugagcaggcc

SEQ ID NO: 333152 - RNA, 17 nt, Human
agcccugugcucuuuuu

SEQ ID NO: 333153 - RNA, 22 nt, Human
cagcccucaaaccacuuccagg

SEQ ID NO: 333154 - RNA, 22 nt, Human
uccugcagccacugcaggcaga

SEQ ID NO: 333155 - RNA, 22 nt, Human
uccuguggcguuaucaugugau

SEQ ID NO: 333156 - RNA, 17 nt, Human
uggcacagaggugcuau

SEQ ID NO: 333157 - RNA, 22 nt, Human
ccugggaccucgcgggaagcgg

SEQ ID NO: 333158 - RNA, 22 nt, Human
agagcuggccagggaucacucu

SEQ ID NO: 333159 - RNA, 22 nt, Human
ucagacaaguaaaauaauguaa

SEQ ID NO: 333160 - RNA, 22 nt, Human
ggcaccagggaaggaaggcugg

SEQ ID NO: 333161 - RNA, 22 nt, Human
cccuguggaggcagcauccugc

SEQ ID NO: 333162 - RNA, 22 nt, Human
cccuguccuggaugggagcacu

SEQ ID NO: 333163 - RNA, 22 nt, Human
aaauauguauggaguucaugaa

SEQ ID NO: 333164 - RNA, 22 nt, Human
ccucucccgggugccgcugggc

SEQ ID NO: 333165 - RNA, 22 nt, Human
caccaggcugaaccagagggga

SEQ ID NO: 333166 - RNA, 18 nt, Human
ucuggaacaacuucaugu

SEQ ID NO: 333167 - RNA, 22 nt, Human
gucaaaugcacagaaccauuaa

SEQ ID NO: 333168 - RNA, 22 nt, Human
gagggcacuggguuucaauguc

SEQ ID NO: 333169 - RNA, 22 nt, Human
ugcugggcuggagcugccaggg

SEQ ID NO: 333170 - RNA, 17 nt, Human
ccagggaggggccgcgc

SEQ ID NO: 333171 - RNA, 22 nt, Human
ucaaaguagccggauggaauuu

SEQ ID NO: 333172 - RNA, 19 nt, Human
gggcuccuugggccucucu

SEQ ID NO: 333173 - RNA, 22 nt, Human
auauaacauacauacagaaaag

SEQ ID NO: 333174 - RNA, 20 nt, Human
agcccuguuuccuggagaga

SEQ ID NO: 333175 - RNA, 22 nt, Human
ucccugaggaagggguguggug

SEQ ID NO: 333176 - RNA, 22 nt, Human
cccugccuuguuggagccuaug

SEQ ID NO: 333177 - RNA, 22 nt, Human
gaucucaaagcaguguggguug

SEQ ID NO: 333178 - RNA, 22 nt, Human
gagcugggauuugaaccuggga

SEQ ID NO: 333179 - RNA, 19 nt, Human
auccuggguccuccagcug

SEQ ID NO: 333180 - RNA, 19 nt, Human
agcuccuguucagcagcuc

SEQ ID NO: 333181 - RNA, 17 nt, Human
ggcaccagacggagagu

SEQ ID NO: 333182 - RNA, 22 nt, Human
agccugggcccugccucuucuc

SEQ ID NO: 333183 - RNA, 22 nt, Human
uaggacauguguuuuauauaug

SEQ ID NO: 333184 - RNA, 22 nt, Human
agagcugggugguggugacuca

SEQ ID NO: 333185 - RNA, 22 nt, Human
agaggacacaucuuuccucaaa

SEQ ID NO: 333186 - RNA, 22 nt, Human
aucauccuagaaggaagcuagg

SEQ ID NO: 333187 - RNA, 19 nt, Human
cugcucccuccuucuggca

SEQ ID NO: 333188 - RNA, 22 nt, Human
cugcagaguggagccucggcug

SEQ ID NO: 333189 - RNA, 22 nt, Human
uccugaggcuaaagugcagugg

SEQ ID NO: 333190 - RNA, 22 nt, Human
gccuguggggcugaggcugccu

SEQ ID NO: 333191 - RNA, 20 nt, Human
cccagcccgggccgcgcucg

SEQ ID NO: 333192 - RNA, 22 nt, Human
agaugguagguggcaggacuga

SEQ ID NO: 333193 - RNA, 22 nt, Human
agagcuggguggacuuguaguu

SEQ ID NO: 333194 - RNA, 22 nt, Human
gagcugggcuggcuuccucccu

SEQ ID NO: 333195 - RNA, 22 nt, Human
ccugcagggugcugccacagau

SEQ ID NO: 333196 - RNA, 22 nt, Human
uguggcacuucucuccuuguaa

SEQ ID NO: 333197 - RNA, 22 nt, Human
uaaauguauaggcacuaaaccu

SEQ ID NO: 333198 - RNA, 22 nt, Human
uagcugggucucuguuuucuca

SEQ ID NO: 333199 - RNA, 22 nt, Human
uccuguggggaaaagccuaucu

SEQ ID NO: 333200 - RNA, 22 nt, Human
cucucugaggaaggagcaucug

SEQ ID NO: 333201 - RNA, 22 nt, Human
auaaaugauucagcaggaaaua

SEQ ID NO: 333202 - RNA, 22 nt, Human
agcuccugucucaagggagccu

SEQ ID NO: 333203 - RNA, 22 nt, Human
ugggcuccggcggccucaggcu

SEQ ID NO: 333204 - RNA, 22 nt, Human
cugcaggggcaguccacuuccu

SEQ ID NO: 333205 - RNA, 22 nt, Human
ccuggguacccuuggcggccuu

SEQ ID NO: 333206 - RNA, 22 nt, Human
aacugguaucucuucaguguaa

SEQ ID NO: 333207 - RNA, 22 nt, Human
ggcaccagcaggcaccgaugcc

SEQ ID NO: 333208 - RNA, 22 nt, Human
gagcuggguguuuauuugccaa

SEQ ID NO: 333209 - RNA, 22 nt, Human
agaagucauuuauguuagauga

SEQ ID NO: 333210 - RNA, 22 nt, Human
ccugggcuuucggcggcuuccu

SEQ ID NO: 333211 - RNA, 22 nt, Human
ggaggccaggaagagccgcccu

SEQ ID NO: 333212 - RNA, 22 nt, Human
aaacacaauguuucuuuguucu

SEQ ID NO: 333213 - RNA, 22 nt, Human
cugguggagaugccuggccccu

SEQ ID NO: 333214 - RNA, 21 nt, Human
agagcugggacuugccugaga

SEQ ID NO: 333215 - RNA, 22 nt, Human
ggaggccaccugaccugcuguu

SEQ ID NO: 333216 - RNA, 20 nt, Human
ggcaccaggcuaggauugga

SEQ ID NO: 333217 - RNA, 22 nt, Human
agagcuggcugcugcggugcuu

SEQ ID NO: 333218 - RNA, 22 nt, Human
aaaaguauuuuggaucucagau

SEQ ID NO: 333219 - RNA, 22 nt, Human
agagcuggugcauauucagaaa

SEQ ID NO: 333220 - RNA, 22 nt, Human
caccagguuccgggcagagcug

SEQ ID NO: 333221 - RNA, 22 nt, Human
agagcugggugaagugccauca

SEQ ID NO: 333222 - RNA, 18 nt, Human
gcagagcugggauuccca

SEQ ID NO: 333223 - RNA, 22 nt, Human
ucccugucuaauaugccaugaa

SEQ ID NO: 333224 - RNA, 18 nt, Human
gagcugggagaaggaagg

SEQ ID NO: 333225 - RNA, 22 nt, Human
ccugucaggguuugccucagaa

SEQ ID NO: 333226 - RNA, 22 nt, Human
uccugaggagaagagugcuagg

SEQ ID NO: 333227 - RNA, 22 nt, Human
gagggcacucgagacuacggca

SEQ ID NO: 333228 - RNA, 22 nt, Human
ggcaccagcacuugggauggcu

SEQ ID NO: 333229 - RNA, 21 nt, Human
gcagagcuggaaccaggaccc

SEQ ID NO: 333230 - RNA, 22 nt, Human
gagcugggcgagccggggaagu

SEQ ID NO: 333231 - RNA, 22 nt, Human
cccugccugugggcaucaacau

SEQ ID NO: 333232 - RNA, 22 nt, Human
cccuguccugcuaggcccuggu

SEQ ID NO: 333233 - RNA, 22 nt, Human
ccucugagcuggccuguggggc

SEQ ID NO: 333234 - RNA, 22 nt, Human
ugguggggccagacuucagcuc

SEQ ID NO: 333235 - RNA, 22 nt, Human
aucucccaaauuagccucuuga

SEQ ID NO: 333236 - RNA, 21 nt, Human
cccgugccuucagcaguccug

SEQ ID NO: 333237 - RNA, 22 nt, Human
guggccuccuccguccgccucu

SEQ ID NO: 333238 - RNA, 22 nt, Human
uucaaaccuaucuaagaaauag

SEQ ID NO: 333239 - RNA, 22 nt, Human
aaaugcacaauaaaguaaaggc

SEQ ID NO: 333240 - RNA, 17 nt, Human
aguuggcagccguugcu

SEQ ID NO: 333241 - RNA, 22 nt, Human
acagugauuggcacugauucag

SEQ ID NO: 333242 - RNA, 20 nt, Human
ccagagcugauggcugcccg

SEQ ID NO: 333243 - RNA, 22 nt, Human
ccauuuguaccauuucuuugua

SEQ ID NO: 333244 - RNA, 22 nt, Human
cuggccuggcaggggaccucua

SEQ ID NO: 333245 - RNA, 22 nt, Human
aaugcugugauuuauuaaguau

SEQ ID NO: 333246 - RNA, 22 nt, Human
cuccuuagugccucugcacgag

SEQ ID NO: 333247 - RNA, 22 nt, Human
ucacuguuaauaaauagcaaag

SEQ ID NO: 333248 - RNA, 22 nt, Human
gaaaacacuuugaucugaaagu

SEQ ID NO: 333249 - RNA, 22 nt, Human
ccucagucuauuuccagcaggu

SEQ ID NO: 333250 - RNA, 22 nt, Human
guccguaguggcugaugcuuug

SEQ ID NO: 333251 - RNA, 22 nt, Human
gggcugacaccacccaggcgca

SEQ ID NO: 333252 - RNA, 23 nt, Human
uggugggcccugcuugcucacug

SEQ ID NO: 333253 - RNA, 22 nt, Human
acuugcaucuuagagacucacc

SEQ ID NO: 333254 - RNA, 22 nt, Human
aucaugugacuagguuuggcca

SEQ ID NO: 333255 - RNA, 22 nt, Human
cuggcuuugaucagagugaccu

SEQ ID NO: 333256 - RNA, 22 nt, Human
guuuuaguggguggccacugau

SEQ ID NO: 333257 - RNA, 22 nt, Human
aggcggguuuaggacaaugcuu

SEQ ID NO: 333258 - RNA, 22 nt, Human
guugggcugaagugugugcuua

SEQ ID NO: 333259 - RNA, 22 nt, Human
gugggggcaggcagugcuagga

SEQ ID NO: 333260 - RNA, 22 nt, Human
aucuucaaagcacaucguuugu

SEQ ID NO: 333261 - RNA, 22 nt, Human
uggcggugacggcggcgccugg

SEQ ID NO: 333262 - RNA, 22 nt, Human
gcucagagauguucaguagcuu

SEQ ID NO: 333263 - RNA, 22 nt, Human
ugugcugcucucagugacagcc

SEQ ID NO: 333264 - RNA, 21 nt, Human
ucagcuugcuucauuauuaug

SEQ ID NO: 333265 - RNA, 22 nt, Human
gugcugccuccauauccgucag

SEQ ID NO: 333266 - RNA, 22 nt, Human
gguuuguggagcuggaaacacu

SEQ ID NO: 333267 - RNA, 22 nt, Human
ucaggccaggagaucagauuga

SEQ ID NO: 333268 - RNA, 22 nt, Human
gugcaugucuuuggaggccucc

SEQ ID NO: 333269 - RNA, 22 nt, Human
aaugucaacacaagagaaaugc

SEQ ID NO: 333270 - RNA, 22 nt, Human
accuccuccaaggagccauagg

SEQ ID NO: 333271 - RNA, 22 nt, Human
cccugcuucccugggagaggcg

SEQ ID NO: 333272 - RNA, 22 nt, Human
uuucgagggauuagcuaggacu

SEQ ID NO: 333273 - RNA, 22 nt, Human
ggccuugggauguggcugcagc

SEQ ID NO: 333274 - RNA, 22 nt, Human
gccuggcuaagcagaaggaccc

SEQ ID NO: 333275 - RNA, 22 nt, Human
uuccaggcgcacgucggccuua

SEQ ID NO: 333276 - RNA, 19 nt, Human
uugcuucaugucuuuugcu

SEQ ID NO: 333277 - RNA, 22 nt, Human
ugcaucuaaguggcuaacaacc

SEQ ID NO: 333278 - RNA, 22 nt, Human
ugacuuuggacuagugauuuaa

SEQ ID NO: 333279 - RNA, 22 nt, Human
aacuuaaacaagcucccaaguu

SEQ ID NO: 333280 - RNA, 22 nt, Human
acaccacaaguaacucuuuucc

SEQ ID NO: 333281 - RNA, 22 nt, Human
aagaggaggacgguucccagaa

SEQ ID NO: 333282 - RNA, 22 nt, Human
uuacaguuaaugugacuaacca

SEQ ID NO: 333283 - RNA, 22 nt, Human
cagugacguaaacugcaugugc

SEQ ID NO: 333284 - RNA, 22 nt, Human
ggccgcggauuuucccgcuggc

SEQ ID NO: 333285 - RNA, 22 nt, Human
cacagagagcuacgugcagcgu

SEQ ID NO: 333286 - RNA, 22 nt, Human
agugaauuagccuauuuguaaa

SEQ ID NO: 333287 - RNA, 22 nt, Human
cagcaguacuucucagagguau

SEQ ID NO: 333288 - RNA, 22 nt, Human
ggcugagcuuuucaugaugguu

SEQ ID NO: 333289 - RNA, 22 nt, Human
cagcuccaucuugcuuauacca

SEQ ID NO: 333290 - RNA, 22 nt, Human
uuguugcugcucaaccucuaua

SEQ ID NO: 333291 - RNA, 22 nt, Human
ccuggcagaauauuaaagugca

SEQ ID NO: 333292 - RNA, 23 nt, Human
guuauugcuggugcuggccagcc

SEQ ID NO: 333293 - RNA, 22 nt, Human
ugcauuaagaauuucugaggau

SEQ ID NO: 333294 - RNA, 22 nt, Human
ucagaagguacugaagacaugg

SEQ ID NO: 333295 - RNA, 22 nt, Human
caugucaagacugaagauccag

SEQ ID NO: 333296 - RNA, 22 nt, Human
gaaugcuggcuuacaggcaguu

SEQ ID NO: 333297 - RNA, 22 nt, Human
uccugcagccauuagaggucaa

SEQ ID NO: 333298 - RNA, 22 nt, Human
aagagcuggcucuugcagcagc

SEQ ID NO: 333299 - RNA, 22 nt, Human
aaguguguauuuuucuucagug

SEQ ID NO: 333300 - RNA, 22 nt, Human
agcagugugggcugcacgcugg

SEQ ID NO: 333301 - RNA, 22 nt, Human
acuccuggguuccggagauucu

SEQ ID NO: 333302 - RNA, 22 nt, Human
gagagagacauguaaacgcggu

SEQ ID NO: 333303 - RNA, 22 nt, Human
ugcuccugaacacagcccuaug

SEQ ID NO: 333304 - RNA, 22 nt, Human
ugagcucaagcaauucacccgc

SEQ ID NO: 333305 - RNA, 22 nt, Human
cucugccagccaaagucaucac

SEQ ID NO: 333306 - RNA, 22 nt, Human
cuucauuuggcaggcuggccuc

SEQ ID NO: 333307 - RNA, 22 nt, Human
cuccuuccugguuagcaccuua

SEQ ID NO: 333308 - RNA, 22 nt, Human
auuggccagacuuauccuucag

SEQ ID NO: 333309 - RNA, 22 nt, Human
cgugcggccucggggcccggcu

SEQ ID NO: 333310 - RNA, 22 nt, Human
agucugaaccagauggcaaggu

SEQ ID NO: 333311 - RNA, 22 nt, Human
gccugcuggcuggaaauucucc

SEQ ID NO: 333312 - RNA, 22 nt, Human
uuuuuugucuugaagaaauggu

SEQ ID NO: 333313 - RNA, 22 nt, Human
gggggcgccgccgcucaucuca

SEQ ID NO: 333314 - RNA, 22 nt, Human
cagcuccagccaccggggggug

SEQ ID NO: 333315 - RNA, 22 nt, Human
guuggcuaugagagcuuuagug

SEQ ID NO: 333316 - RNA, 22 nt, Human
gacggggcagccagcugguggc

SEQ ID NO: 333317 - RNA, 22 nt, Human
uugaacaguuuugucagguuca

SEQ ID NO: 333318 - RNA, 22 nt, Human
ucaucuccauacggucucgcag

SEQ ID NO: 333319 - RNA, 22 nt, Human
uagcauuuagaacaccuugaga

SEQ ID NO: 333320 - RNA, 22 nt, Human
cuccagcucgcgagcucugcuc

SEQ ID NO: 333321 - RNA, 22 nt, Human
cuguucccgguggccgggccag

SEQ ID NO: 333322 - RNA, 21 nt, Human
uccaaaggagacugagugugu

SEQ ID NO: 333323 - RNA, 21 nt, Human
agccaggcaagcacccccacu

SEQ ID NO: 333324 - RNA, 19 nt, Human
ugguggaggugcaccugac

SEQ ID NO: 333325 - RNA, 22 nt, Human
uuauuuuguagcucugaucuuu

SEQ ID NO: 333326 - RNA, 22 nt, Human
gaguuugugggaauggaguauu

SEQ ID NO: 333327 - RNA, 22 nt, Human
cuuugcagagggggugggagcu

SEQ ID NO: 333328 - RNA, 19 nt, Human
ucuggcugccaaggauuga

SEQ ID NO: 333329 - RNA, 22 nt, Human
caaagaagagauuuacagagcu

SEQ ID NO: 333330 - RNA, 19 nt, Human
cucugccauuugcugccug

SEQ ID NO: 333331 - RNA, 21 nt, Human
agccugcaauguagguaccgg

SEQ ID NO: 333332 - RNA, 22 nt, Human
uguggguccuccugugugcccg

SEQ ID NO: 333333 - RNA, 22 nt, Human
ugugugggcgaagacagccuuu

SEQ ID NO: 333334 - RNA, 22 nt, Human
cauuuugugcuagacacuaugg

SEQ ID NO: 333335 - RNA, 22 nt, Human
ccaggagagcucucguucagug

SEQ ID NO: 333336 - RNA, 22 nt, Human
gagguuggagggcuggccugca

SEQ ID NO: 333337 - RNA, 22 nt, Human
ggggaggaagcuggaacacggg

SEQ ID NO: 333338 - RNA, 22 nt, Human
agguuuggguucauugcuggcu

SEQ ID NO: 333339 - RNA, 21 nt, Human
uaaagcucguucaggaaaguc

SEQ ID NO: 333340 - RNA, 22 nt, Human
aggcauuacaucuaaauauuua

SEQ ID NO: 333341 - RNA, 19 nt, Human
ugcagcuguaugagcuuaa

SEQ ID NO: 333342 - RNA, 22 nt, Human
uacagcagcccaccuucuucug

SEQ ID NO: 333343 - RNA, 22 nt, Human
ggcuucaguggccagagaugau

SEQ ID NO: 333344 - RNA, 22 nt, Human
uggcuguagaaucagagacuug

SEQ ID NO: 333345 - RNA, 22 nt, Human
ugguuacccagucgcuggaguu

SEQ ID NO: 333346 - RNA, 22 nt, Human
gguuuguugggguccaggccca

SEQ ID NO: 333347 - RNA, 22 nt, Human
ugggaugggaucucgcuguguc

SEQ ID NO: 333348 - RNA, 22 nt, Human
ucaccuguuggauguauacugu

SEQ ID NO: 333349 - RNA, 22 nt, Human
ucuuuuaucuguuguguaacaa

SEQ ID NO: 333350 - RNA, 22 nt, Human
uucccuuucuuaaagaguuagg

SEQ ID NO: 333351 - RNA, 18 nt, Human
gagagcccagcagguggu

SEQ ID NO: 333352 - RNA, 22 nt, Human
acagcuggccgaggcucaggga

SEQ ID NO: 333353 - RNA, 22 nt, Human
uugagcuugaggaguuauuuga

SEQ ID NO: 333354 - RNA, 22 nt, Human
auacagguucucuagggaacag

SEQ ID NO: 333355 - RNA, 22 nt, Human
ggagaggggaacuuguugcuug

SEQ ID NO: 333356 - RNA, 22 nt, Human
augcugugccuggaaagcggcu

SEQ ID NO: 333357 - RNA, 22 nt, Human
ucuguggcaugguaucuggagg

SEQ ID NO: 333358 - RNA, 22 nt, Human
gcugcccauugcucucccacuc

SEQ ID NO: 333359 - RNA, 22 nt, Human
ugcauuugcaauggguacacaa

SEQ ID NO: 333360 - RNA, 22 nt, Human
ggguucagugaugccuucagga

SEQ ID NO: 333361 - RNA, 21 nt, Human
uggcaggcagcuggaagcuug

SEQ ID NO: 333362 - RNA, 22 nt, Human
agacaagagcugaggacauauu

SEQ ID NO: 333363 - RNA, 22 nt, Human
aaaauuaagugucugggaagcc

SEQ ID NO: 333364 - RNA, 22 nt, Human
caagggcagcagccucaagcgg

SEQ ID NO: 333365 - RNA, 22 nt, Human
cucucuccuuagcugcagacca

SEQ ID NO: 333366 - RNA, 22 nt, Human
uccucauucuuggugcaucaaa

SEQ ID NO: 333367 - RNA, 22 nt, Human
cuuuacuucagcaagcuuuccu

SEQ ID NO: 333368 - RNA, 22 nt, Human
ugugcuugucguggagccaggc

SEQ ID NO: 333369 - RNA, 22 nt, Human
cucuccaggcgagguccuacug

SEQ ID NO: 333370 - RNA, 22 nt, Human
cccacucccugcacgccugccg

SEQ ID NO: 333371 - RNA, 22 nt, Human
gaggagagaagcuaacggugcu

SEQ ID NO: 333372 - RNA, 22 nt, Human
uccagcucugcugugcgccggu

SEQ ID NO: 333373 - RNA, 22 nt, Human
ccaccacugaggcacaggagcc

SEQ ID NO: 333374 - RNA, 22 nt, Human
gugccuccaggcucgacuaguc

SEQ ID NO: 333375 - RNA, 22 nt, Human
gucugcccuuggccugggacuu

SEQ ID NO: 333376 - RNA, 22 nt, Human
gaggcuggcagaaaagcacagg

SEQ ID NO: 333377 - RNA, 22 nt, Human
ggcagcaggguagccauuucuc

SEQ ID NO: 333378 - RNA, 22 nt, Human
gugguuguuuccagguuugaaa

SEQ ID NO: 333379 - RNA, 22 nt, Human
gaggcagagacuccaccuucag

SEQ ID NO: 333380 - RNA, 22 nt, Human
agggagcugcucugcuuccgug

SEQ ID NO: 333381 - RNA, 22 nt, Human
gagcuuuucccgucuuucucgu

SEQ ID NO: 333382 - RNA, 22 nt, Human
acagugcugaucuagacugacc

SEQ ID NO: 333383 - RNA, 22 nt, Human
acaccuuuuauucgccaggcac

SEQ ID NO: 333384 - RNA, 22 nt, Human
ggccacuguuuccugggcaguu

SEQ ID NO: 333385 - RNA, 22 nt, Human
ucucccaaccucuggugggugc

SEQ ID NO: 333386 - RNA, 22 nt, Human
gucuggagccacugcugcugcu

SEQ ID NO: 333387 - RNA, 22 nt, Human
gaauguuaaugcacuucuagcu

SEQ ID NO: 333388 - RNA, 22 nt, Human
gggcuguaggagcuggaauggg

SEQ ID NO: 333389 - RNA, 22 nt, Human
cuccgcuuguguauaccuccaa

SEQ ID NO: 333390 - RNA, 22 nt, Human
aggaaaugccgcggcucucuuu

SEQ ID NO: 333391 - RNA, 22 nt, Human
gccuucugauugcuggacugac

SEQ ID NO: 333392 - RNA, 22 nt, Human
cagggcucgcucgcucgcucgc

SEQ ID NO: 333393 - RNA, 22 nt, Human
agccagcauauauauaguugaa

SEQ ID NO: 333394 - RNA, 22 nt, Human
ugcuggcugggcugcuggagac

SEQ ID NO: 333395 - RNA, 22 nt, Human
cugagccagcgggcucacuuuu

SEQ ID NO: 333396 - RNA, 22 nt, Human
ugcugggauuacagucaugagc

SEQ ID NO: 333397 - RNA, 22 nt, Human
agccacauggaccugaugcuag

SEQ ID NO: 333398 - RNA, 22 nt, Human
uuaccugagcggauuuguugca

SEQ ID NO: 333399 - RNA, 22 nt, Human
aagucaauuaguaaacuuggaa

SEQ ID NO: 333400 - RNA, 21 nt, Human
acccugcuuuaugccguccuc

SEQ ID NO: 333401 - RNA, 22 nt, Human
gagcuuggugcugccuguuguc

SEQ ID NO: 333402 - RNA, 22 nt, Human
ggaagcaaauuccagaaccaca

SEQ ID NO: 333403 - RNA, 22 nt, Human
acagcugggaacucacacagca

SEQ ID NO: 333404 - RNA, 22 nt, Human
uggcuacauuuauacucucauu

SEQ ID NO: 333405 - RNA, 22 nt, Human
uaaagacaauuucgagcuguag

SEQ ID NO: 333406 - RNA, 22 nt, Human
uacuguauacuacugcuguucu

SEQ ID NO: 333407 - RNA, 22 nt, Human
ccaggagcccugccacaauggu

SEQ ID NO: 333408 - RNA, 22 nt, Human
aaguuugucucauuugaucuuc

SEQ ID NO: 333409 - RNA, 22 nt, Human
cccacugcaugaguugguauua

SEQ ID NO: 333410 - RNA, 22 nt, Human
uguccagaucaaugcccacaug

SEQ ID NO: 333411 - RNA, 20 nt, Human
ugugugaauuagggcauguu

SEQ ID NO: 333412 - RNA, 22 nt, Human
ggcuuuggggguguccaagaaa

SEQ ID NO: 333413 - RNA, 22 nt, Human
uuugucaccaguggcuuuggua

SEQ ID NO: 333414 - RNA, 22 nt, Human
aguccagggcuuagucagcggg

SEQ ID NO: 333415 - RNA, 22 nt, Human
cccagagcaugugcugccuuug

SEQ ID NO: 333416 - RNA, 22 nt, Human
ggcaagaaccucaauuaccuuu

SEQ ID NO: 333417 - RNA, 21 nt, Human
agggccagaucaccaaggagc

SEQ ID NO: 333418 - RNA, 22 nt, Human
ccuuccaguucuugguuguaau

SEQ ID NO: 333419 - RNA, 22 nt, Human
acacucaugcucagcuggugcu

SEQ ID NO: 333420 - RNA, 22 nt, Human
gagaguuaguugagcagucuga

SEQ ID NO: 333421 - RNA, 22 nt, Human
uugacguccucgauggggaacu

SEQ ID NO: 333422 - RNA, 22 nt, Human
caguuuuacccaagcuuauuuu

SEQ ID NO: 333423 - RNA, 22 nt, Human
cuguuccuccaccucaacaaac

SEQ ID NO: 333424 - RNA, 22 nt, Human
uuccaggccgggcaggaaacac

SEQ ID NO: 333425 - RNA, 22 nt, Human
ggagccaguuuagaccucaguu

SEQ ID NO: 333426 - RNA, 22 nt, Human
acuuugccuucuuacuguguug

SEQ ID NO: 333427 - RNA, 17 nt, Human
ucuccuggcucuaucag

SEQ ID NO: 333428 - RNA, 22 nt, Human
gcugcaagugcauguugcaacu

SEQ ID NO: 333429 - RNA, 19 nt, Human
caggucuucuuggaggacu

SEQ ID NO: 333430 - RNA, 22 nt, Human
gaaacguuguggaaaauccucu

SEQ ID NO: 333431 - RNA, 22 nt, Human
ucuuucagaaacuuugucugcg

SEQ ID NO: 333432 - RNA, 22 nt, Human
ccacugcuguuacuuacgcaaa

SEQ ID NO: 333433 - RNA, 22 nt, Human
cuccccacgccuggacuaagag

SEQ ID NO: 333434 - RNA, 22 nt, Human
gccacaggucggcuagaggguc

SEQ ID NO: 333435 - RNA, 23 nt, Human
ugacacccucauugugugucgca

SEQ ID NO: 333436 - RNA, 22 nt, Human
gcaggggcugagcaccagcggg

SEQ ID NO: 333437 - RNA, 22 nt, Human
cggcagagcccugagucagccu

SEQ ID NO: 333438 - RNA, 22 nt, Human
gccaggcaggccacgcuguguu

SEQ ID NO: 333439 - RNA, 22 nt, Human
cagggccucugugggcucucuc

SEQ ID NO: 333440 - RNA, 22 nt, Human
gguguugcaguugaagacuggu

SEQ ID NO: 333441 - RNA, 22 nt, Human
aagguccuguagccacagagcc

SEQ ID NO: 333442 - RNA, 22 nt, Human
cagaguccugcaccagcuccag

SEQ ID NO: 333443 - RNA, 22 nt, Human
agcaggaaggggaugaugggca

SEQ ID NO: 333444 - RNA, 22 nt, Human
gagcagcaggccagguugcagg

SEQ ID NO: 333445 - RNA, 22 nt, Human
ggcuggcuggcuuagcagagga

SEQ ID NO: 333446 - RNA, 19 nt, Human
cagcaaacacuguaaaugg

SEQ ID NO: 333447 - RNA, 22 nt, Human
uccugaccacuaggaccaggcu

SEQ ID NO: 333448 - RNA, 22 nt, Human
ugcacaguuggcuacaucgugg

SEQ ID NO: 333449 - RNA, 23 nt, Human
cguuuuuuccucagauguucugg

SEQ ID NO: 333450 - RNA, 22 nt, Human
ugcugugcuggcggcagaggcc

SEQ ID NO: 333451 - RNA, 22 nt, Human
ggcugcugcccaccccugcaug

SEQ ID NO: 333452 - RNA, 22 nt, Human
gucuccugaggcauccauugaa

SEQ ID NO: 333453 - RNA, 22 nt, Human
acaagguugauucuggcaucug

SEQ ID NO: 333454 - RNA, 22 nt, Human
cagagccuuaguucuccuagaa

SEQ ID NO: 333455 - RNA, 21 nt, Human
agggccucuguguacuggggg

SEQ ID NO: 333456 - RNA, 22 nt, Human
ccucuucuaggacguccuugug

SEQ ID NO: 333457 - RNA, 22 nt, Human
gggagcugaaggagccggcggg

SEQ ID NO: 333458 - RNA, 22 nt, Human
gcguuggggaccccgaagcugg

SEQ ID NO: 333459 - RNA, 22 nt, Human
uauuuggauagacagggagaug

SEQ ID NO: 333460 - RNA, 22 nt, Human
aaugaguuuguucuauuauuug

SEQ ID NO: 333461 - RNA, 22 nt, Human
cggagaggugggggcagcaucu

SEQ ID NO: 333462 - RNA, 22 nt, Human
caugccugccuggugggcgugg

SEQ ID NO: 333463 - RNA, 22 nt, Human
auuuugacauugcggcauugcu

SEQ ID NO: 333464 - RNA, 22 nt, Human
ugucugccugcgggccggcaca

SEQ ID NO: 333465 - RNA, 22 nt, Human
ggagcgugcacuccaggcccuu

SEQ ID NO: 333466 - RNA, 22 nt, Human
gcaguaaauugagagucauguu

SEQ ID NO: 333467 - RNA, 22 nt, Human
ugcugcccacuguauuucucca

SEQ ID NO: 333468 - RNA, 22 nt, Human
uugucgggcuuacgcagggcca

SEQ ID NO: 333469 - RNA, 22 nt, Human
aggcugcugccuuggagagugu

SEQ ID NO: 333470 - RNA, 22 nt, Human
ggcagaggaagcuggaaguggg

SEQ ID NO: 333471 - RNA, 22 nt, Human
aacugguucuggaggcugcagg

SEQ ID NO: 333472 - RNA, 22 nt, Human
auggguggccccgugugcaguc

SEQ ID NO: 333473 - RNA, 22 nt, Human
uuguuuaaagaacuucugacuu

SEQ ID NO: 333474 - RNA, 22 nt, Human
gggcuggagagucccacguggg

SEQ ID NO: 333475 - RNA, 22 nt, Human
guuugcaaauuguguuaaagcu

SEQ ID NO: 333476 - RNA, 22 nt, Human
gugcuccaggucgcucagagag

SEQ ID NO: 333477 - RNA, 22 nt, Human
auguuguugaacucuuugcaug

SEQ ID NO: 333478 - RNA, 22 nt, Human
uggccuugcccagcgccuaggu

SEQ ID NO: 333479 - RNA, 19 nt, Human
aacuacagcgcacuguccu

SEQ ID NO: 333480 - RNA, 22 nt, Human
gggaagugcccucuucaggaga

SEQ ID NO: 333481 - RNA, 22 nt, Human
uagggagugcguagcagggugg

SEQ ID NO: 333482 - RNA, 22 nt, Human
uuccccuugauaaugcaguaag

SEQ ID NO: 333483 - RNA, 19 nt, Human
uccugcccaccagccaggg

SEQ ID NO: 333484 - RNA, 22 nt, Human
caguuuuucaaaauuacaugau

SEQ ID NO: 333485 - RNA, 22 nt, Human
uggccucuccuggcagcaucca

SEQ ID NO: 333486 - RNA, 22 nt, Human
augauugaaaaugacauugcca

SEQ ID NO: 333487 - RNA, 22 nt, Human
ccagcugcugcaccgugcaugg

SEQ ID NO: 333488 - RNA, 22 nt, Human
cacccucaagcaguggcacgug

SEQ ID NO: 333489 - RNA, 18 nt, Human
ucaugcaaacgcuucaua

SEQ ID NO: 333490 - RNA, 22 nt, Human
ucaugacaacuugcacaguuuu

SEQ ID NO: 333491 - RNA, 22 nt, Human
ucccacugucuucucgugcucg

SEQ ID NO: 333492 - RNA, 22 nt, Human
acaguccuguacaggccauauc

SEQ ID NO: 333493 - RNA, 22 nt, Human
gccuggcaaggcccuguugacu

SEQ ID NO: 333494 - RNA, 21 nt, Human
ugaggccugccagucucagaa

SEQ ID NO: 333495 - RNA, 21 nt, Human
ccaccaggucuucugcucggg

SEQ ID NO: 333496 - RNA, 19 nt, Human
caggauuguuuaaagcuuu

SEQ ID NO: 333497 - RNA, 22 nt, Human
agagcuagaaggaagcauuucu

SEQ ID NO: 333498 - RNA, 22 nt, Human
cagagccacugucugccaggca

SEQ ID NO: 333499 - RNA, 22 nt, Human
cacuguugaagauacuuccucu

SEQ ID NO: 333500 - RNA, 22 nt, Human
ugcagugaugcuucuggcucag

SEQ ID NO: 333501 - RNA, 22 nt, Human
augaauuguccgauguugugca

SEQ ID NO: 333502 - RNA, 17 nt, Human
aguuuuuggaccugugu

SEQ ID NO: 333503 - RNA, 22 nt, Human
ggcagagcuugcagugagccga

SEQ ID NO: 333504 - RNA, 22 nt, Human
ucuuccagauacuuccugacuu

SEQ ID NO: 333505 - RNA, 22 nt, Human
uuauguauggauggcugaaagu

SEQ ID NO: 333506 - RNA, 22 nt, Human
ggcuauguguccagcaucuuug

SEQ ID NO: 333507 - RNA, 22 nt, Human
gccuggagcucggcugagggcg

SEQ ID NO: 333508 - RNA, 22 nt, Human
cccguguggaugcgcuggugcu

SEQ ID NO: 333509 - RNA, 22 nt, Human
aagggugguguaggagaucaaa

SEQ ID NO: 333510 - RNA, 22 nt, Human
gggcucggcaucuguggacucu

SEQ ID NO: 333511 - RNA, 22 nt, Human
ugcugcucuucaccauggccuc

SEQ ID NO: 333512 - RNA, 22 nt, Human
cuucucggccguguggaugcgc

SEQ ID NO: 333513 - RNA, 22 nt, Human
cagugcugcaggcgccugcggu

SEQ ID NO: 333514 - RNA, 17 nt, Human
gugagcugagucaggac

SEQ ID NO: 333515 - RNA, 22 nt, Human
aucgaguucugaugucccuucu

SEQ ID NO: 333516 - RNA, 22 nt, Human
uuuggucuggaaucuucagggu

SEQ ID NO: 333517 - RNA, 22 nt, Human
uccaggcuccccugcgugcucc

SEQ ID NO: 333518 - RNA, 20 nt, Human
uccuccuugcagagcccaga

SEQ ID NO: 333519 - RNA, 22 nt, Human
uuguuuguaaggcucuuagaau

SEQ ID NO: 333520 - RNA, 22 nt, Human
caggaaugccaaccagugcaug

SEQ ID NO: 333521 - RNA, 22 nt, Human
gggggcuggacuuucccacaca

SEQ ID NO: 333522 - RNA, 22 nt, Human
ugcuuggagaaucagucccagc

SEQ ID NO: 333523 - RNA, 22 nt, Human
uuuccaaggaugugucucucua

SEQ ID NO: 333524 - RNA, 22 nt, Human
cugagcagaagggugcacgugc

SEQ ID NO: 333525 - RNA, 22 nt, Human
aagcgcagacacagagagugga

SEQ ID NO: 333526 - RNA, 22 nt, Human
agcuccugaaaagcgcuugcuu

SEQ ID NO: 333527 - RNA, 22 nt, Human
cuugaaguggagcuuuugaaau

SEQ ID NO: 333528 - RNA, 22 nt, Human
caguuuuaugaaugcuuauuag

SEQ ID NO: 333529 - RNA, 22 nt, Human
uucuuugcccauguuuccuaag

SEQ ID NO: 333530 - RNA, 22 nt, Human
ccaaagcuggcuuucaugguuu

SEQ ID NO: 333531 - RNA, 22 nt, Human
caugaccagagaggacggccag

SEQ ID NO: 333532 - RNA, 22 nt, Human
ugucuucuaccuugacagcauu

SEQ ID NO: 333533 - RNA, 22 nt, Human
ccagguaggagagucaacaugu

SEQ ID NO: 333534 - RNA, 22 nt, Human
cacugcccuggggguugccauc

SEQ ID NO: 333535 - RNA, 22 nt, Human
aguuggcauuuuauuuaaguau

SEQ ID NO: 333536 - RNA, 22 nt, Human
cagagggagcccuccaggagca

SEQ ID NO: 333537 - RNA, 22 nt, Human
ggcaagagggcagauggagugc

SEQ ID NO: 333538 - RNA, 19 nt, Human
uuuaaugugugcugcaauc

SEQ ID NO: 333539 - RNA, 22 nt, Human
aguuuccacuggagacacugug

SEQ ID NO: 333540 - RNA, 22 nt, Human
guguggcuaggauggcuuugcu

SEQ ID NO: 333541 - RNA, 22 nt, Human
ggcuguggucauuaggagguug

SEQ ID NO: 333542 - RNA, 22 nt, Human
gcagagcacccugcagugguau

SEQ ID NO: 333543 - RNA, 22 nt, Human
auuaaauuggacgcugggggaa

SEQ ID NO: 333544 - RNA, 19 nt, Human
ggcugccuucugcucaucu

SEQ ID NO: 333545 - RNA, 22 nt, Human
uccuuggcaugccgucuucucc

SEQ ID NO: 333546 - RNA, 22 nt, Human
gccaaaguccuccagccaugca

SEQ ID NO: 333547 - RNA, 20 nt, Human
ggccugagcauggcuggcag

SEQ ID NO: 333548 - RNA, 22 nt, Human
uuguaagacuguagaaugcaaa

SEQ ID NO: 333549 - RNA, 22 nt, Human
gccugcacucaaacacucucuu

SEQ ID NO: 333550 - RNA, 22 nt, Human
aauucaaggaucuguuaaaucu

SEQ ID NO: 333551 - RNA, 22 nt, Human
caguuuccugaagagaaagaau

SEQ ID NO: 333552 - RNA, 20 nt, Human
ucacuguaauugccuacauu

SEQ ID NO: 333553 - RNA, 22 nt, Human
uuccaaggagagcucgaccuca

SEQ ID NO: 333554 - RNA, 22 nt, Human
cugucaaauggaaacuuauccu

SEQ ID NO: 333555 - RNA, 22 nt, Human
uggcugcccccucccguggaca

SEQ ID NO: 333556 - RNA, 22 nt, Human
gccggacugcugcagcugcuag

SEQ ID NO: 333557 - RNA, 22 nt, Human
uccaggagugauaaggccacug

SEQ ID NO: 333558 - RNA, 22 nt, Human
uuuaggcucaaaagaguuggug

SEQ ID NO: 333559 - RNA, 22 nt, Human
gggcugcacuagggcaagguga

SEQ ID NO: 333560 - RNA, 22 nt, Human
auugcacaucugcacuacagcc

SEQ ID NO: 333561 - RNA, 22 nt, Human
uuuucuuggaguggcuguccuu

SEQ ID NO: 333562 - RNA, 19 nt, Human
cucugccucuggcuguggc

SEQ ID NO: 333563 - RNA, 22 nt, Human
gcuuccaaugcuucuaucacau

SEQ ID NO: 333564 - RNA, 22 nt, Human
ggccucugccccgcggggcucg

SEQ ID NO: 333565 - RNA, 22 nt, Human
ggagcugcucagagccaguccc

SEQ ID NO: 333566 - RNA, 22 nt, Human
caacuuuagaccccaaguagcu

SEQ ID NO: 333567 - RNA, 22 nt, Human
cuucuggcguuggaggucugag

SEQ ID NO: 333568 - RNA, 22 nt, Human
ucacgugagggaccugugucug

SEQ ID NO: 333569 - RNA, 22 nt, Human
uuguacuuaaauaugcaaauag

SEQ ID NO: 333570 - RNA, 22 nt, Human
acauuugauauggaguugugua

SEQ ID NO: 333571 - RNA, 22 nt, Human
cagcuuuugcagacuucuugcc

SEQ ID NO: 333572 - RNA, 22 nt, Human
acagcuggaggucugugagcac

SEQ ID NO: 333573 - RNA, 22 nt, Human
ugcaugacaauugccgucaagu

SEQ ID NO: 333574 - RNA, 22 nt, Human
agcauggccucccgggccuggc

SEQ ID NO: 333575 - RNA, 22 nt, Human
ggccgugcuccaaagucaucgu

SEQ ID NO: 333576 - RNA, 22 nt, Human
gacaggugcuaagggaccuggc

SEQ ID NO: 333577 - RNA, 22 nt, Human
ccaggagaaugggauuacccua

SEQ ID NO: 333578 - RNA, 23 nt, Human
agugaugucacccacagacaagg

SEQ ID NO: 333579 - RNA, 22 nt, Human
ugcauaaacuucucugguguga

SEQ ID NO: 333580 - RNA, 18 nt, Human
uggggggcuugucugaag

SEQ ID NO: 333581 - RNA, 21 nt, Human
gccugggaagagaaagguaag

SEQ ID NO: 333582 - RNA, 22 nt, Human
gcagugacagacaacuguuuga

SEQ ID NO: 333583 - RNA, 22 nt, Human
cuccuuaaagggagcagcagcu

SEQ ID NO: 333584 - RNA, 22 nt, Human
aggaaauuuugaaucagugucu

SEQ ID NO: 333585 - RNA, 22 nt, Human
caggccugugacaccgugucug

SEQ ID NO: 333586 - RNA, 19 nt, Human
acucaggcuuccucugagg

SEQ ID NO: 333587 - RNA, 20 nt, Human
cucuuuucacucucaguggu

SEQ ID NO: 333588 - RNA, 22 nt, Human
cacucacccgguccuucccagu

SEQ ID NO: 333589 - RNA, 22 nt, Human
ugccgcugucgccaccauggcu

SEQ ID NO: 333590 - RNA, 22 nt, Human
agugauguagguggauucuggc

SEQ ID NO: 333591 - RNA, 22 nt, Human
agccagugcagcuggaaauuca

SEQ ID NO: 333592 - RNA, 22 nt, Human
uuugcuugauuaggauauggaa

SEQ ID NO: 333593 - RNA, 22 nt, Human
ggccaaggcucuugagggcuga

SEQ ID NO: 333594 - RNA, 22 nt, Human
ucaguguagcagacuuguagcc

SEQ ID NO: 333595 - RNA, 22 nt, Human
aguguauuugccuauaaaaaug

SEQ ID NO: 333596 - RNA, 22 nt, Human
gggcggggcuuccguccuccac

SEQ ID NO: 333597 - RNA, 18 nt, Human
uaaguggacacaggucac

SEQ ID NO: 333598 - RNA, 22 nt, Human
ugugucuuuggcgaugucugga

SEQ ID NO: 333599 - RNA, 22 nt, Human
cuuggcugaacuccaggaugca

SEQ ID NO: 333600 - RNA, 22 nt, Human
ggugagaggcagugcuguggaa

SEQ ID NO: 333601 - RNA, 22 nt, Human
gccuuuuaaggcagagggagau

SEQ ID NO: 333602 - RNA, 22 nt, Human
aggcuguagaucuagacaugua

SEQ ID NO: 333603 - RNA, 22 nt, Human
cuggccgcaguguggaguugug

SEQ ID NO: 333604 - RNA, 22 nt, Human
ugggaaggggagcuggaaagga

SEQ ID NO: 333605 - RNA, 22 nt, Human
uacaggcucuugucagacguau

SEQ ID NO: 333606 - RNA, 22 nt, Human
cugcagggcccaaggucaacgg

SEQ ID NO: 333607 - RNA, 22 nt, Human
cugccguugugaagcucuuaga

SEQ ID NO: 333608 - RNA, 22 nt, Human
ccacuguuuccuuucugcuggc

SEQ ID NO: 333609 - RNA, 22 nt, Human
ugcugcuuguuuuguaaauaaa

SEQ ID NO: 333610 - RNA, 22 nt, Human
uguuaccauaggucagaacguu

SEQ ID NO: 333611 - RNA, 22 nt, Human
cuccugcagcccucagcagcca

SEQ ID NO: 333612 - RNA, 22 nt, Human
gccacaggaaagcacccuggag

SEQ ID NO: 333613 - RNA, 17 nt, Human
agccugcugaucucaca

SEQ ID NO: 333614 - RNA, 22 nt, Human
gacuuugguucagggcucagag

SEQ ID NO: 333615 - RNA, 22 nt, Human
gucuugcacuuaccuaagaacu

SEQ ID NO: 333616 - RNA, 18 nt, Human
ggaaaaggagugucuagc

SEQ ID NO: 333617 - RNA, 22 nt, Human
agaacauaucuguuuucuaacu

SEQ ID NO: 333618 - RNA, 22 nt, Human
ccacugcuaacuugcugcagcu

SEQ ID NO: 333619 - RNA, 22 nt, Human
uggcccgggaguuuugaagagu

SEQ ID NO: 333620 - RNA, 22 nt, Human
ggcagaggagcuggaaacaugg

SEQ ID NO: 333621 - RNA, 22 nt, Human
uuuucaguugugcucucuaguu

SEQ ID NO: 333622 - RNA, 19 nt, Human
ucuuucauuucuagcucug

SEQ ID NO: 333623 - RNA, 22 nt, Human
gccaggucgucuccauguccaa

SEQ ID NO: 333624 - RNA, 21 nt, Human
auacaagaagauggcagucug

SEQ ID NO: 333625 - RNA, 22 nt, Human
aaggcuccagugaaugcuggca

SEQ ID NO: 333626 - RNA, 21 nt, Human
uccaggagcacgggacuagga

SEQ ID NO: 333627 - RNA, 22 nt, Human
cuggcuccauccuugagcucug

SEQ ID NO: 333628 - RNA, 22 nt, Human
uaaaaucaugacagauugacau

SEQ ID NO: 333629 - RNA, 22 nt, Human
cccacugcugcucuccauggca

SEQ ID NO: 333630 - RNA, 22 nt, Human
guucuucaggcugugcucuaga

SEQ ID NO: 333631 - RNA, 22 nt, Human
gacacugcacuuggggcccaca

SEQ ID NO: 333632 - RNA, 22 nt, Human
gaaaggagaggguuaaggagcu

SEQ ID NO: 333633 - RNA, 22 nt, Human
aagcauuuuagauaaagcauca

SEQ ID NO: 333634 - RNA, 22 nt, Human
cacuuggaggaaggccuauuca

SEQ ID NO: 333635 - RNA, 22 nt, Human
cugcagggcagggccuccuggc

SEQ ID NO: 333636 - RNA, 22 nt, Human
augauuuguuaacagacuuaau

SEQ ID NO: 333637 - RNA, 22 nt, Human
cugugugcagggcacaauggaa

SEQ ID NO: 333638 - RNA, 22 nt, Human
auggaguugagcucuguugucc

SEQ ID NO: 333639 - RNA, 22 nt, Human
ccaagaggggaagggccgcagc

SEQ ID NO: 333640 - RNA, 22 nt, Human
ucucgugcaggccuugcucgga

SEQ ID NO: 333641 - RNA, 22 nt, Human
caggcgggcaggugcggccccu

SEQ ID NO: 333642 - RNA, 22 nt, Human
ugucauggacuggauuucugcu

SEQ ID NO: 333643 - RNA, 22 nt, Human
gcugcugcuugaaggcucggag

SEQ ID NO: 333644 - RNA, 22 nt, Human
aguguguccaggaagcagaugg

SEQ ID NO: 333645 - RNA, 22 nt, Human
ugaacagugugagggugugacc

SEQ ID NO: 333646 - RNA, 22 nt, Human
uggauguuugaaguugcaugug

SEQ ID NO: 333647 - RNA, 22 nt, Human
gaauuguacugcaaucagggga

SEQ ID NO: 333648 - RNA, 22 nt, Human
uauuuguuucuaguggcagcaa

SEQ ID NO: 333649 - RNA, 22 nt, Human
gcuugcugaacaggaaccuggc

SEQ ID NO: 333650 - RNA, 22 nt, Human
uggcagaaugaagacuggggcc

SEQ ID NO: 333651 - RNA, 21 nt, Human
gcaggguuugugcugugaguu

SEQ ID NO: 333652 - RNA, 22 nt, Human
uuugaaaggagcuuuauccaga

SEQ ID NO: 333653 - RNA, 20 nt, Human
ucagugggaaagugagagug

SEQ ID NO: 333654 - RNA, 22 nt, Human
ccuccugggccuugcucuguga

SEQ ID NO: 333655 - RNA, 20 nt, Human
cuuguuaaauaugcagguag

SEQ ID NO: 333656 - RNA, 22 nt, Human
ugugcccuguuaaaugcacagu

SEQ ID NO: 333657 - RNA, 22 nt, Human
gcaaaacagucgaugccuccca

SEQ ID NO: 333658 - RNA, 22 nt, Human
uccuccuuuccccgcuggagcc

SEQ ID NO: 333659 - RNA, 22 nt, Human
cagcccaggacugcagguguuu

SEQ ID NO: 333660 - RNA, 22 nt, Human
ucccacacagcccgcucaccgg

SEQ ID NO: 333661 - RNA, 22 nt, Human
acagacacaggcguggagucgc

SEQ ID NO: 333662 - RNA, 22 nt, Human
cagcccacugccucugugguag

SEQ ID NO: 333663 - RNA, 23 nt, Human
gcacagagcaguuaggggaagau

SEQ ID NO: 333664 - RNA, 22 nt, Human
acauucuacaguuaaccauuag

SEQ ID NO: 333665 - RNA, 22 nt, Human
gccauguucuugaaucuggguc

SEQ ID NO: 333666 - RNA, 22 nt, Human
gcucguacaccagcguggaggu

SEQ ID NO: 333667 - RNA, 22 nt, Human
auuuggcauaggcagaggccca

SEQ ID NO: 333668 - RNA, 22 nt, Human
ucucagaguuccucuggagucc

SEQ ID NO: 333669 - RNA, 22 nt, Human
aggcagugguguuugcuggugg

SEQ ID NO: 333670 - RNA, 22 nt, Human
acacuggagauggaccucacaa

SEQ ID NO: 333671 - RNA, 22 nt, Human
agaugcugccaggccccucagu

SEQ ID NO: 333672 - RNA, 22 nt, Human
agcuggugugccaguuccaguu

SEQ ID NO: 333673 - RNA, 22 nt, Human
ugacccucuuccccaugcgcuc

SEQ ID NO: 333674 - RNA, 22 nt, Human
aaaguaauugugguucuugcca

SEQ ID NO: 333675 - RNA, 22 nt, Human
aucuucccaggcuggggagagg

SEQ ID NO: 333676 - RNA, 22 nt, Human
gagggugguggcuuaaggugcu

SEQ ID NO: 333677 - RNA, 22 nt, Human
cagagcugagucuucaagguug

SEQ ID NO: 333678 - RNA, 22 nt, Human
ggagguggagcuggaaguucca

SEQ ID NO: 333679 - RNA, 22 nt, Human
cauuguguauuucuguaguacu

SEQ ID NO: 333680 - RNA, 22 nt, Human
uguccugugcacuguagcaugu

SEQ ID NO: 333681 - RNA, 22 nt, Human
caggggcggguaaaaggccucc

SEQ ID NO: 333682 - RNA, 22 nt, Human
ccccacaccugccgggcagcag

SEQ ID NO: 333683 - RNA, 22 nt, Human
cuuugugauaguguuaagacca

SEQ ID NO: 333684 - RNA, 20 nt, Human
guggcagugguggcagcagu

SEQ ID NO: 333685 - RNA, 22 nt, Human
auuaguguuguggcuucauggc

SEQ ID NO: 333686 - RNA, 22 nt, Human
ccgcuguccuggagcugcugcu

SEQ ID NO: 333687 - RNA, 22 nt, Human
cagcugcuguucaguuuuguuu

SEQ ID NO: 333688 - RNA, 22 nt, Human
guggcauuugggagaugcgugg

SEQ ID NO: 333689 - RNA, 20 nt, Human
ucuuuuauuggcagauccug

SEQ ID NO: 333690 - RNA, 22 nt, Human
auuuccaggaguugaggucuga

SEQ ID NO: 333691 - RNA, 22 nt, Human
auguucaaguaccuuugugucu

SEQ ID NO: 333692 - RNA, 23 nt, Human
uugguuacuggauuugaggggcc

SEQ ID NO: 333693 - RNA, 22 nt, Human
cugcaccgugucucgggcugcc

SEQ ID NO: 333694 - RNA, 22 nt, Human
guggaaauuuuaggaucaucuu

SEQ ID NO: 333695 - RNA, 22 nt, Human
guggcagagagcaagugucuga

SEQ ID NO: 333696 - RNA, 22 nt, Human
aggugcuuggcucgugcacaca

SEQ ID NO: 333697 - RNA, 22 nt, Human
acacuggacucagaggccagaa

SEQ ID NO: 333698 - RNA, 22 nt, Human
gggaggugauuaggaccaugua

SEQ ID NO: 333699 - RNA, 22 nt, Human
acagcugugggcucugcauaua

SEQ ID NO: 333700 - RNA, 22 nt, Human
cagcugccuguauuguccucau

SEQ ID NO: 333701 - RNA, 22 nt, Human
agcaaggcagcuuucacugcuu

SEQ ID NO: 333702 - RNA, 22 nt, Human
gucagcgugcucagccuauuau

SEQ ID NO: 333703 - RNA, 22 nt, Human
cagaugaaguaggugacgagca

SEQ ID NO: 333704 - RNA, 22 nt, Human
ugccauagcaaugguaagcuga

SEQ ID NO: 333705 - RNA, 22 nt, Human
ugguaaaugucuaacaaucacu

SEQ ID NO: 333706 - RNA, 22 nt, Human
ggacaucuguugugguagagga

SEQ ID NO: 333707 - RNA, 21 nt, Human
agagacugucacugcaguacc

SEQ ID NO: 333708 - RNA, 22 nt, Human
ggugcggagacuccaugaggcc

SEQ ID NO: 333709 - RNA, 22 nt, Human
cagcuuugccaaguaaggucuu

SEQ ID NO: 333710 - RNA, 20 nt, Human
agugauuuguuaguacauug

SEQ ID NO: 333711 - RNA, 22 nt, Human
agucagucugcuagccugugga

SEQ ID NO: 333712 - RNA, 18 nt, Human
acagggagggcgcugggg

SEQ ID NO: 333713 - RNA, 22 nt, Human
auuuggucuacauuuuccaaau

SEQ ID NO: 333714 - RNA, 22 nt, Human
gcacaaaagguacuucauguag

SEQ ID NO: 333715 - RNA, 22 nt, Human
uccagguccuacuggcccauag

SEQ ID NO: 333716 - RNA, 22 nt, Human
caaaauuguugaugcugcuuug

SEQ ID NO: 333717 - RNA, 22 nt, Human
ggagaggguagggguccugccc

SEQ ID NO: 333718 - RNA, 22 nt, Human
ccucuuccacugggccccaucc

SEQ ID NO: 333719 - RNA, 22 nt, Human
uugguuaccuucagaaaugagu

SEQ ID NO: 333720 - RNA, 21 nt, Human
gcuccuggugcugcguggcgc

SEQ ID NO: 333721 - RNA, 17 nt, Human
uuagagcuacauguuga

SEQ ID NO: 333722 - RNA, 22 nt, Human
gaugggcaucaaacaugacgug

SEQ ID NO: 333723 - RNA, 22 nt, Human
cugcugccuuccaaaggccagg

SEQ ID NO: 333724 - RNA, 22 nt, Human
gcccucugguggccgccucggc

SEQ ID NO: 333725 - RNA, 22 nt, Human
aauaguguauuuuucaaaauua

SEQ ID NO: 333726 - RNA, 22 nt, Human
guuguuuuugaacggugguggc

SEQ ID NO: 333727 - RNA, 22 nt, Human
cagucucuggugaguugacagu

SEQ ID NO: 333728 - RNA, 22 nt, Human
cuugaaagucagcagaguggau

SEQ ID NO: 333729 - RNA, 22 nt, Human
gcagcccaggcucgcucacugc

SEQ ID NO: 333730 - RNA, 22 nt, Human
aagcaaaagguuacacuucugg

SEQ ID NO: 333731 - RNA, 22 nt, Human
gcaaggagcaccuuucuggaac

SEQ ID NO: 333732 - RNA, 22 nt, Human
cuggcacaggauccgagaccuu

SEQ ID NO: 333733 - RNA, 22 nt, Human
agccccaggcccggacgccucu

SEQ ID NO: 333734 - RNA, 22 nt, Human
ugcgccugcgcaaagguuucug

SEQ ID NO: 333735 - RNA, 18 nt, Human
aggagcggcugcggcugc

SEQ ID NO: 333736 - RNA, 22 nt, Human
aaagcagcagcacguggaagag

SEQ ID NO: 333737 - RNA, 22 nt, Human
ugaggccugaagccuggagccu

SEQ ID NO: 333738 - RNA, 22 nt, Human
uccaaauagcuggaugauggug

SEQ ID NO: 333739 - RNA, 22 nt, Human
aggccagggcacugcucuuuag

SEQ ID NO: 333740 - RNA, 22 nt, Human
cugggaagggacgccagugccu

SEQ ID NO: 333741 - RNA, 22 nt, Human
uuccuccagccuggagcacuuc

SEQ ID NO: 333742 - RNA, 22 nt, Human
cugagcagucuagccagguguu

SEQ ID NO: 333743 - RNA, 22 nt, Human
aaggcaguuaauuuggcuagaa

SEQ ID NO: 333744 - RNA, 18 nt, Human
uggguggcuagggaguuu

SEQ ID NO: 333745 - RNA, 22 nt, Human
auguaagagcuuugcagggaaa

SEQ ID NO: 333746 - RNA, 22 nt, Human
cuggugcuguagccugauugag

SEQ ID NO: 333747 - RNA, 22 nt, Human
uggcaauguggaaugguccagg

SEQ ID NO: 333748 - RNA, 17 nt, Human
agcagcuggguugaucu

SEQ ID NO: 333749 - RNA, 22 nt, Human
acucuguuugcagguagcucag

SEQ ID NO: 333750 - RNA, 21 nt, Human
gucuuuuuaauugcgauuucc

SEQ ID NO: 333751 - RNA, 22 nt, Human
uagcugcuugaccaggcagugg

SEQ ID NO: 333752 - RNA, 22 nt, Human
cccucucccugcagaauguggc

SEQ ID NO: 333753 - RNA, 22 nt, Human
gccuggcgccgggcugccuguc

SEQ ID NO: 333754 - RNA, 22 nt, Human
ccugcgcgucugggucugucuc

SEQ ID NO: 333755 - RNA, 22 nt, Human
ucaccggcagacguggccugau

SEQ ID NO: 333756 - RNA, 22 nt, Human
gaggagaggcuggacgcgguga

SEQ ID NO: 333757 - RNA, 22 nt, Human
gagucgagcagaaagccgucgg

SEQ ID NO: 333758 - RNA, 21 nt, Human
uaaaagaugacaagacagcuc

SEQ ID NO: 333759 - RNA, 22 nt, Human
gauguggcugcucuaaagccca

SEQ ID NO: 333760 - RNA, 22 nt, Human
cucagucucuugggcugugaag

SEQ ID NO: 333761 - RNA, 22 nt, Human
ugcaaaaagagcgaggagcccu

SEQ ID NO: 333762 - RNA, 22 nt, Human
gcagaagcccggucagcgcacg

SEQ ID NO: 333763 - RNA, 22 nt, Human
gcccagcgagcagagguggacg

SEQ ID NO: 333764 - RNA, 22 nt, Human
uggcacaguuaaaguuguagaa

SEQ ID NO: 333765 - RNA, 22 nt, Human
gcugcaggcucugcaggaauug

SEQ ID NO: 333766 - RNA, 22 nt, Human
aaagcacauuacaagcucaguc

SEQ ID NO: 333767 - RNA, 21 nt, Human
acaaauuguuuauauaggaag

SEQ ID NO: 333768 - RNA, 22 nt, Human
agaugcugcuccacaggccagg

SEQ ID NO: 333769 - RNA, 22 nt, Human
gccagguaugaauuacgcacga

SEQ ID NO: 333770 - RNA, 22 nt, Human
ccucuggccuaggccgggagag

SEQ ID NO: 333771 - RNA, 22 nt, Human
cucacagcugcuucaggaucca

SEQ ID NO: 333772 - RNA, 22 nt, Human
ccaucuucucuugaaccuccuu

SEQ ID NO: 333773 - RNA, 22 nt, Human
ucuccacaccagaaggagcuga

SEQ ID NO: 333774 - RNA, 22 nt, Human
gcagcucucuggccugcccugg

SEQ ID NO: 333775 - RNA, 22 nt, Human
ugaacaugcuguugauggccug

SEQ ID NO: 333776 - RNA, 21 nt, Human
auucugaguugucagucuuca

SEQ ID NO: 333777 - RNA, 22 nt, Human
aagcuggccuguaccugcugag

SEQ ID NO: 333778 - RNA, 22 nt, Human
gcuuuuauuucuucacaaaagu

SEQ ID NO: 333779 - RNA, 22 nt, Human
aggagccauugcaggauggcag

SEQ ID NO: 333780 - RNA, 18 nt, Human
uccaccgcgugcaccucu

SEQ ID NO: 333781 - RNA, 22 nt, Human
cgcagcugcugcucugaaacag

SEQ ID NO: 333782 - RNA, 22 nt, Human
cgcgcugcagacagcggaggcc

SEQ ID NO: 333783 - RNA, 22 nt, Human
auauauacuuugacacauucug

SEQ ID NO: 333784 - RNA, 22 nt, Human
aggaagccuggaguccugccca

SEQ ID NO: 333785 - RNA, 22 nt, Human
acugcacuccagcccgagcaac

SEQ ID NO: 333786 - RNA, 22 nt, Human
uuggaaauguagaaaagcagau

SEQ ID NO: 333787 - RNA, 22 nt, Human
guuuccuuuuggaauuagagcu

SEQ ID NO: 333788 - RNA, 22 nt, Human
uuuccagaaauaccauuuggug

SEQ ID NO: 333789 - RNA, 22 nt, Human
uggaaaauauuuaggugaauga

SEQ ID NO: 333790 - RNA, 22 nt, Human
ggcggugguugagaggacggcg

SEQ ID NO: 333791 - RNA, 22 nt, Human
ugcccucagcagcagcuccugc

SEQ ID NO: 333792 - RNA, 22 nt, Human
ugaaguuguuaagguugccauu

SEQ ID NO: 333793 - RNA, 22 nt, Human
gccccagcagcaaugcgguuga

SEQ ID NO: 333794 - RNA, 23 nt, Human
ggaggcacuuaggcagagcagag

SEQ ID NO: 333795 - RNA, 22 nt, Human
gcagcugcgcugguguggggca

SEQ ID NO: 333796 - RNA, 22 nt, Human
uccgggagcugaacgucuugcg

SEQ ID NO: 333797 - RNA, 22 nt, Human
uggagccagcaggacucagagg

SEQ ID NO: 333798 - RNA, 22 nt, Human
cagcuuguuuacaugcuuauuc

SEQ ID NO: 333799 - RNA, 22 nt, Human
ccucuuccuucucacuguggaa

SEQ ID NO: 333800 - RNA, 22 nt, Human
agccagcuaccggggcuccugg

SEQ ID NO: 333801 - RNA, 20 nt, Human
cugcuccacccggcucucag

SEQ ID NO: 333802 - RNA, 22 nt, Human
ugguuuguauauguuugugaga

SEQ ID NO: 333803 - RNA, 18 nt, Human
uccuuucaccccuucucu

SEQ ID NO: 333804 - RNA, 22 nt, Human
uuauuugcccauguuuagcaga

SEQ ID NO: 333805 - RNA, 22 nt, Human
ugcuccguucuucugcuucuug

SEQ ID NO: 333806 - RNA, 19 nt, Human
acugcagggaggaggugug

SEQ ID NO: 333807 - RNA, 22 nt, Human
ccucccagaugugcccaaugga

SEQ ID NO: 333808 - RNA, 22 nt, Human
ggcgcaguugagcgugcuguuc

SEQ ID NO: 333809 - RNA, 22 nt, Human
cagcuggacugggauguagcga

SEQ ID NO: 333810 - RNA, 22 nt, Human
aucccuggccacgaagcugccc

SEQ ID NO: 333811 - RNA, 22 nt, Human
ggaagaggcugaggccaugcug

SEQ ID NO: 333812 - RNA, 22 nt, Human
cuccacagccccuccaguggca

SEQ ID NO: 333813 - RNA, 23 nt, Human
aaaguacuuaaucugcaaaccac

SEQ ID NO: 333814 - RNA, 23 nt, Human
gggcugcuccaggccaaggcugg

SEQ ID NO: 333815 - RNA, 17 nt, Human
ucugcagggggccgugu

SEQ ID NO: 333816 - RNA, 22 nt, Human
aaggaggaauguagccagcucc

SEQ ID NO: 333817 - RNA, 22 nt, Human
uggaagggagcuggaauuugga

SEQ ID NO: 333818 - RNA, 22 nt, Human
agggccagcagcuuggccaacc

SEQ ID NO: 333819 - RNA, 22 nt, Human
aaauucuguccugaaugccauu

SEQ ID NO: 333820 - RNA, 22 nt, Human
agccacagucuguagccagcuu

SEQ ID NO: 333821 - RNA, 22 nt, Human
acaguucuguccuagacuucgu

SEQ ID NO: 333822 - RNA, 22 nt, Human
cuucauuaaugucuauaaguuu

SEQ ID NO: 333823 - RNA, 22 nt, Human
gcacagagagcagugggggaca

SEQ ID NO: 333824 - RNA, 22 nt, Human
ugucuguccaucugucugggac

SEQ ID NO: 333825 - RNA, 22 nt, Human
aacacugagaggggaguggcac

SEQ ID NO: 333826 - RNA, 22 nt, Human
uuuggaaaugagaagccaccuu

SEQ ID NO: 333827 - RNA, 22 nt, Human
cccaggucgucagcaguguggu

SEQ ID NO: 333828 - RNA, 22 nt, Human
agagaugcuguggguagaggca

SEQ ID NO: 333829 - RNA, 22 nt, Human
ugcucccaaaccugacaggcuc

SEQ ID NO: 333830 - RNA, 22 nt, Human
cgcagcuucagggccaggaggg

SEQ ID NO: 333831 - RNA, 21 nt, Human
ucccucagaagcucuugguca

SEQ ID NO: 333832 - RNA, 22 nt, Human
uccguuuucacacugcuauaaa

SEQ ID NO: 333833 - RNA, 19 nt, Human
uuacaugacauaugaagga

SEQ ID NO: 333834 - RNA, 22 nt, Human
acggagcccgugucagguggga

SEQ ID NO: 333835 - RNA, 22 nt, Human
uucagagcuggugucuacagcu

SEQ ID NO: 333836 - RNA, 22 nt, Human
gcauaaaggacuauaaggauca

SEQ ID NO: 333837 - RNA, 22 nt, Human
aggcugucucaccucaggaggg

SEQ ID NO: 333838 - RNA, 22 nt, Human
cuauuuucccauaugguugaca

SEQ ID NO: 333839 - RNA, 22 nt, Human
ugucacagagcgugcaacagaa

SEQ ID NO: 333840 - RNA, 22 nt, Human
ggcagugaugucaaacagugaa

SEQ ID NO: 333841 - RNA, 22 nt, Human
gaacaguuucccuguagaaaau

SEQ ID NO: 333842 - RNA, 22 nt, Human
uuuaaacuaacaguacacguug

SEQ ID NO: 333843 - RNA, 22 nt, Human
uugagcugccuggcuguggcuc

SEQ ID NO: 333844 - RNA, 19 nt, Human
ugguucuccuuccacaguc

SEQ ID NO: 333845 - RNA, 22 nt, Human
uuggaaguucuuagccuuuuca

SEQ ID NO: 333846 - RNA, 22 nt, Human
acgccucugcagcugccgggcc

SEQ ID NO: 333847 - RNA, 22 nt, Human
cuggccucacagaggcuaagcc

SEQ ID NO: 333848 - RNA, 22 nt, Human
uccucccugcacucagugaagu

SEQ ID NO: 333849 - RNA, 22 nt, Human
gccugagccgccugagcggcgg

SEQ ID NO: 333850 - RNA, 22 nt, Human
uugaggagucaggggcacggaa

SEQ ID NO: 333851 - RNA, 22 nt, Human
gacggagcugguugcugcggcu

SEQ ID NO: 333852 - RNA, 22 nt, Human
auguggcuuucugcguuuucuc

SEQ ID NO: 333853 - RNA, 22 nt, Human
gcccagcugcacccuggugggu

SEQ ID NO: 333854 - RNA, 21 nt, Human
gcuggcugucucuuacacggu

SEQ ID NO: 333855 - RNA, 22 nt, Human
ugggcugcuuccucagcugaga

SEQ ID NO: 333856 - RNA, 22 nt, Human
auauuuguuuggcagaguucag

SEQ ID NO: 333857 - RNA, 22 nt, Human
cuggcuuucauggcgcaguuga

SEQ ID NO: 333858 - RNA, 22 nt, Human
ugcaaggcacccacucugcuuu

SEQ ID NO: 333859 - RNA, 22 nt, Human
cagcuccagcccaggcagcucc

SEQ ID NO: 333860 - RNA, 22 nt, Human
ccccaacccugguuccguggcg

SEQ ID NO: 333861 - RNA, 20 nt, Human
aaaaacaguaaugcugaaga

SEQ ID NO: 333862 - RNA, 18 nt, Human
gggcuuuacagaguggag

SEQ ID NO: 333863 - RNA, 18 nt, Human
gagaggagccagaauuuu

SEQ ID NO: 333864 - RNA, 22 nt, Human
guaggggccagaaagacuuaga

SEQ ID NO: 333865 - RNA, 22 nt, Human
guucuccaggggcuguucaucu

SEQ ID NO: 333866 - RNA, 22 nt, Human
ucagccuggcaggauggccugg

SEQ ID NO: 333867 - RNA, 19 nt, Human
ugguggaggccccauguuc

SEQ ID NO: 333868 - RNA, 22 nt, Human
auuuccuggaggaauggaagca

SEQ ID NO: 333869 - RNA, 22 nt, Human
acaagcgggccacagugcuggu

SEQ ID NO: 333870 - RNA, 22 nt, Human
ggcggccugugggucggccuca

SEQ ID NO: 333871 - RNA, 20 nt, Human
ggcagagcuaugucuguugc

SEQ ID NO: 333872 - RNA, 19 nt, Human
cucucagccugucuccuug

SEQ ID NO: 333873 - RNA, 22 nt, Human
uaaaaguuagcuaggacaaagu

SEQ ID NO: 333874 - RNA, 22 nt, Human
cucucuuuuucgugugccgaag

SEQ ID NO: 333875 - RNA, 22 nt, Human
ggcagcugaagaggaacuuugg

SEQ ID NO: 333876 - RNA, 20 nt, Human
gggcucugcauccaucagcc

SEQ ID NO: 333877 - RNA, 22 nt, Human
accuuuaugaaacagcugucgu

SEQ ID NO: 333878 - RNA, 22 nt, Human
uuguauuaaaauguguuucugu

SEQ ID NO: 333879 - RNA, 22 nt, Human
cccuggcucaggcagcuuuguu

SEQ ID NO: 333880 - RNA, 22 nt, Human
gccgugcgugcgcaggugcugu

SEQ ID NO: 333881 - RNA, 22 nt, Human
cugcacagucauuuccucucaa

SEQ ID NO: 333882 - RNA, 22 nt, Human
uuuccagggaggaauguggggu

SEQ ID NO: 333883 - RNA, 22 nt, Human
cgcugggcgcgcuccgaacccg

SEQ ID NO: 333884 - RNA, 22 nt, Human
aaacccugagacuuggggccag

SEQ ID NO: 333885 - RNA, 23 nt, Human
uggccucuccccaccuggcagaa

SEQ ID NO: 333886 - RNA, 22 nt, Human
aggcugcagaggugcugccaga

SEQ ID NO: 333887 - RNA, 22 nt, Human
uugcacagaugcacaugguugc

SEQ ID NO: 333888 - RNA, 22 nt, Human
cacucucacaugcccugucagu

SEQ ID NO: 333889 - RNA, 22 nt, Human
uuuauucucuaguuggucagau

SEQ ID NO: 333890 - RNA, 22 nt, Human
guguuuaaugcagaugugggug

SEQ ID NO: 333891 - RNA, 22 nt, Human
aagguggugaucaucuugaagg

SEQ ID NO: 333892 - RNA, 22 nt, Human
aauguuugaacuuugcauauuu

SEQ ID NO: 333893 - RNA, 22 nt, Human
guggcaggagggcaucacuugg

SEQ ID NO: 333894 - RNA, 22 nt, Human
ugguggcacugacaucagacac

SEQ ID NO: 333895 - RNA, 22 nt, Human
ucaccgccuugcccggccgggc

SEQ ID NO: 333896 - RNA, 22 nt, Human
acacuccagggagggagggaau

SEQ ID NO: 333897 - RNA, 22 nt, Human
gccuucugaucgcuggacugac

SEQ ID NO: 333898 - RNA, 22 nt, Human
ggcggcgcguagccggagacuu

SEQ ID NO: 333899 - RNA, 15 nt, Human
uggugguguugagac

SEQ ID NO: 333900 - RNA, 22 nt, Human
uugcaggucuggggguccuggu

SEQ ID NO: 333901 - RNA, 22 nt, Human
augaagcugguuuuggcuuggg

SEQ ID NO: 333902 - RNA, 22 nt, Human
ugccuggauggcucugagcagg

SEQ ID NO: 333903 - RNA, 22 nt, Human
ggcaucagcccgguccugggcu

SEQ ID NO: 333904 - RNA, 22 nt, Human
uccuuagagugguugugcuaug

SEQ ID NO: 333905 - RNA, 23 nt, Human
uggcucugagcuuccugguggcc

SEQ ID NO: 333906 - RNA, 22 nt, Human
ucuucagacuguuguucuuuug

SEQ ID NO: 333907 - RNA, 22 nt, Human
ucugggaguuucugugggagcu

SEQ ID NO: 333908 - RNA, 22 nt, Human
cugaucuuaaguaacauuauuu

SEQ ID NO: 333909 - RNA, 22 nt, Human
gggcucaucaagccucuccgcc

SEQ ID NO: 333910 - RNA, 22 nt, Human
uucuuuuaauagagauccugug

SEQ ID NO: 333911 - RNA, 22 nt, Human
gccccucuccuugugcaccugc

SEQ ID NO: 333912 - RNA, 22 nt, Human
aaauuaacuaucacuuuuguga

SEQ ID NO: 333913 - RNA, 22 nt, Human
ggugugggucagcuuuauuaau

SEQ ID NO: 333914 - RNA, 22 nt, Human
cucuggcaauugcugcugacuc

SEQ ID NO: 333915 - RNA, 22 nt, Human
gccucugcacuguggcacacca

SEQ ID NO: 333916 - RNA, 22 nt, Human
gcggcgccugggacccgccagc

SEQ ID NO: 333917 - RNA, 22 nt, Human
gcuccugggcccugggcuaacu

SEQ ID NO: 333918 - RNA, 22 nt, Human
aguguuaaggcugguugcuaua

SEQ ID NO: 333919 - RNA, 22 nt, Human
auuugugggacuauaaugcagg

SEQ ID NO: 333920 - RNA, 22 nt, Human
gguggcaagggcagccaguaac

SEQ ID NO: 333921 - RNA, 22 nt, Human
uccaggcugacgcagcuauuua

SEQ ID NO: 333922 - RNA, 22 nt, Human
guagaggggugauucugugaga

SEQ ID NO: 333923 - RNA, 22 nt, Human
ugaaagcucugucaucauuccu

SEQ ID NO: 333924 - RNA, 22 nt, Human
gcuuucagggucacugucaaca

SEQ ID NO: 333925 - RNA, 22 nt, Human
ccaaaauauuagugcuuaagua

SEQ ID NO: 333926 - RNA, 22 nt, Human
gucugcugacagagcauggacc

SEQ ID NO: 333927 - RNA, 22 nt, Human
ugaggcuggaugggaugccucc

SEQ ID NO: 333928 - RNA, 22 nt, Human
cagagcugucauuugccaguga

SEQ ID NO: 333929 - RNA, 22 nt, Human
auaagugcccaaaaugaaagga

SEQ ID NO: 333930 - RNA, 17 nt, Human
gcguguccccgcgucuc

SEQ ID NO: 333931 - RNA, 18 nt, Human
ucuuccaacacugacacc

SEQ ID NO: 333932 - RNA, 22 nt, Human
aagguggcggcugccagguccu

SEQ ID NO: 333933 - RNA, 22 nt, Human
ccggcgucucuuccacuuccua

SEQ ID NO: 333934 - RNA, 22 nt, Human
gugccaccagaugcuguugcua

SEQ ID NO: 333935 - RNA, 22 nt, Human
uaaaguucuuagaacaaggccu

SEQ ID NO: 333936 - RNA, 22 nt, Human
gagacagagagguacucaacau

SEQ ID NO: 333937 - RNA, 22 nt, Human
ccauggccugaaggagugcauc

SEQ ID NO: 333938 - RNA, 22 nt, Human
gcucuggcuacuguggcuaccg

SEQ ID NO: 333939 - RNA, 22 nt, Human
uggcuggcuguccagcugggca

SEQ ID NO: 333940 - RNA, 22 nt, Human
uagagcucuccuuccucugugg

SEQ ID NO: 333941 - RNA, 22 nt, Human
aauguuaaguuuagauuauaac

SEQ ID NO: 333942 - RNA, 23 nt, Human
gguucugccgcuuacugcugugc

SEQ ID NO: 333943 - RNA, 21 nt, Human
agggaaaaggcugagugaggg

SEQ ID NO: 333944 - RNA, 22 nt, Human
uggaucugcucuaugaacugcu

SEQ ID NO: 333945 - RNA, 22 nt, Human
gggcucuguuuagaccagagau

SEQ ID NO: 333946 - RNA, 22 nt, Human
uuuccucacacagaagaucuug

SEQ ID NO: 333947 - RNA, 22 nt, Human
gguguuguacauucuguggauu

SEQ ID NO: 333948 - RNA, 22 nt, Human
guguuucccuggcacaagaacc

SEQ ID NO: 333949 - RNA, 22 nt, Human
cagugccauauugaaagacauu

SEQ ID NO: 333950 - RNA, 22 nt, Human
guuucuccucugugucuuguuu

SEQ ID NO: 333951 - RNA, 22 nt, Human
accaggcccuccagcugcgugg

SEQ ID NO: 333952 - RNA, 22 nt, Human
ugacucauauuucauggauacg

SEQ ID NO: 333953 - RNA, 22 nt, Human
cugcaucacagcaggaggcaca

SEQ ID NO: 333954 - RNA, 22 nt, Human
guuaaugcaaagcagagggcaa

SEQ ID NO: 333955 - RNA, 22 nt, Human
gcugccgacccacagggguuaa

SEQ ID NO: 333956 - RNA, 22 nt, Human
auucccuuugacgaucccuagg

SEQ ID NO: 333957 - RNA, 21 nt, Human
gccaucaccaagcucuucccc

SEQ ID NO: 333958 - RNA, 22 nt, Human
agaggaaguaaucaggaccugc

SEQ ID NO: 333959 - RNA, 22 nt, Human
ccuuuuauauggcucaucacag

SEQ ID NO: 333960 - RNA, 22 nt, Human
uuucauuauaaaaaguuggcuu

SEQ ID NO: 333961 - RNA, 22 nt, Human
ggccagccuggggcucccagac

SEQ ID NO: 333962 - RNA, 22 nt, Human
ucauggcacaugcccuccaggg

SEQ ID NO: 333963 - RNA, 21 nt, Human
ucucuccucaagcucgacccc

SEQ ID NO: 333964 - RNA, 22 nt, Human
guuuuguucaugaacauugggu

SEQ ID NO: 333965 - RNA, 22 nt, Human
acuggcaguagagggagcgcau

SEQ ID NO: 333966 - RNA, 22 nt, Human
aaugauguuuuuaaagaacaua

SEQ ID NO: 333967 - RNA, 22 nt, Human
cgccguccccuaggaaagagcu

SEQ ID NO: 333968 - RNA, 22 nt, Human
uccugucucaguguauuugcag

SEQ ID NO: 333969 - RNA, 22 nt, Human
uggcuccacaggccagggugug

SEQ ID NO: 333970 - RNA, 22 nt, Human
caguguuuagcacagugcuugg

SEQ ID NO: 333971 - RNA, 22 nt, Human
acaaaugcuuaguucaccaaaa

SEQ ID NO: 333972 - RNA, 22 nt, Human
gccccgucguggggccagggau

SEQ ID NO: 333973 - RNA, 22 nt, Human
cucaucuggcuucaguaacagu

SEQ ID NO: 333974 - RNA, 22 nt, Human
ugccuguguccccuucuuggca

SEQ ID NO: 333975 - RNA, 22 nt, Human
ccaaggcuggagggcuuaugua

SEQ ID NO: 333976 - RNA, 22 nt, Human
aaacucuacauggucgcaaaaa

SEQ ID NO: 333977 - RNA, 22 nt, Human
ugagaugaagugauguaaaaca

SEQ ID NO: 333978 - RNA, 22 nt, Human
ggaagccaguugcuuggugugg

SEQ ID NO: 333979 - RNA, 22 nt, Human
cgggaagguggagguugcagug

SEQ ID NO: 333980 - RNA, 21 nt, Human
aauuucagacccauuuugccu

SEQ ID NO: 333981 - RNA, 16 nt, Human
ccccucaggaaguaca

SEQ ID NO: 333982 - RNA, 20 nt, Human
uggccucugagaugccacgg

SEQ ID NO: 333983 - RNA, 18 nt, Human
ucugaaggaaugauucca

SEQ ID NO: 333984 - RNA, 22 nt, Human
ugcccagucuccgggccagccc

SEQ ID NO: 333985 - RNA, 22 nt, Human
uuccccuugcacuaucacccug

SEQ ID NO: 333986 - RNA, 22 nt, Human
gcagcugcgaagaagucuaucu

SEQ ID NO: 333987 - RNA, 22 nt, Human
accccagaggcggaggcugcag

SEQ ID NO: 333988 - RNA, 22 nt, Human
gcugcuggcuuccugcuguuuu

SEQ ID NO: 333989 - RNA, 22 nt, Human
cuuugggcacugaaguaugggu

SEQ ID NO: 333990 - RNA, 18 nt, Human
uccauccucugcucuuca

SEQ ID NO: 333991 - RNA, 18 nt, Human
auggcuccagugucuucc

SEQ ID NO: 333992 - RNA, 22 nt, Human
caugggcucuucuggacugcac

SEQ ID NO: 333993 - RNA, 22 nt, Human
ucugccaucaagaugcucuggc

SEQ ID NO: 333994 - RNA, 22 nt, Human
acauuuuuggguugaugucuga

SEQ ID NO: 333995 - RNA, 22 nt, Human
cucagaggggaugcuuggagaa

SEQ ID NO: 333996 - RNA, 22 nt, Human
acaauuucuaauauagaucuua

SEQ ID NO: 333997 - RNA, 22 nt, Human
uguucuuagguauuugacaguc

SEQ ID NO: 333998 - RNA, 22 nt, Human
guugcauuaaucugcucaggcu

SEQ ID NO: 333999 - RNA, 22 nt, Human
ucggugcgcgaggcgcgguccc

SEQ ID NO: 334000 - RNA, 22 nt, Human
uguuggcagugcuacagucagu

SEQ ID NO: 334001 - RNA, 22 nt, Human
cucaggaaaauauugaagaagu

SEQ ID NO: 334002 - RNA, 22 nt, Human
cuccaggacugaggacagagcu

SEQ ID NO: 334003 - RNA, 22 nt, Human
ucuccaggggcagggucuggag

SEQ ID NO: 334004 - RNA, 22 nt, Human
aauggcagagacuguugaaaua

SEQ ID NO: 334005 - RNA, 22 nt, Human
aggaggguggggucugccuguc

SEQ ID NO: 334006 - RNA, 22 nt, Human
ugggaugagcuauauagaaagu

SEQ ID NO: 334007 - RNA, 22 nt, Human
ggucuggccuccgggcaggugg

SEQ ID NO: 334008 - RNA, 22 nt, Human
gcccagcaccucucucaggguu

SEQ ID NO: 334009 - RNA, 22 nt, Human
cgccccagccaguugagcggcg

SEQ ID NO: 334010 - RNA, 18 nt, Human
auuugcaggcaugcaggc

SEQ ID NO: 334011 - RNA, 22 nt, Human
caaauacaaauacgggcagcuu

SEQ ID NO: 334012 - RNA, 22 nt, Human
accaaauaggcuuccuggguug

SEQ ID NO: 334013 - RNA, 22 nt, Human
gagcugcuggccuccugcggga

SEQ ID NO: 334014 - RNA, 22 nt, Human
cccagaaugauucagcgacagu

SEQ ID NO: 334015 - RNA, 21 nt, Human
uuggaacaagcagcaguuugc

SEQ ID NO: 334016 - RNA, 22 nt, Human
cugggcuguuuguucuggucuc

SEQ ID NO: 334017 - RNA, 22 nt, Human
aggacagcagugcuggcacuug

SEQ ID NO: 334018 - RNA, 22 nt, Human
acccggagucggagguugcagu

SEQ ID NO: 334019 - RNA, 22 nt, Human
agcgcuggugaucucuauuuug

SEQ ID NO: 334020 - RNA, 22 nt, Human
uggcugaggcuuuucuuaaaga

SEQ ID NO: 334021 - RNA, 22 nt, Human
ggcagccuccagggcacuggug

SEQ ID NO: 334022 - RNA, 22 nt, Human
cagcagcucaggcuccuuccca

SEQ ID NO: 334023 - RNA, 22 nt, Human
gaagagguucaacguggucauc

SEQ ID NO: 334024 - RNA, 22 nt, Human
gcaguuaccuauuuuguagaaa

SEQ ID NO: 334025 - RNA, 22 nt, Human
ccagcagaagcucccgcugggu

SEQ ID NO: 334026 - RNA, 22 nt, Human
gucccauaaguagugcaacuug

SEQ ID NO: 334027 - RNA, 22 nt, Human
uggacccaccccagggccugcu

SEQ ID NO: 334028 - RNA, 22 nt, Human
agaucaaggacaugaagaggcu

SEQ ID NO: 334029 - RNA, 22 nt, Human
ucggagcgucacuggcuggagg

SEQ ID NO: 334030 - RNA, 22 nt, Human
guugcaaaugggaagaugguua

SEQ ID NO: 334031 - RNA, 22 nt, Human
auggcagcggagcuggaaauga

SEQ ID NO: 334032 - RNA, 21 nt, Human
uuccuccucuggagaagaaga

SEQ ID NO: 334033 - RNA, 22 nt, Human
agugugaguuacaaagugugaa

SEQ ID NO: 334034 - RNA, 22 nt, Human
ucacagcugggguuuuggcagc

SEQ ID NO: 334035 - RNA, 22 nt, Human
aggcagaugggagcuggaaguu

SEQ ID NO: 334036 - RNA, 22 nt, Human
cgccaguggcagcuggaacagg

SEQ ID NO: 334037 - RNA, 22 nt, Human
caagagcuggguggcaagcuag

SEQ ID NO: 334038 - RNA, 22 nt, Human
ucaccccuugugaaugcugcuc

SEQ ID NO: 334039 - RNA, 18 nt, Human
cugccagugugcucuccg

SEQ ID NO: 334040 - RNA, 22 nt, Human
agagaagagucuugucaaauua

SEQ ID NO: 334041 - RNA, 22 nt, Human
gggagccagcagggcauggagc

SEQ ID NO: 334042 - RNA, 22 nt, Human
gguggcagaggugcaucagccc

SEQ ID NO: 334043 - RNA, 22 nt, Human
ggagugggaacaaugacauggu

SEQ ID NO: 334044 - RNA, 22 nt, Human
uguaagcuucaaauaucuguga

SEQ ID NO: 334045 - RNA, 22 nt, Human
cagcugccuaugaccuagccuc

SEQ ID NO: 334046 - RNA, 22 nt, Human
gcuguagguaaggauggcaaag

SEQ ID NO: 334047 - RNA, 22 nt, Human
ggauguuuauccuaucuuaguu

SEQ ID NO: 334048 - RNA, 22 nt, Human
ccugcgggcugugcugaagccu

SEQ ID NO: 334049 - RNA, 22 nt, Human
agaggagguccuuuucugaugu

SEQ ID NO: 334050 - RNA, 20 nt, Human
auuugcuuaccuuguuucua

SEQ ID NO: 334051 - RNA, 22 nt, Human
ggagggaaccuuggcuggauug

SEQ ID NO: 334052 - RNA, 21 nt, Human
agaugcagugacccacugggg

SEQ ID NO: 334053 - RNA, 22 nt, Human
agcuuuggcaucugacuagccg

SEQ ID NO: 334054 - RNA, 22 nt, Human
cccgaccucgcaaagcgcacuc

SEQ ID NO: 334055 - RNA, 22 nt, Human
ucucuuugacccuuuagcucca

SEQ ID NO: 334056 - RNA, 22 nt, Human
gccagugccugcugcucagggc

SEQ ID NO: 334057 - RNA, 20 nt, Human
agcuggcccccgguggccug

SEQ ID NO: 334058 - RNA, 22 nt, Human
aucagagcugcauuuuagagcc

SEQ ID NO: 334059 - RNA, 23 nt, Human
aacucuggcuagcauagaauaga

SEQ ID NO: 334060 - RNA, 22 nt, Human
ccucugcccuuuuccuguauca

SEQ ID NO: 334061 - RNA, 22 nt, Human
uugaacaguccuaagagacccu

SEQ ID NO: 334062 - RNA, 22 nt, Human
ucagugauuucuggggugaggg

SEQ ID NO: 334063 - RNA, 22 nt, Human
cucagaguccauaguuuacagu

SEQ ID NO: 334064 - RNA, 22 nt, Human
aguggcaguagaugagcugguu

SEQ ID NO: 334065 - RNA, 22 nt, Human
gaugucuucagauggcaagaga

SEQ ID NO: 334066 - RNA, 19 nt, Human
ugggcuuccccagggcaga

SEQ ID NO: 334067 - RNA, 22 nt, Human
uggaauuaucugaagugauuug

SEQ ID NO: 334068 - RNA, 22 nt, Human
ccugaggcccuggcugugcuga

SEQ ID NO: 334069 - RNA, 22 nt, Human
agcacauucccaccuguacuuc

SEQ ID NO: 334070 - RNA, 22 nt, Human
gaaccuggcagcccuauaucug

SEQ ID NO: 334071 - RNA, 22 nt, Human
ccagcagccaccuucucgaaau

SEQ ID NO: 334072 - RNA, 22 nt, Human
gaggggcugggguugacuccaa

SEQ ID NO: 334073 - RNA, 20 nt, Human
cagagccaggguuuuguuuu

SEQ ID NO: 334074 - RNA, 22 nt, Human
ccagcuugcuccucugcaaugg

SEQ ID NO: 334075 - RNA, 22 nt, Human
uccucuccaggugagccgaaau

SEQ ID NO: 334076 - RNA, 22 nt, Human
acgggcugggacggggaagcuc

SEQ ID NO: 334077 - RNA, 22 nt, Human
gccugccuucggugcgcagcgg

SEQ ID NO: 334078 - RNA, 22 nt, Human
ucuacuuccgcaaaaggcacau

SEQ ID NO: 334079 - RNA, 22 nt, Human
gugcacagaaacauacaaugug

SEQ ID NO: 334080 - RNA, 22 nt, Human
agccaccaccacugaaagguua

SEQ ID NO: 334081 - RNA, 22 nt, Human
ggcuggaaggcccuuuguugau

SEQ ID NO: 334082 - RNA, 22 nt, Human
agcaugucuaacucuucagggu

SEQ ID NO: 334083 - RNA, 22 nt, Human
cuugaguaaagaaguauuuuag

SEQ ID NO: 334084 - RNA, 22 nt, Human
cacaguuuuaucuuauacugau

SEQ ID NO: 334085 - RNA, 22 nt, Human
gagguggcugcuugcugggaaa

SEQ ID NO: 334086 - RNA, 22 nt, Human
ggugcccaaggaagguugccgu

SEQ ID NO: 334087 - RNA, 17 nt, Human
ggccugcaccuccugcu

SEQ ID NO: 334088 - RNA, 18 nt, Human
acuguggcucagaguugc

SEQ ID NO: 334089 - RNA, 22 nt, Human
ccaggcuccccaggaggcccuu

SEQ ID NO: 334090 - RNA, 22 nt, Human
ggaggugacuggaucaugggca

SEQ ID NO: 334091 - RNA, 22 nt, Human
ccaggaugacccccacuuuccu

SEQ ID NO: 334092 - RNA, 22 nt, Human
acuugguggcgaacgaggguca

SEQ ID NO: 334093 - RNA, 22 nt, Human
auaguguguaaagugcagugau

SEQ ID NO: 334094 - RNA, 22 nt, Human
acucacagggccucaguuuucc

SEQ ID NO: 334095 - RNA, 22 nt, Human
cugguuuuuagugcuuaggagu

SEQ ID NO: 334096 - RNA, 22 nt, Human
uggcugaggcacagcugccgcc

SEQ ID NO: 334097 - RNA, 22 nt, Human
gcugccuggaauaacggcuggc

SEQ ID NO: 334098 - RNA, 22 nt, Human
auggcucugcugggcaaagcaa

SEQ ID NO: 334099 - RNA, 22 nt, Human
gccguccuacgccaucauagcg

SEQ ID NO: 334100 - RNA, 19 nt, Human
ccuggcccugcugcgcggg

SEQ ID NO: 334101 - RNA, 22 nt, Human
cagcgguggcaaggugacugug

SEQ ID NO: 334102 - RNA, 22 nt, Human
guggcauugccuucugcaggaa

SEQ ID NO: 334103 - RNA, 22 nt, Human
cuuccuaaaagcuucaagagaa

SEQ ID NO: 334104 - RNA, 22 nt, Human
ccuucuagcaaaucaacauaaa

SEQ ID NO: 334105 - RNA, 22 nt, Human
gaaacuguauguaguuuuuggg

SEQ ID NO: 334106 - RNA, 22 nt, Human
ugggcaaaugcuuuuuagucaa

SEQ ID NO: 334107 - RNA, 22 nt, Human
aguguuugaguuugcggcauug

SEQ ID NO: 334108 - RNA, 22 nt, Human
uugauuugauuguaauggcucu

SEQ ID NO: 334109 - RNA, 22 nt, Human
cggcagcgguuggagguuguag

SEQ ID NO: 334110 - RNA, 22 nt, Human
acuuaccagagaggauccgccc

SEQ ID NO: 334111 - RNA, 21 nt, Human
uccagcacagaugaccucccc

SEQ ID NO: 334112 - RNA, 22 nt, Human
auggcugugguaucagacgcag

SEQ ID NO: 334113 - RNA, 22 nt, Human
uagauaccugcuggaccucauu

SEQ ID NO: 334114 - RNA, 22 nt, Human
cgggcagugcccagcggggcag

SEQ ID NO: 334115 - RNA, 22 nt, Human
uguaccacucuacuaaggguuc

SEQ ID NO: 334116 - RNA, 22 nt, Human
accaugucauuuauuggccaaa

SEQ ID NO: 334117 - RNA, 22 nt, Human
cagggcacuuaaauugccucgu

SEQ ID NO: 334118 - RNA, 22 nt, Human
gcagcagcggggccccugcgcg

SEQ ID NO: 334119 - RNA, 21 nt, Human
accgucaguacuaguauugac

SEQ ID NO: 334120 - RNA, 22 nt, Human
acauuucuccuacuuguuauuu

SEQ ID NO: 334121 - RNA, 22 nt, Human
ggugcaauaaaguuguagaacc

SEQ ID NO: 334122 - RNA, 22 nt, Human
gaacugcauugugguauauguu

SEQ ID NO: 334123 - RNA, 22 nt, Human
agugacauuauuuuguguacua

SEQ ID NO: 334124 - RNA, 22 nt, Human
ugggugguugcugaggcuccuu

SEQ ID NO: 334125 - RNA, 22 nt, Human
guggcauuuuagaacagcugac

SEQ ID NO: 334126 - RNA, 22 nt, Human
uccugugccuccaccugcuccg

SEQ ID NO: 334127 - RNA, 22 nt, Human
uccuggcccuguggccugcagu

SEQ ID NO: 334128 - RNA, 23 nt, Human
agguggagcugugcagccggggc

SEQ ID NO: 334129 - RNA, 22 nt, Human
gugcugagugcagagugcagag

SEQ ID NO: 334130 - RNA, 22 nt, Human
ggucuuucuuugauaguggaga

SEQ ID NO: 334131 - RNA, 22 nt, Human
gcuggccugcgagggcaggcug

SEQ ID NO: 334132 - RNA, 22 nt, Human
aaguuacacauuuucauuguaa

SEQ ID NO: 334133 - RNA, 22 nt, Human
cauugcugugggcauuugcugc

SEQ ID NO: 334134 - RNA, 22 nt, Human
gaguuucuucauggugcagagg

SEQ ID NO: 334135 - RNA, 22 nt, Human
agccagugucgugugacaugag

SEQ ID NO: 334136 - RNA, 22 nt, Human
ccaggcaaagcccaugcaagag

SEQ ID NO: 334137 - RNA, 22 nt, Human
gguuguaguuggagguuguaua

SEQ ID NO: 334138 - RNA, 22 nt, Human
uugcugccagcgcccugcaggg

SEQ ID NO: 334139 - RNA, 22 nt, Human
auguuugaaauuguaaguauau

SEQ ID NO: 334140 - RNA, 22 nt, Human
uggcagugugggaggaagguac

SEQ ID NO: 334141 - RNA, 22 nt, Human
ggucagugccuaucaugugggc

SEQ ID NO: 334142 - RNA, 20 nt, Human
caacacugcccauuguuugc

SEQ ID NO: 334143 - RNA, 22 nt, Human
cuugccagggacucagucaggg

SEQ ID NO: 334144 - RNA, 22 nt, Human
gagcuccugaaacguuccugcc

SEQ ID NO: 334145 - RNA, 22 nt, Human
cccucuggcucuucucaggccg

SEQ ID NO: 334146 - RNA, 22 nt, Human
uuccaaguuaggcgagcuggug

SEQ ID NO: 334147 - RNA, 22 nt, Human
uuggaggaagcucaugggggau

SEQ ID NO: 334148 - RNA, 18 nt, Human
gggguagaguguccuauu

SEQ ID NO: 334149 - RNA, 22 nt, Human
gagggaaacagauggguugugg

SEQ ID NO: 334150 - RNA, 22 nt, Human
ggguuguagagcuggaagggga

SEQ ID NO: 334151 - RNA, 22 nt, Human
ugcccuccacaguggcuccacc

SEQ ID NO: 334152 - RNA, 21 nt, Human
ucuccucccggggagaggccg

SEQ ID NO: 334153 - RNA, 22 nt, Human
agguggaguuaagugugaacug

SEQ ID NO: 334154 - RNA, 22 nt, Human
aaacaguguguuucagagaggc

SEQ ID NO: 334155 - RNA, 22 nt, Human
ggaggaggggugacugaaugcu

SEQ ID NO: 334156 - RNA, 22 nt, Human
guguccagagccgggcugaaug

SEQ ID NO: 334157 - RNA, 22 nt, Human
gggagggucugagagcugcacc

SEQ ID NO: 334158 - RNA, 22 nt, Human
cccaccacgugcuuugcuggag

SEQ ID NO: 334159 - RNA, 22 nt, Human
ucagauggucauucacuagggu

SEQ ID NO: 334160 - RNA, 22 nt, Human
ucugcgcccugucgccugcucc

SEQ ID NO: 334161 - RNA, 22 nt, Human
ggcuggaacuucuucuggcauu

SEQ ID NO: 334162 - RNA, 22 nt, Human
uggggugccgacagggagggca

SEQ ID NO: 334163 - RNA, 22 nt, Human
cuuccagcugauuggcauccag

SEQ ID NO: 334164 - RNA, 22 nt, Human
augagcuaagcagaaagcacac

SEQ ID NO: 334165 - RNA, 22 nt, Human
aggcuccaugguucucccucag

SEQ ID NO: 334166 - RNA, 22 nt, Human
acccagcucuuugauggucuug

SEQ ID NO: 334167 - RNA, 22 nt, Human
acaguguuucacuuaaccguuu

SEQ ID NO: 334168 - RNA, 22 nt, Human
ucagguccaagauggccaucca

SEQ ID NO: 334169 - RNA, 22 nt, Human
aggaaaauggaccagaguuguu

SEQ ID NO: 334170 - RNA, 22 nt, Human
ggagucugugucuugaagcagu

SEQ ID NO: 334171 - RNA, 22 nt, Human
uggcauuuuguagcuguguauc

SEQ ID NO: 334172 - RNA, 22 nt, Human
gggcagcaucaggaggggcuuu

SEQ ID NO: 334173 - RNA, 22 nt, Human
gaggcugugugucccucuggac

SEQ ID NO: 334174 - RNA, 22 nt, Human
cacaucauguuaauucauuaca

SEQ ID NO: 334175 - RNA, 22 nt, Human
cugggaggcccacguugggaag

SEQ ID NO: 334176 - RNA, 22 nt, Human
ccugacagcgugucccuggccc

SEQ ID NO: 334177 - RNA, 22 nt, Human
uuugacucugggugcuuuuucg

SEQ ID NO: 334178 - RNA, 22 nt, Human
uccggcggccggccugagcccg

SEQ ID NO: 334179 - RNA, 22 nt, Human
aaaugccucauuuucucucacu

SEQ ID NO: 334180 - RNA, 22 nt, Human
ucacaacugggugucuucauca

SEQ ID NO: 334181 - RNA, 22 nt, Human
uuacuaguggagaaacugaggc

SEQ ID NO: 334182 - RNA, 22 nt, Human
aaggggggcaccugcaugcccg

SEQ ID NO: 334183 - RNA, 22 nt, Human
ggagaguggauuccagcuguau

SEQ ID NO: 334184 - RNA, 22 nt, Human
uucacugugauguuuaagagaa

SEQ ID NO: 334185 - RNA, 22 nt, Human
uaaaguuuauuggcaccaccau

SEQ ID NO: 334186 - RNA, 22 nt, Human
gaggucaggggagaggcugaug

SEQ ID NO: 334187 - RNA, 22 nt, Human
uccagcugugcuccaggaggug

SEQ ID NO: 334188 - RNA, 22 nt, Human
uagcuguucucuguaaauugga

SEQ ID NO: 334189 - RNA, 22 nt, Human
gagccaggcccguacuugcugu

SEQ ID NO: 334190 - RNA, 22 nt, Human
augggaggcagacacuaaguuc

SEQ ID NO: 334191 - RNA, 22 nt, Human
ggcuuccuccuuccugcuguca

SEQ ID NO: 334192 - RNA, 20 nt, Human
gcugugccaugacccucgag

SEQ ID NO: 334193 - RNA, 22 nt, Human
acagagccuccaggagugcugg

SEQ ID NO: 334194 - RNA, 22 nt, Human
agcugcaccggcuggaccacug

SEQ ID NO: 334195 - RNA, 22 nt, Human
gcgacgcaggcacgacguguug

SEQ ID NO: 334196 - RNA, 22 nt, Human
guggccaucuuuggcccugacu

SEQ ID NO: 334197 - RNA, 22 nt, Human
ggccugcuucucugggcuuucu

SEQ ID NO: 334198 - RNA, 22 nt, Human
ucuccaggcuuaaucucagcuu

SEQ ID NO: 334199 - RNA, 22 nt, Human
gggacgugagugaagaaggucu

SEQ ID NO: 334200 - RNA, 22 nt, Human
accauaguuauaacaaaguguu

SEQ ID NO: 334201 - RNA, 22 nt, Human
acaugcacagcaagggugagag

SEQ ID NO: 334202 - RNA, 22 nt, Human
cuccaggacaugacuuucuugc

SEQ ID NO: 334203 - RNA, 22 nt, Human
cagcugcucugguggucucucc

SEQ ID NO: 334204 - RNA, 22 nt, Human
aaagucuuaauguaaguuuagu

SEQ ID NO: 334205 - RNA, 22 nt, Human
uuuacuguuuacagcuaaugca

SEQ ID NO: 334206 - RNA, 22 nt, Human
uuggaaaugcauuuguuauuau

SEQ ID NO: 334207 - RNA, 22 nt, Human
cuucagagugacucagcaucuu

SEQ ID NO: 334208 - RNA, 22 nt, Human
uuauuuaaaauguagguuggga

SEQ ID NO: 334209 - RNA, 22 nt, Human
uuuaauuuucugggcccagcag

SEQ ID NO: 334210 - RNA, 22 nt, Human
ucaggcuuugggaaugccacuu

SEQ ID NO: 334211 - RNA, 22 nt, Human
ggccuugguaaauuggcauuug

SEQ ID NO: 334212 - RNA, 20 nt, Human
cuguuugcuaucaugagcug

SEQ ID NO: 334213 - RNA, 22 nt, Human
gcugauggcuugcuggcugaca

SEQ ID NO: 334214 - RNA, 22 nt, Human
gccauguuuugguaaauaccau

SEQ ID NO: 334215 - RNA, 22 nt, Human
gcagaagucagaccaucugaau

SEQ ID NO: 334216 - RNA, 22 nt, Human
gacuggcucuaucuccuuggcg

SEQ ID NO: 334217 - RNA, 18 nt, Human
uccaggcuccaggcuaac

SEQ ID NO: 334218 - RNA, 22 nt, Human
cugguuuuccaauguuuugacu

SEQ ID NO: 334219 - RNA, 22 nt, Human
aacuuagagcucuccuaaauga

SEQ ID NO: 334220 - RNA, 22 nt, Human
ucagagccccuccgcuguccca

SEQ ID NO: 334221 - RNA, 22 nt, Human
gcggccugcgcugcucccgacg

SEQ ID NO: 334222 - RNA, 22 nt, Human
guuuccaagucucucaacaccc

SEQ ID NO: 334223 - RNA, 22 nt, Human
agguggcagacuaacagaagga

SEQ ID NO: 334224 - RNA, 22 nt, Human
aagcccucagagccucuuugac

SEQ ID NO: 334225 - RNA, 22 nt, Human
gaaacacucaauuuaguaauuc

SEQ ID NO: 334226 - RNA, 22 nt, Human
gauggugcaggugaagugcugg

SEQ ID NO: 334227 - RNA, 22 nt, Human
cuccagaggcgacuugcaucac

SEQ ID NO: 334228 - RNA, 22 nt, Human
auauaccucauucuuugagugc

SEQ ID NO: 334229 - RNA, 22 nt, Human
agcucagaacugcagacaugug

SEQ ID NO: 334230 - RNA, 22 nt, Human
cugagaguauuggcaggcuugg

SEQ ID NO: 334231 - RNA, 22 nt, Human
aggcaguguggagggcuguugc

SEQ ID NO: 334232 - RNA, 22 nt, Human
uaaaguuggaccugauuuuauu

SEQ ID NO: 334233 - RNA, 22 nt, Human
ucaggggcuugaggugcauguc

SEQ ID NO: 334234 - RNA, 22 nt, Human
gguagccaauuuaaacauuucc

SEQ ID NO: 334235 - RNA, 22 nt, Human
ucugaggacagugcugugccug

SEQ ID NO: 334236 - RNA, 17 nt, Human
uuucugcaugauuggac

SEQ ID NO: 334237 - RNA, 22 nt, Human
uuuguugguugcacuggugggu

SEQ ID NO: 334238 - RNA, 23 nt, Human
uugggcaaaucacuaacgucucc

SEQ ID NO: 334239 - RNA, 22 nt, Human
ccucuucagcaaaguucggccc

SEQ ID NO: 334240 - RNA, 22 nt, Human
uggcauuggaauuuguguugca

SEQ ID NO: 334241 - RNA, 22 nt, Human
ucuggcuucaacuuuacugaaa

SEQ ID NO: 334242 - RNA, 23 nt, Human
caaaaugcuaugugcccaaugca

SEQ ID NO: 334243 - RNA, 22 nt, Human
acgugcuggagaagagcucgcc

SEQ ID NO: 334244 - RNA, 20 nt, Human
uuugauugccccucugacuu

SEQ ID NO: 334245 - RNA, 22 nt, Human
agguggagaagagaugggcagu

SEQ ID NO: 334246 - RNA, 22 nt, Human
gcccagcugagaagcgcggggc

SEQ ID NO: 334247 - RNA, 22 nt, Human
uguuuuaagggucaacugucac

SEQ ID NO: 334248 - RNA, 22 nt, Human
ggcucugcugguaagaugccuc

SEQ ID NO: 334249 - RNA, 22 nt, Human
cuguggaguccuggggaaugga

SEQ ID NO: 334250 - RNA, 22 nt, Human
aaauccaucaaaucuucuagaa

SEQ ID NO: 334251 - RNA, 22 nt, Human
gggcugaauuuguugcauguaa

SEQ ID NO: 334252 - RNA, 22 nt, Human
agagacauagcacaguuuuucg

SEQ ID NO: 334253 - RNA, 22 nt, Human
ucugagagccacugaacagcaa

SEQ ID NO: 334254 - RNA, 21 nt, Human
ggcagcucagcagauggggac

SEQ ID NO: 334255 - RNA, 22 nt, Human
cgcugccuucaucccacgccua

SEQ ID NO: 334256 - RNA, 22 nt, Human
aaaggugccucuuacaaggcuu

SEQ ID NO: 334257 - RNA, 22 nt, Human
gggaugagagcugggacagaag

SEQ ID NO: 334258 - RNA, 22 nt, Human
guggccaaggcagagaaagagc

SEQ ID NO: 334259 - RNA, 22 nt, Human
ugucuuuagccacuugccucuu

SEQ ID NO: 334260 - RNA, 22 nt, Human
agaagcagaaggaagcagggcc

SEQ ID NO: 334261 - RNA, 23 nt, Human
ugggcagcuucugcaugcccacc

SEQ ID NO: 334262 - RNA, 22 nt, Human
ggccuugguggcuuugcugaug

SEQ ID NO: 334263 - RNA, 22 nt, Human
uuuucuaacaucuaguaauuug

SEQ ID NO: 334264 - RNA, 23 nt, Human
uguguucagucaaggaucagagu

SEQ ID NO: 334265 - RNA, 22 nt, Human
cucaggucuuaguucugucauc

SEQ ID NO: 334266 - RNA, 22 nt, Human
gagcuccuauggucgguggcuc

SEQ ID NO: 334267 - RNA, 22 nt, Human
ccagcagcgauagggugagugc

SEQ ID NO: 334268 - RNA, 22 nt, Human
cuggagccggcgagccccagcc

SEQ ID NO: 334269 - RNA, 22 nt, Human
aguaucagaugugauuaaaggg

SEQ ID NO: 334270 - RNA, 22 nt, Human
gagaacuugaacuuuuccucug

SEQ ID NO: 334271 - RNA, 22 nt, Human
ucaaaaugccgagugcccaggu

SEQ ID NO: 334272 - RNA, 22 nt, Human
aagcauuucagguagagauauu

SEQ ID NO: 334273 - RNA, 22 nt, Human
ccagcuggcccagcugugcucc

SEQ ID NO: 334274 - RNA, 22 nt, Human
uccucuucaaaauagcucugaa

SEQ ID NO: 334275 - RNA, 22 nt, Human
ggucuggagcuaaucuuguugg

SEQ ID NO: 334276 - RNA, 22 nt, Human
gugcuggggagauaggaagaga

SEQ ID NO: 334277 - RNA, 22 nt, Human
ugaguuagcucuauucuuuugg

SEQ ID NO: 334278 - RNA, 22 nt, Human
uuguaacaguagcugucagcuc

SEQ ID NO: 334279 - RNA, 22 nt, Human
agcugccgaugcccagcugcau

SEQ ID NO: 334280 - RNA, 22 nt, Human
aagugcuuccauguuugagugu

SEQ ID NO: 334281 - RNA, 22 nt, Human
gaagcccuggggucagugucgu

SEQ ID NO: 334282 - RNA, 22 nt, Human
gcucccugguauugcugccacu

SEQ ID NO: 334283 - RNA, 22 nt, Human
ugcugcucaagcugcagcaaaa

SEQ ID NO: 334284 - RNA, 22 nt, Human
ccacuuaagagaacagcuauag

SEQ ID NO: 334285 - RNA, 20 nt, Human
ucucuggcaagaagcugcag

SEQ ID NO: 334286 - RNA, 22 nt, Human
uccuucccaggugucgccgccu

SEQ ID NO: 334287 - RNA, 22 nt, Human
cagagguagccgagugcaaucg

SEQ ID NO: 334288 - RNA, 22 nt, Human
ucugagugggaacucucaugac

SEQ ID NO: 334289 - RNA, 22 nt, Human
cgaggagugugaaggcuugucg

SEQ ID NO: 334290 - RNA, 22 nt, Human
uuggcgcccaggacgccgccgc

SEQ ID NO: 334291 - RNA, 22 nt, Human
aaucccuccccaggcaaguccu

SEQ ID NO: 334292 - RNA, 22 nt, Human
gguuccaggcauggcaggaugu

SEQ ID NO: 334293 - RNA, 20 nt, Human
uuuuccacuccucaaaacag

SEQ ID NO: 334294 - RNA, 22 nt, Human
gcaguggccacauggaggagga

SEQ ID NO: 334295 - RNA, 22 nt, Human
uggcuggggccugaauccugca

SEQ ID NO: 334296 - RNA, 19 nt, Human
cuggcuucaagcaguccuc

SEQ ID NO: 334297 - RNA, 22 nt, Human
gugcaggugguuggcccagccg

SEQ ID NO: 334298 - RNA, 22 nt, Human
gugcaggacagcacaucuccug

SEQ ID NO: 334299 - RNA, 22 nt, Human
ccagcugggucccugcuggggc

SEQ ID NO: 334300 - RNA, 22 nt, Human
accauccuuuaguuugcguuuc

SEQ ID NO: 334301 - RNA, 22 nt, Human
agaguuuacagaaauaagcugu

SEQ ID NO: 334302 - RNA, 22 nt, Human
ucugcccaggaggucccauggg

SEQ ID NO: 334303 - RNA, 22 nt, Human
ccagcuggaacggcagcccagc

SEQ ID NO: 334304 - RNA, 22 nt, Human
ucuuccuggauggggguugaug

SEQ ID NO: 334305 - RNA, 22 nt, Human
acuucacagauauuuauuuggu

SEQ ID NO: 334306 - RNA, 22 nt, Human
agguggcuaugaggaugcaguc

SEQ ID NO: 334307 - RNA, 22 nt, Human
agagugaaguaauuguuaggau

SEQ ID NO: 334308 - RNA, 22 nt, Human
cccagguaaggaugcuccucau

SEQ ID NO: 334309 - RNA, 22 nt, Human
ugggcugcuucuauuggugguc

SEQ ID NO: 334310 - RNA, 22 nt, Human
cuacuucuguggcucuaagaga

SEQ ID NO: 334311 - RNA, 22 nt, Human
auccaggcgaaugcagaaggcc

SEQ ID NO: 334312 - RNA, 22 nt, Human
augguuuuguccucuuugguuc

SEQ ID NO: 334313 - RNA, 21 nt, Human
uggagagugauuucagugugg

SEQ ID NO: 334314 - RNA, 22 nt, Human
gcuggguggaucggaggcucug

SEQ ID NO: 334315 - RNA, 22 nt, Human
ucaccucucuggccgucuaccu

SEQ ID NO: 334316 - RNA, 17 nt, Human
uaagggggaaacggagc

SEQ ID NO: 334317 - RNA, 22 nt, Human
agugaaaaccuaaucaugcagu

SEQ ID NO: 334318 - RNA, 22 nt, Human
acauuuguuucucuagaguagg

SEQ ID NO: 334319 - RNA, 22 nt, Human
auuaauaucccccgccguucug

SEQ ID NO: 334320 - RNA, 22 nt, Human
agccacugugugaccagcuguc

SEQ ID NO: 334321 - RNA, 22 nt, Human
cuucuuaaaguugucacagcug

SEQ ID NO: 334322 - RNA, 22 nt, Human
ccuugcagcauauagagucccu

SEQ ID NO: 334323 - RNA, 22 nt, Human
gcagcccaggaggcgggagccc

SEQ ID NO: 334324 - RNA, 22 nt, Human
cacugguugccucuuucuguuc

SEQ ID NO: 334325 - RNA, 22 nt, Human
uccucagcaaacacuucacucu

SEQ ID NO: 334326 - RNA, 22 nt, Human
ugcuccaucuagagcucugcag

SEQ ID NO: 334327 - RNA, 22 nt, Human
ugggagcaagcuggugcuggag

SEQ ID NO: 334328 - RNA, 22 nt, Human
uuacgcagcugcuccaggaagc

SEQ ID NO: 334329 - RNA, 22 nt, Human
aucagagcuaguacuugcaggu

SEQ ID NO: 334330 - RNA, 22 nt, Human
guguuuugugaggccuucuuuc

SEQ ID NO: 334331 - RNA, 22 nt, Human
cucgagagauccucuugccacc

SEQ ID NO: 334332 - RNA, 22 nt, Human
cugcgugguaggacucaguucu

SEQ ID NO: 334333 - RNA, 22 nt, Human
uuuuucaagacaaccugcaugu

SEQ ID NO: 334334 - RNA, 22 nt, Human
uuuguguuggaagaaaugcuac

SEQ ID NO: 334335 - RNA, 22 nt, Human
agcuccugaaaauccagacugg

SEQ ID NO: 334336 - RNA, 22 nt, Human
agcugcugcaaguggugcuaac

SEQ ID NO: 334337 - RNA, 18 nt, Human
ggugagggagcuggaagc

SEQ ID NO: 334338 - RNA, 22 nt, Human
uuuguaguuguggaugcugaag

SEQ ID NO: 334339 - RNA, 22 nt, Human
aaagggaaguugcacauguucc

SEQ ID NO: 334340 - RNA, 22 nt, Human
cccaggcuggggcuccuccagc

SEQ ID NO: 334341 - RNA, 22 nt, Human
gccaccagccccaugcgcugug

SEQ ID NO: 334342 - RNA, 22 nt, Human
guugugcaaacacuggggucug

SEQ ID NO: 334343 - RNA, 22 nt, Human
uugcugccuuuguacucugaug

SEQ ID NO: 334344 - RNA, 22 nt, Human
aaugguaauauuucauaguugu

SEQ ID NO: 334345 - RNA, 22 nt, Human
cuuuacagauggauaauuguuu

SEQ ID NO: 334346 - RNA, 21 nt, Human
cccuugccugcacuccucggc

SEQ ID NO: 334347 - RNA, 19 nt, Human
gcagcugugggaagagcca

SEQ ID NO: 334348 - RNA, 20 nt, Human
ucacuguaacauuugggggg

SEQ ID NO: 334349 - RNA, 22 nt, Human
aagcccagcaucccugcaccag

SEQ ID NO: 334350 - RNA, 17 nt, Human
cucugggucuccugcuu

SEQ ID NO: 334351 - RNA, 22 nt, Human
cagaggccccauuggcugugcg

SEQ ID NO: 334352 - RNA, 22 nt, Human
ugccuggcugggcugcucaugg

SEQ ID NO: 334353 - RNA, 22 nt, Human
uccacagggaugccugcggcuu

SEQ ID NO: 334354 - RNA, 22 nt, Human
gggccccaagaaccuccuccug

SEQ ID NO: 334355 - RNA, 22 nt, Human
guguaucaacauguuuuuugug

SEQ ID NO: 334356 - RNA, 22 nt, Human
agcuuugcugcuggagaagggu

SEQ ID NO: 334357 - RNA, 22 nt, Human
auuucagcagcccauguuugga

SEQ ID NO: 334358 - RNA, 22 nt, Human
cagggcucacucggcuggcguc

SEQ ID NO: 334359 - RNA, 22 nt, Human
gucuuuuuuacaccuuacauca

SEQ ID NO: 334360 - RNA, 22 nt, Human
uggcugagcugcagcguggcuu

SEQ ID NO: 334361 - RNA, 22 nt, Human
cuaguagcccauuuuggauacc

SEQ ID NO: 334362 - RNA, 22 nt, Human
agcugucuaccugcagaguccu

SEQ ID NO: 334363 - RNA, 22 nt, Human
uugaggucuggcaguagcguug

SEQ ID NO: 334364 - RNA, 22 nt, Human
ugcuggaagggucggcgugggc

SEQ ID NO: 334365 - RNA, 22 nt, Human
auguuuguguuucccauucagg

SEQ ID NO: 334366 - RNA, 22 nt, Human
uccacagguccucuuugcaaag

SEQ ID NO: 334367 - RNA, 22 nt, Human
cugcggcuggggacagcuguug

SEQ ID NO: 334368 - RNA, 22 nt, Human
uuugcuggagaugagcgugggu

SEQ ID NO: 334369 - RNA, 22 nt, Human
agcggcgccggagggaggugcg

SEQ ID NO: 334370 - RNA, 22 nt, Human
uuugccaguauuuuauugauga

SEQ ID NO: 334371 - RNA, 22 nt, Human
gcugaagagagaugcguccagc

SEQ ID NO: 334372 - RNA, 21 nt, Human
uccuccuguagaggguccugg

SEQ ID NO: 334373 - RNA, 22 nt, Human
gccggggcuggggagagacaug

SEQ ID NO: 334374 - RNA, 22 nt, Human
gugcagcugugguggagccagg

SEQ ID NO: 334375 - RNA, 22 nt, Human
gugcgggccuggggguuucucu

SEQ ID NO: 334376 - RNA, 16 nt, Human
ucucccuugucaccug

SEQ ID NO: 334377 - RNA, 21 nt, Human
agcaucugaggcaguuuccua

SEQ ID NO: 334378 - RNA, 22 nt, Human
ucuguuauaaaucacacugcau

SEQ ID NO: 334379 - RNA, 22 nt, Human
uggcaaggccacaggugcaguu

SEQ ID NO: 334380 - RNA, 22 nt, Human
acuuuggugcgaagucacuuua

SEQ ID NO: 334381 - RNA, 18 nt, Human
ucagacaaguuagacagg

SEQ ID NO: 334382 - RNA, 22 nt, Human
aaacacaucauucaugucguca

SEQ ID NO: 334383 - RNA, 22 nt, Human
uagauucugacccucuuuuuac

SEQ ID NO: 334384 - RNA, 17 nt, Human
ugaggccugcaucagug

SEQ ID NO: 334385 - RNA, 22 nt, Human
agagcuccaggguuuuguagug

SEQ ID NO: 334386 - RNA, 22 nt, Human
acaguguuacuugauaguguau

SEQ ID NO: 334387 - RNA, 22 nt, Human
ggguggaaaguauuuggggacc

SEQ ID NO: 334388 - RNA, 22 nt, Human
caguuaaacagauugaguguua

SEQ ID NO: 334389 - RNA, 22 nt, Human
aguggcagggacuucauauaaa

SEQ ID NO: 334390 - RNA, 22 nt, Human
ccauggccaggaaagccaaggu

SEQ ID NO: 334391 - RNA, 22 nt, Human
uuuggauugcuuggaugcuucg

SEQ ID NO: 334392 - RNA, 22 nt, Human
gcagcugccgugagcucacgcc

SEQ ID NO: 334393 - RNA, 22 nt, Human
augcugccuccucuucagccgc

SEQ ID NO: 334394 - RNA, 22 nt, Human
aacuuucagaauccuaugcauu

SEQ ID NO: 334395 - RNA, 22 nt, Human
auuccucagcaggccuuuuguu

SEQ ID NO: 334396 - RNA, 19 nt, Human
uggugcgcuguuccugagc

SEQ ID NO: 334397 - RNA, 22 nt, Human
agcuuugggcagaagaggauuc

SEQ ID NO: 334398 - RNA, 22 nt, Human
guuguacauaugaggauaaguu

SEQ ID NO: 334399 - RNA, 20 nt, Human
gcuccccuucucugggccuc

SEQ ID NO: 334400 - RNA, 22 nt, Human
guuuccagccuccuggguaaag

SEQ ID NO: 334401 - RNA, 22 nt, Human
uggcuccguuguacaggcugga

SEQ ID NO: 334402 - RNA, 22 nt, Human
gcucccuggaauguuggcugcc

SEQ ID NO: 334403 - RNA, 22 nt, Human
gagagaagggggauaugagccu

SEQ ID NO: 334404 - RNA, 22 nt, Human
gcagagcuggaacugguacuca

SEQ ID NO: 334405 - RNA, 22 nt, Human
caggccagcagggccuccgugg

SEQ ID NO: 334406 - RNA, 22 nt, Human
aguuauugagugcagagcaggg

SEQ ID NO: 334407 - RNA, 22 nt, Human
uuaguuuccuguggugugaagu

SEQ ID NO: 334408 - RNA, 22 nt, Human
cagcuggcgacucuccucgaug

SEQ ID NO: 334409 - RNA, 22 nt, Human
uuuggcaagcgaguacuuucug

SEQ ID NO: 334410 - RNA, 22 nt, Human
gcuugcuuuguaaauaucugug

SEQ ID NO: 334411 - RNA, 22 nt, Human
acaaacuucccagacaagcucc

SEQ ID NO: 334412 - RNA, 22 nt, Human
agggcuccuaugccccauggac

SEQ ID NO: 334413 - RNA, 22 nt, Human
ccacccagccagaugcaggaag

SEQ ID NO: 334414 - RNA, 22 nt, Human
uuugcaaaguccauugaaguua

SEQ ID NO: 334415 - RNA, 22 nt, Human
aaggggaguuagugauaaaacc

SEQ ID NO: 334416 - RNA, 22 nt, Human
guuuccaggcuuugguaugguu

SEQ ID NO: 334417 - RNA, 22 nt, Human
caggguggaacaggcaauacuu

SEQ ID NO: 334418 - RNA, 22 nt, Human
cuugccaguguugcagaagcuc

SEQ ID NO: 334419 - RNA, 22 nt, Human
aggacaaaggaccagaucugga

SEQ ID NO: 334420 - RNA, 23 nt, Human
ucuggcugcuccuuucaaugcuc

SEQ ID NO: 334421 - RNA, 22 nt, Human
ggcagguguggugaccagagau

SEQ ID NO: 334422 - RNA, 22 nt, Human
gauggaggagauggcagggugc

SEQ ID NO: 334423 - RNA, 23 nt, Human
agccucuuguggauggucagcga

SEQ ID NO: 334424 - RNA, 22 nt, Human
gggaggaaggcuugggugagua

SEQ ID NO: 334425 - RNA, 22 nt, Human
ccaagaggggcagagggcugca

SEQ ID NO: 334426 - RNA, 22 nt, Human
ggaacuccugcuccaagcagcu

SEQ ID NO: 334427 - RNA, 22 nt, Human
gcuucccacagcuggacugggg

SEQ ID NO: 334428 - RNA, 22 nt, Human
ggcuagcuuagagucaugcuag

SEQ ID NO: 334429 - RNA, 22 nt, Human
uuuguguuguacuucugugcau

SEQ ID NO: 334430 - RNA, 22 nt, Human
cagcaguguacaaggugucaga

SEQ ID NO: 334431 - RNA, 22 nt, Human
uucuuuuaauuucugucugcag

SEQ ID NO: 334432 - RNA, 22 nt, Human
cucccagccuucgccagucuga

SEQ ID NO: 334433 - RNA, 22 nt, Human
ggaagcuguuaucaucuguauc

SEQ ID NO: 334434 - RNA, 22 nt, Human
guugcagauguggaacucgugc

SEQ ID NO: 334435 - RNA, 22 nt, Human
uccaggagggggagccgugccg

SEQ ID NO: 334436 - RNA, 19 nt, Human
gcuuccagcacugcaggag

SEQ ID NO: 334437 - RNA, 23 nt, Human
caccccacccugaggaggaggga

SEQ ID NO: 334438 - RNA, 22 nt, Human
acugccaggauggcacuagagg

SEQ ID NO: 334439 - RNA, 22 nt, Human
aggugggacccguggggugcga

SEQ ID NO: 334440 - RNA, 22 nt, Human
uuuuggcucugcagguuugcac

SEQ ID NO: 334441 - RNA, 22 nt, Human
uuuuuaagagucuggaaauagu

SEQ ID NO: 334442 - RNA, 22 nt, Human
ugcugcgggacccacugugggc

SEQ ID NO: 334443 - RNA, 22 nt, Human
cugggguccuugccauguguca

SEQ ID NO: 334444 - RNA, 22 nt, Human
gcucugugggggaaauccuggg

SEQ ID NO: 334445 - RNA, 22 nt, Human
uuugcagagugcagaagcaucu

SEQ ID NO: 334446 - RNA, 22 nt, Human
gcaguaucuaugugauggguug

SEQ ID NO: 334447 - RNA, 22 nt, Human
cugggcuccuaaccauccaggu

SEQ ID NO: 334448 - RNA, 19 nt, Human
uaugacaaguacuaguucu

SEQ ID NO: 334449 - RNA, 22 nt, Human
cccagcugaacuugcauuccaa

SEQ ID NO: 334450 - RNA, 22 nt, Human
cuagaaguuuggguccauuaag

SEQ ID NO: 334451 - RNA, 22 nt, Human
gccuuugcugugacaaugcugg

SEQ ID NO: 334452 - RNA, 19 nt, Human
gggugaggaagagcguugc

SEQ ID NO: 334453 - RNA, 22 nt, Human
ccaggacaagccagagggacag

SEQ ID NO: 334454 - RNA, 22 nt, Human
auggccugcagugcugccacag

SEQ ID NO: 334455 - RNA, 22 nt, Human
gagguccacugaggcaacaggg

SEQ ID NO: 334456 - RNA, 22 nt, Human
uaaauacuuuuacuccacugau

SEQ ID NO: 334457 - RNA, 22 nt, Human
ucugcuggaaaaccagggaauu

SEQ ID NO: 334458 - RNA, 22 nt, Human
uccaggagcucauccacgucaa

SEQ ID NO: 334459 - RNA, 18 nt, Human
ggcggguguuuuauucac

SEQ ID NO: 334460 - RNA, 22 nt, Human
ucaucaucauucucccccacuu

SEQ ID NO: 334461 - RNA, 22 nt, Human
caagagcuuuagaaaugcucau

SEQ ID NO: 334462 - RNA, 22 nt, Human
gcgcuccucccggcccuggugg

SEQ ID NO: 334463 - RNA, 22 nt, Human
cccaccagaccugcaccggcac

SEQ ID NO: 334464 - RNA, 22 nt, Human
cuggcaguguccagcucgugau

SEQ ID NO: 334465 - RNA, 22 nt, Human
ucccucugcuagugcuugagcu

SEQ ID NO: 334466 - RNA, 22 nt, Human
cuccagcagaaagggcgagugg

SEQ ID NO: 334467 - RNA, 22 nt, Human
aggcuguccucucuugcucagu

SEQ ID NO: 334468 - RNA, 22 nt, Human
caauguuuuuccuuccuuaaua

SEQ ID NO: 334469 - RNA, 22 nt, Human
ccucguccacaauccuugcaca

SEQ ID NO: 334470 - RNA, 18 nt, Human
ggaaggugcuggagugca

SEQ ID NO: 334471 - RNA, 22 nt, Human
uuucugugauaggcugcgacgc

SEQ ID NO: 334472 - RNA, 22 nt, Human
ugggcagggagcuggaaccaca

SEQ ID NO: 334473 - RNA, 22 nt, Human
ucaugucccguugcuggcugcc

SEQ ID NO: 334474 - RNA, 22 nt, Human
uugugcccucaaagggugcguc

SEQ ID NO: 334475 - RNA, 22 nt, Human
agaguuaaugcaggccaagccu

SEQ ID NO: 334476 - RNA, 22 nt, Human
cagaaagugauuugcuauucca

SEQ ID NO: 334477 - RNA, 22 nt, Human
ggcuuuuguuucagcucugcua

SEQ ID NO: 334478 - RNA, 21 nt, Human
acuguauuguuuucaaggauc

SEQ ID NO: 334479 - RNA, 22 nt, Human
agacgcgguggugcaugccugu

SEQ ID NO: 334480 - RNA, 22 nt, Human
cucucugggcccaguuggcacc

SEQ ID NO: 334481 - RNA, 22 nt, Human
ggagaugccuuguuucaggaac

SEQ ID NO: 334482 - RNA, 22 nt, Human
uguaauguuagaaacaauugcu

SEQ ID NO: 334483 - RNA, 22 nt, Human
ugcagcugccuagggcuggcuu

SEQ ID NO: 334484 - RNA, 22 nt, Human
aacccuggggcugcucugccug

SEQ ID NO: 334485 - RNA, 22 nt, Human
agcagcaggugaccucgaugcc

SEQ ID NO: 334486 - RNA, 22 nt, Human
cugcacagccugucugggggcc

SEQ ID NO: 334487 - RNA, 22 nt, Human
gcagggaaguuguaauguaaug

SEQ ID NO: 334488 - RNA, 22 nt, Human
gugauuuucuccuccuagaagu

SEQ ID NO: 334489 - RNA, 22 nt, Human
guagcagagggcccagguaacu

SEQ ID NO: 334490 - RNA, 22 nt, Human
uguguuuuggaaggaacaugca

SEQ ID NO: 334491 - RNA, 22 nt, Human adenovirus F
caccuguaccgggucuuggaaa

SEQ ID NO: 334492 - RNA, 22 nt, Human adenovirus F
cagugguucuuaauccgcaggc

SEQ ID NO: 334493 - RNA, 22 nt, Human adenovirus F
ucgcaucuuuuuugacuuggcu

SEQ ID NO: 334494 - RNA, 22 nt, Human adenovirus F
gucaaaauugauggucugggua

SEQ ID NO: 334495 - RNA, 22 nt, Human adenovirus F
ggagaucuugcaggccugacga

SEQ ID NO: 334496 - RNA, 22 nt, Human adenovirus F
ggagcguguuugucagagguag

SEQ ID NO: 334497 - RNA, 22 nt, Human adenovirus F
ggagggacguggagcgccugca

SEQ ID NO: 334498 - RNA, 22 nt, Human adenovirus F
gccugggagaaaggcauggauu

SEQ ID NO: 334499 - RNA, 22 nt, Human adenovirus F
aacguaugcuguuccgcccuuc

SEQ ID NO: 334500 - RNA, 22 nt, Human adenovirus F
cgcccucuucugcaccugcacg

SEQ ID NO: 334501 - RNA, 22 nt, Human adenovirus F
agcgguggggagaggugugauc

SEQ ID NO: 334502 - RNA, 23 nt, Human adenovirus F
acugucaguggugcggcgguggc

SEQ ID NO: 334503 - RNA, 22 nt, Human adenovirus F
gcaagcccauucugccaguugg

SEQ ID NO: 334504 - RNA, 22 nt, Human adenovirus F
gccucugccaguguuaauacua

SEQ ID NO: 334505 - RNA, 22 nt, Human adenovirus F
cugcuguaugaugggcacgcgg

SEQ ID NO: 334506 - RNA, 22 nt, Human adenovirus F
gaccaccugucgcggucguuua

SEQ ID NO: 334507 - RNA, 22 nt, Human adenovirus F
ugcggagccugagggucgcugg

SEQ ID NO: 334508 - RNA, 22 nt, Human adenovirus F
ugaggcuuggcagucucuaccu

SEQ ID NO: 334509 - RNA, 22 nt, Human adenovirus F
ugcagagccaccggaggcuggc

SEQ ID NO: 334510 - RNA, 22 nt, Human adenovirus F
gaggcguucgacgcgaggauga

SEQ ID NO: 334511 - RNA, 22 nt, Human adenovirus F
cggaaggcauagugcagggacu

SEQ ID NO: 334512 - RNA, 22 nt, Human adenovirus F
uuuaaacgaccgcgacaggugg

SEQ ID NO: 334513 - RNA, 16 nt, Human adenovirus F
agucauuauuuuguac

SEQ ID NO: 334514 - RNA, 22 nt, Human adenovirus F
aguuagcgcccugucgcugccu

SEQ ID NO: 334515 - RNA, 22 nt, Human adenovirus F
gugcaggugcagaagagggcga

SEQ ID NO: 334516 - RNA, 22 nt, Human
uugauacaggccuucuagauga

SEQ ID NO: 334517 - RNA, 22 nt, Human
uagcauuucccaaaugcauuug

SEQ ID NO: 334518 - RNA, 22 nt, Human
uuagaacugaagaagauuaagg

SEQ ID NO: 334519 - RNA, 21 nt, Human
auaaaguuuuacaggaaugca

SEQ ID NO: 334520 - RNA, 22 nt, Human
uguaugaaguuacugagccucu

SEQ ID NO: 334521 - RNA, 23 nt, Human
acaagauagggauaaaaagauaa

SEQ ID NO: 334522 - RNA, 22 nt, Human
uuggaaauacagcaguuacuuu

SEQ ID NO: 334523 - RNA, 22 nt, Human
uuagaacuuaaacuucagaaag

SEQ ID NO: 334524 - RNA, 22 nt, Human
uacaaguaaauuguagauacca

SEQ ID NO: 334525 - RNA, 22 nt, Human
ugcuagaaaucugaaacuagca

SEQ ID NO: 334526 - RNA, 22 nt, Human
aacagcauaaguauuuauuuca

SEQ ID NO: 334527 - RNA, 22 nt, Human
auucugucuuuuuauacaucua

SEQ ID NO: 334528 - RNA, 22 nt, Human
aucuguuccccuaugcucucua

SEQ ID NO: 334529 - RNA, 20 nt, Human
cuguuaaaagguaugaauuc

SEQ ID NO: 334530 - RNA, 22 nt, Human
uauaaaguuucgaaagauguau

SEQ ID NO: 334531 - RNA, 22 nt, Human
uaauuucuagggacuaaggugc

SEQ ID NO: 334532 - RNA, 22 nt, Human
ugaaauuaugcauuguuguacc

SEQ ID NO: 334533 - RNA, 22 nt, Human
uguaugaaaaggaauagauuga

SEQ ID NO: 334534 - RNA, 18 nt, Human
acaaaugugucacaggaa

SEQ ID NO: 334535 - RNA, 22 nt, Human
agaauccuguuuuacuucauca

SEQ ID NO: 334536 - RNA, 22 nt, Human
uaaucuguauuccuacuuugca

SEQ ID NO: 334537 - RNA, 22 nt, Human
cauuuacuuaaaucuuuacaag

SEQ ID NO: 334538 - RNA, 22 nt, Human
uagaaacaaugacaugcuugua

SEQ ID NO: 334539 - RNA, 22 nt, Human
uauacaauggcugaaucaucca

SEQ ID NO: 334540 - RNA, 22 nt, Human
ucugugcauuguaacaacuaaa

SEQ ID NO: 334541 - RNA, 22 nt, Human
ccuacucugagcgccuccgcau

SEQ ID NO: 334542 - RNA, 22 nt, Human
ugucagaugcgauaaacuagug

SEQ ID NO: 334543 - RNA, 21 nt, Human
ucuagaauccuguauaagacu

SEQ ID NO: 334544 - RNA, 22 nt, Human
uuggaaaaacacgauagugguu

SEQ ID NO: 334545 - RNA, 22 nt, Human
uuguaugaucaaaagaaaugua

SEQ ID NO: 334546 - RNA, 22 nt, Human
gugugaaaaugugcacaauaug

SEQ ID NO: 334547 - RNA, 22 nt, Human
acaagguauccacauuaaaugu

SEQ ID NO: 334548 - RNA, 22 nt, Human
uguagaaacuacacaugcaaca

SEQ ID NO: 334549 - RNA, 22 nt, Human
ucauauaaguuuaaaacuaucu

SEQ ID NO: 334550 - RNA, 22 nt, Human
acuucacagaaauuuuaugagg

SEQ ID NO: 334551 - RNA, 20 nt, Human
gcaaaauaggcucuguuggu

SEQ ID NO: 334552 - RNA, 22 nt, Human
caagauaagaucauuuacacua

SEQ ID NO: 334553 - RNA, 22 nt, Human
auguagaauggugauuggcagg

SEQ ID NO: 334554 - RNA, 22 nt, Human
augcugucgaaaccaaacaucu

SEQ ID NO: 334555 - RNA, 22 nt, Human
uauugaaauucuucauguccuc

SEQ ID NO: 334556 - RNA, 22 nt, Human
ucugucaauauaugugcugcag

SEQ ID NO: 334557 - RNA, 22 nt, Human
uaucaauacauguuaucagugu

SEQ ID NO: 334558 - RNA, 22 nt, Human
acuuuacaagcuuauagccuag

SEQ ID NO: 334559 - RNA, 22 nt, Human
aauguaugaagguuccaguuuc

SEQ ID NO: 334560 - RNA, 22 nt, Human
uagucaaaccucagaauacccc

SEQ ID NO: 334561 - RNA, 22 nt, Human
aauguaugcugugguaucuucu

SEQ ID NO: 334562 - RNA, 22 nt, Human
uacauguauguguacgugcaug

SEQ ID NO: 334563 - RNA, 23 nt, Human
auggaagucacuguuuucuuguc

SEQ ID NO: 334564 - RNA, 22 nt, Human
aauacugucuuucacagauauu

SEQ ID NO: 334565 - RNA, 22 nt, Human
gugaaacacccuccaaugcaca

SEQ ID NO: 334566 - RNA, 22 nt, Human
uguaaaaccaaaucaaucuagu

SEQ ID NO: 334567 - RNA, 22 nt, Human
aaaguucuggcauuuucugucu

SEQ ID NO: 334568 - RNA, 22 nt, Human
auguagaaaguucauagaugcg

SEQ ID NO: 334569 - RNA, 22 nt, Human
aguaugaaucucuuuauucugc

SEQ ID NO: 334570 - RNA, 22 nt, Human
uaauaucuggcauucaaacaug

SEQ ID NO: 334571 - RNA, 22 nt, Human
gaauauuuucaguacagauggu

SEQ ID NO: 334572 - RNA, 22 nt, Human
gaacacaucacauuuuacagug

SEQ ID NO: 334573 - RNA, 22 nt, Human
auucucaauggcuacuuucaua

SEQ ID NO: 334574 - RNA, 22 nt, Human
augcuacagaguuugaauaugu

SEQ ID NO: 334575 - RNA, 22 nt, Human
augucaaacacaacaccagugg

SEQ ID NO: 334576 - RNA, 22 nt, Human
uuucacaagacagcuacuguug

SEQ ID NO: 334577 - RNA, 22 nt, Human
auaugugaaugauaucacuuug

SEQ ID NO: 334578 - RNA, 22 nt, Human
cuguuuaucucuaaccuguuua

SEQ ID NO: 334579 - RNA, 22 nt, Human
acugauuacacgaguucugacu

SEQ ID NO: 334580 - RNA, 22 nt, Human
cagcauuuagaauuugaagugu

SEQ ID NO: 334581 - RNA, 22 nt, Human
uuagccauguugaagauuuaga

SEQ ID NO: 334582 - RNA, 22 nt, Human
uacaaaguaauguauaauaucg

SEQ ID NO: 334583 - RNA, 22 nt, Human
aauugcaauuuucuuaaggucu

SEQ ID NO: 334584 - RNA, 22 nt, Human
uuggaaagauuauuauuaugaa

SEQ ID NO: 334585 - RNA, 22 nt, Human
cauaugaaauaugaguugaaca

SEQ ID NO: 334586 - RNA, 22 nt, Human
auguagaagcugacagugcugu

SEQ ID NO: 334587 - RNA, 22 nt, Human
uguacuaaggcuguguagaugu

SEQ ID NO: 334588 - RNA, 22 nt, Human
cauaauuugugguaguggggga

SEQ ID NO: 334589 - RNA, 22 nt, Human
uacaaaguagaaauucaguaaa

SEQ ID NO: 334590 - RNA, 22 nt, Human
uaugaacuagcugauuuaguuu

SEQ ID NO: 334591 - RNA, 22 nt, Human
caaugaaaauuuaaguugcagc

SEQ ID NO: 334592 - RNA, 22 nt, Human
aucaaauauaauaauuuucgcu

SEQ ID NO: 334593 - RNA, 22 nt, Human
cuagaaauauuuuacagucaag

SEQ ID NO: 334594 - RNA, 22 nt, Human
uaaucuguguaccuucaucgga

SEQ ID NO: 334595 - RNA, 22 nt, Human
agaaucucuacucaaguacuug

SEQ ID NO: 334596 - RNA, 22 nt, Human
aauuauguagccauaugaaaca

SEQ ID NO: 334597 - RNA, 19 nt, Human
uugaaauuguuugauaugg

SEQ ID NO: 334598 - RNA, 22 nt, Human
uucugucaaauuugccauaugg

SEQ ID NO: 334599 - RNA, 22 nt, Human
aauacauauggaauuccauguu

SEQ ID NO: 334600 - RNA, 22 nt, Human
guuuuccugaaacugauggugu

SEQ ID NO: 334601 - RNA, 22 nt, Human
auuacucugucugccucugacc

SEQ ID NO: 334602 - RNA, 22 nt, Human
aauucugugcaggcagagcuau

SEQ ID NO: 334603 - RNA, 22 nt, Human
augacaugaccugguagagaca

SEQ ID NO: 334604 - RNA, 22 nt, Human
aaacacagauuucuuuguccca

SEQ ID NO: 334605 - RNA, 23 nt, Human
aaacuacauuuauaguuuuucuc

SEQ ID NO: 334606 - RNA, 22 nt, Human
uguucauaucauuuugaaagcu

SEQ ID NO: 334607 - RNA, 22 nt, Human
uuucauaauauccagagauuuu

SEQ ID NO: 334608 - RNA, 22 nt, Human
uuguaugaggauagcaagaagc

SEQ ID NO: 334609 - RNA, 22 nt, Human
aucugucuugccuugcauauuu

SEQ ID NO: 334610 - RNA, 22 nt, Human
augugaaagagguguucagugg

SEQ ID NO: 334611 - RNA, 22 nt, Human
cuauugaauuaacuauuaaagu

SEQ ID NO: 334612 - RNA, 22 nt, Human
uauugacaauuugugaaacuau

SEQ ID NO: 334613 - RNA, 22 nt, Human
auauacuuggagacuaucauug

SEQ ID NO: 334614 - RNA, 22 nt, Human
uguagaaccuguuuauuauaga

SEQ ID NO: 334615 - RNA, 23 nt, Human
uuuuccuguggagacaugacugg

SEQ ID NO: 334616 - RNA, 22 nt, Human
cuagguauucauguuucguggc

SEQ ID NO: 334617 - RNA, 22 nt, Human
cuaauguaucauggcucucagc

SEQ ID NO: 334618 - RNA, 20 nt, Human
augugaaagaucaguugucu

SEQ ID NO: 334619 - RNA, 22 nt, Human
aauaaucucccuuuuuguaugu

SEQ ID NO: 334620 - RNA, 20 nt, Human
ucugugcaccugcuacaagg

SEQ ID NO: 334621 - RNA, 22 nt, Human
acagauauuuggggaaagacgu

SEQ ID NO: 334622 - RNA, 22 nt, Human
ugugugaaggagccacuguuca

SEQ ID NO: 334623 - RNA, 19 nt, Human
agcaacaccguuuauuucc

SEQ ID NO: 334624 - RNA, 22 nt, Human
uucaugaaacuuaacuguuggg

SEQ ID NO: 334625 - RNA, 22 nt, Human
aguaugaacggaaggccuggga

SEQ ID NO: 334626 - RNA, 22 nt, Human
cacaugaagagagucuaguaau

SEQ ID NO: 334627 - RNA, 22 nt, Human
cauauguauuucucauaauuag

SEQ ID NO: 334628 - RNA, 22 nt, Human
aauaacuuuuaaaagacccugg

SEQ ID NO: 334629 - RNA, 22 nt, Human
uucugucacagugcugguauca

SEQ ID NO: 334630 - RNA, 22 nt, Human
ugcuacaauucacaucuggaua

SEQ ID NO: 334631 - RNA, 22 nt, Human
uuucauugaugggugauagaaa

SEQ ID NO: 334632 - RNA, 22 nt, Human
ugucuucaucuccaugcacaga

SEQ ID NO: 334633 - RNA, 19 nt, Human
cccucuugcacaaagcaaa

SEQ ID NO: 334634 - RNA, 22 nt, Human
uucauacacgaaaaugcaugca

SEQ ID NO: 334635 - RNA, 22 nt, Human
aaaaugacauuccagugauauu

SEQ ID NO: 334636 - RNA, 20 nt, Human
uucugucagauuauauggga

SEQ ID NO: 334637 - RNA, 22 nt, Human
uucugucaaaugccaguagaga

SEQ ID NO: 334638 - RNA, 22 nt, Human
uucugucauccuuucuagaugu

SEQ ID NO: 334639 - RNA, 22 nt, Human
uauucacaugaaaacaaauuuu

SEQ ID NO: 334640 - RNA, 22 nt, Human
ucauaaaucauacuccauuugc

SEQ ID NO: 334641 - RNA, 22 nt, Human
ugugaaaagcaggcuacuuucu

SEQ ID NO: 334642 - RNA, 22 nt, Human
ucaugaacauggaauaucuuuu

SEQ ID NO: 334643 - RNA, 22 nt, Human
cuacaaugacagaauugaguag

SEQ ID NO: 334644 - RNA, 20 nt, Human
uuaucugucaaucugucuca

SEQ ID NO: 334645 - RNA, 22 nt, Human
uauguaaaaauucaucaggcug

SEQ ID NO: 334646 - RNA, 18 nt, Human
ugucauaauauaucaccu

SEQ ID NO: 334647 - RNA, 22 nt, Human
uuaacacauauuuaucaauugc

SEQ ID NO: 334648 - RNA, 22 nt, Human
aguauaaagugguuuucagcac

SEQ ID NO: 334649 - RNA, 22 nt, Human
aucugucaggagcaaggacuac

SEQ ID NO: 334650 - RNA, 22 nt, Human
caaaguuuuaguaaacauauau

SEQ ID NO: 334651 - RNA, 22 nt, Human
cuagaauugcauucuaugaaua

SEQ ID NO: 334652 - RNA, 22 nt, Human
uaugacauuggccaaguucugu

SEQ ID NO: 334653 - RNA, 22 nt, Human
auacuucuuugauguucacagg

SEQ ID NO: 334654 - RNA, 18 nt, Human
cccucuugcacaaagcaa

SEQ ID NO: 334655 - RNA, 22 nt, Human
uuaucauugucgcagucuaauu

SEQ ID NO: 334656 - RNA, 22 nt, Human
acauuucacuguucacagcagg

SEQ ID NO: 334657 - RNA, 22 nt, Human
acauaugauauugaggaucuca

SEQ ID NO: 334658 - RNA, 22 nt, Human
aaaguuugagugauuugacaca

SEQ ID NO: 334659 - RNA, 22 nt, Human
uacaaagucacauugaaaugaa

SEQ ID NO: 334660 - RNA, 22 nt, Human
aucuacauaaaacgaauacaua

SEQ ID NO: 334661 - RNA, 22 nt, Human
aagauaauauucauuaacuaga

SEQ ID NO: 334662 - RNA, 22 nt, Human
uaacacauaucuacaacaugug

SEQ ID NO: 334663 - RNA, 22 nt, Human
aaguuucauuguucauguaaca

SEQ ID NO: 334664 - RNA, 22 nt, Human
ugcuagaagauagcuagaagau

SEQ ID NO: 334665 - RNA, 22 nt, Human
uacuuacagaaggaagcaauug

SEQ ID NO: 334666 - RNA, 22 nt, Human
uuguaugagcuccaggaacuca

SEQ ID NO: 334667 - RNA, 22 nt, Human
uuucaaaccuacuuguauguuu

SEQ ID NO: 334668 - RNA, 22 nt, Human
uuucuugacugcuuaggaaugc

SEQ ID NO: 334669 - RNA, 22 nt, Human
ucugauuagagcauucuugagu

SEQ ID NO: 334670 - RNA, 22 nt, Human
uucaaauacauucuuugccacu

SEQ ID NO: 334671 - RNA, 20 nt, Human
auacacauucauagaaaaau

SEQ ID NO: 334672 - RNA, 22 nt, Human
gguaugaaaugauuccauguua

SEQ ID NO: 334673 - RNA, 21 nt, Human
uaugaacaugaccaauagucc

SEQ ID NO: 334674 - RNA, 22 nt, Human
aauacugccugugagguaacuc

SEQ ID NO: 334675 - RNA, 22 nt, Human
gaacacauuucucugacuguag

SEQ ID NO: 334676 - RNA, 22 nt, Human
auacacauauguguguauaugu

SEQ ID NO: 334677 - RNA, 22 nt, Human
augaagcugaaaaaggcauaua

SEQ ID NO: 334678 - RNA, 22 nt, Human
gaaguucuuagucucauuugca

SEQ ID NO: 334679 - RNA, 23 nt, Human
ucuguacaauugagaagagaaca

SEQ ID NO: 334680 - RNA, 22 nt, Human
uucugucagaagcuagcuccug

SEQ ID NO: 334681 - RNA, 22 nt, Human
uaugaaacauucauacaaauaa

SEQ ID NO: 334682 - RNA, 22 nt, Human
ucugucaaaaguuuucaauaaa

SEQ ID NO: 334683 - RNA, 22 nt, Human
cucauaaugugacuguauuuga

SEQ ID NO: 334684 - RNA, 23 nt, Human
uguaugaauaugccacaguuuaa

SEQ ID NO: 334685 - RNA, 22 nt, Human
uuucacacugcagcaucagaga

SEQ ID NO: 334686 - RNA, 22 nt, Human
uggaaauacuugccauaaaacu

SEQ ID NO: 334687 - RNA, 22 nt, Human
aauugcaacagguagacuuuuc

SEQ ID NO: 334688 - RNA, 22 nt, Human
guguaugauuucaaauggcuag

SEQ ID NO: 334689 - RNA, 22 nt, Human
uacauugcuuucuaauacaucu

SEQ ID NO: 334690 - RNA, 22 nt, Human
uaugaccuuaggaagcaagaag

SEQ ID NO: 334691 - RNA, 23 nt, Human
gaauaguuuuagaaauuggagaa

SEQ ID NO: 334692 - RNA, 22 nt, Human
auaugagaguaaaugccgaucu

SEQ ID NO: 334693 - RNA, 20 nt, Human
agaaauauugaguucagagg

SEQ ID NO: 334694 - RNA, 22 nt, Human
uacagcauauacagaaugaaca

SEQ ID NO: 334695 - RNA, 22 nt, Human
uaugucaaaguuaagaaauagg

SEQ ID NO: 334696 - RNA, 22 nt, Human
guguaugagccuccagcugggc

SEQ ID NO: 334697 - RNA, 22 nt, Human
ucugauuagcaguuuagggaaa

SEQ ID NO: 334698 - RNA, 22 nt, Human
uuucuugaccacuauguugaua

SEQ ID NO: 334699 - RNA, 22 nt, Human
aucaguuauuuuuaagcuauaa

SEQ ID NO: 334700 - RNA, 22 nt, Human
uucugucauuuagcauugucau

SEQ ID NO: 334701 - RNA, 22 nt, Human
uguuagaaauuauuaguaauau

SEQ ID NO: 334702 - RNA, 22 nt, Human
gaaagauauuuauuggcaacag

SEQ ID NO: 334703 - RNA, 22 nt, Human
guuaugaaauaaauauagauca

SEQ ID NO: 334704 - RNA, 22 nt, Human
aaauacauaaagguuguaccag

SEQ ID NO: 334705 - RNA, 22 nt, Human
uguaugaagacuucuucugugu

SEQ ID NO: 334706 - RNA, 22 nt, Human
uuagaacuuaagaauacugucu

SEQ ID NO: 334707 - RNA, 22 nt, Human
auauaauuguucugaaguguuu

SEQ ID NO: 334708 - RNA, 22 nt, Human
uuuacacaaaagauagcacacc

SEQ ID NO: 334709 - RNA, 22 nt, Human
acuggaaaugagaugauaucag

SEQ ID NO: 334710 - RNA, 22 nt, Human
auaacuuagaguaggcaaaagu

SEQ ID NO: 334711 - RNA, 21 nt, Human
aauguauguuuaucucacagu

SEQ ID NO: 334712 - RNA, 22 nt, Human
cagcauuuaucuuguagcagga

SEQ ID NO: 334713 - RNA, 22 nt, Human
ugucuucaguaaaauacacuau

SEQ ID NO: 334714 - RNA, 22 nt, Human
uucugucaugcucauguaauug

SEQ ID NO: 334715 - RNA, 22 nt, Human
acagauauaaacuauaguagug

SEQ ID NO: 334716 - RNA, 22 nt, Human
uaauacuguauacugcaaauuu

SEQ ID NO: 334717 - RNA, 22 nt, Human
aauaauuuuagcucagaguugu

SEQ ID NO: 334718 - RNA, 22 nt, Human
uaguauuuaaucacuuuugucu

SEQ ID NO: 334719 - RNA, 22 nt, Human
uacagcauguccuuagcaaggc

SEQ ID NO: 334720 - RNA, 22 nt, Human
auguuagaaggaauguuaaaag

SEQ ID NO: 334721 - RNA, 22 nt, Human
uacuuacacagcuguagaaggu

SEQ ID NO: 334722 - RNA, 22 nt, Human
cacagucacauaucuaugugug

SEQ ID NO: 334723 - RNA, 22 nt, Human
ucaauaaaauuguuuuccuauc

SEQ ID NO: 334724 - RNA, 22 nt, Human
gaacacaugauuauaaaugcua

SEQ ID NO: 334725 - RNA, 22 nt, Human
aauguaugagcgugaaagcacu

SEQ ID NO: 334726 - RNA, 22 nt, Human
gaacaucagucauaauuuaacg

SEQ ID NO: 334727 - RNA, 22 nt, Human
aaaguuugcaauuuauguuaau

SEQ ID NO: 334728 - RNA, 23 nt, Human
aaaguuugaagcaacaguaguug

SEQ ID NO: 334729 - RNA, 22 nt, Human
uaacuacauuucacugcaauua

SEQ ID NO: 334730 - RNA, 22 nt, Human
ucauuuugggguuugucaucuu

SEQ ID NO: 334731 - RNA, 22 nt, Human
uaacacauuaguucuccuagau

SEQ ID NO: 334732 - RNA, 22 nt, Human
ugagaaaugggucugcugaaga

SEQ ID NO: 334733 - RNA, 22 nt, Human
ucugaaauagaagugucuuucu

SEQ ID NO: 334734 - RNA, 22 nt, Human
uuuuccuguccaggcaauuauu

SEQ ID NO: 334735 - RNA, 23 nt, Human
aauguauguuaguaucuuagaga

SEQ ID NO: 334736 - RNA, 22 nt, Human
uguaugaaucucauuuguuuaa

SEQ ID NO: 334737 - RNA, 22 nt, Human
ucacauuucugauuauaccaaa

SEQ ID NO: 334738 - RNA, 22 nt, Human
augugaaauagcuggauaugaa

SEQ ID NO: 334739 - RNA, 22 nt, Human
aucugcuugaguuugaagucag

SEQ ID NO: 334740 - RNA, 22 nt, Human
uugugcucuguguuauuuaagg

SEQ ID NO: 334741 - RNA, 22 nt, Human
ucuucuuaugugccauuaucuc

SEQ ID NO: 334742 - RNA, 22 nt, Human
aaauaguuagcccugcauauau

SEQ ID NO: 334743 - RNA, 22 nt, Human
uaggaaauggcucaguuacugc

SEQ ID NO: 334744 - RNA, 22 nt, Human
uauacacaaggugugcauuugu

SEQ ID NO: 334745 - RNA, 22 nt, Human
uaucaauugggccaaaugguac

SEQ ID NO: 334746 - RNA, 22 nt, Human
aaauauagcaauuaugccuacu

SEQ ID NO: 334747 - RNA, 23 nt, Human
auguaucucauccaaggaagcuc

SEQ ID NO: 334748 - RNA, 21 nt, Human
uuucugaaggcaacaucuauc

SEQ ID NO: 334749 - RNA, 22 nt, Human
acacagccgugaaucugcuucu

SEQ ID NO: 334750 - RNA, 22 nt, Human
guaguuuucugaaaauuacuuu

SEQ ID NO: 334751 - RNA, 22 nt, Human
uagaaacauguucuguucuguu

SEQ ID NO: 334752 - RNA, 22 nt, Human
uagcauuuauuccagauuugga

SEQ ID NO: 334753 - RNA, 22 nt, Human
uuugacaaauccuucagcaaug

SEQ ID NO: 334754 - RNA, 22 nt, Human
acuggaaaacacuacuacaugc

SEQ ID NO: 334755 - RNA, 22 nt, Human
ucacaauacucacucaauggcu

SEQ ID NO: 334756 - RNA, 22 nt, Human
uaacacauauuugcaguaagca

SEQ ID NO: 334757 - RNA, 22 nt, Human
uaugaacauguucauugacuua

SEQ ID NO: 334758 - RNA, 22 nt, Human
caaauaguaugagcaaugauuc

SEQ ID NO: 334759 - RNA, 23 nt, Human
aaauaugucugagggcaaagaau

SEQ ID NO: 334760 - RNA, 22 nt, Human
aaauaguuguuuggaucaauaa

SEQ ID NO: 334761 - RNA, 22 nt, Human
uuucugaacaaagccauuauca

SEQ ID NO: 334762 - RNA, 22 nt, Human
aauaguauuuauuuggaaaaag

SEQ ID NO: 334763 - RNA, 22 nt, Human
acaugauuuuuaaagagauaau

SEQ ID NO: 334764 - RNA, 22 nt, Human
uguuccaauaaggaguugaaau

SEQ ID NO: 334765 - RNA, 22 nt, Human
ucauacaauucaaucucugauu

SEQ ID NO: 334766 - RNA, 22 nt, Human
uuaacacaucccugcucuaccc

SEQ ID NO: 334767 - RNA, 23 nt, Human
ugugaaauuugaggucagugcuu

SEQ ID NO: 334768 - RNA, 21 nt, Human
caauaaacugcacauugagac

SEQ ID NO: 334769 - RNA, 22 nt, Human
auuuagacuucccagcacugug

SEQ ID NO: 334770 - RNA, 22 nt, Human
uuucucuugcgauaugcuacac

SEQ ID NO: 334771 - RNA, 22 nt, Human
ucauauaacuggauauuuucaa

SEQ ID NO: 334772 - RNA, 22 nt, Human
aagucuguuugagugucacacu

SEQ ID NO: 334773 - RNA, 22 nt, Human
uguaugaauauguuggggaggu

SEQ ID NO: 334774 - RNA, 22 nt, Human
auucacagaauaguuuuaccag

SEQ ID NO: 334775 - RNA, 22 nt, Human
aacuacauuguccuuucugaag

SEQ ID NO: 334776 - RNA, 22 nt, Human
uaacacaugucugggaugugaa

SEQ ID NO: 334777 - RNA, 22 nt, Human
ucacaauauuuaucuuccaauu

SEQ ID NO: 334778 - RNA, 22 nt, Human
auucugucuaagcuggcuacgu

SEQ ID NO: 334779 - RNA, 22 nt, Human
aaaguuaguuucuuauaugucu

SEQ ID NO: 334780 - RNA, 21 nt, Human
acagauauuucauugaacauu

SEQ ID NO: 334781 - RNA, 22 nt, Human
uagaauucaagauucaacaggc

SEQ ID NO: 334782 - RNA, 22 nt, Human
aauugucaaacacaaauaagag

SEQ ID NO: 334783 - RNA, 22 nt, Human
uuuucguuuauuugacauguaa

SEQ ID NO: 334784 - RNA, 22 nt, Human
auguaugaagcuuuguuuggga

SEQ ID NO: 334785 - RNA, 20 nt, Human
auacacauauucuugcaacu

SEQ ID NO: 334786 - RNA, 22 nt, Human
auguuauggcucaaacauuugg

SEQ ID NO: 334787 - RNA, 22 nt, Human
cucugucacuucuccagcugag

SEQ ID NO: 334788 - RNA, 22 nt, Human
agguauaagucucauuucuguu

SEQ ID NO: 334789 - RNA, 22 nt, Human
auaucauuauguuaugagcaca

SEQ ID NO: 334790 - RNA, 22 nt, Human
uguuugaauuuugcuaacgugu

SEQ ID NO: 334791 - RNA, 21 nt, Human
augugaaaccuuccacgcuga

SEQ ID NO: 334792 - RNA, 22 nt, Human
uacauucagaagaauggacacg

SEQ ID NO: 334793 - RNA, 22 nt, Human
uguguaaagcuuguuccagaaa

SEQ ID NO: 334794 - RNA, 19 nt, Human
acauuuagaauguacuugc

SEQ ID NO: 334795 - RNA, 22 nt, Human
uagauauggccgucuguuuuaa

SEQ ID NO: 334796 - RNA, 22 nt, Human
uuuuccuucuagagcagauuuc

SEQ ID NO: 334797 - RNA, 22 nt, Human
aauacuuuccuauauaaggugc

SEQ ID NO: 334798 - RNA, 22 nt, Human
uaugaacuuuugaugugacaug

SEQ ID NO: 334799 - RNA, 22 nt, Human
gagaacucagacgcaggucaug

SEQ ID NO: 334800 - RNA, 22 nt, Human
acauacuuaugcuaaaaauaua

SEQ ID NO: 334801 - RNA, 22 nt, Human
augugaaaaauuucuuauuaca

SEQ ID NO: 334802 - RNA, 22 nt, Human
agucuacaaagaaaaguuauug

SEQ ID NO: 334803 - RNA, 22 nt, Human
uaacacauuuuccucauacgga

SEQ ID NO: 334804 - RNA, 22 nt, Human
ugcuagaauuagguuaaacaaa

SEQ ID NO: 334805 - RNA, 22 nt, Human
uuccuugaaugagucauggaaa

SEQ ID NO: 334806 - RNA, 22 nt, Human
gaauacauuggaaaucagaaua

SEQ ID NO: 334807 - RNA, 22 nt, Human
aaucuuagguuuggcuucaucu

SEQ ID NO: 334808 - RNA, 22 nt, Human
augaaaauguacauguguauaa

SEQ ID NO: 334809 - RNA, 22 nt, Human
uaacacauuuuaagccauuuua

SEQ ID NO: 334810 - RNA, 22 nt, Human
uuguaauuugcaaauguauugu

SEQ ID NO: 334811 - RNA, 22 nt, Human
uuaauacaagcauaugcacaca

SEQ ID NO: 334812 - RNA, 22 nt, Human
ugaaagauugugauucaauaug

SEQ ID NO: 334813 - RNA, 22 nt, Human
aaaguguggucguucauuuugu

SEQ ID NO: 334814 - RNA, 22 nt, Human
ugguauaaaacuuuuuauugaa

SEQ ID NO: 334815 - RNA, 22 nt, Human
uaauaguugugacuuuguaaag

SEQ ID NO: 334816 - RNA, 22 nt, Human
aauucuguaacuuuacugaauu

SEQ ID NO: 334817 - RNA, 22 nt, Human
cauaauuucccaagagauugaa

SEQ ID NO: 334818 - RNA, 22 nt, Human
gugauaaaauucaaauagcucu

SEQ ID NO: 334819 - RNA, 22 nt, Human
auuacaaucgagagaaacaaau

SEQ ID NO: 334820 - RNA, 22 nt, Human
uguacaaagguacuuugauguu

SEQ ID NO: 334821 - RNA, 22 nt, Human
aagcaacucccuccucauuuuu

SEQ ID NO: 334822 - RNA, 22 nt, Human
uaacuuucuucauaugugaacc

SEQ ID NO: 334823 - RNA, 22 nt, Human
uauacaaugaguacauucuggg

SEQ ID NO: 334824 - RNA, 22 nt, Human
uguaggaaaaacaaugaucugc

SEQ ID NO: 334825 - RNA, 22 nt, Human
uaugaacugugagugugauggg

SEQ ID NO: 334826 - RNA, 19 nt, Human
cauuuagaaguacauauua

SEQ ID NO: 334827 - RNA, 22 nt, Human
uguauaaauuuaaauuccugcu

SEQ ID NO: 334828 - RNA, 22 nt, Human
ugaaacuuauaagaauaugaau

SEQ ID NO: 334829 - RNA, 22 nt, Human
aaacagcaggaacaucuugcca

SEQ ID NO: 334830 - RNA, 22 nt, Human
aagcacauuguacauuugugcu

SEQ ID NO: 334831 - RNA, 22 nt, Human
ucuggucaguaauaagaagugg

SEQ ID NO: 334832 - RNA, 22 nt, Human
aguaugaagcugaaugauuuua

SEQ ID NO: 334833 - RNA, 22 nt, Human
uagcauuaucugucuuaucauu

SEQ ID NO: 334834 - RNA, 22 nt, Human
uucugucacuuuuuuggaaucu

SEQ ID NO: 334835 - RNA, 22 nt, Human
cuuugaaaggaagccacacagc

SEQ ID NO: 334836 - RNA, 22 nt, Human
aaaguaguuagucaugugaaaa

SEQ ID NO: 334837 - RNA, 22 nt, Human
uguaggaauguuuuuaaguugg

SEQ ID NO: 334838 - RNA, 22 nt, Human
uacauauguaaacauguauaaa

SEQ ID NO: 334839 - RNA, 23 nt, Human
ugaaacauuuaggguagaauuuc

SEQ ID NO: 334840 - RNA, 22 nt, Human
cagcauuuucuuaauguaggug

SEQ ID NO: 334841 - RNA, 16 nt, Human
uucugucacguacggc

SEQ ID NO: 334842 - RNA, 22 nt, Human
guguaugaggggagaauguuuu

SEQ ID NO: 334843 - RNA, 22 nt, Human
cucugucagaguguugucccca

SEQ ID NO: 334844 - RNA, 22 nt, Human
auuuagcaaaaaaugaugaagc

SEQ ID NO: 334845 - RNA, 22 nt, Human
ugaaacaaugugaaguugcuga

SEQ ID NO: 334846 - RNA, 22 nt, Human
auauucuuccaaaacaucauuu

SEQ ID NO: 334847 - RNA, 22 nt, Human
aaagaauagccuuuguccaaau

SEQ ID NO: 334848 - RNA, 22 nt, Human
aaauauguauggaguucaugaa

SEQ ID NO: 334849 - RNA, 22 nt, Human
auugcuuaucuaucuuuaaguc

SEQ ID NO: 334850 - RNA, 22 nt, Human
acuauaaaaggauaaaccagaa

SEQ ID NO: 334851 - RNA, 22 nt, Human
aauuaugagguagauaucacau

SEQ ID NO: 334852 - RNA, 22 nt, Human
aguaugaaccuggguucuggau

SEQ ID NO: 334853 - RNA, 22 nt, Human
ugaacacauaaggcuuuccugu

SEQ ID NO: 334854 - RNA, 22 nt, Human
gugcuaaaggguuaugaacaag

SEQ ID NO: 334855 - RNA, 16 nt, Human
uguaugaacgucucca

SEQ ID NO: 334856 - RNA, 22 nt, Human
uuucacaaucaaauggugaaau

SEQ ID NO: 334857 - RNA, 22 nt, Human
ugcuagaauuugcagaagcaua

SEQ ID NO: 334858 - RNA, 22 nt, Human
agguaugagauaaaucaaugaa

SEQ ID NO: 334859 - RNA, 22 nt, Human
cuuucauaaaggaaaugaugag

SEQ ID NO: 334860 - RNA, 22 nt, Human
uguaugaaccuuuaauauagug

SEQ ID NO: 334861 - RNA, 22 nt, Human
aaaguguugauaugugacaucc

SEQ ID NO: 334862 - RNA, 22 nt, Human
uuuagacauggcuugcucacuu

SEQ ID NO: 334863 - RNA, 22 nt, Human
auguaugagagauucuuuuauu

SEQ ID NO: 334864 - RNA, 22 nt, Human
uuuuucuugugcuggaucuaau

SEQ ID NO: 334865 - RNA, 22 nt, Human
auaugugaaguggguuauuuug

SEQ ID NO: 334866 - RNA, 22 nt, Human
uguuuauuacaguucuuggaau

SEQ ID NO: 334867 - RNA, 22 nt, Human
ugaccuuauuugaaaauagaga

SEQ ID NO: 334868 - RNA, 22 nt, Human
aaguauuucguucugaaaaagu

SEQ ID NO: 334869 - RNA, 22 nt, Human
aguaugaagauuauaauuuuuc

SEQ ID NO: 334870 - RNA, 21 nt, Human
gaauaguucuguggcagcagu

SEQ ID NO: 334871 - RNA, 22 nt, Human
uaacacauagauauuuuaacuu

SEQ ID NO: 334872 - RNA, 22 nt, Human
ugugugaaggaauauauacuca

SEQ ID NO: 334873 - RNA, 22 nt, Human
uaacacauauuucaagaguagu

SEQ ID NO: 334874 - RNA, 22 nt, Human
aaguuucaaauguugauuaugc

SEQ ID NO: 334875 - RNA, 22 nt, Human
gucaaaaaguagucauuucugu

SEQ ID NO: 334876 - RNA, 17 nt, Human
uuuagaauacaauguuu

SEQ ID NO: 334877 - RNA, 22 nt, Human
auucugucuuuuuaaaauaaua

SEQ ID NO: 334878 - RNA, 22 nt, Human
aucuagcaguguuauaauugga

SEQ ID NO: 334879 - RNA, 22 nt, Human
aaacacaucauucaugucguca

SEQ ID NO: 334880 - RNA, 22 nt, Human
uucacauugugcagauuauggu

SEQ ID NO: 334881 - RNA, 22 nt, Human
guuguuuuuguucucuauagcu

SEQ ID NO: 334882 - RNA, 22 nt, Human
ugacaaaacugcaauuacuuuu

SEQ ID NO: 334883 - RNA, 22 nt, Human
ugugaaaagggcuuuguacaaa

SEQ ID NO: 334884 - RNA, 22 nt, Human
caugaaauugcuccuuuggugc

SEQ ID NO: 334885 - RNA, 22 nt, Human
auaucauucugauguauaucuu

SEQ ID NO: 334886 - RNA, 22 nt, Human
ucagaaagaacacaggcaguag

SEQ ID NO: 334887 - RNA, 22 nt, Human
augcuacauuuugguuuauaaa

SEQ ID NO: 334888 - RNA, 22 nt, Human
gauauguauugaaugaucauuu

SEQ ID NO: 334889 - RNA, 22 nt, Human
agauaugugcgucuuagauuga

SEQ ID NO: 334890 - RNA, 22 nt, Human
ucaaaguuacuugugguuuucu

SEQ ID NO: 334891 - RNA, 22 nt, Human
cucugaaagaguuuaguauuau

SEQ ID NO: 334892 - RNA, 22 nt, Human
gguauaaaugaucagaucgcug

SEQ ID NO: 334893 - RNA, 22 nt, Human
uauguacaugauuucauuugcu

SEQ ID NO: 334894 - RNA, 22 nt, Human
uggaaauauacaaugugucucu

SEQ ID NO: 334895 - RNA, 22 nt, Human
uugugaaacauucauggauuug

SEQ ID NO: 334896 - RNA, 22 nt, Human
uuuuacuuaauucuuggucaug

SEQ ID NO: 334897 - RNA, 20 nt, Human
auaaaauaacugccacaaga

SEQ ID NO: 334898 - RNA, 22 nt, Human
uaggaaaugcuccauugcauaa

SEQ ID NO: 334899 - RNA, 22 nt, Human
aaaaguauuuauggcuauguaa

SEQ ID NO: 334900 - RNA, 17 nt, Human
agguauaaaaugguagc

SEQ ID NO: 334901 - RNA, 22 nt, Human
augacacuuggugauacuuugu

SEQ ID NO: 334902 - RNA, 22 nt, Human
uuuuucuuaaauguggguuggc

SEQ ID NO: 334903 - RNA, 22 nt, Human
acauuuagaguucuuuacucca

SEQ ID NO: 334904 - RNA, 22 nt, Human
aucacauugccagugauuaccc

SEQ ID NO: 334905 - RNA, 22 nt, Human
auccugucaucauaguacuuga

SEQ ID NO: 334906 - RNA, 22 nt, Human
uucacacacagcuuccuauugu

SEQ ID NO: 334907 - RNA, 22 nt, Human
uuucaaacuuuacucuugaauc

SEQ ID NO: 334908 - RNA, 22 nt, Human
aaacacagggauauauauucca

SEQ ID NO: 334909 - RNA, 22 nt, Human
uagacauuucugguuauugaca

SEQ ID NO: 334910 - RNA, 22 nt, Human
aaguauuucuggccugugaaag

SEQ ID NO: 334911 - RNA, 22 nt, Human
uaugaacuguacuguacuaagc

SEQ ID NO: 334912 - RNA, 22 nt, Human
gauucacucauauuuuacguuu

SEQ ID NO: 334913 - RNA, 22 nt, Human
cauaauuuuccaugguuugcua

SEQ ID NO: 334914 - RNA, 22 nt, Human
aaauaguuacuucugcugucuu

SEQ ID NO: 334915 - RNA, 22 nt, Human
ugugaaauucuugaaaugcaca

SEQ ID NO: 334916 - RNA, 22 nt, Human
gcauaugaucacgugugucggu

SEQ ID NO: 334917 - RNA, 22 nt, Human
cucugauuuccuuauucuguca

SEQ ID NO: 334918 - RNA, 22 nt, Human
aaauauacuagaugaugaccca

SEQ ID NO: 334919 - RNA, 22 nt, Human
aaucuucagugucuaaaaagca

SEQ ID NO: 334920 - RNA, 22 nt, Human
cugcucuaacugcauuaguuuu

SEQ ID NO: 334921 - RNA, 22 nt, Human
ucugucaucucuaaaauagaaa

SEQ ID NO: 334922 - RNA, 22 nt, Human
aucauuuuuaagagacucuucu

SEQ ID NO: 334923 - RNA, 22 nt, Human
aaauacauacacuguacguggc

SEQ ID NO: 334924 - RNA, 22 nt, Human
aauaacuuaagaaauuucccca

SEQ ID NO: 334925 - RNA, 23 nt, Human
uuucacaaugagcauuacagaau

SEQ ID NO: 334926 - RNA, 22 nt, Human
aaauuucaguuggaaugagcuc

SEQ ID NO: 334927 - RNA, 22 nt, Human
uuucugaaaucucuuuugagga

SEQ ID NO: 334928 - RNA, 22 nt, Human
aaaguucuuucucuuauuuggu

SEQ ID NO: 334929 - RNA, 22 nt, Human
uaugagaaucugcaguaugcuu

SEQ ID NO: 334930 - RNA, 22 nt, Human
uagauauguguuuauuaugcug

SEQ ID NO: 334931 - RNA, 22 nt, Human
ugaaguuguuaagguugccauu

SEQ ID NO: 334932 - RNA, 23 nt, Human
uagaaugucauucaaugauaugg

SEQ ID NO: 334933 - RNA, 22 nt, Human
aauguaugugcaucauuuacau

SEQ ID NO: 334934 - RNA, 22 nt, Human
aguaugaaaguuaaucaauuua

SEQ ID NO: 334935 - RNA, 22 nt, Human
uucuugaaucacuuuagagaua

SEQ ID NO: 334936 - RNA, 22 nt, Human
aaaguuuguuauaugauaagga

SEQ ID NO: 334937 - RNA, 22 nt, Human
uagcaauagaaacauauaaagu

SEQ ID NO: 334938 - RNA, 22 nt, Human
caauaguucgguccugaaggcc

SEQ ID NO: 334939 - RNA, 22 nt, Human
auaugagaauuggaaaauauca

SEQ ID NO: 334940 - RNA, 22 nt, Human
uguauaaacuuaagcaggaacc

SEQ ID NO: 334941 - RNA, 22 nt, Human
ucaguuaacaacuauuuauuga

SEQ ID NO: 334942 - RNA, 22 nt, Human
aauaucuucuaaggauagaacu

SEQ ID NO: 334943 - RNA, 22 nt, Human
cauaauuucacugucguauggc

SEQ ID NO: 334944 - RNA, 22 nt, Human
uucugucagcgucagaaauucu

SEQ ID NO: 334945 - RNA, 22 nt, Human
uaugacauugcuuuuuagaacu

SEQ ID NO: 334946 - RNA, 22 nt, Human
aucugcuuuugagaauuuacuu

SEQ ID NO: 334947 - RNA, 22 nt, Human
aaucacaugugcucaauuuuaa

SEQ ID NO: 334948 - RNA, 22 nt, Human
uaauaguuucauaaugugcuuc

SEQ ID NO: 334949 - RNA, 22 nt, Human
agguauaagaagauuauuuaua

SEQ ID NO: 334950 - RNA, 22 nt, Human
uguuagaaguuaaucacuaauu

SEQ ID NO: 334951 - RNA, 22 nt, Human
guuuagaacacggaaauacuga

SEQ ID NO: 334952 - RNA, 20 nt, Human
uuucacaaugaacaugucuc

SEQ ID NO: 334953 - RNA, 22 nt, Human
uuucugaagauacagcuuugcu

SEQ ID NO: 334954 - RNA, 22 nt, Human
auguaaacaagguuauugucca

SEQ ID NO: 334955 - RNA, 22 nt, Human
uaugaaaugguaguaggaaggg

SEQ ID NO: 334956 - RNA, 22 nt, Human
ugcuauaaguagacauucaaca

SEQ ID NO: 334957 - RNA, 22 nt, Human
uaucuguuaugggcugaauugc

SEQ ID NO: 334958 - RNA, 22 nt, Human
uaauuucaauagcuugcauaau

SEQ ID NO: 334959 - RNA, 22 nt, Human
uuagacauguuugcuaaaauga

SEQ ID NO: 334960 - RNA, 22 nt, Human
uacauucagcaaaagaaugguu

SEQ ID NO: 334961 - RNA, 20 nt, Human
uuuuccuucugaguauguug

SEQ ID NO: 334962 - RNA, 22 nt, Human
uaugaacucuggagucugagug

SEQ ID NO: 334963 - RNA, 22 nt, Human
ucauaaaugcagugucauaaau

SEQ ID NO: 334964 - RNA, 22 nt, Human
aaucugucguaguaaaaagcag

SEQ ID NO: 334965 - RNA, 22 nt, Human
ucuuuauugcuacugguuuguc

SEQ ID NO: 334966 - RNA, 22 nt, Human
acauaugugcuuauauccauga

SEQ ID NO: 334967 - RNA, 22 nt, Human
uauguacuaacuuucauucuag

SEQ ID NO: 334968 - RNA, 22 nt, Human
aguaugaauacagauuuucucu

SEQ ID NO: 334969 - RNA, 22 nt, Human
aauguaugugauuauuccucua

SEQ ID NO: 334970 - RNA, 22 nt, Human
cagcauuuggaggagaggcuuu

SEQ ID NO: 334971 - RNA, 22 nt, Human
uaauuucacugauaugaaguca

SEQ ID NO: 334972 - RNA, 22 nt, Human
ugagaauuuuuugucaugcauu

SEQ ID NO: 334973 - RNA, 22 nt, Human
agaauccucuucaguaaauucu

SEQ ID NO: 334974 - RNA, 22 nt, Human
gugugaaagcuuguccucugua

SEQ ID NO: 334975 - RNA, 22 nt, Human
aaacacauuuuaggaaaaucua

SEQ ID NO: 334976 - RNA, 22 nt, Human
uucugucacuugcaaucaagag

SEQ ID NO: 334977 - RNA, 22 nt, Human
auaaucuuucuuuuccagauag

SEQ ID NO: 334978 - RNA, 22 nt, Human
caacacauugaagcuaugauga

SEQ ID NO: 334979 - RNA, 22 nt, Human
uguuugaaacuuugaucacuaa

SEQ ID NO: 334980 - RNA, 22 nt, Human
acuaaauacacacauuuguuca

SEQ ID NO: 334981 - RNA, 22 nt, Human
gaacacauuagucugaguuggc

SEQ ID NO: 334982 - RNA, 22 nt, Human
uaugacuuauuucaucaguucu

SEQ ID NO: 334983 - RNA, 22 nt, Human
uuucaaacauagaucugaauau

SEQ ID NO: 334984 - RNA, 20 nt, Human
aguguacagacacuagaaau

SEQ ID NO: 334985 - RNA, 22 nt, Human
ugaaacauugcacuguaugaau

SEQ ID NO: 334986 - RNA, 22 nt, Human
auuucauacuaaggcucaaaaa

SEQ ID NO: 334987 - RNA, 22 nt, Human
augugaaacugaagcauccaua

SEQ ID NO: 334988 - RNA, 22 nt, Human
gaacacauguccuccuuggauu

SEQ ID NO: 334989 - RNA, 22 nt, Human
ucaugaacaucucaaauaacca

SEQ ID NO: 334990 - RNA, 22 nt, Human
aaaaauaggucaaccguguaug

SEQ ID NO: 334991 - RNA, 22 nt, Human
uauauguaagcuauguaagagu

SEQ ID NO: 334992 - RNA, 22 nt, Human
acacauauauacauauuugugc

SEQ ID NO: 334993 - RNA, 22 nt, Human
agaauaugaugguuggagaauu

SEQ ID NO: 334994 - RNA, 22 nt, Human
aauaacuucauguaacauuuaa

SEQ ID NO: 334995 - RNA, 18 nt, Human
cauaauuuucuuucuuua

SEQ ID NO: 334996 - RNA, 22 nt, Human
aacauucaaaacccaguucagu

SEQ ID NO: 334997 - RNA, 22 nt, Human
aauguauggauucaugucugug

SEQ ID NO: 334998 - RNA, 22 nt, Human
cuguaugaacccauauacuuau

SEQ ID NO: 334999 - RNA, 22 nt, Human
gugaaacagaagcuccuggaau

SEQ ID NO: 335000 - RNA, 22 nt, Human
uuggaaauugcaagugauuugc

SEQ ID NO: 335001 - RNA, 22 nt, Human
aaaguucuggggguguuucugg

SEQ ID NO: 335002 - RNA, 22 nt, Human
gucugucaucugagauggagug

SEQ ID NO: 335003 - RNA, 22 nt, Human
gucugucacucaggggcuggag

SEQ ID NO: 335004 - RNA, 21 nt, Human
auucugucaucccagcuacuu

SEQ ID NO: 335005 - RNA, 22 nt, Human
aauguauuccucaugcaagagu

SEQ ID NO: 335006 - RNA, 22 nt, Human
uaugacauuauaaaggauuauu

SEQ ID NO: 335007 - RNA, 22 nt, Human
augaacugcaguauaaacuugg

SEQ ID NO: 335008 - RNA, 22 nt, Human
auaaaguuuaaaagucaauagu

SEQ ID NO: 335009 - RNA, 19 nt, Human
aaacacagauuucuuacca

SEQ ID NO: 335010 - RNA, 22 nt, Human
agucagugaaaacuagaauguu

SEQ ID NO: 335011 - RNA, 22 nt, Human
uaacacaugguuaguacacaau

SEQ ID NO: 335012 - RNA, 20 nt, Human
aucugcuugccuguccucgg

SEQ ID NO: 335013 - RNA, 22 nt, Human
ugucaagucucugaaugaaaug

SEQ ID NO: 335014 - RNA, 22 nt, Human
cauuuacacuucuaaccacaag

SEQ ID NO: 335015 - RNA, 22 nt, Human
uuagacauagaauauugucuag

SEQ ID NO: 335016 - RNA, 22 nt, Human
cagcauuuaaugcagugcuucc

SEQ ID NO: 335017 - RNA, 22 nt, Human
aagaauacguaucaacaauggu

SEQ ID NO: 335018 - RNA, 22 nt, Human
ucugucaaaugagcaaguaacu

SEQ ID NO: 335019 - RNA, 22 nt, Human
uuaacacagggggagacaaagu

SEQ ID NO: 335020 - RNA, 22 nt, Human
cagcauuuggugaucaucuuaa

SEQ ID NO: 335021 - RNA, 22 nt, Human
agcuagaaguacagccauauga

SEQ ID NO: 335022 - RNA, 22 nt, Human
augucaaaucaguuuuaucaga

SEQ ID NO: 335023 - RNA, 22 nt, Human
uauguacuacacuagaacauuu

SEQ ID NO: 335024 - RNA, 22 nt, Human
agcauucauugcuagaauguaa

SEQ ID NO: 335025 - RNA, 22 nt, Human
uugugaaauguuucaaaauagu

SEQ ID NO: 335026 - RNA, 22 nt, Human
cacaugcaucugucauguuugg

SEQ ID NO: 335027 - RNA, 22 nt, Human
auaacuuucuucacccuugcug

SEQ ID NO: 335028 - RNA, 22 nt, Human
aguuagaaaguaaaucauuuga

SEQ ID NO: 335029 - RNA, 22 nt, Human
aaaguuugucacuuggcuagaa

SEQ ID NO: 335030 - RNA, 22 nt, Human
aaaguugugaaaccgaacaugu

SEQ ID NO: 335031 - RNA, 22 nt, Human
aaguaugacauuuaagacaauu

SEQ ID NO: 335032 - RNA, 22 nt, Human
uuuucucuuguuaauguacuga

SEQ ID NO: 335033 - RNA, 22 nt, Human
uagaauucauguuacuguuagc

SEQ ID NO: 335034 - RNA, 22 nt, Human
uuggaaauggcuguaguuauga

SEQ ID NO: 335035 - RNA, 22 nt, Human
auguauuucuauguagugaaga

SEQ ID NO: 335036 - RNA, 22 nt, Human
ucuucauauauaaaguggaaua

SEQ ID NO: 335037 - RNA, 22 nt, Human
uacacacaugcauuugccuuau

SEQ ID NO: 335038 - RNA, 22 nt, Human
aauguaugacaguucuaguggu

SEQ ID NO: 335039 - RNA, 22 nt, Human
augacucuuagcuaaagguaag

SEQ ID NO: 335040 - RNA, 22 nt, Human
cauucacaaagcugauugaugg

SEQ ID NO: 335041 - RNA, 22 nt, Human
aaguuucaugauguaauuauug

SEQ ID NO: 335042 - RNA, 22 nt, Human
ugagaauuuucaguuucacuuu

SEQ ID NO: 335043 - RNA, 22 nt, Human
uuugauaagagcugcugaaacu

SEQ ID NO: 335044 - RNA, 22 nt, Human
acaagauagcuuagaagauuca

SEQ ID NO: 335045 - RNA, 22 nt, Human
gaaacaauuuuuguugucuaag

SEQ ID NO: 335046 - RNA, 22 nt, Human
uaaaguuuggcagacaauaaca

SEQ ID NO: 335047 - RNA, 22 nt, Human
aguaugaauugcuuugccugua

SEQ ID NO: 335048 - RNA, 22 nt, Human
auguagaaauuaggaugauagu

SEQ ID NO: 335049 - RNA, 23 nt, Human
acagaaaguucugcuggacagag

SEQ ID NO: 335050 - RNA, 22 nt, Human
uagcuagaaugcuucgugauau

SEQ ID NO: 335051 - RNA, 22 nt, Human
auguuagaaucucugaaugugg

SEQ ID NO: 335052 - RNA, 22 nt, Human
ucaauauauuccauguuuucuc

SEQ ID NO: 335053 - RNA, 22 nt, Human
acuucacagauauuuauuuggu

SEQ ID NO: 335054 - RNA, 22 nt, Human
acaaaguuugugguauuccaag

SEQ ID NO: 335055 - RNA, 22 nt, Human
aagauauagauaaaacuaugca

SEQ ID NO: 335056 - RNA, 22 nt, Human
agaauaugaucggaauacagau

SEQ ID NO: 335057 - RNA, 22 nt, Human
auucacaguuuccucauauucu

SEQ ID NO: 335058 - RNA, 22 nt, Human
uguaugaaugggaaaaggaaac

SEQ ID NO: 335059 - RNA, 22 nt, Human
uugaauuagacuuugcuacagg

SEQ ID NO: 335060 - RNA, 22 nt, Human
ugaaaucaaugucuucugucuc

SEQ ID NO: 335061 - RNA, 22 nt, Human
aaguaugaaucaaagacuaucu

SEQ ID NO: 335062 - RNA, 22 nt, Human
auguagaacagguuaaugacag

SEQ ID NO: 335063 - RNA, 20 nt, Human
uaacuuucuaugcuuucagc

SEQ ID NO: 335064 - RNA, 22 nt, Human
aaaguuugaaugauauauuagu

SEQ ID NO: 335065 - RNA, 22 nt, Human
uuucauugucuacauaugacau

SEQ ID NO: 335066 - RNA, 22 nt, Human
auguuugacugaguuuggcaga

SEQ ID NO: 335067 - RNA, 22 nt, Human
auuugcuuuuacuauguuaaaa

SEQ ID NO: 335068 - RNA, 22 nt, Human
aguucacauaucuguuuuauuu

SEQ ID NO: 335069 - RNA, 22 nt, Human
gaaaacuauuggccuagaacaa

SEQ ID NO: 335070 - RNA, 22 nt, Human
aucugucaagauagacucugca

SEQ ID NO: 335071 - RNA, 22 nt, Human
aauaacuucaguucuuacauua

SEQ ID NO: 335072 - RNA, 22 nt, Human
gaaacauacgauuuaggagaaa

SEQ ID NO: 335073 - RNA, 22 nt, Human
cucugucaggcugcagaugcuc

SEQ ID NO: 335074 - RNA, 22 nt, Human
uauucacaguugauuuacaguu

SEQ ID NO: 335075 - RNA, 22 nt, Human
aaucacuuuucucuaauguagc

SEQ ID NO: 335076 - RNA, 22 nt, Human
uagaacauaagucauucauuug

SEQ ID NO: 335077 - RNA, 22 nt, Human
aaucuucauuuugacaagauuc

SEQ ID NO: 335078 - RNA, 22 nt, Human
cuaucauuuuacaugguuggug

SEQ ID NO: 335079 - RNA, 22 nt, Human
gaaacuuacuuacucacauuuc

SEQ ID NO: 335080 - RNA, 22 nt, Human
uuguaugaauguauccuaauuu

SEQ ID NO: 335081 - RNA, 22 nt, Human
gagcauuuuugucugcauuuua

SEQ ID NO: 335082 - RNA, 22 nt, Human
aaauauguaagauuagcacuag

SEQ ID NO: 335083 - RNA, 22 nt, Human
agucuacaaucuuaaaugaacu

SEQ ID NO: 335084 - RNA, 22 nt, Human
uaacacaugguucugucaggaa

SEQ ID NO: 335085 - RNA, 22 nt, Human
auuuuccucaagccucuggaag

SEQ ID NO: 335086 - RNA, 22 nt, Human
uguuugaacugaauaacauagu

SEQ ID NO: 335087 - RNA, 22 nt, Human
uaacacaugaaagcaccuucuu

SEQ ID NO: 335088 - RNA, 22 nt, Human
uucugucaaagacuuuuucagg

SEQ ID NO: 335089 - RNA, 22 nt, Human
uguaugaagccagaaucuguuu

SEQ ID NO: 335090 - RNA, 22 nt, Human
aauguauguguauaucaaauca

SEQ ID NO: 335091 - RNA, 18 nt, Human
acacugcagcagucugcu

SEQ ID NO: 335092 - RNA, 22 nt, Human
uuuucauuguuacuaugagcua

SEQ ID NO: 335093 - RNA, 22 nt, Human
ucugcucuguggcuucagcuaa

SEQ ID NO: 335094 - RNA, 22 nt, Human
uguuagaauauuguaauauucg

SEQ ID NO: 335095 - RNA, 22 nt, Human
gaaacauaguugagacacugcu

SEQ ID NO: 335096 - RNA, 22 nt, Human
uguaugaaagaacaagggcuua

SEQ ID NO: 335097 - RNA, 22 nt, Human
uaucauuguguuauuucuucca

SEQ ID NO: 335098 - RNA, 22 nt, Human
ucucaaaucaaacuuugagcuu

SEQ ID NO: 335099 - RNA, 22 nt, Human
gugauaaagacgugucauaauu

SEQ ID NO: 335100 - RNA, 22 nt, Human
uauauauucuuaaguaguguag

SEQ ID NO: 335101 - RNA, 22 nt, Human
guguauaaugcuguuuguacau

SEQ ID NO: 335102 - RNA, 22 nt, Human
uacaaaugaguuguaugaacca

SEQ ID NO: 335103 - RNA, 22 nt, Human
acuagauaauuauaaaagguag

SEQ ID NO: 335104 - RNA, 22 nt, Human
cucauuaaaggaaaucaccugc

SEQ ID NO: 335105 - RNA, 23 nt, Human
acucacaaagcaggaucauguug

SEQ ID NO: 335106 - RNA, 22 nt, Human
augcuacagcaucucucaucag

SEQ ID NO: 335107 - RNA, 22 nt, Human
uaacuuucacaucacacugacu

SEQ ID NO: 335108 - RNA, 22 nt, Human
gucugucauacggcuuauguaa

SEQ ID NO: 335109 - RNA, 22 nt, Human
uauauguaaauaagucuaaugu

SEQ ID NO: 335110 - RNA, 22 nt, Human
ugaaacuucuaauaugaauagu

SEQ ID NO: 335111 - RNA, 22 nt, Human
cacucugaugguuucuguucaa

SEQ ID NO: 335112 - RNA, 22 nt, Human
gagcauuugguuauaguaauuu

SEQ ID NO: 335113 - RNA, 22 nt, Human
uucugucacuuaggaggucaua

SEQ ID NO: 335114 - RNA, 19 nt, Human
auguaugaggucuucugcu

SEQ ID NO: 335115 - RNA, 22 nt, Human
uuucauaaccucaagcuacagu

SEQ ID NO: 335116 - RNA, 21 nt, Human
uaacacauuuugguacuuugg

SEQ ID NO: 335117 - RNA, 22 nt, Human
ugugaaaagcguguguucuagg

SEQ ID NO: 335118 - RNA, 22 nt, Human
aaaguuguucaguaagaaacuc

SEQ ID NO: 335119 - RNA, 17 nt, Human
uauauguaugccucucc

SEQ ID NO: 335120 - RNA, 22 nt, Human
uaacacauaagcugagaccaug

SEQ ID NO: 335121 - RNA, 22 nt, Human
gaaacauauuaauccagugaaa

SEQ ID NO: 335122 - RNA, 22 nt, Human
uugaauuauaagugugucuacu

SEQ ID NO: 335123 - RNA, 22 nt, Human
uauaauguuuuccauggacuga

SEQ ID NO: 335124 - RNA, 22 nt, Human
cauaauuucuguaucagcacca

SEQ ID NO: 335125 - RNA, 22 nt, Human
aguuagaauagucagauuguag

SEQ ID NO: 335126 - RNA, 22 nt, Human
uaugaacuguaacccucaccgc

SEQ ID NO: 335127 - RNA, 22 nt, Human
cauucacaucuuguuccaucac

SEQ ID NO: 335128 - RNA, 22 nt, Human
uguaugaauauguauuuucaua

SEQ ID NO: 335129 - RNA, 22 nt, Human
acaauacuuaccaauguuuuug

SEQ ID NO: 335130 - RNA, 22 nt, Human
acugcuuacccggccugacuuc

SEQ ID NO: 335131 - RNA, 22 nt, Human
aaauaguucagcuuguaaaccc

SEQ ID NO: 335132 - RNA, 22 nt, Human
aaguaugugauacauguuaauu

SEQ ID NO: 335133 - RNA, 22 nt, Human
aaauaguucagccacggugacu

SEQ ID NO: 335134 - RNA, 20 nt, Human
aauuuacucacagaaugaau

SEQ ID NO: 335135 - RNA, 22 nt, Human
acauuuagcuguacaaucuaug

SEQ ID NO: 335136 - RNA, 22 nt, Human
auguagaagugggcauuauaga

SEQ ID NO: 335137 - RNA, 22 nt, Human
aucucuguaaaccauaaauuga

SEQ ID NO: 335138 - RNA, 22 nt, Human
uuagcauuucaguacacauguu

SEQ ID NO: 335139 - RNA, 22 nt, Human
uucacaauggcaaaccauuaaa

SEQ ID NO: 335140 - RNA, 22 nt, Human
auguaugauauuuccaguauca

SEQ ID NO: 335141 - RNA, 22 nt, Human
agauauauuuaagguaauaagu

SEQ ID NO: 335142 - RNA, 22 nt, Human
gaauauuuguaauuacuguuga

SEQ ID NO: 335143 - RNA, 22 nt, Human
cuguaugaguugggaauagaau

SEQ ID NO: 335144 - RNA, 22 nt, Human
uuguauuucuccacuuucuguu

SEQ ID NO: 335145 - RNA, 22 nt, Human
acaauauuguacccagaaguuu

SEQ ID NO: 335146 - RNA, 22 nt, Human
cacacucauuagucauuucucu

SEQ ID NO: 335147 - RNA, 22 nt, Human
aucugucagccugggauuaggg

SEQ ID NO: 335148 - RNA, 22 nt, Human
uuucauaauacuguacaugaaa

SEQ ID NO: 335149 - RNA, 22 nt, Human
cauacaagcguucaauagaugu

SEQ ID NO: 335150 - RNA, 22 nt, Human
auuuugcuggucugaauuacuu

SEQ ID NO: 335151 - RNA, 22 nt, Human
aaucuuucccuauuaaaugugg

SEQ ID NO: 335152 - RNA, 22 nt, Human
cugcucuaauaucagauagacu

SEQ ID NO: 335153 - RNA, 22 nt, Human
uguauaaaccauggacagcuuu

SEQ ID NO: 335154 - RNA, 22 nt, Human
aaaguuagacagcaucauuucu

SEQ ID NO: 335155 - RNA, 22 nt, Human
aaacacauuagcccuguggaaa

SEQ ID NO: 335156 - RNA, 22 nt, Human
ucugcucugggccagcuauuaa

SEQ ID NO: 335157 - RNA, 22 nt, Human
uauggaaagcucuuuuugauug

SEQ ID NO: 335158 - RNA, 22 nt, Human
acauauuuugaaagcuuucuaa

SEQ ID NO: 335159 - RNA, 22 nt, Human
ucacauuuuauaucucugguuu

SEQ ID NO: 335160 - RNA, 22 nt, Human
uucauacaaugggauauuauga

SEQ ID NO: 335161 - RNA, 22 nt, Human
guaugaaaauuguaaaguucuu

SEQ ID NO: 335162 - RNA, 22 nt, Human
uaauuucaccguugcuagaaau

SEQ ID NO: 335163 - RNA, 22 nt, Human
aaauaguuuagcucucauuuca

SEQ ID NO: 335164 - RNA, 22 nt, Human
aucugucaucagcaccacaggu

SEQ ID NO: 335165 - RNA, 21 nt, Human
augugaaauaucaucagagca

SEQ ID NO: 335166 - RNA, 23 nt, Human
aucuguucaucugacacagauuc

SEQ ID NO: 335167 - RNA, 22 nt, Human
caucaaauaggaauauuuggca

SEQ ID NO: 335168 - RNA, 19 nt, Human
ugcuagaaauucugugacu

SEQ ID NO: 335169 - RNA, 22 nt, Human
uauucacaggcacgaaauauug

SEQ ID NO: 335170 - RNA, 22 nt, Human
acaauguaggauauguacuugu

SEQ ID NO: 335171 - RNA, 22 nt, Human
aguaugaagaauacauagauga

SEQ ID NO: 335172 - RNA, 22 nt, Human
uucugucagcugcuuugucuca

SEQ ID NO: 335173 - RNA, 22 nt, Human
uagcauuucacugaucuucacu

SEQ ID NO: 335174 - RNA, 22 nt, Human
ugaacuuagugggaauaucucu

SEQ ID NO: 335175 - RNA, 19 nt, Human
auauauguauacaaugugg

SEQ ID NO: 335176 - RNA, 22 nt, Human
agauuuauguggucacacucag

SEQ ID NO: 335177 - RNA, 22 nt, Human
agcuagaauauugaucugaaau

SEQ ID NO: 335178 - RNA, 18 nt, Human
cucugucauaagugucau

SEQ ID NO: 335179 - RNA, 22 nt, Human
uauuaaauuauggauuuaggag

SEQ ID NO: 335180 - RNA, 22 nt, Human
ugucauaacuuagugacaaauc

SEQ ID NO: 335181 - RNA, 19 nt, Human
uuuuccuucuauauguuuc

SEQ ID NO: 335182 - RNA, 22 nt, Human
ugugaaauauuuauauacucaa

SEQ ID NO: 335183 - RNA, 20 nt, Human
uggaaguucuguugcauugg

SEQ ID NO: 335184 - RNA, 22 nt, Human
uuucaugauuaacuuagugaau

SEQ ID NO: 335185 - RNA, 22 nt, Human
ucacauuuucuacuacuguacg

SEQ ID NO: 335186 - RNA, 22 nt, Human
uuaugacaggaaaaucacagaa

SEQ ID NO: 335187 - RNA, 22 nt, Human
ucuagaauuuugccauauagcu

SEQ ID NO: 335188 - RNA, 22 nt, Human
cucaaauauaagcuaaaugugg

SEQ ID NO: 335189 - RNA, 22 nt, Human
auguaugaugcuaggcucucag

SEQ ID NO: 335190 - RNA, 22 nt, Human
uaauaguuaugguugguucuca

SEQ ID NO: 335191 - RNA, 22 nt, Human
uuuucuuauggugaagcacaaa

SEQ ID NO: 335192 - RNA, 22 nt, Human
uuauuuucuccucagaaagugg

SEQ ID NO: 335193 - RNA, 19 nt, Human
acauauguggauauacaug

SEQ ID NO: 335194 - RNA, 22 nt, Human
auucugucauuucaagaaaaac

SEQ ID NO: 335195 - RNA, 21 nt, Human
uugaccaagggugcgugcucc

SEQ ID NO: 335196 - RNA, 22 nt, Human
uauaauuuggggaaaguggugu

SEQ ID NO: 335197 - RNA, 22 nt, Human
aauuacuuaagagaaacuuuga

SEQ ID NO: 335198 - RNA, 17 nt, Human
ugaauucaaucugcacu

SEQ ID NO: 335199 - RNA, 22 nt, Human
aauguaugggugagaaaguuga

SEQ ID NO: 335200 - RNA, 22 nt, Human
ucuacuauguuucuuaaauaga

SEQ ID NO: 335201 - RNA, 22 nt, Human
caugaaaucugaguauguuucc

SEQ ID NO: 335202 - RNA, 22 nt, Human
cauaauuuuuuuaagucagaac

SEQ ID NO: 335203 - RNA, 22 nt, Human
auguuugaaauuguaaguauau

SEQ ID NO: 335204 - RNA, 20 nt, Human
uaguauuugcauaaggauag

SEQ ID NO: 335205 - RNA, 22 nt, Human
agauauguuuguauauauuugu

SEQ ID NO: 335206 - RNA, 22 nt, Human
cugcucuagagagcauuaguca

SEQ ID NO: 335207 - RNA, 22 nt, Human
auuacaauaagguuuauuugua

SEQ ID NO: 335208 - RNA, 22 nt, Human
aaaguuguaauggaagaaaugc

SEQ ID NO: 335209 - RNA, 22 nt, Human
aaaguuuguugcuuacaaagaa

SEQ ID NO: 335210 - RNA, 22 nt, Human
uucugucuguaaacuucucaau

SEQ ID NO: 335211 - RNA, 22 nt, Human
uucugucucuguguuuacauua

SEQ ID NO: 335212 - RNA, 22 nt, Human
uacauaugaacuuuauaacuug

SEQ ID NO: 335213 - RNA, 22 nt, Human
uguaugaagguuuaccugcugu

SEQ ID NO: 335214 - RNA, 22 nt, Human
gaauaguucuauggcugcaggg

SEQ ID NO: 335215 - RNA, 22 nt, Human
uauggaaacuaauucauuuuuc

SEQ ID NO: 335216 - RNA, 22 nt, Human
guguaugaacgaaagaauggau

SEQ ID NO: 335217 - RNA, 22 nt, Human
acaauacuauuuucaguauccu

SEQ ID NO: 335218 - RNA, 22 nt, Human
uucuacaauaugaauaaugaag

SEQ ID NO: 335219 - RNA, 22 nt, Human
uuauuuugguaaauguuugccu

SEQ ID NO: 335220 - RNA, 22 nt, Human
uauaauuuaucaugucacaguu

SEQ ID NO: 335221 - RNA, 22 nt, Human
aucugcuuccugggcuccauga

SEQ ID NO: 335222 - RNA, 22 nt, Human
auuucauagauuguaaaucccu

SEQ ID NO: 335223 - RNA, 22 nt, Human
auguagaauuccuucuacuuug

SEQ ID NO: 335224 - RNA, 22 nt, Human
acaaucauuccguucacaacag

SEQ ID NO: 335225 - RNA, 21 nt, Human
acauucacaggauauuaucau

SEQ ID NO: 335226 - RNA, 22 nt, Human
augugaaaauccaauggcagca

SEQ ID NO: 335227 - RNA, 22 nt, Human
aguuagaauauaauuauguuaa

SEQ ID NO: 335228 - RNA, 22 nt, Human
cuuuggaauauuuuauugagaa

SEQ ID NO: 335229 - RNA, 22 nt, Human
aucucauaacucauuugaagac

SEQ ID NO: 335230 - RNA, 22 nt, Human
uuauuuacaacucuucucuucc

SEQ ID NO: 335231 - RNA, 22 nt, Human
aauucuguuacuaaugugaugu

SEQ ID NO: 335232 - RNA, 22 nt, Human
ugucaaagccugaaucacauag

SEQ ID NO: 335233 - RNA, 22 nt, Human
augaaacagugaauuagucaag

SEQ ID NO: 335234 - RNA, 20 nt, Human
ucuguacacucaucuucugc

SEQ ID NO: 335235 - RNA, 22 nt, Human
uucugucaaacucacaggccga

SEQ ID NO: 335236 - RNA, 22 nt, Human
aaaguucuaaaacucuuuguga

SEQ ID NO: 335237 - RNA, 22 nt, Human
aaugucauugguaaagauuagg

SEQ ID NO: 335238 - RNA, 22 nt, Human
ucuuugaugugguuaauuauga

SEQ ID NO: 335239 - RNA, 22 nt, Human
ugacuagaccuauaucuuuuug

SEQ ID NO: 335240 - RNA, 22 nt, Human
guuaacacaggacucucugccu

SEQ ID NO: 335241 - RNA, 22 nt, Human
aauacuauguagccaaaauaau

SEQ ID NO: 335242 - RNA, 22 nt, Human
augaacuuauuucugaacuuuu

SEQ ID NO: 335243 - RNA, 22 nt, Human
aauacuauguugugacacauga

SEQ ID NO: 335244 - RNA, 22 nt, Human
cauaauuugauaugcuugaugg

SEQ ID NO: 335245 - RNA, 22 nt, Human
uacaauauguggccuuuuguga

SEQ ID NO: 335246 - RNA, 22 nt, Human astrovirus
cccagcagacuuccauccagug

SEQ ID NO: 335247 - RNA, 22 nt, Human
uuuguuaauucuuauguuagag

SEQ ID NO: 335248 - RNA, 18 nt, Human
acugugugaauuagcucc

SEQ ID NO: 335249 - RNA, 20 nt, Human
acaggagaucugaggaaagg

SEQ ID NO: 335250 - RNA, 22 nt, Human
uuucaaaccuacuuguauguuu

SEQ ID NO: 335251 - RNA, 22 nt, Human
cuguaaauaugaagaauauaug

SEQ ID NO: 335252 - RNA, 22 nt, Human
agacccagaaagcagcugcauu

SEQ ID NO: 335253 - RNA, 22 nt, Human
ggcucagagaccugcgaucuga

SEQ ID NO: 335254 - RNA, 22 nt, Human
uaugacauugcuuuuuagaacu

SEQ ID NO: 335255 - RNA, 22 nt, Human
accaggaguagaauaucuguga

SEQ ID NO: 335256 - RNA, 22 nt, Human
uaucuaaauggaauauuccaga

SEQ ID NO: 335257 - RNA, 22 nt, Human
caaauacuggguaaguuaauuu

SEQ ID NO: 335258 - RNA, 21 nt, Human
uucuucaugaugauuaauggc

SEQ ID NO: 335259 - RNA, 22 nt, Human
gugaaggacuagcauggagggc

SEQ ID NO: 335260 - RNA, 22 nt, Human
ugaacucucucaagugacagaa

SEQ ID NO: 335261 - RNA, 22 nt, Human
cucaggaugaaagucaugguga

SEQ ID NO: 335262 - RNA, 22 nt, Human
caggcagcucgaugccuuguug

SEQ ID NO: 335263 - RNA, 22 nt, Human
ucacugcucuccaauguggagu

SEQ ID NO: 335264 - RNA, 22 nt, Human
uauaauuuggggaaaguggugu

SEQ ID NO: 335265 - RNA, 22 nt, Human
ggcagucuuaucagcauuggac

SEQ ID NO: 335266 - RNA, 22 nt, Human
gagcaccucaauuugcuauuug

SEQ ID NO: 335267 - RNA, 22 nt, Human
aacauuucagcaaauaagaaca

SEQ ID NO: 335268 - RNA, 22 nt, Human
ugaaaugauuauaugguguuug

SEQ ID NO: 335269 - RNA, 22 nt, Human
auguuugacugaguuuggcaga

SEQ ID NO: 335270 - RNA, 22 nt, Human
cccuggaggcaaagguugcagu

SEQ ID NO: 335271 - RNA, 22 nt, Human
ugacccauggucugaucauagg

SEQ ID NO: 335272 - RNA, 17 nt, Human
gaggacagggaaguagg

SEQ ID NO: 335273 - RNA, 22 nt, Human
ccagugcuaagguagccucugc

SEQ ID NO: 335274 - RNA, 22 nt, Human
auuguuaugaaaauaagauguu

SEQ ID NO: 335275 - RNA, 22 nt, Human
aauauaauuuuauuccuagagu

SEQ ID NO: 335276 - RNA, 21 nt, Human
ugaaaugagaaugcugagcac

SEQ ID NO: 335277 - RNA, 22 nt, Human
agaggcaggagguugacuugag

SEQ ID NO: 335278 - RNA, 22 nt, Human
ugcuugaaagggguuucccagu

SEQ ID NO: 335279 - RNA, 22 nt, Human
cucuucuuauggccguggcuga

SEQ ID NO: 335280 - RNA, 22 nt, Human
ucugggaaccagugcggcuggg

SEQ ID NO: 335281 - RNA, 22 nt, Human
aauacuauguagccaaaauaau

SEQ ID NO: 335282 - RNA, 22 nt, Human
uauuucagcacaugggauaggu

SEQ ID NO: 335283 - RNA, 22 nt, Human
aguggcagagguugacugcagu

SEQ ID NO: 335284 - RNA, 22 nt, Human
uugaaaguuuauggagucugca

SEQ ID NO: 335285 - RNA, 22 nt, Human
uaacacauuuuccucauacgga

SEQ ID NO: 335286 - RNA, 22 nt, Human
aucucuguaaaccauaaauuga

SEQ ID NO: 335287 - RNA, 16 nt, Human
auuuccagauuaugca

SEQ ID NO: 335288 - RNA, 21 nt, Human
cccaggaggcugagaagagca

SEQ ID NO: 335289 - RNA, 22 nt, Human
aagggagguaaagcuauuuaaa

SEQ ID NO: 335290 - RNA, 20 nt, Human
acaggggcagcacaauaaug

SEQ ID NO: 335291 - RNA, 22 nt, Human
agggacuuguguccuauguaug

SEQ ID NO: 335292 - RNA, 22 nt, Human
ugacaaaacugcaauuacuuuu

SEQ ID NO: 335293 - RNA, 22 nt, Human
ucuggcaggucaaucauucuuu

SEQ ID NO: 335294 - RNA, 22 nt, Human
uuguaauuugcaaauguauugu

SEQ ID NO: 335295 - RNA, 22 nt, Human
uucuucuucaagugcugcauuc

SEQ ID NO: 335296 - RNA, 22 nt, Human
ucucugguuauuaacuaacucc

SEQ ID NO: 335297 - RNA, 21 nt, Human
cucaggaucuuauauauuagu

SEQ ID NO: 335298 - RNA, 19 nt, Human
ugcccaggccagguugggc

SEQ ID NO: 335299 - RNA, 22 nt, Human
ucaggagaaggcaauguggaaa

SEQ ID NO: 335300 - RNA, 22 nt, Human
uaucuaaaggauuuaauuuagu

SEQ ID NO: 335301 - RNA, 22 nt, Human
caggcagcauuuacucugauga

SEQ ID NO: 335302 - RNA, 22 nt, Human
ucugcugugggucuauauuuua

SEQ ID NO: 335303 - RNA, 22 nt, Human
ucacuguugaccuggaaguggg

SEQ ID NO: 335304 - RNA, 22 nt, Human
ggaggggaacuaaucccgugac

SEQ ID NO: 335305 - RNA, 22 nt, Human
ucaggagaacuuccuucuaccc

SEQ ID NO: 335306 - RNA, 22 nt, Human
uaauuucuagggacuaaggugc

SEQ ID NO: 335307 - RNA, 22 nt, Human
uuuuauagcugaauaguauucc

SEQ ID NO: 335308 - RNA, 22 nt, Human
gauuucuucauuuguggugaau

SEQ ID NO: 335309 - RNA, 22 nt, Human
ucacaugaguauuauuuuccaa

SEQ ID NO: 335310 - RNA, 20 nt, Human
uuucugugagaaacacuguu

SEQ ID NO: 335311 - RNA, 22 nt, Human
uggaaauauacaaugugucucu

SEQ ID NO: 335312 - RNA, 22 nt, Human
cagcuggcugcaugaugccaaa

SEQ ID NO: 335313 - RNA, 22 nt, Human
ucauuuguucucauucucuacu

SEQ ID NO: 335314 - RNA, 22 nt, Human
uuagccauuuuauacaagugua

SEQ ID NO: 335315 - RNA, 22 nt, Human
augcuacagaguuugaauaugu

SEQ ID NO: 335316 - RNA, 18 nt, Human
cugcuugggagacgucag

SEQ ID NO: 335317 - RNA, 22 nt, Human
ggaggggaggauuaaugacaaa

SEQ ID NO: 335318 - RNA, 22 nt, Human
cccaggagaucuggaucucguc

SEQ ID NO: 335319 - RNA, 22 nt, Human
cccaggaaugaggggcggaggc

SEQ ID NO: 335320 - RNA, 20 nt, Human
cauuuguuagcuuucuacug

SEQ ID NO: 335321 - RNA, 22 nt, Human
uugcugugaaaccaugggaagu

SEQ ID NO: 335322 - RNA, 22 nt, Human
cagaccagcucuaugaacccaa

SEQ ID NO: 335323 - RNA, 22 nt, Human
aacuuucuuggaugucucaaca

SEQ ID NO: 335324 - RNA, 23 nt, Human
cuccccaguguccucaugcaucu

SEQ ID NO: 335325 - RNA, 22 nt, Human
uagaaacauguucuguucuguu

SEQ ID NO: 335326 - RNA, 22 nt, Human
gaggcagcgggucaggaccgug

SEQ ID NO: 335327 - RNA, 22 nt, Human
ggccaggaagggaagaucagca

SEQ ID NO: 335328 - RNA, 22 nt, Human
ggacuucuaagugccagacacu

SEQ ID NO: 335329 - RNA, 22 nt, Human
cacauuuaauccuuuauaagua

SEQ ID NO: 335330 - RNA, 22 nt, Human
uuaauuaaauucaugagcauug

SEQ ID NO: 335331 - RNA, 22 nt, Human
gugugaaagcuuguccucugua

SEQ ID NO: 335332 - RNA, 22 nt, Human
uuugaaagggaaauaaacuccu

SEQ ID NO: 335333 - RNA, 20 nt, Human
aggagggaccuggauuggcg

SEQ ID NO: 335334 - RNA, 22 nt, Human
uucuacagacuauaacugugau

SEQ ID NO: 335335 - RNA, 22 nt, Human
uauguacaugauuucauuugcu

SEQ ID NO: 335336 - RNA, 19 nt, Human
uggggcuguguuuugaccc

SEQ ID NO: 335337 - RNA, 22 nt, Human
auacauacauguaugcacauac

SEQ ID NO: 335338 - RNA, 22 nt, Human
cauucuuauauuuacucauuca

SEQ ID NO: 335339 - RNA, 22 nt, Human
ccucaggggucacugugaggag

SEQ ID NO: 335340 - RNA, 21 nt, Human
uccuuccuugagguccuuucc

SEQ ID NO: 335341 - RNA, 22 nt, Human
gaggcaguuugccaugccagga

SEQ ID NO: 335342 - RNA, 22 nt, Human
ucagugugaggucuuccacccg

SEQ ID NO: 335343 - RNA, 22 nt, Human
caggcagccugcggucugcaca

SEQ ID NO: 335344 - RNA, 22 nt, Human
cugcuucugggaugauggagua

SEQ ID NO: 335345 - RNA, 22 nt, Human
auugucuuuccacugagaaguu

SEQ ID NO: 335346 - RNA, 19 nt, Human
caggaaggggcgaaucugg

SEQ ID NO: 335347 - RNA, 22 nt, Human
uuauuacacugaaagaauugcg

SEQ ID NO: 335348 - RNA, 21 nt, Human
gcugcccaacccugcaucucc

SEQ ID NO: 335349 - RNA, 22 nt, Human
uccaggagguuuggaggaagca

SEQ ID NO: 335350 - RNA, 22 nt, Human
uccauuuucuugcucuagguaa

SEQ ID NO: 335351 - RNA, 22 nt, Human
acaaaugucuccucuuuuguua

SEQ ID NO: 335352 - RNA, 23 nt, Human
uggaggaaacacaucagaagacc

SEQ ID NO: 335353 - RNA, 19 nt, Human
ugcauaaauuauauacuuu

SEQ ID NO: 335354 - RNA, 21 nt, Human
aggcaucuaaagagaguagac

SEQ ID NO: 335355 - RNA, 22 nt, Human
aaaauuauucauggcuuuugga

SEQ ID NO: 335356 - RNA, 22 nt, Human
auuuagcaaaaaaugaugaagc

SEQ ID NO: 335357 - RNA, 22 nt, Human
gaggcagcagaacauggaagag

SEQ ID NO: 335358 - RNA, 22 nt, Human
ugugaaauucuugaaaugcaca

SEQ ID NO: 335359 - RNA, 22 nt, Human
uuaacauacaucaugaacaaug

SEQ ID NO: 335360 - RNA, 22 nt, Human
aggaaacuccccuacaucucaa

SEQ ID NO: 335361 - RNA, 22 nt, Human
auagucuuagaucagauaaagu

SEQ ID NO: 335362 - RNA, 22 nt, Human
cauuguuauagcauuacacacc

SEQ ID NO: 335363 - RNA, 22 nt, Human
ucccaggaauccguccucuaga

SEQ ID NO: 335364 - RNA, 22 nt, Human
cugcugugccucuuuucacgug

SEQ ID NO: 335365 - RNA, 22 nt, Human
cccaguuucaacuuuccagugg

SEQ ID NO: 335366 - RNA, 21 nt, Human
acaggagaccgccuggcaguc

SEQ ID NO: 335367 - RNA, 22 nt, Human
uaggagagcugaacuauugucu

SEQ ID NO: 335368 - RNA, 22 nt, Human
uuucuugaccacuauguugaua

SEQ ID NO: 335369 - RNA, 22 nt, Human
ggcagcuuucucacccaugacc

SEQ ID NO: 335370 - RNA, 22 nt, Human
auuuguugcuagcagcacugau

SEQ ID NO: 335371 - RNA, 22 nt, Human
agagggaucacccuguuucugg

SEQ ID NO: 335372 - RNA, 22 nt, Human
ggugagaggcagaggacagcuu

SEQ ID NO: 335373 - RNA, 22 nt, Human
gcaagcugcucuuauguggagg

SEQ ID NO: 335374 - RNA, 22 nt, Human
uguaugaaaaggaauagauuga

SEQ ID NO: 335375 - RNA, 22 nt, Human
cauucauuuaugaaauaucuau

SEQ ID NO: 335376 - RNA, 22 nt, Human
auuguucaaagugcuuugcaug

SEQ ID NO: 335377 - RNA, 22 nt, Human
gagucuuugguaaagucugcug

SEQ ID NO: 335378 - RNA, 18 nt, Human
cccucuugcacaaagcaa

SEQ ID NO: 335379 - RNA, 20 nt, Human
aguuauaguaucuagccaug

SEQ ID NO: 335380 - RNA, 16 nt, Human
cuuccucuucacuggc

SEQ ID NO: 335381 - RNA, 22 nt, Human
aauuuccagaccccauccacag

SEQ ID NO: 335382 - RNA, 22 nt, Human
cucuuaguaaugccaugaagca

SEQ ID NO: 335383 - RNA, 22 nt, Human
ccuccuuuccuguuuuccugag

SEQ ID NO: 335384 - RNA, 22 nt, Human
uaauaguuaugguugguucuca

SEQ ID NO: 335385 - RNA, 21 nt, Human
cccaggaguccuauuuaaaug

SEQ ID NO: 335386 - RNA, 22 nt, Human
ucaauucugguccucaggaacu

SEQ ID NO: 335387 - RNA, 22 nt, Human
agaggcagccguauuucaaagg

SEQ ID NO: 335388 - RNA, 22 nt, Human
ggaugggagcagaggacgacca

SEQ ID NO: 335389 - RNA, 22 nt, Human
agagagagggaaacugcuaaac

SEQ ID NO: 335390 - RNA, 19 nt, Human
uggagggguuugaaugugg

SEQ ID NO: 335391 - RNA, 22 nt, Human
caguugcuggaugugcagcucu

SEQ ID NO: 335392 - RNA, 23 nt, Human
cuuugccacccagagccugacag

SEQ ID NO: 335393 - RNA, 22 nt, Human
uugagaagaggcuuuguaggaa

SEQ ID NO: 335394 - RNA, 22 nt, Human
acacaaguucuaaagauugcgc

SEQ ID NO: 335395 - RNA, 22 nt, Human
gaggccagcuaguccaggaagu

SEQ ID NO: 335396 - RNA, 22 nt, Human
ugagggagagggcgaaaaugaa

SEQ ID NO: 335397 - RNA, 22 nt, Human
ucaaaguuacuugugguuuucu

SEQ ID NO: 335398 - RNA, 21 nt, Human
uucuucuuggacuguuuuggc

SEQ ID NO: 335399 - RNA, 22 nt, Human
aggcaagcugcagagaguccuu

SEQ ID NO: 335400 - RNA, 22 nt, Human
ucauuuauaaggaugcaauuaa

SEQ ID NO: 335401 - RNA, 22 nt, Human
ucauuuaauaauuuuugaguag

SEQ ID NO: 335402 - RNA, 22 nt, Human
cagcucccgccaucgggaggca

SEQ ID NO: 335403 - RNA, 22 nt, Human
agggggugucucugauuggguu

SEQ ID NO: 335404 - RNA, 22 nt, Human
gggcagcuagcccucuagccca

SEQ ID NO: 335405 - RNA, 22 nt, Human
aaaauuauggaguaucccaaag

SEQ ID NO: 335406 - RNA, 17 nt, Human
uggcagcugaaagcucu

SEQ ID NO: 335407 - RNA, 17 nt, Human
agaacuguaguagcucc

SEQ ID NO: 335408 - RNA, 22 nt, Human
agucaauucuuuucaacucaag

SEQ ID NO: 335409 - RNA, 22 nt, Human
aaggcagccuuuguuugauuga

SEQ ID NO: 335410 - RNA, 22 nt, Human
aacugcuguggccuaguacuua

SEQ ID NO: 335411 - RNA, 22 nt, Human
cuuguaauuauaauguacuguu

SEQ ID NO: 335412 - RNA, 22 nt, Human
uucucagguagugcugaugcug

SEQ ID NO: 335413 - RNA, 22 nt, Human
cagcugcuguuacugcuuauua

SEQ ID NO: 335414 - RNA, 22 nt, Human
cugcuguggccagccaggucaa

SEQ ID NO: 335415 - RNA, 22 nt, Human
agagcagcuggggcagagacca

SEQ ID NO: 335416 - RNA, 22 nt, Human
aucauucugauggucaaugcua

SEQ ID NO: 335417 - RNA, 22 nt, Human
ggaguaggaguagaacucauca

SEQ ID NO: 335418 - RNA, 22 nt, Human
agucaauuaucucuaggucauc

SEQ ID NO: 335419 - RNA, 22 nt, Human
agcagagguguuuauuauggga

SEQ ID NO: 335420 - RNA, 22 nt, Human
uuuaaauuuguguuuagagggu

SEQ ID NO: 335421 - RNA, 22 nt, Human
auguuucaaugcacuuuagccu

SEQ ID NO: 335422 - RNA, 22 nt, Human
cagcauuuagaauuugaagugu

SEQ ID NO: 335423 - RNA, 20 nt, Human
aggacagcagcugccacuug

SEQ ID NO: 335424 - RNA, 22 nt, Human
cuucagaagccugcagccuuug

SEQ ID NO: 335425 - RNA, 22 nt, Human
acucaggaaauugagauaaugg

SEQ ID NO: 335426 - RNA, 22 nt, Human
cauuucacaaauggccacauca

SEQ ID NO: 335427 - RNA, 22 nt, Human
guggcagcaaaugccuggacua

SEQ ID NO: 335428 - RNA, 22 nt, Human
uuucaggguacauggagcaaau

SEQ ID NO: 335429 - RNA, 20 nt, Human
augauuuugcacuaacuuca

SEQ ID NO: 335430 - RNA, 22 nt, Human
agggagugguuaagaaggugca

SEQ ID NO: 335431 - RNA, 22 nt, Human
cagaaauguacugacaugcagu

SEQ ID NO: 335432 - RNA, 22 nt, Human
gaggcugauucggggaacagca

SEQ ID NO: 335433 - RNA, 22 nt, Human
uaugaacuguacuguacuaagc

SEQ ID NO: 335434 - RNA, 22 nt, Human
agaaaugaaaccaaagccuaga

SEQ ID NO: 335435 - RNA, 22 nt, Human
uggcagcugagugcacccccuc

SEQ ID NO: 335436 - RNA, 22 nt, Human
uuauagaaggagcauucacuua

SEQ ID NO: 335437 - RNA, 22 nt, Human
ugaaggccagcagagugaaggc

SEQ ID NO: 335438 - RNA, 22 nt, Human
aggcagucuaguccccaggcaa

SEQ ID NO: 335439 - RNA, 22 nt, Human
uucuuaacuggaaaaugucaga

SEQ ID NO: 335440 - RNA, 22 nt, Human
uucaggaucaaguugccaguag

SEQ ID NO: 335441 - RNA, 22 nt, Human
augugaggcagcacggagauua

SEQ ID NO: 335442 - RNA, 22 nt, Human
uuucuagucucgaucucuuaau

SEQ ID NO: 335443 - RNA, 22 nt, Human
aaagauuugaguucugcuuaua

SEQ ID NO: 335444 - RNA, 22 nt, Human
auucaaguggcugcuauguuaa

SEQ ID NO: 335445 - RNA, 22 nt, Human
cagagaaaaaauccugcucuca

SEQ ID NO: 335446 - RNA, 22 nt, Human
gugcauuuaggucacaugaugu

SEQ ID NO: 335447 - RNA, 17 nt, Human
acagagcacaucaagau

SEQ ID NO: 335448 - RNA, 22 nt, Human
uauaucaccaaaaacaguucug

SEQ ID NO: 335449 - RNA, 19 nt, Human
uguguguuuauauauguau

SEQ ID NO: 335450 - RNA, 22 nt, Human
aguuuucacacucaccaaaagg

SEQ ID NO: 335451 - RNA, 22 nt, Human
uucuucuccgaggagggcuggu

SEQ ID NO: 335452 - RNA, 22 nt, Human
aagagggcagcacagguggguc

SEQ ID NO: 335453 - RNA, 22 nt, Human
uggaggaaaaaaccaggcagag

SEQ ID NO: 335454 - RNA, 22 nt, Human
uaacuuucuucauaugugaacc

SEQ ID NO: 335455 - RNA, 22 nt, Human
auucugauaucuuauucuagcu

SEQ ID NO: 335456 - RNA, 22 nt, Human
gaucuguuauaaucucuuuuau

SEQ ID NO: 335457 - RNA, 22 nt, Human
uguugagacugagggagucagc

SEQ ID NO: 335458 - RNA, 22 nt, Human
cccaggaguucgaggcuguagu

SEQ ID NO: 335459 - RNA, 22 nt, Human
cagcauuuaucuuguagcagga

SEQ ID NO: 335460 - RNA, 22 nt, Human
aauggccagcaacaggagugaa

SEQ ID NO: 335461 - RNA, 22 nt, Human
aagaagagaaaugugcugcugg

SEQ ID NO: 335462 - RNA, 22 nt, Human
caggcagccaggggaccugucc

SEQ ID NO: 335463 - RNA, 22 nt, Human
auacacauauguguguauaugu

SEQ ID NO: 335464 - RNA, 22 nt, Human
ccagaccacccuggccaugcac

SEQ ID NO: 335465 - RNA, 22 nt, Human
uuucauaauauccagagauuuu

SEQ ID NO: 335466 - RNA, 22 nt, Human
ucugucaucucuaaaauagaaa

SEQ ID NO: 335467 - RNA, 22 nt, Human
uguugauuaguguuuagacuua

SEQ ID NO: 335468 - RNA, 22 nt, Human
cuguggaauugaugcuuagugu

SEQ ID NO: 335469 - RNA, 22 nt, Human
auuuuacuacuccaauuaauga

SEQ ID NO: 335470 - RNA, 21 nt, Human
uagggcaggcauuggaagaga

SEQ ID NO: 335471 - RNA, 22 nt, Human
guggcaggagacuggaagaugg

SEQ ID NO: 335472 - RNA, 22 nt, Human
agcagaggaggauuuaguuagg

SEQ ID NO: 335473 - RNA, 22 nt, Human
gaggaacccagcugggguugcc

SEQ ID NO: 335474 - RNA, 22 nt, Human
aggcagugcugugcccugaacc

SEQ ID NO: 335475 - RNA, 22 nt, Human
ucaguagcagaaagcaaugagu

SEQ ID NO: 335476 - RNA, 22 nt, Human
uugcugaaaucuaugacauccu

SEQ ID NO: 335477 - RNA, 22 nt, Human
ucauuuguucaucugcucuucu

SEQ ID NO: 335478 - RNA, 22 nt, Human
gcccaggaucugcucagaucau

SEQ ID NO: 335479 - RNA, 22 nt, Human
auaugugaaguggguuauuuug

SEQ ID NO: 335480 - RNA, 22 nt, Human
cuuaacauccugcauuuuucuu

SEQ ID NO: 335481 - RNA, 22 nt, Human
uggcagcugucagaaugcaaau

SEQ ID NO: 335482 - RNA, 22 nt, Human
ucaggagagaaagaauacaauu

SEQ ID NO: 335483 - RNA, 22 nt, Human
uggagaggaaagugcaguuuug

SEQ ID NO: 335484 - RNA, 20 nt, Human
gaagcagcuucauguagaca

SEQ ID NO: 335485 - RNA, 22 nt, Human
uaugagaaucugcaguaugcuu

SEQ ID NO: 335486 - RNA, 22 nt, Human
cagaaccaggaacugauggaga

SEQ ID NO: 335487 - RNA, 22 nt, Human
uagugcuuuaaguuuacagaga

SEQ ID NO: 335488 - RNA, 22 nt, Human
cccuuagcuccaagggguuugg

SEQ ID NO: 335489 - RNA, 22 nt, Human
uucuccagagggcucugcagga

SEQ ID NO: 335490 - RNA, 22 nt, Human
gagaggucaucucccaucagca

SEQ ID NO: 335491 - RNA, 22 nt, Human
aaauuucaguuggaaugagcuc

SEQ ID NO: 335492 - RNA, 22 nt, Human
uucauugugaacacauucugcc

SEQ ID NO: 335493 - RNA, 22 nt, Human
gaucauuugcaggaaacauuaa

SEQ ID NO: 335494 - RNA, 22 nt, Human
agucucugcugguugugccuau

SEQ ID NO: 335495 - RNA, 22 nt, Human
gcaggagaacaaagcaagcugc

SEQ ID NO: 335496 - RNA, 22 nt, Human
gaggcagcuuggggcugugggu

SEQ ID NO: 335497 - RNA, 22 nt, Human
augaaacagugaauuagucaag

SEQ ID NO: 335498 - RNA, 22 nt, Human
cucccaggcacagggaggagcc

SEQ ID NO: 335499 - RNA, 22 nt, Human
aagacauugucauuuuauaauu

SEQ ID NO: 335500 - RNA, 22 nt, Human
uuucacaaucaaauggugaaau

SEQ ID NO: 335501 - RNA, 22 nt, Human
cagucucucagcuuucagcugu

SEQ ID NO: 335502 - RNA, 22 nt, Human
gcaucuaauccaguccagcauc

SEQ ID NO: 335503 - RNA, 22 nt, Human
aggcagcugcccucuccuuccu

SEQ ID NO: 335504 - RNA, 22 nt, Human
aggcaguggcugagaccagggg

SEQ ID NO: 335505 - RNA, 21 nt, Human
agcaccuuacagcuauaaugg

SEQ ID NO: 335506 - RNA, 22 nt, Human
uccauuuucuaaguaucacuua

SEQ ID NO: 335507 - RNA, 22 nt, Human
cagcugccccuccagggcuggg

SEQ ID NO: 335508 - RNA, 22 nt, Human
aggaugagccgcgcaagcugac

SEQ ID NO: 335509 - RNA, 17 nt, Human
agagggaaaaugcgguu

SEQ ID NO: 335510 - RNA, 22 nt, Human
acaucucaugaaugauaaauca

SEQ ID NO: 335511 - RNA, 22 nt, Human
ucuucccuaaucaccaucuuca

SEQ ID NO: 335512 - RNA, 22 nt, Human
cugugauuguuaguuccuauac

SEQ ID NO: 335513 - RNA, 19 nt, Human
cccaggaggcggagguugc

SEQ ID NO: 335514 - RNA, 22 nt, Human
cauauaaauacaacauguguua

SEQ ID NO: 335515 - RNA, 22 nt, Human
caggcagcugacugucagauau

SEQ ID NO: 335516 - RNA, 22 nt, Human
ucuacagacagagcagguggga

SEQ ID NO: 335517 - RNA, 22 nt, Human
gcagaagucagaccaucugaau

SEQ ID NO: 335518 - RNA, 22 nt, Human
aaaguuaguuucuuauaugucu

SEQ ID NO: 335519 - RNA, 22 nt, Human
aggcugcuucaauggauaagau

SEQ ID NO: 335520 - RNA, 19 nt, Human
agauggcaaaaugcaaaga

SEQ ID NO: 335521 - RNA, 21 nt, Human
ugaaugaggaggauggcauuu

SEQ ID NO: 335522 - RNA, 22 nt, Human
caucaucaaaagugacagagaa

SEQ ID NO: 335523 - RNA, 22 nt, Human
ugaaggccuaacuuccagugcu

SEQ ID NO: 335524 - RNA, 22 nt, Human
uggagucugugaugcucugggu

SEQ ID NO: 335525 - RNA, 23 nt, Human
aggauguaggauguauggcagag

SEQ ID NO: 335526 - RNA, 22 nt, Human
uuuaagauucaguaaggcaaac

SEQ ID NO: 335527 - RNA, 22 nt, Human
cccaggagcuucucucugccuc

SEQ ID NO: 335528 - RNA, 22 nt, Human
aaggcaguuaauuuggcuagaa

SEQ ID NO: 335529 - RNA, 22 nt, Human
aggaaaggccuuugcauuuggu

SEQ ID NO: 335530 - RNA, 22 nt, Human
cuuaagaugaggucaugcuaua

SEQ ID NO: 335531 - RNA, 22 nt, Human
uaauacuguauacugcaaauuu

SEQ ID NO: 335532 - RNA, 22 nt, Human
agguccagcuguugcagccucc

SEQ ID NO: 335533 - RNA, 21 nt, Human
auacacauacacauaaaugug

SEQ ID NO: 335534 - RNA, 22 nt, Human
ucaggaugaccacgagccucua

SEQ ID NO: 335535 - RNA, 22 nt, Human
uaguuaaaauaauggagauguu

SEQ ID NO: 335536 - RNA, 22 nt, Human
uuacaguuuaguccaagccaga

SEQ ID NO: 335537 - RNA, 22 nt, Human
aggagagaauguuccaggcuug

SEQ ID NO: 335538 - RNA, 22 nt, Human
cccaggauggggcugcaguuau

SEQ ID NO: 335539 - RNA, 22 nt, Human
gaaauauucuugucuuguuuuc

SEQ ID NO: 335540 - RNA, 22 nt, Human
cuugaaagauuuggccucugug

SEQ ID NO: 335541 - RNA, 22 nt, Human
uacuuucuguccuucuguuaaa

SEQ ID NO: 335542 - RNA, 22 nt, Human
ucaggagaaagccaauuagagu

SEQ ID NO: 335543 - RNA, 22 nt, Human
augcuguggaaguuccugaagc

SEQ ID NO: 335544 - RNA, 22 nt, Human
cagaccagaaggaagccgacaa

SEQ ID NO: 335545 - RNA, 22 nt, Human
uuugaauagaggccccucagaa

SEQ ID NO: 335546 - RNA, 22 nt, Human
cauacaagcguucaauagaugu

SEQ ID NO: 335547 - RNA, 22 nt, Human
uuucugaagauacagcuuugcu

SEQ ID NO: 335548 - RNA, 23 nt, Human
gccaggaguggguagacuaaugc

SEQ ID NO: 335549 - RNA, 17 nt, Human
agauggcaggaggcaga

SEQ ID NO: 335550 - RNA, 22 nt, Human
aucuucucaagcagcauccugu

SEQ ID NO: 335551 - RNA, 22 nt, Human
ggcagcuuguccuucaggagag

SEQ ID NO: 335552 - RNA, 23 nt, Human
ucucuuucaagagcuuaaugugc

SEQ ID NO: 335553 - RNA, 22 nt, Human
augugaaagagguguucagugg

SEQ ID NO: 335554 - RNA, 22 nt, Human
uucucuuuucaccaguugcuaa

SEQ ID NO: 335555 - RNA, 22 nt, Human
cauuuauuggcauguaguaggu

SEQ ID NO: 335556 - RNA, 21 nt, Human
ucauuugugaucugauuucca

SEQ ID NO: 335557 - RNA, 22 nt, Human
guccaugauucuguguaguaga

SEQ ID NO: 335558 - RNA, 22 nt, Human
ugaggcaggacugagcgggaug

SEQ ID NO: 335559 - RNA, 22 nt, Human
accaggaggcuacacuguccca

SEQ ID NO: 335560 - RNA, 22 nt, Human
aagcagaguccccuucccaugg

SEQ ID NO: 335561 - RNA, 20 nt, Human
uuucacagucccuguuuccu

SEQ ID NO: 335562 - RNA, 22 nt, Human
uuuuaucuucauuccuaucuac

SEQ ID NO: 335563 - RNA, 22 nt, Human
cuuuggcacagucucauuugau

SEQ ID NO: 335564 - RNA, 22 nt, Human
auuucagguaccugugggaucc

SEQ ID NO: 335565 - RNA, 22 nt, Human
gucuucuuguguugccugucuu

SEQ ID NO: 335566 - RNA, 22 nt, Human
aggaagcuagagccaccggacu

SEQ ID NO: 335567 - RNA, 22 nt, Human
uccauuuuagagaugaagaaac

SEQ ID NO: 335568 - RNA, 23 nt, Human
aucuguucaucugacacagauuc

SEQ ID NO: 335569 - RNA, 20 nt, Human
aagcacauuucuacaauaau

SEQ ID NO: 335570 - RNA, 22 nt, Human
uuucaacaccagagaccaugcg

SEQ ID NO: 335571 - RNA, 22 nt, Human
uuccaugagcucugaguucaca

SEQ ID NO: 335572 - RNA, 22 nt, Human
cccaggaacagcacagaacagc

SEQ ID NO: 335573 - RNA, 22 nt, Human
auuuaaaugcuuaagaggguuu

SEQ ID NO: 335574 - RNA, 22 nt, Human
uugcaggauuuuagagaugaca

SEQ ID NO: 335575 - RNA, 22 nt, Human
aggagagggguaggauuaauuu

SEQ ID NO: 335576 - RNA, 22 nt, Human
uauguacuacacuagaacauuu

SEQ ID NO: 335577 - RNA, 22 nt, Human
uugcaucuagggcaacccagag

SEQ ID NO: 335578 - RNA, 22 nt, Human
ggguggaguagaaagaugaauu

SEQ ID NO: 335579 - RNA, 22 nt, Human
uugcuagcugguguaugcauug

SEQ ID NO: 335580 - RNA, 22 nt, Human
aaaaaucuaugacugcuucucc

SEQ ID NO: 335581 - RNA, 22 nt, Human
auugaaagcauggauuuggauu

SEQ ID NO: 335582 - RNA, 18 nt, Human
aguaaagcuuauuacaug

SEQ ID NO: 335583 - RNA, 22 nt, Human
uagggaggcuacuucuuguagg

SEQ ID NO: 335584 - RNA, 22 nt, Human
uuuucaguuccaucucugcucu

SEQ ID NO: 335585 - RNA, 20 nt, Human
guaaaauauggucuuugggu

SEQ ID NO: 335586 - RNA, 22 nt, Human
aguucuuuugugaacauaugcu

SEQ ID NO: 335587 - RNA, 22 nt, Human
uucuuuucuuuaggcauugugu

SEQ ID NO: 335588 - RNA, 22 nt, Human
cugcugugcaggugccuaugau

SEQ ID NO: 335589 - RNA, 22 nt, Human
ucauuauuuuggacuggagugu

SEQ ID NO: 335590 - RNA, 22 nt, Human
cacauauuguaguucaccagga

SEQ ID NO: 335591 - RNA, 22 nt, Human
gcccaggaaaugccccguggug

SEQ ID NO: 335592 - RNA, 19 nt, Human
ucuuucauuucuagcucug

SEQ ID NO: 335593 - RNA, 22 nt, Human
ucuuugaacuuggcugaucucu

SEQ ID NO: 335594 - RNA, 22 nt, Human
uguggaaaagaauaagggagau

SEQ ID NO: 335595 - RNA, 23 nt, Human
aggucagcaggcaaggaaauggc

SEQ ID NO: 335596 - RNA, 22 nt, Human
uucaggauccccaccgcguuua

SEQ ID NO: 335597 - RNA, 22 nt, Human
gaaaggccagcucacagaugag

SEQ ID NO: 335598 - RNA, 22 nt, Human
uaggagaggugaauggcacacu

SEQ ID NO: 335599 - RNA, 22 nt, Human
cucccaggggaacuaucaagua

SEQ ID NO: 335600 - RNA, 22 nt, Human
acaauguguuuuuauacauuug

SEQ ID NO: 335601 - RNA, 22 nt, Human
ucgcugugguuucuguacaugg

SEQ ID NO: 335602 - RNA, 18 nt, Human
aagaggaggaaacccagg

SEQ ID NO: 335603 - RNA, 22 nt, Human
aguuagaauagucagauuguag

SEQ ID NO: 335604 - RNA, 22 nt, Human
ucucaggaaauaggauuugagu

SEQ ID NO: 335605 - RNA, 21 nt, Human
uuugaaagcccuauguuuuca

SEQ ID NO: 335606 - RNA, 22 nt, Human
uaauuauuaugacaacaauugc

SEQ ID NO: 335607 - RNA, 22 nt, Human
aacauucugguucuaaaaaccu

SEQ ID NO: 335608 - RNA, 23 nt, Human
uugcacauuggagcuggucuucu

SEQ ID NO: 335609 - RNA, 22 nt, Human
ccaggauggggagcagauagaa

SEQ ID NO: 335610 - RNA, 22 nt, Human
uuuggacuuagccugcagaauu

SEQ ID NO: 335611 - RNA, 22 nt, Human
uagcacauacauaauagauaga

SEQ ID NO: 335612 - RNA, 22 nt, Human
gucuucaauagagccucaauuu

SEQ ID NO: 335613 - RNA, 22 nt, Human
uugauguacagaauuguucaca

SEQ ID NO: 335614 - RNA, 22 nt, Human
cugcugugcacccaggaaggcu

SEQ ID NO: 335615 - RNA, 22 nt, Human
uauacaaugaguacauucuggg

SEQ ID NO: 335616 - RNA, 22 nt, Human
ggaggagggguuuacauuggaa

SEQ ID NO: 335617 - RNA, 22 nt, Human
cagcgucucguugugggccucg

SEQ ID NO: 335618 - RNA, 22 nt, Human
ugucuuuggaauauuuagcuga

SEQ ID NO: 335619 - RNA, 22 nt, Human
aaguuucauuguucauguaaca

SEQ ID NO: 335620 - RNA, 22 nt, Human
guuauacauauguguuaacaaa

SEQ ID NO: 335621 - RNA, 22 nt, Human
cggagaggugggggcagcaucu

SEQ ID NO: 335622 - RNA, 22 nt, Human
aagggcagaauagagaagaugg

SEQ ID NO: 335623 - RNA, 20 nt, Human
uuuacauuuugaaacaguga

SEQ ID NO: 335624 - RNA, 22 nt, Human
uggaaugacagagagucugaau

SEQ ID NO: 335625 - RNA, 22 nt, Human
augacaugaccugguagagaca

SEQ ID NO: 335626 - RNA, 22 nt, Human
gacuucuauuaauaccucuacu

SEQ ID NO: 335627 - RNA, 19 nt, Human
aaagcagaggagcaucuga

SEQ ID NO: 335628 - RNA, 22 nt, Human
gaggcagcuuaggguacugacu

SEQ ID NO: 335629 - RNA, 22 nt, Human
uacauugcuuucuaauacaucu

SEQ ID NO: 335630 - RNA, 22 nt, Human
aaauuauucucauguguuucuu

SEQ ID NO: 335631 - RNA, 22 nt, Human
gcccaggaggucaaguagcuau

SEQ ID NO: 335632 - RNA, 22 nt, Human
guucuucaucauuuuagauagg

SEQ ID NO: 335633 - RNA, 22 nt, Human
ugcacauucacuuagguauugu

SEQ ID NO: 335634 - RNA, 21 nt, Human
uugaaaguaaauucagcagcu

SEQ ID NO: 335635 - RNA, 22 nt, Human
uuuccagagcaugucugcucag

SEQ ID NO: 335636 - RNA, 22 nt, Human
cuuuccaagaaugcagauaccu

SEQ ID NO: 335637 - RNA, 22 nt, Human
uaggcagcugcaaacuucgguc

SEQ ID NO: 335638 - RNA, 22 nt, Human
uauugaugcuuggauugggcca

SEQ ID NO: 335639 - RNA, 22 nt, Human
ucauacaauucaaucucugauu

SEQ ID NO: 335640 - RNA, 22 nt, Human
augcugugucaccuuaggauuu

SEQ ID NO: 335641 - RNA, 22 nt, Human
acauguaaaaggaacaugcaug

SEQ ID NO: 335642 - RNA, 22 nt, Human
gcugcccaggagagguggggcu

SEQ ID NO: 335643 - RNA, 22 nt, Human
gcccaggaugguguguaguggu

SEQ ID NO: 335644 - RNA, 22 nt, Human
accauuuuggguauuuucagag

SEQ ID NO: 335645 - RNA, 17 nt, Human
guccuacccauggucua

SEQ ID NO: 335646 - RNA, 22 nt, Human
auuucauugaaguuaauucuuc

SEQ ID NO: 335647 - RNA, 22 nt, Human
aauauuuguuaguguuuuaaug

SEQ ID NO: 335648 - RNA, 22 nt, Human
uccaggagagguagaggguucc

SEQ ID NO: 335649 - RNA, 22 nt, Human
uuuggaaugguaccuucaguug

SEQ ID NO: 335650 - RNA, 22 nt, Human
guaugaaaauuguaaaguucuu

SEQ ID NO: 335651 - RNA, 22 nt, Human
cacaugaguccugccagguaug

SEQ ID NO: 335652 - RNA, 22 nt, Human
ucaaucacguguuccauguucu

SEQ ID NO: 335653 - RNA, 22 nt, Human
cuugaaagucagcagaguggau

SEQ ID NO: 335654 - RNA, 22 nt, Human
augcuguguauuuuacucuuuc

SEQ ID NO: 335655 - RNA, 23 nt, Human
uucauuugucuacuucacuuguu

SEQ ID NO: 335656 - RNA, 22 nt, Human
aguucucagcuuaguaugcugu

SEQ ID NO: 335657 - RNA, 22 nt, Human
gcuuugaagacuuuuccagggu

SEQ ID NO: 335658 - RNA, 22 nt, Human
ggagaggacauggcucccacag

SEQ ID NO: 335659 - RNA, 17 nt, Human
uuugaaaggaugucagu

SEQ ID NO: 335660 - RNA, 22 nt, Human
gaggccaaguuggagaccaggu

SEQ ID NO: 335661 - RNA, 22 nt, Human
caggagaggcuguacguuucuc

SEQ ID NO: 335662 - RNA, 22 nt, Human
agcaccugccugcauuggcuau

SEQ ID NO: 335663 - RNA, 22 nt, Human
cacaaugugguuugucaucuuu

SEQ ID NO: 335664 - RNA, 22 nt, Human
aagggcagccugacucacgguc

SEQ ID NO: 335665 - RNA, 22 nt, Human
cuugcaggccuuucuagcucua

SEQ ID NO: 335666 - RNA, 22 nt, Human
cauuuguagcuauuuacuguau

SEQ ID NO: 335667 - RNA, 22 nt, Human
aggagcagaauuuaaugugcag

SEQ ID NO: 335668 - RNA, 22 nt, Human
uguucucacuggaugcuucaca

SEQ ID NO: 335669 - RNA, 22 nt, Human
gugacaguggucacuuguaguu

SEQ ID NO: 335670 - RNA, 22 nt, Human
uccaggaguuugagacugcagu

SEQ ID NO: 335671 - RNA, 22 nt, Human
ugugaacuggcagguggacggg

SEQ ID NO: 335672 - RNA, 22 nt, Human
uucaggauggaguaccuuuuau

SEQ ID NO: 335673 - RNA, 22 nt, Human
cagcuggcuggucagugcacaa

SEQ ID NO: 335674 - RNA, 22 nt, Human
uugcuuugccaccagaagucua

SEQ ID NO: 335675 - RNA, 22 nt, Human
ucagauggcacacagagccugc

SEQ ID NO: 335676 - RNA, 22 nt, Human
cucugcauuuuaacagaugauu

SEQ ID NO: 335677 - RNA, 22 nt, Human
uaugccugauaacugugucucu

SEQ ID NO: 335678 - RNA, 22 nt, Human
gcauguguggaggagaugugcu

SEQ ID NO: 335679 - RNA, 22 nt, Human
caguugccuacuacauggcagg

SEQ ID NO: 335680 - RNA, 22 nt, Human
uugcaaaggggaauaaagcaau

SEQ ID NO: 335681 - RNA, 22 nt, Human
cccaggaggccaagguugcagu

SEQ ID NO: 335682 - RNA, 22 nt, Human
cacagucacauaucuaugugug

SEQ ID NO: 335683 - RNA, 22 nt, Human
aggcagugcucaagacagcagc

SEQ ID NO: 335684 - RNA, 19 nt, Human
uucauucuuucuacuuacc

SEQ ID NO: 335685 - RNA, 22 nt, Human
acuauaaaaggauaaaccagaa

SEQ ID NO: 335686 - RNA, 22 nt, Human
gaggccaggacaugaaagcuga

SEQ ID NO: 335687 - RNA, 18 nt, Human
cauaauuuucuuucuuua

SEQ ID NO: 335688 - RNA, 22 nt, Human
gcucaggaaaacagucuaguaa

SEQ ID NO: 335689 - RNA, 22 nt, Human
aaggcagcaugaaucccuguac

SEQ ID NO: 335690 - RNA, 22 nt, Human
gcagcugccccgacugugaguc

SEQ ID NO: 335691 - RNA, 22 nt, Human
ucugucaaaugagcaaguaacu

SEQ ID NO: 335692 - RNA, 22 nt, Human
uagggcagaguccaggaugggc

SEQ ID NO: 335693 - RNA, 22 nt, Human
cugccaggcagggagauggcug

SEQ ID NO: 335694 - RNA, 22 nt, Human
gaggaaccaaucugugauauuc

SEQ ID NO: 335695 - RNA, 22 nt, Human
cugccaucugagccaaaagugc

SEQ ID NO: 335696 - RNA, 22 nt, Human
aggccagcucuacccuuggacu

SEQ ID NO: 335697 - RNA, 22 nt, Human
gggcagcucucacagcagccaa

SEQ ID NO: 335698 - RNA, 22 nt, Human
gugagggguggcugagcaguuu

SEQ ID NO: 335699 - RNA, 22 nt, Human
agggugguucuuuuaguggaag

SEQ ID NO: 335700 - RNA, 22 nt, Human
uuugcagucaaauuugcuaaau

SEQ ID NO: 335701 - RNA, 22 nt, Human
uugcuguguaacuccuggccug

SEQ ID NO: 335702 - RNA, 22 nt, Human
ccaggagauaagcugaguuuau

SEQ ID NO: 335703 - RNA, 22 nt, Human
aaguguagauuauggagugucu

SEQ ID NO: 335704 - RNA, 22 nt, Human
aauguaugaagguuccaguuuc

SEQ ID NO: 335705 - RNA, 16 nt, Human
uucugucacguacggc

SEQ ID NO: 335706 - RNA, 22 nt, Human
cagggagggaggaaaauuugcu

SEQ ID NO: 335707 - RNA, 22 nt, Human
aaaguauuugugauuuuuacca

SEQ ID NO: 335708 - RNA, 22 nt, Human
ucacauuucugauuauaccaaa

SEQ ID NO: 335709 - RNA, 22 nt, Human
uuccucagcuggccugauuggg

SEQ ID NO: 335710 - RNA, 22 nt, Human
uuuuuggguccaggcuguaucu

SEQ ID NO: 335711 - RNA, 22 nt, Human
uaucauuguguuauuucuucca

SEQ ID NO: 335712 - RNA, 22 nt, Human
uacuaaauaguuuaauuccuca

SEQ ID NO: 335713 - RNA, 22 nt, Human
caaaucuauauguugauauucu

SEQ ID NO: 335714 - RNA, 22 nt, Human
accaggagaggcacuugcaaug

SEQ ID NO: 335715 - RNA, 22 nt, Human
uuugcagugucagcuucugugu

SEQ ID NO: 335716 - RNA, 22 nt, Human
gggcagcucuuugguauccuuc

SEQ ID NO: 335717 - RNA, 22 nt, Human
gcaggagacaacuguaaggaga

SEQ ID NO: 335718 - RNA, 22 nt, Human
uuucaaaguugggaauuguaau

SEQ ID NO: 335719 - RNA, 22 nt, Human
aggcagcuuucuggugcaccau

SEQ ID NO: 335720 - RNA, 22 nt, Human
ggcaggcucagcagccaaggag

SEQ ID NO: 335721 - RNA, 22 nt, Human
uaauacagaaguguauuaaaau

SEQ ID NO: 335722 - RNA, 22 nt, Human
gucaggauuaaugggaguaugc

SEQ ID NO: 335723 - RNA, 22 nt, Human
uugaaaggugaacaugaugcac

SEQ ID NO: 335724 - RNA, 22 nt, Human
ucuuagaaauuccccaguggcu

SEQ ID NO: 335725 - RNA, 22 nt, Human
cccaggaugucgaggcugcagu

SEQ ID NO: 335726 - RNA, 22 nt, Human
uaggcagcauggauucugaaua

SEQ ID NO: 335727 - RNA, 20 nt, Human
cagagccaagagcagcaucu

SEQ ID NO: 335728 - RNA, 22 nt, Human
uggaguuccuuugaaaggcucu

SEQ ID NO: 335729 - RNA, 22 nt, Human
ucucuuucuauaugugagucuu

SEQ ID NO: 335730 - RNA, 22 nt, Human
uucugaaccauugagcacugcc

SEQ ID NO: 335731 - RNA, 22 nt, Human
uugcagcuuagugauguuaucu

SEQ ID NO: 335732 - RNA, 22 nt, Human
augcuacagcaucucucaucag

SEQ ID NO: 335733 - RNA, 22 nt, Human
aaauaguuagcccugcauauau

SEQ ID NO: 335734 - RNA, 22 nt, Human
agggaguuagaaauccaggaua

SEQ ID NO: 335735 - RNA, 22 nt, Human
gccaggagugucccacucauuu

SEQ ID NO: 335736 - RNA, 22 nt, Human
gaggagagccugcacuuugacc

SEQ ID NO: 335737 - RNA, 23 nt, Human
auuucuaggggauuuucuggugc

SEQ ID NO: 335738 - RNA, 22 nt, Human
ucagagaggcaauacuguuuaa

SEQ ID NO: 335739 - RNA, 22 nt, Human
cccaggcagccugcagggaagg

SEQ ID NO: 335740 - RNA, 22 nt, Human
aacaaaugaccugauuucuucc

SEQ ID NO: 335741 - RNA, 22 nt, Human
agagggagugaaauggaauaga

SEQ ID NO: 335742 - RNA, 22 nt, Human
uuuccaagagcuuauuucugaa

SEQ ID NO: 335743 - RNA, 22 nt, Human
ucucucagaggaagaggcagug

SEQ ID NO: 335744 - RNA, 22 nt, Human
uuucaguuuaugucuugaauua

SEQ ID NO: 335745 - RNA, 19 nt, Human
agaggcagucuccaacagg

SEQ ID NO: 335746 - RNA, 22 nt, Human
ugcugaugcuguucuguuagga

SEQ ID NO: 335747 - RNA, 22 nt, Human
gagcauuuuugucugcauuuua

SEQ ID NO: 335748 - RNA, 22 nt, Human
gcucucuuuuuccagugguggu

SEQ ID NO: 335749 - RNA, 22 nt, Human
ucagggugaaccaggcaggaau

SEQ ID NO: 335750 - RNA, 22 nt, Human
uguacauagaucuugaaaauua

SEQ ID NO: 335751 - RNA, 22 nt, Human
cuugcacacauguacaugugua

SEQ ID NO: 335752 - RNA, 22 nt, Human
caaggccauauugccuguaugu

SEQ ID NO: 335753 - RNA, 22 nt, Human
uuugcauaggauggacauuuua

SEQ ID NO: 335754 - RNA, 20 nt, Human
aagggcagagggaacagacu

SEQ ID NO: 335755 - RNA, 22 nt, Human
gggagcugaauggcaauggaga

SEQ ID NO: 335756 - RNA, 22 nt, Human
uacaaaugaguuguaugaacca

SEQ ID NO: 335757 - RNA, 22 nt, Human
aggcacaggaaugucauccagu

SEQ ID NO: 335758 - RNA, 22 nt, Human
augaggcaaucaugguccaguu

SEQ ID NO: 335759 - RNA, 22 nt, Human
ucuucacaggagccugccugcc

SEQ ID NO: 335760 - RNA, 22 nt, Human
uuugaaugcaggacauacagaa

SEQ ID NO: 335761 - RNA, 22 nt, Human
ucacuucacacccacuaucaug

SEQ ID NO: 335762 - RNA, 22 nt, Human
guuuuauaggcuguugcuauau

SEQ ID NO: 335763 - RNA, 22 nt, Human
uaaugucagcauaguuuauuuu

SEQ ID NO: 335764 - RNA, 22 nt, Human
agcuggcagcucucagggguac

SEQ ID NO: 335765 - RNA, 23 nt, Human
uuucuucagaagccuugcgaggc

SEQ ID NO: 335766 - RNA, 20 nt, Human
cuucuucauuaacccuacug

SEQ ID NO: 335767 - RNA, 20 nt, Human
ccagaagagaugaucaucca

SEQ ID NO: 335768 - RNA, 22 nt, Human
aauuuccaaauuucugucacac

SEQ ID NO: 335769 - RNA, 22 nt, Human
ucacaauauuuaucuuccaauu

SEQ ID NO: 335770 - RNA, 22 nt, Human
cagcugacccagugaggaggca

SEQ ID NO: 335771 - RNA, 22 nt, Human
cccaggaaaugggcucuugccu

SEQ ID NO: 335772 - RNA, 22 nt, Human
aucaggauucaccccagagcug

SEQ ID NO: 335773 - RNA, 22 nt, Human
cagugauguuucugcaucagag

SEQ ID NO: 335774 - RNA, 22 nt, Human
caggauggugugagugugagga

SEQ ID NO: 335775 - RNA, 22 nt, Human
uuucaguuuccagcuuugucau

SEQ ID NO: 335776 - RNA, 22 nt, Human
uucucuuuugugaugugagaug

SEQ ID NO: 335777 - RNA, 22 nt, Human
uuugacauuggcuuauucuguu

SEQ ID NO: 335778 - RNA, 22 nt, Human
uaaaacuuaacuauccagauua

SEQ ID NO: 335779 - RNA, 22 nt, Human
uaaugucaaggugauagauuug

SEQ ID NO: 335780 - RNA, 22 nt, Human
ccaggagagcaaaggucacucu

SEQ ID NO: 335781 - RNA, 22 nt, Human
ccaggagacccagggaaggagc

SEQ ID NO: 335782 - RNA, 22 nt, Human
ucaggagggugacaggcccugg

SEQ ID NO: 335783 - RNA, 22 nt, Human
acacauauauacauauuugugc

SEQ ID NO: 335784 - RNA, 22 nt, Human
auguagaagcugacagugcugu

SEQ ID NO: 335785 - RNA, 22 nt, Human
ugaaguuguuaagguugccauu

SEQ ID NO: 335786 - RNA, 23 nt, Human
gagugcagaauagacaugcagug

SEQ ID NO: 335787 - RNA, 22 nt, Human
auugaaagguuuugagcagaua

SEQ ID NO: 335788 - RNA, 22 nt, Human
acaguuaucuuugaaauagaga

SEQ ID NO: 335789 - RNA, 21 nt, Human
uguaaguuucaucugaauugg

SEQ ID NO: 335790 - RNA, 22 nt, Human
aauacuauguugugacacauga

SEQ ID NO: 335791 - RNA, 22 nt, Human
uaggaaaugcuccauugcauaa

SEQ ID NO: 335792 - RNA, 22 nt, Human
uaacaucuuuagcagcucgaac

SEQ ID NO: 335793 - RNA, 22 nt, Human
agugcuguuagguuaauauagu

SEQ ID NO: 335794 - RNA, 22 nt, Human
uggcagcuuuuuguuucaggcu

SEQ ID NO: 335795 - RNA, 22 nt, Human
ugccuugcacauaauauacauu

SEQ ID NO: 335796 - RNA, 22 nt, Human
gcccaggagguugggcugugca

SEQ ID NO: 335797 - RNA, 18 nt, Human
aggcagacacuagagguc

SEQ ID NO: 335798 - RNA, 22 nt, Human
uuuccucacuucaugagaguuu

SEQ ID NO: 335799 - RNA, 22 nt, Human
aaaguuuguugcuuacaaagaa

SEQ ID NO: 335800 - RNA, 21 nt, Human
ccugcugugaucuuagugagu

SEQ ID NO: 335801 - RNA, 22 nt, Human
caggcagccugagggaucuggg

SEQ ID NO: 335802 - RNA, 22 nt, Human
aaugagacacgugaagcagaug

SEQ ID NO: 335803 - RNA, 22 nt, Human
cugcugugggcaggguagcugg

SEQ ID NO: 335804 - RNA, 22 nt, Human
agggagcuaggauccugaaggu

SEQ ID NO: 335805 - RNA, 22 nt, Human
uucaguaaaacacugcaauguc

SEQ ID NO: 335806 - RNA, 22 nt, Human
aaggcaguuugggccaccaucu

SEQ ID NO: 335807 - RNA, 22 nt, Human
cagcauuuaaugcagugcuucc

SEQ ID NO: 335808 - RNA, 22 nt, Human
uuugagauggagucuugcucug

SEQ ID NO: 335809 - RNA, 22 nt, Human
gggcagcugccacuccgcuugc

SEQ ID NO: 335810 - RNA, 22 nt, Human
aaggcagcaagaauuccagguu

SEQ ID NO: 335811 - RNA, 22 nt, Human
uucuuaaaacuuauggacaggu

SEQ ID NO: 335812 - RNA, 22 nt, Human
agcaccuguugcacuucauaau

SEQ ID NO: 335813 - RNA, 22 nt, Human
gauuucuugaccccugucucag

SEQ ID NO: 335814 - RNA, 22 nt, Human
uucauucuuauuugugaucugg

SEQ ID NO: 335815 - RNA, 15 nt, Human
cuccaugauuuugca

SEQ ID NO: 335816 - RNA, 22 nt, Human
ucuuagaaguucauguuccagc

SEQ ID NO: 335817 - RNA, 22 nt, Human
cugcucuaauaucagauagacu

SEQ ID NO: 335818 - RNA, 20 nt, Human
agggcagcuugaggagccgg

SEQ ID NO: 335819 - RNA, 22 nt, Human
gccaucacauccaggcuaccuc

SEQ ID NO: 335820 - RNA, 22 nt, Human
ucucagucagccuugauguccc

SEQ ID NO: 335821 - RNA, 22 nt, Human
agaaaauauucauugagaggcu

SEQ ID NO: 335822 - RNA, 22 nt, Human
uaaauuauggcuggcagagcag

SEQ ID NO: 335823 - RNA, 22 nt, Human
aaugaaauguagcuuauccaua

SEQ ID NO: 335824 - RNA, 22 nt, Human
uguguuauugccacugaagacc

SEQ ID NO: 335825 - RNA, 22 nt, Human
gucuauauauugcuugaauaau

SEQ ID NO: 335826 - RNA, 22 nt, Human
uugagaagaaauaguuugcaau

SEQ ID NO: 335827 - RNA, 22 nt, Human
agcugcccagauaggaggaggc

SEQ ID NO: 335828 - RNA, 22 nt, Human
acugcccucccaucuauugcaa

SEQ ID NO: 335829 - RNA, 18 nt, Human
uugcuuuguaagcuugca

SEQ ID NO: 335830 - RNA, 22 nt, Human
ucuuccucuagaucugaggccc

SEQ ID NO: 335831 - RNA, 22 nt, Human
gacccaggagugcagagagugg

SEQ ID NO: 335832 - RNA, 22 nt, Human
gagggucccugcucagggccag

SEQ ID NO: 335833 - RNA, 22 nt, Human
aggcagaugggagcuggaaguu

SEQ ID NO: 335834 - RNA, 22 nt, Human
uagcauuucacugaucuucacu

SEQ ID NO: 335835 - RNA, 22 nt, Human
uggaaagucucuuuugacugua

SEQ ID NO: 335836 - RNA, 22 nt, Human
guugaaaguagaugcuauuugg

SEQ ID NO: 335837 - RNA, 22 nt, Human
cccaagagcuucuaggacgcug

SEQ ID NO: 335838 - RNA, 22 nt, Human
auucacagaauaguuuuaccag

SEQ ID NO: 335839 - RNA, 22 nt, Human
ugaggggagguuggggcacauc

SEQ ID NO: 335840 - RNA, 22 nt, Human
caggguggggaaauagcgcccu

SEQ ID NO: 335841 - RNA, 22 nt, Human
gauggcagcauauugacagcau

SEQ ID NO: 335842 - RNA, 22 nt, Human
gcagcuucaguaggugaagaca

SEQ ID NO: 335843 - RNA, 20 nt, Human
ucuguacacucaucuucugc

SEQ ID NO: 335844 - RNA, 22 nt, Human
cccaggaagaaauucugauuug

SEQ ID NO: 335845 - RNA, 22 nt, Human
agaccaugggcucugaagagca

SEQ ID NO: 335846 - RNA, 22 nt, Human
acauaccauacauggugagaug

SEQ ID NO: 335847 - RNA, 22 nt, Human
ccacagcugaccgcaggugagc

SEQ ID NO: 335848 - RNA, 22 nt, Human
ucagagagugcaaaauauagcu

SEQ ID NO: 335849 - RNA, 22 nt, Human
cagaguggcgacccccucagcu

SEQ ID NO: 335850 - RNA, 22 nt, Human
auugcuguaaauuaucuuauua

SEQ ID NO: 335851 - RNA, 22 nt, Human
ugcccaggaucuggcgaugcuc

SEQ ID NO: 335852 - RNA, 22 nt, Human
ucacccuugauaauguucuucu

SEQ ID NO: 335853 - RNA, 22 nt, Human
uuauucuucuucucuugccagg

SEQ ID NO: 335854 - RNA, 23 nt, Human
uccaggagcaugcuggcuggcga

SEQ ID NO: 335855 - RNA, 22 nt, Human
uugauuaaacaggcauauucaa

SEQ ID NO: 335856 - RNA, 21 nt, Human
gagacagcccagugccagggc

SEQ ID NO: 335857 - RNA, 22 nt, Human
agacaaaugguaauuaugucua

SEQ ID NO: 335858 - RNA, 18 nt, Human
cugcugugucgucugggc

SEQ ID NO: 335859 - RNA, 22 nt, Human
uuuugaauaauucagaaacagc

SEQ ID NO: 335860 - RNA, 22 nt, Human
cucuccucagaacaggcccucu

SEQ ID NO: 335861 - RNA, 22 nt, Human
cugcauuagucaugcuuugcag

SEQ ID NO: 335862 - RNA, 22 nt, Human
auugaaaggcaaaguaggaagc

SEQ ID NO: 335863 - RNA, 22 nt, Human
auucuucauacagacaaguccu

SEQ ID NO: 335864 - RNA, 22 nt, Human
aucauucuauuguugagcugcc

SEQ ID NO: 335865 - RNA, 22 nt, Human
aauaacuuuuaaaagacccugg

SEQ ID NO: 335866 - RNA, 22 nt, Human
auaguuugugaaacacagcagu

SEQ ID NO: 335867 - RNA, 22 nt, Human
gugcagcugugguggagccagg

SEQ ID NO: 335868 - RNA, 22 nt, Human
uaauuucaccguugcuagaaau

SEQ ID NO: 335869 - RNA, 22 nt, Human
uuugaaagcaggugugggaggg

SEQ ID NO: 335870 - RNA, 22 nt, Human
caggcagccuucucgucucaca

SEQ ID NO: 335871 - RNA, 22 nt, Human
caaaugauaccuauuacuaggc

SEQ ID NO: 335872 - RNA, 22 nt, Human
ugaggcaggaugcuugcacagg

SEQ ID NO: 335873 - RNA, 23 nt, Human
auugaugacuugauuacacuuuu

SEQ ID NO: 335874 - RNA, 22 nt, Human
uuauuuucuccucagaaagugg

SEQ ID NO: 335875 - RNA, 22 nt, Human
uucaacuaauguuuauuuuaug

SEQ ID NO: 335876 - RNA, 21 nt, Human
cucaaagaccaaaaguguaga

SEQ ID NO: 335877 - RNA, 22 nt, Human
uugaaaggguuaaagugguaaa

SEQ ID NO: 335878 - RNA, 22 nt, Human
uccaugaggaccaaauucguag

SEQ ID NO: 335879 - RNA, 22 nt, Human
uuagaacuuaaacuucagaaag

SEQ ID NO: 335880 - RNA, 22 nt, Human
acagugacguuuauuugagacg

SEQ ID NO: 335881 - RNA, 22 nt, Human
cauuuuaaaugauuuaagccaa

SEQ ID NO: 335882 - RNA, 18 nt, Human
agcuucccucugagaggg

SEQ ID NO: 335883 - RNA, 22 nt, Human
uucaacuagauuuauacaauuc

SEQ ID NO: 335884 - RNA, 22 nt, Human
uucucugagauagacuaagugg

SEQ ID NO: 335885 - RNA, 22 nt, Human
uucucagauauuuacugagcau

SEQ ID NO: 335886 - RNA, 22 nt, Human
aggacuuagaacauuauguacu

SEQ ID NO: 335887 - RNA, 22 nt, Human
gcccaggauucuuucuuccuua

SEQ ID NO: 335888 - RNA, 22 nt, Human
gcagagcuucuguccuucagga

SEQ ID NO: 335889 - RNA, 20 nt, Human
caggaugauuggacacgaug

SEQ ID NO: 335890 - RNA, 22 nt, Human
cucaucugauaaaucacucuua

SEQ ID NO: 335891 - RNA, 22 nt, Human
aggcaguggaugucaggaaugg

SEQ ID NO: 335892 - RNA, 22 nt, Human
uuagaaagcuuuccauagucaa

SEQ ID NO: 335893 - RNA, 22 nt, Human
agggagcucuaaguagagggac

SEQ ID NO: 335894 - RNA, 22 nt, Human
ugagacaguuuuucuauuucca

SEQ ID NO: 335895 - RNA, 22 nt, Human
aggcagacaaggucccuggucu

SEQ ID NO: 335896 - RNA, 22 nt, Human
aaggcagcacagcaacugcuca

SEQ ID NO: 335897 - RNA, 22 nt, Human
cagcuuucaucagugacacuca

SEQ ID NO: 335898 - RNA, 22 nt, Human
acccaggagcaggcugggcagu

SEQ ID NO: 335899 - RNA, 21 nt, Human
agcagaggcagaauguaugca

SEQ ID NO: 335900 - RNA, 20 nt, Human
agcaagaguaaggacagcga

SEQ ID NO: 335901 - RNA, 22 nt, Human
gacggcagaaacucaugagguc

SEQ ID NO: 335902 - RNA, 22 nt, Human
ccagcagaggggcggagugcag

SEQ ID NO: 335903 - RNA, 22 nt, Human
cagcaggauuugaaaggaagag

SEQ ID NO: 335904 - RNA, 22 nt, Human
aauuauguagccauaugaaaca

SEQ ID NO: 335905 - RNA, 22 nt, Human
aggaugagaagauuggaaucuu

SEQ ID NO: 335906 - RNA, 22 nt, Human
ugaaaugaaacagaacauauca

SEQ ID NO: 335907 - RNA, 22 nt, Human
cauuguuaauugguaucuuaca

SEQ ID NO: 335908 - RNA, 18 nt, Human
ugagaggcagguagagga

SEQ ID NO: 335909 - RNA, 22 nt, Human
aguuagaauauaauuauguuaa

SEQ ID NO: 335910 - RNA, 22 nt, Human
uagaaacaucagcuaaccaaaa

SEQ ID NO: 335911 - RNA, 22 nt, Human
uaaguggaagguuauaugcuaa

SEQ ID NO: 335912 - RNA, 22 nt, Human
aaauaguucagccacggugacu

SEQ ID NO: 335913 - RNA, 22 nt, Human
gugcuuucugcugcauuccucu

SEQ ID NO: 335914 - RNA, 22 nt, Human
aaaugauugucaaaguucuguu

SEQ ID NO: 335915 - RNA, 22 nt, Human
ugcuagaauuagguuaaacaaa

SEQ ID NO: 335916 - RNA, 22 nt, Human
uucuugcaggucacucacugag

SEQ ID NO: 335917 - RNA, 22 nt, Human
aaucuuagguuuggcuucaucu

SEQ ID NO: 335918 - RNA, 22 nt, Human
uuucucuguucucuaacuguaa

SEQ ID NO: 335919 - RNA, 22 nt, Human
ggaggacacuggcucugccuuc

SEQ ID NO: 335920 - RNA, 22 nt, Human
auacuguuucucuucuacauga

SEQ ID NO: 335921 - RNA, 22 nt, Human
uugcugugucugauggcugaga

SEQ ID NO: 335922 - RNA, 22 nt, Human
ucaggaugguguggaggaaaua

SEQ ID NO: 335923 - RNA, 17 nt, Human
gcugacccuggagaagu

SEQ ID NO: 335924 - RNA, 22 nt, Human
ccaggaaauagugcugugaucu

SEQ ID NO: 335925 - RNA, 23 nt, Human
uugcuuucaucaugagaugcucc

SEQ ID NO: 335926 - RNA, 22 nt, Human
ggagcagggcagugaauucugg

SEQ ID NO: 335927 - RNA, 22 nt, Human
gucaggauuggggucaugaguc

SEQ ID NO: 335928 - RNA, 22 nt, Human
acaauacuuaccaauguuuuug

SEQ ID NO: 335929 - RNA, 22 nt, Human
aggccagaaaugucagggagug

SEQ ID NO: 335930 - RNA, 22 nt, Human
gaaagauauuuauuggcaacag

SEQ ID NO: 335931 - RNA, 21 nt, Human
uucuccccagcgaauccucgg

SEQ ID NO: 335932 - RNA, 22 nt, Human
uucuucuucuggcugcaccugg

SEQ ID NO: 335933 - RNA, 22 nt, Human
uaaguucauaagcuuauucuua

SEQ ID NO: 335934 - RNA, 22 nt, Human
ucacaauuuggauacagcuaug

SEQ ID NO: 335935 - RNA, 22 nt, Human
cauugcuuccuaugucccuucu

SEQ ID NO: 335936 - RNA, 21 nt, Human
auaaaguuuuacaggaaugca

SEQ ID NO: 335937 - RNA, 22 nt, Human
uugcugaagugaagguauguuu

SEQ ID NO: 335938 - RNA, 22 nt, Human
gagaggauccacaaaccaggaa

SEQ ID NO: 335939 - RNA, 22 nt, Human
ugcuagaaaucugaaacuagca

SEQ ID NO: 335940 - RNA, 22 nt, Human
ugcugcuguuuccuacaucuca

SEQ ID NO: 335941 - RNA, 22 nt, Human
aaggagaaaugguagaugugca

SEQ ID NO: 335942 - RNA, 22 nt, Human
uucuuauagaagcaaccauugu

SEQ ID NO: 335943 - RNA, 23 nt, Human
uacaugcuauaauuucacccuca

SEQ ID NO: 335944 - RNA, 22 nt, Human
agaggcaggaagagcugauuuu

SEQ ID NO: 335945 - RNA, 22 nt, Human
uucuucaaugugcccuguuuuc

SEQ ID NO: 335946 - RNA, 22 nt, Human
aacaugcucuguuucuuggaug

SEQ ID NO: 335947 - RNA, 22 nt, Human
gcugcugucacggugcuaaggg

SEQ ID NO: 335948 - RNA, 22 nt, Human
aagaacuuccuaauauauuuuc

SEQ ID NO: 335949 - RNA, 19 nt, Human
uuucccagcccuugcugug

SEQ ID NO: 335950 - RNA, 22 nt, Human
cauuuuaagaugaccugguuuc

SEQ ID NO: 335951 - RNA, 22 nt, Human
gcuuugaagucugugucuuuug

SEQ ID NO: 335952 - RNA, 22 nt, Human
uugaauuauaagugugucuacu

SEQ ID NO: 335953 - RNA, 22 nt, Human
ggagcggagggagggccacugu

SEQ ID NO: 335954 - RNA, 22 nt, Human
agauauauuuaagguaauaagu

SEQ ID NO: 335955 - RNA, 22 nt, Human
ugaaauuaugcauuguuguacc

SEQ ID NO: 335956 - RNA, 22 nt, Human
ggugguggagccagcugggagu

SEQ ID NO: 335957 - RNA, 22 nt, Human
gagaggcaggcgcugcaauggu

SEQ ID NO: 335958 - RNA, 22 nt, Human
aguuauaugugaaaacacguau

SEQ ID NO: 335959 - RNA, 22 nt, Human
ggcagcuauuccaagcagcacu

SEQ ID NO: 335960 - RNA, 22 nt, Human
ggaaaugacuuggugcuucguu

SEQ ID NO: 335961 - RNA, 21 nt, Human
auucugucaucccagcuacuu

SEQ ID NO: 335962 - RNA, 22 nt, Human
ucucuucuaacacuagaaauuc

SEQ ID NO: 335963 - RNA, 22 nt, Human
uuuauuguuuagaagggggcug

SEQ ID NO: 335964 - RNA, 22 nt, Human
auguauuucuauguagugaaga

SEQ ID NO: 335965 - RNA, 22 nt, Human
ucugcagggaugugagggguga

SEQ ID NO: 335966 - RNA, 22 nt, Human
uuuuuuaguuaggucagaaugu

SEQ ID NO: 335967 - RNA, 22 nt, Human
caggguggcacucagcgcaucu

SEQ ID NO: 335968 - RNA, 22 nt, Human
aaaggccacuugaaggauuuuu

SEQ ID NO: 335969 - RNA, 22 nt, Human
aacaucuacuaagugccaggca

SEQ ID NO: 335970 - RNA, 22 nt, Human
cauuuguaggaugcuucuuguu

SEQ ID NO: 335971 - RNA, 22 nt, Human
acucagaagauauaaugacuca

SEQ ID NO: 335972 - RNA, 22 nt, Human
gagggcauaguuaaauaggagg

SEQ ID NO: 335973 - RNA, 16 nt, Human
aggaggggaauuagga

SEQ ID NO: 335974 - RNA, 22 nt, Human
cagcugacagugaggugggggc

SEQ ID NO: 335975 - RNA, 19 nt, Human
ugcuagaaauucugugacu

SEQ ID NO: 335976 - RNA, 22 nt, Human
ccaggaagcugucugauaugaa

SEQ ID NO: 335977 - RNA, 22 nt, Human
gcccaggagguggaggugcagu

SEQ ID NO: 335978 - RNA, 20 nt, Human
guugaaaguaauaugaugcu

SEQ ID NO: 335979 - RNA, 22 nt, Human
gaaccucagugaaacuggaggu

SEQ ID NO: 335980 - RNA, 22 nt, Human
aguggcaggcggagauguagga

SEQ ID NO: 335981 - RNA, 22 nt, Human
acaaauauuuacugaauccacu

SEQ ID NO: 335982 - RNA, 22 nt, Human
uuggaaagcaagcuggacauac

SEQ ID NO: 335983 - RNA, 22 nt, Human
uacauauguaaacauguauaaa

SEQ ID NO: 335984 - RNA, 20 nt, Human
ccacaggaguccagucgacc

SEQ ID NO: 335985 - RNA, 22 nt, Human
caggcagcgcucguggccuggc

SEQ ID NO: 335986 - RNA, 22 nt, Human
uuugaaagcuacuuucggguca

SEQ ID NO: 335987 - RNA, 22 nt, Human
uucauugucucuguuugccuuc

SEQ ID NO: 335988 - RNA, 22 nt, Human
uagcacauuguugaccagaagg

SEQ ID NO: 335989 - RNA, 22 nt, Human
acuaagugauucuaagcaucuu

SEQ ID NO: 335990 - RNA, 22 nt, Human
cuucucagaucucagcuuugag

SEQ ID NO: 335991 - RNA, 22 nt, Human
auauuguugacuauaagaguaa

SEQ ID NO: 335992 - RNA, 22 nt, Human
caaauauuccagguacaucccu

SEQ ID NO: 335993 - RNA, 22 nt, Human
caggguggcacaucacagcauu

SEQ ID NO: 335994 - RNA, 22 nt, Human
cauuuguaguaucuguuuauau

SEQ ID NO: 335995 - RNA, 22 nt, Human
ccucagaugucuuaaggcacug

SEQ ID NO: 335996 - RNA, 22 nt, Human
auauaauuguucugaaguguuu

SEQ ID NO: 335997 - RNA, 22 nt, Human
gcugcugugccuggcguccugu

SEQ ID NO: 335998 - RNA, 22 nt, Human
ugaggcagccugcauuaaagag

SEQ ID NO: 335999 - RNA, 22 nt, Human
guucuugccagcauccucaggu

SEQ ID NO: 336000 - RNA, 22 nt, Human
cccaggcagugugugcaugcgu

SEQ ID NO: 336001 - RNA, 22 nt, Human
aaggcaguagguguuucaaacu

SEQ ID NO: 336002 - RNA, 22 nt, Human
agccagcucccuccccugcagg

SEQ ID NO: 336003 - RNA, 22 nt, Human
ucaggagauguaaccuuagcug

SEQ ID NO: 336004 - RNA, 22 nt, Human
gaagcagcuggugagauggagc

SEQ ID NO: 336005 - RNA, 22 nt, Human
uuugaaaguucuucugacacua

SEQ ID NO: 336006 - RNA, 22 nt, Human
gaugccucuuuuggcugaauua

SEQ ID NO: 336007 - RNA, 22 nt, Human
gggcagcucugcccaucagagg

SEQ ID NO: 336008 - RNA, 22 nt, Human
aaauauagugacacuuauaguc

SEQ ID NO: 336009 - RNA, 22 nt, Human
acccaggaugauaauguucaca

SEQ ID NO: 336010 - RNA, 22 nt, Human
uccaggagugcugguuagagua

SEQ ID NO: 336011 - RNA, 17 nt, Human
cauuuguugaucaguug

SEQ ID NO: 336012 - RNA, 22 nt, Human
cuauuacauuucuggacauuca

SEQ ID NO: 336013 - RNA, 22 nt, Human
agcugcccugguaagauugaug

SEQ ID NO: 336014 - RNA, 22 nt, Human
auuuugaugcuaucuaaugaau

SEQ ID NO: 336015 - RNA, 22 nt, Human
auauucuuccaaaacaucauuu

SEQ ID NO: 336016 - RNA, 22 nt, Human
cccaggaguuggaggcuacggu

SEQ ID NO: 336017 - RNA, 22 nt, Human
ucacugucugaaagaaauggcc

SEQ ID NO: 336018 - RNA, 22 nt, Human
aaacacagggauauauauucca

SEQ ID NO: 336019 - RNA, 22 nt, Human
cugcuuugggcagcuuuguggc

SEQ ID NO: 336020 - RNA, 20 nt, Human
aaacauucauguacaaguga

SEQ ID NO: 336021 - RNA, 22 nt, Human
aagggaggggauguaagccugg

SEQ ID NO: 336022 - RNA, 22 nt, Human
ucucaggaagugauauugagac

SEQ ID NO: 336023 - RNA, 22 nt, Human
aggguggcaccuggaagggaug

SEQ ID NO: 336024 - RNA, 22 nt, Human
uaacaguguggacuugagaucu

SEQ ID NO: 336025 - RNA, 22 nt, Human
gcuggcuugauaguuucugcuu

SEQ ID NO: 336026 - RNA, 22 nt, Human
ugaaaugagauaauuuaagugc

SEQ ID NO: 336027 - RNA, 22 nt, Human
uucuuacagaguuuacagagcc

SEQ ID NO: 336028 - RNA, 22 nt, Human
cugcuguguuccuccugcaucu

SEQ ID NO: 336029 - RNA, 21 nt, Human
gccaggaguagauuacauuua

SEQ ID NO: 336030 - RNA, 22 nt, Human
aaauguauugcauaggauauuu

SEQ ID NO: 336031 - RNA, 22 nt, Human
aaugcauauguaggcaagcagu

SEQ ID NO: 336032 - RNA, 22 nt, Human
acccaggacacagagaugaccc

SEQ ID NO: 336033 - RNA, 22 nt, Human
uuaauuuuaaccuguuuguguc

SEQ ID NO: 336034 - RNA, 21 nt, Human
ugaggcaggggugcuuuuguc

SEQ ID NO: 336035 - RNA, 18 nt, Human
cauuguacaaugcuuuau

SEQ ID NO: 336036 - RNA, 22 nt, Human
ucaauauauuccauguuuucuc

SEQ ID NO: 336037 - RNA, 22 nt, Human
ugcuucuggaaacaguggcugu

SEQ ID NO: 336038 - RNA, 22 nt, Human
cuuucauaaaggaaaugaugag

SEQ ID NO: 336039 - RNA, 22 nt, Human
ugcccaggauugugaggucagg

SEQ ID NO: 336040 - RNA, 22 nt, Human
gaggcaguuccugagugacaag

SEQ ID NO: 336041 - RNA, 22 nt, Human
uuucaguucaguuuauuauauc

SEQ ID NO: 336042 - RNA, 22 nt, Human
uaacacauaucuacaacaugug

SEQ ID NO: 336043 - RNA, 22 nt, Human
cugcgcagggguggcgccagaa

SEQ ID NO: 336044 - RNA, 22 nt, Human
ugaggggaacugaugcccauug

SEQ ID NO: 336045 - RNA, 17 nt, Human
aggcagcucagaacauc

SEQ ID NO: 336046 - RNA, 22 nt, Human
ggauggcauguugggcucuguu

SEQ ID NO: 336047 - RNA, 22 nt, Human
gaacacauguccuccuuggauu

SEQ ID NO: 336048 - RNA, 22 nt, Human
aaguuugcauagauuaagcauu

SEQ ID NO: 336049 - RNA, 22 nt, Human
gaggcagcauucgcauagacag

SEQ ID NO: 336050 - RNA, 22 nt, Human
uuugaaagagcugauacaugaa

SEQ ID NO: 336051 - RNA, 22 nt, Human
agagggagcccagucauagcug

SEQ ID NO: 336052 - RNA, 23 nt, Human
uuccagaguccacaucugccacc

SEQ ID NO: 336053 - RNA, 22 nt, Human
uuuggaauuggaaagugcugug

SEQ ID NO: 336054 - RNA, 22 nt, Human
uguaugaagccagaaucuguuu

SEQ ID NO: 336055 - RNA, 22 nt, Human
auuuuacuuugugaauauugac

SEQ ID NO: 336056 - RNA, 22 nt, Human
ugugaaagcaagucuaguucuc

SEQ ID NO: 336057 - RNA, 22 nt, Human
uguaugaagacuucuucugugu

SEQ ID NO: 336058 - RNA, 22 nt, Human
ugucaaagccugaaucacauag

SEQ ID NO: 336059 - RNA, 22 nt, Human
gaaauaagaguccaugccaggu

SEQ ID NO: 336060 - RNA, 22 nt, Human
agaaguuguagguuugcauauu

SEQ ID NO: 336061 - RNA, 22 nt, Human
aggcagcuggaaaacuccaggc

SEQ ID NO: 336062 - RNA, 22 nt, Human
aggcagcuuucuguaggggugu

SEQ ID NO: 336063 - RNA, 19 nt, Human
auauauguauacaaugugg

SEQ ID NO: 336064 - RNA, 22 nt, Human
auggaaagugcauggaagucau

SEQ ID NO: 336065 - RNA, 22 nt, Human
uaaucuguauuccuacuuugca

SEQ ID NO: 336066 - RNA, 21 nt, Human
uucucagagucuauuacaguu

SEQ ID NO: 336067 - RNA, 21 nt, Human
uggagacucugguucuuugug

SEQ ID NO: 336068 - RNA, 22 nt, Human
agaaaugacacacaugagacau

SEQ ID NO: 336069 - RNA, 22 nt, Human
auugaaagcacaaagaacaagu

SEQ ID NO: 336070 - RNA, 21 nt, Human
ggagggcagcccagacuggcu

SEQ ID NO: 336071 - RNA, 22 nt, Human
gaagcagccacggggagacaga

SEQ ID NO: 336072 - RNA, 22 nt, Human
acacaaauuguaggauaauugc

SEQ ID NO: 336073 - RNA, 21 nt, Human
aucacauuggcuguuauuauu

SEQ ID NO: 336074 - RNA, 22 nt, Human
gaggggaaagugugaggcugcg

SEQ ID NO: 336075 - RNA, 22 nt, Human
acugauuacacgaguucugacu

SEQ ID NO: 336076 - RNA, 22 nt, Human
uuugacaucuaagaauucuuac

SEQ ID NO: 336077 - RNA, 23 nt, Human
ucuugaaaagccuacagcaguuc

SEQ ID NO: 336078 - RNA, 22 nt, Human
aguggcagagccaaguagagcc

SEQ ID NO: 336079 - RNA, 22 nt, Human
aucacuguguauguauaugcag

SEQ ID NO: 336080 - RNA, 22 nt, Human
gaggacaggagacucacuguuu

SEQ ID NO: 336081 - RNA, 22 nt, Human
ugauugaacugagcuucaagau

SEQ ID NO: 336082 - RNA, 23 nt, Human
cagcccuuccugcauguuuuugu

SEQ ID NO: 336083 - RNA, 22 nt, Human
gcagaggggaagcugaggaauu

SEQ ID NO: 336084 - RNA, 22 nt, Human
cugaacucuuuaugacagcuug

SEQ ID NO: 336085 - RNA, 22 nt, Human
uccaggaggcaccuuuggacca

SEQ ID NO: 336086 - RNA, 22 nt, Human
gcacaauuauuuaugcaguaug

SEQ ID NO: 336087 - RNA, 22 nt, Human
uuuucguuuauuugacauguaa

SEQ ID NO: 336088 - RNA, 22 nt, Human
ugaugaaauguugaggcaguga

SEQ ID NO: 336089 - RNA, 22 nt, Human
uucugucaaacucacaggccga

SEQ ID NO: 336090 - RNA, 22 nt, Human
gcccaggaagugacucagaugu

SEQ ID NO: 336091 - RNA, 22 nt, Human
uauguuauuuucauacaacaga

SEQ ID NO: 336092 - RNA, 22 nt, Human
cugcgcagcaaucagagaggag

SEQ ID NO: 336093 - RNA, 22 nt, Human
gggaggugauggcaagcagcgg

SEQ ID NO: 336094 - RNA, 22 nt, Human
uguaugaaccuuuaauauagug

SEQ ID NO: 336095 - RNA, 22 nt, Human
cucaugauguagcgaaugagaa

SEQ ID NO: 336096 - RNA, 22 nt, Human
ucugggaagcugguccuguucu

SEQ ID NO: 336097 - RNA, 22 nt, Human
ugaaaugaagggcuuguucugg

SEQ ID NO: 336098 - RNA, 22 nt, Human
uggcuucuugggaugggucauu

SEQ ID NO: 336099 - RNA, 22 nt, Human
ucaggagauggucuuuauaggc

SEQ ID NO: 336100 - RNA, 22 nt, Human
auguuauaguuauaaaaugagg

SEQ ID NO: 336101 - RNA, 22 nt, Human
ucaucugucauccacaaagcug

SEQ ID NO: 336102 - RNA, 22 nt, Human
aggagggagaugcccauccugg

SEQ ID NO: 336103 - RNA, 22 nt, Human
aaaauugaagugaucaggaacu

SEQ ID NO: 336104 - RNA, 22 nt, Human
ugcuggguuaccuaagccuaaa

SEQ ID NO: 336105 - RNA, 22 nt, Human
ucacaguaucacacaaggauua

SEQ ID NO: 336106 - RNA, 22 nt, Human
uaggaggguuagagggaaauau

SEQ ID NO: 336107 - RNA, 22 nt, Human
uuucacagguacaaacacuccu

SEQ ID NO: 336108 - RNA, 22 nt, Human
aaguauaagcuauucuucauga

SEQ ID NO: 336109 - RNA, 22 nt, Human
acagucauuagauacaaugucu

SEQ ID NO: 336110 - RNA, 22 nt, Human
gcaggagacuggcugugguagu

SEQ ID NO: 336111 - RNA, 22 nt, Human
ucauauaaguuuaaaacuaucu

SEQ ID NO: 336112 - RNA, 22 nt, Human
ugcauaguucuccuuccuccuc

SEQ ID NO: 336113 - RNA, 22 nt, Human
guaucacuuuugagagugagaa

SEQ ID NO: 336114 - RNA, 22 nt, Human
ucacaaaugaggaaaucgagca

SEQ ID NO: 336115 - RNA, 22 nt, Human
uauuuccaggccccacucuaga

SEQ ID NO: 336116 - RNA, 22 nt, Human
aggcaacuuuuggggaugaugg

SEQ ID NO: 336117 - RNA, 22 nt, Human
auuuguagugaagugaaaauaa

SEQ ID NO: 336118 - RNA, 22 nt, Human
guuguuuugcaggauccuuaca

SEQ ID NO: 336119 - RNA, 22 nt, Human
aauacaguagguaauaguucau

SEQ ID NO: 336120 - RNA, 22 nt, Human
uuucuucauucaccuucacccc

SEQ ID NO: 336121 - RNA, 22 nt, Human
ugaggggagacagaguggacuc

SEQ ID NO: 336122 - RNA, 22 nt, Human
aggcagccaaucagaggcugac

SEQ ID NO: 336123 - RNA, 22 nt, Human
aucugucaucagcaccacaggu

SEQ ID NO: 336124 - RNA, 22 nt, Human
aucuguuccccuaugcucucua

SEQ ID NO: 336125 - RNA, 22 nt, Human
aggcagucuaucucuggagccu

SEQ ID NO: 336126 - RNA, 22 nt, Human
augacacuuggugauacuuugu

SEQ ID NO: 336127 - RNA, 22 nt, Human
aauugcaacagguagacuuuuc

SEQ ID NO: 336128 - RNA, 22 nt, Human
ggagauggaauagauucugacu

SEQ ID NO: 336129 - RNA, 22 nt, Human
uucuacaugguugcucagaggg

SEQ ID NO: 336130 - RNA, 22 nt, Human
ggagcuguuggcagcuaucuug

SEQ ID NO: 336131 - RNA, 22 nt, Human
aauuuuaaucaguggugcugag

SEQ ID NO: 336132 - RNA, 22 nt, Human
cccaucacagacacuggguuau

SEQ ID NO: 336133 - RNA, 22 nt, Human
aggagaggaaucauuauuacaa

SEQ ID NO: 336134 - RNA, 19 nt, Human
agacagagcucaguggguu

SEQ ID NO: 336135 - RNA, 22 nt, Human
ucauuucuccgaccugcugucc

SEQ ID NO: 336136 - RNA, 22 nt, Human
ggaggacaggggcugcagcaca

SEQ ID NO: 336137 - RNA, 22 nt, Human
uguuguuuucucauggagaaua

SEQ ID NO: 336138 - RNA, 22 nt, Human
ucugguaaccuuuaucccuccu

SEQ ID NO: 336139 - RNA, 22 nt, Human
agugcuuucccugaaaccuucc

SEQ ID NO: 336140 - RNA, 22 nt, Human
gucacuguuuccuauuauauuu

SEQ ID NO: 336141 - RNA, 22 nt, Human
ucucauugguauauacaugugu

SEQ ID NO: 336142 - RNA, 22 nt, Human
gagagcuggguucaaguagcug

SEQ ID NO: 336143 - RNA, 23 nt, Human
cccuggaguaaauucuuggaagg

SEQ ID NO: 336144 - RNA, 22 nt, Human
cugagccagcuggcaugugcua

SEQ ID NO: 336145 - RNA, 22 nt, Human
auacagauguugaauguuauau

SEQ ID NO: 336146 - RNA, 22 nt, Human
cuugaaagcuuugcgucuucua

SEQ ID NO: 336147 - RNA, 22 nt, Human
ucaucucaaaacccaaggggca

SEQ ID NO: 336148 - RNA, 22 nt, Human
cagcuuccgaccgggggcugca

SEQ ID NO: 336149 - RNA, 22 nt, Human
cccuguacagucucuguggcac

SEQ ID NO: 336150 - RNA, 22 nt, Human
caggaugagaggcccagggaag

SEQ ID NO: 336151 - RNA, 22 nt, Human
uuugaaagacagaauauuuuug

SEQ ID NO: 336152 - RNA, 22 nt, Human
ucucaggagccacagcgggagu

SEQ ID NO: 336153 - RNA, 22 nt, Human
aguaugaauacagauuuucucu

SEQ ID NO: 336154 - RNA, 22 nt, Human
aaugucugagucucuguauccc

SEQ ID NO: 336155 - RNA, 22 nt, Human
uugcauuucccauugaguaaug

SEQ ID NO: 336156 - RNA, 18 nt, Human
ggcaucugcacagcagcc

SEQ ID NO: 336157 - RNA, 22 nt, Human
uuugaaguggaaaaggauuuaa

SEQ ID NO: 336158 - RNA, 22 nt, Human
uuggcaggaauauugcagaggu

SEQ ID NO: 336159 - RNA, 22 nt, Human
guuaacacaggacucucugccu

SEQ ID NO: 336160 - RNA, 20 nt, Human
ucucuucuggggagauaaaa

SEQ ID NO: 336161 - RNA, 22 nt, Human
caggauagaaaggccauggagu

SEQ ID NO: 336162 - RNA, 22 nt, Human
uuuguuuagaugguaaaucagu

SEQ ID NO: 336163 - RNA, 22 nt, Human
uggucuuuaagguagcugucau

SEQ ID NO: 336164 - RNA, 22 nt, Human
caggagagauaugaguccccac

SEQ ID NO: 336165 - RNA, 22 nt, Human
auuucaaggcuauuaauauaaa

SEQ ID NO: 336166 - RNA, 22 nt, Human
ugugugaaggagccacuguuca

SEQ ID NO: 336167 - RNA, 22 nt, Human
ggccagcucuuguccacggagg

SEQ ID NO: 336168 - RNA, 22 nt, Human
uccauuuucaucucauguauaa

SEQ ID NO: 336169 - RNA, 22 nt, Human
gaauaguucuauggcugcaggg

SEQ ID NO: 336170 - RNA, 20 nt, Human
aucugcuugccuguccucgg

SEQ ID NO: 336171 - RNA, 22 nt, Human
gagagggauacugaguuuuggu

SEQ ID NO: 336172 - RNA, 22 nt, Human
uggaagggagugacagucagag

SEQ ID NO: 336173 - RNA, 22 nt, Human
agucugucuacuuaaagucugu

SEQ ID NO: 336174 - RNA, 23 nt, Human
gugcugugagccccuuggccucc

SEQ ID NO: 336175 - RNA, 22 nt, Human
ucauucuuuaccaaguugucac

SEQ ID NO: 336176 - RNA, 22 nt, Human
auucuucaaagagugucaaagu

SEQ ID NO: 336177 - RNA, 22 nt, Human
gagguagccacagauagagacu

SEQ ID NO: 336178 - RNA, 23 nt, Human
uagaaugucauucaaugauaugg

SEQ ID NO: 336179 - RNA, 22 nt, Human
uaacuacauuucacugcaauua

SEQ ID NO: 336180 - RNA, 22 nt, Human
guucuucagauuccauuucagu

SEQ ID NO: 336181 - RNA, 22 nt, Human
acauuuagaguucuuuacucca

SEQ ID NO: 336182 - RNA, 22 nt, Human
cacucaggcugugucaggagga

SEQ ID NO: 336183 - RNA, 22 nt, Human
ugcuguguucuccugacucacc

SEQ ID NO: 336184 - RNA, 22 nt, Human
uugaaauggaagugaaaauucu

SEQ ID NO: 336185 - RNA, 22 nt, Human
caggaaagggaugggcugccac

SEQ ID NO: 336186 - RNA, 22 nt, Human
ggagagugggagcaacuguugc

SEQ ID NO: 336187 - RNA, 22 nt, Human
ugccuggauucgguuguuguca

SEQ ID NO: 336188 - RNA, 22 nt, Human
aaauauacuagaugaugaccca

SEQ ID NO: 336189 - RNA, 22 nt, Human
ugugauauuugaguauugucaa

SEQ ID NO: 336190 - RNA, 22 nt, Human
acagcagcuugcgugucugguc

SEQ ID NO: 336191 - RNA, 22 nt, Human
gcaggagagccagcaggcuucc

SEQ ID NO: 336192 - RNA, 22 nt, Human
uugauacaggcucuauuucauc

SEQ ID NO: 336193 - RNA, 22 nt, Human
gaggccaggaagcccaagauca

SEQ ID NO: 336194 - RNA, 22 nt, Human
aaauugcauuuuaaagguagau

SEQ ID NO: 336195 - RNA, 22 nt, Human
uuauggcauauuccucauugua

SEQ ID NO: 336196 - RNA, 22 nt, Human
aacauucuauuuugcuaaaaca

SEQ ID NO: 336197 - RNA, 22 nt, Human
uuuugcuugagugcacaaaaug

SEQ ID NO: 336198 - RNA, 22 nt, Human
uuucacaucagagguagauuag

SEQ ID NO: 336199 - RNA, 16 nt, Human
gcccaggacgggaggc

SEQ ID NO: 336200 - RNA, 22 nt, Human
caaguaaagaaucacauuucuu

SEQ ID NO: 336201 - RNA, 22 nt, Human
auguuucaccaguuuuauaaga

SEQ ID NO: 336202 - RNA, 22 nt, Human
gacagugcauuuccuggcaugg

SEQ ID NO: 336203 - RNA, 22 nt, Human
gacccaggcccaaggcugccag

SEQ ID NO: 336204 - RNA, 17 nt, Human
gagacagcaggagcccc

SEQ ID NO: 336205 - RNA, 22 nt, Human
auucuucauaccuacugagguu

SEQ ID NO: 336206 - RNA, 22 nt, Human
caggacagagcccagacugugu

SEQ ID NO: 336207 - RNA, 22 nt, Human
agcacauucugccuugcuuugc

SEQ ID NO: 336208 - RNA, 22 nt, Human
gggcagcugccccucucugggc

SEQ ID NO: 336209 - RNA, 22 nt, Human
uuauuuaaaagugguaagauuc

SEQ ID NO: 336210 - RNA, 22 nt, Human
augcugugcuggcuaaccaugg

SEQ ID NO: 336211 - RNA, 22 nt, Human
cagauggaacacagaaaggaga

SEQ ID NO: 336212 - RNA, 22 nt, Human
uuucuuauacuauauugucauc

SEQ ID NO: 336213 - RNA, 22 nt, Human
cuuugaaaggaagccacacagc

SEQ ID NO: 336214 - RNA, 22 nt, Human
acuugcauuauauuuaucacaa

SEQ ID NO: 336215 - RNA, 22 nt, Human
aggggaugauccucccgcagcg

SEQ ID NO: 336216 - RNA, 17 nt, Human
uccaugagacaugaaga

SEQ ID NO: 336217 - RNA, 22 nt, Human
agaccauggccauccuaggaaa

SEQ ID NO: 336218 - RNA, 22 nt, Human
auuuaaauuuucugauggagag

SEQ ID NO: 336219 - RNA, 22 nt, Human
aucacauugccagugauuaccc

SEQ ID NO: 336220 - RNA, 22 nt, Human
gggcagcucagccaccaugcag

SEQ ID NO: 336221 - RNA, 22 nt, Human
cucaagacugaucgcaguggaa

SEQ ID NO: 336222 - RNA, 22 nt, Human
aggaagcuuagugaaaggacca

SEQ ID NO: 336223 - RNA, 22 nt, Human
uacaucauaauaauacuuagaa

SEQ ID NO: 336224 - RNA, 22 nt, Human
acaagcaugggcuuugacauca

SEQ ID NO: 336225 - RNA, 22 nt, Human
uuugcaguuucauugcugaaau

SEQ ID NO: 336226 - RNA, 22 nt, Human
uucuuuugggaauuacguaugc

SEQ ID NO: 336227 - RNA, 22 nt, Human
uacugccuggagcauuggugcu

SEQ ID NO: 336228 - RNA, 22 nt, Human
uuugaaaucuaaucaaggaaca

SEQ ID NO: 336229 - RNA, 22 nt, Human
agcuaccuggcuuaucacuguc

SEQ ID NO: 336230 - RNA, 22 nt, Human
acauaugugcuuauauccauga

SEQ ID NO: 336231 - RNA, 22 nt, Human
ucuucuuaugugccauuaucuc

SEQ ID NO: 336232 - RNA, 22 nt, Human
ccucaggaaaugaauaaauggc

SEQ ID NO: 336233 - RNA, 22 nt, Human
accuugaugccuuuccaagaug

SEQ ID NO: 336234 - RNA, 22 nt, Human
gagaacucagacgcaggucaug

SEQ ID NO: 336235 - RNA, 22 nt, Human
caauacuuccuuguuagaggca

SEQ ID NO: 336236 - RNA, 22 nt, Human
aaacugcuuuccacaguggcua

SEQ ID NO: 336237 - RNA, 22 nt, Human
auaucauucugauguauaucuu

SEQ ID NO: 336238 - RNA, 21 nt, Human
ucaggagagcccaucuacaaa

SEQ ID NO: 336239 - RNA, 18 nt, Human
augggaggggccaagaga

SEQ ID NO: 336240 - RNA, 21 nt, Human
gcaaauguucaggaaaaaaga

SEQ ID NO: 336241 - RNA, 22 nt, Human
uuucuuguaagauguuuauuaa

SEQ ID NO: 336242 - RNA, 22 nt, Human
uuuuucaagacaaccugcaugu

SEQ ID NO: 336243 - RNA, 22 nt, Human
aggguggcugaguagauggaag

SEQ ID NO: 336244 - RNA, 22 nt, Human
ccucagggaaugggaggcuggg

SEQ ID NO: 336245 - RNA, 22 nt, Human
uuccagcaggcagacaggagau

SEQ ID NO: 336246 - RNA, 22 nt, Human
uucacauugugcagauuauggu

SEQ ID NO: 336247 - RNA, 22 nt, Human
ugaggcaggacauggacaacug

SEQ ID NO: 336248 - RNA, 22 nt, Human
uccaggagugauaaggccacug

SEQ ID NO: 336249 - RNA, 22 nt, Human
ugugaaaagggcuuuguacaaa

SEQ ID NO: 336250 - RNA, 22 nt, Human
cauuaaaauaucucaugguguu

SEQ ID NO: 336251 - RNA, 22 nt, Human
caacacauugaagcuaugauga

SEQ ID NO: 336252 - RNA, 22 nt, Human
aagcaauauacugauaugauua

SEQ ID NO: 336253 - RNA, 22 nt, Human
cucaggauuuacuaauuucaag

SEQ ID NO: 336254 - RNA, 20 nt, Human
aggaggggauagaaucaaag

SEQ ID NO: 336255 - RNA, 22 nt, Human
gggugggacugaagucugaggg

SEQ ID NO: 336256 - RNA, 22 nt, Human
ggaggggaugguuugacccugg

SEQ ID NO: 336257 - RNA, 22 nt, Human
agccuuguuggucugaguuugg

SEQ ID NO: 336258 - RNA, 22 nt, Human
caagaugggcaccccagcaccu

SEQ ID NO: 336259 - RNA, 22 nt, Human
uagaaauaaaucugcagcuggg

SEQ ID NO: 336260 - RNA, 22 nt, Human
ucccaggauguuuauggcuggu

SEQ ID NO: 336261 - RNA, 22 nt, Human
uugaaagugccaaguccuagug

SEQ ID NO: 336262 - RNA, 22 nt, Human
agagggauggccccguaacuca

SEQ ID NO: 336263 - RNA, 18 nt, Human
ugugaacacauuuuucug

SEQ ID NO: 336264 - RNA, 22 nt, Human
aucuccaggcauuucaagagac

SEQ ID NO: 336265 - RNA, 20 nt, Human
gggugggagagucugagggu

SEQ ID NO: 336266 - RNA, 22 nt, Human
cugcuucuccaaaguaggacuu

SEQ ID NO: 336267 - RNA, 22 nt, Human
gaaggaggugucaguuggacug

SEQ ID NO: 336268 - RNA, 22 nt, Human
uaugaacucuggagucugagug

SEQ ID NO: 336269 - RNA, 22 nt, Human
cuguggaaaauuuguauguaau

SEQ ID NO: 336270 - RNA, 22 nt, Human
gaggccaaucaauagggcaaua

SEQ ID NO: 336271 - RNA, 22 nt, Human
uucuucucucauagauuaaggu

SEQ ID NO: 336272 - RNA, 22 nt, Human
cccaggaagagugaguggcauu

SEQ ID NO: 336273 - RNA, 22 nt, Human
uuucucuugcgauaugcuacac

SEQ ID NO: 336274 - RNA, 22 nt, Human
ugagauguaagguaugcuuacu

SEQ ID NO: 336275 - RNA, 22 nt, Human
agcuagccuaggcagagugcau

SEQ ID NO: 336276 - RNA, 20 nt, Human
uccaugaguuagagacuaua

SEQ ID NO: 336277 - RNA, 22 nt, Human
augcugugguagacagcauucc

SEQ ID NO: 336278 - RNA, 22 nt, Human
gaggccagaguuccccgaguca

SEQ ID NO: 336279 - RNA, 22 nt, Human
uucacagaauggcaaguuaugg

SEQ ID NO: 336280 - RNA, 22 nt, Human
cacaauuuccuugcuucacuuu

SEQ ID NO: 336281 - RNA, 22 nt, Human
auguagaacagguuaaugacag

SEQ ID NO: 336282 - RNA, 22 nt, Human
caugcugugcaucuugaugacc

SEQ ID NO: 336283 - RNA, 22 nt, Human
uagggauguccugagacuuggc

SEQ ID NO: 336284 - RNA, 22 nt, Human
gaaggccaagaggcuccaagau

SEQ ID NO: 336285 - RNA, 22 nt, Human
aggccagcagcaugacggcauc

SEQ ID NO: 336286 - RNA, 17 nt, Human
gagagcugcugcuuccg

SEQ ID NO: 336287 - RNA, 22 nt, Human
agaggggacagccaccugcccg

SEQ ID NO: 336288 - RNA, 22 nt, Human
auuauuauauagggaaaguccc

SEQ ID NO: 336289 - RNA, 22 nt, Human
cucaggauagcugcgcagccug

SEQ ID NO: 336290 - RNA, 22 nt, Human
uugaaagacuucuccugugaaa

SEQ ID NO: 336291 - RNA, 22 nt, Human
guuuuccugaaacugauggugu

SEQ ID NO: 336292 - RNA, 22 nt, Human
aagggaggaggauuuauuguac

SEQ ID NO: 336293 - RNA, 22 nt, Human
uuaugacaggaaaaucacagaa

SEQ ID NO: 336294 - RNA, 22 nt, Human
cagauccacccuuguagugaca

SEQ ID NO: 336295 - RNA, 22 nt, Human
aauauaaugcuguuuuaugcca

SEQ ID NO: 336296 - RNA, 22 nt, Human
agcaccuugcucuuggccuucc

SEQ ID NO: 336297 - RNA, 22 nt, Human
cagagggcucuuggcugccugc

SEQ ID NO: 336298 - RNA, 22 nt, Human
ucucucuucaacccuuaacuag

SEQ ID NO: 336299 - RNA, 22 nt, Human
augcuguggaugccuugcccca

SEQ ID NO: 336300 - RNA, 22 nt, Human
uaccauuucauucuuuccucau

SEQ ID NO: 336301 - RNA, 22 nt, Human
uaaggccaggcuguggucggca

SEQ ID NO: 336302 - RNA, 22 nt, Human
acauaugauauugaggaucuca

SEQ ID NO: 336303 - RNA, 22 nt, Human
gcuggcaggagccuuucccuuu

SEQ ID NO: 336304 - RNA, 22 nt, Human
uccagccuaggggaacagcugc

SEQ ID NO: 336305 - RNA, 19 nt, Human
cuucuggcccugagccacc

SEQ ID NO: 336306 - RNA, 22 nt, Human
gaaacauacgauuuaggagaaa

SEQ ID NO: 336307 - RNA, 22 nt, Human
ucagagaguuacacaaauuguu

SEQ ID NO: 336308 - RNA, 22 nt, Human
gugaaacagaagcuccuggaau

SEQ ID NO: 336309 - RNA, 22 nt, Human
uccccagggcugcagagggugu

SEQ ID NO: 336310 - RNA, 22 nt, Human
auaucacaguaguuguuuaguu

SEQ ID NO: 336311 - RNA, 22 nt, Human
aguccaaggagagacagcauuu

SEQ ID NO: 336312 - RNA, 22 nt, Human
ccaggagagcgcccucccggcc

SEQ ID NO: 336313 - RNA, 22 nt, Human
gcagaggagcaaguugcuacag

SEQ ID NO: 336314 - RNA, 22 nt, Human
auuuagaacuuuguuugccaau

SEQ ID NO: 336315 - RNA, 22 nt, Human
aggccagccucaggcagggacc

SEQ ID NO: 336316 - RNA, 22 nt, Human
auuauucuuaugucaucauggc

SEQ ID NO: 336317 - RNA, 22 nt, Human
ucacauuuucuacuacuguacg

SEQ ID NO: 336318 - RNA, 22 nt, Human
uugaaggacauccuauuucuag

SEQ ID NO: 336319 - RNA, 22 nt, Human
uugaauaggacucagcagugau

SEQ ID NO: 336320 - RNA, 22 nt, Human
aaagccaugggucuuuggcaua

SEQ ID NO: 336321 - RNA, 22 nt, Human
gagaggagguggcuaugacagc

SEQ ID NO: 336322 - RNA, 22 nt, Human
gaggcagcugaaggagugacag

SEQ ID NO: 336323 - RNA, 22 nt, Human
uauuuuaaagugaagggucuug

SEQ ID NO: 336324 - RNA, 22 nt, Human
cugcuuuggacaacuauucuug

SEQ ID NO: 336325 - RNA, 22 nt, Human
cagcagagggagccauugaaau

SEQ ID NO: 336326 - RNA, 22 nt, Human
caggcagggagcuggaaaggau

SEQ ID NO: 336327 - RNA, 22 nt, Human
ccaugagcuuccuauauagggu

SEQ ID NO: 336328 - RNA, 22 nt, Human
ggcagcuaguuuaagaaagagg

SEQ ID NO: 336329 - RNA, 21 nt, Human
aaugcauuaacauaaagcuga

SEQ ID NO: 336330 - RNA, 22 nt, Human
gaggcugcccaacuggagugga

SEQ ID NO: 336331 - RNA, 22 nt, Human
cucagaauuuagggcucugagg

SEQ ID NO: 336332 - RNA, 22 nt, Human
cauaauuuuccaugguuugcua

SEQ ID NO: 336333 - RNA, 22 nt, Human
acuggaaaacacuacuacaugc

SEQ ID NO: 336334 - RNA, 22 nt, Human
auccagucaaaauuaguaaggu

SEQ ID NO: 336335 - RNA, 22 nt, Human
aggaagcucaaagccaugaugu

SEQ ID NO: 336336 - RNA, 22 nt, Human
uccaggagaaggccauccagcg

SEQ ID NO: 336337 - RNA, 22 nt, Human
uaucuguuaggaucagagcugg

SEQ ID NO: 336338 - RNA, 22 nt, Human
acucaggaaaaauguagugaua

SEQ ID NO: 336339 - RNA, 22 nt, Human
uugaaaggaauacagaggccua

SEQ ID NO: 336340 - RNA, 22 nt, Human
acaggagaaaucuggucaaaag

SEQ ID NO: 336341 - RNA, 22 nt, Human
ugguaauuuacgcauuucugua

SEQ ID NO: 336342 - RNA, 22 nt, Human
aagugggaauagaaaugaaggu

SEQ ID NO: 336343 - RNA, 22 nt, Human
ggugaguugggguucacagguc

SEQ ID NO: 336344 - RNA, 22 nt, Human
guuuagaacacggaaauacuga

SEQ ID NO: 336345 - RNA, 22 nt, Human
agguauaagaagauuauuuaua

SEQ ID NO: 336346 - RNA, 22 nt, Human
cuucuucaagagaaugggagac

SEQ ID NO: 336347 - RNA, 22 nt, Human
cuugaaagcacuuaguaaauua

SEQ ID NO: 336348 - RNA, 18 nt, Human
agggagagaccgcggguc

SEQ ID NO: 336349 - RNA, 22 nt, Human
ggcagaggagcuggaaacaugg

SEQ ID NO: 336350 - RNA, 22 nt, Human
ccaggagaugggaaaguagcag

SEQ ID NO: 336351 - RNA, 22 nt, Human
gcucccaggcauggagguaauu

SEQ ID NO: 336352 - RNA, 22 nt, Human
cccaggaaugggaaggaggaau

SEQ ID NO: 336353 - RNA, 22 nt, Human
ucucuucucuagugagcaacug

SEQ ID NO: 336354 - RNA, 22 nt, Human
uagggcagagcuuguacacgau

SEQ ID NO: 336355 - RNA, 22 nt, Human
gguaugaaaugauuccauguua

SEQ ID NO: 336356 - RNA, 22 nt, Human
uagugcuuaauaaauuucagaa

SEQ ID NO: 336357 - RNA, 20 nt, Human
gaguuccccauuucuccugg

SEQ ID NO: 336358 - RNA, 22 nt, Human
uccaggagugugugcuaauggg

SEQ ID NO: 336359 - RNA, 22 nt, Human
gcuguggucugugagcuccaaa

SEQ ID NO: 336360 - RNA, 22 nt, Human
uauuucagcccuacuacuuggc

SEQ ID NO: 336361 - RNA, 18 nt, Human
cucaccauucugcccaau

SEQ ID NO: 336362 - RNA, 22 nt, Human
agucucuuccuucaaggcuggu

SEQ ID NO: 336363 - RNA, 22 nt, Human
gaggucaggggagaggcugaug

SEQ ID NO: 336364 - RNA, 22 nt, Human
cucuucuugaaagaggaauuca

SEQ ID NO: 336365 - RNA, 22 nt, Human
gggacuucauagcuaggcacuu

SEQ ID NO: 336366 - RNA, 22 nt, Human
cggagccugcuuguugcagcug

SEQ ID NO: 336367 - RNA, 22 nt, Human
acauuuuuauucaucaaagcag

SEQ ID NO: 336368 - RNA, 22 nt, Human
uuaaaugaggcugauguagauu

SEQ ID NO: 336369 - RNA, 22 nt, Human
ucugggaaugaauaagaccugu

SEQ ID NO: 336370 - RNA, 22 nt, Human
acaacauuauacauagaaagcu

SEQ ID NO: 336371 - RNA, 22 nt, Human
agucccuguacuuuccacugcc

SEQ ID NO: 336372 - RNA, 22 nt, Human
uuaauacaagcauaugcacaca

SEQ ID NO: 336373 - RNA, 22 nt, Human
uugaagagugccuuccagacau

SEQ ID NO: 336374 - RNA, 22 nt, Human
gcccaggaaauaaaagugggcu

SEQ ID NO: 336375 - RNA, 22 nt, Human
ugaggcaggagaaucaccggaa

SEQ ID NO: 336376 - RNA, 22 nt, Human
ucucuguaguugggcagcugcu

SEQ ID NO: 336377 - RNA, 22 nt, Human
agucucugcaugccugcugugc

SEQ ID NO: 336378 - RNA, 22 nt, Human
gcaggagagucugugccagguu

SEQ ID NO: 336379 - RNA, 22 nt, Human
ugagaacugaggauuugaauuc

SEQ ID NO: 336380 - RNA, 22 nt, Human
gaggcaugcagagcuggagcag

SEQ ID NO: 336381 - RNA, 22 nt, Human
aaguaugacauuuaagacaauu

SEQ ID NO: 336382 - RNA, 22 nt, Human
auuacaaucgagagaaacaaau

SEQ ID NO: 336383 - RNA, 19 nt, Human
cuuugucagaacaugcuuc

SEQ ID NO: 336384 - RNA, 22 nt, Human
agugcuuugagcguuugaaaag

SEQ ID NO: 336385 - RNA, 22 nt, Human
caguuuuugccauuaagaguaa

SEQ ID NO: 336386 - RNA, 22 nt, Human
cuagggaguggcagagcuggga

SEQ ID NO: 336387 - RNA, 22 nt, Human
uuagacauguuugcuaaaauga

SEQ ID NO: 336388 - RNA, 22 nt, Human
aggcagcuggcaaauucuagag

SEQ ID NO: 336389 - RNA, 22 nt, Human
uuugcaguagacaucuuauuuu

SEQ ID NO: 336390 - RNA, 22 nt, Human
caguucuuaauaccaugugguu

SEQ ID NO: 336391 - RNA, 22 nt, Human
aggacagggauucaaacuccca

SEQ ID NO: 336392 - RNA, 22 nt, Human
cugaggaagacagcagcugugu

SEQ ID NO: 336393 - RNA, 17 nt, Human
ucaggauguagcaguag

SEQ ID NO: 336394 - RNA, 22 nt, Human
aucugucaggagcaaggacuac

SEQ ID NO: 336395 - RNA, 22 nt, Human
caaggccaagucucugugaaga

SEQ ID NO: 336396 - RNA, 22 nt, Human
accaggagccacaggaggagcc

SEQ ID NO: 336397 - RNA, 22 nt, Human
gaagcagcagcuggggacaguu

SEQ ID NO: 336398 - RNA, 22 nt, Human
uccaggagacacccuugugugu

SEQ ID NO: 336399 - RNA, 22 nt, Human
agugcuuuagagaaauggugcu

SEQ ID NO: 336400 - RNA, 18 nt, Human
gcaggagauggguggggu

SEQ ID NO: 336401 - RNA, 18 nt, Human
gaugggagcaagagaaga

SEQ ID NO: 336402 - RNA, 23 nt, Human
aaauuauugcucuucaauugccu

SEQ ID NO: 336403 - RNA, 22 nt, Human
aggcaguggagcuggaauaggc

SEQ ID NO: 336404 - RNA, 22 nt, Human
ucagugcacagagauuuuuguu

SEQ ID NO: 336405 - RNA, 22 nt, Human
uccaugagaacccuuggagaua

SEQ ID NO: 336406 - RNA, 17 nt, Human
gucauucucagaaaaug

SEQ ID NO: 336407 - RNA, 22 nt, Human
uccaggagcauccaggugaagc

SEQ ID NO: 336408 - RNA, 22 nt, Human
ggcucagaccucccagcuccag

SEQ ID NO: 336409 - RNA, 22 nt, Human
ucacacagauugguagagcuga

SEQ ID NO: 336410 - RNA, 22 nt, Human
acacauuucucuuuuuguaagu

SEQ ID NO: 336411 - RNA, 22 nt, Human
cuuaagauuugcgauaccuaau

SEQ ID NO: 336412 - RNA, 22 nt, Human
gcauucuuuuuaggagguuccu

SEQ ID NO: 336413 - RNA, 22 nt, Human
cauaauuucacugucguauggc

SEQ ID NO: 336414 - RNA, 22 nt, Human
uccaggagaccagauguaggcc

SEQ ID NO: 336415 - RNA, 22 nt, Human
agccagcugugggcucaggcgg

SEQ ID NO: 336416 - RNA, 20 nt, Human
aggaagcugagauguagagg

SEQ ID NO: 336417 - RNA, 22 nt, Human
ccucuucuaggacguccuugug

SEQ ID NO: 336418 - RNA, 22 nt, Human
augaaaauguacauguguauaa

SEQ ID NO: 336419 - RNA, 23 nt, Human
acaagauagggauaaaaagauaa

SEQ ID NO: 336420 - RNA, 17 nt, Human
gcccaggaaggacggcc

SEQ ID NO: 336421 - RNA, 22 nt, Human
auugaggcagcauaguucaggg

SEQ ID NO: 336422 - RNA, 22 nt, Human
uucuucuucauuucugacgaug

SEQ ID NO: 336423 - RNA, 22 nt, Human
aaaggccaauaaagacaagcug

SEQ ID NO: 336424 - RNA, 22 nt, Human
ugcugcugaucauuuauagucu

SEQ ID NO: 336425 - RNA, 23 nt, Human
aaacugcuuccaauuccugccau

SEQ ID NO: 336426 - RNA, 22 nt, Human
acuguugucaggcugcuuugga

SEQ ID NO: 336427 - RNA, 22 nt, Human
caaggccaugagcagcgagugu

SEQ ID NO: 336428 - RNA, 22 nt, Human
aucacauucuuucaaagcaguc

SEQ ID NO: 336429 - RNA, 22 nt, Human
cuuagaaaucgaacucagguua

SEQ ID NO: 336430 - RNA, 22 nt, Human
agugcuuuauguuguugugcaa

SEQ ID NO: 336431 - RNA, 22 nt, Human
cucugcaugccuugcucagaca

SEQ ID NO: 336432 - RNA, 22 nt, Human
augcugugagugugccgcagag

SEQ ID NO: 336433 - RNA, 22 nt, Human
ggaggaggcggcagaaguuccu

SEQ ID NO: 336434 - RNA, 23 nt, Human
cuucucagaagucugugccagga

SEQ ID NO: 336435 - RNA, 22 nt, Human
gcaggcaguuauuuaguagaau

SEQ ID NO: 336436 - RNA, 23 nt, Human
guaaaauacgcagugcaguguga

SEQ ID NO: 336437 - RNA, 22 nt, Human
cacaauguauauguauaucaaa

SEQ ID NO: 336438 - RNA, 22 nt, Human
uucaggaucauuuguuuuaucu

SEQ ID NO: 336439 - RNA, 22 nt, Human
cccaggaguaagugacauuguu

SEQ ID NO: 336440 - RNA, 22 nt, Human
gucaggaugggcagccaaacua

SEQ ID NO: 336441 - RNA, 22 nt, Human
guugacagcuggugagcugcua

SEQ ID NO: 336442 - RNA, 22 nt, Human
ucucacuggguauaaaugagua

SEQ ID NO: 336443 - RNA, 22 nt, Human
uuucauugucuacauaugacau

SEQ ID NO: 336444 - RNA, 22 nt, Human
ucuucucuccugcuuggcagaa

SEQ ID NO: 336445 - RNA, 22 nt, Human
gaggcugaggguuagagaguca

SEQ ID NO: 336446 - RNA, 22 nt, Human
cccaggagaccuagaucuguuu

SEQ ID NO: 336447 - RNA, 23 nt, Human
uuucaaauuacucugcagaugac

SEQ ID NO: 336448 - RNA, 20 nt, Human
uucacagaggacucagguca

SEQ ID NO: 336449 - RNA, 22 nt, Human
ugcugcuguauccuuaguguca

SEQ ID NO: 336450 - RNA, 22 nt, Human
uguaugaaagaacaagggcuua

SEQ ID NO: 336451 - RNA, 22 nt, Human
agaaucucuacucaaguacuug

SEQ ID NO: 336452 - RNA, 22 nt, Human
uugaaagaggcaaaguuugauc

SEQ ID NO: 336453 - RNA, 22 nt, Human
aguggacucuucccagugcuug

SEQ ID NO: 336454 - RNA, 22 nt, Human
ccuuaaauucuccauuugaaag

SEQ ID NO: 336455 - RNA, 22 nt, Human
uagaaauguugguauuaacauu

SEQ ID NO: 336456 - RNA, 22 nt, Human
auucaaauuaaguuaauucagc

SEQ ID NO: 336457 - RNA, 22 nt, Human
aucugccuggcuccaggugagc

SEQ ID NO: 336458 - RNA, 22 nt, Human
gagugcagaugaacagaagauu

SEQ ID NO: 336459 - RNA, 22 nt, Human
uggccaggcagguagaacggcc

SEQ ID NO: 336460 - RNA, 22 nt, Human
aagacugucuuuucugagugac

SEQ ID NO: 336461 - RNA, 23 nt, Human
cuugcaggaagcagauggcacac

SEQ ID NO: 336462 - RNA, 22 nt, Human
cuuuccaaugcauuuccaaugu

SEQ ID NO: 336463 - RNA, 22 nt, Human
caaaguuuuaguaaacauauau

SEQ ID NO: 336464 - RNA, 22 nt, Human
auucaaguccagcuucucuaca

SEQ ID NO: 336465 - RNA, 22 nt, Human
gcaccugauugauuucacugcu

SEQ ID NO: 336466 - RNA, 22 nt, Human
gaucuucuagcagaaguaauuu

SEQ ID NO: 336467 - RNA, 22 nt, Human
aaguccaugaucaagauguggc

SEQ ID NO: 336468 - RNA, 22 nt, Human
ucugcaggcuuauaggaugggu

SEQ ID NO: 336469 - RNA, 22 nt, Human
uuugcauaaaggagcauuucuc

SEQ ID NO: 336470 - RNA, 22 nt, Human
ucauuucaaguucugacagcua

SEQ ID NO: 336471 - RNA, 21 nt, Human
uccaggaguucuaauaggugu

SEQ ID NO: 336472 - RNA, 22 nt, Human
ucaauaaaauuguuuuccuauc

SEQ ID NO: 336473 - RNA, 21 nt, Human
uggaggaauaaagcacagaag

SEQ ID NO: 336474 - RNA, 22 nt, Human
uuaaauauuauguugucugcaa

SEQ ID NO: 336475 - RNA, 22 nt, Human
gauaaugaugacaaugacaacc

SEQ ID NO: 336476 - RNA, 22 nt, Human
uuugaaguucccccauaucaga

SEQ ID NO: 336477 - RNA, 22 nt, Human
gagguggaaggcaggaacaaau

SEQ ID NO: 336478 - RNA, 22 nt, Human
uugcucagcacuggagccagcu

SEQ ID NO: 336479 - RNA, 22 nt, Human
gucaggaucaaauugaaguuau

SEQ ID NO: 336480 - RNA, 22 nt, Human
aggugagggugccagugcaugg

SEQ ID NO: 336481 - RNA, 21 nt, Human
acagcauguuuguguguuugc

SEQ ID NO: 336482 - RNA, 22 nt, Human
cagaagaggacuggguagcuca

SEQ ID NO: 336483 - RNA, 22 nt, Human
cucaggauucucgacacucaca

SEQ ID NO: 336484 - RNA, 21 nt, Human
uucuucaguuuaauauaaaau

SEQ ID NO: 336485 - RNA, 22 nt, Human
aauuuuaagcauaugacugguu

SEQ ID NO: 336486 - RNA, 22 nt, Human
guucuucaucauuaacacucug

SEQ ID NO: 336487 - RNA, 22 nt, Human
ccugcugugaccggggagcagg

SEQ ID NO: 336488 - RNA, 22 nt, Human
cauuguuaccaucuuuuaccua

SEQ ID NO: 336489 - RNA, 23 nt, Human
aucauucuccaaucuggagcagg

SEQ ID NO: 336490 - RNA, 22 nt, Human
uucuucagucccacuagccaca

SEQ ID NO: 336491 - RNA, 22 nt, Human
caggcagcuagauuuauaacaa

SEQ ID NO: 336492 - RNA, 22 nt, Human
uauuuccagcaguaagaagaca

SEQ ID NO: 336493 - RNA, 22 nt, Human
cugcuguguggauucaauggcu

SEQ ID NO: 336494 - RNA, 22 nt, Human
augauguugauaaauuacuuua

SEQ ID NO: 336495 - RNA, 22 nt, Human
cagcuuccauaagagauggaga

SEQ ID NO: 336496 - RNA, 22 nt, Human
cccaggagguagagguugcagu

SEQ ID NO: 336497 - RNA, 22 nt, Human
aagacaauuugauacuaguugc

SEQ ID NO: 336498 - RNA, 22 nt, Human
aaggcaguacuuuauguccaua

SEQ ID NO: 336499 - RNA, 22 nt, Human
caugcugugugguuagaacugu

SEQ ID NO: 336500 - RNA, 22 nt, Human
uuuccauguuggugaaaugagg

SEQ ID NO: 336501 - RNA, 18 nt, Human
ggcagggaaaagauaggg

SEQ ID NO: 336502 - RNA, 22 nt, Human
ugaggcagugcugggaagccug

SEQ ID NO: 336503 - RNA, 22 nt, Human
uggaguucauccaugacagcuu

SEQ ID NO: 336504 - RNA, 22 nt, Human
gcugcccacaaugauuacaugg

SEQ ID NO: 336505 - RNA, 22 nt, Human
uugcagcuucgagucuaucugu

SEQ ID NO: 336506 - RNA, 22 nt, Human
cuugcugugugguguucucaga

SEQ ID NO: 336507 - RNA, 22 nt, Human
gcuccuucaggugguagcuguu

SEQ ID NO: 336508 - RNA, 22 nt, Human
agaggggaaggaugugauguga

SEQ ID NO: 336509 - RNA, 22 nt, Human
cauucuuacacaauauuuuaau

SEQ ID NO: 336510 - RNA, 22 nt, Human
ucuucaucucagauuaacagga

SEQ ID NO: 336511 - RNA, 19 nt, Human
auacagauguauccaugau

SEQ ID NO: 336512 - RNA, 22 nt, Human
gaaggccacggaauggagcugg

SEQ ID NO: 336513 - RNA, 22 nt, Human
ugaaggaaugaguauacuguuu

SEQ ID NO: 336514 - RNA, 19 nt, Human
ggcagucucaagcagcaca

SEQ ID NO: 336515 - RNA, 22 nt, Human
aucaguuauuuuuaagcuauaa

SEQ ID NO: 336516 - RNA, 22 nt, Human
uagggaggaggguuuucaaauc

SEQ ID NO: 336517 - RNA, 22 nt, Human
cuacuucuaaguacauggugau

SEQ ID NO: 336518 - RNA, 22 nt, Human
caaauguaaauucuuuugaagc

SEQ ID NO: 336519 - RNA, 22 nt, Human
ucauuucaaugauacuacuaag

SEQ ID NO: 336520 - RNA, 22 nt, Human
ucuuugaauucaaacuguucaa

SEQ ID NO: 336521 - RNA, 22 nt, Human
agcccaggucucaaaguacagg

SEQ ID NO: 336522 - RNA, 21 nt, Human
uacagaaugcgcuucagucug

SEQ ID NO: 336523 - RNA, 20 nt, Human
ggaggguggaagaaagcaag

SEQ ID NO: 336524 - RNA, 22 nt, Human
agggaggucuuugaggggcuua

SEQ ID NO: 336525 - RNA, 22 nt, Human
ccuggagaccagaggauacuuc

SEQ ID NO: 336526 - RNA, 22 nt, Human
aggaugaauaacugaaauggug

SEQ ID NO: 336527 - RNA, 22 nt, Human
uugcauuuccuguacuguuuga

SEQ ID NO: 336528 - RNA, 22 nt, Human
gaggcaacacauuuggaaagca

SEQ ID NO: 336529 - RNA, 22 nt, Human
aggcaagcccccagugaggcuc

SEQ ID NO: 336530 - RNA, 22 nt, Human
ucuucuuccucauuuauacaua

SEQ ID NO: 336531 - RNA, 22 nt, Human
aguaugaagauuauaauuuuuc

SEQ ID NO: 336532 - RNA, 22 nt, Human
cuucugugauuugguuaggaua

SEQ ID NO: 336533 - RNA, 22 nt, Human
aucugcuuuugagaauuuacuu

SEQ ID NO: 336534 - RNA, 22 nt, Human
cugccaggcgauggauuggcug

SEQ ID NO: 336535 - RNA, 22 nt, Human
uugcuuuguuacugcaguuucc

SEQ ID NO: 336536 - RNA, 22 nt, Human
uggcuguguuaccacuucaugu

SEQ ID NO: 336537 - RNA, 22 nt, Human
cuagccaugggcauuaaaggua

SEQ ID NO: 336538 - RNA, 21 nt, Human
auugaaagucaacaaucaguu

SEQ ID NO: 336539 - RNA, 23 nt, Human
aggcagcagguuguccaggguga

SEQ ID NO: 336540 - RNA, 22 nt, Human
uucugucuguaaacuucucaau

SEQ ID NO: 336541 - RNA, 22 nt, Human
aauguaugggugagaaaguuga

SEQ ID NO: 336542 - RNA, 22 nt, Human
caucaucaaaacaaauggaguc

SEQ ID NO: 336543 - RNA, 22 nt, Human
ugaaggcccagccacagaaugg

SEQ ID NO: 336544 - RNA, 21 nt, Human
acagucuccccagaucucucc

SEQ ID NO: 336545 - RNA, 22 nt, Human
aggcaguuguugcugagcagcu

SEQ ID NO: 336546 - RNA, 22 nt, Human
auuuagacuucccagcacugug

SEQ ID NO: 336547 - RNA, 22 nt, Human
cuggcaaguacugggccagcuc

SEQ ID NO: 336548 - RNA, 22 nt, Human
aagcagaggguauggccagguu

SEQ ID NO: 336549 - RNA, 23 nt, Human
uugaaagguagcuggcagcuaga

SEQ ID NO: 336550 - RNA, 22 nt, Human
gcagggaagacccggagcagcg

SEQ ID NO: 336551 - RNA, 22 nt, Human
gaagcagcuuucuggugaggag

SEQ ID NO: 336552 - RNA, 22 nt, Human
caacugcugacaccaucacucc

SEQ ID NO: 336553 - RNA, 23 nt, Human
uccaggagaauuccagggcccgg

SEQ ID NO: 336554 - RNA, 22 nt, Human
gccaggagacuccauucauuug

SEQ ID NO: 336555 - RNA, 17 nt, Human
gaggagcuccaguaggu

SEQ ID NO: 336556 - RNA, 22 nt, Human
ugaccuuauuugaaaauagaga

SEQ ID NO: 336557 - RNA, 22 nt, Human
gggcagcugcagggauggugac

SEQ ID NO: 336558 - RNA, 22 nt, Human
acagauauaaacuauaguagug

SEQ ID NO: 336559 - RNA, 22 nt, Human
gggauggggagcuggaaagggg

SEQ ID NO: 336560 - RNA, 22 nt, Human
auucuucaucacuaccuuguga

SEQ ID NO: 336561 - RNA, 22 nt, Human
ugcuugugagaguuuuuucaga

SEQ ID NO: 336562 - RNA, 22 nt, Human
acuuuugguucuguaacuguga

SEQ ID NO: 336563 - RNA, 22 nt, Human
agcccagggacagggcggaugu

SEQ ID NO: 336564 - RNA, 22 nt, Human
cucagagaggcaguggaaguca

SEQ ID NO: 336565 - RNA, 22 nt, Human
ugccaggagucaggccaggcag

SEQ ID NO: 336566 - RNA, 22 nt, Human
agugcuuugaacgaaaggcuga

SEQ ID NO: 336567 - RNA, 22 nt, Human
uuucauugcagagucugugugc

SEQ ID NO: 336568 - RNA, 22 nt, Human
ucuucagauggccaguuguccc

SEQ ID NO: 336569 - RNA, 17 nt, Human
uugaacugcugagucag

SEQ ID NO: 336570 - RNA, 22 nt, Human
uggcagcuaucuuuaaugagau

SEQ ID NO: 336571 - RNA, 22 nt, Human
uaugaacauguucauugacuua

SEQ ID NO: 336572 - RNA, 22 nt, Human
caaugugguggcagaugucagu

SEQ ID NO: 336573 - RNA, 22 nt, Human
uucugucacuuuuuuggaaucu

SEQ ID NO: 336574 - RNA, 22 nt, Human
agaaaugaagagagucaagguu

SEQ ID NO: 336575 - RNA, 22 nt, Human
cagucucucugaaguauuaaga

SEQ ID NO: 336576 - RNA, 22 nt, Human
uugcagcuucuaccacuguuuc

SEQ ID NO: 336577 - RNA, 22 nt, Human
aauucuguaacuuuacugaauu

SEQ ID NO: 336578 - RNA, 22 nt, Human
ugcuucagaggaaaggcaaaag

SEQ ID NO: 336579 - RNA, 22 nt, Human
agaaaacuugucacagcucuca

SEQ ID NO: 336580 - RNA, 20 nt, Human
uucugucagauuauauggga

SEQ ID NO: 336581 - RNA, 23 nt, Human
ggagugcaauggcgccaucucgg

SEQ ID NO: 336582 - RNA, 22 nt, Human
ggcagcacugcagcuuguuggg

SEQ ID NO: 336583 - RNA, 22 nt, Human
gcuguguuuuauguuagguuaa

SEQ ID NO: 336584 - RNA, 22 nt, Human
uauuaaauuauggauuuaggag

SEQ ID NO: 336585 - RNA, 19 nt, Human
ugcugcuguccuugcaggg

SEQ ID NO: 336586 - RNA, 22 nt, Human
auuaguaaaacauuguauaugu

SEQ ID NO: 336587 - RNA, 22 nt, Human
aacauucaaaacccaguucagu

SEQ ID NO: 336588 - RNA, 22 nt, Human
uuuuuauaugaaggauagugcg

SEQ ID NO: 336589 - RNA, 22 nt, Human
agggcagcucucaccucuggcc

SEQ ID NO: 336590 - RNA, 22 nt, Human
ggaggaggggcgcuuugucuau

SEQ ID NO: 336591 - RNA, 22 nt, Human
ccuggacucaggcugugggcac

SEQ ID NO: 336592 - RNA, 22 nt, Human
uucaggauccccuugaugggcu

SEQ ID NO: 336593 - RNA, 22 nt, Human
ucuagaauuuugccauauagcu

SEQ ID NO: 336594 - RNA, 22 nt, Human
gucccauaaguagugcaacuug

SEQ ID NO: 336595 - RNA, 22 nt, Human
ucaugaacauggaauaucuuuu

SEQ ID NO: 336596 - RNA, 22 nt, Human
gaaucucaaggcuugugaggau

SEQ ID NO: 336597 - RNA, 22 nt, Human
ucauaaaucauacuccauuugc

SEQ ID NO: 336598 - RNA, 19 nt, Human
aggguggcaaaggagggug

SEQ ID NO: 336599 - RNA, 22 nt, Human
ggcagccuugagggaggccugg

SEQ ID NO: 336600 - RNA, 22 nt, Human
ucugucaaaaguuuucaauaaa

SEQ ID NO: 336601 - RNA, 20 nt, Human
aagagaggaaguuauacuag

SEQ ID NO: 336602 - RNA, 22 nt, Human
cugccaggcacgugcagcauca

SEQ ID NO: 336603 - RNA, 22 nt, Human
ucuacugugguccuuguaacca

SEQ ID NO: 336604 - RNA, 22 nt, Human
acugcuuacccggccugacuuc

SEQ ID NO: 336605 - RNA, 22 nt, Human
cugacccauauaagaguggagg

SEQ ID NO: 336606 - RNA, 22 nt, Human
aggcagcuggcagcacccaggg

SEQ ID NO: 336607 - RNA, 22 nt, Human
agaaaugaagcaggaguuauua

SEQ ID NO: 336608 - RNA, 22 nt, Human
ugcuguguggaugugaagaauc

SEQ ID NO: 336609 - RNA, 22 nt, Human
aaaauacuguggaguguugaaa

SEQ ID NO: 336610 - RNA, 22 nt, Human
augcuguguuuuaaauggaaau

SEQ ID NO: 336611 - RNA, 22 nt, Human
uauguaaaaauucaucaggcug

SEQ ID NO: 336612 - RNA, 23 nt, Human
ugugaaauuugaggucagugcuu

SEQ ID NO: 336613 - RNA, 22 nt, Human
aggagaaggaagugcaucacua

SEQ ID NO: 336614 - RNA, 22 nt, Human
agggcagcacaaggcauggacu

SEQ ID NO: 336615 - RNA, 22 nt, Human
gagugcagaugccagccccagu

SEQ ID NO: 336616 - RNA, 22 nt, Human
uaggcagcagugcuaugauucu

SEQ ID NO: 336617 - RNA, 21 nt, Human
uugaccaagggugcgugcucc

SEQ ID NO: 336618 - RNA, 22 nt, Human
agaccaagacuauaaugagagg

SEQ ID NO: 336619 - RNA, 22 nt, Human
uucuucuugaaacuuuagguug

SEQ ID NO: 336620 - RNA, 22 nt, Human
gagaggugaaggcugcccuggg

SEQ ID NO: 336621 - RNA, 22 nt, Human
gcugugcuugggaagaaucucu

SEQ ID NO: 336622 - RNA, 17 nt, Human
gccucugcuugugucau

SEQ ID NO: 336623 - RNA, 22 nt, Human
agcuggcaguaugacuggugac

SEQ ID NO: 336624 - RNA, 22 nt, Human
auuuucaaaacaucugcugugu

SEQ ID NO: 336625 - RNA, 22 nt, Human
uuguuugaggucacugauauuu

SEQ ID NO: 336626 - RNA, 22 nt, Human
acaauucugaugguuucccagu

SEQ ID NO: 336627 - RNA, 22 nt, Human
gacccaggguauccagagcugc

SEQ ID NO: 336628 - RNA, 22 nt, Human
ggcagaagauaggacagggaau

SEQ ID NO: 336629 - RNA, 22 nt, Human
ucaggagacuggcagugcccac

SEQ ID NO: 336630 - RNA, 22 nt, Human
aucacauuguuagcauagacug

SEQ ID NO: 336631 - RNA, 22 nt, Human
uaacacaugucugggaugugaa

SEQ ID NO: 336632 - RNA, 22 nt, Human
aggagaggcucuaacucugugu

SEQ ID NO: 336633 - RNA, 20 nt, Human
gggagucuggaugaaagaug

SEQ ID NO: 336634 - RNA, 19 nt, Human
ucaucucacagggccuggc

SEQ ID NO: 336635 - RNA, 22 nt, Human
gugaaacacccuccaaugcaca

SEQ ID NO: 336636 - RNA, 22 nt, Human
uuuugugagcccauaaaugcca

SEQ ID NO: 336637 - RNA, 22 nt, Human
ccagagagauugcuucuaaaga

SEQ ID NO: 336638 - RNA, 22 nt, Human
cauaauaucuccgauuacuugc

SEQ ID NO: 336639 - RNA, 22 nt, Human
auucuucacaaauauauagaag

SEQ ID NO: 336640 - RNA, 22 nt, Human
gcugcuguugauuuaguccaau

SEQ ID NO: 336641 - RNA, 22 nt, Human
uggcagcuguuaauguuuuguu

SEQ ID NO: 336642 - RNA, 22 nt, Human
ucugucaauauaugugcugcag

SEQ ID NO: 336643 - RNA, 22 nt, Human
agcagccuuugaucaucuggga

SEQ ID NO: 336644 - RNA, 22 nt, Human
aggccagaugucgggcuagaag

SEQ ID NO: 336645 - RNA, 22 nt, Human
agcugaugccauguggaacagu

SEQ ID NO: 336646 - RNA, 22 nt, Human
uagauuuuacuucugucauuac

SEQ ID NO: 336647 - RNA, 22 nt, Human
uagggaugagccaguggguagu

SEQ ID NO: 336648 - RNA, 22 nt, Human
agagagcauugaggaaaucuuc

SEQ ID NO: 336649 - RNA, 22 nt, Human
gccugcagauauauaggauggu

SEQ ID NO: 336650 - RNA, 22 nt, Human
ugaaaugauaucugauaacaaa

SEQ ID NO: 336651 - RNA, 22 nt, Human
aggaggggcauagaaauguaau

SEQ ID NO: 336652 - RNA, 22 nt, Human
cuuuggcagccucugcuauuga

SEQ ID NO: 336653 - RNA, 20 nt, Human
gcccaggaauuugcauuucu

SEQ ID NO: 336654 - RNA, 22 nt, Human
cuguaugaacccauauacuuau

SEQ ID NO: 336655 - RNA, 22 nt, Human
ugaggcaggagaaucacaugaa

SEQ ID NO: 336656 - RNA, 22 nt, Human
cauuugcagagggugacacucu

SEQ ID NO: 336657 - RNA, 22 nt, Human
cccaggagagaggccaguuggc

SEQ ID NO: 336658 - RNA, 22 nt, Human
cauuuccugucuggaggucaaa

SEQ ID NO: 336659 - RNA, 22 nt, Human
uguccucagauaugucuacucu

SEQ ID NO: 336660 - RNA, 22 nt, Human
cagugauggauauggagaaguc

SEQ ID NO: 336661 - RNA, 22 nt, Human
agggaagcuuguuacugagaag

SEQ ID NO: 336662 - RNA, 22 nt, Human
ucaguucugcuagaaaaacagu

SEQ ID NO: 336663 - RNA, 22 nt, Human
uccaggagcucauccacgucaa

SEQ ID NO: 336664 - RNA, 22 nt, Human
gaagcacauggcuauagcuauu

SEQ ID NO: 336665 - RNA, 22 nt, Human
agagggcaaguguaguccagua

SEQ ID NO: 336666 - RNA, 22 nt, Human
ugcauggacucaucagacaaga

SEQ ID NO: 336667 - RNA, 22 nt, Human
cuucuucacacuggucugaagc

SEQ ID NO: 336668 - RNA, 22 nt, Human
ugucugugaccucuuaggcaag

SEQ ID NO: 336669 - RNA, 22 nt, Human
guguuuuaagaaagaagcucag

SEQ ID NO: 336670 - RNA, 22 nt, Human
ucauuuugggguuugucaucuu

SEQ ID NO: 336671 - RNA, 22 nt, Human
uacagcauauacagaaugaaca

SEQ ID NO: 336672 - RNA, 22 nt, Human
gcuccucuauuccccacauuuu

SEQ ID NO: 336673 - RNA, 19 nt, Human
uucuccagccugaccugag

SEQ ID NO: 336674 - RNA, 22 nt, Human
cagucucuugcuucauuaguug

SEQ ID NO: 336675 - RNA, 22 nt, Human
cugagagugcucuuugauguca

SEQ ID NO: 336676 - RNA, 23 nt, Human
agaggggagcaucugcuggcuga

SEQ ID NO: 336677 - RNA, 22 nt, Human
gaggccagaagugccucgggcu

SEQ ID NO: 336678 - RNA, 22 nt, Human
cuuagcaugugguguccuugua

SEQ ID NO: 336679 - RNA, 22 nt, Human
aaggcagcucagcucauggcag

SEQ ID NO: 336680 - RNA, 22 nt, Human
cagaaggcuggcagauugagau

SEQ ID NO: 336681 - RNA, 22 nt, Human
uagcacaucuucuuggccugca

SEQ ID NO: 336682 - RNA, 22 nt, Human
caggcagaguuagagcaacugg

SEQ ID NO: 336683 - RNA, 22 nt, Human
cuugaaagaagggucuuuuaau

SEQ ID NO: 336684 - RNA, 22 nt, Human
cagcuucugucugauuagcaag

SEQ ID NO: 336685 - RNA, 22 nt, Human
uguuuucagucauauagcaggu

SEQ ID NO: 336686 - RNA, 22 nt, Human
uucugugaaucuuuuuucccac

SEQ ID NO: 336687 - RNA, 22 nt, Human
acaguacauaauccugagucug

SEQ ID NO: 336688 - RNA, 22 nt, Human
guuugcauuuauuagucuucug

SEQ ID NO: 336689 - RNA, 22 nt, Human
agcugcccuuuaugaugcugaa

SEQ ID NO: 336690 - RNA, 22 nt, Human
agacucaagacugcagaagacg

SEQ ID NO: 336691 - RNA, 22 nt, Human
aucauuuuuaagagacucuucu

SEQ ID NO: 336692 - RNA, 22 nt, Human
agaauccuguuuuacuucauca

SEQ ID NO: 336693 - RNA, 22 nt, Human
aggccagaaauuuggaguaugu

SEQ ID NO: 336694 - RNA, 22 nt, Human
ucuuugcaaaauacaacaaugg

SEQ ID NO: 336695 - RNA, 22 nt, Human
ucacaguaaaagcauggaagag

SEQ ID NO: 336696 - RNA, 21 nt, Human
gaacauuuggguuguuucuac

SEQ ID NO: 336697 - RNA, 22 nt, Human
ggcagcuucuuaauauggagac

SEQ ID NO: 336698 - RNA, 22 nt, Human
uuugacaucaauacccuagaau

SEQ ID NO: 336699 - RNA, 22 nt, Human
uggaaggaaagguagcagagaa

SEQ ID NO: 336700 - RNA, 22 nt, Human
ggugaagggccuuaggagacag

SEQ ID NO: 336701 - RNA, 23 nt, Human
ggcagcucucaucugaugacuga

SEQ ID NO: 336702 - RNA, 22 nt, Human
aggagggacaccaauauauguu

SEQ ID NO: 336703 - RNA, 22 nt, Human
ucccaggaucugagggcagaga

SEQ ID NO: 336704 - RNA, 23 nt, Human
cuugcagggcuggaggcuuagaa

SEQ ID NO: 336705 - RNA, 22 nt, Human
aaguuucaugauguaauuauug

SEQ ID NO: 336706 - RNA, 22 nt, Human
cacaaaugguuguagacauuaa

SEQ ID NO: 336707 - RNA, 22 nt, Human
uugacaauguccuuugaauuuc

SEQ ID NO: 336708 - RNA, 22 nt, Human
uuuggaauauuaaaaugucuca

SEQ ID NO: 336709 - RNA, 22 nt, Human
uucuucucagggucccacaugg

SEQ ID NO: 336710 - RNA, 23 nt, Human
auguuauuauuagcagucuugcc

SEQ ID NO: 336711 - RNA, 23 nt, Human
aggcgagcucuucuccagcacgu

SEQ ID NO: 336712 - RNA, 23 nt, Human
cugcuguuuucuguaccugaagc

SEQ ID NO: 336713 - RNA, 22 nt, Human
gcagagaacccagcagauuggc

SEQ ID NO: 336714 - RNA, 22 nt, Human
uuugaaagcaccauuugaguag

SEQ ID NO: 336715 - RNA, 22 nt, Human
agcugccccaugagaggcaggu

SEQ ID NO: 336716 - RNA, 22 nt, Human
cugcuguggaugcaggaccuca

SEQ ID NO: 336717 - RNA, 22 nt, Human
cucuucuugccugaugaggcag

SEQ ID NO: 336718 - RNA, 22 nt, Human
uuucaguuuuugcucgauguau

SEQ ID NO: 336719 - RNA, 22 nt, Human
agcccaggaaguugaggcuugc

SEQ ID NO: 336720 - RNA, 22 nt, Human
ucacauucucagcaucuauaca

SEQ ID NO: 336721 - RNA, 22 nt, Human
ucuucaaguuccaaagugcagg

SEQ ID NO: 336722 - RNA, 22 nt, Human
uaaggccagccagcaaaucugu

SEQ ID NO: 336723 - RNA, 22 nt, Human
ugguauaaaacuuuuuauugaa

SEQ ID NO: 336724 - RNA, 22 nt, Human
agaggaugauuuuaaggacacu

SEQ ID NO: 336725 - RNA, 22 nt, Human
uaacacauauuucaagaguagu

SEQ ID NO: 336726 - RNA, 22 nt, Human
aaugucugccagaacugaucau

SEQ ID NO: 336727 - RNA, 22 nt, Human
guggcagcggugugcaaggagg

SEQ ID NO: 336728 - RNA, 22 nt, Human
acuucacagauauuuauuuggu

SEQ ID NO: 336729 - RNA, 22 nt, Human
uuguaugaucaaaagaaaugua

SEQ ID NO: 336730 - RNA, 22 nt, Human
gacccaggagagaggguugcau

SEQ ID NO: 336731 - RNA, 21 nt, Human
ucacagacuggucagugaggc

SEQ ID NO: 336732 - RNA, 19 nt, Human
augucuggguaacagcugc

SEQ ID NO: 336733 - RNA, 22 nt, Human
ccaggagacaaagaugacugcu

SEQ ID NO: 336734 - RNA, 21 nt, Human
ucucugugucuuuaagcugga

SEQ ID NO: 336735 - RNA, 22 nt, Human
acagucuacuugagcuuguaua

SEQ ID NO: 336736 - RNA, 22 nt, Human
caggauggccccggggcugugc

SEQ ID NO: 336737 - RNA, 22 nt, Human
gcucaggaucccaggggugugc

SEQ ID NO: 336738 - RNA, 19 nt, Human
cauuuuaagcauccccagu

SEQ ID NO: 336739 - RNA, 22 nt, Human
uggcagucuggguuggcaguua

SEQ ID NO: 336740 - RNA, 22 nt, Human
gccucugcaauuacauugugcc

SEQ ID NO: 336741 - RNA, 22 nt, Human
uuccaugaaggagacugagaag

SEQ ID NO: 336742 - RNA, 22 nt, Human
cucaaauauaagcuaaaugugg

SEQ ID NO: 336743 - RNA, 22 nt, Human
auucuucaccugagucagucua

SEQ ID NO: 336744 - RNA, 22 nt, Human
ucagcugcucaaauuuauguca

SEQ ID NO: 336745 - RNA, 23 nt, Human
uccaugagaugugggcuucuagu

SEQ ID NO: 336746 - RNA, 22 nt, Human
gagggagggaaaguuuaacacu

SEQ ID NO: 336747 - RNA, 22 nt, Human
uauuugcaacauaaaacucuga

SEQ ID NO: 336748 - RNA, 22 nt, Human
gagggagggccaggucccaacc

SEQ ID NO: 336749 - RNA, 22 nt, Human
cagggagggacaauugucaccu

SEQ ID NO: 336750 - RNA, 22 nt, Human
aggcaccuugagagcaggagcu

SEQ ID NO: 336751 - RNA, 22 nt, Human
ccugcugugaagccaggccugu

SEQ ID NO: 336752 - RNA, 22 nt, Human
ugcauuuccagauuucuggagu

SEQ ID NO: 336753 - RNA, 22 nt, Human
ucuuugaugugguuaauuauga

SEQ ID NO: 336754 - RNA, 22 nt, Human
uucuugaaucacuuuagagaua

SEQ ID NO: 336755 - RNA, 22 nt, Human
gcagcugcuggagggaggcagg

SEQ ID NO: 336756 - RNA, 23 nt, Human
uuucacaaugagcauuacagaau

SEQ ID NO: 336757 - RNA, 22 nt, Human
uuuccucauuuaucugcuggga

SEQ ID NO: 336758 - RNA, 22 nt, Human
ugcauaaagugccauaguauua

SEQ ID NO: 336759 - RNA, 21 nt, Human
uuugaaagcuacaucuauagc

SEQ ID NO: 336760 - RNA, 22 nt, Human
ucugggaauuuauuggcacuuu

SEQ ID NO: 336761 - RNA, 22 nt, Human
cauucacaucuuguuccaucac

SEQ ID NO: 336762 - RNA, 22 nt, Human
ugagaauuuucaguuucacuuu

SEQ ID NO: 336763 - RNA, 22 nt, Human
aauacauauggaauuccauguu

SEQ ID NO: 336764 - RNA, 22 nt, Human
ggagaggagcuauugggggcuc

SEQ ID NO: 336765 - RNA, 22 nt, Human
ugaggcaggaggauugcaggau

SEQ ID NO: 336766 - RNA, 22 nt, Human
agugcuuuccuucuugugacau

SEQ ID NO: 336767 - RNA, 22 nt, Human
uugaacugguaguuggaaaucu

SEQ ID NO: 336768 - RNA, 20 nt, Human
uuucuugucggcuguugcug

SEQ ID NO: 336769 - RNA, 22 nt, Human
uuuucauuguuccucgagcauu

SEQ ID NO: 336770 - RNA, 22 nt, Human
cagcauuuucuuaauguaggug

SEQ ID NO: 336771 - RNA, 22 nt, Human
cccaggagacugagcuguaacc

SEQ ID NO: 336772 - RNA, 22 nt, Human
ugaggcagugauguuuaagcac

SEQ ID NO: 336773 - RNA, 22 nt, Human
uucacaauggcaaaccauuaaa

SEQ ID NO: 336774 - RNA, 22 nt, Human
cauuuacacuucuaaccacaag

SEQ ID NO: 336775 - RNA, 20 nt, Human
ucauuucuugggguuccaag

SEQ ID NO: 336776 - RNA, 22 nt, Human
aaaacuaaauacgcuuugccuc

SEQ ID NO: 336777 - RNA, 22 nt, Human
gaggucaggcuugcagcagggu

SEQ ID NO: 336778 - RNA, 22 nt, Human
uauuucuucgggauucaagcua

SEQ ID NO: 336779 - RNA, 22 nt, Human
acccaggaggcagagguugcag

SEQ ID NO: 336780 - RNA, 22 nt, Human
uuauuuacaacucuucucuucc

SEQ ID NO: 336781 - RNA, 22 nt, Human
aaagacuuggcuuaugauuugc

SEQ ID NO: 336782 - RNA, 17 nt, Human
agagagagcaugccacc

SEQ ID NO: 336783 - RNA, 22 nt, Human
auaugagaguaaaugccgaucu

SEQ ID NO: 336784 - RNA, 23 nt, Human
cugcugugaaacaugguuuuggu

SEQ ID NO: 336785 - RNA, 22 nt, Human
ugucccucugaggcuucccugg

SEQ ID NO: 336786 - RNA, 22 nt, Human
uuuucauuguuacuaugagcua

SEQ ID NO: 336787 - RNA, 22 nt, Human
aaaguuugagugauuugacaca

SEQ ID NO: 336788 - RNA, 22 nt, Human
ccucaggaaccacauugcugcu

SEQ ID NO: 336789 - RNA, 22 nt, Human
uuccugagggacuuuugagauu

SEQ ID NO: 336790 - RNA, 22 nt, Human
ugucucugggugauucaguccu

SEQ ID NO: 336791 - RNA, 22 nt, Human
gauguguuuccaggauuuguuu

SEQ ID NO: 336792 - RNA, 22 nt, Human
acaaucauuccguucacaacag

SEQ ID NO: 336793 - RNA, 17 nt, Human
aaucuguuuacagucag

SEQ ID NO: 336794 - RNA, 22 nt, Human
agcuagaauauugaucugaaau

SEQ ID NO: 336795 - RNA, 22 nt, Human
gagccaaggguugccauggaga

SEQ ID NO: 336796 - RNA, 22 nt, Human
uuuuuauaacucuuuugugaca

SEQ ID NO: 336797 - RNA, 22 nt, Human
cagaguggcacucugcuggaug

SEQ ID NO: 336798 - RNA, 22 nt, Human
aauaacuucaguucuuacauua

SEQ ID NO: 336799 - RNA, 22 nt, Human
gcucucuugguggcuguccugg

SEQ ID NO: 336800 - RNA, 22 nt, Human
gcccaggaguugguggcugcag

SEQ ID NO: 336801 - RNA, 22 nt, Human
caggcaggucagugaagaagga

SEQ ID NO: 336802 - RNA, 21 nt, Human
uaaggccaagucuauuucugu

SEQ ID NO: 336803 - RNA, 22 nt, Human
auuguauaacagcauguauuuu

SEQ ID NO: 336804 - RNA, 22 nt, Human
uuucauaaccucaagcuacagu

SEQ ID NO: 336805 - RNA, 22 nt, Human
uucucagagcacugcugacaaa

SEQ ID NO: 336806 - RNA, 22 nt, Human
cauucacaaagcugauugaugg

SEQ ID NO: 336807 - RNA, 22 nt, Human
uuagaacugaagaagauuaagg

SEQ ID NO: 336808 - RNA, 17 nt, Human
ggcagcugugugcaugc

SEQ ID NO: 336809 - RNA, 22 nt, Human
uugaaagucacaauggcauuaa

SEQ ID NO: 336810 - RNA, 22 nt, Human
uaucuguuggcuccuaguugua

SEQ ID NO: 336811 - RNA, 22 nt, Human
uggcagcucuguucaacaugag

SEQ ID NO: 336812 - RNA, 22 nt, Human
uagaacauaagucauucauuug

SEQ ID NO: 336813 - RNA, 19 nt, Human
ucccaggaagcaaauguca

SEQ ID NO: 336814 - RNA, 20 nt, Human
cuguggaauuuuaccaugcg

SEQ ID NO: 336815 - RNA, 22 nt, Human
uucuuugaguuaguacagucca

SEQ ID NO: 336816 - RNA, 22 nt, Human
gccaggagaaugcuagcagagg

SEQ ID NO: 336817 - RNA, 22 nt, Human
gaggcagagaccuucaggaccu

SEQ ID NO: 336818 - RNA, 22 nt, Human
gucaggaugacaagugcuuuca

SEQ ID NO: 336819 - RNA, 22 nt, Human
uuguauuucuccacuuucuguu

SEQ ID NO: 336820 - RNA, 22 nt, Human
aggcagcuggaggcagagacua

SEQ ID NO: 336821 - RNA, 22 nt, Human
ggcuuggaaaugguaaugagcu

SEQ ID NO: 336822 - RNA, 22 nt, Human
ggcaggcaaugaggaugggaag

SEQ ID NO: 336823 - RNA, 22 nt, Human
ugaaaugagcauuuauucuuua

SEQ ID NO: 336824 - RNA, 22 nt, Human
ggauguugauugaauggccauu

SEQ ID NO: 336825 - RNA, 22 nt, Human
uauuucuaagagauaucuguac

SEQ ID NO: 336826 - RNA, 21 nt, Human
augugaaaccuuccacgcuga

SEQ ID NO: 336827 - RNA, 22 nt, Human
ggcagcuggggcagugcccugu

SEQ ID NO: 336828 - RNA, 22 nt, Human
aggcagcuuuguaguaaagcua

SEQ ID NO: 336829 - RNA, 21 nt, Human
gauuugcagaaacuagacagg

SEQ ID NO: 336830 - RNA, 23 nt, Human
ugaguucucaucuuggcuucuau

SEQ ID NO: 336831 - RNA, 22 nt, Human
uuucauuuugguuaugccauaa

SEQ ID NO: 336832 - RNA, 22 nt, Human
ugaugaaacugagguuccaaga

SEQ ID NO: 336833 - RNA, 22 nt, Human
aaggcagcagaggaaaggugcu

SEQ ID NO: 336834 - RNA, 22 nt, Human
augcuguggggagugaggguag

SEQ ID NO: 336835 - RNA, 22 nt, Human
agcugcccagcuaggaagaagg

SEQ ID NO: 336836 - RNA, 22 nt, Human
uccaggaggguuuucugccuuc

SEQ ID NO: 336837 - RNA, 22 nt, Human
agcccaggcagagggaugcuug

SEQ ID NO: 336838 - RNA, 17 nt, Human
ucauuuguugugacuag

SEQ ID NO: 336839 - RNA, 22 nt, Human
aaggcagccgugugacugcaug

SEQ ID NO: 336840 - RNA, 22 nt, Human
gcagaggacagggauuuagauu

SEQ ID NO: 336841 - RNA, 22 nt, Human
gacagaggcuggagcaccuccu

SEQ ID NO: 336842 - RNA, 17 nt, Human
uucaaagcuuaucaagg

SEQ ID NO: 336843 - RNA, 22 nt, Human
uuuuuaguagagguggguuuca

SEQ ID NO: 336844 - RNA, 22 nt, Human
aggcagcuggacauaacuaacc

SEQ ID NO: 336845 - RNA, 22 nt, Human
uaaaugaagaaauggagauugu

SEQ ID NO: 336846 - RNA, 22 nt, Human
uucauguguauggaacauuuuu

SEQ ID NO: 336847 - RNA, 22 nt, Human
accaggaggccuugguucugag

SEQ ID NO: 336848 - RNA, 22 nt, Human
uagcuagaaugcuucgugauau

SEQ ID NO: 336849 - RNA, 21 nt, Human
aggucagcccagcucuggaag

SEQ ID NO: 336850 - RNA, 22 nt, Human
gagaggaguuacuauuuccgag

SEQ ID NO: 336851 - RNA, 22 nt, Human
acauacuuaugcuaaaaauaua

SEQ ID NO: 336852 - RNA, 22 nt, Human
agcugccgaugcccagcugcau

SEQ ID NO: 336853 - RNA, 22 nt, Human
gaaauauugggacucagagcuu

SEQ ID NO: 336854 - RNA, 22 nt, Human
uuagcauuucaguacacauguu

SEQ ID NO: 336855 - RNA, 22 nt, Human
gcuguguuugacaguagcagac

SEQ ID NO: 336856 - RNA, 22 nt, Human
uuuucaguaaugucuacauaau

SEQ ID NO: 336857 - RNA, 22 nt, Human
acuucuucuucagcugggggau

SEQ ID NO: 336858 - RNA, 22 nt, Human
uacuuuuagccuauuugauucu

SEQ ID NO: 336859 - RNA, 19 nt, Human
gaggagcuaucggagacag

SEQ ID NO: 336860 - RNA, 22 nt, Human
aucuuucuccauauacaucuuu

SEQ ID NO: 336861 - RNA, 22 nt, Human
auguuagaaucucugaaugugg

SEQ ID NO: 336862 - RNA, 22 nt, Human
ugaaaugaaugugauucgauag

SEQ ID NO: 336863 - RNA, 22 nt, Human
ugcauauuguccuugauauuau

SEQ ID NO: 336864 - RNA, 22 nt, Human
uauucacaguugauuuacaguu

SEQ ID NO: 336865 - RNA, 22 nt, Human
gcaggaagcauagaagaaugcc

SEQ ID NO: 336866 - RNA, 22 nt, Human
ucugggaacugagcuccccuag

SEQ ID NO: 336867 - RNA, 22 nt, Human
ucugggaagcugcgugccuguu

SEQ ID NO: 336868 - RNA, 22 nt, Human
gaggaaccaaaucagcuugcac

SEQ ID NO: 336869 - RNA, 22 nt, Human
gugcuaaaggguuaugaacaag

SEQ ID NO: 336870 - RNA, 22 nt, Human
ucagccucucugaguccagacc

SEQ ID NO: 336871 - RNA, 22 nt, Human
uggcaguccccugugccuggaa

SEQ ID NO: 336872 - RNA, 22 nt, Human
uucagcaagaccaccauguacc

SEQ ID NO: 336873 - RNA, 22 nt, Human
uggagagguuuaaacaaaaguu

SEQ ID NO: 336874 - RNA, 22 nt, Human
aagcaccucuaugauugcuuuu

SEQ ID NO: 336875 - RNA, 20 nt, Human
agauuauuccuaagauuucu

SEQ ID NO: 336876 - RNA, 23 nt, Human
auguaucucauccaaggaagcuc

SEQ ID NO: 336877 - RNA, 22 nt, Human
agucugucugucacuucugcag

SEQ ID NO: 336878 - RNA, 23 nt, Human
cccaggagccugaguccucucug

SEQ ID NO: 336879 - RNA, 22 nt, Human
cuguguuugaugagaagccacc

SEQ ID NO: 336880 - RNA, 18 nt, Human
ugaggcagucagugaugg

SEQ ID NO: 336881 - RNA, 22 nt, Human
agguaggggguuugggaacugc

SEQ ID NO: 336882 - RNA, 22 nt, Human
gauuucuugauaauucaaaucc

SEQ ID NO: 336883 - RNA, 22 nt, Human
aguucacauaucuguuuuauuu

SEQ ID NO: 336884 - RNA, 22 nt, Human
cugguacaaaaugcugauauca

SEQ ID NO: 336885 - RNA, 22 nt, Human
uacaguaagaugaaauagcaau

SEQ ID NO: 336886 - RNA, 22 nt, Human
acuuggcaaguaucuauaaagu

SEQ ID NO: 336887 - RNA, 22 nt, Human
augugaaauagcuggauaugaa

SEQ ID NO: 336888 - RNA, 22 nt, Human
uggcagcuggagggcaauggcc

SEQ ID NO: 336889 - RNA, 22 nt, Human
cauagagugauguaagguaugu

SEQ ID NO: 336890 - RNA, 22 nt, Human
gaauagcuuccuuuuuuccaaa

SEQ ID NO: 336891 - RNA, 20 nt, Human
ucaggaugugcugagugaag

SEQ ID NO: 336892 - RNA, 22 nt, Human
auugaaagauuuugggcucaug

SEQ ID NO: 336893 - RNA, 22 nt, Human
acauauauuacuaguaaagaca

SEQ ID NO: 336894 - RNA, 22 nt, Human
gaggcagcagggcugguuccuu

SEQ ID NO: 336895 - RNA, 22 nt, Human
aggaagcugccugggaugggaa

SEQ ID NO: 336896 - RNA, 22 nt, Human
uuccaugaaauguguuaugcuu

SEQ ID NO: 336897 - RNA, 22 nt, Human
aauuuguuaaaagugagugaca

SEQ ID NO: 336898 - RNA, 21 nt, Human
agccuguugguuuacugcuca

SEQ ID NO: 336899 - RNA, 22 nt, Human
aucaggaugcugucaguuacca

SEQ ID NO: 336900 - RNA, 22 nt, Human
aucaggauagugguuaccuggg

SEQ ID NO: 336901 - RNA, 22 nt, Human
cugggaaauggcuucgagcuca

SEQ ID NO: 336902 - RNA, 22 nt, Human
uuaagauagaacccaguagucu

SEQ ID NO: 336903 - RNA, 22 nt, Human
augaaacacacacgcgcauacu

SEQ ID NO: 336904 - RNA, 22 nt, Human
cuuuuccacugagccucacaaa

SEQ ID NO: 336905 - RNA, 22 nt, Human
caguucuuauuuggccaguguc

SEQ ID NO: 336906 - RNA, 22 nt, Human
cacugagcugauagaauuccag

SEQ ID NO: 336907 - RNA, 22 nt, Human
ggaggaggggugacugaaugcu

SEQ ID NO: 336908 - RNA, 22 nt, Human
cagggaggcugucuuaugccug

SEQ ID NO: 336909 - RNA, 22 nt, Human
gcagaggccuagguggaaggcc

SEQ ID NO: 336910 - RNA, 22 nt, Human
gaggguggguuucuugcacguc

SEQ ID NO: 336911 - RNA, 22 nt, Human
ucuuuguaaaugccuagcauaa

SEQ ID NO: 336912 - RNA, 22 nt, Human
ucuuuggaucccaacuggcugg

SEQ ID NO: 336913 - RNA, 22 nt, Human
guucuucaggcugugcucuaga

SEQ ID NO: 336914 - RNA, 22 nt, Human
gaaggaggcguuagcccuagga

SEQ ID NO: 336915 - RNA, 22 nt, Human
augaguucaauuguuucaguca

SEQ ID NO: 336916 - RNA, 22 nt, Human
gggcagcuguaucugagcuuau

SEQ ID NO: 336917 - RNA, 22 nt, Human
ucuuugcaggccaaauuguuaa

SEQ ID NO: 336918 - RNA, 22 nt, Human
uucauuaguucugaagaugucu

SEQ ID NO: 336919 - RNA, 21 nt, Human
uuccagagauuguuucaccug

SEQ ID NO: 336920 - RNA, 21 nt, Human
uaugaacaugaccaauagucc

SEQ ID NO: 336921 - RNA, 22 nt, Human
auaagcauguuagaauauuuga

SEQ ID NO: 336922 - RNA, 22 nt, Human
auucuucacuguuucagaauga

SEQ ID NO: 336923 - RNA, 22 nt, Human
uucuucaacaaggacacuguua

SEQ ID NO: 336924 - RNA, 22 nt, Human
gcucaggagcucuugguggcgc

SEQ ID NO: 336925 - RNA, 22 nt, Human
cuucccagaccuuagagugcag

SEQ ID NO: 336926 - RNA, 22 nt, Human
uucuucucggcugucagauagu

SEQ ID NO: 336927 - RNA, 22 nt, Human
uuuuacuuaauucuuggucaug

SEQ ID NO: 336928 - RNA, 22 nt, Human
acauuuaaauaccuauguuucu

SEQ ID NO: 336929 - RNA, 20 nt, Human
aggcagcugggaaaugaggg

SEQ ID NO: 336930 - RNA, 22 nt, Human
uagcacaucuggcgcuuauagg

SEQ ID NO: 336931 - RNA, 22 nt, Human
gcagcuaccacccaggaaggac

SEQ ID NO: 336932 - RNA, 22 nt, Human
cccaggaguuagagguuguggu

SEQ ID NO: 336933 - RNA, 23 nt, Human
aguaaagcaauuguuggcgagag

SEQ ID NO: 336934 - RNA, 17 nt, Human
aaggccauuuccaccca

SEQ ID NO: 336935 - RNA, 22 nt, Human
uggagcugggguuugaaucugg

SEQ ID NO: 336936 - RNA, 22 nt, Human
ggggcagcucccgagggcagga

SEQ ID NO: 336937 - RNA, 22 nt, Human
agucucugucguagaucagcgu

SEQ ID NO: 336938 - RNA, 22 nt, Human
aaguauuucguucugaaaaagu

SEQ ID NO: 336939 - RNA, 22 nt, Human
aucugccugcaguggagguggg

SEQ ID NO: 336940 - RNA, 22 nt, Human
ucucaagaucucaagauggccc

SEQ ID NO: 336941 - RNA, 20 nt, Human
ccucaguguccuggacuggg

SEQ ID NO: 336942 - RNA, 19 nt, Human
uugaaagauuagcuuucua

SEQ ID NO: 336943 - RNA, 22 nt, Human
accaggagccauagagucaggc

SEQ ID NO: 336944 - RNA, 22 nt, Human
uuauuauuggugaguuaaggaa

SEQ ID NO: 336945 - RNA, 22 nt, Human
uagaagcaguaauagaaauagg

SEQ ID NO: 336946 - RNA, 22 nt, Human
gugcuuuuaaaggcaauuagua

SEQ ID NO: 336947 - RNA, 22 nt, Human
cucacugugccuuuucccaaac

SEQ ID NO: 336948 - RNA, 22 nt, Human
gagggagucugugcaaagaauu

SEQ ID NO: 336949 - RNA, 22 nt, Human
aaucauaauuguauacauucau

SEQ ID NO: 336950 - RNA, 22 nt, Human
ucucaggaucuaauacauggua

SEQ ID NO: 336951 - RNA, 22 nt, Human
gaaggccacaaaaaaugucaua

SEQ ID NO: 336952 - RNA, 22 nt, Human
ccacaucucgguccccucuuug

SEQ ID NO: 336953 - RNA, 22 nt, Human
aaaaacugcaauuacuuuuguc

SEQ ID NO: 336954 - RNA, 18 nt, Human
gagucuuuguuacugcug

SEQ ID NO: 336955 - RNA, 22 nt, Human
aguaugaauugcuuugccugua

SEQ ID NO: 336956 - RNA, 22 nt, Human
cucacuguuuaauagcuggauc

SEQ ID NO: 336957 - RNA, 22 nt, Human
cagcuggccccacaguagaggc

SEQ ID NO: 336958 - RNA, 22 nt, Human
aggcagaucacuugaggccagg

SEQ ID NO: 336959 - RNA, 22 nt, Human
uggcagcuauggucuaagggcc

SEQ ID NO: 336960 - RNA, 22 nt, Human
gggcagcuggauaguuuuaaau

SEQ ID NO: 336961 - RNA, 22 nt, Human
aucaggauguuuggcugucaua

SEQ ID NO: 336962 - RNA, 22 nt, Human
uucaggaugaaagugugcaaca

SEQ ID NO: 336963 - RNA, 22 nt, Human
agucuuuccugcuugacuguuc

SEQ ID NO: 336964 - RNA, 22 nt, Human
ugaggcagguggauuacaaggu

SEQ ID NO: 336965 - RNA, 22 nt, Human
auagcuguuagauuggggucga

SEQ ID NO: 336966 - RNA, 22 nt, Human
augaggcauuccacucaaacuc

SEQ ID NO: 336967 - RNA, 22 nt, Human
gagagucuaggaaccucauaua

SEQ ID NO: 336968 - RNA, 22 nt, Human
aagauuauggcagauaacaauu

SEQ ID NO: 336969 - RNA, 19 nt, Human
uuugcagugguuccuuugu

SEQ ID NO: 336970 - RNA, 22 nt, Human
cauuuccagcuccugcaucaug

SEQ ID NO: 336971 - RNA, 22 nt, Human
augcuguguggccaccuccaug

SEQ ID NO: 336972 - RNA, 22 nt, Human
gcuguucucuguaacaugcauu

SEQ ID NO: 336973 - RNA, 22 nt, Human
cauggagauaaacugaaauauu

SEQ ID NO: 336974 - RNA, 22 nt, Human
cccaggaaaagcagugccagca

SEQ ID NO: 336975 - RNA, 22 nt, Human
cggcagcugauugcagagcacc

SEQ ID NO: 336976 - RNA, 22 nt, Human
caggcagcucugcuuuuccuaa

SEQ ID NO: 336977 - RNA, 22 nt, Human
cagaaggcuuuguggaguagac

SEQ ID NO: 336978 - RNA, 18 nt, Human
gaggcagcuagcaauuuu

SEQ ID NO: 336979 - RNA, 22 nt, Human
augugaaaauccaauggcagca

SEQ ID NO: 336980 - RNA, 19 nt, Human
uuugaaaggauuguuauuu

SEQ ID NO: 336981 - RNA, 22 nt, Human
guuaugaaauaaauauagauca

SEQ ID NO: 336982 - RNA, 22 nt, Human
cgaggcaggcaggcggaggaua

SEQ ID NO: 336983 - RNA, 22 nt, Human
uucauucuugggaucagagagu

SEQ ID NO: 336984 - RNA, 22 nt, Human
auguaugaagcuuuguuuggga

SEQ ID NO: 336985 - RNA, 22 nt, Human
aaggccagacaggaccacaucu

SEQ ID NO: 336986 - RNA, 22 nt, Human
uaauuauucuagucacauagca

SEQ ID NO: 336987 - RNA, 22 nt, Human
uccaugagggacacuggaugcu

SEQ ID NO: 336988 - RNA, 22 nt, Human
uacaaagucacauugaaaugaa

SEQ ID NO: 336989 - RNA, 22 nt, Human
uacucagagucauugcccuucu

SEQ ID NO: 336990 - RNA, 22 nt, Human
auguagaagugggcauuauaga

SEQ ID NO: 336991 - RNA, 22 nt, Human
caaaugauacuguuuuuagucu

SEQ ID NO: 336992 - RNA, 22 nt, Human
uggaaauacuugccauaaaacu

SEQ ID NO: 336993 - RNA, 22 nt, Human
gauuuuauuagcccaaacuuug

SEQ ID NO: 336994 - RNA, 21 nt, Human
uuagaaagcucacuacaguua

SEQ ID NO: 336995 - RNA, 22 nt, Human
aggcaccuugcgguccagugaa

SEQ ID NO: 336996 - RNA, 22 nt, Human
auuacucugucugccucugacc

SEQ ID NO: 336997 - RNA, 22 nt, Human
aaaccgcaauuacuuuugcguc

SEQ ID NO: 336998 - RNA, 22 nt, Human
cucuggcuucuaccuugcaguu

SEQ ID NO: 336999 - RNA, 23 nt, Human
ucguugaauagcaauagcacaac

SEQ ID NO: 337000 - RNA, 22 nt, Human
cagagggcacaugguuuccuca

SEQ ID NO: 337001 - RNA, 22 nt, Human
ugcaggaaauuccaggguggcc

SEQ ID NO: 337002 - RNA, 22 nt, Human
uggaaauggaucugaugagucu

SEQ ID NO: 337003 - RNA, 22 nt, Human
gagcagcucugugccuggagac

SEQ ID NO: 337004 - RNA, 22 nt, Human
uccugagagcagcugcuuugga

SEQ ID NO: 337005 - RNA, 22 nt, Human
augcugucgaaaccaaacaucu

SEQ ID NO: 337006 - RNA, 18 nt, Human
acacugcagcagucugcu

SEQ ID NO: 337007 - RNA, 22 nt, Human
cucuccucugaaguggugaccc

SEQ ID NO: 337008 - RNA, 22 nt, Human
cuuucauucuuagauauuagug

SEQ ID NO: 337009 - RNA, 22 nt, Human
gggcagcucuggcugugggaag

SEQ ID NO: 337010 - RNA, 22 nt, Human
uguguaaagcuuguuccagaaa

SEQ ID NO: 337011 - RNA, 22 nt, Human
uuagaaagaacuuuagauauca

SEQ ID NO: 337012 - RNA, 22 nt, Human
agaaaugacaagacugaucagg

SEQ ID NO: 337013 - RNA, 21 nt, Human
gauuuuaaagagacugccaca

SEQ ID NO: 337014 - RNA, 23 nt, Human
acacauuuuucccguucugaggu

SEQ ID NO: 337015 - RNA, 22 nt, Human
caggcagcucaaccuugggagc

SEQ ID NO: 337016 - RNA, 22 nt, Human
ccucacugaagaggugacauuu

SEQ ID NO: 337017 - RNA, 22 nt, Human
acacuaaugagaaaggaauuaa

SEQ ID NO: 337018 - RNA, 22 nt, Human
aaaggaagaugccaggacucug

SEQ ID NO: 337019 - RNA, 22 nt, Human
auguuagaaggaauguuaaaag

SEQ ID NO: 337020 - RNA, 22 nt, Human
cccaggagagaggggauaaagc

SEQ ID NO: 337021 - RNA, 22 nt, Human
uucaucaauguguuuaauaaug

SEQ ID NO: 337022 - RNA, 22 nt, Human
uguaaaaccaaaucaaucuagu

SEQ ID NO: 337023 - RNA, 22 nt, Human
ccugcuguaaugugucuuuauu

SEQ ID NO: 337024 - RNA, 22 nt, Human
agaauaugaucggaauacagau

SEQ ID NO: 337025 - RNA, 22 nt, Human
cagagccauuauggagacuugc

SEQ ID NO: 337026 - RNA, 22 nt, Human
ggggggugcugaucaguggagc

SEQ ID NO: 337027 - RNA, 22 nt, Human
uauaauuuaucaugucacaguu

SEQ ID NO: 337028 - RNA, 22 nt, Human
aucauucuaguccuuauggucu

SEQ ID NO: 337029 - RNA, 22 nt, Human
acccaggacaugggcacccgug

SEQ ID NO: 337030 - RNA, 22 nt, Human
ucaggauaaaauguaauggcaa

SEQ ID NO: 337031 - RNA, 22 nt, Human
gaugccuccaaaugagggcaga

SEQ ID NO: 337032 - RNA, 22 nt, Human
uuuagacauggcuugcucacuu

SEQ ID NO: 337033 - RNA, 22 nt, Human
gcccaggaguugaagggcugac

SEQ ID NO: 337034 - RNA, 22 nt, Human
cauuuguaucauauguaucuua

SEQ ID NO: 337035 - RNA, 22 nt, Human
aggggcucaaagugugcaggga

SEQ ID NO: 337036 - RNA, 19 nt, Human
cauuuagaaguacauauua

SEQ ID NO: 337037 - RNA, 22 nt, Human
uuugaaauuaagauauugucca

SEQ ID NO: 337038 - RNA, 22 nt, Human
cccaggagaauauuuuuggguc

SEQ ID NO: 337039 - RNA, 22 nt, Human
cccuggaggcuggaggcaguag

SEQ ID NO: 337040 - RNA, 22 nt, Human
uugaauaguguuuucaguauac

SEQ ID NO: 337041 - RNA, 22 nt, Human
gaggacagagccgccuggcaag

SEQ ID NO: 337042 - RNA, 20 nt, Human
augugaaagaucaguugucu

SEQ ID NO: 337043 - RNA, 22 nt, Human
gauuuuaauuauaggagguccu

SEQ ID NO: 337044 - RNA, 22 nt, Human
acugcuuuaucugagaaguccu

SEQ ID NO: 337045 - RNA, 22 nt, Human
caggagaggaggcuacuucuua

SEQ ID NO: 337046 - RNA, 21 nt, Human
ucuagaauccuguauaagacu

SEQ ID NO: 337047 - RNA, 20 nt, Human
cagaggcaaggagacuugga

SEQ ID NO: 337048 - RNA, 22 nt, Human
uucauucuugucuuuguauagu

SEQ ID NO: 337049 - RNA, 22 nt, Human
uucuucaaauagcagggaguca

SEQ ID NO: 337050 - RNA, 22 nt, Human
cuucugcaauaaguuuuggucc

SEQ ID NO: 337051 - RNA, 22 nt, Human
guugaaagagcauggacuugaa

SEQ ID NO: 337052 - RNA, 22 nt, Human
uucauucugggcucuaaggaac

SEQ ID NO: 337053 - RNA, 22 nt, Human
gaccauuugcuaguaaauugca

SEQ ID NO: 337054 - RNA, 22 nt, Human
ggaccuggcaauuugcaucucu

SEQ ID NO: 337055 - RNA, 22 nt, Human
ggcagcuuucaauaggguuaug

SEQ ID NO: 337056 - RNA, 20 nt, Human
ugaaggccauuuguuccaga

SEQ ID NO: 337057 - RNA, 22 nt, Human
aauguaugugauuauuccucua

SEQ ID NO: 337058 - RNA, 22 nt, Human
aggacaggauugagcugaacug

SEQ ID NO: 337059 - RNA, 22 nt, Human
cuccccagguucaggagguggg

SEQ ID NO: 337060 - RNA, 22 nt, Human
cccaggugcugcgugaagccuc

SEQ ID NO: 337061 - RNA, 22 nt, Human
uugcagcugcaguaaauguuca

SEQ ID NO: 337062 - RNA, 20 nt, Human
gcucccagccugcagucccc

SEQ ID NO: 337063 - RNA, 22 nt, Human
agauggagaaugacaauuaagg

SEQ ID NO: 337064 - RNA, 21 nt, Human
agcagaggggacauguuugau

SEQ ID NO: 337065 - RNA, 22 nt, Human
augucaaaucaguuuuaucaga

SEQ ID NO: 337066 - RNA, 22 nt, Human
gcucccagcaauugaggcagcc

SEQ ID NO: 337067 - RNA, 22 nt, Human
auccaugaucaauuuauuacua

SEQ ID NO: 337068 - RNA, 22 nt, Human
gugauuuugagaccuauauagu

SEQ ID NO: 337069 - RNA, 22 nt, Human
ugcaggaaucagaggggaagcg

SEQ ID NO: 337070 - RNA, 22 nt, Human
uaaaaugaucucucauguucuu

SEQ ID NO: 337071 - RNA, 22 nt, Human
guucucucugcuuccaagaugg

SEQ ID NO: 337072 - RNA, 22 nt, Human
gaucauuuugaugcccuuuuag

SEQ ID NO: 337073 - RNA, 22 nt, Human
caggggaguuuuaugcaacaga

SEQ ID NO: 337074 - RNA, 22 nt, Human
aggaagcuccaugaaggcagag

SEQ ID NO: 337075 - RNA, 22 nt, Human
uguucuucuagauugccuuuua

SEQ ID NO: 337076 - RNA, 22 nt, Human
acccaggagccgugagagguua

SEQ ID NO: 337077 - RNA, 22 nt, Human
uauuauuaaauggcagaauuuu

SEQ ID NO: 337078 - RNA, 22 nt, Human
ugaggcaggagguugagaacug

SEQ ID NO: 337079 - RNA, 22 nt, Human
ggcaggcugggugucauggagu

SEQ ID NO: 337080 - RNA, 22 nt, Human
gucaaaaaguagucauuucugu

SEQ ID NO: 337081 - RNA, 22 nt, Human
ucuuugcaaauguuauuaucuu

SEQ ID NO: 337082 - RNA, 22 nt, Human
cccauugugguuguugaggaua

SEQ ID NO: 337083 - RNA, 17 nt, Human
ugaaggccaugaccacg

SEQ ID NO: 337084 - RNA, 22 nt, Human
uuuaaaauuuagaccucuccac

SEQ ID NO: 337085 - RNA, 22 nt, Human
caaggccacugcucagguuucc

SEQ ID NO: 337086 - RNA, 22 nt, Human
gguauaaaugaucagaucgcug

SEQ ID NO: 337087 - RNA, 21 nt, Human
auggagggaccagggaagcag

SEQ ID NO: 337088 - RNA, 22 nt, Human
gcucccagacugaccagaggug

SEQ ID NO: 337089 - RNA, 20 nt, Human
agcuucuucugucuaauuuu

SEQ ID NO: 337090 - RNA, 22 nt, Human
cccaggagauggagguugcagu

SEQ ID NO: 337091 - RNA, 21 nt, Human
agggagcuggccacacagccu

SEQ ID NO: 337092 - RNA, 22 nt, Human
ggagaggggcaaguuuaucuag

SEQ ID NO: 337093 - RNA, 22 nt, Human
aauccugugugacucuggggag

SEQ ID NO: 337094 - RNA, 22 nt, Human
accaggaguaacagugaguggu

SEQ ID NO: 337095 - RNA, 22 nt, Human
uucagcaaacacgaugcuuguu

SEQ ID NO: 337096 - RNA, 22 nt, Human
uugugcucuguguuauuuaagg

SEQ ID NO: 337097 - RNA, 22 nt, Human
uauucacaggcacgaaauauug

SEQ ID NO: 337098 - RNA, 20 nt, Human
uuucacaaugaacaugucuc

SEQ ID NO: 337099 - RNA, 22 nt, Human
uuauuugcccauguuuagcaga

SEQ ID NO: 337100 - RNA, 19 nt, Human
caaggccaccauuucuccg

SEQ ID NO: 337101 - RNA, 22 nt, Human
gagggaggugauacugaacgua

SEQ ID NO: 337102 - RNA, 22 nt, Human
uuugacauggaauaacucauuu

SEQ ID NO: 337103 - RNA, 22 nt, Human
uauucaaaguaccuucauugcc

SEQ ID NO: 337104 - RNA, 22 nt, Human
auuucauacuaaggcucaaaaa

SEQ ID NO: 337105 - RNA, 22 nt, Human
gaccuggaggauccucuucuug

SEQ ID NO: 337106 - RNA, 19 nt, Human
agcauuuggaauucuacac

SEQ ID NO: 337107 - RNA, 22 nt, Human
cuucucagaggccagaagcuau

SEQ ID NO: 337108 - RNA, 22 nt, Human
ucuuaaagagcgcaauuugagg

SEQ ID NO: 337109 - RNA, 19 nt, Human
caggagagcaugcacuuug

SEQ ID NO: 337110 - RNA, 22 nt, Human
acagaaauugggcaaauggaag

SEQ ID NO: 337111 - RNA, 22 nt, Human
ucucaaaucaaacuuugagcuu

SEQ ID NO: 337112 - RNA, 22 nt, Human
acuuaaaaagaaucuuuucacg

SEQ ID NO: 337113 - RNA, 22 nt, Human
agguauaagucucauuucuguu

SEQ ID NO: 337114 - RNA, 22 nt, Human
ucagugugaguaccaugcucag

SEQ ID NO: 337115 - RNA, 22 nt, Human
ucucuucuagcuucuugugguu

SEQ ID NO: 337116 - RNA, 22 nt, Human
uagaauucaagauucaacaggc

SEQ ID NO: 337117 - RNA, 18 nt, Human
guaggucaguaccaagca

SEQ ID NO: 337118 - RNA, 20 nt, Human
cugcugugauucccuccucc

SEQ ID NO: 337119 - RNA, 22 nt, Human
uuucuucucgacaccuuauccc

SEQ ID NO: 337120 - RNA, 22 nt, Human
gaucuucucuuuaguagaaaca

SEQ ID NO: 337121 - RNA, 22 nt, Human
uuuauuugaaucaggggagaau

SEQ ID NO: 337122 - RNA, 22 nt, Human
ugucaaauuuuuauugcaguau

SEQ ID NO: 337123 - RNA, 22 nt, Human
cugcuguguuucugcuagaaaa

SEQ ID NO: 337124 - RNA, 22 nt, Human
caguucuuuguggggaguucuc

SEQ ID NO: 337125 - RNA, 18 nt, Human
ugucauaauauaucaccu

SEQ ID NO: 337126 - RNA, 22 nt, Human
gggaggugauuaggaccaugua

SEQ ID NO: 337127 - RNA, 22 nt, Human
ccucacugcuauguguuugcuc

SEQ ID NO: 337128 - RNA, 22 nt, Human
ugucuucaucuccaugcacaga

SEQ ID NO: 337129 - RNA, 22 nt, Human
gugcugugcgcuuuuucuguau

SEQ ID NO: 337130 - RNA, 22 nt, Human
gaacacauuucucugacuguag

SEQ ID NO: 337131 - RNA, 22 nt, Human
ugaaacuucuaauaugaauagu

SEQ ID NO: 337132 - RNA, 21 nt, Human
ccaggaaggacugagcucccu

SEQ ID NO: 337133 - RNA, 22 nt, Human
uguuagaaguuaaucacuaauu

SEQ ID NO: 337134 - RNA, 22 nt, Human
gucccaggugggcuccaccucu

SEQ ID NO: 337135 - RNA, 22 nt, Human
gcucaggaaauaguuuaguguu

SEQ ID NO: 337136 - RNA, 22 nt, Human
cccgggaggaggaaguugcagu

SEQ ID NO: 337137 - RNA, 22 nt, Human
guucuucaucuuaaccaucugu

SEQ ID NO: 337138 - RNA, 19 nt, Human
ugcaagcuuuuucuuguua

SEQ ID NO: 337139 - RNA, 22 nt, Human
uuaacaauagaguuucuucagg

SEQ ID NO: 337140 - RNA, 22 nt, Human
ugaaucugauuucccuggaggc

SEQ ID NO: 337141 - RNA, 22 nt, Human
uuguaugaauguauccuaauuu

SEQ ID NO: 337142 - RNA, 20 nt, Human
aggcaguuagaaggagauga

SEQ ID NO: 337143 - RNA, 22 nt, Human
uagcuguguaagcuugguaaga

SEQ ID NO: 337144 - RNA, 22 nt, Human
uucugucacuugcaaucaagag

SEQ ID NO: 337145 - RNA, 22 nt, Human
uuucucugcugccugugucgau

SEQ ID NO: 337146 - RNA, 22 nt, Human
gagggaggggagcuccacccuc

SEQ ID NO: 337147 - RNA, 22 nt, Human
uuucuuaguccuagagugauuu

SEQ ID NO: 337148 - RNA, 22 nt, Human
uagaaaugaauguuuaaaaguc

SEQ ID NO: 337149 - RNA, 22 nt, Human
aggcaggcuggucugaagagug

SEQ ID NO: 337150 - RNA, 22 nt, Human
guacauuucucuuguucuuauu

SEQ ID NO: 337151 - RNA, 22 nt, Human
gauuucuuuagguguaauagug

SEQ ID NO: 337152 - RNA, 22 nt, Human
aaaggccacacugcucuuucuc

SEQ ID NO: 337153 - RNA, 22 nt, Human
aaauuaguacauugcaaagucc

SEQ ID NO: 337154 - RNA, 22 nt, Human
uggaaggagacugggaagugug

SEQ ID NO: 337155 - RNA, 22 nt, Human
ggaggggagauguuugggcuca

SEQ ID NO: 337156 - RNA, 22 nt, Human
ggagggaaugucuagcauucuu

SEQ ID NO: 337157 - RNA, 22 nt, Human
gggcagcuccuguggaauccac

SEQ ID NO: 337158 - RNA, 22 nt, Human
ucauuauccuaguaucuugaau

SEQ ID NO: 337159 - RNA, 22 nt, Human
acagucucuccacacugcaggg

SEQ ID NO: 337160 - RNA, 22 nt, Human
guucuucaguaaaauuaaaugu

SEQ ID NO: 337161 - RNA, 22 nt, Human
ucuuucaaugagcauucuuucc

SEQ ID NO: 337162 - RNA, 21 nt, Human
aaaggccauaaucacggagca

SEQ ID NO: 337163 - RNA, 22 nt, Human
cuguuucaagugaagucagaca

SEQ ID NO: 337164 - RNA, 22 nt, Human
ugaggcagaguaagauacauga

SEQ ID NO: 337165 - RNA, 22 nt, Human
uggcagcuuccugcucauagga

SEQ ID NO: 337166 - RNA, 18 nt, Human
agaggggagguaagucug

SEQ ID NO: 337167 - RNA, 22 nt, Human
cucagaagccuucagucuuggc

SEQ ID NO: 337168 - RNA, 22 nt, Human
uugaacaguccuaagagacccu

SEQ ID NO: 337169 - RNA, 22 nt, Human
cuugcaggauuuugcugcugua

SEQ ID NO: 337170 - RNA, 22 nt, Human
auguucuuccaaaucuguaaca

SEQ ID NO: 337171 - RNA, 22 nt, Human
gauuucuuugcaagcuguguuc

SEQ ID NO: 337172 - RNA, 21 nt, Human
agccagcuaucacacagcauu

SEQ ID NO: 337173 - RNA, 22 nt, Human
auugcuguggaaauauaagaug

SEQ ID NO: 337174 - RNA, 20 nt, Human
cugagagucugugcuuaguc

SEQ ID NO: 337175 - RNA, 19 nt, Human
uuuuccuucuauauguuuc

SEQ ID NO: 337176 - RNA, 22 nt, Human
auugcuaggaacagguugcacc

SEQ ID NO: 337177 - RNA, 22 nt, Human
auuucacucauucauguuacuu

SEQ ID NO: 337178 - RNA, 22 nt, Human
uguacuaaggcuguguagaugu

SEQ ID NO: 337179 - RNA, 22 nt, Human
aggcggcugguguccugcaggu

SEQ ID NO: 337180 - RNA, 22 nt, Human
auuggcagaaacagcagggcca

SEQ ID NO: 337181 - RNA, 22 nt, Human
ucauuguuucugcuuuucauga

SEQ ID NO: 337182 - RNA, 22 nt, Human
agaccgagaaguucuccaggcc

SEQ ID NO: 337183 - RNA, 21 nt, Human
agucuguuaggaugacucuga

SEQ ID NO: 337184 - RNA, 22 nt, Human
cugcuguguaucauuuuagaug

SEQ ID NO: 337185 - RNA, 22 nt, Human
cuucuucaaccugaaaguuuca

SEQ ID NO: 337186 - RNA, 22 nt, Human
caaggccaaagggccacuguca

SEQ ID NO: 337187 - RNA, 22 nt, Human
uggagacucugcaucugugaca

SEQ ID NO: 337188 - RNA, 22 nt, Human
ugugugucagagucuccauggu

SEQ ID NO: 337189 - RNA, 22 nt, Human
ugaaaugagauagauaaucagg

SEQ ID NO: 337190 - RNA, 22 nt, Human
aagccgaggccacacagcagga

SEQ ID NO: 337191 - RNA, 22 nt, Human
augcugugaaaaagaaggcuga

SEQ ID NO: 337192 - RNA, 22 nt, Human
augugaaacugaagcauccaua

SEQ ID NO: 337193 - RNA, 22 nt, Human
uggaggggcaauggagcgcgga

SEQ ID NO: 337194 - RNA, 22 nt, Human
uaacacauaagcugagaccaug

SEQ ID NO: 337195 - RNA, 22 nt, Human
caguggagagacuuuuacucuu

SEQ ID NO: 337196 - RNA, 22 nt, Human
gauggcagguaguggucucauc

SEQ ID NO: 337197 - RNA, 22 nt, Human
agucuugcucuugcaucugcuu

SEQ ID NO: 337198 - RNA, 22 nt, Human
acaaaugugucuaauugugccu

SEQ ID NO: 337199 - RNA, 23 nt, Human
cccaggaguuucacugcaaaggu

SEQ ID NO: 337200 - RNA, 22 nt, Human
uagcugcugcagcacagggagg

SEQ ID NO: 337201 - RNA, 22 nt, Human
aaccauuugcaguuacugagac

SEQ ID NO: 337202 - RNA, 22 nt, Human
gagggccagcagccucagcaug

SEQ ID NO: 337203 - RNA, 22 nt, Human
ggcagaggaaggaugaauucac

SEQ ID NO: 337204 - RNA, 19 nt, Human
agaaguuagacauugcaau

SEQ ID NO: 337205 - RNA, 22 nt, Human
ucaggaauccagacagggcaca

SEQ ID NO: 337206 - RNA, 22 nt, Human
cggcagcucgagggccacccgu

SEQ ID NO: 337207 - RNA, 22 nt, Human
guuuuucuuugugugaagacaa

SEQ ID NO: 337208 - RNA, 23 nt, Human
aaaguuugaagcaacaguaguug

SEQ ID NO: 337209 - RNA, 22 nt, Human
gccaggagagcuccuucagguu

SEQ ID NO: 337210 - RNA, 22 nt, Human
cuucucagucaccugugagucu

SEQ ID NO: 337211 - RNA, 22 nt, Human
gaggcgagaagcuggagauggu

SEQ ID NO: 337212 - RNA, 22 nt, Human
ucuuugaauuucugacugucuu

SEQ ID NO: 337213 - RNA, 22 nt, Human
auuccaguuggguucuaauaca

SEQ ID NO: 337214 - RNA, 22 nt, Human
ugaaacauugcacuguaugaau

SEQ ID NO: 337215 - RNA, 22 nt, Human
gucaggauuuacaaacuucagu

SEQ ID NO: 337216 - RNA, 22 nt, Human
uucuucaguguagcaacuguau

SEQ ID NO: 337217 - RNA, 22 nt, Human
aggcagaggagaaugaucuucc

SEQ ID NO: 337218 - RNA, 22 nt, Human
cagguaaaaauaaauuugugag

SEQ ID NO: 337219 - RNA, 22 nt, Human
ugccaggauggccagggggcca

SEQ ID NO: 337220 - RNA, 22 nt, Human
acaccauacucauguugguucc

SEQ ID NO: 337221 - RNA, 22 nt, Human
uauuuucuggacagucuugcuu

SEQ ID NO: 337222 - RNA, 22 nt, Human
ugcccacauggugccauggcca

SEQ ID NO: 337223 - RNA, 22 nt, Human
ucgagcucuggagccaaggaug

SEQ ID NO: 337224 - RNA, 19 nt, Human
cuugcugggugguuucugc

SEQ ID NO: 337225 - RNA, 22 nt, Human
uguaugaaguuacugagccucu

SEQ ID NO: 337226 - RNA, 22 nt, Human
guguaugaacgaaagaauggau

SEQ ID NO: 337227 - RNA, 22 nt, Human
cuugcugucccuugguaugaac

SEQ ID NO: 337228 - RNA, 20 nt, Human
accaauguuagcuuaguacu

SEQ ID NO: 337229 - RNA, 22 nt, Human
gcagcugaaagggaucucuaca

SEQ ID NO: 337230 - RNA, 22 nt, Human
aguaaaaauugaggugcaaaau

SEQ ID NO: 337231 - RNA, 19 nt, Human
uauggcaggccgaggcacu

SEQ ID NO: 337232 - RNA, 22 nt, Human
cugaacuuauugagugcuugcu

SEQ ID NO: 337233 - RNA, 22 nt, Human
uuucaguguaucuuccaaaagc

SEQ ID NO: 337234 - RNA, 22 nt, Human
accaggagguguuugcucaagu

SEQ ID NO: 337235 - RNA, 22 nt, Human
gcuggcagggacagcugcgugu

SEQ ID NO: 337236 - RNA, 22 nt, Human
uguggaaaauuggaacguuccu

SEQ ID NO: 337237 - RNA, 22 nt, Human
cuuaagauuugagauaccuaau

SEQ ID NO: 337238 - RNA, 22 nt, Human
uuuacaaccucauauucugaug

SEQ ID NO: 337239 - RNA, 22 nt, Human
caggagauguaagacuucuguu

SEQ ID NO: 337240 - RNA, 22 nt, Human
gaagcagcugccagagaugucu

SEQ ID NO: 337241 - RNA, 22 nt, Human
uugcacuaggaaaaggcagcca

SEQ ID NO: 337242 - RNA, 22 nt, Human
guuuucaauuauaagauggcuu

SEQ ID NO: 337243 - RNA, 22 nt, Human
ucugcugugauuugcuaccugu

SEQ ID NO: 337244 - RNA, 22 nt, Human
cugagacuuucaugugcuuuua

SEQ ID NO: 337245 - RNA, 20 nt, Human
gggcaguucaaugccacucu

SEQ ID NO: 337246 - RNA, 22 nt, Human
uggcagcuguguccagguagaa

SEQ ID NO: 337247 - RNA, 22 nt, Human
uuugaagucagacacugcuuug

SEQ ID NO: 337248 - RNA, 22 nt, Human
uucaggaugcucagaguagucu

SEQ ID NO: 337249 - RNA, 22 nt, Human
aguacauauaguaauuuagcca

SEQ ID NO: 337250 - RNA, 22 nt, Human
aggcuagcaaugggagaugagu

SEQ ID NO: 337251 - RNA, 22 nt, Human
cuggaggcacccuuagagaggc

SEQ ID NO: 337252 - RNA, 22 nt, Human
ucuuagcacagcuauauaaguu

SEQ ID NO: 337253 - RNA, 22 nt, Human
gagaggaguagacacuuugguu

SEQ ID NO: 337254 - RNA, 22 nt, Human
cucuuucugauucgcugggacc

SEQ ID NO: 337255 - RNA, 22 nt, Human
ugaugaaaauaugauucugagg

SEQ ID NO: 337256 - RNA, 22 nt, Human
uauuuccaagcugaauccaaug

SEQ ID NO: 337257 - RNA, 22 nt, Human
ggaggcagaauagagugugggu

SEQ ID NO: 337258 - RNA, 22 nt, Human
ugauuuccuaggucuggagaag

SEQ ID NO: 337259 - RNA, 22 nt, Human
uuguugguggaauugaugcuag

SEQ ID NO: 337260 - RNA, 22 nt, Human
cggaggggauacauuuucugaa

SEQ ID NO: 337261 - RNA, 22 nt, Human
ucccaggaugugcgugccgccg

SEQ ID NO: 337262 - RNA, 22 nt, Human
gauugaaacauaggcagucgag

SEQ ID NO: 337263 - RNA, 22 nt, Human
aucuugcauuugcuaaaaugca

SEQ ID NO: 337264 - RNA, 22 nt, Human
aaggcagccagauccuuugggu

SEQ ID NO: 337265 - RNA, 22 nt, Human
agcucccagagcucgagaguaa

SEQ ID NO: 337266 - RNA, 22 nt, Human
aaaaugaugcuguaauuuggca

SEQ ID NO: 337267 - RNA, 22 nt, Human
cugaaugaggaaaagagugagg

SEQ ID NO: 337268 - RNA, 22 nt, Human
ccucaugguacuuacuguagcu

SEQ ID NO: 337269 - RNA, 22 nt, Human
gaggcagcugggcuggugguuu

SEQ ID NO: 337270 - RNA, 22 nt, Human
aagcaauagcaacaacuuuaca

SEQ ID NO: 337271 - RNA, 22 nt, Human
ggcagcugucucugaguuagca

SEQ ID NO: 337272 - RNA, 22 nt, Human
uuugaaagucaaccuuccaguu

SEQ ID NO: 337273 - RNA, 22 nt, Human
cucccaggguagggagagacua

SEQ ID NO: 337274 - RNA, 22 nt, Human
gugauaaagacgugucauaauu

SEQ ID NO: 337275 - RNA, 22 nt, Human
uaucuguuaugggcugaauugc

SEQ ID NO: 337276 - RNA, 19 nt, Human
uagaggagaagggaagugg

SEQ ID NO: 337277 - RNA, 22 nt, Human
cucaggauugugccuagggaga

SEQ ID NO: 337278 - RNA, 22 nt, Human
agcccaggaaucugcaucuuga

SEQ ID NO: 337279 - RNA, 22 nt, Human
gaaggccacuuuguguugagaa

SEQ ID NO: 337280 - RNA, 19 nt, Human
acauuuaaauucagaucuc

SEQ ID NO: 337281 - RNA, 22 nt, Human
acaggccacaguggagucucug

SEQ ID NO: 337282 - RNA, 22 nt, Human
uuuguaaauagcaguacucaug

SEQ ID NO: 337283 - RNA, 23 nt, Human
agggugagcaagcuauggagacc

SEQ ID NO: 337284 - RNA, 22 nt, Human
cuucugugcuucacaguugcca

SEQ ID NO: 337285 - RNA, 22 nt, Human
agucacuguucugucaugucaa

SEQ ID NO: 337286 - RNA, 22 nt, Human
uggaaagcgaggaguuggcauu

SEQ ID NO: 337287 - RNA, 22 nt, Human
auguagagcaguguuguccaau

SEQ ID NO: 337288 - RNA, 22 nt, Human
cuguucucuggcgguggcuguu

SEQ ID NO: 337289 - RNA, 22 nt, Human
uucaaauacauucuuugccacu

SEQ ID NO: 337290 - RNA, 22 nt, Human
uggcagcugcaggccuccugag

SEQ ID NO: 337291 - RNA, 21 nt, Human
ggcagcucagcagauggggac

SEQ ID NO: 337292 - RNA, 22 nt, Human
cccaugagauucugaauuuggc

SEQ ID NO: 337293 - RNA, 22 nt, Human
auucuucauuuacuguuacuug

SEQ ID NO: 337294 - RNA, 21 nt, Human
acagcaagccuucacaugagu

SEQ ID NO: 337295 - RNA, 22 nt, Human
uuucaaagucaauaucauuacc

SEQ ID NO: 337296 - RNA, 22 nt, Human
gaggcaguguuuacugcccugu

SEQ ID NO: 337297 - RNA, 22 nt, Human
auucucuuuguauaacaucuug

SEQ ID NO: 337298 - RNA, 22 nt, Human
cccucuacagggaagcgcuuuc

SEQ ID NO: 337299 - RNA, 22 nt, Human
cugcccaggaaccagaggggca

SEQ ID NO: 337300 - RNA, 22 nt, Human
uaauuucacugauaugaaguca

SEQ ID NO: 337301 - RNA, 22 nt, Human
cuggaaauuggagaugauguuu

SEQ ID NO: 337302 - RNA, 19 nt, Human
gcuuuggagggagguucua

SEQ ID NO: 337303 - RNA, 22 nt, Human
gcucaggaucagccaccucuuu

SEQ ID NO: 337304 - RNA, 21 nt, Human
aggcagcucaggcccagagag

SEQ ID NO: 337305 - RNA, 22 nt, Human
auauuucaugggguuccauacu

SEQ ID NO: 337306 - RNA, 22 nt, Human
uuucugcugugcuuucuugcgu

SEQ ID NO: 337307 - RNA, 22 nt, Human
guuguuuuuguucucuauagcu

SEQ ID NO: 337308 - RNA, 22 nt, Human
uucucagagugaccaagucuuu

SEQ ID NO: 337309 - RNA, 22 nt, Human
cccuggaguccuggcaguugau

SEQ ID NO: 337310 - RNA, 22 nt, Human
aaggaguuuggguagucauaca

SEQ ID NO: 337311 - RNA, 22 nt, Human
uccaggagacacaagguacaua

SEQ ID NO: 337312 - RNA, 23 nt, Human
agggagcuaaaaggcuggagcag

SEQ ID NO: 337313 - RNA, 17 nt, Human
uuucuccuuccaucuca

SEQ ID NO: 337314 - RNA, 22 nt, Human
gaggagagggcugcgggcccac

SEQ ID NO: 337315 - RNA, 20 nt, Human
gcccaagguccagaaggggg

SEQ ID NO: 337316 - RNA, 23 nt, Human
uuuggacuugugacucuucuccu

SEQ ID NO: 337317 - RNA, 19 nt, Human
uggagaggaaaugcugcuc

SEQ ID NO: 337318 - RNA, 22 nt, Human
uucuucaauuuuccauauacug

SEQ ID NO: 337319 - RNA, 22 nt, Human
gucaggaucucccaguacauau

SEQ ID NO: 337320 - RNA, 22 nt, Human
cagaugaggcaaccucauugcu

SEQ ID NO: 337321 - RNA, 21 nt, Human
gcucagaguauugcacuguuu

SEQ ID NO: 337322 - RNA, 22 nt, Human
cccaggagguggaguucacagu

SEQ ID NO: 337323 - RNA, 22 nt, Human
gaggggaagacuucuggacagu

SEQ ID NO: 337324 - RNA, 22 nt, Human
ucugucuccucugaggugccag

SEQ ID NO: 337325 - RNA, 22 nt, Human
ucaacugcaaguuugcuuaguu

SEQ ID NO: 337326 - RNA, 22 nt, Human
augugucuuugagacucugcua

SEQ ID NO: 337327 - RNA, 22 nt, Human
guuuauaaggcccaauauuucu

SEQ ID NO: 337328 - RNA, 20 nt, Human
acuugcugggcuuuguuacc

SEQ ID NO: 337329 - RNA, 22 nt, Human
gucuucaacaauaacuaccacu

SEQ ID NO: 337330 - RNA, 22 nt, Human
uaucuguuugcucacagguguu

SEQ ID NO: 337331 - RNA, 22 nt, Human
aagaggaggacgguucccagaa

SEQ ID NO: 337332 - RNA, 22 nt, Human
aggaguggugcaggaccugcca

SEQ ID NO: 337333 - RNA, 22 nt, Human
gcuucccacagcuggacugggg

SEQ ID NO: 337334 - RNA, 22 nt, Human
gaagaggaugacaggagccggu

SEQ ID NO: 337335 - RNA, 22 nt, Human
acaauacuauuuucaguauccu

SEQ ID NO: 337336 - RNA, 22 nt, Human
aaauacauaaagguuguaccag

SEQ ID NO: 337337 - RNA, 22 nt, Human
uagcccagcaugagcagagcug

SEQ ID NO: 337338 - RNA, 22 nt, Human
cagagagagucaaaucuuugcu

SEQ ID NO: 337339 - RNA, 22 nt, Human
gauggcagcagcagccagggau

SEQ ID NO: 337340 - RNA, 20 nt, Human
gccaggagggugugaugagc

SEQ ID NO: 337341 - RNA, 22 nt, Human
ugcacauuaguguuugagaugc

SEQ ID NO: 337342 - RNA, 22 nt, Human
ugugccagccucuggcuguguc

SEQ ID NO: 337343 - RNA, 22 nt, Human
cugucccuucauuauucacuac

SEQ ID NO: 337344 - RNA, 22 nt, Human
uucacagucacccuucuccaug

SEQ ID NO: 337345 - RNA, 22 nt, Human
uucucugaguacguuucagugu

SEQ ID NO: 337346 - RNA, 22 nt, Human
ggagugucagaaacaguguccu

SEQ ID NO: 337347 - RNA, 22 nt, Human
gaacccaggcuuuugaggcugu

SEQ ID NO: 337348 - RNA, 22 nt, Human
aguucuucauaaccuuacugug

SEQ ID NO: 337349 - RNA, 22 nt, Human
uuauacuaaaacgcauugaauu

SEQ ID NO: 337350 - RNA, 22 nt, Human
uaaucuguguaccuucaucgga

SEQ ID NO: 337351 - RNA, 22 nt, Human
acucaggaagaaagcagcuggu

SEQ ID NO: 337352 - RNA, 22 nt, Human
cccagggaagccauuucugacu

SEQ ID NO: 337353 - RNA, 22 nt, Human
cuuaaaaucuggcaguuagcua

SEQ ID NO: 337354 - RNA, 22 nt, Human
uugcucaggcuggugugcagug

SEQ ID NO: 337355 - RNA, 22 nt, Human
ccaggaugacccccacuuuccu

SEQ ID NO: 337356 - RNA, 22 nt, Human
uucaaacaguguagaauauaug

SEQ ID NO: 337357 - RNA, 22 nt, Human
uuucacaaaugucuuuaacuug

SEQ ID NO: 337358 - RNA, 22 nt, Human
ugccgcagugcggggagggccc

SEQ ID NO: 337359 - RNA, 23 nt, Human
ccacuagcaccuguucaacuucu

SEQ ID NO: 337360 - RNA, 22 nt, Human
gacccaggcucgugggacggcu

SEQ ID NO: 337361 - RNA, 20 nt, Human
uauuuguauuugggaaaguu

SEQ ID NO: 337362 - RNA, 22 nt, Human
gccaggaggcuuaacuggacag

SEQ ID NO: 337363 - RNA, 22 nt, Human
cagaagaguagcugaacaaguu

SEQ ID NO: 337364 - RNA, 22 nt, Human
auuuccauagagcgucucacag

SEQ ID NO: 337365 - RNA, 22 nt, Human
gcccaggaguuugcauuuuaac

SEQ ID NO: 337366 - RNA, 22 nt, Human
caggauggagggagggcuguua

SEQ ID NO: 337367 - RNA, 22 nt, Human
ucuacuauguuucuuaaauaga

SEQ ID NO: 337368 - RNA, 22 nt, Human
agucucugggcaugguugugac

SEQ ID NO: 337369 - RNA, 22 nt, Human
uccauucauucauugaugaaca

SEQ ID NO: 337370 - RNA, 18 nt, Human
gugcugugggcaguggcc

SEQ ID NO: 337371 - RNA, 22 nt, Human
gcaaauauucaagacuuuucca

SEQ ID NO: 337372 - RNA, 22 nt, Human
uggcagcagccauggaaggccc

SEQ ID NO: 337373 - RNA, 22 nt, Human
cggagggguuugaacagaggag

SEQ ID NO: 337374 - RNA, 22 nt, Human
cugcccagaagccagaugggca

SEQ ID NO: 337375 - RNA, 16 nt, Human
uguaugaacgucucca

SEQ ID NO: 337376 - RNA, 19 nt, Human
ugugaaagcuaguguucuu

SEQ ID NO: 337377 - RNA, 22 nt, Human
aggguggcuggaggaaucagaa

SEQ ID NO: 337378 - RNA, 22 nt, Human
caugaaauugcuccuuuggugc

SEQ ID NO: 337379 - RNA, 22 nt, Human
aguuugaaaguauugacagaag

SEQ ID NO: 337380 - RNA, 22 nt, Human
aauucugugcaggcagagcuau

SEQ ID NO: 337381 - RNA, 22 nt, Human
gccaggagcccugggcaaguuc

SEQ ID NO: 337382 - RNA, 22 nt, Human
ugaaggccagcucuuuaucagc

SEQ ID NO: 337383 - RNA, 22 nt, Human
agucuacaaucuuaaaugaacu

SEQ ID NO: 337384 - RNA, 22 nt, Human
ucauuucccuccuacaaagagg

SEQ ID NO: 337385 - RNA, 22 nt, Human
aggccagcccugggcugagaga

SEQ ID NO: 337386 - RNA, 22 nt, Human
cuauuucaaggcccagauauga

SEQ ID NO: 337387 - RNA, 22 nt, Human
uuuucagugggcaaugauguga

SEQ ID NO: 337388 - RNA, 22 nt, Human
caucacccggaacugugucugc

SEQ ID NO: 337389 - RNA, 22 nt, Human
gaggcagcaauaaaaagaauuu

SEQ ID NO: 337390 - RNA, 18 nt, Human
uugagggaggggcagagu

SEQ ID NO: 337391 - RNA, 22 nt, Human
cuugcuucauuagugucuuagu

SEQ ID NO: 337392 - RNA, 22 nt, Human
aauacuuuccuauauaaggugc

SEQ ID NO: 337393 - RNA, 22 nt, Human
ccucaggauacaggagccacag

SEQ ID NO: 337394 - RNA, 22 nt, Human
uuacuuuggguccugcuuauaa

SEQ ID NO: 337395 - RNA, 20 nt, Human
auaaaauaacugccacaaga

SEQ ID NO: 337396 - RNA, 22 nt, Human
agggagcucaguuggaagcggu

SEQ ID NO: 337397 - RNA, 22 nt, Human
gcuucccagcagaggaaagacu

SEQ ID NO: 337398 - RNA, 20 nt, Human
auacacauucauagaaaaau

SEQ ID NO: 337399 - RNA, 22 nt, Human
uucucagaggagucgggagcug

SEQ ID NO: 337400 - RNA, 22 nt, Human
agaaggggagaagcuaccagga

SEQ ID NO: 337401 - RNA, 23 nt, Human
acagaaaucauuuguaagguacc

SEQ ID NO: 337402 - RNA, 19 nt, Human
agcaacaccguuuauuucc

SEQ ID NO: 337403 - RNA, 22 nt, Human
caaggccagggaauuuuucugg

SEQ ID NO: 337404 - RNA, 22 nt, Human
aggaggcacucacucucagggu

SEQ ID NO: 337405 - RNA, 22 nt, Human
guguugaugacauuuuagaaac

SEQ ID NO: 337406 - RNA, 22 nt, Human
cagcugacuucauaggaagaca

SEQ ID NO: 337407 - RNA, 22 nt, Human
auugaaagauauacuguucuca

SEQ ID NO: 337408 - RNA, 22 nt, Human
acaaaguuugugguauuccaag

SEQ ID NO: 337409 - RNA, 22 nt, Human
cuuaaauucuuaaugcccucau

SEQ ID NO: 337410 - RNA, 22 nt, Human
aggaagcugcuggaguagugug

SEQ ID NO: 337411 - RNA, 22 nt, Human
aggcagauuacuugaggccagg

SEQ ID NO: 337412 - RNA, 21 nt, Human
gagugcagcaagguagagucu

SEQ ID NO: 337413 - RNA, 22 nt, Human
aucuacccacugaacacaauau

SEQ ID NO: 337414 - RNA, 22 nt, Human
gagccagcuauguagcaagagg

SEQ ID NO: 337415 - RNA, 22 nt, Human
augcuuuuccaggagaaauaua

SEQ ID NO: 337416 - RNA, 19 nt, Human
ugaaauggcaguugcuaaa

SEQ ID NO: 337417 - RNA, 20 nt, Human
agagcagcaguuggugaggu

SEQ ID NO: 337418 - RNA, 22 nt, Human
uucaugugaauauauuugucuu

SEQ ID NO: 337419 - RNA, 22 nt, Human
ucuucauuuuauagcaucugug

SEQ ID NO: 337420 - RNA, 22 nt, Human
uuugacauuauccuguuacugg

SEQ ID NO: 337421 - RNA, 22 nt, Human
gccaugcuugguaugcugugag

SEQ ID NO: 337422 - RNA, 22 nt, Human
gaacaucagucauaauuuaacg

SEQ ID NO: 337423 - RNA, 22 nt, Human
augcuacauuuugguuuauaaa

SEQ ID NO: 337424 - RNA, 22 nt, Human
ucugggaacagccuggcugugu

SEQ ID NO: 337425 - RNA, 22 nt, Human
cagucuucuaaccuagcagccu

SEQ ID NO: 337426 - RNA, 22 nt, Human
gauuuuauauggcauacugugg

SEQ ID NO: 337427 - RNA, 22 nt, Human
gcaucuaaacuugcaucauugu

SEQ ID NO: 337428 - RNA, 21 nt, Human
aggaggggucuuucccacuga

SEQ ID NO: 337429 - RNA, 22 nt, Human
gcucaggacccaggugugaccu

SEQ ID NO: 337430 - RNA, 22 nt, Human
gccaggagaaaaggcgaaugau

SEQ ID NO: 337431 - RNA, 22 nt, Human
uagggaugacgaaaggacagag

SEQ ID NO: 337432 - RNA, 22 nt, Human
cuuaaagaaauugaggagagga

SEQ ID NO: 337433 - RNA, 22 nt, Human
aaauacauacacuguacguggc

SEQ ID NO: 337434 - RNA, 22 nt, Human
guugaaugaaucauucuaugua

SEQ ID NO: 337435 - RNA, 22 nt, Human
uccaggagucagacagauggug

SEQ ID NO: 337436 - RNA, 22 nt, Human
uucucacuauguauguagauug

SEQ ID NO: 337437 - RNA, 22 nt, Human
ccaggcugagcaugauuggagc

SEQ ID NO: 337438 - RNA, 22 nt, Human
gagacagcacaggccacuggga

SEQ ID NO: 337439 - RNA, 22 nt, Human
ugaggcaguauuuuagugacuu

SEQ ID NO: 337440 - RNA, 19 nt, Human
ugaggggcucacagucuca

SEQ ID NO: 337441 - RNA, 22 nt, Human
aguaugaacggaaggccuggga

SEQ ID NO: 337442 - RNA, 22 nt, Human
aauuaugagguagauaucacau

SEQ ID NO: 337443 - RNA, 22 nt, Human
uugaaaguccuucuugaguuac

SEQ ID NO: 337444 - RNA, 22 nt, Human
aggcggcuccgggagugugggc

SEQ ID NO: 337445 - RNA, 22 nt, Human
guccucuggaagaugaguucuu

SEQ ID NO: 337446 - RNA, 22 nt, Human
uaggagggcccugaaaauggca

SEQ ID NO: 337447 - RNA, 21 nt, Human
uuucuucacuuugccccaugu

SEQ ID NO: 337448 - RNA, 22 nt, Human
ggcuuggaaauugcaggacaca

SEQ ID NO: 337449 - RNA, 22 nt, Human
aauguauguguauaucaaauca

SEQ ID NO: 337450 - RNA, 17 nt, Human
uauauguaugccucucc

SEQ ID NO: 337451 - RNA, 16 nt, Human
ccccaggacuuggcac

SEQ ID NO: 337452 - RNA, 22 nt, Human
auuugcuuaucuccacaguugu

SEQ ID NO: 337453 - RNA, 22 nt, Human
agaggucagauuucuccuggug

SEQ ID NO: 337454 - RNA, 21 nt, Human
uccaggaguggcugggcaggg

SEQ ID NO: 337455 - RNA, 22 nt, Human
uauguacuaacuuucauucuag

SEQ ID NO: 337456 - RNA, 22 nt, Human
gguggaaggccuggaaggaggc

SEQ ID NO: 337457 - RNA, 22 nt, Human
cugcuguggguuaagacacugu

SEQ ID NO: 337458 - RNA, 22 nt, Human
ugaaaugacaaagguuuuucuu

SEQ ID NO: 337459 - RNA, 22 nt, Human
cuugaaguugcaaaacauuaau

SEQ ID NO: 337460 - RNA, 22 nt, Human
aaggaaccuggaguagagggag

SEQ ID NO: 337461 - RNA, 22 nt, Human
ugaggcaggaaguuauauaaug

SEQ ID NO: 337462 - RNA, 22 nt, Human
caggaugagaagggcucuuacg

SEQ ID NO: 337463 - RNA, 22 nt, Human
cuagguauucauguuucguggc

SEQ ID NO: 337464 - RNA, 22 nt, Human
acccaggacaaaauaaccaggu

SEQ ID NO: 337465 - RNA, 22 nt, Human
aggcagcuuaagcccuggccca

SEQ ID NO: 337466 - RNA, 22 nt, Human
ggcaagaaggcuucagguagcu

SEQ ID NO: 337467 - RNA, 22 nt, Human
agugauggugagugagaagcuc

SEQ ID NO: 337468 - RNA, 22 nt, Human
uggcagagcaaaaagauagaau

SEQ ID NO: 337469 - RNA, 20 nt, Human
uauuuacaacuuagagccuc

SEQ ID NO: 337470 - RNA, 22 nt, Human
agggagcucacaguccaguaga

SEQ ID NO: 337471 - RNA, 22 nt, Human
gaggcagaaguugcagugagca

SEQ ID NO: 337472 - RNA, 22 nt, Human
ucugucccugagagcucaggag

SEQ ID NO: 337473 - RNA, 22 nt, Human
cuugcuggugguguuuucuaug

SEQ ID NO: 337474 - RNA, 20 nt, Human
aucaggauucuugcuuuguu

SEQ ID NO: 337475 - RNA, 22 nt, Human
auacuaaaguauagaacuuagu

SEQ ID NO: 337476 - RNA, 22 nt, Human
acagauguacacucauauauaa

SEQ ID NO: 337477 - RNA, 22 nt, Human
caggagaucuuaggaauucuua

SEQ ID NO: 337478 - RNA, 22 nt, Human
uugcugugucauuuguuuaauc

SEQ ID NO: 337479 - RNA, 22 nt, Human
uguagggaggaaggguuggaaa

SEQ ID NO: 337480 - RNA, 22 nt, Human
acagauauuuggggaaagacgu

SEQ ID NO: 337481 - RNA, 22 nt, Human
ucagucucaucaacucuauucc

SEQ ID NO: 337482 - RNA, 22 nt, Human
cugcugugcauauuuaucuagg

SEQ ID NO: 337483 - RNA, 22 nt, Human
uucagaauauuuguuuuacaug

SEQ ID NO: 337484 - RNA, 22 nt, Human
ccucugcucugguccaugugcu

SEQ ID NO: 337485 - RNA, 20 nt, Human
cucuccucacccgugucagg

SEQ ID NO: 337486 - RNA, 22 nt, Human
uagugcuuaacacaaagugauu

SEQ ID NO: 337487 - RNA, 22 nt, Human
ucauaaaugcagugucauaaau

SEQ ID NO: 337488 - RNA, 22 nt, Human
aucacaaaggcugcuucaugau

SEQ ID NO: 337489 - RNA, 22 nt, Human
cauaugaaauaugaguugaaca

SEQ ID NO: 337490 - RNA, 20 nt, Human
augugucuguaaacaacucu

SEQ ID NO: 337491 - RNA, 22 nt, Human
uucugaaagccaauucauugaa

SEQ ID NO: 337492 - RNA, 22 nt, Human
ugaggcaguugagcuuccugag

SEQ ID NO: 337493 - RNA, 22 nt, Human
cuguuuaucucuaaccuguuua

SEQ ID NO: 337494 - RNA, 22 nt, Human
uuugcacuagcauuuguccaug

SEQ ID NO: 337495 - RNA, 22 nt, Human
cagcuacuccucccaugacuuc

SEQ ID NO: 337496 - RNA, 22 nt, Human
agggagcuucuggccucagccu

SEQ ID NO: 337497 - RNA, 22 nt, Human
ucucagucuuugcaaggaugcu

SEQ ID NO: 337498 - RNA, 22 nt, Human
caaaugauagagccgauuauca

SEQ ID NO: 337499 - RNA, 22 nt, Human
ccccaggagaaaucuuaaacua

SEQ ID NO: 337500 - RNA, 22 nt, Human
aagcagaggaccgacggaggga

SEQ ID NO: 337501 - RNA, 22 nt, Human
cagcugccuucugcgggaaguc

SEQ ID NO: 337502 - RNA, 22 nt, Human
ucucugaguauccugaacugcc

SEQ ID NO: 337503 - RNA, 22 nt, Human
aagacugugucuauggcuacuc

SEQ ID NO: 337504 - RNA, 22 nt, Human
acaugcauaggagaagucuuua

SEQ ID NO: 337505 - RNA, 22 nt, Human
gagggagggacuagcauucucu

SEQ ID NO: 337506 - RNA, 23 nt, Human
cugcuguguuggucucgauggga

SEQ ID NO: 337507 - RNA, 22 nt, Human
aggcucagaggugagcaucugc

SEQ ID NO: 337508 - RNA, 22 nt, Human
aaaguuugcaauuuauguuaau

SEQ ID NO: 337509 - RNA, 22 nt, Human
agagugcagauaagagaauguu

SEQ ID NO: 337510 - RNA, 22 nt, Human
gcugcugugaauuuuuuaaaug

SEQ ID NO: 337511 - RNA, 19 nt, Human
uucaggauugacccuacug

SEQ ID NO: 337512 - RNA, 22 nt, Human
aaguugagaugucauaggagac

SEQ ID NO: 337513 - RNA, 22 nt, Human
agugcugucaguuuuauagaua

SEQ ID NO: 337514 - RNA, 22 nt, Human
cucuucuugcuagacugagugc

SEQ ID NO: 337515 - RNA, 22 nt, Human
uuucaugagauuccuccacauc

SEQ ID NO: 337516 - RNA, 22 nt, Human
uccauuuuucaugacuccucaa

SEQ ID NO: 337517 - RNA, 22 nt, Human
aggcagcauuugaauccagguc

SEQ ID NO: 337518 - RNA, 22 nt, Human
ccacuguuuuucaguuaacuuu

SEQ ID NO: 337519 - RNA, 22 nt, Human
accaggaggaaguguuaaugau

SEQ ID NO: 337520 - RNA, 22 nt, Human
aaauuuucagagcacuagagaa

SEQ ID NO: 337521 - RNA, 22 nt, Human
agcccagguucuaaagccaaac

SEQ ID NO: 337522 - RNA, 22 nt, Human
uggcagcuagauaguguguuua

SEQ ID NO: 337523 - RNA, 22 nt, Human
gcagcugagagaagaacagggc

SEQ ID NO: 337524 - RNA, 22 nt, Human
cagaguucaaagccugcuggga

SEQ ID NO: 337525 - RNA, 22 nt, Human
aauguaugcugugguaucuucu

SEQ ID NO: 337526 - RNA, 22 nt, Human
aagcaccugcaguugacaaaaa

SEQ ID NO: 337527 - RNA, 22 nt, Human
auaucaaacgaaguuauuuuaa

SEQ ID NO: 337528 - RNA, 17 nt, Human
uuuagaauacaauguuu

SEQ ID NO: 337529 - RNA, 19 nt, Human
ccauggagagagaugcauu

SEQ ID NO: 337530 - RNA, 21 nt, Human
uuucugaaggcaacaucuauc

SEQ ID NO: 337531 - RNA, 17 nt, Human
ggcagccucaggcguuu

SEQ ID NO: 337532 - RNA, 22 nt, Human
acaaauaugguacucggagaaa

SEQ ID NO: 337533 - RNA, 22 nt, Human
uuugaaagaaaccagugaguga

SEQ ID NO: 337534 - RNA, 23 nt, Human
auuugagaaaguauuuuuaagac

SEQ ID NO: 337535 - RNA, 22 nt, Human
uucugucacagugcugguauca

SEQ ID NO: 337536 - RNA, 22 nt, Human
agaguucugcucuucucaguga

SEQ ID NO: 337537 - RNA, 22 nt, Human
uccuucuuugacaaguggcaga

SEQ ID NO: 337538 - RNA, 22 nt, Human
aggcagcaugggcccagagucc

SEQ ID NO: 337539 - RNA, 22 nt, Human
uucaggauucucucccauuuac

SEQ ID NO: 337540 - RNA, 22 nt, Human
aucaggauuauuaaaucuggau

SEQ ID NO: 337541 - RNA, 22 nt, Human
ugaaaugaucaguuugguuacu

SEQ ID NO: 337542 - RNA, 22 nt, Human
uaaugcuuaacagcuggcuuuu

SEQ ID NO: 337543 - RNA, 22 nt, Human
agggcagccucucagccuaggu

SEQ ID NO: 337544 - RNA, 22 nt, Human
uguucauuuggcccuuuuguau

SEQ ID NO: 337545 - RNA, 22 nt, Human
agucucagaaaagaagcaugga

SEQ ID NO: 337546 - RNA, 22 nt, Human
uucaauucugcucugaucuuag

SEQ ID NO: 337547 - RNA, 22 nt, Human
gcagggaagaucuuggagcugc

SEQ ID NO: 337548 - RNA, 22 nt, Human
uggcagcugguacagugggucu

SEQ ID NO: 337549 - RNA, 22 nt, Human
uccaggaguccugggagugauu

SEQ ID NO: 337550 - RNA, 22 nt, Human
aggacagcaguuggugagguuc

SEQ ID NO: 337551 - RNA, 20 nt, Human
uugauaggcagcuugucagg

SEQ ID NO: 337552 - RNA, 22 nt, Human
acucaggagggaucagcuauca

SEQ ID NO: 337553 - RNA, 21 nt, Human
uuucacaaaaguaugugacaa

SEQ ID NO: 337554 - RNA, 22 nt, Human
ggaggugguggcagugacaauu

SEQ ID NO: 337555 - RNA, 22 nt, Human
ugaggcagcuuuuucugugugu

SEQ ID NO: 337556 - RNA, 22 nt, Human
uccaggaggaggaaggcugcca

SEQ ID NO: 337557 - RNA, 22 nt, Human
uuuuguuguaauauaccuaucc

SEQ ID NO: 337558 - RNA, 22 nt, Human
acccaggagacggaggugcagu

SEQ ID NO: 337559 - RNA, 22 nt, Human
ccaggagcagauauggacauaa

SEQ ID NO: 337560 - RNA, 22 nt, Human
cacucugaugguuucuguucaa

SEQ ID NO: 337561 - RNA, 22 nt, Human
aaggccagcuuguagggcuggu

SEQ ID NO: 337562 - RNA, 21 nt, Human
cgcagagcgaacuugcggcgc

SEQ ID NO: 337563 - RNA, 22 nt, Human
ccuugcugaccaucaccuuuga

SEQ ID NO: 337564 - RNA, 22 nt, Human
ccagaagaccccguccaccucc

SEQ ID NO: 337565 - RNA, 20 nt, Human
ugcugucguguuuucugcuu

SEQ ID NO: 337566 - RNA, 22 nt, Human
ugugaaauauuuauauacucaa

SEQ ID NO: 337567 - RNA, 22 nt, Human
aaauauagcaauuaugccuacu

SEQ ID NO: 337568 - RNA, 22 nt, Human
gucaggauuauaauccccaugg

SEQ ID NO: 337569 - RNA, 19 nt, Human
auguaugaggucuucugcu

SEQ ID NO: 337570 - RNA, 22 nt, Human
ucaugcuuaaaagacacuugag

SEQ ID NO: 337571 - RNA, 22 nt, Human
gagagcaggaggcagcgggacg

SEQ ID NO: 337572 - RNA, 20 nt, Human
caguccaaucagaggccacc

SEQ ID NO: 337573 - RNA, 22 nt, Human
gacagcugugcaggagaagggg

SEQ ID NO: 337574 - RNA, 22 nt, Human
gaggcaccucgcgggaggaggc

SEQ ID NO: 337575 - RNA, 22 nt, Human
aaaguucuggcauuuucugucu

SEQ ID NO: 337576 - RNA, 22 nt, Human
aguugcagacgcagagauguug

SEQ ID NO: 337577 - RNA, 22 nt, Human
cuuugcaaacugucacacuuuc

SEQ ID NO: 337578 - RNA, 22 nt, Human
uuugacauugccaauuugcuca

SEQ ID NO: 337579 - RNA, 22 nt, Human
uucugucaaagacuuuuucagg

SEQ ID NO: 337580 - RNA, 22 nt, Human
cucugauuuccuuauucuguca

SEQ ID NO: 337581 - RNA, 21 nt, Human
cccaggaggagcuccggcucc

SEQ ID NO: 337582 - RNA, 22 nt, Human
uuggaaauugcaagugauuugc

SEQ ID NO: 337583 - RNA, 22 nt, Human
auaucaguaucuauguauuugu

SEQ ID NO: 337584 - RNA, 22 nt, Human
aucauuucccuuuagaucacaa

SEQ ID NO: 337585 - RNA, 22 nt, Human
cuugaaagucacaugcagcccu

SEQ ID NO: 337586 - RNA, 17 nt, Human
cccaugagcccacuccc

SEQ ID NO: 337587 - RNA, 23 nt, Human
uuugaaguugacugccuuccaga

SEQ ID NO: 337588 - RNA, 22 nt, Human
ggcucagacucccaggcccucu

SEQ ID NO: 337589 - RNA, 22 nt, Human
gcuugaaaauucauagguauuu

SEQ ID NO: 337590 - RNA, 22 nt, Human
cagcagagcugggcuuugaauu

SEQ ID NO: 337591 - RNA, 22 nt, Human
aaacacauuagcccuguggaaa

SEQ ID NO: 337592 - RNA, 22 nt, Human
ccaggagaaugggauuacccua

SEQ ID NO: 337593 - RNA, 22 nt, Human
guggaaugaauagauuugcauu

SEQ ID NO: 337594 - RNA, 22 nt, Human
cuguuaaucugcuugcaugaug

SEQ ID NO: 337595 - RNA, 22 nt, Human
aggcaggcccucuggaaaggua

SEQ ID NO: 337596 - RNA, 21 nt, Human
ucacaucuauguuaagcaaac

SEQ ID NO: 337597 - RNA, 22 nt, Human
auucugucuuuuuaaaauaaua

SEQ ID NO: 337598 - RNA, 22 nt, Human
uggcaaggccacaggugcaguu

SEQ ID NO: 337599 - RNA, 22 nt, Human
uucugucagcgucagaaauucu

SEQ ID NO: 337600 - RNA, 20 nt, Human
ucuggcaggugaacgagcug

SEQ ID NO: 337601 - RNA, 22 nt, Human
aucaggauuacacggggaugcu

SEQ ID NO: 337602 - RNA, 22 nt, Human
auuucagaugaccaaauggaaa

SEQ ID NO: 337603 - RNA, 23 nt, Human
uggacgccgacuuuggaggcgcu

SEQ ID NO: 337604 - RNA, 22 nt, Human
ggccagcuuugagcugcaggaa

SEQ ID NO: 337605 - RNA, 22 nt, Human
uuagcaucugcuguaagcuuau

SEQ ID NO: 337606 - RNA, 19 nt, Human
aaaaacuuaguccagaaag

SEQ ID NO: 337607 - RNA, 22 nt, Human
gcugauguaagacuuuugguuu

SEQ ID NO: 337608 - RNA, 22 nt, Human
ggagcuguucaggacugcuuca

SEQ ID NO: 337609 - RNA, 22 nt, Human
cugacuguaauucuguucuuaa

SEQ ID NO: 337610 - RNA, 23 nt, Human
uucuucucaauuaguugauucag

SEQ ID NO: 337611 - RNA, 22 nt, Human
caaugaaaauuuaaguugcagc

SEQ ID NO: 337612 - RNA, 22 nt, Human
ccccaggagauuugggagcaca

SEQ ID NO: 337613 - RNA, 19 nt, Human
gaggcgaggcgugcaggag

SEQ ID NO: 337614 - RNA, 22 nt, Human
auuuuccucaagccucuggaag

SEQ ID NO: 337615 - RNA, 22 nt, Human
acuagauaauuauaaaagguag

SEQ ID NO: 337616 - RNA, 22 nt, Human
uuugaaguguuauuucuaucac

SEQ ID NO: 337617 - RNA, 22 nt, Human
auguagaauggugauuggcagg

SEQ ID NO: 337618 - RNA, 22 nt, Human
agaauaugaugguuggagaauu

SEQ ID NO: 337619 - RNA, 22 nt, Human
ugaggcagcaauuguauuguau

SEQ ID NO: 337620 - RNA, 22 nt, Human
uggcagcugugcuucauucuuu

SEQ ID NO: 337621 - RNA, 22 nt, Human
uuggcaguaaaagaaaaugcuu

SEQ ID NO: 337622 - RNA, 22 nt, Human
uucugucaaaugccaguagaga

SEQ ID NO: 337623 - RNA, 22 nt, Human
uuuauucaucaucuguucauau

SEQ ID NO: 337624 - RNA, 22 nt, Human
uuggaaagauuauuauuaugaa

SEQ ID NO: 337625 - RNA, 19 nt, Human
caggaugaucccaugacac

SEQ ID NO: 337626 - RNA, 22 nt, Human
uguuuuuaaauaaugauagaaa

SEQ ID NO: 337627 - RNA, 22 nt, Human
ucucuucuaauuaggguccaug

SEQ ID NO: 337628 - RNA, 22 nt, Human
aagacuguacauuuuccagucu

SEQ ID NO: 337629 - RNA, 22 nt, Human
cuacccaggcuuagagggcugg

SEQ ID NO: 337630 - RNA, 22 nt, Human
auaacuuagaguaggcaaaagu

SEQ ID NO: 337631 - RNA, 22 nt, Human
uucaggauaguggugaguggca

SEQ ID NO: 337632 - RNA, 22 nt, Human
gccacaggcacuuaagggcugg

SEQ ID NO: 337633 - RNA, 22 nt, Human
cccaggaggaggaaaaagcucg

SEQ ID NO: 337634 - RNA, 22 nt, Human
ucuccucuauuucuguauguau

SEQ ID NO: 337635 - RNA, 22 nt, Human
gugauuuucuccuccuagaagu

SEQ ID NO: 337636 - RNA, 22 nt, Human
gcuuuggaugugugccugaggu

SEQ ID NO: 337637 - RNA, 22 nt, Human
caggcagcccugcaccaagugu

SEQ ID NO: 337638 - RNA, 22 nt, Human
cgccucagccguggucaucuuc

SEQ ID NO: 337639 - RNA, 22 nt, Human
ucugauuagagcauucuugagu

SEQ ID NO: 337640 - RNA, 22 nt, Human
aagcacauuguacauuugugcu

SEQ ID NO: 337641 - RNA, 22 nt, Human
cugcugugucagaguccagggg

SEQ ID NO: 337642 - RNA, 22 nt, Human
uuguaaaugaccuuuucuaauu

SEQ ID NO: 337643 - RNA, 22 nt, Human
cugcugugagugguucuugccu

SEQ ID NO: 337644 - RNA, 22 nt, Human
uugaaaguuaucuagauucuga

SEQ ID NO: 337645 - RNA, 22 nt, Human
guucuucagaggggaaagaacc

SEQ ID NO: 337646 - RNA, 23 nt, Human
aaacuacauuuauaguuuuucuc

SEQ ID NO: 337647 - RNA, 22 nt, Human
cacaaauggccguguucaaaga

SEQ ID NO: 337648 - RNA, 22 nt, Human
augcagcugugggcaagaaaug

SEQ ID NO: 337649 - RNA, 22 nt, Human
ccugucacgaugacugcacucu

SEQ ID NO: 337650 - RNA, 22 nt, Human
uuauccuggauuauauauguga

SEQ ID NO: 337651 - RNA, 22 nt, Human
cccaggaggucgaagcugcagu

SEQ ID NO: 337652 - RNA, 22 nt, Human
cccagaaggucgaggcugcagu

SEQ ID NO: 337653 - RNA, 22 nt, Human
uucugggacaucuggacaguuu

SEQ ID NO: 337654 - RNA, 22 nt, Human
cugccagucuaugcugcucggc

SEQ ID NO: 337655 - RNA, 22 nt, Human
ucuacugcacuggugucucauc

SEQ ID NO: 337656 - RNA, 22 nt, Human
ccacagagacaggguccuugcu

SEQ ID NO: 337657 - RNA, 22 nt, Human
ggcagcuuccuaggagagggca

SEQ ID NO: 337658 - RNA, 22 nt, Human
ucuucagacuccaaauguuuua

SEQ ID NO: 337659 - RNA, 22 nt, Human
aaauguuucuacuugugagcau

SEQ ID NO: 337660 - RNA, 22 nt, Human
uagacauuucugguuauugaca

SEQ ID NO: 337661 - RNA, 22 nt, Human
cuucuucaucuguaaaacuugg

SEQ ID NO: 337662 - RNA, 22 nt, Human
cagcuggccaaucagggcgccc

SEQ ID NO: 337663 - RNA, 22 nt, Human
agauaugugcgucuuagauuga

SEQ ID NO: 337664 - RNA, 18 nt, Human
gagaggagccagaauuuu

SEQ ID NO: 337665 - RNA, 22 nt, Human
uucucugaaggccaugcucacu

SEQ ID NO: 337666 - RNA, 22 nt, Human
gaaguacaguuuuaucuagcca

SEQ ID NO: 337667 - RNA, 22 nt, Human
auaugagaauuggaaaauauca

SEQ ID NO: 337668 - RNA, 22 nt, Human
aaguuucaaauguugauuaugc

SEQ ID NO: 337669 - RNA, 22 nt, Human
ucagauggguuuugaaggaugu

SEQ ID NO: 337670 - RNA, 22 nt, Human
uguauaaauuuaaauuccugcu

SEQ ID NO: 337671 - RNA, 22 nt, Human
ucccaggaauugaagccagugu

SEQ ID NO: 337672 - RNA, 20 nt, Human
ucauuguguugccaauuccc

SEQ ID NO: 337673 - RNA, 22 nt, Human
agaggacaaaaugagaagugcu

SEQ ID NO: 337674 - RNA, 22 nt, Human
agcauccaacaggagggaaggg

SEQ ID NO: 337675 - RNA, 22 nt, Human
aauaacuuaagaaauuucccca

SEQ ID NO: 337676 - RNA, 22 nt, Human
gagaggggcccaagccacauag

SEQ ID NO: 337677 - RNA, 22 nt, Human
aaagccagagcaagcugucaca

SEQ ID NO: 337678 - RNA, 22 nt, Human
agaggccagguccagaguuugu

SEQ ID NO: 337679 - RNA, 22 nt, Human
ugucugugaccucuuuggagcc

SEQ ID NO: 337680 - RNA, 22 nt, Human
gucugucaucugagauggagug

SEQ ID NO: 337681 - RNA, 22 nt, Human
aucaaauauaauaauuuucgcu

SEQ ID NO: 337682 - RNA, 22 nt, Human
cauggcugcgagaagagugggu

SEQ ID NO: 337683 - RNA, 22 nt, Human
uuaaauuagucaagcuucucug

SEQ ID NO: 337684 - RNA, 22 nt, Human
augggaggaugcucgggugcuc

SEQ ID NO: 337685 - RNA, 22 nt, Human
uuugaaaggaauuaggaugaca

SEQ ID NO: 337686 - RNA, 22 nt, Human
cugcaucacagcaggaggcaca

SEQ ID NO: 337687 - RNA, 23 nt, Human
uuagagaugauuaaaaaaucuug

SEQ ID NO: 337688 - RNA, 22 nt, Human
uuauucuuuucuccagaauccc

SEQ ID NO: 337689 - RNA, 22 nt, Human
guugaaagcuuuucauuuaguu

SEQ ID NO: 337690 - RNA, 22 nt, Human
cuucuucagcacaauauugaug

SEQ ID NO: 337691 - RNA, 22 nt, Human
uugugaguagugccgcaauaaa

SEQ ID NO: 337692 - RNA, 22 nt, Human
uuggaaaaacacgauagugguu

SEQ ID NO: 337693 - RNA, 22 nt, Human
gugacagucaaagacaugacuu

SEQ ID NO: 337694 - RNA, 22 nt, Human
aucaggaugaagcuguagcgaa

SEQ ID NO: 337695 - RNA, 20 nt, Human
accaggagauggaggcaggg

SEQ ID NO: 337696 - RNA, 22 nt, Human
agggcagccauugagggauucu

SEQ ID NO: 337697 - RNA, 22 nt, Human
acauuucacuguucacagcagg

SEQ ID NO: 337698 - RNA, 22 nt, Human
gcagaggcuguagggaagguug

SEQ ID NO: 337699 - RNA, 20 nt, Human
ugugaaagcaguagaaugac

SEQ ID NO: 337700 - RNA, 22 nt, Human
ucagagaguuggaaagaauuaa

SEQ ID NO: 337701 - RNA, 21 nt, Human
acucaggagacuaacuauguc

SEQ ID NO: 337702 - RNA, 22 nt, Human
uuccaugaagggcagccucuca

SEQ ID NO: 337703 - RNA, 22 nt, Human
uccaugucuucaugugucuaac

SEQ ID NO: 337704 - RNA, 22 nt, Human
uuaaauauuuucagcaggguca

SEQ ID NO: 337705 - RNA, 22 nt, Human
uaauaguuucauaaugugcuuc

SEQ ID NO: 337706 - RNA, 22 nt, Human
gucuucuuuaaccuacuaaagc

SEQ ID NO: 337707 - RNA, 22 nt, Human
gaggcagugucgguggcaggau

SEQ ID NO: 337708 - RNA, 22 nt, Human
agagggauaauauguauuguaa

SEQ ID NO: 337709 - RNA, 22 nt, Human
uucaggauuguguuuuuccuga

SEQ ID NO: 337710 - RNA, 22 nt, Human
ggagugggaacaaugacauggu

SEQ ID NO: 337711 - RNA, 22 nt, Human
cuuguccccagcagguugguuu

SEQ ID NO: 337712 - RNA, 22 nt, Human
cugucauuuaagacauucugga

SEQ ID NO: 337713 - RNA, 22 nt, Human
accauguguuuuacacauggua

SEQ ID NO: 337714 - RNA, 19 nt, Human
uugaaauuguuugauaugg

SEQ ID NO: 337715 - RNA, 22 nt, Human
augcaucuauucccaagggcag

SEQ ID NO: 337716 - RNA, 22 nt, Human
caggcagcaggagcccugcucg

SEQ ID NO: 337717 - RNA, 22 nt, Human
aggacagcagugcuggcacuug

SEQ ID NO: 337718 - RNA, 22 nt, Human
aggcaggccccugagaauagac

SEQ ID NO: 337719 - RNA, 22 nt, Human
uucacagacuuuccauagauug

SEQ ID NO: 337720 - RNA, 19 nt, Human
agccuggcuuugcucugcu

SEQ ID NO: 337721 - RNA, 22 nt, Human
ucugcucugggccagcuauuaa

SEQ ID NO: 337722 - RNA, 22 nt, Human
ggcagcugcaaaucugcucugu

SEQ ID NO: 337723 - RNA, 22 nt, Human
gcauaugaucacgugugucggu

SEQ ID NO: 337724 - RNA, 22 nt, Human
ugaaagguuauuuaggucugcu

SEQ ID NO: 337725 - RNA, 20 nt, Human
cgugcugugaccuugagcau

SEQ ID NO: 337726 - RNA, 22 nt, Human
ccccaggacguggcccucauag

SEQ ID NO: 337727 - RNA, 22 nt, Human
aaggcagcaccgccuccugaaa

SEQ ID NO: 337728 - RNA, 22 nt, Human
ugagagggcccagagcacacca

SEQ ID NO: 337729 - RNA, 22 nt, Human
aaacacaucauucaugucguca

SEQ ID NO: 337730 - RNA, 22 nt, Human
uuauuucauugauuucuaagac

SEQ ID NO: 337731 - RNA, 21 nt, Human
uuugaaagugggugauucuuu

SEQ ID NO: 337732 - RNA, 22 nt, Human
ucaggaugguccuuuaugagaa

SEQ ID NO: 337733 - RNA, 22 nt, Human
aggcagcugugaggacuggauu

SEQ ID NO: 337734 - RNA, 22 nt, Human
auguuugaaauuguaaguauau

SEQ ID NO: 337735 - RNA, 20 nt, Human
ggcagcuugggcagcaguua

SEQ ID NO: 337736 - RNA, 22 nt, Human
uuugaagugggcauuagaaccu

SEQ ID NO: 337737 - RNA, 22 nt, Human
uuuaucuuuaggacuuugcaga

SEQ ID NO: 337738 - RNA, 22 nt, Human
uguccauggauagagcugcucg

SEQ ID NO: 337739 - RNA, 22 nt, Human
gaggagagaugguagauugggu

SEQ ID NO: 337740 - RNA, 22 nt, Human
gaacacauuagucugaguuggc

SEQ ID NO: 337741 - RNA, 22 nt, Human
uaaggccagcaugaaugcagca

SEQ ID NO: 337742 - RNA, 22 nt, Human
uccugaggcucacuuugaaugu

SEQ ID NO: 337743 - RNA, 22 nt, Human
ugugaaggagaugaagggagug

SEQ ID NO: 337744 - RNA, 22 nt, Human
acccaggauagagugcugcagu

SEQ ID NO: 337745 - RNA, 22 nt, Human
auuauuauuguugauguuaggg

SEQ ID NO: 337746 - RNA, 22 nt, Human
auuugcuuucagguauaaaagg

SEQ ID NO: 337747 - RNA, 22 nt, Human
uguaggaaaaacaaugaucugc

SEQ ID NO: 337748 - RNA, 22 nt, Human
uucugucucuguguuuacauua

SEQ ID NO: 337749 - RNA, 22 nt, Human
cuacaaugacagaauugaguag

SEQ ID NO: 337750 - RNA, 22 nt, Human
uccaggaggugaggggaccaaa

SEQ ID NO: 337751 - RNA, 22 nt, Human
guccaugauucugugacacccu

SEQ ID NO: 337752 - RNA, 17 nt, Human
ugauaguucauuuuaag

SEQ ID NO: 337753 - RNA, 22 nt, Human
ucucagaguuuagagcugagcc

SEQ ID NO: 337754 - RNA, 22 nt, Human
ugucuucaguaaaauacacuau

SEQ ID NO: 337755 - RNA, 21 nt, Human
agagagggagaugaaacaucc

SEQ ID NO: 337756 - RNA, 22 nt, Human
uaacacauauuugcaguaagca

SEQ ID NO: 337757 - RNA, 22 nt, Human
uccaugagagguaacuuuacaa

SEQ ID NO: 337758 - RNA, 22 nt, Human
cccaggaggacauuccauaccc

SEQ ID NO: 337759 - RNA, 22 nt, Human
gcaguucuacuuauccauagac

SEQ ID NO: 337760 - RNA, 22 nt, Human
cauuuguaauacugacuugcag

SEQ ID NO: 337761 - RNA, 22 nt, Human
ucaaauaaugccauucaucauc

SEQ ID NO: 337762 - RNA, 22 nt, Human
cugcugugcuuguggccacccg

SEQ ID NO: 337763 - RNA, 22 nt, Human
ugugcaggugcaggaagggggc

SEQ ID NO: 337764 - RNA, 17 nt, Human
ccuguguuugcuccuuc

SEQ ID NO: 337765 - RNA, 22 nt, Human
ccaggagaugggagcaucuaaa

SEQ ID NO: 337766 - RNA, 23 nt, Human
uguugaaguaacuguuacauaga

SEQ ID NO: 337767 - RNA, 22 nt, Human
cauuuacuuaaaucuuuacaag

SEQ ID NO: 337768 - RNA, 22 nt, Human
cauaauuucccaagagauugaa

SEQ ID NO: 337769 - RNA, 22 nt, Human
uucaauucaauucuaaauauau

SEQ ID NO: 337770 - RNA, 22 nt, Human
cauucauuagaauagauaugua

SEQ ID NO: 337771 - RNA, 22 nt, Human
ggugaaggcacaagagggcaag

SEQ ID NO: 337772 - RNA, 22 nt, Human
uguaugaauauguauuuucaua

SEQ ID NO: 337773 - RNA, 22 nt, Human
caggcagcagaggaguguggga

SEQ ID NO: 337774 - RNA, 22 nt, Human
cugagcugggaguagagacucu

SEQ ID NO: 337775 - RNA, 22 nt, Human
gucuuuaugguaugaaaacuga

SEQ ID NO: 337776 - RNA, 22 nt, Human
ccaggcugcagucaaggggcau

SEQ ID NO: 337777 - RNA, 22 nt, Human
cucccaggacucagaggagaag

SEQ ID NO: 337778 - RNA, 18 nt, Human
gcagcugacacuggaguu

SEQ ID NO: 337779 - RNA, 22 nt, Human
ccauuguaaauucuguggaagu

SEQ ID NO: 337780 - RNA, 23 nt, Human
uuugaaaguaucaacucgccuga

SEQ ID NO: 337781 - RNA, 22 nt, Human
agcuggcagucauccuagugag

SEQ ID NO: 337782 - RNA, 22 nt, Human
uuccuuaguugacugucuuagu

SEQ ID NO: 337783 - RNA, 22 nt, Human
uucuucuuucccccugugguac

SEQ ID NO: 337784 - RNA, 22 nt, Human
ucucuucuaauuuucccgagua

SEQ ID NO: 337785 - RNA, 22 nt, Human
caagauggguguugugaugguu

SEQ ID NO: 337786 - RNA, 22 nt, Human
aaaggugacacucugccagcug

SEQ ID NO: 337787 - RNA, 22 nt, Human
ucuggucaguaauaagaagugg

SEQ ID NO: 337788 - RNA, 22 nt, Human
ccuugcguuuuacagcuucuag

SEQ ID NO: 337789 - RNA, 22 nt, Human
cauucucaauaguagaugagua

SEQ ID NO: 337790 - RNA, 22 nt, Human
uaugacauuauaaaggauuauu

SEQ ID NO: 337791 - RNA, 22 nt, Human
aucugcuugaaugagcaacagg

SEQ ID NO: 337792 - RNA, 22 nt, Human
guuaaauucgaugauggauaaa

SEQ ID NO: 337793 - RNA, 22 nt, Human
gaaacauauuaauccagugaaa

SEQ ID NO: 337794 - RNA, 22 nt, Human
cacauauuugaugaagcuuugu

SEQ ID NO: 337795 - RNA, 22 nt, Human
uuucuaggcacagugucuuccc

SEQ ID NO: 337796 - RNA, 22 nt, Human
ggcaagcucaggccucaggugu

SEQ ID NO: 337797 - RNA, 22 nt, Human
aaauuguugaucuacaguaagg

SEQ ID NO: 337798 - RNA, 19 nt, Human
ucauuguugguuugucggg

SEQ ID NO: 337799 - RNA, 22 nt, Human
ucaagugcuugugagguauuug

SEQ ID NO: 337800 - RNA, 22 nt, Human
uucuucuugucugcccucacau

SEQ ID NO: 337801 - RNA, 22 nt, Human
uucaugugauaaaugugugacu

SEQ ID NO: 337802 - RNA, 22 nt, Human
ggccagcucugcacagcagcug

SEQ ID NO: 337803 - RNA, 22 nt, Human
gcauguguuauuuuauguauga

SEQ ID NO: 337804 - RNA, 22 nt, Human
auuaaauuagcaaacugugaaa

SEQ ID NO: 337805 - RNA, 22 nt, Human
gagggaauggugugcaagaggu

SEQ ID NO: 337806 - RNA, 22 nt, Human
uaaauuaugucacaugacucug

SEQ ID NO: 337807 - RNA, 22 nt, Human
uugcccagaguccacagcguac

SEQ ID NO: 337808 - RNA, 22 nt, Human
cuggcugggagcgagcugcuca

SEQ ID NO: 337809 - RNA, 23 nt, Human
uuuuccagaaucgacucuguaga

SEQ ID NO: 337810 - RNA, 22 nt, Human
cccaggaggcagagguuggagc

SEQ ID NO: 337811 - RNA, 22 nt, Human
uauagccauuuccaguggcauc

SEQ ID NO: 337812 - RNA, 22 nt, Human
uugugaaauguuucaaaauagu

SEQ ID NO: 337813 - RNA, 22 nt, Human
uacacacagaggccaugggauu

SEQ ID NO: 337814 - RNA, 22 nt, Human
uauaauguuuuccauggacuga

SEQ ID NO: 337815 - RNA, 22 nt, Human
acccaggacuuggcaaccucau

SEQ ID NO: 337816 - RNA, 22 nt, Human
aggcagccaucugcaggaagga

SEQ ID NO: 337817 - RNA, 22 nt, Human
aaugcuuuuugcgaaaugugca

SEQ ID NO: 337818 - RNA, 22 nt, Human
aagggaggccagagguuuugca

SEQ ID NO: 337819 - RNA, 22 nt, Human
ugaaaugauguacaagaaggca

SEQ ID NO: 337820 - RNA, 22 nt, Human
acccaggagguggaggcugcag

SEQ ID NO: 337821 - RNA, 22 nt, Human
uggcagcuggaucccaaggcag

SEQ ID NO: 337822 - RNA, 22 nt, Human
cacucaggguacaauggagggc

SEQ ID NO: 337823 - RNA, 18 nt, Human
ggucuuuaggucaguguc

SEQ ID NO: 337824 - RNA, 22 nt, Human
agcagagguuuguuggaaaccu

SEQ ID NO: 337825 - RNA, 22 nt, Human
cagcaggagcagucagacuccu

SEQ ID NO: 337826 - RNA, 22 nt, Human
uauuuccaaaagccuauuauga

SEQ ID NO: 337827 - RNA, 22 nt, Human
acaauacaggcuucuggacuua

SEQ ID NO: 337828 - RNA, 22 nt, Human
gggcagcugccagaggccaugg

SEQ ID NO: 337829 - RNA, 22 nt, Human
uucauacacgaaaaugcaugca

SEQ ID NO: 337830 - RNA, 20 nt, Human
uuaucugucaaucugucuca

SEQ ID NO: 337831 - RNA, 22 nt, Human
ucuuuuggaaaugaugugcagg

SEQ ID NO: 337832 - RNA, 22 nt, Human
gaauauuuucaguacagauggu

SEQ ID NO: 337833 - RNA, 22 nt, Human
ugaggcagcccacuuuccuuag

SEQ ID NO: 337834 - RNA, 22 nt, Human
ucugcucuguggcuucagcuaa

SEQ ID NO: 337835 - RNA, 22 nt, Human
cuggcuuucucugugguguuca

SEQ ID NO: 337836 - RNA, 22 nt, Human
ucauucuugaucacuaguuagu

SEQ ID NO: 337837 - RNA, 22 nt, Human
aucaggaucugggagccugaaa

SEQ ID NO: 337838 - RNA, 22 nt, Human
ugaggggauacgguacacauug

SEQ ID NO: 337839 - RNA, 22 nt, Human
augcagcuucaggauuaugaug

SEQ ID NO: 337840 - RNA, 22 nt, Human
ugcuuuggaucuauuugcugag

SEQ ID NO: 337841 - RNA, 23 nt, Human
acauacauggagauaaagugaug

SEQ ID NO: 337842 - RNA, 22 nt, Human
ggcacagagcccagcuuccuag

SEQ ID NO: 337843 - RNA, 22 nt, Human
agaccuggauuccaauccuacc

SEQ ID NO: 337844 - RNA, 22 nt, Human
ucugaaauagaagugucuuucu

SEQ ID NO: 337845 - RNA, 22 nt, Human
uucccucucacuuaaagcuugg

SEQ ID NO: 337846 - RNA, 22 nt, Human
uacauaugaacuuuauaacuug

SEQ ID NO: 337847 - RNA, 22 nt, Human
cuucagaggggacucaaaguca

SEQ ID NO: 337848 - RNA, 21 nt, Human
cccacggaaugaugaggcacu

SEQ ID NO: 337849 - RNA, 22 nt, Human
aggcugcugaggccaccacgcu

SEQ ID NO: 337850 - RNA, 22 nt, Human
gaaaggccauuucugaggguuu

SEQ ID NO: 337851 - RNA, 19 nt, Human
ccaggagagcuuggagaag

SEQ ID NO: 337852 - RNA, 22 nt, Human
ugaggcagugugagauaauaaa

SEQ ID NO: 337853 - RNA, 22 nt, Human
aaaggccacugcaagggaaggu

SEQ ID NO: 337854 - RNA, 22 nt, Human
cucaggauccaucuccugcccu

SEQ ID NO: 337855 - RNA, 22 nt, Human
uaacauuagguagacauaagcc

SEQ ID NO: 337856 - RNA, 22 nt, Human
ugucaagucucugaaugaaaug

SEQ ID NO: 337857 - RNA, 22 nt, Human
gcauguguugguuuaugcaugu

SEQ ID NO: 337858 - RNA, 22 nt, Human
gcugggaagugcaagaucaagg

SEQ ID NO: 337859 - RNA, 22 nt, Human
aggcaagcgcagaagcggagga

SEQ ID NO: 337860 - RNA, 22 nt, Human
cuucucagcauuuugucagucu

SEQ ID NO: 337861 - RNA, 22 nt, Human
uggcagcuggcucugcgcaggc

SEQ ID NO: 337862 - RNA, 22 nt, Human
gcagcuccuccugggcuggaga

SEQ ID NO: 337863 - RNA, 22 nt, Human
uugggcucaggaguuugagacc

SEQ ID NO: 337864 - RNA, 22 nt, Human
uccaugaggcagggaggcuggc

SEQ ID NO: 337865 - RNA, 22 nt, Human
uaugaacuguaacccucaccgc

SEQ ID NO: 337866 - RNA, 22 nt, Human
agagcagcugugacauggacag

SEQ ID NO: 337867 - RNA, 22 nt, Human
uggggcucaccuaggcuggaag

SEQ ID NO: 337868 - RNA, 22 nt, Human
caauaguucgguccugaaggcc

SEQ ID NO: 337869 - RNA, 22 nt, Human
ugcuuucaaaggcuuucuagau

SEQ ID NO: 337870 - RNA, 22 nt, Human
auguaugaugcuaggcucucag

SEQ ID NO: 337871 - RNA, 22 nt, Human
aaauaguuguuuggaucaauaa

SEQ ID NO: 337872 - RNA, 22 nt, Human
aggaagcuaaccagggagugag

SEQ ID NO: 337873 - RNA, 22 nt, Human
uguagaaacuacacaugcaaca

SEQ ID NO: 337874 - RNA, 22 nt, Human
ugcuucugggcaaaugugugug

SEQ ID NO: 337875 - RNA, 22 nt, Human
ugucauaacuuagugacaaauc

SEQ ID NO: 337876 - RNA, 22 nt, Human
uuucaguuguccuguuaauagc

SEQ ID NO: 337877 - RNA, 22 nt, Human
uuccuugaaugagucauggaaa

SEQ ID NO: 337878 - RNA, 22 nt, Human
ccaggagagcaggcgugcagcu

SEQ ID NO: 337879 - RNA, 22 nt, Human
acauuuaaccaaacuguuuaau

SEQ ID NO: 337880 - RNA, 22 nt, Human
uuuucuuauggugaagcacaaa

SEQ ID NO: 337881 - RNA, 22 nt, Human
ccaggagagcauugcacagagg

SEQ ID NO: 337882 - RNA, 22 nt, Human
aaaguguggucguucauuuugu

SEQ ID NO: 337883 - RNA, 19 nt, Human
uucuccaggcugcagaggg

SEQ ID NO: 337884 - RNA, 22 nt, Human
ccugccugcaccuucucugggg

SEQ ID NO: 337885 - RNA, 22 nt, Human
aaugucauugguaaagauuagg

SEQ ID NO: 337886 - RNA, 22 nt, Human
uuucugaaaucucuuuugagga

SEQ ID NO: 337887 - RNA, 22 nt, Human
cuacccagauccaggauggcua

SEQ ID NO: 337888 - RNA, 22 nt, Human
aaaaugacauuccagugauauu

SEQ ID NO: 337889 - RNA, 22 nt, Human
cugcuuuguaaaauagacauaa

SEQ ID NO: 337890 - RNA, 22 nt, Human
aaucuguuuaguucugcguaug

SEQ ID NO: 337891 - RNA, 22 nt, Human
ggguggagaggcuaaguccagu

SEQ ID NO: 337892 - RNA, 22 nt, Human
agauauguuuguauauauuugu

SEQ ID NO: 337893 - RNA, 22 nt, Human
uuucuaggucuuccauacugcc

SEQ ID NO: 337894 - RNA, 22 nt, Human
uucuaugccauguucagcuacu

SEQ ID NO: 337895 - RNA, 22 nt, Human
agggauggaagacuugaagacc

SEQ ID NO: 337896 - RNA, 22 nt, Human
guagccauuggcaaugaagccu

SEQ ID NO: 337897 - RNA, 22 nt, Human
aaauauaguaaaugcauaguuc

SEQ ID NO: 337898 - RNA, 22 nt, Human
ucuucauauauaaaguggaaua

SEQ ID NO: 337899 - RNA, 22 nt, Human
uccaggagaggccugaccaggu

SEQ ID NO: 337900 - RNA, 22 nt, Human
ugaaagauugugauucaauaug

SEQ ID NO: 337901 - RNA, 22 nt, Human
ugaggcaggaguuaaugugcuc

SEQ ID NO: 337902 - RNA, 22 nt, Human
ugcuuggccuacuuguccuuug

SEQ ID NO: 337903 - RNA, 22 nt, Human
acccaggaggugacacagggcu

SEQ ID NO: 337904 - RNA, 22 nt, Human
auguucuuguucaaaugucagu

SEQ ID NO: 337905 - RNA, 21 nt, Human
uucucagaucgaguagugaga

SEQ ID NO: 337906 - RNA, 22 nt, Human
gaagcagcaaguauaggacagg

SEQ ID NO: 337907 - RNA, 22 nt, Human
cuauugaauuaacuauuaaagu

SEQ ID NO: 337908 - RNA, 22 nt, Human
gaaacuuacuuacucacauuuc

SEQ ID NO: 337909 - RNA, 22 nt, Human
aacuagucagugauucucagaa

SEQ ID NO: 337910 - RNA, 22 nt, Human
ggacaagccugugaguggguuu

SEQ ID NO: 337911 - RNA, 22 nt, Human
uccaggagguagugcuuaauuu

SEQ ID NO: 337912 - RNA, 19 nt, Human
cccaggagucuggcugguu

SEQ ID NO: 337913 - RNA, 22 nt, Human
gagguggucgaggagggguacc

SEQ ID NO: 337914 - RNA, 22 nt, Human
gaggcaucugggcacagaagug

SEQ ID NO: 337915 - RNA, 22 nt, Human
ucuucucucauguaggagggaa

SEQ ID NO: 337916 - RNA, 22 nt, Human
uguaugaauauguuggggaggu

SEQ ID NO: 337917 - RNA, 22 nt, Human
agugcagcaugcuggggaggcu

SEQ ID NO: 337918 - RNA, 22 nt, Human
gaggcagcugaagcuucaaaga

SEQ ID NO: 337919 - RNA, 22 nt, Human
ggaggcaggaaagacagguuca

SEQ ID NO: 337920 - RNA, 22 nt, Human
aggaaagguagcgugccagcag

SEQ ID NO: 337921 - RNA, 22 nt, Human
ugcauguguguguauuuauaaa

SEQ ID NO: 337922 - RNA, 22 nt, Human
agucagugaaaacuagaauguu

SEQ ID NO: 337923 - RNA, 22 nt, Human
cccaggaaacccgaaggcgacc

SEQ ID NO: 337924 - RNA, 22 nt, Human
ucuuuucaucauuuaauaggua

SEQ ID NO: 337925 - RNA, 22 nt, Human
cacaauuuguuuuaucaguauu

SEQ ID NO: 337926 - RNA, 22 nt, Human
uagcauuucccaaaugcauuug

SEQ ID NO: 337927 - RNA, 22 nt, Human
auuuccuuugcaaagacugugc

SEQ ID NO: 337928 - RNA, 22 nt, Human
cagcaggauaugguggagagag

SEQ ID NO: 337929 - RNA, 22 nt, Human
uuugaaagggacaaagucacug

SEQ ID NO: 337930 - RNA, 22 nt, Human
gcugcccaggguggagccggcu

SEQ ID NO: 337931 - RNA, 18 nt, Human
agucuucugauccauuuu

SEQ ID NO: 337932 - RNA, 22 nt, Human
aggaagcuccuggagagccagu

SEQ ID NO: 337933 - RNA, 17 nt, Human
gccaggagguuugagcu

SEQ ID NO: 337934 - RNA, 22 nt, Human
aagagggcugcaaucuuauugc

SEQ ID NO: 337935 - RNA, 22 nt, Human
acccaggacucucuuccaguag

SEQ ID NO: 337936 - RNA, 22 nt, Human
gaggccagggaugcaaugagag

SEQ ID NO: 337937 - RNA, 22 nt, Human
auucuucaccauggauaauuug

SEQ ID NO: 337938 - RNA, 22 nt, Human
gcugaaugaauguauuuuaaaa

SEQ ID NO: 337939 - RNA, 22 nt, Human
ugucucugauaaguaguucagu

SEQ ID NO: 337940 - RNA, 22 nt, Human
ggccagagaauaugccuuacgu

SEQ ID NO: 337941 - RNA, 22 nt, Human
gucuucuguaagaugagguccc

SEQ ID NO: 337942 - RNA, 22 nt, Human
cuuuggcaaugucauuuucaau

SEQ ID NO: 337943 - RNA, 22 nt, Human
agaggacagguuuuccaugggc

SEQ ID NO: 337944 - RNA, 22 nt, Human
uugaagaggacuuugcagcugu

SEQ ID NO: 337945 - RNA, 22 nt, Human
uuaaaaugaauauugauuagca

SEQ ID NO: 337946 - RNA, 18 nt, Human
agggaguuuuagggaagg

SEQ ID NO: 337947 - RNA, 22 nt, Human
acucaggaauggggcugggacu

SEQ ID NO: 337948 - RNA, 22 nt, Human
ccaaaugugccuguuucaacaa

SEQ ID NO: 337949 - RNA, 22 nt, Human
uauugacaauuugugaaacuau

SEQ ID NO: 337950 - RNA, 22 nt, Human
uuggaaauacagcaguuacuuu

SEQ ID NO: 337951 - RNA, 22 nt, Human
aggcaggcaaccaccugggaag

SEQ ID NO: 337952 - RNA, 18 nt, Human
acucaggaaaugaugaca

SEQ ID NO: 337953 - RNA, 22 nt, Human
ugaggcagggagaguggauaug

SEQ ID NO: 337954 - RNA, 22 nt, Human
augcuguggccagaguucaacu

SEQ ID NO: 337955 - RNA, 22 nt, Human
augcuguguuugagaaccuagg

SEQ ID NO: 337956 - RNA, 22 nt, Human
ugaggcagcauucuucaagaca

SEQ ID NO: 337957 - RNA, 22 nt, Human
cagcuagcuaagaaggccagag

SEQ ID NO: 337958 - RNA, 22 nt, Human
gccagagguucaacaacugucu

SEQ ID NO: 337959 - RNA, 22 nt, Human
caugcuguguguuuuagcucca

SEQ ID NO: 337960 - RNA, 22 nt, Human
ucauuuguaccauuuuuuaaga

SEQ ID NO: 337961 - RNA, 22 nt, Human
gcuuuggagccuguguucugcc

SEQ ID NO: 337962 - RNA, 22 nt, Human
ucauuuaauagcuuuugucuuu

SEQ ID NO: 337963 - RNA, 22 nt, Human
gugggagcuuuggcaucaggcu

SEQ ID NO: 337964 - RNA, 22 nt, Human
guguguuuagcauuagcagggg

SEQ ID NO: 337965 - RNA, 21 nt, Human
ggcagccucuguggaagggga

SEQ ID NO: 337966 - RNA, 22 nt, Human
uuucacauuagauaugucauuu

SEQ ID NO: 337967 - RNA, 22 nt, Human
uuuccuaguucuaagaaaugua

SEQ ID NO: 337968 - RNA, 22 nt, Human
cccaggaagaggggucaggugu

SEQ ID NO: 337969 - RNA, 22 nt, Human
agaggauguucuaggcacucau

SEQ ID NO: 337970 - RNA, 22 nt, Human
uuguaugaggauagcaagaagc

SEQ ID NO: 337971 - RNA, 22 nt, Human
agugcuguaacaacuuauuugg

SEQ ID NO: 337972 - RNA, 19 nt, Human
uaaggccaaaaguaagugu

SEQ ID NO: 337973 - RNA, 22 nt, Human
ucuguggauuuuaguguucaug

SEQ ID NO: 337974 - RNA, 22 nt, Human
ugcuagugcaggguuuucaguu

SEQ ID NO: 337975 - RNA, 22 nt, Human
uguugaagauaaaguucucauu

SEQ ID NO: 337976 - RNA, 22 nt, Human
aaaggaagauugagcuuuucca

SEQ ID NO: 337977 - RNA, 22 nt, Human
uauuucagggagaauaaauuug

SEQ ID NO: 337978 - RNA, 22 nt, Human
aagaggagacuucagcaacuug

SEQ ID NO: 337979 - RNA, 22 nt, Human
uagcauuuauuccagauuugga

SEQ ID NO: 337980 - RNA, 22 nt, Human
ucccaggacaggccacauggaa

SEQ ID NO: 337981 - RNA, 22 nt, Human
gaggauggaggugugagcuaug

SEQ ID NO: 337982 - RNA, 22 nt, Human
gguuauauaauucagugcuuuc

SEQ ID NO: 337983 - RNA, 22 nt, Human
auucuuaauugccaugcuguau

SEQ ID NO: 337984 - RNA, 22 nt, Human
agugcuuuagcauccaacuguc

SEQ ID NO: 337985 - RNA, 22 nt, Human
ugugaaaagcaggcuacuuucu

SEQ ID NO: 337986 - RNA, 17 nt, Human
agguauaaaaugguagc

SEQ ID NO: 337987 - RNA, 22 nt, Human
uauuugaaaguguacaaaaacu

SEQ ID NO: 337988 - RNA, 22 nt, Human
gaaaggcaguacagcugagccu

SEQ ID NO: 337989 - RNA, 23 nt, Human
aaugauuucaugaugauagcagc

SEQ ID NO: 337990 - RNA, 22 nt, Human
cuggcuguauuaguuugauccu

SEQ ID NO: 337991 - RNA, 22 nt, Human
aaggcagcagugcacgacugau

SEQ ID NO: 337992 - RNA, 22 nt, Human
uucugucacuuaggaggucaua

SEQ ID NO: 337993 - RNA, 22 nt, Human
ccccaggagcuuguuuuagaga

SEQ ID NO: 337994 - RNA, 22 nt, Human
uaacacauagauauuuuaacuu

SEQ ID NO: 337995 - RNA, 22 nt, Human
gaaggccacaagagaaguuaag

SEQ ID NO: 337996 - RNA, 22 nt, Human
ucugggaaaugcuguuccuugu

SEQ ID NO: 337997 - RNA, 22 nt, Human
cagagcucuauguucauggagg

SEQ ID NO: 337998 - RNA, 22 nt, Human
uugguuuacuaggauucaaauu

SEQ ID NO: 337999 - RNA, 22 nt, Human
aagagaggacauggugaaccug

SEQ ID NO: 338000 - RNA, 22 nt, Human
ugcuauaaguagacauucaaca

SEQ ID NO: 338001 - RNA, 22 nt, Human
gcccaguaguucaagguugcag

SEQ ID NO: 338002 - RNA, 23 nt, Human
uucuuucaagaaguucacagugc

SEQ ID NO: 338003 - RNA, 22 nt, Human
cccaggaaaguggaggcggcug

SEQ ID NO: 338004 - RNA, 22 nt, Human
uagcaauagaaacauauaaagu

SEQ ID NO: 338005 - RNA, 16 nt, Human
aaggagggaagagaau

SEQ ID NO: 338006 - RNA, 22 nt, Human
ugcuuugggucucucuaguuuc

SEQ ID NO: 338007 - RNA, 22 nt, Human
ggaggcugagaaguccaagauc

SEQ ID NO: 338008 - RNA, 22 nt, Human
ucuucagacccuuagcugugau

SEQ ID NO: 338009 - RNA, 22 nt, Human
augcuguguccuagugaaagaa

SEQ ID NO: 338010 - RNA, 19 nt, Human
aaacacagauuucuuacca

SEQ ID NO: 338011 - RNA, 18 nt, Human
uggcagcuagguaaagaa

SEQ ID NO: 338012 - RNA, 19 nt, Human
cccaggagcaguauugaug

SEQ ID NO: 338013 - RNA, 22 nt, Human
gcagcucccagcuugaaagguc

SEQ ID NO: 338014 - RNA, 22 nt, Human
gaggagcugggcugagaggguc

SEQ ID NO: 338015 - RNA, 22 nt, Human
gggcagcuggcuuauagguuug

SEQ ID NO: 338016 - RNA, 22 nt, Human
aggcaguuguagagagggcucu

SEQ ID NO: 338017 - RNA, 22 nt, Human
auguggaggaaaugaguguaca

SEQ ID NO: 338018 - RNA, 22 nt, Human
auguuauuaaaguacagauucu

SEQ ID NO: 338019 - RNA, 22 nt, Human
ccauccuaucugaccuacuugu

SEQ ID NO: 338020 - RNA, 22 nt, Human
gaaauauuucucuugagccccu

SEQ ID NO: 338021 - RNA, 20 nt, Human
aucuucuuggccagcuugcu

SEQ ID NO: 338022 - RNA, 22 nt, Human
auaucauuauguuaugagcaca

SEQ ID NO: 338023 - RNA, 22 nt, Human
uacagcauguccuuagcaaggc

SEQ ID NO: 338024 - RNA, 22 nt, Human
caggaugagguagaggcagaua

SEQ ID NO: 338025 - RNA, 22 nt, Human
caguuucuacgaaggucaaccc

SEQ ID NO: 338026 - RNA, 22 nt, Human
aaaacaguuuaggcaucacagu

SEQ ID NO: 338027 - RNA, 22 nt, Human
aauuacuuaagagaaacuuuga

SEQ ID NO: 338028 - RNA, 22 nt, Human
aucuucucauguguaaugaggu

SEQ ID NO: 338029 - RNA, 18 nt, Human
ccucagggagagagacgc

SEQ ID NO: 338030 - RNA, 22 nt, Human
ugaggcaggacuugcauaaagu

SEQ ID NO: 338031 - RNA, 22 nt, Human
aaggcagccucugccagccggg

SEQ ID NO: 338032 - RNA, 21 nt, Human
agcagaggcugccuggugacu

SEQ ID NO: 338033 - RNA, 22 nt, Human
gaggccuggagccgccuaggcg

SEQ ID NO: 338034 - RNA, 22 nt, Human
ccccaggaagccucagauuugc

SEQ ID NO: 338035 - RNA, 22 nt, Human
uuuguuaaauauuuauugagug

SEQ ID NO: 338036 - RNA, 22 nt, Human
gcugccagccaacuugcugugc

SEQ ID NO: 338037 - RNA, 22 nt, Human
cacaugcaucugucauguuugg

SEQ ID NO: 338038 - RNA, 22 nt, Human
gaaauauuacaguggaggggau

SEQ ID NO: 338039 - RNA, 22 nt, Human
aggguccugggugcaguugcuu

SEQ ID NO: 338040 - RNA, 22 nt, Human
ugaugaauaaacuugagaguca

SEQ ID NO: 338041 - RNA, 17 nt, Human
gcgcagcuccuggcgcg

SEQ ID NO: 338042 - RNA, 22 nt, Human
cucugucaggcugcagaugcuc

SEQ ID NO: 338043 - RNA, 22 nt, Human
cccuggagguggagguugcagg

SEQ ID NO: 338044 - RNA, 22 nt, Human
aagcaccuggguuauaucuuag

SEQ ID NO: 338045 - RNA, 22 nt, Human
gaggggaaaguucugcacaagg

SEQ ID NO: 338046 - RNA, 22 nt, Human
acaugauuuuuaaagagauaau

SEQ ID NO: 338047 - RNA, 22 nt, Human
uaaggccaaacuauuauaguuc

SEQ ID NO: 338048 - RNA, 22 nt, Human
aauaucagcacuuuugugguau

SEQ ID NO: 338049 - RNA, 20 nt, Human
aggaggcauagucuggaaag

SEQ ID NO: 338050 - RNA, 22 nt, Human
gagggagugccagagggccagc

SEQ ID NO: 338051 - RNA, 20 nt, Human
uucaggauucuagaccacac

SEQ ID NO: 338052 - RNA, 22 nt, Human
aaaggccagguuggcugguauu

SEQ ID NO: 338053 - RNA, 19 nt, Human
ggcagcuugggaagguagc

SEQ ID NO: 338054 - RNA, 22 nt, Human
ucugcaggcucuagaugagguu

SEQ ID NO: 338055 - RNA, 22 nt, Human
auucacaaaaugauauagauac

SEQ ID NO: 338056 - RNA, 22 nt, Human
uaugaacugugagugugauggg

SEQ ID NO: 338057 - RNA, 22 nt, Human
caggauggucagaugcauuguc

SEQ ID NO: 338058 - RNA, 22 nt, Human
uucccucuccuacucaggaaag

SEQ ID NO: 338059 - RNA, 17 nt, Human
acucaggaucugggagu

SEQ ID NO: 338060 - RNA, 22 nt, Human
uucacacacagcuuccuauugu

SEQ ID NO: 338061 - RNA, 22 nt, Human
aggcacagcacaccuggccccc

SEQ ID NO: 338062 - RNA, 22 nt, Human
cugcccaggcugaaggaacauc

SEQ ID NO: 338063 - RNA, 22 nt, Human
cccaugagguggagguugcagu

SEQ ID NO: 338064 - RNA, 22 nt, Human
uggcagcuauuacaaggaaguc

SEQ ID NO: 338065 - RNA, 22 nt, Human
uagcccagaagagggaagcaac

SEQ ID NO: 338066 - RNA, 23 nt, Human
ucuguacaauugagaagagaaca

SEQ ID NO: 338067 - RNA, 22 nt, Human
auggagggugucagagagcgaa

SEQ ID NO: 338068 - RNA, 21 nt, Human
uucuucaaagaagaaggcaca

SEQ ID NO: 338069 - RNA, 22 nt, Human
cuugcugggguaagucugugcu

SEQ ID NO: 338070 - RNA, 21 nt, Human
uucaaaaugguguguuugucu

SEQ ID NO: 338071 - RNA, 22 nt, Human
cgcagggauuucaaggggccuu

SEQ ID NO: 338072 - RNA, 19 nt, Human
accaggagacagugagcuu

SEQ ID NO: 338073 - RNA, 22 nt, Human
agcugcccuguggggaggguug

SEQ ID NO: 338074 - RNA, 22 nt, Human
aaccauuugccauuaucuuaag

SEQ ID NO: 338075 - RNA, 22 nt, Human
ugaggcagaaauuccuguuuuc

SEQ ID NO: 338076 - RNA, 22 nt, Human
augugaggaagaaagagguaag

SEQ ID NO: 338077 - RNA, 22 nt, Human
aaggaaccauuugugugcaugg

SEQ ID NO: 338078 - RNA, 22 nt, Human
auuugcuuuuacuauguuaaaa

SEQ ID NO: 338079 - RNA, 22 nt, Human
guuuuauaggugaaauauuacu

SEQ ID NO: 338080 - RNA, 22 nt, Human
uaacacauuuuaagccauuuua

SEQ ID NO: 338081 - RNA, 22 nt, Human
ucuaaagaagaggguucugcgg

SEQ ID NO: 338082 - RNA, 22 nt, Human
uuugcauaagucauguccagug

SEQ ID NO: 338083 - RNA, 22 nt, Human
auguuuuugagauacaaacaga

SEQ ID NO: 338084 - RNA, 23 nt, Human
gggcaguuauguuguccuuggcu

SEQ ID NO: 338085 - RNA, 22 nt, Human
auccaugaagguacuucucagg

SEQ ID NO: 338086 - RNA, 22 nt, Human
uuccuuaggcuguuugcagugc

SEQ ID NO: 338087 - RNA, 22 nt, Human
acacauuucuaaauuuuuaccg

SEQ ID NO: 338088 - RNA, 22 nt, Human
uuugaaaguccuaggagagucc

SEQ ID NO: 338089 - RNA, 22 nt, Human
cucaggaucgcuugcccuaggg

SEQ ID NO: 338090 - RNA, 22 nt, Human
ugcauguguuugccacagugag

SEQ ID NO: 338091 - RNA, 22 nt, Human
agcgagggaggucugaggacag

SEQ ID NO: 338092 - RNA, 22 nt, Human
auuucauagauuguaaaucccu

SEQ ID NO: 338093 - RNA, 20 nt, Human
uuucaagucagcaauucuca

SEQ ID NO: 338094 - RNA, 22 nt, Human
aggucagcaugaguagaaggua

SEQ ID NO: 338095 - RNA, 23 nt, Human
uugauuucaaaugcagagaacac

SEQ ID NO: 338096 - RNA, 22 nt, Human
uguuuuaaagccauugccuuuc

SEQ ID NO: 338097 - RNA, 22 nt, Human
auguagaaaguucauagaugcg

SEQ ID NO: 338098 - RNA, 22 nt, Human
aaaggccaugguuggaguguuu

SEQ ID NO: 338099 - RNA, 22 nt, Human
agagugucugguagcugcucug

SEQ ID NO: 338100 - RNA, 22 nt, Human
ggaggagguggguuaaguugua

SEQ ID NO: 338101 - RNA, 22 nt, Human
uucugucaugcucauguaauug

SEQ ID NO: 338102 - RNA, 22 nt, Human
uuuuccagauuggacuuagucc

SEQ ID NO: 338103 - RNA, 22 nt, Human
aagcgccaugguuccugcgcag

SEQ ID NO: 338104 - RNA, 22 nt, Human
cuggguaaguuccuaaggcuca

SEQ ID NO: 338105 - RNA, 22 nt, Human
cuguaugaggaucagacuggac

SEQ ID NO: 338106 - RNA, 22 nt, Human
uagggauguggugagaacugag

SEQ ID NO: 338107 - RNA, 20 nt, Human
gcagcuacucugucucgcuc

SEQ ID NO: 338108 - RNA, 22 nt, Human
cucaggaugucggugacuauug

SEQ ID NO: 338109 - RNA, 22 nt, Human
uugaaaguagcagcugcauaug

SEQ ID NO: 338110 - RNA, 22 nt, Human
ccaggcugccgaggaaagaaag

SEQ ID NO: 338111 - RNA, 22 nt, Human
ggcagccuugacuagugacuua

SEQ ID NO: 338112 - RNA, 22 nt, Human
uccauuuuagaagaaaauccac

SEQ ID NO: 338113 - RNA, 22 nt, Human
aaaggccauuacuugcuuuuag

SEQ ID NO: 338114 - RNA, 22 nt, Human
ucugcaggcuuggaguggcagc

SEQ ID NO: 338115 - RNA, 22 nt, Human
ggaggcagaacuucccgucagu

SEQ ID NO: 338116 - RNA, 22 nt, Human
cucaggauuuaaaggggcacuc

SEQ ID NO: 338117 - RNA, 22 nt, Human
gaccauuuguugaaaagauuau

SEQ ID NO: 338118 - RNA, 23 nt, Human
uugcauagacauccucauagauu

SEQ ID NO: 338119 - RNA, 22 nt, Human
auuucucuuagcaagacauuac

SEQ ID NO: 338120 - RNA, 22 nt, Human
uggcagcucauuuggaaaugga

SEQ ID NO: 338121 - RNA, 22 nt, Human
ucaguucuuuauuucacaguga

SEQ ID NO: 338122 - RNA, 21 nt, Human
cuguggaagggaacuagaggg

SEQ ID NO: 338123 - RNA, 22 nt, Human
uccaggaggcucugguugacgu

SEQ ID NO: 338124 - RNA, 22 nt, Human
gaggcagcaugguaccuuggag

SEQ ID NO: 338125 - RNA, 22 nt, Human
aggcagcguagcaaggcuagua

SEQ ID NO: 338126 - RNA, 22 nt, Human
augcuuuuaugucacaugguca

SEQ ID NO: 338127 - RNA, 22 nt, Human
auguaugagagauucuuuuauu

SEQ ID NO: 338128 - RNA, 22 nt, Human
aguucucaagacaauuaccugu

SEQ ID NO: 338129 - RNA, 17 nt, Human
uucucugagcuguauug

SEQ ID NO: 338130 - RNA, 22 nt, Human
ugcuagaauuugcagaagcaua

SEQ ID NO: 338131 - RNA, 22 nt, Human
cugucauugagccugucagggc

SEQ ID NO: 338132 - RNA, 22 nt, Human
ucugauuagcaguuuagggaaa

SEQ ID NO: 338133 - RNA, 22 nt, Human
ccaggagaagcaucugagugua

SEQ ID NO: 338134 - RNA, 22 nt, Human
auuaaauuaaguggcuaauuua

SEQ ID NO: 338135 - RNA, 22 nt, Human
caaauguauaaauguacuuucu

SEQ ID NO: 338136 - RNA, 22 nt, Human
guugaaagaugucuugguuccc

SEQ ID NO: 338137 - RNA, 22 nt, Human
uucuccaacacaagcaugaugu

SEQ ID NO: 338138 - RNA, 22 nt, Human
ucuucagagugaaagucuguga

SEQ ID NO: 338139 - RNA, 22 nt, Human
aucugucagccugggauuaggg

SEQ ID NO: 338140 - RNA, 22 nt, Human
auguuuccagguucuuccuaug

SEQ ID NO: 338141 - RNA, 22 nt, Human
ggccagaggugguacauagcuu

SEQ ID NO: 338142 - RNA, 22 nt, Human
auaguuugaaggcuguucuacu

SEQ ID NO: 338143 - RNA, 21 nt, Human
cucuugugucagagccagagg

SEQ ID NO: 338144 - RNA, 22 nt, Human
guguaugagccuccagcugggc

SEQ ID NO: 338145 - RNA, 22 nt, Human
cugcugugccuuaaaaugcaag

SEQ ID NO: 338146 - RNA, 22 nt, Human
ugaaagcagcaccaauaccauu

SEQ ID NO: 338147 - RNA, 22 nt, Human
gaggagagaacauuccuccaua

SEQ ID NO: 338148 - RNA, 22 nt, Human
aggcaguggaaggagaaagcaa

SEQ ID NO: 338149 - RNA, 22 nt, Human
ggcagacuguaauaggagaauu

SEQ ID NO: 338150 - RNA, 22 nt, Human
aggagaggucucccuuccccag

SEQ ID NO: 338151 - RNA, 22 nt, Human
aucaggaugacuauaaggcugc

SEQ ID NO: 338152 - RNA, 22 nt, Human
cucuucuuggcccccaugaggg

SEQ ID NO: 338153 - RNA, 22 nt, Human
auggcagccugagcagaggaau

SEQ ID NO: 338154 - RNA, 22 nt, Human
aaagcagagguugcagugagcu

SEQ ID NO: 338155 - RNA, 22 nt, Human
ggugaagggugucauggcauuu

SEQ ID NO: 338156 - RNA, 22 nt, Human
ugaggcaggagaauggcgggaa

SEQ ID NO: 338157 - RNA, 22 nt, Human
uugaaauaucaaguuauuagug

SEQ ID NO: 338158 - RNA, 22 nt, Human
ucaggagacauucuuaaaguag

SEQ ID NO: 338159 - RNA, 22 nt, Human
aauggccagcugggagaguuga

SEQ ID NO: 338160 - RNA, 22 nt, Human
auacaacagaaaaugauuauuc

SEQ ID NO: 338161 - RNA, 22 nt, Human
cacaggagagcugggaggugcc

SEQ ID NO: 338162 - RNA, 22 nt, Human
aacauauaaacucuuaaguuca

SEQ ID NO: 338163 - RNA, 22 nt, Human
ggcagcauauauucagugggca

SEQ ID NO: 338164 - RNA, 22 nt, Human
cagucucuaaaucaaucugaau

SEQ ID NO: 338165 - RNA, 22 nt, Human
uuguaaauaguaguaagaugcc

SEQ ID NO: 338166 - RNA, 22 nt, Human
gcccaggaguugaaugcagcag

SEQ ID NO: 338167 - RNA, 22 nt, Human
ccacugaggcaggcaguaucua

SEQ ID NO: 338168 - RNA, 22 nt, Human
aaguaaaauguuuccuuuauua

SEQ ID NO: 338169 - RNA, 23 nt, Human
cugcccugaucuugaucuauugu

SEQ ID NO: 338170 - RNA, 22 nt, Human
gaggagaggcuggacgcgguga

SEQ ID NO: 338171 - RNA, 22 nt, Human
augcugugucuagcaggaacac

SEQ ID NO: 338172 - RNA, 22 nt, Human
uaucuguuguccaugcagaaag

SEQ ID NO: 338173 - RNA, 22 nt, Human
aucaggaucugcaucauaagaa

SEQ ID NO: 338174 - RNA, 22 nt, Human
uuucagaaagcugaacauauga

SEQ ID NO: 338175 - RNA, 22 nt, Human
agucuacaaagaaaaguuauug

SEQ ID NO: 338176 - RNA, 22 nt, Human
ucucacuuuccagacuuuucaa

SEQ ID NO: 338177 - RNA, 22 nt, Human
cuagaaauauuuuacagucaag

SEQ ID NO: 338178 - RNA, 20 nt, Human
uuuuccuucugaguauguug

SEQ ID NO: 338179 - RNA, 22 nt, Human
ucacaucucccuggaggacaca

SEQ ID NO: 338180 - RNA, 22 nt, Human
ggccagcagucacagggucaga

SEQ ID NO: 338181 - RNA, 22 nt, Human
ggcagcaucucuggcagcagcu

SEQ ID NO: 338182 - RNA, 22 nt, Human
gaauauuuguaauuacuguuga

SEQ ID NO: 338183 - RNA, 23 nt, Human
uaugaacugcauugcuggugugu

SEQ ID NO: 338184 - RNA, 19 nt, Human
ucugccucuggucaggcuc

SEQ ID NO: 338185 - RNA, 22 nt, Human
aguaugaagaauacauagauga

SEQ ID NO: 338186 - RNA, 22 nt, Human
uucugagacaauugagagucua

SEQ ID NO: 338187 - RNA, 22 nt, Human
gaacacaugauuauaaaugcua

SEQ ID NO: 338188 - RNA, 22 nt, Human
uacccaggaggaaacugaggcu

SEQ ID NO: 338189 - RNA, 22 nt, Human
uuucaaaauuuugcagugguaa

SEQ ID NO: 338190 - RNA, 22 nt, Human
aaugucugcucuacucaggagg

SEQ ID NO: 338191 - RNA, 22 nt, Human
auauucuugugauuauaaagua

SEQ ID NO: 338192 - RNA, 22 nt, Human
agauuuauguggucacacucag

SEQ ID NO: 338193 - RNA, 22 nt, Human
uagaaacaaugacaugcuugua

SEQ ID NO: 338194 - RNA, 22 nt, Human
uuucacauaugguuguugauug

SEQ ID NO: 338195 - RNA, 22 nt, Human
cagcugcuuuaguuuuccaucc

SEQ ID NO: 338196 - RNA, 22 nt, Human
cagaggaugaucuggccucucu

SEQ ID NO: 338197 - RNA, 22 nt, Human
aggcagcccacaggacacagga

SEQ ID NO: 338198 - RNA, 22 nt, Human
uugcuucaguagcucuuuaaag

SEQ ID NO: 338199 - RNA, 22 nt, Human
uuugaagucaggcuuucuaccc

SEQ ID NO: 338200 - RNA, 22 nt, Human
cagugguuauacuuacuguuuc

SEQ ID NO: 338201 - RNA, 22 nt, Human
acauucuuaacaguuaaaaacu

SEQ ID NO: 338202 - RNA, 22 nt, Human
cagaggcagccgggggagaacg

SEQ ID NO: 338203 - RNA, 22 nt, Human
aggguagggccguagggccaug

SEQ ID NO: 338204 - RNA, 21 nt, Human
aaauacagaaacuuguuuuca

SEQ ID NO: 338205 - RNA, 22 nt, Human
augcuguguggucaaguuaauu

SEQ ID NO: 338206 - RNA, 22 nt, Human
aucugccucuucuucauugcga

SEQ ID NO: 338207 - RNA, 22 nt, Human
uccagaaacuuuuccagucuca

SEQ ID NO: 338208 - RNA, 22 nt, Human
uuuguaugugauaagacuauuc

SEQ ID NO: 338209 - RNA, 20 nt, Human
ggcaggcuuuauauggaggg

SEQ ID NO: 338210 - RNA, 22 nt, Human
agacaguguguguauauauggu

SEQ ID NO: 338211 - RNA, 22 nt, Human
uuagagucaaaauggcauguua

SEQ ID NO: 338212 - RNA, 22 nt, Human
aagcuggcaugucaccugagaa

SEQ ID NO: 338213 - RNA, 22 nt, Human
cuucagaauccagaaucagaau

SEQ ID NO: 338214 - RNA, 22 nt, Human
ccuucauugcaucuuuaagaga

SEQ ID NO: 338215 - RNA, 22 nt, Human
gagcagcuccagccgcaugacu

SEQ ID NO: 338216 - RNA, 19 nt, Human
uggcagggagaguuugaag

SEQ ID NO: 338217 - RNA, 22 nt, Human
aagcagcuuuugaagagugagg

SEQ ID NO: 338218 - RNA, 22 nt, Human
uuccuuaguguuagauucugug

SEQ ID NO: 338219 - RNA, 18 nt, Human
ggcagcuugacuagcaac

SEQ ID NO: 338220 - RNA, 22 nt, Human
uuugauaagagcugcugaaacu

SEQ ID NO: 338221 - RNA, 22 nt, Human
aguauugugacucaaguauucu

SEQ ID NO: 338222 - RNA, 19 nt, Human
uucacaauuaugaaauuag

SEQ ID NO: 338223 - RNA, 22 nt, Human
ccagcagagcauggggaggaag

SEQ ID NO: 338224 - RNA, 22 nt, Human
uaucuguuguaguacagaugau

SEQ ID NO: 338225 - RNA, 22 nt, Human
uagugcuuuaggccugaguguc

SEQ ID NO: 338226 - RNA, 22 nt, Human
aaacugcugguugcuggccagc

SEQ ID NO: 338227 - RNA, 22 nt, Human
acaguggagaaggcaugaggcu

SEQ ID NO: 338228 - RNA, 17 nt, Human
caggcagacauguaagc

SEQ ID NO: 338229 - RNA, 22 nt, Human
cugcuguguugccagugucacc

SEQ ID NO: 338230 - RNA, 22 nt, Human
aauguaugagcgugaaagcacu

SEQ ID NO: 338231 - RNA, 22 nt, Human
gcccaggaguucaaggcugcag

SEQ ID NO: 338232 - RNA, 22 nt, Human
uuucauaauacuguacaugaaa

SEQ ID NO: 338233 - RNA, 22 nt, Human
ccccggaggcggagguugcagu

SEQ ID NO: 338234 - RNA, 22 nt, Human
cccaggaggcgcagguugcggu

SEQ ID NO: 338235 - RNA, 22 nt, Human
uaugaccuuaggaagcaagaag

SEQ ID NO: 338236 - RNA, 18 nt, Human
ucaggagacacagacgca

SEQ ID NO: 338237 - RNA, 20 nt, Human
uuuuccagaaaguaucauug

SEQ ID NO: 338238 - RNA, 22 nt, Human
cugacagucucauugauuugcu

SEQ ID NO: 338239 - RNA, 22 nt, Human
aaaggcaggcuuucacaucuca

SEQ ID NO: 338240 - RNA, 22 nt, Human
agcuacccgaggacaggcuaag

SEQ ID NO: 338241 - RNA, 22 nt, Human
gagcagcucgagaaggaagcag

SEQ ID NO: 338242 - RNA, 22 nt, Human
ggcuuugccuggaauuuccuug

SEQ ID NO: 338243 - RNA, 22 nt, Human
gugucccaggccucuggaauua

SEQ ID NO: 338244 - RNA, 22 nt, Human
ucucucuugucaccccaucugc

SEQ ID NO: 338245 - RNA, 19 nt, Human
agucuuucccacucgucuu

SEQ ID NO: 338246 - RNA, 22 nt, Human
ggcagcuuguccuggaggaugg

SEQ ID NO: 338247 - RNA, 22 nt, Human
ugaaaucaaugucuucugucuc

SEQ ID NO: 338248 - RNA, 22 nt, Human
uaaaauagcaugugcagugaaa

SEQ ID NO: 338249 - RNA, 22 nt, Human
uaauuccaaguugagacaugca

SEQ ID NO: 338250 - RNA, 22 nt, Human
acaggagacccugcugguucug

SEQ ID NO: 338251 - RNA, 22 nt, Human
uuucacacugcagcaucagaga

SEQ ID NO: 338252 - RNA, 22 nt, Human
gaggagagaagcuaacggugcu

SEQ ID NO: 338253 - RNA, 22 nt, Human
uucagggagagcgggacgggug

SEQ ID NO: 338254 - RNA, 22 nt, Human
aacaugcugccuuucuacgagu

SEQ ID NO: 338255 - RNA, 22 nt, Human
gcucacugccauucucuagaug

SEQ ID NO: 338256 - RNA, 23 nt, Human
uaauucacauauacauugcuuca

SEQ ID NO: 338257 - RNA, 21 nt, Human
uccaggagcacgggacuagga

SEQ ID NO: 338258 - RNA, 22 nt, Human
uguuugaacugaauaacauagu

SEQ ID NO: 338259 - RNA, 22 nt, Human
gugugaaaaugugcacaauaug

SEQ ID NO: 338260 - RNA, 22 nt, Human
ucuuagcauuucauaacaacug

SEQ ID NO: 338261 - RNA, 22 nt, Human
uggcagcugccauguccacgug

SEQ ID NO: 338262 - RNA, 22 nt, Human
ggcaucuccaaaacaugaacuc

SEQ ID NO: 338263 - RNA, 22 nt, Human
ggcagaggaggggugaauuugc

SEQ ID NO: 338264 - RNA, 22 nt, Human
cucuucucugcagccuuugaag

SEQ ID NO: 338265 - RNA, 22 nt, Human
cuacccagagugaaucucuuaa

SEQ ID NO: 338266 - RNA, 22 nt, Human
gaaaacuauuggccuagaacaa

SEQ ID NO: 338267 - RNA, 22 nt, Human
cuuuggcaaggguuuuaauugu

SEQ ID NO: 338268 - RNA, 22 nt, Human
uuuucucuuguuaauguacuga

SEQ ID NO: 338269 - RNA, 22 nt, Human
uugcugaauugaauccuuuggu

SEQ ID NO: 338270 - RNA, 22 nt, Human
cuuaacagagagaaguguugcu

SEQ ID NO: 338271 - RNA, 21 nt, Human
gaauaguucuguggcagcagu

SEQ ID NO: 338272 - RNA, 22 nt, Human
uggcagcuagcuguuuucaugc

SEQ ID NO: 338273 - RNA, 22 nt, Human
uucagcaaauggacuguucagg

SEQ ID NO: 338274 - RNA, 20 nt, Human
gggcagcuccccucauucug

SEQ ID NO: 338275 - RNA, 22 nt, Human
gcagaggccaggccaccagcaa

SEQ ID NO: 338276 - RNA, 23 nt, Human
ucucaagaggaagcagggcucau

SEQ ID NO: 338277 - RNA, 22 nt, Human
guucuucaaagugacaacuaaa

SEQ ID NO: 338278 - RNA, 22 nt, Human
acuguguggaccacucugaggc

SEQ ID NO: 338279 - RNA, 22 nt, Human
aagauaauauucauuaacuaga

SEQ ID NO: 338280 - RNA, 22 nt, Human
auuucagauucagaaauguagg

SEQ ID NO: 338281 - RNA, 22 nt, Human
guguguuucagaagccaggugu

SEQ ID NO: 338282 - RNA, 22 nt, Human
uccaggagguaugaguggcccc

SEQ ID NO: 338283 - RNA, 22 nt, Human
caaggccacuccagagacuggu

SEQ ID NO: 338284 - RNA, 22 nt, Human
ggaggggagucucccaaagccg

SEQ ID NO: 338285 - RNA, 22 nt, Human
uacaaguaaauuguagauacca

SEQ ID NO: 338286 - RNA, 20 nt, Human
uaggcagcuugacccuuggu

SEQ ID NO: 338287 - RNA, 22 nt, Human
auuuugcuggucugaauuacuu

SEQ ID NO: 338288 - RNA, 22 nt, Human
guccucugaaguugugcaaugc

SEQ ID NO: 338289 - RNA, 22 nt, Human
uuuaaaaucagaugggaguugg

SEQ ID NO: 338290 - RNA, 18 nt, Human
cgaggcaggcggaucacg

SEQ ID NO: 338291 - RNA, 22 nt, Human
aguauaaagugguuuucagcac

SEQ ID NO: 338292 - RNA, 22 nt, Human
uucuuaacucaaauauauaucc

SEQ ID NO: 338293 - RNA, 22 nt, Human
ucuuugaauccuuuacaucuga

SEQ ID NO: 338294 - RNA, 18 nt, Human
gucacuguguuucugagc

SEQ ID NO: 338295 - RNA, 22 nt, Human
ggagaggauguuuuaguaacuu

SEQ ID NO: 338296 - RNA, 22 nt, Human
aagauggagcacgagcagaagc

SEQ ID NO: 338297 - RNA, 22 nt, Human
cccuugcaucccauguguggcc

SEQ ID NO: 338298 - RNA, 22 nt, Human
agucucuuauucccuauugcug

SEQ ID NO: 338299 - RNA, 22 nt, Human
gacccaggaagcuacuucuggu

SEQ ID NO: 338300 - RNA, 22 nt, Human
ucuacuguagugaugcugcagu

SEQ ID NO: 338301 - RNA, 22 nt, Human
guuuuucuaggaccaugugauu

SEQ ID NO: 338302 - RNA, 20 nt, Human
auuuggcaugaaguauugau

SEQ ID NO: 338303 - RNA, 22 nt, Human
uuucaucuuccuuggcauaggu

SEQ ID NO: 338304 - RNA, 21 nt, Human
cccagggaagccgcagucacc

SEQ ID NO: 338305 - RNA, 22 nt, Human
aagaauacguaucaacaauggu

SEQ ID NO: 338306 - RNA, 22 nt, Human
cucccagggucuaggcugcugg

SEQ ID NO: 338307 - RNA, 22 nt, Human
ccaggaaauggcuugcuucuuu

SEQ ID NO: 338308 - RNA, 22 nt, Human
uguacauacauagauauacaca

SEQ ID NO: 338309 - RNA, 22 nt, Human
uuucuucagagagagcuuuccc

SEQ ID NO: 338310 - RNA, 22 nt, Human
uucacagacauugcagacugaa

SEQ ID NO: 338311 - RNA, 22 nt, Human
acccaggauaaucuguguaucu

SEQ ID NO: 338312 - RNA, 22 nt, Human
cuguggaaauaaacaaugcuaa

SEQ ID NO: 338313 - RNA, 22 nt, Human
uauuucagucacuucuucucug

SEQ ID NO: 338314 - RNA, 23 nt, Human
cuuuuaacuagaguaucagcugc

SEQ ID NO: 338315 - RNA, 22 nt, Human
ugaaaugagagcacagaauaaa

SEQ ID NO: 338316 - RNA, 22 nt, Human
gaggaggcacuugagcagaugu

SEQ ID NO: 338317 - RNA, 22 nt, Human
cagcaggaggugaguagcaggu

SEQ ID NO: 338318 - RNA, 20 nt, Human
agaggccaguuaggagucua

SEQ ID NO: 338319 - RNA, 22 nt, Human
aggcagcuuucagugucucuca

SEQ ID NO: 338320 - RNA, 22 nt, Human
gaggcagccucaguggaccucg

SEQ ID NO: 338321 - RNA, 23 nt, Human
ucccaggaaucugcauuuuuaac

SEQ ID NO: 338322 - RNA, 22 nt, Human
cauuuguuggucagauuguagu

SEQ ID NO: 338323 - RNA, 22 nt, Human
gugguaaucggauucuuaccgg

SEQ ID NO: 338324 - RNA, 22 nt, Human
cgucuuccucuuacgaugcgcu

SEQ ID NO: 338325 - RNA, 22 nt, Human
aauagcucacugauuucucuuu

SEQ ID NO: 338326 - RNA, 23 nt, Human
agcacacuuguacaaugcccuag

SEQ ID NO: 338327 - RNA, 22 nt, Human
agaggccggccgagcccauggg

SEQ ID NO: 338328 - RNA, 22 nt, Human
uugcuuuguggugguucuucca

SEQ ID NO: 338329 - RNA, 22 nt, Human
gcagagaagaugcccaggcuuc

SEQ ID NO: 338330 - RNA, 22 nt, Human
gcccaggaaguugaggcugccg

SEQ ID NO: 338331 - RNA, 21 nt, Human
uggcaggcagcuggaagcuug

SEQ ID NO: 338332 - RNA, 23 nt, Human
gaggcagcuccugcagugcccug

SEQ ID NO: 338333 - RNA, 22 nt, Human
uuucuucaauugcuaacaagga

SEQ ID NO: 338334 - RNA, 22 nt, Human
acagagagaaacaaucagcagc

SEQ ID NO: 338335 - RNA, 22 nt, Human
uuuuaguguagucaccgugggu

SEQ ID NO: 338336 - RNA, 22 nt, Human
agaggaggcagcuuaacucagu

SEQ ID NO: 338337 - RNA, 22 nt, Human
gcuaugcaggagccuaaugaca

SEQ ID NO: 338338 - RNA, 22 nt, Human
gccaggaguucagaugcauguu

SEQ ID NO: 338339 - RNA, 22 nt, Human
uuugaauaucacaaacuuucaa

SEQ ID NO: 338340 - RNA, 22 nt, Human
auaacuuucuucacccuugcug

SEQ ID NO: 338341 - RNA, 22 nt, Human
ucuccucucuuaccugguacaa

SEQ ID NO: 338342 - RNA, 22 nt, Human
guucuucaggccauccucccag

SEQ ID NO: 338343 - RNA, 20 nt, Human
ucucagcauaagaacccuuc

SEQ ID NO: 338344 - RNA, 22 nt, Human
augaaggcuguguggagccccc

SEQ ID NO: 338345 - RNA, 22 nt, Human
aucuuguuauaagagauaaugg

SEQ ID NO: 338346 - RNA, 22 nt, Human
uagugcuuggcccuaccagaua

SEQ ID NO: 338347 - RNA, 22 nt, Human
ggcagcuguaagaugagugaau

SEQ ID NO: 338348 - RNA, 22 nt, Human
ggccaggagcugcacagggcuc

SEQ ID NO: 338349 - RNA, 22 nt, Human
cugcugugaguuuggaggucua

SEQ ID NO: 338350 - RNA, 22 nt, Human
aggcaggcacacuuccuccagg

SEQ ID NO: 338351 - RNA, 22 nt, Human
uggagagguugaauaacuuguc

SEQ ID NO: 338352 - RNA, 22 nt, Human
uaucuguucaauggaagaugac

SEQ ID NO: 338353 - RNA, 22 nt, Human
cagugcugggcagaggagagcg

SEQ ID NO: 338354 - RNA, 22 nt, Human
cucauuaaaggaaaucaccugc

SEQ ID NO: 338355 - RNA, 21 nt, Human
ucuuccuccacagcgugccac

SEQ ID NO: 338356 - RNA, 22 nt, Human
agaggggaggcgaaccagaguc

SEQ ID NO: 338357 - RNA, 22 nt, Human
ccaggagagcucucguucagug

SEQ ID NO: 338358 - RNA, 22 nt, Human
cccaggagagggaaccaaaugu

SEQ ID NO: 338359 - RNA, 23 nt, Human
agaugaggcuucuccauguuggu

SEQ ID NO: 338360 - RNA, 22 nt, Human
aaaguuuguuauaugauaagga

SEQ ID NO: 338361 - RNA, 22 nt, Human
ucauuugugugagugauuugac

SEQ ID NO: 338362 - RNA, 22 nt, Human
uccuuagagacaagaccaguuu

SEQ ID NO: 338363 - RNA, 22 nt, Human
gccaggaguguguggcuauguu

SEQ ID NO: 338364 - RNA, 22 nt, Human
uuugaaagaauuuauguacuuu

SEQ ID NO: 338365 - RNA, 22 nt, Human
ucccaggaugaagacaguguug

SEQ ID NO: 338366 - RNA, 22 nt, Human
uaugaaacauucauacaaauaa

SEQ ID NO: 338367 - RNA, 22 nt, Human
uucuccagaccuugugacuaug

SEQ ID NO: 338368 - RNA, 22 nt, Human
ugaggggagaagcagcagccug

SEQ ID NO: 338369 - RNA, 22 nt, Human
uuagccauggacugaauugacu

SEQ ID NO: 338370 - RNA, 23 nt, Human
gaggcacucaggaaaugugagug

SEQ ID NO: 338371 - RNA, 22 nt, Human
aggcaguuuauccccagagccu

SEQ ID NO: 338372 - RNA, 22 nt, Human
gagugucugaauuagagcacaa

SEQ ID NO: 338373 - RNA, 22 nt, Human
gacccaggguggucaccugaaa

SEQ ID NO: 338374 - RNA, 22 nt, Human
uugaaguuguaguucagugaag

SEQ ID NO: 338375 - RNA, 22 nt, Human
aauugcaauuuucuuaaggucu

SEQ ID NO: 338376 - RNA, 22 nt, Human
acuguagcugccacuggaugca

SEQ ID NO: 338377 - RNA, 22 nt, Human
ugaacuccaaauacugcugauu

SEQ ID NO: 338378 - RNA, 22 nt, Human
gcugguuuccuuaucuauaaag

SEQ ID NO: 338379 - RNA, 20 nt, Human
uguuaaaggacacuugcuuu

SEQ ID NO: 338380 - RNA, 22 nt, Human
uaacacaugaaagcaccuucuu

SEQ ID NO: 338381 - RNA, 22 nt, Human
cgaggcagaggcugaaacggcu

SEQ ID NO: 338382 - RNA, 19 nt, Human
gacagugcaguuguaguac

SEQ ID NO: 338383 - RNA, 22 nt, Human
uguccucuuccagugcuccuuc

SEQ ID NO: 338384 - RNA, 22 nt, Human
uucaggaucacuaaacccucca

SEQ ID NO: 338385 - RNA, 22 nt, Human
uuucaguuacugcuauaucauu

SEQ ID NO: 338386 - RNA, 22 nt, Human
uuugaaaguguuuacuugggaa

SEQ ID NO: 338387 - RNA, 22 nt, Human
agacucaagcagauaggaauua

SEQ ID NO: 338388 - RNA, 22 nt, Human
uauaaaguuucgaaagauguau

SEQ ID NO: 338389 - RNA, 23 nt, Human
gggcagcuuaagcuuguuuuucu

SEQ ID NO: 338390 - RNA, 22 nt, Human
uuucauugaugggugauagaaa

SEQ ID NO: 338391 - RNA, 22 nt, Human
auuuccaguccuaaugaucugg

SEQ ID NO: 338392 - RNA, 22 nt, Human
uuucaaagaccauuaacuauca

SEQ ID NO: 338393 - RNA, 22 nt, Human
cuuccuucugaagcauagaagc

SEQ ID NO: 338394 - RNA, 22 nt, Human
aguuugaauugaaaugcagaug

SEQ ID NO: 338395 - RNA, 22 nt, Human
aggcagcagugauaagauagga

SEQ ID NO: 338396 - RNA, 22 nt, Human
ggcagcucugcuccacaugagu

SEQ ID NO: 338397 - RNA, 22 nt, Human
aaauacuagaauucagaguuga

SEQ ID NO: 338398 - RNA, 22 nt, Human
ugaguuuugucuugcuagaagu

SEQ ID NO: 338399 - RNA, 22 nt, Human
ggaggugggauuaggaccuaaa

SEQ ID NO: 338400 - RNA, 22 nt, Human
uaugaaaugguaguaggaaggg

SEQ ID NO: 338401 - RNA, 22 nt, Human
auaaaugauucagcaggaaaua

SEQ ID NO: 338402 - RNA, 22 nt, Human
cuguaguugaugauuucugaua

SEQ ID NO: 338403 - RNA, 15 nt, Human
uggcagcuuguuaag

SEQ ID NO: 338404 - RNA, 22 nt, Human
acuggcagcagcagcccuuggg

SEQ ID NO: 338405 - RNA, 19 nt, Human
gcagcugcuugaaaagaaa

SEQ ID NO: 338406 - RNA, 22 nt, Human
ggggcagccuccaggaaagcug

SEQ ID NO: 338407 - RNA, 22 nt, Human
uaucaucuuguugucaugcagc

SEQ ID NO: 338408 - RNA, 22 nt, Human
uccaggaggcagggcugugccc

SEQ ID NO: 338409 - RNA, 22 nt, Human
uggcaggcagugugggagcugg

SEQ ID NO: 338410 - RNA, 19 nt, Human
acauuuagaauguacuugc

SEQ ID NO: 338411 - RNA, 22 nt, Human
gcugucccgcugacuuccagcu

SEQ ID NO: 338412 - RNA, 22 nt, Human
uacuuccuguuuccaugucugu

SEQ ID NO: 338413 - RNA, 22 nt, Human
cuaaucaucuuucucuuaaagc

SEQ ID NO: 338414 - RNA, 22 nt, Human
auguuauggcucaaacauuugg

SEQ ID NO: 338415 - RNA, 22 nt, Human
aggcagauauuggggugaugug

SEQ ID NO: 338416 - RNA, 22 nt, Human
gccaggaggggagaguguguca

SEQ ID NO: 338417 - RNA, 22 nt, Human
aaggcagcuucaccacagcauu

SEQ ID NO: 338418 - RNA, 23 nt, Human
uuuuccuguggagacaugacugg

SEQ ID NO: 338419 - RNA, 22 nt, Human
acagugcuggcuacaacccugg

SEQ ID NO: 338420 - RNA, 22 nt, Human
ucaggagaaaauaucaggaagu

SEQ ID NO: 338421 - RNA, 22 nt, Human
cccagcaggaggagguugcagu

SEQ ID NO: 338422 - RNA, 22 nt, Human
uagauauguguuuauuaugcug

SEQ ID NO: 338423 - RNA, 22 nt, Human
ccacagagcauuagauuucaga

SEQ ID NO: 338424 - RNA, 22 nt, Human
accauccugaaaccuucaugcu

SEQ ID NO: 338425 - RNA, 22 nt, Human
ccaugagccaggcugaggaagc

SEQ ID NO: 338426 - RNA, 22 nt, Human
ugagccuguccugugcauguga

SEQ ID NO: 338427 - RNA, 22 nt, Human
ugagaaaugggucugcugaaga

SEQ ID NO: 338428 - RNA, 22 nt, Human
uguucauaucauuuugaaagcu

SEQ ID NO: 338429 - RNA, 22 nt, Human
aguaaagcagaguugcaguaca

SEQ ID NO: 338430 - RNA, 22 nt, Human
uuuauuuggcauccagggagaa

SEQ ID NO: 338431 - RNA, 22 nt, Human
ccaggcugggcuacaaguugag

SEQ ID NO: 338432 - RNA, 22 nt, Human
ucugucucaaguucuugcacuc

SEQ ID NO: 338433 - RNA, 22 nt, Human
cagcagaggugguucacauugu

SEQ ID NO: 338434 - RNA, 22 nt, Human
acucagaaugacugaugcugug

SEQ ID NO: 338435 - RNA, 22 nt, Human
augaaacaguguguauagcaaa

SEQ ID NO: 338436 - RNA, 22 nt, Human
cuccaggagggggauggcugua

SEQ ID NO: 338437 - RNA, 22 nt, Human
uugauacaggccuucuagauga

SEQ ID NO: 338438 - RNA, 22 nt, Human
auuugcuuuaagguauaaaagg

SEQ ID NO: 338439 - RNA, 22 nt, Human
uuugcaaagaaauuauugcugu

SEQ ID NO: 338440 - RNA, 22 nt, Human
gcccaggauggagaauaguggu

SEQ ID NO: 338441 - RNA, 22 nt, Human
uuugaauguuuuagguacuuaa

SEQ ID NO: 338442 - RNA, 22 nt, Human
gcccaggaaagauagggccuca

SEQ ID NO: 338443 - RNA, 22 nt, Human
acucuucuugcugcucauuaau

SEQ ID NO: 338444 - RNA, 22 nt, Human
guugaaagaucauguggcugcc

SEQ ID NO: 338445 - RNA, 20 nt, Human
uucuucucuaguuaucuuca

SEQ ID NO: 338446 - RNA, 22 nt, Human
uuaacacaucccugcucuaccc

SEQ ID NO: 338447 - RNA, 22 nt, Human
aauguauuccucaugcaagagu

SEQ ID NO: 338448 - RNA, 22 nt, Human
ucacagacacagggagaagcau

SEQ ID NO: 338449 - RNA, 22 nt, Human
uccaggagggauugggcugugg

SEQ ID NO: 338450 - RNA, 22 nt, Human
aagugaagaaauacaugagaau

SEQ ID NO: 338451 - RNA, 22 nt, Human
gauauguauugaaugaucauuu

SEQ ID NO: 338452 - RNA, 22 nt, Human
uaucuguugucuuuuacaugua

SEQ ID NO: 338453 - RNA, 22 nt, Human
cuagccugggauuugaacuuau

SEQ ID NO: 338454 - RNA, 19 nt, Human
acaaaugauguugcacuga

SEQ ID NO: 338455 - RNA, 22 nt, Human
uggcagcuccggguaggggcug

SEQ ID NO: 338456 - RNA, 22 nt, Human
gagguagcaugcuggaagggac

SEQ ID NO: 338457 - RNA, 23 nt, Human
uggcagcuguguaagagaaagca

SEQ ID NO: 338458 - RNA, 22 nt, Human
uuuuccuucuagagcagauuuc

SEQ ID NO: 338459 - RNA, 22 nt, Human
aagcaaaggcaggagcuuguga

SEQ ID NO: 338460 - RNA, 22 nt, Human
gaggaggcuuccgggaggcacg

SEQ ID NO: 338461 - RNA, 22 nt, Human
uguuugaaacuuugaucacuaa

SEQ ID NO: 338462 - RNA, 22 nt, Human
acuaaauacacacauuuguuca

SEQ ID NO: 338463 - RNA, 17 nt, Human
ugaauucaaucugcacu

SEQ ID NO: 338464 - RNA, 22 nt, Human
auucuucagcaggggacacuau

SEQ ID NO: 338465 - RNA, 21 nt, Human
uaauaauuccacuacagagua

SEQ ID NO: 338466 - RNA, 22 nt, Human
uuugacaaauccuucagcaaug

SEQ ID NO: 338467 - RNA, 22 nt, Human
agcugcccuuaauaggcauuca

SEQ ID NO: 338468 - RNA, 22 nt, Human
aaaauuauagaucuagugccug

SEQ ID NO: 338469 - RNA, 22 nt, Human
uucaauucuaaacuaauauucu

SEQ ID NO: 338470 - RNA, 22 nt, Human
agggcaguucaacuucauagug

SEQ ID NO: 338471 - RNA, 22 nt, Human
caggauggagaguuguugguug

SEQ ID NO: 338472 - RNA, 22 nt, Human
ucccaggacccaggcauucaca

SEQ ID NO: 338473 - RNA, 22 nt, Human
caaggccaagguuuugugaacu

SEQ ID NO: 338474 - RNA, 22 nt, Human
uuuuagcacuaagugauaugcu

SEQ ID NO: 338475 - RNA, 22 nt, Human
uuaugauuugccacagauuggu

SEQ ID NO: 338476 - RNA, 20 nt, Human
augcuuucuugugugcugcu

SEQ ID NO: 338477 - RNA, 22 nt, Human
ugcccaggcuggaaugcagugg

SEQ ID NO: 338478 - RNA, 22 nt, Human
auuuccaggagaaaggauuuua

SEQ ID NO: 338479 - RNA, 21 nt, Human
gugcuuuuccuuaauguucuu

SEQ ID NO: 338480 - RNA, 22 nt, Human
cagcuggcgggcagagccgcca

SEQ ID NO: 338481 - RNA, 22 nt, Human
auuuucagagacaucuggacuu

SEQ ID NO: 338482 - RNA, 17 nt, Human
uuucaucugggaccacc

SEQ ID NO: 338483 - RNA, 22 nt, Human
uaaaugagggcugacaugauug

SEQ ID NO: 338484 - RNA, 22 nt, Human
auguuucaccagcaaauuaccu

SEQ ID NO: 338485 - RNA, 22 nt, Human
gagcagcucugggugacccagu

SEQ ID NO: 338486 - RNA, 22 nt, Human
cauaauauacuacauugaugaa

SEQ ID NO: 338487 - RNA, 22 nt, Human
uugacacaguuuucucauuaag

SEQ ID NO: 338488 - RNA, 22 nt, Human
gugguuuugccauuacaaguaa

SEQ ID NO: 338489 - RNA, 22 nt, Human
caggagagcccggguccgggcu

SEQ ID NO: 338490 - RNA, 22 nt, Human
uucugugauugacauguggcuu

SEQ ID NO: 338491 - RNA, 22 nt, Human
uucuuucucaacaugaauguuu

SEQ ID NO: 338492 - RNA, 22 nt, Human
uuaaagggccgauuuccaggcc

SEQ ID NO: 338493 - RNA, 20 nt, Human
ccucaggaugagggugagca

SEQ ID NO: 338494 - RNA, 22 nt, Human
uucucagaugauucagauaaac

SEQ ID NO: 338495 - RNA, 22 nt, Human
cagcuucugcuaucgaacaucu

SEQ ID NO: 338496 - RNA, 16 nt, Human
ucccaggaggcggaac

SEQ ID NO: 338497 - RNA, 22 nt, Human
aaauauaauuucugccucaaua

SEQ ID NO: 338498 - RNA, 23 nt, Human
uuuauccaacucuguaaucucuc

SEQ ID NO: 338499 - RNA, 22 nt, Human
auucuucacauaagugcuguac

SEQ ID NO: 338500 - RNA, 22 nt, Human
gggagucugggcuagacuccuu

SEQ ID NO: 338501 - RNA, 20 nt, Human
caucaucacaugagccaauu

SEQ ID NO: 338502 - RNA, 22 nt, Human
ucauuucucccggccaaaaacu

SEQ ID NO: 338503 - RNA, 22 nt, Human
ucuucuccagugcuucugcaca

SEQ ID NO: 338504 - RNA, 22 nt, Human
uacugcaugguggaguggagcu

SEQ ID NO: 338505 - RNA, 22 nt, Human
gaaacugugaucguguucuggg

SEQ ID NO: 338506 - RNA, 22 nt, Human
agaggaugguugaggaagaccu

SEQ ID NO: 338507 - RNA, 22 nt, Human
aguuauaaucugcuacugauau

SEQ ID NO: 338508 - RNA, 22 nt, Human
gcgucugaguugcgggggcuca

SEQ ID NO: 338509 - RNA, 22 nt, Human
aaaguuugaaugauauauuagu

SEQ ID NO: 338510 - RNA, 22 nt, Human
augaggcaguacacacaaagcc

SEQ ID NO: 338511 - RNA, 22 nt, Human
agucucuuuaaucacagugucu

SEQ ID NO: 338512 - RNA, 22 nt, Human
acugccauuggucaaaugagug

SEQ ID NO: 338513 - RNA, 22 nt, Human
aggccagacagcuagaaacagg

SEQ ID NO: 338514 - RNA, 22 nt, Human
ucugugcauuguaacaacuaaa

SEQ ID NO: 338515 - RNA, 22 nt, Human
uacauguauguguacgugcaug

SEQ ID NO: 338516 - RNA, 22 nt, Human
uuucaucuaacacuacauaggg

SEQ ID NO: 338517 - RNA, 22 nt, Human
agauggaguuaguaccagaguc

SEQ ID NO: 338518 - RNA, 22 nt, Human
caggcagcagccacucugguau

SEQ ID NO: 338519 - RNA, 22 nt, Human
aggccagcaagaaagagagucu

SEQ ID NO: 338520 - RNA, 22 nt, Human
ugcuggaauaauuucauguuaa

SEQ ID NO: 338521 - RNA, 22 nt, Human
uggcagcugauuagauggugcc

SEQ ID NO: 338522 - RNA, 22 nt, Human
uuucuucacaggguauugggug

SEQ ID NO: 338523 - RNA, 22 nt, Human
uucugucagaagcuagcuccug

SEQ ID NO: 338524 - RNA, 22 nt, Human
uacaaaguagaaauucaguaaa

SEQ ID NO: 338525 - RNA, 22 nt, Human
aucauuacuccuguaaaauugu

SEQ ID NO: 338526 - RNA, 23 nt, Human
ucaggauauugugugccaaggug

SEQ ID NO: 338527 - RNA, 23 nt, Human
ucagagagcuguugagagcugcc

SEQ ID NO: 338528 - RNA, 22 nt, Human
cuuuguagcugcuucugauuua

SEQ ID NO: 338529 - RNA, 22 nt, Human
gucuccugagacugcagucacc

SEQ ID NO: 338530 - RNA, 22 nt, Human
gaaacaauuuuuguugucuaag

SEQ ID NO: 338531 - RNA, 20 nt, Human
gcccaggaucucugaggcau

SEQ ID NO: 338532 - RNA, 22 nt, Human
uccaggagauacacugcaccag

SEQ ID NO: 338533 - RNA, 22 nt, Human
gagggaggcaucaugaauccag

SEQ ID NO: 338534 - RNA, 22 nt, Human
gcagcugcagacccucagugcu

SEQ ID NO: 338535 - RNA, 19 nt, Human
ugccuggacaaaugugggg

SEQ ID NO: 338536 - RNA, 22 nt, Human
uuuacauuucccucugucaguu

SEQ ID NO: 338537 - RNA, 22 nt, Human
cagucuuuguucccauuacuga

SEQ ID NO: 338538 - RNA, 22 nt, Human
gucaggauuugaacucaggucu

SEQ ID NO: 338539 - RNA, 22 nt, Human
cuggaguuagaguagacacuga

SEQ ID NO: 338540 - RNA, 22 nt, Human
auacacauguguaugugcaugc

SEQ ID NO: 338541 - RNA, 22 nt, Human
aaacacauuuuaggaaaaucua

SEQ ID NO: 338542 - RNA, 22 nt, Human
gaggcagccagagguucucauu

SEQ ID NO: 338543 - RNA, 22 nt, Human
acauuucuaguuguucaucucc

SEQ ID NO: 338544 - RNA, 22 nt, Human
uggggcuccuccuggcaggagg

SEQ ID NO: 338545 - RNA, 22 nt, Human
augaagcugaaaaaggcauaua

SEQ ID NO: 338546 - RNA, 22 nt, Human
gcuccucuucucccacugaaug

SEQ ID NO: 338547 - RNA, 22 nt, Human
uucauugugauucuuggcuagc

SEQ ID NO: 338548 - RNA, 22 nt, Human
aaggccaacuaggaugagcuag

SEQ ID NO: 338549 - RNA, 22 nt, Human
ugaaugaguuuggcugcuguuc

SEQ ID NO: 338550 - RNA, 22 nt, Human
acuucacagaaauuuuaugagg

SEQ ID NO: 338551 - RNA, 22 nt, Human
ucagaaaagguagcugugacaa

SEQ ID NO: 338552 - RNA, 22 nt, Human
ugaggcaggaauggggaaaagu

SEQ ID NO: 338553 - RNA, 22 nt, Human
ucccaggacuuccaguuggagg

SEQ ID NO: 338554 - RNA, 19 nt, Human
uuucuuaggccuuuggccu

SEQ ID NO: 338555 - RNA, 22 nt, Human
aagauauagauaaaacuaugca

SEQ ID NO: 338556 - RNA, 22 nt, Human
aaauaguucagcuuguaaaccc

SEQ ID NO: 338557 - RNA, 22 nt, Human
ugaacacauaaggcuuuccugu

SEQ ID NO: 338558 - RNA, 22 nt, Human
cuuugcaauagaggcacacaug

SEQ ID NO: 338559 - RNA, 22 nt, Human
auggagacgcaagggaccuagg

SEQ ID NO: 338560 - RNA, 22 nt, Human
uucuucaguuugguaaauguaa

SEQ ID NO: 338561 - RNA, 22 nt, Human
uguauaaacuuaagcaggaacc

SEQ ID NO: 338562 - RNA, 22 nt, Human
guuuuaguggguggccacugau

SEQ ID NO: 338563 - RNA, 22 nt, Human
agacgagggccuggcacacagu

SEQ ID NO: 338564 - RNA, 22 nt, Human
aguuggagugaacaugagauug

SEQ ID NO: 338565 - RNA, 22 nt, Human
gcaugucaugucauguaggaau

SEQ ID NO: 338566 - RNA, 22 nt, Human
ugccuguguugauuacuuuguc

SEQ ID NO: 338567 - RNA, 17 nt, Human
aggccagaugaggcaag

SEQ ID NO: 338568 - RNA, 22 nt, Human
ccuggagagagaggccaacugc

SEQ ID NO: 338569 - RNA, 22 nt, Human
cuggcuugcagcucaucauaaa

SEQ ID NO: 338570 - RNA, 22 nt, Human
ugaaggccagggauuugcagcc

SEQ ID NO: 338571 - RNA, 22 nt, Human
gccugcagaacugugaggcaau

SEQ ID NO: 338572 - RNA, 22 nt, Human
aucaggaucaugcuggguggga

SEQ ID NO: 338573 - RNA, 22 nt, Human
uuucacagcuggguggcagagu

SEQ ID NO: 338574 - RNA, 22 nt, Human
uuccaagagcuuuaauuguuga

SEQ ID NO: 338575 - RNA, 23 nt, Human
agaugagccaacaccuccaugcc

SEQ ID NO: 338576 - RNA, 23 nt, Human
acugucugauauguuuuccauca

SEQ ID NO: 338577 - RNA, 21 nt, Human
auaagcaugcugauuacauuu

SEQ ID NO: 338578 - RNA, 22 nt, Human
gauuucuugauaaguaguguga

SEQ ID NO: 338579 - RNA, 22 nt, Human
gugguaauagagcuccaaacua

SEQ ID NO: 338580 - RNA, 22 nt, Human
gcccaggagccuggagaugugu

SEQ ID NO: 338581 - RNA, 18 nt, Human
aauuuccauaugaauugc

SEQ ID NO: 338582 - RNA, 22 nt, Human
acccaggagcucugggguccuc

SEQ ID NO: 338583 - RNA, 21 nt, Human
cagcagaguaaugcauucgua

SEQ ID NO: 338584 - RNA, 22 nt, Human
ggcaggcugcuugggucauguc

SEQ ID NO: 338585 - RNA, 22 nt, Human
ucucugaguaagugacaguuca

SEQ ID NO: 338586 - RNA, 22 nt, Human
gcaggagaaaugaagauugggu

SEQ ID NO: 338587 - RNA, 22 nt, Human
aagaagagaacuggcauccuaa

SEQ ID NO: 338588 - RNA, 22 nt, Human
ugaaggcccuaucuccauauac

SEQ ID NO: 338589 - RNA, 20 nt, Human
augugagggguugaaguggg

SEQ ID NO: 338590 - RNA, 22 nt, Human
ggacagcugcuuucaggccaca

SEQ ID NO: 338591 - RNA, 22 nt, Human
ggaggaugccaagcugugcaca

SEQ ID NO: 338592 - RNA, 22 nt, Human
aggagcagaacugauucugacu

SEQ ID NO: 338593 - RNA, 22 nt, Human
cuggcugugcagucuuccagaa

SEQ ID NO: 338594 - RNA, 22 nt, Human
ugauuuccccagucuugcugcu

SEQ ID NO: 338595 - RNA, 22 nt, Human
ucugggaaguccucugucaugc

SEQ ID NO: 338596 - RNA, 22 nt, Human
ugaggcaggaguucaggcugcg

SEQ ID NO: 338597 - RNA, 22 nt, Human
guguaugaggggagaauguuuu

SEQ ID NO: 338598 - RNA, 22 nt, Human
aaucuucauuuugacaagauuc

SEQ ID NO: 338599 - RNA, 22 nt, Human
gcgcaggagccgcggagggccg

SEQ ID NO: 338600 - RNA, 22 nt, Human
cuugaacucaaugugaggaaga

SEQ ID NO: 338601 - RNA, 22 nt, Human
uuugacaaaggaaaaaugcaca

SEQ ID NO: 338602 - RNA, 19 nt, Human
acuggcaguuucugcaugg

SEQ ID NO: 338603 - RNA, 22 nt, Human
auuacaguaacagcuacaaugc

SEQ ID NO: 338604 - RNA, 22 nt, Human
uccaggagguugagacugcagu

SEQ ID NO: 338605 - RNA, 22 nt, Human
caagagagaugcagcucacuca

SEQ ID NO: 338606 - RNA, 21 nt, Human
aggcagcuggaaggccuggcu

SEQ ID NO: 338607 - RNA, 22 nt, Human
ggcaugcucuuuguccacagua

SEQ ID NO: 338608 - RNA, 22 nt, Human
augcugugucaggaauuugaua

SEQ ID NO: 338609 - RNA, 22 nt, Human
gccaggagggaaaggacaauuu

SEQ ID NO: 338610 - RNA, 22 nt, Human
gguggagcuggaccaggagagg

SEQ ID NO: 338611 - RNA, 22 nt, Human
ucugcaggcuguacaggaagca

SEQ ID NO: 338612 - RNA, 20 nt, Human
uugagcuuuuaguacagaca

SEQ ID NO: 338613 - RNA, 22 nt, Human
aaguguauauaugacuuauaaa

SEQ ID NO: 338614 - RNA, 20 nt, Human
agaggaggauuauuuuauuc

SEQ ID NO: 338615 - RNA, 22 nt, Human
ugagccugguugcagugucugg

SEQ ID NO: 338616 - RNA, 22 nt, Human
cccauucauccucgcuuccuuc

SEQ ID NO: 338617 - RNA, 22 nt, Human
aaaguuugucacuuggcuagaa

SEQ ID NO: 338618 - RNA, 22 nt, Human
uacaauauguggccuuuuguga

SEQ ID NO: 338619 - RNA, 20 nt, Human
uuucaguugguuaauggcau

SEQ ID NO: 338620 - RNA, 22 nt, Human
gcagcugaauguccauugcugc

SEQ ID NO: 338621 - RNA, 21 nt, Human
aauguauguuuaucucacagu

SEQ ID NO: 338622 - RNA, 22 nt, Human
aguaugaaaguuaaucaauuua

SEQ ID NO: 338623 - RNA, 22 nt, Human
ugugaaaagcguguguucuagg

SEQ ID NO: 338624 - RNA, 22 nt, Human
guaggcagggcuguggggagaa

SEQ ID NO: 338625 - RNA, 22 nt, Human
caugaaaucugaguauguuucc

SEQ ID NO: 338626 - RNA, 22 nt, Human
ucugaaaugcaaauuugacuga

SEQ ID NO: 338627 - RNA, 22 nt, Human
uguagaaccuguuuauuauaga

SEQ ID NO: 338628 - RNA, 22 nt, Human
auccugucaucauaguacuuga

SEQ ID NO: 338629 - RNA, 22 nt, Human
acaauguaggauauguacuugu

SEQ ID NO: 338630 - RNA, 22 nt, Human
uauuuuaucugccagaguggag

SEQ ID NO: 338631 - RNA, 22 nt, Human
uuuuuguagucauuagaagagg

SEQ ID NO: 338632 - RNA, 22 nt, Human
uuugaacuucuaccugucauau

SEQ ID NO: 338633 - RNA, 22 nt, Human
ucaggaugagcucauaacuaug

SEQ ID NO: 338634 - RNA, 22 nt, Human
ccaggcagcaaauuuucugaau

SEQ ID NO: 338635 - RNA, 22 nt, Human
caggauggucuucauuuggcuc

SEQ ID NO: 338636 - RNA, 22 nt, Human
caggaaaggugugucaugaugg

SEQ ID NO: 338637 - RNA, 22 nt, Human
auuuccagugcacugaauagaa

SEQ ID NO: 338638 - RNA, 22 nt, Human
cugcuuugacuguuaagaacca

SEQ ID NO: 338639 - RNA, 22 nt, Human
gcagaggauagcauaugaaccu

SEQ ID NO: 338640 - RNA, 22 nt, Human
uucuucaaaacaacacuggccu

SEQ ID NO: 338641 - RNA, 22 nt, Human
aaaguauucuugacuguuuuuc

SEQ ID NO: 338642 - RNA, 22 nt, Human
acauugcugcauucuccuuccc

SEQ ID NO: 338643 - RNA, 22 nt, Human
uuuuaucugcuucauuaguuga

SEQ ID NO: 338644 - RNA, 22 nt, Human
caaggccauaagagauacaaaa

SEQ ID NO: 338645 - RNA, 22 nt, Human
cucacugacgaggaagcugaga

SEQ ID NO: 338646 - RNA, 22 nt, Human
gaauauuuuuaaagggacuaau

SEQ ID NO: 338647 - RNA, 22 nt, Human
uaauaguugugacuuuguaaag

SEQ ID NO: 338648 - RNA, 22 nt, Human
uuacaagcagcuacauaucaca

SEQ ID NO: 338649 - RNA, 22 nt, Human
ggaggaugagcuacgaggagcu

SEQ ID NO: 338650 - RNA, 22 nt, Human
ucaugaacaucucaaauaacca

SEQ ID NO: 338651 - RNA, 22 nt, Human
uuaguuuucccaucuuuauggu

SEQ ID NO: 338652 - RNA, 22 nt, Human
ccuugcauauauuauaucuuug

SEQ ID NO: 338653 - RNA, 22 nt, Human
ggugagggaguggaacgaggug

SEQ ID NO: 338654 - RNA, 22 nt, Human
aacauacauauuucagugucca

SEQ ID NO: 338655 - RNA, 22 nt, Human
aagcaacucccuccucauuuuu

SEQ ID NO: 338656 - RNA, 22 nt, Human
ggacagaggguugacagaguau

SEQ ID NO: 338657 - RNA, 22 nt, Human
gaggcugccccuuccucagcug

SEQ ID NO: 338658 - RNA, 21 nt, Human
aucauucuggaaaauucaagc

SEQ ID NO: 338659 - RNA, 22 nt, Human
agucucugccagcuuguccucu

SEQ ID NO: 338660 - RNA, 22 nt, Human
cuucucaaaguugugaaucagg

SEQ ID NO: 338661 - RNA, 22 nt, Human
aggagaggcaucaagaaaaucg

SEQ ID NO: 338662 - RNA, 22 nt, Human
accaggagagauuuuauugaga

SEQ ID NO: 338663 - RNA, 22 nt, Human
uugaacauuggcaauuucauau

SEQ ID NO: 338664 - RNA, 22 nt, Human
caggcagcugaggacuuugcua

SEQ ID NO: 338665 - RNA, 22 nt, Human
gaggccaggggccuggagauga

SEQ ID NO: 338666 - RNA, 22 nt, Human
aagauuauuuaagacaggaacc

SEQ ID NO: 338667 - RNA, 22 nt, Human
ugcugugagguugagaaggaag

SEQ ID NO: 338668 - RNA, 22 nt, Human
cuguaugaguugggaauagaau

SEQ ID NO: 338669 - RNA, 22 nt, Human
gaaggccauuagagccugugcc

SEQ ID NO: 338670 - RNA, 22 nt, Human
ucuuuccauggccacacagucu

SEQ ID NO: 338671 - RNA, 22 nt, Human
cugcuguggugucaagcaucuc

SEQ ID NO: 338672 - RNA, 22 nt, Human
ucauuuguugcuguuaccugag

SEQ ID NO: 338673 - RNA, 18 nt, Human
ucuuuggacaacuacugg

SEQ ID NO: 338674 - RNA, 22 nt, Human
acacagccgugaaucugcuucu

SEQ ID NO: 338675 - RNA, 18 nt, Human
cucugucauaagugucau

SEQ ID NO: 338676 - RNA, 22 nt, Human
cauuuguauguuccuccuuagg

SEQ ID NO: 338677 - RNA, 18 nt, Human
ccagguggugacagagau

SEQ ID NO: 338678 - RNA, 22 nt, Human
cucaggauagauuguccucuca

SEQ ID NO: 338679 - RNA, 22 nt, Human
augacucuuagcuaaagguaag

SEQ ID NO: 338680 - RNA, 22 nt, Human
aaagcagaacugagagagcugg

SEQ ID NO: 338681 - RNA, 22 nt, Human
cucuucuuuaguccagaccauc

SEQ ID NO: 338682 - RNA, 22 nt, Human
ggaggggucucuagcgaggaga

SEQ ID NO: 338683 - RNA, 22 nt, Human
uuuguuuagaaagagauuggug

SEQ ID NO: 338684 - RNA, 23 nt, Human
uuucaacuccugccauuauuucu

SEQ ID NO: 338685 - RNA, 22 nt, Human
gcugcccagacauugaaucagg

SEQ ID NO: 338686 - RNA, 22 nt, Human
uucuagaugauaaaccagcagc

SEQ ID NO: 338687 - RNA, 22 nt, Human
uucauucuuugaaucugaggua

SEQ ID NO: 338688 - RNA, 22 nt, Human
uuucuugacugcuuaggaaugc

SEQ ID NO: 338689 - RNA, 22 nt, Human
ucauacaucuguccuggagcuc

SEQ ID NO: 338690 - RNA, 22 nt, Human
aggcaguuuaggcagcgauuua

SEQ ID NO: 338691 - RNA, 22 nt, Human
aucuacauaaaacgaauacaua

SEQ ID NO: 338692 - RNA, 20 nt, Human
cugcugugugugccucagcc

SEQ ID NO: 338693 - RNA, 22 nt, Human
ucuuagaaguuuauggcacgga

SEQ ID NO: 338694 - RNA, 22 nt, Human
ggcagggaagcuggcaucacgg

SEQ ID NO: 338695 - RNA, 22 nt, Human
uuaaaauagccagugccccucu

SEQ ID NO: 338696 - RNA, 22 nt, Human
cucaggaaaggccaugcaaggg

SEQ ID NO: 338697 - RNA, 22 nt, Human
cauuuguaucugggcugcugug

SEQ ID NO: 338698 - RNA, 22 nt, Human
uauuucagcaagaagaaugugg

SEQ ID NO: 338699 - RNA, 22 nt, Human
aaaggugacugcagcagcuauu

SEQ ID NO: 338700 - RNA, 22 nt, Human
ugcacagugaccccuggugacu

SEQ ID NO: 338701 - RNA, 22 nt, Human
uaugaacuuuugaugugacaug

SEQ ID NO: 338702 - RNA, 22 nt, Human
cugcugugugcuuacuuggguu

SEQ ID NO: 338703 - RNA, 22 nt, Human
ucacaguuauagucuguagaau

SEQ ID NO: 338704 - RNA, 22 nt, Human
gccaggagccagcuucuuagca

SEQ ID NO: 338705 - RNA, 22 nt, Human
caucucaugggcaugccaagcu

SEQ ID NO: 338706 - RNA, 20 nt, Human
ugaaggccagcagcauaggg

SEQ ID NO: 338707 - RNA, 22 nt, Human
aguaccaugcuuccugacuggu

SEQ ID NO: 338708 - RNA, 22 nt, Human
uugcugaaaacaguggguauug

SEQ ID NO: 338709 - RNA, 22 nt, Human
cuucuucaguugcauguauugg

SEQ ID NO: 338710 - RNA, 20 nt, Human
ugugcaggagagugaggcug

SEQ ID NO: 338711 - RNA, 22 nt, Human
uucuucaaccaucuacauaaac

SEQ ID NO: 338712 - RNA, 22 nt, Human
aggucagcaggccaggggcgaa

SEQ ID NO: 338713 - RNA, 20 nt, Human
cagaggcauuuucagacucu

SEQ ID NO: 338714 - RNA, 22 nt, Human
gaggcugcuguuagcccugggc

SEQ ID NO: 338715 - RNA, 22 nt, Human
uuggcagugucugcaaaaugga

SEQ ID NO: 338716 - RNA, 22 nt, Human
gguuugaacagcuuuggagaag

SEQ ID NO: 338717 - RNA, 22 nt, Human
cccaggaggcagagguugcagu

SEQ ID NO: 338718 - RNA, 22 nt, Human
cccaggaaguggagguugcagu

SEQ ID NO: 338719 - RNA, 22 nt, Human
auguuuccauuuucuuguauca

SEQ ID NO: 338720 - RNA, 22 nt, Human
uacauucagaagaauggacacg

SEQ ID NO: 338721 - RNA, 18 nt, Human
cugcccagagcauuucau

SEQ ID NO: 338722 - RNA, 22 nt, Human
aguaugaaccuggguucuggau

SEQ ID NO: 338723 - RNA, 22 nt, Human
aggagagcuggugucuggaauc

SEQ ID NO: 338724 - RNA, 22 nt, Human
aggcaggcucaaugcccagucu

SEQ ID NO: 338725 - RNA, 22 nt, Human
ugcuacaauucacaucuggaua

SEQ ID NO: 338726 - RNA, 22 nt, Human
agaggggaguccuaaucugauu

SEQ ID NO: 338727 - RNA, 22 nt, Human
uuggaaauggcuguaguuauga

SEQ ID NO: 338728 - RNA, 22 nt, Human
uucaggauucugugucugacaa

SEQ ID NO: 338729 - RNA, 22 nt, Human
cauuuguuaaccaguguggauu

SEQ ID NO: 338730 - RNA, 20 nt, Human
uggcaucucucaauuguagg

SEQ ID NO: 338731 - RNA, 15 nt, Human
uucaggauaugacuc

SEQ ID NO: 338732 - RNA, 22 nt, Human
uauacacaaggugugcauuugu

SEQ ID NO: 338733 - RNA, 22 nt, Human
uuuaaauuauaguuaaugucug

SEQ ID NO: 338734 - RNA, 22 nt, Human
uacuuacagaaggaagcaauug

SEQ ID NO: 338735 - RNA, 22 nt, Human
uucaggauucuuucagacuggg

SEQ ID NO: 338736 - RNA, 22 nt, Human
aaaguucuaaaacucuuuguga

SEQ ID NO: 338737 - RNA, 22 nt, Human
cccaaggaagacgcuugugaua

SEQ ID NO: 338738 - RNA, 22 nt, Human
agugcuuugguauagaacuauu

SEQ ID NO: 338739 - RNA, 20 nt, Human
aggcucagcugagcucuugg

SEQ ID NO: 338740 - RNA, 22 nt, Human
guccaugacugugacucacaug

SEQ ID NO: 338741 - RNA, 22 nt, Human
uuucuucagccacuccaaacug

SEQ ID NO: 338742 - RNA, 20 nt, Human
uuugucuguuaaguguuucu

SEQ ID NO: 338743 - RNA, 22 nt, Human
aucuuucaaucaggaaaaaucu

SEQ ID NO: 338744 - RNA, 22 nt, Human
gaaacauaguugagacacugcu

SEQ ID NO: 338745 - RNA, 22 nt, Human
aaacacagauuucuuuguccca

SEQ ID NO: 338746 - RNA, 22 nt, Human
gucuuucuaugaugaacuguug

SEQ ID NO: 338747 - RNA, 22 nt, Human
aggccagcgcugcuagcucccg

SEQ ID NO: 338748 - RNA, 22 nt, Human
uugugaaacauucauggauuug

SEQ ID NO: 338749 - RNA, 22 nt, Human
cugccuccugccgugcagcuuc

SEQ ID NO: 338750 - RNA, 22 nt, Human
aauaucaguauauuguaucagu

SEQ ID NO: 338751 - RNA, 22 nt, Human
uaggaaauggcucaguuacugc

SEQ ID NO: 338752 - RNA, 22 nt, Human
gaggcagugcauugucuagggg

SEQ ID NO: 338753 - RNA, 22 nt, Human
acuggcaggcugcuggccggcg

SEQ ID NO: 338754 - RNA, 22 nt, Human
uucaggauaugugauaucugaa

SEQ ID NO: 338755 - RNA, 22 nt, Human
uccaggagauucauuaggucau

SEQ ID NO: 338756 - RNA, 15 nt, Human
caggagaggaagguu

SEQ ID NO: 338757 - RNA, 20 nt, Human
ucugugcaccugcuacaagg

SEQ ID NO: 338758 - RNA, 22 nt, Human
aauaauuuuagcucagaguugu

SEQ ID NO: 338759 - RNA, 22 nt, Human
aagagagggguugcauggaaau

SEQ ID NO: 338760 - RNA, 20 nt, Human
uuucaguuaucuugaccuuc

SEQ ID NO: 338761 - RNA, 22 nt, Human
uccauuuuguagguaugcuaca

SEQ ID NO: 338762 - RNA, 22 nt, Human
ucugcuguauuagguugaacug

SEQ ID NO: 338763 - RNA, 22 nt, Human
uuagccauauagaaaaagagcu

SEQ ID NO: 338764 - RNA, 22 nt, Human
auugcuguacacuucuagaucu

SEQ ID NO: 338765 - RNA, 22 nt, Human
cagaggcagugggguugcuccu

SEQ ID NO: 338766 - RNA, 22 nt, Human
cugcuuugauuagaagaguaca

SEQ ID NO: 338767 - RNA, 22 nt, Human
gauucacucauauuuuacguuu

SEQ ID NO: 338768 - RNA, 22 nt, Human
cccuugcacauuugucuuuaau

SEQ ID NO: 338769 - RNA, 22 nt, Human
gagcauuugguuauaguaauuu

SEQ ID NO: 338770 - RNA, 22 nt, Human
gaggagcuugaggcuaggagcc

SEQ ID NO: 338771 - RNA, 22 nt, Human
cagcuggcaaguggagcagggu

SEQ ID NO: 338772 - RNA, 17 nt, Human
aagacagaagccaugag

SEQ ID NO: 338773 - RNA, 22 nt, Human
aggcagugcaugcaaaggucgg

SEQ ID NO: 338774 - RNA, 22 nt, Human
agucuccuuggccucaaugccu

SEQ ID NO: 338775 - RNA, 22 nt, Human
uuuaaauggcauuuucccagau

SEQ ID NO: 338776 - RNA, 22 nt, Human
cuaauguaucauggcucucagc

SEQ ID NO: 338777 - RNA, 22 nt, Human
cccaggaaugagcaggcagggg

SEQ ID NO: 338778 - RNA, 22 nt, Human
ugcugaugaguccuucuaucgc

SEQ ID NO: 338779 - RNA, 22 nt, Human
aaucuucagugucuaaaaagca

SEQ ID NO: 338780 - RNA, 22 nt, Human
ucagguggcuuggagggggacg

SEQ ID NO: 338781 - RNA, 22 nt, Human
gagguagcgaguggacagugca

SEQ ID NO: 338782 - RNA, 22 nt, Human
gaacacaucacauuuuacagug

SEQ ID NO: 338783 - RNA, 22 nt, Human
gaaucucaguggaagcaggaag

SEQ ID NO: 338784 - RNA, 22 nt, Human
acuucaugcagaagagagcugu

SEQ ID NO: 338785 - RNA, 22 nt, Human
uagcucuucauuucaucugauu

SEQ ID NO: 338786 - RNA, 22 nt, Human
ggaggccagggacccagucagc

SEQ ID NO: 338787 - RNA, 22 nt, Human
cuugggaaugcuaacagaugac

SEQ ID NO: 338788 - RNA, 22 nt, Human
cugcuguguuucacaccucugg

SEQ ID NO: 338789 - RNA, 22 nt, Human
gucauucuuaacaacucaguag

SEQ ID NO: 338790 - RNA, 22 nt, Human
uaaggccaauuaacaaccaggg

SEQ ID NO: 338791 - RNA, 22 nt, Human
ugaggcaguauucuccauucca

SEQ ID NO: 338792 - RNA, 22 nt, Human
aggaaaacacaguauugaugga

SEQ ID NO: 338793 - RNA, 22 nt, Human
uggcagcugucuguggggucuc

SEQ ID NO: 338794 - RNA, 22 nt, Human
uuagccauuaauguccugugca

SEQ ID NO: 338795 - RNA, 22 nt, Human
uaacacauuaguucuccuagau

SEQ ID NO: 338796 - RNA, 22 nt, Human
uccaggaguccuggguggcccc

SEQ ID NO: 338797 - RNA, 22 nt, Human
gaggagcuggcugucgggaggc

SEQ ID NO: 338798 - RNA, 22 nt, Human
uuugcagugauucuugcaguga

SEQ ID NO: 338799 - RNA, 22 nt, Human
uucuccucuguuggccuucccu

SEQ ID NO: 338800 - RNA, 22 nt, Human
aaagauuauggcauugaaauac

SEQ ID NO: 338801 - RNA, 22 nt, Human
cagcugacccgugggaggcggg

SEQ ID NO: 338802 - RNA, 22 nt, Human
acaggagaauuaucuggaacaa

SEQ ID NO: 338803 - RNA, 20 nt, Human
cccagugaagcauggaagag

SEQ ID NO: 338804 - RNA, 22 nt, Human
ucacauuuuauaucucugguuu

SEQ ID NO: 338805 - RNA, 22 nt, Human
caaauagugucacauugugagg

SEQ ID NO: 338806 - RNA, 22 nt, Human
aggcagugccuggaccccagcu

SEQ ID NO: 338807 - RNA, 22 nt, Human
auaaauaucacuguugucccuc

SEQ ID NO: 338808 - RNA, 22 nt, Human
caaguaaacaauaugugauuca

SEQ ID NO: 338809 - RNA, 22 nt, Human
uaagauaaguggguugagaugg

SEQ ID NO: 338810 - RNA, 22 nt, Human
auaaagauuucuuuuucucuac

SEQ ID NO: 338811 - RNA, 22 nt, Human
uaggcagcgcuuggcugugcuu

SEQ ID NO: 338812 - RNA, 22 nt, Human
caagauaagaucauuuacacua

SEQ ID NO: 338813 - RNA, 22 nt, Human
uacccagggcuuuucugaugca

SEQ ID NO: 338814 - RNA, 22 nt, Human
aguguguccagaaaucuguauu

SEQ ID NO: 338815 - RNA, 22 nt, Human
gaaggccauugcguccugggau

SEQ ID NO: 338816 - RNA, 22 nt, Human
cauuuguuaauuacuauuaucu

SEQ ID NO: 338817 - RNA, 19 nt, Human
caagugaagccugggaugg

SEQ ID NO: 338818 - RNA, 23 nt, Human
uccuuccuuugagaggcuccauc

SEQ ID NO: 338819 - RNA, 22 nt, Human
acaugauuuuaguaucauaaua

SEQ ID NO: 338820 - RNA, 22 nt, Human
gaccaaggaagaggggagccag

SEQ ID NO: 338821 - RNA, 22 nt, Human
uaguauuuaaucacuuuugucu

SEQ ID NO: 338822 - RNA, 22 nt, Human
cacagcauaaugaaauauacuu

SEQ ID NO: 338823 - RNA, 22 nt, Human
acauauuuugaaagcuuucuaa

SEQ ID NO: 338824 - RNA, 22 nt, Human
auuugcuucugugaaaucaagu

SEQ ID NO: 338825 - RNA, 22 nt, Human
aucccaugagaccacguuggcu

SEQ ID NO: 338826 - RNA, 22 nt, Human
agacgagggcccccaggacagc

SEQ ID NO: 338827 - RNA, 22 nt, Human
ccagaggaaaaauaucucccua

SEQ ID NO: 338828 - RNA, 20 nt, Human
guggcaggcagugaaggagc

SEQ ID NO: 338829 - RNA, 22 nt, Human
ucuacccagagcuaugaccuga

SEQ ID NO: 338830 - RNA, 22 nt, Human
gaggcaguguugaaaaggagag

SEQ ID NO: 338831 - RNA, 22 nt, Human
agaggccaggcugcagagggau

SEQ ID NO: 338832 - RNA, 22 nt, Human
uuucccaguucccugcucuaua

SEQ ID NO: 338833 - RNA, 19 nt, Human
ggucagcugggcuagaggc

SEQ ID NO: 338834 - RNA, 22 nt, Human
agaggagugggaagcagugcaa

SEQ ID NO: 338835 - RNA, 22 nt, Human
cucugucacuucuccagcugag

SEQ ID NO: 338836 - RNA, 22 nt, Human
augugaaaaauuucuuauuaca

SEQ ID NO: 338837 - RNA, 22 nt, Human
cauuuucagcacccaucugaaa

SEQ ID NO: 338838 - RNA, 22 nt, Human
augcugugccuggaaagcggcu

SEQ ID NO: 338839 - RNA, 22 nt, Human
uucaugaaacuuaacuguuggg

SEQ ID NO: 338840 - RNA, 22 nt, Human
cuucaggauuuaggaagaugaa

SEQ ID NO: 338841 - RNA, 22 nt, Human
ucuucuucccaucccucaaaug

SEQ ID NO: 338842 - RNA, 22 nt, Human
uuugcaaagugacuauuauaug

SEQ ID NO: 338843 - RNA, 22 nt, Human
aggcacaggccucagcacccag

SEQ ID NO: 338844 - RNA, 22 nt, Human
cagcaggaccauugaggcauca

SEQ ID NO: 338845 - RNA, 22 nt, Human
aaggcagcaggauuuggugacu

SEQ ID NO: 338846 - RNA, 22 nt, Human
ugucuucagcaaaugccuuucu

SEQ ID NO: 338847 - RNA, 22 nt, Human
ggccagaaguuggaaaagagcc

SEQ ID NO: 338848 - RNA, 22 nt, Human
cucaacagcucugccauacucc

SEQ ID NO: 338849 - RNA, 22 nt, Human
gaggcacuggaggaaaggagaa

SEQ ID NO: 338850 - RNA, 22 nt, Human
aggagcagcuucugaaccaugu

SEQ ID NO: 338851 - RNA, 22 nt, Human
uucuuuuacauuaagauuucag

SEQ ID NO: 338852 - RNA, 22 nt, Human
gcagcugcagagaccggguggg

SEQ ID NO: 338853 - RNA, 22 nt, Human
uuagagucaagcugcauguucu

SEQ ID NO: 338854 - RNA, 23 nt, Human
cuuuuaacuugaucugagaccag

SEQ ID NO: 338855 - RNA, 22 nt, Human
cucaggauguacuacagaaggc

SEQ ID NO: 338856 - RNA, 22 nt, Human
uuucuucagccuucacaaccug

SEQ ID NO: 338857 - RNA, 22 nt, Human
ccaggacaaguguggccauggc

SEQ ID NO: 338858 - RNA, 22 nt, Human
aguuauuacucuuuaacauauu

SEQ ID NO: 338859 - RNA, 22 nt, Human
ucaggagaaucagggcuguccu

SEQ ID NO: 338860 - RNA, 23 nt, Human
uggcaaggaaugggauggagacu

SEQ ID NO: 338861 - RNA, 22 nt, Human
aaagccauuacaaaauuucaua

SEQ ID NO: 338862 - RNA, 21 nt, Human
gcugcaucaaucuacccaggg

SEQ ID NO: 338863 - RNA, 22 nt, Human
agcuucccaagguuggaagguu

SEQ ID NO: 338864 - RNA, 22 nt, Human
guuuucaaggggauuuaacuga

SEQ ID NO: 338865 - RNA, 22 nt, Human
uugguuuagagagugugguuac

SEQ ID NO: 338866 - RNA, 22 nt, Human
uauuuccaccuauuauuuucug

SEQ ID NO: 338867 - RNA, 22 nt, Human
gaugagcauuguuucauguguu

SEQ ID NO: 338868 - RNA, 22 nt, Human
gaggcagcucuucugaaugggg

SEQ ID NO: 338869 - RNA, 22 nt, Human
uaaggccaaggggccauagucu

SEQ ID NO: 338870 - RNA, 22 nt, Human
cuagaauugcauucuaugaaua

SEQ ID NO: 338871 - RNA, 22 nt, Human
agacagcuaauaaaugagugug

SEQ ID NO: 338872 - RNA, 22 nt, Human
acuuuacaagcuuauagccuag

SEQ ID NO: 338873 - RNA, 22 nt, Human
cccaggagaugcacuccauugg

SEQ ID NO: 338874 - RNA, 22 nt, Human
aagcuggagaguuaggugaaua

SEQ ID NO: 338875 - RNA, 22 nt, Human
ucaggagaguguucaguggagg

SEQ ID NO: 338876 - RNA, 22 nt, Human
uuucuagggcucuugucuucug

SEQ ID NO: 338877 - RNA, 22 nt, Human
cagggaggaugggcuguuuugc

SEQ ID NO: 338878 - RNA, 18 nt, Human
gcagcuagccaggggggc

SEQ ID NO: 338879 - RNA, 21 nt, Human
aaucauacaaaacaugucagg

SEQ ID NO: 338880 - RNA, 22 nt, Human
auaugugaaugauaucacuuug

SEQ ID NO: 338881 - RNA, 22 nt, Human
ggagggacccacucuagaggug

SEQ ID NO: 338882 - RNA, 23 nt, Human
gugagucuugccuuugcugugga

SEQ ID NO: 338883 - RNA, 23 nt, Human
auucuucauuaucuucuagaaaa

SEQ ID NO: 338884 - RNA, 20 nt, Human
cucaggauacugcaaaguug

SEQ ID NO: 338885 - RNA, 22 nt, Human
cagcugccugucuggaggcaau

SEQ ID NO: 338886 - RNA, 22 nt, Human
ccuacucugagcgccuccgcau

SEQ ID NO: 338887 - RNA, 22 nt, Human
aggcaguguguagcuggaagag

SEQ ID NO: 338888 - RNA, 22 nt, Human
uuagccauuaaauuacaaggug

SEQ ID NO: 338889 - RNA, 22 nt, Human
uggaggaaguggcuggccagaa

SEQ ID NO: 338890 - RNA, 21 nt, Human
cugcuguggcccccgacaugc

SEQ ID NO: 338891 - RNA, 22 nt, Human
cacagacccagaagggaugaag

SEQ ID NO: 338892 - RNA, 22 nt, Human
uacuuuuuagcacagugugugc

SEQ ID NO: 338893 - RNA, 22 nt, Human
aggaugaggcuggcaggucuug

SEQ ID NO: 338894 - RNA, 22 nt, Human
uccaggagggggagccgugccg

SEQ ID NO: 338895 - RNA, 19 nt, Human
ugagaggcuuaaggcagcu

SEQ ID NO: 338896 - RNA, 22 nt, Human
aucugcuugaguuugaagucag

SEQ ID NO: 338897 - RNA, 22 nt, Human
ggcagcuggguuggccagaaac

SEQ ID NO: 338898 - RNA, 22 nt, Human
guaggcagguggaggagugaag

SEQ ID NO: 338899 - RNA, 22 nt, Human
cuagcaucagaugagaagcugu

SEQ ID NO: 338900 - RNA, 22 nt, Human
aaucuucuuucuuaacaguaca

SEQ ID NO: 338901 - RNA, 22 nt, Human
aucaggauccaccuugagccug

SEQ ID NO: 338902 - RNA, 22 nt, Human
cccaggagguuggggcuacagu

SEQ ID NO: 338903 - RNA, 22 nt, Human
auucugucauuucaagaaaaac

SEQ ID NO: 338904 - RNA, 22 nt, Human
auugaaagagaauguagcucuu

SEQ ID NO: 338905 - RNA, 22 nt, Human
cccaggaacuccagagcuccuc

SEQ ID NO: 338906 - RNA, 22 nt, Human
uauauguaaauaagucuaaugu

SEQ ID NO: 338907 - RNA, 22 nt, Human
uuugaaauaugaggcauuauga

SEQ ID NO: 338908 - RNA, 22 nt, Human
ucugcugucacucauuugcuuc

SEQ ID NO: 338909 - RNA, 22 nt, Human
cagucccuaguggagcucacag

SEQ ID NO: 338910 - RNA, 22 nt, Human
cauuuauucauuugcuagggcu

SEQ ID NO: 338911 - RNA, 22 nt, Human
uaucaauugggccaaaugguac

SEQ ID NO: 338912 - RNA, 22 nt, Human
ggagcaggagucucuugaauuu

SEQ ID NO: 338913 - RNA, 22 nt, Human
uaagaacuucggacauguuauc

SEQ ID NO: 338914 - RNA, 22 nt, Human
gucugucauacggcuuauguaa

SEQ ID NO: 338915 - RNA, 19 nt, Human
ucucugcuucucuuggcau

SEQ ID NO: 338916 - RNA, 22 nt, Human
cugaaaauguuacacaggaaga

SEQ ID NO: 338917 - RNA, 22 nt, Human
agugagaguauuaaugugaacu

SEQ ID NO: 338918 - RNA, 22 nt, Human
uuucacaagacagcuacuguug

SEQ ID NO: 338919 - RNA, 22 nt, Human
gucacuguauccagguuccagc

SEQ ID NO: 338920 - RNA, 22 nt, Human
aaauaguuuagcucucauuuca

SEQ ID NO: 338921 - RNA, 22 nt, Human
agagacagaggcaauauagcuu

SEQ ID NO: 338922 - RNA, 22 nt, Human
uugacacagaucaauauucaac

SEQ ID NO: 338923 - RNA, 22 nt, Human
gaaggccauuuuuagguagaau

SEQ ID NO: 338924 - RNA, 22 nt, Human
aaucugucguaguaaaaagcag

SEQ ID NO: 338925 - RNA, 22 nt, Human
caaggccaguccauuuuggaag

SEQ ID NO: 338926 - RNA, 22 nt, Human
ucauuuguggaagugauugugg

SEQ ID NO: 338927 - RNA, 22 nt, Human
agcccaggagguggagguugca

SEQ ID NO: 338928 - RNA, 22 nt, Human
cuuugaauugccguuucaucug

SEQ ID NO: 338929 - RNA, 22 nt, Human
uucuucuuuccuauaauuaauu

SEQ ID NO: 338930 - RNA, 22 nt, Human
ggaagaggcugaggccaugcug

SEQ ID NO: 338931 - RNA, 22 nt, Human
uggcagagugcagaagaggcau

SEQ ID NO: 338932 - RNA, 22 nt, Human
uggagaggagcaccauggccau

SEQ ID NO: 338933 - RNA, 22 nt, Human
acucagaaccauuuacucugag

SEQ ID NO: 338934 - RNA, 22 nt, Human
caaauguauucucacuucaggg

SEQ ID NO: 338935 - RNA, 22 nt, Human
ucuuuauugcuacugguuuguc

SEQ ID NO: 338936 - RNA, 22 nt, Human
caagauggaguccgggaaugug

SEQ ID NO: 338937 - RNA, 22 nt, Human
guucuucagucacaucacagaa

SEQ ID NO: 338938 - RNA, 22 nt, Human
uuuauauuucccaggauuggcc

SEQ ID NO: 338939 - RNA, 22 nt, Human
auauauuugagaauauucauga

SEQ ID NO: 338940 - RNA, 22 nt, Human
ccaugagacagcaacugaaagu

SEQ ID NO: 338941 - RNA, 22 nt, Human
cuuuggaauauuuuauugagaa

SEQ ID NO: 338942 - RNA, 22 nt, Human
gggcagcuggccagguauucug

SEQ ID NO: 338943 - RNA, 22 nt, Human
aucugcuuccugggcuccauga

SEQ ID NO: 338944 - RNA, 18 nt, Human
uuccaugauuccuuucac

SEQ ID NO: 338945 - RNA, 22 nt, Human
acucaggaaaugaagacugguu

SEQ ID NO: 338946 - RNA, 22 nt, Human
gaggcagcaaaauauaucauaa

SEQ ID NO: 338947 - RNA, 22 nt, Human
acccaggagagagcuauaaaau

SEQ ID NO: 338948 - RNA, 22 nt, Human
aaagcagaggugauaugacuua

SEQ ID NO: 338949 - RNA, 22 nt, Human
acuggaaaugagaugauaucag

SEQ ID NO: 338950 - RNA, 22 nt, Human
ugcuguggcaguuuauguauag

SEQ ID NO: 338951 - RNA, 22 nt, Human
uugcauuugaucuuggguucuc

SEQ ID NO: 338952 - RNA, 22 nt, Human
gagugcaggccugagcaccauc

SEQ ID NO: 338953 - RNA, 22 nt, Human
uuauacauguguuuugagauga

SEQ ID NO: 338954 - RNA, 22 nt, Human
cucccagagagcaggugggccg

SEQ ID NO: 338955 - RNA, 22 nt, Human
ugucucaguacacuccgauguu

SEQ ID NO: 338956 - RNA, 22 nt, Human
auuacaauaagguuuauuugua

SEQ ID NO: 338957 - RNA, 22 nt, Human
ucacaaauauuuuaacaguagg

SEQ ID NO: 338958 - RNA, 22 nt, Human
uccaggaguggggcagaggucu

SEQ ID NO: 338959 - RNA, 20 nt, Human
agcauuugaaauaugacuau

SEQ ID NO: 338960 - RNA, 22 nt, Human
uugguuuaggaacuggcuugga

SEQ ID NO: 338961 - RNA, 22 nt, Human
ccauccugcauugcuauucaga

SEQ ID NO: 338962 - RNA, 22 nt, Human
cauaauuugugguaguggggga

SEQ ID NO: 338963 - RNA, 22 nt, Human
aaaguugugaaaccgaacaugu

SEQ ID NO: 338964 - RNA, 22 nt, Human
agggcagcccuucugggagggc

SEQ ID NO: 338965 - RNA, 20 nt, Human
gucaggauuaguaaacucug

SEQ ID NO: 338966 - RNA, 22 nt, Human
aggcuagcuuuggcucaguaaa

SEQ ID NO: 338967 - RNA, 22 nt, Human
uuagccaugugggaaaaacagc

SEQ ID NO: 338968 - RNA, 22 nt, Human
cagagccacuuggagaugagaa

SEQ ID NO: 338969 - RNA, 22 nt, Human
uucaggaugacaccauguccag

SEQ ID NO: 338970 - RNA, 22 nt, Human
aggguagguguaagauagcccu

SEQ ID NO: 338971 - RNA, 22 nt, Human
aguaugaagcugaaugauuuua

SEQ ID NO: 338972 - RNA, 20 nt, Human
cuguuaaaagguaugaauuc

SEQ ID NO: 338973 - RNA, 19 nt, Human
uuagccauccacagugaaa

SEQ ID NO: 338974 - RNA, 21 nt, Human
uucugggaaaugagcuggggc

SEQ ID NO: 338975 - RNA, 22 nt, Human
gcaucuaaauaaacgugggagu

SEQ ID NO: 338976 - RNA, 22 nt, Human
uauaucauggagauuaacauuc

SEQ ID NO: 338977 - RNA, 22 nt, Human
ucuuuuggguucuuaugauuua

SEQ ID NO: 338978 - RNA, 22 nt, Human
cugcccaggaaggagaggaugg

SEQ ID NO: 338979 - RNA, 22 nt, Human
agucuugcauuuucugaagaug

SEQ ID NO: 338980 - RNA, 18 nt, Human
caugucugcgccacaagg

SEQ ID NO: 338981 - RNA, 22 nt, Human
uuuguaaaggccugaauuucag

SEQ ID NO: 338982 - RNA, 22 nt, Human
aggggagguggcagaaaugugc

SEQ ID NO: 338983 - RNA, 22 nt, Human
uccucagaaaccccugugaggu

SEQ ID NO: 338984 - RNA, 22 nt, Human
cggagaggaccugcaacucgcu

SEQ ID NO: 338985 - RNA, 22 nt, Human
agugcuuugugcucucacugca

SEQ ID NO: 338986 - RNA, 22 nt, Human
ucucccaggcugcccuguggac

SEQ ID NO: 338987 - RNA, 21 nt, Human
ucacuagugccuucugucauu

SEQ ID NO: 338988 - RNA, 22 nt, Human
uaaggccaaguucauauacaac

SEQ ID NO: 338989 - RNA, 22 nt, Human
gugcugugucuaucaggaauaa

SEQ ID NO: 338990 - RNA, 22 nt, Human
cugcugugauugggagaaaccg

SEQ ID NO: 338991 - RNA, 22 nt, Human
auugaaaguccuaucuaaggga

SEQ ID NO: 338992 - RNA, 22 nt, Human
cugcagagcaaguaacauccuc

SEQ ID NO: 338993 - RNA, 21 nt, Human
cacucaggguaugugccaggc

SEQ ID NO: 338994 - RNA, 22 nt, Human
aggccagcacgacagccgcagg

SEQ ID NO: 338995 - RNA, 22 nt, Human
auucaaguucuucugucuuugc

SEQ ID NO: 338996 - RNA, 22 nt, Human
uccuucuuucccccuagucauu

SEQ ID NO: 338997 - RNA, 22 nt, Human
uuuauuguuaucaugggugagu

SEQ ID NO: 338998 - RNA, 22 nt, Human
ccugcucagagcgucuugugug

SEQ ID NO: 338999 - RNA, 22 nt, Human
auucucaauggcuacuuucaua

SEQ ID NO: 339000 - RNA, 22 nt, Human
auuggcaguuagugacgaggcu

SEQ ID NO: 339001 - RNA, 22 nt, Human
uagugcuugagucucuccguac

SEQ ID NO: 339002 - RNA, 22 nt, Human
uauauauucuuaaguaguguag

SEQ ID NO: 339003 - RNA, 22 nt, Human
aggcaagcauuuaaccacucau

SEQ ID NO: 339004 - RNA, 22 nt, Human
agcagagccugggcuaggggug

SEQ ID NO: 339005 - RNA, 20 nt, Human
auacacauauucuugcaacu

SEQ ID NO: 339006 - RNA, 22 nt, Human
cccaggagagagacuugaaucu

SEQ ID NO: 339007 - RNA, 22 nt, Human
uguucuuuggcuucacagcucu

SEQ ID NO: 339008 - RNA, 22 nt, Human
gcaaguuauuuccauuuaaagc

SEQ ID NO: 339009 - RNA, 22 nt, Human
ucauauaacuggauauuuucaa

SEQ ID NO: 339010 - RNA, 22 nt, Human
caacugugaauuuuaugauacc

SEQ ID NO: 339011 - RNA, 22 nt, Human
agcaccauugcaaauauggcag

SEQ ID NO: 339012 - RNA, 22 nt, Human
uucucagaauugacugggagca

SEQ ID NO: 339013 - RNA, 22 nt, Human
gaaggccaguuuugagauaggu

SEQ ID NO: 339014 - RNA, 22 nt, Human
ucauuguuauguuuugcugucu

SEQ ID NO: 339015 - RNA, 22 nt, Human
cagcugccccgcuggcugacca

SEQ ID NO: 339016 - RNA, 22 nt, Human
gccaggagcaugucauuguuga

SEQ ID NO: 339017 - RNA, 22 nt, Human
caacagcugaucuuugaugaag

SEQ ID NO: 339018 - RNA, 22 nt, Human
auacuucuuugauguucacagg

SEQ ID NO: 339019 - RNA, 22 nt, Human
ccauggcaauggucagucuauu

SEQ ID NO: 339020 - RNA, 22 nt, Human
auucuucagaauaucuggcacu

SEQ ID NO: 339021 - RNA, 22 nt, Human
auauaauacaaccugcuaagug

SEQ ID NO: 339022 - RNA, 23 nt, Human
ucagucuucccugucaguaauag

SEQ ID NO: 339023 - RNA, 22 nt, Human
uuagacauagaauauugucuag

SEQ ID NO: 339024 - RNA, 22 nt, Human
aaguaugugauacauguuaauu

SEQ ID NO: 339025 - RNA, 22 nt, Human
auggaguucuuuaaauucacag

SEQ ID NO: 339026 - RNA, 22 nt, Human
gcuacugauugaccuuggagag

SEQ ID NO: 339027 - RNA, 20 nt, Human
cuucuucaguaguuuguucu

SEQ ID NO: 339028 - RNA, 20 nt, Human
ucacaucuggcagcugauga

SEQ ID NO: 339029 - RNA, 22 nt, Human
aagcagagcaagcguauuuauu

SEQ ID NO: 339030 - RNA, 22 nt, Human
ucaggauggcuucugcaucaaa

SEQ ID NO: 339031 - RNA, 22 nt, Human
gcugccagcuuuccuuggcuga

SEQ ID NO: 339032 - RNA, 22 nt, Human
agccagcuguucuggggcagca

SEQ ID NO: 339033 - RNA, 22 nt, Human
agaccauagggaccucagguug

SEQ ID NO: 339034 - RNA, 22 nt, Human
gauggcaggcaggugaguagag

SEQ ID NO: 339035 - RNA, 22 nt, Human
uuaggaguccagaugucuuggg

SEQ ID NO: 339036 - RNA, 22 nt, Human
cuucuucauaggcaguccuguu

SEQ ID NO: 339037 - RNA, 22 nt, Human
uugaaauacugcauuguucagu

SEQ ID NO: 339038 - RNA, 22 nt, Human
uggcagcuugaaugcagucuuu

SEQ ID NO: 339039 - RNA, 22 nt, Human
cauuuccacuucugaaaacugg

SEQ ID NO: 339040 - RNA, 22 nt, Human
ugaaggccacuuccugugagcu

SEQ ID NO: 339041 - RNA, 22 nt, Human
uguacaaagguacuuugauguu

SEQ ID NO: 339042 - RNA, 22 nt, Human
ugccaggauauaagagugcgau

SEQ ID NO: 339043 - RNA, 22 nt, Human
auucacaguuuccucauauucu

SEQ ID NO: 339044 - RNA, 22 nt, Human
uugauagguuuuauguauaguu

SEQ ID NO: 339045 - RNA, 22 nt, Human
uauauguaagcuauguaagagu

SEQ ID NO: 339046 - RNA, 22 nt, Human
ucaaauaccagcaauuucaugu

SEQ ID NO: 339047 - RNA, 22 nt, Human
aguggcaguagaugagcugguu

SEQ ID NO: 339048 - RNA, 22 nt, Human
cugcucuagagagcauuaguca

SEQ ID NO: 339049 - RNA, 22 nt, Human
aaguauuucuggccugugaaag

SEQ ID NO: 339050 - RNA, 22 nt, Human
aucaggaucacagaaacuuuua

SEQ ID NO: 339051 - RNA, 22 nt, Human
guggcaggagagacacagccau

SEQ ID NO: 339052 - RNA, 22 nt, Human
uaacacaugguucugucaggaa

SEQ ID NO: 339053 - RNA, 22 nt, Human
cuccaggaaaauagggaaugag

SEQ ID NO: 339054 - RNA, 22 nt, Human
uguauuuuuagaccuuuagacc

SEQ ID NO: 339055 - RNA, 22 nt, Human
agccuauuccaggaugagcuca

SEQ ID NO: 339056 - RNA, 22 nt, Human
uucacauuggugauauguuucu

SEQ ID NO: 339057 - RNA, 22 nt, Human
ucagagagccucaggcacugcc

SEQ ID NO: 339058 - RNA, 22 nt, Human
gaaggggacuggcagcugcaga

SEQ ID NO: 339059 - RNA, 22 nt, Human
uauuuguugaguuguuaugucu

SEQ ID NO: 339060 - RNA, 22 nt, Human
cacaaaugugcagaaaugugag

SEQ ID NO: 339061 - RNA, 22 nt, Human
aauaaucucccuuuuuguaugu

SEQ ID NO: 339062 - RNA, 22 nt, Human
accgaaggaaacuggaaccguu

SEQ ID NO: 339063 - RNA, 22 nt, Human
aauacugucuuucacagauauu

SEQ ID NO: 339064 - RNA, 22 nt, Human
ugcuuuggccacuagaauucag

SEQ ID NO: 339065 - RNA, 22 nt, Human
uugcaauagccuuauuuccaaa

SEQ ID NO: 339066 - RNA, 21 nt, Human
ggcagcguguggacaggaagg

SEQ ID NO: 339067 - RNA, 22 nt, Human
gaggagcugggucagggagaca

SEQ ID NO: 339068 - RNA, 22 nt, Human
gaggaaccacucugagaagcca

SEQ ID NO: 339069 - RNA, 22 nt, Human
ugcuuagacgucaaguacagcc

SEQ ID NO: 339070 - RNA, 22 nt, Human
guuuucugauuagcaaaucuga

SEQ ID NO: 339071 - RNA, 22 nt, Human
gaaaggugccccauaggcagga

SEQ ID NO: 339072 - RNA, 22 nt, Human
aaaguucuggggguguuucugg

SEQ ID NO: 339073 - RNA, 22 nt, Human
auuucccagcuuugaucaguuu

SEQ ID NO: 339074 - RNA, 22 nt, Human
caugugguucaaguacuccaca

SEQ ID NO: 339075 - RNA, 22 nt, Human
acauacauauguuuaaaugcau

SEQ ID NO: 339076 - RNA, 22 nt, Human
uucagugucaauuuuuaaauau

SEQ ID NO: 339077 - RNA, 22 nt, Human
gagggaugguaguugacacuga

SEQ ID NO: 339078 - RNA, 22 nt, Human
ugaaacauuugaugaucuuugg

SEQ ID NO: 339079 - RNA, 22 nt, Human
cccaggaccgcgcggcugagcg

SEQ ID NO: 339080 - RNA, 22 nt, Human
gaccauuucuaggaaucagacu

SEQ ID NO: 339081 - RNA, 22 nt, Human
cugcuguguggugaaacucagu

SEQ ID NO: 339082 - RNA, 22 nt, Human
aaggcaguaaaaucuaccuugc

SEQ ID NO: 339083 - RNA, 22 nt, Human
ggccagcugggccaccaggugc

SEQ ID NO: 339084 - RNA, 22 nt, Human
ggaagaggaggagccaggcuuu

SEQ ID NO: 339085 - RNA, 22 nt, Human
ccaggagaauaauggcagauua

SEQ ID NO: 339086 - RNA, 22 nt, Human
aaaaauaggucaaccguguaug

SEQ ID NO: 339087 - RNA, 22 nt, Human
aucuuucagggccauuuguauu

SEQ ID NO: 339088 - RNA, 23 nt, Human
ugaaacauuuaggguagaauuuc

SEQ ID NO: 339089 - RNA, 22 nt, Human
agacagcugggaaauggagugu

SEQ ID NO: 339090 - RNA, 22 nt, Human
uguaugaagguuuaccugcugu

SEQ ID NO: 339091 - RNA, 22 nt, Human
ggcagcuaggggcagggaauuc

SEQ ID NO: 339092 - RNA, 22 nt, Human
cucugucagaguguugucccca

SEQ ID NO: 339093 - RNA, 22 nt, Human
ggauggagguucucagaugcuc

SEQ ID NO: 339094 - RNA, 22 nt, Human
cccaggaaaugaacuucugauu

SEQ ID NO: 339095 - RNA, 22 nt, Human
ccugcuguucuguuuagugaac

SEQ ID NO: 339096 - RNA, 19 nt, Human
caggaaugagguaauggcu

SEQ ID NO: 339097 - RNA, 22 nt, Human
gaggggagacagggaaaucagu

SEQ ID NO: 339098 - RNA, 19 nt, Human
aucugccuguuaucacaua

SEQ ID NO: 339099 - RNA, 22 nt, Human
aaaauaacuucuacuauuugca

SEQ ID NO: 339100 - RNA, 22 nt, Human
ucccaggagcaccuuuugagcc

SEQ ID NO: 339101 - RNA, 22 nt, Human
uaacacaugguuaguacacaau

SEQ ID NO: 339102 - RNA, 22 nt, Human
acuuucugcaguguuggaaaug

SEQ ID NO: 339103 - RNA, 22 nt, Human
uccaggagguugagugaguucc

SEQ ID NO: 339104 - RNA, 22 nt, Human
ccaggaguggcuggugaccuuc

SEQ ID NO: 339105 - RNA, 19 nt, Human
ugaggggaggagaggccug

SEQ ID NO: 339106 - RNA, 22 nt, Human
gcuguguuggugaagcuguagc

SEQ ID NO: 339107 - RNA, 22 nt, Human
aggccagcuuccagaggggcag

SEQ ID NO: 339108 - RNA, 22 nt, Human
uucagaaugugaccuuauuugg

SEQ ID NO: 339109 - RNA, 22 nt, Human
agagcagcacguuguccccaca

SEQ ID NO: 339110 - RNA, 22 nt, Human
uugaauaguuuuggauagcaua

SEQ ID NO: 339111 - RNA, 22 nt, Human
ggauggcaggacaaggacccag

SEQ ID NO: 339112 - RNA, 22 nt, Human
auucauuuagguauucacuuac

SEQ ID NO: 339113 - RNA, 22 nt, Human
aggcagcauccagaggagaaug

SEQ ID NO: 339114 - RNA, 22 nt, Human
ccagugcuuccaggaauacggu

SEQ ID NO: 339115 - RNA, 22 nt, Human
cagugaaaucacaacuuuaguu

SEQ ID NO: 339116 - RNA, 22 nt, Human
gaaggucaccuccccucucugg

SEQ ID NO: 339117 - RNA, 22 nt, Human
uuuuaucuaccuaugcucauuu

SEQ ID NO: 339118 - RNA, 22 nt, Human
cacccugggcugggccuguuaa

SEQ ID NO: 339119 - RNA, 22 nt, Human
ucuggcuuucauuuguuuaaag

SEQ ID NO: 339120 - RNA, 22 nt, Human
caggaggggguggaguuucgcc

SEQ ID NO: 339121 - RNA, 22 nt, Human
aggaggggcaaugauagucugg

SEQ ID NO: 339122 - RNA, 22 nt, Human
ucucaggaagauuagggcuaag

SEQ ID NO: 339123 - RNA, 22 nt, Human
aaagauaauguuuccuuauucu

SEQ ID NO: 339124 - RNA, 22 nt, Human
ugaacucgggaggaggcugcag

SEQ ID NO: 339125 - RNA, 20 nt, Human
uacagaaugcaauaaaaugg

SEQ ID NO: 339126 - RNA, 23 nt, Human
uccaggagaaccccugucugucc

SEQ ID NO: 339127 - RNA, 22 nt, Human
aaaaacuguaauuacuuuugca

SEQ ID NO: 339128 - RNA, 22 nt, Human
cauuuguaguuaaaaaugucuc

SEQ ID NO: 339129 - RNA, 22 nt, Human
gacagcuguggagaggcaugug

SEQ ID NO: 339130 - RNA, 22 nt, Human
ucucgacagccuggcacagugg

SEQ ID NO: 339131 - RNA, 22 nt, Human
gcccaggaggcagagguugugg

SEQ ID NO: 339132 - RNA, 22 nt, Human
aaaagucugcucucauuucaga

SEQ ID NO: 339133 - RNA, 22 nt, Human
uagcauuaucugucuuaucauu

SEQ ID NO: 339134 - RNA, 22 nt, Human
caggaaugaggucguaaguguc

SEQ ID NO: 339135 - RNA, 22 nt, Human
aagggcaggaaaagauggaugu

SEQ ID NO: 339136 - RNA, 22 nt, Human
ugaaucaguauaaauucucaaa

SEQ ID NO: 339137 - RNA, 22 nt, Human
ucaggauguuaauauagcauua

SEQ ID NO: 339138 - RNA, 22 nt, Human
gcccaggaguuggaggcugcag

SEQ ID NO: 339139 - RNA, 22 nt, Human
gucagagagggcacgugcacac

SEQ ID NO: 339140 - RNA, 22 nt, Human
aggcagacucaauggcuagaua

SEQ ID NO: 339141 - RNA, 22 nt, Human
agucuucucauuucacaugcuu

SEQ ID NO: 339142 - RNA, 22 nt, Human
uucugucaaauuugccauaugg

SEQ ID NO: 339143 - RNA, 22 nt, Human
uuucaugauuaacuuagugaau

SEQ ID NO: 339144 - RNA, 22 nt, Human
gaagcagcgaaguggaagggac

SEQ ID NO: 339145 - RNA, 22 nt, Human
aacaugauggggaagaacaaga

SEQ ID NO: 339146 - RNA, 22 nt, Human
gauggacagccuggaaggaaag

SEQ ID NO: 339147 - RNA, 19 nt, Human
cccucuugcacaaagcaaa

SEQ ID NO: 339148 - RNA, 22 nt, Human
ugaacaguuucaagaaaacuuu

SEQ ID NO: 339149 - RNA, 22 nt, Human
aauaucaacaguguccuucuaa

SEQ ID NO: 339150 - RNA, 22 nt, Human
caugauuuugucuuguguuaau

SEQ ID NO: 339151 - RNA, 22 nt, Human
cccaggaggcggagguuguggu

SEQ ID NO: 339152 - RNA, 22 nt, Human
uggugguuaugcgcuuuguggg

SEQ ID NO: 339153 - RNA, 22 nt, Human
cauguuuacuaccaggagaaug

SEQ ID NO: 339154 - RNA, 22 nt, Human
gaggcagcggcucacagagaaa

SEQ ID NO: 339155 - RNA, 22 nt, Human
ugaacaaacugcauucuucacu

SEQ ID NO: 339156 - RNA, 22 nt, Human
uaaacauuuguuauucuuguuu

SEQ ID NO: 339157 - RNA, 22 nt, Human
uuugaauagcauaggauuacau

SEQ ID NO: 339158 - RNA, 22 nt, Human
ggagccuggucagguuggcucc

SEQ ID NO: 339159 - RNA, 22 nt, Human
aucugccuccaaguccaugugu

SEQ ID NO: 339160 - RNA, 22 nt, Human
gaggccaggagugcuguaaguu

SEQ ID NO: 339161 - RNA, 22 nt, Human
gagugcaguuggggugagggga

SEQ ID NO: 339162 - RNA, 22 nt, Human
gcucagagcuugaaguuccacu

SEQ ID NO: 339163 - RNA, 22 nt, Human
ucuucacaugaccuucaugucu

SEQ ID NO: 339164 - RNA, 22 nt, Human
uugcaucuaccauaucaaagau

SEQ ID NO: 339165 - RNA, 22 nt, Human
gucaggaugcuauuguuauuaa

SEQ ID NO: 339166 - RNA, 22 nt, Human
uugauuucuauucagauguaga

SEQ ID NO: 339167 - RNA, 22 nt, Human
uuugaaagccuggcuuuucucu

SEQ ID NO: 339168 - RNA, 22 nt, Human
aaucuucuacuugacaguucuc

SEQ ID NO: 339169 - RNA, 22 nt, Human
auggagggugguaagacagaga

SEQ ID NO: 339170 - RNA, 22 nt, Human
auacauauaugguacuuccugg

SEQ ID NO: 339171 - RNA, 22 nt, Human
cuacccagcaccuaggcugccu

SEQ ID NO: 339172 - RNA, 22 nt, Human
cucaggauauugggcuggagca

SEQ ID NO: 339173 - RNA, 22 nt, Human
aaagccaugaauguuauagagg

SEQ ID NO: 339174 - RNA, 22 nt, Human
ucaggagagagaaauuggggcu

SEQ ID NO: 339175 - RNA, 22 nt, Human
uagggauguaaacauaguaauu

SEQ ID NO: 339176 - RNA, 22 nt, Human
ccagugcuucuuugcuagcugg

SEQ ID NO: 339177 - RNA, 22 nt, Human
uucccaugccuggccccuaucc

SEQ ID NO: 339178 - RNA, 22 nt, Human
aaaguuguaauggaagaaaugc

SEQ ID NO: 339179 - RNA, 22 nt, Human
uuuuucuuaaauguggguuggc

SEQ ID NO: 339180 - RNA, 22 nt, Human
auuugcaaagucguaucuguga

SEQ ID NO: 339181 - RNA, 22 nt, Human
aaggcagccaugugcuuugggu

SEQ ID NO: 339182 - RNA, 22 nt, Human
ccaggacagugaacauguaaga

SEQ ID NO: 339183 - RNA, 22 nt, Human
ucaggaggccaccaggaccugu

SEQ ID NO: 339184 - RNA, 22 nt, Human
augaacugcaguauaaacuugg

SEQ ID NO: 339185 - RNA, 22 nt, Human
uuaucauugucgcagucuaauu

SEQ ID NO: 339186 - RNA, 22 nt, Human
uauucacaugaaaacaaauuuu

SEQ ID NO: 339187 - RNA, 22 nt, Human
caagauggacauaaggagagaa

SEQ ID NO: 339188 - RNA, 22 nt, Human
gugcugugugauccaugcuggc

SEQ ID NO: 339189 - RNA, 22 nt, Human
ccuggauucaagucuuucuuuc

SEQ ID NO: 339190 - RNA, 22 nt, Human
ccuucuucuguguggcccaaga

SEQ ID NO: 339191 - RNA, 22 nt, Human
caggcagcaucagucugcugua

SEQ ID NO: 339192 - RNA, 22 nt, Human
cccuggaggucagaggccuggg

SEQ ID NO: 339193 - RNA, 22 nt, Human
aaacauuugcaacucgguuugg

SEQ ID NO: 339194 - RNA, 22 nt, Human
augaaggcaguuaaacgucauc

SEQ ID NO: 339195 - RNA, 21 nt, Human
acagauauuucauugaacauu

SEQ ID NO: 339196 - RNA, 22 nt, Human
uuggaauucaaguuguagcuua

SEQ ID NO: 339197 - RNA, 22 nt, Human
accaggagggacccugguggcc

SEQ ID NO: 339198 - RNA, 22 nt, Human
ucugaacuccagcccugcucuc

SEQ ID NO: 339199 - RNA, 22 nt, Human
cccuuagcucaauuucuugccc

SEQ ID NO: 339200 - RNA, 22 nt, Human
uacauucagcaaaagaaugguu

SEQ ID NO: 339201 - RNA, 22 nt, Human
uucacagauguauuggaacucc

SEQ ID NO: 339202 - RNA, 18 nt, Human
gagagggaucccucagga

SEQ ID NO: 339203 - RNA, 22 nt, Human
ccccaggacacauggaccaagu

SEQ ID NO: 339204 - RNA, 22 nt, Human
aaggagaguacaggaguuggua

SEQ ID NO: 339205 - RNA, 22 nt, Human
uaaagcacauaucuuacaauaa

SEQ ID NO: 339206 - RNA, 21 nt, Human
aggcagcaggauccagggaca

SEQ ID NO: 339207 - RNA, 22 nt, Human
guuauaaaaugcacaguuguuu

SEQ ID NO: 339208 - RNA, 23 nt, Human
cccauuuucauguuaacuccugg

SEQ ID NO: 339209 - RNA, 22 nt, Human
auucuucauuguugauucaugu

SEQ ID NO: 339210 - RNA, 22 nt, Human
cuguggaaggccuguccugaaa

SEQ ID NO: 339211 - RNA, 23 nt, Human
ggagaggggugugggcaucuuua

SEQ ID NO: 339212 - RNA, 19 nt, Human
uccaggagcaaagccaguu

SEQ ID NO: 339213 - RNA, 17 nt, Human
cccacggaggugugaaa

SEQ ID NO: 339214 - RNA, 22 nt, Human
caaggccagagccagcgauaag

SEQ ID NO: 339215 - RNA, 22 nt, Human
ggucagagggugggcugccugu

SEQ ID NO: 339216 - RNA, 22 nt, Human
cugcuuugcauagcugccagag

SEQ ID NO: 339217 - RNA, 22 nt, Human
aucaggaucacugggagucuug

SEQ ID NO: 339218 - RNA, 22 nt, Human
uccuuagagauacugucuugaa

SEQ ID NO: 339219 - RNA, 22 nt, Human
gaggcagcugggauacaaggga

SEQ ID NO: 339220 - RNA, 19 nt, Human
aggcagcaggccagggaug

SEQ ID NO: 339221 - RNA, 22 nt, Human
cagaggcacaagaaagcaaggc

SEQ ID NO: 339222 - RNA, 22 nt, Human
ucucuucuauuugagacuauuu

SEQ ID NO: 339223 - RNA, 22 nt, Human
uaguuuuacuugcgaugauaau

SEQ ID NO: 339224 - RNA, 22 nt, Human
caacauuucaaggucuuuagga

SEQ ID NO: 339225 - RNA, 22 nt, Human
ugaaacaaugugaaguugcuga

SEQ ID NO: 339226 - RNA, 22 nt, Human
ugacuagaccuauaucuuuuug

SEQ ID NO: 339227 - RNA, 22 nt, Human
ggcagcucacgggcauggggug

SEQ ID NO: 339228 - RNA, 22 nt, Human
agcugcuacugcucugccagag

SEQ ID NO: 339229 - RNA, 22 nt, Human
uuagccauugucagcacauggc

SEQ ID NO: 339230 - RNA, 22 nt, Human
gagagggagccagccaggaacc

SEQ ID NO: 339231 - RNA, 22 nt, Human
gcugcugucagugguggcaguu

SEQ ID NO: 339232 - RNA, 22 nt, Human
acacauuuacauguuuacguau

SEQ ID NO: 339233 - RNA, 22 nt, Human
aaucuguucuacucuauucaga

SEQ ID NO: 339234 - RNA, 21 nt, Human
ggcagccugacccccagagag

SEQ ID NO: 339235 - RNA, 22 nt, Human
ucccaggaaggauucggcauuu

SEQ ID NO: 339236 - RNA, 22 nt, Human
uuccucagaaaauacuguccaa

SEQ ID NO: 339237 - RNA, 20 nt, Human
uugauucaagggcugaugga

SEQ ID NO: 339238 - RNA, 22 nt, Human
uaugucaaaguuaagaaauagg

SEQ ID NO: 339239 - RNA, 22 nt, Human
aucaggauucaguaucuccagc

SEQ ID NO: 339240 - RNA, 22 nt, Human
auuuucaucauggguuuaacau

SEQ ID NO: 339241 - RNA, 22 nt, Human
aucauucuagcuguuguguuga

SEQ ID NO: 339242 - RNA, 20 nt, Human
aggcaccugucacaggugag

SEQ ID NO: 339243 - RNA, 22 nt, Human
ucccaggaagaucccagggacc

SEQ ID NO: 339244 - RNA, 22 nt, Human
aacauuuaugauugagguaaau

SEQ ID NO: 339245 - RNA, 22 nt, Human
ccagaggaggggggucuuucug

SEQ ID NO: 339246 - RNA, 23 nt, Human
gaauaguuuuagaaauuggagaa

SEQ ID NO: 339247 - RNA, 22 nt, Human
acaaauguggacauggauaaug

SEQ ID NO: 339248 - RNA, 22 nt, Human
caggaugggauguagugggccc

SEQ ID NO: 339249 - RNA, 22 nt, Human
ccaggcugugguuuagauagag

SEQ ID NO: 339250 - RNA, 22 nt, Human
agaggcagaaguguucaaaccc

SEQ ID NO: 339251 - RNA, 22 nt, Human
aggcagacaaggacacaguggg

SEQ ID NO: 339252 - RNA, 22 nt, Human
uuuccaagacuccaguucuccc

SEQ ID NO: 339253 - RNA, 21 nt, Human
cucaggauggcggccuggugg

SEQ ID NO: 339254 - RNA, 23 nt, Human
ugaaggccuggaggacgcguugu

SEQ ID NO: 339255 - RNA, 22 nt, Human
ggagaagggacagacucagcuu

SEQ ID NO: 339256 - RNA, 22 nt, Human
ugacauaauaauccaaacauac

SEQ ID NO: 339257 - RNA, 22 nt, Human
aaguggacuaauacaaggacua

SEQ ID NO: 339258 - RNA, 22 nt, Human
ugguaauuaauuugauagguuc

SEQ ID NO: 339259 - RNA, 23 nt, Human
auggaagucacuguuuucuuguc

SEQ ID NO: 339260 - RNA, 22 nt, Human
aaauguuuugcucccauguggu

SEQ ID NO: 339261 - RNA, 22 nt, Human
gaaauuauugcuagagacugca

SEQ ID NO: 339262 - RNA, 22 nt, Human
auguuuccgugagcauccuuga

SEQ ID NO: 339263 - RNA, 22 nt, Human
accaggaggccuggagcacaaa

SEQ ID NO: 339264 - RNA, 22 nt, Human
agagguagagguugcagugagc

SEQ ID NO: 339265 - RNA, 22 nt, Human
agugcuuucuugcuccaucagu

SEQ ID NO: 339266 - RNA, 22 nt, Human
gucuccugagccuugacugcaa

SEQ ID NO: 339267 - RNA, 22 nt, Human
uugaauuagacuuugcuacagg

SEQ ID NO: 339268 - RNA, 22 nt, Human
ugguuuugcuaaaauagaaaga

SEQ ID NO: 339269 - RNA, 22 nt, Human
ucccaggauguuggcggcaggu

SEQ ID NO: 339270 - RNA, 22 nt, Human
auugcuuaucuaucuuuaaguc

SEQ ID NO: 339271 - RNA, 22 nt, Human
uuucucaguuacuagcuguggu

SEQ ID NO: 339272 - RNA, 22 nt, Human
ucuaaccuuugaaacugcuuuc

SEQ ID NO: 339273 - RNA, 22 nt, Human
agugcagccgagaucaggugcu

SEQ ID NO: 339274 - RNA, 22 nt, Human
aucugcaggaaugugugcagag

SEQ ID NO: 339275 - RNA, 22 nt, Human
aguggcagagugcacucaggca

SEQ ID NO: 339276 - RNA, 22 nt, Human
uuuuagauaguuuaacugcacu

SEQ ID NO: 339277 - RNA, 22 nt, Human
ggccaggagaggagggcacuga

SEQ ID NO: 339278 - RNA, 22 nt, Human
ucuucaauuagauuuaccaauu

SEQ ID NO: 339279 - RNA, 22 nt, Human
ucuuagaaugucaacugauguu

SEQ ID NO: 339280 - RNA, 22 nt, Human
aaguaugaaucaaagacuaucu

SEQ ID NO: 339281 - RNA, 22 nt, Human
caggcagcugcuggguucagcc

SEQ ID NO: 339282 - RNA, 22 nt, Human
uacagcuaggcaaaaaugacau

SEQ ID NO: 339283 - RNA, 22 nt, Human
gucugucacucaggggcuggag

SEQ ID NO: 339284 - RNA, 22 nt, Human
aggcagguuggugagaagacug

SEQ ID NO: 339285 - RNA, 22 nt, Human
gaauacauuggaaaucagaaua

SEQ ID NO: 339286 - RNA, 22 nt, Human
uauuuucuguggaggaccagau

SEQ ID NO: 339287 - RNA, 22 nt, Human
uuaacacauauuuaucaauugc

SEQ ID NO: 339288 - RNA, 22 nt, Human
ugcccaggguuucuaagagcag

SEQ ID NO: 339289 - RNA, 22 nt, Human
aagauauucaaagauuuauuag

SEQ ID NO: 339290 - RNA, 22 nt, Human
agaccaagugcaggugccacua

SEQ ID NO: 339291 - RNA, 17 nt, Human
caagagagaugacugga

SEQ ID NO: 339292 - RNA, 22 nt, Human
ucaguuaacaacuauuuauuga

SEQ ID NO: 339293 - RNA, 22 nt, Human
aggguggccaugagggagagau

SEQ ID NO: 339294 - RNA, 22 nt, Human
ugaggcagucacccccuccugc

SEQ ID NO: 339295 - RNA, 22 nt, Human
aggacagcccuugagagcacau

SEQ ID NO: 339296 - RNA, 22 nt, Human
cccaggaggguggccucugccc

SEQ ID NO: 339297 - RNA, 22 nt, Human
uuuacacaaaagauagcacacc

SEQ ID NO: 339298 - RNA, 22 nt, Human
gccauuuucugucuuguuuauu

SEQ ID NO: 339299 - RNA, 22 nt, Human
uuugcaauuugugcugcaaaug

SEQ ID NO: 339300 - RNA, 22 nt, Human
uucucagauccaucagaagucc

SEQ ID NO: 339301 - RNA, 22 nt, Human
ugaguucuaguggcugcagauu

SEQ ID NO: 339302 - RNA, 22 nt, Human
gauguagagggaagauuuuaaa

SEQ ID NO: 339303 - RNA, 22 nt, Human
aauacugccugugagguaacuc

SEQ ID NO: 339304 - RNA, 19 nt, Human
gagcgcagagggcagggga

SEQ ID NO: 339305 - RNA, 22 nt, Human
cccaugagaccugguuuaaggc

SEQ ID NO: 339306 - RNA, 22 nt, Human
ugggagcccaagggagcugccg

SEQ ID NO: 339307 - RNA, 22 nt, Human
uuauuuaaugugaucugaagag

SEQ ID NO: 339308 - RNA, 23 nt, Human
accaggagaaaagcuuugcggga

SEQ ID NO: 339309 - RNA, 22 nt, Human
gcucaggaccgaggggugggaa

SEQ ID NO: 339310 - RNA, 22 nt, Human
cauuuguuuagaagucuuuaua

SEQ ID NO: 339311 - RNA, 22 nt, Human
accaggaguugggggugggacc

SEQ ID NO: 339312 - RNA, 22 nt, Human
cugcuguguuggcauuggauag

SEQ ID NO: 339313 - RNA, 22 nt, Human
aggcagcuaagauggauaauga

SEQ ID NO: 339314 - RNA, 22 nt, Human
ucugaaagaagggcagucuuuu

SEQ ID NO: 339315 - RNA, 19 nt, Human
accaggaguaucagagcug

SEQ ID NO: 339316 - RNA, 22 nt, Human
aucucauaacucauuugaagac

SEQ ID NO: 339317 - RNA, 22 nt, Human
aggcagcugaccacaguaugau

SEQ ID NO: 339318 - RNA, 22 nt, Human
gaggagaggggcucccaagagc

SEQ ID NO: 339319 - RNA, 22 nt, Human
uucagaaguagcuaagcaguca

SEQ ID NO: 339320 - RNA, 21 nt, Human
gggugggaggacacagcaggc

SEQ ID NO: 339321 - RNA, 22 nt, Human
ugcugcugauggcaccuaggca

SEQ ID NO: 339322 - RNA, 22 nt, Human
gcccaggaagccaccgggaagu

SEQ ID NO: 339323 - RNA, 22 nt, Human
aucugcagaggacaggcgagga

SEQ ID NO: 339324 - RNA, 22 nt, Human
ugaacuuagugggaauaucucu

SEQ ID NO: 339325 - RNA, 22 nt, Human
uacauaguauucacauuguuuu

SEQ ID NO: 339326 - RNA, 22 nt, Human
ucugggaacucugucauuuccc

SEQ ID NO: 339327 - RNA, 22 nt, Human
uuccaugaaagugaaauggagc

SEQ ID NO: 339328 - RNA, 22 nt, Human
uuugaaaggguuaugagacuga

SEQ ID NO: 339329 - RNA, 22 nt, Human
cccaaggacacgggcagggaca

SEQ ID NO: 339330 - RNA, 22 nt, Human
aaagaauagccuuuguccaaau

SEQ ID NO: 339331 - RNA, 22 nt, Human
cagucucagaggugggaguggg

SEQ ID NO: 339332 - RNA, 22 nt, Human
cuuuuauuuugaauuaagggcu

SEQ ID NO: 339333 - RNA, 20 nt, Human
gaugggaaucggagcuggua

SEQ ID NO: 339334 - RNA, 22 nt, Human
cccaggagacauauagaaggac

SEQ ID NO: 339335 - RNA, 22 nt, Human
agguaugagauaaaucaaugaa

SEQ ID NO: 339336 - RNA, 21 nt, Human
agaggcaggcauuaaguacac

SEQ ID NO: 339337 - RNA, 22 nt, Human
augcugugccuucucugugcca

SEQ ID NO: 339338 - RNA, 22 nt, Human
uccaggagggguaggcaguaug

SEQ ID NO: 339339 - RNA, 23 nt, Human
aaggccagaauuucaauggugcc

SEQ ID NO: 339340 - RNA, 22 nt, Human
ggugaaggucagagcaggaaaa

SEQ ID NO: 339341 - RNA, 22 nt, Human
gaucuucuauguaaugaagugu

SEQ ID NO: 339342 - RNA, 22 nt, Human
gggcaguuuauucuagaugguu

SEQ ID NO: 339343 - RNA, 22 nt, Human
auuaaaauuccaagguaugcca

SEQ ID NO: 339344 - RNA, 22 nt, Human
uggaguucucaggugagggcuu

SEQ ID NO: 339345 - RNA, 22 nt, Human
caggaugaagggcaaaggcaag

SEQ ID NO: 339346 - RNA, 22 nt, Human
ggguggagcuuggacaccagua

SEQ ID NO: 339347 - RNA, 22 nt, Human
ucuuuccaaggacucuguagca

SEQ ID NO: 339348 - RNA, 22 nt, Human
cccaggagguguagcugcgugg

SEQ ID NO: 339349 - RNA, 22 nt, Human
gcagcugccuucagcuggaugg

SEQ ID NO: 339350 - RNA, 22 nt, Human
ucacugcucagucuguacuaca

SEQ ID NO: 339351 - RNA, 22 nt, Human
uuuuccagagcugucucuugca

SEQ ID NO: 339352 - RNA, 22 nt, Human
auucuucacaccuguuccuguu

SEQ ID NO: 339353 - RNA, 22 nt, Human
aggcaggcacuccggaaguguc

SEQ ID NO: 339354 - RNA, 22 nt, Human
ucugcagguguuggaaggguca

SEQ ID NO: 339355 - RNA, 21 nt, Human
ugcugaugucagagaagcaag

SEQ ID NO: 339356 - RNA, 22 nt, Human
augauauuugcaaugugcuugc

SEQ ID NO: 339357 - RNA, 22 nt, Human
uucugucauccuuucuagaugu

SEQ ID NO: 339358 - RNA, 22 nt, Human
agggaagcccuggcugagaccc

SEQ ID NO: 339359 - RNA, 17 nt, Human
agaggcagauacuugga

SEQ ID NO: 339360 - RNA, 22 nt, Human
ugccuggaaggcccaugggaag

SEQ ID NO: 339361 - RNA, 22 nt, Human
uguguucuggaaagcucacuga

SEQ ID NO: 339362 - RNA, 22 nt, Human
uuucugugguggguaguucaga

SEQ ID NO: 339363 - RNA, 22 nt, Human
ugaaguuauauauguugaaaau

SEQ ID NO: 339364 - RNA, 22 nt, Human
uagcucuucaaucacugucucc

SEQ ID NO: 339365 - RNA, 22 nt, Human
cagaggcaggaagaugggcagu

SEQ ID NO: 339366 - RNA, 22 nt, Human
uccauguguuuuccuguccaca

SEQ ID NO: 339367 - RNA, 22 nt, Human
aggcagguccccuggaaggcac

SEQ ID NO: 339368 - RNA, 22 nt, Human
gaucauuuacuuguucuggacu

SEQ ID NO: 339369 - RNA, 20 nt, Human
cccaggagugagcagcuuua

SEQ ID NO: 339370 - RNA, 22 nt, Human
ucaugcuuauugcauauuugga

SEQ ID NO: 339371 - RNA, 22 nt, Human
cuggccagcugacagcagggcu

SEQ ID NO: 339372 - RNA, 22 nt, Human
gaucuguuucauucacagucug

SEQ ID NO: 339373 - RNA, 20 nt, Human
uggaaguucuguugcauugg

SEQ ID NO: 339374 - RNA, 22 nt, Human
aauguauggauucaugucugug

SEQ ID NO: 339375 - RNA, 22 nt, Human
auacaacuuuacaugcaauucc

SEQ ID NO: 339376 - RNA, 22 nt, Human
acccaggagacagguugcagug

SEQ ID NO: 339377 - RNA, 22 nt, Human
acaacauucuuaaauacacuga

SEQ ID NO: 339378 - RNA, 22 nt, Human
agaggcggagguugcagugagc

SEQ ID NO: 339379 - RNA, 19 nt, Human
acauauguggauauacaug

SEQ ID NO: 339380 - RNA, 22 nt, Human
ggagguggcagggaacauaauu

SEQ ID NO: 339381 - RNA, 19 nt, Human
aauacaguguuauagaauu

SEQ ID NO: 339382 - RNA, 22 nt, Human
uccaggaggacugagggggcug

SEQ ID NO: 339383 - RNA, 22 nt, Human
gaggagcuugugagaagauguc

SEQ ID NO: 339384 - RNA, 22 nt, Human
uaauuauuugaagacauuagag

SEQ ID NO: 339385 - RNA, 22 nt, Human
acuggcaguagagggagcgcau

SEQ ID NO: 339386 - RNA, 22 nt, Human
uuagccaugcccuagaagagga

SEQ ID NO: 339387 - RNA, 22 nt, Human
augcagcugucagggagaacau

SEQ ID NO: 339388 - RNA, 22 nt, Human
uccucagacuucccuuugugua

SEQ ID NO: 339389 - RNA, 22 nt, Human
aaucauucuuauuucacagcaa

SEQ ID NO: 339390 - RNA, 22 nt, Human
uggcaucucaaacaggcagauu

SEQ ID NO: 339391 - RNA, 22 nt, Human
auuuggcaacauuaauugaauc

SEQ ID NO: 339392 - RNA, 22 nt, Human
agaggaggaagagcuuuaaaau

SEQ ID NO: 339393 - RNA, 22 nt, Human
uaucuuguaauagguccacuug

SEQ ID NO: 339394 - RNA, 22 nt, Human
aauaauuagugggacagagaac

SEQ ID NO: 339395 - RNA, 22 nt, Human
gcagaggagaugaagauacuuu

SEQ ID NO: 339396 - RNA, 22 nt, Human
cagagggaaaaggggaguaaua

SEQ ID NO: 339397 - RNA, 22 nt, Human
uuucccagagguaugaauaagu

SEQ ID NO: 339398 - RNA, 22 nt, Human
cugcugugcagacagacucucu

SEQ ID NO: 339399 - RNA, 22 nt, Human
uacuaucucuucuaacuucaga

SEQ ID NO: 339400 - RNA, 21 nt, Human
caauaaacugcacauugagac

SEQ ID NO: 339401 - RNA, 22 nt, Human
gccucugcccuccugggacugc

SEQ ID NO: 339402 - RNA, 22 nt, Human
cccagcaguaaccaguggaaau

SEQ ID NO: 339403 - RNA, 21 nt, Human
gggcagcucuguuuuauuuuc

SEQ ID NO: 339404 - RNA, 22 nt, Human
ugaggcagaaaauagcaguuca

SEQ ID NO: 339405 - RNA, 22 nt, Human
cagugguugguagauacuugag

SEQ ID NO: 339406 - RNA, 22 nt, Human
ucacaauacucacucaauggcu

SEQ ID NO: 339407 - RNA, 22 nt, Human
auauucuucuuguucagacuau

SEQ ID NO: 339408 - RNA, 22 nt, Human
cacacucauuagucauuucucu

SEQ ID NO: 339409 - RNA, 22 nt, Human
gagaggcagaggccugaaaccg

SEQ ID NO: 339410 - RNA, 22 nt, Human
ccucuucuagguuucagccugc

SEQ ID NO: 339411 - RNA, 22 nt, Human
auucugucuaagcuggcuacgu

SEQ ID NO: 339412 - RNA, 22 nt, Human
aaugauuuccccuacacagaag

SEQ ID NO: 339413 - RNA, 22 nt, Human
ugguaaauauguccauucucuu

SEQ ID NO: 339414 - RNA, 17 nt, Human
aagagaggcugagcugg

SEQ ID NO: 339415 - RNA, 22 nt, Human
cucucagacugaagggccugug

SEQ ID NO: 339416 - RNA, 23 nt, Human
accaggaguugucucaggaaaca

SEQ ID NO: 339417 - RNA, 23 nt, Human
cagaaaacccagagcucaguccc

SEQ ID NO: 339418 - RNA, 22 nt, Human
acgagagguccuuagaaucugu

SEQ ID NO: 339419 - RNA, 22 nt, Human
uggcagcagacaaaaggccauu

SEQ ID NO: 339420 - RNA, 22 nt, Human
uggagacugugcuaagggaguu

SEQ ID NO: 339421 - RNA, 22 nt, Human
aagcuggaacaucuugaggaag

SEQ ID NO: 339422 - RNA, 22 nt, Human
ucaggagacuuaugucacagug

SEQ ID NO: 339423 - RNA, 22 nt, Human
uggcaaggcugugggggcagag

SEQ ID NO: 339424 - RNA, 22 nt, Human
cuggcagucugccucuucacug

SEQ ID NO: 339425 - RNA, 22 nt, Human
agaggccaugcuagaggccugg

SEQ ID NO: 339426 - RNA, 22 nt, Human
uaucuguuccaggcacucagcu

SEQ ID NO: 339427 - RNA, 22 nt, Human
uuucaaauagaaucuuuccaaa

SEQ ID NO: 339428 - RNA, 22 nt, Human
cuuaaauuuucaucuacaagaa

SEQ ID NO: 339429 - RNA, 22 nt, Human
uucugucauuuagcauugucau

SEQ ID NO: 339430 - RNA, 22 nt, Human
cccaagagguggagguugcagu

SEQ ID NO: 339431 - RNA, 22 nt, Human
cuugauguauaaguugauaugu

SEQ ID NO: 339432 - RNA, 22 nt, Human
aaucuuucccuauuaaaugugg

SEQ ID NO: 339433 - RNA, 22 nt, Human
agcaccugucacaagcagaagg

SEQ ID NO: 339434 - RNA, 23 nt, Human
acuuuauugaccccaggucaguu

SEQ ID NO: 339435 - RNA, 22 nt, Human
agggcagcagcuccuccuagcu

SEQ ID NO: 339436 - RNA, 22 nt, Human
aauugucaaacacaaauaagag

SEQ ID NO: 339437 - RNA, 20 nt, Human
auccaugagagucuggauuc

SEQ ID NO: 339438 - RNA, 22 nt, Human
ugcuuggcuuucugagcuucug

SEQ ID NO: 339439 - RNA, 22 nt, Human
cagagccaggucuaggagucuc

SEQ ID NO: 339440 - RNA, 20 nt, Human
cccaggaguuugcucuuacu

SEQ ID NO: 339441 - RNA, 22 nt, Human
accaggagcauuuuuuauuagu

SEQ ID NO: 339442 - RNA, 23 nt, Human
acuauaaaguuguucugauuuac

SEQ ID NO: 339443 - RNA, 22 nt, Human
uuucagggagccuagaagagcu

SEQ ID NO: 339444 - RNA, 22 nt, Human
gcauuuccugugcuuggcauau

SEQ ID NO: 339445 - RNA, 22 nt, Human
uagauauggccgucuguuuuaa

SEQ ID NO: 339446 - RNA, 22 nt, Human
ggugaagguggaacgcagagca

SEQ ID NO: 339447 - RNA, 22 nt, Human
aaaggagacuucagaucuccuu

SEQ ID NO: 339448 - RNA, 23 nt, Human
acagaaaguucugcuggacagag

SEQ ID NO: 339449 - RNA, 22 nt, Human
aggcagcugaggucuggcgccc

SEQ ID NO: 339450 - RNA, 22 nt, Human
cugcuuccauaaauaaugugcu

SEQ ID NO: 339451 - RNA, 22 nt, Human
aaagcagagcagggcacuuaug

SEQ ID NO: 339452 - RNA, 22 nt, Human
aggcaguuucugggacagcaua

SEQ ID NO: 339453 - RNA, 22 nt, Human
cccaggaauuggaggcugcagu

SEQ ID NO: 339454 - RNA, 18 nt, Human
ugcuggguaacuguaugg

SEQ ID NO: 339455 - RNA, 22 nt, Human
acaagauagcuuagaagauuca

SEQ ID NO: 339456 - RNA, 22 nt, Human
gugguaauuuaauccuacacug

SEQ ID NO: 339457 - RNA, 22 nt, Human
ucauuuguugaacuuuagugcg

SEQ ID NO: 339458 - RNA, 22 nt, Human
ugaguaauaaacugucuugcuc

SEQ ID NO: 339459 - RNA, 22 nt, Human
ugaguuuuuucaacauaugaag

SEQ ID NO: 339460 - RNA, 21 nt, Human
augucaaaugcuuuauuuuau

SEQ ID NO: 339461 - RNA, 22 nt, Human
cugcugugugaccauggacagg

SEQ ID NO: 339462 - RNA, 21 nt, Human
aaugaaguggcuauuuugagg

SEQ ID NO: 339463 - RNA, 21 nt, Human
uacugagaccucacagugugc

SEQ ID NO: 339464 - RNA, 22 nt, Human
cccaggaggcagagauagcagu

SEQ ID NO: 339465 - RNA, 22 nt, Human
uacugcauaacuggcauguggg

SEQ ID NO: 339466 - RNA, 22 nt, Human
aucuuucaguuucauaccaauu

SEQ ID NO: 339467 - RNA, 22 nt, Human
ggguacuuaauauuuacggggu

SEQ ID NO: 339468 - RNA, 22 nt, Human
ucuggcaggcaaucggcucugg

SEQ ID NO: 339469 - RNA, 22 nt, Human
ugaggcagguaagcaaguuuug

SEQ ID NO: 339470 - RNA, 22 nt, Human
aguggaccagaagacugaagcu

SEQ ID NO: 339471 - RNA, 22 nt, Human
caguaaagcauguaugucuuca

SEQ ID NO: 339472 - RNA, 22 nt, Human
agcccagggaaccaggaagugg

SEQ ID NO: 339473 - RNA, 22 nt, Human
gcucaggacuggaggagcgggg

SEQ ID NO: 339474 - RNA, 22 nt, Human
uuucagcugguaaaggaguagc

SEQ ID NO: 339475 - RNA, 22 nt, Human
uucuucuuuaucucaguauccu

SEQ ID NO: 339476 - RNA, 20 nt, Human
uaacuuucuaugcuuucagc

SEQ ID NO: 339477 - RNA, 22 nt, Human
cuuugcaaacgauuaccacaug

SEQ ID NO: 339478 - RNA, 22 nt, Human
agaggggaaguaaugaaugaua

SEQ ID NO: 339479 - RNA, 22 nt, Human
uccacauccauugcuugacuuu

SEQ ID NO: 339480 - RNA, 22 nt, Human
guaaaauagaauaacguggcua

SEQ ID NO: 339481 - RNA, 18 nt, Human
acaaaugugucacaggaa

SEQ ID NO: 339482 - RNA, 22 nt, Human
gauuucuuuaugaaguacagaa

SEQ ID NO: 339483 - RNA, 22 nt, Human
auuaucuauguagaaugauuuu

SEQ ID NO: 339484 - RNA, 22 nt, Human
uuuacuuuugguaaggucauuu

SEQ ID NO: 339485 - RNA, 22 nt, Human
ucauuuguacuugugugcuugu

SEQ ID NO: 339486 - RNA, 22 nt, Human
uaagcugugggagauuggcaua

SEQ ID NO: 339487 - RNA, 20 nt, Human
agaaauauugaguucagagg

SEQ ID NO: 339488 - RNA, 22 nt, Human
caagaugugccuaaucagaccu

SEQ ID NO: 339489 - RNA, 22 nt, Human
gugcauuugugcaugcacaugu

SEQ ID NO: 339490 - RNA, 22 nt, Human
gggcagcugucuugguucucaa

SEQ ID NO: 339491 - RNA, 22 nt, Human
gggcagcucggaagugggaaag

SEQ ID NO: 339492 - RNA, 22 nt, Human
gggagacacgcugcaggcauaa

SEQ ID NO: 339493 - RNA, 22 nt, Human
uugagaagaauguguugaguuu

SEQ ID NO: 339494 - RNA, 22 nt, Human
gcggagggcgagcccgcggagc

SEQ ID NO: 339495 - RNA, 22 nt, Human
guccucuguuagaaaugugcuu

SEQ ID NO: 339496 - RNA, 22 nt, Human
uauacaauggcugaaucaucca

SEQ ID NO: 339497 - RNA, 22 nt, Human
uggaaggaagccaaggaagguu

SEQ ID NO: 339498 - RNA, 22 nt, Human
cuucagagugcagaagauuggg

SEQ ID NO: 339499 - RNA, 22 nt, Human
cccaggaggcagaaguugcagu

SEQ ID NO: 339500 - RNA, 22 nt, Human
ucauuuuucacacagggucacc

SEQ ID NO: 339501 - RNA, 22 nt, Human
aaaggccacacagagcagggag

SEQ ID NO: 339502 - RNA, 22 nt, Human
guuauauauaguauuucucuga

SEQ ID NO: 339503 - RNA, 22 nt, Human
uuucauggcuaggacuagagug

SEQ ID NO: 339504 - RNA, 22 nt, Human
ucucaguguguuuucucucaga

SEQ ID NO: 339505 - RNA, 22 nt, Human
cucauaaugugacuguauuuga

SEQ ID NO: 339506 - RNA, 22 nt, Human
aggcagcuagagagugaaacug

SEQ ID NO: 339507 - RNA, 22 nt, Human
agacaaauggaguaugagcaac

SEQ ID NO: 339508 - RNA, 22 nt, Human
uugcauuuaaguagauguuaca

SEQ ID NO: 339509 - RNA, 21 nt, Human
ucucugguuggaguugugcca

SEQ ID NO: 339510 - RNA, 23 nt, Human
gcagaggagcaagcuggacacca

SEQ ID NO: 339511 - RNA, 22 nt, Human
aggcagcuuuaacugguaguag

SEQ ID NO: 339512 - RNA, 22 nt, Human
uuugaaaggugucgagaugugu

SEQ ID NO: 339513 - RNA, 22 nt, Human
cccaggagguggagguugcagc

SEQ ID NO: 339514 - RNA, 22 nt, Human
uacaacauuguguugcuucaua

SEQ ID NO: 339515 - RNA, 22 nt, Human
uuucaugaggggcaaaaucuca

SEQ ID NO: 339516 - RNA, 22 nt, Human
auucugucuuuuuauacaucua

SEQ ID NO: 339517 - RNA, 20 nt, Human
ucacuaguaaccaucugcuu

SEQ ID NO: 339518 - RNA, 22 nt, Human
gauggcagucaaccaggugagg

SEQ ID NO: 339519 - RNA, 22 nt, Human
aaaguuagacagcaucauuucu

SEQ ID NO: 339520 - RNA, 22 nt, Human
aaaaguauuuauggcuauguaa

SEQ ID NO: 339521 - RNA, 22 nt, Human
ggagcacuauaauagagauuuu

SEQ ID NO: 339522 - RNA, 18 nt, Human
uuugcaaaggaaguaugg

SEQ ID NO: 339523 - RNA, 22 nt, Human
cucugaaagaguuuaguauuau

SEQ ID NO: 339524 - RNA, 19 nt, Human
ggcaggcuggauagagagg

SEQ ID NO: 339525 - RNA, 20 nt, Human
aauuuacucacagaaugaau

SEQ ID NO: 339526 - RNA, 22 nt, Human
ggcugaaggaugaaagcugcag

SEQ ID NO: 339527 - RNA, 22 nt, Human
caaggccacguucugcaugcgg

SEQ ID NO: 339528 - RNA, 22 nt, Human
ucugcuguaaagaauuucugcc

SEQ ID NO: 339529 - RNA, 22 nt, Human
ucugaaggugcuagagaaagcu

SEQ ID NO: 339530 - RNA, 20 nt, Human
gagauggacagaugaagggg

SEQ ID NO: 339531 - RNA, 23 nt, Human
acagacaacacugaugagagaaa

SEQ ID NO: 339532 - RNA, 22 nt, Human
uccaugaguuugaggaaaagag

SEQ ID NO: 339533 - RNA, 22 nt, Human
ggagaggguguggaaaguuauc

SEQ ID NO: 339534 - RNA, 22 nt, Human
ucaggauguccaaaauccagcc

SEQ ID NO: 339535 - RNA, 22 nt, Human
gaggucagucagaccaggguuu

SEQ ID NO: 339536 - RNA, 22 nt, Human
ucuuccaagguugcacacuauc

SEQ ID NO: 339537 - RNA, 22 nt, Human
cccaggaacagggcucagaccc

SEQ ID NO: 339538 - RNA, 22 nt, Human
uuuaaauucugucugccgcuua

SEQ ID NO: 339539 - RNA, 22 nt, Human
uucucugaucuugcuagacuga

SEQ ID NO: 339540 - RNA, 22 nt, Human
aucaggauggguuuggcuuagg

SEQ ID NO: 339541 - RNA, 22 nt, Human
cccaggagguggagcuugcagu

SEQ ID NO: 339542 - RNA, 23 nt, Human
ucucaggacacacaugucuauca

SEQ ID NO: 339543 - RNA, 22 nt, Human
cagcauuuggaggagaggcuuu

SEQ ID NO: 339544 - RNA, 22 nt, Human
agaggcggagcuugcagugagc

SEQ ID NO: 339545 - RNA, 22 nt, Human
gcaggggcuaaggacacagaga

SEQ ID NO: 339546 - RNA, 22 nt, Human
cccaggaggugugcccaacucg

SEQ ID NO: 339547 - RNA, 23 nt, Human
aggcagcuggguagcaucuuucu

SEQ ID NO: 339548 - RNA, 19 nt, Human
uucauucucuuauuguugu

SEQ ID NO: 339549 - RNA, 22 nt, Human
auacuuucugaccaauuaauug

SEQ ID NO: 339550 - RNA, 22 nt, Human
ucccaggaggugcuuccuagga

SEQ ID NO: 339551 - RNA, 22 nt, Human
uaauaucuacuucauagaguuu

SEQ ID NO: 339552 - RNA, 22 nt, Human
gcaaagcauucuguggagucua

SEQ ID NO: 339553 - RNA, 22 nt, Human
caggagaaauguggcugcuacc

SEQ ID NO: 339554 - RNA, 22 nt, Human
augaaggcuguguagauggaug

SEQ ID NO: 339555 - RNA, 22 nt, Human
uaugacuuauuucaucaguucu

SEQ ID NO: 339556 - RNA, 22 nt, Human
cucagugugaaugcucaguaaa

SEQ ID NO: 339557 - RNA, 19 nt, Human
guugaaaguaggugagggu

SEQ ID NO: 339558 - RNA, 22 nt, Human
ugaggcagauauuuauuggguu

SEQ ID NO: 339559 - RNA, 23 nt, Human
uggagcugacagucagagggagg

SEQ ID NO: 339560 - RNA, 22 nt, Human
cuggccagaguuggagggugug

SEQ ID NO: 339561 - RNA, 22 nt, Human
gaggcauggccugaggcuagga

SEQ ID NO: 339562 - RNA, 22 nt, Human
aauaguauuuauuuggaaaaag

SEQ ID NO: 339563 - RNA, 22 nt, Human
ucaucugucccaggcuuuuuuc

SEQ ID NO: 339564 - RNA, 17 nt, Human
ccaggagagaugcuugu

SEQ ID NO: 339565 - RNA, 22 nt, Human
ugcuagaagauagcuagaagau

SEQ ID NO: 339566 - RNA, 22 nt, Human
gagcagcugagcuggaaugaga

SEQ ID NO: 339567 - RNA, 22 nt, Human
cauaauuugauaugcuugaugg

SEQ ID NO: 339568 - RNA, 22 nt, Human
acuuugcagggcuugauaucca

SEQ ID NO: 339569 - RNA, 22 nt, Human
ccaggagaugauguuggggauu

SEQ ID NO: 339570 - RNA, 22 nt, Human
uuaacauuguccuuagcagauu

SEQ ID NO: 339571 - RNA, 22 nt, Human
caguuucuauggcugggcucug

SEQ ID NO: 339572 - RNA, 22 nt, Human
guaggcagugguuggaagagaa

SEQ ID NO: 339573 - RNA, 23 nt, Human
agaggcaggaguggcuugcccgg

SEQ ID NO: 339574 - RNA, 22 nt, Human
uggcagcugaauggcuggaugg

SEQ ID NO: 339575 - RNA, 22 nt, Human
uauggaaacuaauucauuuuuc

SEQ ID NO: 339576 - RNA, 22 nt, Human
caggcagcugcgacaagagagc

SEQ ID NO: 339577 - RNA, 22 nt, Human
uuagccauguugaagauuuaga

SEQ ID NO: 339578 - RNA, 22 nt, Human
aucaggaugacaacugcugggu

SEQ ID NO: 339579 - RNA, 22 nt, Human
uuuccagguauuaauacuguau

SEQ ID NO: 339580 - RNA, 22 nt, Human
guucuucagcauuagaagucau

SEQ ID NO: 339581 - RNA, 22 nt, Human
auucuuauuuaaauagagucug

SEQ ID NO: 339582 - RNA, 23 nt, Human
auguauuuaaauuucagugauga

SEQ ID NO: 339583 - RNA, 22 nt, Human
gaggcacugcaguacagugacu

SEQ ID NO: 339584 - RNA, 22 nt, Human
augucaaacacaacaccagugg

SEQ ID NO: 339585 - RNA, 22 nt, Human
aggcacaguggcucacaccugu

SEQ ID NO: 339586 - RNA, 22 nt, Human
uuauuauagauuaugcaagauu

SEQ ID NO: 339587 - RNA, 22 nt, Human
aaagcagacugauuugcaucac

SEQ ID NO: 339588 - RNA, 22 nt, Human
gugguuuucuccaacccagaac

SEQ ID NO: 339589 - RNA, 22 nt, Human
aggcacaguuucauccccgggc

SEQ ID NO: 339590 - RNA, 22 nt, Human
uguuugaauuuugcuaacgugu

SEQ ID NO: 339591 - RNA, 22 nt, Human
gcccaggaguucaagucuagug

SEQ ID NO: 339592 - RNA, 22 nt, Human
caggcgagugaacagacucuca

SEQ ID NO: 339593 - RNA, 22 nt, Human
auucauaacggcaaaugucacc

SEQ ID NO: 339594 - RNA, 22 nt, Human
aguaugaaucucuuuauucugc

SEQ ID NO: 339595 - RNA, 21 nt, Human
cuugaaagguagagucuacag

SEQ ID NO: 339596 - RNA, 22 nt, Human
agagggcagggcgguaaguccu

SEQ ID NO: 339597 - RNA, 22 nt, Human
ugaggcagggaguuuaauuguc

SEQ ID NO: 339598 - RNA, 22 nt, Human
cuaauacacccuauugcuuguu

SEQ ID NO: 339599 - RNA, 19 nt, Human
aguggcagaucuggaagua

SEQ ID NO: 339600 - RNA, 22 nt, Human
agaaaugaauauguagugguua

SEQ ID NO: 339601 - RNA, 22 nt, Human
uuuccuaggagauugaucacau

SEQ ID NO: 339602 - RNA, 22 nt, Human
ucugggaacacacgucacuuca

SEQ ID NO: 339603 - RNA, 22 nt, Human
gcccaggauggcuggaggugcu

SEQ ID NO: 339604 - RNA, 20 nt, Human
cccaggagcugugccccauc

SEQ ID NO: 339605 - RNA, 23 nt, Human
cccagggacacgaugacaccucc

SEQ ID NO: 339606 - RNA, 22 nt, Human
cuguauuucccacauucucuau

SEQ ID NO: 339607 - RNA, 22 nt, Human
ucacaaauagcuauauuaagga

SEQ ID NO: 339608 - RNA, 22 nt, Human
aaggagagagcuuugcuggaac

SEQ ID NO: 339609 - RNA, 22 nt, Human
ccaugagcuucaacugacacag

SEQ ID NO: 339610 - RNA, 22 nt, Human
agagagggcauagaaaaaggga

SEQ ID NO: 339611 - RNA, 22 nt, Human
uguuccaauaaggaguugaaau

SEQ ID NO: 339612 - RNA, 22 nt, Human
uaugacauuggccaaguucugu

SEQ ID NO: 339613 - RNA, 22 nt, Human
ugugugaaggaauauauacuca

SEQ ID NO: 339614 - RNA, 20 nt, Human
caggagggacauuucagcau

SEQ ID NO: 339615 - RNA, 22 nt, Human
aaggcagcuuuaaaaaagaugc

SEQ ID NO: 339616 - RNA, 17 nt, Human
agcugaccagauggacu

SEQ ID NO: 339617 - RNA, 22 nt, Human
ucuccuccuuuuuucaacauag

SEQ ID NO: 339618 - RNA, 18 nt, Human
aagaggaggagcagguug

SEQ ID NO: 339619 - RNA, 23 nt, Human
ugcaugugaauucauacuuguuu

SEQ ID NO: 339620 - RNA, 22 nt, Human
ccaggagacuguacugauauuu

SEQ ID NO: 339621 - RNA, 22 nt, Human
cauuuguauagugcuuagacca

SEQ ID NO: 339622 - RNA, 22 nt, Human
auuaaauuggaucugcauaguu

SEQ ID NO: 339623 - RNA, 22 nt, Human
acauuuuuuagagucccacauu

SEQ ID NO: 339624 - RNA, 22 nt, Human
gucuucuuuucagucugcuugu

SEQ ID NO: 339625 - RNA, 18 nt, Human
uaggagagaauuuauuua

SEQ ID NO: 339626 - RNA, 22 nt, Human
aagauggaguaguguaaugguu

SEQ ID NO: 339627 - RNA, 17 nt, Human
uccaggagaggcaaugg

SEQ ID NO: 339628 - RNA, 22 nt, Human
aggagaggguggcauuaaguuu

SEQ ID NO: 339629 - RNA, 22 nt, Human
gcagcugcaauaggcaucaagc

SEQ ID NO: 339630 - RNA, 21 nt, Human
augugaaauaucaucagagca

SEQ ID NO: 339631 - RNA, 22 nt, Human
caguuucuuggaugccaauuuc

SEQ ID NO: 339632 - RNA, 22 nt, Human
ucuucauuccguagauauuuau

SEQ ID NO: 339633 - RNA, 22 nt, Human
gggcaguugauggaggucugga

SEQ ID NO: 339634 - RNA, 22 nt, Human
acaugcauacacguacauaccu

SEQ ID NO: 339635 - RNA, 22 nt, Human
cuucuucauguauugauagucu

SEQ ID NO: 339636 - RNA, 22 nt, Human
acagugcuaaacacuucuugaa

SEQ ID NO: 339637 - RNA, 22 nt, Human
cuugaaagcacuccuuugacug

SEQ ID NO: 339638 - RNA, 22 nt, Human
aaauauguaagauuagcacuag

SEQ ID NO: 339639 - RNA, 22 nt, Human
uuaaauuuuagaaacagacucu

SEQ ID NO: 339640 - RNA, 22 nt, Human
uacuuacacagcuguagaaggu

SEQ ID NO: 339641 - RNA, 19 nt, Human
uucccaggaaaggggugca

SEQ ID NO: 339642 - RNA, 22 nt, Human
uugcauuuuuagaugcuucugu

SEQ ID NO: 339643 - RNA, 22 nt, Human
gaggagaggccaucguuguuau

SEQ ID NO: 339644 - RNA, 22 nt, Human
aaggcagcccuggcucagccug

SEQ ID NO: 339645 - RNA, 22 nt, Human
aguccaugguucugacucaucu

SEQ ID NO: 339646 - RNA, 20 nt, Human
cugcuguguuauuguagaac

SEQ ID NO: 339647 - RNA, 22 nt, Human
acccaggaggcaagguugcagu

SEQ ID NO: 339648 - RNA, 22 nt, Human
auuggcaggaaccgaggagggg

SEQ ID NO: 339649 - RNA, 22 nt, Human
agaccaagaaaggaugaggauc

SEQ ID NO: 339650 - RNA, 22 nt, Human
cuggcaguguccagcucgugau

SEQ ID NO: 339651 - RNA, 22 nt, Human
aagggcagagggaaucccacau

SEQ ID NO: 339652 - RNA, 22 nt, Human
guugaaaguggagaaccugguu

SEQ ID NO: 339653 - RNA, 22 nt, Human
gaaacuguauguaguuuuuggg

SEQ ID NO: 339654 - RNA, 22 nt, Human
ugauugaagaggugaggaaguu

SEQ ID NO: 339655 - RNA, 22 nt, Human
ggcagcuuccugagccagcagc

SEQ ID NO: 339656 - RNA, 22 nt, Human
gggaagcaggugcagcucgccu

SEQ ID NO: 339657 - RNA, 22 nt, Human
caaggccaguuucuccuaguca

SEQ ID NO: 339658 - RNA, 22 nt, Human
uuggcagugaugcagcuuguuc

SEQ ID NO: 339659 - RNA, 22 nt, Human
auguaugauauuuccaguauca

SEQ ID NO: 339660 - RNA, 22 nt, Human
aaggagagguuguccguguugu

SEQ ID NO: 339661 - RNA, 22 nt, Human
uuucacuagaacguucuuguuu

SEQ ID NO: 339662 - RNA, 22 nt, Human
agggcagcagcggcccaggccu

SEQ ID NO: 339663 - RNA, 22 nt, Human
uguuuauuacaguucuuggaau

SEQ ID NO: 339664 - RNA, 22 nt, Human
aaauaguuacuucugcugucuu

SEQ ID NO: 339665 - RNA, 22 nt, Human
cuggccaggcuugggacagaca

SEQ ID NO: 339666 - RNA, 22 nt, Human
agggagcugagcugugagcagc

SEQ ID NO: 339667 - RNA, 22 nt, Human
cccaggaguuugaguucagcau

SEQ ID NO: 339668 - RNA, 22 nt, Human
aucacugucgucaucugagauu

SEQ ID NO: 339669 - RNA, 22 nt, Human
cagaggcaaaagagguggaggu

SEQ ID NO: 339670 - RNA, 22 nt, Human
uuauuucauguaaaauuuaugu

SEQ ID NO: 339671 - RNA, 22 nt, Human
aauacaguaauuuugaugaguu

SEQ ID NO: 339672 - RNA, 22 nt, Human
guaggcagucucucaggugauc

SEQ ID NO: 339673 - RNA, 22 nt, Human
cugcaucaguggauaugauggu

SEQ ID NO: 339674 - RNA, 22 nt, Human
ggauggcagucugcaugagaaa

SEQ ID NO: 339675 - RNA, 22 nt, Human
augcugugauuguagaaauauu

SEQ ID NO: 339676 - RNA, 22 nt, Human
uaacaauaguguuugcuaguca

SEQ ID NO: 339677 - RNA, 22 nt, Human
uucucuuugacauuauucaggu

SEQ ID NO: 339678 - RNA, 22 nt, Human
gagagucuagugcaccuaguuu

SEQ ID NO: 339679 - RNA, 21 nt, Human
agggagcuuuagguagaaguu

SEQ ID NO: 339680 - RNA, 22 nt, Human
uggcagcucccagagcuuccaa

SEQ ID NO: 339681 - RNA, 19 nt, Human
uuugaaagaguuuuauugg

SEQ ID NO: 339682 - RNA, 23 nt, Human
cagggaggagauacuguguaucu

SEQ ID NO: 339683 - RNA, 22 nt, Human
agaggggagagcuaagcaauuc

SEQ ID NO: 339684 - RNA, 18 nt, Human
aaacuggcuuggccugug

SEQ ID NO: 339685 - RNA, 22 nt, Human
ucagugaucuaaggguauggcc

SEQ ID NO: 339686 - RNA, 22 nt, Human
ccaggagagcagaagcccaggc

SEQ ID NO: 339687 - RNA, 22 nt, Human
ucucucuuuuuaaucauguaau

SEQ ID NO: 339688 - RNA, 22 nt, Human
gucaggaugagggaugaggagu

SEQ ID NO: 339689 - RNA, 22 nt, Human
uaaggccaauuacauauguuca

SEQ ID NO: 339690 - RNA, 22 nt, Human
uacacacaugcauuugccuuau

SEQ ID NO: 339691 - RNA, 22 nt, Human
uaaaguuuggcagacaauaaca

SEQ ID NO: 339692 - RNA, 22 nt, Human
aaggcagccauagcaccaucca

SEQ ID NO: 339693 - RNA, 22 nt, Human
aaaguguugauaugugacaucc

SEQ ID NO: 339694 - RNA, 22 nt, Human
aaaguucuuucucuuauuuggu

SEQ ID NO: 339695 - RNA, 22 nt, Human
aggagggaccuaggaauauugc

SEQ ID NO: 339696 - RNA, 22 nt, Human
ugaaucauggauaaauagcuua

SEQ ID NO: 339697 - RNA, 19 nt, Human
gugcuuuuuaagagcucag

SEQ ID NO: 339698 - RNA, 22 nt, Human
aauaacuucauguaacauuuaa

SEQ ID NO: 339699 - RNA, 22 nt, Human
aggcugcucaguagauggagcu

SEQ ID NO: 339700 - RNA, 22 nt, Human
uagggcaggggaggaaucugaa

SEQ ID NO: 339701 - RNA, 20 nt, Human
ugcguguguauuuauuuucu

SEQ ID NO: 339702 - RNA, 22 nt, Human
agcccaggugagggguucgaaa

SEQ ID NO: 339703 - RNA, 22 nt, Human
acauuuagcuguacaaucuaug

SEQ ID NO: 339704 - RNA, 22 nt, Human
cagaggauucccuagugaccug

SEQ ID NO: 339705 - RNA, 22 nt, Human
gggcacagaagucuaagacauc

SEQ ID NO: 339706 - RNA, 22 nt, Human
ccucuucugcuucaggagcacu

SEQ ID NO: 339707 - RNA, 22 nt, Human
ucacacagguuugcaaugauuu

SEQ ID NO: 339708 - RNA, 22 nt, Human
accaggagucuagccuagucaa

SEQ ID NO: 339709 - RNA, 22 nt, Human
uuaacacagggggagacaaagu

SEQ ID NO: 339710 - RNA, 22 nt, Human
agaggacagacggaaagugcca

SEQ ID NO: 339711 - RNA, 22 nt, Human
aauaugcauuaacuguguacau

SEQ ID NO: 339712 - RNA, 22 nt, Human
uggcagcuccuggggccagcac

SEQ ID NO: 339713 - RNA, 22 nt, Human
gucuucuuguuuugaaggaaau

SEQ ID NO: 339714 - RNA, 22 nt, Human
ucacugcugcugccaugaugga

SEQ ID NO: 339715 - RNA, 22 nt, Human
gcuuggcauugaccauuaucau

SEQ ID NO: 339716 - RNA, 22 nt, Human
uuucaaacauaucuucauuacu

SEQ ID NO: 339717 - RNA, 22 nt, Human
ucuuuguaacugucuauugaga

SEQ ID NO: 339718 - RNA, 22 nt, Human
ucuuugcagaauuuaacuuugc

SEQ ID NO: 339719 - RNA, 22 nt, Human
uuucuucauagaccuugucuug

SEQ ID NO: 339720 - RNA, 22 nt, Human
aaagcagauucugaugcaguag

SEQ ID NO: 339721 - RNA, 22 nt, Human
uuguuuuaucuuucuacagacu

SEQ ID NO: 339722 - RNA, 22 nt, Human
uauuuccauguuagaacuaagu

SEQ ID NO: 339723 - RNA, 19 nt, Human
ggcagcuggacgcuguuca

SEQ ID NO: 339724 - RNA, 22 nt, Human
uucuucaaacaaaaguggcaug

SEQ ID NO: 339725 - RNA, 22 nt, Human
uuuguuuacucauucauugaug

SEQ ID NO: 339726 - RNA, 22 nt, Human
auguagaauuccuucuacuuug

SEQ ID NO: 339727 - RNA, 22 nt, Human
gcaagcugaugugauagugaaa

SEQ ID NO: 339728 - RNA, 17 nt, Human
aggcaggcagagcggga

SEQ ID NO: 339729 - RNA, 21 nt, Human
cccaggagaagaaaagaugca

SEQ ID NO: 339730 - RNA, 22 nt, Human
cuucucaguugcaagugucaga

SEQ ID NO: 339731 - RNA, 22 nt, Human
uucacagaugccugaugugugg

SEQ ID NO: 339732 - RNA, 22 nt, Human
uucaacuauuaugaauaaaauu

SEQ ID NO: 339733 - RNA, 22 nt, Human
cccaggagaccugugaaaggac

SEQ ID NO: 339734 - RNA, 23 nt, Human
caguggagacucaugcuuccuua

SEQ ID NO: 339735 - RNA, 22 nt, Human
uccaggaguuugaccugugggc

SEQ ID NO: 339736 - RNA, 22 nt, Human
uugcaggaaacugagugugagc

SEQ ID NO: 339737 - RNA, 22 nt, Human
cugccaggcagcagagggagaa

SEQ ID NO: 339738 - RNA, 22 nt, Human
uucuucuuaauguccugggaac

SEQ ID NO: 339739 - RNA, 22 nt, Human
uuuguagaggguaauugacaga

SEQ ID NO: 339740 - RNA, 22 nt, Human
aggcaggcucaggcccaugcuu

SEQ ID NO: 339741 - RNA, 22 nt, Human
uccaugagacagauacuguaag

SEQ ID NO: 339742 - RNA, 22 nt, Human
uggaggaaguugcuggaaguca

SEQ ID NO: 339743 - RNA, 21 nt, Human
uaacacauuuugguacuuugg

SEQ ID NO: 339744 - RNA, 22 nt, Human
auguucuguuuuguaauucaua

SEQ ID NO: 339745 - RNA, 22 nt, Human
cucucuguuaugcuuucaugaa

SEQ ID NO: 339746 - RNA, 19 nt, Human
uuacuuggcaaagucaguc

SEQ ID NO: 339747 - RNA, 22 nt, Human
gagggugggccagauaugaggg

SEQ ID NO: 339748 - RNA, 22 nt, Human
caagauggagaagcagcaaggg

SEQ ID NO: 339749 - RNA, 22 nt, Human
ugaggggagcuagcaugccuug

SEQ ID NO: 339750 - RNA, 22 nt, Human
guaguucugcagugucaccuga

SEQ ID NO: 339751 - RNA, 22 nt, Human
gucaggauguuuauucuccagu

SEQ ID NO: 339752 - RNA, 22 nt, Human
gcccaggauaaugcugucccug

SEQ ID NO: 339753 - RNA, 22 nt, Human
uagaauucauguuacuguuagc

SEQ ID NO: 339754 - RNA, 22 nt, Human
cuacccaggcuggagugcagua

SEQ ID NO: 339755 - RNA, 22 nt, Human
gccaggaggcugcuguguaggc

SEQ ID NO: 339756 - RNA, 22 nt, Human
auauacuuggagacuaucauug

SEQ ID NO: 339757 - RNA, 23 nt, Human
uguaugaauaugccacaguuuaa

SEQ ID NO: 339758 - RNA, 22 nt, Human
auuugcuugugcuaugaaaguu

SEQ ID NO: 339759 - RNA, 22 nt, Human
uccaugagcuagcuuuccaaag

SEQ ID NO: 339760 - RNA, 22 nt, Human
cuugcugucuugcauuuagagc

SEQ ID NO: 339761 - RNA, 22 nt, Human
caaauaguuuuucauguauuau

SEQ ID NO: 339762 - RNA, 22 nt, Human
caggagggcccgagacucuucc

SEQ ID NO: 339763 - RNA, 22 nt, Human
cuucagaaugggacuguguuug

SEQ ID NO: 339764 - RNA, 22 nt, Human
gagagguccauuccccugucag

SEQ ID NO: 339765 - RNA, 19 nt, Human
gaggucagcaagaaguauu

SEQ ID NO: 339766 - RNA, 22 nt, Human
acagaauugaaaguauaaucug

SEQ ID NO: 339767 - RNA, 22 nt, Human
agugagggaugaagaacugcgg

SEQ ID NO: 339768 - RNA, 22 nt, Human
aggcagauuuaggagaaaagaa

SEQ ID NO: 339769 - RNA, 22 nt, Human
cucuucuugucucugguuagaa

SEQ ID NO: 339770 - RNA, 22 nt, Human
uguuagaaauuauuaguaauau

SEQ ID NO: 339771 - RNA, 22 nt, Human
ucccuucacagaugcgauguuu

SEQ ID NO: 339772 - RNA, 22 nt, Human
ucauuucuauugcuacugucug

SEQ ID NO: 339773 - RNA, 22 nt, Human
guagggagcccagagcccagug

SEQ ID NO: 339774 - RNA, 22 nt, Human
ucugcaucauuuuucagagccg

SEQ ID NO: 339775 - RNA, 22 nt, Human
aaggccagccugagagcuaaca

SEQ ID NO: 339776 - RNA, 22 nt, Human
gagaaaugcaugcaugucauca

SEQ ID NO: 339777 - RNA, 22 nt, Human
cuggcugugcugcaggcuuugg

SEQ ID NO: 339778 - RNA, 22 nt, Human
agugugucugaucacuugugag

SEQ ID NO: 339779 - RNA, 22 nt, Human
uucugucagcugcuuugucuca

SEQ ID NO: 339780 - RNA, 22 nt, Human
agcauucauugcuagaauguaa

SEQ ID NO: 339781 - RNA, 19 nt, Human
uggcaucuguaaaauggug

SEQ ID NO: 339782 - RNA, 22 nt, Human
aaucacuuuucucuaauguagc

SEQ ID NO: 339783 - RNA, 22 nt, Human
ugcccagggauaagccuagaga

SEQ ID NO: 339784 - RNA, 22 nt, Human
augaacuuauuucugaacuuuu

SEQ ID NO: 339785 - RNA, 22 nt, Human
uggcagcugcguuguguuucug

SEQ ID NO: 339786 - RNA, 22 nt, Human
gaaguucuuagucucauuugca

SEQ ID NO: 339787 - RNA, 22 nt, Human
cuaucauuuuacaugguuggug

SEQ ID NO: 339788 - RNA, 22 nt, Human
uccaugagcuagggauucauca

SEQ ID NO: 339789 - RNA, 22 nt, Human
gaggaggccaguggaaggaagc

SEQ ID NO: 339790 - RNA, 22 nt, Human
uaaauuauguuccauguccuuu

SEQ ID NO: 339791 - RNA, 22 nt, Human
aguuagaaaguaaaucauuuga

SEQ ID NO: 339792 - RNA, 22 nt, Human
gaggggcagagguagagaacaa

SEQ ID NO: 339793 - RNA, 22 nt, Human
uuagaacuuaagaauacugucu

SEQ ID NO: 339794 - RNA, 22 nt, Human
uugcugaaguuaaugcuugcaa

SEQ ID NO: 339795 - RNA, 21 nt, Human
gacaaagugaagcaggcagga

SEQ ID NO: 339796 - RNA, 22 nt, Human
aucaggaucagggcuagcagag

SEQ ID NO: 339797 - RNA, 21 nt, Human
auuucagagcacacaaguaaa

SEQ ID NO: 339798 - RNA, 22 nt, Human
augaggcaucugcagucacuag

SEQ ID NO: 339799 - RNA, 22 nt, Human
uucuuuuccuacacagcgauuu

SEQ ID NO: 339800 - RNA, 22 nt, Human
cagcauuuggugaucaucuuaa

SEQ ID NO: 339801 - RNA, 22 nt, Human
ggaagagggaaccacgacugua

SEQ ID NO: 339802 - RNA, 22 nt, Human
aggagggagcuuaagccaggca

SEQ ID NO: 339803 - RNA, 22 nt, Human
ugagaauuuuuugucaugcauu

SEQ ID NO: 339804 - RNA, 22 nt, Human
acacaaugcauauuuuuccaga

SEQ ID NO: 339805 - RNA, 22 nt, Human
uuauuuugguaaauguuugccu

SEQ ID NO: 339806 - RNA, 20 nt, Human
aggcagcuggccaggcaggu

SEQ ID NO: 339807 - RNA, 22 nt, Human
uuauucuuuaaacauauauguu

SEQ ID NO: 339808 - RNA, 22 nt, Human
ccuccucugggaagauucagag

SEQ ID NO: 339809 - RNA, 22 nt, Human
uaugaacuagcugauuuaguuu

SEQ ID NO: 339810 - RNA, 22 nt, Human
cccaggaggcagagcuugcagu

SEQ ID NO: 339811 - RNA, 22 nt, Human
uuucacauuuaggcgugaauug

SEQ ID NO: 339812 - RNA, 19 nt, Human
uaucuguuuccugcuuguc

SEQ ID NO: 339813 - RNA, 22 nt, Human
gaggcagcaucuauggugggaa

SEQ ID NO: 339814 - RNA, 22 nt, Human
cgaggcagacaaaaguuggaag

SEQ ID NO: 339815 - RNA, 22 nt, Human
auuaaauuuucacuaggcuccc

SEQ ID NO: 339816 - RNA, 22 nt, Human
ucugcuguucauucuuuuagcu

SEQ ID NO: 339817 - RNA, 22 nt, Human
caaggccaguucaccaagggca

SEQ ID NO: 339818 - RNA, 22 nt, Human
ucagucuuugcuuaugacaaua

SEQ ID NO: 339819 - RNA, 22 nt, Human
agcuucuuggcucagcacuugg

SEQ ID NO: 339820 - RNA, 22 nt, Human
uuaucacuuaugagcuuuuugc

SEQ ID NO: 339821 - RNA, 22 nt, Human
ccaggaaaauaccaagcuuuaa

SEQ ID NO: 339822 - RNA, 22 nt, Human
uucugggagagaaagggccuug

SEQ ID NO: 339823 - RNA, 22 nt, Human
gggagggguugcauguuugagu

SEQ ID NO: 339824 - RNA, 22 nt, Human
uacaaaguaauguauaauaucg

SEQ ID NO: 339825 - RNA, 22 nt, Human
auguaaacaagguuauugucca

SEQ ID NO: 339826 - RNA, 22 nt, Human
auucuucaguauguguggauug

SEQ ID NO: 339827 - RNA, 21 nt, Human
uuucuuaggcucuaaaaugac

SEQ ID NO: 339828 - RNA, 22 nt, Human
gggacgggcaguccaagggguc

SEQ ID NO: 339829 - RNA, 22 nt, Human
agcugcccugggcuggagaugg

SEQ ID NO: 339830 - RNA, 22 nt, Human
uucaggauggcggauguugggg

SEQ ID NO: 339831 - RNA, 19 nt, Human
ucccaggaaccuuuuauuu

SEQ ID NO: 339832 - RNA, 22 nt, Human
gcugcccauuccacuggauggu

SEQ ID NO: 339833 - RNA, 19 nt, Human
uggcaggcccaggauggac

SEQ ID NO: 339834 - RNA, 22 nt, Human
ucagagaguuagugucuuagcu

SEQ ID NO: 339835 - RNA, 22 nt, Human
guggaauguccuugaucauaag

SEQ ID NO: 339836 - RNA, 22 nt, Human
guaggcagauaggagugcagcc

SEQ ID NO: 339837 - RNA, 22 nt, Human
cagaauggcuuuuauggcucag

SEQ ID NO: 339838 - RNA, 22 nt, Human
ggcuuggaccagucacaguggu

SEQ ID NO: 339839 - RNA, 22 nt, Human
cugcugugagcacuccagccug

SEQ ID NO: 339840 - RNA, 22 nt, Human
agcagcauuaugauauaucuua

SEQ ID NO: 339841 - RNA, 22 nt, Human
ugaggcaguucuuacuuguauu

SEQ ID NO: 339842 - RNA, 22 nt, Human
cauugcuguuaauugucucuag

SEQ ID NO: 339843 - RNA, 22 nt, Human
auucuucaucagagaugcacua

SEQ ID NO: 339844 - RNA, 22 nt, Human
ugaaagggguugaguuacagcu

SEQ ID NO: 339845 - RNA, 22 nt, Human
cuacagacccaccuuggaagaa

SEQ ID NO: 339846 - RNA, 22 nt, Human
uccaggagucuagccucaggcc

SEQ ID NO: 339847 - RNA, 22 nt, Human
cccaggagaauauaauguucuu

SEQ ID NO: 339848 - RNA, 20 nt, Human
cugcccagccacugagggau

SEQ ID NO: 339849 - RNA, 22 nt, Human
ugaaagcacaaguucuaacagg

SEQ ID NO: 339850 - RNA, 22 nt, Human
ucucuguacaguacaugccgug

SEQ ID NO: 339851 - RNA, 22 nt, Human
agaggcaguauacaauccgagc

SEQ ID NO: 339852 - RNA, 22 nt, Human
uuucugaacaaagccauuauca

SEQ ID NO: 339853 - RNA, 22 nt, Human
agaagucauuuauguuagauga

SEQ ID NO: 339854 - RNA, 15 nt, Human
cccaggaguucgaga

SEQ ID NO: 339855 - RNA, 22 nt, Human
uuugaaaggagcuuuauccaga

SEQ ID NO: 339856 - RNA, 22 nt, Human
auucuuauuauaguaaaacagu

SEQ ID NO: 339857 - RNA, 22 nt, Human
ggaggugggcuaaggacucucu

SEQ ID NO: 339858 - RNA, 22 nt, Human
gaggcagagugcaccccaggag

SEQ ID NO: 339859 - RNA, 22 nt, Human
ugcuggguagaaguauuagucu

SEQ ID NO: 339860 - RNA, 22 nt, Human
aaucacaugugcucaauuuuaa

SEQ ID NO: 339861 - RNA, 18 nt, Human
uggcagcaggaagccauu

SEQ ID NO: 339862 - RNA, 19 nt, Human
aucugccuuagugcugcug

SEQ ID NO: 339863 - RNA, 22 nt, Human
aaaauauuuuagggccaggaga

SEQ ID NO: 339864 - RNA, 22 nt, Human
ucuucagauaaagggagaguau

SEQ ID NO: 339865 - RNA, 22 nt, Human
auggaaagggaagcaaggaaca

SEQ ID NO: 339866 - RNA, 22 nt, Human
aggcagcccugugcuggaugcu

SEQ ID NO: 339867 - RNA, 22 nt, Human
auugugcaaauauuaucuguag

SEQ ID NO: 339868 - RNA, 22 nt, Human
cuguguuggcuuuucucuugua

SEQ ID NO: 339869 - RNA, 22 nt, Human
uuuaacagaugugaaauuuuca

SEQ ID NO: 339870 - RNA, 22 nt, Human
uggaaauguauuugggcaugcc

SEQ ID NO: 339871 - RNA, 22 nt, Human
augacaguucuacacuuaaucu

SEQ ID NO: 339872 - RNA, 22 nt, Human
aaauuauuaugccccucuauaa

SEQ ID NO: 339873 - RNA, 22 nt, Human
uuugacaugcaaagcacuuuag

SEQ ID NO: 339874 - RNA, 20 nt, Human
cucaggauugucuagccccu

SEQ ID NO: 339875 - RNA, 22 nt, Human
ugaggggaaggcaugauaaaua

SEQ ID NO: 339876 - RNA, 22 nt, Human
uaggcagcuuagguuagaagug

SEQ ID NO: 339877 - RNA, 22 nt, Human
caggaggaagaacucugcaaca

SEQ ID NO: 339878 - RNA, 22 nt, Human
uguuagaauauuguaauauucg

SEQ ID NO: 339879 - RNA, 22 nt, Human
cucagaagaacaaaggcucuac

SEQ ID NO: 339880 - RNA, 22 nt, Human
aaggcagucugguuucaaagca

SEQ ID NO: 339881 - RNA, 22 nt, Human
cuccaggaaagccugaggcccg

SEQ ID NO: 339882 - RNA, 22 nt, Human
uucuucaugcuguugcugcuug

SEQ ID NO: 339883 - RNA, 22 nt, Human
ggaagaggcugagccagguccc

SEQ ID NO: 339884 - RNA, 22 nt, Human
ugaggcagcaauugauuauuca

SEQ ID NO: 339885 - RNA, 21 nt, Human
ucuugaaaauuguagcaguuu

SEQ ID NO: 339886 - RNA, 22 nt, Human
uucauucugcaguucucagcuc

SEQ ID NO: 339887 - RNA, 22 nt, Human
cagcagaggcacgucugugaau

SEQ ID NO: 339888 - RNA, 22 nt, Human
uuuucagaggccuaagagguuu

SEQ ID NO: 339889 - RNA, 22 nt, Human
uuccaugacaccgagggaaguc

SEQ ID NO: 339890 - RNA, 22 nt, Human
uucuacaauaugaauaaugaag

SEQ ID NO: 339891 - RNA, 22 nt, Human
aaaggccaccaacaugaagcau

SEQ ID NO: 339892 - RNA, 22 nt, Human
caggcagcucuaauggaaagug

SEQ ID NO: 339893 - RNA, 22 nt, Human
gugcauuugacgaauacucacu

SEQ ID NO: 339894 - RNA, 20 nt, Human
ucagaugggagugagccauc

SEQ ID NO: 339895 - RNA, 22 nt, Human
gagcgauguggguauguagaag

SEQ ID NO: 339896 - RNA, 22 nt, Human
cccaggaggcagauguugcagu

SEQ ID NO: 339897 - RNA, 22 nt, Human
uauugaaauucuucauguccuc

SEQ ID NO: 339898 - RNA, 22 nt, Human
cucccagagaccaagcugagaa

SEQ ID NO: 339899 - RNA, 20 nt, Human
agcugccccugggcacugcc

SEQ ID NO: 339900 - RNA, 22 nt, Human
ucaggagacaaagggugcggag

SEQ ID NO: 339901 - RNA, 22 nt, Human
ucuucagaggaagucagucuuu

SEQ ID NO: 339902 - RNA, 22 nt, Human
cugcucuaacugcauuaguuuu

SEQ ID NO: 339903 - RNA, 22 nt, Human
cagcugacgccagaguggaauu

SEQ ID NO: 339904 - RNA, 22 nt, Human
cagaggcaggauaagaacugcg

SEQ ID NO: 339905 - RNA, 22 nt, Human
gcagcugagcgugaggaagagu

SEQ ID NO: 339906 - RNA, 17 nt, Human
cucacggaggaugaauc

SEQ ID NO: 339907 - RNA, 17 nt, Human
ucccaggaacagggaau

SEQ ID NO: 339908 - RNA, 22 nt, Human
uauuucagguauggugugaaau

SEQ ID NO: 339909 - RNA, 22 nt, Human
uuuuucuugugcuggaucuaau

SEQ ID NO: 339910 - RNA, 18 nt, Human
ugcuuggagcauuuacca

SEQ ID NO: 339911 - RNA, 22 nt, Human
uuuuccuguccaggcaauuauu

SEQ ID NO: 339912 - RNA, 22 nt, Human
ucagucucuggggcuucuguuu

SEQ ID NO: 339913 - RNA, 22 nt, Human
uuguaugagcuccaggaacuca

SEQ ID NO: 339914 - RNA, 22 nt, Human
uuuggaauguaguuuaaucauc

SEQ ID NO: 339915 - RNA, 22 nt, Human
ggcagcuucucccaggcuguuu

SEQ ID NO: 339916 - RNA, 18 nt, Human
ucuuccaacacugacacc

SEQ ID NO: 339917 - RNA, 22 nt, Human
agugugagcccuggaguggugc

SEQ ID NO: 339918 - RNA, 22 nt, Human
ccaagaugaucuuuacaguguu

SEQ ID NO: 339919 - RNA, 22 nt, Human
uaggcagccagcaucaguuggg

SEQ ID NO: 339920 - RNA, 22 nt, Human
cacaugaagagagucuaguaau

SEQ ID NO: 339921 - RNA, 22 nt, Human
uucuucuccuaaggagaguccu

SEQ ID NO: 339922 - RNA, 22 nt, Human
aaacaugaauagauauuaaaca

SEQ ID NO: 339923 - RNA, 22 nt, Human
agauggcagggguaccuggaag

SEQ ID NO: 339924 - RNA, 22 nt, Human
uucaggauuauacucucuuccc

SEQ ID NO: 339925 - RNA, 22 nt, Human
gaacuguaguuaauacuacaca

SEQ ID NO: 339926 - RNA, 22 nt, Human
aguguuugagacacauuucacu

SEQ ID NO: 339927 - RNA, 22 nt, Human
ucccaggauuuuaggcucucag

SEQ ID NO: 339928 - RNA, 22 nt, Human
agagggcagucucagauuggga

SEQ ID NO: 339929 - RNA, 22 nt, Human
aauauccacacugugucccugc

SEQ ID NO: 339930 - RNA, 22 nt, Human
guguaugauuucaaauggcuag

SEQ ID NO: 339931 - RNA, 22 nt, Human
uaauuucaauagcuugcauaau

SEQ ID NO: 339932 - RNA, 22 nt, Human
caggacagcucaacaccuccuc

SEQ ID NO: 339933 - RNA, 22 nt, Human
ggcaggcagaggcugagacagg

SEQ ID NO: 339934 - RNA, 22 nt, Human
uugcauuugacaaauuauuuaa

SEQ ID NO: 339935 - RNA, 22 nt, Human
ucuucucuacaccagcagcccc

SEQ ID NO: 339936 - RNA, 22 nt, Human
cugcugugacagcugccguguu

SEQ ID NO: 339937 - RNA, 22 nt, Human
gcccaggagaggccagggcuga

SEQ ID NO: 339938 - RNA, 22 nt, Human
auucuucacauggauaggaucu

SEQ ID NO: 339939 - RNA, 22 nt, Human
uuucacaacugcuuauuugaga

SEQ ID NO: 339940 - RNA, 22 nt, Human
aacuacauuguccuuucugaag

SEQ ID NO: 339941 - RNA, 22 nt, Human
uaaggccaccguuauagaacca

SEQ ID NO: 339942 - RNA, 22 nt, Human
aauguaugacaguucuaguggu

SEQ ID NO: 339943 - RNA, 22 nt, Human
ucccaggaaaacacucgaggac

SEQ ID NO: 339944 - RNA, 23 nt, Human
acucacaaagcaggaucauguug

SEQ ID NO: 339945 - RNA, 22 nt, Human
uugaaagaagaagcugcgaugu

SEQ ID NO: 339946 - RNA, 22 nt, Human
ggaggggauuuaguagaugcua

SEQ ID NO: 339947 - RNA, 22 nt, Human
auuauauaggacuugcccuucc

SEQ ID NO: 339948 - RNA, 22 nt, Human
ugucagaugcgauaaacuagug

SEQ ID NO: 339949 - RNA, 22 nt, Human
uguaugaaugggaaaaggaaac

SEQ ID NO: 339950 - RNA, 22 nt, Human
cggcagcuccgcgccguaggac

SEQ ID NO: 339951 - RNA, 22 nt, Human
uguauaaaccauggacagcuuu

SEQ ID NO: 339952 - RNA, 22 nt, Human
auacaaagacaaaucucaaucu

SEQ ID NO: 339953 - RNA, 22 nt, Human
cauuuucaugaguuucuguuca

SEQ ID NO: 339954 - RNA, 22 nt, Human
ucagucuucccuccagugcaac

SEQ ID NO: 339955 - RNA, 21 nt, Human
acauucacaggauauuaucau

SEQ ID NO: 339956 - RNA, 22 nt, Human
ucuuugcacugugcaagcagaa

SEQ ID NO: 339957 - RNA, 22 nt, Human
aaaggccaagcaugagguggac

SEQ ID NO: 339958 - RNA, 22 nt, Human
uguaggaauguuuuuaaguugg

SEQ ID NO: 339959 - RNA, 22 nt, Human
uuacacaacaucuguauuauua

SEQ ID NO: 339960 - RNA, 22 nt, Human
cccaggagauaacguucccaag

SEQ ID NO: 339961 - RNA, 22 nt, Human
cugcugugcaacauugcaccua

SEQ ID NO: 339962 - RNA, 22 nt, Human
aaggcagcaacuaauggaucuc

SEQ ID NO: 339963 - RNA, 22 nt, Human
ccagguaggagagagggauccu

SEQ ID NO: 339964 - RNA, 22 nt, Human
ucaccgccuugcccggccgggc

SEQ ID NO: 339965 - RNA, 22 nt, Human
aucugucaagauagacucugca

SEQ ID NO: 339966 - RNA, 22 nt, Human
aggcuggagggcaauggcaaga

SEQ ID NO: 339967 - RNA, 22 nt, Human
aagauaaacucuugauuucuga

SEQ ID NO: 339968 - RNA, 22 nt, Human
aagggcaggagaagacggauau

SEQ ID NO: 339969 - RNA, 22 nt, Human
guuaucaugcuucaucaucacu

SEQ ID NO: 339970 - RNA, 20 nt, Human
ggggcugcaugcagagaaga

SEQ ID NO: 339971 - RNA, 22 nt, Human
cacucuccagcacaccccauuu

SEQ ID NO: 339972 - RNA, 22 nt, Human
aggcugcugccuuggagagugu

SEQ ID NO: 339973 - RNA, 22 nt, Human
aaggcaguaggaucuuccacag

SEQ ID NO: 339974 - RNA, 22 nt, Human
uugcauuugagaaaguucuccu

SEQ ID NO: 339975 - RNA, 22 nt, Human
gagagaaaugugcaguuugggc

SEQ ID NO: 339976 - RNA, 22 nt, Human
uuggaugaagucuagcuuuagu

SEQ ID NO: 339977 - RNA, 22 nt, Human
cucaggauggaagccuacagga

SEQ ID NO: 339978 - RNA, 22 nt, Human
cuguauuuguccucuauuuauu

SEQ ID NO: 339979 - RNA, 22 nt, Human
uuucaucuucccagagaccuug

SEQ ID NO: 339980 - RNA, 22 nt, Human
uccaggagagguguggggacug

SEQ ID NO: 339981 - RNA, 22 nt, Human
uauggaaagcucuuuuugauug

SEQ ID NO: 339982 - RNA, 22 nt, Human
gcuccucugucaaaugagagug

SEQ ID NO: 339983 - RNA, 22 nt, Human
aaauacagaguugcuuaaaagc

SEQ ID NO: 339984 - RNA, 22 nt, Human
auugaaagaguuuucugcugca

SEQ ID NO: 339985 - RNA, 20 nt, Human
cuucuucagccuaugcuuca

SEQ ID NO: 339986 - RNA, 22 nt, Human
ucaggagagaguuggguaggcu

SEQ ID NO: 339987 - RNA, 22 nt, Human
cuucucagcaugguuacuguga

SEQ ID NO: 339988 - RNA, 22 nt, Human
cagaccucaguccucaguagga

SEQ ID NO: 339989 - RNA, 22 nt, Human
ggagcugugcagugacuacaga

SEQ ID NO: 339990 - RNA, 21 nt, Human
ggauggauagggaagagauuu

SEQ ID NO: 339991 - RNA, 17 nt, Human
gcuguaguuugauaaga

SEQ ID NO: 339992 - RNA, 22 nt, Human
gaggcagcaggcugaggaggau

SEQ ID NO: 339993 - RNA, 23 nt, Human
aauguauguuaguaucuuagaga

SEQ ID NO: 339994 - RNA, 22 nt, Human
guucuucacauuucauugagga

SEQ ID NO: 339995 - RNA, 22 nt, Human
cuuugaagagauuacugugcuc

SEQ ID NO: 339996 - RNA, 22 nt, Human
ggggcagcuaccggaaguaggg

SEQ ID NO: 339997 - RNA, 22 nt, Human
aucaggauagucuguaaauugu

SEQ ID NO: 339998 - RNA, 22 nt, Human
cuuaaauuggaugaguuaaguu

SEQ ID NO: 339999 - RNA, 22 nt, Human
aauuuccagaucagaugacuca

SEQ ID NO: 340000 - RNA, 22 nt, Human
cauuuguacagaacagcuuuau

SEQ ID NO: 340001 - RNA, 22 nt, Human
ucauggauggccgggaggugau

SEQ ID NO: 340002 - RNA, 22 nt, Human
cuuacagagaagaaaauguagu

SEQ ID NO: 340003 - RNA, 22 nt, Human
uccaggagaaaacugacggugg

SEQ ID NO: 340004 - RNA, 19 nt, Human
agggaguuuauauuugcac

SEQ ID NO: 340005 - RNA, 22 nt, Human
caggcagcugggucaccguccc

SEQ ID NO: 340006 - RNA, 22 nt, Human
ugccuugcgggcguuucuguug

SEQ ID NO: 340007 - RNA, 22 nt, Human
auugaaagauaggcuacugugg

SEQ ID NO: 340008 - RNA, 19 nt, Human
gccaggagggcucuggcug

SEQ ID NO: 340009 - RNA, 18 nt, Human
cugcccagagcacuugug

SEQ ID NO: 340010 - RNA, 23 nt, Human
ucuccuccuagauacagucaugg

SEQ ID NO: 340011 - RNA, 22 nt, Human
uguuuuaagagcgcacuuuaua

SEQ ID NO: 340012 - RNA, 22 nt, Human
auguucuuucagccagugcauc

SEQ ID NO: 340013 - RNA, 22 nt, Human
uaacuuucacaucacacugacu

SEQ ID NO: 340014 - RNA, 22 nt, Human
uuuggaauuggcauucuauucu

SEQ ID NO: 340015 - RNA, 22 nt, Human
uuccaagaguaaauucaaauug

SEQ ID NO: 340016 - RNA, 22 nt, Human
acagucuugcuguauggucagg

SEQ ID NO: 340017 - RNA, 22 nt, Human
uuugcaaauaccaugaaacuug

SEQ ID NO: 340018 - RNA, 22 nt, Human
guguauaaugcuguuuguacau

SEQ ID NO: 340019 - RNA, 19 nt, Human
aggcaggugcagagguccc

SEQ ID NO: 340020 - RNA, 22 nt, Human
cccaggagacagaaacagaggu

SEQ ID NO: 340021 - RNA, 22 nt, Human
uuucaaagaguuguaaauuacu

SEQ ID NO: 340022 - RNA, 18 nt, Human
aggcaggcuggagugacu

SEQ ID NO: 340023 - RNA, 22 nt, Human
ucucacugcaaauauuauguau

SEQ ID NO: 340024 - RNA, 22 nt, Human
ccagcagagucuaggaaggagg

SEQ ID NO: 340025 - RNA, 21 nt, Human
ggacagcugcgcgcagggcuc

SEQ ID NO: 340026 - RNA, 22 nt, Human
aucugccugagucuagguuuuc

SEQ ID NO: 340027 - RNA, 22 nt, Human
agggggugcccagaugaaggau

SEQ ID NO: 340028 - RNA, 22 nt, Human
aguaaaucagaccucauuaugu

SEQ ID NO: 340029 - RNA, 22 nt, Human
uaaggccauuauggugggcccg

SEQ ID NO: 340030 - RNA, 19 nt, Human
uggagacugagagugagca

SEQ ID NO: 340031 - RNA, 22 nt, Human
aguuugaaauguuggcaauauu

SEQ ID NO: 340032 - RNA, 22 nt, Human
accaggaguuuugaccaggggc

SEQ ID NO: 340033 - RNA, 22 nt, Human
ugccuguguccccuucuuggca

SEQ ID NO: 340034 - RNA, 22 nt, Human
uucauacaaugggauauuauga

SEQ ID NO: 340035 - RNA, 22 nt, Human
aauucuguuacuaaugugaugu

SEQ ID NO: 340036 - RNA, 18 nt, Human
ucauuuguuuugcaugaa

SEQ ID NO: 340037 - RNA, 22 nt, Human
gauggcaggugauagccgaguc

SEQ ID NO: 340038 - RNA, 22 nt, Human
aaacagcaggaacaucuugcca

SEQ ID NO: 340039 - RNA, 22 nt, Human
ggagaggaaaugccagcacuuc

SEQ ID NO: 340040 - RNA, 22 nt, Human
aaggcagccuuuugaguugauu

SEQ ID NO: 340041 - RNA, 19 nt, Human
cuggccaggccaggggccc

SEQ ID NO: 340042 - RNA, 22 nt, Human
aauauaugugguauugaccagc

SEQ ID NO: 340043 - RNA, 22 nt, Human
uguaugaaucucauuuguuuaa

SEQ ID NO: 340044 - RNA, 22 nt, Human
auacuguuuugugacuuaucuu

SEQ ID NO: 340045 - RNA, 22 nt, Human
gcaggcagagguggaggagaca

SEQ ID NO: 340046 - RNA, 22 nt, Human
acccaggaaaacauggugcaga

SEQ ID NO: 340047 - RNA, 22 nt, Human
uagcuuuccuuguugccugugc

SEQ ID NO: 340048 - RNA, 22 nt, Human
uucucagagcucacuguaguaa

SEQ ID NO: 340049 - RNA, 22 nt, Human
aucuuucuauuucuaaaaacua

SEQ ID NO: 340050 - RNA, 22 nt, Human
cucacugucuguacuagcugau

SEQ ID NO: 340051 - RNA, 22 nt, Human
ucuucacauggaacaugaagcu

SEQ ID NO: 340052 - RNA, 22 nt, Human
auaaucuuucuuuuccagauag

SEQ ID NO: 340053 - RNA, 22 nt, Human
auacaacuuuaucuguaaugag

SEQ ID NO: 340054 - RNA, 22 nt, Human
aagucuguuugagugucacacu

SEQ ID NO: 340055 - RNA, 22 nt, Human
aggcacagagaaugcccuccau

SEQ ID NO: 340056 - RNA, 22 nt, Human
aauauuguuucaagaucacaga

SEQ ID NO: 340057 - RNA, 22 nt, Human
cagcagagaaauuaaacuucug

SEQ ID NO: 340058 - RNA, 22 nt, Human
ucugucuucaucagcaugugau

SEQ ID NO: 340059 - RNA, 22 nt, Human
ggaggcgauccugggaaacacc

SEQ ID NO: 340060 - RNA, 22 nt, Human
gaggagagagggacugucugca

SEQ ID NO: 340061 - RNA, 22 nt, Human
gggcagcugccaagugcaucgc

SEQ ID NO: 340062 - RNA, 22 nt, Human
ugaaaggugacauuucuuggau

SEQ ID NO: 340063 - RNA, 22 nt, Human
gucaggauuuuaaaaucccagu

SEQ ID NO: 340064 - RNA, 22 nt, Human
gucauauacacugcauguaauc

SEQ ID NO: 340065 - RNA, 21 nt, Human
auacauucuauuaagcauuua

SEQ ID NO: 340066 - RNA, 22 nt, Human
uacccaggggcugagcagaggu

SEQ ID NO: 340067 - RNA, 22 nt, Human
uaucaauacauguuaucagugu

SEQ ID NO: 340068 - RNA, 22 nt, Human
aggguagggcccggagacagac

SEQ ID NO: 340069 - RNA, 19 nt, Human
uccaggaggcugccauuga

SEQ ID NO: 340070 - RNA, 22 nt, Human
acucaggaaaugagaggcucuc

SEQ ID NO: 340071 - RNA, 22 nt, Human
acagucuugagcaucagccaga

SEQ ID NO: 340072 - RNA, 22 nt, Human
ugaaagguagcuggccucauag

SEQ ID NO: 340073 - RNA, 22 nt, Human
ccucaggauccgcaggugcagu

SEQ ID NO: 340074 - RNA, 22 nt, Human
auaaaguuuaaaagucaauagu

SEQ ID NO: 340075 - RNA, 20 nt, Human
ucagugauuuugaagaggaa

SEQ ID NO: 340076 - RNA, 22 nt, Human
cuccaugaauuugagcuuugug

SEQ ID NO: 340077 - RNA, 22 nt, Human
ucuuugaaagcuguucuagagu

SEQ ID NO: 340078 - RNA, 19 nt, Human
agcuuccauauucucuagu

SEQ ID NO: 340079 - RNA, 22 nt, Human
aggguaggaacugaguggaagg

SEQ ID NO: 340080 - RNA, 22 nt, Human
aucugucuugccuugcauauuu

SEQ ID NO: 340081 - RNA, 22 nt, Human
aagugagugguaaggagcaugg

SEQ ID NO: 340082 - RNA, 22 nt, Human
aguccuuugggaaaaaugacua

SEQ ID NO: 340083 - RNA, 23 nt, Human
uggaaagcggaccuggggcagag

SEQ ID NO: 340084 - RNA, 22 nt, Human
auguuucagauacagaucaaau

SEQ ID NO: 340085 - RNA, 22 nt, Human
guaguuuucugaaaauuacuuu

SEQ ID NO: 340086 - RNA, 20 nt, Human
uaguauuugcauaaggauag

SEQ ID NO: 340087 - RNA, 22 nt, Human
cagugucuccagaugcuccaau

SEQ ID NO: 340088 - RNA, 20 nt, Human
cugcugugguccuuuauuuu

SEQ ID NO: 340089 - RNA, 22 nt, Human
cccaggagauggugcguggucu

SEQ ID NO: 340090 - RNA, 20 nt, Human
gcaaaauaggcucuguuggu

SEQ ID NO: 340091 - RNA, 22 nt, Human
uaaauuguuuucuagaaguugu

SEQ ID NO: 340092 - RNA, 22 nt, Human
uuuaacagguaaaguaaaugug

SEQ ID NO: 340093 - RNA, 22 nt, Human
uuguuauaaagacuaaauaugu

SEQ ID NO: 340094 - RNA, 22 nt, Human
aggcagcuucugauuagcagcg

SEQ ID NO: 340095 - RNA, 22 nt, Human
gaaauauuguacuggagauguu

SEQ ID NO: 340096 - RNA, 23 nt, Human
ccacagagcugccaauuccugug

SEQ ID NO: 340097 - RNA, 22 nt, Human
cucaggaugcaauuccaucaag

SEQ ID NO: 340098 - RNA, 22 nt, Human
gaauacaugauacaugaacugc

SEQ ID NO: 340099 - RNA, 22 nt, Human
aggcaagcauugggaacagggc

SEQ ID NO: 340100 - RNA, 22 nt, Human
agaggcagcagucauacuacag

SEQ ID NO: 340101 - RNA, 22 nt, Human
acacauauucauauguacuuac

SEQ ID NO: 340102 - RNA, 23 nt, Human
aaauaugucugagggcaaagaau

SEQ ID NO: 340103 - RNA, 22 nt, Human
acuggcagagacccugauggcc

SEQ ID NO: 340104 - RNA, 22 nt, Human
agucauaugacccuucacaaac

SEQ ID NO: 340105 - RNA, 22 nt, Human
gaaacugugaggaucuuaacuu

SEQ ID NO: 340106 - RNA, 22 nt, Human
caggcagcguccugcuuccugu

SEQ ID NO: 340107 - RNA, 22 nt, Human
aggcagcaugggccccagcucc

SEQ ID NO: 340108 - RNA, 22 nt, Human
caggaugguggcaugaucagaa

SEQ ID NO: 340109 - RNA, 22 nt, Human
aggcaggcugcuauggaguaga

SEQ ID NO: 340110 - RNA, 20 nt, Human
cccagguaggugccaugagu

SEQ ID NO: 340111 - RNA, 23 nt, Human
aggcccaacucugugagggcugc

SEQ ID NO: 340112 - RNA, 22 nt, Human
gacagcuggcaguggaaaggug

SEQ ID NO: 340113 - RNA, 22 nt, Human
cccaggagccaucugucuuggc

SEQ ID NO: 340114 - RNA, 22 nt, Human
ucaucuugcugccauugcuuua

SEQ ID NO: 340115 - RNA, 22 nt, Human
acauuguuugagaauacagaug

SEQ ID NO: 340116 - RNA, 22 nt, Human
ugaggggagcccgcccuggacg

SEQ ID NO: 340117 - RNA, 22 nt, Human
agaauccucuucaguaaauucu

SEQ ID NO: 340118 - RNA, 19 nt, Human
aaggcagcaguagcaucca

SEQ ID NO: 340119 - RNA, 22 nt, Human
aaauuagucgguuuaggaauuu

SEQ ID NO: 340120 - RNA, 22 nt, Human
aggcagacugugcgggaagagu

SEQ ID NO: 340121 - RNA, 22 nt, Human
uccaggaggccucauuuccugu

SEQ ID NO: 340122 - RNA, 22 nt, Human
uuuuucagccaugaauuacacu

SEQ ID NO: 340123 - RNA, 22 nt, Human
uugaacuguaagcaugucugcc

SEQ ID NO: 340124 - RNA, 22 nt, Human
ugccugugguuccaguuuuuuc

SEQ ID NO: 340125 - RNA, 22 nt, Human
aacagcauaaguauuuauuuca

SEQ ID NO: 340126 - RNA, 22 nt, Human
ucugcaggaggcuggcugcagg

SEQ ID NO: 340127 - RNA, 22 nt, Human
ccagagagaaauggauuugagu

SEQ ID NO: 340128 - RNA, 20 nt, Human
uuucugugcccaggucuguu

SEQ ID NO: 340129 - RNA, 22 nt, Human
acuugcugguggcauuuacagu

SEQ ID NO: 340130 - RNA, 22 nt, Human
uuucaaacuuuacucuugaauc

SEQ ID NO: 340131 - RNA, 22 nt, Human
aaauuauaggugccaccuugga

SEQ ID NO: 340132 - RNA, 22 nt, Human
gggagagguuacccgagcaacu

SEQ ID NO: 340133 - RNA, 22 nt, Human
cauaauuucuguaucagcacca

SEQ ID NO: 340134 - RNA, 22 nt, Human
gagggcaguagccucguacccu

SEQ ID NO: 340135 - RNA, 22 nt, Human
aagcagcuggaagaguaagaug

SEQ ID NO: 340136 - RNA, 23 nt, Human
uagggcagcugggagggacaugc

SEQ ID NO: 340137 - RNA, 19 nt, Human
ugaguucugugguucucaa

SEQ ID NO: 340138 - RNA, 22 nt, Human
acaauauuguacccagaaguuu

SEQ ID NO: 340139 - RNA, 22 nt, Human
agauggagaccuuggaugaacu

SEQ ID NO: 340140 - RNA, 22 nt, Human
uacccaggagaaacagcagggc

SEQ ID NO: 340141 - RNA, 22 nt, Human
auccaugauuaguaggauaaag

SEQ ID NO: 340142 - RNA, 22 nt, Human
cucacugugaccucagcagaca

SEQ ID NO: 340143 - RNA, 22 nt, Human
caugucuguguacacaugcaca

SEQ ID NO: 340144 - RNA, 22 nt, Human
accaggagacaugaccaaugag

SEQ ID NO: 340145 - RNA, 22 nt, Human
uucaugugaucacagauuguaa

SEQ ID NO: 340146 - RNA, 22 nt, Human
ugcauggaggaagaugaaugca

SEQ ID NO: 340147 - RNA, 22 nt, Human
cuucuucaauagcaagcgcaua

SEQ ID NO: 340148 - RNA, 22 nt, Human
aacaguaaagacagaauuuauc

SEQ ID NO: 340149 - RNA, 22 nt, Human
uuacuuugcuuucucauuacag

SEQ ID NO: 340150 - RNA, 22 nt, Human
aaggccagaguacuagaggcug

SEQ ID NO: 340151 - RNA, 22 nt, Human
guuuuauaauugcuucauaaga

SEQ ID NO: 340152 - RNA, 22 nt, Human
uagcuaucuguguccagaucca

SEQ ID NO: 340153 - RNA, 22 nt, Human
ugacaguuaagguauacauuca

SEQ ID NO: 340154 - RNA, 22 nt, Human
ucucaggacuuugggaagcuca

SEQ ID NO: 340155 - RNA, 22 nt, Human
aauugcuaaagauuauguuuuc

SEQ ID NO: 340156 - RNA, 22 nt, Human
uauuuuaaagacugccagccua

SEQ ID NO: 340157 - RNA, 22 nt, Human
cccaggagguggagguugcagu

SEQ ID NO: 340158 - RNA, 22 nt, Human
cauauguauuucucauaauuag

SEQ ID NO: 340159 - RNA, 22 nt, Human
guuugcauauuugcacaggaau

SEQ ID NO: 340160 - RNA, 22 nt, Human
uuuuaacuuaaaauacauagau

SEQ ID NO: 340161 - RNA, 22 nt, Human
cucacuguccaacaggcuuuac

SEQ ID NO: 340162 - RNA, 22 nt, Human
uuuaacagaugcuaugucuacc

SEQ ID NO: 340163 - RNA, 22 nt, Human
uuuagaaguucacacauuuaaa

SEQ ID NO: 340164 - RNA, 22 nt, Human
uuugaaaggaaguuaauacuuu

SEQ ID NO: 340165 - RNA, 22 nt, Human
auuaaauuggacgcugggggaa

SEQ ID NO: 340166 - RNA, 22 nt, Human
agugcuuuaccuagauaauguu

SEQ ID NO: 340167 - RNA, 22 nt, Human
cuucagaagaaaagcagugugu

SEQ ID NO: 340168 - RNA, 22 nt, Human
ccuggagauuucuucaagcuuu

SEQ ID NO: 340169 - RNA, 22 nt, Human
gcagagcuccccaagacaccaa

SEQ ID NO: 340170 - RNA, 22 nt, Human
agggagcuuccgaacuacagcu

SEQ ID NO: 340171 - RNA, 22 nt, Human
agcuagaaguacagccauauga

SEQ ID NO: 340172 - RNA, 22 nt, Human
acugugugacuguuauuacugu

SEQ ID NO: 340173 - RNA, 22 nt, Human
agaggccacuuugccugugaug

SEQ ID NO: 340174 - RNA, 22 nt, Human
uguaggccuauguccagcaauu

SEQ ID NO: 340175 - RNA, 22 nt, Human
ucagaaagaacacaggcaguag

SEQ ID NO: 340176 - RNA, 19 nt, Human
cuucuucuuggcagccaag

SEQ ID NO: 340177 - RNA, 18 nt, Human
aggcaggugcuggaaguc

SEQ ID NO: 340178 - RNA, 22 nt, Human
uugauacauuuuuaggauaaac

SEQ ID NO: 340179 - RNA, 22 nt, Human
uggcagcugaggggaggcuuug

SEQ ID NO: 340180 - RNA, 22 nt, Human
uguuuuaaucucccauugcucu

SEQ ID NO: 340181 - RNA, 22 nt, Human
cccaggagguggagguugcggu

SEQ ID NO: 340182 - RNA, 22 nt, Human
cucaggauuaaggaaucuaaau

SEQ ID NO: 340183 - RNA, 22 nt, Human
uuuaaauuuagaagaaacacug

SEQ ID NO: 340184 - RNA, 22 nt, Human
agaggagguccuuuucugaugu

SEQ ID NO: 340185 - RNA, 20 nt, Human
uccaggagaacugggagccg

SEQ ID NO: 340186 - RNA, 22 nt, Human
ucucaggaauagaguggcagca

SEQ ID NO: 340187 - RNA, 22 nt, Human
uuaaauuccagccucauaauag

SEQ ID NO: 340188 - RNA, 22 nt, Human
uugugguuaaccgcacauuuuu

SEQ ID NO: 340189 - RNA, 22 nt, Human
uuacaagauaaccugaugcugu

SEQ ID NO: 340190 - RNA, 22 nt, Human
gcccaggacucagggugucgcg

SEQ ID NO: 340191 - RNA, 22 nt, Human
uauguguuugacacccugcaag

SEQ ID NO: 340192 - RNA, 22 nt, Human
aaauuauuacaagcuaguuggc

SEQ ID NO: 340193 - RNA, 22 nt, Human
ugaauaguccuuggaauaacug

SEQ ID NO: 340194 - RNA, 22 nt, Human
auuucccaugugaaucaauugg

SEQ ID NO: 340195 - RNA, 22 nt, Human
ggaggggagguccagcugaucu

SEQ ID NO: 340196 - RNA, 22 nt, Human
ugaaacuuauaagaauaugaau

SEQ ID NO: 340197 - RNA, 22 nt, Human
acaagguauccacauuaaaugu

SEQ ID NO: 340198 - RNA, 22 nt, Human
ggacagcucugccaggagcuca

SEQ ID NO: 340199 - RNA, 22 nt, Human
ccuugcugcgugcuagcacaga

SEQ ID NO: 340200 - RNA, 22 nt, Human
gaccauuuuuacagagcauuca

SEQ ID NO: 340201 - RNA, 22 nt, Human
aggcagcagucaugaggaaaga

SEQ ID NO: 340202 - RNA, 21 nt, Human
gauugaaaccauggcagugag

SEQ ID NO: 340203 - RNA, 22 nt, Human
agcaccaugaccuugccauuga

SEQ ID NO: 340204 - RNA, 22 nt, Human
uaugauuuguagacauuugauu

SEQ ID NO: 340205 - RNA, 22 nt, Human
uaauaucuggcauucaaacaug

SEQ ID NO: 340206 - RNA, 22 nt, Human
aaagccauugaacuguacuuua

SEQ ID NO: 340207 - RNA, 22 nt, Human
gcucacugcaaccucugcuucc

SEQ ID NO: 340208 - RNA, 22 nt, Human
cagcagagaccaagugauuuga

SEQ ID NO: 340209 - RNA, 22 nt, Human
ugaaagguuaaaaguaguauug

SEQ ID NO: 340210 - RNA, 22 nt, Human
ugucucugaggugagggucagc

SEQ ID NO: 340211 - RNA, 17 nt, Human
caaggccagcaucuuca

SEQ ID NO: 340212 - RNA, 22 nt, Human
gagguggugguggaggcauagc

SEQ ID NO: 340213 - RNA, 22 nt, Human
ccagggaguuuccaaucugaga

SEQ ID NO: 340214 - RNA, 22 nt, Human
cccaggaaaucaggcuuucuag

SEQ ID NO: 340215 - RNA, 20 nt, Human
aguguacagacacuagaaau

SEQ ID NO: 340216 - RNA, 22 nt, Human
cccaggaaagagacugcugggu

SEQ ID NO: 340217 - RNA, 22 nt, Human
ucccaggacaugggcucugcuc

SEQ ID NO: 340218 - RNA, 22 nt, Human
uagggcaggugaagaaaagcua

SEQ ID NO: 340219 - RNA, 22 nt, Human
auguagaaauuaggaugauagu

SEQ ID NO: 340220 - RNA, 22 nt, Human
ggcaugcugcguacagaugaac

SEQ ID NO: 340221 - RNA, 22 nt, Human
ggagguggcagagggacauucu

SEQ ID NO: 340222 - RNA, 22 nt, Human
cucaggaugcaggucacaggac

SEQ ID NO: 340223 - RNA, 22 nt, Human
uuaacaugucuugacuucaucu

SEQ ID NO: 340224 - RNA, 20 nt, Human
ugaggcaggagaauggcaug

SEQ ID NO: 340225 - RNA, 22 nt, Human
uuucaaacauagaucugaauau

SEQ ID NO: 340226 - RNA, 22 nt, Human
cgaggcagggaagcugcaaaag

SEQ ID NO: 340227 - RNA, 22 nt, Human
ugaaaugacagucuuaagcucu

SEQ ID NO: 340228 - RNA, 22 nt, Human
caggauggucucgaucuccuga

SEQ ID NO: 340229 - RNA, 22 nt, Human
caucaaauaggaauauuuggca

SEQ ID NO: 340230 - RNA, 19 nt, Human
cucucacucgccacauccu

SEQ ID NO: 340231 - RNA, 22 nt, Human
gagagaggccuccauguacuga

SEQ ID NO: 340232 - RNA, 22 nt, Human
uauuuguauguguguacauaua

SEQ ID NO: 340233 - RNA, 20 nt, Human
uccaggagguuaguguggcu

SEQ ID NO: 340234 - RNA, 22 nt, Human
gugcagcugcaggagucagguc

SEQ ID NO: 340235 - RNA, 22 nt, Human
cccaggaaccuaccagcucgag

SEQ ID NO: 340236 - RNA, 22 nt, Human
caaauaguaugagcaaugauuc

SEQ ID NO: 340237 - RNA, 22 nt, Human
ucccaggaaugucugaaaguga

SEQ ID NO: 340238 - RNA, 22 nt, Human
auucauuugcuauuguguaugg

SEQ ID NO: 340239 - RNA, 22 nt, Human
aaauauguauggaguucaugaa

SEQ ID NO: 340240 - RNA, 21 nt, Human
ccauaccuaccucaccugguu

SEQ ID NO: 340241 - RNA, 22 nt, Human
aaaguaguuagucaugugaaaa

SEQ ID NO: 340242 - RNA, 23 nt, Human
accaggagccaagaucucccugg

SEQ ID NO: 340243 - RNA, 22 nt, Human
ggagaggagauuguggcauuuu

SEQ ID NO: 340244 - RNA, 22 nt, Human
uggcagcuacagacagagguga

SEQ ID NO: 340245 - RNA, 22 nt, Human
cauaauuuuuuuaagucagaac

SEQ ID NO: 340246 - RNA, 22 nt, Human
uagucaaaccucagaauacccc

SEQ ID NO: 340247 - RNA, 22 nt, Human
agagugcaaccgaaacaagcag

SEQ ID NO: 340248 - RNA, 18 nt, Human
ugaauagggguuugcaga

SEQ ID NO: 340249 - RNA, 22 nt, Human
gaggcagcuggguccggucggg

SEQ ID NO: 340250 - RNA, 22 nt, Human
gcugauguuuaguugauguuac

SEQ ID NO: 340251 - RNA, 22 nt, Human
aggcagcucuguggccucccag

SEQ ID NO: 340252 - RNA, 22 nt, Human
gauauuuugagaaauccuauga

SEQ ID NO: 340253 - RNA, 17 nt, Human
uagcuguguuucagcua

SEQ ID NO: 340254 - RNA, 22 nt, Human
ucacagacauggugagguaaca

SEQ ID NO: 340255 - RNA, 22 nt, Human
cagaggcauacucccagucuug

SEQ ID NO: 340256 - RNA, 22 nt, Human
uuauccaagcagaagcugcaca

SEQ ID NO: 340257 - RNA, 22 nt, Human
gucaggauuauuuuauuaaaag

SEQ ID NO: 340258 - RNA, 22 nt, Human
ugaaggccucugguacaugcca

SEQ ID NO: 340259 - RNA, 22 nt, Human
uucaggaugcagagguuguagu

SEQ ID NO: 340260 - RNA, 22 nt, Human
cugcuguguuagcagguuuagu

SEQ ID NO: 340261 - RNA, 22 nt, Human
agucucuuuguggacucugccu

SEQ ID NO: 340262 - RNA, 22 nt, Human
ugaguucucacccauucuucuu

SEQ ID NO: 340263 - RNA, 22 nt, Human
aauaucuucuaaggauagaacu

SEQ ID NO: 340264 - RNA, 22 nt, Human
ugauuuuuagcuauucugaaga

SEQ ID NO: 340265 - RNA, 22 nt, Human
ccaggagagcucuaaauggcug

SEQ ID NO: 340266 - RNA, 22 nt, Human
aucuagcaguguuauaauugga

SEQ ID NO: 340267 - RNA, 22 nt, Human
ucaauucaacacaugcacauug

SEQ ID NO: 340268 - RNA, 22 nt, Human
uuugcagucuggccugcuuugg

SEQ ID NO: 340269 - RNA, 22 nt, Human
gugauaaaauucaaauagcucu

SEQ ID NO: 340270 - RNA, 22 nt, Human
aauguaugugcaucauuuacau

SEQ ID NO: 340271 - RNA, 22 nt, Human
ugcaggaacugggagggauagu

SEQ ID NO: 340272 - RNA, 22 nt, Human
gaggcugcuuugaugacaggag

SEQ ID NO: 340273 - RNA, 22 nt, Human
aggcagagcuggguuuugaaau

SEQ ID NO: 340274 - RNA, 22 nt, Human
ccaggagauuuuuccauagcac

SEQ ID NO: 340275 - RNA, 22 nt, Human
gccaggaggucagccccucaac

SEQ ID NO: 340276 - RNA, 22 nt, Human
aaaguuguucaguaagaaacuc

SEQ ID NO: 340277 - RNA, 22 nt, Human
aggaagcuggugugaggaugaa

SEQ ID NO: 340278 - RNA, 22 nt, Human
auacaacagaaaaugauuauuc

SEQ ID NO: 340279 - RNA, 22 nt, Human
uuuagcaaaaaagcucugcgua

SEQ ID NO: 340280 - RNA, 22 nt, Human
acaaacagaguugaaaaauagg

SEQ ID NO: 340281 - RNA, 22 nt, Human
gcuuccaaugcuucuaucacau

SEQ ID NO: 340282 - RNA, 22 nt, Human
cuggcucgcauuauauuuuggg

SEQ ID NO: 340283 - RNA, 22 nt, Human
uaacaaaguauuguuuguguau

SEQ ID NO: 340284 - RNA, 22 nt, Human
aguaacagguguacagacuauc

SEQ ID NO: 340285 - RNA, 22 nt, Human
uaggugucuggacaacuuugua

SEQ ID NO: 340286 - RNA, 22 nt, Human
aaaugccucauuuucucucacu

SEQ ID NO: 340287 - RNA, 23 nt, Human
agcaacagugggugaguguugcu

SEQ ID NO: 340288 - RNA, 22 nt, Human
ccagguaggagagucaacaugu

SEQ ID NO: 340289 - RNA, 22 nt, Human
uuuauacuccacucugcaagcg

SEQ ID NO: 340290 - RNA, 22 nt, Human
aaucugagggaacuugaacucc

SEQ ID NO: 340291 - RNA, 22 nt, Human
aacccagaaacgcaggcgguca

SEQ ID NO: 340292 - RNA, 22 nt, Human
uagaaagagcuuugcuuccuuu

SEQ ID NO: 340293 - RNA, 22 nt, Human
uuuaggcucaaaagaguuggug

SEQ ID NO: 340294 - RNA, 22 nt, Human
cauccauagauugagagauggu

SEQ ID NO: 340295 - RNA, 22 nt, Human
aacuuucagaauccuaugcauu

SEQ ID NO: 340296 - RNA, 22 nt, Human
uguggugccgagagucuggacg

SEQ ID NO: 340297 - RNA, 22 nt, Human
uucacagcuaagagcuaaguaa

SEQ ID NO: 340298 - RNA, 22 nt, Human
agagcaauuagcuuagguaaaa

SEQ ID NO: 340299 - RNA, 22 nt, Human
ugugcuugucguggagccaggc

SEQ ID NO: 340300 - RNA, 22 nt, Human
ggaacaguugcgucaugggccu

SEQ ID NO: 340301 - RNA, 18 nt, Human
uauaaacacacuuagguu

SEQ ID NO: 340302 - RNA, 21 nt, Human
uaaacauaaccuuguauggcu

SEQ ID NO: 340303 - RNA, 22 nt, Human
ucugaaauuuuaguuauagaaa

SEQ ID NO: 340304 - RNA, 22 nt, Human
guuugcaaauuguguuaaagcu

SEQ ID NO: 340305 - RNA, 22 nt, Human
guugcauuaaucugcucaggcu

SEQ ID NO: 340306 - RNA, 22 nt, Human
aagauuuaccacuuuauucaag

SEQ ID NO: 340307 - RNA, 22 nt, Human
agcauuagguguguuucagagg

SEQ ID NO: 340308 - RNA, 22 nt, Human
ucaaagaucagaugguuguagg

SEQ ID NO: 340309 - RNA, 22 nt, Human
ucucugguuaugucauuaagca

SEQ ID NO: 340310 - RNA, 22 nt, Human
uaucacauacuucucauccagg

SEQ ID NO: 340311 - RNA, 22 nt, Human
cuucuuaaaguugucacagcug

SEQ ID NO: 340312 - RNA, 22 nt, Human
uggaucuugaugcuccaagagu

SEQ ID NO: 340313 - RNA, 22 nt, Human
uaagaaacauuuuuaugacagu

SEQ ID NO: 340314 - RNA, 22 nt, Human
aaguguguauuuuucuucagug

SEQ ID NO: 340315 - RNA, 19 nt, Human
agcagccaucgaccaugga

SEQ ID NO: 340316 - RNA, 20 nt, Human
cagcucugggcaggucgagg

SEQ ID NO: 340317 - RNA, 23 nt, Human
aguguucagcauguaguaaauac

SEQ ID NO: 340318 - RNA, 22 nt, Human
cugggguccuugccauguguca

SEQ ID NO: 340319 - RNA, 19 nt, Human
gagcagcuuccuaucuggu

SEQ ID NO: 340320 - RNA, 22 nt, Human
uugaauaguuuuggauagcaua

SEQ ID NO: 340321 - RNA, 22 nt, Human
cuggcuuuuuucccauuaugca

SEQ ID NO: 340322 - RNA, 22 nt, Human
uugagacacaaggcacaguaag

SEQ ID NO: 340323 - RNA, 22 nt, Human
caauguacaaaauaauuacaca

SEQ ID NO: 340324 - RNA, 23 nt, Human
aaugaguugggcagcauacaggc

SEQ ID NO: 340325 - RNA, 19 nt, Human
caggauuguuuaaagcuuu

SEQ ID NO: 340326 - RNA, 23 nt, Human
gacagguaaggguugggagaauc

SEQ ID NO: 340327 - RNA, 23 nt, Human
aguacauuugacccaaauaagcu

SEQ ID NO: 340328 - RNA, 22 nt, Human
acaguguuucacuuaaccguuu

SEQ ID NO: 340329 - RNA, 22 nt, Human
ugaggauggaaugcugugcaag

SEQ ID NO: 340330 - RNA, 22 nt, Human
uucaguaagcacuucuagagcu

SEQ ID NO: 340331 - RNA, 22 nt, Human
acucuguaauucugaagcaccu

SEQ ID NO: 340332 - RNA, 22 nt, Human
aauguuaaguuuagauuauaac

SEQ ID NO: 340333 - RNA, 22 nt, Human
cauugcaacuucaaacuccugg

SEQ ID NO: 340334 - RNA, 22 nt, Human
agaauaaccaguguuucacagu

SEQ ID NO: 340335 - RNA, 22 nt, Human
cagcaguacuucucagagguau

SEQ ID NO: 340336 - RNA, 22 nt, Human
cauuguuggcagagggacagag

SEQ ID NO: 340337 - RNA, 22 nt, Human
ugcauguuucuguauguuaaug

SEQ ID NO: 340338 - RNA, 22 nt, Human
augcuuucucuuaguucauuga

SEQ ID NO: 340339 - RNA, 22 nt, Human
uuagcaaacaucuucgugugag

SEQ ID NO: 340340 - RNA, 22 nt, Human
ucaccuguuggauguauacugu

SEQ ID NO: 340341 - RNA, 22 nt, Human
uuucauuauaaaaaguuggcuu

SEQ ID NO: 340342 - RNA, 22 nt, Human
aucagagcuaguacuugcaggu

SEQ ID NO: 340343 - RNA, 22 nt, Human
uccagcagguccgagacaaguu

SEQ ID NO: 340344 - RNA, 22 nt, Human
cacccucaagcaguggcacgug

SEQ ID NO: 340345 - RNA, 22 nt, Human
aggcuuaacuacaauuuuugcc

SEQ ID NO: 340346 - RNA, 22 nt, Human
cagugccagcugcuuggccuac

SEQ ID NO: 340347 - RNA, 17 nt, Human
ucugagaaugcuggagg

SEQ ID NO: 340348 - RNA, 22 nt, Human
aaugaguuuguucuauuauuug

SEQ ID NO: 340349 - RNA, 17 nt, Human
ucugagaacuugaagca

SEQ ID NO: 340350 - RNA, 20 nt, Human
uugcaaagugaauagcaauu

SEQ ID NO: 340351 - RNA, 22 nt, Human
aagugcaggucucagcuacucu

SEQ ID NO: 340352 - RNA, 22 nt, Human
ugacucauauuucauggauacg

SEQ ID NO: 340353 - RNA, 22 nt, Human
caagcagauauuuuagucaaga

SEQ ID NO: 340354 - RNA, 22 nt, Human
uucaacaacuugguucaaaugg

SEQ ID NO: 340355 - RNA, 22 nt, Human
gucaaaacaaaguuaagaauuc

SEQ ID NO: 340356 - RNA, 22 nt, Human
agucauguguucaucuuucauu

SEQ ID NO: 340357 - RNA, 22 nt, Human
augcaguuagguaauagucuca

SEQ ID NO: 340358 - RNA, 22 nt, Human
guggcauuugggagaugcgugg

SEQ ID NO: 340359 - RNA, 22 nt, Human
cagcagcucaggcuccuuccca

SEQ ID NO: 340360 - RNA, 22 nt, Human
cagacucuugagcugauuguau

SEQ ID NO: 340361 - RNA, 22 nt, Human
cauagacauugauagguuauau

SEQ ID NO: 340362 - RNA, 22 nt, Human
gagcagcagcugggccagguuc

SEQ ID NO: 340363 - RNA, 22 nt, Human
guuaacaacacugugagugcug

SEQ ID NO: 340364 - RNA, 22 nt, Human
cucagcaacccacacacggucu

SEQ ID NO: 340365 - RNA, 22 nt, Human
ugcaauuagcguauuaguuuau

SEQ ID NO: 340366 - RNA, 22 nt, Human
uuagaaaaaggcuguggucuua

SEQ ID NO: 340367 - RNA, 22 nt, Human
uugcuauuuugagagucauagu

SEQ ID NO: 340368 - RNA, 22 nt, Human
cacugguugccucuuucuguuc

SEQ ID NO: 340369 - RNA, 22 nt, Human
guggccaaggcagagaaagagc

SEQ ID NO: 340370 - RNA, 22 nt, Human
uugaacaguuuugucagguuca

SEQ ID NO: 340371 - RNA, 22 nt, Human
gagcaaggaugggucuauagua

SEQ ID NO: 340372 - RNA, 22 nt, Human
auuccaaagccugaauaaugga

SEQ ID NO: 340373 - RNA, 22 nt, Human
ucuuggcaguucuugugcuuuu

SEQ ID NO: 340374 - RNA, 22 nt, Human
cucucugggcccaguuggcacc

SEQ ID NO: 340375 - RNA, 22 nt, Human
agaagagccacuguugacggca

SEQ ID NO: 340376 - RNA, 22 nt, Human
auguuuguguuucccauucagg

SEQ ID NO: 340377 - RNA, 23 nt, Human
uguguucagucaaggaucagagu

SEQ ID NO: 340378 - RNA, 22 nt, Human
uagaaguuaaaggaauacagaa

SEQ ID NO: 340379 - RNA, 21 nt, Human
agaugcagugacccacugggg

SEQ ID NO: 340380 - RNA, 22 nt, Human
auugagaaaauucgagcaaguu

SEQ ID NO: 340381 - RNA, 22 nt, Human
agcacauucccaccuguacuuc

SEQ ID NO: 340382 - RNA, 17 nt, Human
agcagcuggguugaucu

SEQ ID NO: 340383 - RNA, 22 nt, Human
aaggagucugggccauucagag

SEQ ID NO: 340384 - RNA, 22 nt, Human
uuuuucaagacaaccugcaugu

SEQ ID NO: 340385 - RNA, 22 nt, Human
augcacaagguagauuauuauu

SEQ ID NO: 340386 - RNA, 22 nt, Human
gcagcaaucuucacagugucau

SEQ ID NO: 340387 - RNA, 22 nt, Human
aaugaaacuaguagaaucuuug

SEQ ID NO: 340388 - RNA, 22 nt, Human
ucuaguuagugguugauacugu

SEQ ID NO: 340389 - RNA, 22 nt, Human
guugcaaaugggaagaugguua

SEQ ID NO: 340390 - RNA, 22 nt, Human
auuuacucgugcuucauugaau

SEQ ID NO: 340391 - RNA, 22 nt, Human
uucaaacacugcuuugagaggg

SEQ ID NO: 340392 - RNA, 23 nt, Human
acaaguguuuccaauauggcugg

SEQ ID NO: 340393 - RNA, 22 nt, Human
aaaacauuuuacugccaucuca

SEQ ID NO: 340394 - RNA, 22 nt, Human
acaaucagcacugaguuuaucu

SEQ ID NO: 340395 - RNA, 22 nt, Human
caagccaggaaggauccagcac

SEQ ID NO: 340396 - RNA, 22 nt, Human
uuguacaaauaggaaccucuga

SEQ ID NO: 340397 - RNA, 22 nt, Human
cagugccaaggauggccuggga

SEQ ID NO: 340398 - RNA, 22 nt, Human
uuguguacucaccagcacauac

SEQ ID NO: 340399 - RNA, 22 nt, Human
cuggcuuucauggcgcaguuga

SEQ ID NO: 340400 - RNA, 20 nt, Human
cucuuuucacucucaguggu

SEQ ID NO: 340401 - RNA, 22 nt, Human
gauuuucauuauagcuaguuuc

SEQ ID NO: 340402 - RNA, 22 nt, Human
ggcaauuacguauuagucaugu

SEQ ID NO: 340403 - RNA, 22 nt, Human
uuguaacaguagcugucagcuc

SEQ ID NO: 340404 - RNA, 22 nt, Human
aucagagcugcauuuuagagcc

SEQ ID NO: 340405 - RNA, 21 nt, Human
ucaggaagagccaguucaugc

SEQ ID NO: 340406 - RNA, 22 nt, Human
gcaguuaccuauuuuguagaaa

SEQ ID NO: 340407 - RNA, 21 nt, Human
acagaagcggcgaguggcccc

SEQ ID NO: 340408 - RNA, 22 nt, Human
aacaguaugugagauuuacaca

SEQ ID NO: 340409 - RNA, 22 nt, Human
agcaauguuggccuauauaccu

SEQ ID NO: 340410 - RNA, 22 nt, Human
ugagcaccaggcaccacagcuc

SEQ ID NO: 340411 - RNA, 23 nt, Human
auaugucaugcaccagcacuuua

SEQ ID NO: 340412 - RNA, 22 nt, Human
aguaacuuaagcaauuguguau

SEQ ID NO: 340413 - RNA, 22 nt, Human
aagcaauucacaguucacuuaa

SEQ ID NO: 340414 - RNA, 22 nt, Human
cauuucaaacaguuacagcugc

SEQ ID NO: 340415 - RNA, 22 nt, Human
ugucacagugcacagcuaagaa

SEQ ID NO: 340416 - RNA, 22 nt, Human
cuucauuaaugucuauaaguuu

SEQ ID NO: 340417 - RNA, 22 nt, Human
uuucaugauuaacuuagugaau

SEQ ID NO: 340418 - RNA, 22 nt, Human
agcaaggcagcuuucacugcuu

SEQ ID NO: 340419 - RNA, 22 nt, Human
uucacauaaucugcagcaagcg

SEQ ID NO: 340420 - RNA, 22 nt, Human
cuaagguuggcaguggaauugg

SEQ ID NO: 340421 - RNA, 22 nt, Human
gagccugagcaaugugauguuu

SEQ ID NO: 340422 - RNA, 23 nt, Human
ugcaaaauuugcagaguucgaug

SEQ ID NO: 340423 - RNA, 22 nt, Human
auaguagcgagaucucagcuca

SEQ ID NO: 340424 - RNA, 22 nt, Human
ggugcaauaaaguuguagaacc

SEQ ID NO: 340425 - RNA, 22 nt, Human
aucuucaaggaaaaaauacagu

SEQ ID NO: 340426 - RNA, 22 nt, Human
guuuugaauacuacuagaacuu

SEQ ID NO: 340427 - RNA, 19 nt, Human
cauaauacaguggaucuga

SEQ ID NO: 340428 - RNA, 22 nt, Human
aguacaagugaugugguaaaaa

SEQ ID NO: 340429 - RNA, 22 nt, Human
gagcuuuucccgucuuucucgu

SEQ ID NO: 340430 - RNA, 22 nt, Human
gcauuacuucuuucauagguca

SEQ ID NO: 340431 - RNA, 22 nt, Human
ccagaaugugugaaauuugaug

SEQ ID NO: 340432 - RNA, 22 nt, Human
uugaguuuccugacagcgaagg

SEQ ID NO: 340433 - RNA, 22 nt, Human
uauaaacuccucuugcauuccu

SEQ ID NO: 340434 - RNA, 22 nt, Human
uuuucuuggaguggcuguccuu

SEQ ID NO: 340435 - RNA, 22 nt, Human
accagaagcuggagcacaagga

SEQ ID NO: 340436 - RNA, 22 nt, Human
aaugaaacuauauuuagagagg

SEQ ID NO: 340437 - RNA, 22 nt, Human
auugaacauuguucuaggaggc

SEQ ID NO: 340438 - RNA, 22 nt, Human
augaagcugguuuuggcuuggg

SEQ ID NO: 340439 - RNA, 22 nt, Human
gcucaugggcccagagcagccc

SEQ ID NO: 340440 - RNA, 22 nt, Human
aagcaacuaaggcaaggaaaug

SEQ ID NO: 340441 - RNA, 22 nt, Human
ucuaauuuuggcauuuuaaccu

SEQ ID NO: 340442 - RNA, 22 nt, Human
ucuuugcauggacauguguuuu

SEQ ID NO: 340443 - RNA, 22 nt, Human
aauuagaagcuguuagcaaaau

SEQ ID NO: 340444 - RNA, 22 nt, Human
ucaagaaagggcuucaccagga

SEQ ID NO: 340445 - RNA, 22 nt, Human
cauaaauuguacccauuccaac

SEQ ID NO: 340446 - RNA, 20 nt, Human
aauagcacagcucaaacauu

SEQ ID NO: 340447 - RNA, 22 nt, Human
aagcaaaagguuacacuucugg

SEQ ID NO: 340448 - RNA, 22 nt, Human
uguccuguccuuccuggaaguc

SEQ ID NO: 340449 - RNA, 22 nt, Human
uucguuuaguccacaaaugcau

SEQ ID NO: 340450 - RNA, 22 nt, Human
ucacaauacucacucaauggcu

SEQ ID NO: 340451 - RNA, 22 nt, Human
cugucaaauggaaacuuauccu

SEQ ID NO: 340452 - RNA, 22 nt, Human
uuuguaguuguggaugcugaag

SEQ ID NO: 340453 - RNA, 22 nt, Human
cucaucuggcuucaguaacagu

SEQ ID NO: 340454 - RNA, 22 nt, Human
guuugagauggguuauugcucu

SEQ ID NO: 340455 - RNA, 22 nt, Human
uugcauauccuccaacacaugg

SEQ ID NO: 340456 - RNA, 22 nt, Human
uuaaaagaauccuguuauccuc

SEQ ID NO: 340457 - RNA, 22 nt, Human
uguucaguuugcuaucauaauc

SEQ ID NO: 340458 - RNA, 22 nt, Human
gacauacagcccucucccuggu

SEQ ID NO: 340459 - RNA, 21 nt, Human
aaagugguaaggauuauuuug

SEQ ID NO: 340460 - RNA, 22 nt, Human
gacuggcucuaucaggauaaau

SEQ ID NO: 340461 - RNA, 22 nt, Human
uugaacaguccuaagagacccu

SEQ ID NO: 340462 - RNA, 22 nt, Human
guucugucugagcaccacagga

SEQ ID NO: 340463 - RNA, 21 nt, Human
ucaauuauggaugugugcaaa

SEQ ID NO: 340464 - RNA, 22 nt, Human
aaucuucaggguccuggggcuc

SEQ ID NO: 340465 - RNA, 22 nt, Human
aagccacugcagcaggagcugc

SEQ ID NO: 340466 - RNA, 19 nt, Human
uaugacaaguacuaguucu

SEQ ID NO: 340467 - RNA, 22 nt, Human
agaaacaucgcuuaguccucau

SEQ ID NO: 340468 - RNA, 22 nt, Human
caaauacaaauacgggcagcuu

SEQ ID NO: 340469 - RNA, 22 nt, Human
cucagcaacagcgacuuaaggg

SEQ ID NO: 340470 - RNA, 22 nt, Human
ucagcacaggucuugcaaaaca

SEQ ID NO: 340471 - RNA, 22 nt, Human
ucaguguagcagacuuguagcc

SEQ ID NO: 340472 - RNA, 22 nt, Human
auacaccaccuuggaucuuuca

SEQ ID NO: 340473 - RNA, 22 nt, Human
ucaaagcacuggggaaagccug

SEQ ID NO: 340474 - RNA, 22 nt, Human
aguucugacucugaaucuggga

SEQ ID NO: 340475 - RNA, 23 nt, Human
uugcauuaauguggaggcacagg

SEQ ID NO: 340476 - RNA, 22 nt, Human
agugccaaaucgagggcucuga

SEQ ID NO: 340477 - RNA, 18 nt, Human
ucuuccaacacugacacc

SEQ ID NO: 340478 - RNA, 22 nt, Human
cuuuauguuggggugucuuagu

SEQ ID NO: 340479 - RNA, 18 nt, Human
gaacagcaauuucauguu

SEQ ID NO: 340480 - RNA, 22 nt, Human
aaacaguguguuucagagaggc

SEQ ID NO: 340481 - RNA, 18 nt, Human
ucagacaaguuagacagg

SEQ ID NO: 340482 - RNA, 22 nt, Human
caauaauugcuuuccagaguua

SEQ ID NO: 340483 - RNA, 22 nt, Human
augaacaguacaaagcacagac

SEQ ID NO: 340484 - RNA, 22 nt, Human
ucuacaacgugguuuuguugua

SEQ ID NO: 340485 - RNA, 22 nt, Human
cgcaggugccggcagauggggu

SEQ ID NO: 340486 - RNA, 22 nt, Human
ugagacaaagcagcugacagaa

SEQ ID NO: 340487 - RNA, 22 nt, Human
auagcaaaggacaauagucagu

SEQ ID NO: 340488 - RNA, 22 nt, Human
agacacuguguacagaaaaaga

SEQ ID NO: 340489 - RNA, 22 nt, Human
ugcauuucccauuguguggcuc

SEQ ID NO: 340490 - RNA, 22 nt, Human
cauuaacacuuuggauuuagac

SEQ ID NO: 340491 - RNA, 22 nt, Human
aucuucaaagcacaucguuugu

SEQ ID NO: 340492 - RNA, 22 nt, Human
guucuucaaagugacaacuaaa

SEQ ID NO: 340493 - RNA, 22 nt, Human
agagaagagucuugucaaauua

SEQ ID NO: 340494 - RNA, 19 nt, Human
cuggcuucaagcaguccuc

SEQ ID NO: 340495 - RNA, 22 nt, Human
cccauugugguuguugaggaua

SEQ ID NO: 340496 - RNA, 22 nt, Human
aaagaugucauacacauuaaga

SEQ ID NO: 340497 - RNA, 22 nt, Human
uaguauuuccuguaagcuauag

SEQ ID NO: 340498 - RNA, 22 nt, Human
gcagcucucuggccugcccugg

SEQ ID NO: 340499 - RNA, 22 nt, Human
cagcacauggauggaguuagga

SEQ ID NO: 340500 - RNA, 22 nt, Human
gcaguugcaggauuuguguugu

SEQ ID NO: 340501 - RNA, 22 nt, Human
acaaagugaaaagcaucgaauu

SEQ ID NO: 340502 - RNA, 22 nt, Human
uucaaaccuaucuaagaaauag

SEQ ID NO: 340503 - RNA, 22 nt, Human
cagugccauauugaaagacauu

SEQ ID NO: 340504 - RNA, 22 nt, Human
agcagugugggcugcacgcugg

SEQ ID NO: 340505 - RNA, 22 nt, Human
uuuagcaaggagaaauaauccu

SEQ ID NO: 340506 - RNA, 22 nt, Human
uuugaaauguaucaguauaggu

SEQ ID NO: 340507 - RNA, 22 nt, Human
caucugcaggggaagccaguuu

SEQ ID NO: 340508 - RNA, 20 nt, Human
cuuguuaaauaugcagguag

SEQ ID NO: 340509 - RNA, 22 nt, Human
uagaagaacaugucaaacuaua

SEQ ID NO: 340510 - RNA, 22 nt, Human
ugagaagcauuaggaagaacau

SEQ ID NO: 340511 - RNA, 19 nt, Human
ucuuucauuucuagcucug

SEQ ID NO: 340512 - RNA, 22 nt, Human
aucuuuggguacaaacuugccu

SEQ ID NO: 340513 - RNA, 22 nt, Human
ucagacaccgucuauuuugccu

SEQ ID NO: 340514 - RNA, 22 nt, Human
ggguucagugaugccuucagga

SEQ ID NO: 340515 - RNA, 22 nt, Human
gagcaacacauugaaugaggau

SEQ ID NO: 340516 - RNA, 22 nt, Human
uucaguuuugcuuuuaaucaug

SEQ ID NO: 340517 - RNA, 23 nt, Human
ugaaagcaaugggucuauaguau

SEQ ID NO: 340518 - RNA, 22 nt, Human
cauuuugugcuagacacuaugg

SEQ ID NO: 340519 - RNA, 22 nt, Human
caaagaugccaaaaggaagaca

SEQ ID NO: 340520 - RNA, 22 nt, Human
ugaacagugugagggugugacc

SEQ ID NO: 340521 - RNA, 22 nt, Human
uaaagcaaugaaaguuuugcag

SEQ ID NO: 340522 - RNA, 22 nt, Human
ugcuuguauucauaucacagcu

SEQ ID NO: 340523 - RNA, 22 nt, Human
agcagcaggugaccucgaugcc

SEQ ID NO: 340524 - RNA, 22 nt, Human
gaagaaguguaagucuguuuca

SEQ ID NO: 340525 - RNA, 20 nt, Human
caucaacaccuugucagccu

SEQ ID NO: 340526 - RNA, 22 nt, Human
acuuuucuuaucagaaaggcca

SEQ ID NO: 340527 - RNA, 22 nt, Human
aauagcaaaugcucauuugaaa

SEQ ID NO: 340528 - RNA, 22 nt, Human
guucaguuauuucugaagauau

SEQ ID NO: 340529 - RNA, 22 nt, Human
gcaagcagcccagaacagcucu

SEQ ID NO: 340530 - RNA, 22 nt, Human
agugaaaaccuaaucaugcagu

SEQ ID NO: 340531 - RNA, 22 nt, Human
gcaguggccacauggaggagga

SEQ ID NO: 340532 - RNA, 22 nt, Human
aguuggcauuuuauuuaaguau

SEQ ID NO: 340533 - RNA, 22 nt, Human
agugaaauaugcccauugcugu

SEQ ID NO: 340534 - RNA, 22 nt, Human
uucagcacuggacagcgagucu

SEQ ID NO: 340535 - RNA, 22 nt, Human
cacagcuaccugcaugccugcu

SEQ ID NO: 340536 - RNA, 22 nt, Human
caaagaagagauuuacagagcu

SEQ ID NO: 340537 - RNA, 22 nt, Human
uucaaacaguguagaauauaug

SEQ ID NO: 340538 - RNA, 22 nt, Human
acagugauuggcacugauucag

SEQ ID NO: 340539 - RNA, 22 nt, Human
caagucugaccucugggugaag

SEQ ID NO: 340540 - RNA, 22 nt, Human
cagcucugguuccugggcccag

SEQ ID NO: 340541 - RNA, 22 nt, Human
ccauuuguaccauuucuuugua

SEQ ID NO: 340542 - RNA, 22 nt, Human
ucagagccccuccgcuguccca

SEQ ID NO: 340543 - RNA, 22 nt, Human
uaaccuguuaagggcugaccca

SEQ ID NO: 340544 - RNA, 22 nt, Human
aacuagaaagaacauauuucca

SEQ ID NO: 340545 - RNA, 22 nt, Human
aagccugagccaugcuuuacug

SEQ ID NO: 340546 - RNA, 22 nt, Human
gcagaagucagaccaucugaau

SEQ ID NO: 340547 - RNA, 22 nt, Human
caguuaaacagauugaguguua

SEQ ID NO: 340548 - RNA, 22 nt, Human
agaaaucugacugcugugcaca

SEQ ID NO: 340549 - RNA, 22 nt, Human
gagcagcuguucugacuugucu

SEQ ID NO: 340550 - RNA, 22 nt, Human
caaaauuguugaugcugcuuug

SEQ ID NO: 340551 - RNA, 21 nt, Human
uucacaguggauaacuuucug

SEQ ID NO: 340552 - RNA, 22 nt, Human
gacagguaaagaugguggcagg

SEQ ID NO: 340553 - RNA, 19 nt, Human
ucaaagucugagucacuuu

SEQ ID NO: 340554 - RNA, 22 nt, Human
gugaccaucaucucagcuaguu

SEQ ID NO: 340555 - RNA, 22 nt, Human
uguccugugcacuguagcaugu

SEQ ID NO: 340556 - RNA, 22 nt, Human
ucuauuaaugauucaauagugu

SEQ ID NO: 340557 - RNA, 22 nt, Human
uagcagcacuauuuguuguagu

SEQ ID NO: 340558 - RNA, 22 nt, Human
gaugaguucuuucuauucuauu

SEQ ID NO: 340559 - RNA, 20 nt, Human
aaaaacaguaaugcugaaga

SEQ ID NO: 340560 - RNA, 23 nt, Human
augcaacauugccaguaugggca

SEQ ID NO: 340561 - RNA, 22 nt, Human
ccagaacagaccugccugaccu

SEQ ID NO: 340562 - RNA, 22 nt, Human
gguucaguggaauguguugacc

SEQ ID NO: 340563 - RNA, 22 nt, Human
agccacauggaccugaugcuag

SEQ ID NO: 340564 - RNA, 22 nt, Human
ggcucucuuaacuggccauccu

SEQ ID NO: 340565 - RNA, 22 nt, Human
auguaacauaugugaucgcauu

SEQ ID NO: 340566 - RNA, 22 nt, Human
uuguagucuaggauagauuuuu

SEQ ID NO: 340567 - RNA, 22 nt, Human
cuucucaaaguugugaaucagg

SEQ ID NO: 340568 - RNA, 22 nt, Human
agugaauuagccuauuuguaaa

SEQ ID NO: 340569 - RNA, 22 nt, Human coronavirus 229E
ccauagaagacauacuuuuuag

SEQ ID NO: 340570 - RNA, 22 nt, Human coronavirus 229E
uuaccagacuaacaucuauuca

SEQ ID NO: 340571 - RNA, 22 nt, Human coronavirus 229E
ugagggcagaaccauuuauggu

SEQ ID NO: 340572 - RNA, 22 nt, Human coronavirus 229E
ugucugaaauccauaguagcua

SEQ ID NO: 340573 - RNA, 22 nt, Human coronavirus 229E
gcauaugaaacagcaagacaag

SEQ ID NO: 340574 - RNA, 22 nt, Human coronavirus 229E
gucugucauagauagccugaau

SEQ ID NO: 340575 - RNA, 22 nt, Human coronavirus 229E
agauguuaacaguuaauguggu

SEQ ID NO: 340576 - RNA, 22 nt, Human coronavirus 229E
gcagaggauguuuguacuuguu

SEQ ID NO: 340577 - RNA, 22 nt, Human coronavirus 229E
uacacauuuugacauugaagaa

SEQ ID NO: 340578 - RNA, 22 nt, Human coronavirus 229E
uuaagauuggagcuguuaaaca

SEQ ID NO: 340579 - RNA, 22 nt, Human coronavirus 229E
uuuguuaaugacaaaauuacug

SEQ ID NO: 340580 - RNA, 22 nt, Human coronavirus 229E
uuuucaugcccuauuuuaugua

SEQ ID NO: 340581 - RNA, 22 nt, Human coronavirus 229E
uauucaaucagcacuuucuguu

SEQ ID NO: 340582 - RNA, 22 nt, Human coronavirus 229E
ccagaguauauugauguuaaua

SEQ ID NO: 340583 - RNA, 22 nt, Human coronavirus 229E
auuucuuuugcuccaugguggu

SEQ ID NO: 340584 - RNA, 20 nt, Human coronavirus 229E
auuguuaugacaagaacccu

SEQ ID NO: 340585 - RNA, 22 nt, Human coronavirus 229E
uuuguuaaugacaaaauuacug

SEQ ID NO: 340586 - RNA, 22 nt, Human coronavirus 229E
uuugaacaguguaauuaagcuc

SEQ ID NO: 340587 - RNA, 22 nt, Human coronavirus 229E
agauguuaacaguuaauguggu

SEQ ID NO: 340588 - RNA, 22 nt, Human coronavirus 229E
gccuaucuacuuguugaucagc

SEQ ID NO: 340589 - RNA, 22 nt, Human coronavirus 229E
ggugcuaauuucacuggucaaa

SEQ ID NO: 340590 - RNA, 18 nt, Human coronavirus 229E
ggucaaggucucuggggc

SEQ ID NO: 340591 - RNA, 22 nt, Human coronavirus 229E
gcuuuaacaccauuggccacaa

SEQ ID NO: 340592 - RNA, 22 nt, Human coronavirus 229E
uguugcaacaugcuacaauucu

SEQ ID NO: 340593 - RNA, 22 nt, Human coronavirus 229E
ugucugaaauccauaguagcua

SEQ ID NO: 340594 - RNA, 22 nt, Human coronavirus 229E
caagcugucacgcaaauaccug

SEQ ID NO: 340595 - RNA, 20 nt, Human coronavirus 229E
uaguaugugguucucaaaca

SEQ ID NO: 340596 - RNA, 22 nt, Human coronavirus 229E
gugcaauuucuaaugaauggua

SEQ ID NO: 340597 - RNA, 22 nt, Human coronavirus 229E
uacacauuuugacauugaagaa

SEQ ID NO: 340598 - RNA, 22 nt, Human coronavirus 229E
gucugucauagauagccugaau

SEQ ID NO: 340599 - RNA, 20 nt, Human coronavirus 229E
aucuucaaguugaaucugca

SEQ ID NO: 340600 - RNA, 22 nt, Human
auguaguauuuggaaauguaaa

SEQ ID NO: 340601 - RNA, 22 nt, Human
aaaguaauugugguucuugcca

SEQ ID NO: 340602 - RNA, 22 nt, Human
aaauugcaaaaguacuuuuagg

SEQ ID NO: 340603 - RNA, 22 nt, Human
ccauccaugguguugguuguau

SEQ ID NO: 340604 - RNA, 22 nt, Human
uuagacaucaagaagccaaugu

SEQ ID NO: 340605 - RNA, 22 nt, Human
auuggccagacuuauccuucag

SEQ ID NO: 340606 - RNA, 22 nt, Human
guucuccaggggcuguucaucu

SEQ ID NO: 340607 - RNA, 22 nt, Human
ugaauaaucuuggguauuaaua

SEQ ID NO: 340608 - RNA, 22 nt, Human
uuuugaauaauucagaaacagc

SEQ ID NO: 340609 - RNA, 22 nt, Human
gcacaaaagguacuucauguag

SEQ ID NO: 340610 - RNA, 22 nt, Human
gaauaauugugaugcuugaagu

SEQ ID NO: 340611 - RNA, 22 nt, Human
cauucauaggaggagaugauua

SEQ ID NO: 340612 - RNA, 22 nt, Human
aucauccauggcugaucauaaa

SEQ ID NO: 340613 - RNA, 22 nt, Human
aauagcaaaugcucauuugaaa

SEQ ID NO: 340614 - RNA, 22 nt, Human
uuaugggcgaugcaaaccugau

SEQ ID NO: 340615 - RNA, 22 nt, Human
cuggugcuguagccugauugag

SEQ ID NO: 340616 - RNA, 22 nt, Human
uuugacaugugcuuauaacuuu

SEQ ID NO: 340617 - RNA, 22 nt, Human
uucccagauuggagggcagggg

SEQ ID NO: 340618 - RNA, 22 nt, Human
ucuguuauaaaucacacugcau

SEQ ID NO: 340619 - RNA, 22 nt, Human
uuguugcugcucaaccucuaua

SEQ ID NO: 340620 - RNA, 22 nt, Human
ucucuuaauuguaaugguuccu

SEQ ID NO: 340621 - RNA, 22 nt, Human
gucaaaacaaaguuaagaauuc

SEQ ID NO: 340622 - RNA, 22 nt, Human
cuucucugucacaggguuacgu

SEQ ID NO: 340623 - RNA, 22 nt, Human
cuucuggguauuccagauaccu

SEQ ID NO: 340624 - RNA, 22 nt, Human
aagccacugcagcaggagcugc

SEQ ID NO: 340625 - RNA, 22 nt, Human
acaagucaguggaauuaauauu

SEQ ID NO: 340626 - RNA, 22 nt, Human
auuaauaucccccgccguucug

SEQ ID NO: 340627 - RNA, 22 nt, Human
ugcugguucuuaggagagagau

SEQ ID NO: 340628 - RNA, 22 nt, Human
aggcauuacaucuaaauauuua

SEQ ID NO: 340629 - RNA, 22 nt, Human
gauucugaaauuaacagacugg

SEQ ID NO: 340630 - RNA, 20 nt, Human
uaugauaauuacaaaauagu

SEQ ID NO: 340631 - RNA, 22 nt, Human
cauuaacacuuuggauuuagac

SEQ ID NO: 340632 - RNA, 22 nt, Human
caagucuagcuuggucacuugg

SEQ ID NO: 340633 - RNA, 22 nt, Human
uuugaaauguaucaguauaggu

SEQ ID NO: 340634 - RNA, 22 nt, Human
ggcagguguggugaccagagau

SEQ ID NO: 340635 - RNA, 22 nt, Human
uguuuuaagggucaacugucac

SEQ ID NO: 340636 - RNA, 22 nt, Human
cugcugagguggagauugcagu

SEQ ID NO: 340637 - RNA, 22 nt, Human
guuucuccucugugucuuguuu

SEQ ID NO: 340638 - RNA, 22 nt, Human
uuuagcaaggagaaauaauccu

SEQ ID NO: 340639 - RNA, 22 nt, Human
uaucauuuuacugugacauuuu

SEQ ID NO: 340640 - RNA, 23 nt, Human
aaguaccuacacauuauuucaga

SEQ ID NO: 340641 - RNA, 22 nt, Human
uaacuucucugagccucauucc

SEQ ID NO: 340642 - RNA, 23 nt, Human
uaucauuucagcucucugccugg

SEQ ID NO: 340643 - RNA, 22 nt, Human
uccuuggcaugccgucuucucc

SEQ ID NO: 340644 - RNA, 22 nt, Human
cugaugcucuggauguagucaa

SEQ ID NO: 340645 - RNA, 22 nt, Human
uccucuucaaaauagcucugaa

SEQ ID NO: 340646 - RNA, 21 nt, Human
ccacaauucuaguuacauaug

SEQ ID NO: 340647 - RNA, 22 nt, Human
acauucuacaguuaaccauuag

SEQ ID NO: 340648 - RNA, 22 nt, Human
uauaaacuccucuugcauuccu

SEQ ID NO: 340649 - RNA, 22 nt, Human
uacaccagauuauuuauaacau

SEQ ID NO: 340650 - RNA, 22 nt, Human
uuucugaggaauuaauacagaa

SEQ ID NO: 340651 - RNA, 22 nt, Human
ucuguggcaaacacagugacca

SEQ ID NO: 340652 - RNA, 22 nt, Human
agcugugaccuucaagagcuac

SEQ ID NO: 340653 - RNA, 22 nt, Human
aauguuaaguuuagauuauaac

SEQ ID NO: 340654 - RNA, 22 nt, Human
acaaguuucauuguuuagaacc

SEQ ID NO: 340655 - RNA, 22 nt, Human
uaaaccuuauuugaauaccaac

SEQ ID NO: 340656 - RNA, 22 nt, Human
acagcaucccugaagauaacca

SEQ ID NO: 340657 - RNA, 22 nt, Human
aacaugaugacauuguaagcuu

SEQ ID NO: 340658 - RNA, 22 nt, Human
uacauuuauaaggcuucucugu

SEQ ID NO: 340659 - RNA, 22 nt, Human
agaggcucuuugagcugggaga

SEQ ID NO: 340660 - RNA, 23 nt, Human
aguguucagcauguaguaaauac

SEQ ID NO: 340661 - RNA, 22 nt, Human
uuuaaaccuaucuaagaaauag

SEQ ID NO: 340662 - RNA, 22 nt, Human
ucccagauuccugcucuuauau

SEQ ID NO: 340663 - RNA, 22 nt, Human
gcuucuggugaggccucaggaa

SEQ ID NO: 340664 - RNA, 22 nt, Human
aucauuaacccuugaugcuggg

SEQ ID NO: 340665 - RNA, 22 nt, Human
aggguugaagucugguccucau

SEQ ID NO: 340666 - RNA, 22 nt, Human
uuacaauuacuugaucucagcu

SEQ ID NO: 340667 - RNA, 22 nt, Human
caaccugaugugcaugccacgg

SEQ ID NO: 340668 - RNA, 22 nt, Human
cuugccagggacucagucaggg

SEQ ID NO: 340669 - RNA, 22 nt, Human
caguggguccugcgucugccag

SEQ ID NO: 340670 - RNA, 18 nt, Human
ucuuccaacacugacacc

SEQ ID NO: 340671 - RNA, 22 nt, Human
auucauucugaccucaagagaa

SEQ ID NO: 340672 - RNA, 22 nt, Human
uagggcucugagaguucagccu

SEQ ID NO: 340673 - RNA, 22 nt, Human
uuugccaguauuuuauugauga

SEQ ID NO: 340674 - RNA, 22 nt, Human
uuugaauauacuucaaacaaag

SEQ ID NO: 340675 - RNA, 22 nt, Human
cuaguuuuaagcuccuugaggu

SEQ ID NO: 340676 - RNA, 22 nt, Human
cauaacauccuugcuacuuuga

SEQ ID NO: 340677 - RNA, 22 nt, Human
caacccaagguuaguuggucuu

SEQ ID NO: 340678 - RNA, 22 nt, Human
acauuuaaugauccuacuguga

SEQ ID NO: 340679 - RNA, 22 nt, Human
ugaauagagcugcaguggacau

SEQ ID NO: 340680 - RNA, 22 nt, Human
augauugaaaaugacauugcca

SEQ ID NO: 340681 - RNA, 22 nt, Human
aagaaaagguaaccgcuuaucu

SEQ ID NO: 340682 - RNA, 22 nt, Human
ccucuucuaggacguccuugug

SEQ ID NO: 340683 - RNA, 22 nt, Human
cgggcacucagggucgaggugg

SEQ ID NO: 340684 - RNA, 23 nt, Human
cacuggugggguuuaaaagaagc

SEQ ID NO: 340685 - RNA, 23 nt, Human
agggcacugaagcuggaauuggg

SEQ ID NO: 340686 - RNA, 22 nt, Human
aucaucaucuaaauugugucgc

SEQ ID NO: 340687 - RNA, 22 nt, Human
uuucacauaugguuguugauug

SEQ ID NO: 340688 - RNA, 22 nt, Human
aggcggcugguguccugcaggu

SEQ ID NO: 340689 - RNA, 22 nt, Human
uucuucaaccaucuacauaaac

SEQ ID NO: 340690 - RNA, 20 nt, Human
agcuucuucugucuaauuuu

SEQ ID NO: 340691 - RNA, 23 nt, Human
uuagagaugauuaaaaaaucuug

SEQ ID NO: 340692 - RNA, 22 nt, Human
ucagagagccucaggcacugcc

SEQ ID NO: 340693 - RNA, 22 nt, Human
agcccagguucuaaagccaaac

SEQ ID NO: 340694 - RNA, 22 nt, Human
cuacccagcaccuaggcugccu

SEQ ID NO: 340695 - RNA, 22 nt, Human
auuuaaauuuucugauggagag

SEQ ID NO: 340696 - RNA, 22 nt, Human
ucacauuuuauaucucugguuu

SEQ ID NO: 340697 - RNA, 22 nt, Human
aaggcagcagugcacgacugau

SEQ ID NO: 340698 - RNA, 20 nt, Human
uauuuacaacuuagagccuc

SEQ ID NO: 340699 - RNA, 22 nt, Human
uuaucacuuaugagcuuuuugc

SEQ ID NO: 340700 - RNA, 22 nt, Human
aaguuucaaauguugauuaugc

SEQ ID NO: 340701 - RNA, 22 nt, Human
uucaacuauuaugaauaaaauu

SEQ ID NO: 340702 - RNA, 22 nt, Human
uuucuuauacuauauugucauc

SEQ ID NO: 340703 - RNA, 22 nt, Human
auuaguaaaacauuguauaugu

SEQ ID NO: 340704 - RNA, 22 nt, Human
aggguggcaccuggaagggaug

SEQ ID NO: 340705 - RNA, 22 nt, Human
gcucccaggcauggagguaauu

SEQ ID NO: 340706 - RNA, 22 nt, Human
uuugcaguuucauugcugaaau

SEQ ID NO: 340707 - RNA, 22 nt, Human
uucucugaaggccaugcucacu

SEQ ID NO: 340708 - RNA, 22 nt, Human
uucaggauggcggauguugggg

SEQ ID NO: 340709 - RNA, 18 nt, Human
aaacuggcuuggccugug

SEQ ID NO: 340710 - RNA, 22 nt, Human
ucucaggaauagaguggcagca

SEQ ID NO: 340711 - RNA, 16 nt, Human
aaggagggaagagaau

SEQ ID NO: 340712 - RNA, 22 nt, Human
gaggagaggcuggacgcgguga

SEQ ID NO: 340713 - RNA, 23 nt, Human
aggcagcagguuguccaggguga

SEQ ID NO: 340714 - RNA, 22 nt, Human
ggagguggcagggaacauaauu

SEQ ID NO: 340715 - RNA, 22 nt, Human
ggugaaggcacaagagggcaag

SEQ ID NO: 340716 - RNA, 22 nt, Human
agucuucucauuucacaugcuu

SEQ ID NO: 340717 - RNA, 22 nt, Human
aaauuagucgguuuaggaauuu

SEQ ID NO: 340718 - RNA, 22 nt, Human
uggcaaggccacaggugcaguu

SEQ ID NO: 340719 - RNA, 22 nt, Human
gauugaaacauaggcagucgag

SEQ ID NO: 340720 - RNA, 22 nt, Human
aggcuagcaaugggagaugagu

SEQ ID NO: 340721 - RNA, 22 nt, Human
ccucagaugucuuaaggcacug

SEQ ID NO: 340722 - RNA, 22 nt, Human
aagaggaggacgguucccagaa

SEQ ID NO: 340723 - RNA, 22 nt, Human
uaaggccagccagcaaaucugu

SEQ ID NO: 340724 - RNA, 22 nt, Human
ucauuuguggaagugauugugg

SEQ ID NO: 340725 - RNA, 22 nt, Human
uugaaguuguaguucagugaag

SEQ ID NO: 340726 - RNA, 22 nt, Human
cugcccaggcugaaggaacauc

SEQ ID NO: 340727 - RNA, 18 nt, Human
aggcaggcuggagugacu

SEQ ID NO: 340728 - RNA, 22 nt, Human
cccagggaagccauuucugacu

SEQ ID NO: 340729 - RNA, 22 nt, Human
auuuagacuucccagcacugug

SEQ ID NO: 340730 - RNA, 21 nt, Human
uuagaaagcucacuacaguua

SEQ ID NO: 340731 - RNA, 22 nt, Human
ggcagcuuguccuggaggaugg

SEQ ID NO: 340732 - RNA, 22 nt, Human
aaauauguauggaguucaugaa

SEQ ID NO: 340733 - RNA, 22 nt, Human
uuuuuuaguuaggucagaaugu

SEQ ID NO: 340734 - RNA, 22 nt, Human
uguuccaauaaggaguugaaau

SEQ ID NO: 340735 - RNA, 22 nt, Human
ugccuugcacauaauauacauu

SEQ ID NO: 340736 - RNA, 19 nt, Human
cauuuagaaguacauauua

SEQ ID NO: 340737 - RNA, 22 nt, Human
uucuuaacucaaauauauaucc

SEQ ID NO: 340738 - RNA, 22 nt, Human
cagauggaacacagaaaggaga

SEQ ID NO: 340739 - RNA, 22 nt, Human
uucuuaaaacuuauggacaggu

SEQ ID NO: 340740 - RNA, 22 nt, Human
augaggcaaucaugguccaguu

SEQ ID NO: 340741 - RNA, 22 nt, Human
aaggcaguuugggccaccaucu

SEQ ID NO: 340742 - RNA, 22 nt, Human
cucuucuuggcccccaugaggg

SEQ ID NO: 340743 - RNA, 22 nt, Human
gugauaaagacgugucauaauu

SEQ ID NO: 340744 - RNA, 22 nt, Human
uuucuucaauugcuaacaagga

SEQ ID NO: 340745 - RNA, 22 nt, Human
uguguaaagcuuguuccagaaa

SEQ ID NO: 340746 - RNA, 22 nt, Human
cuucucagaggccagaagcuau

SEQ ID NO: 340747 - RNA, 22 nt, Human
cucagagaggcaguggaaguca

SEQ ID NO: 340748 - RNA, 22 nt, Human
ugauuuccuaggucuggagaag

SEQ ID NO: 340749 - RNA, 22 nt, Human
guugaaagcuuuucauuuaguu

SEQ ID NO: 340750 - RNA, 22 nt, Human
gaucuguuauaaucucuuuuau

SEQ ID NO: 340751 - RNA, 22 nt, Human
cuuuggaauauuuuauugagaa

SEQ ID NO: 340752 - RNA, 21 nt, Human
aaugcauuaacauaaagcuga

SEQ ID NO: 340753 - RNA, 22 nt, Human
agagugcagauaagagaauguu

SEQ ID NO: 340754 - RNA, 22 nt, Human
caggagagauaugaguccccac

SEQ ID NO: 340755 - RNA, 22 nt, Human
aagugaagaaauacaugagaau

SEQ ID NO: 340756 - RNA, 22 nt, Human
uacaaaguagaaauucaguaaa

SEQ ID NO: 340757 - RNA, 22 nt, Human
uggcuucuugggaugggucauu

SEQ ID NO: 340758 - RNA, 22 nt, Human
ucagugcacagagauuuuuguu

SEQ ID NO: 340759 - RNA, 19 nt, Human
uuugcagugguuccuuugu

SEQ ID NO: 340760 - RNA, 22 nt, Human
cuagaaauauuuuacagucaag

SEQ ID NO: 340761 - RNA, 22 nt, Human
ccaggcugcagucaaggggcau

SEQ ID NO: 340762 - RNA, 22 nt, Human
ugcuagaauuagguuaaacaaa

SEQ ID NO: 340763 - RNA, 22 nt, Human
aguaugaauacagauuuucucu

SEQ ID NO: 340764 - RNA, 22 nt, Human
guuaaauucgaugauggauaaa

SEQ ID NO: 340765 - RNA, 22 nt, Human
ucccaggaugugcgugccgccg

SEQ ID NO: 340766 - RNA, 22 nt, Human
ucagauggguuuugaaggaugu

SEQ ID NO: 340767 - RNA, 22 nt, Human
ugcuggguagaaguauuagucu

SEQ ID NO: 340768 - RNA, 22 nt, Human
ucccaggauguuggcggcaggu

SEQ ID NO: 340769 - RNA, 22 nt, Human
aaauauacuagaugaugaccca

SEQ ID NO: 340770 - RNA, 22 nt, Human
agggugguucuuuuaguggaag

SEQ ID NO: 340771 - RNA, 22 nt, Human
caggcagcucuaauggaaagug

SEQ ID NO: 340772 - RNA, 22 nt, Human
auucuuauuuaaauagagucug

SEQ ID NO: 340773 - RNA, 22 nt, Human
ccucuucuaggacguccuugug

SEQ ID NO: 340774 - RNA, 22 nt, Human
uaucuguuggcuccuaguugua

SEQ ID NO: 340775 - RNA, 22 nt, Human
accaggagguguuugcucaagu

SEQ ID NO: 340776 - RNA, 23 nt, Human
ugaguucucaucuuggcuucuau

SEQ ID NO: 340777 - RNA, 22 nt, Human
acucuucuugcugcucauuaau

SEQ ID NO: 340778 - RNA, 22 nt, Human
ugcccagggauaagccuagaga

SEQ ID NO: 340779 - RNA, 22 nt, Human
uugcugaagugaagguauguuu

SEQ ID NO: 340780 - RNA, 22 nt, Human
uacuuacagaaggaagcaauug

SEQ ID NO: 340781 - RNA, 22 nt, Human
uggaaagucucuuuugacugua

SEQ ID NO: 340782 - RNA, 22 nt, Human
auaaaugauucagcaggaaaua

SEQ ID NO: 340783 - RNA, 22 nt, Human
agucucuuuaaucacagugucu

SEQ ID NO: 340784 - RNA, 22 nt, Human
cccaggaaguggagguugcagu

SEQ ID NO: 340785 - RNA, 22 nt, Human
aaagcagagguugcagugagcu

SEQ ID NO: 340786 - RNA, 22 nt, Human
cucuucuuuaguccagaccauc

SEQ ID NO: 340787 - RNA, 21 nt, Human
ucuugaaaauuguagcaguuu

SEQ ID NO: 340788 - RNA, 18 nt, Human
cucugucauaagugucau

SEQ ID NO: 340789 - RNA, 22 nt, Human
cuggguaaguuccuaaggcuca

SEQ ID NO: 340790 - RNA, 22 nt, Human
cucauuaaaggaaaucaccugc

SEQ ID NO: 340791 - RNA, 22 nt, Human
caagauaagaucauuuacacua

SEQ ID NO: 340792 - RNA, 22 nt, Human
cccuuagcucaauuucuugccc

SEQ ID NO: 340793 - RNA, 22 nt, Human
gcagcugccuucagcuggaugg

SEQ ID NO: 340794 - RNA, 22 nt, Human
cugagccagcuggcaugugcua

SEQ ID NO: 340795 - RNA, 22 nt, Human
uucuacaauaugaauaaugaag

SEQ ID NO: 340796 - RNA, 22 nt, Human
uacccaggggcugagcagaggu

SEQ ID NO: 340797 - RNA, 19 nt, Human
acauuuagaauguacuugc

SEQ ID NO: 340798 - RNA, 22 nt, Human
ggcaagaaggcuucagguagcu

SEQ ID NO: 340799 - RNA, 22 nt, Human
gccaggagggaaaggacaauuu

SEQ ID NO: 340800 - RNA, 22 nt, Human
uaaguucauaagcuuauucuua

SEQ ID NO: 340801 - RNA, 22 nt, Human
uuuuacuuaauucuuggucaug

SEQ ID NO: 340802 - RNA, 22 nt, Human
ucauuuguugaacuuuagugcg

SEQ ID NO: 340803 - RNA, 22 nt, Human
ucauuuguucucauucucuacu

SEQ ID NO: 340804 - RNA, 22 nt, Human
auucacaaaaugauauagauac

SEQ ID NO: 340805 - RNA, 22 nt, Human
cagagggaaaaggggaguaaua

SEQ ID NO: 340806 - RNA, 22 nt, Human
gccagagguucaacaacugucu

SEQ ID NO: 340807 - RNA, 22 nt, Human
uucugggagagaaagggccuug

SEQ ID NO: 340808 - RNA, 22 nt, Human
cuggcaguguccagcucgugau

SEQ ID NO: 340809 - RNA, 22 nt, Human
aguucucagcuuaguaugcugu

SEQ ID NO: 340810 - RNA, 22 nt, Human
acagaaauugggcaaauggaag

SEQ ID NO: 340811 - RNA, 22 nt, Human
aauacauauggaauuccauguu

SEQ ID NO: 340812 - RNA, 22 nt, Human
uagggcaggggaggaaucugaa

SEQ ID NO: 340813 - RNA, 22 nt, Human
uucuagaugauaaaccagcagc

SEQ ID NO: 340814 - RNA, 18 nt, Human
guaggucaguaccaagca

SEQ ID NO: 340815 - RNA, 21 nt, Human
uucuucuuggacuguuuuggc

SEQ ID NO: 340816 - RNA, 22 nt, Human
ucucacuuuccagacuuuucaa

SEQ ID NO: 340817 - RNA, 22 nt, Human
uggagagguugaauaacuuguc

SEQ ID NO: 340818 - RNA, 22 nt, Human
acucaggagggaucagcuauca

SEQ ID NO: 340819 - RNA, 21 nt, Human
uccaggaguggcugggcaggg

SEQ ID NO: 340820 - RNA, 22 nt, Human
uucauugugaacacauucugcc

SEQ ID NO: 340821 - RNA, 22 nt, Human
aucauucuaguccuuauggucu

SEQ ID NO: 340822 - RNA, 22 nt, Human
augcugugucaccuuaggauuu

SEQ ID NO: 340823 - RNA, 22 nt, Human
ugaggggaacugaugcccauug

SEQ ID NO: 340824 - RNA, 22 nt, Human
uuugaaaggagcuuuauccaga

SEQ ID NO: 340825 - RNA, 22 nt, Human
aguauaaagugguuuucagcac

SEQ ID NO: 340826 - RNA, 22 nt, Human
ucuuucaaugagcauucuuucc

SEQ ID NO: 340827 - RNA, 22 nt, Human
uucuucuucuggcugcaccugg

SEQ ID NO: 340828 - RNA, 22 nt, Human
cugcgcagggguggcgccagaa

SEQ ID NO: 340829 - RNA, 22 nt, Human
acccaggaggugacacagggcu

SEQ ID NO: 340830 - RNA, 22 nt, Human
gcaaagcauucuguggagucua

SEQ ID NO: 340831 - RNA, 22 nt, Human
ugaggcagucacccccuccugc

SEQ ID NO: 340832 - RNA, 22 nt, Human
ggaggugggcuaaggacucucu

SEQ ID NO: 340833 - RNA, 22 nt, Human
agggagcucacaguccaguaga

SEQ ID NO: 340834 - RNA, 22 nt, Human
gcccaggauucuuucuuccuua

SEQ ID NO: 340835 - RNA, 19 nt, Human
acauuuaaauucagaucuc

SEQ ID NO: 340836 - RNA, 22 nt, Human
agaggggaaggaugugauguga

SEQ ID NO: 340837 - RNA, 22 nt, Human
uuuccagguauuaauacuguau

SEQ ID NO: 340838 - RNA, 22 nt, Human
ggaggagguggguuaaguugua

SEQ ID NO: 340839 - RNA, 22 nt, Human
uaacacaugucugggaugugaa

SEQ ID NO: 340840 - RNA, 22 nt, Human
cacaaugugguuugucaucuuu

SEQ ID NO: 340841 - RNA, 22 nt, Human
uuucacauuuaggcgugaauug

SEQ ID NO: 340842 - RNA, 22 nt, Human
ugaggcaggaaguuauauaaug

SEQ ID NO: 340843 - RNA, 22 nt, Human
gugguuuucuccaacccagaac

SEQ ID NO: 340844 - RNA, 20 nt, Human
cagagccaagagcagcaucu

SEQ ID NO: 340845 - RNA, 22 nt, Human
uuucugcugugcuuucuugcgu

SEQ ID NO: 340846 - RNA, 20 nt, Human
cuucuucauuaacccuacug

SEQ ID NO: 340847 - RNA, 22 nt, Human
uugcagcugcaguaaauguuca

SEQ ID NO: 340848 - RNA, 22 nt, Human
uuucaucuucccagagaccuug

SEQ ID NO: 340849 - RNA, 22 nt, Human
agaggaggaagagcuuuaaaau

SEQ ID NO: 340850 - RNA, 22 nt, Human
cuagguauucauguuucguggc

SEQ ID NO: 340851 - RNA, 22 nt, Human
uagggauguaaacauaguaauu

SEQ ID NO: 340852 - RNA, 23 nt, Human
auguaucucauccaaggaagcuc

SEQ ID NO: 340853 - RNA, 22 nt, Human
gcucacugcaaccucugcuucc

SEQ ID NO: 340854 - RNA, 22 nt, Human
uuagacauguuugcuaaaauga

SEQ ID NO: 340855 - RNA, 22 nt, Human
aaucuuagguuuggcuucaucu

SEQ ID NO: 340856 - RNA, 22 nt, Human
cauuuguauagugcuuagacca

SEQ ID NO: 340857 - RNA, 22 nt, Human
aggcagcaugggcccagagucc

SEQ ID NO: 340858 - RNA, 21 nt, Human
cucaggauggcggccuggugg

SEQ ID NO: 340859 - RNA, 22 nt, Human
gaggcagcuuaggguacugacu

SEQ ID NO: 340860 - RNA, 22 nt, Human
uacagcauauacagaaugaaca

SEQ ID NO: 340861 - RNA, 22 nt, Human
aagacugugucuauggcuacuc

SEQ ID NO: 340862 - RNA, 22 nt, Human
ccaggcugagcaugauuggagc

SEQ ID NO: 340863 - RNA, 21 nt, Human
ucaggagagcccaucuacaaa

SEQ ID NO: 340864 - RNA, 22 nt, Human
aucaggaucugggagccugaaa

SEQ ID NO: 340865 - RNA, 22 nt, Human
uuccuuaguguuagauucugug

SEQ ID NO: 340866 - RNA, 22 nt, Human
agaaaacuugucacagcucuca

SEQ ID NO: 340867 - RNA, 22 nt, Human
caugcugugcaucuugaugacc

SEQ ID NO: 340868 - RNA, 22 nt, Human
uuuuccagagcugucucuugca

SEQ ID NO: 340869 - RNA, 22 nt, Human
aggcagacucaauggcuagaua

SEQ ID NO: 340870 - RNA, 22 nt, Human
agacaguguguguauauauggu

SEQ ID NO: 340871 - RNA, 22 nt, Human
uucuucucagggucccacaugg

SEQ ID NO: 340872 - RNA, 22 nt, Human
agugcuuuagagaaauggugcu

SEQ ID NO: 340873 - RNA, 22 nt, Human
ucuucaaguuccaaagugcagg

SEQ ID NO: 340874 - RNA, 22 nt, Human
ucugucaauauaugugcugcag

SEQ ID NO: 340875 - RNA, 21 nt, Human
gcucagaguauugcacuguuu

SEQ ID NO: 340876 - RNA, 22 nt, Human
agccagcuguucuggggcagca

SEQ ID NO: 340877 - RNA, 22 nt, Human
acaauguaggauauguacuugu

SEQ ID NO: 340878 - RNA, 22 nt, Human
uagauuuuacuucugucauuac

SEQ ID NO: 340879 - RNA, 17 nt, Human
agguauaaaaugguagc

SEQ ID NO: 340880 - RNA, 22 nt, Human
uagcauuucccaaaugcauuug

SEQ ID NO: 340881 - RNA, 22 nt, Human
cagcugacccgugggaggcggg

SEQ ID NO: 340882 - RNA, 21 nt, Human
agucuguuaggaugacucuga

SEQ ID NO: 340883 - RNA, 22 nt, Human
agaggggacagccaccugcccg

SEQ ID NO: 340884 - RNA, 22 nt, Human
aguguguccagaaaucuguauu

SEQ ID NO: 340885 - RNA, 22 nt, Human
uuguuauaaagacuaaauaugu

SEQ ID NO: 340886 - RNA, 22 nt, Human
uucugugauugacauguggcuu

SEQ ID NO: 340887 - RNA, 22 nt, Human
gggcacagaagucuaagacauc

SEQ ID NO: 340888 - RNA, 22 nt, Human
agaggaugauuuuaaggacacu

SEQ ID NO: 340889 - RNA, 22 nt, Human
gcauaugaucacgugugucggu

SEQ ID NO: 340890 - RNA, 21 nt, Human
uggagacucugguucuuugug

SEQ ID NO: 340891 - RNA, 22 nt, Human
cucacuguuuaauagcuggauc

SEQ ID NO: 340892 - RNA, 22 nt, Human
cuuuggcaaugucauuuucaau

SEQ ID NO: 340893 - RNA, 22 nt, Human
ucuggcaggcaaucggcucugg

SEQ ID NO: 340894 - RNA, 22 nt, Human
aacagcauaaguauuuauuuca

SEQ ID NO: 340895 - RNA, 22 nt, Human
cagaccagaaggaagccgacaa

SEQ ID NO: 340896 - RNA, 22 nt, Human
accaggaggaaguguuaaugau

SEQ ID NO: 340897 - RNA, 22 nt, Human
aucauucugauggucaaugcua

SEQ ID NO: 340898 - RNA, 22 nt, Human
uuuuucuuaaauguggguuggc

SEQ ID NO: 340899 - RNA, 22 nt, Human
aucaggauucaccccagagcug

SEQ ID NO: 340900 - RNA, 22 nt, Human
aguucuuuugugaacauaugcu

SEQ ID NO: 340901 - RNA, 22 nt, Human
uccuuagagacaagaccaguuu

SEQ ID NO: 340902 - RNA, 22 nt, Human
cauuuguaggaugcuucuuguu

SEQ ID NO: 340903 - RNA, 22 nt, Human
auguucuuucagccagugcauc

SEQ ID NO: 340904 - RNA, 19 nt, Human
ggucagcugggcuagaggc

SEQ ID NO: 340905 - RNA, 22 nt, Human
uggcagcuggagggcaauggcc

SEQ ID NO: 340906 - RNA, 22 nt, Human
uggcagcugucagaaugcaaau

SEQ ID NO: 340907 - RNA, 22 nt, Human
agauggagaccuuggaugaacu

SEQ ID NO: 340908 - RNA, 22 nt, Human
caaauaguuuuucauguauuau

SEQ ID NO: 340909 - RNA, 22 nt, Human
cagcugacgccagaguggaauu

SEQ ID NO: 340910 - RNA, 22 nt, Human
aaauaguuagcccugcauauau

SEQ ID NO: 340911 - RNA, 22 nt, Human
uucuugaaucacuuuagagaua

SEQ ID NO: 340912 - RNA, 22 nt, Human
ucaggagacuggcagugcccac

SEQ ID NO: 340913 - RNA, 22 nt, Human
acauuuuuauucaucaaagcag

SEQ ID NO: 340914 - RNA, 22 nt, Human
cuagcaucagaugagaagcugu

SEQ ID NO: 340915 - RNA, 22 nt, Human
uaggcagcagugcuaugauucu

SEQ ID NO: 340916 - RNA, 22 nt, Human
uuucaguuacugcuauaucauu

SEQ ID NO: 340917 - RNA, 22 nt, Human
aucugcaggaaugugugcagag

SEQ ID NO: 340918 - RNA, 22 nt, Human
uaaaaugaucucucauguucuu

SEQ ID NO: 340919 - RNA, 22 nt, Human
uuauuucauugauuucuaagac

SEQ ID NO: 340920 - RNA, 22 nt, Human
agccuuguuggucugaguuugg

SEQ ID NO: 340921 - RNA, 22 nt, Human
cccaggagguguagcugcgugg

SEQ ID NO: 340922 - RNA, 22 nt, Human
uggggcucaccuaggcuggaag

SEQ ID NO: 340923 - RNA, 23 nt, Human
agaggggagcaucugcuggcuga

SEQ ID NO: 340924 - RNA, 17 nt, Human
ucccaggaacagggaau

SEQ ID NO: 340925 - RNA, 23 nt, Human
ugaaacauuuaggguagaauuuc

SEQ ID NO: 340926 - RNA, 22 nt, Human
auugaaagauuuugggcucaug

SEQ ID NO: 340927 - RNA, 22 nt, Human
auugaaagcauggauuuggauu

SEQ ID NO: 340928 - RNA, 20 nt, Human
ucauuucuugggguuccaag

SEQ ID NO: 340929 - RNA, 20 nt, Human
ugaaggccauuuguuccaga

SEQ ID NO: 340930 - RNA, 22 nt, Human
gaccauuucuaggaaucagacu

SEQ ID NO: 340931 - RNA, 22 nt, Human
auaaauaucacuguugucccuc

SEQ ID NO: 340932 - RNA, 19 nt, Human
gagcgcagagggcagggga

SEQ ID NO: 340933 - RNA, 22 nt, Human
cccaggaggcagauguugcagu

SEQ ID NO: 340934 - RNA, 22 nt, Human
ucuuuccauggccacacagucu

SEQ ID NO: 340935 - RNA, 22 nt, Human
cccaggaacuccagagcuccuc

SEQ ID NO: 340936 - RNA, 22 nt, Human
acagucuugagcaucagccaga

SEQ ID NO: 340937 - RNA, 22 nt, Human
uucaggauucucucccauuuac

SEQ ID NO: 340938 - RNA, 22 nt, Human
auguuauggcucaaacauuugg

SEQ ID NO: 340939 - RNA, 22 nt, Human
gcuguguuugacaguagcagac

SEQ ID NO: 340940 - RNA, 22 nt, Human
auuaaauuaaguggcuaauuua

SEQ ID NO: 340941 - RNA, 22 nt, Human
uuucaaauagaaucuuuccaaa

SEQ ID NO: 340942 - RNA, 22 nt, Human
uuucaaaauuuugcagugguaa

SEQ ID NO: 340943 - RNA, 22 nt, Human
uugcuucaguagcucuuuaaag

SEQ ID NO: 340944 - RNA, 22 nt, Human
acuggaaaugagaugauaucag

SEQ ID NO: 340945 - RNA, 22 nt, Human
aucaggauuauuaaaucuggau

SEQ ID NO: 340946 - RNA, 22 nt, Human
aggggaugauccucccgcagcg

SEQ ID NO: 340947 - RNA, 22 nt, Human
agccuauuccaggaugagcuca

SEQ ID NO: 340948 - RNA, 22 nt, Human
uguucuuuggcuucacagcucu

SEQ ID NO: 340949 - RNA, 21 nt, Human
gaacauuuggguuguuucuac

SEQ ID NO: 340950 - RNA, 23 nt, Human
acagacaacacugaugagagaaa

SEQ ID NO: 340951 - RNA, 22 nt, Human
cccaggagaccuagaucuguuu

SEQ ID NO: 340952 - RNA, 23 nt, Human
cagcccuuccugcauguuuuugu

SEQ ID NO: 340953 - RNA, 20 nt, Human
aggaggggauagaaucaaag

SEQ ID NO: 340954 - RNA, 22 nt, Human
agagggcagggcgguaaguccu

SEQ ID NO: 340955 - RNA, 22 nt, Human
cagcauuuggugaucaucuuaa

SEQ ID NO: 340956 - RNA, 22 nt, Human
cccaggaaccuaccagcucgag

SEQ ID NO: 340957 - RNA, 22 nt, Human
gcucaggacccaggugugaccu

SEQ ID NO: 340958 - RNA, 22 nt, Human
uucugaaccauugagcacugcc

SEQ ID NO: 340959 - RNA, 22 nt, Human
uuguaaaugaccuuuucuaauu

SEQ ID NO: 340960 - RNA, 22 nt, Human
uguauaaauuuaaauuccugcu

SEQ ID NO: 340961 - RNA, 22 nt, Human
guaugaaaauuguaaaguucuu

SEQ ID NO: 340962 - RNA, 22 nt, Human
ggcaggcagaggcugagacagg

SEQ ID NO: 340963 - RNA, 22 nt, Human
aaauacuagaauucagaguuga

SEQ ID NO: 340964 - RNA, 22 nt, Human
uuggaugaagucuagcuuuagu

SEQ ID NO: 340965 - RNA, 22 nt, Human
aaggcagcaacuaauggaucuc

SEQ ID NO: 340966 - RNA, 22 nt, Human
ugaggggagcccgcccuggacg

SEQ ID NO: 340967 - RNA, 22 nt, Human
uugguuuagagagugugguuac

SEQ ID NO: 340968 - RNA, 22 nt, Human
ucucuucuagcuucuugugguu

SEQ ID NO: 340969 - RNA, 22 nt, Human
cucacugugaccucagcagaca

SEQ ID NO: 340970 - RNA, 22 nt, Human
uccaggagugauaaggccacug

SEQ ID NO: 340971 - RNA, 20 nt, Human
uccaugaguuagagacuaua

SEQ ID NO: 340972 - RNA, 22 nt, Human
uugauacaggccuucuagauga

SEQ ID NO: 340973 - RNA, 22 nt, Human
cucaggauuaaggaaucuaaau

SEQ ID NO: 340974 - RNA, 22 nt, Human
ugugaaaagggcuuuguacaaa

SEQ ID NO: 340975 - RNA, 22 nt, Human
uuagagucaagcugcauguucu

SEQ ID NO: 340976 - RNA, 22 nt, Human
gcugugcuugggaagaaucucu

SEQ ID NO: 340977 - RNA, 22 nt, Human
gagggagggccaggucccaacc

SEQ ID NO: 340978 - RNA, 20 nt, Human
gcccaagguccagaaggggg

SEQ ID NO: 340979 - RNA, 22 nt, Human
aggcaagcauugggaacagggc

SEQ ID NO: 340980 - RNA, 22 nt, Human
guuguuuugcaggauccuuaca

SEQ ID NO: 340981 - RNA, 22 nt, Human
caggacagcucaacaccuccuc

SEQ ID NO: 340982 - RNA, 22 nt, Human
ggcagaagauaggacagggaau

SEQ ID NO: 340983 - RNA, 22 nt, Human
cuggccaggcuugggacagaca

SEQ ID NO: 340984 - RNA, 22 nt, Human
caggcagcccugcaccaagugu

SEQ ID NO: 340985 - RNA, 22 nt, Human
uucugggacaucuggacaguuu

SEQ ID NO: 340986 - RNA, 22 nt, Human
ugcccaggaucuggcgaugcuc

SEQ ID NO: 340987 - RNA, 20 nt, Human
uuuacauuuugaaacaguga

SEQ ID NO: 340988 - RNA, 21 nt, Human
cugcuguggcccccgacaugc

SEQ ID NO: 340989 - RNA, 22 nt, Human
ccaggacaaguguggccauggc

SEQ ID NO: 340990 - RNA, 22 nt, Human
cccaggagaugcacuccauugg

SEQ ID NO: 340991 - RNA, 22 nt, Human
aggcaguuuaggcagcgauuua

SEQ ID NO: 340992 - RNA, 22 nt, Human
uuuauuuggcauccagggagaa

SEQ ID NO: 340993 - RNA, 22 nt, Human
cccaggagauaacguucccaag

SEQ ID NO: 340994 - RNA, 22 nt, Human
gaggagagccugcacuuugacc

SEQ ID NO: 340995 - RNA, 22 nt, Human
uuguaugaggauagcaagaagc

SEQ ID NO: 340996 - RNA, 22 nt, Human
agcaccuguugcacuucauaau

SEQ ID NO: 340997 - RNA, 22 nt, Human
uuugaaaguguuuacuugggaa

SEQ ID NO: 340998 - RNA, 22 nt, Human
gagaggggcccaagccacauag

SEQ ID NO: 340999 - RNA, 23 nt, Human
accaggagaaaagcuuugcggga

SEQ ID NO: 341000 - RNA, 22 nt, Human
aagggcagaauagagaagaugg

SEQ ID NO: 341001 - RNA, 23 nt, Human
cccagggacacgaugacaccucc

SEQ ID NO: 341002 - RNA, 22 nt, Human
agggagcuucuggccucagccu

SEQ ID NO: 341003 - RNA, 22 nt, Human
gucauauacacugcauguaauc

SEQ ID NO: 341004 - RNA, 20 nt, Human
agcaagaguaaggacagcga

SEQ ID NO: 341005 - RNA, 22 nt, Human
aguggcaguagaugagcugguu

SEQ ID NO: 341006 - RNA, 22 nt, Human
uucucacuauguauguagauug

SEQ ID NO: 341007 - RNA, 22 nt, Human
gaaaggccagcucacagaugag

SEQ ID NO: 341008 - RNA, 22 nt, Human
cuugaaagcacuccuuugacug

SEQ ID NO: 341009 - RNA, 22 nt, Human
uggaaauauacaaugugucucu

SEQ ID NO: 341010 - RNA, 22 nt, Human
cucuuaguaaugccaugaagca

SEQ ID NO: 341011 - RNA, 23 nt, Human
uuuauccaacucuguaaucucuc

SEQ ID NO: 341012 - RNA, 22 nt, Human
ucagguggcuuggagggggacg

SEQ ID NO: 341013 - RNA, 22 nt, Human
ucacaugaguauuauuuuccaa

SEQ ID NO: 341014 - RNA, 20 nt, Human
cccagguaggugccaugagu

SEQ ID NO: 341015 - RNA, 22 nt, Human
uucaggaugcagagguuguagu

SEQ ID NO: 341016 - RNA, 22 nt, Human
gguauaaaugaucagaucgcug

SEQ ID NO: 341017 - RNA, 22 nt, Human
uuucuucauucaccuucacccc

SEQ ID NO: 341018 - RNA, 22 nt, Human
cuucuucaaccugaaaguuuca

SEQ ID NO: 341019 - RNA, 23 nt, Human
aauguauguuaguaucuuagaga

SEQ ID NO: 341020 - RNA, 22 nt, Human
uucugucacuugcaaucaagag

SEQ ID NO: 341021 - RNA, 21 nt, Human
cuugaaagguagagucuacag

SEQ ID NO: 341022 - RNA, 22 nt, Human
agucugucuacuuaaagucugu

SEQ ID NO: 341023 - RNA, 22 nt, Human
ucauuucucccggccaaaaacu

SEQ ID NO: 341024 - RNA, 22 nt, Human
cauuguuaccaucuuuuaccua

SEQ ID NO: 341025 - RNA, 22 nt, Human
ggcaggcucagcagccaaggag

SEQ ID NO: 341026 - RNA, 22 nt, Human
aaggcaguaaaaucuaccuugc

SEQ ID NO: 341027 - RNA, 22 nt, Human
ggcagcugcaaaucugcucugu

SEQ ID NO: 341028 - RNA, 22 nt, Human
acauuucacuguucacagcagg

SEQ ID NO: 341029 - RNA, 22 nt, Human
ugcuuuggccacuagaauucag

SEQ ID NO: 341030 - RNA, 22 nt, Human
ucauauaaguuuaaaacuaucu

SEQ ID NO: 341031 - RNA, 23 nt, Human
auuugagaaaguauuuuuaagac

SEQ ID NO: 341032 - RNA, 22 nt, Human
aaaacuaaauacgcuuugccuc

SEQ ID NO: 341033 - RNA, 22 nt, Human
uugcauuuaaguagauguuaca

SEQ ID NO: 341034 - RNA, 22 nt, Human
ucagagagugcaaaauauagcu

SEQ ID NO: 341035 - RNA, 22 nt, Human
guccucuguuagaaaugugcuu

SEQ ID NO: 341036 - RNA, 22 nt, Human
aggccagcuuccagaggggcag

SEQ ID NO: 341037 - RNA, 22 nt, Human
ugaggcaggaauggggaaaagu

SEQ ID NO: 341038 - RNA, 22 nt, Human
uggaggaaguugcuggaaguca

SEQ ID NO: 341039 - RNA, 22 nt, Human
uguucauaucauuuugaaagcu

SEQ ID NO: 341040 - RNA, 22 nt, Human
aagcaccucuaugauugcuuuu

SEQ ID NO: 341041 - RNA, 23 nt, Human
uuuggacuugugacucuucuccu

SEQ ID NO: 341042 - RNA, 22 nt, Human
uguuuuaaagccauugccuuuc

SEQ ID NO: 341043 - RNA, 22 nt, Human
uaauuucacugauaugaaguca

SEQ ID NO: 341044 - RNA, 22 nt, Human
aucaggaucacugggagucuug

SEQ ID NO: 341045 - RNA, 22 nt, Human
gaaacuuacuuacucacauuuc

SEQ ID NO: 341046 - RNA, 22 nt, Human
caguugccuacuacauggcagg

SEQ ID NO: 341047 - RNA, 22 nt, Human
gucaggauuuuaaaaucccagu

SEQ ID NO: 341048 - RNA, 18 nt, Human
acacugcagcagucugcu

SEQ ID NO: 341049 - RNA, 22 nt, Human
uuauggcauauuccucauugua

SEQ ID NO: 341050 - RNA, 19 nt, Human
cccaggagcaguauugaug

SEQ ID NO: 341051 - RNA, 22 nt, Human
uugcaggaaacugagugugagc

SEQ ID NO: 341052 - RNA, 22 nt, Human
uaucuguugucuuuuacaugua

SEQ ID NO: 341053 - RNA, 22 nt, Human
aggcagccaucugcaggaagga

SEQ ID NO: 341054 - RNA, 22 nt, Human
gcucccagacugaccagaggug

SEQ ID NO: 341055 - RNA, 22 nt, Human
aggagggagcuuaagccaggca

SEQ ID NO: 341056 - RNA, 22 nt, Human
auugaaagguuuugagcagaua

SEQ ID NO: 341057 - RNA, 22 nt, Human
ucuuugcaaauguuauuaucuu

SEQ ID NO: 341058 - RNA, 21 nt, Human
cccagggaagccgcagucacc

SEQ ID NO: 341059 - RNA, 22 nt, Human
uuagaacugaagaagauuaagg

SEQ ID NO: 341060 - RNA, 19 nt, Human
uggagaggaaaugcugcuc

SEQ ID NO: 341061 - RNA, 22 nt, Human
ugaacuccaaauacugcugauu

SEQ ID NO: 341062 - RNA, 22 nt, Human
uuuggacuuagccugcagaauu

SEQ ID NO: 341063 - RNA, 22 nt, Human
uuuaaauggcauuuucccagau

SEQ ID NO: 341064 - RNA, 23 nt, Human
uccaugagaugugggcuucuagu

SEQ ID NO: 341065 - RNA, 22 nt, Human
ugcuuugggucucucuaguuuc

SEQ ID NO: 341066 - RNA, 22 nt, Human
augaaacaguguguauagcaaa

SEQ ID NO: 341067 - RNA, 22 nt, Human
caaaugauacuguuuuuagucu

SEQ ID NO: 341068 - RNA, 21 nt, Human
uugaaaguaaauucagcagcu

SEQ ID NO: 341069 - RNA, 22 nt, Human
aucuuucaguuucauaccaauu

SEQ ID NO: 341070 - RNA, 22 nt, Human
aggacagggauucaaacuccca

SEQ ID NO: 341071 - RNA, 22 nt, Human
uucacagauguauuggaacucc

SEQ ID NO: 341072 - RNA, 22 nt, Human
ccaggaugacccccacuuuccu

SEQ ID NO: 341073 - RNA, 22 nt, Human
aacaugcugccuuucuacgagu

SEQ ID NO: 341074 - RNA, 22 nt, Human
auacauacauguaugcacauac

SEQ ID NO: 341075 - RNA, 22 nt, Human
ugaggcagggaguuuaauuguc

SEQ ID NO: 341076 - RNA, 17 nt, Human
caaggccagcaucuuca

SEQ ID NO: 341077 - RNA, 22 nt, Human
uuugaaguucccccauaucaga

SEQ ID NO: 341078 - RNA, 22 nt, Human
aggggagguggcagaaaugugc

SEQ ID NO: 341079 - RNA, 22 nt, Human
uauuuccaccuauuauuuucug

SEQ ID NO: 341080 - RNA, 22 nt, Human
caaggccaguucaccaagggca

SEQ ID NO: 341081 - RNA, 22 nt, Human
ucucuguaguugggcagcugcu

SEQ ID NO: 341082 - RNA, 22 nt, Human
cagucucucugaaguauuaaga

SEQ ID NO: 341083 - RNA, 19 nt, Human
ugagaggcuuaaggcagcu

SEQ ID NO: 341084 - RNA, 22 nt, Human
acacaaauuguaggauaauugc

SEQ ID NO: 341085 - RNA, 19 nt, Human
aauacaguguuauagaauu

SEQ ID NO: 341086 - RNA, 22 nt, Human
gcagaggcuguagggaagguug

SEQ ID NO: 341087 - RNA, 16 nt, Human
auuuccagauuaugca

SEQ ID NO: 341088 - RNA, 22 nt, Human
ugaggcaggacuugcauaaagu

SEQ ID NO: 341089 - RNA, 22 nt, Human
ucaggauaaaauguaauggcaa

SEQ ID NO: 341090 - RNA, 22 nt, Human
cuauuacauuucuggacauuca

SEQ ID NO: 341091 - RNA, 22 nt, Human
ugagacaguuuuucuauuucca

SEQ ID NO: 341092 - RNA, 22 nt, Human
gagggcauaguuaaauaggagg

SEQ ID NO: 341093 - RNA, 20 nt, Human
cugagagucugugcuuaguc

SEQ ID NO: 341094 - RNA, 22 nt, Human
cucaggaucgcuugcccuaggg

SEQ ID NO: 341095 - RNA, 23 nt, Human
agaugaggcuucuccauguuggu

SEQ ID NO: 341096 - RNA, 22 nt, Human
agggagcuaggauccugaaggu

SEQ ID NO: 341097 - RNA, 22 nt, Human
ucacauucucagcaucuauaca

SEQ ID NO: 341098 - RNA, 22 nt, Human
aggagaggguggcauuaaguuu

SEQ ID NO: 341099 - RNA, 22 nt, Human
cauggagauaaacugaaauauu

SEQ ID NO: 341100 - RNA, 22 nt, Human
cccaggaggccaagguugcagu

SEQ ID NO: 341101 - RNA, 22 nt, Human
uccaugaguuugaggaaaagag

SEQ ID NO: 341102 - RNA, 22 nt, Human
ggcucagacucccaggcccucu

SEQ ID NO: 341103 - RNA, 22 nt, Human
aauguauggauucaugucugug

SEQ ID NO: 341104 - RNA, 22 nt, Human
uuaacaauagaguuucuucagg

SEQ ID NO: 341105 - RNA, 22 nt, Human
gggcagcucucacagcagccaa

SEQ ID NO: 341106 - RNA, 22 nt, Human
acaagguauccacauuaaaugu

SEQ ID NO: 341107 - RNA, 22 nt, Human
ugccaggagucaggccaggcag

SEQ ID NO: 341108 - RNA, 20 nt, Human
aucaggauucuugcuuuguu

SEQ ID NO: 341109 - RNA, 22 nt, Human
cuauuucaaggcccagauauga

SEQ ID NO: 341110 - RNA, 22 nt, Human
uucugucacuuuuuuggaaucu

SEQ ID NO: 341111 - RNA, 22 nt, Human
gaggccagaagugccucgggcu

SEQ ID NO: 341112 - RNA, 22 nt, Human
uacauucagcaaaagaaugguu

SEQ ID NO: 341113 - RNA, 22 nt, Human
aucauucuagcuguuguguuga

SEQ ID NO: 341114 - RNA, 22 nt, Human
gaaagauauuuauuggcaacag

SEQ ID NO: 341115 - RNA, 22 nt, Human
auucugucuuuuuauacaucua

SEQ ID NO: 341116 - RNA, 22 nt, Human
gaaucucaaggcuugugaggau

SEQ ID NO: 341117 - RNA, 22 nt, Human
auuugcuucugugaaaucaagu

SEQ ID NO: 341118 - RNA, 22 nt, Human
ucugcugugauuugcuaccugu

SEQ ID NO: 341119 - RNA, 17 nt, Human
caagagagaugacugga

SEQ ID NO: 341120 - RNA, 22 nt, Human
auuacucugucugccucugacc

SEQ ID NO: 341121 - RNA, 22 nt, Human
aguguuugagacacauuucacu

SEQ ID NO: 341122 - RNA, 22 nt, Human
ugaaguuauauauguugaaaau

SEQ ID NO: 341123 - RNA, 22 nt, Human
cccaagagcuucuaggacgcug

SEQ ID NO: 341124 - RNA, 22 nt, Human
uuuacauuucccucugucaguu

SEQ ID NO: 341125 - RNA, 22 nt, Human
cccaggagguggaguucacagu

SEQ ID NO: 341126 - RNA, 22 nt, Human
auuguucaaagugcuuugcaug

SEQ ID NO: 341127 - RNA, 22 nt, Human
uauaauuuggggaaaguggugu

SEQ ID NO: 341128 - RNA, 22 nt, Human
gaagcagcugccagagaugucu

SEQ ID NO: 341129 - RNA, 22 nt, Human
cggagaggugggggcagcaucu

SEQ ID NO: 341130 - RNA, 22 nt, Human
aaaauuauagaucuagugccug

SEQ ID NO: 341131 - RNA, 22 nt, Human
aaggcagccuuuguuugauuga

SEQ ID NO: 341132 - RNA, 22 nt, Human
cugcuguguuggcauuggauag

SEQ ID NO: 341133 - RNA, 22 nt, Human
uuuccuaggagauugaucacau

SEQ ID NO: 341134 - RNA, 22 nt, Human
aaugagacacgugaagcagaug

SEQ ID NO: 341135 - RNA, 22 nt, Human
cugcuguggccagccaggucaa

SEQ ID NO: 341136 - RNA, 15 nt, Human
uucaggauaugacuc

SEQ ID NO: 341137 - RNA, 22 nt, Human
agcaccaugaccuugccauuga

SEQ ID NO: 341138 - RNA, 22 nt, Human
uucaauucuaaacuaauauucu

SEQ ID NO: 341139 - RNA, 22 nt, Human
aggcuagcuuuggcucaguaaa

SEQ ID NO: 341140 - RNA, 22 nt, Human
uaucuuguaauagguccacuug

SEQ ID NO: 341141 - RNA, 22 nt, Human
ucauuucaaguucugacagcua

SEQ ID NO: 341142 - RNA, 22 nt, Human
aaaggccaagcaugagguggac

SEQ ID NO: 341143 - RNA, 22 nt, Human
aaauauagugacacuuauaguc

SEQ ID NO: 341144 - RNA, 22 nt, Human
uuuaaauuuguguuuagagggu

SEQ ID NO: 341145 - RNA, 22 nt, Human
uguccucagauaugucuacucu

SEQ ID NO: 341146 - RNA, 22 nt, Human
cuuaaaaucuggcaguuagcua

SEQ ID NO: 341147 - RNA, 22 nt, Human
cccaggaagagugaguggcauu

SEQ ID NO: 341148 - RNA, 22 nt, Human
ucugaaagaagggcagucuuuu

SEQ ID NO: 341149 - RNA, 22 nt, Human
uuugaauagcauaggauuacau

SEQ ID NO: 341150 - RNA, 22 nt, Human
uacuuuuuagcacagugugugc

SEQ ID NO: 341151 - RNA, 22 nt, Human
uuccaugaaggagacugagaag

SEQ ID NO: 341152 - RNA, 22 nt, Human
gaaacauaguugagacacugcu

SEQ ID NO: 341153 - RNA, 22 nt, Human
cuguauuucccacauucucuau

SEQ ID NO: 341154 - RNA, 22 nt, Human
cugucccuucauuauucacuac

SEQ ID NO: 341155 - RNA, 22 nt, Human
aaugucugagucucuguauccc

SEQ ID NO: 341156 - RNA, 23 nt, Human
uccaggagaauuccagggcccgg

SEQ ID NO: 341157 - RNA, 22 nt, Human
cucagugugaaugcucaguaaa

SEQ ID NO: 341158 - RNA, 21 nt, Human
uccaggagcacgggacuagga

SEQ ID NO: 341159 - RNA, 22 nt, Human
acuaaauacacacauuuguuca

SEQ ID NO: 341160 - RNA, 22 nt, Human
uguuugaaacuuugaucacuaa

SEQ ID NO: 341161 - RNA, 22 nt, Human
gaggcaguuugccaugccagga

SEQ ID NO: 341162 - RNA, 22 nt, Human
ggggggugcugaucaguggagc

SEQ ID NO: 341163 - RNA, 22 nt, Human
agcugcccuguggggaggguug

SEQ ID NO: 341164 - RNA, 22 nt, Human
ugcuguguggaugugaagaauc

SEQ ID NO: 341165 - RNA, 22 nt, Human
auuuguugcuagcagcacugau

SEQ ID NO: 341166 - RNA, 19 nt, Human
auguaugaggucuucugcu

SEQ ID NO: 341167 - RNA, 19 nt, Human
cccucuugcacaaagcaaa

SEQ ID NO: 341168 - RNA, 22 nt, Human
auucauuugcuauuguguaugg

SEQ ID NO: 341169 - RNA, 22 nt, Human
ugaguucucacccauucuucuu

SEQ ID NO: 341170 - RNA, 22 nt, Human
cuuuuauuuugaauuaagggcu

SEQ ID NO: 341171 - RNA, 17 nt, Human
agcugaccagauggacu

SEQ ID NO: 341172 - RNA, 22 nt, Human
aaggcagcaggauuuggugacu

SEQ ID NO: 341173 - RNA, 22 nt, Human
uucuucuucaagugcugcauuc

SEQ ID NO: 341174 - RNA, 22 nt, Human
caucacccggaacugugucugc

SEQ ID NO: 341175 - RNA, 22 nt, Human
aaaggugacugcagcagcuauu

SEQ ID NO: 341176 - RNA, 22 nt, Human
cauuuguagcuauuuacuguau

SEQ ID NO: 341177 - RNA, 22 nt, Human
uuuucguuuauuugacauguaa

SEQ ID NO: 341178 - RNA, 22 nt, Human
aauguaugugcaucauuuacau

SEQ ID NO: 341179 - RNA, 22 nt, Human
agacccagaaagcagcugcauu

SEQ ID NO: 341180 - RNA, 22 nt, Human
cauaauaucuccgauuacuugc

SEQ ID NO: 341181 - RNA, 22 nt, Human
uugcugaaaacaguggguauug

SEQ ID NO: 341182 - RNA, 22 nt, Human
cuccaggaaaauagggaaugag

SEQ ID NO: 341183 - RNA, 22 nt, Human
aggccagccucaggcagggacc

SEQ ID NO: 341184 - RNA, 22 nt, Human
uguauaaacuuaagcaggaacc

SEQ ID NO: 341185 - RNA, 22 nt, Human
gccaggaguguguggcuauguu

SEQ ID NO: 341186 - RNA, 22 nt, Human
uauuuuaaagugaagggucuug

SEQ ID NO: 341187 - RNA, 22 nt, Human
agcagagguguuuauuauggga

SEQ ID NO: 341188 - RNA, 22 nt, Human
gcaggagaaaugaagauugggu

SEQ ID NO: 341189 - RNA, 22 nt, Human
ugagaacugaggauuugaauuc

SEQ ID NO: 341190 - RNA, 23 nt, Human
uucuuucaagaaguucacagugc

SEQ ID NO: 341191 - RNA, 22 nt, Human
uccugagagcagcugcuuugga

SEQ ID NO: 341192 - RNA, 22 nt, Human
uuaauacaagcauaugcacaca

SEQ ID NO: 341193 - RNA, 21 nt, Human
uugaccaagggugcgugcucc

SEQ ID NO: 341194 - RNA, 22 nt, Human
ugaaaugacaaagguuuuucuu

SEQ ID NO: 341195 - RNA, 22 nt, Human
ucccaggaaugucugaaaguga

SEQ ID NO: 341196 - RNA, 22 nt, Human
uuugaaagagcugauacaugaa

SEQ ID NO: 341197 - RNA, 22 nt, Human
aguaugaagauuauaauuuuuc

SEQ ID NO: 341198 - RNA, 22 nt, Human
uuagccauuuuauacaagugua

SEQ ID NO: 341199 - RNA, 22 nt, Human
augugaggcagcacggagauua

SEQ ID NO: 341200 - RNA, 22 nt, Human
cacaugcaucugucauguuugg

SEQ ID NO: 341201 - RNA, 22 nt, Human
uucuccaacacaagcaugaugu

SEQ ID NO: 341202 - RNA, 22 nt, Human
aucuuucuauuucuaaaaacua

SEQ ID NO: 341203 - RNA, 22 nt, Human
agugcuuuaccuagauaauguu

SEQ ID NO: 341204 - RNA, 22 nt, Human
cuccccagguucaggagguggg

SEQ ID NO: 341205 - RNA, 22 nt, Human
ucucauugguauauacaugugu

SEQ ID NO: 341206 - RNA, 19 nt, Human
ccaggagagcuuggagaag

SEQ ID NO: 341207 - RNA, 16 nt, Human
ucccaggaggcggaac

SEQ ID NO: 341208 - RNA, 22 nt, Human
uagcuaucuguguccagaucca

SEQ ID NO: 341209 - RNA, 22 nt, Human
cuuagaaaucgaacucagguua

SEQ ID NO: 341210 - RNA, 22 nt, Human
aguuagaaaguaaaucauuuga

SEQ ID NO: 341211 - RNA, 22 nt, Human
gcauguguggaggagaugugcu

SEQ ID NO: 341212 - RNA, 22 nt, Human
uggcagcugcguuguguuucug

SEQ ID NO: 341213 - RNA, 22 nt, Human
uaggagaggugaauggcacacu

SEQ ID NO: 341214 - RNA, 19 nt, Human
agccuggcuuugcucugcu

SEQ ID NO: 341215 - RNA, 22 nt, Human
aguuauuacucuuuaacauauu

SEQ ID NO: 341216 - RNA, 22 nt, Human
cccaaggacacgggcagggaca

SEQ ID NO: 341217 - RNA, 23 nt, Human
uggcagcuguguaagagaaagca

SEQ ID NO: 341218 - RNA, 22 nt, Human
uucuucuucauuucugacgaug

SEQ ID NO: 341219 - RNA, 22 nt, Human
gucuucuuuaaccuacuaaagc

SEQ ID NO: 341220 - RNA, 22 nt, Human
gugaaggacuagcauggagggc

SEQ ID NO: 341221 - RNA, 22 nt, Human
gaggcagcagaacauggaagag

SEQ ID NO: 341222 - RNA, 22 nt, Human
cauguuuacuaccaggagaaug

SEQ ID NO: 341223 - RNA, 21 nt, Human
auucugucaucccagcuacuu

SEQ ID NO: 341224 - RNA, 22 nt, Human
aggguaggaacugaguggaagg

SEQ ID NO: 341225 - RNA, 22 nt, Human
auacuucuuugauguucacagg

SEQ ID NO: 341226 - RNA, 22 nt, Human
uuacaagcagcuacauaucaca

SEQ ID NO: 341227 - RNA, 22 nt, Human
cagagccauuauggagacuugc

SEQ ID NO: 341228 - RNA, 22 nt, Human
cugcuuuguaaaauagacauaa

SEQ ID NO: 341229 - RNA, 22 nt, Human
uuauacuaaaacgcauugaauu

SEQ ID NO: 341230 - RNA, 22 nt, Human
uaugaacuguacuguacuaagc

SEQ ID NO: 341231 - RNA, 22 nt, Human
gaggcugcccaacuggagugga

SEQ ID NO: 341232 - RNA, 22 nt, Human
cauacaagcguucaauagaugu

SEQ ID NO: 341233 - RNA, 22 nt, Human
aggcaccuugcgguccagugaa

SEQ ID NO: 341234 - RNA, 22 nt, Human
ggaccuggcaauuugcaucucu

SEQ ID NO: 341235 - RNA, 22 nt, Human
aaguauaagcuauucuucauga

SEQ ID NO: 341236 - RNA, 22 nt, Human
uccucagacuucccuuugugua

SEQ ID NO: 341237 - RNA, 22 nt, Human
uccauuuuucaugacuccucaa

SEQ ID NO: 341238 - RNA, 22 nt, Human
ucacaauacucacucaauggcu

SEQ ID NO: 341239 - RNA, 22 nt, Human
ccaggacagugaacauguaaga

SEQ ID NO: 341240 - RNA, 22 nt, Human
ucauauaacuggauauuuucaa

SEQ ID NO: 341241 - RNA, 22 nt, Human
auuugcuuuuacuauguuaaaa

SEQ ID NO: 341242 - RNA, 22 nt, Human
gaggggagacagggaaaucagu

SEQ ID NO: 341243 - RNA, 19 nt, Human
uuagccauccacagugaaa

SEQ ID NO: 341244 - RNA, 22 nt, Human
ucuuagaaguuuauggcacgga

SEQ ID NO: 341245 - RNA, 22 nt, Human
caguuucuuggaugccaauuuc

SEQ ID NO: 341246 - RNA, 22 nt, Human
acaaucauuccguucacaacag

SEQ ID NO: 341247 - RNA, 18 nt, Human
uaggagagaauuuauuua

SEQ ID NO: 341248 - RNA, 22 nt, Human
caugaaauugcuccuuuggugc

SEQ ID NO: 341249 - RNA, 22 nt, Human
uagcuuuccuuguugccugugc

SEQ ID NO: 341250 - RNA, 22 nt, Human
uaucauuguguuauuucuucca

SEQ ID NO: 341251 - RNA, 19 nt, Human
augucuggguaacagcugc

SEQ ID NO: 341252 - RNA, 22 nt, Human
gaaauauugggacucagagcuu

SEQ ID NO: 341253 - RNA, 22 nt, Human
gcugccagccaacuugcugugc

SEQ ID NO: 341254 - RNA, 22 nt, Human
caggacagagcccagacugugu

SEQ ID NO: 341255 - RNA, 22 nt, Human
uguuguuuucucauggagaaua

SEQ ID NO: 341256 - RNA, 22 nt, Human
cuugcugucccuugguaugaac

SEQ ID NO: 341257 - RNA, 22 nt, Human
caggcagccuucucgucucaca

SEQ ID NO: 341258 - RNA, 22 nt, Human
aggcggcuccgggagugugggc

SEQ ID NO: 341259 - RNA, 22 nt, Human
cuuugcaaacgauuaccacaug

SEQ ID NO: 341260 - RNA, 22 nt, Human
uuauuauagauuaugcaagauu

SEQ ID NO: 341261 - RNA, 22 nt, Human
aaagcagacugauuugcaucac

SEQ ID NO: 341262 - RNA, 22 nt, Human
uagcccagcaugagcagagcug

SEQ ID NO: 341263 - RNA, 22 nt, Human
uucagaaugugaccuuauuugg

SEQ ID NO: 341264 - RNA, 22 nt, Human
cagaccucaguccucaguagga

SEQ ID NO: 341265 - RNA, 23 nt, Human
ucucaagaggaagcagggcucau

SEQ ID NO: 341266 - RNA, 22 nt, Human
cuguuucaagugaagucagaca

SEQ ID NO: 341267 - RNA, 22 nt, Human
cuugcaggauuuugcugcugua

SEQ ID NO: 341268 - RNA, 19 nt, Human
agcauuuggaauucuacac

SEQ ID NO: 341269 - RNA, 21 nt, Human
ugaaaugagaaugcugagcac

SEQ ID NO: 341270 - RNA, 22 nt, Human
uuggaaagcaagcuggacauac

SEQ ID NO: 341271 - RNA, 23 nt, Human
uaugaacugcauugcuggugugu

SEQ ID NO: 341272 - RNA, 22 nt, Human
auugugcaaauauuaucuguag

SEQ ID NO: 341273 - RNA, 22 nt, Human
uccauucauucauugaugaaca

SEQ ID NO: 341274 - RNA, 22 nt, Human
caggcagcugcuggguucagcc

SEQ ID NO: 341275 - RNA, 22 nt, Human
ucuuugcaggccaaauuguuaa

SEQ ID NO: 341276 - RNA, 22 nt, Human
caauacuuccuuguuagaggca

SEQ ID NO: 341277 - RNA, 22 nt, Human
acaugauuuuuaaagagauaau

SEQ ID NO: 341278 - RNA, 22 nt, Human
gccaggagacuccauucauuug

SEQ ID NO: 341279 - RNA, 22 nt, Human
uuuaacagaugcuaugucuacc

SEQ ID NO: 341280 - RNA, 22 nt, Human
cuugaaagcuuugcgucuucua

SEQ ID NO: 341281 - RNA, 22 nt, Human
ggagagugggagcaacuguugc

SEQ ID NO: 341282 - RNA, 22 nt, Human
aggaggcacucacucucagggu

SEQ ID NO: 341283 - RNA, 20 nt, Human
augugaaagaucaguugucu

SEQ ID NO: 341284 - RNA, 22 nt, Human
gaccauuuguugaaaagauuau

SEQ ID NO: 341285 - RNA, 22 nt, Human
acugauuacacgaguucugacu

SEQ ID NO: 341286 - RNA, 21 nt, Human
ugaggcaggggugcuuuuguc

SEQ ID NO: 341287 - RNA, 19 nt, Human
gcuuuggagggagguucua

SEQ ID NO: 341288 - RNA, 22 nt, Human
ccccaggagaaaucuuaaacua

SEQ ID NO: 341289 - RNA, 22 nt, Human
ucuaaccuuugaaacugcuuuc

SEQ ID NO: 341290 - RNA, 20 nt, Human
gggagucuggaugaaagaug

SEQ ID NO: 341291 - RNA, 22 nt, Human
auggaaagugcauggaagucau

SEQ ID NO: 341292 - RNA, 22 nt, Human
uuuccuaguucuaagaaaugua

SEQ ID NO: 341293 - RNA, 22 nt, Human
uuucauugaugggugauagaaa

SEQ ID NO: 341294 - RNA, 22 nt, Human
ugcuguggcaguuuauguauag

SEQ ID NO: 341295 - RNA, 22 nt, Human
gagaggugaaggcugcccuggg

SEQ ID NO: 341296 - RNA, 22 nt, Human
gaggagagagggacugucugca

SEQ ID NO: 341297 - RNA, 20 nt, Human
acaggggcagcacaauaaug

SEQ ID NO: 341298 - RNA, 22 nt, Human
ucaucuugcugccauugcuuua

SEQ ID NO: 341299 - RNA, 22 nt, Human
ccucaggggucacugugaggag

SEQ ID NO: 341300 - RNA, 22 nt, Human
uugauacauuuuuaggauaaac

SEQ ID NO: 341301 - RNA, 18 nt, Human
acugugugaauuagcucc

SEQ ID NO: 341302 - RNA, 21 nt, Human
auacacauacacauaaaugug

SEQ ID NO: 341303 - RNA, 22 nt, Human
augcugugauuguagaaauauu

SEQ ID NO: 341304 - RNA, 22 nt, Human
aggaugaggcuggcaggucuug

SEQ ID NO: 341305 - RNA, 22 nt, Human
auacaaagacaaaucucaaucu

SEQ ID NO: 341306 - RNA, 23 nt, Human
aaacuacauuuauaguuuuucuc

SEQ ID NO: 341307 - RNA, 22 nt, Human
uggaggaaaaaaccaggcagag

SEQ ID NO: 341308 - RNA, 20 nt, Human
ccagaagagaugaucaucca

SEQ ID NO: 341309 - RNA, 22 nt, Human
uucuucuugaaacuuuagguug

SEQ ID NO: 341310 - RNA, 22 nt, Human
agggggugcccagaugaaggau

SEQ ID NO: 341311 - RNA, 22 nt, Human
uaaucuguguaccuucaucgga

SEQ ID NO: 341312 - RNA, 22 nt, Human
uccuuagagauacugucuugaa

SEQ ID NO: 341313 - RNA, 22 nt, Human
ccacagagacaggguccuugcu

SEQ ID NO: 341314 - RNA, 22 nt, Human
gucuccugagacugcagucacc

SEQ ID NO: 341315 - RNA, 22 nt, Human
aaaguucuuucucuuauuuggu

SEQ ID NO: 341316 - RNA, 22 nt, Human
auguagaauggugauuggcagg

SEQ ID NO: 341317 - RNA, 20 nt, Human
ggggcugcaugcagagaaga

SEQ ID NO: 341318 - RNA, 23 nt, Human
cuuuuaacuugaucugagaccag

SEQ ID NO: 341319 - RNA, 22 nt, Human
uucuucagucccacuagccaca

SEQ ID NO: 341320 - RNA, 22 nt, Human
gccaggaggcugcuguguaggc

SEQ ID NO: 341321 - RNA, 22 nt, Human
uaggaaauggcucaguuacugc

SEQ ID NO: 341322 - RNA, 22 nt, Human
auugucuuuccacugagaaguu

SEQ ID NO: 341323 - RNA, 22 nt, Human
ugcugaugcuguucuguuagga

SEQ ID NO: 341324 - RNA, 22 nt, Human
gcaguucuacuuauccauagac

SEQ ID NO: 341325 - RNA, 22 nt, Human
uuugcagugauucuugcaguga

SEQ ID NO: 341326 - RNA, 22 nt, Human
aaguauuucuggccugugaaag

SEQ ID NO: 341327 - RNA, 22 nt, Human
cagaagaggacuggguagcuca

SEQ ID NO: 341328 - RNA, 22 nt, Human
gaggcagagugcaccccaggag

SEQ ID NO: 341329 - RNA, 22 nt, Human
guguguuuagcauuagcagggg

SEQ ID NO: 341330 - RNA, 22 nt, Human
ugaggcagguggauuacaaggu

SEQ ID NO: 341331 - RNA, 22 nt, Human
cugccaucugagccaaaagugc

SEQ ID NO: 341332 - RNA, 22 nt, Human
ucauacaauucaaucucugauu

SEQ ID NO: 341333 - RNA, 22 nt, Human
uauuuguauguguguacauaua

SEQ ID NO: 341334 - RNA, 22 nt, Human
uuuggaaugguaccuucaguug

SEQ ID NO: 341335 - RNA, 22 nt, Human
auacaacagaaaaugauuauuc

SEQ ID NO: 341336 - RNA, 22 nt, Human
uccaggagggggagccgugccg

SEQ ID NO: 341337 - RNA, 22 nt, Human
uguaugaagacuucuucugugu

SEQ ID NO: 341338 - RNA, 22 nt, Human
auucacaguuuccucauauucu

SEQ ID NO: 341339 - RNA, 22 nt, Human
caagagagaugcagcucacuca

SEQ ID NO: 341340 - RNA, 22 nt, Human
uauauguaaauaagucuaaugu

SEQ ID NO: 341341 - RNA, 22 nt, Human
uuaguuuucccaucuuuauggu

SEQ ID NO: 341342 - RNA, 21 nt, Human
uucucagaucgaguagugaga

SEQ ID NO: 341343 - RNA, 22 nt, Human
ggauggcauguugggcucuguu

SEQ ID NO: 341344 - RNA, 22 nt, Human
gcugcugucacggugcuaaggg

SEQ ID NO: 341345 - RNA, 22 nt, Human
aggcagaggagaaugaucuucc

SEQ ID NO: 341346 - RNA, 22 nt, Human
guguaugagccuccagcugggc

SEQ ID NO: 341347 - RNA, 22 nt, Human
cccaggagcuucucucugccuc

SEQ ID NO: 341348 - RNA, 23 nt, Human
agggagcuaaaaggcuggagcag

SEQ ID NO: 341349 - RNA, 22 nt, Human
gggcagcucugcccaucagagg

SEQ ID NO: 341350 - RNA, 20 nt, Human
ggcagcuugggcagcaguua

SEQ ID NO: 341351 - RNA, 22 nt, Human
agagggauaauauguauuguaa

SEQ ID NO: 341352 - RNA, 22 nt, Human
agaccgagaaguucuccaggcc

SEQ ID NO: 341353 - RNA, 22 nt, Human
augugaggaagaaagagguaag

SEQ ID NO: 341354 - RNA, 22 nt, Human
aaugucauugguaaagauuagg

SEQ ID NO: 341355 - RNA, 22 nt, Human
ggugaagggugucauggcauuu

SEQ ID NO: 341356 - RNA, 22 nt, Human
cccaggagguggagguugcggu

SEQ ID NO: 341357 - RNA, 20 nt, Human
uuucaagucagcaauucuca

SEQ ID NO: 341358 - RNA, 22 nt, Human
ggcuuggaaaugguaaugagcu

SEQ ID NO: 341359 - RNA, 22 nt, Human
ucaguucuuuauuucacaguga

SEQ ID NO: 341360 - RNA, 22 nt, Human
ucugcuguaaagaauuucugcc

SEQ ID NO: 341361 - RNA, 22 nt, Human
ucuuugaauucaaacuguucaa

SEQ ID NO: 341362 - RNA, 22 nt, Human
cccaggaaaagcagugccagca

SEQ ID NO: 341363 - RNA, 23 nt, Human
uuucacaaugagcauuacagaau

SEQ ID NO: 341364 - RNA, 22 nt, Human
gagcagcugagcuggaaugaga

SEQ ID NO: 341365 - RNA, 22 nt, Human
ucagcugcucaaauuuauguca

SEQ ID NO: 341366 - RNA, 22 nt, Human
aggcaggcaaccaccugggaag

SEQ ID NO: 341367 - RNA, 22 nt, Human
agucugucugucacuucugcag

SEQ ID NO: 341368 - RNA, 22 nt, Human
auguuucaaugcacuuuagccu

SEQ ID NO: 341369 - RNA, 22 nt, Human
gagguggaaggcaggaacaaau

SEQ ID NO: 341370 - RNA, 22 nt, Human
uaaaguuuggcagacaauaaca

SEQ ID NO: 341371 - RNA, 22 nt, Human
uaacacauauuucaagaguagu

SEQ ID NO: 341372 - RNA, 22 nt, Human
agggcagccucucagccuaggu

SEQ ID NO: 341373 - RNA, 19 nt, Human
acaaaugauguugcacuga

SEQ ID NO: 341374 - RNA, 22 nt, Human
uuagccauuaaauuacaaggug

SEQ ID NO: 341375 - RNA, 22 nt, Human
ugaaucugauuucccuggaggc

SEQ ID NO: 341376 - RNA, 22 nt, Human
ccucaugguacuuacuguagcu

SEQ ID NO: 341377 - RNA, 22 nt, Human
aagggcagccugacucacgguc

SEQ ID NO: 341378 - RNA, 22 nt, Human
cagcugccugucuggaggcaau

SEQ ID NO: 341379 - RNA, 22 nt, Human
ugccaggauggccagggggcca

SEQ ID NO: 341380 - RNA, 22 nt, Human
gccaggagagcuccuucagguu

SEQ ID NO: 341381 - RNA, 22 nt, Human
aggcagugcugugcccugaacc

SEQ ID NO: 341382 - RNA, 22 nt, Human
uagcacaucuucuuggccugca

SEQ ID NO: 341383 - RNA, 22 nt, Human
uucuucuuuccuauaauuaauu

SEQ ID NO: 341384 - RNA, 22 nt, Human
caggcagcaggagcccugcucg

SEQ ID NO: 341385 - RNA, 22 nt, Human
cuguuaaucugcuugcaugaug

SEQ ID NO: 341386 - RNA, 22 nt, Human
aucugccuggcuccaggugagc

SEQ ID NO: 341387 - RNA, 22 nt, Human
aggcaagcauuuaaccacucau

SEQ ID NO: 341388 - RNA, 22 nt, Human
uuucuuaguccuagagugauuu

SEQ ID NO: 341389 - RNA, 22 nt, Human
aauucuguuacuaaugugaugu

SEQ ID NO: 341390 - RNA, 17 nt, Human
cccaugagcccacuccc

SEQ ID NO: 341391 - RNA, 22 nt, Human
cuguaguugaugauuucugaua

SEQ ID NO: 341392 - RNA, 23 nt, Human
uuugaaguugacugccuuccaga

SEQ ID NO: 341393 - RNA, 22 nt, Human
uagaauucauguuacuguuagc

SEQ ID NO: 341394 - RNA, 22 nt, Human
agucauaugacccuucacaaac

SEQ ID NO: 341395 - RNA, 22 nt, Human
ggccagcucugcacagcagcug

SEQ ID NO: 341396 - RNA, 22 nt, Human
ccucuucuagguuucagccugc

SEQ ID NO: 341397 - RNA, 22 nt, Human
gacccaggguauccagagcugc

SEQ ID NO: 341398 - RNA, 22 nt, Human
uacauguauguguacgugcaug

SEQ ID NO: 341399 - RNA, 22 nt, Human
gccaggagaaugcuagcagagg

SEQ ID NO: 341400 - RNA, 22 nt, Human
cucaucugauaaaucacucuua

SEQ ID NO: 341401 - RNA, 22 nt, Human
aggcugcugccuuggagagugu

SEQ ID NO: 341402 - RNA, 22 nt, Human
cucuucuugcuagacugagugc

SEQ ID NO: 341403 - RNA, 23 nt, Human
acugucugauauguuuuccauca

SEQ ID NO: 341404 - RNA, 22 nt, Human
gauuucuuuagguguaauagug

SEQ ID NO: 341405 - RNA, 22 nt, Human
acaugcauaggagaagucuuua

SEQ ID NO: 341406 - RNA, 23 nt, Human
gugagucuugccuuugcugugga

SEQ ID NO: 341407 - RNA, 22 nt, Human
gaaggccaguuuugagauaggu

SEQ ID NO: 341408 - RNA, 22 nt, Human
accauccugaaaccuucaugcu

SEQ ID NO: 341409 - RNA, 22 nt, Human
uggcagagugcagaagaggcau

SEQ ID NO: 341410 - RNA, 22 nt, Human
ucugucuucaucagcaugugau

SEQ ID NO: 341411 - RNA, 22 nt, Human
cccuggagguggagguugcagg

SEQ ID NO: 341412 - RNA, 22 nt, Human
uuugaaagucaaccuuccaguu

SEQ ID NO: 341413 - RNA, 22 nt, Human
cugcuguggugucaagcaucuc

SEQ ID NO: 341414 - RNA, 22 nt, Human
ucauuuguugcuguuaccugag

SEQ ID NO: 341415 - RNA, 22 nt, Human
ugacaguuaagguauacauuca

SEQ ID NO: 341416 - RNA, 22 nt, Human
cccaggaggacauuccauaccc

SEQ ID NO: 341417 - RNA, 22 nt, Human
agcccagggacagggcggaugu

SEQ ID NO: 341418 - RNA, 22 nt, Human
ccaggcugccgaggaaagaaag

SEQ ID NO: 341419 - RNA, 22 nt, Human
ugugugucagagucuccauggu

SEQ ID NO: 341420 - RNA, 22 nt, Human
ucaggagacaaagggugcggag

SEQ ID NO: 341421 - RNA, 22 nt, Human
ccaggagacuguacugauauuu

SEQ ID NO: 341422 - RNA, 22 nt, Human
uauaucaccaaaaacaguucug

SEQ ID NO: 341423 - RNA, 19 nt, Human
ucaucucacagggccuggc

SEQ ID NO: 341424 - RNA, 22 nt, Human
gguaugaaaugauuccauguua

SEQ ID NO: 341425 - RNA, 22 nt, Human
uguaggccuauguccagcaauu

SEQ ID NO: 341426 - RNA, 23 nt, Human
cccauuuucauguuaacuccugg

SEQ ID NO: 341427 - RNA, 22 nt, Human
ggcaugcugcguacagaugaac

SEQ ID NO: 341428 - RNA, 23 nt, Human
auggaagucacuguuuucuuguc

SEQ ID NO: 341429 - RNA, 19 nt, Human
aaacacagauuucuuacca

SEQ ID NO: 341430 - RNA, 22 nt, Human
cugcucuaauaucagauagacu

SEQ ID NO: 341431 - RNA, 22 nt, Human
auuugcuugugcuaugaaaguu

SEQ ID NO: 341432 - RNA, 22 nt, Human
aguacauauaguaauuuagcca

SEQ ID NO: 341433 - RNA, 22 nt, Human
ggugaguugggguucacagguc

SEQ ID NO: 341434 - RNA, 22 nt, Human
uucucagaauugacugggagca

SEQ ID NO: 341435 - RNA, 22 nt, Human
uccagccuaggggaacagcugc

SEQ ID NO: 341436 - RNA, 22 nt, Human
uacuaucucuucuaacuucaga

SEQ ID NO: 341437 - RNA, 22 nt, Human
aaggccagccugagagcuaaca

SEQ ID NO: 341438 - RNA, 23 nt, Human
aaugauuucaugaugauagcagc

SEQ ID NO: 341439 - RNA, 18 nt, Human
uggcagcuagguaaagaa

SEQ ID NO: 341440 - RNA, 22 nt, Human
uucugucaugcucauguaauug

SEQ ID NO: 341441 - RNA, 22 nt, Human
augaggcaucugcagucacuag

SEQ ID NO: 341442 - RNA, 22 nt, Human
ucugcaggcucuagaugagguu

SEQ ID NO: 341443 - RNA, 20 nt, Human
uuucacaaugaacaugucuc

SEQ ID NO: 341444 - RNA, 22 nt, Human
ucugggaauuuauuggcacuuu

SEQ ID NO: 341445 - RNA, 22 nt, Human
aacugcuguggccuaguacuua

SEQ ID NO: 341446 - RNA, 22 nt, Human
ugccgcagugcggggagggccc

SEQ ID NO: 341447 - RNA, 22 nt, Human
gcccaggagguugggcugugca

SEQ ID NO: 341448 - RNA, 22 nt, Human
ucugauuagagcauucuugagu

SEQ ID NO: 341449 - RNA, 21 nt, Human
cccaggagaagaaaagaugca

SEQ ID NO: 341450 - RNA, 17 nt, Human
aggcaggcagagcggga

SEQ ID NO: 341451 - RNA, 22 nt, Human
auuucauacuaaggcucaaaaa

SEQ ID NO: 341452 - RNA, 23 nt, Human
gggcaguuauguuguccuuggcu

SEQ ID NO: 341453 - RNA, 22 nt, Human
ugcuagugcaggguuuucaguu

SEQ ID NO: 341454 - RNA, 22 nt, Human
gcccaggacucagggugucgcg

SEQ ID NO: 341455 - RNA, 22 nt, Human
auuacaguaacagcuacaaugc

SEQ ID NO: 341456 - RNA, 22 nt, Human
auucaaguggcugcuauguuaa

SEQ ID NO: 341457 - RNA, 22 nt, Human
ggagugggaacaaugacauggu

SEQ ID NO: 341458 - RNA, 19 nt, Human
uggcaggcccaggauggac

SEQ ID NO: 341459 - RNA, 22 nt, Human
uugcucagcacuggagccagcu

SEQ ID NO: 341460 - RNA, 22 nt, Human
uugaagagugccuuccagacau

SEQ ID NO: 341461 - RNA, 22 nt, Human
aaacagcaggaacaucuugcca

SEQ ID NO: 341462 - RNA, 22 nt, Human
aggcagaugggagcuggaaguu

SEQ ID NO: 341463 - RNA, 22 nt, Human
ccaggauggggagcagauagaa

SEQ ID NO: 341464 - RNA, 22 nt, Human
auguggaggaaaugaguguaca

SEQ ID NO: 341465 - RNA, 22 nt, Human
cagugaaaucacaacuuuaguu

SEQ ID NO: 341466 - RNA, 22 nt, Human
ugaggcaggagaaucaccggaa

SEQ ID NO: 341467 - RNA, 23 nt, Human
cugcugugaaacaugguuuuggu

SEQ ID NO: 341468 - RNA, 22 nt, Human
cccaugagauucugaauuuggc

SEQ ID NO: 341469 - RNA, 22 nt, Human
cagcaggaccauugaggcauca

SEQ ID NO: 341470 - RNA, 22 nt, Human
guuuuauaggugaaauauuacu

SEQ ID NO: 341471 - RNA, 22 nt, Human
ugcccaggcuggaaugcagugg

SEQ ID NO: 341472 - RNA, 22 nt, Human
uugugaaacauucauggauuug

SEQ ID NO: 341473 - RNA, 22 nt, Human
aagcaaaggcaggagcuuguga

SEQ ID NO: 341474 - RNA, 22 nt, Human
uagugcuuaauaaauuucagaa

SEQ ID NO: 341475 - RNA, 21 nt, Human
agcaccuuacagcuauaaugg

SEQ ID NO: 341476 - RNA, 22 nt, Human
gaacacaugauuauaaaugcua

SEQ ID NO: 341477 - RNA, 23 nt, Human
acuauaaaguuguucugauuuac

SEQ ID NO: 341478 - RNA, 22 nt, Human
ucacaguuauagucuguagaau

SEQ ID NO: 341479 - RNA, 22 nt, Human
gucaggaugacaagugcuuuca

SEQ ID NO: 341480 - RNA, 22 nt, Human
ucucucagaggaagaggcagug

SEQ ID NO: 341481 - RNA, 22 nt, Human
gccaggagugucccacucauuu

SEQ ID NO: 341482 - RNA, 22 nt, Human
gggcagcucuuugguauccuuc

SEQ ID NO: 341483 - RNA, 22 nt, Human
uuguauuucuccacuuucuguu

SEQ ID NO: 341484 - RNA, 21 nt, Human
cucaaagaccaaaaguguaga

SEQ ID NO: 341485 - RNA, 22 nt, Human
cuucucagucaccugugagucu

SEQ ID NO: 341486 - RNA, 22 nt, Human
aaacacauuagcccuguggaaa

SEQ ID NO: 341487 - RNA, 22 nt, Human
agagguagagguugcagugagc

SEQ ID NO: 341488 - RNA, 19 nt, Human
ugaggggcucacagucuca

SEQ ID NO: 341489 - RNA, 22 nt, Human
uagugcuuuaggccugaguguc

SEQ ID NO: 341490 - RNA, 22 nt, Human
caggcagccugcggucugcaca

SEQ ID NO: 341491 - RNA, 22 nt, Human
aacaugauggggaagaacaaga

SEQ ID NO: 341492 - RNA, 23 nt, Human
ccacagagcugccaauuccugug

SEQ ID NO: 341493 - RNA, 18 nt, Human
agcuucccucugagaggg

SEQ ID NO: 341494 - RNA, 22 nt, Human
uguauaaaccauggacagcuuu

SEQ ID NO: 341495 - RNA, 22 nt, Human
gcuccucuucucccacugaaug

SEQ ID NO: 341496 - RNA, 22 nt, Human
aggugagggugccagugcaugg

SEQ ID NO: 341497 - RNA, 19 nt, Human
aggcagcaggccagggaug

SEQ ID NO: 341498 - RNA, 22 nt, Human
ugcccaggguuucuaagagcag

SEQ ID NO: 341499 - RNA, 22 nt, Human
gcaugucaugucauguaggaau

SEQ ID NO: 341500 - RNA, 22 nt, Human
ucauaaaucauacuccauuugc

SEQ ID NO: 341501 - RNA, 22 nt, Human
uagcauuaucugucuuaucauu

SEQ ID NO: 341502 - RNA, 22 nt, Human
cccaggagaucuggaucucguc

SEQ ID NO: 341503 - RNA, 22 nt, Human
uacaauauguggccuuuuguga

SEQ ID NO: 341504 - RNA, 20 nt, Human
gaugggaaucggagcuggua

SEQ ID NO: 341505 - RNA, 22 nt, Human
gcuccucugucaaaugagagug

SEQ ID NO: 341506 - RNA, 22 nt, Human
uggugguuaugcgcuuuguggg

SEQ ID NO: 341507 - RNA, 22 nt, Human
accaggaggcuacacuguccca

SEQ ID NO: 341508 - RNA, 22 nt, Human
uuccuugaaugagucauggaaa

SEQ ID NO: 341509 - RNA, 22 nt, Human
uggcagcugguacagugggucu

SEQ ID NO: 341510 - RNA, 22 nt, Human
uuuccaagagcuuauuucugaa

SEQ ID NO: 341511 - RNA, 22 nt, Human
uuccuuaggcuguuugcagugc

SEQ ID NO: 341512 - RNA, 21 nt, Human
agccuguugguuuacugcuca

SEQ ID NO: 341513 - RNA, 22 nt, Human
aggcaagcccccagugaggcuc

SEQ ID NO: 341514 - RNA, 21 nt, Human
acagucuccccagaucucucc

SEQ ID NO: 341515 - RNA, 22 nt, Human
auugaggcagcauaguucaggg

SEQ ID NO: 341516 - RNA, 18 nt, Human
ggcaucugcacagcagcc

SEQ ID NO: 341517 - RNA, 22 nt, Human
aucugccugagucuagguuuuc

SEQ ID NO: 341518 - RNA, 22 nt, Human
ucuuuggaucccaacuggcugg

SEQ ID NO: 341519 - RNA, 22 nt, Human
gaagcagcuggugagauggagc

SEQ ID NO: 341520 - RNA, 22 nt, Human
agggacuuguguccuauguaug

SEQ ID NO: 341521 - RNA, 22 nt, Human
ccaggaguggcuggugaccuuc

SEQ ID NO: 341522 - RNA, 22 nt, Human
uaacacaugguuaguacacaau

SEQ ID NO: 341523 - RNA, 22 nt, Human
auuacaaucgagagaaacaaau

SEQ ID NO: 341524 - RNA, 22 nt, Human
cuuaagauuugcgauaccuaau

SEQ ID NO: 341525 - RNA, 22 nt, Human
uagaaaugaauguuuaaaaguc

SEQ ID NO: 341526 - RNA, 22 nt, Human
ccccaggagauuugggagcaca

SEQ ID NO: 341527 - RNA, 22 nt, Human
ucuuugaauuucugacugucuu

SEQ ID NO: 341528 - RNA, 22 nt, Human
ccuggauucaagucuuucuuuc

SEQ ID NO: 341529 - RNA, 22 nt, Human
ucaugaacauggaauaucuuuu

SEQ ID NO: 341530 - RNA, 22 nt, Human
uuucauugucuacauaugacau

SEQ ID NO: 341531 - RNA, 22 nt, Human
gauauuuugagaaauccuauga

SEQ ID NO: 341532 - RNA, 22 nt, Human
cuacaaugacagaauugaguag

SEQ ID NO: 341533 - RNA, 22 nt, Human
ucugcaggcuuggaguggcagc

SEQ ID NO: 341534 - RNA, 22 nt, Human
aaggcagccaugugcuuugggu

SEQ ID NO: 341535 - RNA, 22 nt, Human
aaggcagccucugccagccggg

SEQ ID NO: 341536 - RNA, 19 nt, Human
aggguggcaaaggagggug

SEQ ID NO: 341537 - RNA, 22 nt, Human
acuuucugcaguguuggaaaug

SEQ ID NO: 341538 - RNA, 22 nt, Human
augcuguguuuuaaauggaaau

SEQ ID NO: 341539 - RNA, 22 nt, Human
ugucaagucucugaaugaaaug

SEQ ID NO: 341540 - RNA, 22 nt, Human
aggcagacugugcgggaagagu

SEQ ID NO: 341541 - RNA, 22 nt, Human
cuguggaaauaaacaaugcuaa

SEQ ID NO: 341542 - RNA, 22 nt, Human
agaggccagguccagaguuugu

SEQ ID NO: 341543 - RNA, 22 nt, Human
ccaggagagcucuaaauggcug

SEQ ID NO: 341544 - RNA, 22 nt, Human
uuucaaaccuacuuguauguuu

SEQ ID NO: 341545 - RNA, 22 nt, Human
augcugugguagacagcauucc

SEQ ID NO: 341546 - RNA, 22 nt, Human
uucccaugccuggccccuaucc

SEQ ID NO: 341547 - RNA, 22 nt, Human
acauuguuugagaauacagaug

SEQ ID NO: 341548 - RNA, 22 nt, Human
uccauguguuuuccuguccaca

SEQ ID NO: 341549 - RNA, 22 nt, Human
cuuguccccagcagguugguuu

SEQ ID NO: 341550 - RNA, 22 nt, Human
ucaauucugguccucaggaacu

SEQ ID NO: 341551 - RNA, 20 nt, Human
agcauuugaaauaugacuau

SEQ ID NO: 341552 - RNA, 22 nt, Human
uucugucauccuuucuagaugu

SEQ ID NO: 341553 - RNA, 22 nt, Human
gcugauguuuaguugauguuac

SEQ ID NO: 341554 - RNA, 22 nt, Human
ucucuucuaauuaggguccaug

SEQ ID NO: 341555 - RNA, 22 nt, Human
gggcagcuggccagguauucug

SEQ ID NO: 341556 - RNA, 20 nt, Human
augugucuguaaacaacucu

SEQ ID NO: 341557 - RNA, 22 nt, Human
gacagcuguggagaggcaugug

SEQ ID NO: 341558 - RNA, 22 nt, Human
uucagugucaauuuuuaaauau

SEQ ID NO: 341559 - RNA, 22 nt, Human
ugaaggcccuaucuccauauac

SEQ ID NO: 341560 - RNA, 22 nt, Human
uugacacaguuuucucauuaag

SEQ ID NO: 341561 - RNA, 22 nt, Human
augacacuuggugauacuuugu

SEQ ID NO: 341562 - RNA, 22 nt, Human
auugcuguggaaauauaagaug

SEQ ID NO: 341563 - RNA, 22 nt, Human
aguccaugguucugacucaucu

SEQ ID NO: 341564 - RNA, 22 nt, Human
aguuagaauauaauuauguuaa

SEQ ID NO: 341565 - RNA, 22 nt, Human
cugagcugggaguagagacucu

SEQ ID NO: 341566 - RNA, 23 nt, Human
uggaggaaacacaucagaagacc

SEQ ID NO: 341567 - RNA, 22 nt, Human
uuucugaacaaagccauuauca

SEQ ID NO: 341568 - RNA, 22 nt, Human
uccaugucuucaugugucuaac

SEQ ID NO: 341569 - RNA, 22 nt, Human
ugaaaugauaucugauaacaaa

SEQ ID NO: 341570 - RNA, 22 nt, Human
cauaauuuuuuuaagucagaac

SEQ ID NO: 341571 - RNA, 22 nt, Human
gcucaggaaauaguuuaguguu

SEQ ID NO: 341572 - RNA, 22 nt, Human
ucacauuuucuacuacuguacg

SEQ ID NO: 341573 - RNA, 23 nt, Human
aggcgagcucuucuccagcacgu

SEQ ID NO: 341574 - RNA, 22 nt, Human
uaugacauugcuuuuuagaacu

SEQ ID NO: 341575 - RNA, 22 nt, Human
uguggaaaauuggaacguuccu

SEQ ID NO: 341576 - RNA, 22 nt, Human
uguuagaaguuaaucacuaauu

SEQ ID NO: 341577 - RNA, 22 nt, Human
acuuuugguucuguaacuguga

SEQ ID NO: 341578 - RNA, 22 nt, Human
ugaacucucucaagugacagaa

SEQ ID NO: 341579 - RNA, 22 nt, Human
uggccaggcagguagaacggcc

SEQ ID NO: 341580 - RNA, 22 nt, Human
ucugucucaaguucuugcacuc

SEQ ID NO: 341581 - RNA, 22 nt, Human
uaacacauuuuaagccauuuua

SEQ ID NO: 341582 - RNA, 22 nt, Human
gaggagaggccaucguuguuau

SEQ ID NO: 341583 - RNA, 22 nt, Human
aucugccuccaaguccaugugu

SEQ ID NO: 341584 - RNA, 22 nt, Human
aggaagcuagagccaccggacu

SEQ ID NO: 341585 - RNA, 22 nt, Human
cugcuguguggauucaauggcu

SEQ ID NO: 341586 - RNA, 22 nt, Human
auggagggugucagagagcgaa

SEQ ID NO: 341587 - RNA, 22 nt, Human
guugacagcuggugagcugcua

SEQ ID NO: 341588 - RNA, 22 nt, Human
aaaaauaggucaaccguguaug

SEQ ID NO: 341589 - RNA, 22 nt, Human
uuaaaauagccagugccccucu

SEQ ID NO: 341590 - RNA, 21 nt, Human
ccaggaaggacugagcucccu

SEQ ID NO: 341591 - RNA, 22 nt, Human
gguggagcuggaccaggagagg

SEQ ID NO: 341592 - RNA, 22 nt, Human
uugcauuuuuagaugcuucugu

SEQ ID NO: 341593 - RNA, 22 nt, Human
auuacaauaagguuuauuugua

SEQ ID NO: 341594 - RNA, 22 nt, Human
aucuuucaaucaggaaaaaucu

SEQ ID NO: 341595 - RNA, 22 nt, Human
uuaacacaucccugcucuaccc

SEQ ID NO: 341596 - RNA, 22 nt, Human
uucaguaaaacacugcaauguc

SEQ ID NO: 341597 - RNA, 19 nt, Human
acauauguggauauacaug

SEQ ID NO: 341598 - RNA, 22 nt, Human
uaaugucaaggugauagauuug

SEQ ID NO: 341599 - RNA, 22 nt, Human
uauuuccagcaguaagaagaca

SEQ ID NO: 341600 - RNA, 22 nt, Human
cagaggcaggaagaugggcagu

SEQ ID NO: 341601 - RNA, 23 nt, Human
auguuauuauuagcagucuugcc

SEQ ID NO: 341602 - RNA, 22 nt, Human
aggcagcauccagaggagaaug

SEQ ID NO: 341603 - RNA, 22 nt, Human
ugucucaguacacuccgauguu

SEQ ID NO: 341604 - RNA, 22 nt, Human
ugaacaguuucaagaaaacuuu

SEQ ID NO: 341605 - RNA, 22 nt, Human
ucaugcuuauugcauauuugga

SEQ ID NO: 341606 - RNA, 22 nt, Human
ccucacugaagaggugacauuu

SEQ ID NO: 341607 - RNA, 22 nt, Human
cagggaggaugggcuguuuugc

SEQ ID NO: 341608 - RNA, 22 nt, Human
agugcuuuauguuguugugcaa

SEQ ID NO: 341609 - RNA, 22 nt, Human
uaaguggaagguuauaugcuaa

SEQ ID NO: 341610 - RNA, 19 nt, Human
ugcaagcuuuuucuuguua

SEQ ID NO: 341611 - RNA, 22 nt, Human
uuucaaagaguuguaaauuacu

SEQ ID NO: 341612 - RNA, 21 nt, Human
auacauucuauuaagcauuua

SEQ ID NO: 341613 - RNA, 22 nt, Human
agugauggugagugagaagcuc

SEQ ID NO: 341614 - RNA, 23 nt, Human
acauacauggagauaaagugaug

SEQ ID NO: 341615 - RNA, 22 nt, Human
uuuauuugaaucaggggagaau

SEQ ID NO: 341616 - RNA, 22 nt, Human
agauauguuuguauauauuugu

SEQ ID NO: 341617 - RNA, 22 nt, Human
gugauuuugagaccuauauagu

SEQ ID NO: 341618 - RNA, 22 nt, Human
ugugccagccucuggcuguguc

SEQ ID NO: 341619 - RNA, 22 nt, Human
aguggcagagguugacugcagu

SEQ ID NO: 341620 - RNA, 22 nt, Human
uuauccaagcagaagcugcaca

SEQ ID NO: 341621 - RNA, 22 nt, Human
uacauaguauucacauuguuuu

SEQ ID NO: 341622 - RNA, 22 nt, Human
uuccaugaaagugaaauggagc

SEQ ID NO: 341623 - RNA, 22 nt, Human
cacucaggcugugucaggagga

SEQ ID NO: 341624 - RNA, 22 nt, Human
gagagcaggaggcagcgggacg

SEQ ID NO: 341625 - RNA, 21 nt, Human
ucuagaauccuguauaagacu

SEQ ID NO: 341626 - RNA, 22 nt, Human
agugcugucaguuuuauagaua

SEQ ID NO: 341627 - RNA, 22 nt, Human
ugucuucagcaaaugccuuucu

SEQ ID NO: 341628 - RNA, 22 nt, Human
uaucuguucaauggaagaugac

SEQ ID NO: 341629 - RNA, 18 nt, Human
caugucugcgccacaagg

SEQ ID NO: 341630 - RNA, 22 nt, Human
gcugcccagacauugaaucagg

SEQ ID NO: 341631 - RNA, 22 nt, Human
uuugaaagggaaauaaacuccu

SEQ ID NO: 341632 - RNA, 22 nt, Human
cccuggaggcaaagguugcagu

SEQ ID NO: 341633 - RNA, 18 nt, Human
ugaauagggguuugcaga

SEQ ID NO: 341634 - RNA, 22 nt, Human
ggagauggaauagauucugacu

SEQ ID NO: 341635 - RNA, 22 nt, Human
ccugucacgaugacugcacucu

SEQ ID NO: 341636 - RNA, 22 nt, Human
ucaaucacguguuccauguucu

SEQ ID NO: 341637 - RNA, 19 nt, Human
cuucuucuuggcagccaag

SEQ ID NO: 341638 - RNA, 22 nt, Human
aggcaggcccucuggaaaggua

SEQ ID NO: 341639 - RNA, 22 nt, Human
ucugcaggcuguacaggaagca

SEQ ID NO: 341640 - RNA, 22 nt, Human
ggugaagguggaacgcagagca

SEQ ID NO: 341641 - RNA, 22 nt, Human
cuucucagaucucagcuuugag

SEQ ID NO: 341642 - RNA, 22 nt, Human
gcugcccacaaugauuacaugg

SEQ ID NO: 341643 - RNA, 18 nt, Human
aauuuccauaugaauugc

SEQ ID NO: 341644 - RNA, 22 nt, Human
gggaagcaggugcagcucgccu

SEQ ID NO: 341645 - RNA, 22 nt, Human
aacauucugguucuaaaaaccu

SEQ ID NO: 341646 - RNA, 22 nt, Human
uuugacaucaauacccuagaau

SEQ ID NO: 341647 - RNA, 22 nt, Human
ugaaggccagggauuugcagcc

SEQ ID NO: 341648 - RNA, 22 nt, Human
uccaugagaacccuuggagaua

SEQ ID NO: 341649 - RNA, 20 nt, Human
uuaucugucaaucugucuca

SEQ ID NO: 341650 - RNA, 22 nt, Human
gaggcagcauucgcauagacag

SEQ ID NO: 341651 - RNA, 22 nt, Human
caggaaaggugugucaugaugg

SEQ ID NO: 341652 - RNA, 22 nt, Human
caggcagccugagggaucuggg

SEQ ID NO: 341653 - RNA, 22 nt, Human
ugcuacaauucacaucuggaua

SEQ ID NO: 341654 - RNA, 22 nt, Human
aggagaggcaucaagaaaaucg

SEQ ID NO: 341655 - RNA, 22 nt, Human
uaucuaaauggaauauuccaga

SEQ ID NO: 341656 - RNA, 22 nt, Human
cucccaggcacagggaggagcc

SEQ ID NO: 341657 - RNA, 22 nt, Human
gcccaggaagugacucagaugu

SEQ ID NO: 341658 - RNA, 22 nt, Human
ucucaguguguuuucucucaga

SEQ ID NO: 341659 - RNA, 22 nt, Human
aaucuuucccuauuaaaugugg

SEQ ID NO: 341660 - RNA, 22 nt, Human
augaaggcaguuaaacgucauc

SEQ ID NO: 341661 - RNA, 22 nt, Human
augaaacagugaauuagucaag

SEQ ID NO: 341662 - RNA, 22 nt, Human
uacaguaagaugaaauagcaau

SEQ ID NO: 341663 - RNA, 22 nt, Human
uuuucaguuccaucucugcucu

SEQ ID NO: 341664 - RNA, 22 nt, Human
ucugggaagcugguccuguucu

SEQ ID NO: 341665 - RNA, 19 nt, Human
uucacaauuaugaaauuag

SEQ ID NO: 341666 - RNA, 19 nt, Human
uugaaagauuagcuuucua

SEQ ID NO: 341667 - RNA, 22 nt, Human
caacugcugacaccaucacucc

SEQ ID NO: 341668 - RNA, 22 nt, Human
acaauacuuaccaauguuuuug

SEQ ID NO: 341669 - RNA, 22 nt, Human
aggaagcuccuggagagccagu

SEQ ID NO: 341670 - RNA, 22 nt, Human
gggcagcuguaucugagcuuau

SEQ ID NO: 341671 - RNA, 22 nt, Human
ugacauaauaauccaaacauac

SEQ ID NO: 341672 - RNA, 22 nt, Human
aucauucuauuguugagcugcc

SEQ ID NO: 341673 - RNA, 22 nt, Human
ucacaauuuggauacagcuaug

SEQ ID NO: 341674 - RNA, 22 nt, Human
gaaauuauugcuagagacugca

SEQ ID NO: 341675 - RNA, 22 nt, Human
uauuuccaggccccacucuaga

SEQ ID NO: 341676 - RNA, 22 nt, Human
ccaggagacaaagaugacugcu

SEQ ID NO: 341677 - RNA, 22 nt, Human
aaagcagaggugauaugacuua

SEQ ID NO: 341678 - RNA, 22 nt, Human
uaaaugagggcugacaugauug

SEQ ID NO: 341679 - RNA, 22 nt, Human
aggcagcuuucuguaggggugu

SEQ ID NO: 341680 - RNA, 22 nt, Human
aaaauugaagugaucaggaacu

SEQ ID NO: 341681 - RNA, 22 nt, Human
caaggccagggaauuuuucugg

SEQ ID NO: 341682 - RNA, 22 nt, Human
cuucucaguugcaagugucaga

SEQ ID NO: 341683 - RNA, 20 nt, Human
aggagggaccuggauuggcg

SEQ ID NO: 341684 - RNA, 22 nt, Human
aaugcuuuuugcgaaaugugca

SEQ ID NO: 341685 - RNA, 20 nt, Human
gucaggauuaguaaacucug

SEQ ID NO: 341686 - RNA, 20 nt, Human
uaguauuugcauaaggauag

SEQ ID NO: 341687 - RNA, 22 nt, Human
cugcagagcaaguaacauccuc

SEQ ID NO: 341688 - RNA, 22 nt, Human
aggccagaaaugucagggagug

SEQ ID NO: 341689 - RNA, 22 nt, Human
gcaagcugaugugauagugaaa

SEQ ID NO: 341690 - RNA, 22 nt, Human
uacaucauaauaauacuuagaa

SEQ ID NO: 341691 - RNA, 22 nt, Human
gcuggcuugauaguuucugcuu

SEQ ID NO: 341692 - RNA, 22 nt, Human
acauuucuaguuguucaucucc

SEQ ID NO: 341693 - RNA, 22 nt, Human
uggcagcuguguccagguagaa

SEQ ID NO: 341694 - RNA, 22 nt, Human
uuuucauuguuacuaugagcua

SEQ ID NO: 341695 - RNA, 22 nt, Human
ggaggcugagaaguccaagauc

SEQ ID NO: 341696 - RNA, 23 nt, Human
accaggaguugucucaggaaaca

SEQ ID NO: 341697 - RNA, 17 nt, Human
gagagcugcugcuuccg

SEQ ID NO: 341698 - RNA, 22 nt, Human
aggucagcaggccaggggcgaa

SEQ ID NO: 341699 - RNA, 22 nt, Human
uugaagaggacuuugcagcugu

SEQ ID NO: 341700 - RNA, 22 nt, Human
cucugucagaguguugucccca

SEQ ID NO: 341701 - RNA, 22 nt, Human
cuuaacagagagaaguguugcu

SEQ ID NO: 341702 - RNA, 22 nt, Human
ucuucagacuccaaauguuuua

SEQ ID NO: 341703 - RNA, 23 nt, Human
ggagugcaauggcgccaucucgg

SEQ ID NO: 341704 - RNA, 22 nt, Human
cauucacaucuuguuccaucac

SEQ ID NO: 341705 - RNA, 22 nt, Human
auucuucagcaggggacacuau

SEQ ID NO: 341706 - RNA, 22 nt, Human
accaggaggccuugguucugag

SEQ ID NO: 341707 - RNA, 17 nt, Human
uggcagcugaaagcucu

SEQ ID NO: 341708 - RNA, 22 nt, Human
caggaugagguagaggcagaua

SEQ ID NO: 341709 - RNA, 22 nt, Human
cccaggagguggagcuugcagu

SEQ ID NO: 341710 - RNA, 22 nt, Human
uagcacauuguugaccagaagg

SEQ ID NO: 341711 - RNA, 22 nt, Human
ucaaauaccagcaauuucaugu

SEQ ID NO: 341712 - RNA, 22 nt, Human
cagcuuucaucagugacacuca

SEQ ID NO: 341713 - RNA, 23 nt, Human
gagugcagaauagacaugcagug

SEQ ID NO: 341714 - RNA, 22 nt, Human
gaucauuugcaggaaacauuaa

SEQ ID NO: 341715 - RNA, 22 nt, Human
cugguacaaaaugcugauauca

SEQ ID NO: 341716 - RNA, 22 nt, Human
cccaggaggguggccucugccc

SEQ ID NO: 341717 - RNA, 22 nt, Human
ugaggcaggaugcuugcacagg

SEQ ID NO: 341718 - RNA, 17 nt, Human
cucacggaggaugaauc

SEQ ID NO: 341719 - RNA, 19 nt, Human
ccauggagagagaugcauu

SEQ ID NO: 341720 - RNA, 22 nt, Human
cggagaggaccugcaacucgcu

SEQ ID NO: 341721 - RNA, 23 nt, Human
cuuugccacccagagccugacag

SEQ ID NO: 341722 - RNA, 22 nt, Human
cuuugcaauagaggcacacaug

SEQ ID NO: 341723 - RNA, 22 nt, Human
gaaauaagaguccaugccaggu

SEQ ID NO: 341724 - RNA, 20 nt, Human
ccacaggaguccagucgacc

SEQ ID NO: 341725 - RNA, 22 nt, Human
ucauuuaauaauuuuugaguag

SEQ ID NO: 341726 - RNA, 22 nt, Human
ucagagaguuggaaagaauuaa

SEQ ID NO: 341727 - RNA, 22 nt, Human
guucuucaggccauccucccag

SEQ ID NO: 341728 - RNA, 22 nt, Human
agcugaugccauguggaacagu

SEQ ID NO: 341729 - RNA, 22 nt, Human
gauguagagggaagauuuuaaa

SEQ ID NO: 341730 - RNA, 22 nt, Human
acagucuugcuguauggucagg

SEQ ID NO: 341731 - RNA, 22 nt, Human
acuauaaaaggauaaaccagaa

SEQ ID NO: 341732 - RNA, 22 nt, Human
aggcaagcugcagagaguccuu

SEQ ID NO: 341733 - RNA, 22 nt, Human
ggcuuggaccagucacaguggu

SEQ ID NO: 341734 - RNA, 22 nt, Human
uugaacugguaguuggaaaucu

SEQ ID NO: 341735 - RNA, 22 nt, Human
cuccaggagggggauggcugua

SEQ ID NO: 341736 - RNA, 22 nt, Human
gcagcugaauguccauugcugc

SEQ ID NO: 341737 - RNA, 15 nt, Human
cuccaugauuuugca

SEQ ID NO: 341738 - RNA, 22 nt, Human
uugagaagaaauaguuugcaau

SEQ ID NO: 341739 - RNA, 22 nt, Human
gcauguguugguuuaugcaugu

SEQ ID NO: 341740 - RNA, 22 nt, Human
gcagagaagaugcccaggcuuc

SEQ ID NO: 341741 - RNA, 22 nt, Human
ucucuucuaauuuucccgagua

SEQ ID NO: 341742 - RNA, 22 nt, Human
cccauucauccucgcuuccuuc

SEQ ID NO: 341743 - RNA, 22 nt, Human
uugcagcuucgagucuaucugu

SEQ ID NO: 341744 - RNA, 19 nt, Human
auauauguauacaaugugg

SEQ ID NO: 341745 - RNA, 22 nt, Human
ggaggggaggauuaaugacaaa

SEQ ID NO: 341746 - RNA, 22 nt, Human
gacagcuggcaguggaaaggug

SEQ ID NO: 341747 - RNA, 21 nt, Human
ucucugugucuuuaagcugga

SEQ ID NO: 341748 - RNA, 19 nt, Human
auacagauguauccaugau

SEQ ID NO: 341749 - RNA, 22 nt, Human
aaauuucaguuggaaugagcuc

SEQ ID NO: 341750 - RNA, 22 nt, Human
agagagagggaaacugcuaaac

SEQ ID NO: 341751 - RNA, 17 nt, Human
agagagagcaugccacc

SEQ ID NO: 341752 - RNA, 20 nt, Human
uugagcuuuuaguacagaca

SEQ ID NO: 341753 - RNA, 22 nt, Human
uuucacaaucaaauggugaaau

SEQ ID NO: 341754 - RNA, 21 nt, Human
aggcagcucaggcccagagag

SEQ ID NO: 341755 - RNA, 22 nt, Human
ucucaggaucuaauacauggua

SEQ ID NO: 341756 - RNA, 22 nt, Human
uuauucuuuaaacauauauguu

SEQ ID NO: 341757 - RNA, 22 nt, Human
cucaggaugucggugacuauug

SEQ ID NO: 341758 - RNA, 17 nt, Human
cccacggaggugugaaa

SEQ ID NO: 341759 - RNA, 22 nt, Human
uucaacuaauguuuauuuuaug

SEQ ID NO: 341760 - RNA, 22 nt, Human
cauuuccacuucugaaaacugg

SEQ ID NO: 341761 - RNA, 22 nt, Human
agagugcaaccgaaacaagcag

SEQ ID NO: 341762 - RNA, 22 nt, Human
ggagaggauguuuuaguaacuu

SEQ ID NO: 341763 - RNA, 19 nt, Human
aaggcagcaguagcaucca

SEQ ID NO: 341764 - RNA, 22 nt, Human
ccuugcguuuuacagcuucuag

SEQ ID NO: 341765 - RNA, 22 nt, Human
cugcugugugaccauggacagg

SEQ ID NO: 341766 - RNA, 22 nt, Human
agguaggggguuugggaacugc

SEQ ID NO: 341767 - RNA, 22 nt, Human
cagaaccaggaacugauggaga

SEQ ID NO: 341768 - RNA, 22 nt, Human
aaucauaauuguauacauucau

SEQ ID NO: 341769 - RNA, 18 nt, Human
ggucuuuaggucaguguc

SEQ ID NO: 341770 - RNA, 22 nt, Human
ugaaaucaaugucuucugucuc

SEQ ID NO: 341771 - RNA, 22 nt, Human
aggcagcccacaggacacagga

SEQ ID NO: 341772 - RNA, 23 nt, Human
cugcccugaucuugaucuauugu

SEQ ID NO: 341773 - RNA, 22 nt, Human
gaggagagggcugcgggcccac

SEQ ID NO: 341774 - RNA, 22 nt, Human
uaugccugauaacugugucucu

SEQ ID NO: 341775 - RNA, 22 nt, Human
aagagaggacauggugaaccug

SEQ ID NO: 341776 - RNA, 22 nt, Human
caucaucaaaacaaauggaguc

SEQ ID NO: 341777 - RNA, 22 nt, Human
ucuuagcacagcuauauaaguu

SEQ ID NO: 341778 - RNA, 22 nt, Human
uauugaugcuuggauugggcca

SEQ ID NO: 341779 - RNA, 22 nt, Human
cucaggauugugccuagggaga

SEQ ID NO: 341780 - RNA, 22 nt, Human
cuguguuggcuuuucucuugua

SEQ ID NO: 341781 - RNA, 22 nt, Human
uccaugagggacacuggaugcu

SEQ ID NO: 341782 - RNA, 18 nt, Human
ugcuuggagcauuuacca

SEQ ID NO: 341783 - RNA, 19 nt, Human
uugaaauuguuugauaugg

SEQ ID NO: 341784 - RNA, 22 nt, Human
cauuuccagcuccugcaucaug

SEQ ID NO: 341785 - RNA, 22 nt, Human
cauuuccugucuggaggucaaa

SEQ ID NO: 341786 - RNA, 22 nt, Human
aucugucaggagcaaggacuac

SEQ ID NO: 341787 - RNA, 22 nt, Human
cauucucaauaguagaugagua

SEQ ID NO: 341788 - RNA, 22 nt, Human
ugaaagauugugauucaauaug

SEQ ID NO: 341789 - RNA, 22 nt, Human
agauauauuuaagguaauaagu

SEQ ID NO: 341790 - RNA, 22 nt, Human
agggcagcucucaccucuggcc

SEQ ID NO: 341791 - RNA, 22 nt, Human
cuuuccaaugcauuuccaaugu

SEQ ID NO: 341792 - RNA, 22 nt, Human
ucagagaguuacacaaauuguu

SEQ ID NO: 341793 - RNA, 22 nt, Human
auaguuugugaaacacagcagu

SEQ ID NO: 341794 - RNA, 22 nt, Human
ucuacugugguccuuguaacca

SEQ ID NO: 341795 - RNA, 22 nt, Human
auucaaguccagcuucucuaca

SEQ ID NO: 341796 - RNA, 22 nt, Human
uccauuuucuugcucuagguaa

SEQ ID NO: 341797 - RNA, 22 nt, Human
agcagccuuugaucaucuggga

SEQ ID NO: 341798 - RNA, 22 nt, Human
uuaucauugucgcagucuaauu

SEQ ID NO: 341799 - RNA, 22 nt, Human
uuuaucuuuaggacuuugcaga

SEQ ID NO: 341800 - RNA, 22 nt, Human
caggcgagugaacagacucuca

SEQ ID NO: 341801 - RNA, 22 nt, Human
uucucagaggagucgggagcug

SEQ ID NO: 341802 - RNA, 22 nt, Human
cccaguuucaacuuuccagugg

SEQ ID NO: 341803 - RNA, 22 nt, Human
ccacagcugaccgcaggugagc

SEQ ID NO: 341804 - RNA, 22 nt, Human
aagccgaggccacacagcagga

SEQ ID NO: 341805 - RNA, 22 nt, Human
ucaggagaaggcaauguggaaa

SEQ ID NO: 341806 - RNA, 22 nt, Human
ccuacucugagcgccuccgcau

SEQ ID NO: 341807 - RNA, 22 nt, Human
acuagauaauuauaaaagguag

SEQ ID NO: 341808 - RNA, 22 nt, Human
ugguaauuuacgcauuucugua

SEQ ID NO: 341809 - RNA, 22 nt, Human
ggacaagccugugaguggguuu

SEQ ID NO: 341810 - RNA, 22 nt, Human
auucuucacaaauauauagaag

SEQ ID NO: 341811 - RNA, 22 nt, Human
uugaaagaagaagcugcgaugu

SEQ ID NO: 341812 - RNA, 22 nt, Human
ugccuugcgggcguuucuguug

SEQ ID NO: 341813 - RNA, 22 nt, Human
agcaccauugcaaauauggcag

SEQ ID NO: 341814 - RNA, 22 nt, Human
ucugggaacacacgucacuuca

SEQ ID NO: 341815 - RNA, 22 nt, Human
gcagcugaaagggaucucuaca

SEQ ID NO: 341816 - RNA, 22 nt, Human
aagcgccaugguuccugcgcag

SEQ ID NO: 341817 - RNA, 22 nt, Human
gcccaggagguggaggugcagu

SEQ ID NO: 341818 - RNA, 21 nt, Human
ggauggauagggaagagauuu

SEQ ID NO: 341819 - RNA, 22 nt, Human
ccagggaguuuccaaucugaga

SEQ ID NO: 341820 - RNA, 22 nt, Human
uaacaauaguguuugcuaguca

SEQ ID NO: 341821 - RNA, 22 nt, Human
gaggcaguguugaaaaggagag

SEQ ID NO: 341822 - RNA, 22 nt, Human
uuucucugcugccugugucgau

SEQ ID NO: 341823 - RNA, 22 nt, Human
uaacacauagauauuuuaacuu

SEQ ID NO: 341824 - RNA, 22 nt, Human
ucuuagaaguucauguuccagc

SEQ ID NO: 341825 - RNA, 22 nt, Human
gauggcaggcaggugaguagag

SEQ ID NO: 341826 - RNA, 22 nt, Human
uggaagggagugacagucagag

SEQ ID NO: 341827 - RNA, 22 nt, Human
auuguuaugaaaauaagauguu

SEQ ID NO: 341828 - RNA, 22 nt, Human
ucuucucuacaccagcagcccc

SEQ ID NO: 341829 - RNA, 17 nt, Human
guccuacccauggucua

SEQ ID NO: 341830 - RNA, 22 nt, Human
uugcaaaggggaauaaagcaau

SEQ ID NO: 341831 - RNA, 22 nt, Human
cuuugaaaggaagccacacagc

SEQ ID NO: 341832 - RNA, 22 nt, Human
aauugcaacagguagacuuuuc

SEQ ID NO: 341833 - RNA, 22 nt, Human
gcagaggccaggccaccagcaa

SEQ ID NO: 341834 - RNA, 22 nt, Human
aggacagcccuugagagcacau

SEQ ID NO: 341835 - RNA, 22 nt, Human
ucugguaaccuuuaucccuccu

SEQ ID NO: 341836 - RNA, 22 nt, Human
uuucuugacugcuuaggaaugc

SEQ ID NO: 341837 - RNA, 22 nt, Human
cagcuucugcuaucgaacaucu

SEQ ID NO: 341838 - RNA, 22 nt, Human
uuuucauuguuccucgagcauu

SEQ ID NO: 341839 - RNA, 22 nt, Human
aucucauaacucauuugaagac

SEQ ID NO: 341840 - RNA, 22 nt, Human
gaggcauggccugaggcuagga

SEQ ID NO: 341841 - RNA, 22 nt, Human
guaaaauagaauaacguggcua

SEQ ID NO: 341842 - RNA, 22 nt, Human
aaaggcaggcuuucacaucuca

SEQ ID NO: 341843 - RNA, 22 nt, Human
aucaggaucagggcuagcagag

SEQ ID NO: 341844 - RNA, 22 nt, Human
ggcagcauauauucagugggca

SEQ ID NO: 341845 - RNA, 22 nt, Human
agaggggaaguaaugaaugaua

SEQ ID NO: 341846 - RNA, 22 nt, Human
caggaugggauguagugggccc

SEQ ID NO: 341847 - RNA, 20 nt, Human
ucaggaugugcugagugaag

SEQ ID NO: 341848 - RNA, 16 nt, Human
cuuccucuucacuggc

SEQ ID NO: 341849 - RNA, 22 nt, Human
cccaagagguggagguugcagu

SEQ ID NO: 341850 - RNA, 22 nt, Human
aguggcaggcggagauguagga

SEQ ID NO: 341851 - RNA, 22 nt, Human
ccaggagaagcaucugagugua

SEQ ID NO: 341852 - RNA, 22 nt, Human
cauucauuuaugaaauaucuau

SEQ ID NO: 341853 - RNA, 22 nt, Human
aagcuggaacaucuugaggaag

SEQ ID NO: 341854 - RNA, 22 nt, Human
cccaggagaauauaauguucuu

SEQ ID NO: 341855 - RNA, 23 nt, Human
ggcagcucucaucugaugacuga

SEQ ID NO: 341856 - RNA, 21 nt, Human
uaugaacaugaccaauagucc

SEQ ID NO: 341857 - RNA, 22 nt, Human
cccaggaggcagagauagcagu

SEQ ID NO: 341858 - RNA, 22 nt, Human
acuaagugauucuaagcaucuu

SEQ ID NO: 341859 - RNA, 22 nt, Human
gaggggaaagugugaggcugcg

SEQ ID NO: 341860 - RNA, 22 nt, Human
ugaguuuuuucaacauaugaag

SEQ ID NO: 341861 - RNA, 22 nt, Human
ugaguaauaaacugucuugcuc

SEQ ID NO: 341862 - RNA, 21 nt, Human
ucucugguuggaguugugcca

SEQ ID NO: 341863 - RNA, 22 nt, Human
gaaacaauuuuuguugucuaag

SEQ ID NO: 341864 - RNA, 22 nt, Human
gugcuuuuaaaggcaauuagua

SEQ ID NO: 341865 - RNA, 22 nt, Human
uugcugaaguuaaugcuugcaa

SEQ ID NO: 341866 - RNA, 22 nt, Human
aaggcaguagguguuucaaacu

SEQ ID NO: 341867 - RNA, 22 nt, Human
gaagcagccacggggagacaga

SEQ ID NO: 341868 - RNA, 22 nt, Human
gcaggcagagguggaggagaca

SEQ ID NO: 341869 - RNA, 22 nt, Human
ccauggcaauggucagucuauu

SEQ ID NO: 341870 - RNA, 22 nt, Human
ccagcagagcauggggaggaag

SEQ ID NO: 341871 - RNA, 22 nt, Human
cgaggcagggaagcugcaaaag

SEQ ID NO: 341872 - RNA, 22 nt, Human
uugcaggauuuuagagaugaca

SEQ ID NO: 341873 - RNA, 22 nt, Human
uccagaaacuuuuccagucuca

SEQ ID NO: 341874 - RNA, 22 nt, Human
aaauuauucucauguguuucuu

SEQ ID NO: 341875 - RNA, 22 nt, Human
agaaaugacacacaugagacau

SEQ ID NO: 341876 - RNA, 22 nt, Human
agccagcucccuccccugcagg

SEQ ID NO: 341877 - RNA, 22 nt, Human
caguaaagcauguaugucuuca

SEQ ID NO: 341878 - RNA, 23 nt, Human
gaauaguuuuagaaauuggagaa

SEQ ID NO: 341879 - RNA, 22 nt, Human
aucaggaucugcaucauaagaa

SEQ ID NO: 341880 - RNA, 21 nt, Human
aggcagcaggauccagggaca

SEQ ID NO: 341881 - RNA, 22 nt, Human
uagauauggccgucuguuuuaa

SEQ ID NO: 341882 - RNA, 22 nt, Human
ucacaucucccuggaggacaca

SEQ ID NO: 341883 - RNA, 22 nt, Human
aggagaggucucccuuccccag

SEQ ID NO: 341884 - RNA, 22 nt, Human
ccacugaggcaggcaguaucua

SEQ ID NO: 341885 - RNA, 22 nt, Human
aaggagaguacaggaguuggua

SEQ ID NO: 341886 - RNA, 22 nt, Human
uuuucaguaaugucuacauaau

SEQ ID NO: 341887 - RNA, 22 nt, Human
uauuuccauguuagaacuaagu

SEQ ID NO: 341888 - RNA, 22 nt, Human
uaaauuauguuccauguccuuu

SEQ ID NO: 341889 - RNA, 22 nt, Human
aagcuggcaugucaccugagaa

SEQ ID NO: 341890 - RNA, 22 nt, Human
ggcagggaagcuggcaucacgg

SEQ ID NO: 341891 - RNA, 22 nt, Human
cuggccagaguuggagggugug

SEQ ID NO: 341892 - RNA, 22 nt, Human
gagaggaguuacuauuuccgag

SEQ ID NO: 341893 - RNA, 22 nt, Human
augcuguguccuagugaaagaa

SEQ ID NO: 341894 - RNA, 22 nt, Human
uuucaguuuuugcucgauguau

SEQ ID NO: 341895 - RNA, 22 nt, Human
cucagaagccuucagucuuggc

SEQ ID NO: 341896 - RNA, 21 nt, Human
aaucauacaaaacaugucagg

SEQ ID NO: 341897 - RNA, 22 nt, Human
uuucacagguacaaacacuccu

SEQ ID NO: 341898 - RNA, 22 nt, Human
ucucucuugucaccccaucugc

SEQ ID NO: 341899 - RNA, 22 nt, Human
acaguuaucuuugaaauagaga

SEQ ID NO: 341900 - RNA, 22 nt, Human
ugagccugguugcagugucugg

SEQ ID NO: 341901 - RNA, 22 nt, Human
aaaguuugucacuuggcuagaa

SEQ ID NO: 341902 - RNA, 22 nt, Human
uuggaaauacagcaguuacuuu

SEQ ID NO: 341903 - RNA, 22 nt, Human
uaaagcacauaucuuacaauaa

SEQ ID NO: 341904 - RNA, 22 nt, Human
aggaugagaagauuggaaucuu

SEQ ID NO: 341905 - RNA, 20 nt, Human
uccaggagaacugggagccg

SEQ ID NO: 341906 - RNA, 22 nt, Human
uggagaggaaagugcaguuuug

SEQ ID NO: 341907 - RNA, 22 nt, Human
uauaauuuaucaugucacaguu

SEQ ID NO: 341908 - RNA, 22 nt, Human
ggguggaguagaaagaugaauu

SEQ ID NO: 341909 - RNA, 22 nt, Human
aaauacauaaagguuguaccag

SEQ ID NO: 341910 - RNA, 22 nt, Human
caggcagcucugcuuuuccuaa

SEQ ID NO: 341911 - RNA, 22 nt, Human
uuucucuguucucuaacuguaa

SEQ ID NO: 341912 - RNA, 22 nt, Human
guguuuuaagaaagaagcucag

SEQ ID NO: 341913 - RNA, 22 nt, Human
ucaggagauguaaccuuagcug

SEQ ID NO: 341914 - RNA, 22 nt, Human
uccaggaggacugagggggcug

SEQ ID NO: 341915 - RNA, 22 nt, Human
gugugaaaaugugcacaauaug

SEQ ID NO: 341916 - RNA, 22 nt, Human
aggccagaaauuuggaguaugu

SEQ ID NO: 341917 - RNA, 22 nt, Human
uauguuauuuucauacaacaga

SEQ ID NO: 341918 - RNA, 22 nt, Human
agggaagcccuggcugagaccc

SEQ ID NO: 341919 - RNA, 22 nt, Human
uauacaaugaguacauucuggg

SEQ ID NO: 341920 - RNA, 22 nt, Human
acccaggacucucuuccaguag

SEQ ID NO: 341921 - RNA, 22 nt, Human
aggagagaauguuccaggcuug

SEQ ID NO: 341922 - RNA, 22 nt, Human
uacauauguaaacauguauaaa

SEQ ID NO: 341923 - RNA, 22 nt, Human
ugggagcccaagggagcugccg

SEQ ID NO: 341924 - RNA, 22 nt, Human
gaaauauuucucuugagccccu

SEQ ID NO: 341925 - RNA, 22 nt, Human
cccaggaguucgaggcuguagu

SEQ ID NO: 341926 - RNA, 22 nt, Human
cugcuguggaugcaggaccuca

SEQ ID NO: 341927 - RNA, 22 nt, Human
aaaggaagaugccaggacucug

SEQ ID NO: 341928 - RNA, 21 nt, Human
ggagggcagcccagacuggcu

SEQ ID NO: 341929 - RNA, 17 nt, Human
agagggaaaaugcgguu

SEQ ID NO: 341930 - RNA, 22 nt, Human
uuuggaauauuaaaaugucuca

SEQ ID NO: 341931 - RNA, 22 nt, Human
cacaaaugugcagaaaugugag

SEQ ID NO: 341932 - RNA, 22 nt, Human
gucaggauuuacaaacuucagu

SEQ ID NO: 341933 - RNA, 22 nt, Human
ucaggaauccagacagggcaca

SEQ ID NO: 341934 - RNA, 22 nt, Human
uuuuaucuucauuccuaucuac

SEQ ID NO: 341935 - RNA, 22 nt, Human
aguauugugacucaaguauucu

SEQ ID NO: 341936 - RNA, 18 nt, Human
cgaggcaggcggaucacg

SEQ ID NO: 341937 - RNA, 21 nt, Human
uggcaggcagcuggaagcuug

SEQ ID NO: 341938 - RNA, 22 nt, Human
uucauucuuugaaucugaggua

SEQ ID NO: 341939 - RNA, 22 nt, Human
ucugggaacugagcuccccuag

SEQ ID NO: 341940 - RNA, 22 nt, Human
gcagcucccagcuugaaagguc

SEQ ID NO: 341941 - RNA, 22 nt, Human
uguaaaaccaaaucaaucuagu

SEQ ID NO: 341942 - RNA, 22 nt, Human
cuugaaagaagggucuuuuaau

SEQ ID NO: 341943 - RNA, 22 nt, Human
cugcuguguaucauuuuagaug

SEQ ID NO: 341944 - RNA, 22 nt, Human
ucuuugcaaaauacaacaaugg

SEQ ID NO: 341945 - RNA, 22 nt, Human
cccucuacagggaagcgcuuuc

SEQ ID NO: 341946 - RNA, 22 nt, Human
auauaauuguucugaaguguuu

SEQ ID NO: 341947 - RNA, 22 nt, Human
ucaggagaguguucaguggagg

SEQ ID NO: 341948 - RNA, 22 nt, Human
cugcuuugcauagcugccagag

SEQ ID NO: 341949 - RNA, 22 nt, Human
auggagacgcaagggaccuagg

SEQ ID NO: 341950 - RNA, 22 nt, Human
agaggccggccgagcccauggg

SEQ ID NO: 341951 - RNA, 22 nt, Human
ggaggggagguccagcugaucu

SEQ ID NO: 341952 - RNA, 22 nt, Human
uggcaguccccugugccuggaa

SEQ ID NO: 341953 - RNA, 22 nt, Human
aguccuuugggaaaaaugacua

SEQ ID NO: 341954 - RNA, 22 nt, Human
cauuguuauagcauuacacacc

SEQ ID NO: 341955 - RNA, 22 nt, Human
auugcuguaaauuaucuuauua

SEQ ID NO: 341956 - RNA, 22 nt, Human
ugcuucuggaaacaguggcugu

SEQ ID NO: 341957 - RNA, 22 nt, Human
cccuuagcuccaagggguuugg

SEQ ID NO: 341958 - RNA, 22 nt, Human
cagcagagaaauuaaacuucug

SEQ ID NO: 341959 - RNA, 22 nt, Human
uuugaagucagacacugcuuug

SEQ ID NO: 341960 - RNA, 22 nt, Human
uuucagggagccuagaagagcu

SEQ ID NO: 341961 - RNA, 22 nt, Human
caaggccacuccagagacuggu

SEQ ID NO: 341962 - RNA, 22 nt, Human
agucuugcauuuucugaagaug

SEQ ID NO: 341963 - RNA, 22 nt, Human
caggagauguaagacuucuguu

SEQ ID NO: 341964 - RNA, 22 nt, Human
aggcagugcaugcaaaggucgg

SEQ ID NO: 341965 - RNA, 22 nt, Human
aguuauaugugaaaacacguau

SEQ ID NO: 341966 - RNA, 22 nt, Human
ucauuucuccgaccugcugucc

SEQ ID NO: 341967 - RNA, 22 nt, Human
gcuguucucuguaacaugcauu

SEQ ID NO: 341968 - RNA, 22 nt, Human
cucucagacugaagggccugug

SEQ ID NO: 341969 - RNA, 22 nt, Human
uugcuuuguggugguucuucca

SEQ ID NO: 341970 - RNA, 22 nt, Human
cagugauggauauggagaaguc

SEQ ID NO: 341971 - RNA, 22 nt, Human
uucaggauaugugauaucugaa

SEQ ID NO: 341972 - RNA, 22 nt, Human
uuagccauguugaagauuuaga

SEQ ID NO: 341973 - RNA, 22 nt, Human
cuagaauugcauucuaugaaua

SEQ ID NO: 341974 - RNA, 22 nt, Human
cauuuguaguuaaaaaugucuc

SEQ ID NO: 341975 - RNA, 21 nt, Human
gagacagcccagugccagggc

SEQ ID NO: 341976 - RNA, 22 nt, Human
uuugcauaggauggacauuuua

SEQ ID NO: 341977 - RNA, 22 nt, Human
uuuaaauucugucugccgcuua

SEQ ID NO: 341978 - RNA, 22 nt, Human
uggaaauggaucugaugagucu

SEQ ID NO: 341979 - RNA, 23 nt, Human
uguugaaguaacuguuacauaga

SEQ ID NO: 341980 - RNA, 22 nt, Human
uaaggccaaggggccauagucu

SEQ ID NO: 341981 - RNA, 22 nt, Human
ucagaaagaacacaggcaguag

SEQ ID NO: 341982 - RNA, 22 nt, Human
ucauuuguacuugugugcuugu

SEQ ID NO: 341983 - RNA, 21 nt, Human
uuucuuaggcucuaaaaugac

SEQ ID NO: 341984 - RNA, 22 nt, Human
aggcagucuaguccccaggcaa

SEQ ID NO: 341985 - RNA, 22 nt, Human
uaauuccaaguugagacaugca

SEQ ID NO: 341986 - RNA, 22 nt, Human
aaguuucaugauguaauuauug

SEQ ID NO: 341987 - RNA, 22 nt, Human
uucuucuccuaaggagaguccu

SEQ ID NO: 341988 - RNA, 22 nt, Human
uugauacaggcucuauuucauc

SEQ ID NO: 341989 - RNA, 22 nt, Human
caaggccaagucucugugaaga

SEQ ID NO: 341990 - RNA, 22 nt, Human
aucugcuuuugagaauuuacuu

SEQ ID NO: 341991 - RNA, 22 nt, Human
uugcugaauugaauccuuuggu

SEQ ID NO: 341992 - RNA, 22 nt, Human
cagaggcagccgggggagaacg

SEQ ID NO: 341993 - RNA, 22 nt, Human
gaaggggacuggcagcugcaga

SEQ ID NO: 341994 - RNA, 22 nt, Human
agucucagaaaagaagcaugga

SEQ ID NO: 341995 - RNA, 22 nt, Human
uucacauuggugauauguuucu

SEQ ID NO: 341996 - RNA, 22 nt, Human
uugcuguguaacuccuggccug

SEQ ID NO: 341997 - RNA, 19 nt, Human
uccaggaggcugccauuga

SEQ ID NO: 341998 - RNA, 22 nt, Human
augcugugccuucucugugcca

SEQ ID NO: 341999 - RNA, 20 nt, Human
aggcucagcugagcucuugg

SEQ ID NO: 342000 - RNA, 22 nt, Human
cucauaaugugacuguauuuga

SEQ ID NO: 342001 - RNA, 22 nt, Human
ucauuguuauguuuugcugucu

SEQ ID NO: 342002 - RNA, 22 nt, Human
ggccagcucuuguccacggagg

SEQ ID NO: 342003 - RNA, 22 nt, Human
aggcagauuuaggagaaaagaa

SEQ ID NO: 342004 - RNA, 20 nt, Human
aggaagcugagauguagagg

SEQ ID NO: 342005 - RNA, 20 nt, Human
agcugccccugggcacugcc

SEQ ID NO: 342006 - RNA, 22 nt, Human
aauacuauguagccaaaauaau

SEQ ID NO: 342007 - RNA, 22 nt, Human
ucugggaaccagugcggcuggg

SEQ ID NO: 342008 - RNA, 22 nt, Human
ugcuugaaagggguuucccagu

SEQ ID NO: 342009 - RNA, 22 nt, Human
gugcagcugcaggagucagguc

SEQ ID NO: 342010 - RNA, 22 nt, Human
aguaaaaauugaggugcaaaau

SEQ ID NO: 342011 - RNA, 22 nt, Human
gcccaguaguucaagguugcag

SEQ ID NO: 342012 - RNA, 22 nt, Human
gagccaaggguugccauggaga

SEQ ID NO: 342013 - RNA, 22 nt, Human
uauuucagcaagaagaaugugg

SEQ ID NO: 342014 - RNA, 22 nt, Human
cugcuguguggugaaacucagu

SEQ ID NO: 342015 - RNA, 22 nt, Human
ggaggcgauccugggaaacacc

SEQ ID NO: 342016 - RNA, 22 nt, Human
aggcagcauuugaauccagguc

SEQ ID NO: 342017 - RNA, 22 nt, Human
ugcaggaaucagaggggaagcg

SEQ ID NO: 342018 - RNA, 23 nt, Human
agcacacuuguacaaugcccuag

SEQ ID NO: 342019 - RNA, 22 nt, Human
gggcaguuuauucuagaugguu

SEQ ID NO: 342020 - RNA, 20 nt, Human
auuuggcaugaaguauugau

SEQ ID NO: 342021 - RNA, 22 nt, Human
uuuucagugggcaaugauguga

SEQ ID NO: 342022 - RNA, 22 nt, Human
acacaaguucuaaagauugcgc

SEQ ID NO: 342023 - RNA, 22 nt, Human
ugcuggaauaauuucauguuaa

SEQ ID NO: 342024 - RNA, 22 nt, Human
uucuucaugcuguugcugcuug

SEQ ID NO: 342025 - RNA, 22 nt, Human
gcaucuaaauaaacgugggagu

SEQ ID NO: 342026 - RNA, 22 nt, Human
accauuuuggguauuuucagag

SEQ ID NO: 342027 - RNA, 21 nt, Human
agcagaggggacauguuugau

SEQ ID NO: 342028 - RNA, 22 nt, Human
gacagcugugcaggagaagggg

SEQ ID NO: 342029 - RNA, 22 nt, Human
guguaugaggggagaauguuuu

SEQ ID NO: 342030 - RNA, 22 nt, Human
gaaauauucuugucuuguuuuc

SEQ ID NO: 342031 - RNA, 22 nt, Human
cccaggagacugagcuguaacc

SEQ ID NO: 342032 - RNA, 22 nt, Human
uucauucugcaguucucagcuc

SEQ ID NO: 342033 - RNA, 22 nt, Human
ucuggcaggucaaucauucuuu

SEQ ID NO: 342034 - RNA, 22 nt, Human
auucuucacauggauaggaucu

SEQ ID NO: 342035 - RNA, 23 nt, Human
aggcagcuggguagcaucuuucu

SEQ ID NO: 342036 - RNA, 22 nt, Human
aauacaguagguaauaguucau

SEQ ID NO: 342037 - RNA, 22 nt, Human
cuaucauuuuacaugguuggug

SEQ ID NO: 342038 - RNA, 22 nt, Human
ugaggcagggagaguggauaug

SEQ ID NO: 342039 - RNA, 22 nt, Human
guaggcagauaggagugcagcc

SEQ ID NO: 342040 - RNA, 22 nt, Human
gcuguggucugugagcuccaaa

SEQ ID NO: 342041 - RNA, 22 nt, Human
acaauacaggcuucuggacuua

SEQ ID NO: 342042 - RNA, 20 nt, Human
uggcaucucucaauuguagg

SEQ ID NO: 342043 - RNA, 22 nt, Human
uauucaaaguaccuucauugcc

SEQ ID NO: 342044 - RNA, 22 nt, Human
aauuaugagguagauaucacau

SEQ ID NO: 342045 - RNA, 18 nt, Human
gagucuuuguuacugcug

SEQ ID NO: 342046 - RNA, 22 nt, Human
guucuucaucauuuuagauagg

SEQ ID NO: 342047 - RNA, 22 nt, Human
ugaaagcacaaguucuaacagg

SEQ ID NO: 342048 - RNA, 22 nt, Human
cuuuggcacagucucauuugau

SEQ ID NO: 342049 - RNA, 22 nt, Human
auaaaguuuaaaagucaauagu

SEQ ID NO: 342050 - RNA, 22 nt, Human
cauucauuagaauagauaugua

SEQ ID NO: 342051 - RNA, 22 nt, Human
auggagggugguaagacagaga

SEQ ID NO: 342052 - RNA, 20 nt, Human
cccaggagcugugccccauc

SEQ ID NO: 342053 - RNA, 19 nt, Human
ggcagucucaagcagcaca

SEQ ID NO: 342054 - RNA, 22 nt, Human
ugucucugauaaguaguucagu

SEQ ID NO: 342055 - RNA, 22 nt, Human
uucugucaaacucacaggccga

SEQ ID NO: 342056 - RNA, 22 nt, Human
aggagcagaacugauucugacu

SEQ ID NO: 342057 - RNA, 22 nt, Human
auucuucacuguuucagaauga

SEQ ID NO: 342058 - RNA, 22 nt, Human
cauuuguaucugggcugcugug

SEQ ID NO: 342059 - RNA, 22 nt, Human
auguagaaauuaggaugauagu

SEQ ID NO: 342060 - RNA, 22 nt, Human
ucucaggaaauaggauuugagu

SEQ ID NO: 342061 - RNA, 22 nt, Human
aauugucaaacacaaauaagag

SEQ ID NO: 342062 - RNA, 22 nt, Human
ugaggggagcuagcaugccuug

SEQ ID NO: 342063 - RNA, 22 nt, Human
aaaaacugcaauuacuuuuguc

SEQ ID NO: 342064 - RNA, 22 nt, Human
uggcagcagacaaaaggccauu

SEQ ID NO: 342065 - RNA, 22 nt, Human
aaguguauauaugacuuauaaa

SEQ ID NO: 342066 - RNA, 22 nt, Human
aauauuguuucaagaucacaga

SEQ ID NO: 342067 - RNA, 22 nt, Human
auauucuugugauuauaaagua

SEQ ID NO: 342068 - RNA, 22 nt, Human
uuaaaaugaauauugauuagca

SEQ ID NO: 342069 - RNA, 22 nt, Human
uuaauuaaauucaugagcauug

SEQ ID NO: 342070 - RNA, 22 nt, Human
ugaggcaguugagcuuccugag

SEQ ID NO: 342071 - RNA, 22 nt, Human
acucaggaaaugagaggcucuc

SEQ ID NO: 342072 - RNA, 22 nt, Human
uaaggccaauuaacaaccaggg

SEQ ID NO: 342073 - RNA, 22 nt, Human
uguguuauugccacugaagacc

SEQ ID NO: 342074 - RNA, 22 nt, Human
aauauaugugguauugaccagc

SEQ ID NO: 342075 - RNA, 22 nt, Human
agguauaagucucauuucuguu

SEQ ID NO: 342076 - RNA, 22 nt, Human
gcagaggggaagcugaggaauu

SEQ ID NO: 342077 - RNA, 22 nt, Human
aguggcagagccaaguagagcc

SEQ ID NO: 342078 - RNA, 22 nt, Human
auguuugacugaguuuggcaga

SEQ ID NO: 342079 - RNA, 22 nt, Human
acaccauacucauguugguucc

SEQ ID NO: 342080 - RNA, 22 nt, Human
ucucccaggcugcccuguggac

SEQ ID NO: 342081 - RNA, 22 nt, Human
gugugaaagcuuguccucugua

SEQ ID NO: 342082 - RNA, 22 nt, Human
uuucaaacuuuacucuugaauc

SEQ ID NO: 342083 - RNA, 22 nt, Human
cagucccuaguggagcucacag

SEQ ID NO: 342084 - RNA, 22 nt, Human
cugcgcagcaaucagagaggag

SEQ ID NO: 342085 - RNA, 22 nt, Human
aucaggauagugguuaccuggg

SEQ ID NO: 342086 - RNA, 22 nt, Human
ucuuuguaaaugccuagcauaa

SEQ ID NO: 342087 - RNA, 22 nt, Human
cagaguggcacucugcuggaug

SEQ ID NO: 342088 - RNA, 22 nt, Human
cccaggaguuugaguucagcau

SEQ ID NO: 342089 - RNA, 22 nt, Human
uaacacaugaaagcaccuucuu

SEQ ID NO: 342090 - RNA, 22 nt, Human
guuuuauaauugcuucauaaga

SEQ ID NO: 342091 - RNA, 22 nt, Human
aguaaaucagaccucauuaugu

SEQ ID NO: 342092 - RNA, 22 nt, Human
acuugcugguggcauuuacagu

SEQ ID NO: 342093 - RNA, 22 nt, Human
uguuugaacugaauaacauagu

SEQ ID NO: 342094 - RNA, 22 nt, Human
accaggagagauuuuauugaga

SEQ ID NO: 342095 - RNA, 22 nt, Human
gccaggaguucagaugcauguu

SEQ ID NO: 342096 - RNA, 22 nt, Human
aggcagcuagagagugaaacug

SEQ ID NO: 342097 - RNA, 22 nt, Human
caagaugggcaccccagcaccu

SEQ ID NO: 342098 - RNA, 20 nt, Human
aggcagcuggccaggcaggu

SEQ ID NO: 342099 - RNA, 22 nt, Human
cagagagagucaaaucuuugcu

SEQ ID NO: 342100 - RNA, 22 nt, Human
agaccaagaaaggaugaggauc

SEQ ID NO: 342101 - RNA, 22 nt, Human
cuuguaauuauaauguacuguu

SEQ ID NO: 342102 - RNA, 22 nt, Human
gaggagaggggcucccaagagc

SEQ ID NO: 342103 - RNA, 22 nt, Human
uguugagacugagggagucagc

SEQ ID NO: 342104 - RNA, 22 nt, Human
uaugagaaucugcaguaugcuu

SEQ ID NO: 342105 - RNA, 22 nt, Human
uaguuaaaauaauggagauguu

SEQ ID NO: 342106 - RNA, 22 nt, Human
ccucuucugcuucaggagcacu

SEQ ID NO: 342107 - RNA, 22 nt, Human
aggcacagagaaugcccuccau

SEQ ID NO: 342108 - RNA, 22 nt, Human
uucuacaugguugcucagaggg

SEQ ID NO: 342109 - RNA, 22 nt, Human
uccaggagauacacugcaccag

SEQ ID NO: 342110 - RNA, 22 nt, Human
uugaauaguguuuucaguauac

SEQ ID NO: 342111 - RNA, 22 nt, Human
caaauaguaugagcaaugauuc

SEQ ID NO: 342112 - RNA, 22 nt, Human
ggagggaaugucuagcauucuu

SEQ ID NO: 342113 - RNA, 22 nt, Human
ugaaguuguuaagguugccauu

SEQ ID NO: 342114 - RNA, 22 nt, Human
cagcauuuagaauuugaagugu

SEQ ID NO: 342115 - RNA, 22 nt, Human
gugacaguggucacuuguaguu

SEQ ID NO: 342116 - RNA, 22 nt, Human
cauuuguuaauuacuauuaucu

SEQ ID NO: 342117 - RNA, 22 nt, Human
gaggagagaagcuaacggugcu

SEQ ID NO: 342118 - RNA, 22 nt, Human
ucccaggaauccguccucuaga

SEQ ID NO: 342119 - RNA, 22 nt, Human
aaagccauuacaaaauuucaua

SEQ ID NO: 342120 - RNA, 22 nt, Human
uugcugaaaucuaugacauccu

SEQ ID NO: 342121 - RNA, 22 nt, Human
uauuugcaacauaaaacucuga

SEQ ID NO: 342122 - RNA, 22 nt, Human
uuucaaacauaucuucauuacu

SEQ ID NO: 342123 - RNA, 22 nt, Human
ggaguaggaguagaacucauca

SEQ ID NO: 342124 - RNA, 22 nt, Human
agcagcauuaugauauaucuua

SEQ ID NO: 342125 - RNA, 22 nt, Human
cuucccagaccuuagagugcag

SEQ ID NO: 342126 - RNA, 22 nt, Human
auguaugauauuuccaguauca

SEQ ID NO: 342127 - RNA, 22 nt, Human
aggcagcagugauaagauagga

SEQ ID NO: 342128 - RNA, 22 nt, Human
cccagaaggucgaggcugcagu

SEQ ID NO: 342129 - RNA, 22 nt, Human
cccaggaggucgaagcugcagu

SEQ ID NO: 342130 - RNA, 22 nt, Human
uguccucuuccagugcuccuuc

SEQ ID NO: 342131 - RNA, 22 nt, Human
aagauaaacucuugauuucuga

SEQ ID NO: 342132 - RNA, 22 nt, Human
cucaggauuuacuaauuucaag

SEQ ID NO: 342133 - RNA, 22 nt, Human
auugaaaguccuaucuaaggga

SEQ ID NO: 342134 - RNA, 22 nt, Human
aggcuggagggcaauggcaaga

SEQ ID NO: 342135 - RNA, 22 nt, Human
guaucacuuuugagagugagaa

SEQ ID NO: 342136 - RNA, 22 nt, Human
uuugaaguggaaaaggauuuaa

SEQ ID NO: 342137 - RNA, 22 nt, Human
uucaggauucuuucagacuggg

SEQ ID NO: 342138 - RNA, 19 nt, Human
uggagacugagagugagca

SEQ ID NO: 342139 - RNA, 22 nt, Human
cuucaggauuuaggaagaugaa

SEQ ID NO: 342140 - RNA, 22 nt, Human
gucuauauauugcuugaauaau

SEQ ID NO: 342141 - RNA, 21 nt, Human
ugcugaugucagagaagcaag

SEQ ID NO: 342142 - RNA, 22 nt, Human
uggcagagcaaaaagauagaau

SEQ ID NO: 342143 - RNA, 22 nt, Human
aucuacauaaaacgaauacaua

SEQ ID NO: 342144 - RNA, 22 nt, Human
cagcuacuccucccaugacuuc

SEQ ID NO: 342145 - RNA, 22 nt, Human
uuugagauggagucuugcucug

SEQ ID NO: 342146 - RNA, 22 nt, Human
ggccagaggugguacauagcuu

SEQ ID NO: 342147 - RNA, 22 nt, Human
gaacuguaguuaauacuacaca

SEQ ID NO: 342148 - RNA, 22 nt, Human
auucauaacggcaaaugucacc

SEQ ID NO: 342149 - RNA, 22 nt, Human
cuuuccaagaaugcagauaccu

SEQ ID NO: 342150 - RNA, 22 nt, Human
uaucuguuugcucacagguguu

SEQ ID NO: 342151 - RNA, 22 nt, Human
gagggaggcaucaugaauccag

SEQ ID NO: 342152 - RNA, 22 nt, Human
auuuccagugcacugaauagaa

SEQ ID NO: 342153 - RNA, 20 nt, Human
gcucccagccugcagucccc

SEQ ID NO: 342154 - RNA, 22 nt, Human
cccaggaggcagagguugcagu

SEQ ID NO: 342155 - RNA, 22 nt, Human
gcagcuaccacccaggaaggac

SEQ ID NO: 342156 - RNA, 22 nt, Human
uuagaacuuaagaauacugucu

SEQ ID NO: 342157 - RNA, 22 nt, Human
aagcaccuggguuauaucuuag

SEQ ID NO: 342158 - RNA, 22 nt, Human
uguucucacuggaugcuucaca

SEQ ID NO: 342159 - RNA, 22 nt, Human
cucaacagcucugccauacucc

SEQ ID NO: 342160 - RNA, 23 nt, Human
acagaaaucauuuguaagguacc

SEQ ID NO: 342161 - RNA, 22 nt, Human
augaaacacacacgcgcauacu

SEQ ID NO: 342162 - RNA, 22 nt, Human
uguucauuuggcccuuuuguau

SEQ ID NO: 342163 - RNA, 22 nt, Human
gaggccaggacaugaaagcuga

SEQ ID NO: 342164 - RNA, 22 nt, Human
gagcauuuuugucugcauuuua

SEQ ID NO: 342165 - RNA, 22 nt, Human
auguuagaaucucugaaugugg

SEQ ID NO: 342166 - RNA, 22 nt, Human
uucuuacagaguuuacagagcc

SEQ ID NO: 342167 - RNA, 22 nt, Human
uggcagcuggaucccaaggcag

SEQ ID NO: 342168 - RNA, 22 nt, Human
ggauguugauugaauggccauu

SEQ ID NO: 342169 - RNA, 22 nt, Human
aggcucagaggugagcaucugc

SEQ ID NO: 342170 - RNA, 22 nt, Human
auugaaagaguuuucugcugca

SEQ ID NO: 342171 - RNA, 22 nt, Human
uccaggaggccucauuuccugu

SEQ ID NO: 342172 - RNA, 22 nt, Human
augcuguguuugagaaccuagg

SEQ ID NO: 342173 - RNA, 22 nt, Human
ugccaggauauaagagugcgau

SEQ ID NO: 342174 - RNA, 22 nt, Human
cagcauuuaucuuguagcagga

SEQ ID NO: 342175 - RNA, 22 nt, Human
agcucccagagcucgagaguaa

SEQ ID NO: 342176 - RNA, 22 nt, Human
ugugaaauucuugaaaugcaca

SEQ ID NO: 342177 - RNA, 22 nt, Human
caggcagccaggggaccugucc

SEQ ID NO: 342178 - RNA, 22 nt, Human
aggagcagcuucugaaccaugu

SEQ ID NO: 342179 - RNA, 22 nt, Human
agagagcauugaggaaaucuuc

SEQ ID NO: 342180 - RNA, 20 nt, Human
uuucacagucccuguuuccu

SEQ ID NO: 342181 - RNA, 22 nt, Human
guuuuucuuugugugaagacaa

SEQ ID NO: 342182 - RNA, 22 nt, Human
aacaaaugaccugauuucuucc

SEQ ID NO: 342183 - RNA, 22 nt, Human
guaggcagguggaggagugaag

SEQ ID NO: 342184 - RNA, 22 nt, Human
auuaaaauuccaagguaugcca

SEQ ID NO: 342185 - RNA, 22 nt, Human
augcuuuuccaggagaaauaua

SEQ ID NO: 342186 - RNA, 22 nt, Human
gcccaggauaaugcugucccug

SEQ ID NO: 342187 - RNA, 22 nt, Human
cccgggaggaggaaguugcagu

SEQ ID NO: 342188 - RNA, 22 nt, Human
cuacccaggcuuagagggcugg

SEQ ID NO: 342189 - RNA, 22 nt, Human
augucaaaucaguuuuaucaga

SEQ ID NO: 342190 - RNA, 22 nt, Human
uuuguuuagaaagagauuggug

SEQ ID NO: 342191 - RNA, 20 nt, Human
ucagugauuuugaagaggaa

SEQ ID NO: 342192 - RNA, 22 nt, Human
cagauccacccuuguagugaca

SEQ ID NO: 342193 - RNA, 22 nt, Human
acagugacguuuauuugagacg

SEQ ID NO: 342194 - RNA, 22 nt, Human
guccucuggaagaugaguucuu

SEQ ID NO: 342195 - RNA, 18 nt, Human
ugcuggguaacuguaugg

SEQ ID NO: 342196 - RNA, 22 nt, Human
ucaguucugcuagaaaaacagu

SEQ ID NO: 342197 - RNA, 22 nt, Human
uauuuccaaaagccuauuauga

SEQ ID NO: 342198 - RNA, 22 nt, Human
aggcagguccccuggaaggcac

SEQ ID NO: 342199 - RNA, 22 nt, Human
cugccagucuaugcugcucggc

SEQ ID NO: 342200 - RNA, 22 nt, Human
uccaggaggguuuucugccuuc

SEQ ID NO: 342201 - RNA, 22 nt, Human
gaccauuugcuaguaaauugca

SEQ ID NO: 342202 - RNA, 22 nt, Human
augaggcauuccacucaaacuc

SEQ ID NO: 342203 - RNA, 22 nt, Human
aaaagucugcucucauuucaga

SEQ ID NO: 342204 - RNA, 22 nt, Human
cccaucacagacacuggguuau

SEQ ID NO: 342205 - RNA, 22 nt, Human
uucaaauacauucuuugccacu

SEQ ID NO: 342206 - RNA, 22 nt, Human
ucauacaucuguccuggagcuc

SEQ ID NO: 342207 - RNA, 20 nt, Human
cauuuguuagcuuucuacug

SEQ ID NO: 342208 - RNA, 22 nt, Human
agaccauggccauccuaggaaa

SEQ ID NO: 342209 - RNA, 22 nt, Human
uugaaaggguuaaagugguaaa

SEQ ID NO: 342210 - RNA, 22 nt, Human
guuuuauaggcuguugcuauau

SEQ ID NO: 342211 - RNA, 22 nt, Human
ugaggcaggagguugagaacug

SEQ ID NO: 342212 - RNA, 22 nt, Human
caaggccacugcucagguuucc

SEQ ID NO: 342213 - RNA, 22 nt, Human
gagugucugaauuagagcacaa

SEQ ID NO: 342214 - RNA, 16 nt, Human
uguaugaacgucucca

SEQ ID NO: 342215 - RNA, 19 nt, Human
caggagagcaugcacuuug

SEQ ID NO: 342216 - RNA, 22 nt, Human
gauggcagucaaccaggugagg

SEQ ID NO: 342217 - RNA, 22 nt, Human
uagauauguguuuauuaugcug

SEQ ID NO: 342218 - RNA, 22 nt, Human
aagggcagagggaaucccacau

SEQ ID NO: 342219 - RNA, 22 nt, Human
agaggggagagcuaagcaauuc

SEQ ID NO: 342220 - RNA, 22 nt, Human
uauuuucuggacagucuugcuu

SEQ ID NO: 342221 - RNA, 22 nt, Human
aaccauuugcaguuacugagac

SEQ ID NO: 342222 - RNA, 22 nt, Human
agggagugguuaagaaggugca

SEQ ID NO: 342223 - RNA, 22 nt, Human
aggcaccuugagagcaggagcu

SEQ ID NO: 342224 - RNA, 22 nt, Human
aagcuggagaguuaggugaaua

SEQ ID NO: 342225 - RNA, 22 nt, Human
caaaugauagagccgauuauca

SEQ ID NO: 342226 - RNA, 22 nt, Human
guuauacauauguguuaacaaa

SEQ ID NO: 342227 - RNA, 22 nt, Human
accuugaugccuuuccaagaug

SEQ ID NO: 342228 - RNA, 22 nt, Human
gaggccaggaagcccaagauca

SEQ ID NO: 342229 - RNA, 17 nt, Human
aggcagcucagaacauc

SEQ ID NO: 342230 - RNA, 22 nt, Human
cagaaggcuuuguggaguagac

SEQ ID NO: 342231 - RNA, 22 nt, Human
acuuaaaaagaaucuuuucacg

SEQ ID NO: 342232 - RNA, 22 nt, Human
ucaaaguuacuugugguuuucu

SEQ ID NO: 342233 - RNA, 22 nt, Human
agucuccuuggccucaaugccu

SEQ ID NO: 342234 - RNA, 22 nt, Human
uuucuucagccuucacaaccug

SEQ ID NO: 342235 - RNA, 23 nt, Human
uagaaugucauucaaugauaugg

SEQ ID NO: 342236 - RNA, 22 nt, Human
caggauggccccggggcugugc

SEQ ID NO: 342237 - RNA, 22 nt, Human
auuugcuuaucuccacaguugu

SEQ ID NO: 342238 - RNA, 22 nt, Human
gagacagcacaggccacuggga

SEQ ID NO: 342239 - RNA, 23 nt, Human
cuccccaguguccucaugcaucu

SEQ ID NO: 342240 - RNA, 22 nt, Human
guucuucaucauuaacacucug

SEQ ID NO: 342241 - RNA, 22 nt, Human
ugaaaggugacauuucuuggau

SEQ ID NO: 342242 - RNA, 22 nt, Human
gcuuuggagccuguguucugcc

SEQ ID NO: 342243 - RNA, 22 nt, Human
aguaccaugcuuccugacuggu

SEQ ID NO: 342244 - RNA, 22 nt, Human
auucuucagaauaucuggcacu

SEQ ID NO: 342245 - RNA, 22 nt, Human
auucaaguucuucugucuuugc

SEQ ID NO: 342246 - RNA, 22 nt, Human
aauacugucuuucacagauauu

SEQ ID NO: 342247 - RNA, 22 nt, Human
cucaggauguacuacagaaggc

SEQ ID NO: 342248 - RNA, 22 nt, Human
aucaggauagucuguaaauugu

SEQ ID NO: 342249 - RNA, 22 nt, Human
acagauguacacucauauauaa

SEQ ID NO: 342250 - RNA, 23 nt, Human
acuuuauugaccccaggucaguu

SEQ ID NO: 342251 - RNA, 22 nt, Human
uaugaacucuggagucugagug

SEQ ID NO: 342252 - RNA, 23 nt, Human
aucauucuccaaucuggagcagg

SEQ ID NO: 342253 - RNA, 22 nt, Human
uuucacaagacagcuacuguug

SEQ ID NO: 342254 - RNA, 22 nt, Human
cccauugugguuguugaggaua

SEQ ID NO: 342255 - RNA, 22 nt, Human
uauugacaauuugugaaacuau

SEQ ID NO: 342256 - RNA, 22 nt, Human
uucuuucucaacaugaauguuu

SEQ ID NO: 342257 - RNA, 22 nt, Human
accaggaguugggggugggacc

SEQ ID NO: 342258 - RNA, 22 nt, Human
aauaugcauuaacuguguacau

SEQ ID NO: 342259 - RNA, 22 nt, Human
ucagauggcacacagagccugc

SEQ ID NO: 342260 - RNA, 22 nt, Human
agaggauguucuaggcacucau

SEQ ID NO: 342261 - RNA, 22 nt, Human
ucacuucacacccacuaucaug

SEQ ID NO: 342262 - RNA, 22 nt, Human
uucugucagaagcuagcuccug

SEQ ID NO: 342263 - RNA, 23 nt, Human
aaauaugucugagggcaaagaau

SEQ ID NO: 342264 - RNA, 22 nt, Human
cauuuucaugaguuucuguuca

SEQ ID NO: 342265 - RNA, 22 nt, Human
auauaauacaaccugcuaagug

SEQ ID NO: 342266 - RNA, 22 nt, Human
caggaugguggcaugaucagaa

SEQ ID NO: 342267 - RNA, 22 nt, Human
uucacauugugcagauuauggu

SEQ ID NO: 342268 - RNA, 22 nt, Human
uaacaucuuuagcagcucgaac

SEQ ID NO: 342269 - RNA, 22 nt, Human
agcuacccgaggacaggcuaag

SEQ ID NO: 342270 - RNA, 22 nt, Human
uuuguaaaggccugaauuucag

SEQ ID NO: 342271 - RNA, 22 nt, Human
cacaggagagcugggaggugcc

SEQ ID NO: 342272 - RNA, 22 nt, Human
augcuacagaguuugaauaugu

SEQ ID NO: 342273 - RNA, 20 nt, Human
gagauggacagaugaagggg

SEQ ID NO: 342274 - RNA, 22 nt, Human
ugcaggaacugggagggauagu

SEQ ID NO: 342275 - RNA, 22 nt, Human
uucaggaugacaccauguccag

SEQ ID NO: 342276 - RNA, 22 nt, Human
cagaguggcgacccccucagcu

SEQ ID NO: 342277 - RNA, 22 nt, Human
uuauuacacugaaagaauugcg

SEQ ID NO: 342278 - RNA, 21 nt, Human
acagauauuucauugaacauu

SEQ ID NO: 342279 - RNA, 22 nt, Human
ucuuuguaacugucuauugaga

SEQ ID NO: 342280 - RNA, 22 nt, Human
aaagaauagccuuuguccaaau

SEQ ID NO: 342281 - RNA, 22 nt, Human
uaauuucaauagcuugcauaau

SEQ ID NO: 342282 - RNA, 22 nt, Human
uaucaauacauguuaucagugu

SEQ ID NO: 342283 - RNA, 22 nt, Human
ccugcugugaagccaggccugu

SEQ ID NO: 342284 - RNA, 17 nt, Human
ugaauucaaucugcacu

SEQ ID NO: 342285 - RNA, 22 nt, Human
uuugcagucuggccugcuuugg

SEQ ID NO: 342286 - RNA, 22 nt, Human
cacaaauggccguguucaaaga

SEQ ID NO: 342287 - RNA, 20 nt, Human
uauuuguauuugggaaaguu

SEQ ID NO: 342288 - RNA, 20 nt, Human
gggugggagagucugagggu

SEQ ID NO: 342289 - RNA, 22 nt, Human
cuccaugaauuugagcuuugug

SEQ ID NO: 342290 - RNA, 22 nt, Human
cggcagcugauugcagagcacc

SEQ ID NO: 342291 - RNA, 22 nt, Human
uuacacaacaucuguauuauua

SEQ ID NO: 342292 - RNA, 17 nt, Human
uuucuccuuccaucuca

SEQ ID NO: 342293 - RNA, 22 nt, Human
gucaggauuauaauccccaugg

SEQ ID NO: 342294 - RNA, 22 nt, Human
uucauucuugucuuuguauagu

SEQ ID NO: 342295 - RNA, 22 nt, Human
cuggaguuagaguagacacuga

SEQ ID NO: 342296 - RNA, 22 nt, Human
ucuccuccuuuuuucaacauag

SEQ ID NO: 342297 - RNA, 22 nt, Human
cucaggauagcugcgcagccug

SEQ ID NO: 342298 - RNA, 22 nt, Human
uuucacagcuggguggcagagu

SEQ ID NO: 342299 - RNA, 22 nt, Human
cucacugacgaggaagcugaga

SEQ ID NO: 342300 - RNA, 22 nt, Human
agugcuuugagcguuugaaaag

SEQ ID NO: 342301 - RNA, 22 nt, Human
ugaaauuaugcauuguuguacc

SEQ ID NO: 342302 - RNA, 22 nt, Human
agaaaugaaaccaaagccuaga

SEQ ID NO: 342303 - RNA, 22 nt, Human
aggacuuagaacauuauguacu

SEQ ID NO: 342304 - RNA, 23 nt, Human
uugauuucaaaugcagagaacac

SEQ ID NO: 342305 - RNA, 22 nt, Human
gggcagcugcagggauggugac

SEQ ID NO: 342306 - RNA, 22 nt, Human
uaaauuguuuucuagaaguugu

SEQ ID NO: 342307 - RNA, 22 nt, Human
cccaggaccgcgcggcugagcg

SEQ ID NO: 342308 - RNA, 22 nt, Human
ucccaggacaugggcucugcuc

SEQ ID NO: 342309 - RNA, 22 nt, Human
caggagaucuuaggaauucuua

SEQ ID NO: 342310 - RNA, 22 nt, Human
gggcaguugauggaggucugga

SEQ ID NO: 342311 - RNA, 22 nt, Human
cuugcuucauuagugucuuagu

SEQ ID NO: 342312 - RNA, 22 nt, Human
ugcuggguuaccuaagccuaaa

SEQ ID NO: 342313 - RNA, 22 nt, Human
cucaggauggaagccuacagga

SEQ ID NO: 342314 - RNA, 22 nt, Human
cugcugugauugggagaaaccg

SEQ ID NO: 342315 - RNA, 20 nt, Human
ugcugucguguuuucugcuu

SEQ ID NO: 342316 - RNA, 22 nt, Human
gaggcugcuuugaugacaggag

SEQ ID NO: 342317 - RNA, 22 nt, Human
ucccaggauuuuaggcucucag

SEQ ID NO: 342318 - RNA, 22 nt, Human
guagggagcccagagcccagug

SEQ ID NO: 342319 - RNA, 17 nt, Human
gccucugcuugugucau

SEQ ID NO: 342320 - RNA, 22 nt, Human
uaaauuaugucacaugacucug

SEQ ID NO: 342321 - RNA, 21 nt, Human
agcagaggcagaauguaugca

SEQ ID NO: 342322 - RNA, 22 nt, Human
ggccaggaagggaagaucagca

SEQ ID NO: 342323 - RNA, 22 nt, Human
aacuacauuguccuuucugaag

SEQ ID NO: 342324 - RNA, 22 nt, Human
uuucaugaggggcaaaaucuca

SEQ ID NO: 342325 - RNA, 23 nt, Human
agggugagcaagcuauggagacc

SEQ ID NO: 342326 - RNA, 22 nt, Human
agguaugagauaaaucaaugaa

SEQ ID NO: 342327 - RNA, 22 nt, Human
ugcauguguguguauuuauaaa

SEQ ID NO: 342328 - RNA, 22 nt, Human
aggguagguguaagauagcccu

SEQ ID NO: 342329 - RNA, 22 nt, Human
acuugcauuauauuuaucacaa

SEQ ID NO: 342330 - RNA, 22 nt, Human
uagggauguggugagaacugag

SEQ ID NO: 342331 - RNA, 22 nt, Human
cccagcaguaaccaguggaaau

SEQ ID NO: 342332 - RNA, 22 nt, Human
gccugcagauauauaggauggu

SEQ ID NO: 342333 - RNA, 22 nt, Human
cuuaacauccugcauuuuucuu

SEQ ID NO: 342334 - RNA, 22 nt, Human
ggagaggagauuguggcauuuu

SEQ ID NO: 342335 - RNA, 17 nt, Human
uagcuguguuucagcua

SEQ ID NO: 342336 - RNA, 22 nt, Human
acgagagguccuuagaaucugu

SEQ ID NO: 342337 - RNA, 22 nt, Human
uucucagguagugcugaugcug

SEQ ID NO: 342338 - RNA, 22 nt, Human
ggaggacaggggcugcagcaca

SEQ ID NO: 342339 - RNA, 21 nt, Human
gccaggaguagauuacauuua

SEQ ID NO: 342340 - RNA, 22 nt, Human
auguucuuguucaaaugucagu

SEQ ID NO: 342341 - RNA, 22 nt, Human
cuguauuuguccucuauuuauu

SEQ ID NO: 342342 - RNA, 22 nt, Human
ucauuuauaaggaugcaauuaa

SEQ ID NO: 342343 - RNA, 22 nt, Human
uagggcagaguccaggaugggc

SEQ ID NO: 342344 - RNA, 22 nt, Human
augcugugagugugccgcagag

SEQ ID NO: 342345 - RNA, 22 nt, Human
uuguugguggaauugaugcuag

SEQ ID NO: 342346 - RNA, 22 nt, Human
uaaggccaggcuguggucggca

SEQ ID NO: 342347 - RNA, 23 nt, Human
cagaaaacccagagcucaguccc

SEQ ID NO: 342348 - RNA, 22 nt, Human
gaaacauacgauuuaggagaaa

SEQ ID NO: 342349 - RNA, 22 nt, Human
ucucaaaucaaacuuugagcuu

SEQ ID NO: 342350 - RNA, 22 nt, Human
ucauucuuuaccaaguugucac

SEQ ID NO: 342351 - RNA, 22 nt, Human
agaaaauauucauugagaggcu

SEQ ID NO: 342352 - RNA, 17 nt, Human
gcuguaguuugauaaga

SEQ ID NO: 342353 - RNA, 22 nt, Human
cuguggaaggccuguccugaaa

SEQ ID NO: 342354 - RNA, 22 nt, Human
uugaaaguuuauggagucugca

SEQ ID NO: 342355 - RNA, 22 nt, Human
gaaauauuacaguggaggggau

SEQ ID NO: 342356 - RNA, 22 nt, Human
cucaggauauugggcuggagca

SEQ ID NO: 342357 - RNA, 22 nt, Human
cugcauuagucaugcuuugcag

SEQ ID NO: 342358 - RNA, 22 nt, Human
gaaaacuauuggccuagaacaa

SEQ ID NO: 342359 - RNA, 22 nt, Human
guucucucugcuuccaagaugg

SEQ ID NO: 342360 - RNA, 22 nt, Human
ugcugcugauggcaccuaggca

SEQ ID NO: 342361 - RNA, 22 nt, Human
cacagucacauaucuaugugug

SEQ ID NO: 342362 - RNA, 23 nt, Human
uuucuucagaagccuugcgaggc

SEQ ID NO: 342363 - RNA, 22 nt, Human
cacucuccagcacaccccauuu

SEQ ID NO: 342364 - RNA, 20 nt, Human
aauuuacucacagaaugaau

SEQ ID NO: 342365 - RNA, 19 nt, Human
uggagggguuugaaugugg

SEQ ID NO: 342366 - RNA, 22 nt, Human
ucugggaaguccucugucaugc

SEQ ID NO: 342367 - RNA, 22 nt, Human
auaucacaguaguuguuuaguu

SEQ ID NO: 342368 - RNA, 22 nt, Human
aagcacauuguacauuugugcu

SEQ ID NO: 342369 - RNA, 22 nt, Human
uguaugaauauguauuuucaua

SEQ ID NO: 342370 - RNA, 22 nt, Human
ggauggagguucucagaugcuc

SEQ ID NO: 342371 - RNA, 22 nt, Human
ucccaggagcaccuuuugagcc

SEQ ID NO: 342372 - RNA, 19 nt, Human
ggcagcuugggaagguagc

SEQ ID NO: 342373 - RNA, 22 nt, Human
acccaggaaaacauggugcaga

SEQ ID NO: 342374 - RNA, 22 nt, Human
cgccucagccguggucaucuuc

SEQ ID NO: 342375 - RNA, 22 nt, Human
agccagcugugggcucaggcgg

SEQ ID NO: 342376 - RNA, 22 nt, Human
aauguaugugauuauuccucua

SEQ ID NO: 342377 - RNA, 22 nt, Human
aaaggccaugguuggaguguuu

SEQ ID NO: 342378 - RNA, 22 nt, Human
cugcugugagugguucuugccu

SEQ ID NO: 342379 - RNA, 22 nt, Human
gagguggugguggaggcauagc

SEQ ID NO: 342380 - RNA, 22 nt, Human
guuuuaguggguggccacugau

SEQ ID NO: 342381 - RNA, 22 nt, Human
cacacucauuagucauuucucu

SEQ ID NO: 342382 - RNA, 22 nt, Human
ucacaaaugaggaaaucgagca

SEQ ID NO: 342383 - RNA, 22 nt, Human
gcauguguuauuuuauguauga

SEQ ID NO: 342384 - RNA, 22 nt, Human
cccaggaagaaauucugauuug

SEQ ID NO: 342385 - RNA, 15 nt, Human
cccaggaguucgaga

SEQ ID NO: 342386 - RNA, 22 nt, Human
aucugccugcaguggagguggg

SEQ ID NO: 342387 - RNA, 22 nt, Human
uacagcuaggcaaaaaugacau

SEQ ID NO: 342388 - RNA, 22 nt, Human
aauauccacacugugucccugc

SEQ ID NO: 342389 - RNA, 22 nt, Human
auucugucauuucaagaaaaac

SEQ ID NO: 342390 - RNA, 21 nt, Human
cccaggaguccuauuuaaaug

SEQ ID NO: 342391 - RNA, 22 nt, Human
cucccaggggaacuaucaagua

SEQ ID NO: 342392 - RNA, 19 nt, Human
caggaugaucccaugacac

SEQ ID NO: 342393 - RNA, 22 nt, Human
gucccauaaguagugcaacuug

SEQ ID NO: 342394 - RNA, 22 nt, Human
cucccaggacucagaggagaag

SEQ ID NO: 342395 - RNA, 22 nt, Human
gaggcagcaauaaaaagaauuu

SEQ ID NO: 342396 - RNA, 22 nt, Human
auguauuucuauguagugaaga

SEQ ID NO: 342397 - RNA, 22 nt, Human
auaugugaaugauaucacuuug

SEQ ID NO: 342398 - RNA, 20 nt, Human
ugugaaagcaguagaaugac

SEQ ID NO: 342399 - RNA, 22 nt, Human
augugucuuugagacucugcua

SEQ ID NO: 342400 - RNA, 22 nt, Human
cagcaggagcagucagacuccu

SEQ ID NO: 342401 - RNA, 22 nt, Human
uucucugaguacguuucagugu

SEQ ID NO: 342402 - RNA, 22 nt, Human
gugcugugcgcuuuuucuguau

SEQ ID NO: 342403 - RNA, 22 nt, Human
aaaguaguuagucaugugaaaa

SEQ ID NO: 342404 - RNA, 22 nt, Human
uuucaguuguccuguuaauagc

SEQ ID NO: 342405 - RNA, 22 nt, Human
caguggagagacuuuuacucuu

SEQ ID NO: 342406 - RNA, 22 nt, Human
uggcagcuaucuuuaaugagau

SEQ ID NO: 342407 - RNA, 22 nt, Human
gcaggcaguuauuuaguagaau

SEQ ID NO: 342408 - RNA, 19 nt, Human
aucugccuuagugcugcug

SEQ ID NO: 342409 - RNA, 22 nt, Human
uuugaaagcaccauuugaguag

SEQ ID NO: 342410 - RNA, 22 nt, Human
ugugaaaagcaggcuacuuucu

SEQ ID NO: 342411 - RNA, 22 nt, Human
ucuuugaaagcuguucuagagu

SEQ ID NO: 342412 - RNA, 22 nt, Human
caagauggacauaaggagagaa

SEQ ID NO: 342413 - RNA, 23 nt, Human
guaaaauacgcagugcaguguga

SEQ ID NO: 342414 - RNA, 22 nt, Human
uccaggagucuagccucaggcc

SEQ ID NO: 342415 - RNA, 22 nt, Human
cauuuuaaaugauuuaagccaa

SEQ ID NO: 342416 - RNA, 23 nt, Human
uggacgccgacuuuggaggcgcu

SEQ ID NO: 342417 - RNA, 22 nt, Human
aaguaugaaucaaagacuaucu

SEQ ID NO: 342418 - RNA, 22 nt, Human
cccaggaaacccgaaggcgacc

SEQ ID NO: 342419 - RNA, 22 nt, Human
agcuucccaagguuggaagguu

SEQ ID NO: 342420 - RNA, 22 nt, Human
aauaaucucccuuuuuguaugu

SEQ ID NO: 342421 - RNA, 22 nt, Human
uugacacagaucaauauucaac

SEQ ID NO: 342422 - RNA, 22 nt, Human
aagugagugguaaggagcaugg

SEQ ID NO: 342423 - RNA, 22 nt, Human
gauauguauugaaugaucauuu

SEQ ID NO: 342424 - RNA, 22 nt, Human
uggcagcuagauaguguguuua

SEQ ID NO: 342425 - RNA, 22 nt, Human
ucaucucaaaacccaaggggca

SEQ ID NO: 342426 - RNA, 22 nt, Human
gcuuugaagucugugucuuuug

SEQ ID NO: 342427 - RNA, 22 nt, Human
aucuuguuauaagagauaaugg

SEQ ID NO: 342428 - RNA, 22 nt, Human
ccaggagacccagggaaggagc

SEQ ID NO: 342429 - RNA, 22 nt, Human
uuacuuugcuuucucauuacag

SEQ ID NO: 342430 - RNA, 17 nt, Human
aaucuguuuacagucag

SEQ ID NO: 342431 - RNA, 22 nt, Human
uugugaaauguuucaaaauagu

SEQ ID NO: 342432 - RNA, 22 nt, Human
agcuagccuaggcagagugcau

SEQ ID NO: 342433 - RNA, 22 nt, Human
aggcagugcucaagacagcagc

SEQ ID NO: 342434 - RNA, 22 nt, Human
ggaggcagaauagagugugggu

SEQ ID NO: 342435 - RNA, 22 nt, Human
ugaggcaggacugagcgggaug

SEQ ID NO: 342436 - RNA, 22 nt, Human
aaaguuagacagcaucauuucu

SEQ ID NO: 342437 - RNA, 22 nt, Human
ucaggagauggucuuuauaggc

SEQ ID NO: 342438 - RNA, 22 nt, Human
ugugaaggagaugaagggagug

SEQ ID NO: 342439 - RNA, 20 nt, Human
guugaaaguaauaugaugcu

SEQ ID NO: 342440 - RNA, 21 nt, Human
uucuucaugaugauuaauggc

SEQ ID NO: 342441 - RNA, 22 nt, Human
uuaacauuguccuuagcagauu

SEQ ID NO: 342442 - RNA, 22 nt, Human
acaaauaugguacucggagaaa

SEQ ID NO: 342443 - RNA, 22 nt, Human
aaguuugcauagauuaagcauu

SEQ ID NO: 342444 - RNA, 22 nt, Human
caggauagaaaggccauggagu

SEQ ID NO: 342445 - RNA, 22 nt, Human
gucaggauguuuauucuccagu

SEQ ID NO: 342446 - RNA, 22 nt, Human
gagaggcaggcgcugcaauggu

SEQ ID NO: 342447 - RNA, 22 nt, Human
cuacccagauccaggauggcua

SEQ ID NO: 342448 - RNA, 22 nt, Human
ugagauguaagguaugcuuacu

SEQ ID NO: 342449 - RNA, 22 nt, Human
ggcagcuguaagaugagugaau

SEQ ID NO: 342450 - RNA, 22 nt, Human
ucugcaggcuuauaggaugggu

SEQ ID NO: 342451 - RNA, 19 nt, Human
caaggccaccauuucuccg

SEQ ID NO: 342452 - RNA, 22 nt, Human
ucacugcucuccaauguggagu

SEQ ID NO: 342453 - RNA, 22 nt, Human
uuugaacuucuaccugucauau

SEQ ID NO: 342454 - RNA, 18 nt, Human
ucauuuguuuugcaugaa

SEQ ID NO: 342455 - RNA, 20 nt, Human
guggcaggcagugaaggagc

SEQ ID NO: 342456 - RNA, 22 nt, Human
uuugaaaggugucgagaugugu

SEQ ID NO: 342457 - RNA, 22 nt, Human
uugcugugucauuuguuuaauc

SEQ ID NO: 342458 - RNA, 22 nt, Human
ucuuuuggaaaugaugugcagg

SEQ ID NO: 342459 - RNA, 22 nt, Human
ucuaaagaagaggguucugcgg

SEQ ID NO: 342460 - RNA, 21 nt, Human
uucuucaaagaagaaggcaca

SEQ ID NO: 342461 - RNA, 22 nt, Human
gccucugcaauuacauugugcc

SEQ ID NO: 342462 - RNA, 22 nt, Human
guugaaagagcauggacuugaa

SEQ ID NO: 342463 - RNA, 22 nt, Human
ggaggaggggcgcuuugucuau

SEQ ID NO: 342464 - RNA, 22 nt, Human
agaccauagggaccucagguug

SEQ ID NO: 342465 - RNA, 22 nt, Human
uuuacaaccucauauucugaug

SEQ ID NO: 342466 - RNA, 22 nt, Human
aaugaaauguagcuuauccaua

SEQ ID NO: 342467 - RNA, 22 nt, Human
uugcagcuucuaccacuguuuc

SEQ ID NO: 342468 - RNA, 22 nt, Human
aggccagcacgacagccgcagg

SEQ ID NO: 342469 - RNA, 22 nt, Human
agcacauucugccuugcuuugc

SEQ ID NO: 342470 - RNA, 18 nt, Human
cugcccagagcauuucau

SEQ ID NO: 342471 - RNA, 22 nt, Human
uuuaacagguaaaguaaaugug

SEQ ID NO: 342472 - RNA, 22 nt, Human
gaucauuuugaugcccuuuuag

SEQ ID NO: 342473 - RNA, 22 nt, Human
aucuuucagggccauuuguauu

SEQ ID NO: 342474 - RNA, 22 nt, Human
cacaauguauauguauaucaaa

SEQ ID NO: 342475 - RNA, 22 nt, Human
ggagguggcagagggacauucu

SEQ ID NO: 342476 - RNA, 22 nt, Human
cagcagagaccaagugauuuga

SEQ ID NO: 342477 - RNA, 22 nt, Human
cuguaugaggaucagacuggac

SEQ ID NO: 342478 - RNA, 22 nt, Human
ugaggcagaaauuccuguuuuc

SEQ ID NO: 342479 - RNA, 22 nt, Human
uuggaaagauuauuauuaugaa

SEQ ID NO: 342480 - RNA, 22 nt, Human
cagggaggcugucuuaugccug

SEQ ID NO: 342481 - RNA, 22 nt, Human
ugucucugaggugagggucagc

SEQ ID NO: 342482 - RNA, 22 nt, Human
aaagccagagcaagcugucaca

SEQ ID NO: 342483 - RNA, 22 nt, Human
ggccaggagcugcacagggcuc

SEQ ID NO: 342484 - RNA, 22 nt, Human
auuuagaacuuuguuugccaau

SEQ ID NO: 342485 - RNA, 17 nt, Human
agaacuguaguagcucc

SEQ ID NO: 342486 - RNA, 22 nt, Human
agggcaguucaacuucauagug

SEQ ID NO: 342487 - RNA, 22 nt, Human
agaauccucuucaguaaauucu

SEQ ID NO: 342488 - RNA, 22 nt, Human
cauuucacaaauggccacauca

SEQ ID NO: 342489 - RNA, 22 nt, Human
guucuucaucuuaaccaucugu

SEQ ID NO: 342490 - RNA, 22 nt, Human
cugcaucacagcaggaggcaca

SEQ ID NO: 342491 - RNA, 22 nt, Human
auuuccuuugcaaagacugugc

SEQ ID NO: 342492 - RNA, 22 nt, Human
ucaauucaacacaugcacauug

SEQ ID NO: 342493 - RNA, 22 nt, Human
gauuuuaauuauaggagguccu

SEQ ID NO: 342494 - RNA, 22 nt, Human
uuugaaaucuaaucaaggaaca

SEQ ID NO: 342495 - RNA, 22 nt, Human
agguauaagaagauuauuuaua

SEQ ID NO: 342496 - RNA, 22 nt, Human
ccugcuguaaugugucuuuauu

SEQ ID NO: 342497 - RNA, 22 nt, Human
uuauuauuggugaguuaaggaa

SEQ ID NO: 342498 - RNA, 20 nt, Human
gggcagcuccccucauucug

SEQ ID NO: 342499 - RNA, 22 nt, Human
uugaaaguuaucuagauucuga

SEQ ID NO: 342500 - RNA, 22 nt, Human
gagagggauacugaguuuuggu

SEQ ID NO: 342501 - RNA, 20 nt, Human
cucuccucacccgugucagg

SEQ ID NO: 342502 - RNA, 22 nt, Human
uucucugaucuugcuagacuga

SEQ ID NO: 342503 - RNA, 22 nt, Human
aaagauaauguuuccuuauucu

SEQ ID NO: 342504 - RNA, 22 nt, Human
uaugaacuguaacccucaccgc

SEQ ID NO: 342505 - RNA, 22 nt, Human
aggcacaguggcucacaccugu

SEQ ID NO: 342506 - RNA, 22 nt, Human
ugauuuccccagucuugcugcu

SEQ ID NO: 342507 - RNA, 22 nt, Human
aucuucucaagcagcauccugu

SEQ ID NO: 342508 - RNA, 22 nt, Human
gcagagcuccccaagacaccaa

SEQ ID NO: 342509 - RNA, 22 nt, Human
gacccaggaagcuacuucuggu

SEQ ID NO: 342510 - RNA, 22 nt, Human
guucuucagcauuagaagucau

SEQ ID NO: 342511 - RNA, 18 nt, Human
aggcaggugcuggaaguc

SEQ ID NO: 342512 - RNA, 22 nt, Human
guacauuucucuuguucuuauu

SEQ ID NO: 342513 - RNA, 22 nt, Human
ugaggggagaagcagcagccug

SEQ ID NO: 342514 - RNA, 22 nt, Human
cuucuucauguauugauagucu

SEQ ID NO: 342515 - RNA, 20 nt, Human
ugugcaggagagugaggcug

SEQ ID NO: 342516 - RNA, 22 nt, Human
ucauuuuucacacagggucacc

SEQ ID NO: 342517 - RNA, 22 nt, Human
cggaggggauacauuuucugaa

SEQ ID NO: 342518 - RNA, 22 nt, Human
uuauucuuuucuccagaauccc

SEQ ID NO: 342519 - RNA, 22 nt, Human
auucacagaauaguuuuaccag

SEQ ID NO: 342520 - RNA, 20 nt, Human
agauuauuccuaagauuucu

SEQ ID NO: 342521 - RNA, 20 nt, Human
cagaggcaaggagacuugga

SEQ ID NO: 342522 - RNA, 22 nt, Human
ucaggauggcuucugcaucaaa

SEQ ID NO: 342523 - RNA, 23 nt, Human
cccaggaguuucacugcaaaggu

SEQ ID NO: 342524 - RNA, 22 nt, Human
gaggccaggggccuggagauga

SEQ ID NO: 342525 - RNA, 22 nt, Human
cuggcugggagcgagcugcuca

SEQ ID NO: 342526 - RNA, 22 nt, Human
ucuacuguagugaugcugcagu

SEQ ID NO: 342527 - RNA, 22 nt, Human
uucaugugaauauauuugucuu

SEQ ID NO: 342528 - RNA, 21 nt, Human
aaaggccauaaucacggagca

SEQ ID NO: 342529 - RNA, 22 nt, Human
aagagggcugcaaucuuauugc

SEQ ID NO: 342530 - RNA, 22 nt, Human
ucaucugucccaggcuuuuuuc

SEQ ID NO: 342531 - RNA, 22 nt, Human
gcaaauauucaagacuuuucca

SEQ ID NO: 342532 - RNA, 22 nt, Human
cauggcugcgagaagagugggu

SEQ ID NO: 342533 - RNA, 22 nt, Human
aucugcuugaguuugaagucag

SEQ ID NO: 342534 - RNA, 22 nt, Human
auucuucauuguugauucaugu

SEQ ID NO: 342535 - RNA, 22 nt, Human
agugcuguaacaacuuauuugg

SEQ ID NO: 342536 - RNA, 22 nt, Human
aggcagcuuucagugucucuca

SEQ ID NO: 342537 - RNA, 22 nt, Human
aggcugcugaggccaccacgcu

SEQ ID NO: 342538 - RNA, 23 nt, Human
ucguugaauagcaauagcacaac

SEQ ID NO: 342539 - RNA, 22 nt, Human
uccaugagacagauacuguaag

SEQ ID NO: 342540 - RNA, 22 nt, Human
cuuucauaaaggaaaugaugag

SEQ ID NO: 342541 - RNA, 22 nt, Human
ggcagccuugagggaggccugg

SEQ ID NO: 342542 - RNA, 22 nt, Human
ccaggagaugauguuggggauu

SEQ ID NO: 342543 - RNA, 22 nt, Human
cagcugacuucauaggaagaca

SEQ ID NO: 342544 - RNA, 22 nt, Human
accaggagacaugaccaaugag

SEQ ID NO: 342545 - RNA, 22 nt, Human
ucccaggaucugagggcagaga

SEQ ID NO: 342546 - RNA, 22 nt, Human
aggguggcugaguagauggaag

SEQ ID NO: 342547 - RNA, 18 nt, Human
aagaggaggagcagguug

SEQ ID NO: 342548 - RNA, 22 nt, Human
agcuaccuggcuuaucacuguc

SEQ ID NO: 342549 - RNA, 22 nt, Human
uagggauguccugagacuuggc

SEQ ID NO: 342550 - RNA, 22 nt, Human
augacaguucuacacuuaaucu

SEQ ID NO: 342551 - RNA, 23 nt, Human
gaggcacucaggaaaugugagug

SEQ ID NO: 342552 - RNA, 22 nt, Human
auauuguugacuauaagaguaa

SEQ ID NO: 342553 - RNA, 22 nt, Human
cccaggaggcgcagguugcggu

SEQ ID NO: 342554 - RNA, 22 nt, Human
ccccggaggcggagguugcagu

SEQ ID NO: 342555 - RNA, 22 nt, Human
gcugcccaggguggagccggcu

SEQ ID NO: 342556 - RNA, 22 nt, Human
gcaggaagcauagaagaaugcc

SEQ ID NO: 342557 - RNA, 22 nt, Human
auuaaauuggacgcugggggaa

SEQ ID NO: 342558 - RNA, 22 nt, Human
gcuuuggaugugugccugaggu

SEQ ID NO: 342559 - RNA, 22 nt, Human
ccccaggagcuuguuuuagaga

SEQ ID NO: 342560 - RNA, 22 nt, Human
ugucuucaguaaaauacacuau

SEQ ID NO: 342561 - RNA, 22 nt, Human
uaacacauaucuacaacaugug

SEQ ID NO: 342562 - RNA, 19 nt, Human
gugcuuuuuaagagcucag

SEQ ID NO: 342563 - RNA, 22 nt, Human
ucuacugcacuggugucucauc

SEQ ID NO: 342564 - RNA, 22 nt, Human
aguucacauaucuguuuuauuu

SEQ ID NO: 342565 - RNA, 22 nt, Human
uagugcuuggcccuaccagaua

SEQ ID NO: 342566 - RNA, 22 nt, Human
uucucuuuucaccaguugcuaa

SEQ ID NO: 342567 - RNA, 22 nt, Human
uugaauuagacuuugcuacagg

SEQ ID NO: 342568 - RNA, 20 nt, Human
auccaugagagucuggauuc

SEQ ID NO: 342569 - RNA, 22 nt, Human
auugaaagagaauguagcucuu

SEQ ID NO: 342570 - RNA, 21 nt, Human
augugaaaccuuccacgcuga

SEQ ID NO: 342571 - RNA, 22 nt, Human
ugagaauuuucaguuucacuuu

SEQ ID NO: 342572 - RNA, 22 nt, Human
uauuugaaaguguacaaaaacu

SEQ ID NO: 342573 - RNA, 22 nt, Human
uucagggagagcgggacgggug

SEQ ID NO: 342574 - RNA, 22 nt, Human
gaacacauuagucugaguuggc

SEQ ID NO: 342575 - RNA, 22 nt, Human
augugaaauagcuggauaugaa

SEQ ID NO: 342576 - RNA, 22 nt, Human
uuuugugagcccauaaaugcca

SEQ ID NO: 342577 - RNA, 19 nt, Human
uguguguuuauauauguau

SEQ ID NO: 342578 - RNA, 22 nt, Human
ucuacagacagagcagguggga

SEQ ID NO: 342579 - RNA, 22 nt, Human
ggagaggggcaaguuuaucuag

SEQ ID NO: 342580 - RNA, 22 nt, Human
ugaugaauaaacuugagaguca

SEQ ID NO: 342581 - RNA, 22 nt, Human
guaguucugcagugucaccuga

SEQ ID NO: 342582 - RNA, 22 nt, Human
cauauaaauacaacauguguua

SEQ ID NO: 342583 - RNA, 17 nt, Human
uucaaagcuuaucaagg

SEQ ID NO: 342584 - RNA, 22 nt, Human
aucacuguguauguauaugcag

SEQ ID NO: 342585 - RNA, 19 nt, Human
uagaggagaagggaagugg

SEQ ID NO: 342586 - RNA, 22 nt, Human
guggcagcggugugcaaggagg

SEQ ID NO: 342587 - RNA, 22 nt, Human
aaagcagagcagggcacuuaug

SEQ ID NO: 342588 - RNA, 22 nt, Human
gauucacucauauuuuacguuu

SEQ ID NO: 342589 - RNA, 22 nt, Human
uucuuaacuggaaaaugucaga

SEQ ID NO: 342590 - RNA, 22 nt, Human
acccaggauagagugcugcagu

SEQ ID NO: 342591 - RNA, 22 nt, Human
cucuuucugauucgcugggacc

SEQ ID NO: 342592 - RNA, 22 nt, Human
cagcuggcugcaugaugccaaa

SEQ ID NO: 342593 - RNA, 22 nt, Human
uggcagcuauggucuaagggcc

SEQ ID NO: 342594 - RNA, 22 nt, Human
aauauuuguuaguguuuuaaug

SEQ ID NO: 342595 - RNA, 22 nt, Human
cagagccaggucuaggagucuc

SEQ ID NO: 342596 - RNA, 22 nt, Human
aauguauguguauaucaaauca

SEQ ID NO: 342597 - RNA, 22 nt, Human
ccagaagaccccguccaccucc

SEQ ID NO: 342598 - RNA, 20 nt, Human
ucugugcaccugcuacaagg

SEQ ID NO: 342599 - RNA, 22 nt, Human
caucaaauaggaauauuuggca

SEQ ID NO: 342600 - RNA, 22 nt, Human
auuauuauuguugauguuaggg

SEQ ID NO: 342601 - RNA, 22 nt, Human
aagacaauuugauacuaguugc

SEQ ID NO: 342602 - RNA, 22 nt, Human
cagaggcaaaagagguggaggu

SEQ ID NO: 342603 - RNA, 22 nt, Human
acaauauuguacccagaaguuu

SEQ ID NO: 342604 - RNA, 18 nt, Human
uugcuuuguaagcuugca

SEQ ID NO: 342605 - RNA, 22 nt, Human
gaauacaugauacaugaacugc

SEQ ID NO: 342606 - RNA, 20 nt, Human
gcaaaauaggcucuguuggu

SEQ ID NO: 342607 - RNA, 22 nt, Human
uugcuuugccaccagaagucua

SEQ ID NO: 342608 - RNA, 22 nt, Human
aucauuucccuuuagaucacaa

SEQ ID NO: 342609 - RNA, 22 nt, Human
gaggccagaguuccccgaguca

SEQ ID NO: 342610 - RNA, 22 nt, Human
ugaaaugaucaguuugguuacu

SEQ ID NO: 342611 - RNA, 22 nt, Human
uuucauaauauccagagauuuu

SEQ ID NO: 342612 - RNA, 22 nt, Human
uaguauuuaaucacuuuugucu

SEQ ID NO: 342613 - RNA, 22 nt, Human
uagacauuucugguuauugaca

SEQ ID NO: 342614 - RNA, 22 nt, Human
gcagcuucaguaggugaagaca

SEQ ID NO: 342615 - RNA, 20 nt, Human
gaagcagcuucauguagaca

SEQ ID NO: 342616 - RNA, 22 nt, Human
cagcagaggugguucacauugu

SEQ ID NO: 342617 - RNA, 22 nt, Human
uuugacauggaauaacucauuu

SEQ ID NO: 342618 - RNA, 22 nt, Human
ucacauuucugauuauaccaaa

SEQ ID NO: 342619 - RNA, 22 nt, Human
caugcugugugguuagaacugu

SEQ ID NO: 342620 - RNA, 22 nt, Human
uucuuauagaagcaaccauugu

SEQ ID NO: 342621 - RNA, 22 nt, Human
uagggaugacgaaaggacagag

SEQ ID NO: 342622 - RNA, 22 nt, Human
cuugcuggugguguuuucuaug

SEQ ID NO: 342623 - RNA, 23 nt, Human
cccaggagccugaguccucucug

SEQ ID NO: 342624 - RNA, 22 nt, Human
ggaggccagggacccagucagc

SEQ ID NO: 342625 - RNA, 22 nt, Human
uuauccuggauuauauauguga

SEQ ID NO: 342626 - RNA, 22 nt, Human
acccaggagccgugagagguua

SEQ ID NO: 342627 - RNA, 22 nt, Human
ugaggcaggaggauugcaggau

SEQ ID NO: 342628 - RNA, 22 nt, Human
ugagccuguccugugcauguga

SEQ ID NO: 342629 - RNA, 22 nt, Human
gaggagcuugaggcuaggagcc

SEQ ID NO: 342630 - RNA, 22 nt, Human
gcaggagagccagcaggcuucc

SEQ ID NO: 342631 - RNA, 20 nt, Human
uuucaguugguuaauggcau

SEQ ID NO: 342632 - RNA, 22 nt, Human
agugcuuucccugaaaccuucc

SEQ ID NO: 342633 - RNA, 22 nt, Human
ucugcagggaugugagggguga

SEQ ID NO: 342634 - RNA, 19 nt, Human
uucauucucuuauuguugu

SEQ ID NO: 342635 - RNA, 22 nt, Human
agcaccugccugcauuggcuau

SEQ ID NO: 342636 - RNA, 22 nt, Human
gcacaauuauuuaugcaguaug

SEQ ID NO: 342637 - RNA, 22 nt, Human
uggcagcugcaggccuccugag

SEQ ID NO: 342638 - RNA, 22 nt, Human
agaaguuguagguuugcauauu

SEQ ID NO: 342639 - RNA, 22 nt, Human
ugccuguguccccuucuuggca

SEQ ID NO: 342640 - RNA, 20 nt, Human
uuucugugagaaacacuguu

SEQ ID NO: 342641 - RNA, 22 nt, Human
uuuggaauuggcauucuauucu

SEQ ID NO: 342642 - RNA, 22 nt, Human
ccucaggauccgcaggugcagu

SEQ ID NO: 342643 - RNA, 22 nt, Human
uggcagcugauuagauggugcc

SEQ ID NO: 342644 - RNA, 22 nt, Human
cuguggaaaauuuguauguaau

SEQ ID NO: 342645 - RNA, 22 nt, Human
uugcauuugagaaaguucuccu

SEQ ID NO: 342646 - RNA, 22 nt, Human
gguggaaggccuggaaggaggc

SEQ ID NO: 342647 - RNA, 22 nt, Human
gaacacaucacauuuuacagug

SEQ ID NO: 342648 - RNA, 21 nt, Human
acagcauguuuguguguuugc

SEQ ID NO: 342649 - RNA, 22 nt, Human
agaggacaaaaugagaagugcu

SEQ ID NO: 342650 - RNA, 22 nt, Human
uccaugagagguaacuuuacaa

SEQ ID NO: 342651 - RNA, 22 nt, Human
uaucuaaaggauuuaauuuagu

SEQ ID NO: 342652 - RNA, 22 nt, Human
ucuucauuccguagauauuuau

SEQ ID NO: 342653 - RNA, 22 nt, Human
ugaggcaguauuuuagugacuu

SEQ ID NO: 342654 - RNA, 22 nt, Human
cccaggaaugagcaggcagggg

SEQ ID NO: 342655 - RNA, 22 nt, Human
ucuucauuuuauagcaucugug

SEQ ID NO: 342656 - RNA, 22 nt, Human
gcugccagcuuuccuuggcuga

SEQ ID NO: 342657 - RNA, 19 nt, Human
cuggccaggccaggggccc

SEQ ID NO: 342658 - RNA, 22 nt, Human
ggagcuguucaggacugcuuca

SEQ ID NO: 342659 - RNA, 22 nt, Human
cagaggauucccuagugaccug

SEQ ID NO: 342660 - RNA, 22 nt, Human
augcagcugugggcaagaaaug

SEQ ID NO: 342661 - RNA, 22 nt, Human
ggacagcucugccaggagcuca

SEQ ID NO: 342662 - RNA, 22 nt, Human
gucuucuuuucagucugcuugu

SEQ ID NO: 342663 - RNA, 22 nt, Human
uucuucucucauagauuaaggu

SEQ ID NO: 342664 - RNA, 22 nt, Human
uaguuuuacuugcgaugauaau

SEQ ID NO: 342665 - RNA, 22 nt, Human
aauugcaauuuucuuaaggucu

SEQ ID NO: 342666 - RNA, 22 nt, Human
ucugcucugggccagcuauuaa

SEQ ID NO: 342667 - RNA, 22 nt, Human
auguuugaaauuguaaguauau

SEQ ID NO: 342668 - RNA, 22 nt, Human
cuguggaauugaugcuuagugu

SEQ ID NO: 342669 - RNA, 23 nt, Human
uacaugcuauaauuucacccuca

SEQ ID NO: 342670 - RNA, 22 nt, Human
acagaauugaaaguauaaucug

SEQ ID NO: 342671 - RNA, 22 nt, Human
acccaggagacggaggugcagu

SEQ ID NO: 342672 - RNA, 22 nt, Human
aggcagguuggugagaagacug

SEQ ID NO: 342673 - RNA, 22 nt, Human
auuauucuuaugucaucauggc

SEQ ID NO: 342674 - RNA, 22 nt, Human
cagaagaguagcugaacaaguu

SEQ ID NO: 342675 - RNA, 22 nt, Human
cuggccagcugacagcagggcu

SEQ ID NO: 342676 - RNA, 22 nt, Human
gaauauuuucaguacagauggu

SEQ ID NO: 342677 - RNA, 22 nt, Human
gcugcugugaauuuuuuaaaug

SEQ ID NO: 342678 - RNA, 22 nt, Human
aaggcaguuaauuuggcuagaa

SEQ ID NO: 342679 - RNA, 22 nt, Human
gggagagguuacccgagcaacu

SEQ ID NO: 342680 - RNA, 22 nt, Human
auucuuaauugccaugcuguau

SEQ ID NO: 342681 - RNA, 22 nt, Human
auuauauaggacuugcccuucc

SEQ ID NO: 342682 - RNA, 22 nt, Human
acauuuagcuguacaaucuaug

SEQ ID NO: 342683 - RNA, 22 nt, Human
ccaggagaugggagcaucuaaa

SEQ ID NO: 342684 - RNA, 22 nt, Human
ccaggagaauaauggcagauua

SEQ ID NO: 342685 - RNA, 22 nt, Human
aggccagcagcaugacggcauc

SEQ ID NO: 342686 - RNA, 22 nt, Human
auguuuccauuuucuuguauca

SEQ ID NO: 342687 - RNA, 22 nt, Human
uugaacaguccuaagagacccu

SEQ ID NO: 342688 - RNA, 22 nt, Human
agguccagcuguugcagccucc

SEQ ID NO: 342689 - RNA, 17 nt, Human
gcugacccuggagaagu

SEQ ID NO: 342690 - RNA, 22 nt, Human
augaggcaguacacacaaagcc

SEQ ID NO: 342691 - RNA, 22 nt, Human
ucucugaguaagugacaguuca

SEQ ID NO: 342692 - RNA, 22 nt, Human
cuacagacccaccuuggaagaa

SEQ ID NO: 342693 - RNA, 23 nt, Human
uugcauagacauccucauagauu

SEQ ID NO: 342694 - RNA, 22 nt, Human
agaggcaggaagagcugauuuu

SEQ ID NO: 342695 - RNA, 22 nt, Human
agugcagccgagaucaggugcu

SEQ ID NO: 342696 - RNA, 22 nt, Human
uucugucagcugcuuugucuca

SEQ ID NO: 342697 - RNA, 22 nt, Human
cugcucuaacugcauuaguuuu

SEQ ID NO: 342698 - RNA, 22 nt, Human
agaggccacuuugccugugaug

SEQ ID NO: 342699 - RNA, 22 nt, Human
cugacuguaauucuguucuuaa

SEQ ID NO: 342700 - RNA, 22 nt, Human
ggccaggagaggagggcacuga

SEQ ID NO: 342701 - RNA, 22 nt, Human
uguaugaaagaacaagggcuua

SEQ ID NO: 342702 - RNA, 22 nt, Human
uugcuagcugguguaugcauug

SEQ ID NO: 342703 - RNA, 22 nt, Human
uggaaugacagagagucugaau

SEQ ID NO: 342704 - RNA, 22 nt, Human
auucuucauuuacuguuacuug

SEQ ID NO: 342705 - RNA, 22 nt, Human
aaggcagcccuggcucagccug

SEQ ID NO: 342706 - RNA, 22 nt, Human
ggcucagaccucccagcuccag

SEQ ID NO: 342707 - RNA, 22 nt, Human
gguuauauaauucagugcuuuc

SEQ ID NO: 342708 - RNA, 22 nt, Human
gccauuuucugucuuguuuauu

SEQ ID NO: 342709 - RNA, 22 nt, Human
agucuugcucuugcaucugcuu

SEQ ID NO: 342710 - RNA, 22 nt, Human
caggcagcugaggacuuugcua

SEQ ID NO: 342711 - RNA, 22 nt, Human
auguagaagcugacagugcugu

SEQ ID NO: 342712 - RNA, 22 nt, Human
aaucuucauuuugacaagauuc

SEQ ID NO: 342713 - RNA, 22 nt, Human
aguucuucauaaccuuacugug

SEQ ID NO: 342714 - RNA, 22 nt, Human
uggcuguguuaccacuucaugu

SEQ ID NO: 342715 - RNA, 22 nt, Human
cccaggaagaggggucaggugu

SEQ ID NO: 342716 - RNA, 19 nt, Human
uccaggagcaaagccaguu

SEQ ID NO: 342717 - RNA, 22 nt, Human
gucuucaacaauaacuaccacu

SEQ ID NO: 342718 - RNA, 22 nt, Human
uuucaguguaucuuccaaaagc

SEQ ID NO: 342719 - RNA, 22 nt, Human
gaggcagcagggcugguuccuu

SEQ ID NO: 342720 - RNA, 22 nt, Human
aaaauauuuuagggccaggaga

SEQ ID NO: 342721 - RNA, 22 nt, Human
gaaacauauuaauccagugaaa

SEQ ID NO: 342722 - RNA, 19 nt, Human
cuugcugggugguuucugc

SEQ ID NO: 342723 - RNA, 22 nt, Human
aggcaagcgcagaagcggagga

SEQ ID NO: 342724 - RNA, 22 nt, Human
gaggccagcuaguccaggaagu

SEQ ID NO: 342725 - RNA, 22 nt, Human
gagggaauggugugcaagaggu

SEQ ID NO: 342726 - RNA, 22 nt, Human
ggcagcuaggggcagggaauuc

SEQ ID NO: 342727 - RNA, 22 nt, Human
aggcagauuacuugaggccagg

SEQ ID NO: 342728 - RNA, 22 nt, Human
caaauguauaaauguacuuucu

SEQ ID NO: 342729 - RNA, 22 nt, Human
acugccauuggucaaaugagug

SEQ ID NO: 342730 - RNA, 18 nt, Human
ugucauaauauaucaccu

SEQ ID NO: 342731 - RNA, 22 nt, Human
gaggcacuggaggaaaggagaa

SEQ ID NO: 342732 - RNA, 22 nt, Human
cagugguuauacuuacuguuuc

SEQ ID NO: 342733 - RNA, 22 nt, Human
cucagaagaacaaaggcucuac

SEQ ID NO: 342734 - RNA, 22 nt, Human
auggaaagggaagcaaggaaca

SEQ ID NO: 342735 - RNA, 22 nt, Human
uucagcaagaccaccauguacc

SEQ ID NO: 342736 - RNA, 22 nt, Human
aauuuuaagcauaugacugguu

SEQ ID NO: 342737 - RNA, 22 nt, Human
uaauaguuucauaaugugcuuc

SEQ ID NO: 342738 - RNA, 22 nt, Human
ccagaccacccuggccaugcac

SEQ ID NO: 342739 - RNA, 22 nt, Human
cauucuuauauuuacucauuca

SEQ ID NO: 342740 - RNA, 22 nt, Human
ugaggcaggagaauggcgggaa

SEQ ID NO: 342741 - RNA, 22 nt, Human
ugguuuugcuaaaauagaaaga

SEQ ID NO: 342742 - RNA, 22 nt, Human
aacaucuacuaagugccaggca

SEQ ID NO: 342743 - RNA, 22 nt, Human
aagauauagauaaaacuaugca

SEQ ID NO: 342744 - RNA, 22 nt, Human
gcagcugagcgugaggaagagu

SEQ ID NO: 342745 - RNA, 22 nt, Human
gcagcugcagacccucagugcu

SEQ ID NO: 342746 - RNA, 22 nt, Human
gcgcaggagccgcggagggccg

SEQ ID NO: 342747 - RNA, 22 nt, Human
ggagcugugcagugacuacaga

SEQ ID NO: 342748 - RNA, 20 nt, Human
auacacauucauagaaaaau

SEQ ID NO: 342749 - RNA, 22 nt, Human
aguaugaagaauacauagauga

SEQ ID NO: 342750 - RNA, 22 nt, Human
uccacauccauugcuugacuuu

SEQ ID NO: 342751 - RNA, 22 nt, Human
agagagggcauagaaaaaggga

SEQ ID NO: 342752 - RNA, 22 nt, Human
ucaggaugguguggaggaaaua

SEQ ID NO: 342753 - RNA, 22 nt, Human
agucucugcaugccugcugugc

SEQ ID NO: 342754 - RNA, 22 nt, Human
ccaugagacagcaacugaaagu

SEQ ID NO: 342755 - RNA, 22 nt, Human
auguucuguuuuguaauucaua

SEQ ID NO: 342756 - RNA, 22 nt, Human
gcugcugugccuggcguccugu

SEQ ID NO: 342757 - RNA, 22 nt, Human
aggccagcccugggcugagaga

SEQ ID NO: 342758 - RNA, 22 nt, Human
uucuuugaguuaguacagucca

SEQ ID NO: 342759 - RNA, 22 nt, Human
aaauuguugaucuacaguaagg

SEQ ID NO: 342760 - RNA, 22 nt, Human
guguauaaugcuguuuguacau

SEQ ID NO: 342761 - RNA, 22 nt, Human
cuauugaauuaacuauuaaagu

SEQ ID NO: 342762 - RNA, 22 nt, Human
augugaaagagguguucagugg

SEQ ID NO: 342763 - RNA, 22 nt, Human
auuuaaaugcuuaagaggguuu

SEQ ID NO: 342764 - RNA, 22 nt, Human
gaggucaggcuugcagcagggu

SEQ ID NO: 342765 - RNA, 22 nt, Human
agcugcccuuuaugaugcugaa

SEQ ID NO: 342766 - RNA, 22 nt, Human
gagggaggggagcuccacccuc

SEQ ID NO: 342767 - RNA, 22 nt, Human
aaggcagcaugaaucccuguac

SEQ ID NO: 342768 - RNA, 22 nt, Human
auuauuauauagggaaaguccc

SEQ ID NO: 342769 - RNA, 22 nt, Human
aauguaugaagguuccaguuuc

SEQ ID NO: 342770 - RNA, 17 nt, Human
uuucaucugggaccacc

SEQ ID NO: 342771 - RNA, 22 nt, Human
ucaagugcuugugagguauuug

SEQ ID NO: 342772 - RNA, 22 nt, Human
gaggcagcaaaauauaucauaa

SEQ ID NO: 342773 - RNA, 22 nt, Human
acugcuuacccggccugacuuc

SEQ ID NO: 342774 - RNA, 22 nt, Human
cucugucaggcugcagaugcuc

SEQ ID NO: 342775 - RNA, 22 nt, Human
auccugucaucauaguacuuga

SEQ ID NO: 342776 - RNA, 22 nt, Human
cgaggcagacaaaaguuggaag

SEQ ID NO: 342777 - RNA, 17 nt, Human
gcccaggaaggacggcc

SEQ ID NO: 342778 - RNA, 22 nt, Human
cuccaggaaagccugaggcccg

SEQ ID NO: 342779 - RNA, 22 nt, Human
ucauuauuuuggacuggagugu

SEQ ID NO: 342780 - RNA, 18 nt, Human
gaugggagcaagagaaga

SEQ ID NO: 342781 - RNA, 22 nt, Human
guuaucaugcuucaucaucacu

SEQ ID NO: 342782 - RNA, 22 nt, Human
ucaugaacaucucaaauaacca

SEQ ID NO: 342783 - RNA, 22 nt, Human
uagugcuuaacacaaagugauu

SEQ ID NO: 342784 - RNA, 22 nt, Human
uugcauuugaucuuggguucuc

SEQ ID NO: 342785 - RNA, 22 nt, Human
cugcuuugauuagaagaguaca

SEQ ID NO: 342786 - RNA, 17 nt, Human
uauauguaugccucucc

SEQ ID NO: 342787 - RNA, 22 nt, Human
aggagcagaauuuaaugugcag

SEQ ID NO: 342788 - RNA, 22 nt, Human
uguuuuaagagcgcacuuuaua

SEQ ID NO: 342789 - RNA, 22 nt, Human
gagcagcucugggugacccagu

SEQ ID NO: 342790 - RNA, 22 nt, Human
uuucaugauuaacuuagugaau

SEQ ID NO: 342791 - RNA, 22 nt, Human
ugaggcagcccacuuuccuuag

SEQ ID NO: 342792 - RNA, 22 nt, Human
ggcagcacugcagcuuguuggg

SEQ ID NO: 342793 - RNA, 22 nt, Human
uuugaaagaaaccagugaguga

SEQ ID NO: 342794 - RNA, 22 nt, Human
aaaaugacauuccagugauauu

SEQ ID NO: 342795 - RNA, 22 nt, Human
cugccaggcgauggauuggcug

SEQ ID NO: 342796 - RNA, 22 nt, Human
uucuucuuucccccugugguac

SEQ ID NO: 342797 - RNA, 22 nt, Human
uuaaauuuuagaaacagacucu

SEQ ID NO: 342798 - RNA, 22 nt, Human
caggcagcaucagucugcugua

SEQ ID NO: 342799 - RNA, 22 nt, Human
aaaauuauucauggcuuuugga

SEQ ID NO: 342800 - RNA, 19 nt, Human
uucuccaggcugcagaggg

SEQ ID NO: 342801 - RNA, 22 nt, Human
gcucagagcuugaaguuccacu

SEQ ID NO: 342802 - RNA, 23 nt, Human
cugcuguguuggucucgauggga

SEQ ID NO: 342803 - RNA, 22 nt, Human
auuugcaaagucguaucuguga

SEQ ID NO: 342804 - RNA, 19 nt, Human
gcagcugcuugaaaagaaa

SEQ ID NO: 342805 - RNA, 22 nt, Human
acacauuucucuuuuuguaagu

SEQ ID NO: 342806 - RNA, 21 nt, Human
uccaggaguucuaauaggugu

SEQ ID NO: 342807 - RNA, 22 nt, Human
ugcuucugggcaaaugugugug

SEQ ID NO: 342808 - RNA, 22 nt, Human
aggaagcuggugugaggaugaa

SEQ ID NO: 342809 - RNA, 18 nt, Human
gagagggaucccucagga

SEQ ID NO: 342810 - RNA, 22 nt, Human
aggucagcaugaguagaaggua

SEQ ID NO: 342811 - RNA, 22 nt, Human
uggcagcuauuacaaggaaguc

SEQ ID NO: 342812 - RNA, 22 nt, Human
uucuugcaggucacucacugag

SEQ ID NO: 342813 - RNA, 22 nt, Human
aaucuguuuaguucugcguaug

SEQ ID NO: 342814 - RNA, 23 nt, Human
acaagauagggauaaaaagauaa

SEQ ID NO: 342815 - RNA, 22 nt, Human
augugaaaauccaauggcagca

SEQ ID NO: 342816 - RNA, 22 nt, Human
ggaggggaacuaaucccgugac

SEQ ID NO: 342817 - RNA, 22 nt, Human
gagugcaggccugagcaccauc

SEQ ID NO: 342818 - RNA, 22 nt, Human
uuccaagaguaaauucaaauug

SEQ ID NO: 342819 - RNA, 22 nt, Human
ucaggagagagaaauuggggcu

SEQ ID NO: 342820 - RNA, 22 nt, Human
aggcagcuucugauuagcagcg

SEQ ID NO: 342821 - RNA, 22 nt, Human
cugccaggcacgugcagcauca

SEQ ID NO: 342822 - RNA, 22 nt, Human
aaauauaguaaaugcauaguuc

SEQ ID NO: 342823 - RNA, 22 nt, Human
uuugaauguuuuagguacuuaa

SEQ ID NO: 342824 - RNA, 22 nt, Human
ucucagucagccuugauguccc

SEQ ID NO: 342825 - RNA, 22 nt, Human
uaggagagcugaacuauugucu

SEQ ID NO: 342826 - RNA, 22 nt, Human
uucugucaaaugccaguagaga

SEQ ID NO: 342827 - RNA, 22 nt, Human
uucaggauccccuugaugggcu

SEQ ID NO: 342828 - RNA, 22 nt, Human
cugcuguguuagcagguuuagu

SEQ ID NO: 342829 - RNA, 22 nt, Human
agucucuuuguggacucugccu

SEQ ID NO: 342830 - RNA, 22 nt, Human
ccaggcugggcuacaaguugag

SEQ ID NO: 342831 - RNA, 21 nt, Human
agggagcuuuagguagaaguu

SEQ ID NO: 342832 - RNA, 22 nt, Human
ucugaaggugcuagagaaagcu

SEQ ID NO: 342833 - RNA, 22 nt, Human
aucaggauuacacggggaugcu

SEQ ID NO: 342834 - RNA, 22 nt, Human
ggcaucuccaaaacaugaacuc

SEQ ID NO: 342835 - RNA, 22 nt, Human
aaucuucuacuugacaguucuc

SEQ ID NO: 342836 - RNA, 22 nt, Human
cagcagagcugggcuuugaauu

SEQ ID NO: 342837 - RNA, 22 nt, Human
ggaugggagcagaggacgacca

SEQ ID NO: 342838 - RNA, 22 nt, Human
uuguaugaauguauccuaauuu

SEQ ID NO: 342839 - RNA, 20 nt, Human
uucuucucuaguuaucuuca

SEQ ID NO: 342840 - RNA, 22 nt, Human
cugaacuuauugagugcuugcu

SEQ ID NO: 342841 - RNA, 23 nt, Human
cuugcaggaagcagauggcacac

SEQ ID NO: 342842 - RNA, 22 nt, Human
cauuugcagagggugacacucu

SEQ ID NO: 342843 - RNA, 22 nt, Human
gaauacauuggaaaucagaaua

SEQ ID NO: 342844 - RNA, 22 nt, Human
uucccucucacuuaaagcuugg

SEQ ID NO: 342845 - RNA, 22 nt, Human
auuuggcaacauuaauugaauc

SEQ ID NO: 342846 - RNA, 22 nt, Human
aagacauugucauuuuauaauu

SEQ ID NO: 342847 - RNA, 22 nt, Human
gagcagcucgagaaggaagcag

SEQ ID NO: 342848 - RNA, 22 nt, Human
gaggcugaggguuagagaguca

SEQ ID NO: 342849 - RNA, 22 nt, Human
cagcuggcgggcagagccgcca

SEQ ID NO: 342850 - RNA, 20 nt, Human
ucagaugggagugagccauc

SEQ ID NO: 342851 - RNA, 22 nt, Human
ucaaauaaugccauucaucauc

SEQ ID NO: 342852 - RNA, 22 nt, Human
gugauaaaauucaaauagcucu

SEQ ID NO: 342853 - RNA, 22 nt, Human
cugcuucugggaugauggagua

SEQ ID NO: 342854 - RNA, 22 nt, Human
cccaggaggcagagguuggagc

SEQ ID NO: 342855 - RNA, 22 nt, Human
caggcagcagaggaguguggga

SEQ ID NO: 342856 - RNA, 22 nt, Human
ucaggagaacuuccuucuaccc

SEQ ID NO: 342857 - RNA, 22 nt, Human
gcugcccauuccacuggauggu

SEQ ID NO: 342858 - RNA, 22 nt, Human
aucacugucgucaucugagauu

SEQ ID NO: 342859 - RNA, 22 nt, Human
ucugcugugggucuauauuuua

SEQ ID NO: 342860 - RNA, 22 nt, Human
ucacaguaaaagcauggaagag

SEQ ID NO: 342861 - RNA, 22 nt, Human
uaucaucuuguugucaugcagc

SEQ ID NO: 342862 - RNA, 22 nt, Human
auuuucagagacaucuggacuu

SEQ ID NO: 342863 - RNA, 22 nt, Human
ucugggaacucugucauuuccc

SEQ ID NO: 342864 - RNA, 22 nt, Human
agcuagaauauugaucugaaau

SEQ ID NO: 342865 - RNA, 20 nt, Human
cccagugaagcauggaagag

SEQ ID NO: 342866 - RNA, 19 nt, Human
uggggcuguguuuugaccc

SEQ ID NO: 342867 - RNA, 22 nt, Human
gcccaggaagccaccgggaagu

SEQ ID NO: 342868 - RNA, 22 nt, Human
uauggaaacuaauucauuuuuc

SEQ ID NO: 342869 - RNA, 22 nt, Human
uauuucagcccuacuacuuggc

SEQ ID NO: 342870 - RNA, 22 nt, Human
auacagauguugaauguuauau

SEQ ID NO: 342871 - RNA, 22 nt, Human
gaggcaucugggcacagaagug

SEQ ID NO: 342872 - RNA, 23 nt, Human
uggagcugacagucagagggagg

SEQ ID NO: 342873 - RNA, 22 nt, Human
uguaugaagguuuaccugcugu

SEQ ID NO: 342874 - RNA, 22 nt, Human
uugguuuaggaacuggcuugga

SEQ ID NO: 342875 - RNA, 22 nt, Human
aggcaguguguagcuggaagag

SEQ ID NO: 342876 - RNA, 18 nt, Human
gcagcuagccaggggggc

SEQ ID NO: 342877 - RNA, 22 nt, Human
auuucagaugaccaaauggaaa

SEQ ID NO: 342878 - RNA, 22 nt, Human
caguucuuaauaccaugugguu

SEQ ID NO: 342879 - RNA, 22 nt, Human
agagggaucacccuguuucugg

SEQ ID NO: 342880 - RNA, 22 nt, Human
cauuuguauguuccuccuuagg

SEQ ID NO: 342881 - RNA, 22 nt, Human
aaggaguuuggguagucauaca

SEQ ID NO: 342882 - RNA, 22 nt, Human
cugcugugagcacuccagccug

SEQ ID NO: 342883 - RNA, 22 nt, Human
cauauguauuucucauaauuag

SEQ ID NO: 342884 - RNA, 22 nt, Human
uugguuuacuaggauucaaauu

SEQ ID NO: 342885 - RNA, 22 nt, Human
ucaggaugguccuuuaugagaa

SEQ ID NO: 342886 - RNA, 22 nt, Human
agcugccccaugagaggcaggu

SEQ ID NO: 342887 - RNA, 22 nt, Human
cccaggaacagggcucagaccc

SEQ ID NO: 342888 - RNA, 22 nt, Human
cagcagagggagccauugaaau

SEQ ID NO: 342889 - RNA, 18 nt, Human
ugagaggcagguagagga

SEQ ID NO: 342890 - RNA, 22 nt, Human
acauaccauacauggugagaug

SEQ ID NO: 342891 - RNA, 22 nt, Human
gcagcuccuccugggcuggaga

SEQ ID NO: 342892 - RNA, 22 nt, Human
ucaacugcaaguuugcuuaguu

SEQ ID NO: 342893 - RNA, 21 nt, Human
cccacggaaugaugaggcacu

SEQ ID NO: 342894 - RNA, 22 nt, Human
gaaggccauuuuuagguagaau

SEQ ID NO: 342895 - RNA, 22 nt, Human
cuggcugugcugcaggcuuugg

SEQ ID NO: 342896 - RNA, 22 nt, Human
uuuuagcacuaagugauaugcu

SEQ ID NO: 342897 - RNA, 22 nt, Human
ggaggcagaacuucccgucagu

SEQ ID NO: 342898 - RNA, 22 nt, Human
gggacuucauagcuaggcacuu

SEQ ID NO: 342899 - RNA, 22 nt, Human
uccaggaguuugagacugcagu

SEQ ID NO: 342900 - RNA, 22 nt, Human
ccuugcugcgugcuagcacaga

SEQ ID NO: 342901 - RNA, 22 nt, Human
ugucuucaucuccaugcacaga

SEQ ID NO: 342902 - RNA, 22 nt, Human
agauggagaaugacaauuaagg

SEQ ID NO: 342903 - RNA, 22 nt, Human
gagggaggugauacugaacgua

SEQ ID NO: 342904 - RNA, 22 nt, Human
cucuccucugaaguggugaccc

SEQ ID NO: 342905 - RNA, 22 nt, Human
ggcaggcugcuugggucauguc

SEQ ID NO: 342906 - RNA, 22 nt, Human
aggaagcugcuggaguagugug

SEQ ID NO: 342907 - RNA, 22 nt, Human
aaagccaugggucuuuggcaua

SEQ ID NO: 342908 - RNA, 22 nt, Human
cccagcaggaggagguugcagu

SEQ ID NO: 342909 - RNA, 22 nt, Human
gaggcagcaucuauggugggaa

SEQ ID NO: 342910 - RNA, 22 nt, Human
gaucuucucuuuaguagaaaca

SEQ ID NO: 342911 - RNA, 22 nt, Human
auuuccaggagaaaggauuuua

SEQ ID NO: 342912 - RNA, 22 nt, Human
gcugguuuccuuaucuauaaag

SEQ ID NO: 342913 - RNA, 22 nt, Human
guugaaagaucauguggcugcc

SEQ ID NO: 342914 - RNA, 22 nt, Human
aaauauagcaauuaugccuacu

SEQ ID NO: 342915 - RNA, 22 nt, Human
acagcagcuugcgugucugguc

SEQ ID NO: 342916 - RNA, 22 nt, Human
ugaggcaggacauggacaacug

SEQ ID NO: 342917 - RNA, 22 nt, Human
caagaugugccuaaucagaccu

SEQ ID NO: 342918 - RNA, 22 nt, Human
ggggcagcucccgagggcagga

SEQ ID NO: 342919 - RNA, 22 nt, Human
ucucucuucaacccuuaacuag

SEQ ID NO: 342920 - RNA, 22 nt, Human
auuucccagcuuugaucaguuu

SEQ ID NO: 342921 - RNA, 22 nt, Human
aauguaugacaguucuaguggu

SEQ ID NO: 342922 - RNA, 22 nt, Human
aaauuuucagagcacuagagaa

SEQ ID NO: 342923 - RNA, 22 nt, Human
auuucagguaccugugggaucc

SEQ ID NO: 342924 - RNA, 20 nt, Human
gccaggagggugugaugagc

SEQ ID NO: 342925 - RNA, 22 nt, Human
cugcugugggcaggguagcugg

SEQ ID NO: 342926 - RNA, 22 nt, Human
aucaguuauuuuuaagcuauaa

SEQ ID NO: 342927 - RNA, 22 nt, Human
uucuucaaaacaacacuggccu

SEQ ID NO: 342928 - RNA, 18 nt, Human
ggcagggaaaagauaggg

SEQ ID NO: 342929 - RNA, 22 nt, Human
uuuaacagaugugaaauuuuca

SEQ ID NO: 342930 - RNA, 22 nt, Human
uucugugaaucuuuuuucccac

SEQ ID NO: 342931 - RNA, 22 nt, Human
caggcagcgcucguggccuggc

SEQ ID NO: 342932 - RNA, 20 nt, Human
acuugcugggcuuuguuacc

SEQ ID NO: 342933 - RNA, 22 nt, Human
cucaugauguagcgaaugagaa

SEQ ID NO: 342934 - RNA, 22 nt, Human
ucuuugcacugugcaagcagaa

SEQ ID NO: 342935 - RNA, 22 nt, Human
uggcagcuggcucugcgcaggc

SEQ ID NO: 342936 - RNA, 22 nt, Human
ucugcaucauuuuucagagccg

SEQ ID NO: 342937 - RNA, 22 nt, Human
aauaacuuuuaaaagacccugg

SEQ ID NO: 342938 - RNA, 22 nt, Human
auguuauaguuauaaaaugagg

SEQ ID NO: 342939 - RNA, 19 nt, Human
aaaaacuuaguccagaaag

SEQ ID NO: 342940 - RNA, 22 nt, Human
aucaggaugaagcuguagcgaa

SEQ ID NO: 342941 - RNA, 22 nt, Human
auagcuguuagauuggggucga

SEQ ID NO: 342942 - RNA, 22 nt, Human
uaucuguuguaguacagaugau

SEQ ID NO: 342943 - RNA, 22 nt, Human
ggguggagcuuggacaccagua

SEQ ID NO: 342944 - RNA, 22 nt, Human
ugcuauaaguagacauucaaca

SEQ ID NO: 342945 - RNA, 22 nt, Human
aaauuaguacauugcaaagucc

SEQ ID NO: 342946 - RNA, 22 nt, Human
uugauuaaacaggcauauucaa

SEQ ID NO: 342947 - RNA, 20 nt, Human
ccucaggaugagggugagca

SEQ ID NO: 342948 - RNA, 22 nt, Human
cagcuggccccacaguagaggc

SEQ ID NO: 342949 - RNA, 23 nt, Human
ucuugaaaagccuacagcaguuc

SEQ ID NO: 342950 - RNA, 22 nt, Human
ucuuuccaaggacucuguagca

SEQ ID NO: 342951 - RNA, 22 nt, Human
uaugucaaaguuaagaaauagg

SEQ ID NO: 342952 - RNA, 22 nt, Human
cacaaaugguuguagacauuaa

SEQ ID NO: 342953 - RNA, 22 nt, Human
aggguggccaugagggagagau

SEQ ID NO: 342954 - RNA, 22 nt, Human
ucucaggaagauuagggcuaag

SEQ ID NO: 342955 - RNA, 23 nt, Human
uucuucucaauuaguugauucag

SEQ ID NO: 342956 - RNA, 22 nt, Human
caagauggguguugugaugguu

SEQ ID NO: 342957 - RNA, 18 nt, Human
gaggcagcuagcaauuuu

SEQ ID NO: 342958 - RNA, 22 nt, Human
aaaggccaauaaagacaagcug

SEQ ID NO: 342959 - RNA, 22 nt, Human
uuuaaauuuagaagaaacacug

SEQ ID NO: 342960 - RNA, 22 nt, Human
uuuuagauaguuuaacugcacu

SEQ ID NO: 342961 - RNA, 22 nt, Human
gcugcugucagugguggcaguu

SEQ ID NO: 342962 - RNA, 22 nt, Human
augcuguguggccaccuccaug

SEQ ID NO: 342963 - RNA, 22 nt, Human
cugaaugaggaaaagagugagg

SEQ ID NO: 342964 - RNA, 22 nt, Human
gucugucaucugagauggagug

SEQ ID NO: 342965 - RNA, 20 nt, Human
ccucaguguccuggacuggg

SEQ ID NO: 342966 - RNA, 22 nt, Human
ugaaggccacuuccugugagcu

SEQ ID NO: 342967 - RNA, 22 nt, Human
uuugcagucaaauuugcuaaau

SEQ ID NO: 342968 - RNA, 17 nt, Human
uucucugagcuguauug

SEQ ID NO: 342969 - RNA, 22 nt, Human
cugcugugccucuuuucacgug

SEQ ID NO: 342970 - RNA, 22 nt, Human
accaggagucuagccuagucaa

SEQ ID NO: 342971 - RNA, 22 nt, Human
ucucuucuauuugagacuauuu

SEQ ID NO: 342972 - RNA, 22 nt, Human
ccuggagaccagaggauacuuc

SEQ ID NO: 342973 - RNA, 22 nt, Human
gcuucccacagcuggacugggg

SEQ ID NO: 342974 - RNA, 22 nt, Human
uuucaggguacauggagcaaau

SEQ ID NO: 342975 - RNA, 22 nt, Human
ucgagcucuggagccaaggaug

SEQ ID NO: 342976 - RNA, 22 nt, Human
uccaggaguccugggagugauu

SEQ ID NO: 342977 - RNA, 22 nt, Human
guugaaaguggagaaccugguu

SEQ ID NO: 342978 - RNA, 22 nt, Human
uuugcagugucagcuucugugu

SEQ ID NO: 342979 - RNA, 21 nt, Human
ucacuagugccuucugucauu

SEQ ID NO: 342980 - RNA, 22 nt, Human
gaacaucagucauaauuuaacg

SEQ ID NO: 342981 - RNA, 22 nt, Human
uugcaucuaccauaucaaagau

SEQ ID NO: 342982 - RNA, 22 nt, Human
uuuaaaaucagaugggaguugg

SEQ ID NO: 342983 - RNA, 22 nt, Human
ccaggagagcaaaggucacucu

SEQ ID NO: 342984 - RNA, 22 nt, Human
cagaggcaggauaagaacugcg

SEQ ID NO: 342985 - RNA, 22 nt, Human
ccucaggaaccacauugcugcu

SEQ ID NO: 342986 - RNA, 22 nt, Human
aguucucaagacaauuaccugu

SEQ ID NO: 342987 - RNA, 22 nt, Human
uuucccagagguaugaauaagu

SEQ ID NO: 342988 - RNA, 22 nt, Human
uugcauuugacaaauuauuuaa

SEQ ID NO: 342989 - RNA, 22 nt, Human
auuuagcaaaaaaugaugaagc

SEQ ID NO: 342990 - RNA, 22 nt, Human
ccuccuuuccuguuuuccugag

SEQ ID NO: 342991 - RNA, 22 nt, Human
agaggagguccuuuucugaugu

SEQ ID NO: 342992 - RNA, 22 nt, Human
acucaggaauggggcugggacu

SEQ ID NO: 342993 - RNA, 22 nt, Human
auucuucacaccuguuccuguu

SEQ ID NO: 342994 - RNA, 22 nt, Human
guggaauguccuugaucauaag

SEQ ID NO: 342995 - RNA, 22 nt, Human
ugaggcagguaagcaaguuuug

SEQ ID NO: 342996 - RNA, 22 nt, Human
caaguaaacaauaugugauuca

SEQ ID NO: 342997 - RNA, 22 nt, Human
gggugggacugaagucugaggg

SEQ ID NO: 342998 - RNA, 22 nt, Human
aaaggccacugcaagggaaggu

SEQ ID NO: 342999 - RNA, 22 nt, Human
uuaaauauuuucagcaggguca

SEQ ID NO: 343000 - RNA, 21 nt, Human
agcagaggcugccuggugacu

SEQ ID NO: 343001 - RNA, 22 nt, Human
ugcaggaaauuccaggguggcc

SEQ ID NO: 343002 - RNA, 22 nt, Human
ggcuuugccuggaauuuccuug

SEQ ID NO: 343003 - RNA, 22 nt, Human
ucaggagggugacaggcccugg

SEQ ID NO: 343004 - RNA, 22 nt, Human
cugcugugcacccaggaaggcu

SEQ ID NO: 343005 - RNA, 22 nt, Human
gagcauuugguuauaguaauuu

SEQ ID NO: 343006 - RNA, 22 nt, Human
gagggccagcagccucagcaug

SEQ ID NO: 343007 - RNA, 22 nt, Human
agggcagcagcuccuccuagcu

SEQ ID NO: 343008 - RNA, 21 nt, Human
cuguggaagggaacuagaggg

SEQ ID NO: 343009 - RNA, 22 nt, Human
uugaacauuggcaauuucauau

SEQ ID NO: 343010 - RNA, 22 nt, Human
aaucacuuuucucuaauguagc

SEQ ID NO: 343011 - RNA, 22 nt, Human
aagaggagacuucagcaacuug

SEQ ID NO: 343012 - RNA, 23 nt, Human
ugcaugugaauucauacuuguuu

SEQ ID NO: 343013 - RNA, 22 nt, Human
aggcagcuggcagcacccaggg

SEQ ID NO: 343014 - RNA, 21 nt, Human
augugaaauaucaucagagca

SEQ ID NO: 343015 - RNA, 22 nt, Human
auuuucaaaacaucugcugugu

SEQ ID NO: 343016 - RNA, 19 nt, Human
uaucuguuuccugcuuguc

SEQ ID NO: 343017 - RNA, 23 nt, Human
ccacuagcaccuguucaacuucu

SEQ ID NO: 343018 - RNA, 22 nt, Human
gauguguuuccaggauuuguuu

SEQ ID NO: 343019 - RNA, 22 nt, Human
cagugucuccagaugcuccaau

SEQ ID NO: 343020 - RNA, 22 nt, Human
ucccuucacagaugcgauguuu

SEQ ID NO: 343021 - RNA, 22 nt, Human
caguuuuugccauuaagaguaa

SEQ ID NO: 343022 - RNA, 22 nt, Human
uuuuuauaacucuuuugugaca

SEQ ID NO: 343023 - RNA, 22 nt, Human
cuuaaagaaauugaggagagga

SEQ ID NO: 343024 - RNA, 22 nt, Human
auucuucaaagagugucaaagu

SEQ ID NO: 343025 - RNA, 22 nt, Human
auguaaacaagguuauugucca

SEQ ID NO: 343026 - RNA, 22 nt, Human
uagcauuucacugaucuucacu

SEQ ID NO: 343027 - RNA, 22 nt, Human
ggugaaggucagagcaggaaaa

SEQ ID NO: 343028 - RNA, 22 nt, Human
gggcagcugucuugguucucaa

SEQ ID NO: 343029 - RNA, 22 nt, Human
aaagcagauucugaugcaguag

SEQ ID NO: 343030 - RNA, 22 nt, Human
auacaacuuuaucuguaaugag

SEQ ID NO: 343031 - RNA, 22 nt, Human
cuagccugggauuugaacuuau

SEQ ID NO: 343032 - RNA, 22 nt, Human
ucuccucuauuucuguauguau

SEQ ID NO: 343033 - RNA, 22 nt, Human
aagagagggguugcauggaaau

SEQ ID NO: 343034 - RNA, 22 nt, Human
aggaugagccgcgcaagcugac

SEQ ID NO: 343035 - RNA, 22 nt, Human
acccaggauaaucuguguaucu

SEQ ID NO: 343036 - RNA, 22 nt, Human
uuucaucuuccuuggcauaggu

SEQ ID NO: 343037 - RNA, 22 nt, Human
cuaaucaucuuucucuuaaagc

SEQ ID NO: 343038 - RNA, 22 nt, Human
uacuuccuguuuccaugucugu

SEQ ID NO: 343039 - RNA, 22 nt, Human
agugcuuuagcauccaacuguc

SEQ ID NO: 343040 - RNA, 22 nt, Human
uucaggauccccaccgcguuua

SEQ ID NO: 343041 - RNA, 22 nt, Human
uuucacaaaugucuuuaacuug

SEQ ID NO: 343042 - RNA, 22 nt, Human
uuucuaggucuuccauacugcc

SEQ ID NO: 343043 - RNA, 22 nt, Human
gcccaggaggcagagguugugg

SEQ ID NO: 343044 - RNA, 22 nt, Human
uguuuuuaaauaaugauagaaa

SEQ ID NO: 343045 - RNA, 22 nt, Human
aaaguucuggggguguuucugg

SEQ ID NO: 343046 - RNA, 22 nt, Human
uccaggagcauccaggugaagc

SEQ ID NO: 343047 - RNA, 22 nt, Human
gaggagagaugguagauugggu

SEQ ID NO: 343048 - RNA, 22 nt, Human
uacauaugaacuuuauaacuug

SEQ ID NO: 343049 - RNA, 22 nt, Human
ggucagagggugggcugccugu

SEQ ID NO: 343050 - RNA, 20 nt, Human
caggagggacauuucagcau

SEQ ID NO: 343051 - RNA, 22 nt, Human
cccaggaugucgaggcugcagu

SEQ ID NO: 343052 - RNA, 22 nt, Human
acaugauuuuaguaucauaaua

SEQ ID NO: 343053 - RNA, 22 nt, Human
ugaggcagcuuuuucugugugu

SEQ ID NO: 343054 - RNA, 22 nt, Human
aagugggaauagaaaugaaggu

SEQ ID NO: 343055 - RNA, 22 nt, Human
acccaggacuuggcaaccucau

SEQ ID NO: 343056 - RNA, 22 nt, Human
aaacaugaauagauauuaaaca

SEQ ID NO: 343057 - RNA, 22 nt, Human
gucugucacucaggggcuggag

SEQ ID NO: 343058 - RNA, 22 nt, Human
ugaacucgggaggaggcugcag

SEQ ID NO: 343059 - RNA, 22 nt, Human
uucuucuugucugcccucacau

SEQ ID NO: 343060 - RNA, 22 nt, Human
uccaggaggugaggggaccaaa

SEQ ID NO: 343061 - RNA, 20 nt, Human
augcuuucuugugugcugcu

SEQ ID NO: 343062 - RNA, 22 nt, Human
cugcugugcauauuuaucuagg

SEQ ID NO: 343063 - RNA, 22 nt, Human
uccccagggcugcagagggugu

SEQ ID NO: 343064 - RNA, 20 nt, Human
uacagaaugcaauaaaaugg

SEQ ID NO: 343065 - RNA, 17 nt, Human
agaggcagauacuugga

SEQ ID NO: 343066 - RNA, 22 nt, Human
aagacugucuuuucugagugac

SEQ ID NO: 343067 - RNA, 22 nt, Human
acuggcaguagagggagcgcau

SEQ ID NO: 343068 - RNA, 22 nt, Human
caaugugguggcagaugucagu

SEQ ID NO: 343069 - RNA, 22 nt, Human
gcagagaacccagcagauuggc

SEQ ID NO: 343070 - RNA, 21 nt, Human
ggcagcguguggacaggaagg

SEQ ID NO: 343071 - RNA, 22 nt, Human
uaugaacauguucauugacuua

SEQ ID NO: 343072 - RNA, 22 nt, Human
ccauccugcauugcuauucaga

SEQ ID NO: 343073 - RNA, 22 nt, Human
acaacauuauacauagaaagcu

SEQ ID NO: 343074 - RNA, 19 nt, Human
uuuuccuucuauauguuuc

SEQ ID NO: 343075 - RNA, 22 nt, Human
cuucagagugcagaagauuggg

SEQ ID NO: 343076 - RNA, 22 nt, Human
aggcagcucuguggccucccag

SEQ ID NO: 343077 - RNA, 22 nt, Human
uauuucuucgggauucaagcua

SEQ ID NO: 343078 - RNA, 22 nt, Human
ucaggaggccaccaggaccugu

SEQ ID NO: 343079 - RNA, 16 nt, Human
aggaggggaauuagga

SEQ ID NO: 343080 - RNA, 22 nt, Human
gaggccaggagugcuguaaguu

SEQ ID NO: 343081 - RNA, 22 nt, Human
gaggagcugggucagggagaca

SEQ ID NO: 343082 - RNA, 22 nt, Human
acaacauucuuaaauacacuga

SEQ ID NO: 343083 - RNA, 22 nt, Human
ucaggagagaguuggguaggcu

SEQ ID NO: 343084 - RNA, 22 nt, Human
uuucuucauagaccuugucuug

SEQ ID NO: 343085 - RNA, 22 nt, Human
uuugaaauuaagauauugucca

SEQ ID NO: 343086 - RNA, 22 nt, Human
acaagauagcuuagaagauuca

SEQ ID NO: 343087 - RNA, 22 nt, Human
ccagugcuuccaggaauacggu

SEQ ID NO: 343088 - RNA, 22 nt, Human
auguaugagagauucuuuuauu

SEQ ID NO: 343089 - RNA, 22 nt, Human
aggaagcuuagugaaaggacca

SEQ ID NO: 343090 - RNA, 22 nt, Human
aaucuucuuucuuaacaguaca

SEQ ID NO: 343091 - RNA, 22 nt, Human
gcggagggcgagcccgcggagc

SEQ ID NO: 343092 - RNA, 22 nt, Human
gugcauuugugcaugcacaugu

SEQ ID NO: 343093 - RNA, 23 nt, Human
uuucaacuccugccauuauuucu

SEQ ID NO: 343094 - RNA, 22 nt, Human
aaguccaugaucaagauguggc

SEQ ID NO: 343095 - RNA, 22 nt, Human
aagggcaggagaagacggauau

SEQ ID NO: 343096 - RNA, 22 nt, Human
agacagcuaauaaaugagugug

SEQ ID NO: 343097 - RNA, 22 nt, Human
uaaauuauggcuggcagagcag

SEQ ID NO: 343098 - RNA, 22 nt, Human
caguuucuauggcugggcucug

SEQ ID NO: 343099 - RNA, 22 nt, Human
uuauuuacaacucuucucuucc

SEQ ID NO: 343100 - RNA, 22 nt, Human
aauguaugagcgugaaagcacu

SEQ ID NO: 343101 - RNA, 22 nt, Human
gaggcagcaugguaccuuggag

SEQ ID NO: 343102 - RNA, 22 nt, Human
ugucaaagccugaaucacauag

SEQ ID NO: 343103 - RNA, 22 nt, Human
cagaggaugaucuggccucucu

SEQ ID NO: 343104 - RNA, 22 nt, Human
cuucuucacacuggucugaagc

SEQ ID NO: 343105 - RNA, 21 nt, Human
uacugagaccucacagugugc

SEQ ID NO: 343106 - RNA, 22 nt, Human
aucaggauucaguaucuccagc

SEQ ID NO: 343107 - RNA, 22 nt, Human
aacauuuaugauugagguaaau

SEQ ID NO: 343108 - RNA, 22 nt, Human
ucaggagacuuaugucacagug

SEQ ID NO: 343109 - RNA, 22 nt, Human
gauuuuauuagcccaaacuuug

SEQ ID NO: 343110 - RNA, 22 nt, Human
aaguaaaauguuuccuuuauua

SEQ ID NO: 343111 - RNA, 22 nt, Human
uucugucacagugcugguauca

SEQ ID NO: 343112 - RNA, 19 nt, Human
uucuccagccugaccugag

SEQ ID NO: 343113 - RNA, 22 nt, Human
ugaacaaacugcauucuucacu

SEQ ID NO: 343114 - RNA, 22 nt, Human
cccaggagagggaaccaaaugu

SEQ ID NO: 343115 - RNA, 22 nt, Human
acaauacuauuuucaguauccu

SEQ ID NO: 343116 - RNA, 22 nt, Human
ucaggauguccaaaauccagcc

SEQ ID NO: 343117 - RNA, 22 nt, Human
uccaggagcucauccacgucaa

SEQ ID NO: 343118 - RNA, 23 nt, Human
acagaaaguucugcuggacagag

SEQ ID NO: 343119 - RNA, 22 nt, Human
cugcuuccauaaauaaugugcu

SEQ ID NO: 343120 - RNA, 22 nt, Human
ucacugcucagucuguacuaca

SEQ ID NO: 343121 - RNA, 22 nt, Human
aggagagggguaggauuaauuu

SEQ ID NO: 343122 - RNA, 22 nt, Human
ugagaauuuuuugucaugcauu

SEQ ID NO: 343123 - RNA, 22 nt, Human
accaggagccauagagucaggc

SEQ ID NO: 343124 - RNA, 22 nt, Human
gcagaagucagaccaucugaau

SEQ ID NO: 343125 - RNA, 22 nt, Human
ucucaagaucucaagauggccc

SEQ ID NO: 343126 - RNA, 22 nt, Human
aaggcagccuuuugaguugauu

SEQ ID NO: 343127 - RNA, 22 nt, Human
aaguauuucguucugaaaaagu

SEQ ID NO: 343128 - RNA, 22 nt, Human
auucuucaccauggauaauuug

SEQ ID NO: 343129 - RNA, 19 nt, Human
uuugaaaggauuguuauuu

SEQ ID NO: 343130 - RNA, 18 nt, Human
ugaggcagucagugaugg

SEQ ID NO: 343131 - RNA, 22 nt, Human
cccaugagaccugguuuaaggc

SEQ ID NO: 343132 - RNA, 22 nt, Human
aucugccucuucuucauugcga

SEQ ID NO: 343133 - RNA, 21 nt, Human
ggcagcucagcagauggggac

SEQ ID NO: 343134 - RNA, 22 nt, Human
caaauauuccagguacaucccu

SEQ ID NO: 343135 - RNA, 22 nt, Human
uauuauuaaauggcagaauuuu

SEQ ID NO: 343136 - RNA, 22 nt, Human
cuuucauucuuagauauuagug

SEQ ID NO: 343137 - RNA, 22 nt, Human
agucuacaaagaaaaguuauug

SEQ ID NO: 343138 - RNA, 22 nt, Human
ugcauaguucuccuuccuccuc

SEQ ID NO: 343139 - RNA, 22 nt, Human
cauuguuaauugguaucuuaca

SEQ ID NO: 343140 - RNA, 22 nt, Human
agacaaauggaguaugagcaac

SEQ ID NO: 343141 - RNA, 22 nt, Human
ggcaugcucuuuguccacagua

SEQ ID NO: 343142 - RNA, 22 nt, Human
ugaggcagccugcauuaaagag

SEQ ID NO: 343143 - RNA, 22 nt, Human
agauggaguuaguaccagaguc

SEQ ID NO: 343144 - RNA, 22 nt, Human
uugcaauagccuuauuuccaaa

SEQ ID NO: 343145 - RNA, 18 nt, Human
acucaggaaaugaugaca

SEQ ID NO: 343146 - RNA, 20 nt, Human
aggcaccugucacaggugag

SEQ ID NO: 343147 - RNA, 22 nt, Human
uacccaggaggaaacugaggcu

SEQ ID NO: 343148 - RNA, 22 nt, Human
auuuucaucauggguuuaacau

SEQ ID NO: 343149 - RNA, 22 nt, Human
aucaggaucaugcuggguggga

SEQ ID NO: 343150 - RNA, 22 nt, Human
gucaggaucucccaguacauau

SEQ ID NO: 343151 - RNA, 20 nt, Human
guaaaauauggucuuugggu

SEQ ID NO: 343152 - RNA, 22 nt, Human
uacugcauaacuggcauguggg

SEQ ID NO: 343153 - RNA, 22 nt, Human
uguaugaaucucauuuguuuaa

SEQ ID NO: 343154 - RNA, 22 nt, Human
cuuaagaugaggucaugcuaua

SEQ ID NO: 343155 - RNA, 22 nt, Human
ucauuuguaccauuuuuuaaga

SEQ ID NO: 343156 - RNA, 22 nt, Human
gaggacaggagacucacuguuu

SEQ ID NO: 343157 - RNA, 22 nt, Human
agcagaggaggauuuaguuagg

SEQ ID NO: 343158 - RNA, 22 nt, Human
ucucucuuuuuaaucauguaau

SEQ ID NO: 343159 - RNA, 22 nt, Human
gcugauguaagacuuuugguuu

SEQ ID NO: 343160 - RNA, 22 nt, Human
cccaggaguuagagguuguggu

SEQ ID NO: 343161 - RNA, 22 nt, Human
uacaacauuguguugcuucaua

SEQ ID NO: 343162 - RNA, 22 nt, Human
ggcagacuguaauaggagaauu

SEQ ID NO: 343163 - RNA, 22 nt, Human
uggcagcuagcuguuuucaugc

SEQ ID NO: 343164 - RNA, 22 nt, Human
ucaauauauuccauguuuucuc

SEQ ID NO: 343165 - RNA, 19 nt, Human
ucccaggaaccuuuuauuu

SEQ ID NO: 343166 - RNA, 22 nt, Human
cucuccucagaacaggcccucu

SEQ ID NO: 343167 - RNA, 22 nt, Human
cuucagaagaaaagcagugugu

SEQ ID NO: 343168 - RNA, 20 nt, Human
ucuguacacucaucuucugc

SEQ ID NO: 343169 - RNA, 22 nt, Human
uccaugagcuagggauucauca

SEQ ID NO: 343170 - RNA, 22 nt, Human
augaaggcuguguggagccccc

SEQ ID NO: 343171 - RNA, 22 nt, Human
gaaccucagugaaacuggaggu

SEQ ID NO: 343172 - RNA, 22 nt, Human
cauaauuugauaugcuugaugg

SEQ ID NO: 343173 - RNA, 23 nt, Human
acucacaaagcaggaucauguug

SEQ ID NO: 343174 - RNA, 22 nt, Human
auugcuaggaacagguugcacc

SEQ ID NO: 343175 - RNA, 22 nt, Human
uccaggagucagacagauggug

SEQ ID NO: 343176 - RNA, 22 nt, Human
aggccagacagcuagaaacagg

SEQ ID NO: 343177 - RNA, 18 nt, Human
gugcugugggcaguggcc

SEQ ID NO: 343178 - RNA, 21 nt, Human
uguaaguuucaucugaauugg

SEQ ID NO: 343179 - RNA, 22 nt, Human
uuagaaagcuuuccauagucaa

SEQ ID NO: 343180 - RNA, 22 nt, Human
uaacacauuuuccucauacgga

SEQ ID NO: 343181 - RNA, 22 nt, Human
augacucuuagcuaaagguaag

SEQ ID NO: 343182 - RNA, 22 nt, Human
cugcccaggaaggagaggaugg

SEQ ID NO: 343183 - RNA, 22 nt, Human
cuguaugaguugggaauagaau

SEQ ID NO: 343184 - RNA, 21 nt, Human
acucaggagacuaacuauguc

SEQ ID NO: 343185 - RNA, 22 nt, Human
cccaggagguagagguugcagu

SEQ ID NO: 343186 - RNA, 22 nt, Human
uggaaggaaagguagcagagaa

SEQ ID NO: 343187 - RNA, 22 nt, Human
gagaaaugcaugcaugucauca

SEQ ID NO: 343188 - RNA, 22 nt, Human
uuucaaagucaauaucauuacc

SEQ ID NO: 343189 - RNA, 22 nt, Human
auugaaagcacaaagaacaagu

SEQ ID NO: 343190 - RNA, 22 nt, Human
uuggaaaaacacgauagugguu

SEQ ID NO: 343191 - RNA, 22 nt, Human
aggcaguggaugucaggaaugg

SEQ ID NO: 343192 - RNA, 22 nt, Human
uaaggccagcaugaaugcagca

SEQ ID NO: 343193 - RNA, 22 nt, Human
augggaggaugcucgggugcuc

SEQ ID NO: 343194 - RNA, 22 nt, Human
uucuucuuuaucucaguauccu

SEQ ID NO: 343195 - RNA, 22 nt, Human
uuauuuugguaaauguuugccu

SEQ ID NO: 343196 - RNA, 22 nt, Human
caaggccauaagagauacaaaa

SEQ ID NO: 343197 - RNA, 22 nt, Human
cuuaagauuugagauaccuaau

SEQ ID NO: 343198 - RNA, 22 nt, Human
auguucuuccaaaucuguaaca

SEQ ID NO: 343199 - RNA, 22 nt, Human
auacuguuucucuucuacauga

SEQ ID NO: 343200 - RNA, 22 nt, Human
agaggcggagguugcagugagc

SEQ ID NO: 343201 - RNA, 22 nt, Human
uucuuuuccuacacagcgauuu

SEQ ID NO: 343202 - RNA, 20 nt, Human
uuuuccagaaaguaucauug

SEQ ID NO: 343203 - RNA, 22 nt, Human
agucucugcugguugugccuau

SEQ ID NO: 343204 - RNA, 22 nt, Human
cuucugugcuucacaguugcca

SEQ ID NO: 343205 - RNA, 18 nt, Human
agucuucugauccauuuu

SEQ ID NO: 343206 - RNA, 22 nt, Human
cagcaggaggugaguagcaggu

SEQ ID NO: 343207 - RNA, 23 nt, Human
aucuguucaucugacacagauuc

SEQ ID NO: 343208 - RNA, 22 nt, Human
gaggcagcugggcuggugguuu

SEQ ID NO: 343209 - RNA, 22 nt, Human
cagcugccccuccagggcuggg

SEQ ID NO: 343210 - RNA, 22 nt, Human
aucaggaugacaacugcugggu

SEQ ID NO: 343211 - RNA, 22 nt, Human
aguccaaggagagacagcauuu

SEQ ID NO: 343212 - RNA, 22 nt, Human
agucaauuaucucuaggucauc

SEQ ID NO: 343213 - RNA, 22 nt, Human
ucccaggaauugaagccagugu

SEQ ID NO: 343214 - RNA, 21 nt, Human
acauucacaggauauuaucau

SEQ ID NO: 343215 - RNA, 19 nt, Human
cucucacucgccacauccu

SEQ ID NO: 343216 - RNA, 22 nt, Human
uuagccauauagaaaaagagcu

SEQ ID NO: 343217 - RNA, 22 nt, Human
aagauaauauucauuaacuaga

SEQ ID NO: 343218 - RNA, 22 nt, Human
guuuuccugaaacugauggugu

SEQ ID NO: 343219 - RNA, 22 nt, Human
augcuguguauuuuacucuuuc

SEQ ID NO: 343220 - RNA, 22 nt, Human
gaaggccaagaggcuccaagau

SEQ ID NO: 343221 - RNA, 22 nt, Human
gucaggaugggcagccaaacua

SEQ ID NO: 343222 - RNA, 18 nt, Human
aguaaagcuuauuacaug

SEQ ID NO: 343223 - RNA, 22 nt, Human
agacucaagacugcagaagacg

SEQ ID NO: 343224 - RNA, 22 nt, Human
auaugagaauuggaaaauauca

SEQ ID NO: 343225 - RNA, 22 nt, Human
cucaaauauaagcuaaaugugg

SEQ ID NO: 343226 - RNA, 22 nt, Human
uugcauuucccauugaguaaug

SEQ ID NO: 343227 - RNA, 22 nt, Human
gauuucuuuaugaaguacagaa

SEQ ID NO: 343228 - RNA, 22 nt, Human
aggguagggccguagggccaug

SEQ ID NO: 343229 - RNA, 22 nt, Human
gugcagcugugguggagccagg

SEQ ID NO: 343230 - RNA, 22 nt, Human
uucagaauauuuguuuuacaug

SEQ ID NO: 343231 - RNA, 20 nt, Human
uucugucagauuauauggga

SEQ ID NO: 343232 - RNA, 22 nt, Human
uguuuuaaucucccauugcucu

SEQ ID NO: 343233 - RNA, 22 nt, Human
auguagaauuccuucuacuuug

SEQ ID NO: 343234 - RNA, 22 nt, Human
uuugacaaaggaaaaaugcaca

SEQ ID NO: 343235 - RNA, 22 nt, Human
gcugcuguugauuuaguccaau

SEQ ID NO: 343236 - RNA, 22 nt, Human
acuucuucuucagcugggggau

SEQ ID NO: 343237 - RNA, 22 nt, Human
gggcagcucagccaccaugcag

SEQ ID NO: 343238 - RNA, 22 nt, Human
cccaggaggaggaaaaagcucg

SEQ ID NO: 343239 - RNA, 22 nt, Human
auagucuuagaucagauaaagu

SEQ ID NO: 343240 - RNA, 22 nt, Human
uucucagauccaucagaagucc

SEQ ID NO: 343241 - RNA, 17 nt, Human
cauuuguugaucaguug

SEQ ID NO: 343242 - RNA, 22 nt, Human
agaccuggauuccaauccuacc

SEQ ID NO: 343243 - RNA, 22 nt, Human
ggaggugguggcagugacaauu

SEQ ID NO: 343244 - RNA, 22 nt, Human
aagggaggggauguaagccugg

SEQ ID NO: 343245 - RNA, 22 nt, Human
uuuugaauaauucagaaacagc

SEQ ID NO: 343246 - RNA, 22 nt, Human
gaggcagugcauugucuagggg

SEQ ID NO: 343247 - RNA, 22 nt, Human
auugaaagauaggcuacugugg

SEQ ID NO: 343248 - RNA, 20 nt, Human
agaggccaguuaggagucua

SEQ ID NO: 343249 - RNA, 22 nt, Human
ugaggggagacagaguggacuc

SEQ ID NO: 343250 - RNA, 22 nt, Human
uucauucugggcucuaaggaac

SEQ ID NO: 343251 - RNA, 22 nt, Human
ugcacauuaguguuugagaugc

SEQ ID NO: 343252 - RNA, 22 nt, Human
agucucuuccuucaaggcuggu

SEQ ID NO: 343253 - RNA, 18 nt, Human
cugcugugucgucugggc

SEQ ID NO: 343254 - RNA, 22 nt, Human
uauagccauuuccaguggcauc

SEQ ID NO: 343255 - RNA, 22 nt, Human
uacccagggcuuuucugaugca

SEQ ID NO: 343256 - RNA, 19 nt, Human
ugcuagaaauucugugacu

SEQ ID NO: 343257 - RNA, 22 nt, Human
ucacaauauuuaucuuccaauu

SEQ ID NO: 343258 - RNA, 22 nt, Human
aggacagcagugcuggcacuug

SEQ ID NO: 343259 - RNA, 22 nt, Human
ugaaacauugcacuguaugaau

SEQ ID NO: 343260 - RNA, 22 nt, Human
agcuggcaguaugacuggugac

SEQ ID NO: 343261 - RNA, 22 nt, Human
aggcaggcacacuuccuccagg

SEQ ID NO: 343262 - RNA, 22 nt, Human
ucagggugaaccaggcaggaau

SEQ ID NO: 343263 - RNA, 22 nt, Human
cgaggcaggcaggcggaggaua

SEQ ID NO: 343264 - RNA, 22 nt, Human
aggcagcuggcaaauucuagag

SEQ ID NO: 343265 - RNA, 22 nt, Human
ggacagaggguugacagaguau

SEQ ID NO: 343266 - RNA, 22 nt, Human
ucaggagacauucuuaaaguag

SEQ ID NO: 343267 - RNA, 22 nt, Human
aucuacccacugaacacaauau

SEQ ID NO: 343268 - RNA, 20 nt, Human
auaaaauaacugccacaaga

SEQ ID NO: 343269 - RNA, 22 nt, Human
cagucuuuguucccauuacuga

SEQ ID NO: 343270 - RNA, 22 nt, Human
cauuaaaauaucucaugguguu

SEQ ID NO: 343271 - RNA, 22 nt, Human
ucugcagguguuggaaggguca

SEQ ID NO: 343272 - RNA, 22 nt, Human
cagcauuuaaugcagugcuucc

SEQ ID NO: 343273 - RNA, 22 nt, Human
auaucauucugauguauaucuu

SEQ ID NO: 343274 - RNA, 22 nt, Human
uuggcagugaugcagcuuguuc

SEQ ID NO: 343275 - RNA, 22 nt, Human
acaaauauuuacugaauccacu

SEQ ID NO: 343276 - RNA, 22 nt, Human
guuugcauauuugcacaggaau

SEQ ID NO: 343277 - RNA, 22 nt, Human
ugcugaugaguccuucuaucgc

SEQ ID NO: 343278 - RNA, 22 nt, Human
ccaggagauaagcugaguuuau

SEQ ID NO: 343279 - RNA, 22 nt, Human
cuuaaauuggaugaguuaaguu

SEQ ID NO: 343280 - RNA, 22 nt, Human
ugauuuuuagcuauucugaaga

SEQ ID NO: 343281 - RNA, 22 nt, Human
uuuuguuguaauauaccuaucc

SEQ ID NO: 343282 - RNA, 16 nt, Human
ccccaggacuuggcac

SEQ ID NO: 343283 - RNA, 22 nt, Human
cccaggagauggagguugcagu

SEQ ID NO: 343284 - RNA, 22 nt, Human
uucacagucacccuucuccaug

SEQ ID NO: 343285 - RNA, 22 nt, Human
uuugaaagcuacuuucggguca

SEQ ID NO: 343286 - RNA, 22 nt, Human
ugaaucauggauaaauagcuua

SEQ ID NO: 343287 - RNA, 22 nt, Human
gggaggugauuaggaccaugua

SEQ ID NO: 343288 - RNA, 19 nt, Human
aucugccuguuaucacaua

SEQ ID NO: 343289 - RNA, 19 nt, Human
uggcaucuguaaaauggug

SEQ ID NO: 343290 - RNA, 22 nt, Human
caaggccacguucugcaugcgg

SEQ ID NO: 343291 - RNA, 22 nt, Human
gucaggauuugaacucaggucu

SEQ ID NO: 343292 - RNA, 22 nt, Human
uguuuucagucauauagcaggu

SEQ ID NO: 343293 - RNA, 22 nt, Human
auuaucuauguagaaugauuuu

SEQ ID NO: 343294 - RNA, 22 nt, Human
guccaugacugugacucacaug

SEQ ID NO: 343295 - RNA, 20 nt, Human
cuucuucaguaguuuguucu

SEQ ID NO: 343296 - RNA, 22 nt, Human
gcaggagacuggcugugguagu

SEQ ID NO: 343297 - RNA, 22 nt, Human
auguuuccagguucuuccuaug

SEQ ID NO: 343298 - RNA, 22 nt, Human
aguaugaauugcuuugccugua

SEQ ID NO: 343299 - RNA, 22 nt, Human
uagggaggcuacuucuuguagg

SEQ ID NO: 343300 - RNA, 22 nt, Human
caggguggggaaauagcgcccu

SEQ ID NO: 343301 - RNA, 22 nt, Human
agauuuauguggucacacucag

SEQ ID NO: 343302 - RNA, 23 nt, Human
gccaggaguggguagacuaaugc

SEQ ID NO: 343303 - RNA, 22 nt, Human
ucuucaucucagauuaacagga

SEQ ID NO: 343304 - RNA, 22 nt, Human
ccugcuguucuguuuagugaac

SEQ ID NO: 343305 - RNA, 22 nt, Human
caaggccauauugccuguaugu

SEQ ID NO: 343306 - RNA, 22 nt, Human
agggagcucaguuggaagcggu

SEQ ID NO: 343307 - RNA, 22 nt, Human
guguaugauuucaaauggcuag

SEQ ID NO: 343308 - RNA, 22 nt, Human
aauacaguaauuuugaugaguu

SEQ ID NO: 343309 - RNA, 22 nt, Human
uucugucuguaaacuucucaau

SEQ ID NO: 343310 - RNA, 22 nt, Human
ggagaagggacagacucagcuu

SEQ ID NO: 343311 - RNA, 22 nt, Human
caggauggucuucauuuggcuc

SEQ ID NO: 343312 - RNA, 22 nt, Human
aaaguuugcaauuuauguuaau

SEQ ID NO: 343313 - RNA, 22 nt, Human
uuucucaguuacuagcuguggu

SEQ ID NO: 343314 - RNA, 22 nt, Human
aggagagcuggugucuggaauc

SEQ ID NO: 343315 - RNA, 22 nt, Human
aggcagcugaccacaguaugau

SEQ ID NO: 343316 - RNA, 22 nt, Human
gaggcagcaggcugaggaggau

SEQ ID NO: 343317 - RNA, 22 nt, Human
auauucuucuuguucagacuau

SEQ ID NO: 343318 - RNA, 19 nt, Human
gacagugcaguuguaguac

SEQ ID NO: 343319 - RNA, 21 nt, Human
cucaggaucuuauauauuagu

SEQ ID NO: 343320 - RNA, 22 nt, Human
cacucugaugguuucuguucaa

SEQ ID NO: 343321 - RNA, 22 nt, Human
uuagagucaaaauggcauguua

SEQ ID NO: 343322 - RNA, 22 nt, Human
uuucaguucaguuuauuauauc

SEQ ID NO: 343323 - RNA, 22 nt, Human
aaucuucagugucuaaaaagca

SEQ ID NO: 343324 - RNA, 22 nt, Human
augaacuuauuucugaacuuuu

SEQ ID NO: 343325 - RNA, 22 nt, Human
uucugagacaauugagagucua

SEQ ID NO: 343326 - RNA, 22 nt, Human
aaaggagacuucagaucuccuu

SEQ ID NO: 343327 - RNA, 18 nt, Human
ucaggagacacagacgca

SEQ ID NO: 343328 - RNA, 22 nt, Human
ucugcuguucauucuuuuagcu

SEQ ID NO: 343329 - RNA, 22 nt, Human
auguuucagauacagaucaaau

SEQ ID NO: 343330 - RNA, 22 nt, Human
acauucuuaacaguuaaaaacu

SEQ ID NO: 343331 - RNA, 22 nt, Human
ucuuugaugugguuaauuauga

SEQ ID NO: 343332 - RNA, 22 nt, Human
ggcugaaggaugaaagcugcag

SEQ ID NO: 343333 - RNA, 22 nt, Human
cccuggaguccuggcaguugau

SEQ ID NO: 343334 - RNA, 22 nt, Human
ucuguggauuuuaguguucaug

SEQ ID NO: 343335 - RNA, 22 nt, Human
ucuuagaaauuccccaguggcu

SEQ ID NO: 343336 - RNA, 22 nt, Human
uucuuuuacauuaagauuucag

SEQ ID NO: 343337 - RNA, 22 nt, Human
uguuuauuacaguucuuggaau

SEQ ID NO: 343338 - RNA, 22 nt, Human
uggaguuccuuugaaaggcucu

SEQ ID NO: 343339 - RNA, 22 nt, Human
ccaggagagcucucguucagug

SEQ ID NO: 343340 - RNA, 22 nt, Human
ccuucauugcaucuuuaagaga

SEQ ID NO: 343341 - RNA, 22 nt, Human
uucuuuugggaauuacguaugc

SEQ ID NO: 343342 - RNA, 18 nt, Human
cauuguacaaugcuuuau

SEQ ID NO: 343343 - RNA, 22 nt, Human
cagcauuuggaggagaggcuuu

SEQ ID NO: 343344 - RNA, 22 nt, Human
cugcuguggguuaagacacugu

SEQ ID NO: 343345 - RNA, 22 nt, Human
aauacuuuccuauauaaggugc

SEQ ID NO: 343346 - RNA, 22 nt, Human
cugugauuguuaguuccuauac

SEQ ID NO: 343347 - RNA, 22 nt, Human
uauguacuaacuuucauucuag

SEQ ID NO: 343348 - RNA, 22 nt, Human
uuucaacaccagagaccaugcg

SEQ ID NO: 343349 - RNA, 22 nt, Human
aggcagcugaggucuggcgccc

SEQ ID NO: 343350 - RNA, 22 nt, Human
agcugcccugguaagauugaug

SEQ ID NO: 343351 - RNA, 21 nt, Human
uuucacaaaaguaugugacaa

SEQ ID NO: 343352 - RNA, 22 nt, Human
cugaaaauguuacacaggaaga

SEQ ID NO: 343353 - RNA, 22 nt, Human
ccaggagauuuuuccauagcac

SEQ ID NO: 343354 - RNA, 22 nt, Human
uuagaacuuaaacuucagaaag

SEQ ID NO: 343355 - RNA, 22 nt, Human
aagauuauuuaagacaggaacc

SEQ ID NO: 343356 - RNA, 22 nt, Human
agauaugugcgucuuagauuga

SEQ ID NO: 343357 - RNA, 22 nt, Human
auuaaauuuucacuaggcuccc

SEQ ID NO: 343358 - RNA, 22 nt, Human
uuugcaauuugugcugcaaaug

SEQ ID NO: 343359 - RNA, 22 nt, Human
aggcugcuucaauggauaagau

SEQ ID NO: 343360 - RNA, 22 nt, Human
uugaaagugccaaguccuagug

SEQ ID NO: 343361 - RNA, 23 nt, Human
ucuguacaauugagaagagaaca

SEQ ID NO: 343362 - RNA, 22 nt, Human
uggaggaaguggcuggccagaa

SEQ ID NO: 343363 - RNA, 22 nt, Human
ucagagaguuagugucuuagcu

SEQ ID NO: 343364 - RNA, 22 nt, Human
aucacaaaggcugcuucaugau

SEQ ID NO: 343365 - RNA, 22 nt, Human
auaucauuauguuaugagcaca

SEQ ID NO: 343366 - RNA, 22 nt, Human
uuuuucuugugcuggaucuaau

SEQ ID NO: 343367 - RNA, 22 nt, Human
uuagccauggacugaauugacu

SEQ ID NO: 343368 - RNA, 22 nt, Human
gggacgggcaguccaagggguc

SEQ ID NO: 343369 - RNA, 22 nt, Human
gcuuugaagacuuuuccagggu

SEQ ID NO: 343370 - RNA, 19 nt, Human
ugaguucugugguucucaa

SEQ ID NO: 343371 - RNA, 22 nt, Human
cuucagaaugggacuguguuug

SEQ ID NO: 343372 - RNA, 22 nt, Human
uaggagggcccugaaaauggca

SEQ ID NO: 343373 - RNA, 22 nt, Human
aaacugcuuuccacaguggcua

SEQ ID NO: 343374 - RNA, 22 nt, Human
ggagcaggagucucuugaauuu

SEQ ID NO: 343375 - RNA, 22 nt, Human
uccugaggcucacuuugaaugu

SEQ ID NO: 343376 - RNA, 22 nt, Human
agaggggaggcgaaccagaguc

SEQ ID NO: 343377 - RNA, 22 nt, Human
uucacagaugccugaugugugg

SEQ ID NO: 343378 - RNA, 22 nt, Human
guuuauaaggcccaauauuucu

SEQ ID NO: 343379 - RNA, 22 nt, Human
uggagucugugaugcucugggu

SEQ ID NO: 343380 - RNA, 22 nt, Human
gucuucuguaagaugagguccc

SEQ ID NO: 343381 - RNA, 22 nt, Human
cagaggcagugggguugcuccu

SEQ ID NO: 343382 - RNA, 21 nt, Human
uuccagagauuguuucaccug

SEQ ID NO: 343383 - RNA, 22 nt, Human
aggcaggcucaaugcccagucu

SEQ ID NO: 343384 - RNA, 22 nt, Human
gucacuguauccagguuccagc

SEQ ID NO: 343385 - RNA, 22 nt, Human
agcccaggcagagggaugcuug

SEQ ID NO: 343386 - RNA, 22 nt, Human
auucuuauuauaguaaaacagu

SEQ ID NO: 343387 - RNA, 22 nt, Human
gcugcccaggagagguggggcu

SEQ ID NO: 343388 - RNA, 21 nt, Human
gcugcccaacccugcaucucc

SEQ ID NO: 343389 - RNA, 22 nt, Human
ccacaucucgguccccucuuug

SEQ ID NO: 343390 - RNA, 22 nt, Human
aggcagacaaggucccuggucu

SEQ ID NO: 343391 - RNA, 22 nt, Human
aggaggggcauagaaauguaau

SEQ ID NO: 343392 - RNA, 22 nt, Human
uuugaaagcaggugugggaggg

SEQ ID NO: 343393 - RNA, 22 nt, Human
aaacacauuuuaggaaaaucua

SEQ ID NO: 343394 - RNA, 22 nt, Human
cuggaaauuggagaugauguuu

SEQ ID NO: 343395 - RNA, 22 nt, Human
uagggaugagccaguggguagu

SEQ ID NO: 343396 - RNA, 22 nt, Human
cuucuucaauagcaagcgcaua

SEQ ID NO: 343397 - RNA, 22 nt, Human
gugagggguggcugagcaguuu

SEQ ID NO: 343398 - RNA, 22 nt, Human
uucuucuccgaggagggcuggu

SEQ ID NO: 343399 - RNA, 22 nt, Human
acucaggaaauugagauaaugg

SEQ ID NO: 343400 - RNA, 22 nt, Human
caaauagugucacauugugagg

SEQ ID NO: 343401 - RNA, 22 nt, Human
gaggcaccucgcgggaggaggc

SEQ ID NO: 343402 - RNA, 22 nt, Human
agcauucauugcuagaauguaa

SEQ ID NO: 343403 - RNA, 22 nt, Human
uuucuucacaggguauugggug

SEQ ID NO: 343404 - RNA, 22 nt, Human
augcugugaaaaagaaggcuga

SEQ ID NO: 343405 - RNA, 22 nt, Human
ucuuuauugcuacugguuuguc

SEQ ID NO: 343406 - RNA, 22 nt, Human
cagagcucuauguucauggagg

SEQ ID NO: 343407 - RNA, 22 nt, Human
ugcccacauggugccauggcca

SEQ ID NO: 343408 - RNA, 22 nt, Human
auguuagaaggaauguuaaaag

SEQ ID NO: 343409 - RNA, 22 nt, Human
auuguauaacagcauguauuuu

SEQ ID NO: 343410 - RNA, 22 nt, Human
ugcuuggccuacuuguccuuug

SEQ ID NO: 343411 - RNA, 22 nt, Human
ugaaagguuaaaaguaguauug

SEQ ID NO: 343412 - RNA, 22 nt, Human
cagaccagcucuaugaacccaa

SEQ ID NO: 343413 - RNA, 21 nt, Human
ccauaccuaccucaccugguu

SEQ ID NO: 343414 - RNA, 22 nt, Human
uucuacagacuauaacugugau

SEQ ID NO: 343415 - RNA, 22 nt, Human
ggcacagagcccagcuuccuag

SEQ ID NO: 343416 - RNA, 22 nt, Human
caugauuuugucuuguguuaau

SEQ ID NO: 343417 - RNA, 22 nt, Human
agucaauucuuuucaacucaag

SEQ ID NO: 343418 - RNA, 22 nt, Human
agcuggcagucauccuagugag

SEQ ID NO: 343419 - RNA, 22 nt, Human
cccaggagauggugcguggucu

SEQ ID NO: 343420 - RNA, 22 nt, Human
agaaggggagaagcuaccagga

SEQ ID NO: 343421 - RNA, 22 nt, Human
cuucucaaaguugugaaucagg

SEQ ID NO: 343422 - RNA, 22 nt, Human
ucugucuccucugaggugccag

SEQ ID NO: 343423 - RNA, 22 nt, Human
acuggcagcagcagcccuuggg

SEQ ID NO: 343424 - RNA, 19 nt, Human
uuucuuaggccuuuggccu

SEQ ID NO: 343425 - RNA, 22 nt, Human
agaggcaguauacaauccgagc

SEQ ID NO: 343426 - RNA, 22 nt, Human
ugaauaguccuuggaauaacug

SEQ ID NO: 343427 - RNA, 22 nt, Human
gcucaggagcucuugguggcgc

SEQ ID NO: 343428 - RNA, 22 nt, Human
gucuucaauagagccucaauuu

SEQ ID NO: 343429 - RNA, 22 nt, Human
uuuuaacuuaaaauacauagau

SEQ ID NO: 343430 - RNA, 22 nt, Human
ugaugaaaauaugauucugagg

SEQ ID NO: 343431 - RNA, 22 nt, Human
gaaacugugaggaucuuaacuu

SEQ ID NO: 343432 - RNA, 23 nt, Human
gggcagcuuaagcuuguuuuucu

SEQ ID NO: 343433 - RNA, 21 nt, Human
agggagcuggccacacagccu

SEQ ID NO: 343434 - RNA, 22 nt, Human
cagugguugguagauacuugag

SEQ ID NO: 343435 - RNA, 22 nt, Human
aaauauaauuucugccucaaua

SEQ ID NO: 343436 - RNA, 22 nt, Human
gugacagucaaagacaugacuu

SEQ ID NO: 343437 - RNA, 22 nt, Human
aaaggccaccaacaugaagcau

SEQ ID NO: 343438 - RNA, 22 nt, Human
cuuccuucugaagcauagaagc

SEQ ID NO: 343439 - RNA, 20 nt, Human
cugcugugugugccucagcc

SEQ ID NO: 343440 - RNA, 22 nt, Human
gaggcagaaguugcagugagca

SEQ ID NO: 343441 - RNA, 17 nt, Human
uuugaaaggaugucagu

SEQ ID NO: 343442 - RNA, 22 nt, Human
aguuugaaaguauugacagaag

SEQ ID NO: 343443 - RNA, 22 nt, Human
ucucuuucuauaugugagucuu

SEQ ID NO: 343444 - RNA, 22 nt, Human
cucaggaugcaggucacaggac

SEQ ID NO: 343445 - RNA, 22 nt, Human
uugcagcuuagugauguuaucu

SEQ ID NO: 343446 - RNA, 22 nt, Human
ucccaggauguuuauggcuggu

SEQ ID NO: 343447 - RNA, 17 nt, Human
aagacagaagccaugag

SEQ ID NO: 343448 - RNA, 21 nt, Human
ggcagccugacccccagagag

SEQ ID NO: 343449 - RNA, 22 nt, Human
guucuucacauuucauugagga

SEQ ID NO: 343450 - RNA, 22 nt, Human
auuucccaugugaaucaauugg

SEQ ID NO: 343451 - RNA, 22 nt, Human
ucucacugcaaauauuauguau

SEQ ID NO: 343452 - RNA, 22 nt, Human
aaggagagguuguccguguugu

SEQ ID NO: 343453 - RNA, 22 nt, Human
cagcuggcuggucagugcacaa

SEQ ID NO: 343454 - RNA, 22 nt, Human
uugcugugaaaccaugggaagu

SEQ ID NO: 343455 - RNA, 22 nt, Human
aaauaguucagcuuguaaaccc

SEQ ID NO: 343456 - RNA, 22 nt, Human
gagguagcgaguggacagugca

SEQ ID NO: 343457 - RNA, 17 nt, Human
aaggccauuuccaccca

SEQ ID NO: 343458 - RNA, 22 nt, Human
auacaacuuuacaugcaauucc

SEQ ID NO: 343459 - RNA, 21 nt, Human
gcaaauguucaggaaaaaaga

SEQ ID NO: 343460 - RNA, 22 nt, Human
caggagggcccgagacucuucc

SEQ ID NO: 343461 - RNA, 22 nt, Human
gagcgauguggguauguagaag

SEQ ID NO: 343462 - RNA, 22 nt, Human
uggcagcugaauggcuggaugg

SEQ ID NO: 343463 - RNA, 22 nt, Human
gcagaggagcaaguugcuacag

SEQ ID NO: 343464 - RNA, 22 nt, Human
cugcuuugggcagcuuuguggc

SEQ ID NO: 343465 - RNA, 22 nt, Human
uuucuuguaagauguuuauuaa

SEQ ID NO: 343466 - RNA, 22 nt, Human
aacauucuauuuugcuaaaaca

SEQ ID NO: 343467 - RNA, 22 nt, Human
caacacauugaagcuaugauga

SEQ ID NO: 343468 - RNA, 22 nt, Human
acagagagaaacaaucagcagc

SEQ ID NO: 343469 - RNA, 22 nt, Human
uucaugugaucacagauuguaa

SEQ ID NO: 343470 - RNA, 22 nt, Human
ucacagacauggugagguaaca

SEQ ID NO: 343471 - RNA, 22 nt, Human
uuauuucauguaaaauuuaugu

SEQ ID NO: 343472 - RNA, 22 nt, Human
cuugaaguugcaaaacauuaau

SEQ ID NO: 343473 - RNA, 22 nt, Human
aaagacuuggcuuaugauuugc

SEQ ID NO: 343474 - RNA, 22 nt, Human
auaaagauuucuuuuucucuac

SEQ ID NO: 343475 - RNA, 22 nt, Human
guucuucagucacaucacagaa

SEQ ID NO: 343476 - RNA, 22 nt, Human
uucuccucuguuggccuucccu

SEQ ID NO: 343477 - RNA, 22 nt, Human
aaggccagcuuguagggcuggu

SEQ ID NO: 343478 - RNA, 22 nt, Human
uugauguacagaauuguucaca

SEQ ID NO: 343479 - RNA, 22 nt, Human
ucuucucucauguaggagggaa

SEQ ID NO: 343480 - RNA, 22 nt, Human
ucuuuucaucauuuaauaggua

SEQ ID NO: 343481 - RNA, 19 nt, Human
gaggcgaggcgugcaggag

SEQ ID NO: 343482 - RNA, 18 nt, Human
ugugaacacauuuuucug

SEQ ID NO: 343483 - RNA, 22 nt, Human
uuuuaguguagucaccgugggu

SEQ ID NO: 343484 - RNA, 22 nt, Human
aaaccgcaauuacuuuugcguc

SEQ ID NO: 343485 - RNA, 22 nt, Human
ggaggggaugguuugacccugg

SEQ ID NO: 343486 - RNA, 21 nt, Human
ccugcugugaucuuagugagu

SEQ ID NO: 343487 - RNA, 22 nt, Human
ugaggcaguauucuccauucca

SEQ ID NO: 343488 - RNA, 22 nt, Human
aaauaguuuagcucucauuuca

SEQ ID NO: 343489 - RNA, 22 nt, Human
gaggagagaacauuccuccaua

SEQ ID NO: 343490 - RNA, 22 nt, Human
uacugccuggagcauuggugcu

SEQ ID NO: 343491 - RNA, 22 nt, Human
ucaccgccuugcccggccgggc

SEQ ID NO: 343492 - RNA, 22 nt, Human
cucugaaagaguuuaguauuau

SEQ ID NO: 343493 - RNA, 22 nt, Human
cugagacuuucaugugcuuuua

SEQ ID NO: 343494 - RNA, 22 nt, Human
gacccaggguggucaccugaaa

SEQ ID NO: 343495 - RNA, 22 nt, Human
gggcagcuagcccucuagccca

SEQ ID NO: 343496 - RNA, 22 nt, Human
uaauuucuagggacuaaggugc

SEQ ID NO: 343497 - RNA, 22 nt, Human
ucacaaauagcuauauuaagga

SEQ ID NO: 343498 - RNA, 22 nt, Human
uauuucuaagagauaucuguac

SEQ ID NO: 343499 - RNA, 22 nt, Human
aggccagaugucgggcuagaag

SEQ ID NO: 343500 - RNA, 22 nt, Human
uuggaauucaaguuguagcuua

SEQ ID NO: 343501 - RNA, 22 nt, Human
cagaugaggcaaccucauugcu

SEQ ID NO: 343502 - RNA, 22 nt, Human
gccaggaggucagccccucaac

SEQ ID NO: 343503 - RNA, 22 nt, Human
aggaaagguagcgugccagcag

SEQ ID NO: 343504 - RNA, 22 nt, Human
ugcauggaggaagaugaaugca

SEQ ID NO: 343505 - RNA, 19 nt, Human
aggcaggugcagagguccc

SEQ ID NO: 343506 - RNA, 22 nt, Human
auucuucauacagacaaguccu

SEQ ID NO: 343507 - RNA, 20 nt, Human
aagggcagagggaacagacu

SEQ ID NO: 343508 - RNA, 22 nt, Human
aaaggccacacugcucuuucuc

SEQ ID NO: 343509 - RNA, 20 nt, Human
uuucaguuaucuugaccuuc

SEQ ID NO: 343510 - RNA, 18 nt, Human
augggaggggccaagaga

SEQ ID NO: 343511 - RNA, 22 nt, Human
ugaaaugauuauaugguguuug

SEQ ID NO: 343512 - RNA, 22 nt, Human
ucuuaaagagcgcaauuugagg

SEQ ID NO: 343513 - RNA, 22 nt, Human
ugaggcagcaauugauuauuca

SEQ ID NO: 343514 - RNA, 22 nt, Human
gaggcugauucggggaacagca

SEQ ID NO: 343515 - RNA, 22 nt, Human
cacagcauaaugaaauauacuu

SEQ ID NO: 343516 - RNA, 22 nt, Human
aguaugaacggaaggccuggga

SEQ ID NO: 343517 - RNA, 22 nt, Human
cacauuuaauccuuuauaagua

SEQ ID NO: 343518 - RNA, 22 nt, Human
acaggagaauuaucuggaacaa

SEQ ID NO: 343519 - RNA, 22 nt, Human
agggcagcagcggcccaggccu

SEQ ID NO: 343520 - RNA, 22 nt, Human
uucaggaucacuaaacccucca

SEQ ID NO: 343521 - RNA, 22 nt, Human
uuucacaucagagguagauuag

SEQ ID NO: 343522 - RNA, 22 nt, Human
cuucuucaguugcauguauugg

SEQ ID NO: 343523 - RNA, 22 nt, Human
cucugucacuucuccagcugag

SEQ ID NO: 343524 - RNA, 17 nt, Human
ugaaggccaugaccacg

SEQ ID NO: 343525 - RNA, 22 nt, Human
uccaggagggguaggcaguaug

SEQ ID NO: 343526 - RNA, 22 nt, Human
aaaaguauuuauggcuauguaa

SEQ ID NO: 343527 - RNA, 22 nt, Human
cugcaucaguggauaugauggu

SEQ ID NO: 343528 - RNA, 22 nt, Human
gcuuggcauugaccauuaucau

SEQ ID NO: 343529 - RNA, 22 nt, Human
aauccugugugacucuggggag

SEQ ID NO: 343530 - RNA, 22 nt, Human
uaagaacuucggacauguuauc

SEQ ID NO: 343531 - RNA, 22 nt, Human
uuucuagggcucuugucuucug

SEQ ID NO: 343532 - RNA, 22 nt, Human
uuuuucagccaugaauuacacu

SEQ ID NO: 343533 - RNA, 22 nt, Human
aaaggccacuugaaggauuuuu

SEQ ID NO: 343534 - RNA, 22 nt, Human
aagaagagaacuggcauccuaa

SEQ ID NO: 343535 - RNA, 22 nt, Human
accaggagcauuuuuuauuagu

SEQ ID NO: 343536 - RNA, 22 nt, Human
acaggccacaguggagucucug

SEQ ID NO: 343537 - RNA, 22 nt, Human
uaaggccaaguucauauacaac

SEQ ID NO: 343538 - RNA, 22 nt, Human
ugcccaggauugugaggucagg

SEQ ID NO: 343539 - RNA, 22 nt, Human
gaaacuguauguaguuuuuggg

SEQ ID NO: 343540 - RNA, 21 nt, Human
agaggcaggcauuaaguacac

SEQ ID NO: 343541 - RNA, 22 nt, Human
cagggagggacaauugucaccu

SEQ ID NO: 343542 - RNA, 22 nt, Human
uucaggaucaaguugccaguag

SEQ ID NO: 343543 - RNA, 22 nt, Human
auguagaacagguuaaugacag

SEQ ID NO: 343544 - RNA, 22 nt, Human
cccaggaggugugcccaacucg

SEQ ID NO: 343545 - RNA, 17 nt, Human
acagagcacaucaagau

SEQ ID NO: 343546 - RNA, 22 nt, Human
aaggcagucugguuucaaagca

SEQ ID NO: 343547 - RNA, 22 nt, Human
aucugcagaggacaggcgagga

SEQ ID NO: 343548 - RNA, 22 nt, Human
uuuacacaaaagauagcacacc

SEQ ID NO: 343549 - RNA, 22 nt, Human
uacucagagucauugcccuucu

SEQ ID NO: 343550 - RNA, 19 nt, Human
agaaguuagacauugcaau

SEQ ID NO: 343551 - RNA, 23 nt, Human
aguaaagcaauuguuggcgagag

SEQ ID NO: 343552 - RNA, 22 nt, Human
uggaggggcaauggagcgcgga

SEQ ID NO: 343553 - RNA, 22 nt, Human
uuaaauuagucaagcuucucug

SEQ ID NO: 343554 - RNA, 22 nt, Human
gaagcagcaaguauaggacagg

SEQ ID NO: 343555 - RNA, 21 nt, Human
ucuuccuccacagcgugccac

SEQ ID NO: 343556 - RNA, 22 nt, Human
cagcugacccagugaggaggca

SEQ ID NO: 343557 - RNA, 21 nt, Human
gaauaguucuguggcagcagu

SEQ ID NO: 343558 - RNA, 22 nt, Human
ucacagacacagggagaagcau

SEQ ID NO: 343559 - RNA, 20 nt, Human
aguuauaguaucuagccaug

SEQ ID NO: 343560 - RNA, 21 nt, Human
aggcagcuggaaggccuggcu

SEQ ID NO: 343561 - RNA, 22 nt, Human
aggcaggcacuccggaaguguc

SEQ ID NO: 343562 - RNA, 22 nt, Human
ugaaaugagauaauuuaagugc

SEQ ID NO: 343563 - RNA, 22 nt, Human
uguagggaggaaggguuggaaa

SEQ ID NO: 343564 - RNA, 22 nt, Human
aagcaauauacugauaugauua

SEQ ID NO: 343565 - RNA, 22 nt, Human
ccuggagagagaggccaacugc

SEQ ID NO: 343566 - RNA, 20 nt, Human
uuucugugcccaggucuguu

SEQ ID NO: 343567 - RNA, 22 nt, Human
acuucacagaaauuuuaugagg

SEQ ID NO: 343568 - RNA, 22 nt, Human
agcuucuuggcucagcacuugg

SEQ ID NO: 343569 - RNA, 22 nt, Human
uggcagcuugaaugcagucuuu

SEQ ID NO: 343570 - RNA, 22 nt, Human
cagcauuuucuuaauguaggug

SEQ ID NO: 343571 - RNA, 22 nt, Human
gcagaggagaugaagauacuuu

SEQ ID NO: 343572 - RNA, 22 nt, Human
cugcugugucagaguccagggg

SEQ ID NO: 343573 - RNA, 22 nt, Human
uccaugaggaccaaauucguag

SEQ ID NO: 343574 - RNA, 22 nt, Human
aagucuguuugagugucacacu

SEQ ID NO: 343575 - RNA, 22 nt, Human
ucuucuuaugugccauuaucuc

SEQ ID NO: 343576 - RNA, 22 nt, Human
ucugcuguauuagguugaacug

SEQ ID NO: 343577 - RNA, 22 nt, Human
ucaggagagaaagaauacaauu

SEQ ID NO: 343578 - RNA, 22 nt, Human
auuggcaggaaccgaggagggg

SEQ ID NO: 343579 - RNA, 17 nt, Human
uccaugagacaugaaga

SEQ ID NO: 343580 - RNA, 20 nt, Human
cagaggcauuuucagacucu

SEQ ID NO: 343581 - RNA, 22 nt, Human
acaggagacccugcugguucug

SEQ ID NO: 343582 - RNA, 22 nt, Human
aacuuucuuggaugucucaaca

SEQ ID NO: 343583 - RNA, 22 nt, Human
caugcuguguguuuuagcucca

SEQ ID NO: 343584 - RNA, 22 nt, Human
cuugauguauaaguugauaugu

SEQ ID NO: 343585 - RNA, 23 nt, Human
ucucuuucaagagcuuaaugugc

SEQ ID NO: 343586 - RNA, 19 nt, Human
uucccaggaaaggggugca

SEQ ID NO: 343587 - RNA, 22 nt, Human
ugaggcagaaaauagcaguuca

SEQ ID NO: 343588 - RNA, 22 nt, Human
gaucuucuauguaaugaagugu

SEQ ID NO: 343589 - RNA, 22 nt, Human
cuuaaauucuuaaugcccucau

SEQ ID NO: 343590 - RNA, 22 nt, Human
uuuaagauucaguaaggcaaac

SEQ ID NO: 343591 - RNA, 21 nt, Human
uccuuccuugagguccuuucc

SEQ ID NO: 343592 - RNA, 22 nt, Human
gcucacugccauucucuagaug

SEQ ID NO: 343593 - RNA, 22 nt, Human
caggaugagaggcccagggaag

SEQ ID NO: 343594 - RNA, 22 nt, Human
uccauuuucuaaguaucacuua

SEQ ID NO: 343595 - RNA, 22 nt, Human
ggugagggaguggaacgaggug

SEQ ID NO: 343596 - RNA, 22 nt, Human
ucagccucucugaguccagacc

SEQ ID NO: 343597 - RNA, 22 nt, Human
uccaggagugugugcuaauggg

SEQ ID NO: 343598 - RNA, 22 nt, Human
ugcuucagaggaaaggcaaaag

SEQ ID NO: 343599 - RNA, 22 nt, Human
ggcagcugucucugaguuagca

SEQ ID NO: 343600 - RNA, 22 nt, Human
ucaucugucauccacaaagcug

SEQ ID NO: 343601 - RNA, 22 nt, Human
ugcuuagacgucaaguacagcc

SEQ ID NO: 343602 - RNA, 22 nt, Human
uguagaaacuacacaugcaaca

SEQ ID NO: 343603 - RNA, 19 nt, Human
ucauuguugguuugucggg

SEQ ID NO: 343604 - RNA, 22 nt, Human
ucuagaauuuugccauauagcu

SEQ ID NO: 343605 - RNA, 22 nt, Human
ucuacccagagcuaugaccuga

SEQ ID NO: 343606 - RNA, 22 nt, Human
ccaggagagcauugcacagagg

SEQ ID NO: 343607 - RNA, 22 nt, Human
aggagaaggaagugcaucacua

SEQ ID NO: 343608 - RNA, 22 nt, Human
agggcagcacaaggcauggacu

SEQ ID NO: 343609 - RNA, 22 nt, Human
uggucuuuaagguagcugucau

SEQ ID NO: 343610 - RNA, 22 nt, Human
uucaggaucauuuguuuuaucu

SEQ ID NO: 343611 - RNA, 22 nt, Human
auguaugaugcuaggcucucag

SEQ ID NO: 343612 - RNA, 22 nt, Human
aauguauuccucaugcaagagu

SEQ ID NO: 343613 - RNA, 22 nt, Human
ggggcagccuccaggaaagcug

SEQ ID NO: 343614 - RNA, 22 nt, Human
gaggcacugcaguacagugacu

SEQ ID NO: 343615 - RNA, 22 nt, Human
ugguauaaaacuuuuuauugaa

SEQ ID NO: 343616 - RNA, 21 nt, Human
uuucuucacuuugccccaugu

SEQ ID NO: 343617 - RNA, 22 nt, Human
uuugaaauaugaggcauuauga

SEQ ID NO: 343618 - RNA, 22 nt, Human
aagcagaggguauggccagguu

SEQ ID NO: 343619 - RNA, 22 nt, Human
gagggugggccagauaugaggg

SEQ ID NO: 343620 - RNA, 22 nt, Human
ugaccuuauuugaaaauagaga

SEQ ID NO: 343621 - RNA, 22 nt, Human
cucuggcuucuaccuugcaguu

SEQ ID NO: 343622 - RNA, 22 nt, Human
gccaggagccagcuucuuagca

SEQ ID NO: 343623 - RNA, 22 nt, Human
uuggaaauggcuguaguuauga

SEQ ID NO: 343624 - RNA, 21 nt, Human
auugaaagucaacaaucaguu

SEQ ID NO: 343625 - RNA, 22 nt, Human
ggagaggacauggcucccacag

SEQ ID NO: 343626 - RNA, 22 nt, Human
uucauugugauucuuggcuagc

SEQ ID NO: 343627 - RNA, 22 nt, Human
aaauauguaagauuagcacuag

SEQ ID NO: 343628 - RNA, 22 nt, Human
guucuucagaggggaaagaacc

SEQ ID NO: 343629 - RNA, 22 nt, Human
aacuagucagugauucucagaa

SEQ ID NO: 343630 - RNA, 22 nt, Human
aggcaggcugcuauggaguaga

SEQ ID NO: 343631 - RNA, 22 nt, Human
uauuucagguauggugugaaau

SEQ ID NO: 343632 - RNA, 22 nt, Human
cuucucagcaugguuacuguga

SEQ ID NO: 343633 - RNA, 23 nt, Human
uaauucacauauacauugcuuca

SEQ ID NO: 343634 - RNA, 22 nt, Human
gaggaggcacuugagcagaugu

SEQ ID NO: 343635 - RNA, 22 nt, Human
auguuucaccagcaaauuaccu

SEQ ID NO: 343636 - RNA, 22 nt, Human
gcccaggaucugcucagaucau

SEQ ID NO: 343637 - RNA, 22 nt, Human
auguuucaccaguuuuauaaga

SEQ ID NO: 343638 - RNA, 22 nt, Human
ugaggcagcaauuguauuguau

SEQ ID NO: 343639 - RNA, 22 nt, Human
acagucucuccacacugcaggg

SEQ ID NO: 343640 - RNA, 22 nt, Human
uugaaagucacaauggcauuaa

SEQ ID NO: 343641 - RNA, 17 nt, Human
ggcagccucaggcguuu

SEQ ID NO: 343642 - RNA, 22 nt, Human
gugcugugugauccaugcuggc

SEQ ID NO: 343643 - RNA, 22 nt, Human
ucccaggaggugcuuccuagga

SEQ ID NO: 343644 - RNA, 22 nt, Human
ucuucacauggaacaugaagcu

SEQ ID NO: 343645 - RNA, 21 nt, Human
caauaaacugcacauugagac

SEQ ID NO: 343646 - RNA, 22 nt, Human
aaguaugacauuuaagacaauu

SEQ ID NO: 343647 - RNA, 22 nt, Human
augaaggcuguguagauggaug

SEQ ID NO: 343648 - RNA, 22 nt, Human
gagucuuugguaaagucugcug

SEQ ID NO: 343649 - RNA, 22 nt, Human
cauuuguaauacugacuugcag

SEQ ID NO: 343650 - RNA, 22 nt, Human
agcagagccugggcuaggggug

SEQ ID NO: 343651 - RNA, 22 nt, Human
aagauggaguaguguaaugguu

SEQ ID NO: 343652 - RNA, 22 nt, Human
uuccuuaguugacugucuuagu

SEQ ID NO: 343653 - RNA, 17 nt, Human
gcgcagcuccuggcgcg

SEQ ID NO: 343654 - RNA, 22 nt, Human
cucaggauuuaaaggggcacuc

SEQ ID NO: 343655 - RNA, 22 nt, Human
cuucugcaauaaguuuuggucc

SEQ ID NO: 343656 - RNA, 18 nt, Human
ccagguggugacagagau

SEQ ID NO: 343657 - RNA, 22 nt, Human
ggcagaggagcuggaaacaugg

SEQ ID NO: 343658 - RNA, 22 nt, Human
caggcagcugcgacaagagagc

SEQ ID NO: 343659 - RNA, 22 nt, Human
cuacccaggcuggagugcagua

SEQ ID NO: 343660 - RNA, 22 nt, Human
aaaaugaugcuguaauuuggca

SEQ ID NO: 343661 - RNA, 22 nt, Human
gggcagcucuggcugugggaag

SEQ ID NO: 343662 - RNA, 22 nt, Human
ggcucagagaccugcgaucuga

SEQ ID NO: 343663 - RNA, 22 nt, Human
uaugaacugugagugugauggg

SEQ ID NO: 343664 - RNA, 18 nt, Human
ccucagggagagagacgc

SEQ ID NO: 343665 - RNA, 22 nt, Human
aggcaggcucaggcccaugcuu

SEQ ID NO: 343666 - RNA, 19 nt, Human
ggcaggcuggauagagagg

SEQ ID NO: 343667 - RNA, 22 nt, Human
aaaguuuguugcuuacaaagaa

SEQ ID NO: 343668 - RNA, 22 nt, Human
aagacuguacauuuuccagucu

SEQ ID NO: 343669 - RNA, 22 nt, Human
gaggcagcucuucugaaugggg

SEQ ID NO: 343670 - RNA, 22 nt, Human
uaacauuagguagacauaagcc

SEQ ID NO: 343671 - RNA, 22 nt, Human
gaggcagcuuggggcugugggu

SEQ ID NO: 343672 - RNA, 22 nt, Human
auuucagauucagaaauguagg

SEQ ID NO: 343673 - RNA, 21 nt, Human
gauuugcagaaacuagacagg

SEQ ID NO: 343674 - RNA, 22 nt, Human
uucauacacgaaaaugcaugca

SEQ ID NO: 343675 - RNA, 22 nt, Human
uagcaauagaaacauauaaagu

SEQ ID NO: 343676 - RNA, 22 nt, Human
auccaugaagguacuucucagg

SEQ ID NO: 343677 - RNA, 22 nt, Human
aggcaacuuuuggggaugaugg

SEQ ID NO: 343678 - RNA, 22 nt, Human
aauaguauuuauuuggaaaaag

SEQ ID NO: 343679 - RNA, 22 nt, Human
gccaucacauccaggcuaccuc

SEQ ID NO: 343680 - RNA, 17 nt, Human
ucaggauguagcaguag

SEQ ID NO: 343681 - RNA, 20 nt, Human
gcagcuacucugucucgcuc

SEQ ID NO: 343682 - RNA, 22 nt, Human
ggaggugggauuaggaccuaaa

SEQ ID NO: 343683 - RNA, 22 nt, Human
aacaguaaagacagaauuuauc

SEQ ID NO: 343684 - RNA, 22 nt, Human
cugccaggcagggagauggcug

SEQ ID NO: 343685 - RNA, 22 nt, Human
augucaaacacaacaccagugg

SEQ ID NO: 343686 - RNA, 22 nt, Human
ccucugcucugguccaugugcu

SEQ ID NO: 343687 - RNA, 19 nt, Human
caggaaugagguaauggcu

SEQ ID NO: 343688 - RNA, 19 nt, Human
ucucugcuucucuuggcau

SEQ ID NO: 343689 - RNA, 22 nt, Human
uagcuguguaagcuugguaaga

SEQ ID NO: 343690 - RNA, 22 nt, Human
ccaugagcuucaacugacacag

SEQ ID NO: 343691 - RNA, 22 nt, Human
uuucauugcagagucugugugc

SEQ ID NO: 343692 - RNA, 22 nt, Human
ucauucuugaucacuaguuagu

SEQ ID NO: 343693 - RNA, 22 nt, Human
acacaaugcauauuuuuccaga

SEQ ID NO: 343694 - RNA, 22 nt, Human
uggcagcuuccugcucauagga

SEQ ID NO: 343695 - RNA, 22 nt, Human
uuaacauacaucaugaacaaug

SEQ ID NO: 343696 - RNA, 22 nt, Human
uuucugaagauacagcuuugcu

SEQ ID NO: 343697 - RNA, 22 nt, Human
gagugcagaugaacagaagauu

SEQ ID NO: 343698 - RNA, 22 nt, Human
ugcugugagguugagaaggaag

SEQ ID NO: 343699 - RNA, 20 nt, Human
cgugcugugaccuugagcau

SEQ ID NO: 343700 - RNA, 22 nt, Human
acuggaaaacacuacuacaugc

SEQ ID NO: 343701 - RNA, 22 nt, Human
uugcccagaguccacagcguac

SEQ ID NO: 343702 - RNA, 22 nt, Human
gcccaggaaagauagggccuca

SEQ ID NO: 343703 - RNA, 22 nt, Human
aggcagcuaagauggauaauga

SEQ ID NO: 343704 - RNA, 22 nt, Human
uuuucuuauggugaagcacaaa

SEQ ID NO: 343705 - RNA, 22 nt, Human
uugauagguuuuauguauaguu

SEQ ID NO: 343706 - RNA, 22 nt, Human
gaagcagcagcuggggacaguu

SEQ ID NO: 343707 - RNA, 22 nt, Human
gaauauuuuuaaagggacuaau

SEQ ID NO: 343708 - RNA, 22 nt, Human
agaggggaguccuaaucugauu

SEQ ID NO: 343709 - RNA, 22 nt, Human
ccaggaaauggcuugcuucuuu

SEQ ID NO: 343710 - RNA, 22 nt, Human
aucaggaugcugucaguuacca

SEQ ID NO: 343711 - RNA, 22 nt, Human
ggagugucagaaacaguguccu

SEQ ID NO: 343712 - RNA, 22 nt, Human
aauaucaguauauuguaucagu

SEQ ID NO: 343713 - RNA, 22 nt, Human
uaucaauugggccaaaugguac

SEQ ID NO: 343714 - RNA, 22 nt, Human
aaaugauugucaaaguucuguu

SEQ ID NO: 343715 - RNA, 22 nt, Human
gugauuuucuccuccuagaagu

SEQ ID NO: 343716 - RNA, 22 nt, Human
agucccuguacuuuccacugcc

SEQ ID NO: 343717 - RNA, 22 nt, Human
ugaggcagauauuuauuggguu

SEQ ID NO: 343718 - RNA, 22 nt, Human
caguugcuggaugugcagcucu

SEQ ID NO: 343719 - RNA, 22 nt, Human
uggcagcagccauggaaggccc

SEQ ID NO: 343720 - RNA, 22 nt, Human
ucagucuucccuccagugcaac

SEQ ID NO: 343721 - RNA, 22 nt, Human
gaagcagcgaaguggaagggac

SEQ ID NO: 343722 - RNA, 22 nt, Human
uugaaaggugaacaugaugcac

SEQ ID NO: 343723 - RNA, 22 nt, Human
aaaggccagguuggcugguauu

SEQ ID NO: 343724 - RNA, 22 nt, Human
aauauaaugcuguuuuaugcca

SEQ ID NO: 343725 - RNA, 22 nt, Human
cccaaggaagacgcuugugaua

SEQ ID NO: 343726 - RNA, 22 nt, Human
aguaugaaccuggguucuggau

SEQ ID NO: 343727 - RNA, 22 nt, Human
uuuguuuagaugguaaaucagu

SEQ ID NO: 343728 - RNA, 22 nt, Human
agcaccuugcucuuggccuucc

SEQ ID NO: 343729 - RNA, 22 nt, Human
uucagcaaauggacuguucagg

SEQ ID NO: 343730 - RNA, 20 nt, Human
aucugcuugccuguccucgg

SEQ ID NO: 343731 - RNA, 20 nt, Human
cuucuucagccuaugcuuca

SEQ ID NO: 343732 - RNA, 22 nt, Human
acaggagaaaucuggucaaaag

SEQ ID NO: 343733 - RNA, 22 nt, Human
gaggggaagacuucuggacagu

SEQ ID NO: 343734 - RNA, 22 nt, Human
cugacagucucauugauuugcu

SEQ ID NO: 343735 - RNA, 22 nt, Human
gccucugcccuccugggacugc

SEQ ID NO: 343736 - RNA, 22 nt, Human
aucucuguaaaccauaaauuga

SEQ ID NO: 343737 - RNA, 22 nt, Human
aguuagaauagucagauuguag

SEQ ID NO: 343738 - RNA, 22 nt, Human
ucuucuuccucauuuauacaua

SEQ ID NO: 343739 - RNA, 22 nt, Human
agaccaugggcucugaagagca

SEQ ID NO: 343740 - RNA, 22 nt, Human
guugaaaguagaugcuauuugg

SEQ ID NO: 343741 - RNA, 19 nt, Human
accaggaguaucagagcug

SEQ ID NO: 343742 - RNA, 22 nt, Human
uuaugauuugccacagauuggu

SEQ ID NO: 343743 - RNA, 22 nt, Human
uaucuguuaggaucagagcugg

SEQ ID NO: 343744 - RNA, 22 nt, Human
uagcacauacauaauagauaga

SEQ ID NO: 343745 - RNA, 22 nt, Human
ggccagcugggccaccaggugc

SEQ ID NO: 343746 - RNA, 23 nt, Human
uugcuuucaucaugagaugcucc

SEQ ID NO: 343747 - RNA, 22 nt, Human
uaccauuucauucuuuccucau

SEQ ID NO: 343748 - RNA, 22 nt, Human
caggcagcucaaccuugggagc

SEQ ID NO: 343749 - RNA, 22 nt, Human
auucauuuagguauucacuuac

SEQ ID NO: 343750 - RNA, 22 nt, Human
gcaggagagucugugccagguu

SEQ ID NO: 343751 - RNA, 22 nt, Human
uuauacauguguuuugagauga

SEQ ID NO: 343752 - RNA, 22 nt, Human
cuggcagucugccucuucacug

SEQ ID NO: 343753 - RNA, 22 nt, Human
aauucuguaacuuuacugaauu

SEQ ID NO: 343754 - RNA, 22 nt, Human
gcccaggaaauaaaagugggcu

SEQ ID NO: 343755 - RNA, 22 nt, Human
cucacuguccaacaggcuuuac

SEQ ID NO: 343756 - RNA, 22 nt, Human
uagaaacaucagcuaaccaaaa

SEQ ID NO: 343757 - RNA, 22 nt, Human
cuggcaaguacugggccagcuc

SEQ ID NO: 343758 - RNA, 22 nt, Human
aauagcucacugauuucucuuu

SEQ ID NO: 343759 - RNA, 22 nt, Human
uccaggagacacccuugugugu

SEQ ID NO: 343760 - RNA, 22 nt, Human
acucaggaaaugaagacugguu

SEQ ID NO: 343761 - RNA, 22 nt, Human
cuugcaggccuuucuagcucua

SEQ ID NO: 343762 - RNA, 19 nt, Human
ugcugcuguccuugcaggg

SEQ ID NO: 343763 - RNA, 22 nt, Human
uguccauggauagagcugcucg

SEQ ID NO: 343764 - RNA, 22 nt, Human
ucugucaaaugagcaaguaacu

SEQ ID NO: 343765 - RNA, 22 nt, Human
aggccagcucuacccuuggacu

SEQ ID NO: 343766 - RNA, 22 nt, Human
gggcagcucggaagugggaaag

SEQ ID NO: 343767 - RNA, 22 nt, Human
cuucagaggggacucaaaguca

SEQ ID NO: 343768 - RNA, 22 nt, Human
gcucaggacuggaggagcgggg

SEQ ID NO: 343769 - RNA, 22 nt, Human
agcuggcagcucucagggguac

SEQ ID NO: 343770 - RNA, 22 nt, Human
uugggcucaggaguuugagacc

SEQ ID NO: 343771 - RNA, 21 nt, Human
ggcagccucuguggaagggga

SEQ ID NO: 343772 - RNA, 22 nt, Human
uggcagcuuuuuguuucaggcu

SEQ ID NO: 343773 - RNA, 22 nt, Human
acccaggagacagguugcagug

SEQ ID NO: 343774 - RNA, 22 nt, Human
uuggcaggaauauugcagaggu

SEQ ID NO: 343775 - RNA, 22 nt, Human
ggagcagggcagugaauucugg

SEQ ID NO: 343776 - RNA, 22 nt, Human
gaagaggaugacaggagccggu

SEQ ID NO: 343777 - RNA, 22 nt, Human
gaggcgagaagcuggagauggu

SEQ ID NO: 343778 - RNA, 22 nt, Human
cucaggauagauuguccucuca

SEQ ID NO: 343779 - RNA, 23 nt, Human
uuccagaguccacaucugccacc

SEQ ID NO: 343780 - RNA, 22 nt, Human
aagauggagcacgagcagaagc

SEQ ID NO: 343781 - RNA, 21 nt, Human
ggacagcugcgcgcagggcuc

SEQ ID NO: 343782 - RNA, 22 nt, Human
uauuuguugaguuguuaugucu

SEQ ID NO: 343783 - RNA, 22 nt, Human
aaggcagcaccgccuccugaaa

SEQ ID NO: 343784 - RNA, 22 nt, Human
uuacuuuggguccugcuuauaa

SEQ ID NO: 343785 - RNA, 22 nt, Human
auuucucuuagcaagacauuac

SEQ ID NO: 343786 - RNA, 22 nt, Human
agggagcucuaaguagagggac

SEQ ID NO: 343787 - RNA, 22 nt, Human
guuguuuuuguucucuauagcu

SEQ ID NO: 343788 - RNA, 22 nt, Human
cacaugaagagagucuaguaau

SEQ ID NO: 343789 - RNA, 22 nt, Human
gagaggauccacaaaccaggaa

SEQ ID NO: 343790 - RNA, 22 nt, Human
uccaggagacacaagguacaua

SEQ ID NO: 343791 - RNA, 22 nt, Human
uccuucuuucccccuagucauu

SEQ ID NO: 343792 - RNA, 22 nt, Human
gugguaauuuaauccuacacug

SEQ ID NO: 343793 - RNA, 22 nt, Human
ucauuuaauagcuuuugucuuu

SEQ ID NO: 343794 - RNA, 22 nt, Human
gcagaggacagggauuuagauu

SEQ ID NO: 343795 - RNA, 22 nt, Human
cucuucuugccugaugaggcag

SEQ ID NO: 343796 - RNA, 22 nt, Human
cauucacaaagcugauugaugg

SEQ ID NO: 343797 - RNA, 22 nt, Human
uguuugaauuuugcuaacgugu

SEQ ID NO: 343798 - RNA, 18 nt, Human
gagaggagccagaauuuu

SEQ ID NO: 343799 - RNA, 22 nt, Human
ccccaggacguggcccucauag

SEQ ID NO: 343800 - RNA, 22 nt, Human
uucuucaguguagcaacuguau

SEQ ID NO: 343801 - RNA, 22 nt, Human
gggagggguugcauguuugagu

SEQ ID NO: 343802 - RNA, 22 nt, Human
uaugacuuauuucaucaguucu

SEQ ID NO: 343803 - RNA, 19 nt, Human
ugugaaagcuaguguucuu

SEQ ID NO: 343804 - RNA, 22 nt, Human
cugcuguguuccuccugcaucu

SEQ ID NO: 343805 - RNA, 22 nt, Human
uaacaguguggacuugagaucu

SEQ ID NO: 343806 - RNA, 21 nt, Human
cucuugugucagagccagagg

SEQ ID NO: 343807 - RNA, 22 nt, Human
gcuucccagcagaggaaagacu

SEQ ID NO: 343808 - RNA, 22 nt, Human
ucgcugugguuucuguacaugg

SEQ ID NO: 343809 - RNA, 22 nt, Human
gagagcuggguucaaguagcug

SEQ ID NO: 343810 - RNA, 22 nt, Human
uugaaauacugcauuguucagu

SEQ ID NO: 343811 - RNA, 22 nt, Human
uggaaagcgaggaguuggcauu

SEQ ID NO: 343812 - RNA, 22 nt, Human
agcccagggaaccaggaagugg

SEQ ID NO: 343813 - RNA, 22 nt, Human
cagaaauguacugacaugcagu

SEQ ID NO: 343814 - RNA, 22 nt, Human
uggcagcuccuggggccagcac

SEQ ID NO: 343815 - RNA, 22 nt, Human
ugaugaaacugagguuccaaga

SEQ ID NO: 343816 - RNA, 22 nt, Human
acaauucugaugguuucccagu

SEQ ID NO: 343817 - RNA, 22 nt, Human
aaaaaucuaugacugcuucucc

SEQ ID NO: 343818 - RNA, 22 nt, Human
uuugaauagaggccccucagaa

SEQ ID NO: 343819 - RNA, 22 nt, Human
cauaauuugugguaguggggga

SEQ ID NO: 343820 - RNA, 22 nt, Human
ugacccauggucugaucauagg

SEQ ID NO: 343821 - RNA, 22 nt, Human
uucuucuuaauguccugggaac

SEQ ID NO: 343822 - RNA, 22 nt, Human
uuuccagagcaugucugcucag

SEQ ID NO: 343823 - RNA, 22 nt, Human
aggcagcugugaggacuggauu

SEQ ID NO: 343824 - RNA, 22 nt, Human
gaggguggguuucuugcacguc

SEQ ID NO: 343825 - RNA, 22 nt, Human
aaaguugugaaaccgaacaugu

SEQ ID NO: 343826 - RNA, 22 nt, Human
agagugucugguagcugcucug

SEQ ID NO: 343827 - RNA, 22 nt, Human
gucaggauuaaugggaguaugc

SEQ ID NO: 343828 - RNA, 22 nt, Human
uucauucuuauuugugaucugg

SEQ ID NO: 343829 - RNA, 22 nt, Human
uuaauuuuaaccuguuuguguc

SEQ ID NO: 343830 - RNA, 22 nt, Human
gcccaggagaggccagggcuga

SEQ ID NO: 343831 - RNA, 22 nt, Human
gagagaaaugugcaguuugggc

SEQ ID NO: 343832 - RNA, 22 nt, Human
uggagaggagcaccauggccau

SEQ ID NO: 343833 - RNA, 22 nt, Human
uaacuuucacaucacacugacu

SEQ ID NO: 343834 - RNA, 22 nt, Human
uuuuauagcugaauaguauucc

SEQ ID NO: 343835 - RNA, 22 nt, Human
gagggcaguagccucguacccu

SEQ ID NO: 343836 - RNA, 22 nt, Human
auacacauguguaugugcaugc

SEQ ID NO: 343837 - RNA, 22 nt, Human
uauucacaguugauuuacaguu

SEQ ID NO: 343838 - RNA, 22 nt, Human
ucugggaagcugcgugccuguu

SEQ ID NO: 343839 - RNA, 22 nt, Human
gcuaugcaggagccuaaugaca

SEQ ID NO: 343840 - RNA, 22 nt, Human
guucuucaggcugugcucuaga

SEQ ID NO: 343841 - RNA, 22 nt, Human
agacgagggccuggcacacagu

SEQ ID NO: 343842 - RNA, 19 nt, Human
uggcagggagaguuugaag

SEQ ID NO: 343843 - RNA, 22 nt, Human
uggggcuccuccuggcaggagg

SEQ ID NO: 343844 - RNA, 22 nt, Human
uuuuccagauuggacuuagucc

SEQ ID NO: 343845 - RNA, 17 nt, Human
caggcagacauguaagc

SEQ ID NO: 343846 - RNA, 22 nt, Human
augcuacagcaucucucaucag

SEQ ID NO: 343847 - RNA, 22 nt, Human
ucauuuguucaucugcucuucu

SEQ ID NO: 343848 - RNA, 22 nt, Human
uguaugaaugggaaaaggaaac

SEQ ID NO: 343849 - RNA, 22 nt, Human
aggcagcuuucuggugcaccau

SEQ ID NO: 343850 - RNA, 22 nt, Human
caugucuguguacacaugcaca

SEQ ID NO: 343851 - RNA, 22 nt, Human
cuugcacacauguacaugugua

SEQ ID NO: 343852 - RNA, 23 nt, Human
ucuccuccuagauacagucaugg

SEQ ID NO: 343853 - RNA, 22 nt, Human
agcgagggaggucugaggacag

SEQ ID NO: 343854 - RNA, 22 nt, Human
aggcacaggccucagcacccag

SEQ ID NO: 343855 - RNA, 19 nt, Human
ggcagcuggacgcuguuca

SEQ ID NO: 343856 - RNA, 22 nt, Human
uaggcagcgcuuggcugugcuu

SEQ ID NO: 343857 - RNA, 22 nt, Human
cagugauguuucugcaucagag

SEQ ID NO: 343858 - RNA, 22 nt, Human
cuaauguaucauggcucucagc

SEQ ID NO: 343859 - RNA, 22 nt, Human
accaggagaggcacuugcaaug

SEQ ID NO: 343860 - RNA, 21 nt, Human
auggagggaccagggaagcag

SEQ ID NO: 343861 - RNA, 22 nt, Human
aggcaguggcugagaccagggg

SEQ ID NO: 343862 - RNA, 22 nt, Human
aucauuuuuaagagacucuucu

SEQ ID NO: 343863 - RNA, 20 nt, Human
caguccaaucagaggccacc

SEQ ID NO: 343864 - RNA, 22 nt, Human
agugcuuugguauagaacuauu

SEQ ID NO: 343865 - RNA, 21 nt, Human
uuugaaagugggugauucuuu

SEQ ID NO: 343866 - RNA, 22 nt, Human
aaauguuucuacuugugagcau

SEQ ID NO: 343867 - RNA, 22 nt, Human
ccaugagccaggcugaggaagc

SEQ ID NO: 343868 - RNA, 22 nt, Human
agagggcagucucagauuggga

SEQ ID NO: 343869 - RNA, 22 nt, Human
gauuucuugaccccugucucag

SEQ ID NO: 343870 - RNA, 22 nt, Human
uaugaacuuuugaugugacaug

SEQ ID NO: 343871 - RNA, 22 nt, Human
cuuacagagaagaaaauguagu

SEQ ID NO: 343872 - RNA, 22 nt, Human
gcaggagacaacuguaaggaga

SEQ ID NO: 343873 - RNA, 22 nt, Human
ccagcagagucuaggaaggagg

SEQ ID NO: 343874 - RNA, 22 nt, Human
aauuuccagaucagaugacuca

SEQ ID NO: 343875 - RNA, 22 nt, Human
uuucacauuagauaugucauuu

SEQ ID NO: 343876 - RNA, 21 nt, Human
agagagggagaugaaacaucc

SEQ ID NO: 343877 - RNA, 22 nt, Human
uaggcagcauggauucugaaua

SEQ ID NO: 343878 - RNA, 22 nt, Human
gcucaggaaaacagucuaguaa

SEQ ID NO: 343879 - RNA, 19 nt, Human
ugcauaaauuauauacuuu

SEQ ID NO: 343880 - RNA, 22 nt, Human
gucuccugagccuugacugcaa

SEQ ID NO: 343881 - RNA, 22 nt, Human
aaauguuuugcucccauguggu

SEQ ID NO: 343882 - RNA, 22 nt, Human
ccaggaaaauaccaagcuuuaa

SEQ ID NO: 343883 - RNA, 22 nt, Human
cccaggagacagaaacagaggu

SEQ ID NO: 343884 - RNA, 22 nt, Human
agcccaggagguggagguugca

SEQ ID NO: 343885 - RNA, 22 nt, Human
uagaacauaagucauucauuug

SEQ ID NO: 343886 - RNA, 22 nt, Human
auuccaguuggguucuaauaca

SEQ ID NO: 343887 - RNA, 22 nt, Human
gcagagcuucuguccuucagga

SEQ ID NO: 343888 - RNA, 22 nt, Human
cccaggaaaguggaggcggcug

SEQ ID NO: 343889 - RNA, 22 nt, Human
aacauacauauuucagugucca

SEQ ID NO: 343890 - RNA, 22 nt, Human
cccaggauggggcugcaguuau

SEQ ID NO: 343891 - RNA, 22 nt, Human
aauugcuaaagauuauguuuuc

SEQ ID NO: 343892 - RNA, 22 nt, Human
ucaggaugaccacgagccucua

SEQ ID NO: 343893 - RNA, 22 nt, Human
acccaggaugauaauguucaca

SEQ ID NO: 343894 - RNA, 22 nt, Human
aaagauuugaguucugcuuaua

SEQ ID NO: 343895 - RNA, 22 nt, Human
aagggaggccagagguuuugca

SEQ ID NO: 343896 - RNA, 22 nt, Human
uuacaagauaaccugaugcugu

SEQ ID NO: 343897 - RNA, 22 nt, Human
aaaacaguuuaggcaucacagu

SEQ ID NO: 343898 - RNA, 22 nt, Human
augcuguggaugccuugcccca

SEQ ID NO: 343899 - RNA, 22 nt, Human
aggcagcuggacauaacuaacc

SEQ ID NO: 343900 - RNA, 22 nt, Human
gaggcagcugggauacaaggga

SEQ ID NO: 343901 - RNA, 22 nt, Human
uauuuucuguggaggaccagau

SEQ ID NO: 343902 - RNA, 22 nt, Human
gggcagcugccagaggccaugg

SEQ ID NO: 343903 - RNA, 22 nt, Human
gagagguccauuccccugucag

SEQ ID NO: 343904 - RNA, 22 nt, Human
aacaugcucuguuucuuggaug

SEQ ID NO: 343905 - RNA, 22 nt, Human
cuuaaauuuucaucuacaagaa

SEQ ID NO: 343906 - RNA, 22 nt, Human
auucugucuaagcuggcuacgu

SEQ ID NO: 343907 - RNA, 22 nt, Human
aucaggauccaccuugagccug

SEQ ID NO: 343908 - RNA, 22 nt, Human
ugccuguguugauuacuuuguc

SEQ ID NO: 343909 - RNA, 22 nt, Human
aucugucuugccuugcauauuu

SEQ ID NO: 343910 - RNA, 20 nt, Human
augugagggguugaaguggg

SEQ ID NO: 343911 - RNA, 22 nt, Human
uacaaaguaauguauaauaucg

SEQ ID NO: 343912 - RNA, 22 nt, Human
auaucaaacgaaguuauuuuaa

SEQ ID NO: 343913 - RNA, 22 nt, Human
gagccagcuauguagcaagagg

SEQ ID NO: 343914 - RNA, 22 nt, Human
ucauaaaugcagugucauaaau

SEQ ID NO: 343915 - RNA, 22 nt, Human
aguggcagagugcacucaggca

SEQ ID NO: 343916 - RNA, 22 nt, Human
uaacacauuaguucuccuagau

SEQ ID NO: 343917 - RNA, 22 nt, Human
acagauauuuggggaaagacgu

SEQ ID NO: 343918 - RNA, 22 nt, Human
cauuuauuggcauguaguaggu

SEQ ID NO: 343919 - RNA, 22 nt, Human
gcaaguuauuuccauuuaaagc

SEQ ID NO: 343920 - RNA, 22 nt, Human
cagaaggcuggcagauugagau

SEQ ID NO: 343921 - RNA, 22 nt, Human
aguaaagcagaguugcaguaca

SEQ ID NO: 343922 - RNA, 22 nt, Human
aauaacuucaguucuuacauua

SEQ ID NO: 343923 - RNA, 22 nt, Human
gcaggagaacaaagcaagcugc

SEQ ID NO: 343924 - RNA, 22 nt, Human
gugaaacacccuccaaugcaca

SEQ ID NO: 343925 - RNA, 22 nt, Human
gccaggaggcuuaacuggacag

SEQ ID NO: 343926 - RNA, 22 nt, Human
cugcugugcuuguggccacccg

SEQ ID NO: 343927 - RNA, 22 nt, Human
auaaucuuucuuuuccagauag

SEQ ID NO: 343928 - RNA, 20 nt, Human
uccaggagguuaguguggcu

SEQ ID NO: 343929 - RNA, 22 nt, Human
aggagaggcucuaacucugugu

SEQ ID NO: 343930 - RNA, 22 nt, Human
aaggcagcacagcaacugcuca

SEQ ID NO: 343931 - RNA, 22 nt, Human
uuccagcaggcagacaggagau

SEQ ID NO: 343932 - RNA, 22 nt, Human
caggcagcucgaugccuuguug

SEQ ID NO: 343933 - RNA, 22 nt, Human
guuuagaacacggaaauacuga

SEQ ID NO: 343934 - RNA, 22 nt, Human
cuuuguagcugcuucugauuua

SEQ ID NO: 343935 - RNA, 22 nt, Human
gagcaccucaauuugcuauuug

SEQ ID NO: 343936 - RNA, 22 nt, Human
agugugagcccuggaguggugc

SEQ ID NO: 343937 - RNA, 22 nt, Human
gcgucugaguugcgggggcuca

SEQ ID NO: 343938 - RNA, 22 nt, Human
guaggcagggcuguggggagaa

SEQ ID NO: 343939 - RNA, 22 nt, Human
aucuugcauuugcuaaaaugca

SEQ ID NO: 343940 - RNA, 22 nt, Human
ggaggacacuggcucugccuuc

SEQ ID NO: 343941 - RNA, 21 nt, Human
ugaaugaggaggauggcauuu

SEQ ID NO: 343942 - RNA, 22 nt, Human
uguacaaagguacuuugauguu

SEQ ID NO: 343943 - RNA, 22 nt, Human
auucuucaccugagucagucua

SEQ ID NO: 343944 - RNA, 22 nt, Human
agaaaugaagagagucaagguu

SEQ ID NO: 343945 - RNA, 22 nt, Human
agagacagaggcaauauagcuu

SEQ ID NO: 343946 - RNA, 22 nt, Human
auguagaaaguucauagaugcg

SEQ ID NO: 343947 - RNA, 22 nt, Human
ugaggcaggaguucaggcugcg

SEQ ID NO: 343948 - RNA, 21 nt, Human
auuucagagcacacaaguaaa

SEQ ID NO: 343949 - RNA, 19 nt, Human
ucuuucauuucuagcucug

SEQ ID NO: 343950 - RNA, 22 nt, Human
gcucaggaucccaggggugugc

SEQ ID NO: 343951 - RNA, 22 nt, Human
aaggcaguacuuuauguccaua

SEQ ID NO: 343952 - RNA, 22 nt, Human
auuuccauagagcgucucacag

SEQ ID NO: 343953 - RNA, 22 nt, Human
ugaaaugacagucuuaagcucu

SEQ ID NO: 343954 - RNA, 22 nt, Human
aauguaugcugugguaucuucu

SEQ ID NO: 343955 - RNA, 22 nt, Human
ggagggacccacucuagaggug

SEQ ID NO: 343956 - RNA, 21 nt, Human
uaaggccaagucuauuucugu

SEQ ID NO: 343957 - RNA, 22 nt, Human
uucauguguauggaacauuuuu

SEQ ID NO: 343958 - RNA, 22 nt, Human
ucagaaaagguagcugugacaa

SEQ ID NO: 343959 - RNA, 22 nt, Human
ggaggaggcggcagaaguuccu

SEQ ID NO: 343960 - RNA, 22 nt, Human
uuugaaguguuauuucuaucac

SEQ ID NO: 343961 - RNA, 22 nt, Human
cuuugcaaacugucacacuuuc

SEQ ID NO: 343962 - RNA, 22 nt, Human
uauuuccaagcugaauccaaug

SEQ ID NO: 343963 - RNA, 22 nt, Human
gagggagggacuagcauucucu

SEQ ID NO: 343964 - RNA, 22 nt, Human
aucuucucauguguaaugaggu

SEQ ID NO: 343965 - RNA, 20 nt, Human
uaacuuucuaugcuuucagc

SEQ ID NO: 343966 - RNA, 22 nt, Human
agucucugccagcuuguccucu

SEQ ID NO: 343967 - RNA, 22 nt, Human
caggguggcacaucacagcauu

SEQ ID NO: 343968 - RNA, 22 nt, Human
uauuuuaucugccagaguggag

SEQ ID NO: 343969 - RNA, 22 nt, Human
agagggcaaguguaguccagua

SEQ ID NO: 343970 - RNA, 22 nt, Human
uugaauuauaagugugucuacu

SEQ ID NO: 343971 - RNA, 22 nt, Human
uuuauauuucccaggauuggcc

SEQ ID NO: 343972 - RNA, 18 nt, Human
ucuuuggacaacuacugg

SEQ ID NO: 343973 - RNA, 22 nt, Human
gcucaggaucagccaccucuuu

SEQ ID NO: 343974 - RNA, 22 nt, Human
uuugacauugccaauuugcuca

SEQ ID NO: 343975 - RNA, 22 nt, Human
gcccaggaaaugccccguggug

SEQ ID NO: 343976 - RNA, 22 nt, Human
cacaugaguccugccagguaug

SEQ ID NO: 343977 - RNA, 22 nt, Human
gaaggucaccuccccucucugg

SEQ ID NO: 343978 - RNA, 22 nt, Human
uaaucuguauuccuacuuugca

SEQ ID NO: 343979 - RNA, 22 nt, Human
aguggaccagaagacugaagcu

SEQ ID NO: 343980 - RNA, 21 nt, Human
acaggagaccgccuggcaguc

SEQ ID NO: 343981 - RNA, 22 nt, Human
aaucugucguaguaaaaagcag

SEQ ID NO: 343982 - RNA, 22 nt, Human
cccaggaacagcacagaacagc

SEQ ID NO: 343983 - RNA, 22 nt, Human
gcucucuuuuuccagugguggu

SEQ ID NO: 343984 - RNA, 22 nt, Human
cagcugccccgcuggcugacca

SEQ ID NO: 343985 - RNA, 22 nt, Human
agagggagcccagucauagcug

SEQ ID NO: 343986 - RNA, 22 nt, Human
uuuggaauguaguuuaaucauc

SEQ ID NO: 343987 - RNA, 22 nt, Human
ggcagcuggguuggccagaaac

SEQ ID NO: 343988 - RNA, 22 nt, Human
gauuucuugauaaguaguguga

SEQ ID NO: 343989 - RNA, 22 nt, Human
ggauggcaggacaaggacccag

SEQ ID NO: 343990 - RNA, 22 nt, Human
ucaggauguuaauauagcauua

SEQ ID NO: 343991 - RNA, 22 nt, Human
ugugaaauauuuauauacucaa

SEQ ID NO: 343992 - RNA, 22 nt, Human
uaauaguuaugguugguucuca

SEQ ID NO: 343993 - RNA, 19 nt, Human
agggaguuuauauuugcac

SEQ ID NO: 343994 - RNA, 22 nt, Human
aagauuauggcagauaacaauu

SEQ ID NO: 343995 - RNA, 22 nt, Human
augugaaaaauuucuuauuaca

SEQ ID NO: 343996 - RNA, 22 nt, Human
ggugagaggcagaggacagcuu

SEQ ID NO: 343997 - RNA, 22 nt, Human
ggauggcagucugcaugagaaa

SEQ ID NO: 343998 - RNA, 22 nt, Human
agagcagcugugacauggacag

SEQ ID NO: 343999 - RNA, 22 nt, Human
uaacacauauuugcaguaagca

SEQ ID NO: 344000 - RNA, 22 nt, Human
ugcuuuggaucuauuugcugag

SEQ ID NO: 344001 - RNA, 22 nt, Human
aggcagagcuggguuuugaaau

SEQ ID NO: 344002 - RNA, 22 nt, Human
gauaaugaugacaaugacaacc

SEQ ID NO: 344003 - RNA, 22 nt, Human
caggaaugaggucguaaguguc

SEQ ID NO: 344004 - RNA, 22 nt, Human
agaaaugaagcaggaguuauua

SEQ ID NO: 344005 - RNA, 20 nt, Human
accaauguuagcuuaguacu

SEQ ID NO: 344006 - RNA, 22 nt, Human
guucuucaguaaaauuaaaugu

SEQ ID NO: 344007 - RNA, 22 nt, Human
gaucauuuacuuguucuggacu

SEQ ID NO: 344008 - RNA, 22 nt, Human
uggcaucucaaacaggcagauu

SEQ ID NO: 344009 - RNA, 22 nt, Human
agacgagggcccccaggacagc

SEQ ID NO: 344010 - RNA, 20 nt, Human
acaggagaucugaggaaagg

SEQ ID NO: 344011 - RNA, 22 nt, Human
uugauuucuauucagauguaga

SEQ ID NO: 344012 - RNA, 22 nt, Human
aucccaugagaccacguuggcu

SEQ ID NO: 344013 - RNA, 22 nt, Human
gugguuuugccauuacaaguaa

SEQ ID NO: 344014 - RNA, 22 nt, Human
gucuucuuguguugccugucuu

SEQ ID NO: 344015 - RNA, 22 nt, Human
aaccauuugccauuaucuuaag

SEQ ID NO: 344016 - RNA, 20 nt, Human
caggaugauuggacacgaug

SEQ ID NO: 344017 - RNA, 22 nt, Human
uccaggaguggggcagaggucu

SEQ ID NO: 344018 - RNA, 22 nt, Human
ucucgacagccuggcacagugg

SEQ ID NO: 344019 - RNA, 22 nt, Human
guccucugaaguugugcaaugc

SEQ ID NO: 344020 - RNA, 22 nt, Human
caugugguucaaguacuccaca

SEQ ID NO: 344021 - RNA, 22 nt, Human
ucuucauauauaaaguggaaua

SEQ ID NO: 344022 - RNA, 22 nt, Human
gcauucuuuuuaggagguuccu

SEQ ID NO: 344023 - RNA, 22 nt, Human
ugaaggcccagccacagaaugg

SEQ ID NO: 344024 - RNA, 19 nt, Human
agcuuccauauucucuagu

SEQ ID NO: 344025 - RNA, 22 nt, Human
uucucagauauuuacugagcau

SEQ ID NO: 344026 - RNA, 22 nt, Human
agagcagcacguuguccccaca

SEQ ID NO: 344027 - RNA, 22 nt, Human
cuacccagagugaaucucuuaa

SEQ ID NO: 344028 - RNA, 22 nt, Human
ggcagccuugacuagugacuua

SEQ ID NO: 344029 - RNA, 22 nt, Human
auucuucaucagagaugcacua

SEQ ID NO: 344030 - RNA, 22 nt, Human
cuagggaguggcagagcuggga

SEQ ID NO: 344031 - RNA, 22 nt, Human
ggaggaugccaagcugugcaca

SEQ ID NO: 344032 - RNA, 22 nt, Human
ucauggauggccgggaggugau

SEQ ID NO: 344033 - RNA, 22 nt, Human
aacauucaaaacccaguucagu

SEQ ID NO: 344034 - RNA, 22 nt, Human
guuauaaaaugcacaguuguuu

SEQ ID NO: 344035 - RNA, 22 nt, Human
gagugcagaugccagccccagu

SEQ ID NO: 344036 - RNA, 22 nt, Human
accauguguuuuacacauggua

SEQ ID NO: 344037 - RNA, 22 nt, Human
acccaggagagagcuauaaaau

SEQ ID NO: 344038 - RNA, 22 nt, Human
uuuucucuuguuaauguacuga

SEQ ID NO: 344039 - RNA, 22 nt, Human
ccagaggaaaaauaucucccua

SEQ ID NO: 344040 - RNA, 22 nt, Human
ucuuagaaugucaacugauguu

SEQ ID NO: 344041 - RNA, 22 nt, Human
caggcagcguccugcuuccugu

SEQ ID NO: 344042 - RNA, 22 nt, Human
accaggagccacaggaggagcc

SEQ ID NO: 344043 - RNA, 22 nt, Human
cauaauauacuacauugaugaa

SEQ ID NO: 344044 - RNA, 22 nt, Human
caggagaggcuguacguuucuc

SEQ ID NO: 344045 - RNA, 22 nt, Human
uguacauacauagauauacaca

SEQ ID NO: 344046 - RNA, 21 nt, Human
gcugcaucaaucuacccaggg

SEQ ID NO: 344047 - RNA, 22 nt, Human
ccaugagcuuccuauauagggu

SEQ ID NO: 344048 - RNA, 22 nt, Human
agaagucauuuauguuagauga

SEQ ID NO: 344049 - RNA, 22 nt, Human
uuuuuauaugaaggauagugcg

SEQ ID NO: 344050 - RNA, 22 nt, Human
cagcagaggcacgucugugaau

SEQ ID NO: 344051 - RNA, 22 nt, Human
uaaacauuuguuauucuuguuu

SEQ ID NO: 344052 - RNA, 22 nt, Human
gucaggaugcuauuguuauuaa

SEQ ID NO: 344053 - RNA, 22 nt, Human
ugaaaugagcauuuauucuuua

SEQ ID NO: 344054 - RNA, 22 nt, Human
uuucuagucucgaucucuuaau

SEQ ID NO: 344055 - RNA, 18 nt, Human
agggagagaccgcggguc

SEQ ID NO: 344056 - RNA, 22 nt, Human
ugaggcaggagaaucacaugaa

SEQ ID NO: 344057 - RNA, 22 nt, Human
uacugcaugguggaguggagcu

SEQ ID NO: 344058 - RNA, 22 nt, Human
cagucucagaggugggaguggg

SEQ ID NO: 344059 - RNA, 21 nt, Human
ucauuugugaucugauuucca

SEQ ID NO: 344060 - RNA, 19 nt, Human
uucaggauugacccuacug

SEQ ID NO: 344061 - RNA, 22 nt, Human
caaggccaugagcagcgagugu

SEQ ID NO: 344062 - RNA, 22 nt, Human
ggaggcaggaaagacagguuca

SEQ ID NO: 344063 - RNA, 22 nt, Human
uuugcauaaaggagcauuucuc

SEQ ID NO: 344064 - RNA, 22 nt, Human
gaggaacccagcugggguugcc

SEQ ID NO: 344065 - RNA, 17 nt, Human
ccuguguuugcuccuuc

SEQ ID NO: 344066 - RNA, 22 nt, Human
ccaggagagcaggcgugcagcu

SEQ ID NO: 344067 - RNA, 22 nt, Human
ugaggggauacgguacacauug

SEQ ID NO: 344068 - RNA, 22 nt, Human
aauuuccaaauuucugucacac

SEQ ID NO: 344069 - RNA, 22 nt, Human
gcaucuaaacuugcaucauugu

SEQ ID NO: 344070 - RNA, 22 nt, Human
agggaguuagaaauccaggaua

SEQ ID NO: 344071 - RNA, 22 nt, Human
ggagcggagggagggccacugu

SEQ ID NO: 344072 - RNA, 22 nt, Human
gcaagcugcucuuauguggagg

SEQ ID NO: 344073 - RNA, 22 nt, Human
gagugcaguuggggugagggga

SEQ ID NO: 344074 - RNA, 22 nt, Human
aggcagcuuuguaguaaagcua

SEQ ID NO: 344075 - RNA, 22 nt, Human
ucacccuugauaauguucuucu

SEQ ID NO: 344076 - RNA, 22 nt, Human
acaaaugucuccucuuuuguua

SEQ ID NO: 344077 - RNA, 22 nt, Human
gucccaggugggcuccaccucu

SEQ ID NO: 344078 - RNA, 22 nt, Human
auguagaagugggcauuauaga

SEQ ID NO: 344079 - RNA, 22 nt, Human
caauaguucgguccugaaggcc

SEQ ID NO: 344080 - RNA, 22 nt, Human
ugcuagaagauagcuagaagau

SEQ ID NO: 344081 - RNA, 22 nt, Human
uuucaugagauuccuccacauc

SEQ ID NO: 344082 - RNA, 22 nt, Human
auacuuucugaccaauuaauug

SEQ ID NO: 344083 - RNA, 22 nt, Human
uacacacagaggccaugggauu

SEQ ID NO: 344084 - RNA, 22 nt, Human
guccaugauucugugacacccu

SEQ ID NO: 344085 - RNA, 22 nt, Human
ggaagaggcugaggccaugcug

SEQ ID NO: 344086 - RNA, 22 nt, Human
agucacuguucugucaugucaa

SEQ ID NO: 344087 - RNA, 22 nt, Human
gaggucagucagaccaggguuu

SEQ ID NO: 344088 - RNA, 22 nt, Human
gaaauauuguacuggagauguu

SEQ ID NO: 344089 - RNA, 22 nt, Human
ucugggaaaugcuguuccuugu

SEQ ID NO: 344090 - RNA, 22 nt, Human
ugaggcagugauguuuaagcac

SEQ ID NO: 344091 - RNA, 22 nt, Human
uugaaaguccuucuugaguuac

SEQ ID NO: 344092 - RNA, 22 nt, Human
ggagaggagcuauugggggcuc

SEQ ID NO: 344093 - RNA, 22 nt, Human
uuucccaguucccugcucuaua

SEQ ID NO: 344094 - RNA, 22 nt, Human
gaggaggcuuccgggaggcacg

SEQ ID NO: 344095 - RNA, 22 nt, Human
gaggcagcggcucacagagaaa

SEQ ID NO: 344096 - RNA, 22 nt, Human
agggaagcuuguuacugagaag

SEQ ID NO: 344097 - RNA, 22 nt, Human
aaauaguuguuuggaucaauaa

SEQ ID NO: 344098 - RNA, 22 nt, Human
uccaggagaggccugaccaggu

SEQ ID NO: 344099 - RNA, 22 nt, Human
gaggcaguguuuacugcccugu

SEQ ID NO: 344100 - RNA, 22 nt, Human
uggaaauacuugccauaaaacu

SEQ ID NO: 344101 - RNA, 21 nt, Human
uuucugaaggcaacaucuauc

SEQ ID NO: 344102 - RNA, 22 nt, Human
caggcagcugacugucagauau

SEQ ID NO: 344103 - RNA, 22 nt, Human
uuuuuguagucauuagaagagg

SEQ ID NO: 344104 - RNA, 21 nt, Human
gauuuuaaagagacugccaca

SEQ ID NO: 344105 - RNA, 22 nt, Human
agggauggaagacuugaagacc

SEQ ID NO: 344106 - RNA, 22 nt, Human
uuauuugcccauguuuagcaga

SEQ ID NO: 344107 - RNA, 22 nt, Human
augaagcugaaaaaggcauaua

SEQ ID NO: 344108 - RNA, 22 nt, Human
aaggcagcaagaauuccagguu

SEQ ID NO: 344109 - RNA, 22 nt, Human
cccaggcagccugcagggaagg

SEQ ID NO: 344110 - RNA, 22 nt, Human
ucucagaguuuagagcugagcc

SEQ ID NO: 344111 - RNA, 22 nt, Human
gagagucuaggaaccucauaua

SEQ ID NO: 344112 - RNA, 22 nt, Human
aaacacagggauauauauucca

SEQ ID NO: 344113 - RNA, 22 nt, Human
ugaaugaguuuggcugcuguuc

SEQ ID NO: 344114 - RNA, 22 nt, Human
gugcuaaaggguuaugaacaag

SEQ ID NO: 344115 - RNA, 22 nt, Human
auuaaauuagcaaacugugaaa

SEQ ID NO: 344116 - RNA, 22 nt, Human
ucugggaaugaauaagaccugu

SEQ ID NO: 344117 - RNA, 22 nt, Human
caggcagcugggucaccguccc

SEQ ID NO: 344118 - RNA, 22 nt, Human
agaggcagaaguguucaaaccc

SEQ ID NO: 344119 - RNA, 22 nt, Human
ucaggagaaagccaauuagagu

SEQ ID NO: 344120 - RNA, 22 nt, Human
uggcagcugaggggaggcuuug

SEQ ID NO: 344121 - RNA, 22 nt, Human
ucuucagauaaagggagaguau

SEQ ID NO: 344122 - RNA, 22 nt, Human
ucacuguugaccuggaaguggg

SEQ ID NO: 344123 - RNA, 22 nt, Human
uucuucucggcugucagauagu

SEQ ID NO: 344124 - RNA, 23 nt, Human
uggcaaggaaugggauggagacu

SEQ ID NO: 344125 - RNA, 22 nt, Human
ucuuccucuagaucugaggccc

SEQ ID NO: 344126 - RNA, 22 nt, Human
guugaaagaugucuugguuccc

SEQ ID NO: 344127 - RNA, 18 nt, Human
ggcagcuugacuagcaac

SEQ ID NO: 344128 - RNA, 22 nt, Human
aucuagcaguguuauaauugga

SEQ ID NO: 344129 - RNA, 22 nt, Human
ggagaggaaaugccagcacuuc

SEQ ID NO: 344130 - RNA, 22 nt, Human
cccaggagaccugugaaaggac

SEQ ID NO: 344131 - RNA, 22 nt, Human
agaguucugcucuucucaguga

SEQ ID NO: 344132 - RNA, 22 nt, Human
uggaaggagacugggaagugug

SEQ ID NO: 344133 - RNA, 22 nt, Human
aagaauacguaucaacaauggu

SEQ ID NO: 344134 - RNA, 22 nt, Human
aggaagcucaaagccaugaugu

SEQ ID NO: 344135 - RNA, 22 nt, Human
ccaggcugugguuuagauagag

SEQ ID NO: 344136 - RNA, 23 nt, Human
auuucuaggggauuuucuggugc

SEQ ID NO: 344137 - RNA, 22 nt, Human
auuuuacuuugugaauauugac

SEQ ID NO: 344138 - RNA, 22 nt, Human
ggcagcuucuuaauauggagac

SEQ ID NO: 344139 - RNA, 22 nt, Human
uuucagaaagcugaacauauga

SEQ ID NO: 344140 - RNA, 22 nt, Human
ucuccucucuuaccugguacaa

SEQ ID NO: 344141 - RNA, 19 nt, Human
agacagagcucaguggguu

SEQ ID NO: 344142 - RNA, 20 nt, Human
ucauuguguugccaauuccc

SEQ ID NO: 344143 - RNA, 22 nt, Human
cuugaacucaaugugaggaaga

SEQ ID NO: 344144 - RNA, 22 nt, Human
gagaggagguggcuaugacagc

SEQ ID NO: 344145 - RNA, 22 nt, Human
agucuuuccugcuugacuguuc

SEQ ID NO: 344146 - RNA, 22 nt, Human
uuugcaguagacaucuuauuuu

SEQ ID NO: 344147 - RNA, 22 nt, Human
agaggcagccguauuucaaagg

SEQ ID NO: 344148 - RNA, 22 nt, Human
aucaggauguuuggcugucaua

SEQ ID NO: 344149 - RNA, 22 nt, Human
cccaggaaaucaggcuuucuag

SEQ ID NO: 344150 - RNA, 22 nt, Human
caaggccaguccauuuuggaag

SEQ ID NO: 344151 - RNA, 22 nt, Human
ugaaaugaaacagaacauauca

SEQ ID NO: 344152 - RNA, 22 nt, Human
guggaaugaauagauuugcauu

SEQ ID NO: 344153 - RNA, 22 nt, Human
gagggucccugcucagggccag

SEQ ID NO: 344154 - RNA, 22 nt, Human
uuugaaagaauuuauguacuuu

SEQ ID NO: 344155 - RNA, 22 nt, Human
uucucugagauagacuaagugg

SEQ ID NO: 344156 - RNA, 22 nt, Human
caaaucuauauguugauauucu

SEQ ID NO: 344157 - RNA, 22 nt, Human
gcccaggaguucaagucuagug

SEQ ID NO: 344158 - RNA, 21 nt, Human
cacucaggguaugugccaggc

SEQ ID NO: 344159 - RNA, 20 nt, Human
ucacaucuggcagcugauga

SEQ ID NO: 344160 - RNA, 23 nt, Human
uagggcagcugggagggacaugc

SEQ ID NO: 344161 - RNA, 22 nt, Human
ccuuaaauucuccauuugaaag

SEQ ID NO: 344162 - RNA, 22 nt, Human
ggcagcucugcuccacaugagu

SEQ ID NO: 344163 - RNA, 22 nt, Human
cuaauacacccuauugcuuguu

SEQ ID NO: 344164 - RNA, 23 nt, Human
gaggcagcuccugcagugcccug

SEQ ID NO: 344165 - RNA, 19 nt, Human
aguggcagaucuggaagua

SEQ ID NO: 344166 - RNA, 22 nt, Human
cggagccugcuuguugcagcug

SEQ ID NO: 344167 - RNA, 22 nt, Human
uuuguagaggguaauugacaga

SEQ ID NO: 344168 - RNA, 22 nt, Human
uagcuagaaugcuucgugauau

SEQ ID NO: 344169 - RNA, 22 nt, Human
ugguaauuaauuugauagguuc

SEQ ID NO: 344170 - RNA, 22 nt, Human
acuuggcaaguaucuauaaagu

SEQ ID NO: 344171 - RNA, 22 nt, Human
ugacaaaacugcaauuacuuuu

SEQ ID NO: 344172 - RNA, 22 nt, Human
agcuagaaguacagccauauga

SEQ ID NO: 344173 - RNA, 17 nt, Human
uuuagaauacaauguuu

SEQ ID NO: 344174 - RNA, 20 nt, Human
cccaggagugagcagcuuua

SEQ ID NO: 344175 - RNA, 22 nt, Human
uuuuccuucuagagcagauuuc

SEQ ID NO: 344176 - RNA, 22 nt, Human
uaagcugugggagauuggcaua

SEQ ID NO: 344177 - RNA, 20 nt, Human
uaggcagcuugacccuuggu

SEQ ID NO: 344178 - RNA, 22 nt, Human
gcuugaaaauucauagguauuu

SEQ ID NO: 344179 - RNA, 22 nt, Human
aucacauucuuucaaagcaguc

SEQ ID NO: 344180 - RNA, 22 nt, Human
uuaacaugucuugacuucaucu

SEQ ID NO: 344181 - RNA, 23 nt, Human
ucagagagcuguugagagcugcc

SEQ ID NO: 344182 - RNA, 22 nt, Human
auuucaaggcuauuaauauaaa

SEQ ID NO: 344183 - RNA, 22 nt, Human
aaacugcugguugcuggccagc

SEQ ID NO: 344184 - RNA, 22 nt, Human
uccaggagguaugaguggcccc

SEQ ID NO: 344185 - RNA, 22 nt, Human
caggcagaguuagagcaacugg

SEQ ID NO: 344186 - RNA, 22 nt, Human
gauuucuuugcaagcuguguuc

SEQ ID NO: 344187 - RNA, 19 nt, Human
ugccuggacaaaugugggg

SEQ ID NO: 344188 - RNA, 22 nt, Human
uuucuaggcacagugucuuccc

SEQ ID NO: 344189 - RNA, 22 nt, Human
gauggcaggugauagccgaguc

SEQ ID NO: 344190 - RNA, 22 nt, Human
uguaugaaaaggaauagauuga

SEQ ID NO: 344191 - RNA, 22 nt, Human
cauuuguuggucagauuguagu

SEQ ID NO: 344192 - RNA, 22 nt, Human
uguaugaaguuacugagccucu

SEQ ID NO: 344193 - RNA, 21 nt, Human
cccaggaggagcuccggcucc

SEQ ID NO: 344194 - RNA, 22 nt, Human
aagcaauagcaacaacuuuaca

SEQ ID NO: 344195 - RNA, 22 nt, Human
cccaggagguggagguugcagc

SEQ ID NO: 344196 - RNA, 22 nt, Human
aggguccugggugcaguugcuu

SEQ ID NO: 344197 - RNA, 22 nt, Human
cugccaggcagcagagggagaa

SEQ ID NO: 344198 - RNA, 22 nt, Human
aaggagaaaugguagaugugca

SEQ ID NO: 344199 - RNA, 22 nt, Human
ccaggagcagauauggacauaa

SEQ ID NO: 344200 - RNA, 22 nt, Human
uuuccucacuucaugagaguuu

SEQ ID NO: 344201 - RNA, 22 nt, Human
aaauguauugcauaggauauuu

SEQ ID NO: 344202 - RNA, 19 nt, Human
ugaggggaggagaggccug

SEQ ID NO: 344203 - RNA, 22 nt, Human
aaggcagccgugugacugcaug

SEQ ID NO: 344204 - RNA, 19 nt, Human
caagugaagccugggaugg

SEQ ID NO: 344205 - RNA, 22 nt, Human
cauugcuuccuaugucccuucu

SEQ ID NO: 344206 - RNA, 22 nt, Human
uccaggagguugagacugcagu

SEQ ID NO: 344207 - RNA, 21 nt, Human
uuugaaagcccuauguuuuca

SEQ ID NO: 344208 - RNA, 22 nt, Human
aaaguuugagugauuugacaca

SEQ ID NO: 344209 - RNA, 20 nt, Human
aagcacauuucuacaauaau

SEQ ID NO: 344210 - RNA, 22 nt, Human
gggagacacgcugcaggcauaa

SEQ ID NO: 344211 - RNA, 22 nt, Human
aggaaacuccccuacaucucaa

SEQ ID NO: 344212 - RNA, 19 nt, Human
agucuuucccacucgucuu

SEQ ID NO: 344213 - RNA, 22 nt, Human
auuucacucauucauguuacuu

SEQ ID NO: 344214 - RNA, 22 nt, Human
ggaggaggggugacugaaugcu

SEQ ID NO: 344215 - RNA, 22 nt, Human
aggguagggcccggagacagac

SEQ ID NO: 344216 - RNA, 21 nt, Human
uucuccccagcgaauccucgg

SEQ ID NO: 344217 - RNA, 22 nt, Human
ccugcugugaccggggagcagg

SEQ ID NO: 344218 - RNA, 22 nt, Human
gaacacauguccuccuuggauu

SEQ ID NO: 344219 - RNA, 17 nt, Human
gaggagcuccaguaggu

SEQ ID NO: 344220 - RNA, 22 nt, Human
ggcagcuuucucacccaugacc

SEQ ID NO: 344221 - RNA, 22 nt, Human
cccaggcagugugugcaugcgu

SEQ ID NO: 344222 - RNA, 21 nt, Human
uagggcaggcauuggaagaga

SEQ ID NO: 344223 - RNA, 22 nt, Human
uagugcuuuaaguuuacagaga

SEQ ID NO: 344224 - RNA, 22 nt, Human
ggccagcuuugagcugcaggaa

SEQ ID NO: 344225 - RNA, 22 nt, Human
ugaaggccucugguacaugcca

SEQ ID NO: 344226 - RNA, 22 nt, Human
auuuugaugcuaucuaaugaau

SEQ ID NO: 344227 - RNA, 22 nt, Human
cugcugugaguuuggaggucua

SEQ ID NO: 344228 - RNA, 22 nt, Human
gaggcagcugaaggagugacag

SEQ ID NO: 344229 - RNA, 22 nt, Human
uagggcaggugaagaaaagcua

SEQ ID NO: 344230 - RNA, 22 nt, Human
agcccaggaaguugaggcuugc

SEQ ID NO: 344231 - RNA, 22 nt, Human
gaaggccacuuuguguugagaa

SEQ ID NO: 344232 - RNA, 22 nt, Human
uugcaucuagggcaacccagag

SEQ ID NO: 344233 - RNA, 22 nt, Human
gaaguacaguuuuaucuagcca

SEQ ID NO: 344234 - RNA, 21 nt, Human
gagugcagcaagguagagucu

SEQ ID NO: 344235 - RNA, 22 nt, Human
caggauggucucgaucuccuga

SEQ ID NO: 344236 - RNA, 22 nt, Human
uuugcaaagaaauuauugcugu

SEQ ID NO: 344237 - RNA, 22 nt, Human
uccucagaaaccccugugaggu

SEQ ID NO: 344238 - RNA, 22 nt, Human
acagugcuaaacacuucuugaa

SEQ ID NO: 344239 - RNA, 22 nt, Human
ucccaggacaggccacauggaa

SEQ ID NO: 344240 - RNA, 22 nt, Human
ucuacuauguuucuuaaauaga

SEQ ID NO: 344241 - RNA, 22 nt, Human
ucauuauccuaguaucuugaau

SEQ ID NO: 344242 - RNA, 22 nt, Human
gaagcagcuuucuggugaggag

SEQ ID NO: 344243 - RNA, 22 nt, Human
aggaagcugccugggaugggaa

SEQ ID NO: 344244 - RNA, 22 nt, Human
aaagcagaacugagagagcugg

SEQ ID NO: 344245 - RNA, 22 nt, Human
uggcaaggcugugggggcagag

SEQ ID NO: 344246 - RNA, 22 nt, Human
aauucugugcaggcagagcuau

SEQ ID NO: 344247 - RNA, 18 nt, Human
gcagcugacacuggaguu

SEQ ID NO: 344248 - RNA, 22 nt, Human
acagauauaaacuauaguagug

SEQ ID NO: 344249 - RNA, 22 nt, Human
gaaaggcaguacagcugagccu

SEQ ID NO: 344250 - RNA, 22 nt, Human
aagcagaguccccuucccaugg

SEQ ID NO: 344251 - RNA, 19 nt, Human
cauuuuaagcauccccagu

SEQ ID NO: 344252 - RNA, 20 nt, Human
caucaucacaugagccaauu

SEQ ID NO: 344253 - RNA, 22 nt, Human
auaugagaguaaaugccgaucu

SEQ ID NO: 344254 - RNA, 21 nt, Human
gggugggaggacacagcaggc

SEQ ID NO: 344255 - RNA, 22 nt, Human
uucaggauaguggugaguggca

SEQ ID NO: 344256 - RNA, 22 nt, Human
aauaucuucuaaggauagaacu

SEQ ID NO: 344257 - RNA, 22 nt, Human
auacuaaaguauagaacuuagu

SEQ ID NO: 344258 - RNA, 22 nt, Human
uguaggaaaaacaaugaucugc

SEQ ID NO: 344259 - RNA, 22 nt, Human
aaacacagauuucuuuguccca

SEQ ID NO: 344260 - RNA, 22 nt, Human
cagagggcucuuggcugccugc

SEQ ID NO: 344261 - RNA, 22 nt, Human
guggcagcaaaugccuggacua

SEQ ID NO: 344262 - RNA, 22 nt, Human
cagcucccgccaucgggaggca

SEQ ID NO: 344263 - RNA, 22 nt, Human
aggcaguuuauccccagagccu

SEQ ID NO: 344264 - RNA, 22 nt, Human
gcucccagcaauugaggcagcc

SEQ ID NO: 344265 - RNA, 23 nt, Human
aaggccagaauuucaauggugcc

SEQ ID NO: 344266 - RNA, 22 nt, Human
agaggcagcagucauacuacag

SEQ ID NO: 344267 - RNA, 22 nt, Human
cugacccauauaagaguggagg

SEQ ID NO: 344268 - RNA, 22 nt, Human
aggaggggcaaugauagucugg

SEQ ID NO: 344269 - RNA, 22 nt, Human
uuugaaaguccuaggagagucc

SEQ ID NO: 344270 - RNA, 22 nt, Human
gaaacugugaucguguucuggg

SEQ ID NO: 344271 - RNA, 21 nt, Human
aaugaaguggcuauuuugagg

SEQ ID NO: 344272 - RNA, 22 nt, Human
uuuguuuacucauucauugaug

SEQ ID NO: 344273 - RNA, 22 nt, Human
gcauuuccugugcuuggcauau

SEQ ID NO: 344274 - RNA, 22 nt, Human
ggcagcaucucuggcagcagcu

SEQ ID NO: 344275 - RNA, 22 nt, Human
ccagaggaggggggucuuucug

SEQ ID NO: 344276 - RNA, 22 nt, Human
ugcauggacucaucagacaaga

SEQ ID NO: 344277 - RNA, 22 nt, Human
aagggaggaggauuuauuguac

SEQ ID NO: 344278 - RNA, 22 nt, Human
cugcuguguuucugcuagaaaa

SEQ ID NO: 344279 - RNA, 22 nt, Human
gauggcagguaguggucucauc

SEQ ID NO: 344280 - RNA, 22 nt, Human
guugaaugaaucauucuaugua

SEQ ID NO: 344281 - RNA, 22 nt, Human
gcagaggauagcauaugaaccu

SEQ ID NO: 344282 - RNA, 22 nt, Human
gaaggaggugucaguuggacug

SEQ ID NO: 344283 - RNA, 22 nt, Human
uguguucuggaaagcucacuga

SEQ ID NO: 344284 - RNA, 22 nt, Human
uuguaugagcuccaggaacuca

SEQ ID NO: 344285 - RNA, 22 nt, Human
gcccaggaugguguguaguggu

SEQ ID NO: 344286 - RNA, 22 nt, Human
uguacauagaucuugaaaauua

SEQ ID NO: 344287 - RNA, 22 nt, Human
caucucaugggcaugccaagcu

SEQ ID NO: 344288 - RNA, 15 nt, Human
uggcagcuuguuaag

SEQ ID NO: 344289 - RNA, 22 nt, Human
gaacccaggcuuuugaggcugu

SEQ ID NO: 344290 - RNA, 22 nt, Human
cucugcauuuuaacagaugauu

SEQ ID NO: 344291 - RNA, 22 nt, Human
ucaggagaaaauaucaggaagu

SEQ ID NO: 344292 - RNA, 22 nt, Human
uagaaauaaaucugcagcuggg

SEQ ID NO: 344293 - RNA, 22 nt, Human
acucagaaugacugaugcugug

SEQ ID NO: 344294 - RNA, 22 nt, Human
uccaggagagguguggggacug

SEQ ID NO: 344295 - RNA, 22 nt, Human
cuugcugugugguguucucaga

SEQ ID NO: 344296 - RNA, 22 nt, Human
uacaaaugaguuguaugaacca

SEQ ID NO: 344297 - RNA, 22 nt, Human
cccaggagaauauuuuuggguc

SEQ ID NO: 344298 - RNA, 22 nt, Human
ucuucagagugaaagucuguga

SEQ ID NO: 344299 - RNA, 22 nt, Human
guuaacacaggacucucugccu

SEQ ID NO: 344300 - RNA, 22 nt, Human
uuuagaaguucacacauuuaaa

SEQ ID NO: 344301 - RNA, 22 nt, Human
ucuuccaagguugcacacuauc

SEQ ID NO: 344302 - RNA, 22 nt, Human
uuugaaaggaauuaggaugaca

SEQ ID NO: 344303 - RNA, 22 nt, Human
cugcugugcaacauugcaccua

SEQ ID NO: 344304 - RNA, 20 nt, Human
aguguacagacacuagaaau

SEQ ID NO: 344305 - RNA, 22 nt, Human
caaugaaaauuuaaguugcagc

SEQ ID NO: 344306 - RNA, 22 nt, Human
ggaggggucucuagcgaggaga

SEQ ID NO: 344307 - RNA, 22 nt, Human
cccaggaaaugggcucuugccu

SEQ ID NO: 344308 - RNA, 22 nt, Human
uggcagcugucuguggggucuc

SEQ ID NO: 344309 - RNA, 22 nt, Human
guguaugaacgaaagaauggau

SEQ ID NO: 344310 - RNA, 22 nt, Human
acacauuucuaaauuuuuaccg

SEQ ID NO: 344311 - RNA, 20 nt, Human
ucucagcauaagaacccuuc

SEQ ID NO: 344312 - RNA, 22 nt, Human
ugaaaugaagggcuuguucugg

SEQ ID NO: 344313 - RNA, 22 nt, Human
uaucuguuccaggcacucagcu

SEQ ID NO: 344314 - RNA, 22 nt, Human
uucauugucucuguuugccuuc

SEQ ID NO: 344315 - RNA, 23 nt, Human
uuucaaauuacucugcagaugac

SEQ ID NO: 344316 - RNA, 21 nt, Human
aucacauuggcuguuauuauu

SEQ ID NO: 344317 - RNA, 22 nt, Human
uuuccaagacuccaguucuccc

SEQ ID NO: 344318 - RNA, 21 nt, Human
auaagcaugcugauuacauuu

SEQ ID NO: 344319 - RNA, 22 nt, Human
guuuucaaggggauuuaacuga

SEQ ID NO: 344320 - RNA, 22 nt, Human
caggaugaagggcaaaggcaag

SEQ ID NO: 344321 - RNA, 22 nt, Human
uuguuugaggucacugauauuu

SEQ ID NO: 344322 - RNA, 22 nt, Human
gcucucuugguggcuguccugg

SEQ ID NO: 344323 - RNA, 22 nt, Human
ugauugaacugagcuucaagau

SEQ ID NO: 344324 - RNA, 22 nt, Human
ucacugucugaaagaaauggcc

SEQ ID NO: 344325 - RNA, 22 nt, Human
guuaugaaauaaauauagauca

SEQ ID NO: 344326 - RNA, 22 nt, Human
gaauagcuuccuuuuuuccaaa

SEQ ID NO: 344327 - RNA, 22 nt, Human
ugaaggccagcagagugaaggc

SEQ ID NO: 344328 - RNA, 22 nt, Human
cugcugugcaggugccuaugau

SEQ ID NO: 344329 - RNA, 22 nt, Human
gcccaggaguugaaugcagcag

SEQ ID NO: 344330 - RNA, 22 nt, Human
uggcagcuacagacagagguga

SEQ ID NO: 344331 - RNA, 22 nt, Human
ugucucugggugauucaguccu

SEQ ID NO: 344332 - RNA, 22 nt, Human
aucuuucuccauauacaucuuu

SEQ ID NO: 344333 - RNA, 22 nt, Human
ggguacuuaauauuuacggggu

SEQ ID NO: 344334 - RNA, 22 nt, Human
aauuuccagaccccauccacag

SEQ ID NO: 344335 - RNA, 22 nt, Human
acaaauguggacauggauaaug

SEQ ID NO: 344336 - RNA, 22 nt, Human
aggcaguuucugggacagcaua

SEQ ID NO: 344337 - RNA, 20 nt, Human
ggaggguggaagaaagcaag

SEQ ID NO: 344338 - RNA, 22 nt, Human
aguggacucuucccagugcuug

SEQ ID NO: 344339 - RNA, 22 nt, Human
aggcagaucacuugaggccagg

SEQ ID NO: 344340 - RNA, 22 nt, Human
gacuucuauuaauaccucuacu

SEQ ID NO: 344341 - RNA, 22 nt, Human
augcuguguggucaaguuaauu

SEQ ID NO: 344342 - RNA, 22 nt, Human
uuuauuguuaucaugggugagu

SEQ ID NO: 344343 - RNA, 22 nt, Human
gccaggagcccugggcaaguuc

SEQ ID NO: 344344 - RNA, 22 nt, Human
uuucagcugguaaaggaguagc

SEQ ID NO: 344345 - RNA, 18 nt, Human
acaaaugugucacaggaa

SEQ ID NO: 344346 - RNA, 22 nt, Human
cccaugagguggagguugcagu

SEQ ID NO: 344347 - RNA, 23 nt, Human
uugcacauuggagcuggucuucu

SEQ ID NO: 344348 - RNA, 22 nt, Human
ccaaaugugccuguuucaacaa

SEQ ID NO: 344349 - RNA, 22 nt, Human
ucucuguacaguacaugccgug

SEQ ID NO: 344350 - RNA, 22 nt, Human
cagaggcacaagaaagcaaggc

SEQ ID NO: 344351 - RNA, 22 nt, Human
gaggagcugggcugagaggguc

SEQ ID NO: 344352 - RNA, 22 nt, Human
gaggaaccaaaucagcuugcac

SEQ ID NO: 344353 - RNA, 22 nt, Human
cuuagcaugugguguccuugua

SEQ ID NO: 344354 - RNA, 22 nt, Human
agcugcuacugcucugccagag

SEQ ID NO: 344355 - RNA, 22 nt, Human
ugaggcagcauucuucaagaca

SEQ ID NO: 344356 - RNA, 22 nt, Human
agcccaggucucaaaguacagg

SEQ ID NO: 344357 - RNA, 22 nt, Human
cucacugugccuuuucccaaac

SEQ ID NO: 344358 - RNA, 22 nt, Human
accaggagggacccugguggcc

SEQ ID NO: 344359 - RNA, 17 nt, Human
ccaggagagaugcuugu

SEQ ID NO: 344360 - RNA, 22 nt, Human
gucugucauacggcuuauguaa

SEQ ID NO: 344361 - RNA, 22 nt, Human
uccaggagugcugguuagagua

SEQ ID NO: 344362 - RNA, 22 nt, Human
uaauuauuugaagacauuagag

SEQ ID NO: 344363 - RNA, 22 nt, Human
uugagaagaauguguugaguuu

SEQ ID NO: 344364 - RNA, 22 nt, Human
uucaggauggaguaccuuuuau

SEQ ID NO: 344365 - RNA, 22 nt, Human
aagggagguaaagcuauuuaaa

SEQ ID NO: 344366 - RNA, 22 nt, Human
cucucuguuaugcuuucaugaa

SEQ ID NO: 344367 - RNA, 22 nt, Human
gaugccucuuuuggcugaauua

SEQ ID NO: 344368 - RNA, 22 nt, Human
cuguucucuggcgguggcuguu

SEQ ID NO: 344369 - RNA, 22 nt, Human
aguaugaaaguuaaucaauuua

SEQ ID NO: 344370 - RNA, 22 nt, Human
aggccagcgcugcuagcucccg

SEQ ID NO: 344371 - RNA, 22 nt, Human
augcuguggaaguuccugaagc

SEQ ID NO: 344372 - RNA, 22 nt, Human
ugccuggauucgguuguuguca

SEQ ID NO: 344373 - RNA, 22 nt, Human
ucaggaugagcucauaacuaug

SEQ ID NO: 344374 - RNA, 22 nt, Human
cucccagggucuaggcugcugg

SEQ ID NO: 344375 - RNA, 19 nt, Human
aaagcagaggagcaucuga

SEQ ID NO: 344376 - RNA, 22 nt, Human
uuuacuuuugguaaggucauuu

SEQ ID NO: 344377 - RNA, 22 nt, Human
acccaggaggcagagguugcag

SEQ ID NO: 344378 - RNA, 22 nt, Human
aauggccagcugggagaguuga

SEQ ID NO: 344379 - RNA, 23 nt, Human
aaaguuugaagcaacaguaguug

SEQ ID NO: 344380 - RNA, 22 nt, Human
cagcuuccgaccgggggcugca

SEQ ID NO: 344381 - RNA, 22 nt, Human
acauauauuacuaguaaagaca

SEQ ID NO: 344382 - RNA, 22 nt, Human
ggcagaggaaggaugaauucac

SEQ ID NO: 344383 - RNA, 22 nt, Human
ugcuuggcuuucugagcuucug

SEQ ID NO: 344384 - RNA, 22 nt, Human
cagcaggauuugaaaggaagag

SEQ ID NO: 344385 - RNA, 22 nt, Human
agggggugucucugauuggguu

SEQ ID NO: 344386 - RNA, 22 nt, Human
uaggcagcuuagguuagaagug

SEQ ID NO: 344387 - RNA, 22 nt, Human
uucacagacauugcagacugaa

SEQ ID NO: 344388 - RNA, 22 nt, Human
uaugaccuuaggaagcaagaag

SEQ ID NO: 344389 - RNA, 22 nt, Human
ccauccuaucugaccuacuugu

SEQ ID NO: 344390 - RNA, 22 nt, Human
aggccagcaagaaagagagucu

SEQ ID NO: 344391 - RNA, 22 nt, Human
gaagcacauggcuauagcuauu

SEQ ID NO: 344392 - RNA, 22 nt, Human
uucuucaaugugcccuguuuuc

SEQ ID NO: 344393 - RNA, 22 nt, Human
uucucagaugauucagauaaac

SEQ ID NO: 344394 - RNA, 22 nt, Human
gaggccagggaugcaaugagag

SEQ ID NO: 344395 - RNA, 22 nt, Human
ucauuucuauugcuacugucug

SEQ ID NO: 344396 - RNA, 22 nt, Human
cugagagugcucuuugauguca

SEQ ID NO: 344397 - RNA, 22 nt, Human
aaguggacuaauacaaggacua

SEQ ID NO: 344398 - RNA, 22 nt, Human
auaagcauguuagaauauuuga

SEQ ID NO: 344399 - RNA, 22 nt, Human
ucugugcauuguaacaacuaaa

SEQ ID NO: 344400 - RNA, 22 nt, Human
uuccaagagcuuuaauuguuga

SEQ ID NO: 344401 - RNA, 21 nt, Human
aauguauguuuaucucacagu

SEQ ID NO: 344402 - RNA, 22 nt, Human
ggacagcugcuuucaggccaca

SEQ ID NO: 344403 - RNA, 20 nt, Human
ucucuucuggggagauaaaa

SEQ ID NO: 344404 - RNA, 22 nt, Human
auucugauaucuuauucuagcu

SEQ ID NO: 344405 - RNA, 22 nt, Human
ucuuagcauuucauaacaacug

SEQ ID NO: 344406 - RNA, 22 nt, Human
aggcagcagucaugaggaaaga

SEQ ID NO: 344407 - RNA, 22 nt, Human
cagcuuccauaagagauggaga

SEQ ID NO: 344408 - RNA, 22 nt, Human
uuguuuuaucuuucuacagacu

SEQ ID NO: 344409 - RNA, 22 nt, Human
uuugaaaggaaguuaauacuuu

SEQ ID NO: 344410 - RNA, 22 nt, Human
cugcugugugcuuacuuggguu

SEQ ID NO: 344411 - RNA, 22 nt, Human
uucccucuccuacucaggaaag

SEQ ID NO: 344412 - RNA, 22 nt, Human
ucccaggaaaacacucgaggac

SEQ ID NO: 344413 - RNA, 22 nt, Human
gucaggauuggggucaugaguc

SEQ ID NO: 344414 - RNA, 22 nt, Human
ugcauauuguccuugauauuau

SEQ ID NO: 344415 - RNA, 23 nt, Human
aaacugcuuccaauuccugccau

SEQ ID NO: 344416 - RNA, 22 nt, Human
aauuuguuaaaagugagugaca

SEQ ID NO: 344417 - RNA, 22 nt, Human
ccucaggauacaggagccacag

SEQ ID NO: 344418 - RNA, 22 nt, Human
aaggccagaguacuagaggcug

SEQ ID NO: 344419 - RNA, 18 nt, Human
agggaguuuuagggaagg

SEQ ID NO: 344420 - RNA, 22 nt, Human
gacagugcauuuccuggcaugg

SEQ ID NO: 344421 - RNA, 22 nt, Human
agaaaugacaagacugaucagg

SEQ ID NO: 344422 - RNA, 22 nt, Human
aaaguuaguuucuuauaugucu

SEQ ID NO: 344423 - RNA, 22 nt, Human
gacccaggcccaaggcugccag

SEQ ID NO: 344424 - RNA, 22 nt, Human
auaguuugaaggcuguucuacu

SEQ ID NO: 344425 - RNA, 19 nt, Human
cuuugucagaacaugcuuc

SEQ ID NO: 344426 - RNA, 17 nt, Human
ggcagcugugugcaugc

SEQ ID NO: 344427 - RNA, 22 nt, Human
uugaaaguagcagcugcauaug

SEQ ID NO: 344428 - RNA, 21 nt, Human
aucauucuggaaaauucaagc

SEQ ID NO: 344429 - RNA, 22 nt, Human
cugcuuugacuguuaagaacca

SEQ ID NO: 344430 - RNA, 19 nt, Human
uaaggccaaaaguaagugu

SEQ ID NO: 344431 - RNA, 22 nt, Human
ucuucagacccuuagcugugau

SEQ ID NO: 344432 - RNA, 22 nt, Human
gaaguucuuagucucauuugca

SEQ ID NO: 344433 - RNA, 20 nt, Human
agagcagcaguuggugaggu

SEQ ID NO: 344434 - RNA, 22 nt, Human
uucacacacagcuuccuauugu

SEQ ID NO: 344435 - RNA, 22 nt, Human
cagggagggaggaaaauuugcu

SEQ ID NO: 344436 - RNA, 22 nt, Human
acuggcagagacccugauggcc

SEQ ID NO: 344437 - RNA, 22 nt, Human
ugaaagcagcaccaauaccauu

SEQ ID NO: 344438 - RNA, 22 nt, Human
caagauggagaagcagcaaggg

SEQ ID NO: 344439 - RNA, 22 nt, Human
ugaaaugagauagauaaucagg

SEQ ID NO: 344440 - RNA, 22 nt, Human
cuuugaagagauuacugugcuc

SEQ ID NO: 344441 - RNA, 22 nt, Human
uugugguuaaccgcacauuuuu

SEQ ID NO: 344442 - RNA, 22 nt, Human
uuuguuaaauauuuauugagug

SEQ ID NO: 344443 - RNA, 20 nt, Human
augauuuugcacuaacuuca

SEQ ID NO: 344444 - RNA, 22 nt, Human
ucugaacuccagcccugcucuc

SEQ ID NO: 344445 - RNA, 22 nt, Human
gaccuggaggauccucuucuug

SEQ ID NO: 344446 - RNA, 22 nt, Human
cagaguucaaagccugcuggga

SEQ ID NO: 344447 - RNA, 22 nt, Human
cugcugugccuuaaaaugcaag

SEQ ID NO: 344448 - RNA, 19 nt, Human
agauggcaaaaugcaaaga

SEQ ID NO: 344449 - RNA, 22 nt, Human
aggagggaccuaggaauauugc

SEQ ID NO: 344450 - RNA, 19 nt, Human
ugaaauggcaguugcuaaa

SEQ ID NO: 344451 - RNA, 22 nt, Human
ucuuugaauccuuuacaucuga

SEQ ID NO: 344452 - RNA, 22 nt, Human
cuggaggcacccuuagagaggc

SEQ ID NO: 344453 - RNA, 22 nt, Human
ucugggaacagccuggcugugu

SEQ ID NO: 344454 - RNA, 22 nt, Human
ggcuuggaaauugcaggacaca

SEQ ID NO: 344455 - RNA, 22 nt, Human
ugcauaaagugccauaguauua

SEQ ID NO: 344456 - RNA, 22 nt, Human
uucucuuugacauuauucaggu

SEQ ID NO: 344457 - RNA, 22 nt, Human
augugaaacugaagcauccaua

SEQ ID NO: 344458 - RNA, 22 nt, Human
aaagauuauggcauugaaauac

SEQ ID NO: 344459 - RNA, 22 nt, Human
uauaauguuuuccauggacuga

SEQ ID NO: 344460 - RNA, 22 nt, Human
caggaugagaagggcucuuacg

SEQ ID NO: 344461 - RNA, 22 nt, Human
cugcugugcagacagacucucu

SEQ ID NO: 344462 - RNA, 22 nt, Human
cucaggaaaggccaugcaaggg

SEQ ID NO: 344463 - RNA, 21 nt, Human
gggcagcucuguuuuauuuuc

SEQ ID NO: 344464 - RNA, 22 nt, Human
auacacauauguguguauaugu

SEQ ID NO: 344465 - RNA, 22 nt, Human
auauacuuggagacuaucauug

SEQ ID NO: 344466 - RNA, 22 nt, Human
uuagaaagaacuuuagauauca

SEQ ID NO: 344467 - RNA, 22 nt, Human
cuugaaagucagcagaguggau

SEQ ID NO: 344468 - RNA, 17 nt, Human
uccaggagaggcaaugg

SEQ ID NO: 344469 - RNA, 22 nt, Human
uuagacauagaauauugucuag

SEQ ID NO: 344470 - RNA, 22 nt, Human
gcagcugagagaagaacagggc

SEQ ID NO: 344471 - RNA, 22 nt, Human
acaagcaugggcuuugacauca

SEQ ID NO: 344472 - RNA, 22 nt, Human
ugaugaaauguugaggcaguga

SEQ ID NO: 344473 - RNA, 22 nt, Human
aggcagcuggaaaacuccaggc

SEQ ID NO: 344474 - RNA, 22 nt, Human
caacugugaauuuuaugauacc

SEQ ID NO: 344475 - RNA, 22 nt, Human
cccaggaguaagugacauuguu

SEQ ID NO: 344476 - RNA, 22 nt, Human
uuccucagcuggccugauuggg

SEQ ID NO: 344477 - RNA, 22 nt, Human
cacucaggguacaauggagggc

SEQ ID NO: 344478 - RNA, 22 nt, Human
agaauaugaugguuggagaauu

SEQ ID NO: 344479 - RNA, 22 nt, Human
uucagaaguagcuaagcaguca

SEQ ID NO: 344480 - RNA, 22 nt, Human
aaaggugacacucugccagcug

SEQ ID NO: 344481 - RNA, 22 nt, Human
uggaguucauccaugacagcuu

SEQ ID NO: 344482 - RNA, 22 nt, Human
aauacugccugugagguaacuc

SEQ ID NO: 344483 - RNA, 20 nt, Human
cugcccagccacugagggau

SEQ ID NO: 344484 - RNA, 22 nt, Human
ugaaaugaaugugauucgauag

SEQ ID NO: 344485 - RNA, 22 nt, Human
cccaggaauuggaggcugcagu

SEQ ID NO: 344486 - RNA, 21 nt, Human
augucaaaugcuuuauuuuau

SEQ ID NO: 344487 - RNA, 22 nt, Human
aaugucugcucuacucaggagg

SEQ ID NO: 344488 - RNA, 22 nt, Human
cccuugcacauuugucuuuaau

SEQ ID NO: 344489 - RNA, 22 nt, Human
cuucagaauccagaaucagaau

SEQ ID NO: 344490 - RNA, 22 nt, Human
gaggcagcuggguccggucggg

SEQ ID NO: 344491 - RNA, 22 nt, Human
gcugaaugaauguauuuuaaaa

SEQ ID NO: 344492 - RNA, 22 nt, Human
aggcagcugcccucuccuuccu

SEQ ID NO: 344493 - RNA, 22 nt, Human
aggagaggaaucauuauuacaa

SEQ ID NO: 344494 - RNA, 22 nt, Human
cccaggaaugggaaggaggaau

SEQ ID NO: 344495 - RNA, 22 nt, Human
uagcacaucuggcgcuuauagg

SEQ ID NO: 344496 - RNA, 22 nt, Human
gugguaauagagcuccaaacua

SEQ ID NO: 344497 - RNA, 22 nt, Human
gaggaggccaguggaaggaagc

SEQ ID NO: 344498 - RNA, 22 nt, Human
cucuucucugcagccuuugaag

SEQ ID NO: 344499 - RNA, 22 nt, Human
aaaguucuggcauuuucugucu

SEQ ID NO: 344500 - RNA, 22 nt, Human
ccagguaggagagagggauccu

SEQ ID NO: 344501 - RNA, 20 nt, Human
cugcuguguuauuguagaac

SEQ ID NO: 344502 - RNA, 22 nt, Human
agggagcugagcugugagcagc

SEQ ID NO: 344503 - RNA, 22 nt, Human
aaauacagaguugcuuaaaagc

SEQ ID NO: 344504 - RNA, 22 nt, Human
uugcauuuccuguacuguuuga

SEQ ID NO: 344505 - RNA, 22 nt, Human
uucugucaaagacuuuuucagg

SEQ ID NO: 344506 - RNA, 22 nt, Human
cagucuucuaaccuagcagccu

SEQ ID NO: 344507 - RNA, 22 nt, Human
uauaaaguuucgaaagauguau

SEQ ID NO: 344508 - RNA, 22 nt, Human
aggcagcguagcaaggcuagua

SEQ ID NO: 344509 - RNA, 22 nt, Human
cucuucuugucucugguuagaa

SEQ ID NO: 344510 - RNA, 22 nt, Human
gggcagcuggauaguuuuaaau

SEQ ID NO: 344511 - RNA, 17 nt, Human
gaggacagggaaguagg

SEQ ID NO: 344512 - RNA, 22 nt, Human
auauauuugagaauauucauga

SEQ ID NO: 344513 - RNA, 22 nt, Human
gucaaaaaguagucauuucugu

SEQ ID NO: 344514 - RNA, 22 nt, Human
aaauuauaggugccaccuugga

SEQ ID NO: 344515 - RNA, 22 nt, Human
agaggaugguugaggaagaccu

SEQ ID NO: 344516 - RNA, 22 nt, Human
ucccaggaugaagacaguguug

SEQ ID NO: 344517 - RNA, 22 nt, Human
ggcaggcugggugucauggagu

SEQ ID NO: 344518 - RNA, 22 nt, Human
ucugucccugagagcucaggag

SEQ ID NO: 344519 - RNA, 22 nt, Human
uaaaauagcaugugcagugaaa

SEQ ID NO: 344520 - RNA, 22 nt, Human
cucagaauuuagggcucugagg

SEQ ID NO: 344521 - RNA, 22 nt, Human
gugucccaggccucuggaauua

SEQ ID NO: 344522 - RNA, 22 nt, Human
cucugauuuccuuauucuguca

SEQ ID NO: 344523 - RNA, 22 nt, Human
auuuguagugaagugaaaauaa

SEQ ID NO: 344524 - RNA, 22 nt, Human
ccucagggaaugggaggcuggg

SEQ ID NO: 344525 - RNA, 22 nt, Human
cuugaaagucacaugcagcccu

SEQ ID NO: 344526 - RNA, 22 nt, Human
uuuugcuugagugcacaaaaug

SEQ ID NO: 344527 - RNA, 22 nt, Human
agggcagccauugagggauucu

SEQ ID NO: 344528 - RNA, 22 nt, Human
ucugcugucacucauuugcuuc

SEQ ID NO: 344529 - RNA, 22 nt, Human
ggacuucuaagugccagacacu

SEQ ID NO: 344530 - RNA, 22 nt, Human
caguucuuuguggggaguucuc

SEQ ID NO: 344531 - RNA, 22 nt, Human
auuugcuuucagguauaaaagg

SEQ ID NO: 344532 - RNA, 22 nt, Human
ugucccucugaggcuucccugg

SEQ ID NO: 344533 - RNA, 22 nt, Human
ggcagucuuaucagcauuggac

SEQ ID NO: 344534 - RNA, 22 nt, Human
agcugcccugggcuggagaugg

SEQ ID NO: 344535 - RNA, 19 nt, Human
gccaggagggcucuggcug

SEQ ID NO: 344536 - RNA, 22 nt, Human
ugcugcuguuuccuacaucuca

SEQ ID NO: 344537 - RNA, 22 nt, Human
cuugcugucuugcauuuagagc

SEQ ID NO: 344538 - RNA, 22 nt, Human
ugaguuuugucuugcuagaagu

SEQ ID NO: 344539 - RNA, 20 nt, Human
uucacagaggacucagguca

SEQ ID NO: 344540 - RNA, 20 nt, Human
cugcugugauucccuccucc

SEQ ID NO: 344541 - RNA, 22 nt, Human
uacagcauguccuuagcaaggc

SEQ ID NO: 344542 - RNA, 22 nt, Human
uuauuuaaugugaucugaagag

SEQ ID NO: 344543 - RNA, 22 nt, Human
ucuucuucccaucccucaaaug

SEQ ID NO: 344544 - RNA, 22 nt, Human
ucuucucuccugcuuggcagaa

SEQ ID NO: 344545 - RNA, 20 nt, Human
uucaggauucuagaccacac

SEQ ID NO: 344546 - RNA, 22 nt, Human
cuugggaaugcuaacagaugac

SEQ ID NO: 344547 - RNA, 22 nt, Human
ggcagcuucucccaggcuguuu

SEQ ID NO: 344548 - RNA, 22 nt, Human
augaguucaauuguuucaguca

SEQ ID NO: 344549 - RNA, 22 nt, Human
aucugucaagauagacucugca

SEQ ID NO: 344550 - RNA, 22 nt, Human
uucaggaugaaagugugcaaca

SEQ ID NO: 344551 - RNA, 22 nt, Human
aguuugaaauguuggcaauauu

SEQ ID NO: 344552 - RNA, 22 nt, Human
uuccaugacaccgagggaaguc

SEQ ID NO: 344553 - RNA, 22 nt, Human
ccacagagcauuagauuucaga

SEQ ID NO: 344554 - RNA, 22 nt, Human
uugugcucuguguuauuuaagg

SEQ ID NO: 344555 - RNA, 22 nt, Human
uagaauucaagauucaacaggc

SEQ ID NO: 344556 - RNA, 22 nt, Human
ggcaggcaaugaggaugggaag

SEQ ID NO: 344557 - RNA, 18 nt, Human
uuugcaaaggaaguaugg

SEQ ID NO: 344558 - RNA, 22 nt, Human
gaugagcauuguuucauguguu

SEQ ID NO: 344559 - RNA, 22 nt, Human
uccaggagauucauuaggucau

SEQ ID NO: 344560 - RNA, 22 nt, Human
ccagugcuaagguagccucugc

SEQ ID NO: 344561 - RNA, 22 nt, Human
ggugaagggccuuaggagacag

SEQ ID NO: 344562 - RNA, 22 nt, Human
gcccaggagccuggagaugugu

SEQ ID NO: 344563 - RNA, 21 nt, Human
ucacagacuggucagugaggc

SEQ ID NO: 344564 - RNA, 21 nt, Human
uaauaauuccacuacagagua

SEQ ID NO: 344565 - RNA, 15 nt, Human
caggagaggaagguu

SEQ ID NO: 344566 - RNA, 22 nt, Human
ugugaaagcaagucuaguucuc

SEQ ID NO: 344567 - RNA, 22 nt, Human
cccaggaguuggaggcuacggu

SEQ ID NO: 344568 - RNA, 22 nt, Human
ugcacauucacuuagguauugu

SEQ ID NO: 344569 - RNA, 22 nt, Human
aagaagagaaaugugcugcugg

SEQ ID NO: 344570 - RNA, 22 nt, Human
uguaugaaccuuuaauauagug

SEQ ID NO: 344571 - RNA, 22 nt, Human
gucaggaugagggaugaggagu

SEQ ID NO: 344572 - RNA, 19 nt, Human
ucugccucuggucaggcuc

SEQ ID NO: 344573 - RNA, 22 nt, Human
uucuuuucuuuaggcauugugu

SEQ ID NO: 344574 - RNA, 22 nt, Human
ugcugcugaucauuuauagucu

SEQ ID NO: 344575 - RNA, 22 nt, Human
ggaagagggaaccacgacugua

SEQ ID NO: 344576 - RNA, 22 nt, Human
uaucuguuaugggcugaauugc

SEQ ID NO: 344577 - RNA, 23 nt, Human
ggagaggggugugggcaucuuua

SEQ ID NO: 344578 - RNA, 22 nt, Human
aagcagcuuuugaagagugagg

SEQ ID NO: 344579 - RNA, 22 nt, Human
guuuucaauuauaagauggcuu

SEQ ID NO: 344580 - RNA, 22 nt, Human
acaucucaugaaugauaaauca

SEQ ID NO: 344581 - RNA, 22 nt, Human
caguuucuacgaaggucaaccc

SEQ ID NO: 344582 - RNA, 19 nt, Human
guugaaaguaggugagggu

SEQ ID NO: 344583 - RNA, 22 nt, Human
guccaugauucuguguaguaga

SEQ ID NO: 344584 - RNA, 22 nt, Human
cucaggaugcaauuccaucaag

SEQ ID NO: 344585 - RNA, 22 nt, Human
aggguggcuggaggaaucagaa

SEQ ID NO: 344586 - RNA, 22 nt, Human
uagugcuugagucucuccguac

SEQ ID NO: 344587 - RNA, 22 nt, Human
gccacaggcacuuaagggcugg

SEQ ID NO: 344588 - RNA, 21 nt, Human
uucuucaguuuaauauaaaau

SEQ ID NO: 344589 - RNA, 22 nt, Human
ccugccugcaccuucucugggg

SEQ ID NO: 344590 - RNA, 22 nt, Human
acauaugugcuuauauccauga

SEQ ID NO: 344591 - RNA, 22 nt, Human
aggcacaguuucauccccgggc

SEQ ID NO: 344592 - RNA, 21 nt, Human
cagcagaguaaugcauucgua

SEQ ID NO: 344593 - RNA, 22 nt, Human
uuccucagaaaauacuguccaa

SEQ ID NO: 344594 - RNA, 23 nt, Human
cagggaggagauacuguguaucu

SEQ ID NO: 344595 - RNA, 22 nt, Human
aggcagcuggaggcagagacua

SEQ ID NO: 344596 - RNA, 22 nt, Human
gugcauuugacgaauacucacu

SEQ ID NO: 344597 - RNA, 22 nt, Human
auugaaaggcaaaguaggaagc

SEQ ID NO: 344598 - RNA, 20 nt, Human
gcccaggaucucugaggcau

SEQ ID NO: 344599 - RNA, 22 nt, Human
uggcaggcagugugggagcugg

SEQ ID NO: 344600 - RNA, 22 nt, Human
augcugugccuggaaagcggcu

SEQ ID NO: 344601 - RNA, 22 nt, Human
ggccagaaguuggaaaagagcc

SEQ ID NO: 344602 - RNA, 22 nt, Human
aggcugcucaguagauggagcu

SEQ ID NO: 344603 - RNA, 22 nt, Human
ucacacagguuugcaaugauuu

SEQ ID NO: 344604 - RNA, 22 nt, Human
auucuucaucacuaccuuguga

SEQ ID NO: 344605 - RNA, 22 nt, Human
ucugaaaugcaaauuugacuga

SEQ ID NO: 344606 - RNA, 22 nt, Human
ggaggggauuuaguagaugcua

SEQ ID NO: 344607 - RNA, 22 nt, Human
aguuugaauugaaaugcagaug

SEQ ID NO: 344608 - RNA, 22 nt, Human
uaauacagaaguguauuaaaau

SEQ ID NO: 344609 - RNA, 23 nt, Human
aggauguaggauguauggcagag

SEQ ID NO: 344610 - RNA, 22 nt, Human
auguuuuugagauacaaacaga

SEQ ID NO: 344611 - RNA, 22 nt, Human
ucagucuuugcuuaugacaaua

SEQ ID NO: 344612 - RNA, 22 nt, Human
aagcagcuggaagaguaagaug

SEQ ID NO: 344613 - RNA, 22 nt, Human
agcauccaacaggagggaaggg

SEQ ID NO: 344614 - RNA, 22 nt, Human
ucaguagcagaaagcaaugagu

SEQ ID NO: 344615 - RNA, 22 nt, Human
uaacacauaagcugagaccaug

SEQ ID NO: 344616 - RNA, 22 nt, Human
cugggaaauggcuucgagcuca

SEQ ID NO: 344617 - RNA, 22 nt, Human
ucagucucaucaacucuauucc

SEQ ID NO: 344618 - RNA, 22 nt, Human
uguauuuuuagaccuuuagacc

SEQ ID NO: 344619 - RNA, 22 nt, Human
agugcuuugugcucucacugca

SEQ ID NO: 344620 - RNA, 22 nt, Human
gagaggcagaggccugaaaccg

SEQ ID NO: 344621 - RNA, 22 nt, Human
uaggcagcugcaaacuucgguc

SEQ ID NO: 344622 - RNA, 20 nt, Human
auacacauauucuugcaacu

SEQ ID NO: 344623 - RNA, 22 nt, Human
uaaggccaauuacauauguuca

SEQ ID NO: 344624 - RNA, 22 nt, Human
uuuagacauggcuugcucacuu

SEQ ID NO: 344625 - RNA, 22 nt, Human
cugccuccugccgugcagcuuc

SEQ ID NO: 344626 - RNA, 22 nt, Human
uaauuauuaugacaacaauugc

SEQ ID NO: 344627 - RNA, 22 nt, Human
uugacaauguccuuugaauuuc

SEQ ID NO: 344628 - RNA, 23 nt, Human
uccuuccuuugagaggcuccauc

SEQ ID NO: 344629 - RNA, 23 nt, Human
uuuuccuguggagacaugacugg

SEQ ID NO: 344630 - RNA, 22 nt, Human
ccuccucugggaagauucagag

SEQ ID NO: 344631 - RNA, 22 nt, Human
ucuucccuaaucaccaucuuca

SEQ ID NO: 344632 - RNA, 22 nt, Human
cauaauuucacugucguauggc

SEQ ID NO: 344633 - RNA, 22 nt, Human
gcaccugauugauuucacugcu

SEQ ID NO: 344634 - RNA, 17 nt, Human
aagagaggcugagcugg

SEQ ID NO: 344635 - RNA, 22 nt, Human
aggacaggauugagcugaacug

SEQ ID NO: 344636 - RNA, 22 nt, Human
uuuuaucugcuucauuaguuga

SEQ ID NO: 344637 - RNA, 22 nt, Human
augcuguggggagugaggguag

SEQ ID NO: 344638 - RNA, 22 nt, Human
acuguagcugccacuggaugca

SEQ ID NO: 344639 - RNA, 22 nt, Human
acaaaguuugugguauuccaag

SEQ ID NO: 344640 - RNA, 20 nt, Human
uggaaguucuguugcauugg

SEQ ID NO: 344641 - RNA, 22 nt, Human
uucaacuagauuuauacaauuc

SEQ ID NO: 344642 - RNA, 23 nt, Human
acacauuuuucccguucugaggu

SEQ ID NO: 344643 - RNA, 22 nt, Human
ucccaggacccaggcauucaca

SEQ ID NO: 344644 - RNA, 22 nt, Human
uccaggaguuugaccugugggc

SEQ ID NO: 344645 - RNA, 22 nt, Human
aggcagccaaucagaggcugac

SEQ ID NO: 344646 - RNA, 22 nt, Human
agaggcaggagguugacuugag

SEQ ID NO: 344647 - RNA, 22 nt, Human
caaauguauucucacuucaggg

SEQ ID NO: 344648 - RNA, 22 nt, Human
auuggcaguuagugacgaggcu

SEQ ID NO: 344649 - RNA, 22 nt, Human
auuuccaguccuaaugaucugg

SEQ ID NO: 344650 - RNA, 22 nt, Human
acagugcuggcuacaacccugg

SEQ ID NO: 344651 - RNA, 22 nt, Human
uaugaaacauucauacaaauaa

SEQ ID NO: 344652 - RNA, 22 nt, Human
ccuggagauuucuucaagcuuu

SEQ ID NO: 344653 - RNA, 22 nt, Human
accaggaguuuugaccaggggc

SEQ ID NO: 344654 - RNA, 22 nt, Human
aaguugagaugucauaggagac

SEQ ID NO: 344655 - RNA, 22 nt, Human
uacaaagucacauugaaaugaa

SEQ ID NO: 344656 - RNA, 21 nt, Human
ucacaucuauguuaagcaaac

SEQ ID NO: 344657 - RNA, 22 nt, Human
cggcagcuccgcgccguaggac

SEQ ID NO: 344658 - RNA, 22 nt, Human
cugcuucuccaaaguaggacuu

SEQ ID NO: 344659 - RNA, 22 nt, Human
aucugucaucagcaccacaggu

SEQ ID NO: 344660 - RNA, 22 nt, Human
augcuacauuuugguuuauaaa

SEQ ID NO: 344661 - RNA, 22 nt, Human
gggcagcugccaagugcaucgc

SEQ ID NO: 344662 - RNA, 22 nt, Human
acauuuagaguucuuuacucca

SEQ ID NO: 344663 - RNA, 22 nt, Human
ugagaaaugggucugcugaaga

SEQ ID NO: 344664 - RNA, 22 nt, Human
aaagccauugaacuguacuuua

SEQ ID NO: 344665 - RNA, 22 nt, Human
aggaugaauaacugaaauggug

SEQ ID NO: 344666 - RNA, 22 nt, Human
uuucugaaaucucuuuugagga

SEQ ID NO: 344667 - RNA, 22 nt, Human
cagcuggcaaguggagcagggu

SEQ ID NO: 344668 - RNA, 22 nt, Human
aauaacuuaagaaauuucccca

SEQ ID NO: 344669 - RNA, 22 nt, Human
uagcauuuauuccagauuugga

SEQ ID NO: 344670 - RNA, 22 nt, Human
gcccaggauggcuggaggugcu

SEQ ID NO: 344671 - RNA, 22 nt, Human
ucacugcugcugccaugaugga

SEQ ID NO: 344672 - RNA, 22 nt, Human
gccaggagaaaaggcgaaugau

SEQ ID NO: 344673 - RNA, 22 nt, Human
auuucauugaaguuaauucuuc

SEQ ID NO: 344674 - RNA, 22 nt, Human
ggggcagcuaccggaaguaggg

SEQ ID NO: 344675 - RNA, 22 nt, Human
gaggcugccccuuccucagcug

SEQ ID NO: 344676 - RNA, 22 nt, Human
cauuuacuuaaaucuuuacaag

SEQ ID NO: 344677 - RNA, 22 nt, Human
gcccaggauggagaauaguggu

SEQ ID NO: 344678 - RNA, 22 nt, Human
gaggggcagagguagagaacaa

SEQ ID NO: 344679 - RNA, 22 nt, Human
ugcuguguucuccugacucacc

SEQ ID NO: 344680 - RNA, 22 nt, Human
uucaauucugcucugaucuuag

SEQ ID NO: 344681 - RNA, 19 nt, Human
agaggcagucuccaacagg

SEQ ID NO: 344682 - RNA, 22 nt, Human
uuugcaaagugacuauuauaug

SEQ ID NO: 344683 - RNA, 22 nt, Human
cagagccacuuggagaugagaa

SEQ ID NO: 344684 - RNA, 22 nt, Human
ugccugugguuccaguuuuuuc

SEQ ID NO: 344685 - RNA, 22 nt, Human
uuguaugaucaaaagaaaugua

SEQ ID NO: 344686 - RNA, 20 nt, Human
cucaggauacugcaaaguug

SEQ ID NO: 344687 - RNA, 22 nt, Human
uugaacuguaagcaugucugcc

SEQ ID NO: 344688 - RNA, 22 nt, Human
aaaguuuguuauaugauaagga

SEQ ID NO: 344689 - RNA, 22 nt, Human
uaugaaaugguaguaggaaggg

SEQ ID NO: 344690 - RNA, 22 nt, Human
acaaaugugucuaauugugccu

SEQ ID NO: 344691 - RNA, 20 nt, Human
ucacuaguaaccaucugcuu

SEQ ID NO: 344692 - RNA, 22 nt, Human
ugugauauuugaguauugucaa

SEQ ID NO: 344693 - RNA, 22 nt, Human
ucuuugcagaauuuaacuuugc

SEQ ID NO: 344694 - RNA, 22 nt, Human
augcuguggccagaguucaacu

SEQ ID NO: 344695 - RNA, 22 nt, Human
cugucauuuaagacauucugga

SEQ ID NO: 344696 - RNA, 22 nt, Human
gauuuuauauggcauacugugg

SEQ ID NO: 344697 - RNA, 22 nt, Human
caacauuucaaggucuuuagga

SEQ ID NO: 344698 - RNA, 22 nt, Human
gaaucucaguggaagcaggaag

SEQ ID NO: 344699 - RNA, 18 nt, Human
uuccaugauuccuuucac

SEQ ID NO: 344700 - RNA, 23 nt, Human
ucaggauauugugugccaaggug

SEQ ID NO: 344701 - RNA, 22 nt, Human
caggauggugugagugugagga

SEQ ID NO: 344702 - RNA, 22 nt, Human
agagcagcuggggcagagacca

SEQ ID NO: 344703 - RNA, 22 nt, Human
accgaaggaaacuggaaccguu

SEQ ID NO: 344704 - RNA, 22 nt, Human
ucucagucuuugcaaggaugcu

SEQ ID NO: 344705 - RNA, 22 nt, Human
ugaaagguuauuuaggucugcu

SEQ ID NO: 344706 - RNA, 22 nt, Human
aucuguuccccuaugcucucua

SEQ ID NO: 344707 - RNA, 22 nt, Human
uguaugaauauguuggggaggu

SEQ ID NO: 344708 - RNA, 22 nt, Human
auccaugauuaguaggauaaag

SEQ ID NO: 344709 - RNA, 22 nt, Human
cagcugcuguuacugcuuauua

SEQ ID NO: 344710 - RNA, 22 nt, Human
uuucaguuuccagcuuugucau

SEQ ID NO: 344711 - RNA, 22 nt, Human
aaggcagcuucaccacagcauu

SEQ ID NO: 344712 - RNA, 22 nt, Human
guggcaggagagacacagccau

SEQ ID NO: 344713 - RNA, 22 nt, Human
aagaacuuccuaauauauuuuc

SEQ ID NO: 344714 - RNA, 22 nt, Human
ugaggcagaguaagauacauga

SEQ ID NO: 344715 - RNA, 22 nt, Human
auuggcagaaacagcagggcca

SEQ ID NO: 344716 - RNA, 22 nt, Human
cuuugaauugccguuucaucug

SEQ ID NO: 344717 - RNA, 22 nt, Human
agcugcccagcuaggaagaagg

SEQ ID NO: 344718 - RNA, 22 nt, Human
aagcagaggaccgacggaggga

SEQ ID NO: 344719 - RNA, 22 nt, Human
acacauauucauauguacuuac

SEQ ID NO: 344720 - RNA, 22 nt, Human
uggcagcuguuaauguuuuguu

SEQ ID NO: 344721 - RNA, 22 nt, Human
auggcagccugagcagaggaau

SEQ ID NO: 344722 - RNA, 22 nt, Human
acuuuacaagcuuauagccuag

SEQ ID NO: 344723 - RNA, 22 nt, Human
ucauuugugugagugauuugac

SEQ ID NO: 344724 - RNA, 22 nt, Human
gaggccaaucaauagggcaaua

SEQ ID NO: 344725 - RNA, 22 nt, Human
auugcuguacacuucuagaucu

SEQ ID NO: 344726 - RNA, 21 nt, Human
aggcaucuaaagagaguagac

SEQ ID NO: 344727 - RNA, 22 nt, Human
aacauuucagcaaauaagaaca

SEQ ID NO: 344728 - RNA, 22 nt, Human
uccauuuuguagguaugcuaca

SEQ ID NO: 344729 - RNA, 22 nt, Human
uucagcaaacacgaugcuuguu

SEQ ID NO: 344730 - RNA, 22 nt, Human
agacucaagcagauaggaauua

SEQ ID NO: 344731 - RNA, 22 nt, Human
gccaggaggggagaguguguca

SEQ ID NO: 344732 - RNA, 22 nt, Human
uucuucaaauagcagggaguca

SEQ ID NO: 344733 - RNA, 20 nt, Human
cuguggaauuuuaccaugcg

SEQ ID NO: 344734 - RNA, 20 nt, Human
aggacagcagcugccacuug

SEQ ID NO: 344735 - RNA, 22 nt, Human
uauugaaauucuucauguccuc

SEQ ID NO: 344736 - RNA, 22 nt, Human
agcugcccagauaggaggaggc

SEQ ID NO: 344737 - RNA, 22 nt, Human
uuucuucagagagagcuuuccc

SEQ ID NO: 344738 - RNA, 22 nt, Human
ugaaacuucuaauaugaauagu

SEQ ID NO: 344739 - RNA, 22 nt, Human
ccaggaagcugucugauaugaa

SEQ ID NO: 344740 - RNA, 22 nt, Human
gaggcagccagagguucucauu

SEQ ID NO: 344741 - RNA, 22 nt, Human
ggcagcuuguccuucaggagag

SEQ ID NO: 344742 - RNA, 22 nt, Human
uaauaucuacuucauagaguuu

SEQ ID NO: 344743 - RNA, 22 nt, Human
ggcagcucacgggcauggggug

SEQ ID NO: 344744 - RNA, 22 nt, Human
aggacagcaguuggugagguuc

SEQ ID NO: 344745 - RNA, 23 nt, Human
auucuucauuaucuucuagaaaa

SEQ ID NO: 344746 - RNA, 22 nt, Human
ugaaaugauguacaagaaggca

SEQ ID NO: 344747 - RNA, 22 nt, Human
uuuaaaauuuagaccucuccac

SEQ ID NO: 344748 - RNA, 22 nt, Human
gcugucccgcugacuuccagcu

SEQ ID NO: 344749 - RNA, 22 nt, Human
acccaggacaaaauaaccaggu

SEQ ID NO: 344750 - RNA, 21 nt, Human
gauugaaaccauggcagugag

SEQ ID NO: 344751 - RNA, 23 nt, Human
uggaaagcggaccuggggcagag

SEQ ID NO: 344752 - RNA, 21 nt, Human
uucugggaaaugagcuggggc

SEQ ID NO: 344753 - RNA, 22 nt, Human
agcagagguuuguuggaaaccu

SEQ ID NO: 344754 - RNA, 22 nt, Human
auucuucaguauguguggauug

SEQ ID NO: 344755 - RNA, 18 nt, Human
uggcagcaggaagccauu

SEQ ID NO: 344756 - RNA, 22 nt, Human
ucucuucucuagugagcaacug

SEQ ID NO: 344757 - RNA, 22 nt, Human
aaggccagacaggaccacaucu

SEQ ID NO: 344758 - RNA, 22 nt, Human
uuucauggcuaggacuagagug

SEQ ID NO: 344759 - RNA, 22 nt, Human
ccaggcagcaaauuuucugaau

SEQ ID NO: 344760 - RNA, 22 nt, Human
uaaggccaccguuauagaacca

SEQ ID NO: 344761 - RNA, 22 nt, Human
cccaggaggcagagcuugcagu

SEQ ID NO: 344762 - RNA, 22 nt, Human
acugugugacuguuauuacugu

SEQ ID NO: 344763 - RNA, 22 nt, Human
ucucaggaagugauauugagac

SEQ ID NO: 344764 - RNA, 22 nt, Human
uuugacaaauccuucagcaaug

SEQ ID NO: 344765 - RNA, 23 nt, Human
aggcccaacucugugagggcugc

SEQ ID NO: 344766 - RNA, 22 nt, Human
gaggacagagccgccuggcaag

SEQ ID NO: 344767 - RNA, 22 nt, Human
aaaguauucuugacuguuuuuc

SEQ ID NO: 344768 - RNA, 22 nt, Human
uuagcaucugcuguaagcuuau

SEQ ID NO: 344769 - RNA, 22 nt, Human
gaggcagcgggucaggaccgug

SEQ ID NO: 344770 - RNA, 20 nt, Human
aucuucuuggccagcuugcu

SEQ ID NO: 344771 - RNA, 22 nt, Human
aggggcucaaagugugcaggga

SEQ ID NO: 344772 - RNA, 22 nt, Human
uucuucaauuuuccauauacug

SEQ ID NO: 344773 - RNA, 22 nt, Human
acauugcugcauucuccuuccc

SEQ ID NO: 344774 - RNA, 22 nt, Human
gauggcagcagcagccagggau

SEQ ID NO: 344775 - RNA, 22 nt, Human
ugcuagaaaucugaaacuagca

SEQ ID NO: 344776 - RNA, 22 nt, Human
agagggauggccccguaacuca

SEQ ID NO: 344777 - RNA, 22 nt, Human
aaauaguuacuucugcugucuu

SEQ ID NO: 344778 - RNA, 21 nt, Human
cgcagagcgaacuugcggcgc

SEQ ID NO: 344779 - RNA, 22 nt, Human
guguugaugacauuuuagaaac

SEQ ID NO: 344780 - RNA, 22 nt, Human
cacauauuguaguucaccagga

SEQ ID NO: 344781 - RNA, 22 nt, Human
augacaugaccugguagagaca

SEQ ID NO: 344782 - RNA, 22 nt, Human
cuucuucagcacaauauugaug

SEQ ID NO: 344783 - RNA, 22 nt, Human
aucacauuguuagcauagacug

SEQ ID NO: 344784 - RNA, 22 nt, Human
uagcucuucauuucaucugauu

SEQ ID NO: 344785 - RNA, 22 nt, Human
aucaggauggguuuggcuuagg

SEQ ID NO: 344786 - RNA, 22 nt, Human
caaggccaguuucuccuaguca

SEQ ID NO: 344787 - RNA, 22 nt, Human
uuugacaucuaagaauucuuac

SEQ ID NO: 344788 - RNA, 22 nt, Human
uuaaaugaggcugauguagauu

SEQ ID NO: 344789 - RNA, 21 nt, Human
aaauacagaaacuuguuuuca

SEQ ID NO: 344790 - RNA, 17 nt, Human
agauggcaggaggcaga

SEQ ID NO: 344791 - RNA, 22 nt, Human
cccaggaaagagacugcugggu

SEQ ID NO: 344792 - RNA, 23 nt, Human
agaugagccaacaccuccaugcc

SEQ ID NO: 344793 - RNA, 22 nt, Human
gaggcugcuguuagcccugggc

SEQ ID NO: 344794 - RNA, 22 nt, Human
uacaaguaaauuguagauacca

SEQ ID NO: 344795 - RNA, 22 nt, Human
aaauacauacacuguacguggc

SEQ ID NO: 344796 - RNA, 22 nt, Human
cccuguacagucucuguggcac

SEQ ID NO: 344797 - RNA, 22 nt, Human
uuuccucauuuaucugcuggga

SEQ ID NO: 344798 - RNA, 22 nt, Human
aggcacaggaaugucauccagu

SEQ ID NO: 344799 - RNA, 22 nt, Human
agucuacaaucuuaaaugaacu

SEQ ID NO: 344800 - RNA, 22 nt, Human
ggaggggagucucccaaagccg

SEQ ID NO: 344801 - RNA, 22 nt, Human
uaauacuguauacugcaaauuu

SEQ ID NO: 344802 - RNA, 22 nt, Human
uaggaggguuagagggaaauau

SEQ ID NO: 344803 - RNA, 22 nt, Human
gauggcagcauauugacagcau

SEQ ID NO: 344804 - RNA, 19 nt, Human
caggaaggggcgaaucugg

SEQ ID NO: 344805 - RNA, 22 nt, Human
cccuggaggucagaggccuggg

SEQ ID NO: 344806 - RNA, 22 nt, Human
gcucaggaccgaggggugggaa

SEQ ID NO: 344807 - RNA, 22 nt, Human
uuuauucaucaucuguucauau

SEQ ID NO: 344808 - RNA, 22 nt, Human
gagggaugguaguugacacuga

SEQ ID NO: 344809 - RNA, 22 nt, Human
uuccaugaagggcagccucuca

SEQ ID NO: 344810 - RNA, 22 nt, Human
gcuggcaggagccuuucccuuu

SEQ ID NO: 344811 - RNA, 21 nt, Human
acagcaagccuucacaugagu

SEQ ID NO: 344812 - RNA, 22 nt, Human
uccauuuucaucucauguauaa

SEQ ID NO: 344813 - RNA, 23 nt, Human
uccaggagcaugcuggcuggcga

SEQ ID NO: 344814 - RNA, 22 nt, Human
cauaugaaauaugaguugaaca

SEQ ID NO: 344815 - RNA, 22 nt, Human
gcaggggcuaaggacacagaga

SEQ ID NO: 344816 - RNA, 22 nt, Human
uugaaauggaagugaaaauucu

SEQ ID NO: 344817 - RNA, 22 nt, Human
augcagcuucaggauuaugaug

SEQ ID NO: 344818 - RNA, 22 nt, Human
gucauucuuaacaacucaguag

SEQ ID NO: 344819 - RNA, 22 nt, Human
ggaagaggaggagccaggcuuu

SEQ ID NO: 344820 - RNA, 22 nt, Human
gguuugaacagcuuuggagaag

SEQ ID NO: 344821 - RNA, 22 nt, Human
ugaggggaaggcaugauaaaua

SEQ ID NO: 344822 - RNA, 22 nt, Human
uugaaagacuucuccugugaaa

SEQ ID NO: 344823 - RNA, 22 nt, Human
agauggcagggguaccuggaag

SEQ ID NO: 344824 - RNA, 22 nt, Human
ggagcacuauaauagagauuuu

SEQ ID NO: 344825 - RNA, 22 nt, Human
acuuugcagggcuugauaucca

SEQ ID NO: 344826 - RNA, 22 nt, Human
ccagcagaggggcggagugcag

SEQ ID NO: 344827 - RNA, 22 nt, Human
accaggaguaacagugaguggu

SEQ ID NO: 344828 - RNA, 22 nt, Human
uuuuuaguagagguggguuuca

SEQ ID NO: 344829 - RNA, 22 nt, Human
uuauucuucuucucuugccagg

SEQ ID NO: 344830 - RNA, 22 nt, Human
aaaguucuaaaacucuuuguga

SEQ ID NO: 344831 - RNA, 22 nt, Human
uagggcagagcuuguacacgau

SEQ ID NO: 344832 - RNA, 22 nt, Human
cgaggcagaggcugaaacggcu

SEQ ID NO: 344833 - RNA, 22 nt, Human
uccaggaggcagggcugugccc

SEQ ID NO: 344834 - RNA, 22 nt, Human
acuucaugcagaagagagcugu

SEQ ID NO: 344835 - RNA, 22 nt, Human
caaaguuuuaguaaacauauau

SEQ ID NO: 344836 - RNA, 22 nt, Human
ugaaagguagcuggccucauag

SEQ ID NO: 344837 - RNA, 22 nt, Human
ccagagagauugcuucuaaaga

SEQ ID NO: 344838 - RNA, 22 nt, Human
aggaaaggccuuugcauuuggu

SEQ ID NO: 344839 - RNA, 22 nt, Human
auuuugcuggucugaauuacuu

SEQ ID NO: 344840 - RNA, 22 nt, Human
ggagaggguguggaaaguuauc

SEQ ID NO: 344841 - RNA, 22 nt, Human
uuugaaugcaggacauacagaa

SEQ ID NO: 344842 - RNA, 22 nt, Human
uacuuacacagcuguagaaggu

SEQ ID NO: 344843 - RNA, 22 nt, Human
caggcaggucagugaagaagga

SEQ ID NO: 344844 - RNA, 22 nt, Human
ucucugaguauccugaacugcc

SEQ ID NO: 344845 - RNA, 22 nt, Human
uuugaaagggacaaagucacug

SEQ ID NO: 344846 - RNA, 22 nt, Human
auauuucaugggguuccauacu

SEQ ID NO: 344847 - RNA, 22 nt, Human
ugagagggcccagagcacacca

SEQ ID NO: 344848 - RNA, 22 nt, Human
gaaggccauuagagccugugcc

SEQ ID NO: 344849 - RNA, 21 nt, Human
cccaggaggcugagaagagca

SEQ ID NO: 344850 - RNA, 22 nt, Human
caucaucaaaagugacagagaa

SEQ ID NO: 344851 - RNA, 22 nt, Human
aauuuuaaucaguggugcugag

SEQ ID NO: 344852 - RNA, 22 nt, Human
augcugugucaggaauuugaua

SEQ ID NO: 344853 - RNA, 22 nt, Human
uggaaggaagccaaggaagguu

SEQ ID NO: 344854 - RNA, 22 nt, Human
ugaggcaguucuuacuuguauu

SEQ ID NO: 344855 - RNA, 22 nt, Human
agaccaagacuauaaugagagg

SEQ ID NO: 344856 - RNA, 23 nt, Human
ugugaaauuugaggucagugcuu

SEQ ID NO: 344857 - RNA, 22 nt, Human
aaaaacuguaauuacuuuugca

SEQ ID NO: 344858 - RNA, 22 nt, Human
uuugaauaucacaaacuuucaa

SEQ ID NO: 344859 - RNA, 22 nt, Human
auguuuccgugagcauccuuga

SEQ ID NO: 344860 - RNA, 22 nt, Human
aggaagcuccaugaaggcagag

SEQ ID NO: 344861 - RNA, 22 nt, Human
acauuuuuuagagucccacauu

SEQ ID NO: 344862 - RNA, 22 nt, Human
uucauucuugggaucagagagu

SEQ ID NO: 344863 - RNA, 22 nt, Human
agggcagcccuucugggagggc

SEQ ID NO: 344864 - RNA, 22 nt, Human
auacuguuuugugacuuaucuu

SEQ ID NO: 344865 - RNA, 22 nt, Human
caggagaaauguggcugcuacc

SEQ ID NO: 344866 - RNA, 22 nt, Human
caggggaguuuuaugcaacaga

SEQ ID NO: 344867 - RNA, 22 nt, Human
auguaugaagcuuuguuuggga

SEQ ID NO: 344868 - RNA, 22 nt, Human
gaauaguucuauggcugcaggg

SEQ ID NO: 344869 - RNA, 22 nt, Human
uuucucuugcgauaugcuacac

SEQ ID NO: 344870 - RNA, 22 nt, Human
cuagccaugggcauuaaaggua

SEQ ID NO: 344871 - RNA, 22 nt, Human
auccagucaaaauuaguaaggu

SEQ ID NO: 344872 - RNA, 22 nt, Human
cuucucagcauuuugucagucu

SEQ ID NO: 344873 - RNA, 22 nt, Human
cuguuuaucucuaaccuguuua

SEQ ID NO: 344874 - RNA, 22 nt, Human
aaaguguggucguucauuuugu

SEQ ID NO: 344875 - RNA, 23 nt, Human
uguaugaauaugccacaguuuaa

SEQ ID NO: 344876 - RNA, 22 nt, Human
gugguaaucggauucuuaccgg

SEQ ID NO: 344877 - RNA, 22 nt, Human
aggcagcccugugcuggaugcu

SEQ ID NO: 344878 - RNA, 18 nt, Human
cugcuugggagacgucag

SEQ ID NO: 344879 - RNA, 22 nt, Human
cggagggguuugaacagaggag

SEQ ID NO: 344880 - RNA, 22 nt, Human
acauuuaaccaaacuguuuaau

SEQ ID NO: 344881 - RNA, 22 nt, Human
aggagggagaugcccauccugg

SEQ ID NO: 344882 - RNA, 22 nt, Human
guaggcagucucucaggugauc

SEQ ID NO: 344883 - RNA, 17 nt, Human
gagacagcaggagcccc

SEQ ID NO: 344884 - RNA, 22 nt, Human
uauaucauggagauuaacauuc

SEQ ID NO: 344885 - RNA, 22 nt, Human
aaucacaugugcucaauuuuaa

SEQ ID NO: 344886 - RNA, 22 nt, Human
aaugauuuccccuacacagaag

SEQ ID NO: 344887 - RNA, 22 nt, Human
gcugggaagugcaagaucaagg

SEQ ID NO: 344888 - RNA, 22 nt, Human
aaagccaugaauguuauagagg

SEQ ID NO: 344889 - RNA, 22 nt, Human
gagguagcaugcuggaagggac

SEQ ID NO: 344890 - RNA, 22 nt, Human
uggagagguuuaaacaaaaguu

SEQ ID NO: 344891 - RNA, 22 nt, Human
augcugucgaaaccaaacaucu

SEQ ID NO: 344892 - RNA, 22 nt, Human
agaggacagacggaaagugcca

SEQ ID NO: 344893 - RNA, 22 nt, Human
gauuucuugauaauucaaaucc

SEQ ID NO: 344894 - RNA, 22 nt, Human
guuauauauaguauuucucuga

SEQ ID NO: 344895 - RNA, 22 nt, Human
ucacacagauugguagagcuga

SEQ ID NO: 344896 - RNA, 22 nt, Human
uucugucagcgucagaaauucu

SEQ ID NO: 344897 - RNA, 22 nt, Human
agcccaggaaucugcaucuuga

SEQ ID NO: 344898 - RNA, 22 nt, Human
gucaggauuauuuuauuaaaag

SEQ ID NO: 344899 - RNA, 22 nt, Human
uuugacaugcaaagcacuuuag

SEQ ID NO: 344900 - RNA, 22 nt, Human
uccaugaggcagggaggcuggc

SEQ ID NO: 344901 - RNA, 22 nt, Human
aaauugcauuuuaaagguagau

SEQ ID NO: 344902 - RNA, 22 nt, Human
auaacuuucuucacccuugcug

SEQ ID NO: 344903 - RNA, 22 nt, Human
uucucagagcucacuguaguaa

SEQ ID NO: 344904 - RNA, 22 nt, Human
uccaggagaccagauguaggcc

SEQ ID NO: 344905 - RNA, 22 nt, Human
cagguaaaaauaaauuugugag

SEQ ID NO: 344906 - RNA, 22 nt, Human
agugcuguuagguuaauauagu

SEQ ID NO: 344907 - RNA, 22 nt, Human
cccaggaggcggagguuguggu

SEQ ID NO: 344908 - RNA, 22 nt, Human
uuugaaaggguuaugagacuga

SEQ ID NO: 344909 - RNA, 22 nt, Human
uuucuucagccacuccaaacug

SEQ ID NO: 344910 - RNA, 22 nt, Human
uucugucucuguguuuacauua

SEQ ID NO: 344911 - RNA, 22 nt, Human
uuugcauaagucauguccagug

SEQ ID NO: 344912 - RNA, 22 nt, Human
agaaaugaauauguagugguua

SEQ ID NO: 344913 - RNA, 22 nt, Human
uacuuuuagccuauuugauucu

SEQ ID NO: 344914 - RNA, 22 nt, Human
gcagggaagacccggagcagcg

SEQ ID NO: 344915 - RNA, 22 nt, Human
caaguaaagaaucacauuucuu

SEQ ID NO: 344916 - RNA, 23 nt, Human
gcagaggagcaagcuggacacca

SEQ ID NO: 344917 - RNA, 22 nt, Human
ucuucacaugaccuucaugucu

SEQ ID NO: 344918 - RNA, 22 nt, Human
uggcagcucccagagcuuccaa

SEQ ID NO: 344919 - RNA, 22 nt, Human
uguaggaauguuuuuaaguugg

SEQ ID NO: 344920 - RNA, 22 nt, Human
cauuuuaagaugaccugguuuc

SEQ ID NO: 344921 - RNA, 19 nt, Human
gaggagcuaucggagacag

SEQ ID NO: 344922 - RNA, 22 nt, Human
gucuuuaugguaugaaaacuga

SEQ ID NO: 344923 - RNA, 22 nt, Human
gaauauuuguaauuacuguuga

SEQ ID NO: 344924 - RNA, 22 nt, Human
uaaaugaagaaauggagauugu

SEQ ID NO: 344925 - RNA, 22 nt, Human
caacagcugaucuuugaugaag

SEQ ID NO: 344926 - RNA, 22 nt, Human
aggcaggcuggucugaagagug

SEQ ID NO: 344927 - RNA, 23 nt, Human
accaggagccaagaucucccugg

SEQ ID NO: 344928 - RNA, 22 nt, Human
cucacugucuguacuagcugau

SEQ ID NO: 344929 - RNA, 22 nt, Human
ucuucaauuagauuuaccaauu

SEQ ID NO: 344930 - RNA, 22 nt, Human
uuucacacugcagcaucagaga

SEQ ID NO: 344931 - RNA, 22 nt, Human
aaguguagauuauggagugucu

SEQ ID NO: 344932 - RNA, 22 nt, Human
ugcacagugaccccuggugacu

SEQ ID NO: 344933 - RNA, 22 nt, Human
ugaacacauaaggcuuuccugu

SEQ ID NO: 344934 - RNA, 22 nt, Human
acucaggaaaaauguagugaua

SEQ ID NO: 344935 - RNA, 22 nt, Human
gagcagcuccagccgcaugacu

SEQ ID NO: 344936 - RNA, 22 nt, Human
guaggcagugguuggaagagaa

SEQ ID NO: 344937 - RNA, 22 nt, Human
aaggccaacuaggaugagcuag

SEQ ID NO: 344938 - RNA, 22 nt, Human
aaaauacuguggaguguugaaa

SEQ ID NO: 344939 - RNA, 18 nt, Human
aagaggaggaaacccagg

SEQ ID NO: 344940 - RNA, 23 nt, Human
gugcugugagccccuuggccucc

SEQ ID NO: 344941 - RNA, 22 nt, Human
gaggauggaggugugagcuaug

SEQ ID NO: 344942 - RNA, 22 nt, Human
acuggcaggcugcuggccggcg

SEQ ID NO: 344943 - RNA, 22 nt, Human
gaacacauuucucugacuguag

SEQ ID NO: 344944 - RNA, 22 nt, Human
uuuauuguuuagaagggggcug

SEQ ID NO: 344945 - RNA, 21 nt, Human
uucaaaaugguguguuugucu

SEQ ID NO: 344946 - RNA, 22 nt, Human
gcagcugccccgacugugaguc

SEQ ID NO: 344947 - RNA, 22 nt, Human
gaaggccacaagagaaguuaag

SEQ ID NO: 344948 - RNA, 22 nt, Human
ccucaggaaaugaauaaauggc

SEQ ID NO: 344949 - RNA, 23 nt, Human
cuuuuaacuagaguaucagcugc

SEQ ID NO: 344950 - RNA, 22 nt, Human
ucagagaggcaauacuguuuaa

SEQ ID NO: 344951 - RNA, 22 nt, Human
gugaaacagaagcuccuggaau

SEQ ID NO: 344952 - RNA, 22 nt, Human
cacccugggcugggccuguuaa

SEQ ID NO: 344953 - RNA, 22 nt, Human
gaaaggugccccauaggcagga

SEQ ID NO: 344954 - RNA, 22 nt, Human
uccaggagaaggccauccagcg

SEQ ID NO: 344955 - RNA, 22 nt, Human
auuugcuuuaagguauaaaagg

SEQ ID NO: 344956 - RNA, 22 nt, Human
gaggcaacacauuuggaaagca

SEQ ID NO: 344957 - RNA, 22 nt, Human
gcuccucuauuccccacauuuu

SEQ ID NO: 344958 - RNA, 18 nt, Human
agaggggagguaagucug

SEQ ID NO: 344959 - RNA, 22 nt, Human
uacacacaugcauuugccuuau

SEQ ID NO: 344960 - RNA, 22 nt, Human
gccugcagaacugugaggcaau

SEQ ID NO: 344961 - RNA, 20 nt, Human
uuugucuguuaaguguuucu

SEQ ID NO: 344962 - RNA, 22 nt, Human
aaggagagagcuuugcuggaac

SEQ ID NO: 344963 - RNA, 22 nt, Human
ggugguggagccagcugggagu

SEQ ID NO: 344964 - RNA, 22 nt, Human
ugucagaugcgauaaacuagug

SEQ ID NO: 344965 - RNA, 22 nt, Human
cugcugugacagcugccguguu

SEQ ID NO: 344966 - RNA, 22 nt, Human
cauaauuuuccaugguuugcua

SEQ ID NO: 344967 - RNA, 22 nt, Human
gggcagcugccccucucugggc

SEQ ID NO: 344968 - RNA, 22 nt, Human
caaggccagagccagcgauaag

SEQ ID NO: 344969 - RNA, 22 nt, Human
gcccaggaguugaagggcugac

SEQ ID NO: 344970 - RNA, 22 nt, Human
aucaggaucacagaaacuuuua

SEQ ID NO: 344971 - RNA, 22 nt, Human
gagguagccacagauagagacu

SEQ ID NO: 344972 - RNA, 22 nt, Human
gaggcaguuccugagugacaag

SEQ ID NO: 344973 - RNA, 22 nt, Human
aguaugaaucucuuuauucugc

SEQ ID NO: 344974 - RNA, 22 nt, Human
ugucugugaccucuuaggcaag

SEQ ID NO: 344975 - RNA, 22 nt, Human
agucucugggcaugguugugac

SEQ ID NO: 344976 - RNA, 22 nt, Human
cucaagacugaucgcaguggaa

SEQ ID NO: 344977 - RNA, 22 nt, Human
gcccaggaguugguggcugcag

SEQ ID NO: 344978 - RNA, 22 nt, Human
uuugaaaguucuucugacacua

SEQ ID NO: 344979 - RNA, 22 nt, Human
uucuccagaccuugugacuaug

SEQ ID NO: 344980 - RNA, 16 nt, Human
uucugucacguacggc

SEQ ID NO: 344981 - RNA, 21 nt, Human
auaaaguuuuacaggaaugca

SEQ ID NO: 344982 - RNA, 22 nt, Human
aauguaugggugagaaaguuga

SEQ ID NO: 344983 - RNA, 22 nt, Human
agaaucucuacucaaguacuug

SEQ ID NO: 344984 - RNA, 22 nt, Human
cauuuguacagaacagcuuuau

SEQ ID NO: 344985 - RNA, 22 nt, Human
aggcacagcacaccuggccccc

SEQ ID NO: 344986 - RNA, 22 nt, Human
agaggccaugcuagaggccugg

SEQ ID NO: 344987 - RNA, 18 nt, Human
cucaccauucugcccaau

SEQ ID NO: 344988 - RNA, 22 nt, Human
uccaggagagguagaggguucc

SEQ ID NO: 344989 - RNA, 23 nt, Human
ucucaggacacacaugucuauca

SEQ ID NO: 344990 - RNA, 22 nt, Human
ucagugugaguaccaugcucag

SEQ ID NO: 344991 - RNA, 22 nt, Human
agaauaugaucggaauacagau

SEQ ID NO: 344992 - RNA, 23 nt, Human
uuuuccagaaucgacucuguaga

SEQ ID NO: 344993 - RNA, 23 nt, Human
aaauuauugcucuucaauugccu

SEQ ID NO: 344994 - RNA, 22 nt, Human
acaugcauacacguacauaccu

SEQ ID NO: 344995 - RNA, 22 nt, Human
agucagugaaaacuagaauguu

SEQ ID NO: 344996 - RNA, 22 nt, Human
ccaggagaugggaaaguagcag

SEQ ID NO: 344997 - RNA, 22 nt, Human
uaggcagccagcaucaguuggg

SEQ ID NO: 344998 - RNA, 22 nt, Human
uuaugacaggaaaaucacagaa

SEQ ID NO: 344999 - RNA, 22 nt, Human
ccagagagaaauggauuugagu

SEQ ID NO: 345000 - RNA, 22 nt, Human
gagguggucgaggagggguacc

SEQ ID NO: 345001 - RNA, 22 nt, Human
gucagagagggcacgugcacac

SEQ ID NO: 345002 - RNA, 22 nt, Human
cugcuuuggacaacuauucuug

SEQ ID NO: 345003 - RNA, 22 nt, Human
acacuaaugagaaaggaauuaa

SEQ ID NO: 345004 - RNA, 22 nt, Human
ugaaagggguugaguuacagcu

SEQ ID NO: 345005 - RNA, 19 nt, Human
uucauucuuucuacuuacc

SEQ ID NO: 345006 - RNA, 22 nt, Human
ggccagagaauaugccuuacgu

SEQ ID NO: 345007 - RNA, 22 nt, Human
ccccaggaagccucagauuugc

SEQ ID NO: 345008 - RNA, 22 nt, Human
aaggcagccauagcaccaucca

SEQ ID NO: 345009 - RNA, 22 nt, Human
ccaggagagcagaagcccaggc

SEQ ID NO: 345010 - RNA, 22 nt, Human
cuggcugugcagucuuccagaa

SEQ ID NO: 345011 - RNA, 20 nt, Human
uugauaggcagcuugucagg

SEQ ID NO: 345012 - RNA, 22 nt, Human
ggaaaugacuuggugcuucguu

SEQ ID NO: 345013 - RNA, 21 nt, Human
uaacacauuuugguacuuugg

SEQ ID NO: 345014 - RNA, 22 nt, Human
ugaaggccagcucuuuaucagc

SEQ ID NO: 345015 - RNA, 22 nt, Human
uccaggaggaggaaggcugcca

SEQ ID NO: 345016 - RNA, 22 nt, Human
guggcaggagacuggaagaugg

SEQ ID NO: 345017 - RNA, 22 nt, Human
uggcagucuggguuggcaguua

SEQ ID NO: 345018 - RNA, 20 nt, Human
cccaggaguuugcucuuacu

SEQ ID NO: 345019 - RNA, 22 nt, Human
uucugucauuuagcauugucau

SEQ ID NO: 345020 - RNA, 22 nt, Human
uagcugcugcagcacagggagg

SEQ ID NO: 345021 - RNA, 22 nt, Human
agaccaagugcaggugccacua

SEQ ID NO: 345022 - RNA, 22 nt, Human
agacaaaugguaauuaugucua

SEQ ID NO: 345023 - RNA, 22 nt, Human
uaacacaugguucugucaggaa

SEQ ID NO: 345024 - RNA, 22 nt, Human
augcuuuuaugucacaugguca

SEQ ID NO: 345025 - RNA, 22 nt, Human
caaggccaaagggccacuguca

SEQ ID NO: 345026 - RNA, 22 nt, Human
aaaguuugaaugauauauuagu

SEQ ID NO: 345027 - RNA, 22 nt, Human
gaaggaggcguuagcccuagga

SEQ ID NO: 345028 - RNA, 22 nt, Human
uuucauaaccucaagcuacagu

SEQ ID NO: 345029 - RNA, 22 nt, Human
uuugaagugggcauuagaaccu

SEQ ID NO: 345030 - RNA, 22 nt, Human
uuuguaugugauaagacuauuc

SEQ ID NO: 345031 - RNA, 22 nt, Human
gagagaggccuccauguacuga

SEQ ID NO: 345032 - RNA, 22 nt, Human
aucacauugccagugauuaccc

SEQ ID NO: 345033 - RNA, 19 nt, Human
acuggcaguuucugcaugg

SEQ ID NO: 345034 - RNA, 22 nt, Human
acauguaaaaggaacaugcaug

SEQ ID NO: 345035 - RNA, 20 nt, Human
aaacauucauguacaaguga

SEQ ID NO: 345036 - RNA, 22 nt, Human
uagggaggaggguuuucaaauc

SEQ ID NO: 345037 - RNA, 22 nt, Human
acccaggacaugggcacccgug

SEQ ID NO: 345038 - RNA, 22 nt, Human
ugaggggagguuggggcacauc

SEQ ID NO: 345039 - RNA, 22 nt, Human
acucagaagauauaaugacuca

SEQ ID NO: 345040 - RNA, 19 nt, Human
cccaggaggcggagguugc

SEQ ID NO: 345041 - RNA, 22 nt, Human
agcaccugucacaagcagaagg

SEQ ID NO: 345042 - RNA, 22 nt, Human
gacagaggcuggagcaccuccu

SEQ ID NO: 345043 - RNA, 22 nt, Human
gaggaaccaaucugugauauuc

SEQ ID NO: 345044 - RNA, 22 nt, Human
caggcagcuagauuuauaacaa

SEQ ID NO: 345045 - RNA, 22 nt, Human
uuagccaugugggaaaaacagc

SEQ ID NO: 345046 - RNA, 22 nt, Human
aaggcagcagaggaaaggugcu

SEQ ID NO: 345047 - RNA, 22 nt, Human
aaucauucuuauuucacagcaa

SEQ ID NO: 345048 - RNA, 22 nt, Human
gugcugugucuaucaggaauaa

SEQ ID NO: 345049 - RNA, 22 nt, Human
auucaaauuaaguuaauucagc

SEQ ID NO: 345050 - RNA, 22 nt, Human
gucacuguuuccuauuauauuu

SEQ ID NO: 345051 - RNA, 22 nt, Human
ugaaggccuaacuuccagugcu

SEQ ID NO: 345052 - RNA, 22 nt, Human
cagcuagcuaagaaggccagag

SEQ ID NO: 345053 - RNA, 19 nt, Human
accaggagacagugagcuu

SEQ ID NO: 345054 - RNA, 22 nt, Human
uacuuucuguccuucuguuaaa

SEQ ID NO: 345055 - RNA, 23 nt, Human
agaggcaggaguggcuugcccgg

SEQ ID NO: 345056 - RNA, 22 nt, Human
uugagaagaggcuuuguaggaa

SEQ ID NO: 345057 - RNA, 22 nt, Human
ucacaguaucacacaaggauua

SEQ ID NO: 345058 - RNA, 22 nt, Human
aguuauaaucugcuacugauau

SEQ ID NO: 345059 - RNA, 22 nt, Human
auucucaauggcuacuuucaua

SEQ ID NO: 345060 - RNA, 22 nt, Human
cuguguuugaugagaagccacc

SEQ ID NO: 345061 - RNA, 22 nt, Human
ucccaggacuuccaguuggagg

SEQ ID NO: 345062 - RNA, 22 nt, Human
uucaucaauguguuuaauaaug

SEQ ID NO: 345063 - RNA, 22 nt, Human
aauacuauguugugacacauga

SEQ ID NO: 345064 - RNA, 21 nt, Human
uacagaaugcgcuucagucug

SEQ ID NO: 345065 - RNA, 22 nt, Human
uagucaaaccucagaauacccc

SEQ ID NO: 345066 - RNA, 23 nt, Human
cuugcagggcuggaggcuuagaa

SEQ ID NO: 345067 - RNA, 20 nt, Human
ugaaggccagcagcauaggg

SEQ ID NO: 345068 - RNA, 22 nt, Human
ucauuucccuccuacaaagagg

SEQ ID NO: 345069 - RNA, 22 nt, Human
ccccaggacacauggaccaagu

SEQ ID NO: 345070 - RNA, 20 nt, Human
agaaauauugaguucagagg

SEQ ID NO: 345071 - RNA, 22 nt, Human
uacccaggagaaacagcagggc

SEQ ID NO: 345072 - RNA, 22 nt, Human
aaggcagccagauccuuugggu

SEQ ID NO: 345073 - RNA, 22 nt, Human
caguucuuauuuggccaguguc

SEQ ID NO: 345074 - RNA, 22 nt, Human
uccaggagguagugcuuaauuu

SEQ ID NO: 345075 - RNA, 22 nt, Human
cccaggagguggagguugcagu

SEQ ID NO: 345076 - RNA, 22 nt, Human
uuuuucaagacaaccugcaugu

SEQ ID NO: 345077 - RNA, 22 nt, Human
uagaaacauguucuguucuguu

SEQ ID NO: 345078 - RNA, 22 nt, Human
gaccaaggaagaggggagccag

SEQ ID NO: 345079 - RNA, 22 nt, Human
uauguacaugauuucauuugcu

SEQ ID NO: 345080 - RNA, 22 nt, Human
gugggagcuuuggcaucaggcu

SEQ ID NO: 345081 - RNA, 22 nt, Human
ccacuguuuuucaguuaacuuu

SEQ ID NO: 345082 - RNA, 22 nt, Human
ggcagcuauuccaagcagcacu

SEQ ID NO: 345083 - RNA, 22 nt, Human
uugcucaggcuggugugcagug

SEQ ID NO: 345084 - RNA, 22 nt, Human
agagggagugaaauggaauaga

SEQ ID NO: 345085 - RNA, 22 nt, Human
acugcccucccaucuauugcaa

SEQ ID NO: 345086 - RNA, 22 nt, Human
uuucaaaguugggaauuguaau

SEQ ID NO: 345087 - RNA, 22 nt, Human
uucucuuuugugaugugagaug

SEQ ID NO: 345088 - RNA, 19 nt, Human
cccaggagucuggcugguu

SEQ ID NO: 345089 - RNA, 22 nt, Human
auuuuccucaagccucuggaag

SEQ ID NO: 345090 - RNA, 22 nt, Human
ggaagaggcugagccagguccc

SEQ ID NO: 345091 - RNA, 22 nt, Human
agaggccaggcugcagagggau

SEQ ID NO: 345092 - RNA, 22 nt, Human
uuagccauuaauguccugugca

SEQ ID NO: 345093 - RNA, 22 nt, Human
aauauaauuuuauuccuagagu

SEQ ID NO: 345094 - RNA, 22 nt, Human
uauggaaagcucuuuuugauug

SEQ ID NO: 345095 - RNA, 22 nt, Human
aggcagcuuaagcccuggccca

SEQ ID NO: 345096 - RNA, 22 nt, Human
aaaauuauggaguaucccaaag

SEQ ID NO: 345097 - RNA, 22 nt, Human
uaagauaaguggguugagaugg

SEQ ID NO: 345098 - RNA, 22 nt, Human
uccaggaguccuggguggcccc

SEQ ID NO: 345099 - RNA, 22 nt, Human
cuucuucaucuguaaaacuugg

SEQ ID NO: 345100 - RNA, 22 nt, Human
gccaugcuugguaugcugugag

SEQ ID NO: 345101 - RNA, 22 nt, Human
cccaggaaugaggggcggaggc

SEQ ID NO: 345102 - RNA, 22 nt, Human
aauaacuucauguaacauuuaa

SEQ ID NO: 345103 - RNA, 22 nt, Human
gauuucuucauuuguggugaau

SEQ ID NO: 345104 - RNA, 22 nt, Human
cuuuggcagccucugcuauuga

SEQ ID NO: 345105 - RNA, 22 nt, Human
aggaaaacacaguauugaugga

SEQ ID NO: 345106 - RNA, 22 nt, Human
gaucuucuagcagaaguaauuu

SEQ ID NO: 345107 - RNA, 22 nt, Human
caggaaagggaugggcugccac

SEQ ID NO: 345108 - RNA, 20 nt, Human
ugaggcaggagaauggcaug

SEQ ID NO: 345109 - RNA, 22 nt, Human
ugaaacauuugaugaucuuugg

SEQ ID NO: 345110 - RNA, 22 nt, Human
uuucacuagaacguucuuguuu

SEQ ID NO: 345111 - RNA, 22 nt, Human
acauauuuugaaagcuuucuaa

SEQ ID NO: 345112 - RNA, 22 nt, Human
ugugcaggugcaggaagggggc

SEQ ID NO: 345113 - RNA, 22 nt, Human
aaugcauauguaggcaagcagu

SEQ ID NO: 345114 - RNA, 22 nt, Human
ucccaggaaggauucggcauuu

SEQ ID NO: 345115 - RNA, 22 nt, Human
uaaugucagcauaguuuauuuu

SEQ ID NO: 345116 - RNA, 22 nt, Human
guuugcauuuauuagucuucug

SEQ ID NO: 345117 - RNA, 22 nt, Human
aguugcagacgcagagauguug

SEQ ID NO: 345118 - RNA, 22 nt, Human
gaaggccauugcguccugggau

SEQ ID NO: 345119 - RNA, 22 nt, Human
acaguacauaauccugagucug

SEQ ID NO: 345120 - RNA, 22 nt, Human
caggauggagggagggcuguua

SEQ ID NO: 345121 - RNA, 22 nt, Human
aggcaggccccugagaauagac

SEQ ID NO: 345122 - RNA, 22 nt, Human
uuuuccuguccaggcaauuauu

SEQ ID NO: 345123 - RNA, 22 nt, Human
gagaacucagacgcaggucaug

SEQ ID NO: 345124 - RNA, 22 nt, Human
acucagaaccauuuacucugag

SEQ ID NO: 345125 - RNA, 22 nt, Human
ucagugugaggucuuccacccg

SEQ ID NO: 345126 - RNA, 22 nt, Human
ucugcaggaggcuggcugcagg

SEQ ID NO: 345127 - RNA, 22 nt, Human
acccaggaggcaagguugcagu

SEQ ID NO: 345128 - RNA, 22 nt, Human
cuugaaagauuuggccucugug

SEQ ID NO: 345129 - RNA, 22 nt, Human
ucuucagaggaagucagucuuu

SEQ ID NO: 345130 - RNA, 17 nt, Human
aggccagaugaggcaag

SEQ ID NO: 345131 - RNA, 19 nt, Human
cuucuggcccugagccacc

SEQ ID NO: 345132 - RNA, 22 nt, Human
agugcagcaugcuggggaggcu

SEQ ID NO: 345133 - RNA, 19 nt, Human
ugcccaggccagguugggc

SEQ ID NO: 345134 - RNA, 22 nt, Human
uuuguaaauagcaguacucaug

SEQ ID NO: 345135 - RNA, 22 nt, Human
uguuagaaauuauuaguaauau

SEQ ID NO: 345136 - RNA, 22 nt, Human
aggcagugccuggaccccagcu

SEQ ID NO: 345137 - RNA, 22 nt, Human
ucucaggacuuugggaagcuca

SEQ ID NO: 345138 - RNA, 22 nt, Human
aaaguauuugugauuuuuacca

SEQ ID NO: 345139 - RNA, 22 nt, Human
gacccaggagugcagagagugg

SEQ ID NO: 345140 - RNA, 22 nt, Human
aaaauaacuucuacuauuugca

SEQ ID NO: 345141 - RNA, 18 nt, Human
gcaggagauggguggggu

SEQ ID NO: 345142 - RNA, 22 nt, Human
acauaugauauugaggaucuca

SEQ ID NO: 345143 - RNA, 22 nt, Human
cccaggagguuggggcuacagu

SEQ ID NO: 345144 - RNA, 22 nt, Human
ugcugcuguauccuuaguguca

SEQ ID NO: 345145 - RNA, 22 nt, Human
agcccaggugagggguucgaaa

SEQ ID NO: 345146 - RNA, 22 nt, Human
agacagcugggaaauggagugu

SEQ ID NO: 345147 - RNA, 23 nt, Human
caguggagacucaugcuuccuua

SEQ ID NO: 345148 - RNA, 22 nt, Human
cuucuucauaggcaguccuguu

SEQ ID NO: 345149 - RNA, 22 nt, Human
uccaugagcuagcuuuccaaag

SEQ ID NO: 345150 - RNA, 22 nt, Human
gaggcagcugaagcuucaaaga

SEQ ID NO: 345151 - RNA, 22 nt, Human
ugaaacuuauaagaauaugaau

SEQ ID NO: 345152 - RNA, 22 nt, Human
gcuacugauugaccuuggagag

SEQ ID NO: 345153 - RNA, 22 nt, Human
uggcagcuccggguaggggcug

SEQ ID NO: 345154 - RNA, 22 nt, Human
ucucugguuauuaacuaacucc

SEQ ID NO: 345155 - RNA, 22 nt, Human
uugaauaggacucagcagugau

SEQ ID NO: 345156 - RNA, 22 nt, Human
uuuuuggguccaggcuguaucu

SEQ ID NO: 345157 - RNA, 22 nt, Human
ucuucacaggagccugccugcc

SEQ ID NO: 345158 - RNA, 22 nt, Human
cggcagcucgagggccacccgu

SEQ ID NO: 345159 - RNA, 18 nt, Human
cugcccagagcacuugug

SEQ ID NO: 345160 - RNA, 22 nt, Human
uucaggauuguguuuuuccuga

SEQ ID NO: 345161 - RNA, 22 nt, Human
uuugacauuauccuguuacugg

SEQ ID NO: 345162 - RNA, 20 nt, Human
gcccaggaauuugcauuucu

SEQ ID NO: 345163 - RNA, 22 nt, Human
cacagacccagaagggaugaag

SEQ ID NO: 345164 - RNA, 22 nt, Human
aucugcuuccugggcuccauga

SEQ ID NO: 345165 - RNA, 22 nt, Human
aagcaccugcaguugacaaaaa

SEQ ID NO: 345166 - RNA, 20 nt, Human
ugcguguguauuuauuuucu

SEQ ID NO: 345167 - RNA, 22 nt, Human
cagugcugggcagaggagagcg

SEQ ID NO: 345168 - RNA, 22 nt, Human
aaauuauuaugccccucuauaa

SEQ ID NO: 345169 - RNA, 22 nt, Human
aaaguuguucaguaagaaacuc

SEQ ID NO: 345170 - RNA, 22 nt, Human
uaaggccauuauggugggcccg

SEQ ID NO: 345171 - RNA, 22 nt, Human
cagcugccuucugcgggaaguc

SEQ ID NO: 345172 - RNA, 22 nt, Human
gagagggagccagccaggaacc

SEQ ID NO: 345173 - RNA, 22 nt, Human
uaaugcuuaacagcuggcuuuu

SEQ ID NO: 345174 - RNA, 22 nt, Human
ccaagaugaucuuuacaguguu

SEQ ID NO: 345175 - RNA, 22 nt, Human
uucauacaaugggauauuauga

SEQ ID NO: 345176 - RNA, 22 nt, Human
cauaauuucuguaucagcacca

SEQ ID NO: 345177 - RNA, 22 nt, Human
acauacuuaugcuaaaaauaua

SEQ ID NO: 345178 - RNA, 22 nt, Human
ggcagcuuucaauaggguuaug

SEQ ID NO: 345179 - RNA, 22 nt, Human
uauauguaagcuauguaagagu

SEQ ID NO: 345180 - RNA, 22 nt, Human
cccaggaaaugaacuucugauu

SEQ ID NO: 345181 - RNA, 22 nt, Human
aucaggaugacuauaaggcugc

SEQ ID NO: 345182 - RNA, 22 nt, Human
gagagucuagugcaccuaguuu

SEQ ID NO: 345183 - RNA, 22 nt, Human
accaggaguagaauaucuguga

SEQ ID NO: 345184 - RNA, 18 nt, Human
cauaauuuucuuucuuua

SEQ ID NO: 345185 - RNA, 22 nt, Human
uuucaaacauagaucugaauau

SEQ ID NO: 345186 - RNA, 22 nt, Human
uuauuuucuccucagaaagugg

SEQ ID NO: 345187 - RNA, 22 nt, Human
ccuugcauauauuauaucuuug

SEQ ID NO: 345188 - RNA, 22 nt, Human
ggcagcuggggcagugcccugu

SEQ ID NO: 345189 - RNA, 22 nt, Human
ucuggcuuucauuuguuuaaag

SEQ ID NO: 345190 - RNA, 22 nt, Human
agugagaguauuaaugugaacu

SEQ ID NO: 345191 - RNA, 22 nt, Human
ccuggacucaggcugugggcac

SEQ ID NO: 345192 - RNA, 22 nt, Human
gcuguguuggugaagcuguagc

SEQ ID NO: 345193 - RNA, 22 nt, Human
cauuuucagcacccaucugaaa

SEQ ID NO: 345194 - RNA, 18 nt, Human
aggcagacacuagagguc

SEQ ID NO: 345195 - RNA, 23 nt, Human
ugaaggccuggaggacgcguugu

SEQ ID NO: 345196 - RNA, 22 nt, Human
aguaugaagcugaaugauuuua

SEQ ID NO: 345197 - RNA, 22 nt, Human
uggagcugggguuugaaucugg

SEQ ID NO: 345198 - RNA, 22 nt, Human
ugucuuuggaauauuuagcuga

SEQ ID NO: 345199 - RNA, 21 nt, Human
aggaggggucuuucccacuga

SEQ ID NO: 345200 - RNA, 20 nt, Human
uuucuugucggcuguugcug

SEQ ID NO: 345201 - RNA, 22 nt, Human
cucaggauucucgacacucaca

SEQ ID NO: 345202 - RNA, 22 nt, Human
gacccaggcucgugggacggcu

SEQ ID NO: 345203 - RNA, 22 nt, Human
aaaguguugauaugugacaucc

SEQ ID NO: 345204 - RNA, 22 nt, Human
ggcagcuuccuaggagagggca

SEQ ID NO: 345205 - RNA, 22 nt, Human
uuugacauuggcuuauucuguu

SEQ ID NO: 345206 - RNA, 22 nt, Human
ucagucucuggggcuucuguuu

SEQ ID NO: 345207 - RNA, 19 nt, Human
uuucccagcccuugcugug

SEQ ID NO: 345208 - RNA, 22 nt, Human
ugagggagagggcgaaaaugaa

SEQ ID NO: 345209 - RNA, 22 nt, Human
gggauggggagcuggaaagggg

SEQ ID NO: 345210 - RNA, 22 nt, Human
aaggcagcuuuaaaaaagaugc

SEQ ID NO: 345211 - RNA, 22 nt, Human
cccaggagacauauagaaggac

SEQ ID NO: 345212 - RNA, 22 nt, Human
auaugugaaguggguuauuuug

SEQ ID NO: 345213 - RNA, 22 nt, Human
gacccaggagagaggguugcau

SEQ ID NO: 345214 - RNA, 23 nt, Human
uucauuugucuacuucacuuguu

SEQ ID NO: 345215 - RNA, 22 nt, Human
gucuuucuaugaugaacuguug

SEQ ID NO: 345216 - RNA, 22 nt, Human
auggaguucuuuaaauucacag

SEQ ID NO: 345217 - RNA, 22 nt, Human
uuugaaagccuggcuuuucucu

SEQ ID NO: 345218 - RNA, 22 nt, Human
uacauucagaagaauggacacg

SEQ ID NO: 345219 - RNA, 22 nt, Human
gggagucugggcuagacuccuu

SEQ ID NO: 345220 - RNA, 22 nt, Human
auacauauaugguacuuccugg

SEQ ID NO: 345221 - RNA, 20 nt, Human
accaggagauggaggcaggg

SEQ ID NO: 345222 - RNA, 22 nt, Human
aaggcagcucagcucauggcag

SEQ ID NO: 345223 - RNA, 22 nt, Human
cacauauuugaugaagcuuugu

SEQ ID NO: 345224 - RNA, 22 nt, Human
uguuagaauauuguaauauucg

SEQ ID NO: 345225 - RNA, 22 nt, Human
uugaaggacauccuauuucuag

SEQ ID NO: 345226 - RNA, 22 nt, Human
ugucugugaccucuuuggagcc

SEQ ID NO: 345227 - RNA, 22 nt, Human
ucauuguuucugcuuuucauga

SEQ ID NO: 345228 - RNA, 22 nt, Human
cuugaaagcacuuaguaaauua

SEQ ID NO: 345229 - RNA, 22 nt, Human
uucacagacuuuccauagauug

SEQ ID NO: 345230 - RNA, 22 nt, Human
cugcucuagagagcauuaguca

SEQ ID NO: 345231 - RNA, 22 nt, Human
auuucauagauuguaaaucccu

SEQ ID NO: 345232 - RNA, 22 nt, Human
caggcagcagccacucugguau

SEQ ID NO: 345233 - RNA, 22 nt, Human
cacaauuuguuuuaucaguauu

SEQ ID NO: 345234 - RNA, 22 nt, Human
uauucacaggcacgaaauauug

SEQ ID NO: 345235 - RNA, 22 nt, Human
ugaggcagugugagauaauaaa

SEQ ID NO: 345236 - RNA, 20 nt, Human
gaguuccccauuucuccugg

SEQ ID NO: 345237 - RNA, 22 nt, Human
uuuuaucuaccuaugcucauuu

SEQ ID NO: 345238 - RNA, 22 nt, Human
gcagggaagaucuuggagcugc

SEQ ID NO: 345239 - RNA, 22 nt, Human
ugugaacuggcagguggacggg

SEQ ID NO: 345240 - RNA, 22 nt, Human
ggaggggagauguuugggcuca

SEQ ID NO: 345241 - RNA, 22 nt, Human
uauauauucuuaaguaguguag

SEQ ID NO: 345242 - RNA, 22 nt, Human
ucaauaaaauuguuuuccuauc

SEQ ID NO: 345243 - RNA, 22 nt, Human
ggagccuggucagguuggcucc

SEQ ID NO: 345244 - RNA, 22 nt, Human
agcugccgaugcccagcugcau

SEQ ID NO: 345245 - RNA, 22 nt, Human
gaaggccacaaaaaaugucaua

SEQ ID NO: 345246 - RNA, 22 nt, Human
uuccaugagcucugaguucaca

SEQ ID NO: 345247 - RNA, 22 nt, Human
gagaggucaucucccaucagca

SEQ ID NO: 345248 - RNA, 22 nt, Human
ucaggagaaucagggcuguccu

SEQ ID NO: 345249 - RNA, 22 nt, Human
auaucaguaucuauguauuugu

SEQ ID NO: 345250 - RNA, 22 nt, Human
ccuucuucuguguggcccaaga

SEQ ID NO: 345251 - RNA, 22 nt, Human
uccaggagaaaacugacggugg

SEQ ID NO: 345252 - RNA, 21 nt, Human
uggaggaauaaagcacagaag

SEQ ID NO: 345253 - RNA, 22 nt, Human
uccaggagguuuggaggaagca

SEQ ID NO: 345254 - RNA, 22 nt, Human
gcccaggaguuugcauuuuaac

SEQ ID NO: 345255 - RNA, 22 nt, Human
agaggucagauuucuccuggug

SEQ ID NO: 345256 - RNA, 22 nt, Human
uggcagcugagugcacccccuc

SEQ ID NO: 345257 - RNA, 22 nt, Human
uguagaaccuguuuauuauaga

SEQ ID NO: 345258 - RNA, 19 nt, Human
agcaacaccguuuauuucc

SEQ ID NO: 345259 - RNA, 22 nt, Human
aggaguggugcaggaccugcca

SEQ ID NO: 345260 - RNA, 22 nt, Human
uucaugaaacuuaacuguuggg

SEQ ID NO: 345261 - RNA, 23 nt, Human
aggucagcaggcaaggaaauggc

SEQ ID NO: 345262 - RNA, 22 nt, Human
uuugaagucaggcuuucuaccc

SEQ ID NO: 345263 - RNA, 22 nt, Human
ugcuagaauuugcagaagcaua

SEQ ID NO: 345264 - RNA, 22 nt, Human
caagauggaguccgggaaugug

SEQ ID NO: 345265 - RNA, 22 nt, Human
cugcccaggaaccagaggggca

SEQ ID NO: 345266 - RNA, 22 nt, Human
ucuuugaacuuggcugaucucu

SEQ ID NO: 345267 - RNA, 22 nt, Human
aauaucaacaguguccuucuaa

SEQ ID NO: 345268 - RNA, 22 nt, Human
accaggaggccuggagcacaaa

SEQ ID NO: 345269 - RNA, 22 nt, Human
aaaguuguaauggaagaaaugc

SEQ ID NO: 345270 - RNA, 22 nt, Human
cauaauuucccaagagauugaa

SEQ ID NO: 345271 - RNA, 22 nt, Human
ugaggcaggaguuaaugugcuc

SEQ ID NO: 345272 - RNA, 22 nt, Human
aggcagcaugggccccagcucc

SEQ ID NO: 345273 - RNA, 22 nt, Human
caggcagggagcuggaaaggau

SEQ ID NO: 345274 - RNA, 22 nt, Human
gaggcaugcagagcuggagcag

SEQ ID NO: 345275 - RNA, 22 nt, Human
aaggaaccauuugugugcaugg

SEQ ID NO: 345276 - RNA, 22 nt, Human
aaaggccauuacuugcuuuuag

SEQ ID NO: 345277 - RNA, 22 nt, Human
gaaaggccauuucugaggguuu

SEQ ID NO: 345278 - RNA, 22 nt, Human
uuguaauuugcaaauguauugu

SEQ ID NO: 345279 - RNA, 22 nt, Human
cucugcaugccuugcucagaca

SEQ ID NO: 345280 - RNA, 22 nt, Human
ggcaagcucaggccucaggugu

SEQ ID NO: 345281 - RNA, 22 nt, Human
uaugacauuggccaaguucugu

SEQ ID NO: 345282 - RNA, 22 nt, Human
uauuucagcacaugggauaggu

SEQ ID NO: 345283 - RNA, 17 nt, Human
gucauucucagaaaaug

SEQ ID NO: 345284 - RNA, 23 nt, Human
cugcuguuuucuguaccugaagc

SEQ ID NO: 345285 - RNA, 22 nt, Human
cagcugacagugaggugggggc

SEQ ID NO: 345286 - RNA, 22 nt, Human
uugaauaguuuuggauagcaua

SEQ ID NO: 345287 - RNA, 22 nt, Human
ugcuuucaaaggcuuucuagau

SEQ ID NO: 345288 - RNA, 22 nt, Human
cuucugugauuugguuaggaua

SEQ ID NO: 345289 - RNA, 22 nt, Human
gaucuguuucauucacagucug

SEQ ID NO: 345290 - RNA, 23 nt, Human
auugaugacuugauuacacuuuu

SEQ ID NO: 345291 - RNA, 17 nt, Human
uugaacugcugagucag

SEQ ID NO: 345292 - RNA, 22 nt, Human
acuguugucaggcugcuuugga

SEQ ID NO: 345293 - RNA, 22 nt, Human
uaauaguugugacuuuguaaag

SEQ ID NO: 345294 - RNA, 22 nt, Human
aggcaguuguagagagggcucu

SEQ ID NO: 345295 - RNA, 20 nt, Human
aggaggcauagucuggaaag

SEQ ID NO: 345296 - RNA, 22 nt, Human
augaaaauguacauguguauaa

SEQ ID NO: 345297 - RNA, 22 nt, Human
cuggcuuucucugugguguuca

SEQ ID NO: 345298 - RNA, 22 nt, Human
uuaacacauauuuaucaauugc

SEQ ID NO: 345299 - RNA, 22 nt, Human
ucugcucuguggcuucagcuaa

SEQ ID NO: 345300 - RNA, 22 nt, Human
caaauacuggguaaguuaauuu

SEQ ID NO: 345301 - RNA, 22 nt, Human
aaaggccacacagagcagggag

SEQ ID NO: 345302 - RNA, 22 nt, Human
gcagcugcagagaccggguggg

SEQ ID NO: 345303 - RNA, 22 nt, Human
gugcuuucugcugcauuccucu

SEQ ID NO: 345304 - RNA, 22 nt, Human
aucauuacuccuguaaaauugu

SEQ ID NO: 345305 - RNA, 18 nt, Human
cccucuugcacaaagcaa

SEQ ID NO: 345306 - RNA, 22 nt, Human
gggcagcuggcuuauagguuug

SEQ ID NO: 345307 - RNA, 20 nt, Human
ucuggcaggugaacgagcug

SEQ ID NO: 345308 - RNA, 22 nt, Human
uagcucuucaaucacugucucc

SEQ ID NO: 345309 - RNA, 22 nt, Human
ucaugcuuaaaagacacuugag

SEQ ID NO: 345310 - RNA, 22 nt, Human
uguugauuaguguuuagacuua

SEQ ID NO: 345311 - RNA, 18 nt, Human
gucacuguguuucugagc

SEQ ID NO: 345312 - RNA, 22 nt, Human
cuguaugaacccauauacuuau

SEQ ID NO: 345313 - RNA, 22 nt, Human
gcccaggaguuggaggcugcag

SEQ ID NO: 345314 - RNA, 22 nt, Human
cagcuggccaaucagggcgccc

SEQ ID NO: 345315 - RNA, 22 nt, Human
acaauguguuuuuauacauuug

SEQ ID NO: 345316 - RNA, 22 nt, Human
uauguaaaaauucaucaggcug

SEQ ID NO: 345317 - RNA, 22 nt, Human
aauggccagcaacaggagugaa

SEQ ID NO: 345318 - RNA, 22 nt, Human
cagagaaaaaauccugcucuca

SEQ ID NO: 345319 - RNA, 22 nt, Human
cagaggcauacucccagucuug

SEQ ID NO: 345320 - RNA, 22 nt, Human
ucugaaauagaagugucuuucu

SEQ ID NO: 345321 - RNA, 22 nt, Human
uaaggccaaacuauuauaguuc

SEQ ID NO: 345322 - RNA, 22 nt, Human
uaaaacuuaacuauccagauua

SEQ ID NO: 345323 - RNA, 22 nt, Human
caggauggucagaugcauuguc

SEQ ID NO: 345324 - RNA, 22 nt, Human
caggaggggguggaguuucgcc

SEQ ID NO: 345325 - RNA, 22 nt, Human
uuucaguuuaugucuugaauua

SEQ ID NO: 345326 - RNA, 22 nt, Human
cucaggauccaucuccugcccu

SEQ ID NO: 345327 - RNA, 20 nt, Human
cugcugugguccuuuauuuu

SEQ ID NO: 345328 - RNA, 22 nt, Human
ucucacuggguauaaaugagua

SEQ ID NO: 345329 - RNA, 22 nt, Human
uucuaugccauguucagcuacu

SEQ ID NO: 345330 - RNA, 22 nt, Human
cuuuggcaaggguuuuaauugu

SEQ ID NO: 345331 - RNA, 22 nt, Human
gacggcagaaacucaugagguc

SEQ ID NO: 345332 - RNA, 22 nt, Human
aaguaugugauacauguuaauu

SEQ ID NO: 345333 - RNA, 22 nt, Human
gauggacagccuggaaggaaag

SEQ ID NO: 345334 - RNA, 22 nt, Human
auucugucuuuuuaaaauaaua

SEQ ID NO: 345335 - RNA, 22 nt, Human
cucaggaugaaagucaugguga

SEQ ID NO: 345336 - RNA, 22 nt, Human
aggcagcuuuaacugguaguag

SEQ ID NO: 345337 - RNA, 22 nt, Human
uuugcacuagcauuuguccaug

SEQ ID NO: 345338 - RNA, 22 nt, Human
guucuucaaagugacaacuaaa

SEQ ID NO: 345339 - RNA, 22 nt, Human
uuaggaguccagaugucuuggg

SEQ ID NO: 345340 - RNA, 22 nt, Human
agugcuuugaacgaaaggcuga

SEQ ID NO: 345341 - RNA, 22 nt, Human
acccaggagcaggcugggcagu

SEQ ID NO: 345342 - RNA, 22 nt, Human
gaggcagugucgguggcaggau

SEQ ID NO: 345343 - RNA, 22 nt, Human
cucuucuuauggccguggcuga

SEQ ID NO: 345344 - RNA, 22 nt, Human
aaacacaucauucaugucguca

SEQ ID NO: 345345 - RNA, 22 nt, Human
uugugaguagugccgcaauaaa

SEQ ID NO: 345346 - RNA, 22 nt, Human
uuucaaagaccauuaacuauca

SEQ ID NO: 345347 - RNA, 22 nt, Human
ugauugaagaggugaggaaguu

SEQ ID NO: 345348 - RNA, 22 nt, Human
cccaggaggcagaaguugcagu

SEQ ID NO: 345349 - RNA, 22 nt, Human
cagagggcacaugguuuccuca

SEQ ID NO: 345350 - RNA, 22 nt, Human
gaggggaaaguucugcacaagg

SEQ ID NO: 345351 - RNA, 22 nt, Human
ugcauguguuugccacagugag

SEQ ID NO: 345352 - RNA, 22 nt, Human
uucugucaaauuugccauaugg

SEQ ID NO: 345353 - RNA, 22 nt, Human
uuuaaauuauaguuaaugucug

SEQ ID NO: 345354 - RNA, 22 nt, Human
caaggccaagguuuugugaacu

SEQ ID NO: 345355 - RNA, 22 nt, Human
uucaauucaauucuaaauauau

SEQ ID NO: 345356 - RNA, 22 nt, Human
gccaggagcaugucauuguuga

SEQ ID NO: 345357 - RNA, 22 nt, Human
cacaauuuccuugcuucacuuu

SEQ ID NO: 345358 - RNA, 22 nt, Human
aggaagcuaaccagggagugag

SEQ ID NO: 345359 - RNA, 22 nt, Human
cagaauggcuuuuauggcucag

SEQ ID NO: 345360 - RNA, 22 nt, Human
uccaggagggauugggcugugg

SEQ ID NO: 345361 - RNA, 22 nt, Human
uauucacaugaaaacaaauuuu

SEQ ID NO: 345362 - RNA, 22 nt, Human
ucugucaaaaguuuucaauaaa

SEQ ID NO: 345363 - RNA, 22 nt, Human
cucuucuugaaagaggaauuca

SEQ ID NO: 345364 - RNA, 22 nt, Human
ugugugaaggaauauauacuca

SEQ ID NO: 345365 - RNA, 22 nt, Human
uuggcaguaaaagaaaaugcuu

SEQ ID NO: 345366 - RNA, 22 nt, Human
aagcaacucccuccucauuuuu

SEQ ID NO: 345367 - RNA, 22 nt, Human
augcagcugucagggagaacau

SEQ ID NO: 345368 - RNA, 22 nt, Human
ccuugcugaccaucaccuuuga

SEQ ID NO: 345369 - RNA, 22 nt, Human
ggcagaggaggggugaauuugc

SEQ ID NO: 345370 - RNA, 20 nt, Human
aagagaggaaguuauacuag

SEQ ID NO: 345371 - RNA, 22 nt, Human
cauuuguaucauauguaucuua

SEQ ID NO: 345372 - RNA, 22 nt, Human
ugaguucuaguggcugcagauu

SEQ ID NO: 345373 - RNA, 22 nt, Human
ggguggagaggcuaaguccagu

SEQ ID NO: 345374 - RNA, 23 nt, Human
uccaggagaaccccugucugucc

SEQ ID NO: 345375 - RNA, 22 nt, Human
caggguggcacucagcgcaucu

SEQ ID NO: 345376 - RNA, 22 nt, Human
ugcauuuccagauuucuggagu

SEQ ID NO: 345377 - RNA, 20 nt, Human
cucaggauugucuagccccu

SEQ ID NO: 345378 - RNA, 22 nt, Human
uggcagcucuguucaacaugag

SEQ ID NO: 345379 - RNA, 22 nt, Human
gaggaaccacucugagaagcca

SEQ ID NO: 345380 - RNA, 22 nt, Human
ccugcucagagcgucuugugug

SEQ ID NO: 345381 - RNA, 17 nt, Human
ugauaguucauuuuaag

SEQ ID NO: 345382 - RNA, 22 nt, Human
cauuuauucauuugcuagggcu

SEQ ID NO: 345383 - RNA, 23 nt, Human
cuucucagaagucugugccagga

SEQ ID NO: 345384 - RNA, 22 nt, Human
cugcuguguugccagugucacc

SEQ ID NO: 345385 - RNA, 22 nt, Human
auuaaauuggaucugcauaguu

SEQ ID NO: 345386 - RNA, 22 nt, Human
acauacauauguuuaaaugcau

SEQ ID NO: 345387 - RNA, 22 nt, Human
ucuggucaguaauaagaagugg

SEQ ID NO: 345388 - RNA, 22 nt, Human
aucugcuugaaugagcaacagg

SEQ ID NO: 345389 - RNA, 22 nt, Human
guucuugccagcauccucaggu

SEQ ID NO: 345390 - RNA, 22 nt, Human
gagcagcucugugccuggagac

SEQ ID NO: 345391 - RNA, 22 nt, Human
cauuuguuuagaagucuuuaua

SEQ ID NO: 345392 - RNA, 22 nt, Human
uaugacauuauaaaggauuauu

SEQ ID NO: 345393 - RNA, 22 nt, Human
caggauggagaguuguugguug

SEQ ID NO: 345394 - RNA, 22 nt, Human
uuuguuaauucuuauguuagag

SEQ ID NO: 345395 - RNA, 22 nt, Human
uucaaacaguguagaauauaug

SEQ ID NO: 345396 - RNA, 22 nt, Human
aauaauuagugggacagagaac

SEQ ID NO: 345397 - RNA, 22 nt, Human
ugugaaaagcguguguucuagg

SEQ ID NO: 345398 - RNA, 22 nt, Human
agaggagugggaagcagugcaa

SEQ ID NO: 345399 - RNA, 22 nt, Human
uucaggauuauacucucuuccc

SEQ ID NO: 345400 - RNA, 22 nt, Human
uucugaaagccaauucauugaa

SEQ ID NO: 345401 - RNA, 22 nt, Human
acacagccgugaaucugcuucu

SEQ ID NO: 345402 - RNA, 22 nt, Human
ggaggaugagcuacgaggagcu

SEQ ID NO: 345403 - RNA, 23 nt, Human
uugaaagguagcuggcagcuaga

SEQ ID NO: 345404 - RNA, 22 nt, Human
uaacuuucuucauaugugaacc

SEQ ID NO: 345405 - RNA, 22 nt, Human
ucauuuugggguuugucaucuu

SEQ ID NO: 345406 - RNA, 22 nt, Human
caggagagcccggguccgggcu

SEQ ID NO: 345407 - RNA, 22 nt, Human
ccaggagaaugggauuacccua

SEQ ID NO: 345408 - RNA, 22 nt, Human
agaggcggagcuugcagugagc

SEQ ID NO: 345409 - RNA, 20 nt, Human
uguuaaaggacacuugcuuu

SEQ ID NO: 345410 - RNA, 22 nt, Human
cccuggaggcuggaggcaguag

SEQ ID NO: 345411 - RNA, 22 nt, Human
cccaggagagaggggauaaagc

SEQ ID NO: 345412 - RNA, 16 nt, Human
gcccaggacgggaggc

SEQ ID NO: 345413 - RNA, 22 nt, Human
uuucugugguggguaguucaga

SEQ ID NO: 345414 - RNA, 18 nt, Human
uugagggaggggcagagu

SEQ ID NO: 345415 - RNA, 22 nt, Human
cucccagagaccaagcugagaa

SEQ ID NO: 345416 - RNA, 22 nt, Human
ucuucagauggccaguuguccc

SEQ ID NO: 345417 - RNA, 22 nt, Human
auugaaagauauacuguucuca

SEQ ID NO: 345418 - RNA, 22 nt, Human
aggcaguuguugcugagcagcu

SEQ ID NO: 345419 - RNA, 22 nt, Human
cccuugcaucccauguguggcc

SEQ ID NO: 345420 - RNA, 20 nt, Human
aggcaguuagaaggagauga

SEQ ID NO: 345421 - RNA, 22 nt, Human
aaggcaguaggaucuuccacag

SEQ ID NO: 345422 - RNA, 22 nt, Human
guguguuucagaagccaggugu

SEQ ID NO: 345423 - RNA, 22 nt, Human
uggcagcugccauguccacgug

SEQ ID NO: 345424 - RNA, 22 nt, Human
acuucacagauauuuauuuggu

SEQ ID NO: 345425 - RNA, 22 nt, Human
uauuuuaaagacugccagccua

SEQ ID NO: 345426 - RNA, 22 nt, Human
gaccauuuuuacagagcauuca

SEQ ID NO: 345427 - RNA, 22 nt, Human
cuguaaauaugaagaauauaug

SEQ ID NO: 345428 - RNA, 22 nt, Human
ugaacuuagugggaauaucucu

SEQ ID NO: 345429 - RNA, 22 nt, Human
uucaugugauaaaugugugacu

SEQ ID NO: 345430 - RNA, 22 nt, Human
acauuuaaauaccuauguuucu

SEQ ID NO: 345431 - RNA, 22 nt, Human
cuucuucaagagaaugggagac

SEQ ID NO: 345432 - RNA, 22 nt, Human
uugcuuuguuacugcaguuucc

SEQ ID NO: 345433 - RNA, 22 nt, Human
uuaaauuccagccucauaauag

SEQ ID NO: 345434 - RNA, 22 nt, Human
gcuggcagggacagcugcgugu

SEQ ID NO: 345435 - RNA, 22 nt, Human
gagaggaguagacacuuugguu

SEQ ID NO: 345436 - RNA, 22 nt, Human
uugcacuaggaaaaggcagcca

SEQ ID NO: 345437 - RNA, 21 nt, Human
uuugaaagcuacaucuauagc

SEQ ID NO: 345438 - RNA, 22 nt, Human
uuugcaaauaccaugaaacuug

SEQ ID NO: 345439 - RNA, 22 nt, Human
cuggcuugcagcucaucauaaa

SEQ ID NO: 345440 - RNA, 22 nt, Human
aaguuucauuguucauguaaca

SEQ ID NO: 345441 - RNA, 22 nt, Human
acaguggagaaggcaugaggcu

SEQ ID NO: 345442 - RNA, 22 nt, Human
agugugucugaucacuugugag

SEQ ID NO: 345443 - RNA, 22 nt, Human
ugaaucaguauaaauucucaaa

SEQ ID NO: 345444 - RNA, 22 nt, Human
caugaaaucugaguauguuucc

SEQ ID NO: 345445 - RNA, 22 nt, Human
gaggucaggggagaggcugaug

SEQ ID NO: 345446 - RNA, 22 nt, Human
caggagaggaggcuacuucuua

SEQ ID NO: 345447 - RNA, 21 nt, Human
gugcuuuuccuuaauguucuu

SEQ ID NO: 345448 - RNA, 22 nt, Human
uuuccauguuggugaaaugagg

SEQ ID NO: 345449 - RNA, 22 nt, Human
ucuucuccagugcuucugcaca

SEQ ID NO: 345450 - RNA, 22 nt, Human
uauuaaauuauggauuuaggag

SEQ ID NO: 345451 - RNA, 22 nt, Human
agugagggaugaagaacugcgg

SEQ ID NO: 345452 - RNA, 22 nt, Human
ggcagcuaguuuaagaaagagg

SEQ ID NO: 345453 - RNA, 22 nt, Human
aauuauguagccauaugaaaca

SEQ ID NO: 345454 - RNA, 22 nt, Human
uccaggaggcucugguugacgu

SEQ ID NO: 345455 - RNA, 22 nt, Human
uuucauaauacuguacaugaaa

SEQ ID NO: 345456 - RNA, 23 nt, Human
ucagucuucccugucaguaauag

SEQ ID NO: 345457 - RNA, 22 nt, Human
gcccaggaguucaaggcugcag

SEQ ID NO: 345458 - RNA, 22 nt, Human
uugaaagaggcaaaguuugauc

SEQ ID NO: 345459 - RNA, 18 nt, Human
ucuuccaacacugacacc

SEQ ID NO: 345460 - RNA, 22 nt, Human
ggaggagggguuuacauuggaa

SEQ ID NO: 345461 - RNA, 22 nt, Human
uguaugaagccagaaucuguuu

SEQ ID NO: 345462 - RNA, 22 nt, Human
auucuucacauaagugcuguac

SEQ ID NO: 345463 - RNA, 22 nt, Human
cucccagagagcaggugggccg

SEQ ID NO: 345464 - RNA, 22 nt, Human
auccaugaucaauuuauuacua

SEQ ID NO: 345465 - RNA, 22 nt, Human
augcugugucuagcaggaacac

SEQ ID NO: 345466 - RNA, 22 nt, Human
aggcaguggagcuggaauaggc

SEQ ID NO: 345467 - RNA, 22 nt, Human
aaauaguucagccacggugacu

SEQ ID NO: 345468 - RNA, 22 nt, Human
cccaggagccaucugucuuggc

SEQ ID NO: 345469 - RNA, 22 nt, Human
gagggagggaaaguuuaacacu

SEQ ID NO: 345470 - RNA, 22 nt, Human
agugcuuuccuucuugugacau

SEQ ID NO: 345471 - RNA, 22 nt, Human
aucugucagccugggauuaggg

SEQ ID NO: 345472 - RNA, 22 nt, Human
cccaggagagagacuugaaucu

SEQ ID NO: 345473 - RNA, 22 nt, Human
uaauuauucuagucacauagca

SEQ ID NO: 345474 - RNA, 22 nt, Human
uugaaauaucaaguuauuagug

SEQ ID NO: 345475 - RNA, 22 nt, Human
cugucauugagccugucagggc

SEQ ID NO: 345476 - RNA, 17 nt, Human
ucauuuguugugacuag

SEQ ID NO: 345477 - RNA, 22 nt, Human
ucugauuagcaguuuagggaaa

SEQ ID NO: 345478 - RNA, 22 nt, Human
uucuucaaacaaaaguggcaug

SEQ ID NO: 345479 - RNA, 22 nt, Human
ugcuugugagaguuuuuucaga

SEQ ID NO: 345480 - RNA, 22 nt, Human
acccaggacacagagaugaccc

SEQ ID NO: 345481 - RNA, 22 nt, Human
uuuucagaggccuaagagguuu

SEQ ID NO: 345482 - RNA, 22 nt, Human
gagggagucugugcaaagaauu

SEQ ID NO: 345483 - RNA, 22 nt, Human
uucucagagcacugcugacaaa

SEQ ID NO: 345484 - RNA, 22 nt, Human
agggagcuuccgaacuacagcu

SEQ ID NO: 345485 - RNA, 22 nt, Human
aguuuucacacucaccaaaagg

SEQ ID NO: 345486 - RNA, 22 nt, Human
uucugucacuuaggaggucaua

SEQ ID NO: 345487 - RNA, 22 nt, Human
agaggaggcagcuuaacucagu

SEQ ID NO: 345488 - RNA, 22 nt, Human
ccauuguaaauucuguggaagu

SEQ ID NO: 345489 - RNA, 22 nt, Human
uguugaagauaaaguucucauu

SEQ ID NO: 345490 - RNA, 22 nt, Human
uuucacaacugcuuauuugaga

SEQ ID NO: 345491 - RNA, 23 nt, Human
uuugaaaguaucaacucgccuga

SEQ ID NO: 345492 - RNA, 21 nt, Human
gacaaagugaagcaggcagga

SEQ ID NO: 345493 - RNA, 22 nt, Human
aaucuguucuacucuauucaga

SEQ ID NO: 345494 - RNA, 22 nt, Human
guucuucagauuccauuucagu

SEQ ID NO: 345495 - RNA, 22 nt, Human
uucucagagugaccaagucuuu

SEQ ID NO: 345496 - RNA, 22 nt, Human
gcagcugcaauaggcaucaagc

SEQ ID NO: 345497 - RNA, 22 nt, Human
uugcugugucugauggcugaga

SEQ ID NO: 345498 - RNA, 22 nt, Human
guuuucugauuagcaaaucuga

SEQ ID NO: 345499 - RNA, 22 nt, Human
acccaggagguggaggcugcag

SEQ ID NO: 345500 - RNA, 22 nt, Human
gaggccaaguuggagaccaggu

SEQ ID NO: 345501 - RNA, 17 nt, Human
acucaggaucugggagu

SEQ ID NO: 345502 - RNA, 22 nt, Human
acugcuuuaucugagaaguccu

SEQ ID NO: 345503 - RNA, 22 nt, Human
ucacaaauauuuuaacaguagg

SEQ ID NO: 345504 - RNA, 22 nt, Human
aagauauucaaagauuuauuag

SEQ ID NO: 345505 - RNA, 22 nt, Human
aucaaauauaauaauuuucgcu

SEQ ID NO: 345506 - RNA, 22 nt, Human
ucuuuuggguucuuaugauuua

SEQ ID NO: 345507 - RNA, 22 nt, Human
gcagaggccuagguggaaggcc

SEQ ID NO: 345508 - RNA, 22 nt, Human
cuggcuguauuaguuugauccu

SEQ ID NO: 345509 - RNA, 22 nt, Human
augcaucuauucccaagggcag

SEQ ID NO: 345510 - RNA, 22 nt, Human
gggcagcuccuguggaauccac

SEQ ID NO: 345511 - RNA, 22 nt, Human
uuggaaauugcaagugauuugc

SEQ ID NO: 345512 - RNA, 22 nt, Human
acucaggaagaaagcagcuggu

SEQ ID NO: 345513 - RNA, 22 nt, Human
aauaauuuuagcucagaguugu

SEQ ID NO: 345514 - RNA, 22 nt, Human
gucaggaucaaauugaaguuau

SEQ ID NO: 345515 - RNA, 22 nt, Human
aagggcaggaaaagauggaugu

SEQ ID NO: 345516 - RNA, 22 nt, Human
ccucacugcuauguguuugcuc

SEQ ID NO: 345517 - RNA, 22 nt, Human
auugcuuaucuaucuuuaaguc

SEQ ID NO: 345518 - RNA, 22 nt, Human
cccaggagagaggccaguuggc

SEQ ID NO: 345519 - RNA, 23 nt, Human
auguauuuaaauuucagugauga

SEQ ID NO: 345520 - RNA, 22 nt, Human
cacugagcugauagaauuccag

SEQ ID NO: 345521 - RNA, 22 nt, Human
uaauuucaccguugcuagaaau

SEQ ID NO: 345522 - RNA, 22 nt, Human
uauguguuugacacccugcaag

SEQ ID NO: 345523 - RNA, 22 nt, Human
caggaggaagaacucugcaaca

SEQ ID NO: 345524 - RNA, 22 nt, Human
cucccaggguagggagagacua

SEQ ID NO: 345525 - RNA, 22 nt, Human
agcugcccuuaauaggcauuca

SEQ ID NO: 345526 - RNA, 22 nt, Human
aauuacuuaagagaaacuuuga

SEQ ID NO: 345527 - RNA, 22 nt, Human
uauacacaaggugugcauuugu

SEQ ID NO: 345528 - RNA, 22 nt, Human
uccaggagguugagugaguucc

SEQ ID NO: 345529 - RNA, 22 nt, Human
gcuguguuuuauguuagguuaa

SEQ ID NO: 345530 - RNA, 22 nt, Human
uaugauuuguagacauuugauu

SEQ ID NO: 345531 - RNA, 22 nt, Human
ugucauaacuuagugacaaauc

SEQ ID NO: 345532 - RNA, 22 nt, Human
ccagugcuucuuugcuagcugg

SEQ ID NO: 345533 - RNA, 22 nt, Human
cuucagaagccugcagccuuug

SEQ ID NO: 345534 - RNA, 22 nt, Human
uuaaauauuauguugucugcaa

SEQ ID NO: 345535 - RNA, 22 nt, Human
uggcagcugugcuucauucuuu

SEQ ID NO: 345536 - RNA, 22 nt, Human
ccaggagagcgcccucccggcc

SEQ ID NO: 345537 - RNA, 22 nt, Human
caaaugauaccuauuacuaggc

SEQ ID NO: 345538 - RNA, 22 nt, Human
guagccauuggcaaugaagccu

SEQ ID NO: 345539 - RNA, 22 nt, Human
cauugcuguuaauugucucuag

SEQ ID NO: 345540 - RNA, 22 nt, Human
augaacugcaguauaaacuugg

SEQ ID NO: 345541 - RNA, 22 nt, Human
ccaggaaauagugcugugaucu

SEQ ID NO: 345542 - RNA, 22 nt, Human
cugcccagaagccagaugggca

SEQ ID NO: 345543 - RNA, 22 nt, Human
augauauuugcaaugugcuugc

SEQ ID NO: 345544 - RNA, 22 nt, Human
cugaggaagacagcagcugugu

SEQ ID NO: 345545 - RNA, 22 nt, Human
aauaucagcacuuuugugguau

SEQ ID NO: 345546 - RNA, 22 nt, Human
ugccuggaaggcccaugggaag

SEQ ID NO: 345547 - RNA, 22 nt, Human
uccauuuuagaagaaaauccac

SEQ ID NO: 345548 - RNA, 22 nt, Human
uuagccaugcccuagaagagga

SEQ ID NO: 345549 - RNA, 22 nt, Human
uccuucuuugacaaguggcaga

SEQ ID NO: 345550 - RNA, 22 nt, Human
acagucauuagauacaaugucu

SEQ ID NO: 345551 - RNA, 22 nt, Human
aaaggaagauugagcuuuucca

SEQ ID NO: 345552 - RNA, 22 nt, Human
caggcagcauuuacucugauga

SEQ ID NO: 345553 - RNA, 22 nt, Human
gggagcugaauggcaauggaga

SEQ ID NO: 345554 - RNA, 22 nt, Human
uaauaucuggcauucaaacaug

SEQ ID NO: 345555 - RNA, 22 nt, Human
uguucuucuagauugccuuuua

SEQ ID NO: 345556 - RNA, 22 nt, Human
ugguaaauauguccauucucuu

SEQ ID NO: 345557 - RNA, 22 nt, Human
cauuuguuaaccaguguggauu

SEQ ID NO: 345558 - RNA, 22 nt, Human
ugaaaugagagcacagaauaaa

SEQ ID NO: 345559 - RNA, 22 nt, Human
uuaagauagaacccaguagucu

SEQ ID NO: 345560 - RNA, 22 nt, Human
uggagacugugcuaagggaguu

SEQ ID NO: 345561 - RNA, 22 nt, Human
uuugaaagacagaauauuuuug

SEQ ID NO: 345562 - RNA, 22 nt, Human
uacuaaauaguuuaauuccuca

SEQ ID NO: 345563 - RNA, 22 nt, Human
aaauuauuacaagcuaguuggc

SEQ ID NO: 345564 - RNA, 22 nt, Human
uauuucagggagaauaaauuug

SEQ ID NO: 345565 - RNA, 22 nt, Human
ggcagcuuccugagccagcagc

SEQ ID NO: 345566 - RNA, 22 nt, Human
ucauuucaaugauacuacuaag

SEQ ID NO: 345567 - RNA, 22 nt, Human
gaggagcuggcugucgggaggc

SEQ ID NO: 345568 - RNA, 22 nt, Human
aaggaaccuggaguagagggag

SEQ ID NO: 345569 - RNA, 22 nt, Human
uaacuacauuucacugcaauua

SEQ ID NO: 345570 - RNA, 22 nt, Human
gggcagcugccacuccgcuugc

SEQ ID NO: 345571 - RNA, 22 nt, Human
agugcuuucuugcuccaucagu

SEQ ID NO: 345572 - RNA, 22 nt, Human
cugcuguguuucacaccucugg

SEQ ID NO: 345573 - RNA, 22 nt, Human
auauucuuccaaaacaucauuu

SEQ ID NO: 345574 - RNA, 22 nt, Human
uucacagaauggcaaguuaugg

SEQ ID NO: 345575 - RNA, 22 nt, Human
gugcauuuaggucacaugaugu

SEQ ID NO: 345576 - RNA, 22 nt, Human
uuucuucucgacaccuuauccc

SEQ ID NO: 345577 - RNA, 20 nt, Human
ggcaggcuuuauauggaggg

SEQ ID NO: 345578 - RNA, 22 nt, Human
acacauuuacauguuuacguau

SEQ ID NO: 345579 - RNA, 22 nt, Human
augauguugauaaauuacuuua

SEQ ID NO: 345580 - RNA, 19 nt, Human
ucccaggaagcaaauguca

SEQ ID NO: 345581 - RNA, 22 nt, Human
cuacuucuaaguacauggugau

SEQ ID NO: 345582 - RNA, 22 nt, Human
uggaguucucaggugagggcuu

SEQ ID NO: 345583 - RNA, 21 nt, Human
aggucagcccagcucuggaag

SEQ ID NO: 345584 - RNA, 22 nt, Human
aggcagacaaggacacaguggg

SEQ ID NO: 345585 - RNA, 22 nt, Human
ggccagcagucacagggucaga

SEQ ID NO: 345586 - RNA, 22 nt, Human
ugaggcagugcugggaagccug

SEQ ID NO: 345587 - RNA, 22 nt, Human
ucagugaucuaaggguauggcc

SEQ ID NO: 345588 - RNA, 20 nt, Human
uuuuccuucugaguauguug

SEQ ID NO: 345589 - RNA, 22 nt, Human
aguuggagugaacaugagauug

SEQ ID NO: 345590 - RNA, 22 nt, Human
cagucucuugcuucauuaguug

SEQ ID NO: 345591 - RNA, 22 nt, Human
uuccaugaaauguguuaugcuu

SEQ ID NO: 345592 - RNA, 22 nt, Human
auucucuuuguauaacaucuug

SEQ ID NO: 345593 - RNA, 22 nt, Human
ugaaggaaugaguauacuguuu

SEQ ID NO: 345594 - RNA, 22 nt, Human
cagcugcuuuaguuuuccaucc

SEQ ID NO: 345595 - RNA, 20 nt, Human
agaggaggauuauuuuauuc

SEQ ID NO: 345596 - RNA, 22 nt, Human
cauagagugauguaagguaugu

SEQ ID NO: 345597 - RNA, 22 nt, Human
auaacuuagaguaggcaaaagu

SEQ ID NO: 345598 - RNA, 22 nt, Human
acccaggagcucugggguccuc

SEQ ID NO: 345599 - RNA, 22 nt, Human
uuagcauuucaguacacauguu

SEQ ID NO: 345600 - RNA, 22 nt, Human
cuugcugggguaagucugugcu

SEQ ID NO: 345601 - RNA, 22 nt, Human
ggagcuguuggcagcuaucuug

SEQ ID NO: 345602 - RNA, 22 nt, Human
uugaaaggaauacagaggccua

SEQ ID NO: 345603 - RNA, 22 nt, Human
augcugugcuggcuaaccaugg

SEQ ID NO: 345604 - RNA, 22 nt, Human
ugucaaauuuuuauugcaguau

SEQ ID NO: 345605 - RNA, 22 nt, Human
uagcccagaagagggaagcaac

SEQ ID NO: 345606 - RNA, 22 nt, Human
cuuuuccacugagccucacaaa

SEQ ID NO: 345607 - RNA, 22 nt, Human
cugaacucuuuaugacagcuug

SEQ ID NO: 345608 - RNA, 22 nt, Human
aggcagauauuggggugaugug

SEQ ID NO: 345609 - RNA, 22 nt, Human
aucuccaggcauuucaagagac

SEQ ID NO: 345610 - RNA, 22 nt, Human
gaggcagccucaguggaccucg

SEQ ID NO: 345611 - RNA, 22 nt, Human
uccauuuuagagaugaagaaac

SEQ ID NO: 345612 - RNA, 22 nt, Human
agggaggucuuugaggggcuua

SEQ ID NO: 345613 - RNA, 22 nt, Human
aacauauaaacucuuaaguuca

SEQ ID NO: 345614 - RNA, 20 nt, Human
aggcagcugggaaaugaggg

SEQ ID NO: 345615 - RNA, 22 nt, Human
gcccaggaggucaaguagcuau

SEQ ID NO: 345616 - RNA, 22 nt, Human
cauucuuacacaauauuuuaau

SEQ ID NO: 345617 - RNA, 22 nt, Human
gggaggugauggcaagcagcgg

SEQ ID NO: 345618 - RNA, 22 nt, Human
uuccugagggacuuuugagauu

SEQ ID NO: 345619 - RNA, 22 nt, Human
uagaagcaguaauagaaauagg

SEQ ID NO: 345620 - RNA, 22 nt, Human
uucaggaugcucagaguagucu

SEQ ID NO: 345621 - RNA, 22 nt, Human
agucucugucguagaucagcgu

SEQ ID NO: 345622 - RNA, 22 nt, Human
uccaggaggcaccuuuggacca

SEQ ID NO: 345623 - RNA, 22 nt, Human
aaacauuugcaacucgguuugg

SEQ ID NO: 345624 - RNA, 22 nt, Human
uuucaucuaacacuacauaggg

SEQ ID NO: 345625 - RNA, 22 nt, Human
aggagggacaccaauauauguu

SEQ ID NO: 345626 - RNA, 22 nt, Human
gcuccuucaggugguagcuguu

SEQ ID NO: 345627 - RNA, 22 nt, Human
acacauauauacauauuugugc

SEQ ID NO: 345628 - RNA, 22 nt, Human
uauacaauggcugaaucaucca

SEQ ID NO: 345629 - RNA, 22 nt, Human
aaugucugccagaacugaucau

SEQ ID NO: 345630 - RNA, 22 nt, Human
uuggcagugucugcaaaaugga

SEQ ID NO: 345631 - RNA, 20 nt, Human
agggcagcuugaggagccgg

SEQ ID NO: 345632 - RNA, 22 nt, Human
uaucuguuguccaugcagaaag

SEQ ID NO: 345633 - RNA, 22 nt, Human
uucuccagagggcucugcagga

SEQ ID NO: 345634 - RNA, 22 nt, Human
gaggagcuugugagaagauguc

SEQ ID NO: 345635 - RNA, 22 nt, Human
uuagccauugucagcacauggc

SEQ ID NO: 345636 - RNA, 22 nt, Human
uuaacacagggggagacaaagu

SEQ ID NO: 345637 - RNA, 22 nt, Human
gcccaggaaguugaggcugccg

SEQ ID NO: 345638 - RNA, 22 nt, Human
uacauugcuuucuaauacaucu

SEQ ID NO: 345639 - RNA, 22 nt, Human
uuuggaauuggaaagugcugug

SEQ ID NO: 345640 - RNA, 22 nt, Human
auuuuacuacuccaauuaauga

SEQ ID NO: 345641 - RNA, 22 nt, Human
cagcuucugucugauuagcaag

SEQ ID NO: 345642 - RNA, 22 nt, Human
agaggacagguuuuccaugggc

SEQ ID NO: 345643 - RNA, 22 nt, Human
uuucauuuugguuaugccauaa

SEQ ID NO: 345644 - RNA, 22 nt, Human
gcagcugcuggagggaggcagg

SEQ ID NO: 345645 - RNA, 22 nt, Human
gucuucuuguuuugaaggaaau

SEQ ID NO: 345646 - RNA, 22 nt, Human
uucauuaguucugaagaugucu

SEQ ID NO: 345647 - RNA, 22 nt, Human
uggcagcucauuuggaaaugga

SEQ ID NO: 345648 - RNA, 22 nt, Human
cagucucucagcuuucagcugu

SEQ ID NO: 345649 - RNA, 22 nt, Human
uaggaaaugcuccauugcauaa

SEQ ID NO: 345650 - RNA, 22 nt, Human
uagaaauguugguauuaacauu

SEQ ID NO: 345651 - RNA, 22 nt, Human
ucaguuaacaacuauuuauuga

SEQ ID NO: 345652 - RNA, 22 nt, Human
gaugccuccaaaugagggcaga

SEQ ID NO: 345653 - RNA, 22 nt, Human
aggcagucuaucucuggagccu

SEQ ID NO: 345654 - RNA, 22 nt, Human
gagggagugccagagggccagc

SEQ ID NO: 345655 - RNA, 22 nt, Human
uguggaaaagaauaagggagau

SEQ ID NO: 345656 - RNA, 22 nt, Human
aagcagagcaagcguauuuauu

SEQ ID NO: 345657 - RNA, 22 nt, Human
cagcaggauaugguggagagag

SEQ ID NO: 345658 - RNA, 22 nt, Human
uuacaguuuaguccaagccaga

SEQ ID NO: 345659 - RNA, 22 nt, Human
uucuucaguuugguaaauguaa

SEQ ID NO: 345660 - RNA, 22 nt, Human
uuguaaauaguaguaagaugcc

SEQ ID NO: 345661 - RNA, 22 nt, Human
uuugauaagagcugcugaaacu

SEQ ID NO: 345662 - RNA, 22 nt, Human
uauguacuacacuagaacauuu

SEQ ID NO: 345663 - RNA, 19 nt, Human
uauggcaggccgaggcacu

SEQ ID NO: 345664 - RNA, 22 nt, Human
uuaaagggccgauuuccaggcc

SEQ ID NO: 345665 - RNA, 19 nt, Human
uuugaaagaguuuuauugg

SEQ ID NO: 345666 - RNA, 22 nt, Human
agucucuuauucccuauugcug

SEQ ID NO: 345667 - RNA, 22 nt, Human
cauuuguaguaucuguuuauau

SEQ ID NO: 345668 - RNA, 22 nt, Human
gcaucuaauccaguccagcauc

SEQ ID NO: 345669 - RNA, 22 nt, Human
ucugucaucucuaaaauagaaa

SEQ ID NO: 345670 - RNA, 22 nt, Human
ucccaggaagaucccagggacc

SEQ ID NO: 345671 - RNA, 22 nt, Human
cauuuacacuucuaaccacaag

SEQ ID NO: 345672 - RNA, 22 nt, Human
auguuauuaaaguacagauucu

SEQ ID NO: 345673 - RNA, 21 nt, Human
uucucagagucuauuacaguu

SEQ ID NO: 345674 - RNA, 22 nt, Human
gaggccuggagccgccuaggcg

SEQ ID NO: 345675 - RNA, 20 nt, Human
uugauucaagggcugaugga

SEQ ID NO: 345676 - RNA, 22 nt, Human
uucuucaacaaggacacuguua

SEQ ID NO: 345677 - RNA, 22 nt, Human
uuucuugaccacuauguugaua

SEQ ID NO: 345678 - RNA, 22 nt, Human
uagaaacaaugacaugcuugua

SEQ ID NO: 345679 - RNA, 22 nt, Human
cgcagggauuucaaggggccuu

SEQ ID NO: 345680 - RNA, 22 nt, Human
uggaaauguauuugggcaugcc

SEQ ID NO: 345681 - RNA, 23 nt, Human
cccuggaguaaauucuuggaagg

SEQ ID NO: 345682 - RNA, 22 nt, Human
uggagacucugcaucugugaca

SEQ ID NO: 345683 - RNA, 19 nt, Human
gaggucagcaagaaguauu

SEQ ID NO: 345684 - RNA, 22 nt, Human
aagagggcagcacagguggguc

SEQ ID NO: 345685 - RNA, 22 nt, Human
ucucuucuaacacuagaaauuc

SEQ ID NO: 345686 - RNA, 20 nt, Human
gggcaguucaaugccacucu

SEQ ID NO: 345687 - RNA, 17 nt, Human
gccaggagguuugagcu

SEQ ID NO: 345688 - RNA, 22 nt, Human
ugugugaaggagccacuguuca

SEQ ID NO: 345689 - RNA, 22 nt, Human
guaguuuucugaaaauuacuuu

SEQ ID NO: 345690 - RNA, 22 nt, Human
uaugaacuagcugauuuaguuu

SEQ ID NO: 345691 - RNA, 22 nt, Human
ucucaggagccacagcgggagu

SEQ ID NO: 345692 - RNA, 23 nt, Human
ucccaggaaucugcauuuuuaac

SEQ ID NO: 345693 - RNA, 22 nt, Human
uuauagaaggagcauucacuua

SEQ ID NO: 345694 - RNA, 22 nt, Human
acagucuacuugagcuuguaua

SEQ ID NO: 345695 - RNA, 22 nt, Human
gaaggccacggaauggagcugg

SEQ ID NO: 345696 - RNA, 22 nt, Human
uucacaauggcaaaccauuaaa

SEQ ID NO: 345697 - RNA, 21 nt, Human
agccagcuaucacacagcauu

SEQ ID NO: 345698 - RNA, 22 nt, Human
agaauccuguuuuacuucauca

SEQ ID NO: 345699 - RNA, 22 nt, Human
guuuuucuaggaccaugugauu

SEQ ID NO: 345700 - RNA, 22 nt, Human
cccaggugcugcgugaagccuc

SEQ ID NO: 345701 - RNA, 22 nt, Human
aggcaguggaaggagaaagcaa

SEQ ID NO: 345702 - RNA, 22 nt, Human
cagucucuaaaucaaucugaau

SEQ ID NO: 345703 - RNA, 22 nt, Human
uucaggauucugugucugacaa

SEQ ID NO: 345704 - RNA, 19 nt, Human
uuacuuggcaaagucaguc

SEQ ID NO: 345705 - RNA, 22 nt, Human
caaauguaaauucuuuugaagc

SEQ ID NO: 345706 - RNA, 22 nt, Human
cgucuuccucuuacgaugcgcu

SEQ ID NO: 345707 - RNA, 22 nt, Human
uuauuuaaaagugguaagauuc

SEQ ID NO: 345708 - RNA, 22 nt, Human
cagcgucucguugugggccucg

SEQ ID NO: 345709 - RNA, 20 nt, Human
cuguuaaaagguaugaauuc

SEQ ID NO: 345710 - RNA, 22 nt, Human
acuguguggaccacucugaggc

SEQ ID NO: 345711 - RNA, 22 nt, Human
uguacuaaggcuguguagaugu

SEQ ID NO: 345712 - RNA, 22 nt, Human
gaggcagagaccuucaggaccu

SEQ ID NO: 345713 - RNA, 22 nt, Human
auucuucauaccuacugagguu

SEQ ID NO: 345714 - RNA, 22 nt, Human
auguagagcaguguuguccaau

SEQ ID NO: 345715 - RNA, 22 nt, Human
ugacuagaccuauaucuuuuug

SEQ ID NO: 345716 - RNA, 22 nt, Human
ugaaacaaugugaaguugcuga

SEQ ID NO: 345717 - RNA, 22 nt, Human
uauuucagucacuucuucucug

SEQ ID NO: 345718 - RNA, 19 nt, Human
cauaauacaguggaucuga

SEQ ID NO: 345719 - RNA, 18 nt, Human
gaacagcaauuucauguu

SEQ ID NO: 345720 - RNA, 22 nt, Human
ucuugggcaauuucucuagagg

SEQ ID NO: 345721 - RNA, 22 nt, Human
agggcacucugcagggaccacc

SEQ ID NO: 345722 - RNA, 22 nt, Human
cauaaauuguacccauuccaac

SEQ ID NO: 345723 - RNA, 22 nt, Human
uacuacauacagaauuuagaga

SEQ ID NO: 345724 - RNA, 23 nt, Human
uugcauuaauguggaggcacagg

SEQ ID NO: 345725 - RNA, 21 nt, Human
accgucaguacuaguauugac

SEQ ID NO: 345726 - RNA, 22 nt, Human
ccucuugauugguuggaagcgg

SEQ ID NO: 345727 - RNA, 22 nt, Human
cuguaaccuccucuuuccauuc

SEQ ID NO: 345728 - RNA, 22 nt, Human
ucuauuaaugauucaauagugu

SEQ ID NO: 345729 - RNA, 22 nt, Human
gacuguggacucucaugauaga

SEQ ID NO: 345730 - RNA, 22 nt, Human
cugagcaugcuacaugcagcac

SEQ ID NO: 345731 - RNA, 22 nt, Human
cuugccaguguugcagaagcuc

SEQ ID NO: 345732 - RNA, 21 nt, Human
agccugcaauguagguaccgg

SEQ ID NO: 345733 - RNA, 22 nt, Human
cuguggguggcugugccccagg

SEQ ID NO: 345734 - RNA, 22 nt, Human
guaaagcaaaauguagagauug

SEQ ID NO: 345735 - RNA, 22 nt, Human
cuugggcaggggaaacagcugc

SEQ ID NO: 345736 - RNA, 17 nt, Human
ucuccuggcucuaucag

SEQ ID NO: 345737 - RNA, 22 nt, Human
aaauucuguccugaaugccauu

SEQ ID NO: 345738 - RNA, 20 nt, Human
gccaagaauaugcccgacuc

SEQ ID NO: 345739 - RNA, 22 nt, Human
uuugggcaggcuuuucccuaga

SEQ ID NO: 345740 - RNA, 22 nt, Human
cuucuggcguuggaggucugag

SEQ ID NO: 345741 - RNA, 22 nt, Human
aaggaucauguauauguuuaag

SEQ ID NO: 345742 - RNA, 22 nt, Human
acuagugcacauuguuucucaa

SEQ ID NO: 345743 - RNA, 22 nt, Human
ucugugggcauuuauaaucugg

SEQ ID NO: 345744 - RNA, 22 nt, Human
caacauuucaaggucuuuagga

SEQ ID NO: 345745 - RNA, 22 nt, Human
ggcucugcugguaagaugccuc

SEQ ID NO: 345746 - RNA, 22 nt, Human
uauucacagcugccgcacucag

SEQ ID NO: 345747 - RNA, 22 nt, Human
auuccaaagccugaauaaugga

SEQ ID NO: 345748 - RNA, 22 nt, Human
guauuucuuuacauaugcucau

SEQ ID NO: 345749 - RNA, 22 nt, Human
cuucuaauucuuauguaagcuu

SEQ ID NO: 345750 - RNA, 21 nt, Human
agcugugguuuuacaucuuuu

SEQ ID NO: 345751 - RNA, 18 nt, Human
uauaaacacacuuagguu

SEQ ID NO: 345752 - RNA, 22 nt, Human
ugccagcaguagcaguaggcca

SEQ ID NO: 345753 - RNA, 22 nt, Human
gauccacaggaaccaaaacgca

SEQ ID NO: 345754 - RNA, 22 nt, Human
uauagcagcaugauuuauaguc

SEQ ID NO: 345755 - RNA, 22 nt, Human
uuccugagucgccgagucuaug

SEQ ID NO: 345756 - RNA, 22 nt, Human
ucugcuugugucuguccagccu

SEQ ID NO: 345757 - RNA, 22 nt, Human
cucuauucuaauggauucuggg

SEQ ID NO: 345758 - RNA, 22 nt, Human
auggcucugcugggcaaagcaa

SEQ ID NO: 345759 - RNA, 22 nt, Human
uaucaguagaacaauggacauu

SEQ ID NO: 345760 - RNA, 22 nt, Human
uggggcuccuccuggcaggagg

SEQ ID NO: 345761 - RNA, 22 nt, Human
uaaaacuagugguugggacuaa

SEQ ID NO: 345762 - RNA, 22 nt, Human
uuccccuugauaaugcaguaag

SEQ ID NO: 345763 - RNA, 22 nt, Human
gugcugagugcagagugcagag

SEQ ID NO: 345764 - RNA, 22 nt, Human
aaaacuuucagggauacagaaa

SEQ ID NO: 345765 - RNA, 22 nt, Human
aaauuaacuaucacuuuuguga

SEQ ID NO: 345766 - RNA, 22 nt, Human
ccagguaggagagucaacaugu

SEQ ID NO: 345767 - RNA, 21 nt, Human
agcauucaaaagaugccauaa

SEQ ID NO: 345768 - RNA, 22 nt, Human
uagauuaucccugauuugucca

SEQ ID NO: 345769 - RNA, 22 nt, Human
ucugaggucauuccaaggacau

SEQ ID NO: 345770 - RNA, 22 nt, Human
gaaaauaguucaucacaaugau

SEQ ID NO: 345771 - RNA, 22 nt, Human
ucaugcagauaagaauaaguaa

SEQ ID NO: 345772 - RNA, 22 nt, Human
agggcacuuccucugggucccu

SEQ ID NO: 345773 - RNA, 22 nt, Human
cuguccauggcaaugaugcaga

SEQ ID NO: 345774 - RNA, 22 nt, Human
caggaugccuuugaacucugga

SEQ ID NO: 345775 - RNA, 22 nt, Human
accagucauagaaagcaguggu

SEQ ID NO: 345776 - RNA, 22 nt, Human
uuuaggaagaguugaguaaauu

SEQ ID NO: 345777 - RNA, 22 nt, Human
cauugcaacuucaaacuccugg

SEQ ID NO: 345778 - RNA, 22 nt, Human
uaaccaagcaaacuuucauugu

SEQ ID NO: 345779 - RNA, 22 nt, Human
ucucuacagcacccgcaugcua

SEQ ID NO: 345780 - RNA, 22 nt, Human
ucaguaaaugagcaaaaauuuc

SEQ ID NO: 345781 - RNA, 22 nt, Human
uaacauuucggugacaguggga

SEQ ID NO: 345782 - RNA, 22 nt, Human
auacaacagaaaaugauuauuc

SEQ ID NO: 345783 - RNA, 22 nt, Human
uuccagagaguuauuccccugg

SEQ ID NO: 345784 - RNA, 22 nt, Human
ugcauaaacuucucugguguga

SEQ ID NO: 345785 - RNA, 22 nt, Human
ccaaaauauuagugcuuaagua

SEQ ID NO: 345786 - RNA, 22 nt, Human
ggcuguggucauuaggagguug

SEQ ID NO: 345787 - RNA, 22 nt, Human
cauuuacauuuaagguuaauau

SEQ ID NO: 345788 - RNA, 22 nt, Human
ggacaucuguugugguagagga

SEQ ID NO: 345789 - RNA, 22 nt, Human
auucugcugccuaguuuaugaa

SEQ ID NO: 345790 - RNA, 22 nt, Human
ccugugggagggagcggcugga

SEQ ID NO: 345791 - RNA, 22 nt, Human
gcuucuggaagcauaugcaaga

SEQ ID NO: 345792 - RNA, 22 nt, Human
auacacauguuauuguggaagc

SEQ ID NO: 345793 - RNA, 21 nt, Human
caagacauaugaguacucugg

SEQ ID NO: 345794 - RNA, 22 nt, Human
uuuccagaaauaccauuuggug

SEQ ID NO: 345795 - RNA, 22 nt, Human
acucaucuuugaauuuucagua

SEQ ID NO: 345796 - RNA, 22 nt, Human
acaggaaaugaaaugguaucua

SEQ ID NO: 345797 - RNA, 22 nt, Human
ccugugggcgcagcuggaguca

SEQ ID NO: 345798 - RNA, 22 nt, Human
aauuagaagcuguuagcaaaau

SEQ ID NO: 345799 - RNA, 22 nt, Human
agauguuuuuccaggucuaauu

SEQ ID NO: 345800 - RNA, 22 nt, Human
acaguaaucugggaacuuguua

SEQ ID NO: 345801 - RNA, 22 nt, Human
aguaaaaucaccaucucuuugu

SEQ ID NO: 345802 - RNA, 22 nt, Human
guggcuaggcccaacggcagga

SEQ ID NO: 345803 - RNA, 22 nt, Human
guuaaaugcagauucugacuca

SEQ ID NO: 345804 - RNA, 22 nt, Human
aacacuaaaggucaguuagaag

SEQ ID NO: 345805 - RNA, 22 nt, Human
agcagcaggugaccucgaugcc

SEQ ID NO: 345806 - RNA, 22 nt, Human
cagaaacacuguauuuagggaa

SEQ ID NO: 345807 - RNA, 22 nt, Human
guuuugaauacuacuagaacuu

SEQ ID NO: 345808 - RNA, 22 nt, Human
uuguccagcgaccaggcucugu

SEQ ID NO: 345809 - RNA, 22 nt, Human
cuuugggcacugaaguaugggu

SEQ ID NO: 345810 - RNA, 22 nt, Human
acauucaugcaccuuccuaucc

SEQ ID NO: 345811 - RNA, 22 nt, Human
uuccuuucucuggacugcagcc

SEQ ID NO: 345812 - RNA, 22 nt, Human
cauccauagauugagagauggu

SEQ ID NO: 345813 - RNA, 22 nt, Human
cuucucaaaguugugaaucagg

SEQ ID NO: 345814 - RNA, 22 nt, Human
uaaaaucaugacagauugacau

SEQ ID NO: 345815 - RNA, 22 nt, Human
aaagccauaucuauucuauucu

SEQ ID NO: 345816 - RNA, 22 nt, Human
aacaguaugugagauuuacaca

SEQ ID NO: 345817 - RNA, 22 nt, Human
augccaucaaugacagaguuag

SEQ ID NO: 345818 - RNA, 22 nt, Human
gcaggaguguggugggacaucc

SEQ ID NO: 345819 - RNA, 22 nt, Human
aaaucaugguggaagaaacaga

SEQ ID NO: 345820 - RNA, 22 nt, Human
cauuccgcuccccuuccuugcg

SEQ ID NO: 345821 - RNA, 20 nt, Human
caauaauuuacuucccuauu

SEQ ID NO: 345822 - RNA, 22 nt, Human
augaauaaaacauuuuaaucag

SEQ ID NO: 345823 - RNA, 22 nt, Human
uguuaccauaggucagaacguu

SEQ ID NO: 345824 - RNA, 20 nt, Human
caucaacaccuugucagccu

SEQ ID NO: 345825 - RNA, 20 nt, Human
uugaggagauauugaauacu

SEQ ID NO: 345826 - RNA, 22 nt, Human
ugcuuguauucauaucacagcu

SEQ ID NO: 345827 - RNA, 22 nt, Human
ggcuuuuguuucagcucugcua

SEQ ID NO: 345828 - RNA, 21 nt, Human
auacaagaagauggcagucug

SEQ ID NO: 345829 - RNA, 19 nt, Human
uccagaacugcccuggccu

SEQ ID NO: 345830 - RNA, 22 nt, Human
uagcagaacaauagucaaugau

SEQ ID NO: 345831 - RNA, 22 nt, Human
caauaauugcuuuccagaguua

SEQ ID NO: 345832 - RNA, 22 nt, Human
aggcagaugggagcuggaaguu

SEQ ID NO: 345833 - RNA, 18 nt, Human
uagcucuuguugguccau

SEQ ID NO: 345834 - RNA, 22 nt, Human
uaaaugcaguacaaauuguucu

SEQ ID NO: 345835 - RNA, 22 nt, Human
auuacugaggcaaaguaguuuu

SEQ ID NO: 345836 - RNA, 22 nt, Human
uggcucaucuuuuuagacuuau

SEQ ID NO: 345837 - RNA, 20 nt, Human
ucauaugugguuguauacaa

SEQ ID NO: 345838 - RNA, 22 nt, Human
caguaaauguccucgcagggaa

SEQ ID NO: 345839 - RNA, 22 nt, Human
uuaccacagugccugucuaaug

SEQ ID NO: 345840 - RNA, 22 nt, Human
agugacauuauuuuguguacua

SEQ ID NO: 345841 - RNA, 22 nt, Human
cauaacuugguguuggaaacug

SEQ ID NO: 345842 - RNA, 22 nt, Human
cuucucuuggguguggugucuu

SEQ ID NO: 345843 - RNA, 22 nt, Human
gaaacacucaauuuaguaauuc

SEQ ID NO: 345844 - RNA, 22 nt, Human
acuucagugugguauaaaacgu

SEQ ID NO: 345845 - RNA, 22 nt, Human
gcugauggcuugcuggcugaca

SEQ ID NO: 345846 - RNA, 22 nt, Human
ugcauuaagaauuucugaggau

SEQ ID NO: 345847 - RNA, 22 nt, Human
aucaugcagcaacaagcaaggc

SEQ ID NO: 345848 - RNA, 22 nt, Human
aacagaaaucauuuagggcucu

SEQ ID NO: 345849 - RNA, 22 nt, Human
ucucauaauuguuucccagcua

SEQ ID NO: 345850 - RNA, 22 nt, Human
agucaguaugacuuauaguucu

SEQ ID NO: 345851 - RNA, 22 nt, Human
augaaaacagccuccugugaua

SEQ ID NO: 345852 - RNA, 23 nt, Human
auaauaacgucugucuugucucu

SEQ ID NO: 345853 - RNA, 18 nt, Human
ucugugggaucagugagg

SEQ ID NO: 345854 - RNA, 22 nt, Human
aaauugaauuugggaaacauug

SEQ ID NO: 345855 - RNA, 22 nt, Human
aagcaaaagguuacacuucugg

SEQ ID NO: 345856 - RNA, 22 nt, Human
caguauuuaggauuaggagaga

SEQ ID NO: 345857 - RNA, 22 nt, Human
uuguaacaguagcugucagcuc

SEQ ID NO: 345858 - RNA, 22 nt, Human
aagggccacaugccauuuaaaa

SEQ ID NO: 345859 - RNA, 22 nt, Human
uccaaauagcuggaugauggug

SEQ ID NO: 345860 - RNA, 22 nt, Human
auacaccaccuuggaucuuuca

SEQ ID NO: 345861 - RNA, 22 nt, Human
aauaaguacuuggggauaacuu

SEQ ID NO: 345862 - RNA, 22 nt, Human
uaccuugugagcuuucuaacau

SEQ ID NO: 345863 - RNA, 22 nt, Human
cugaggaucuaauuauuggguc

SEQ ID NO: 345864 - RNA, 22 nt, Human
aaacaucuucucuugauucuuu

SEQ ID NO: 345865 - RNA, 22 nt, Human
gcauaaaggacuauaaggauca

SEQ ID NO: 345866 - RNA, 22 nt, Human
agcaggcauuugauauauauuu

SEQ ID NO: 345867 - RNA, 22 nt, Human
cacaccuuaggccugagcgcuu

SEQ ID NO: 345868 - RNA, 22 nt, Human
augcugagugagugaaacccag

SEQ ID NO: 345869 - RNA, 22 nt, Human
auauaguuggguuucauucuac

SEQ ID NO: 345870 - RNA, 22 nt, Human
guuaacaacacugugagugcug

SEQ ID NO: 345871 - RNA, 22 nt, Human
ccuuuuaagggagacuagagau

SEQ ID NO: 345872 - RNA, 22 nt, Human
ugcugcacuuauggcucugagg

SEQ ID NO: 345873 - RNA, 22 nt, Human
aaugccuuggagagccuagagg

SEQ ID NO: 345874 - RNA, 22 nt, Human
uucaacaacuugguucaaaugg

SEQ ID NO: 345875 - RNA, 21 nt, Human
uugauuuagcagaucuagcug

SEQ ID NO: 345876 - RNA, 22 nt, Human
uacaguaaccagucuacuuaga

SEQ ID NO: 345877 - RNA, 22 nt, Human
aagcagcauaugacagcaucca

SEQ ID NO: 345878 - RNA, 22 nt, Human
gaugauuacacuuuuaaaacag

SEQ ID NO: 345879 - RNA, 22 nt, Human
auagcaaaggacaauagucagu

SEQ ID NO: 345880 - RNA, 22 nt, Human
uaccaaaaccaagccauuaucu

SEQ ID NO: 345881 - RNA, 22 nt, Human
cauugcuuugugcauauuuaaa

SEQ ID NO: 345882 - RNA, 22 nt, Human
cauugcuguuaauugucucuag

SEQ ID NO: 345883 - RNA, 22 nt, Human
gcaguugcaggauuuguguugu

SEQ ID NO: 345884 - RNA, 22 nt, Human
aacuuucuuugcaucuaaguuu

SEQ ID NO: 345885 - RNA, 22 nt, Human
aaggcugaauucaaggguaggc

SEQ ID NO: 345886 - RNA, 22 nt, Human
uucauucuugucuuuguauagu

SEQ ID NO: 345887 - RNA, 22 nt, Human
ucagcaguuuuauaugcagcuu

SEQ ID NO: 345888 - RNA, 22 nt, Human
caguaugucuacuggacaaagu

SEQ ID NO: 345889 - RNA, 22 nt, Human
gaugaaaaaagacgagcauaua

SEQ ID NO: 345890 - RNA, 22 nt, Human
cuggccugaggucggcuguagg

SEQ ID NO: 345891 - RNA, 22 nt, Human
aagccagguguugugguaagag

SEQ ID NO: 345892 - RNA, 22 nt, Human
aagaaugauuacaaagcaacga

SEQ ID NO: 345893 - RNA, 22 nt, Human
caggguggaaaagcuaguugga

SEQ ID NO: 345894 - RNA, 22 nt, Human
gcugagagcaguguggccuuaa

SEQ ID NO: 345895 - RNA, 22 nt, Human
uccauuuucaucucauguauaa

SEQ ID NO: 345896 - RNA, 21 nt, Human
agggagcuggccacacagccu

SEQ ID NO: 345897 - RNA, 22 nt, Human
ccagagccucgcccggagccuc

SEQ ID NO: 345898 - RNA, 22 nt, Human
uuugaaagacagaauauuuuug

SEQ ID NO: 345899 - RNA, 21 nt, Human
ugcugccaucaugcagagaug

SEQ ID NO: 345900 - RNA, 22 nt, Human
ccaggaggcagaaguugcagug

SEQ ID NO: 345901 - RNA, 22 nt, Human
aaaagggacuacucucagcucc

SEQ ID NO: 345902 - RNA, 23 nt, Human
aggcugagcucucccagcuucag

SEQ ID NO: 345903 - RNA, 23 nt, Human
ucagcugcuuccuccugccugcc

SEQ ID NO: 345904 - RNA, 22 nt, Human
uggcagcauguuauguaaggaa

SEQ ID NO: 345905 - RNA, 22 nt, Human
acaaagugcacaagaugagaac

SEQ ID NO: 345906 - RNA, 22 nt, Human
ucaaaggcugcuugucuucugg

SEQ ID NO: 345907 - RNA, 22 nt, Human
gaugcagaaaguagacaccauc

SEQ ID NO: 345908 - RNA, 22 nt, Human
acauuugagaugccuuuuaggu

SEQ ID NO: 345909 - RNA, 22 nt, Human
uuuccagguauuaauacuguau

SEQ ID NO: 345910 - RNA, 22 nt, Human
uccuggcccgaucccugugaag

SEQ ID NO: 345911 - RNA, 22 nt, Human
ugucccaggcugaaguacagug

SEQ ID NO: 345912 - RNA, 22 nt, Human
agaaugcaguuugaaauaaggu

SEQ ID NO: 345913 - RNA, 22 nt, Human
uuucuuauacuauauugucauc

SEQ ID NO: 345914 - RNA, 22 nt, Human
ugggaggagcccucugggaagg

SEQ ID NO: 345915 - RNA, 22 nt, Human
acaacuuuagucuggagggaaa

SEQ ID NO: 345916 - RNA, 17 nt, Human
gccaaaggguuccaauc

SEQ ID NO: 345917 - RNA, 20 nt, Human
cuuggccuacuuagcuuugu

SEQ ID NO: 345918 - RNA, 23 nt, Human
acagagguccaaacaguauaagc

SEQ ID NO: 345919 - RNA, 22 nt, Human
ccagagccugcugagccccauu

SEQ ID NO: 345920 - RNA, 22 nt, Human
agggcagcuggaagguggcuuc

SEQ ID NO: 345921 - RNA, 22 nt, Human
agcuuuaucccuugcccaucga

SEQ ID NO: 345922 - RNA, 22 nt, Human
uucaggaucacuaaacccucca

SEQ ID NO: 345923 - RNA, 17 nt, Human
gggcugacaguggccuc

SEQ ID NO: 345924 - RNA, 22 nt, Human
ucuguucagacacuuuacaugu

SEQ ID NO: 345925 - RNA, 22 nt, Human
uggcugagaccuucccaaauuc

SEQ ID NO: 345926 - RNA, 22 nt, Human
aggcacaguuucauccccgggc

SEQ ID NO: 345927 - RNA, 22 nt, Human
gaggcagcaggcugaggaggau

SEQ ID NO: 345928 - RNA, 22 nt, Human
cugccuuccaaccccagacucc

SEQ ID NO: 345929 - RNA, 22 nt, Human
cuugcuggugguguuuucuaug

SEQ ID NO: 345930 - RNA, 22 nt, Human
agaaauguauagugaauuuuuc

SEQ ID NO: 345931 - RNA, 22 nt, Human
gaaguuuauuucaaucuauuca

SEQ ID NO: 345932 - RNA, 22 nt, Human
acucugccuuucagcagaugaa

SEQ ID NO: 345933 - RNA, 22 nt, Human
ucacacguccuugcuacuccuc

SEQ ID NO: 345934 - RNA, 19 nt, Human
acauggcaucccaggaggu

SEQ ID NO: 345935 - RNA, 22 nt, Human
ugcaggaauuuuuugcagaaag

SEQ ID NO: 345936 - RNA, 22 nt, Human
uggcucagcaagacauugaccu

SEQ ID NO: 345937 - RNA, 22 nt, Human
aaggcagccaugugcuuugggu

SEQ ID NO: 345938 - RNA, 22 nt, Human
ugagccuguccugugcauguga

SEQ ID NO: 345939 - RNA, 21 nt, Human
gacaaagugaagcaggcagga

SEQ ID NO: 345940 - RNA, 22 nt, Human
uucaaucauuuuuacauagucc

SEQ ID NO: 345941 - RNA, 22 nt, Human
ggccucaguuucuccauggguu

SEQ ID NO: 345942 - RNA, 22 nt, Human
augagcuucccagacaggaugg

SEQ ID NO: 345943 - RNA, 22 nt, Human
uggcuuuaggagcuauauaccu

SEQ ID NO: 345944 - RNA, 21 nt, Human
uggagcugccacuuguccucc

SEQ ID NO: 345945 - RNA, 22 nt, Human
uugcagagugguugugaggauu

SEQ ID NO: 345946 - RNA, 22 nt, Human
augugugccccuuuuacucuuu

SEQ ID NO: 345947 - RNA, 22 nt, Human
cuggggcuucaaugcuucggug

SEQ ID NO: 345948 - RNA, 22 nt, Human
uagaggcagaagaaauugacaa

SEQ ID NO: 345949 - RNA, 22 nt, Human
caaauucucaagguuuauccca

SEQ ID NO: 345950 - RNA, 22 nt, Human
auuuguacaaauuuauguuagu

SEQ ID NO: 345951 - RNA, 22 nt, Human
cacauuucuaggaaauuaaaug

SEQ ID NO: 345952 - RNA, 22 nt, Human
cuggagugaagcuuauuuuuca

SEQ ID NO: 345953 - RNA, 22 nt, Human
accaucagucauugucaguggg

SEQ ID NO: 345954 - RNA, 23 nt, Human
cugcagccgcguggggacgugga

SEQ ID NO: 345955 - RNA, 22 nt, Human
aucuucucauguguaaugaggu

SEQ ID NO: 345956 - RNA, 22 nt, Human
aaagauuauggcauugaaauac

SEQ ID NO: 345957 - RNA, 22 nt, Human
ugcucccaggcucuguggucug

SEQ ID NO: 345958 - RNA, 22 nt, Human
caauuucaaugaggccacaggg

SEQ ID NO: 345959 - RNA, 22 nt, Human
uucagagaugacaccugguguu

SEQ ID NO: 345960 - RNA, 22 nt, Human
uguuugcucugacuaucuugcg

SEQ ID NO: 345961 - RNA, 22 nt, Human
uggaagaaggcagagaggcauu

SEQ ID NO: 345962 - RNA, 22 nt, Human
guaggaaagggagugaagggaa

SEQ ID NO: 345963 - RNA, 20 nt, Human
aguguuccggaagacuggca

SEQ ID NO: 345964 - RNA, 22 nt, Human
cuggugucugcucccucacagc

SEQ ID NO: 345965 - RNA, 22 nt, Human
gcuggaaggcuaggcucaguug

SEQ ID NO: 345966 - RNA, 22 nt, Human
agcccaugcaacaggccuagcg

SEQ ID NO: 345967 - RNA, 22 nt, Human
aggagccuccuucucaugugca

SEQ ID NO: 345968 - RNA, 22 nt, Human
ggcagggcaggaaagucaggaa

SEQ ID NO: 345969 - RNA, 22 nt, Human
acccaggagcaggcugggcagu

SEQ ID NO: 345970 - RNA, 22 nt, Human
caguguguggauccucccagga

SEQ ID NO: 345971 - RNA, 16 nt, Human
uggaaggggucuccgg

SEQ ID NO: 345972 - RNA, 22 nt, Human
uucaggaugcucagaguagucu

SEQ ID NO: 345973 - RNA, 22 nt, Human
gcuggcaccugcaccaagcagg

SEQ ID NO: 345974 - RNA, 22 nt, Human
cuuugaauugccguuucaucug

SEQ ID NO: 345975 - RNA, 22 nt, Human
acagccagguaaaggcauggca

SEQ ID NO: 345976 - RNA, 22 nt, Human
auucuucauuuacuguuacuug

SEQ ID NO: 345977 - RNA, 22 nt, Human
ccagggugugggcgucggcacg

SEQ ID NO: 345978 - RNA, 22 nt, Human
auugaaagagaauguagcucuu

SEQ ID NO: 345979 - RNA, 22 nt, Human
cugccagccaggccagguaggc

SEQ ID NO: 345980 - RNA, 22 nt, Human
acacaaacugcuagaaaauugg

SEQ ID NO: 345981 - RNA, 22 nt, Human
gugucaugggagucagaaguga

SEQ ID NO: 345982 - RNA, 22 nt, Human
uggcucugcugaaccuagugca

SEQ ID NO: 345983 - RNA, 20 nt, Human
gccugccucagcuagcugag

SEQ ID NO: 345984 - RNA, 22 nt, Human
agggugucagccacggaauggg

SEQ ID NO: 345985 - RNA, 22 nt, Human
ugccuggaugugcuggccucac

SEQ ID NO: 345986 - RNA, 22 nt, Human
ucacugucugaaagaaauggcc

SEQ ID NO: 345987 - RNA, 22 nt, Human
agggcugcaccggggcuucgcg

SEQ ID NO: 345988 - RNA, 22 nt, Human
agcacagaguugcagagagcgu

SEQ ID NO: 345989 - RNA, 22 nt, Human
acagagauguggaugagggauu

SEQ ID NO: 345990 - RNA, 22 nt, Human
agcagcaucaacccucccgugu

SEQ ID NO: 345991 - RNA, 22 nt, Human
aaauuugauaagccauuguuac

SEQ ID NO: 345992 - RNA, 22 nt, Human
uuacagaacugucuugaaauuu

SEQ ID NO: 345993 - RNA, 21 nt, Human
acagcaagccuucacaugagu

SEQ ID NO: 345994 - RNA, 22 nt, Human
caucauaaaauugagauaacug

SEQ ID NO: 345995 - RNA, 22 nt, Human
aaaugcuguaacugauauucug

SEQ ID NO: 345996 - RNA, 22 nt, Human
uucugugcccauuuuaaaaugg

SEQ ID NO: 345997 - RNA, 22 nt, Human
gcugucuuccuugcuccaaggg

SEQ ID NO: 345998 - RNA, 22 nt, Human
caagaaaugggauuugacugcc

SEQ ID NO: 345999 - RNA, 23 nt, Human
ucuuuacauacugaugaguucuc

SEQ ID NO: 346000 - RNA, 22 nt, Human
cuuugcaaacgauuaccacaug

SEQ ID NO: 346001 - RNA, 22 nt, Human
agauguggccggcuagggagag

SEQ ID NO: 346002 - RNA, 22 nt, Human
caggcugccgugaagcaggccu

SEQ ID NO: 346003 - RNA, 22 nt, Human
gcagaggacacaggagggcaag

SEQ ID NO: 346004 - RNA, 22 nt, Human
gccugagcuacuagggagucug

SEQ ID NO: 346005 - RNA, 20 nt, Human
ugaggcaggagaauggcaug

SEQ ID NO: 346006 - RNA, 19 nt, Human
ucaaaggcuuuuaggagac

SEQ ID NO: 346007 - RNA, 22 nt, Human
cauucauuuaugaaauaucuau

SEQ ID NO: 346008 - RNA, 22 nt, Human
gccucugcgccucagccgaccu

SEQ ID NO: 346009 - RNA, 22 nt, Human
gugcucaggaagcuguuccugc

SEQ ID NO: 346010 - RNA, 22 nt, Human
agaagccagaggcaguggguac

SEQ ID NO: 346011 - RNA, 22 nt, Human
cuguggaauugaugcuuagugu

SEQ ID NO: 346012 - RNA, 22 nt, Human
cagcuccagcccaggcagcucc

SEQ ID NO: 346013 - RNA, 22 nt, Human
cuugcacacauguacaugugua

SEQ ID NO: 346014 - RNA, 22 nt, Human
cugcugugagugguucuugccu

SEQ ID NO: 346015 - RNA, 18 nt, Human
aaggcuucaaagaguaga

SEQ ID NO: 346016 - RNA, 22 nt, Human
ugucucugguauuaggugaaaa

SEQ ID NO: 346017 - RNA, 22 nt, Human
ucccaggccauaaaacucagag

SEQ ID NO: 346018 - RNA, 18 nt, Human
aguggucuguuauaucau

SEQ ID NO: 346019 - RNA, 21 nt, Human
gcugcugccccuagugaggcc

SEQ ID NO: 346020 - RNA, 22 nt, Human
gaucuucuagcagaaguaauuu

SEQ ID NO: 346021 - RNA, 22 nt, Human
uggcccugcagaacuagccugg

SEQ ID NO: 346022 - RNA, 22 nt, Human
cagccagccucucaaccaugca

SEQ ID NO: 346023 - RNA, 22 nt, Human
aggacaggauugagcugaacug

SEQ ID NO: 346024 - RNA, 22 nt, Human
agaaauaugcugauuagaugaa

SEQ ID NO: 346025 - RNA, 22 nt, Human
aagucacaagcauauaugcauu

SEQ ID NO: 346026 - RNA, 20 nt, Human
uucaggauucuagaccacac

SEQ ID NO: 346027 - RNA, 22 nt, Human
agaaagcacucugucuuuuacc

SEQ ID NO: 346028 - RNA, 21 nt, Human
guagggacagagaguugguga

SEQ ID NO: 346029 - RNA, 22 nt, Human
ucuacugugguccuuguaacca

SEQ ID NO: 346030 - RNA, 22 nt, Human
ucagccagaggcuucuugguuu

SEQ ID NO: 346031 - RNA, 22 nt, Human
cucaggaugaaagucaugguga

SEQ ID NO: 346032 - RNA, 17 nt, Human
aggagucucagaugagc

SEQ ID NO: 346033 - RNA, 22 nt, Human
aagcaucucuauguggagagug

SEQ ID NO: 346034 - RNA, 17 nt, Human
ggugagaccucccacuc

SEQ ID NO: 346035 - RNA, 22 nt, Human
agccaggcuaaaugagccauga

SEQ ID NO: 346036 - RNA, 22 nt, Human
agccucucuccagcuuggcaga

SEQ ID NO: 346037 - RNA, 21 nt, Human
ugcaggagucugugagucagg

SEQ ID NO: 346038 - RNA, 20 nt, Human
caucaucacaugagccaauu

SEQ ID NO: 346039 - RNA, 22 nt, Human
caccagggcagcagccuagucu

SEQ ID NO: 346040 - RNA, 22 nt, Human
ucuauacacacaaagaaugcuu

SEQ ID NO: 346041 - RNA, 22 nt, Human
ugauuuccuaggucuggagaag

SEQ ID NO: 346042 - RNA, 22 nt, Human
cucuggagaugguucucaauug

SEQ ID NO: 346043 - RNA, 21 nt, Human
agaugaggauacugaggccua

SEQ ID NO: 346044 - RNA, 22 nt, Human
cagaagaggacuggguagcuca

SEQ ID NO: 346045 - RNA, 22 nt, Human
aggccagcaagaaagagagucu

SEQ ID NO: 346046 - RNA, 22 nt, Human
cucuucuuuaguccagaccauc

SEQ ID NO: 346047 - RNA, 22 nt, Human
auuauuagacuuauaugguagu

SEQ ID NO: 346048 - RNA, 23 nt, Human
acagccaguucaccucuccuugg

SEQ ID NO: 346049 - RNA, 22 nt, Human
cugggccuuggauugacacugu

SEQ ID NO: 346050 - RNA, 22 nt, Human
gggcugacaccacccaggcgca

SEQ ID NO: 346051 - RNA, 22 nt, Human
auccugugcaaugacugcaucu

SEQ ID NO: 346052 - RNA, 22 nt, Human
cagaaaaccugacucuagaacu

SEQ ID NO: 346053 - RNA, 22 nt, Human
ggauggcaggacaaggacccag

SEQ ID NO: 346054 - RNA, 22 nt, Human
cccagggcccuggacagcuaca

SEQ ID NO: 346055 - RNA, 22 nt, Human
cauuuucucaaugaacccucuu

SEQ ID NO: 346056 - RNA, 22 nt, Human
acuuugaaacuaaaauucauua

SEQ ID NO: 346057 - RNA, 22 nt, Human
gacagccucaugaggagcaaaa

SEQ ID NO: 346058 - RNA, 22 nt, Human
agguaaagacagugaaagaggg

SEQ ID NO: 346059 - RNA, 22 nt, Human
aagcaaaagguuacacuucugg

SEQ ID NO: 346060 - RNA, 22 nt, Human
gcugggcagccuggccgcugcc

SEQ ID NO: 346061 - RNA, 22 nt, Human
ugugcagggaagggcaugcuau

SEQ ID NO: 346062 - RNA, 22 nt, Human
uggauaaacucacuguaaguug

SEQ ID NO: 346063 - RNA, 22 nt, Human
uccaugagcuagggauucauca

SEQ ID NO: 346064 - RNA, 21 nt, Human
aaugugugcuauuuaucuuuu

SEQ ID NO: 346065 - RNA, 22 nt, Human
agggcccuccccgcucagggca

SEQ ID NO: 346066 - RNA, 22 nt, Human
augcaaaauaaggcagaaacau

SEQ ID NO: 346067 - RNA, 22 nt, Human
ugaaaaggagccuuagguaggu

SEQ ID NO: 346068 - RNA, 22 nt, Human
aaggacagaaacagauugcugg

SEQ ID NO: 346069 - RNA, 22 nt, Human
aaaagguagauucuccuucuau

SEQ ID NO: 346070 - RNA, 22 nt, Human
cuggcagccaagugggauacuc

SEQ ID NO: 346071 - RNA, 22 nt, Human
aauuuagaauucgcuagcuaau

SEQ ID NO: 346072 - RNA, 22 nt, Human
ucaggaugagcucauaacuaug

SEQ ID NO: 346073 - RNA, 22 nt, Human
uccuggccgccgcguggggccg

SEQ ID NO: 346074 - RNA, 22 nt, Human
agaggcggagguugcagugagc

SEQ ID NO: 346075 - RNA, 22 nt, Human
gaagccaggggccugacaggca

SEQ ID NO: 346076 - RNA, 20 nt, Human
cagagcuguuauggaugaug

SEQ ID NO: 346077 - RNA, 22 nt, Human
gcugagagaaaagugagguucu

SEQ ID NO: 346078 - RNA, 22 nt, Human
auuaguaaaacauuguauaugu

SEQ ID NO: 346079 - RNA, 22 nt, Human
cuauugaauagcccaaaucauu

SEQ ID NO: 346080 - RNA, 22 nt, Human
cauggcagugauucagccuuug

SEQ ID NO: 346081 - RNA, 22 nt, Human
ggcacugauuccauucaugaag

SEQ ID NO: 346082 - RNA, 22 nt, Human
acuuucucccacccacccgucu

SEQ ID NO: 346083 - RNA, 22 nt, Human
aggagucaggaccaaauggaaa

SEQ ID NO: 346084 - RNA, 17 nt, Human
aggcagcucagaacauc

SEQ ID NO: 346085 - RNA, 22 nt, Human
agguggagugaaggaaaggcag

SEQ ID NO: 346086 - RNA, 18 nt, Human
acauuucuaggugaaagc

SEQ ID NO: 346087 - RNA, 22 nt, Human
aaggccaggagacuuggaguca

SEQ ID NO: 346088 - RNA, 22 nt, Human
acuucauuguaauauuauagca

SEQ ID NO: 346089 - RNA, 22 nt, Human
aaguuucauguggagguagacu

SEQ ID NO: 346090 - RNA, 22 nt, Human
gccuguccacuaaacagccaag

SEQ ID NO: 346091 - RNA, 22 nt, Human
agugugggugagggaggcccuc

SEQ ID NO: 346092 - RNA, 22 nt, Human
uucaaugauuuuuagggaucau

SEQ ID NO: 346093 - RNA, 22 nt, Human
auguaucaugcaggguccauga

SEQ ID NO: 346094 - RNA, 20 nt, Human
acaauagauuugagcaaagu

SEQ ID NO: 346095 - RNA, 18 nt, Human
aggcacuggaauuaaggg

SEQ ID NO: 346096 - RNA, 22 nt, Human
ugugggcucccccucacucugu

SEQ ID NO: 346097 - RNA, 22 nt, Human
ugcaggugugguuccucagcca

SEQ ID NO: 346098 - RNA, 22 nt, Human
uuguuucauggggauguuuauu

SEQ ID NO: 346099 - RNA, 22 nt, Human
cucuggccugcuuccucaggua

SEQ ID NO: 346100 - RNA, 22 nt, Human
uauacagucuuuugcuauauuc

SEQ ID NO: 346101 - RNA, 22 nt, Human
acugagcucuugacugggaguu

SEQ ID NO: 346102 - RNA, 22 nt, Human
ugcuuuauucccuucugaugug

SEQ ID NO: 346103 - RNA, 21 nt, Human
acacugugucauaaugcuuaa

SEQ ID NO: 346104 - RNA, 22 nt, Human
acugccuuauaugcugugugug

SEQ ID NO: 346105 - RNA, 22 nt, Human
aaucaguguguaaaguggcugc

SEQ ID NO: 346106 - RNA, 22 nt, Human
uaugaaaauuuagcugaagcau

SEQ ID NO: 346107 - RNA, 22 nt, Human
uguaucaaggguuuauguaagc

SEQ ID NO: 346108 - RNA, 22 nt, Human
ccagcugucacucagaaaggcc

SEQ ID NO: 346109 - RNA, 22 nt, Human
aaguguuuauuuauaacgaucu

SEQ ID NO: 346110 - RNA, 22 nt, Human
uauugaugcuuggauugggcca

SEQ ID NO: 346111 - RNA, 22 nt, Human
ucacagaagaugcuggauguug

SEQ ID NO: 346112 - RNA, 22 nt, Human
uacccagcuccucagaagacca

SEQ ID NO: 346113 - RNA, 22 nt, Human
aaggagagguuguccguguugu

SEQ ID NO: 346114 - RNA, 21 nt, Human
uaagccaccaugugaaaccag

SEQ ID NO: 346115 - RNA, 22 nt, Human
aggucccaggcauagcuggucu

SEQ ID NO: 346116 - RNA, 22 nt, Human
gcacccagcccagggcgugaug

SEQ ID NO: 346117 - RNA, 21 nt, Human
uccauuguuuucccaggguuu

SEQ ID NO: 346118 - RNA, 22 nt, Human
ugagacaaccuaauuaaacacc

SEQ ID NO: 346119 - RNA, 22 nt, Human
cucccaggguagggagagacua

SEQ ID NO: 346120 - RNA, 22 nt, Human
ugacauuuaucaaagaaauggu

SEQ ID NO: 346121 - RNA, 22 nt, Human
ucccagauucuucugugugggc

SEQ ID NO: 346122 - RNA, 22 nt, Human
acagggcagagugaaaugcuau

SEQ ID NO: 346123 - RNA, 22 nt, Human
cauagcaacagcaucaagucaa

SEQ ID NO: 346124 - RNA, 22 nt, Human
cauuuacuguugaaucccuagc

SEQ ID NO: 346125 - RNA, 22 nt, Human
uucauacucacuccaauaacug

SEQ ID NO: 346126 - RNA, 20 nt, Human
aggcagcuggccaggcaggu

SEQ ID NO: 346127 - RNA, 22 nt, Human
agccauccuacuaccucagcau

SEQ ID NO: 346128 - RNA, 22 nt, Human
cauaauuacugauaugcugauu

SEQ ID NO: 346129 - RNA, 22 nt, Human
ggcucuggugcccuggcuccca

SEQ ID NO: 346130 - RNA, 22 nt, Human
uuucagaaagcugaacauauga

SEQ ID NO: 346131 - RNA, 22 nt, Human
aaaucaguucucccuuucuuca

SEQ ID NO: 346132 - RNA, 20 nt, Human
gcaggcagggaaugggggug

SEQ ID NO: 346133 - RNA, 22 nt, Human
aggcugagacugugcauuagug

SEQ ID NO: 346134 - RNA, 22 nt, Human
guuaggcagugugguauagcag

SEQ ID NO: 346135 - RNA, 19 nt, Human
ggcugccuuuccuuaccag

SEQ ID NO: 346136 - RNA, 22 nt, Human
agaacagaugugggcagaccug

SEQ ID NO: 346137 - RNA, 22 nt, Human
aaaagacauaugugggcauucu

SEQ ID NO: 346138 - RNA, 22 nt, Human
ucucccaguccucugugcuuac

SEQ ID NO: 346139 - RNA, 22 nt, Human
gagccaggcccguacuugcugu

SEQ ID NO: 346140 - RNA, 22 nt, Human
augcuauacucaaagaaauuca

SEQ ID NO: 346141 - RNA, 22 nt, Human
cagagcugucauuugccaguga

SEQ ID NO: 346142 - RNA, 22 nt, Human
ugaauaaucuuggguauuaaua

SEQ ID NO: 346143 - RNA, 22 nt, Human
gugcucacugugagacguccug

SEQ ID NO: 346144 - RNA, 22 nt, Human
ugggcagagaucuggaucaaac

SEQ ID NO: 346145 - RNA, 22 nt, Human
uccuuucccuuuccauccuggc

SEQ ID NO: 346146 - RNA, 22 nt, Human
gugcauugcgaugcagacgacc

SEQ ID NO: 346147 - RNA, 22 nt, Human
ucugagcuacgaugccugucac

SEQ ID NO: 346148 - RNA, 22 nt, Human
cucugcugcccaggccugcuag

SEQ ID NO: 346149 - RNA, 22 nt, Human
agagccugcuguguaagucaca

SEQ ID NO: 346150 - RNA, 22 nt, Human
cuucucagucaccugugagucu

SEQ ID NO: 346151 - RNA, 22 nt, Human
cccaggagaauauuuuuggguc

SEQ ID NO: 346152 - RNA, 22 nt, Human
ucccagagcaguacuccaggag

SEQ ID NO: 346153 - RNA, 22 nt, Human
cagagccagcaguggggacagg

SEQ ID NO: 346154 - RNA, 19 nt, Human
ucugcuggcagaauucccu

SEQ ID NO: 346155 - RNA, 22 nt, Human
cuuauuagaguuguguucuguu

SEQ ID NO: 346156 - RNA, 22 nt, Human
uucaagaucuggguuuucagcu

SEQ ID NO: 346157 - RNA, 22 nt, Human
gaggcucaacccacagggguug

SEQ ID NO: 346158 - RNA, 22 nt, Human
gggaccaggugggugcauuccg

SEQ ID NO: 346159 - RNA, 22 nt, Human
aagcuccccgaaacccaccucu

SEQ ID NO: 346160 - RNA, 22 nt, Human
accucaggauguggacacagaa

SEQ ID NO: 346161 - RNA, 22 nt, Human
agacagcaggggagucugguuu

SEQ ID NO: 346162 - RNA, 22 nt, Human
uggcagcuuccugcucauagga

SEQ ID NO: 346163 - RNA, 22 nt, Human
cccaggcauuuucaacuuuagu

SEQ ID NO: 346164 - RNA, 22 nt, Human
caguguuucugaguuccagcuc

SEQ ID NO: 346165 - RNA, 22 nt, Human
ccuggugcuuaccagagcuuuu

SEQ ID NO: 346166 - RNA, 22 nt, Human
agcugcucaggagagccagguc

SEQ ID NO: 346167 - RNA, 18 nt, Human
ucacagugcucuugccua

SEQ ID NO: 346168 - RNA, 22 nt, Human
acucaguacaucuggaguuggc

SEQ ID NO: 346169 - RNA, 22 nt, Human
ccugucugcaugaucccugcca

SEQ ID NO: 346170 - RNA, 22 nt, Human
ugccucugggugaccaaggagc

SEQ ID NO: 346171 - RNA, 22 nt, Human
guauacagauacuuagacgugc

SEQ ID NO: 346172 - RNA, 22 nt, Human
ggcuuuauuauguggccaugug

SEQ ID NO: 346173 - RNA, 22 nt, Human
ucacagaagagauauugacaga

SEQ ID NO: 346174 - RNA, 22 nt, Human
gguuggggcgagcuggaggccc

SEQ ID NO: 346175 - RNA, 22 nt, Human
caugcuuuaccaaagcagugau

SEQ ID NO: 346176 - RNA, 22 nt, Human
aaggagucugggccauucagag

SEQ ID NO: 346177 - RNA, 19 nt, Human
caguggagauuggaggagg

SEQ ID NO: 346178 - RNA, 19 nt, Human
agccuggcuuugcucugcu

SEQ ID NO: 346179 - RNA, 22 nt, Human
ugagccuggcggaagcagcgug

SEQ ID NO: 346180 - RNA, 22 nt, Human
gcaacuuuagggccagcaagua

SEQ ID NO: 346181 - RNA, 22 nt, Human
uccucuggggucagggcacuac

SEQ ID NO: 346182 - RNA, 22 nt, Human
augaauaaaacauuuuaaucag

SEQ ID NO: 346183 - RNA, 22 nt, Human
gcaggccuccccugcuggagcu

SEQ ID NO: 346184 - RNA, 22 nt, Human
ugcagggacaggcucuggggau

SEQ ID NO: 346185 - RNA, 22 nt, Human
cugucccucaucaccucugggu

SEQ ID NO: 346186 - RNA, 22 nt, Human
cccaggaaaguggaggcggcug

SEQ ID NO: 346187 - RNA, 22 nt, Human
augcuauacauaugacaucaca

SEQ ID NO: 346188 - RNA, 22 nt, Human
ucacaguaaaagcauggaagag

SEQ ID NO: 346189 - RNA, 22 nt, Human
agagccuggaccugagcuacaa

SEQ ID NO: 346190 - RNA, 22 nt, Human
aggucaaguuuagauagaguua

SEQ ID NO: 346191 - RNA, 20 nt, Human
cugccaugauugauagagug

SEQ ID NO: 346192 - RNA, 22 nt, Human
cagcagugcuucagugugagau

SEQ ID NO: 346193 - RNA, 22 nt, Human
aacagaauaguugauguacagu

SEQ ID NO: 346194 - RNA, 22 nt, Human
uacacacaugcauuugccuuau

SEQ ID NO: 346195 - RNA, 22 nt, Human
cuugggaaugcuaacagaugac

SEQ ID NO: 346196 - RNA, 22 nt, Human
agggcugccugacuccagagcc

SEQ ID NO: 346197 - RNA, 22 nt, Human
gggaagcagcauugugcuggcu

SEQ ID NO: 346198 - RNA, 22 nt, Human
ucuggauccuaugcacuggacu

SEQ ID NO: 346199 - RNA, 22 nt, Human
auacaucuuccuuuuaaaaugc

SEQ ID NO: 346200 - RNA, 22 nt, Human
cugagccaguagucagggacaa

SEQ ID NO: 346201 - RNA, 22 nt, Human
ugaggcuguucuaccagggcca

SEQ ID NO: 346202 - RNA, 22 nt, Human
uuacagaaaagggguuguccuu

SEQ ID NO: 346203 - RNA, 22 nt, Human
ugaacaaacugcauucuucacu

SEQ ID NO: 346204 - RNA, 22 nt, Human
agagcugggacuuggacucaau

SEQ ID NO: 346205 - RNA, 22 nt, Human
aaugccaguguguugauuccag

SEQ ID NO: 346206 - RNA, 22 nt, Human
gggcuggaucuccugcaggcag

SEQ ID NO: 346207 - RNA, 22 nt, Human
ucccagggcacucacccucccu

SEQ ID NO: 346208 - RNA, 22 nt, Human
gccccucccagucaggagcacu

SEQ ID NO: 346209 - RNA, 22 nt, Human
gcucccugacucaguuccugag

SEQ ID NO: 346210 - RNA, 20 nt, Human
uugauucaagggcugaugga

SEQ ID NO: 346211 - RNA, 22 nt, Human
gcaguguuguuaaaagauuaga

SEQ ID NO: 346212 - RNA, 22 nt, Human
cagucacuggaauagcugagga

SEQ ID NO: 346213 - RNA, 22 nt, Human
uacacaugaucauuuaguagca

SEQ ID NO: 346214 - RNA, 22 nt, Human
agaaauguauucuguauguuuu

SEQ ID NO: 346215 - RNA, 22 nt, Human
auacauacauguaugcacauac

SEQ ID NO: 346216 - RNA, 21 nt, Human
accaggcuugugggagggagc

SEQ ID NO: 346217 - RNA, 22 nt, Human
ugaaggagcugauguaaggggu

SEQ ID NO: 346218 - RNA, 22 nt, Human
gcccagcacauugcugaggacc

SEQ ID NO: 346219 - RNA, 22 nt, Human
gggcugaguuccugccucacuc

SEQ ID NO: 346220 - RNA, 22 nt, Human
ggcagugacuguucagacgucc

SEQ ID NO: 346221 - RNA, 22 nt, Human
ucucaccaaagccuugaccaua

SEQ ID NO: 346222 - RNA, 22 nt, Human
aagggaggaggauuuauuguac

SEQ ID NO: 346223 - RNA, 22 nt, Human
caaguccuccaugugacuaggu

SEQ ID NO: 346224 - RNA, 22 nt, Human
gagggaaagguuaauacaugau

SEQ ID NO: 346225 - RNA, 22 nt, Human
caucacccggaacugugucugc

SEQ ID NO: 346226 - RNA, 22 nt, Human
aaccauuugccauuaucuuaag

SEQ ID NO: 346227 - RNA, 22 nt, Human
ggcucugcaugugagugggugg

SEQ ID NO: 346228 - RNA, 22 nt, Human
ugagcugggcugggcugagcug

SEQ ID NO: 346229 - RNA, 23 nt, Human
ucaguuuuggcuguucaguguug

SEQ ID NO: 346230 - RNA, 22 nt, Human
cagggcaguuugugccuaugag

SEQ ID NO: 346231 - RNA, 22 nt, Human
ccagagacgucggucagggcgc

SEQ ID NO: 346232 - RNA, 19 nt, Human
ugccuggacaaaugugggg

SEQ ID NO: 346233 - RNA, 22 nt, Human
agggaggcaggaaaguugucug

SEQ ID NO: 346234 - RNA, 22 nt, Human
uuuauccauucaccaguugaac

SEQ ID NO: 346235 - RNA, 22 nt, Human
uuaaauuccagccucauaauag

SEQ ID NO: 346236 - RNA, 22 nt, Human
ccuugcugcgugcuagcacaga

SEQ ID NO: 346237 - RNA, 22 nt, Human
cuguuuauacgacagguggagg

SEQ ID NO: 346238 - RNA, 22 nt, Human
augcacagacccaaaggccauc

SEQ ID NO: 346239 - RNA, 22 nt, Human
ucaggagauguaaccuuagcug

SEQ ID NO: 346240 - RNA, 22 nt, Human
caguucuuaauaccaugugguu

SEQ ID NO: 346241 - RNA, 22 nt, Human
cugagaggcacaaggcauuucg

SEQ ID NO: 346242 - RNA, 22 nt, Human
auuauauaggacuugcccuucc

SEQ ID NO: 346243 - RNA, 22 nt, Human
gaagccacagagauuguggggg

SEQ ID NO: 346244 - RNA, 22 nt, Human
uggcagcacuagguacugagcu

SEQ ID NO: 346245 - RNA, 22 nt, Human
ccuggagaccagaggauacuuc

SEQ ID NO: 346246 - RNA, 23 nt, Human
uugugggcagauuccauggggag

SEQ ID NO: 346247 - RNA, 22 nt, Human
auccaaaccuggacaugagugg

SEQ ID NO: 346248 - RNA, 22 nt, Human
cagaaauguuuauauguggugu

SEQ ID NO: 346249 - RNA, 22 nt, Human
cugggccagucucggccgcucu

SEQ ID NO: 346250 - RNA, 22 nt, Human
ucccugggccuccugcuaugca

SEQ ID NO: 346251 - RNA, 22 nt, Human
acccaggagagagcuauaaaau

SEQ ID NO: 346252 - RNA, 22 nt, Human
agggagcuuccgaacuacagcu

SEQ ID NO: 346253 - RNA, 22 nt, Human
agaggcuccuucacucuggcac

SEQ ID NO: 346254 - RNA, 22 nt, Human
cugccuguuuucugauagauuu

SEQ ID NO: 346255 - RNA, 22 nt, Human
agcuccuccugugccaggccag

SEQ ID NO: 346256 - RNA, 22 nt, Human
gggcagcucugcccaucagagg

SEQ ID NO: 346257 - RNA, 22 nt, Human
agcuucucaggagucugaggca

SEQ ID NO: 346258 - RNA, 22 nt, Human
gggucccaggaaggagcagugu

SEQ ID NO: 346259 - RNA, 22 nt, Human
uaaagcaggccacauaugugau

SEQ ID NO: 346260 - RNA, 22 nt, Human
aggcugugcaauuaggguaaga

SEQ ID NO: 346261 - RNA, 22 nt, Human
accagagcuggcucugagcacc

SEQ ID NO: 346262 - RNA, 22 nt, Human
aagauuucagaguuugggggaa

SEQ ID NO: 346263 - RNA, 22 nt, Human
aaggcccuggccccagcuucuu

SEQ ID NO: 346264 - RNA, 22 nt, Human
caccagacagguguaugcauau

SEQ ID NO: 346265 - RNA, 22 nt, Human
guuauguaaucuaacacucagu

SEQ ID NO: 346266 - RNA, 22 nt, Human
cccaagagguggagguugcagu

SEQ ID NO: 346267 - RNA, 22 nt, Human
agucucagaaaagaagcaugga

SEQ ID NO: 346268 - RNA, 22 nt, Human
acuguucauuuguccuguaucu

SEQ ID NO: 346269 - RNA, 22 nt, Human
cugagcugggaguagagacucu

SEQ ID NO: 346270 - RNA, 22 nt, Human
ucucaggaagugauauugagac

SEQ ID NO: 346271 - RNA, 22 nt, Human
uguauacaggcauaagagauac

SEQ ID NO: 346272 - RNA, 21 nt, Human
auacagaaggcagacucucuc

SEQ ID NO: 346273 - RNA, 22 nt, Human
gucaggaucucccaguacauau

SEQ ID NO: 346274 - RNA, 22 nt, Human
gcugucccgcugacuuccagcu

SEQ ID NO: 346275 - RNA, 22 nt, Human
agaggcuguuacacucccagau

SEQ ID NO: 346276 - RNA, 22 nt, Human
uugcaucuagggcaacccagag

SEQ ID NO: 346277 - RNA, 22 nt, Human
agaggccuaaccaagauguccu

SEQ ID NO: 346278 - RNA, 22 nt, Human
uuuguaaaaggaggaagcaugg

SEQ ID NO: 346279 - RNA, 22 nt, Human
ccaggacuuauuacaguauaac

SEQ ID NO: 346280 - RNA, 22 nt, Human
uggccugcccagagcagcucug

SEQ ID NO: 346281 - RNA, 22 nt, Human
uaugucaaaguuaagaaauagg

SEQ ID NO: 346282 - RNA, 22 nt, Human
uguccucagauaugucuacucu

SEQ ID NO: 346283 - RNA, 22 nt, Human
gagcacagccaaaguaagaagg

SEQ ID NO: 346284 - RNA, 22 nt, Human
cagagcauuaaaaccagcucug

SEQ ID NO: 346285 - RNA, 22 nt, Human
gaagccccaaacccucgccauc

SEQ ID NO: 346286 - RNA, 22 nt, Human
uugcauuuaaguagauguuaca

SEQ ID NO: 346287 - RNA, 22 nt, Human
aaauugcagaugcuaaaugacu

SEQ ID NO: 346288 - RNA, 21 nt, Human
cauuagggcagaagcaggaag

SEQ ID NO: 346289 - RNA, 22 nt, Human
agucaccaacaugguucccagg

SEQ ID NO: 346290 - RNA, 22 nt, Human
uuugcauuugcaaauaaugaaa

SEQ ID NO: 346291 - RNA, 22 nt, Human
cacaaugugguuugucaucuuu

SEQ ID NO: 346292 - RNA, 19 nt, Human
ccagguggaacugagguag

SEQ ID NO: 346293 - RNA, 22 nt, Human
auuuguuccacacauauuuacu

SEQ ID NO: 346294 - RNA, 22 nt, Human
ccagcuuuauagcuucaaagga

SEQ ID NO: 346295 - RNA, 22 nt, Human
gaugccugcauuucaggagagu

SEQ ID NO: 346296 - RNA, 22 nt, Human
cagaauguagaucaucaucaag

SEQ ID NO: 346297 - RNA, 17 nt, Human
gccuuccuuccuccaca

SEQ ID NO: 346298 - RNA, 21 nt, Human
ugcuggccucaagggugacuu

SEQ ID NO: 346299 - RNA, 22 nt, Human
ugcauuaugcuugugcuguaua

SEQ ID NO: 346300 - RNA, 18 nt, Human
cccagcccaccauuucuc

SEQ ID NO: 346301 - RNA, 22 nt, Human
ggcugccauaacagaguaccac

SEQ ID NO: 346302 - RNA, 18 nt, Human
gcaaggcucaggccaggc

SEQ ID NO: 346303 - RNA, 22 nt, Human
ccugccugacagagaagguuca

SEQ ID NO: 346304 - RNA, 22 nt, Human
cauucauuagaauagauaugua

SEQ ID NO: 346305 - RNA, 22 nt, Human
gcuccucugucaaaugagagug

SEQ ID NO: 346306 - RNA, 22 nt, Human
augacagaaggccucccugaca

SEQ ID NO: 346307 - RNA, 22 nt, Human
cuggagaggcugggaacagguu

SEQ ID NO: 346308 - RNA, 22 nt, Human
caaagucccagcugcuuagaga

SEQ ID NO: 346309 - RNA, 22 nt, Human
aaggcuuucagcuaacuugauu

SEQ ID NO: 346310 - RNA, 22 nt, Human
uucucuuaucuggcauuauugg

SEQ ID NO: 346311 - RNA, 22 nt, Human
aucaaaguucguaacugauaac

SEQ ID NO: 346312 - RNA, 22 nt, Human
ucugaaggucugagaaccagga

SEQ ID NO: 346313 - RNA, 22 nt, Human
caggaaagggaugggcugccac

SEQ ID NO: 346314 - RNA, 22 nt, Human
agacagggucuugaucagagcu

SEQ ID NO: 346315 - RNA, 22 nt, Human
acacugaauguuuaagaacuug

SEQ ID NO: 346316 - RNA, 22 nt, Human
aguccuuacucgggggcccaga

SEQ ID NO: 346317 - RNA, 22 nt, Human
ucauguuauugacucauaauau

SEQ ID NO: 346318 - RNA, 22 nt, Human
aaucgguugaacccaggaagug

SEQ ID NO: 346319 - RNA, 22 nt, Human
gggcuucucuuuagugagcuga

SEQ ID NO: 346320 - RNA, 22 nt, Human
agagcaggcauaaagcuuugaa

SEQ ID NO: 346321 - RNA, 22 nt, Human
uuggaucauggaaugucugcuu

SEQ ID NO: 346322 - RNA, 22 nt, Human
uguuguuuucucauggagaaua

SEQ ID NO: 346323 - RNA, 22 nt, Human
aagaauguggguggauaugaug

SEQ ID NO: 346324 - RNA, 22 nt, Human
uaguccauuuucacacugcuga

SEQ ID NO: 346325 - RNA, 22 nt, Human
ucaagagaagugcuccacagua

SEQ ID NO: 346326 - RNA, 22 nt, Human
aacauacauauuucagugucca

SEQ ID NO: 346327 - RNA, 22 nt, Human
aaacuuugguauguagcaaaac

SEQ ID NO: 346328 - RNA, 22 nt, Human
agggagcucuaaguagagggac

SEQ ID NO: 346329 - RNA, 22 nt, Human
cuuacauugucuuaguuuucaa

SEQ ID NO: 346330 - RNA, 22 nt, Human
gaggugaguggaucacgagguc

SEQ ID NO: 346331 - RNA, 21 nt, Human
agauuguauggaggugagagg

SEQ ID NO: 346332 - RNA, 22 nt, Human
aguauguauuuuauacuuacag

SEQ ID NO: 346333 - RNA, 22 nt, Human
agcugcccugguaagauugaug

SEQ ID NO: 346334 - RNA, 22 nt, Human
uguucuuuggcuucacagcucu

SEQ ID NO: 346335 - RNA, 19 nt, Human
agugucaucagcuacucag

SEQ ID NO: 346336 - RNA, 22 nt, Human
agaagccagaauauucauggau

SEQ ID NO: 346337 - RNA, 22 nt, Human
aggagcugcaaauauuaguaau

SEQ ID NO: 346338 - RNA, 22 nt, Human
uuuuuggguccaggcuguaucu

SEQ ID NO: 346339 - RNA, 22 nt, Human
aggaccugaaauucuugcuuuu

SEQ ID NO: 346340 - RNA, 22 nt, Human
ucuggcucuaacuaggcaucag

SEQ ID NO: 346341 - RNA, 22 nt, Human
aaaggccacacugcucuuucuc

SEQ ID NO: 346342 - RNA, 22 nt, Human
uguguccuuuggaggaucagcg

SEQ ID NO: 346343 - RNA, 22 nt, Human
uuugcauugcauuaaguauucu

SEQ ID NO: 346344 - RNA, 22 nt, Human
cauucauuuacuuucaacagcu

SEQ ID NO: 346345 - RNA, 22 nt, Human
agcugagcucaggcugauguaa

SEQ ID NO: 346346 - RNA, 22 nt, Human
ugaguacucggagugcuuugga

SEQ ID NO: 346347 - RNA, 22 nt, Human
uuacauaacgguaugaaaaaug

SEQ ID NO: 346348 - RNA, 22 nt, Human
uguucucacuggaugcuucaca

SEQ ID NO: 346349 - RNA, 22 nt, Human
ucucaggguuuguacaagugua

SEQ ID NO: 346350 - RNA, 22 nt, Human
aggcagcuuuguaguaaagcua

SEQ ID NO: 346351 - RNA, 22 nt, Human
uuuaggcagcuacauacuaacu

SEQ ID NO: 346352 - RNA, 22 nt, Human
uaaugugugucaucaguagagu

SEQ ID NO: 346353 - RNA, 17 nt, Human
uggcacagaggugcuau

SEQ ID NO: 346354 - RNA, 22 nt, Human
uaugcacagaaguuugcugaau

SEQ ID NO: 346355 - RNA, 22 nt, Human
cguccuuacagagggucacagc

SEQ ID NO: 346356 - RNA, 22 nt, Human
acaauacaggcuucuggacuua

SEQ ID NO: 346357 - RNA, 22 nt, Human
ucagggacagggugcugcugcg

SEQ ID NO: 346358 - RNA, 22 nt, Human
agaaaugaaaccaaagccuaga

SEQ ID NO: 346359 - RNA, 22 nt, Human
uggcagagaacacacaugauuc

SEQ ID NO: 346360 - RNA, 22 nt, Human
aggcugagcugaccugguuugg

SEQ ID NO: 346361 - RNA, 22 nt, Human
accaggcacucuuguggcagug

SEQ ID NO: 346362 - RNA, 22 nt, Human
ucaaucacguguuccauguucu

SEQ ID NO: 346363 - RNA, 22 nt, Human
uucagagccacuucaagucuaa

SEQ ID NO: 346364 - RNA, 22 nt, Human
caggagcaguuagaagcccacu

SEQ ID NO: 346365 - RNA, 23 nt, Human
gggagaauaugaggaugauggug

SEQ ID NO: 346366 - RNA, 22 nt, Human
cucugggcacauuuuccaggac

SEQ ID NO: 346367 - RNA, 22 nt, Human
auguaauaggguaacauaacau

SEQ ID NO: 346368 - RNA, 22 nt, Human
cagggguggcugcagcagaggu

SEQ ID NO: 346369 - RNA, 22 nt, Human
cuggguggcuguccagccagcc

SEQ ID NO: 346370 - RNA, 22 nt, Human
ucaguuuucaauuucaucagag

SEQ ID NO: 346371 - RNA, 19 nt, Human
ucuggcuccugccaggcug

SEQ ID NO: 346372 - RNA, 22 nt, Human
ugcaaaauaaugaacgauuuuu

SEQ ID NO: 346373 - RNA, 22 nt, Human
ucucaggaauagaguggcagca

SEQ ID NO: 346374 - RNA, 22 nt, Human
ccaggacccugcaaacccuguu

SEQ ID NO: 346375 - RNA, 22 nt, Human
cucucccagucaggcucaggau

SEQ ID NO: 346376 - RNA, 22 nt, Human
accagggcacaggagucugaag

SEQ ID NO: 346377 - RNA, 22 nt, Human
cuauacagagcauccuuaacuu

SEQ ID NO: 346378 - RNA, 22 nt, Human
uuguacaaguauuaugugaaca

SEQ ID NO: 346379 - RNA, 22 nt, Human
acagcagcuugcgugucugguc

SEQ ID NO: 346380 - RNA, 18 nt, Human
uggagcaggaagccuggc

SEQ ID NO: 346381 - RNA, 23 nt, Human
uggugccucagaagcagugggcu

SEQ ID NO: 346382 - RNA, 23 nt, Human
gcccaugcuguugggcccgagca

SEQ ID NO: 346383 - RNA, 22 nt, Human
uaaagccacuucauucuagucu

SEQ ID NO: 346384 - RNA, 22 nt, Human
ugauuuccuagcugacaugaaa

SEQ ID NO: 346385 - RNA, 22 nt, Human
ugguuuugcuaaaauagaaaga

SEQ ID NO: 346386 - RNA, 22 nt, Human
aaacaaacauagguuugaaagu

SEQ ID NO: 346387 - RNA, 22 nt, Human
aguguuguaugggaugacugcu

SEQ ID NO: 346388 - RNA, 22 nt, Human
uuuauuauagugguggggacug

SEQ ID NO: 346389 - RNA, 22 nt, Human
ugccgcagugcggggagggccc

SEQ ID NO: 346390 - RNA, 23 nt, Human
ggccuccuggucuaggcuagacu

SEQ ID NO: 346391 - RNA, 22 nt, Human
cagcugccccuccagggcuggg

SEQ ID NO: 346392 - RNA, 22 nt, Human
uugucuguaaagacggccacca

SEQ ID NO: 346393 - RNA, 22 nt, Human
aguguggguuuuauggagcccu

SEQ ID NO: 346394 - RNA, 22 nt, Human
ccagggcauguaacuaauggug

SEQ ID NO: 346395 - RNA, 22 nt, Human
ucagggcaaugucccucagaag

SEQ ID NO: 346396 - RNA, 22 nt, Human
aucuaaaaggagcucuuuaucu

SEQ ID NO: 346397 - RNA, 22 nt, Human
gauuucuucauucauuagaugg

SEQ ID NO: 346398 - RNA, 22 nt, Human
gcuugggauaugcugauguaaa

SEQ ID NO: 346399 - RNA, 22 nt, Human
gcaccugggguacacagcuaca

SEQ ID NO: 346400 - RNA, 22 nt, Human
ccagcaggacuuuggaaauaug

SEQ ID NO: 346401 - RNA, 22 nt, Human
gaagccagccuugucugccucu

SEQ ID NO: 346402 - RNA, 22 nt, Human
cuagaaauauuuuacagucaag

SEQ ID NO: 346403 - RNA, 22 nt, Human
ucagaggagaugguuaccaggg

SEQ ID NO: 346404 - RNA, 22 nt, Human
aauucuuguuguuaguauauuu

SEQ ID NO: 346405 - RNA, 15 nt, Human
caggagaggaagguu

SEQ ID NO: 346406 - RNA, 19 nt, Human
uggcugggcgugccuccgu

SEQ ID NO: 346407 - RNA, 22 nt, Human
caaaggcuucaucucagagcag

SEQ ID NO: 346408 - RNA, 22 nt, Human
gaggggcugggguugacuccaa

SEQ ID NO: 346409 - RNA, 22 nt, Human
gauggguggucucagacuugcc

SEQ ID NO: 346410 - RNA, 22 nt, Human
cagccucucuguaucucaggau

SEQ ID NO: 346411 - RNA, 20 nt, Human
uaacagaaguagaagugggu

SEQ ID NO: 346412 - RNA, 22 nt, Human
aggaaaggccuuugcauuuggu

SEQ ID NO: 346413 - RNA, 21 nt, Human
gcugcucgagauccagugcuu

SEQ ID NO: 346414 - RNA, 22 nt, Human
auccagggauaaaaguaagguu

SEQ ID NO: 346415 - RNA, 22 nt, Human
auuugcuuaucuccacaguugu

SEQ ID NO: 346416 - RNA, 22 nt, Human
cccagccuggugcacugugggg

SEQ ID NO: 346417 - RNA, 22 nt, Human
agaggagcugggaggcccucgu

SEQ ID NO: 346418 - RNA, 22 nt, Human
uccuucagugucccgcucaggu

SEQ ID NO: 346419 - RNA, 22 nt, Human
gagcccagguucugcuuccagc

SEQ ID NO: 346420 - RNA, 22 nt, Human
ggccaggagcugcacagggcuc

SEQ ID NO: 346421 - RNA, 22 nt, Human
gaggcaguuccugagugacaag

SEQ ID NO: 346422 - RNA, 22 nt, Human
aucaguuuaacugucaagagcc

SEQ ID NO: 346423 - RNA, 22 nt, Human
aucuucaaagggauguccaugg

SEQ ID NO: 346424 - RNA, 22 nt, Human
ucugauaacucuggccccaggc

SEQ ID NO: 346425 - RNA, 22 nt, Human
cuuacauuaaguaagagauuga

SEQ ID NO: 346426 - RNA, 22 nt, Human
cuguuuucccuggaguucagca

SEQ ID NO: 346427 - RNA, 22 nt, Human
uuucacacaacgugaauauacu

SEQ ID NO: 346428 - RNA, 22 nt, Human
auacauguaacugcauuguaau

SEQ ID NO: 346429 - RNA, 22 nt, Human
cuggauuuaggacuaguccaag

SEQ ID NO: 346430 - RNA, 22 nt, Human
ugcauuauaacugaauguuguu

SEQ ID NO: 346431 - RNA, 22 nt, Human
acagaauuugcuugggcaaugg

SEQ ID NO: 346432 - RNA, 22 nt, Human
auguguaggugaaucgaggcug

SEQ ID NO: 346433 - RNA, 22 nt, Human
ugagaauuacaaaugagucaca

SEQ ID NO: 346434 - RNA, 22 nt, Human
aagagccagcuagugaagaggc

SEQ ID NO: 346435 - RNA, 22 nt, Human
aggcagcuggaggcagagacua

SEQ ID NO: 346436 - RNA, 22 nt, Human
cugagcagccccaccagccauu

SEQ ID NO: 346437 - RNA, 22 nt, Human
ugccacacagucugguagaaua

SEQ ID NO: 346438 - RNA, 22 nt, Human
cagucccaggguugguucagcu

SEQ ID NO: 346439 - RNA, 22 nt, Human
auugacaaggaaacuauaccag

SEQ ID NO: 346440 - RNA, 22 nt, Human
cuguccugcaguugggggcagg

SEQ ID NO: 346441 - RNA, 22 nt, Human
gaggacagugugaucugccagc

SEQ ID NO: 346442 - RNA, 22 nt, Human
accagcagaguugaggaggaca

SEQ ID NO: 346443 - RNA, 22 nt, Human
agauaauuugaguaaauuaauu

SEQ ID NO: 346444 - RNA, 22 nt, Human
ugcagccaauucauucauucuu

SEQ ID NO: 346445 - RNA, 22 nt, Human
agcaggggcaggguuuugugcu

SEQ ID NO: 346446 - RNA, 22 nt, Human
aggacaguccgggguccuccac

SEQ ID NO: 346447 - RNA, 22 nt, Human
gaauauauuggugaaaauaguu

SEQ ID NO: 346448 - RNA, 22 nt, Human
ucucugagcugcuucuugcaua

SEQ ID NO: 346449 - RNA, 22 nt, Human
ccuuucucuggcagcaggacag

SEQ ID NO: 346450 - RNA, 22 nt, Human
gcagcugaaagggaucucuaca

SEQ ID NO: 346451 - RNA, 23 nt, Human
agacagaggcugaggcuggccgc

SEQ ID NO: 346452 - RNA, 18 nt, Human
ucauuuguuuugcaugaa

SEQ ID NO: 346453 - RNA, 22 nt, Human
acccagagccagggucaggagc

SEQ ID NO: 346454 - RNA, 22 nt, Human
agaggcugucccuugcuauucc

SEQ ID NO: 346455 - RNA, 18 nt, Human
cuggcuuucuuauccauc

SEQ ID NO: 346456 - RNA, 23 nt, Human
agguucaggagauggaggaacaa

SEQ ID NO: 346457 - RNA, 22 nt, Human
acagcuggaggccccauugucc

SEQ ID NO: 346458 - RNA, 22 nt, Human
ucuucauuuuacaggcagaccu

SEQ ID NO: 346459 - RNA, 22 nt, Human
uaguccuugguaaaauucuaug

SEQ ID NO: 346460 - RNA, 22 nt, Human
cuggagcuccagggucuccucu

SEQ ID NO: 346461 - RNA, 22 nt, Human
gggaccugggccagaggacagu

SEQ ID NO: 346462 - RNA, 22 nt, Human
cucuggagggaggcugagcugg

SEQ ID NO: 346463 - RNA, 22 nt, Human
aacaaauggaacacaaaucuuu

SEQ ID NO: 346464 - RNA, 22 nt, Human
cugcucugugguccaugagaca

SEQ ID NO: 346465 - RNA, 22 nt, Human
cugcaagauuggaagaugcaau

SEQ ID NO: 346466 - RNA, 22 nt, Human
agccugagagccaagcugugca

SEQ ID NO: 346467 - RNA, 22 nt, Human
guuccacaaaauguacccaguu

SEQ ID NO: 346468 - RNA, 22 nt, Human
uagcacauaacuuagaauaguu

SEQ ID NO: 346469 - RNA, 22 nt, Human
acagcugggugcugcucagagc

SEQ ID NO: 346470 - RNA, 22 nt, Human
aggcugucaucuuugcaggcag

SEQ ID NO: 346471 - RNA, 22 nt, Human
gccagagcugagugagguucuu

SEQ ID NO: 346472 - RNA, 22 nt, Human
acacuuuguuguggcauauacg

SEQ ID NO: 346473 - RNA, 22 nt, Human
cugucucagcaggaagucauca

SEQ ID NO: 346474 - RNA, 22 nt, Human
cuuccaaagcacuuuauggacc

SEQ ID NO: 346475 - RNA, 22 nt, Human
uauuuugacgauuuuaugcaaa

SEQ ID NO: 346476 - RNA, 22 nt, Human
ugaguccaagagccagugggaa

SEQ ID NO: 346477 - RNA, 22 nt, Human
gagcagugggaaggaacagggu

SEQ ID NO: 346478 - RNA, 19 nt, Human
augucuggguaacagcugc

SEQ ID NO: 346479 - RNA, 22 nt, Human
agcaggaguguccccuggcugu

SEQ ID NO: 346480 - RNA, 22 nt, Human
ggcaggucagguccaugaccaa

SEQ ID NO: 346481 - RNA, 22 nt, Human
ucaggcugguggucagauggcu

SEQ ID NO: 346482 - RNA, 22 nt, Human
uaaaggcuuuuacaggagugca

SEQ ID NO: 346483 - RNA, 22 nt, Human
aggcucuguuauucuagagggc

SEQ ID NO: 346484 - RNA, 22 nt, Human
gagagugauucccucccauaga

SEQ ID NO: 346485 - RNA, 22 nt, Human
acagcuuuaucucagggaucag

SEQ ID NO: 346486 - RNA, 22 nt, Human
cauuuagacauuugauuugggg

SEQ ID NO: 346487 - RNA, 22 nt, Human
uuguacaaauaggaaccucuga

SEQ ID NO: 346488 - RNA, 22 nt, Human
guaacugaggcagcuuuuaaga

SEQ ID NO: 346489 - RNA, 22 nt, Human
agaaaaaucuuggcgcuugucu

SEQ ID NO: 346490 - RNA, 22 nt, Human
uccaggcucucaggugucagca

SEQ ID NO: 346491 - RNA, 22 nt, Human
gagugguaggcaguguuaggaa

SEQ ID NO: 346492 - RNA, 22 nt, Human
gcaggaagaugagcucagguaa

SEQ ID NO: 346493 - RNA, 22 nt, Human
ggucucugacuuagagauggau

SEQ ID NO: 346494 - RNA, 22 nt, Human
uuguaacagguacuaaauaacu

SEQ ID NO: 346495 - RNA, 22 nt, Human
ccugucagcugauggcuaugua

SEQ ID NO: 346496 - RNA, 22 nt, Human
ugcugccaagcccgugcuccug

SEQ ID NO: 346497 - RNA, 20 nt, Human
uggcuccucuuggcuguggc

SEQ ID NO: 346498 - RNA, 22 nt, Human
acugucaccaucagagcgggaa

SEQ ID NO: 346499 - RNA, 22 nt, Human
ccucuuugugccugcaggcugc

SEQ ID NO: 346500 - RNA, 22 nt, Human
cugcuggggucagagcacuggg

SEQ ID NO: 346501 - RNA, 22 nt, Human
uauaauuuuagaagagauggaa

SEQ ID NO: 346502 - RNA, 22 nt, Human
cugaggcugggcauggggucca

SEQ ID NO: 346503 - RNA, 22 nt, Human
cugccagcucucuggaggcucu

SEQ ID NO: 346504 - RNA, 22 nt, Human
ucagaacauugacauucuuauu

SEQ ID NO: 346505 - RNA, 22 nt, Human
uccaugucuucaugugucuaac

SEQ ID NO: 346506 - RNA, 22 nt, Human
uuucaagcauaacugggaagag

SEQ ID NO: 346507 - RNA, 22 nt, Human
auuucugugcaguaaaugguga

SEQ ID NO: 346508 - RNA, 23 nt, Human
uugaaagguagcuggcagcuaga

SEQ ID NO: 346509 - RNA, 20 nt, Human
cccuggccuguuucaugccc

SEQ ID NO: 346510 - RNA, 22 nt, Human
auguuauaguuauaaaaugagg

SEQ ID NO: 346511 - RNA, 22 nt, Human
agaggcaggaagagcugauuuu

SEQ ID NO: 346512 - RNA, 22 nt, Human
aagagcugauuaagucaugagg

SEQ ID NO: 346513 - RNA, 22 nt, Human
cuauaauuaugcucaaaaugua

SEQ ID NO: 346514 - RNA, 22 nt, Human
aaggagagagcuuugcuggaac

SEQ ID NO: 346515 - RNA, 23 nt, Human
cuugcagggcuggaggcuuagaa

SEQ ID NO: 346516 - RNA, 22 nt, Human
ugcugcuccugccuggcuccca

SEQ ID NO: 346517 - RNA, 22 nt, Human
ugugugcauucacaugcaugcc

SEQ ID NO: 346518 - RNA, 22 nt, Human
cagggacccgcacagguagcau

SEQ ID NO: 346519 - RNA, 22 nt, Human
uauguacaccggggaagguggg

SEQ ID NO: 346520 - RNA, 22 nt, Human
uuauguacaauguuaauguaaa

SEQ ID NO: 346521 - RNA, 22 nt, Human
uggcagcuggagggcaauggcc

SEQ ID NO: 346522 - RNA, 22 nt, Human
ucaggcuggaaugcaguggggc

SEQ ID NO: 346523 - RNA, 22 nt, Human
ggacuggacucucaggcucaca

SEQ ID NO: 346524 - RNA, 22 nt, Human
uucacaggcuuggagguggggg

SEQ ID NO: 346525 - RNA, 22 nt, Human
ggcagcaggagccaucugguag

SEQ ID NO: 346526 - RNA, 22 nt, Human
ugcuuagacgucaaguacagcc

SEQ ID NO: 346527 - RNA, 22 nt, Human
cacuggcaugugaggcgguggc

SEQ ID NO: 346528 - RNA, 22 nt, Human
uagaaacugauagucuugugcu

SEQ ID NO: 346529 - RNA, 22 nt, Human
cagccagguaugggcgugcggg

SEQ ID NO: 346530 - RNA, 22 nt, Human
agaugguguuuccccaggugga

SEQ ID NO: 346531 - RNA, 22 nt, Human
gguguccucaugauuuucuaga

SEQ ID NO: 346532 - RNA, 22 nt, Human
cccaagagcuucuaggacgcug

SEQ ID NO: 346533 - RNA, 22 nt, Human
ucugggagagcugcugucagag

SEQ ID NO: 346534 - RNA, 22 nt, Human
gcucagggaacuuuuugcaggc

SEQ ID NO: 346535 - RNA, 22 nt, Human
aggugcaggagcugugcaggga

SEQ ID NO: 346536 - RNA, 22 nt, Human
augguuuaguuagggcuuuuca

SEQ ID NO: 346537 - RNA, 22 nt, Human
aaguaugacauuuaagacaauu

SEQ ID NO: 346538 - RNA, 22 nt, Human
ucucacuuuguugcccagacuu

SEQ ID NO: 346539 - RNA, 22 nt, Human
ccuggcugucguuuugugaaau

SEQ ID NO: 346540 - RNA, 23 nt, Human
aaagacugcugagaauuuuagga

SEQ ID NO: 346541 - RNA, 21 nt, Human
ucacaugcccauuacuggagc

SEQ ID NO: 346542 - RNA, 22 nt, Human
uucacagagagaacucaaacca

SEQ ID NO: 346543 - RNA, 22 nt, Human
ccuggcaggccccuccuggauu

SEQ ID NO: 346544 - RNA, 22 nt, Human
aaaggcaggcuuucacaucuca

SEQ ID NO: 346545 - RNA, 22 nt, Human
uggaggugagugugguacagca

SEQ ID NO: 346546 - RNA, 22 nt, Human
ccaggaagcggugagggcugcc

SEQ ID NO: 346547 - RNA, 22 nt, Human
uugaucagguugcuguggugua

SEQ ID NO: 346548 - RNA, 22 nt, Human
ggcagugaacagaaaugcagaa

SEQ ID NO: 346549 - RNA, 22 nt, Human
uccuuggcagcagggagcauga

SEQ ID NO: 346550 - RNA, 22 nt, Human
uuacagaaaagggcuuuaagag

SEQ ID NO: 346551 - RNA, 22 nt, Human
uggcaaggcugugggggcagag

SEQ ID NO: 346552 - RNA, 22 nt, Human
aggagugaguguccucagcaga

SEQ ID NO: 346553 - RNA, 18 nt, Human
gcagugaagaaagagcuu

SEQ ID NO: 346554 - RNA, 22 nt, Human
auggcucauuuaucuugcagcc

SEQ ID NO: 346555 - RNA, 22 nt, Human
cacagcuggugcacuagcucug

SEQ ID NO: 346556 - RNA, 22 nt, Human
guucuucaucauuuuagauagg

SEQ ID NO: 346557 - RNA, 22 nt, Human
ucagaggauuggacuuuuaugu

SEQ ID NO: 346558 - RNA, 22 nt, Human
uccuugaagcaacgugcagaca

SEQ ID NO: 346559 - RNA, 22 nt, Human
gcuggccauauauuuugcuguu

SEQ ID NO: 346560 - RNA, 22 nt, Human
aguaaaaauugaggugcaaaau

SEQ ID NO: 346561 - RNA, 22 nt, Human
cuguuuauaaauagaggggagu

SEQ ID NO: 346562 - RNA, 22 nt, Human
caggggcucugggugaugugag

SEQ ID NO: 346563 - RNA, 22 nt, Human
ucauuuucacacauaaauagca

SEQ ID NO: 346564 - RNA, 22 nt, Human
agcugagagguggcaagcugua

SEQ ID NO: 346565 - RNA, 22 nt, Human
uggcugaggagggucuucuggu

SEQ ID NO: 346566 - RNA, 19 nt, Human
agaggccucagcagcuggc

SEQ ID NO: 346567 - RNA, 22 nt, Human
aguuauauaacuaucuagaugc

SEQ ID NO: 346568 - RNA, 22 nt, Human
caaacuggcuaugggaaucuug

SEQ ID NO: 346569 - RNA, 22 nt, Human
gggaugucacugugccuggcac

SEQ ID NO: 346570 - RNA, 22 nt, Human
guggcuucacauggcauuuggc

SEQ ID NO: 346571 - RNA, 22 nt, Human
guccucuuagccacuuaauuau

SEQ ID NO: 346572 - RNA, 22 nt, Human
uguauguugggucaaaguacau

SEQ ID NO: 346573 - RNA, 22 nt, Human
cuacauuuugugauuaugaaau

SEQ ID NO: 346574 - RNA, 22 nt, Human
cucuccagaauaugccgccgug

SEQ ID NO: 346575 - RNA, 18 nt, Human
uauauuucacacauauuc

SEQ ID NO: 346576 - RNA, 22 nt, Human
gcugaagagagaugcguccagc

SEQ ID NO: 346577 - RNA, 22 nt, Human
ggaugcugacuuuggagcaugg

SEQ ID NO: 346578 - RNA, 22 nt, Human
gugcauuggugcgccacuucac

SEQ ID NO: 346579 - RNA, 21 nt, Human
uucaaagagugggcauuguca

SEQ ID NO: 346580 - RNA, 22 nt, Human
augcugugucuagcaggaacac

SEQ ID NO: 346581 - RNA, 22 nt, Human
gaaggagacccugaagaugcug

SEQ ID NO: 346582 - RNA, 22 nt, Human
cucuccucagaacaggcccucu

SEQ ID NO: 346583 - RNA, 22 nt, Human
uccagagggcgauggcuggggg

SEQ ID NO: 346584 - RNA, 22 nt, Human
aaauuaguacauugcaaagucc

SEQ ID NO: 346585 - RNA, 22 nt, Human
aaguauuucguucugaaaaagu

SEQ ID NO: 346586 - RNA, 22 nt, Human
aauacaguaauuuugaugaguu

SEQ ID NO: 346587 - RNA, 22 nt, Human
gagaggcagaggccugaaaccg

SEQ ID NO: 346588 - RNA, 16 nt, Human
gccuggaguggcaggg

SEQ ID NO: 346589 - RNA, 22 nt, Human
guugaaaguagaugcuauuugg

SEQ ID NO: 346590 - RNA, 22 nt, Human
ccuggaaggcaggcauggauug

SEQ ID NO: 346591 - RNA, 22 nt, Human
gcucaggagcucuugguggcgc

SEQ ID NO: 346592 - RNA, 22 nt, Human
gcugcuucucugauggagucca

SEQ ID NO: 346593 - RNA, 22 nt, Human
ccuguggcacaugcagggauuc

SEQ ID NO: 346594 - RNA, 22 nt, Human
aggagccaguuccaccccagga

SEQ ID NO: 346595 - RNA, 22 nt, Human
ggugcagaaggaagggagcugg

SEQ ID NO: 346596 - RNA, 22 nt, Human
gggaagcaggugcagcucgccu

SEQ ID NO: 346597 - RNA, 22 nt, Human
gaugaaaaucuugagaugucga

SEQ ID NO: 346598 - RNA, 22 nt, Human
ccagaggcauguucaaagcaau

SEQ ID NO: 346599 - RNA, 22 nt, Human
gagcuguccgccccugggccga

SEQ ID NO: 346600 - RNA, 22 nt, Human
aaugauuggcacuagauacaca

SEQ ID NO: 346601 - RNA, 22 nt, Human
uuccuaaaagaauacacuggau

SEQ ID NO: 346602 - RNA, 22 nt, Human
agcucccagaguccucugccca

SEQ ID NO: 346603 - RNA, 22 nt, Human
agcagcucugagaggccagcac

SEQ ID NO: 346604 - RNA, 22 nt, Human
cagcuuugauucuuucugccau

SEQ ID NO: 346605 - RNA, 22 nt, Human
cagcuggaugggagaccauguu

SEQ ID NO: 346606 - RNA, 22 nt, Human
agcaggugacagggcuguggug

SEQ ID NO: 346607 - RNA, 22 nt, Human
caggagcucucaucgucagggc

SEQ ID NO: 346608 - RNA, 22 nt, Human
caucagaaagaguccuggacuu

SEQ ID NO: 346609 - RNA, 22 nt, Human
cccagccucuggauucugcccu

SEQ ID NO: 346610 - RNA, 22 nt, Human
gggcagagaaauggacaguugg

SEQ ID NO: 346611 - RNA, 22 nt, Human
cccuccagcucaaagcaaccgg

SEQ ID NO: 346612 - RNA, 22 nt, Human
cugcagccuaggugcagcuggg

SEQ ID NO: 346613 - RNA, 22 nt, Human
agcagggccucuggcacugguc

SEQ ID NO: 346614 - RNA, 22 nt, Human
cagagcuguccaaacccugaca

SEQ ID NO: 346615 - RNA, 22 nt, Human
ucacagaaauaagauaguuauu

SEQ ID NO: 346616 - RNA, 22 nt, Human
gcaguaaaaaaggauaugugca

SEQ ID NO: 346617 - RNA, 22 nt, Human
uucauuccuucccuaagcaacu

SEQ ID NO: 346618 - RNA, 22 nt, Human
aggguaggaacugaguggaagg

SEQ ID NO: 346619 - RNA, 22 nt, Human
cugggccucauccucagaguuu

SEQ ID NO: 346620 - RNA, 22 nt, Human
acagugucaugucguguucccc

SEQ ID NO: 346621 - RNA, 22 nt, Human
acaggugggcuuaagagucggc

SEQ ID NO: 346622 - RNA, 22 nt, Human
ccuggaguuuuuugguugacuc

SEQ ID NO: 346623 - RNA, 22 nt, Human
uuauuauuuuguguacagcaaa

SEQ ID NO: 346624 - RNA, 22 nt, Human
aaaugcaauuguauguacucca

SEQ ID NO: 346625 - RNA, 22 nt, Human
gucuuuauuugagauugucauu

SEQ ID NO: 346626 - RNA, 22 nt, Human
gccuggcaggccugggccagca

SEQ ID NO: 346627 - RNA, 22 nt, Human
ugcuuaaacccugaucaugugu

SEQ ID NO: 346628 - RNA, 17 nt, Human
guccugggaggagagag

SEQ ID NO: 346629 - RNA, 22 nt, Human
uucuuucagaacacaagugauu

SEQ ID NO: 346630 - RNA, 22 nt, Human
gaagggugugugugagggacac

SEQ ID NO: 346631 - RNA, 22 nt, Human
cggcagagcggcgagccccucc

SEQ ID NO: 346632 - RNA, 22 nt, Human
cagagacauuaagugccaugau

SEQ ID NO: 346633 - RNA, 22 nt, Human
uuuuuugucuugaagaaauggu

SEQ ID NO: 346634 - RNA, 22 nt, Human
caguagcacuagauaugugugg

SEQ ID NO: 346635 - RNA, 22 nt, Human
ggugaaggcacaagagggcaag

SEQ ID NO: 346636 - RNA, 23 nt, Human
acagcugcaccuggccgccuggc

SEQ ID NO: 346637 - RNA, 22 nt, Human
gggugggaucuguggagccuca

SEQ ID NO: 346638 - RNA, 22 nt, Human
ugucucagaauggcucauaaua

SEQ ID NO: 346639 - RNA, 21 nt, Human
gcagagccggggcgagaaggc

SEQ ID NO: 346640 - RNA, 22 nt, Human
gugugcaggccacaggccaggg

SEQ ID NO: 346641 - RNA, 22 nt, Human
ugugugccagccuacgaggagc

SEQ ID NO: 346642 - RNA, 21 nt, Human
ucacuuauaauguauuugcug

SEQ ID NO: 346643 - RNA, 22 nt, Human
uuuuuguagucauuagaagagg

SEQ ID NO: 346644 - RNA, 22 nt, Human
ucuuucagccacuuaccugucu

SEQ ID NO: 346645 - RNA, 22 nt, Human
cacugccugugagcugugugcc

SEQ ID NO: 346646 - RNA, 22 nt, Human
gcccagcagcugguggagaagg

SEQ ID NO: 346647 - RNA, 22 nt, Human
gagaagcaaucaguggccaccc

SEQ ID NO: 346648 - RNA, 19 nt, Human
aggcagaggcuuggcuagc

SEQ ID NO: 346649 - RNA, 22 nt, Human
aucuuucaaucaggaaaaaucu

SEQ ID NO: 346650 - RNA, 22 nt, Human
auuaaauuggaucugcauaguu

SEQ ID NO: 346651 - RNA, 22 nt, Human
gcaaagucugcaucuggaucag

SEQ ID NO: 346652 - RNA, 22 nt, Human
uuacaucuaaacugugaacaau

SEQ ID NO: 346653 - RNA, 22 nt, Human
augucuuuauaaauguauaaug

SEQ ID NO: 346654 - RNA, 22 nt, Human
ccucagggaggccucuguggcu

SEQ ID NO: 346655 - RNA, 22 nt, Human
ugucauuuaguccucugugugu

SEQ ID NO: 346656 - RNA, 22 nt, Human
caaggccaguucaccaagggca

SEQ ID NO: 346657 - RNA, 22 nt, Human
ugggccacggggguggagagcu

SEQ ID NO: 346658 - RNA, 22 nt, Human
acagugugaugggccugccuga

SEQ ID NO: 346659 - RNA, 22 nt, Human
cugcagagcauaaaucugaaua

SEQ ID NO: 346660 - RNA, 22 nt, Human
agccagcugccuuucacaucug

SEQ ID NO: 346661 - RNA, 22 nt, Human
aaagaaggggucuacauccaau

SEQ ID NO: 346662 - RNA, 22 nt, Human
uggagccagagcgcagccuggg

SEQ ID NO: 346663 - RNA, 22 nt, Human
uuuacagagaauguacauaaag

SEQ ID NO: 346664 - RNA, 22 nt, Human
uaaauguguguagccaucugug

SEQ ID NO: 346665 - RNA, 22 nt, Human
cugcugcucgaccagucccagg

SEQ ID NO: 346666 - RNA, 22 nt, Human
agcagagaagacacaggcuuca

SEQ ID NO: 346667 - RNA, 22 nt, Human
caguggcgugaucucugcucac

SEQ ID NO: 346668 - RNA, 22 nt, Human
aaguccagguccucauuccauc

SEQ ID NO: 346669 - RNA, 22 nt, Human
gcagcugccccgacugugaguc

SEQ ID NO: 346670 - RNA, 21 nt, Human
auaagcaugcugauuacauuu

SEQ ID NO: 346671 - RNA, 22 nt, Human
aguggagacaggacagucgaua

SEQ ID NO: 346672 - RNA, 22 nt, Human
gcaggcagagucaauuugaucc

SEQ ID NO: 346673 - RNA, 22 nt, Human
uggcccugacuuggaggccuga

SEQ ID NO: 346674 - RNA, 22 nt, Human
acacaaugcauauuuuuccaga

SEQ ID NO: 346675 - RNA, 22 nt, Human
acuguggcucaucaggcuggug

SEQ ID NO: 346676 - RNA, 22 nt, Human
ugccaggcccugcgggguccca

SEQ ID NO: 346677 - RNA, 22 nt, Human
aaaaaucuaugacugcuucucc

SEQ ID NO: 346678 - RNA, 22 nt, Human
gcagcugagagaagaacagggc

SEQ ID NO: 346679 - RNA, 22 nt, Human
ggcaaaaaccgcaauaacuucu

SEQ ID NO: 346680 - RNA, 22 nt, Human
uaaaugaagaaauggagauugu

SEQ ID NO: 346681 - RNA, 22 nt, Human
gggcugagccacagcuuuuguu

SEQ ID NO: 346682 - RNA, 22 nt, Human
uauuuuaaagacugccagccua

SEQ ID NO: 346683 - RNA, 22 nt, Human
ucugcucagugcuuaucucuaa

SEQ ID NO: 346684 - RNA, 22 nt, Human
cuggagccacugggucuuguau

SEQ ID NO: 346685 - RNA, 22 nt, Human
ccucagagccuccagaaggaau

SEQ ID NO: 346686 - RNA, 22 nt, Human
uuugaaagagcugauacaugaa

SEQ ID NO: 346687 - RNA, 23 nt, Human
ucccaggaaucugcauuuuuaac

SEQ ID NO: 346688 - RNA, 22 nt, Human
caguacuuugcaucauuccacu

SEQ ID NO: 346689 - RNA, 22 nt, Human
cacagggccuggggcagcugcu

SEQ ID NO: 346690 - RNA, 18 nt, Human
ccagcaugccagaggcug

SEQ ID NO: 346691 - RNA, 22 nt, Human
ccuggauccaugaaaaggcuac

SEQ ID NO: 346692 - RNA, 22 nt, Human
caggaccuggaaugcuugugaa

SEQ ID NO: 346693 - RNA, 22 nt, Human
uauuuccaggccccacucuaga

SEQ ID NO: 346694 - RNA, 20 nt, Human
uggcaucucucaauuguagg

SEQ ID NO: 346695 - RNA, 22 nt, Human
agauaaugaaugccaugacauu

SEQ ID NO: 346696 - RNA, 22 nt, Human
cuggagccggcgagccccagcc

SEQ ID NO: 346697 - RNA, 22 nt, Human
ucuaguucuagaucccugagga

SEQ ID NO: 346698 - RNA, 22 nt, Human
cccagcuccaagggacagcgaa

SEQ ID NO: 346699 - RNA, 22 nt, Human
uucacaauaggagcaugcaaau

SEQ ID NO: 346700 - RNA, 22 nt, Human
auagacuugguuaguaaauuug

SEQ ID NO: 346701 - RNA, 22 nt, Human
ugaggcagauauuuauuggguu

SEQ ID NO: 346702 - RNA, 22 nt, Human
uggggacacagagccaaacuau

SEQ ID NO: 346703 - RNA, 20 nt, Human
acugugaaugcugaauuagc

SEQ ID NO: 346704 - RNA, 22 nt, Human
agugagggaugaagaacugcgg

SEQ ID NO: 346705 - RNA, 22 nt, Human
guaauuaggaauaaaaugggaa

SEQ ID NO: 346706 - RNA, 20 nt, Human
agcuggccuguccuaggccu

SEQ ID NO: 346707 - RNA, 22 nt, Human
ugaugaaauguugaggcaguga

SEQ ID NO: 346708 - RNA, 22 nt, Human
ugcccagcacugugccagucac

SEQ ID NO: 346709 - RNA, 22 nt, Human
aaauguauugcauaggauauuu

SEQ ID NO: 346710 - RNA, 20 nt, Human
acuggaucuggcuggagcug

SEQ ID NO: 346711 - RNA, 22 nt, Human
ucuuuacaaucuaagcauaguu

SEQ ID NO: 346712 - RNA, 22 nt, Human
cagggugacugcccuggccacu

SEQ ID NO: 346713 - RNA, 22 nt, Human
ggcccuguccuggcugucuccg

SEQ ID NO: 346714 - RNA, 22 nt, Human
uccaggaggcaccuuuggacca

SEQ ID NO: 346715 - RNA, 22 nt, Human
gcaaauucuuaacuggacugug

SEQ ID NO: 346716 - RNA, 22 nt, Human
aaagccagggacagugugcaug

SEQ ID NO: 346717 - RNA, 22 nt, Human
augguuuuucaaguauucagaa

SEQ ID NO: 346718 - RNA, 22 nt, Human
auuccauuguguaaggauaucg

SEQ ID NO: 346719 - RNA, 22 nt, Human
uuaaaaucuaaagcaguugucu

SEQ ID NO: 346720 - RNA, 22 nt, Human
agguacaguagacagacaguua

SEQ ID NO: 346721 - RNA, 22 nt, Human
uaagcuauuccugaagaagguu

SEQ ID NO: 346722 - RNA, 22 nt, Human
uaaaucacuccuaauaaucagu

SEQ ID NO: 346723 - RNA, 22 nt, Human
augggaggcagcagagcccagc

SEQ ID NO: 346724 - RNA, 22 nt, Human
ugggggagauugugcaucucua

SEQ ID NO: 346725 - RNA, 22 nt, Human
ugggccuccaauuccagcggga

SEQ ID NO: 346726 - RNA, 22 nt, Human
accaggagggacccugguggcc

SEQ ID NO: 346727 - RNA, 22 nt, Human
cauguacacucauguaacuaua

SEQ ID NO: 346728 - RNA, 23 nt, Human
aggaggaaaaguuaucugcugag

SEQ ID NO: 346729 - RNA, 22 nt, Human
ugucccagcagcuggguucucu

SEQ ID NO: 346730 - RNA, 22 nt, Human
ucaaaauucuagggagaauggu

SEQ ID NO: 346731 - RNA, 22 nt, Human
uguccuuuucuuuagugcagcu

SEQ ID NO: 346732 - RNA, 22 nt, Human
uuugaaaggguuaugagacuga

SEQ ID NO: 346733 - RNA, 22 nt, Human
uccucaugccgggucucacgcu

SEQ ID NO: 346734 - RNA, 20 nt, Human
uguuccaagcuaaugaauga

SEQ ID NO: 346735 - RNA, 22 nt, Human
uccaguggguugcugagggagg

SEQ ID NO: 346736 - RNA, 22 nt, Human
gaaaaaugcuccaaaucugugg

SEQ ID NO: 346737 - RNA, 22 nt, Human
uuucacauuagauaugucauuu

SEQ ID NO: 346738 - RNA, 22 nt, Human
cagggugggcacccagccucca

SEQ ID NO: 346739 - RNA, 22 nt, Human
acaaaaguguaggaauuccuua

SEQ ID NO: 346740 - RNA, 17 nt, Human
ccuuucucuuucaucuc

SEQ ID NO: 346741 - RNA, 20 nt, Human
cccagguaggugccaugagu

SEQ ID NO: 346742 - RNA, 22 nt, Human
ucucugguuauuaacuaacucc

SEQ ID NO: 346743 - RNA, 22 nt, Human
gcacugaacuuuaaucauuucu

SEQ ID NO: 346744 - RNA, 22 nt, Human
cugucucugucuuaacucccag

SEQ ID NO: 346745 - RNA, 22 nt, Human
uaaggcaccauaauauauuuaa

SEQ ID NO: 346746 - RNA, 23 nt, Human
aaaguguagccagguuaagaacc

SEQ ID NO: 346747 - RNA, 22 nt, Human
cagaguguuucuuugggugggu

SEQ ID NO: 346748 - RNA, 22 nt, Human
uaugugaauacagcaguggaug

SEQ ID NO: 346749 - RNA, 22 nt, Human
acuccuggggauccauuccuuu

SEQ ID NO: 346750 - RNA, 22 nt, Human
ggaggccuagccagcuccaguu

SEQ ID NO: 346751 - RNA, 22 nt, Human
cuuaggcagggcuggaagaucu

SEQ ID NO: 346752 - RNA, 22 nt, Human
ccagagccagagaggugccugc

SEQ ID NO: 346753 - RNA, 22 nt, Human
aucuuugaagaggacuugaagu

SEQ ID NO: 346754 - RNA, 22 nt, Human
auucuucaccugagucagucua

SEQ ID NO: 346755 - RNA, 22 nt, Human
cugaauaauacagacuagcuuc

SEQ ID NO: 346756 - RNA, 22 nt, Human
ucaggcugaaucauccuagcuu

SEQ ID NO: 346757 - RNA, 22 nt, Human
cugucauugagccugucagggc

SEQ ID NO: 346758 - RNA, 17 nt, Human
acaggcagaucaccuga

SEQ ID NO: 346759 - RNA, 22 nt, Human
uccugcagagacagaggccuca

SEQ ID NO: 346760 - RNA, 19 nt, Human
uucuccagccugaccugag

SEQ ID NO: 346761 - RNA, 22 nt, Human
cucacugugccuuuucccaaac

SEQ ID NO: 346762 - RNA, 22 nt, Human
aacagugagaagguggacagga

SEQ ID NO: 346763 - RNA, 22 nt, Human
gcagggcacaaggacgcacagg

SEQ ID NO: 346764 - RNA, 22 nt, Human
cugaggaagacagcagcugugu

SEQ ID NO: 346765 - RNA, 22 nt, Human
gaaaauguuuguccggagcuga

SEQ ID NO: 346766 - RNA, 22 nt, Human
aauguugagcuugaaaguaggu

SEQ ID NO: 346767 - RNA, 22 nt, Human
uggccagcccuucagccaugcc

SEQ ID NO: 346768 - RNA, 22 nt, Human
uaaguuuaaauguacaugaagc

SEQ ID NO: 346769 - RNA, 22 nt, Human
caggcacuguguuaggcacugu

SEQ ID NO: 346770 - RNA, 22 nt, Human
ucuuuuggguucuuaugauuua

SEQ ID NO: 346771 - RNA, 22 nt, Human
aggagucauaaaugugaacaaa

SEQ ID NO: 346772 - RNA, 22 nt, Human
aggagcugagggagcgcccuug

SEQ ID NO: 346773 - RNA, 22 nt, Human
uagggaggcuacuucuuguagg

SEQ ID NO: 346774 - RNA, 22 nt, Human
cugucagcacucuacuacagau

SEQ ID NO: 346775 - RNA, 19 nt, Human
cagcucaguuugauucucu

SEQ ID NO: 346776 - RNA, 22 nt, Human
uccauuuuguagguaugcuaca

SEQ ID NO: 346777 - RNA, 19 nt, Human
uuggaaggagccagagugg

SEQ ID NO: 346778 - RNA, 22 nt, Human
ucuaggagaaccaucagggagg

SEQ ID NO: 346779 - RNA, 21 nt, Human
uccugccuuaguccagagcag

SEQ ID NO: 346780 - RNA, 23 nt, Human
gagugcagaauagacaugcagug

SEQ ID NO: 346781 - RNA, 22 nt, Human
caguccuuauuccuauauuccu

SEQ ID NO: 346782 - RNA, 22 nt, Human
auguuucagauacagaucaaau

SEQ ID NO: 346783 - RNA, 22 nt, Human
ugccaggccacguagcuucaag

SEQ ID NO: 346784 - RNA, 22 nt, Human
uuuggaauuggaaagugcugug

SEQ ID NO: 346785 - RNA, 21 nt, Human
cccaggaguccuauuuaaaug

SEQ ID NO: 346786 - RNA, 22 nt, Human
ugagcaucuuuuuacagguuua

SEQ ID NO: 346787 - RNA, 22 nt, Human
augacaaaagaagacaugaggu

SEQ ID NO: 346788 - RNA, 22 nt, Human
ugucccagacacaguaugcgcu

SEQ ID NO: 346789 - RNA, 22 nt, Human
uuuugaaagggugauuuggcuu

SEQ ID NO: 346790 - RNA, 22 nt, Human
gagcuuuaccuuagguucuguu

SEQ ID NO: 346791 - RNA, 22 nt, Human
ccucucucuccugcacacacac

SEQ ID NO: 346792 - RNA, 22 nt, Human
uggaggcaucagagugcuuggc

SEQ ID NO: 346793 - RNA, 22 nt, Human
acagggcauuuccucuaugugu

SEQ ID NO: 346794 - RNA, 22 nt, Human
guuucacagucugcagaauuuu

SEQ ID NO: 346795 - RNA, 22 nt, Human
uguaacaguaagccugugagcu

SEQ ID NO: 346796 - RNA, 22 nt, Human
aggaggggcaaugauagucugg

SEQ ID NO: 346797 - RNA, 22 nt, Human
agaucugaaucucauccgagga

SEQ ID NO: 346798 - RNA, 22 nt, Human
ccugggcaacauagggagaccc

SEQ ID NO: 346799 - RNA, 22 nt, Human
auaucacaaacaagucuguacu

SEQ ID NO: 346800 - RNA, 22 nt, Human
agauuucaauggauauugcaag

SEQ ID NO: 346801 - RNA, 22 nt, Human
augugaaacugaagcauccaua

SEQ ID NO: 346802 - RNA, 17 nt, Human
gccaggagguuugagcu

SEQ ID NO: 346803 - RNA, 22 nt, Human
ugaggcucugcuucuguggcuc

SEQ ID NO: 346804 - RNA, 22 nt, Human
agcaccauugcaaauauggcag

SEQ ID NO: 346805 - RNA, 23 nt, Human
agcuucauugaccuccgcagggg

SEQ ID NO: 346806 - RNA, 22 nt, Human
cagaggcaggauaagaacugcg

SEQ ID NO: 346807 - RNA, 22 nt, Human
auuuuuccaauuaggauaaaga

SEQ ID NO: 346808 - RNA, 22 nt, Human
acaaagcuagagaagagaauug

SEQ ID NO: 346809 - RNA, 20 nt, Human
gggcaguucaaugccacucu

SEQ ID NO: 346810 - RNA, 22 nt, Human
aaguuacuggcaagggcugcag

SEQ ID NO: 346811 - RNA, 22 nt, Human
ugguuuauuucucugaaagguu

SEQ ID NO: 346812 - RNA, 19 nt, Human
cuucuggcccugagccacc

SEQ ID NO: 346813 - RNA, 22 nt, Human
caggguagacaguaggugucug

SEQ ID NO: 346814 - RNA, 22 nt, Human
auaguacacauccuacaauguu

SEQ ID NO: 346815 - RNA, 22 nt, Human
gcccaggaguugaagggcugac

SEQ ID NO: 346816 - RNA, 22 nt, Human
ugugugcagccucugucuuugg

SEQ ID NO: 346817 - RNA, 22 nt, Human
uugagaagaauguguugaguuu

SEQ ID NO: 346818 - RNA, 22 nt, Human
aggcugaggcggguagaucacc

SEQ ID NO: 346819 - RNA, 22 nt, Human
ugaaaugaucaguuugguuacu

SEQ ID NO: 346820 - RNA, 22 nt, Human
ccaggguggggcaggcccacug

SEQ ID NO: 346821 - RNA, 22 nt, Human
gaggugggagggcagucccuaa

SEQ ID NO: 346822 - RNA, 22 nt, Human
aaggggaaaaaguguuaggagu

SEQ ID NO: 346823 - RNA, 22 nt, Human
agggucugacaaugugacuuag

SEQ ID NO: 346824 - RNA, 22 nt, Human
agcagggcuuugcagacuuggg

SEQ ID NO: 346825 - RNA, 22 nt, Human
aauaagauccugaagauauguu

SEQ ID NO: 346826 - RNA, 22 nt, Human
gguacaaugucuuacagaccca

SEQ ID NO: 346827 - RNA, 22 nt, Human
caagggaccugagauggucucu

SEQ ID NO: 346828 - RNA, 22 nt, Human
cccucaggagaugucagcugga

SEQ ID NO: 346829 - RNA, 22 nt, Human
gguggaaggccuggaaggaggc

SEQ ID NO: 346830 - RNA, 22 nt, Human
ugcagaagaccuuccagggcug

SEQ ID NO: 346831 - RNA, 22 nt, Human
gucuucaauagagccucaauuu

SEQ ID NO: 346832 - RNA, 22 nt, Human
uaauuuauuucaacugccaagg

SEQ ID NO: 346833 - RNA, 22 nt, Human
ccaggaaugaaauguagauaaa

SEQ ID NO: 346834 - RNA, 22 nt, Human
agggaggaccaaugugugguua

SEQ ID NO: 346835 - RNA, 22 nt, Human
auggcagccugagcagaggaau

SEQ ID NO: 346836 - RNA, 22 nt, Human
uauuuagaugcauuuggauugc

SEQ ID NO: 346837 - RNA, 22 nt, Human
gagaggggcccaagccacauag

SEQ ID NO: 346838 - RNA, 22 nt, Human
cagggcuagugacaccccaguc

SEQ ID NO: 346839 - RNA, 22 nt, Human
ugugccaggcacuugcccaggc

SEQ ID NO: 346840 - RNA, 21 nt, Human
gaacauuuggguuguuucuac

SEQ ID NO: 346841 - RNA, 22 nt, Human
auugucuuuggugcuuccagga

SEQ ID NO: 346842 - RNA, 22 nt, Human
gggcucugggauucagagcaag

SEQ ID NO: 346843 - RNA, 22 nt, Human
uuccauuuauucuuguccagau

SEQ ID NO: 346844 - RNA, 23 nt, Human
accaggagaaaagcuuugcggga

SEQ ID NO: 346845 - RNA, 22 nt, Human
ccaggugucuguggccagcccu

SEQ ID NO: 346846 - RNA, 22 nt, Human
uggcucaggguccccaaauggu

SEQ ID NO: 346847 - RNA, 22 nt, Human
ugugcagcucuagagccaagcc

SEQ ID NO: 346848 - RNA, 17 nt, Human
ucaggcugggugcagug

SEQ ID NO: 346849 - RNA, 22 nt, Human
cuuauguaaacuacagauaaua

SEQ ID NO: 346850 - RNA, 22 nt, Human
gaagcccaggcuuccuuggcuu

SEQ ID NO: 346851 - RNA, 22 nt, Human
gaggaggcacuugagcagaugu

SEQ ID NO: 346852 - RNA, 22 nt, Human
aggugucugggcuuuggaguca

SEQ ID NO: 346853 - RNA, 22 nt, Human
ccagcagggcagugcccuggac

SEQ ID NO: 346854 - RNA, 22 nt, Human
ugcucauuggcgaucugaggga

SEQ ID NO: 346855 - RNA, 22 nt, Human
ggcuuccuuucacuacccucag

SEQ ID NO: 346856 - RNA, 22 nt, Human
gcauuuauuucuuuacugcauc

SEQ ID NO: 346857 - RNA, 22 nt, Human
gagcagcugcagugcagacccu

SEQ ID NO: 346858 - RNA, 22 nt, Human
ggcagaagaaaggcuaagucuc

SEQ ID NO: 346859 - RNA, 22 nt, Human
aaaguggucaccuucucauuuc

SEQ ID NO: 346860 - RNA, 22 nt, Human
gccagguguccucacagugagg

SEQ ID NO: 346861 - RNA, 22 nt, Human
aucaggauggguuuggcuuagg

SEQ ID NO: 346862 - RNA, 22 nt, Human
ugcuggaggggccugaccagga

SEQ ID NO: 346863 - RNA, 22 nt, Human
gaccauuugcuaguaaauugca

SEQ ID NO: 346864 - RNA, 22 nt, Human
gaggccugcagcguggucccug

SEQ ID NO: 346865 - RNA, 22 nt, Human
augaauaaguaaacuccuuugg

SEQ ID NO: 346866 - RNA, 22 nt, Human
ccuggggcucaagauggcgccg

SEQ ID NO: 346867 - RNA, 22 nt, Human
gcagggcagugugucugugggg

SEQ ID NO: 346868 - RNA, 22 nt, Human
ggugaggggagagugaaagaaa

SEQ ID NO: 346869 - RNA, 22 nt, Human
ucagaagcaaacaucacucuag

SEQ ID NO: 346870 - RNA, 22 nt, Human
cacacuagucuauccauuagcu

SEQ ID NO: 346871 - RNA, 22 nt, Human
ucauuucccuccuacaaagagg

SEQ ID NO: 346872 - RNA, 22 nt, Human
gugugcaguagagaaagagcag

SEQ ID NO: 346873 - RNA, 22 nt, Human
uuguaacacuuuucuauuaaua

SEQ ID NO: 346874 - RNA, 22 nt, Human
uggcugggggugcuauagcugc

SEQ ID NO: 346875 - RNA, 22 nt, Human
aggagugagcuuuggggucaga

SEQ ID NO: 346876 - RNA, 22 nt, Human
agaaaauauucauugagaggcu

SEQ ID NO: 346877 - RNA, 22 nt, Human
cagaguacugggagaacagaag

SEQ ID NO: 346878 - RNA, 22 nt, Human
uucugucacuuaggaggucaua

SEQ ID NO: 346879 - RNA, 22 nt, Human
uggcugaauaauauucuguugu

SEQ ID NO: 346880 - RNA, 22 nt, Human
agaauuagucacaauuauagga

SEQ ID NO: 346881 - RNA, 22 nt, Human
cugacucccaaagaggacgcgu

SEQ ID NO: 346882 - RNA, 22 nt, Human
uauguuaaauguuugauguuua

SEQ ID NO: 346883 - RNA, 22 nt, Human
gccagcaguauguccuggcagu

SEQ ID NO: 346884 - RNA, 22 nt, Human
aagccagguguuuaggccagcg

SEQ ID NO: 346885 - RNA, 22 nt, Human
acuaaacugaagcaugaaaagg

SEQ ID NO: 346886 - RNA, 19 nt, Human
agagaggcugugugaggga

SEQ ID NO: 346887 - RNA, 22 nt, Human
guuaggcauuugccuuaauuuu

SEQ ID NO: 346888 - RNA, 22 nt, Human
agaguguuuuucugucaaggac

SEQ ID NO: 346889 - RNA, 22 nt, Human
caugaauauuuaguauuuacuu

SEQ ID NO: 346890 - RNA, 22 nt, Human
cggcagcaaaggaagccagguc

SEQ ID NO: 346891 - RNA, 22 nt, Human
gagggcugcugccagauaugcc

SEQ ID NO: 346892 - RNA, 19 nt, Human
ccugucugucuucagcuag

SEQ ID NO: 346893 - RNA, 22 nt, Human
cuucagaacuauaaaaaguacu

SEQ ID NO: 346894 - RNA, 23 nt, Human
gagagcugacugucaagacuguu

SEQ ID NO: 346895 - RNA, 22 nt, Human
acagauauaugauuguguaaau

SEQ ID NO: 346896 - RNA, 22 nt, Human
gccccuggcuggccagcuccuc

SEQ ID NO: 346897 - RNA, 23 nt, Human
augaaugaauaaggcaggaaagc

SEQ ID NO: 346898 - RNA, 22 nt, Human
ccagcuuuuggggugacaauuu

SEQ ID NO: 346899 - RNA, 22 nt, Human
aaaaagauguccugaaguuuag

SEQ ID NO: 346900 - RNA, 22 nt, Human
aaauguagaccuauagggaccu

SEQ ID NO: 346901 - RNA, 22 nt, Human
agugugucugaucacuugugag

SEQ ID NO: 346902 - RNA, 20 nt, Human
gaguuccccauuucuccugg

SEQ ID NO: 346903 - RNA, 22 nt, Human
auuuggcaacauuaauugaauc

SEQ ID NO: 346904 - RNA, 22 nt, Human
gaauucugucgcuuacuagaug

SEQ ID NO: 346905 - RNA, 22 nt, Human
aagccgaggccacacagcagga

SEQ ID NO: 346906 - RNA, 22 nt, Human
uguaaucauuacaguacaugga

SEQ ID NO: 346907 - RNA, 22 nt, Human
acucugaaugugcauguaaauc

SEQ ID NO: 346908 - RNA, 22 nt, Human
cagccucuaagcacagccucuc

SEQ ID NO: 346909 - RNA, 20 nt, Human
aggcagcugggaaaugaggg

SEQ ID NO: 346910 - RNA, 22 nt, Human
cucugguguccuuuagaauuua

SEQ ID NO: 346911 - RNA, 21 nt, Human
cccacggaaugaugaggcacu

SEQ ID NO: 346912 - RNA, 22 nt, Human
ucugggaaguccucugucaugc

SEQ ID NO: 346913 - RNA, 22 nt, Human
gaggcagcaucuauggugggaa

SEQ ID NO: 346914 - RNA, 22 nt, Human
gccugcagaacugugaggcaau

SEQ ID NO: 346915 - RNA, 22 nt, Human
cucuggcuuugcucaugcaucc

SEQ ID NO: 346916 - RNA, 22 nt, Human
aagcuggcaauuaucaaaacug

SEQ ID NO: 346917 - RNA, 22 nt, Human
auugacaagacaauggcucuua

SEQ ID NO: 346918 - RNA, 22 nt, Human
uugucugugaaauggaaauagu

SEQ ID NO: 346919 - RNA, 22 nt, Human
uccugccugagcguggaggagg

SEQ ID NO: 346920 - RNA, 23 nt, Human
aaguaacagggauaauagcaguu

SEQ ID NO: 346921 - RNA, 22 nt, Human
ccacaggggucucuguagcuga

SEQ ID NO: 346922 - RNA, 22 nt, Human
ggcagggcccugauuccugggg

SEQ ID NO: 346923 - RNA, 19 nt, Human
ugcuuaauuccuaguaggu

SEQ ID NO: 346924 - RNA, 22 nt, Human
gcaguguuaggaauaaaaauga

SEQ ID NO: 346925 - RNA, 22 nt, Human
aaucuggcauguaagcuuagag

SEQ ID NO: 346926 - RNA, 22 nt, Human
cccagacauaacagcagagagg

SEQ ID NO: 346927 - RNA, 20 nt, Human
uccaagcccuccuuccauuc

SEQ ID NO: 346928 - RNA, 22 nt, Human
uugcucugaacccagggcacca

SEQ ID NO: 346929 - RNA, 22 nt, Human
caggaugagguagaggcagaua

SEQ ID NO: 346930 - RNA, 22 nt, Human
ugguccagaugccuuggcuuua

SEQ ID NO: 346931 - RNA, 22 nt, Human
gauuuccucacuaacauccauc

SEQ ID NO: 346932 - RNA, 22 nt, Human
ucuggccuacuggaguccauga

SEQ ID NO: 346933 - RNA, 22 nt, Human
ugcucugugguccaagauggcu

SEQ ID NO: 346934 - RNA, 22 nt, Human
gccugcuggcuguccauugcag

SEQ ID NO: 346935 - RNA, 22 nt, Human
gcuggcuugauaguuucugcuu

SEQ ID NO: 346936 - RNA, 22 nt, Human
guagaaauuccauuuacuuuga

SEQ ID NO: 346937 - RNA, 22 nt, Human
cugugauuguuaguuccuauac

SEQ ID NO: 346938 - RNA, 22 nt, Human
acugaaggguaaugugggagcc

SEQ ID NO: 346939 - RNA, 22 nt, Human
guaaaugugcuucuuuuaacuu

SEQ ID NO: 346940 - RNA, 22 nt, Human
ugaucugaaggacaugggaccc

SEQ ID NO: 346941 - RNA, 22 nt, Human
uuucacauuuuauacuuaagcc

SEQ ID NO: 346942 - RNA, 22 nt, Human
cauuuugugcuagacacuaugg

SEQ ID NO: 346943 - RNA, 22 nt, Human
cugcacagagcagggcagacac

SEQ ID NO: 346944 - RNA, 22 nt, Human
cuccagggggcauccacacagc

SEQ ID NO: 346945 - RNA, 22 nt, Human
gcuccucuccucggagucgggg

SEQ ID NO: 346946 - RNA, 22 nt, Human
guuuaagaaaauucauguuguu

SEQ ID NO: 346947 - RNA, 22 nt, Human
ugggccugaaggagcugcgccc

SEQ ID NO: 346948 - RNA, 22 nt, Human
aaguccaugaucaagauguggc

SEQ ID NO: 346949 - RNA, 22 nt, Human
ggcagcagggcugucucccuac

SEQ ID NO: 346950 - RNA, 22 nt, Human
gaaagccauagcccagcuuuac

SEQ ID NO: 346951 - RNA, 22 nt, Human
gugcaggguagcgacggcagga

SEQ ID NO: 346952 - RNA, 22 nt, Human
ugcuguuauacuuagcugguua

SEQ ID NO: 346953 - RNA, 22 nt, Human
guuguuuuuguucucuauagcu

SEQ ID NO: 346954 - RNA, 22 nt, Human
guggccuggaaaggcuggucug

SEQ ID NO: 346955 - RNA, 22 nt, Human
aaaugcacagaggccagagagg

SEQ ID NO: 346956 - RNA, 22 nt, Human
agggauggaagacuugaagacc

SEQ ID NO: 346957 - RNA, 22 nt, Human
gggcagcucagccaccaugcag

SEQ ID NO: 346958 - RNA, 22 nt, Human
auccuugaacuuagacacuagg

SEQ ID NO: 346959 - RNA, 21 nt, Human
ccugagggugguugugaagau

SEQ ID NO: 346960 - RNA, 22 nt, Human
gccaggagcccugggcaaguuc

SEQ ID NO: 346961 - RNA, 22 nt, Human
cccagggaagccauuucugacu

SEQ ID NO: 346962 - RNA, 22 nt, Human
gggcuccaacggugagcaugga

SEQ ID NO: 346963 - RNA, 22 nt, Human
caaagggcucuagacucagcag

SEQ ID NO: 346964 - RNA, 22 nt, Human
aucaaaguaggcauauguuuuu

SEQ ID NO: 346965 - RNA, 22 nt, Human
ugcugugggcaguacauaagcu

SEQ ID NO: 346966 - RNA, 22 nt, Human
uccaggcauuccagccauucca

SEQ ID NO: 346967 - RNA, 22 nt, Human
cauugcuguuaauugucucuag

SEQ ID NO: 346968 - RNA, 22 nt, Human
ugucaccaccggaagaaacugc

SEQ ID NO: 346969 - RNA, 22 nt, Human
gaggccuggucuaugagauguu

SEQ ID NO: 346970 - RNA, 22 nt, Human
gcuguucaaaagccacaguuac

SEQ ID NO: 346971 - RNA, 22 nt, Human
uucacauuaucaggauuguuuc

SEQ ID NO: 346972 - RNA, 22 nt, Human
uuugaauaucacaaacuuucaa

SEQ ID NO: 346973 - RNA, 22 nt, Human
guuagguagaaguuuacuuuga

SEQ ID NO: 346974 - RNA, 22 nt, Human
caggggaguuuuaugcaacaga

SEQ ID NO: 346975 - RNA, 22 nt, Human
uaggcagggauuaggguugauu

SEQ ID NO: 346976 - RNA, 23 nt, Human
uggcucagcuaguuuuccauuuc

SEQ ID NO: 346977 - RNA, 22 nt, Human
cagcagcccacgcgugcugucc

SEQ ID NO: 346978 - RNA, 22 nt, Human
ccacuucaucagugcuccauuu

SEQ ID NO: 346979 - RNA, 22 nt, Human
uucagcagucguccaggaaaag

SEQ ID NO: 346980 - RNA, 22 nt, Human
aucuuguuauaagagauaaugg

SEQ ID NO: 346981 - RNA, 22 nt, Human
gaggccaaucaauagggcaaua

SEQ ID NO: 346982 - RNA, 17 nt, Human
uggacccuugggccucc

SEQ ID NO: 346983 - RNA, 22 nt, Human
gccugccuucggugcgcagcgg

SEQ ID NO: 346984 - RNA, 23 nt, Human
cuccucguaacucuguggugggu

SEQ ID NO: 346985 - RNA, 22 nt, Human
gcagcugcagacccucagugcu

SEQ ID NO: 346986 - RNA, 22 nt, Human
uacauuguucaugcaugagaaa

SEQ ID NO: 346987 - RNA, 22 nt, Human
uggcagcaauuagcuagagcug

SEQ ID NO: 346988 - RNA, 22 nt, Human
uagggcagauucgguggaguuu

SEQ ID NO: 346989 - RNA, 22 nt, Human
gagaggaguaggcugauggugc

SEQ ID NO: 346990 - RNA, 22 nt, Human
aagguacaccaaaguucaaguu

SEQ ID NO: 346991 - RNA, 22 nt, Human
gaggagagaagcuaacggugcu

SEQ ID NO: 346992 - RNA, 22 nt, Human
guugaaagaugucuugguuccc

SEQ ID NO: 346993 - RNA, 20 nt, Human
uguugauuggugucaucuca

SEQ ID NO: 346994 - RNA, 21 nt, Human
ggcccugguuacgccuccucu

SEQ ID NO: 346995 - RNA, 22 nt, Human
uuucuacagcuggugcaacuuu

SEQ ID NO: 346996 - RNA, 22 nt, Human
ggcugcagguugguuggcagcu

SEQ ID NO: 346997 - RNA, 22 nt, Human
agggcugcuuugcuaaauaugg

SEQ ID NO: 346998 - RNA, 22 nt, Human
ugugccaugaggcucugauaug

SEQ ID NO: 346999 - RNA, 22 nt, Human
ccagugcuuccaggaauacggu

SEQ ID NO: 347000 - RNA, 22 nt, Human
uggaccugcguaggugcugggc

SEQ ID NO: 347001 - RNA, 22 nt, Human
ucaaugauuagaguuuagugug

SEQ ID NO: 347002 - RNA, 22 nt, Human
cuucacauguuggaguccuuug

SEQ ID NO: 347003 - RNA, 22 nt, Human
ccaggaggcggaagguacagug

SEQ ID NO: 347004 - RNA, 22 nt, Human
ucucugagcgcauuccuccggc

SEQ ID NO: 347005 - RNA, 22 nt, Human
cagggccagagagggcuggcug

SEQ ID NO: 347006 - RNA, 22 nt, Human
acagggcagaaauguugcaucu

SEQ ID NO: 347007 - RNA, 22 nt, Human
uggcuucugcuuucaguggagg

SEQ ID NO: 347008 - RNA, 19 nt, Human
cuggccaggccaggggccc

SEQ ID NO: 347009 - RNA, 22 nt, Human
ccucagggaaugggaggcuggg

SEQ ID NO: 347010 - RNA, 22 nt, Human
uccaggagguugagugaguucc

SEQ ID NO: 347011 - RNA, 22 nt, Human
gcccagccuccaagcuccaagg

SEQ ID NO: 347012 - RNA, 22 nt, Human
cacaaaaguaggaggcaggcgg

SEQ ID NO: 347013 - RNA, 22 nt, Human
agcaggaacgaguucaugggga

SEQ ID NO: 347014 - RNA, 22 nt, Human
ugaaggcagcaugcacacuagu

SEQ ID NO: 347015 - RNA, 22 nt, Human
ucaggagcugcacugggcccac

SEQ ID NO: 347016 - RNA, 22 nt, Human
uugauuucuuacucuuccaagg

SEQ ID NO: 347017 - RNA, 22 nt, Human
agaggccaggcugcagagggau

SEQ ID NO: 347018 - RNA, 22 nt, Human
caauguguuugcauauuaaaau

SEQ ID NO: 347019 - RNA, 22 nt, Human
gugaccaucagagaauaacaaa

SEQ ID NO: 347020 - RNA, 22 nt, Human
gcugccagccaacuugcugugc

SEQ ID NO: 347021 - RNA, 22 nt, Human
accagagcgcucaagccuuccc

SEQ ID NO: 347022 - RNA, 22 nt, Human
cagagcauuuggaagccacgug

SEQ ID NO: 347023 - RNA, 22 nt, Human
augcuucagugcuaccuucaaa

SEQ ID NO: 347024 - RNA, 22 nt, Human
uuuaggcaauagauggcagugu

SEQ ID NO: 347025 - RNA, 22 nt, Human
gaagaaagauuggcaugcuuca

SEQ ID NO: 347026 - RNA, 22 nt, Human
caauaauauccugugcuguuug

SEQ ID NO: 347027 - RNA, 22 nt, Human
cagaagcauuccagcaaauagu

SEQ ID NO: 347028 - RNA, 22 nt, Human
ggcccugugguuuugcaaaguc

SEQ ID NO: 347029 - RNA, 22 nt, Human
agcccccaaaagugcuuaugau

SEQ ID NO: 347030 - RNA, 22 nt, Human
uuccaggggcagcagugauggu

SEQ ID NO: 347031 - RNA, 22 nt, Human
gagccagccuucuucugagguc

SEQ ID NO: 347032 - RNA, 22 nt, Human
uauuaucauugguaauaugguc

SEQ ID NO: 347033 - RNA, 17 nt, Human
agaacuguaguagcucc

SEQ ID NO: 347034 - RNA, 22 nt, Human
cccuuagcuccaagggguuugg

SEQ ID NO: 347035 - RNA, 21 nt, Human
ggccugaguauaggacaggcc

SEQ ID NO: 347036 - RNA, 22 nt, Human
gagggaccuuuacacagacauu

SEQ ID NO: 347037 - RNA, 22 nt, Human
acuuaaaaagaaucuuuucacg

SEQ ID NO: 347038 - RNA, 22 nt, Human
uguagaaauuaguaagaucaac

SEQ ID NO: 347039 - RNA, 22 nt, Human
augguacaaaauguauaaaguc

SEQ ID NO: 347040 - RNA, 22 nt, Human
uuagaaagaacuuuagauauca

SEQ ID NO: 347041 - RNA, 20 nt, Human
gcaaauggaucccacaagcc

SEQ ID NO: 347042 - RNA, 22 nt, Human
ucagcagggaggcucugugccc

SEQ ID NO: 347043 - RNA, 22 nt, Human
agggcuggcuaggugcguuccc

SEQ ID NO: 347044 - RNA, 22 nt, Human
agccuggacagcuacggagaac

SEQ ID NO: 347045 - RNA, 22 nt, Human
cuagggacugggaccuuaguua

SEQ ID NO: 347046 - RNA, 22 nt, Human
cuggccuggagccucugggugg

SEQ ID NO: 347047 - RNA, 22 nt, Human
cugaaggagguagagugacaua

SEQ ID NO: 347048 - RNA, 22 nt, Human
cugugcaguggcagcguguggg

SEQ ID NO: 347049 - RNA, 22 nt, Human
aguggcagagaccccagccagc

SEQ ID NO: 347050 - RNA, 22 nt, Human
cagaagaguagcugaacaaguu

SEQ ID NO: 347051 - RNA, 22 nt, Human
ucuuccucucuaauugaucaga

SEQ ID NO: 347052 - RNA, 22 nt, Human
ugaagaauguugcagugagcau

SEQ ID NO: 347053 - RNA, 17 nt, Human
guccuacccauggucua

SEQ ID NO: 347054 - RNA, 22 nt, Human
uagauuucaggcuggcuugcgg

SEQ ID NO: 347055 - RNA, 22 nt, Human
uuucaguuacugcuauaucauu

SEQ ID NO: 347056 - RNA, 23 nt, Human
ucucugaguuguacuuucccuug

SEQ ID NO: 347057 - RNA, 17 nt, Human
uuccccugaccaagccu

SEQ ID NO: 347058 - RNA, 22 nt, Human
aucuggcuggauucuuagcguu

SEQ ID NO: 347059 - RNA, 23 nt, Human
uagaauucaaucuguuccacauc

SEQ ID NO: 347060 - RNA, 22 nt, Human
cagacagcugcuuucuugcugu

SEQ ID NO: 347061 - RNA, 22 nt, Human
ggcugggcaaacaagacucuuc

SEQ ID NO: 347062 - RNA, 22 nt, Human
ugcuugggaauguggagucaga

SEQ ID NO: 347063 - RNA, 22 nt, Human
gagcagaacuacucacauaucg

SEQ ID NO: 347064 - RNA, 22 nt, Human
ugcaccauacccauuccccucu

SEQ ID NO: 347065 - RNA, 22 nt, Human
cuggagagaaaugacaaagcua

SEQ ID NO: 347066 - RNA, 22 nt, Human
gggcucucaugaguguguggua

SEQ ID NO: 347067 - RNA, 22 nt, Human
ggggggugcugaucaguggagc

SEQ ID NO: 347068 - RNA, 22 nt, Human
ugcuccuuccucauccugugca

SEQ ID NO: 347069 - RNA, 22 nt, Human
gaaaauguuagcuucauaguca

SEQ ID NO: 347070 - RNA, 22 nt, Human
uccuuugguuguagacaggaau

SEQ ID NO: 347071 - RNA, 22 nt, Human
uauuucuguaacucagggucug

SEQ ID NO: 347072 - RNA, 22 nt, Human
aauguguauaugaacauacagg

SEQ ID NO: 347073 - RNA, 22 nt, Human
gcagccagccccucugaccucu

SEQ ID NO: 347074 - RNA, 22 nt, Human
agcauggggcaaugcaugugcu

SEQ ID NO: 347075 - RNA, 22 nt, Human
gaggagaaauuuggggaccuga

SEQ ID NO: 347076 - RNA, 22 nt, Human
aggcugaguuucucauucucgc

SEQ ID NO: 347077 - RNA, 22 nt, Human
ucagaggaccuuacugagaacc

SEQ ID NO: 347078 - RNA, 22 nt, Human
uugcagcugcaguaaauguuca

SEQ ID NO: 347079 - RNA, 22 nt, Human
ugcaugcauaaauguacacaca

SEQ ID NO: 347080 - RNA, 22 nt, Human
uggucuuuaagguagcugucau

SEQ ID NO: 347081 - RNA, 20 nt, Human
gaaaugugaccucuucugug

SEQ ID NO: 347082 - RNA, 22 nt, Human
aaggcacugaacuuaaauucug

SEQ ID NO: 347083 - RNA, 22 nt, Human
cacagaauaaauugguaucaga

SEQ ID NO: 347084 - RNA, 22 nt, Human
aggggcuggaguucgagguuac

SEQ ID NO: 347085 - RNA, 22 nt, Human
caggagaaauguggcugcuacc

SEQ ID NO: 347086 - RNA, 21 nt, Human
acagauuuuauaucucugcug

SEQ ID NO: 347087 - RNA, 22 nt, Human
caguacuuauuucuauuuaggg

SEQ ID NO: 347088 - RNA, 22 nt, Human
aaaauccugcugacucgagaug

SEQ ID NO: 347089 - RNA, 18 nt, Human
ugacagaaccuggagccu

SEQ ID NO: 347090 - RNA, 21 nt, Human
uaaaucucuguauucuucagu

SEQ ID NO: 347091 - RNA, 22 nt, Human
gcugcucuccauggccgugagu

SEQ ID NO: 347092 - RNA, 22 nt, Human
gccagggaacccaagggccuca

SEQ ID NO: 347093 - RNA, 22 nt, Human
gaggcugcuguuagcccugggc

SEQ ID NO: 347094 - RNA, 21 nt, Human
agcagaggggacauguuugau

SEQ ID NO: 347095 - RNA, 22 nt, Human
ugauucuauggaaggcauaagg

SEQ ID NO: 347096 - RNA, 22 nt, Human
cccaggaaugggaaggaggaau

SEQ ID NO: 347097 - RNA, 22 nt, Human
augcuuuauuauuuugcaggga

SEQ ID NO: 347098 - RNA, 22 nt, Human
aaauugaaugauuaagugguga

SEQ ID NO: 347099 - RNA, 22 nt, Human
ugcuccagugagcuggccaucc

SEQ ID NO: 347100 - RNA, 22 nt, Human
ugccacacucacuucuguggac

SEQ ID NO: 347101 - RNA, 22 nt, Human
gugccugcugcagagucgcugu

SEQ ID NO: 347102 - RNA, 22 nt, Human
uaggcagcagugcuaugauucu

SEQ ID NO: 347103 - RNA, 22 nt, Human
gaggcacaucacuuggugcauu

SEQ ID NO: 347104 - RNA, 22 nt, Human
cugcuguggguuaagacacugu

SEQ ID NO: 347105 - RNA, 22 nt, Human
auugaaucugcacuaguauuuu

SEQ ID NO: 347106 - RNA, 22 nt, Human
aaauauguauggaguucaugaa

SEQ ID NO: 347107 - RNA, 22 nt, Human
uggcagggaguugcaggauuuc

SEQ ID NO: 347108 - RNA, 22 nt, Human
uggagcuggcuuguggaaguug

SEQ ID NO: 347109 - RNA, 22 nt, Human
agagcagcacguuguccccaca

SEQ ID NO: 347110 - RNA, 22 nt, Human
auuuucauuuugcagggugaga

SEQ ID NO: 347111 - RNA, 22 nt, Human
cuggagugaggucugggagccu

SEQ ID NO: 347112 - RNA, 22 nt, Human
auauuagguuggugcaaaagua

SEQ ID NO: 347113 - RNA, 22 nt, Human
ugaaaguuacaggaaaacagau

SEQ ID NO: 347114 - RNA, 22 nt, Human
uccugcagccacugcaggcaga

SEQ ID NO: 347115 - RNA, 22 nt, Human
caggaugggugucggccagcac

SEQ ID NO: 347116 - RNA, 22 nt, Human
gaaaauguuuccuguuauuugc

SEQ ID NO: 347117 - RNA, 22 nt, Human
uugaaaggccuguuuauccagc

SEQ ID NO: 347118 - RNA, 22 nt, Human
cccagcccccgagugucuggaa

SEQ ID NO: 347119 - RNA, 22 nt, Human
caucucaugggcaugccaagcu

SEQ ID NO: 347120 - RNA, 22 nt, Human
ggcagcuccaaaaggaaacacu

SEQ ID NO: 347121 - RNA, 22 nt, Human
gaucuucucuuuaguagaaaca

SEQ ID NO: 347122 - RNA, 22 nt, Human
ugggcagacuaaggucaaagcu

SEQ ID NO: 347123 - RNA, 22 nt, Human
uguuucauuaguacugacaaua

SEQ ID NO: 347124 - RNA, 22 nt, Human
agauacauugaguuuccuccug

SEQ ID NO: 347125 - RNA, 22 nt, Human
uggcagcuacagacagagguga

SEQ ID NO: 347126 - RNA, 22 nt, Human
gccucugcccauccaccaucag

SEQ ID NO: 347127 - RNA, 22 nt, Human
ugggaguguucuuggcuugcuu

SEQ ID NO: 347128 - RNA, 22 nt, Human
ugaaucugauuucccuggaggc

SEQ ID NO: 347129 - RNA, 23 nt, Human
agugcugaauugaaagcuccagg

SEQ ID NO: 347130 - RNA, 22 nt, Human
gccagagccacuuuugggugau

SEQ ID NO: 347131 - RNA, 22 nt, Human
gggcugugggacccggcacuuu

SEQ ID NO: 347132 - RNA, 22 nt, Human
acugucugcaaaacucauacuc

SEQ ID NO: 347133 - RNA, 22 nt, Human
uaaguucauuagacuacagaua

SEQ ID NO: 347134 - RNA, 20 nt, Human
caggaggcaaggucaagguc

SEQ ID NO: 347135 - RNA, 22 nt, Human
acaacuuucuggguuaucugau

SEQ ID NO: 347136 - RNA, 22 nt, Human
gccuggaguacuccuugaagug

SEQ ID NO: 347137 - RNA, 22 nt, Human
cagugcaguugguggcaggggu

SEQ ID NO: 347138 - RNA, 18 nt, Human
uggagcugagugcugugc

SEQ ID NO: 347139 - RNA, 22 nt, Human
uuaaugcuugucuagaucuucu

SEQ ID NO: 347140 - RNA, 22 nt, Human
acacugugacaaaggcuguucu

SEQ ID NO: 347141 - RNA, 22 nt, Human
agcagagcugcaguggccugcu

SEQ ID NO: 347142 - RNA, 22 nt, Human
gccaggcagacaggucaucagg

SEQ ID NO: 347143 - RNA, 22 nt, Human
ccagagccccugagcuucccug

SEQ ID NO: 347144 - RNA, 22 nt, Human
uuccaggacuggguguuugaag

SEQ ID NO: 347145 - RNA, 22 nt, Human
aggcugagccugggcguggugg

SEQ ID NO: 347146 - RNA, 22 nt, Human
ggcagggagagcaugcugauaa

SEQ ID NO: 347147 - RNA, 17 nt, Human
auuuccucagggcugag

SEQ ID NO: 347148 - RNA, 22 nt, Human
uuagaaaacauaagugguaaag

SEQ ID NO: 347149 - RNA, 22 nt, Human
gugugcagucugcuaggcaggg

SEQ ID NO: 347150 - RNA, 23 nt, Human
gccucagagaaacagcugcacac

SEQ ID NO: 347151 - RNA, 22 nt, Human
uggccugccucccggcuucuuu

SEQ ID NO: 347152 - RNA, 22 nt, Human
uucauguaauuccauaagguaa

SEQ ID NO: 347153 - RNA, 22 nt, Human
gacagcuggcaguggaaaggug

SEQ ID NO: 347154 - RNA, 22 nt, Human
aaggcagccgugugacugcaug

SEQ ID NO: 347155 - RNA, 22 nt, Human
gugcaugugcauccauguguac

SEQ ID NO: 347156 - RNA, 22 nt, Human
ugacaguuaagguauacauuca

SEQ ID NO: 347157 - RNA, 22 nt, Human
cucaggaugcaggucacaggac

SEQ ID NO: 347158 - RNA, 22 nt, Human
ccugguguugugaaguagccgu

SEQ ID NO: 347159 - RNA, 22 nt, Human
gcucugucaacagcuagcugug

SEQ ID NO: 347160 - RNA, 22 nt, Human
agaggaggaagagcuuuaaaau

SEQ ID NO: 347161 - RNA, 22 nt, Human
guuccaaaguuagaguguauug

SEQ ID NO: 347162 - RNA, 22 nt, Human
uuacaaagaguguucuuuucca

SEQ ID NO: 347163 - RNA, 22 nt, Human
aggcaggcacacuuccuccagg

SEQ ID NO: 347164 - RNA, 22 nt, Human
agagccugaggccaggaaaaug

SEQ ID NO: 347165 - RNA, 22 nt, Human
aucaggaucugggagccugaaa

SEQ ID NO: 347166 - RNA, 22 nt, Human
cuguuucaagugaagucagaca

SEQ ID NO: 347167 - RNA, 21 nt, Human
uguccuuaaugcaauguccuu

SEQ ID NO: 347168 - RNA, 22 nt, Human
gaugugagugguagcugggauu

SEQ ID NO: 347169 - RNA, 19 nt, Human
agaggcagucuccaacagg

SEQ ID NO: 347170 - RNA, 22 nt, Human
agggcuccaggggcugggugac

SEQ ID NO: 347171 - RNA, 22 nt, Human
aagugaaacauguaucucuuua

SEQ ID NO: 347172 - RNA, 22 nt, Human
cagcuggcaaguggagcagggu

SEQ ID NO: 347173 - RNA, 22 nt, Human
aggugagguuugggagguguca

SEQ ID NO: 347174 - RNA, 22 nt, Human
ggccuugggaggagggucagaa

SEQ ID NO: 347175 - RNA, 22 nt, Human
ucaaagucauggcuaguaauga

SEQ ID NO: 347176 - RNA, 22 nt, Human
uacuaaauaguuuaauuccuca

SEQ ID NO: 347177 - RNA, 22 nt, Human
gaggcagagucacaaagagucu

SEQ ID NO: 347178 - RNA, 22 nt, Human
aaaucaguuggaacacaagcag

SEQ ID NO: 347179 - RNA, 22 nt, Human
gagcaggcuugcagagaagggg

SEQ ID NO: 347180 - RNA, 22 nt, Human
ugaggccaaugacccugggcag

SEQ ID NO: 347181 - RNA, 22 nt, Human
ugcuguguggaugugaagaauc

SEQ ID NO: 347182 - RNA, 22 nt, Human
cccagagcugagucugauauau

SEQ ID NO: 347183 - RNA, 22 nt, Human
acaugcaugucuaugggcaggu

SEQ ID NO: 347184 - RNA, 22 nt, Human
aggcucagucuguucaugcacu

SEQ ID NO: 347185 - RNA, 22 nt, Human
uggccugggugcugcugacauc

SEQ ID NO: 347186 - RNA, 22 nt, Human
cccugcugucaggugcugggag

SEQ ID NO: 347187 - RNA, 22 nt, Human
agcaguggugugaggagggcuc

SEQ ID NO: 347188 - RNA, 21 nt, Human
ucccagggccaggugccauca

SEQ ID NO: 347189 - RNA, 22 nt, Human
cagaggcucaccagccuuucac

SEQ ID NO: 347190 - RNA, 18 nt, Human
ggcagggaaaagauaggg

SEQ ID NO: 347191 - RNA, 22 nt, Human
acauuuaaauaugccuuauauu

SEQ ID NO: 347192 - RNA, 19 nt, Human
gaaguccucuaguaaauuu

SEQ ID NO: 347193 - RNA, 21 nt, Human
ggauggauagggaagagauuu

SEQ ID NO: 347194 - RNA, 22 nt, Human
cagaggaagcagacacaucuug

SEQ ID NO: 347195 - RNA, 22 nt, Human
gaguggggcccacugcugggug

SEQ ID NO: 347196 - RNA, 22 nt, Human
uguggcuguguccaccugcugc

SEQ ID NO: 347197 - RNA, 22 nt, Human
ggcuuuauuuugcaugaaugcu

SEQ ID NO: 347198 - RNA, 22 nt, Human
ggagugaaguggcgcgaucucg

SEQ ID NO: 347199 - RNA, 22 nt, Human
auuucucagugaaaugacaggc

SEQ ID NO: 347200 - RNA, 22 nt, Human
ccagccagucccgcaugaccgc

SEQ ID NO: 347201 - RNA, 22 nt, Human
uucauucugggcucuaaggaac

SEQ ID NO: 347202 - RNA, 22 nt, Human
ugagccugcugucgcuggaccc

SEQ ID NO: 347203 - RNA, 22 nt, Human
cacaugaugguggaagccauag

SEQ ID NO: 347204 - RNA, 22 nt, Human
cuuuccaagaaugcagauaccu

SEQ ID NO: 347205 - RNA, 22 nt, Human
ccaccagcagugugcaaggauu

SEQ ID NO: 347206 - RNA, 22 nt, Human
uuagauaacaguagaauaucaa

SEQ ID NO: 347207 - RNA, 22 nt, Human
aggagggcaggcuggcugccua

SEQ ID NO: 347208 - RNA, 22 nt, Human
ccagcaugagacgaugaugaag

SEQ ID NO: 347209 - RNA, 21 nt, Human
acaggcucuggggaugcuggg

SEQ ID NO: 347210 - RNA, 22 nt, Human
uguuccaauaaggaguugaaau

SEQ ID NO: 347211 - RNA, 22 nt, Human
cccacucccugcacgccugccg

SEQ ID NO: 347212 - RNA, 22 nt, Human
cucugaauggacacuccagugu

SEQ ID NO: 347213 - RNA, 22 nt, Human
gucaccagucccagcuccugaa

SEQ ID NO: 347214 - RNA, 22 nt, Human
guguaauuauauaaagaucuac

SEQ ID NO: 347215 - RNA, 22 nt, Human
augcuguggaugccuugcccca

SEQ ID NO: 347216 - RNA, 22 nt, Human
uuggccuuaaccucucugugcc

SEQ ID NO: 347217 - RNA, 22 nt, Human
auaugcacauacauacauaggu

SEQ ID NO: 347218 - RNA, 22 nt, Human
gggcugaccaaugccuugcuuu

SEQ ID NO: 347219 - RNA, 22 nt, Human
aguggcagagguugacugcagu

SEQ ID NO: 347220 - RNA, 22 nt, Human
aaacagcugucauuguuuuaaa

SEQ ID NO: 347221 - RNA, 22 nt, Human
acauuucuuugcuagacagcag

SEQ ID NO: 347222 - RNA, 22 nt, Human
agggggugcccagaugaaggau

SEQ ID NO: 347223 - RNA, 22 nt, Human
uagcccagagucccaauuccag

SEQ ID NO: 347224 - RNA, 22 nt, Human
cauggcuucuaagugauaacgu

SEQ ID NO: 347225 - RNA, 22 nt, Human
uauuucuguaugcauaaaagga

SEQ ID NO: 347226 - RNA, 22 nt, Human
cugggaggugaacagaaaaacu

SEQ ID NO: 347227 - RNA, 22 nt, Human
agggauguaaauucuucuucuu

SEQ ID NO: 347228 - RNA, 20 nt, Human
ccuccaggcacacccaugug

SEQ ID NO: 347229 - RNA, 22 nt, Human
gcaggagacuggcugugguagu

SEQ ID NO: 347230 - RNA, 22 nt, Human
gagcagcuagauaaagcccuuc

SEQ ID NO: 347231 - RNA, 22 nt, Human
uacaaaguaauguauaauaucg

SEQ ID NO: 347232 - RNA, 22 nt, Human
ggcagggucuggacugaaagcu

SEQ ID NO: 347233 - RNA, 22 nt, Human
ugaagcagagugaaggugaauu

SEQ ID NO: 347234 - RNA, 22 nt, Human
uccugcagagccgcccucaggu

SEQ ID NO: 347235 - RNA, 22 nt, Human
gaauccaggguuguuugagcua

SEQ ID NO: 347236 - RNA, 20 nt, Human
ugucaugcauuagaugaaga

SEQ ID NO: 347237 - RNA, 22 nt, Human
ccucuucuaggacguccuugug

SEQ ID NO: 347238 - RNA, 22 nt, Human
ugggcugcccaagguggccaug

SEQ ID NO: 347239 - RNA, 22 nt, Human
aaagcccauguggaaguacagg

SEQ ID NO: 347240 - RNA, 22 nt, Human
gaggcuccccaugaggccccag

SEQ ID NO: 347241 - RNA, 22 nt, Human
caaauucucacccuguuugauu

SEQ ID NO: 347242 - RNA, 22 nt, Human
uuugcauuacuugacuuuaguu

SEQ ID NO: 347243 - RNA, 22 nt, Human
agccaggcgggucuuugcuccu

SEQ ID NO: 347244 - RNA, 22 nt, Human
agggcaugaagcaguggacagc

SEQ ID NO: 347245 - RNA, 22 nt, Human
gagaagucauuugaccaccuag

SEQ ID NO: 347246 - RNA, 22 nt, Human
gcucugggauuaccagccuuag

SEQ ID NO: 347247 - RNA, 22 nt, Human
cacagcuugggcucugacaaua

SEQ ID NO: 347248 - RNA, 22 nt, Human
gcagcuguguaaugagcccaca

SEQ ID NO: 347249 - RNA, 22 nt, Human
aaauuauuaugccccucuauaa

SEQ ID NO: 347250 - RNA, 22 nt, Human
gauaaaauaacuauggaauacu

SEQ ID NO: 347251 - RNA, 22 nt, Human
cuggcaggaagaggaaagguca

SEQ ID NO: 347252 - RNA, 22 nt, Human
agguacagcaauauaagagguc

SEQ ID NO: 347253 - RNA, 23 nt, Human
ucguugaauagcaauagcacaac

SEQ ID NO: 347254 - RNA, 19 nt, Human
agcagccauagacaauaug

SEQ ID NO: 347255 - RNA, 22 nt, Human
uucaggaugaaagugugcaaca

SEQ ID NO: 347256 - RNA, 22 nt, Human
guugaaagaucauguggcugcc

SEQ ID NO: 347257 - RNA, 22 nt, Human
caggguggaagcuguagagugg

SEQ ID NO: 347258 - RNA, 22 nt, Human
cucacaggagaaagucaugguc

SEQ ID NO: 347259 - RNA, 22 nt, Human
aggcugcugaggccaccacgcu

SEQ ID NO: 347260 - RNA, 23 nt, Human
ggagugcaauggcgccaucucgg

SEQ ID NO: 347261 - RNA, 22 nt, Human
cagagcugcacauucuaugaug

SEQ ID NO: 347262 - RNA, 22 nt, Human
uauuccaaaauaguuaagcacu

SEQ ID NO: 347263 - RNA, 22 nt, Human
cacugaaggacaguaggaaggg

SEQ ID NO: 347264 - RNA, 22 nt, Human
aaaguauuugugauuuuuacca

SEQ ID NO: 347265 - RNA, 22 nt, Human
uggagagcgugcuuagcacucu

SEQ ID NO: 347266 - RNA, 19 nt, Human
agaaaucucgagauuuguu

SEQ ID NO: 347267 - RNA, 22 nt, Human
uaucuuugcaaauaucucuaag

SEQ ID NO: 347268 - RNA, 22 nt, Human
ugccagccagguucugaggcua

SEQ ID NO: 347269 - RNA, 22 nt, Human
gcuguggucugugagcuccaaa

SEQ ID NO: 347270 - RNA, 22 nt, Human
guguuuccaguucagaaagcaa

SEQ ID NO: 347271 - RNA, 22 nt, Human
ugcagggcccucauuccugucc

SEQ ID NO: 347272 - RNA, 22 nt, Human
ccacaggaccagaggagaucac

SEQ ID NO: 347273 - RNA, 22 nt, Human
ggugaggcccagugaucugugu

SEQ ID NO: 347274 - RNA, 22 nt, Human
accaggcagucaccguccagga

SEQ ID NO: 347275 - RNA, 22 nt, Human
ugggccuggguuccuccugggc

SEQ ID NO: 347276 - RNA, 22 nt, Human
aggagcugagucagcccgacag

SEQ ID NO: 347277 - RNA, 22 nt, Human
gugauugcccagcaccauuguu

SEQ ID NO: 347278 - RNA, 22 nt, Human
ccagcccuucccaacuggccag

SEQ ID NO: 347279 - RNA, 22 nt, Human
uucauguauuuaucauguaaau

SEQ ID NO: 347280 - RNA, 22 nt, Human
aguaaaauuaauggaucagaag

SEQ ID NO: 347281 - RNA, 22 nt, Human
uuauuacacugaaagaauugcg

SEQ ID NO: 347282 - RNA, 22 nt, Human
gcuuggaaguaggauugggaga

SEQ ID NO: 347283 - RNA, 22 nt, Human
ggcuggcuggcugguagacaag

SEQ ID NO: 347284 - RNA, 22 nt, Human
cucuguccuugcacaguuccua

SEQ ID NO: 347285 - RNA, 20 nt, Human
gagauggcuaagugcugaac

SEQ ID NO: 347286 - RNA, 22 nt, Human
acaugauuggacuccuuccccu

SEQ ID NO: 347287 - RNA, 22 nt, Human
guuauguaucuugauugggugg

SEQ ID NO: 347288 - RNA, 22 nt, Human
ugaagcagagaauuugacaguc

SEQ ID NO: 347289 - RNA, 22 nt, Human
uuaauuaugcaaaaggccccau

SEQ ID NO: 347290 - RNA, 22 nt, Human
uugcauuuuuagaugcuucugu

SEQ ID NO: 347291 - RNA, 22 nt, Human
gccagagcagaauagaguggcc

SEQ ID NO: 347292 - RNA, 22 nt, Human
uaaagguagugugacauauugu

SEQ ID NO: 347293 - RNA, 22 nt, Human
uauacagaaccgccugaagucu

SEQ ID NO: 347294 - RNA, 22 nt, Human
ucagcagggcugugguguggcu

SEQ ID NO: 347295 - RNA, 22 nt, Human
ucugggagggagccucagaauc

SEQ ID NO: 347296 - RNA, 22 nt, Human
ccagguggaggugugagguccu

SEQ ID NO: 347297 - RNA, 22 nt, Human
gcugcagcagaaguucucagag

SEQ ID NO: 347298 - RNA, 23 nt, Human
acucacaaagcaggaucauguug

SEQ ID NO: 347299 - RNA, 22 nt, Human
aggcagcccugugcuggaugcu

SEQ ID NO: 347300 - RNA, 22 nt, Human
gaggaccacagaugagccugca

SEQ ID NO: 347301 - RNA, 21 nt, Human
agcagagugcuuugacuuugu

SEQ ID NO: 347302 - RNA, 22 nt, Human
gcaaggcugcugccacccaucu

SEQ ID NO: 347303 - RNA, 16 nt, Human
gggcugggggauucug

SEQ ID NO: 347304 - RNA, 22 nt, Human
cagcaggcccagaguuucaugg

SEQ ID NO: 347305 - RNA, 22 nt, Human
gggcugcuuuuuucuuagcaga

SEQ ID NO: 347306 - RNA, 22 nt, Human
gauuucuuugcaagcuguguuc

SEQ ID NO: 347307 - RNA, 22 nt, Human
agcaggcagccauuuggaaggc

SEQ ID NO: 347308 - RNA, 22 nt, Human
auggcuuucagauuucuauguu

SEQ ID NO: 347309 - RNA, 21 nt, Human
agaaauguaucauucuuuucc

SEQ ID NO: 347310 - RNA, 22 nt, Human
ucacuuuugaucccuaugcagu

SEQ ID NO: 347311 - RNA, 22 nt, Human
ccagguggaaggucugugcucu

SEQ ID NO: 347312 - RNA, 22 nt, Human
gagagcugugguuugaccaggc

SEQ ID NO: 347313 - RNA, 22 nt, Human
gccagagcugagacacgagucc

SEQ ID NO: 347314 - RNA, 22 nt, Human
uaaggcacccuucugaguagag

SEQ ID NO: 347315 - RNA, 22 nt, Human
uggccugccuucgcugagcuga

SEQ ID NO: 347316 - RNA, 22 nt, Human
uagcucuucaaucacugucucc

SEQ ID NO: 347317 - RNA, 22 nt, Human
ggagaggggcaaguuuaucuag

SEQ ID NO: 347318 - RNA, 22 nt, Human
ugcuuugggucucucuaguuuc

SEQ ID NO: 347319 - RNA, 19 nt, Human
accucugcagagauguuua

SEQ ID NO: 347320 - RNA, 22 nt, Human
agaggccuaauugcuacccuuu

SEQ ID NO: 347321 - RNA, 22 nt, Human
cacugaagccugggaguaagac

SEQ ID NO: 347322 - RNA, 19 nt, Human
gcagccaccgcggcggccg

SEQ ID NO: 347323 - RNA, 22 nt, Human
caaauucacaugauugcuucug

SEQ ID NO: 347324 - RNA, 22 nt, Human
augugcauuaaaugucaauguu

SEQ ID NO: 347325 - RNA, 22 nt, Human
cugccuccugccgugcagcuuc

SEQ ID NO: 347326 - RNA, 22 nt, Human
gcguaaggccucuggucucgga

SEQ ID NO: 347327 - RNA, 22 nt, Human
gcuggagcuugagaggacaggg

SEQ ID NO: 347328 - RNA, 22 nt, Human
augcugaagagugcacaggcua

SEQ ID NO: 347329 - RNA, 22 nt, Human
gagcugccuguugcauagcaac

SEQ ID NO: 347330 - RNA, 22 nt, Human
uuuaagacuuagauuuauuggg

SEQ ID NO: 347331 - RNA, 22 nt, Human
cuuaagauuugcgauaccuaau

SEQ ID NO: 347332 - RNA, 22 nt, Human
uagcagggccaggcugggaacc

SEQ ID NO: 347333 - RNA, 22 nt, Human
gcucccuccaugaggcagaccg

SEQ ID NO: 347334 - RNA, 22 nt, Human
cggagggguuugaacagaggag

SEQ ID NO: 347335 - RNA, 22 nt, Human
uaccaggcagcugcacagaggc

SEQ ID NO: 347336 - RNA, 22 nt, Human
ugcauuguuuagaacucuuugg

SEQ ID NO: 347337 - RNA, 22 nt, Human
gccuggcugagguggggaggca

SEQ ID NO: 347338 - RNA, 22 nt, Human
aaucagucucauuuagcaggga

SEQ ID NO: 347339 - RNA, 22 nt, Human
cccaggucugugccagcucuga

SEQ ID NO: 347340 - RNA, 22 nt, Human
caaagccucugauuucacuugu

SEQ ID NO: 347341 - RNA, 17 nt, Human
ucuguucaugcauaccu

SEQ ID NO: 347342 - RNA, 20 nt, Human
agcuucuucugucuaauuuu

SEQ ID NO: 347343 - RNA, 22 nt, Human
ucauugcaguugaguuguguua

SEQ ID NO: 347344 - RNA, 22 nt, Human
uuauuauaaugagggauaaaaa

SEQ ID NO: 347345 - RNA, 22 nt, Human
ggguuggggcccagcagucugc

SEQ ID NO: 347346 - RNA, 22 nt, Human
cugccaggcagggagauggcug

SEQ ID NO: 347347 - RNA, 22 nt, Human
gcuguauuccugcacuguauag

SEQ ID NO: 347348 - RNA, 22 nt, Human
augguuuaagggagaauauuga

SEQ ID NO: 347349 - RNA, 22 nt, Human
ugagcuuacgugggaacagacu

SEQ ID NO: 347350 - RNA, 22 nt, Human
gccuggcaggccucaugagggg

SEQ ID NO: 347351 - RNA, 22 nt, Human
ggcugcugcccaccccugcaug

SEQ ID NO: 347352 - RNA, 22 nt, Human
aguggugcugcgcgcggagcuc

SEQ ID NO: 347353 - RNA, 20 nt, Human
gucaggauuaguaaacucug

SEQ ID NO: 347354 - RNA, 22 nt, Human
uacaacauuguguugcuucaua

SEQ ID NO: 347355 - RNA, 22 nt, Human
uauuucuucgggauucaagcua

SEQ ID NO: 347356 - RNA, 22 nt, Human
gcugcaggagcuggagcugugg

SEQ ID NO: 347357 - RNA, 20 nt, Human
ccuggcuuugcaucugugau

SEQ ID NO: 347358 - RNA, 22 nt, Human
caaggccacugcucagguuucc

SEQ ID NO: 347359 - RNA, 22 nt, Human
uccugccuagcaggugaccuau

SEQ ID NO: 347360 - RNA, 22 nt, Human
gucagaggggacaagacacaga

SEQ ID NO: 347361 - RNA, 22 nt, Human
uccagucaagcuugagaauuuc

SEQ ID NO: 347362 - RNA, 20 nt, Human
cuguagggugcagcaggcuc

SEQ ID NO: 347363 - RNA, 22 nt, Human
ugaaaguugcacauaagagaau

SEQ ID NO: 347364 - RNA, 22 nt, Human
ggcagcaacucggagagaagag

SEQ ID NO: 347365 - RNA, 22 nt, Human
cugggagggguagccaauccua

SEQ ID NO: 347366 - RNA, 22 nt, Human
ugaguccauugauggauaguga

SEQ ID NO: 347367 - RNA, 22 nt, Human
accaggcagcacuuuccuugca

SEQ ID NO: 347368 - RNA, 22 nt, Human
uggguaggccaggaagcagugu

SEQ ID NO: 347369 - RNA, 22 nt, Human
uggcagggugccaguugcgagu

SEQ ID NO: 347370 - RNA, 17 nt, Human
gagacagcaggagcccc

SEQ ID NO: 347371 - RNA, 22 nt, Human
acaacuuugacccuuguucuua

SEQ ID NO: 347372 - RNA, 22 nt, Human
acacaccaugauuuauuuaccc

SEQ ID NO: 347373 - RNA, 22 nt, Human
ccacagaaaguugucuagagua

SEQ ID NO: 347374 - RNA, 22 nt, Human
gagucacauuaauuuaauuuua

SEQ ID NO: 347375 - RNA, 22 nt, Human
uucuucaauuauuggaaagaaa

SEQ ID NO: 347376 - RNA, 22 nt, Human
acacaggggcucggcugggugc

SEQ ID NO: 347377 - RNA, 22 nt, Human
agccuccaucccaugcacaaag

SEQ ID NO: 347378 - RNA, 22 nt, Human
uggcugagcucccuguguguug

SEQ ID NO: 347379 - RNA, 22 nt, Human
caaaugcuaacuucuuuccaaa

SEQ ID NO: 347380 - RNA, 22 nt, Human
ucucaguguguuuucucucaga

SEQ ID NO: 347381 - RNA, 22 nt, Human
uuucacaauuuuaaggagcaaa

SEQ ID NO: 347382 - RNA, 17 nt, Human
gcucccugaggacagcu

SEQ ID NO: 347383 - RNA, 22 nt, Human
gaugcagggcuggcaggagcuu

SEQ ID NO: 347384 - RNA, 22 nt, Human
ugaagugaccuggggcagugua

SEQ ID NO: 347385 - RNA, 22 nt, Human
guuuucaugucuauugggcaua

SEQ ID NO: 347386 - RNA, 22 nt, Human
auguagcagauauuugugcaca

SEQ ID NO: 347387 - RNA, 22 nt, Human
aauuagggagccaucauaaggu

SEQ ID NO: 347388 - RNA, 22 nt, Human
aggauccuuuggccacuucuua

SEQ ID NO: 347389 - RNA, 22 nt, Human
uaaauucccaacucugcucuuc

SEQ ID NO: 347390 - RNA, 22 nt, Human
ucccagagugugggcaucaagg

SEQ ID NO: 347391 - RNA, 22 nt, Human
uacagucuuuggaaagagauag

SEQ ID NO: 347392 - RNA, 22 nt, Human
gccccagguugccugucccagg

SEQ ID NO: 347393 - RNA, 22 nt, Human
gcugggcugagcuagacuuggc

SEQ ID NO: 347394 - RNA, 22 nt, Human
aaaggccacacagagcagggag

SEQ ID NO: 347395 - RNA, 22 nt, Human
ccagcagggaaaaacccaccaa

SEQ ID NO: 347396 - RNA, 23 nt, Human
uuucuucagaagccuugcgaggc

SEQ ID NO: 347397 - RNA, 22 nt, Human
gagaaagcuucuuucccacagg

SEQ ID NO: 347398 - RNA, 22 nt, Human
ggccucaguuucuucaacugua

SEQ ID NO: 347399 - RNA, 22 nt, Human
cauuuauugaguggccacagug

SEQ ID NO: 347400 - RNA, 22 nt, Human
uugcccagaguccacagcguac

SEQ ID NO: 347401 - RNA, 22 nt, Human
agagacaaugccaaugcacacg

SEQ ID NO: 347402 - RNA, 22 nt, Human
guggcugcagagccagcaagcu

SEQ ID NO: 347403 - RNA, 22 nt, Human
ugcuagaauaccuaccuggagg

SEQ ID NO: 347404 - RNA, 22 nt, Human
uggcucagaagaaaagguaaac

SEQ ID NO: 347405 - RNA, 22 nt, Human
ugguacuuggaggcagaaaaau

SEQ ID NO: 347406 - RNA, 22 nt, Human
gagccagcuauguagcaagagg

SEQ ID NO: 347407 - RNA, 22 nt, Human
cucuggagcgcugcuucccgcg

SEQ ID NO: 347408 - RNA, 22 nt, Human
cugugcaguaggucagggcugg

SEQ ID NO: 347409 - RNA, 21 nt, Human
ugccagcauuaaacagucauu

SEQ ID NO: 347410 - RNA, 22 nt, Human
gaaugcacuuccaacaucuauu

SEQ ID NO: 347411 - RNA, 22 nt, Human
aggcagcuagagagugaaacug

SEQ ID NO: 347412 - RNA, 22 nt, Human
ugaaccagagucuccagugguu

SEQ ID NO: 347413 - RNA, 22 nt, Human
cagcccuggccccagguggucu

SEQ ID NO: 347414 - RNA, 22 nt, Human
uguauuuuuagaccuuuagacc

SEQ ID NO: 347415 - RNA, 22 nt, Human
ugagccagccuugcagcugugc

SEQ ID NO: 347416 - RNA, 22 nt, Human
gcugucuggguugagggcccug

SEQ ID NO: 347417 - RNA, 19 nt, Human
ccagucccauacaggagau

SEQ ID NO: 347418 - RNA, 22 nt, Human
cuguguccugcgucaagccaau

SEQ ID NO: 347419 - RNA, 22 nt, Human
auccugggaagcugacauugaa

SEQ ID NO: 347420 - RNA, 22 nt, Human
gaguccuuuucauagcaguggg

SEQ ID NO: 347421 - RNA, 22 nt, Human
gaagcucucaaacucuccccuu

SEQ ID NO: 347422 - RNA, 22 nt, Human
uaagacaugguugaucuagugu

SEQ ID NO: 347423 - RNA, 22 nt, Human
aaguccuugaagaaacaguucu

SEQ ID NO: 347424 - RNA, 22 nt, Human
ccagacuguggaguuccuggug

SEQ ID NO: 347425 - RNA, 22 nt, Human
ggcacugagaggcucuuccuaa

SEQ ID NO: 347426 - RNA, 22 nt, Human
aggagcccugcgggaggcagag

SEQ ID NO: 347427 - RNA, 22 nt, Human
ucaguaaaugaaugaauauaug

SEQ ID NO: 347428 - RNA, 22 nt, Human
aacuuugaggucacugaauucc

SEQ ID NO: 347429 - RNA, 22 nt, Human
ggaggggaugguuugacccugg

SEQ ID NO: 347430 - RNA, 22 nt, Human
ugcuggggcucugaccacucca

SEQ ID NO: 347431 - RNA, 22 nt, Human
cugcucuguucccccaucaucu

SEQ ID NO: 347432 - RNA, 22 nt, Human
uccaggcagggcagccaucaag

SEQ ID NO: 347433 - RNA, 22 nt, Human
cagcagcaugaauucgagccac

SEQ ID NO: 347434 - RNA, 22 nt, Human
gggcaguugauggaggucugga

SEQ ID NO: 347435 - RNA, 22 nt, Human
cggggacacacuggcagcuccu

SEQ ID NO: 347436 - RNA, 22 nt, Human
cauuaaaauaucucaugguguu

SEQ ID NO: 347437 - RNA, 22 nt, Human
gcagcagagcuuuguccuggcu

SEQ ID NO: 347438 - RNA, 22 nt, Human
gccacaugucaugugcucagua

SEQ ID NO: 347439 - RNA, 22 nt, Human
gagcuuuagcugagaccugcuu

SEQ ID NO: 347440 - RNA, 22 nt, Human
agucccuguacuuuccacugcc

SEQ ID NO: 347441 - RNA, 22 nt, Human
gcccucuggcagccuuggcugg

SEQ ID NO: 347442 - RNA, 22 nt, Human
cuuccucccccacacacucacu

SEQ ID NO: 347443 - RNA, 22 nt, Human
uuauuccaauuucuccuacaaa

SEQ ID NO: 347444 - RNA, 22 nt, Human
acagagccacuuuggugccuac

SEQ ID NO: 347445 - RNA, 22 nt, Human
gcagaaggauccgcaggugcaa

SEQ ID NO: 347446 - RNA, 22 nt, Human
ucugcaggacugaggccuguuu

SEQ ID NO: 347447 - RNA, 22 nt, Human
uccagcagaaaagagguaggga

SEQ ID NO: 347448 - RNA, 22 nt, Human
ucagcuuuggucacauugaguu

SEQ ID NO: 347449 - RNA, 22 nt, Human
uggcccugacagguccugggca

SEQ ID NO: 347450 - RNA, 22 nt, Human
gcugcccaggguggagccggcu

SEQ ID NO: 347451 - RNA, 22 nt, Human
agaagcaguuauuuuuugcaca

SEQ ID NO: 347452 - RNA, 20 nt, Human
ucagaggcugccagcugggg

SEQ ID NO: 347453 - RNA, 22 nt, Human
aaaaccaggcguuuccuauuau

SEQ ID NO: 347454 - RNA, 22 nt, Human
cuguaguugaugauuucugaua

SEQ ID NO: 347455 - RNA, 21 nt, Human
aucucacagcccagagaagcc

SEQ ID NO: 347456 - RNA, 22 nt, Human
ggguguccugugccaagcuggg

SEQ ID NO: 347457 - RNA, 22 nt, Human
uagggcaggggaggaaucugaa

SEQ ID NO: 347458 - RNA, 22 nt, Human
uggccaggcagguagaacggcc

SEQ ID NO: 347459 - RNA, 22 nt, Human
ucacaauuuggauacagcuaug

SEQ ID NO: 347460 - RNA, 20 nt, Human
cagcuuggaugagaggcuga

SEQ ID NO: 347461 - RNA, 22 nt, Human
caguggaggccuugggaccuuu

SEQ ID NO: 347462 - RNA, 22 nt, Human
gcaggagccaggccgagcuggu

SEQ ID NO: 347463 - RNA, 21 nt, Human
cugccuugaaugguacuggga

SEQ ID NO: 347464 - RNA, 22 nt, Human
gccaggagugucccacucauuu

SEQ ID NO: 347465 - RNA, 22 nt, Human
uuuauuuauccuucuggauugc

SEQ ID NO: 347466 - RNA, 22 nt, Human
ucaucuugcugccauugcuuua

SEQ ID NO: 347467 - RNA, 22 nt, Human
cagaggcugccagccaugugca

SEQ ID NO: 347468 - RNA, 22 nt, Human
gacccagcuaaccaggugggga

SEQ ID NO: 347469 - RNA, 22 nt, Human
agaagccacaggccucgucugg

SEQ ID NO: 347470 - RNA, 22 nt, Human
accaucagucacauguagagaa

SEQ ID NO: 347471 - RNA, 22 nt, Human
gcuccucuauuccccacauuuu

SEQ ID NO: 347472 - RNA, 19 nt, Human
ucucugcuucucuuggcau

SEQ ID NO: 347473 - RNA, 22 nt, Human
uuguugucauuguagaggauuu

SEQ ID NO: 347474 - RNA, 22 nt, Human
uauuucccagggagcaacaagc

SEQ ID NO: 347475 - RNA, 22 nt, Human
augcucuggaguacgugaaauu

SEQ ID NO: 347476 - RNA, 22 nt, Human
caagagcucagaaacccuugcu

SEQ ID NO: 347477 - RNA, 22 nt, Human
gauuuccuagacauggggcaga

SEQ ID NO: 347478 - RNA, 22 nt, Human
caguugcuacaguucaagugug

SEQ ID NO: 347479 - RNA, 22 nt, Human
guuuuccauggaggucugaccu

SEQ ID NO: 347480 - RNA, 22 nt, Human
ucagaggaaagggaacauaguc

SEQ ID NO: 347481 - RNA, 22 nt, Human
guuaauuugcagcuuucgagcu

SEQ ID NO: 347482 - RNA, 22 nt, Human
guggcucucgccagccugcggg

SEQ ID NO: 347483 - RNA, 23 nt, Human
ugaugggaaggaacgacuaccac

SEQ ID NO: 347484 - RNA, 22 nt, Human
acagacagauuuugucugaugu

SEQ ID NO: 347485 - RNA, 22 nt, Human
agccagcucccuccccugcagg

SEQ ID NO: 347486 - RNA, 18 nt, Human
gcagcugacacuggaguu

SEQ ID NO: 347487 - RNA, 22 nt, Human
auuuagaaauuccaaaaguauu

SEQ ID NO: 347488 - RNA, 22 nt, Human
cccuggaguccuggcaguugau

SEQ ID NO: 347489 - RNA, 22 nt, Human
uuaaacagagucugaaauguaa

SEQ ID NO: 347490 - RNA, 22 nt, Human
gcaggcaggcuuccuugaacug

SEQ ID NO: 347491 - RNA, 22 nt, Human
cauuacaugguccaggauauau

SEQ ID NO: 347492 - RNA, 22 nt, Human
caggauggucuucauuuggcuc

SEQ ID NO: 347493 - RNA, 22 nt, Human
uggaggcaacugaagauguagu

SEQ ID NO: 347494 - RNA, 22 nt, Human
agcagagccugggcuaggggug

SEQ ID NO: 347495 - RNA, 22 nt, Human
aagauuuacuagcauaauagcu

SEQ ID NO: 347496 - RNA, 17 nt, Human
gcuuccucaugcaguuc

SEQ ID NO: 347497 - RNA, 20 nt, Human
uugauucccucuaaacucgc

SEQ ID NO: 347498 - RNA, 22 nt, Human
ugauugaagaggugaggaaguu

SEQ ID NO: 347499 - RNA, 22 nt, Human
gcucccugcagcugagaguucc

SEQ ID NO: 347500 - RNA, 22 nt, Human
ccuccagguguuacauaugacu

SEQ ID NO: 347501 - RNA, 22 nt, Human
uuguccuuaccucaaucuggaa

SEQ ID NO: 347502 - RNA, 22 nt, Human
uuuccucugagugagcugggag

SEQ ID NO: 347503 - RNA, 22 nt, Human
uuccaaacugccaauucagaag

SEQ ID NO: 347504 - RNA, 22 nt, Human
ccugggaagagcugacaggagg

SEQ ID NO: 347505 - RNA, 22 nt, Human
aggucauuaaaguuaaaugagg

SEQ ID NO: 347506 - RNA, 22 nt, Human
aggaugaggcuggcaggucuug

SEQ ID NO: 347507 - RNA, 22 nt, Human
ugcauuaucuuuaauguucuca

SEQ ID NO: 347508 - RNA, 22 nt, Human
aaaggucaaaaucgugacauug

SEQ ID NO: 347509 - RNA, 22 nt, Human
cagaggcagaggucaucucugg

SEQ ID NO: 347510 - RNA, 22 nt, Human
cagagcagaagcgguccucaca

SEQ ID NO: 347511 - RNA, 22 nt, Human
cugaggcugaagagggccuacg

SEQ ID NO: 347512 - RNA, 22 nt, Human
aacaugauggggaagaacaaga

SEQ ID NO: 347513 - RNA, 22 nt, Human
aaggagucucagcugggccuga

SEQ ID NO: 347514 - RNA, 22 nt, Human
agaauuguaagcaauuugauua

SEQ ID NO: 347515 - RNA, 22 nt, Human
uucacaggaauguaggggucuu

SEQ ID NO: 347516 - RNA, 23 nt, Human
gggugggccaaauuagguagccu

SEQ ID NO: 347517 - RNA, 22 nt, Human
auauauaaccuggauaaggcuu

SEQ ID NO: 347518 - RNA, 22 nt, Human
uuucacuagaacguucuuguuu

SEQ ID NO: 347519 - RNA, 20 nt, Human
ucucagcauaagaacccuuc

SEQ ID NO: 347520 - RNA, 22 nt, Human
uucaaguuuugccuccccaucc

SEQ ID NO: 347521 - RNA, 22 nt, Human
ccagaaggcggagauugcagug

SEQ ID NO: 347522 - RNA, 20 nt, Human
gagauggacagaugaagggg

SEQ ID NO: 347523 - RNA, 22 nt, Human
uucccaguuagucauuuuuaca

SEQ ID NO: 347524 - RNA, 22 nt, Human
auuuucaugacuaccuuaaaua

SEQ ID NO: 347525 - RNA, 22 nt, Human
guucuucaggccauccucccag

SEQ ID NO: 347526 - RNA, 22 nt, Human
ugugugccugagccgugccugg

SEQ ID NO: 347527 - RNA, 22 nt, Human
gaugauggacaaagcauuggug

SEQ ID NO: 347528 - RNA, 20 nt, Human
ucuguucaaaucuuaguucc

SEQ ID NO: 347529 - RNA, 22 nt, Human
acaggccuuggcaggcauguga

SEQ ID NO: 347530 - RNA, 22 nt, Human
caggccugauacacugaacucu

SEQ ID NO: 347531 - RNA, 22 nt, Human
uccugcaggggcugaggaacca

SEQ ID NO: 347532 - RNA, 19 nt, Human
uuuacucuccaaggugagu

SEQ ID NO: 347533 - RNA, 23 nt, Human
ccagggccccuacaccacugucc

SEQ ID NO: 347534 - RNA, 18 nt, Human
ugaauagggguuugcaga

SEQ ID NO: 347535 - RNA, 22 nt, Human
uguacuuccccaaugacagcac

SEQ ID NO: 347536 - RNA, 22 nt, Human
ugucucuggcccaugagcagag

SEQ ID NO: 347537 - RNA, 22 nt, Human
accuggagucauuugaggagua

SEQ ID NO: 347538 - RNA, 22 nt, Human
gagggacagcuaaagagaaauu

SEQ ID NO: 347539 - RNA, 22 nt, Human
ugcaggcuggaggagggacuaa

SEQ ID NO: 347540 - RNA, 22 nt, Human
uauaacaguuuaggugguguca

SEQ ID NO: 347541 - RNA, 22 nt, Human
acuguacacgugucauuuacag

SEQ ID NO: 347542 - RNA, 22 nt, Human
ucuuaaagagcgcaauuugagg

SEQ ID NO: 347543 - RNA, 22 nt, Human
auaauaacaccugaauaggaaa

SEQ ID NO: 347544 - RNA, 22 nt, Human
ucugcugucacucauuugcuuc

SEQ ID NO: 347545 - RNA, 22 nt, Human
gggcagcagagcccugccgagu

SEQ ID NO: 347546 - RNA, 22 nt, Human
ucacugggagaugugggaaggg

SEQ ID NO: 347547 - RNA, 22 nt, Human
ucaguuuucucaucugugaaau

SEQ ID NO: 347548 - RNA, 22 nt, Human
agugaaaugauucugagcaaga

SEQ ID NO: 347549 - RNA, 22 nt, Human
gguggggccugcuccagcggcc

SEQ ID NO: 347550 - RNA, 22 nt, Human
ggguuucaugguucucacaaug

SEQ ID NO: 347551 - RNA, 22 nt, Human
aacuuucuuggaugucucaaca

SEQ ID NO: 347552 - RNA, 22 nt, Human
aggccuguuggcgugggcucua

SEQ ID NO: 347553 - RNA, 22 nt, Human
cauggauugaauauaaauuaga

SEQ ID NO: 347554 - RNA, 22 nt, Human
aaggcagcaccgccuccugaaa

SEQ ID NO: 347555 - RNA, 22 nt, Human
ccaggcugcuguugguguccgc

SEQ ID NO: 347556 - RNA, 22 nt, Human
gccccugggagcagagccacca

SEQ ID NO: 347557 - RNA, 22 nt, Human
gcaccaggcuuagagccccagg

SEQ ID NO: 347558 - RNA, 18 nt, Human
aaguaacagaagagcaca

SEQ ID NO: 347559 - RNA, 22 nt, Human
ugggcugcugagaaugagagag

SEQ ID NO: 347560 - RNA, 19 nt, Human
uggcuuccaucucucucau

SEQ ID NO: 347561 - RNA, 22 nt, Human
uccuugaaaaucuugguuuaga

SEQ ID NO: 347562 - RNA, 22 nt, Human
gaggcagcauucgcauagacag

SEQ ID NO: 347563 - RNA, 22 nt, Human
acauuucucagggaguuuugcu

SEQ ID NO: 347564 - RNA, 22 nt, Human
gcccugagggguggugucugua

SEQ ID NO: 347565 - RNA, 22 nt, Human
ugagggaguuggguguauagga

SEQ ID NO: 347566 - RNA, 22 nt, Human
aaaguguaaggaauuuaaguaa

SEQ ID NO: 347567 - RNA, 22 nt, Human
cagggccuuauccugccauuga

SEQ ID NO: 347568 - RNA, 22 nt, Human
gagcuuccacucuagaaggagu

SEQ ID NO: 347569 - RNA, 22 nt, Human
gucaaacaaauuaacauaucca

SEQ ID NO: 347570 - RNA, 23 nt, Human
acagaaaucauuuguaagguacc

SEQ ID NO: 347571 - RNA, 22 nt, Human
gaggggcucuugggcaugaagg

SEQ ID NO: 347572 - RNA, 22 nt, Human
gguggcagcgucuaucugacau

SEQ ID NO: 347573 - RNA, 22 nt, Human
gcucugucuucagcacacagua

SEQ ID NO: 347574 - RNA, 22 nt, Human
agucuuuccugcuugacuguuc

SEQ ID NO: 347575 - RNA, 22 nt, Human
aaaguccagagggcacacugaa

SEQ ID NO: 347576 - RNA, 22 nt, Human
cuggaaguauaggggagaugau

SEQ ID NO: 347577 - RNA, 22 nt, Human
gucccagggaagaaggcagcac

SEQ ID NO: 347578 - RNA, 22 nt, Human
cauggccucaaaggacugcaga

SEQ ID NO: 347579 - RNA, 22 nt, Human
agagccacugggagacagagca

SEQ ID NO: 347580 - RNA, 22 nt, Human
aucugcuugaaugagcaacagg

SEQ ID NO: 347581 - RNA, 22 nt, Human
cccaggcugaguuagagguguc

SEQ ID NO: 347582 - RNA, 22 nt, Human
ugacagaaagaauaugucaauc

SEQ ID NO: 347583 - RNA, 17 nt, Human
gaggacagggaaguagg

SEQ ID NO: 347584 - RNA, 22 nt, Human
ggagggcaucaaucaggccugg

SEQ ID NO: 347585 - RNA, 22 nt, Human
ucuggccugggccugccggugc

SEQ ID NO: 347586 - RNA, 22 nt, Human
ugaggcaggacauggacaacug

SEQ ID NO: 347587 - RNA, 22 nt, Human
uucccucucacuuaaagcuugg

SEQ ID NO: 347588 - RNA, 22 nt, Human
ugcuuuauuuauaaaauagcaa

SEQ ID NO: 347589 - RNA, 22 nt, Human
ugggcagguuguuauuugacau

SEQ ID NO: 347590 - RNA, 22 nt, Human
ugguaucagagccaucuguauu

SEQ ID NO: 347591 - RNA, 22 nt, Human
gggcugagagugacuguucugu

SEQ ID NO: 347592 - RNA, 22 nt, Human
agcugccauccgaggugucaga

SEQ ID NO: 347593 - RNA, 22 nt, Human
ccaguugguuucaaugggacag

SEQ ID NO: 347594 - RNA, 22 nt, Human
ucauuguuauguuuugcugucu

SEQ ID NO: 347595 - RNA, 22 nt, Human
caggggcugugggcggagccuc

SEQ ID NO: 347596 - RNA, 22 nt, Human
auggcagggaccaagcugucau

SEQ ID NO: 347597 - RNA, 22 nt, Human
aagaaacaaccacugcucuccu

SEQ ID NO: 347598 - RNA, 22 nt, Human
ugggccuguugccugaguccau

SEQ ID NO: 347599 - RNA, 22 nt, Human
gcuguuccugcuuagaggucgg

SEQ ID NO: 347600 - RNA, 19 nt, Human
uugaggggccaggggagau

SEQ ID NO: 347601 - RNA, 22 nt, Human
cuggagccuagguugaccuggg

SEQ ID NO: 347602 - RNA, 22 nt, Human
ugcugggggcuuucuggauacc

SEQ ID NO: 347603 - RNA, 22 nt, Human
ucaggcagaccaccgugggcag

SEQ ID NO: 347604 - RNA, 22 nt, Human
uuacaggggacauuggggacau

SEQ ID NO: 347605 - RNA, 22 nt, Human
auauguguauuugguuagccua

SEQ ID NO: 347606 - RNA, 22 nt, Human
uggguuuaaacucaacucuaaa

SEQ ID NO: 347607 - RNA, 22 nt, Human
gaggucaggcuugcagcagggu

SEQ ID NO: 347608 - RNA, 22 nt, Human
gaaaaugugccuuuggguauug

SEQ ID NO: 347609 - RNA, 22 nt, Human
aucugacuucacgcccaugcca

SEQ ID NO: 347610 - RNA, 23 nt, Human
cagcuuucagggcuuuagggaag

SEQ ID NO: 347611 - RNA, 19 nt, Human
cucucacucgccacauccu

SEQ ID NO: 347612 - RNA, 18 nt, Human
cagagcagagguggagcg

SEQ ID NO: 347613 - RNA, 22 nt, Human
uaaguggaagguuauaugcuaa

SEQ ID NO: 347614 - RNA, 18 nt, Human
cucugcuaaugggcagcu

SEQ ID NO: 347615 - RNA, 22 nt, Human
agaaugcuccagagcugaaaga

SEQ ID NO: 347616 - RNA, 23 nt, Human
agggaaaguaguaauggccuuug

SEQ ID NO: 347617 - RNA, 22 nt, Human
uuauuauuccccaagucauuau

SEQ ID NO: 347618 - RNA, 22 nt, Human
uagcuuuaauaagcugcugaau

SEQ ID NO: 347619 - RNA, 22 nt, Human
ucagucuuugcuuaugacaaua

SEQ ID NO: 347620 - RNA, 22 nt, Human
uccaagaagucaucuaaacugu

SEQ ID NO: 347621 - RNA, 19 nt, Human
agcaaauauaauaguguuc

SEQ ID NO: 347622 - RNA, 22 nt, Human
cagacagaccugcaagggcaca

SEQ ID NO: 347623 - RNA, 17 nt, Human
gccugcaggcccgcaga

SEQ ID NO: 347624 - RNA, 22 nt, Human
aaaaauguuaucuacuguccga

SEQ ID NO: 347625 - RNA, 22 nt, Human
gcccucagaguuccccacagug

SEQ ID NO: 347626 - RNA, 22 nt, Human
caucuucagguucauggucaua

SEQ ID NO: 347627 - RNA, 21 nt, Human
aucagcaaaugccugucuccc

SEQ ID NO: 347628 - RNA, 22 nt, Human
gcccagcaccucucucaggguu

SEQ ID NO: 347629 - RNA, 22 nt, Human
agcagcaggcuguguggacuga

SEQ ID NO: 347630 - RNA, 22 nt, Human
cugagcaggauauucacagcag

SEQ ID NO: 347631 - RNA, 22 nt, Human
ggccaggagauggacaccacau

SEQ ID NO: 347632 - RNA, 21 nt, Human
ggcagugaugugaagugcauc

SEQ ID NO: 347633 - RNA, 22 nt, Human
uucuucagucccacuagccaca

SEQ ID NO: 347634 - RNA, 19 nt, Human
ccaggccucuggggccugu

SEQ ID NO: 347635 - RNA, 20 nt, Human
aguagcagugugacauugac

SEQ ID NO: 347636 - RNA, 22 nt, Human
cccucagcuucucccugcagcu

SEQ ID NO: 347637 - RNA, 22 nt, Human
ugauuuccaugaagcugaaggc

SEQ ID NO: 347638 - RNA, 22 nt, Human
gccgugcgugcgcaggugcugu

SEQ ID NO: 347639 - RNA, 22 nt, Human
aggcugcagugcagguaggauu

SEQ ID NO: 347640 - RNA, 22 nt, Human
cugccagguuggcgcucgcucu

SEQ ID NO: 347641 - RNA, 21 nt, Human
agcuuccugcagugggagguc

SEQ ID NO: 347642 - RNA, 22 nt, Human
aguggggagguccaggccaccc

SEQ ID NO: 347643 - RNA, 22 nt, Human
aaucagaauuuguccccugagu

SEQ ID NO: 347644 - RNA, 22 nt, Human
uggcagcugcaggccuccugag

SEQ ID NO: 347645 - RNA, 22 nt, Human
uuguuaaaaauagauuuccagg

SEQ ID NO: 347646 - RNA, 22 nt, Human
aggcucccaagcacugacccca

SEQ ID NO: 347647 - RNA, 22 nt, Human
ugguuuaaccugucucuuauua

SEQ ID NO: 347648 - RNA, 22 nt, Human
ggaccagagaagugagcaccug

SEQ ID NO: 347649 - RNA, 23 nt, Human
aggcccaacucugugagggcugc

SEQ ID NO: 347650 - RNA, 20 nt, Human
cccaggagugagcagcuuua

SEQ ID NO: 347651 - RNA, 22 nt, Human
augggaugaacuugaucugcuu

SEQ ID NO: 347652 - RNA, 22 nt, Human
aaucccagcuacucaggaaguu

SEQ ID NO: 347653 - RNA, 22 nt, Human
auaauauaauccuacuucccau

SEQ ID NO: 347654 - RNA, 20 nt, Human
uaagaacaagacuaggaagc

SEQ ID NO: 347655 - RNA, 22 nt, Human
cuauugaauuaacuauuaaagu

SEQ ID NO: 347656 - RNA, 18 nt, Human
uggguggcuagggaguuu

SEQ ID NO: 347657 - RNA, 22 nt, Human
auguaucagaaauagcauuggc

SEQ ID NO: 347658 - RNA, 22 nt, Human
aaguuucaugauguaauuauug

SEQ ID NO: 347659 - RNA, 22 nt, Human
caaagucagccagcuaguaggu

SEQ ID NO: 347660 - RNA, 22 nt, Human
cccgggaggaggaaguugcagu

SEQ ID NO: 347661 - RNA, 20 nt, Human
agaagccaagugacauguuu

SEQ ID NO: 347662 - RNA, 22 nt, Human
guuuccauggcucuguuaaugg

SEQ ID NO: 347663 - RNA, 22 nt, Human
ucagcuuugggggucucaggag

SEQ ID NO: 347664 - RNA, 22 nt, Human
agugucauaugccacugcaucc

SEQ ID NO: 347665 - RNA, 19 nt, Human
ggcauccagaacuaccagu

SEQ ID NO: 347666 - RNA, 22 nt, Human
uuuuccagagcugucucuugca

SEQ ID NO: 347667 - RNA, 22 nt, Human
cagggcucccuugcaaggaggg

SEQ ID NO: 347668 - RNA, 22 nt, Human
auuucacucucccugccacuua

SEQ ID NO: 347669 - RNA, 22 nt, Human
cucuucagauaaaagggauauu

SEQ ID NO: 347670 - RNA, 22 nt, Human
uuucugaauaacucuaugauau

SEQ ID NO: 347671 - RNA, 22 nt, Human
ggcacucagagauucaggcugu

SEQ ID NO: 347672 - RNA, 18 nt, Human
gcugagguggugucagag

SEQ ID NO: 347673 - RNA, 22 nt, Human
auuuagcaaaaaaugaugaagc

SEQ ID NO: 347674 - RNA, 22 nt, Human
aacccagccguguagcugccgc

SEQ ID NO: 347675 - RNA, 22 nt, Human
gagcagcuguccccaaagcuuc

SEQ ID NO: 347676 - RNA, 22 nt, Human
cgugagcaaaauggacacuccc

SEQ ID NO: 347677 - RNA, 22 nt, Human
uuagggacagcucuguagguga

SEQ ID NO: 347678 - RNA, 22 nt, Human
ucuguccuguuuccuccugaca

SEQ ID NO: 347679 - RNA, 22 nt, Human
ggcauccaguucugaucaacaa

SEQ ID NO: 347680 - RNA, 22 nt, Human
gcucugggugaacuuggagcaa

SEQ ID NO: 347681 - RNA, 23 nt, Human
aaacaugcagcacaugaaugcua

SEQ ID NO: 347682 - RNA, 22 nt, Human
agauauuuguaucuugcuauug

SEQ ID NO: 347683 - RNA, 18 nt, Human
agcagaauucuaggguuc

SEQ ID NO: 347684 - RNA, 22 nt, Human
ucagggcaagucucagaagguu

SEQ ID NO: 347685 - RNA, 22 nt, Human
uuucauguuuauggaaaaugag

SEQ ID NO: 347686 - RNA, 22 nt, Human
uuugaaagggacaaagucacug

SEQ ID NO: 347687 - RNA, 22 nt, Human
uuauuuauuguguaccuacugu

SEQ ID NO: 347688 - RNA, 22 nt, Human
cugaaggauuuaguucuuugcu

SEQ ID NO: 347689 - RNA, 22 nt, Human
uuuggaauuggcauucuauucu

SEQ ID NO: 347690 - RNA, 17 nt, Human
ugguggcuggagucagg

SEQ ID NO: 347691 - RNA, 22 nt, Human
gccuuaauuuaugucuaacaua

SEQ ID NO: 347692 - RNA, 22 nt, Human
aaucagaacgcucgaucuucgg

SEQ ID NO: 347693 - RNA, 18 nt, Human
cugcccagagcauuucau

SEQ ID NO: 347694 - RNA, 22 nt, Human
cacacacaguuuuguauucugu

SEQ ID NO: 347695 - RNA, 22 nt, Human
gagccaaggguugccauggaga

SEQ ID NO: 347696 - RNA, 22 nt, Human
ugucacauaauuuaucuguagg

SEQ ID NO: 347697 - RNA, 22 nt, Human
uacauucaacaugucacuaugu

SEQ ID NO: 347698 - RNA, 22 nt, Human
ugccuuggugcuucuucaugug

SEQ ID NO: 347699 - RNA, 23 nt, Human
ccacagagcugccaauuccugug

SEQ ID NO: 347700 - RNA, 22 nt, Human
ggccccaggaccuccacggucc

SEQ ID NO: 347701 - RNA, 22 nt, Human
ucugccuguugcuagaauguca

SEQ ID NO: 347702 - RNA, 22 nt, Human
aaaugcagcagcuaauugaaaa

SEQ ID NO: 347703 - RNA, 22 nt, Human
uggcucuggauuaaucuaggaa

SEQ ID NO: 347704 - RNA, 20 nt, Human
cuccagggaacagacuggag

SEQ ID NO: 347705 - RNA, 22 nt, Human
aaaguuagaaugauaucaacga

SEQ ID NO: 347706 - RNA, 18 nt, Human
gugugcaguugcaggggu

SEQ ID NO: 347707 - RNA, 22 nt, Human
agagaaaacucauugagguguc

SEQ ID NO: 347708 - RNA, 22 nt, Human
cagcuuccauaagagauggaga

SEQ ID NO: 347709 - RNA, 22 nt, Human
agucucugcugguugugccuau

SEQ ID NO: 347710 - RNA, 22 nt, Human
gucagcugucuccccagagugg

SEQ ID NO: 347711 - RNA, 22 nt, Human
uguaugcaaauuuauuagcaca

SEQ ID NO: 347712 - RNA, 17 nt, Human
ugcauguccuuuguucc

SEQ ID NO: 347713 - RNA, 22 nt, Human
cacugggcguguccugggugag

SEQ ID NO: 347714 - RNA, 20 nt, Human
ccucaguguccuggacuggg

SEQ ID NO: 347715 - RNA, 22 nt, Human
ucagggcaaaagggaaaccauu

SEQ ID NO: 347716 - RNA, 22 nt, Human
guacauuggcaacucucuuaga

SEQ ID NO: 347717 - RNA, 22 nt, Human
ugggaccugcuccuggaaugag

SEQ ID NO: 347718 - RNA, 22 nt, Human
agcucagggcgaucugucucgg

SEQ ID NO: 347719 - RNA, 22 nt, Human
ccuguguguaggccaggggagu

SEQ ID NO: 347720 - RNA, 22 nt, Human
ccacugcccccugaagaccagg

SEQ ID NO: 347721 - RNA, 22 nt, Human
caggagacaaguuagcagcuga

SEQ ID NO: 347722 - RNA, 22 nt, Human
gcacccagggacuuggcuggcc

SEQ ID NO: 347723 - RNA, 22 nt, Human
uccaggcaaagccuuguagacg

SEQ ID NO: 347724 - RNA, 19 nt, Human
acaaaugauguugcacuga

SEQ ID NO: 347725 - RNA, 22 nt, Human
guccucugcccaggucaagguu

SEQ ID NO: 347726 - RNA, 22 nt, Human
cagggcagggccacacccccug

SEQ ID NO: 347727 - RNA, 22 nt, Human
aagggugggcccuggcagccau

SEQ ID NO: 347728 - RNA, 22 nt, Human
gcccagcaggggauggcagcuc

SEQ ID NO: 347729 - RNA, 22 nt, Human
caggcagcaggagcccugcucg

SEQ ID NO: 347730 - RNA, 22 nt, Human
uuugucauaucacacaauuuug

SEQ ID NO: 347731 - RNA, 22 nt, Human
ccagugcccagucucccugguc

SEQ ID NO: 347732 - RNA, 22 nt, Human
uggcagcuuuuuguuucaggcu

SEQ ID NO: 347733 - RNA, 22 nt, Human
uggagcaggcaucuuucucucu

SEQ ID NO: 347734 - RNA, 22 nt, Human
aguuuuuccguggcuacgauaa

SEQ ID NO: 347735 - RNA, 22 nt, Human
uuuaggcagaagcccugcugau

SEQ ID NO: 347736 - RNA, 22 nt, Human
gggaccuggacaugugugugcu

SEQ ID NO: 347737 - RNA, 22 nt, Human
ucugucccugagagcucaggag

SEQ ID NO: 347738 - RNA, 22 nt, Human
aaauguguuccuuugcuacaga

SEQ ID NO: 347739 - RNA, 22 nt, Human
gcugaaggucucuggagagguc

SEQ ID NO: 347740 - RNA, 22 nt, Human
gauagaaagguguugaaaucca

SEQ ID NO: 347741 - RNA, 22 nt, Human
ggcaucuccaaaacaugaacuc

SEQ ID NO: 347742 - RNA, 22 nt, Human
agaauaguggcaaugacugcac

SEQ ID NO: 347743 - RNA, 22 nt, Human
aaaccgcaauuacuuuugcguc

SEQ ID NO: 347744 - RNA, 22 nt, Human
agauguguuucuaguuccugca

SEQ ID NO: 347745 - RNA, 22 nt, Human
gcuuccugauauucauacuguu

SEQ ID NO: 347746 - RNA, 22 nt, Human
guaaaucccauccuuucucugg

SEQ ID NO: 347747 - RNA, 22 nt, Human
cucagaaguucagccuagagua

SEQ ID NO: 347748 - RNA, 22 nt, Human
uuagaaaugcacccaagaccua

SEQ ID NO: 347749 - RNA, 22 nt, Human
uuuuaguguagucaccgugggu

SEQ ID NO: 347750 - RNA, 22 nt, Human
ugcaggaacugggagggauagu

SEQ ID NO: 347751 - RNA, 22 nt, Human
caauuucauuaauagauauaga

SEQ ID NO: 347752 - RNA, 22 nt, Human
uaauauauuucugcuaagcuca

SEQ ID NO: 347753 - RNA, 22 nt, Human
gccaggcuggugucacaacucu

SEQ ID NO: 347754 - RNA, 22 nt, Human
gaggggcagaaugugaucaggg

SEQ ID NO: 347755 - RNA, 22 nt, Human
uaaguccuagcuuugguaggaa

SEQ ID NO: 347756 - RNA, 20 nt, Human
cucaggauugucuagccccu

SEQ ID NO: 347757 - RNA, 22 nt, Human
uuuacagaauguugaauuuggg

SEQ ID NO: 347758 - RNA, 22 nt, Human
agccacagagagggagcugcaa

SEQ ID NO: 347759 - RNA, 22 nt, Human
aggucacacaacugucagaggc

SEQ ID NO: 347760 - RNA, 22 nt, Human
ggcucaggagaggggcuaaaag

SEQ ID NO: 347761 - RNA, 22 nt, Human
cccuggagcaucucugcugucu

SEQ ID NO: 347762 - RNA, 21 nt, Human
agcuggugucagagcucuggg

SEQ ID NO: 347763 - RNA, 19 nt, Human
gcacugaagaguuggucac

SEQ ID NO: 347764 - RNA, 22 nt, Human
agggccugagcuggcugaccuc

SEQ ID NO: 347765 - RNA, 22 nt, Human
gagccucguggcggccacugcg

SEQ ID NO: 347766 - RNA, 22 nt, Human
gagauuggccuggcuugccaac

SEQ ID NO: 347767 - RNA, 22 nt, Human
cagggcucccucuggcucccag

SEQ ID NO: 347768 - RNA, 22 nt, Human
ugucucugaacagcuuacuaaa

SEQ ID NO: 347769 - RNA, 22 nt, Human
ccucaggaaccacauugcugcu

SEQ ID NO: 347770 - RNA, 22 nt, Human
ugugugacccccagugaagccu

SEQ ID NO: 347771 - RNA, 22 nt, Human
gagggcugaagauuguggcccc

SEQ ID NO: 347772 - RNA, 22 nt, Human
cugaauaauuuuauaguugcug

SEQ ID NO: 347773 - RNA, 22 nt, Human
gugucccaggagaggagacaau

SEQ ID NO: 347774 - RNA, 22 nt, Human
accgggaaguccugcacugggc

SEQ ID NO: 347775 - RNA, 22 nt, Human
agcaccuguugcacuucauaau

SEQ ID NO: 347776 - RNA, 22 nt, Human
agacaaguucugugggucaccu

SEQ ID NO: 347777 - RNA, 22 nt, Human
acauuucucauucuccccuaac

SEQ ID NO: 347778 - RNA, 22 nt, Human
gcagccuguuguaccagccugu

SEQ ID NO: 347779 - RNA, 22 nt, Human
agcuguggcagcacuuuggagu

SEQ ID NO: 347780 - RNA, 20 nt, Human
gggaguggugguagccugug

SEQ ID NO: 347781 - RNA, 22 nt, Human
agcaguggagcgagauguuuaa

SEQ ID NO: 347782 - RNA, 22 nt, Human
cccaggagagagacuugaaucu

SEQ ID NO: 347783 - RNA, 22 nt, Human
agcccaggcagagggaugcuug

SEQ ID NO: 347784 - RNA, 22 nt, Human
gugcccugaguggguaggagag

SEQ ID NO: 347785 - RNA, 22 nt, Human
uguauagaguuggaagaugacu

SEQ ID NO: 347786 - RNA, 22 nt, Human
cuuauaaaguccaucugaacaa

SEQ ID NO: 347787 - RNA, 22 nt, Human
agcugaguuaauucaucacuua

SEQ ID NO: 347788 - RNA, 22 nt, Human
auuuucagagacaucuggacuu

SEQ ID NO: 347789 - RNA, 22 nt, Human
gguggguauugaauacaggugu

SEQ ID NO: 347790 - RNA, 22 nt, Human
auuucuguugcuuauaaauuac

SEQ ID NO: 347791 - RNA, 22 nt, Human
gccuggagacagcagaggcggc

SEQ ID NO: 347792 - RNA, 18 nt, Human
gucauugcaacauacugu

SEQ ID NO: 347793 - RNA, 22 nt, Human
uaggccaguggcagguugugug

SEQ ID NO: 347794 - RNA, 23 nt, Human
aggauccugguacaggagcagag

SEQ ID NO: 347795 - RNA, 22 nt, Human
auucuucagcaggggacacuau

SEQ ID NO: 347796 - RNA, 22 nt, Human
aggagugcaaauaguccagaga

SEQ ID NO: 347797 - RNA, 22 nt, Human
gaggaggcuuccgggaggcacg

SEQ ID NO: 347798 - RNA, 22 nt, Human
ccaggagauaagcugaguuuau

SEQ ID NO: 347799 - RNA, 22 nt, Human
cucuuccuacagucugcuaugc

SEQ ID NO: 347800 - RNA, 22 nt, Human
cucagaguccauaguuuacagu

SEQ ID NO: 347801 - RNA, 22 nt, Human
uuauacuaaaacgcauugaauu

SEQ ID NO: 347802 - RNA, 21 nt, Human
cacucaggguaugugccaggc

SEQ ID NO: 347803 - RNA, 22 nt, Human
aggaaagggguagguguggacg

SEQ ID NO: 347804 - RNA, 22 nt, Human
aguaaacauuuucauauuuucu

SEQ ID NO: 347805 - RNA, 18 nt, Human
ccagguggugacagagau

SEQ ID NO: 347806 - RNA, 22 nt, Human
cugucugcuagaacaucuauac

SEQ ID NO: 347807 - RNA, 22 nt, Human
cauauuucagucuaagaugugu

SEQ ID NO: 347808 - RNA, 22 nt, Human
ucagccaggccaggcauucaca

SEQ ID NO: 347809 - RNA, 22 nt, Human
cauguuaauaugcauugaguac

SEQ ID NO: 347810 - RNA, 22 nt, Human
uucacagaguuauuuuuaugcu

SEQ ID NO: 347811 - RNA, 22 nt, Human
gccucugcaauuacauugugcc

SEQ ID NO: 347812 - RNA, 22 nt, Human
ucugagaguccaucuccaagcc

SEQ ID NO: 347813 - RNA, 22 nt, Human
gcaguggauccaaugguaucuu

SEQ ID NO: 347814 - RNA, 22 nt, Human
aggcccaguagugcugccuuua

SEQ ID NO: 347815 - RNA, 22 nt, Human
gagcuguccuaccaggaguccu

SEQ ID NO: 347816 - RNA, 20 nt, Human
uucuuucaucuacacguugu

SEQ ID NO: 347817 - RNA, 22 nt, Human
auuugucuucaguagguucuuc

SEQ ID NO: 347818 - RNA, 22 nt, Human
uccugguggcuuucccugccuu

SEQ ID NO: 347819 - RNA, 22 nt, Human
ucauacacaagagcauguaaca

SEQ ID NO: 347820 - RNA, 22 nt, Human
uucuccagaccuugugacuaug

SEQ ID NO: 347821 - RNA, 22 nt, Human
uggagccaugccuggccuuucc

SEQ ID NO: 347822 - RNA, 22 nt, Human
cagagcagacguugagauuaag

SEQ ID NO: 347823 - RNA, 22 nt, Human
gcugccuguccugaggaguccg

SEQ ID NO: 347824 - RNA, 22 nt, Human
gccuggaggaauguagcugagg

SEQ ID NO: 347825 - RNA, 22 nt, Human
acuggcucagaguuccuagaga

SEQ ID NO: 347826 - RNA, 22 nt, Human
ccaugagcuucaacugacacag

SEQ ID NO: 347827 - RNA, 22 nt, Human
agcagggcuucugugccugugc

SEQ ID NO: 347828 - RNA, 22 nt, Human
cugcucugaguauuaacggagg

SEQ ID NO: 347829 - RNA, 22 nt, Human
aagauuauuuaagacaggaacc

SEQ ID NO: 347830 - RNA, 22 nt, Human
gccagggggucagcaggcacuu

SEQ ID NO: 347831 - RNA, 22 nt, Human
aaacauugcuaaauaaugcugc

SEQ ID NO: 347832 - RNA, 22 nt, Human
uuagcuaaacuguaacuagaau

SEQ ID NO: 347833 - RNA, 22 nt, Human
uucaacacaggaacaugauaua

SEQ ID NO: 347834 - RNA, 22 nt, Human
caguccuuagauuuuacugcca

SEQ ID NO: 347835 - RNA, 22 nt, Human
uuucaacauauaccauaaugcc

SEQ ID NO: 347836 - RNA, 22 nt, Human
acccaggauagagugcugcagu

SEQ ID NO: 347837 - RNA, 22 nt, Human
ucucagagaacaguuggugcuu

SEQ ID NO: 347838 - RNA, 22 nt, Human
cugccaggcacgugcagcauca

SEQ ID NO: 347839 - RNA, 22 nt, Human
uccaggagaaaacugacggugg

SEQ ID NO: 347840 - RNA, 23 nt, Human
uggcagugaucaaaagcuuacau

SEQ ID NO: 347841 - RNA, 22 nt, Human
gaagcagcaaguauaggacagg

SEQ ID NO: 347842 - RNA, 22 nt, Human
ucuccuucgaggcccagcuccc

SEQ ID NO: 347843 - RNA, 22 nt, Human
gugaaggacuagcauggagggc

SEQ ID NO: 347844 - RNA, 22 nt, Human
gagagugaggccugggaaucua

SEQ ID NO: 347845 - RNA, 22 nt, Human
uagccucuggaauccuuucucu

SEQ ID NO: 347846 - RNA, 22 nt, Human
ucaaguuuaauugagauguuua

SEQ ID NO: 347847 - RNA, 22 nt, Human
ugcccaggauugugaggucagg

SEQ ID NO: 347848 - RNA, 22 nt, Human
agcagccaagguaaccugugcu

SEQ ID NO: 347849 - RNA, 22 nt, Human
agaggucagauuucuccuggug

SEQ ID NO: 347850 - RNA, 23 nt, Human
uggcugagauccuacuguuugcu

SEQ ID NO: 347851 - RNA, 22 nt, Human
augcuuaaugaggguauauaug

SEQ ID NO: 347852 - RNA, 22 nt, Human
cauccaggcaccacaaccagcu

SEQ ID NO: 347853 - RNA, 22 nt, Human
gauuuuaauuauaggagguccu

SEQ ID NO: 347854 - RNA, 22 nt, Human
acuaaggaauaugacaaacuca

SEQ ID NO: 347855 - RNA, 22 nt, Human
cccugcaguccuuucuuggcuc

SEQ ID NO: 347856 - RNA, 22 nt, Human
gcucagagcuugaaguuccacu

SEQ ID NO: 347857 - RNA, 22 nt, Human
ggagaagggacagacucagcuu

SEQ ID NO: 347858 - RNA, 22 nt, Human
gccaggcauguccucugcagaa

SEQ ID NO: 347859 - RNA, 22 nt, Human
caguccuugcuaugacccugag

SEQ ID NO: 347860 - RNA, 22 nt, Human
gggcagguggcaaagccagagg

SEQ ID NO: 347861 - RNA, 22 nt, Human
augaggcaggagugcaguggca

SEQ ID NO: 347862 - RNA, 22 nt, Human
aguuuauagcccagauucaugg

SEQ ID NO: 347863 - RNA, 22 nt, Human
cuugucugugucggauaaaacu

SEQ ID NO: 347864 - RNA, 22 nt, Human
ccaucccuucucuggccagcag

SEQ ID NO: 347865 - RNA, 22 nt, Human
caaggccaugagcagcgagugu

SEQ ID NO: 347866 - RNA, 22 nt, Human
uuccuuagcagaccugguaucc

SEQ ID NO: 347867 - RNA, 22 nt, Human
cuaugaaaugucagauucugca

SEQ ID NO: 347868 - RNA, 22 nt, Human
uagcagcuuaaguaauuagaau

SEQ ID NO: 347869 - RNA, 22 nt, Human
gagcuggugugugcccgagcac

SEQ ID NO: 347870 - RNA, 19 nt, Human
agcaaauacaucaaaauug

SEQ ID NO: 347871 - RNA, 21 nt, Human
acaguucaugauaacuccauc

SEQ ID NO: 347872 - RNA, 22 nt, Human
cccagcuugcccaggacugagg

SEQ ID NO: 347873 - RNA, 22 nt, Human
uucauugugauucuuggcuagc

SEQ ID NO: 347874 - RNA, 19 nt, Human
ucugaaguccagggcauac

SEQ ID NO: 347875 - RNA, 22 nt, Human
uuuuggucagguuggucucgaa

SEQ ID NO: 347876 - RNA, 22 nt, Human
cagcaggggaacugugggccag

SEQ ID NO: 347877 - RNA, 22 nt, Human
ucuccuggauggaccuucucuu

SEQ ID NO: 347878 - RNA, 22 nt, Human
ccuugcauauauuauaucuuug

SEQ ID NO: 347879 - RNA, 22 nt, Human
uccccagccgugaaggagagga

SEQ ID NO: 347880 - RNA, 22 nt, Human
agcuguggcaaccuugucagac

SEQ ID NO: 347881 - RNA, 22 nt, Human
gaagaagcaggaguguguagca

SEQ ID NO: 347882 - RNA, 22 nt, Human
aauuuacaggugcacucgccau

SEQ ID NO: 347883 - RNA, 22 nt, Human
agauggcagggguaccuggaag

SEQ ID NO: 347884 - RNA, 22 nt, Human
gcagcuuucuacuuccuacagc

SEQ ID NO: 347885 - RNA, 19 nt, Human
ucaaugcaugaaaucagcc

SEQ ID NO: 347886 - RNA, 22 nt, Human
uccaggcauagaaggcacgcac

SEQ ID NO: 347887 - RNA, 22 nt, Human
cagcucccagagugaccagcag

SEQ ID NO: 347888 - RNA, 22 nt, Human
uuucacaaguuucaggauucug

SEQ ID NO: 347889 - RNA, 22 nt, Human
auccaaaucaugucagaagaac

SEQ ID NO: 347890 - RNA, 22 nt, Human
ucauuuauaaggaugcaauuaa

SEQ ID NO: 347891 - RNA, 22 nt, Human
aggggugaaggcccgauaggag

SEQ ID NO: 347892 - RNA, 22 nt, Human
ugucugguggguugacaggcag

SEQ ID NO: 347893 - RNA, 22 nt, Human
gccucugggcucugccccuggc

SEQ ID NO: 347894 - RNA, 22 nt, Human
aggggugauuugggacaggaca

SEQ ID NO: 347895 - RNA, 22 nt, Human
ggucucagcccucgccagcagc

SEQ ID NO: 347896 - RNA, 22 nt, Human
uaugcacacaggcuuaauucau

SEQ ID NO: 347897 - RNA, 22 nt, Human
cccagccucuggguucugccgg

SEQ ID NO: 347898 - RNA, 22 nt, Human
uggaaagaauuccuaugguuca

SEQ ID NO: 347899 - RNA, 22 nt, Human
uugcugaagugaagguauguuu

SEQ ID NO: 347900 - RNA, 21 nt, Human
ucugggcccaugcugccucac

SEQ ID NO: 347901 - RNA, 17 nt, Human
uaucagaauguguuuac

SEQ ID NO: 347902 - RNA, 22 nt, Human
ugacuucaaaggcucuacuccu

SEQ ID NO: 347903 - RNA, 22 nt, Human
cugaagcacagcauauaaauaa

SEQ ID NO: 347904 - RNA, 22 nt, Human
cugugucggacgugggcagcag

SEQ ID NO: 347905 - RNA, 22 nt, Human
uggggcagaguaggauuuuggc

SEQ ID NO: 347906 - RNA, 22 nt, Human
cccaguggagauaggagugugg

SEQ ID NO: 347907 - RNA, 22 nt, Human
gagccagggcugugagcugagc

SEQ ID NO: 347908 - RNA, 22 nt, Human
cugggcacaaguggcccuggau

SEQ ID NO: 347909 - RNA, 22 nt, Human
agcccggcuuccccgguugcua

SEQ ID NO: 347910 - RNA, 22 nt, Human
gugaggcagcaggagccucugu

SEQ ID NO: 347911 - RNA, 19 nt, Human
gcugcucugggucucaucu

SEQ ID NO: 347912 - RNA, 22 nt, Human
ucucuggggauggaccugggag

SEQ ID NO: 347913 - RNA, 22 nt, Human
ucuuuugugauucuucaguuac

SEQ ID NO: 347914 - RNA, 18 nt, Human
ucagcuuuugaaaaccaa

SEQ ID NO: 347915 - RNA, 22 nt, Human
cagggcuccccgcaccgcagcc

SEQ ID NO: 347916 - RNA, 22 nt, Human
aaauuucaagcaaaguagcuau

SEQ ID NO: 347917 - RNA, 22 nt, Human
agacaacaucacuaaagcugag

SEQ ID NO: 347918 - RNA, 22 nt, Human
uuauucagucugucuagggagu

SEQ ID NO: 347919 - RNA, 18 nt, Human
aagaggaggaaacccagg

SEQ ID NO: 347920 - RNA, 20 nt, Human
uacauucaaaacaaacucug

SEQ ID NO: 347921 - RNA, 22 nt, Human
ggaggugguggcagugacaauu

SEQ ID NO: 347922 - RNA, 22 nt, Human
uucaacucuucaagaucacauc

SEQ ID NO: 347923 - RNA, 22 nt, Human
ugaaauguuugaagaccacuga

SEQ ID NO: 347924 - RNA, 22 nt, Human
auccugggcagugugucacucu

SEQ ID NO: 347925 - RNA, 22 nt, Human
gcagcuuugucacggagugucg

SEQ ID NO: 347926 - RNA, 22 nt, Human
ucagccaguuuguuuauuccgg

SEQ ID NO: 347927 - RNA, 22 nt, Human
ucauccaguucacauggugagu

SEQ ID NO: 347928 - RNA, 22 nt, Human
aggauccugcgcuuugggggag

SEQ ID NO: 347929 - RNA, 22 nt, Human
uaacagaagaugaaacuucuuu

SEQ ID NO: 347930 - RNA, 22 nt, Human
cacauuucucuaccucacacaa

SEQ ID NO: 347931 - RNA, 17 nt, Human
aggcaggcagagcggga

SEQ ID NO: 347932 - RNA, 22 nt, Human
caaggccauauugccuguaugu

SEQ ID NO: 347933 - RNA, 22 nt, Human
uugagucaguaauuccauuucu

SEQ ID NO: 347934 - RNA, 22 nt, Human
cuggcuuuggucaugugaucau

SEQ ID NO: 347935 - RNA, 22 nt, Human
agggcuccugaggcccuucugg

SEQ ID NO: 347936 - RNA, 22 nt, Human
ggaggcccagagaggugaagug

SEQ ID NO: 347937 - RNA, 22 nt, Human
auucuuggagcagucaaagaag

SEQ ID NO: 347938 - RNA, 22 nt, Human
cugcuuuggcucagugacauca

SEQ ID NO: 347939 - RNA, 22 nt, Human
uugggcuggcagagguggucuu

SEQ ID NO: 347940 - RNA, 22 nt, Human
cccucugcaggcuggaccugcc

SEQ ID NO: 347941 - RNA, 22 nt, Human
gcugcuuccuuuccugcugacc

SEQ ID NO: 347942 - RNA, 22 nt, Human
uggggcuggggaucuugagccu

SEQ ID NO: 347943 - RNA, 22 nt, Human
ucugcagcuuuuugguggggug

SEQ ID NO: 347944 - RNA, 22 nt, Human
ccaggcaucacgggcauguggc

SEQ ID NO: 347945 - RNA, 22 nt, Human
gcccaggaaguugaggcugccg

SEQ ID NO: 347946 - RNA, 22 nt, Human
ggauucagugucuguuaauagu

SEQ ID NO: 347947 - RNA, 22 nt, Human
cagaaacauguauaaaguugua

SEQ ID NO: 347948 - RNA, 22 nt, Human
gcaggcugggguagccccacuu

SEQ ID NO: 347949 - RNA, 23 nt, Human
ucucagaggauuccugggccuug

SEQ ID NO: 347950 - RNA, 22 nt, Human
gagcacagcuggagguagcauu

SEQ ID NO: 347951 - RNA, 22 nt, Human
ugcucuccggcuuccguggccu

SEQ ID NO: 347952 - RNA, 22 nt, Human
guacuuccagccaagugagaca

SEQ ID NO: 347953 - RNA, 22 nt, Human
aggcuuguggauuggagcgagu

SEQ ID NO: 347954 - RNA, 23 nt, Human
uggcugagcccacuaucuuggcc

SEQ ID NO: 347955 - RNA, 21 nt, Human
gcucccugcucagcuccuggg

SEQ ID NO: 347956 - RNA, 22 nt, Human
auuuggaaacaauuauauucuu

SEQ ID NO: 347957 - RNA, 22 nt, Human
uggacucagugcugccauuccc

SEQ ID NO: 347958 - RNA, 22 nt, Human
aaaguuacuaucacaaugaaau

SEQ ID NO: 347959 - RNA, 22 nt, Human
uggcauuuuguucaguauaugg

SEQ ID NO: 347960 - RNA, 22 nt, Human
agagcagauggccagggggccu

SEQ ID NO: 347961 - RNA, 22 nt, Human
uacuagaaccucacaacaaucc

SEQ ID NO: 347962 - RNA, 22 nt, Human
augaggcagguggaggcugcca

SEQ ID NO: 347963 - RNA, 22 nt, Human
caagggcucuuuugaggaaugu

SEQ ID NO: 347964 - RNA, 23 nt, Human
cacugcagcguggucuggcagga

SEQ ID NO: 347965 - RNA, 22 nt, Human
cagaggaaaguauuucuggaag

SEQ ID NO: 347966 - RNA, 22 nt, Human
cugaggcucaagggcagguggg

SEQ ID NO: 347967 - RNA, 22 nt, Human
uagggcucugcucaucaguugu

SEQ ID NO: 347968 - RNA, 22 nt, Human
uuggcuucucuuaacccuaaag

SEQ ID NO: 347969 - RNA, 22 nt, Human
aguacaaugucugacacaguag

SEQ ID NO: 347970 - RNA, 22 nt, Human
ggcagcuuguccuggaggaugg

SEQ ID NO: 347971 - RNA, 22 nt, Human
cccaggugcugcgugaagccuc

SEQ ID NO: 347972 - RNA, 22 nt, Human
cugcagggcagggccuccuggc

SEQ ID NO: 347973 - RNA, 22 nt, Human
gaaggccuagggaugcucugcg

SEQ ID NO: 347974 - RNA, 22 nt, Human
agcaccuggucuccuggcgcug

SEQ ID NO: 347975 - RNA, 22 nt, Human
uauuccagguuucuuguuguau

SEQ ID NO: 347976 - RNA, 22 nt, Human
cagcuggcauaccugggcccgg

SEQ ID NO: 347977 - RNA, 22 nt, Human
agccacagagguugaugugguu

SEQ ID NO: 347978 - RNA, 22 nt, Human
ugaggccacuuccccacagccc

SEQ ID NO: 347979 - RNA, 19 nt, Human
ucugccucuggucaggcuc

SEQ ID NO: 347980 - RNA, 22 nt, Human
uucauacuaaaguguaagaugu

SEQ ID NO: 347981 - RNA, 22 nt, Human
cccacagguccccaugaacucg

SEQ ID NO: 347982 - RNA, 22 nt, Human
agaggagguggugaugcuuuaa

SEQ ID NO: 347983 - RNA, 22 nt, Human
ccuggcugcauuuugcuggaug

SEQ ID NO: 347984 - RNA, 22 nt, Human
agcugccccaugagaggcaggu

SEQ ID NO: 347985 - RNA, 22 nt, Human
auuauguauuugguauaguuug

SEQ ID NO: 347986 - RNA, 22 nt, Human
acagaauuaaugaaaauuacaa

SEQ ID NO: 347987 - RNA, 22 nt, Human
gaggccaggguaccaucaacau

SEQ ID NO: 347988 - RNA, 22 nt, Human
uccaggagucuagccucaggcc

SEQ ID NO: 347989 - RNA, 22 nt, Human
ggaggccuugaggccaggagcu

SEQ ID NO: 347990 - RNA, 22 nt, Human
gggcucugggaugcucuuagag

SEQ ID NO: 347991 - RNA, 21 nt, Human
ggcagcacuaccugaagcaua

SEQ ID NO: 347992 - RNA, 22 nt, Human
uugcaggauuuuagagaugaca

SEQ ID NO: 347993 - RNA, 21 nt, Human
cucacaggaugcaguguuacu

SEQ ID NO: 347994 - RNA, 22 nt, Human
auugaaagcacaaagaacaagu

SEQ ID NO: 347995 - RNA, 22 nt, Human
agggcucugagcuggaccaccu

SEQ ID NO: 347996 - RNA, 22 nt, Human
gggagcuggagcuggaagacuc

SEQ ID NO: 347997 - RNA, 22 nt, Human
cuuggcugucuauaggaaagag

SEQ ID NO: 347998 - RNA, 22 nt, Human
caaguccuuuucuuggcucagg

SEQ ID NO: 347999 - RNA, 21 nt, Human
uuccagagauuguuucaccug

SEQ ID NO: 348000 - RNA, 22 nt, Human
ucauaacagcuaagucccuuuc

SEQ ID NO: 348001 - RNA, 21 nt, Human
uagggcucucugugucaggug

SEQ ID NO: 348002 - RNA, 22 nt, Human
gguuucaaauuaaagucuuaag

SEQ ID NO: 348003 - RNA, 22 nt, Human
ugcugcugauggcaccuaggca

SEQ ID NO: 348004 - RNA, 23 nt, Human
agcuggaggcugucuacucccaa

SEQ ID NO: 348005 - RNA, 22 nt, Human
ccagagcuucggggcggcugua

SEQ ID NO: 348006 - RNA, 23 nt, Human
acucagagaccccgggaagugac

SEQ ID NO: 348007 - RNA, 22 nt, Human
uuuuuauaugaaggauagugcg

SEQ ID NO: 348008 - RNA, 22 nt, Human
ggagcugcuccuucagccaagu

SEQ ID NO: 348009 - RNA, 23 nt, Human
aggugccaacugagagcugagag

SEQ ID NO: 348010 - RNA, 22 nt, Human
caaaguuuggcucucaugacau

SEQ ID NO: 348011 - RNA, 22 nt, Human
cugagccacugcuuguucagug

SEQ ID NO: 348012 - RNA, 22 nt, Human
uccugcaguuacaucccagcca

SEQ ID NO: 348013 - RNA, 22 nt, Human
augaguaaaaccacuauuuaca

SEQ ID NO: 348014 - RNA, 22 nt, Human
cugcugugaguuuggaggucua

SEQ ID NO: 348015 - RNA, 21 nt, Human
ugaggcucuguugugccugca

SEQ ID NO: 348016 - RNA, 22 nt, Human
ccagcagaagcucccgcugggu

SEQ ID NO: 348017 - RNA, 22 nt, Human
aggcugggaaaccugaaguugu

SEQ ID NO: 348018 - RNA, 22 nt, Human
gagccaccuucaacucaggaau

SEQ ID NO: 348019 - RNA, 19 nt, Human
ucccaggaagcaaauguca

SEQ ID NO: 348020 - RNA, 22 nt, Human
caucagaaaccuugaggaaacu

SEQ ID NO: 348021 - RNA, 22 nt, Human
gcucaggaccgaggggugggaa

SEQ ID NO: 348022 - RNA, 22 nt, Human
auguaguguagagauuagucuc

SEQ ID NO: 348023 - RNA, 22 nt, Human
accaggagucuagccuagucaa

SEQ ID NO: 348024 - RNA, 22 nt, Human
auuccaaaggcuggccuggagg

SEQ ID NO: 348025 - RNA, 22 nt, Human
auacaucuaugccuuucugaca

SEQ ID NO: 348026 - RNA, 20 nt, Human
uccaguggccugaaucugga

SEQ ID NO: 348027 - RNA, 22 nt, Human
uuauuuucuccucagaaagugg

SEQ ID NO: 348028 - RNA, 22 nt, Human
agagggauaauauguauuguaa

SEQ ID NO: 348029 - RNA, 23 nt, Human
cagggcugguagggaagagcgug

SEQ ID NO: 348030 - RNA, 22 nt, Human
gaggcagcugaaggagugacag

SEQ ID NO: 348031 - RNA, 22 nt, Human
cacaagacuuauuuguguagaa

SEQ ID NO: 348032 - RNA, 22 nt, Human
agagcugcaggguggacccagg

SEQ ID NO: 348033 - RNA, 22 nt, Human
aaaaaugaauucuucaguggca

SEQ ID NO: 348034 - RNA, 22 nt, Human
agccagcagggcuuagaggaca

SEQ ID NO: 348035 - RNA, 22 nt, Human
uacauuccauguguguguauuc

SEQ ID NO: 348036 - RNA, 22 nt, Human
cccuggaggucagaggccuggg

SEQ ID NO: 348037 - RNA, 22 nt, Human
uuacaaagagugccagagugug

SEQ ID NO: 348038 - RNA, 22 nt, Human
agugauuugggugucagaaagu

SEQ ID NO: 348039 - RNA, 22 nt, Human
aggccagcgcugcuagcucccg

SEQ ID NO: 348040 - RNA, 22 nt, Human
ugcugaugcuguucuguuagga

SEQ ID NO: 348041 - RNA, 22 nt, Human
ucccagagaaagucaaggucuu

SEQ ID NO: 348042 - RNA, 22 nt, Human
acugugugacuguuauuacugu

SEQ ID NO: 348043 - RNA, 22 nt, Human
gcuguggccgucagggaaaugg

SEQ ID NO: 348044 - RNA, 22 nt, Human
caggugccgggaaugcagcaau

SEQ ID NO: 348045 - RNA, 16 nt, Human
gcagaggaaaggggag

SEQ ID NO: 348046 - RNA, 23 nt, Human
ucuuuccucagcacacaccaaga

SEQ ID NO: 348047 - RNA, 22 nt, Human
cuucugugauuugguuaggaua

SEQ ID NO: 348048 - RNA, 22 nt, Human
cccaggaggcggagguuguggu

SEQ ID NO: 348049 - RNA, 22 nt, Human
caggucagaggcgcagccccca

SEQ ID NO: 348050 - RNA, 22 nt, Human
agagcagccugugaugaugcac

SEQ ID NO: 348051 - RNA, 22 nt, Human
uuacagaagaguaacuuggcaa

SEQ ID NO: 348052 - RNA, 22 nt, Human
cagugaggaguccagggcagag

SEQ ID NO: 348053 - RNA, 21 nt, Human
uucucagagucuauuacaguu

SEQ ID NO: 348054 - RNA, 22 nt, Human
uugcaagacacuuggaagcaca

SEQ ID NO: 348055 - RNA, 22 nt, Human
aggcucaguuugguuuccauug

SEQ ID NO: 348056 - RNA, 22 nt, Human
gagucugaugucccccaggcca

SEQ ID NO: 348057 - RNA, 22 nt, Human
ccugggaggcggagguugcagu

SEQ ID NO: 348058 - RNA, 22 nt, Human
uugcuuuguggugguucuucca

SEQ ID NO: 348059 - RNA, 22 nt, Human
ccagagcagggcagcagggcuc

SEQ ID NO: 348060 - RNA, 22 nt, Human
cagcucugggugacaggagggc

SEQ ID NO: 348061 - RNA, 22 nt, Human
ugguaaagaaggcuagaucuga

SEQ ID NO: 348062 - RNA, 22 nt, Human
aggcagcaugggccccagcucc

SEQ ID NO: 348063 - RNA, 22 nt, Human
cagugaggaagcugucuggacc

SEQ ID NO: 348064 - RNA, 22 nt, Human
ucacauuuuccuugguaucugu

SEQ ID NO: 348065 - RNA, 22 nt, Human
uucaacuuuaugcauauguauu

SEQ ID NO: 348066 - RNA, 22 nt, Human
cugaaagaauaagauguuuaca

SEQ ID NO: 348067 - RNA, 22 nt, Human
aagaggaaaugauugacuauau

SEQ ID NO: 348068 - RNA, 22 nt, Human
ucacauuuucauauucucugag

SEQ ID NO: 348069 - RNA, 22 nt, Human
aaugaugguuucaucacuugaa

SEQ ID NO: 348070 - RNA, 20 nt, Human
ugcuguaagauuagagagcu

SEQ ID NO: 348071 - RNA, 22 nt, Human
gucaggauuugaacucaggucu

SEQ ID NO: 348072 - RNA, 22 nt, Human
uauuuagaacagacaauagaaa

SEQ ID NO: 348073 - RNA, 22 nt, Human
gaugugggguugagggaccagc

SEQ ID NO: 348074 - RNA, 22 nt, Human
cugcccaggaaggagaggaugg

SEQ ID NO: 348075 - RNA, 22 nt, Human
gcaaaauuaaacuuagcaucau

SEQ ID NO: 348076 - RNA, 22 nt, Human
guuucacagaugguguucauau

SEQ ID NO: 348077 - RNA, 22 nt, Human
gcccagaaguugaggcugcagu

SEQ ID NO: 348078 - RNA, 22 nt, Human
gacagcaggagaucaugauaga

SEQ ID NO: 348079 - RNA, 22 nt, Human
gacuuuggcaucuagacauugu

SEQ ID NO: 348080 - RNA, 20 nt, Human
gaggcugcggacugcuggac

SEQ ID NO: 348081 - RNA, 22 nt, Human
gcauuuaaauuugaacuucaga

SEQ ID NO: 348082 - RNA, 22 nt, Human
ccuggaucuaaggaagcuggga

SEQ ID NO: 348083 - RNA, 22 nt, Human
agcugcaggccucuccugggga

SEQ ID NO: 348084 - RNA, 22 nt, Human
uuccucagccagcacuuagggg

SEQ ID NO: 348085 - RNA, 19 nt, Human
cccaggagcaguauugaug

SEQ ID NO: 348086 - RNA, 22 nt, Human
auccuucagcugcccuguuacc

SEQ ID NO: 348087 - RNA, 22 nt, Human
cagcaggguuaagugacucacc

SEQ ID NO: 348088 - RNA, 22 nt, Human
ucagcccugggacccagggaug

SEQ ID NO: 348089 - RNA, 19 nt, Human
ggccaccucucuucccagg

SEQ ID NO: 348090 - RNA, 22 nt, Human
gaggggcucuuuaauaguaaca

SEQ ID NO: 348091 - RNA, 22 nt, Human
agagccagcauuugggcccugc

SEQ ID NO: 348092 - RNA, 22 nt, Human
uucauuacugcgguagucacac

SEQ ID NO: 348093 - RNA, 22 nt, Human
ugaggcagcaauuguauuguau

SEQ ID NO: 348094 - RNA, 22 nt, Human
uccauuuucuugcucuagguaa

SEQ ID NO: 348095 - RNA, 22 nt, Human
auuaggcagugccauuguacgg

SEQ ID NO: 348096 - RNA, 22 nt, Human
cagaggcugggaccucaggcau

SEQ ID NO: 348097 - RNA, 22 nt, Human
gauggcagcauauugacagcau

SEQ ID NO: 348098 - RNA, 22 nt, Human
agcagcauguaugagggugaac

SEQ ID NO: 348099 - RNA, 22 nt, Human
uucuucaaagaugucuguugga

SEQ ID NO: 348100 - RNA, 22 nt, Human
gcaguggcaccgcuggcucugg

SEQ ID NO: 348101 - RNA, 22 nt, Human
auuugcaugcuucuauugugaa

SEQ ID NO: 348102 - RNA, 22 nt, Human
cagcucuggcgucagggagcga

SEQ ID NO: 348103 - RNA, 22 nt, Human
gcagcauuuguggaaugggccc

SEQ ID NO: 348104 - RNA, 22 nt, Human
ucgagucauguucucccauuaa

SEQ ID NO: 348105 - RNA, 22 nt, Human
ccaggagacaaagaugacugcu

SEQ ID NO: 348106 - RNA, 22 nt, Human
aagaugcagcuuccacuuuugc

SEQ ID NO: 348107 - RNA, 22 nt, Human
gaagagcuguagccugcucuuu

SEQ ID NO: 348108 - RNA, 22 nt, Human
cagaggcaggaagaugggcagu

SEQ ID NO: 348109 - RNA, 22 nt, Human
auucauuugcuauuguguaugg

SEQ ID NO: 348110 - RNA, 22 nt, Human
agucccagugagaugaaccagg

SEQ ID NO: 348111 - RNA, 22 nt, Human
cagguaaaaauaaauuugugag

SEQ ID NO: 348112 - RNA, 20 nt, Human
ucaggaugugcugagugaag

SEQ ID NO: 348113 - RNA, 22 nt, Human
aggcggcugguguccugcaggu

SEQ ID NO: 348114 - RNA, 22 nt, Human
gcugugcagucuuuggugugcc

SEQ ID NO: 348115 - RNA, 20 nt, Human
agaaggcuccuuuugccaag

SEQ ID NO: 348116 - RNA, 22 nt, Human
aagggcagcugacagaugcuua

SEQ ID NO: 348117 - RNA, 22 nt, Human
uguguacagcaggauuucucaa

SEQ ID NO: 348118 - RNA, 23 nt, Human
gugcugugagccccuuggccucc

SEQ ID NO: 348119 - RNA, 22 nt, Human
gggcagugguuacacagcugag

SEQ ID NO: 348120 - RNA, 22 nt, Human
gauuuuauuagcccaaacuuug

SEQ ID NO: 348121 - RNA, 22 nt, Human
cugaguccagggacagaggcgu

SEQ ID NO: 348122 - RNA, 16 nt, Human
cuuccucuucacuggc

SEQ ID NO: 348123 - RNA, 22 nt, Human
gagcugccugaacaagcagcag

SEQ ID NO: 348124 - RNA, 22 nt, Human
cacccagggcugugccugccca

SEQ ID NO: 348125 - RNA, 22 nt, Human
cccaggaaaugaacuucugauu

SEQ ID NO: 348126 - RNA, 22 nt, Human
gcaggcugaugacuggaguugg

SEQ ID NO: 348127 - RNA, 22 nt, Human
acaaaggugagcagaagacaca

SEQ ID NO: 348128 - RNA, 22 nt, Human
uggagggcaugcuguccauggg

SEQ ID NO: 348129 - RNA, 22 nt, Human
ucccaggaaaacacucgaggac

SEQ ID NO: 348130 - RNA, 16 nt, Human
aggcucagaggcugga

SEQ ID NO: 348131 - RNA, 22 nt, Human
agcuuccucaccucagaggucu

SEQ ID NO: 348132 - RNA, 23 nt, Human
ugacacauuuccuuuccacugca

SEQ ID NO: 348133 - RNA, 22 nt, Human
ggcaggguccacaccugggaaa

SEQ ID NO: 348134 - RNA, 22 nt, Human
agggcugcuccuccuucaggcc

SEQ ID NO: 348135 - RNA, 22 nt, Human
cccaggaaaagcagugccagca

SEQ ID NO: 348136 - RNA, 19 nt, Human
uuugaaaggauuguuauuu

SEQ ID NO: 348137 - RNA, 22 nt, Human
ucuggagcuuccucauuuacag

SEQ ID NO: 348138 - RNA, 22 nt, Human
gcagccagguuugaggaccacu

SEQ ID NO: 348139 - RNA, 22 nt, Human
cucagaagccuucagucuuggc

SEQ ID NO: 348140 - RNA, 22 nt, Human
uuuguaaagucuguucugaguu

SEQ ID NO: 348141 - RNA, 22 nt, Human
caggagcugggucuggaagcag

SEQ ID NO: 348142 - RNA, 22 nt, Human
ucucagagggaaaggccaauuu

SEQ ID NO: 348143 - RNA, 22 nt, Human
aggggugaaagagggcccucaa

SEQ ID NO: 348144 - RNA, 22 nt, Human
agcaggaggguuuuguagaguc

SEQ ID NO: 348145 - RNA, 21 nt, Human
cagacccucuagaggccaccu

SEQ ID NO: 348146 - RNA, 22 nt, Human
uacagagaguacagcauccaca

SEQ ID NO: 348147 - RNA, 22 nt, Human
uggcucaguuaggucagaaaca

SEQ ID NO: 348148 - RNA, 22 nt, Human
ugcaguggaaucuggagagcag

SEQ ID NO: 348149 - RNA, 17 nt, Human
agguggguggaucaccu

SEQ ID NO: 348150 - RNA, 22 nt, Human
ugucaaaaugacuuuacuacag

SEQ ID NO: 348151 - RNA, 22 nt, Human
gcagauggcucagacacugggg

SEQ ID NO: 348152 - RNA, 22 nt, Human
aggccagcucacccuggcuccu

SEQ ID NO: 348153 - RNA, 22 nt, Human
cauuugaugacucaacucauaa

SEQ ID NO: 348154 - RNA, 22 nt, Human
guggggggacguuggucacuuu

SEQ ID NO: 348155 - RNA, 22 nt, Human
aagauauagauaaaacuaugca

SEQ ID NO: 348156 - RNA, 22 nt, Human
gccagaagggguggauccaggc

SEQ ID NO: 348157 - RNA, 22 nt, Human
aggucagcugcugauaggcagc

SEQ ID NO: 348158 - RNA, 22 nt, Human
ucugggagagcacguggcugac

SEQ ID NO: 348159 - RNA, 22 nt, Human
ccaggcugcagucaaggggcau

SEQ ID NO: 348160 - RNA, 22 nt, Human
uacauaauuaaucuuuaaguuc

SEQ ID NO: 348161 - RNA, 22 nt, Human
aaaucaguuguuauauuaaaga

SEQ ID NO: 348162 - RNA, 22 nt, Human
auccaaacauguaccacacuaa

SEQ ID NO: 348163 - RNA, 22 nt, Human
aaguauaagcuauucuucauga

SEQ ID NO: 348164 - RNA, 22 nt, Human
acuguggccugcuguaugggcu

SEQ ID NO: 348165 - RNA, 19 nt, Human
augcuuuauguuauuucuu

SEQ ID NO: 348166 - RNA, 22 nt, Human
ccauggagcgggugagugagug

SEQ ID NO: 348167 - RNA, 22 nt, Human
agcagcucuuaacaaagcaugg

SEQ ID NO: 348168 - RNA, 22 nt, Human
cugguccuugacgcgugggagg

SEQ ID NO: 348169 - RNA, 18 nt, Human
gaaaggagagacaguagg

SEQ ID NO: 348170 - RNA, 22 nt, Human
aauccugugugacucuggggag

SEQ ID NO: 348171 - RNA, 22 nt, Human
aagggcuggaauaucucuuaga

SEQ ID NO: 348172 - RNA, 20 nt, Human
cauuugaaucuccauucugc

SEQ ID NO: 348173 - RNA, 22 nt, Human
gagaggccaccugacgagcagu

SEQ ID NO: 348174 - RNA, 22 nt, Human
agugucugccaacugcaugguc

SEQ ID NO: 348175 - RNA, 22 nt, Human
cuggccuggcagggagggcaug

SEQ ID NO: 348176 - RNA, 22 nt, Human
ccugucuguccucucaugagcc

SEQ ID NO: 348177 - RNA, 22 nt, Human
cgggcuggcugcagcugcugga

SEQ ID NO: 348178 - RNA, 22 nt, Human
uccguauuugacuauugcaccg

SEQ ID NO: 348179 - RNA, 22 nt, Human
agagucugaaugcucagaguug

SEQ ID NO: 348180 - RNA, 22 nt, Human
aggccugacuugaauuuagggc

SEQ ID NO: 348181 - RNA, 22 nt, Human
aggagaaguaaggcuagaugau

SEQ ID NO: 348182 - RNA, 23 nt, Human
gagggcucugagugcuugggcca

SEQ ID NO: 348183 - RNA, 22 nt, Human
gcagcugaauguccauugcugc

SEQ ID NO: 348184 - RNA, 21 nt, Human
gcugagagguugggaaguuca

SEQ ID NO: 348185 - RNA, 22 nt, Human
auucucaaacaagugguuugau

SEQ ID NO: 348186 - RNA, 21 nt, Human
gaaaggucuuaacuuacagag

SEQ ID NO: 348187 - RNA, 22 nt, Human
ugggcaggaugcguugauucuu

SEQ ID NO: 348188 - RNA, 22 nt, Human
aucauucuagcuguuguguuga

SEQ ID NO: 348189 - RNA, 22 nt, Human
aguauuucugcucaugaaagag

SEQ ID NO: 348190 - RNA, 22 nt, Human
cuuguagaauugaaauggucuc

SEQ ID NO: 348191 - RNA, 22 nt, Human
auggcagauggcuggagcaggu

SEQ ID NO: 348192 - RNA, 22 nt, Human
ucuccugguuuguuaaauaauu

SEQ ID NO: 348193 - RNA, 22 nt, Human
aggccuagaggaauggccaggg

SEQ ID NO: 348194 - RNA, 21 nt, Human
uguaugcacgcacaugcacac

SEQ ID NO: 348195 - RNA, 22 nt, Human
ggugacugguuuaucuggcagu

SEQ ID NO: 348196 - RNA, 22 nt, Human
uauauuaacacccacuugccuc

SEQ ID NO: 348197 - RNA, 22 nt, Human
uauuuaucgagugucuacuaug

SEQ ID NO: 348198 - RNA, 19 nt, Human
ucuggcuccgccucuuagu

SEQ ID NO: 348199 - RNA, 22 nt, Human
cugagcauggccgguccauggu

SEQ ID NO: 348200 - RNA, 22 nt, Human
auucacagggacaaugggagag

SEQ ID NO: 348201 - RNA, 17 nt, Human
aaaauucuguaaagagg

SEQ ID NO: 348202 - RNA, 22 nt, Human
gccucugcaucuucgccgcacu

SEQ ID NO: 348203 - RNA, 22 nt, Human
aaaugcacugaacacauguugu

SEQ ID NO: 348204 - RNA, 22 nt, Human
cuaaaauuaccuaccaguuuag

SEQ ID NO: 348205 - RNA, 22 nt, Human
cauucugugauucuaaaucccu

SEQ ID NO: 348206 - RNA, 22 nt, Human
aagggcaggugggcauuucugg

SEQ ID NO: 348207 - RNA, 22 nt, Human
auggauaagucaaagaguaucc

SEQ ID NO: 348208 - RNA, 22 nt, Human
auaguuugaaggcuguucuacu

SEQ ID NO: 348209 - RNA, 22 nt, Human
cucccagguuacaucugagccu

SEQ ID NO: 348210 - RNA, 22 nt, Human
gcucugggaacugacugccuuc

SEQ ID NO: 348211 - RNA, 22 nt, Human
aaguucaaguguaaucuuuauu

SEQ ID NO: 348212 - RNA, 22 nt, Human
aaaauugaggcucauguuaaau

SEQ ID NO: 348213 - RNA, 22 nt, Human
gcauggcugguguccugaggga

SEQ ID NO: 348214 - RNA, 22 nt, Human
uaggagaggugaauggcacacu

SEQ ID NO: 348215 - RNA, 22 nt, Human
uauuuuguuaauaauccagucc

SEQ ID NO: 348216 - RNA, 22 nt, Human
acugguuuuccagguuacuucu

SEQ ID NO: 348217 - RNA, 22 nt, Human
auaaguaggaaaauuugaauau

SEQ ID NO: 348218 - RNA, 22 nt, Human
caggccuggcugcagcucgccu

SEQ ID NO: 348219 - RNA, 22 nt, Human
uccuugaauugugccacuuacc

SEQ ID NO: 348220 - RNA, 22 nt, Human
caggccuggcccccggcacacc

SEQ ID NO: 348221 - RNA, 22 nt, Human
aggaaaaucgagucuggaggca

SEQ ID NO: 348222 - RNA, 22 nt, Human
aauguuaauuuacugucuucau

SEQ ID NO: 348223 - RNA, 22 nt, Human
ggggcggggcucugagaagcau

SEQ ID NO: 348224 - RNA, 22 nt, Human
agggcagaaauauugauacugu

SEQ ID NO: 348225 - RNA, 21 nt, Human
uucuuuccccagaggacuaaa

SEQ ID NO: 348226 - RNA, 22 nt, Human
agcagggcuugccgcuuguccu

SEQ ID NO: 348227 - RNA, 22 nt, Human
ugccagcuccgaggagcugcag

SEQ ID NO: 348228 - RNA, 22 nt, Human
augggaggaugcucgggugcuc

SEQ ID NO: 348229 - RNA, 22 nt, Human
uaagcugugggagauuggcaua

SEQ ID NO: 348230 - RNA, 22 nt, Human
uggcucugggaaucuguugcuu

SEQ ID NO: 348231 - RNA, 23 nt, Human
cagggcccugcucaauuucucca

SEQ ID NO: 348232 - RNA, 22 nt, Human
cuguccagcuuggcuccugggg

SEQ ID NO: 348233 - RNA, 20 nt, Human
aggacagcagcugccacuug

SEQ ID NO: 348234 - RNA, 22 nt, Human
uggccuugggcagguggccugc

SEQ ID NO: 348235 - RNA, 22 nt, Human
ucugcagaauucgaggaagaaa

SEQ ID NO: 348236 - RNA, 19 nt, Human
acacagggcuagaguuaca

SEQ ID NO: 348237 - RNA, 22 nt, Human
ggccagagaauaugccuuacgu

SEQ ID NO: 348238 - RNA, 22 nt, Human
acagccagggucucaggaggcg

SEQ ID NO: 348239 - RNA, 22 nt, Human
uccagggagauggcagaggcug

SEQ ID NO: 348240 - RNA, 22 nt, Human
augaaauaucuugaagaaauuc

SEQ ID NO: 348241 - RNA, 22 nt, Human
gaggaagaagcaaaccagcuaa

SEQ ID NO: 348242 - RNA, 22 nt, Human
acagagagguaaaauauauagu

SEQ ID NO: 348243 - RNA, 22 nt, Human
cccugccuugggguccacaccg

SEQ ID NO: 348244 - RNA, 22 nt, Human
caggcugcggucggcucugguc

SEQ ID NO: 348245 - RNA, 22 nt, Human
gaggucaauaauaugugcuuua

SEQ ID NO: 348246 - RNA, 22 nt, Human
ucccaaggcacagggcagggac

SEQ ID NO: 348247 - RNA, 22 nt, Human
uccagggguaccggccaggcag

SEQ ID NO: 348248 - RNA, 20 nt, Human
gcucccagccugcagucccc

SEQ ID NO: 348249 - RNA, 22 nt, Human
acaaauaugguacucggagaaa

SEQ ID NO: 348250 - RNA, 20 nt, Human
gcugcucuccacggucugca

SEQ ID NO: 348251 - RNA, 22 nt, Human
uugagaagaggcuuuguaggaa

SEQ ID NO: 348252 - RNA, 22 nt, Human
aaguauauuuuuugaagcauau

SEQ ID NO: 348253 - RNA, 22 nt, Human
guucauauuacuuugagugcag

SEQ ID NO: 348254 - RNA, 20 nt, Human
ggaccagguggggcgguggc

SEQ ID NO: 348255 - RNA, 22 nt, Human
auaaacagcuccauuuagugcc

SEQ ID NO: 348256 - RNA, 22 nt, Human
gccagguggucuggcuccagag

SEQ ID NO: 348257 - RNA, 22 nt, Human
guuaggcaguuuucuucauucu

SEQ ID NO: 348258 - RNA, 22 nt, Human
uugcagagaucagcagguuuga

SEQ ID NO: 348259 - RNA, 22 nt, Human
acugggccuugccauggcagcc

SEQ ID NO: 348260 - RNA, 22 nt, Human
cuaugaaaggauuuggaguugu

SEQ ID NO: 348261 - RNA, 22 nt, Human
acauuucuccuacuuguuauuu

SEQ ID NO: 348262 - RNA, 22 nt, Human
gcuuuauguaaguccaaaggca

SEQ ID NO: 348263 - RNA, 22 nt, Human
cuguagcaaguuauucaauaaa

SEQ ID NO: 348264 - RNA, 22 nt, Human
agugcugucuccuucccccggg

SEQ ID NO: 348265 - RNA, 22 nt, Human
aagggcagcuauuaucgucauc

SEQ ID NO: 348266 - RNA, 22 nt, Human
ucuccugugcacccucccugug

SEQ ID NO: 348267 - RNA, 22 nt, Human
uauugaaauccauuacguucuu

SEQ ID NO: 348268 - RNA, 22 nt, Human
uccuucaagaugccacagcuuu

SEQ ID NO: 348269 - RNA, 22 nt, Human
uggcccugaggacccagugugg

SEQ ID NO: 348270 - RNA, 22 nt, Human
gugauuuagauguugaaaguga

SEQ ID NO: 348271 - RNA, 22 nt, Human
gaauacauuggaaaucagaaua

SEQ ID NO: 348272 - RNA, 22 nt, Human
auaugaagaauuccaauuugga

SEQ ID NO: 348273 - RNA, 22 nt, Human
aguguuugucccguuagaaaug

SEQ ID NO: 348274 - RNA, 22 nt, Human
agucacuguucugucaugucaa

SEQ ID NO: 348275 - RNA, 22 nt, Human
uccacuuuagcaaugauugaau

SEQ ID NO: 348276 - RNA, 22 nt, Human
agccacagcaacaagugcaauu

SEQ ID NO: 348277 - RNA, 23 nt, Human
ucagagagcuguugagagcugcc

SEQ ID NO: 348278 - RNA, 22 nt, Human
gugggaugguagguagguaaua

SEQ ID NO: 348279 - RNA, 22 nt, Human
uuccuuaguugacugucuuagu

SEQ ID NO: 348280 - RNA, 21 nt, Human
ugacugaggcuucuucacaca

SEQ ID NO: 348281 - RNA, 23 nt, Human
ggccuguguuuugucugaaguac

SEQ ID NO: 348282 - RNA, 22 nt, Human
cuucagaagaaaagcagugugu

SEQ ID NO: 348283 - RNA, 22 nt, Human
ggauggcagucugcaugagaaa

SEQ ID NO: 348284 - RNA, 22 nt, Human
cagggccuuuuagcaucuucuc

SEQ ID NO: 348285 - RNA, 22 nt, Human
acugugugcccugacgccaggg

SEQ ID NO: 348286 - RNA, 22 nt, Human
ggaaggagggcggcaaugauga

SEQ ID NO: 348287 - RNA, 22 nt, Human
aucaggaugaagcuguagcgaa

SEQ ID NO: 348288 - RNA, 22 nt, Human
ccucugcaccauagccuucagc

SEQ ID NO: 348289 - RNA, 22 nt, Human
ggccugccucacagucagcacc

SEQ ID NO: 348290 - RNA, 22 nt, Human
uagaaauguugguauuaacauu

SEQ ID NO: 348291 - RNA, 22 nt, Human
uaauucagggccagaaucccca

SEQ ID NO: 348292 - RNA, 22 nt, Human
uuauucuuuucuccagaauccc

SEQ ID NO: 348293 - RNA, 22 nt, Human
aguccuuaugugguggagagag

SEQ ID NO: 348294 - RNA, 22 nt, Human
aaacaucaccauuuuaccuaau

SEQ ID NO: 348295 - RNA, 22 nt, Human
guacagaaggauuucuaguagu

SEQ ID NO: 348296 - RNA, 22 nt, Human
gcugcugugugggagacaggcg

SEQ ID NO: 348297 - RNA, 22 nt, Human
gaauuucaaagagguuaagagg

SEQ ID NO: 348298 - RNA, 22 nt, Human
gggagcaggagccugccugcca

SEQ ID NO: 348299 - RNA, 22 nt, Human
aggccuggcaugagaccugaga

SEQ ID NO: 348300 - RNA, 22 nt, Human
ccugccugauuccaggauggcu

SEQ ID NO: 348301 - RNA, 22 nt, Human
gcaugggcuuucucagaguucu

SEQ ID NO: 348302 - RNA, 22 nt, Human
uguguacaagaguguuuacugu

SEQ ID NO: 348303 - RNA, 22 nt, Human
uaaaagcucuucuguugaguua

SEQ ID NO: 348304 - RNA, 22 nt, Human
aagcugcccucauucccagugc

SEQ ID NO: 348305 - RNA, 22 nt, Human
uggggcagcagaccuuucuugg

SEQ ID NO: 348306 - RNA, 22 nt, Human
cccugccuacaggguuuucuuu

SEQ ID NO: 348307 - RNA, 22 nt, Human
ucugcaggccucgacaaggcca

SEQ ID NO: 348308 - RNA, 22 nt, Human
auugucuucuggucuuaucuuu

SEQ ID NO: 348309 - RNA, 20 nt, Human
ccugccugccucggcucauu

SEQ ID NO: 348310 - RNA, 18 nt, Human
uguuccaaggaaggaauc

SEQ ID NO: 348311 - RNA, 22 nt, Human
uuuacucuugcuacacaacugu

SEQ ID NO: 348312 - RNA, 22 nt, Human
cagcagggggcagcgcagauca

SEQ ID NO: 348313 - RNA, 22 nt, Human
ucagcuuuuuggauugcccaag

SEQ ID NO: 348314 - RNA, 22 nt, Human
gcugcagcccggcgcgccugag

SEQ ID NO: 348315 - RNA, 22 nt, Human
agacaacaccaaaugcuagugu

SEQ ID NO: 348316 - RNA, 22 nt, Human
ccuggagggcgccgcacagucc

SEQ ID NO: 348317 - RNA, 22 nt, Human
aggaugagccgcgcaagcugac

SEQ ID NO: 348318 - RNA, 22 nt, Human
auguacauuuagaucauuucug

SEQ ID NO: 348319 - RNA, 22 nt, Human
uucacagacauugcagacugaa

SEQ ID NO: 348320 - RNA, 20 nt, Human
agggucagagagcgugagug

SEQ ID NO: 348321 - RNA, 22 nt, Human
aguaaacacugucuuuauauau

SEQ ID NO: 348322 - RNA, 22 nt, Human
ccaggcucugucuggucagaag

SEQ ID NO: 348323 - RNA, 22 nt, Human
uuuauccagaaucaggauuuuu

SEQ ID NO: 348324 - RNA, 22 nt, Human
ccauggcaauggucagucuauu

SEQ ID NO: 348325 - RNA, 22 nt, Human
acucugaggcaggucagggcag

SEQ ID NO: 348326 - RNA, 22 nt, Human
aggauuuauuccagaaaugcaa

SEQ ID NO: 348327 - RNA, 18 nt, Human
caugggugacagguggau

SEQ ID NO: 348328 - RNA, 22 nt, Human
uaaggccagccagcaaaucugu

SEQ ID NO: 348329 - RNA, 22 nt, Human
cuauuagguaugugguugcuau

SEQ ID NO: 348330 - RNA, 22 nt, Human
agaaacauccugcuuuccauuu

SEQ ID NO: 348331 - RNA, 22 nt, Human
gugugcagggggccagcgcagc

SEQ ID NO: 348332 - RNA, 19 nt, Human
agcaccugugagagccugg

SEQ ID NO: 348333 - RNA, 22 nt, Human
cagcagagggagccauugaaau

SEQ ID NO: 348334 - RNA, 22 nt, Human
acacaauacagggcucaaaaua

SEQ ID NO: 348335 - RNA, 22 nt, Human
uuccucaguuagugccugaggc

SEQ ID NO: 348336 - RNA, 22 nt, Human
cucugagagcggucuguggcuu

SEQ ID NO: 348337 - RNA, 22 nt, Human
caggugcuguccugcacauguc

SEQ ID NO: 348338 - RNA, 22 nt, Human
cuguucaugcugauucuguaug

SEQ ID NO: 348339 - RNA, 22 nt, Human
cagggccacuguagaugaggag

SEQ ID NO: 348340 - RNA, 22 nt, Human
gacccaggagugcagagagugg

SEQ ID NO: 348341 - RNA, 20 nt, Human
guaaaauauggucuuugggu

SEQ ID NO: 348342 - RNA, 22 nt, Human
uuacagaauguucuuccaacag

SEQ ID NO: 348343 - RNA, 22 nt, Human
guccucagagugggcagguccu

SEQ ID NO: 348344 - RNA, 22 nt, Human
aaguuuaacuugaauucuuucu

SEQ ID NO: 348345 - RNA, 22 nt, Human
ggaggaugccaagcugugcaca

SEQ ID NO: 348346 - RNA, 22 nt, Human
agacgagggcccccaggacagc

SEQ ID NO: 348347 - RNA, 22 nt, Human
uucacauuauaaucaguucugc

SEQ ID NO: 348348 - RNA, 22 nt, Human
ugaaugauuugggugcauucag

SEQ ID NO: 348349 - RNA, 22 nt, Human
uggcuuaagauuuaugcuuuua

SEQ ID NO: 348350 - RNA, 22 nt, Human
auagucuuagaucagauaaagu

SEQ ID NO: 348351 - RNA, 22 nt, Human
uaaaaugaucucucauguucuu

SEQ ID NO: 348352 - RNA, 22 nt, Human
cuucucagcauuuugucagucu

SEQ ID NO: 348353 - RNA, 22 nt, Human
cugggcacagcguugggcucuu

SEQ ID NO: 348354 - RNA, 22 nt, Human
agccccugggaguagcugcugc

SEQ ID NO: 348355 - RNA, 22 nt, Human
cugccucucagccugaccgcca

SEQ ID NO: 348356 - RNA, 22 nt, Human
ggaggugggagacauaggcggc

SEQ ID NO: 348357 - RNA, 22 nt, Human
acaugcauacaagcacauguag

SEQ ID NO: 348358 - RNA, 21 nt, Human
aggcucagagagaaacucuug

SEQ ID NO: 348359 - RNA, 22 nt, Human
uaaaggcucacuggcuuggggu

SEQ ID NO: 348360 - RNA, 22 nt, Human
uaugaagaaguucugugaaaug

SEQ ID NO: 348361 - RNA, 22 nt, Human
ccacaggcugcugcaggucccg

SEQ ID NO: 348362 - RNA, 22 nt, Human
ugcugccaccccucaccagagc

SEQ ID NO: 348363 - RNA, 22 nt, Human
aggugcagcugacaccaugugg

SEQ ID NO: 348364 - RNA, 22 nt, Human
ucccaggagcaccuuuugagcc

SEQ ID NO: 348365 - RNA, 22 nt, Human
uucaguuucagucuugcaaaaa

SEQ ID NO: 348366 - RNA, 22 nt, Human
ccugggcagguguggcuucccc

SEQ ID NO: 348367 - RNA, 22 nt, Human
accugccuucucaaggacauga

SEQ ID NO: 348368 - RNA, 22 nt, Human
gguggguauaguuagggccucu

SEQ ID NO: 348369 - RNA, 22 nt, Human
aggcugagucgggaggaucacu

SEQ ID NO: 348370 - RNA, 22 nt, Human
ucagggcacugucaccugauau

SEQ ID NO: 348371 - RNA, 21 nt, Human
gccuggcagguggaagggcuc

SEQ ID NO: 348372 - RNA, 22 nt, Human
aagcagaauuucccacuaguug

SEQ ID NO: 348373 - RNA, 22 nt, Human
aguagaauagauggauacuauu

SEQ ID NO: 348374 - RNA, 22 nt, Human
ccaggugggaggaaagcagaga

SEQ ID NO: 348375 - RNA, 22 nt, Human
ggaggggagauguuugggcuca

SEQ ID NO: 348376 - RNA, 22 nt, Human
uucagaaaugaauauugguauu

SEQ ID NO: 348377 - RNA, 22 nt, Human
acgcagaagggccuggcgugcc

SEQ ID NO: 348378 - RNA, 21 nt, Human
cugcucugacagugaggccag

SEQ ID NO: 348379 - RNA, 19 nt, Human
cugcucaggucagucuguc

SEQ ID NO: 348380 - RNA, 22 nt, Human
gacagaggcuggagcaccuccu

SEQ ID NO: 348381 - RNA, 22 nt, Human
uauguuuuucaagugcacacua

SEQ ID NO: 348382 - RNA, 22 nt, Human
ugaggcagcccacuuuccuuag

SEQ ID NO: 348383 - RNA, 22 nt, Human
cugggcaggagggcucuaugga

SEQ ID NO: 348384 - RNA, 22 nt, Human
uuguaaauaguaguaagaugcc

SEQ ID NO: 348385 - RNA, 22 nt, Human
aggaagugaaagggaaggaguu

SEQ ID NO: 348386 - RNA, 18 nt, Human
ccugccagucuggagcag

SEQ ID NO: 348387 - RNA, 22 nt, Human
ugaagaugucagcagggguggu

SEQ ID NO: 348388 - RNA, 22 nt, Human
gccuggaguucagccaaguccc

SEQ ID NO: 348389 - RNA, 23 nt, Human
agagcuuagggaauucacaugag

SEQ ID NO: 348390 - RNA, 19 nt, Human
cccuggcaggcaagccugg

SEQ ID NO: 348391 - RNA, 22 nt, Human
agcuaagacuuagugacuuagu

SEQ ID NO: 348392 - RNA, 20 nt, Human
cuuccacacaagaagcacag

SEQ ID NO: 348393 - RNA, 22 nt, Human
acagcagccugcagcccugugu

SEQ ID NO: 348394 - RNA, 22 nt, Human
ugagccuggggccugggcagcg

SEQ ID NO: 348395 - RNA, 22 nt, Human
auauguguacgugcaguauaua

SEQ ID NO: 348396 - RNA, 22 nt, Human
gcagaagcuguucgaaggccgc

SEQ ID NO: 348397 - RNA, 22 nt, Human
ucuucagauaaagggagaguau

SEQ ID NO: 348398 - RNA, 22 nt, Human
acagugaaugcccaagaaaagu

SEQ ID NO: 348399 - RNA, 22 nt, Human
ugcccacauggugccauggcca

SEQ ID NO: 348400 - RNA, 22 nt, Human
gucagcacuuuuccgaggcaga

SEQ ID NO: 348401 - RNA, 22 nt, Human
uuugaaguccaucuggcccagu

SEQ ID NO: 348402 - RNA, 22 nt, Human
ugcagggcacggugcgcguggg

SEQ ID NO: 348403 - RNA, 22 nt, Human
auaaaauuugcuacuguuaaau

SEQ ID NO: 348404 - RNA, 20 nt, Human
cagggcucugggccuggccu

SEQ ID NO: 348405 - RNA, 22 nt, Human
acagacagggcaccugccuccu

SEQ ID NO: 348406 - RNA, 22 nt, Human
cuguggcuaggaagcuguggga

SEQ ID NO: 348407 - RNA, 22 nt, Human
uauaucauggagauuaacauuc

SEQ ID NO: 348408 - RNA, 22 nt, Human
auauacaaagggcaaccucgcu

SEQ ID NO: 348409 - RNA, 22 nt, Human
aaggcacugacugugcagggga

SEQ ID NO: 348410 - RNA, 22 nt, Human
aggaauucaagaccagcugggc

SEQ ID NO: 348411 - RNA, 22 nt, Human
agaacagcaguuaugguucauu

SEQ ID NO: 348412 - RNA, 18 nt, Human
cugucaccgccaccacac

SEQ ID NO: 348413 - RNA, 22 nt, Human
gguggcagaauaauugaagguc

SEQ ID NO: 348414 - RNA, 22 nt, Human
gaaccucagugaaacuggaggu

SEQ ID NO: 348415 - RNA, 22 nt, Human
acuauacaccaaaauauuaagg

SEQ ID NO: 348416 - RNA, 20 nt, Human
gaaguccuguuauauccuuu

SEQ ID NO: 348417 - RNA, 22 nt, Human
ucuggagcuggcagggcccugg

SEQ ID NO: 348418 - RNA, 22 nt, Human
ggagugucagaaacaguguccu

SEQ ID NO: 348419 - RNA, 22 nt, Human
auuuccacauaagggaaauaag

SEQ ID NO: 348420 - RNA, 22 nt, Human
cagucccaguuugagacucugg

SEQ ID NO: 348421 - RNA, 22 nt, Human
gggguugguuuaaaugcuugag

SEQ ID NO: 348422 - RNA, 22 nt, Human
auuaaauuaaguggcuaauuua

SEQ ID NO: 348423 - RNA, 19 nt, Human
ccagcagacacagcugccc

SEQ ID NO: 348424 - RNA, 21 nt, Human
uccaaaucccauucuguaguc

SEQ ID NO: 348425 - RNA, 22 nt, Human
ugagcccaggaguaugaggcug

SEQ ID NO: 348426 - RNA, 22 nt, Human
caucaucaaaacaaauggaguc

SEQ ID NO: 348427 - RNA, 22 nt, Human
caggcagcgcucguggccuggc

SEQ ID NO: 348428 - RNA, 22 nt, Human
agugcauauaugaagaguauga

SEQ ID NO: 348429 - RNA, 20 nt, Human
gccaggcacuguucucaaua

SEQ ID NO: 348430 - RNA, 22 nt, Human
acaaaguuaacaguuggauagu

SEQ ID NO: 348431 - RNA, 22 nt, Human
aggauuuacaaugauucuaggu

SEQ ID NO: 348432 - RNA, 20 nt, Human
uggagccacagucagguucc

SEQ ID NO: 348433 - RNA, 22 nt, Human
uugaaggaggcuccuuuuuaaa

SEQ ID NO: 348434 - RNA, 23 nt, Human
cagaccuggcagucauccucaac

SEQ ID NO: 348435 - RNA, 22 nt, Human
uugccaggagcucaucugaggg

SEQ ID NO: 348436 - RNA, 20 nt, Human
cugggcugcccagcuauggg

SEQ ID NO: 348437 - RNA, 22 nt, Human
accugccuaguugguucugccc

SEQ ID NO: 348438 - RNA, 22 nt, Human
agggucaggagacacuggcaac

SEQ ID NO: 348439 - RNA, 23 nt, Human
ccugucugugcuggguggacaca

SEQ ID NO: 348440 - RNA, 22 nt, Human
agagccccugguggagugagaa

SEQ ID NO: 348441 - RNA, 22 nt, Human
gaaagguugggugaauggugga

SEQ ID NO: 348442 - RNA, 22 nt, Human
uucucagauauuuacugagcau

SEQ ID NO: 348443 - RNA, 22 nt, Human
gagcugucuggggacucugggu

SEQ ID NO: 348444 - RNA, 22 nt, Human
cuggagcuaauaauccaucuga

SEQ ID NO: 348445 - RNA, 19 nt, Human
aggacccuuauccuggcuu

SEQ ID NO: 348446 - RNA, 22 nt, Human
cacuggaauauggcguugaacc

SEQ ID NO: 348447 - RNA, 22 nt, Human
gagaccaggaaguacagcagcc

SEQ ID NO: 348448 - RNA, 22 nt, Human
ucaucucaaaacccaaggggca

SEQ ID NO: 348449 - RNA, 22 nt, Human
aggcugagcugguagugaguac

SEQ ID NO: 348450 - RNA, 22 nt, Human
uuaauuuucucaucugugaaau

SEQ ID NO: 348451 - RNA, 20 nt, Human
gggagucuggaugaaagaug

SEQ ID NO: 348452 - RNA, 22 nt, Human
aggagagagaacacuugggucc

SEQ ID NO: 348453 - RNA, 22 nt, Human
cuggagccuucaccaggggaaa

SEQ ID NO: 348454 - RNA, 22 nt, Human
ugaaggcccagccacagaaugg

SEQ ID NO: 348455 - RNA, 22 nt, Human
ucccuggaacagagagacaacg

SEQ ID NO: 348456 - RNA, 22 nt, Human
cuggcuuucccuggacaacagc

SEQ ID NO: 348457 - RNA, 22 nt, Human
uguaugugcuugagaagguggg

SEQ ID NO: 348458 - RNA, 22 nt, Human
ggaggaccugcuggcccugcaa

SEQ ID NO: 348459 - RNA, 22 nt, Human
uucaauucuaaacuaauauucu

SEQ ID NO: 348460 - RNA, 22 nt, Human
ccugggagcuguggaaaggcug

SEQ ID NO: 348461 - RNA, 22 nt, Human
uggcagccacaucucguggauu

SEQ ID NO: 348462 - RNA, 22 nt, Human
ugagcccagagcccuuguaggg

SEQ ID NO: 348463 - RNA, 22 nt, Human
uagaacuacaagcauuaaaagu

SEQ ID NO: 348464 - RNA, 22 nt, Human
cugcccuggcagccuaccaugg

SEQ ID NO: 348465 - RNA, 22 nt, Human
ccuuuuucaauauagaauugca

SEQ ID NO: 348466 - RNA, 22 nt, Human
uugaaggacauccuauuucuag

SEQ ID NO: 348467 - RNA, 22 nt, Human
gaggccugggagccuguccucc

SEQ ID NO: 348468 - RNA, 22 nt, Human
gagagcccugcuccuaucccag

SEQ ID NO: 348469 - RNA, 22 nt, Human
acagagaugcaaguguguauuu

SEQ ID NO: 348470 - RNA, 22 nt, Human
ugggugagugggaaaagcccag

SEQ ID NO: 348471 - RNA, 22 nt, Human
aaggugaaacuggaagcuggcc

SEQ ID NO: 348472 - RNA, 22 nt, Human
cagaggcagccgggggagaacg

SEQ ID NO: 348473 - RNA, 22 nt, Human
caaauguguuuuuucuucuaca

SEQ ID NO: 348474 - RNA, 22 nt, Human
uucauugugaacacauucugcc

SEQ ID NO: 348475 - RNA, 22 nt, Human
cagggccauuggcguggcuguc

SEQ ID NO: 348476 - RNA, 21 nt, Human
gcacagcaugaguguuggcau

SEQ ID NO: 348477 - RNA, 22 nt, Human
gcagggcagggcaagaacuggg

SEQ ID NO: 348478 - RNA, 22 nt, Human
cuacagaagaaacuaucacuau

SEQ ID NO: 348479 - RNA, 22 nt, Human
ucaugcuuaaaagacacuugag

SEQ ID NO: 348480 - RNA, 18 nt, Human
cagcugugcccuguuugg

SEQ ID NO: 348481 - RNA, 23 nt, Human
aaccagauaaauggcuccagggc

SEQ ID NO: 348482 - RNA, 22 nt, Human
cugucacacugauaucaggcuu

SEQ ID NO: 348483 - RNA, 19 nt, Human
gguaaaagugagcuucagg

SEQ ID NO: 348484 - RNA, 22 nt, Human
acagggccucagcugauucugg

SEQ ID NO: 348485 - RNA, 22 nt, Human
ccagaauucagaaagggcauaa

SEQ ID NO: 348486 - RNA, 22 nt, Human
gucacacucagaaugacuagag

SEQ ID NO: 348487 - RNA, 22 nt, Human
agcugagcauuugauccaccuc

SEQ ID NO: 348488 - RNA, 22 nt, Human
gcaccugcaggaugagccaggg

SEQ ID NO: 348489 - RNA, 22 nt, Human
uguuucagucccuguguucaau

SEQ ID NO: 348490 - RNA, 22 nt, Human
auguccaguuucuacacacaua

SEQ ID NO: 348491 - RNA, 22 nt, Human
gaggcucagagaagucauggua

SEQ ID NO: 348492 - RNA, 23 nt, Human
gaggcagcuccugcagugcccug

SEQ ID NO: 348493 - RNA, 22 nt, Human
uauuuuaucugccagaguggag

SEQ ID NO: 348494 - RNA, 22 nt, Human
acagagcugggaucugaaccca

SEQ ID NO: 348495 - RNA, 22 nt, Human
uggcccugugugcaggcugcac

SEQ ID NO: 348496 - RNA, 22 nt, Human
gggaccugaggagggguuucag

SEQ ID NO: 348497 - RNA, 22 nt, Human
ggcugggagcuggacaggccgg

SEQ ID NO: 348498 - RNA, 20 nt, Human
uuacagaaaugauguuauuu

SEQ ID NO: 348499 - RNA, 22 nt, Human
ucucuggagggcuccaggcggg

SEQ ID NO: 348500 - RNA, 22 nt, Human
ucagagaaaugaaguagggauu

SEQ ID NO: 348501 - RNA, 22 nt, Human
gcucugugccacaugcaguguu

SEQ ID NO: 348502 - RNA, 16 nt, Human
ugggaccuguggccaa

SEQ ID NO: 348503 - RNA, 22 nt, Human
cuuccugaacaaugccaucaau

SEQ ID NO: 348504 - RNA, 22 nt, Human
ggccugcacagagguggcucua

SEQ ID NO: 348505 - RNA, 22 nt, Human
uaccuuuugcuuauuaugacac

SEQ ID NO: 348506 - RNA, 22 nt, Human
aggaagccugcaggugacugcu

SEQ ID NO: 348507 - RNA, 22 nt, Human
gagggaggggagcuccacccuc

SEQ ID NO: 348508 - RNA, 22 nt, Human
ugaugggaggugcugcaggacc

SEQ ID NO: 348509 - RNA, 22 nt, Human
cccaaggcauggcaugguggca

SEQ ID NO: 348510 - RNA, 22 nt, Human
aaaaacuguaauuacuuuugca

SEQ ID NO: 348511 - RNA, 22 nt, Human
caggcacuagcagaaugaggcu

SEQ ID NO: 348512 - RNA, 22 nt, Human
uagcacaucuggcgcuuauagg

SEQ ID NO: 348513 - RNA, 22 nt, Human
ugagcuggucuugaguguagcu

SEQ ID NO: 348514 - RNA, 22 nt, Human
aagggcaggcagagaucauaua

SEQ ID NO: 348515 - RNA, 22 nt, Human
ucaguuuucauuucaugagcag

SEQ ID NO: 348516 - RNA, 22 nt, Human
cugagagccuccuguuggcuag

SEQ ID NO: 348517 - RNA, 22 nt, Human
uccagucauuuccauuguuccc

SEQ ID NO: 348518 - RNA, 22 nt, Human
ucaucuucuauuaauagggaga

SEQ ID NO: 348519 - RNA, 22 nt, Human
cugaggcagagggcagaccaga

SEQ ID NO: 348520 - RNA, 22 nt, Human
aggcucagcaucugauucauau

SEQ ID NO: 348521 - RNA, 22 nt, Human
gaguccuugacacauaguaggu

SEQ ID NO: 348522 - RNA, 22 nt, Human
cuggggugugcucagagcaggg

SEQ ID NO: 348523 - RNA, 20 nt, Human
uccaggcagcucagaguguc

SEQ ID NO: 348524 - RNA, 22 nt, Human
uuagaaagcuuuccauagucaa

SEQ ID NO: 348525 - RNA, 22 nt, Human
ccugggcauucuuugaguucuc

SEQ ID NO: 348526 - RNA, 22 nt, Human
aggaccugacuggcuccugcuu

SEQ ID NO: 348527 - RNA, 19 nt, Human
aggauuuauuaugugcuca

SEQ ID NO: 348528 - RNA, 22 nt, Human
uggcagagcccagacuccaguc

SEQ ID NO: 348529 - RNA, 22 nt, Human
guacauuuuacuuuguuugaau

SEQ ID NO: 348530 - RNA, 22 nt, Human
ggcgcuggccacgguggcucug

SEQ ID NO: 348531 - RNA, 22 nt, Human
aauagcucacugauuucucuuu

SEQ ID NO: 348532 - RNA, 22 nt, Human
agcugcagucaagcugggccac

SEQ ID NO: 348533 - RNA, 22 nt, Human
agccagaggccagccugccuca

SEQ ID NO: 348534 - RNA, 22 nt, Human
ggaggagcacuucugagcucag

SEQ ID NO: 348535 - RNA, 22 nt, Human
uaaacagaaagcagauguacuu

SEQ ID NO: 348536 - RNA, 22 nt, Human
uugaaaacuuucuagaccaaga

SEQ ID NO: 348537 - RNA, 18 nt, Human
gcagcuagccaggggggc

SEQ ID NO: 348538 - RNA, 21 nt, Human
aggcagaaagagcccaggcug

SEQ ID NO: 348539 - RNA, 22 nt, Human
cccagggaagggcuaccugagg

SEQ ID NO: 348540 - RNA, 22 nt, Human
ucaguuuucucauuuaugagau

SEQ ID NO: 348541 - RNA, 22 nt, Human
accaggcugugaagugagacua

SEQ ID NO: 348542 - RNA, 22 nt, Human
ugcagcugauuaaagggcagac

SEQ ID NO: 348543 - RNA, 22 nt, Human
ucuguucaucucaugggagaau

SEQ ID NO: 348544 - RNA, 22 nt, Human
gcagggucugaggccacagagg

SEQ ID NO: 348545 - RNA, 22 nt, Human
aggcccugcuuuccagagcuca

SEQ ID NO: 348546 - RNA, 22 nt, Human
cacuuagucucaccaguucagu

SEQ ID NO: 348547 - RNA, 22 nt, Human
gcagggcagcugaagcuaggug

SEQ ID NO: 348548 - RNA, 22 nt, Human
gaagcagcagcuggggacaguu

SEQ ID NO: 348549 - RNA, 22 nt, Human
auuucagaugaccaaauggaaa

SEQ ID NO: 348550 - RNA, 22 nt, Human
uuuaggcaugcaguucuauuua

SEQ ID NO: 348551 - RNA, 22 nt, Human
ucaguggagagcuuccaggauu

SEQ ID NO: 348552 - RNA, 22 nt, Human
gccugggugucgaucacuagug

SEQ ID NO: 348553 - RNA, 22 nt, Human
uuauuuaaaauguagguuggga

SEQ ID NO: 348554 - RNA, 22 nt, Human
ccagcugcugugaggaccacag

SEQ ID NO: 348555 - RNA, 22 nt, Human
auacagaauacuaauuccugag

SEQ ID NO: 348556 - RNA, 20 nt, Human
ucagauuuuucuaacuuuga

SEQ ID NO: 348557 - RNA, 22 nt, Human
ccuuccagaguucagucugccc

SEQ ID NO: 348558 - RNA, 22 nt, Human
gagcugucucuauaugaaugcu

SEQ ID NO: 348559 - RNA, 22 nt, Human
ccugcaggggagagacuucuag

SEQ ID NO: 348560 - RNA, 22 nt, Human
gggaggugauggcaagcagcgg

SEQ ID NO: 348561 - RNA, 22 nt, Human
ucccagagcucugacaccagcu

SEQ ID NO: 348562 - RNA, 22 nt, Human
uuauuuaggagaaggaacccug

SEQ ID NO: 348563 - RNA, 22 nt, Human
aggagcagaacuguuguggagg

SEQ ID NO: 348564 - RNA, 22 nt, Human
agcagggcugugcuccuuccga

SEQ ID NO: 348565 - RNA, 22 nt, Human
gauuuacagcuauacccaaugg

SEQ ID NO: 348566 - RNA, 22 nt, Human
uuuaagagcuaguaugucauuu

SEQ ID NO: 348567 - RNA, 22 nt, Human
aggcugagcggggucccagagc

SEQ ID NO: 348568 - RNA, 17 nt, Human
gagugcugguggagcuc

SEQ ID NO: 348569 - RNA, 21 nt, Human
uguucacauggagcagaaugu

SEQ ID NO: 348570 - RNA, 22 nt, Human
gagggaccccaggcuggcccuu

SEQ ID NO: 348571 - RNA, 22 nt, Human
gccagggcaggggagcaucugc

SEQ ID NO: 348572 - RNA, 22 nt, Human
agucauaauuauaaacaucagu

SEQ ID NO: 348573 - RNA, 22 nt, Human
guauuauuggguaguaugguaa

SEQ ID NO: 348574 - RNA, 22 nt, Human
uggcagggccuaccccaauauc

SEQ ID NO: 348575 - RNA, 22 nt, Human
agcccaggaaguugaggcuugc

SEQ ID NO: 348576 - RNA, 22 nt, Human
gaaauuauugcuagagacugca

SEQ ID NO: 348577 - RNA, 22 nt, Human
cggcugugucuucacaggagcc

SEQ ID NO: 348578 - RNA, 22 nt, Human
ggccuuggugccauggccaguu

SEQ ID NO: 348579 - RNA, 22 nt, Human
ucucugaagauauuuauuauua

SEQ ID NO: 348580 - RNA, 22 nt, Human
uugugcaauuuaaaaucuuccu

SEQ ID NO: 348581 - RNA, 22 nt, Human
acagagaaagugggcugaagau

SEQ ID NO: 348582 - RNA, 22 nt, Human
cuggguggaucgcagccccagg

SEQ ID NO: 348583 - RNA, 22 nt, Human
uugcacuaggaaaaggcagcca

SEQ ID NO: 348584 - RNA, 22 nt, Human
ugggcacuguagcuggugcugg

SEQ ID NO: 348585 - RNA, 22 nt, Human
gggcagguguuuccaaggugag

SEQ ID NO: 348586 - RNA, 22 nt, Human
gcuugcuggugccugcaggcuc

SEQ ID NO: 348587 - RNA, 22 nt, Human
caagauggagaagcagcaaggg

SEQ ID NO: 348588 - RNA, 22 nt, Human
gccuggaguuguggugaagcca

SEQ ID NO: 348589 - RNA, 22 nt, Human
ggccagggccuggggacugucc

SEQ ID NO: 348590 - RNA, 20 nt, Human
gcugccuuguccugcuuggu

SEQ ID NO: 348591 - RNA, 22 nt, Human
gagccagcugagcugcacuguc

SEQ ID NO: 348592 - RNA, 22 nt, Human
uauuaggguaaauuugacaugc

SEQ ID NO: 348593 - RNA, 22 nt, Human
ucaggggaaaucucucagcgaa

SEQ ID NO: 348594 - RNA, 22 nt, Human
cagcaggaggcauggcuucccu

SEQ ID NO: 348595 - RNA, 22 nt, Human
ggcuggguuauuuauggccaag

SEQ ID NO: 348596 - RNA, 22 nt, Human
gacuucaaaggucaaacaucgc

SEQ ID NO: 348597 - RNA, 22 nt, Human
gagagucacugucugcauuucc

SEQ ID NO: 348598 - RNA, 22 nt, Human
guuaaagaagaauaguuccuuu

SEQ ID NO: 348599 - RNA, 22 nt, Human
cuggccagaguuggagggugug

SEQ ID NO: 348600 - RNA, 22 nt, Human
uuacaagugucagguacuggca

SEQ ID NO: 348601 - RNA, 22 nt, Human
aucaggaucugcaucauaagaa

SEQ ID NO: 348602 - RNA, 22 nt, Human
aaucagaauuuauugaaucuuu

SEQ ID NO: 348603 - RNA, 22 nt, Human
aggcucaguucacgucaacuuu

SEQ ID NO: 348604 - RNA, 22 nt, Human
aaggcugaggagggccugcagg

SEQ ID NO: 348605 - RNA, 22 nt, Human
acacaugagaaacaucaguugu

SEQ ID NO: 348606 - RNA, 22 nt, Human
auuccaaagccugaauaaugga

SEQ ID NO: 348607 - RNA, 22 nt, Human
gcuguggcuguacagagaccau

SEQ ID NO: 348608 - RNA, 22 nt, Human
cacugcuuucacaguuuguucc

SEQ ID NO: 348609 - RNA, 22 nt, Human
uauauucaaugauuaguaucag

SEQ ID NO: 348610 - RNA, 22 nt, Human
gcagcugcuggagggaggcagg

SEQ ID NO: 348611 - RNA, 22 nt, Human
agcugccacauggugucacugu

SEQ ID NO: 348612 - RNA, 22 nt, Human
aggcacugugcagucccaagca

SEQ ID NO: 348613 - RNA, 22 nt, Human
cagacagaaggcuccuugaggu

SEQ ID NO: 348614 - RNA, 23 nt, Human
uccaggagaaccccugucugucc

SEQ ID NO: 348615 - RNA, 22 nt, Human
ucuguucaagacugaggugaca

SEQ ID NO: 348616 - RNA, 22 nt, Human
uuggcuuccaggaucucagcag

SEQ ID NO: 348617 - RNA, 22 nt, Human
caguuucuucaucaguuaagca

SEQ ID NO: 348618 - RNA, 22 nt, Human
cucuccuugcagauggcugccu

SEQ ID NO: 348619 - RNA, 23 nt, Human
cucugcaggagagugggcagggc

SEQ ID NO: 348620 - RNA, 22 nt, Human
uggcccugcuaugauccugcaa

SEQ ID NO: 348621 - RNA, 22 nt, Human
uacauaguauucacauuguuuu

SEQ ID NO: 348622 - RNA, 22 nt, Human
uuccaugaaagugaaauggagc

SEQ ID NO: 348623 - RNA, 22 nt, Human
gcucccaccuuugcuaucagua

SEQ ID NO: 348624 - RNA, 22 nt, Human
uagcagggaagaugaucagaau

SEQ ID NO: 348625 - RNA, 22 nt, Human
ugcagaaggccugacauugcac

SEQ ID NO: 348626 - RNA, 22 nt, Human
cccaugagguggagguugcagu

SEQ ID NO: 348627 - RNA, 22 nt, Human
cucugcuuggaacuggacagaa

SEQ ID NO: 348628 - RNA, 22 nt, Human
gacagccaugcacuucugcugu

SEQ ID NO: 348629 - RNA, 22 nt, Human
ggcagcucacugauuagcaauu

SEQ ID NO: 348630 - RNA, 22 nt, Human
uacauucuggaaaggcacagac

SEQ ID NO: 348631 - RNA, 22 nt, Human
ugagcuucaaaauaugugaauc

SEQ ID NO: 348632 - RNA, 22 nt, Human
uccugagagcagcugcuuugga

SEQ ID NO: 348633 - RNA, 19 nt, Human
cuugguuaugguaugaugc

SEQ ID NO: 348634 - RNA, 22 nt, Human
aaggcacucagccuugggacag

SEQ ID NO: 348635 - RNA, 21 nt, Human
cccaggaggcugagaagagca

SEQ ID NO: 348636 - RNA, 22 nt, Human
cagccuguagaauacaguaaau

SEQ ID NO: 348637 - RNA, 22 nt, Human
agcaugaagacuucagagcuag

SEQ ID NO: 348638 - RNA, 22 nt, Human
acuuugcagagccagaagagaa

SEQ ID NO: 348639 - RNA, 22 nt, Human
gcagcaggcuuuucauaccuug

SEQ ID NO: 348640 - RNA, 22 nt, Human
agucucagaaaauaugcuuuuu

SEQ ID NO: 348641 - RNA, 22 nt, Human
uugcuuccucgaggccagcgug

SEQ ID NO: 348642 - RNA, 22 nt, Human
acccaggggcagccuugcugug

SEQ ID NO: 348643 - RNA, 22 nt, Human
agccucucugaugugacagcua

SEQ ID NO: 348644 - RNA, 22 nt, Human
aaggcagcaagaauuccagguu

SEQ ID NO: 348645 - RNA, 18 nt, Human
gcagcugcaguuguagcu

SEQ ID NO: 348646 - RNA, 22 nt, Human
accaggcuggagugcaguggcg

SEQ ID NO: 348647 - RNA, 22 nt, Human
caguggcaugguugacugcagu

SEQ ID NO: 348648 - RNA, 22 nt, Human
acagaccaaaaaaggauauugg

SEQ ID NO: 348649 - RNA, 21 nt, Human
uuguucuuccagaagcaaagu

SEQ ID NO: 348650 - RNA, 22 nt, Human
uccagugguuugaaaggggugu

SEQ ID NO: 348651 - RNA, 22 nt, Human
uguguccuucugggagucccag

SEQ ID NO: 348652 - RNA, 22 nt, Human
aggauuuaaauccuuaaccacu

SEQ ID NO: 348653 - RNA, 22 nt, Human
gugugccaccagucaaggugaa

SEQ ID NO: 348654 - RNA, 22 nt, Human
uuguaacaaucugucauaaaug

SEQ ID NO: 348655 - RNA, 22 nt, Human
aggaaacuccccuacaucucaa

SEQ ID NO: 348656 - RNA, 22 nt, Human
ucagcuuggacagcuugguuga

SEQ ID NO: 348657 - RNA, 19 nt, Human
ggagccuggagcacgugcc

SEQ ID NO: 348658 - RNA, 22 nt, Human
gucuauauauugcuugaauaau

SEQ ID NO: 348659 - RNA, 22 nt, Human
ugcagggcuauaacuccauucu

SEQ ID NO: 348660 - RNA, 22 nt, Human
uggagucugugaugcucugggu

SEQ ID NO: 348661 - RNA, 22 nt, Human
agauggggcugaaaguuccaau

SEQ ID NO: 348662 - RNA, 22 nt, Human
auuuagaaguuggagggcaaga

SEQ ID NO: 348663 - RNA, 22 nt, Human
agccaggccuuuucucaagguu

SEQ ID NO: 348664 - RNA, 22 nt, Human
cugcuuugacuguuaagaacca

SEQ ID NO: 348665 - RNA, 22 nt, Human
cacauuugaaggaauuagcauu

SEQ ID NO: 348666 - RNA, 22 nt, Human
acagcuguauccccagagcuca

SEQ ID NO: 348667 - RNA, 22 nt, Human
uuaugcaacaggugagcagaca

SEQ ID NO: 348668 - RNA, 23 nt, Human
uagggcagcugggagggacaugc

SEQ ID NO: 348669 - RNA, 22 nt, Human
ucuuuccauggccacacagucu

SEQ ID NO: 348670 - RNA, 22 nt, Human
agaagccagcuucagcugcccg

SEQ ID NO: 348671 - RNA, 22 nt, Human
gucaaauauacuaagagguaaa

SEQ ID NO: 348672 - RNA, 22 nt, Human
gcugcagcaagcccuccagggg

SEQ ID NO: 348673 - RNA, 22 nt, Human
ggcucugcagugacuugagggg

SEQ ID NO: 348674 - RNA, 22 nt, Human
aagaauguucauuaaacuguug

SEQ ID NO: 348675 - RNA, 22 nt, Human
aaugggauaauuguucauggga

SEQ ID NO: 348676 - RNA, 22 nt, Human
cagcaagauuuuuaaagcaagg

SEQ ID NO: 348677 - RNA, 22 nt, Human
cagcugagucugagguucuuug

SEQ ID NO: 348678 - RNA, 19 nt, Human
ccaggccuggcgucuccgc

SEQ ID NO: 348679 - RNA, 22 nt, Human
aggagagcuggugucuggaauc

SEQ ID NO: 348680 - RNA, 22 nt, Human
ggccugcuauuggugggcagac

SEQ ID NO: 348681 - RNA, 22 nt, Human
uuuaggcagaacauggacuuug

SEQ ID NO: 348682 - RNA, 22 nt, Human
ggaggcuccacugcucuuccug

SEQ ID NO: 348683 - RNA, 22 nt, Human
guacucucuugaaggccuuucu

SEQ ID NO: 348684 - RNA, 22 nt, Human
uggcucagccagcccuaggaac

SEQ ID NO: 348685 - RNA, 22 nt, Human
ggugggcaacauuuggccugag

SEQ ID NO: 348686 - RNA, 21 nt, Human
cuggacugaggagacagucgc

SEQ ID NO: 348687 - RNA, 22 nt, Human
uuccuccacgugacaggagcca

SEQ ID NO: 348688 - RNA, 20 nt, Human
uuccuguauacaaagaguuc

SEQ ID NO: 348689 - RNA, 22 nt, Human
ggcucagguuuccuucccagcu

SEQ ID NO: 348690 - RNA, 22 nt, Human
gcccagcaggacagagugguuu

SEQ ID NO: 348691 - RNA, 22 nt, Human
ugaaugaaugaauuaauagagu

SEQ ID NO: 348692 - RNA, 22 nt, Human
acuagaaacuaauggauuauua

SEQ ID NO: 348693 - RNA, 22 nt, Human
aggaagcucggagagggcaaau

SEQ ID NO: 348694 - RNA, 22 nt, Human
uagcacauacauaauagauaga

SEQ ID NO: 348695 - RNA, 17 nt, Human
gcauccaguaacaugcc

SEQ ID NO: 348696 - RNA, 21 nt, Human
uucaaugaaaacaaagugagg

SEQ ID NO: 348697 - RNA, 22 nt, Human
cagcuagcuaagaaggccagag

SEQ ID NO: 348698 - RNA, 22 nt, Human
agccuggagaggcgccauacac

SEQ ID NO: 348699 - RNA, 17 nt, Human
agcagcuggguugaucu

SEQ ID NO: 348700 - RNA, 22 nt, Human
gcaugugucuccccaguggagg

SEQ ID NO: 348701 - RNA, 22 nt, Human
ugaacaacugcaaaaaucucca

SEQ ID NO: 348702 - RNA, 22 nt, Human
aagccagguuccauggaggagc

SEQ ID NO: 348703 - RNA, 22 nt, Human
ucugagaggcagaccuuccuaa

SEQ ID NO: 348704 - RNA, 22 nt, Human
auccuugagccuuaucuuuugu

SEQ ID NO: 348705 - RNA, 22 nt, Human
uccagacccaugacccugggga

SEQ ID NO: 348706 - RNA, 22 nt, Human
uuuguaaaggccugaauuucag

SEQ ID NO: 348707 - RNA, 22 nt, Human
cagugaaaucacaacuuuaguu

SEQ ID NO: 348708 - RNA, 22 nt, Human
gaauucugguuuugaaaugaau

SEQ ID NO: 348709 - RNA, 22 nt, Human
agugcccuggcccagcuggacc

SEQ ID NO: 348710 - RNA, 22 nt, Human
uggggcugucccgguuuggcga

SEQ ID NO: 348711 - RNA, 19 nt, Human
cuguccuuggcugcacugu

SEQ ID NO: 348712 - RNA, 22 nt, Human
auuuagaacuuuguuugccaau

SEQ ID NO: 348713 - RNA, 19 nt, Human
caagugaagccugggaugg

SEQ ID NO: 348714 - RNA, 22 nt, Human
ucuggaucaccacuucugccuc

SEQ ID NO: 348715 - RNA, 22 nt, Human
gccuggaggggacagucucugg

SEQ ID NO: 348716 - RNA, 22 nt, Human
gccaagagaaugugagagaaau

SEQ ID NO: 348717 - RNA, 22 nt, Human
gcagggacagggcagggccuuu

SEQ ID NO: 348718 - RNA, 22 nt, Human
aauaucagcacuuuugugguau

SEQ ID NO: 348719 - RNA, 22 nt, Human
ggaugcuggggaccaaucucug

SEQ ID NO: 348720 - RNA, 22 nt, Human
ugagcccaggaguuggaggcug

SEQ ID NO: 348721 - RNA, 22 nt, Human
ccaaaugcuccacugacuuugg

SEQ ID NO: 348722 - RNA, 22 nt, Human
caucagaauagcucuguggaua

SEQ ID NO: 348723 - RNA, 22 nt, Human
uucauucccuuauauuagcauu

SEQ ID NO: 348724 - RNA, 22 nt, Human
agcagccauccuuagagaaaga

SEQ ID NO: 348725 - RNA, 22 nt, Human
ggggaugguggcauuuguaaaa

SEQ ID NO: 348726 - RNA, 22 nt, Human
ccaaggagcugcaggcacuugu

SEQ ID NO: 348727 - RNA, 22 nt, Human
cuggcagcucugagucccuucu

SEQ ID NO: 348728 - RNA, 22 nt, Human
uuccaugagcucugaguucaca

SEQ ID NO: 348729 - RNA, 22 nt, Human
ugaggccaggaucccaggcucu

SEQ ID NO: 348730 - RNA, 22 nt, Human
gcugauuauuacaugucugugg

SEQ ID NO: 348731 - RNA, 22 nt, Human
ucccagccacagguguagcccu

SEQ ID NO: 348732 - RNA, 22 nt, Human
cuuaaauuggaugaguuaaguu

SEQ ID NO: 348733 - RNA, 22 nt, Human
ggcagugaugucaaacagugaa

SEQ ID NO: 348734 - RNA, 22 nt, Human
uucuuuaaaauagugagaaaga

SEQ ID NO: 348735 - RNA, 22 nt, Human
caaaugcaggucagcagguguc

SEQ ID NO: 348736 - RNA, 17 nt, Human
cugucugcgcaugaggu

SEQ ID NO: 348737 - RNA, 22 nt, Human
cgcauacauagaaacacacaga

SEQ ID NO: 348738 - RNA, 22 nt, Human
acagcuguggggacucuugccc

SEQ ID NO: 348739 - RNA, 22 nt, Human
cucuggcuucuaccuugcaguu

SEQ ID NO: 348740 - RNA, 22 nt, Human
ugcaaacaggagaguaaguaua

SEQ ID NO: 348741 - RNA, 22 nt, Human
aauuaauggaaaguaaggaagg

SEQ ID NO: 348742 - RNA, 22 nt, Human
gcuggggagcaagaguagugag

SEQ ID NO: 348743 - RNA, 22 nt, Human
uacugccuggagcauuggugcu

SEQ ID NO: 348744 - RNA, 19 nt, Human
ggcugucucggcccagcca

SEQ ID NO: 348745 - RNA, 22 nt, Human
ugcaggcuuuagccccauggcu

SEQ ID NO: 348746 - RNA, 17 nt, Human
ugagaaguaggcaucau

SEQ ID NO: 348747 - RNA, 22 nt, Human
ccagcagagcauggggaggaag

SEQ ID NO: 348748 - RNA, 19 nt, Human
agcuccugggcucugggcc

SEQ ID NO: 348749 - RNA, 22 nt, Human
uauuuaaaaagaggccagcugg

SEQ ID NO: 348750 - RNA, 22 nt, Human
auugacaaucuacuauguucug

SEQ ID NO: 348751 - RNA, 22 nt, Human
gcccaugcacuuucugugaugg

SEQ ID NO: 348752 - RNA, 22 nt, Human
gagacugauggggcucccagaa

SEQ ID NO: 348753 - RNA, 22 nt, Human
agggcuggcaucucuaaugcug

SEQ ID NO: 348754 - RNA, 22 nt, Human
ccaaugauggugcccacgauga

SEQ ID NO: 348755 - RNA, 19 nt, Human
caugagcugcucacuuccc

SEQ ID NO: 348756 - RNA, 22 nt, Human
cuacauuuuucaccgagccucu

SEQ ID NO: 348757 - RNA, 22 nt, Human
cucagcccagcccaggaccagg

SEQ ID NO: 348758 - RNA, 22 nt, Human
ggaugcugggagacagcaggca

SEQ ID NO: 348759 - RNA, 22 nt, Human
gcagccugaggcccuuucuggc

SEQ ID NO: 348760 - RNA, 22 nt, Human
guacauuucucuuguucuuauu

SEQ ID NO: 348761 - RNA, 22 nt, Human
uuucuuaggcucuaaaaugacu

SEQ ID NO: 348762 - RNA, 18 nt, Human
ccuggaccugucuccuuu

SEQ ID NO: 348763 - RNA, 22 nt, Human
gcagaggaucaggcucuggaaa

SEQ ID NO: 348764 - RNA, 22 nt, Human
ggcagcugagcauggcuaccuu

SEQ ID NO: 348765 - RNA, 22 nt, Human
cuggccugagcacagcggcugc

SEQ ID NO: 348766 - RNA, 18 nt, Human
agugugugcccuuucagg

SEQ ID NO: 348767 - RNA, 23 nt, Human
ugauuuccagugagucaguggga

SEQ ID NO: 348768 - RNA, 22 nt, Human
gaguucuaaaggcagaacauaa

SEQ ID NO: 348769 - RNA, 22 nt, Human
uuccuuguuuguagcucuggga

SEQ ID NO: 348770 - RNA, 22 nt, Human
aaagcaaucagauucagauguc

SEQ ID NO: 348771 - RNA, 22 nt, Human
gugcauuugugcaugcacaugu

SEQ ID NO: 348772 - RNA, 22 nt, Human
ucuuuccuuagaauaauucuuu

SEQ ID NO: 348773 - RNA, 21 nt, Human
gacaggggaagaagcaaggag

SEQ ID NO: 348774 - RNA, 19 nt, Human
cagagcagugguuccugaa

SEQ ID NO: 348775 - RNA, 22 nt, Human
gaucauuugcaggaaacauuaa

SEQ ID NO: 348776 - RNA, 22 nt, Human
ucagcaguguaguuuaucauuc

SEQ ID NO: 348777 - RNA, 22 nt, Human
uggcucaggcuugaaaauagau

SEQ ID NO: 348778 - RNA, 22 nt, Human
ggcucugggucuguggggagcg

SEQ ID NO: 348779 - RNA, 22 nt, Human
gcaaaggccacuggggcgaugg

SEQ ID NO: 348780 - RNA, 22 nt, Human
guuaauaaagguauagaaucag

SEQ ID NO: 348781 - RNA, 22 nt, Human
gaggccugucgcuaggccucug

SEQ ID NO: 348782 - RNA, 21 nt, Human
gccagagcaguacaaugaggu

SEQ ID NO: 348783 - RNA, 22 nt, Human
acauuucugcuagaauagguga

SEQ ID NO: 348784 - RNA, 22 nt, Human
cucagaauuacaucccauuuua

SEQ ID NO: 348785 - RNA, 22 nt, Human
ugggagcaagcuggugcuggag

SEQ ID NO: 348786 - RNA, 22 nt, Human
cuuuccaaugucacuaugaauc

SEQ ID NO: 348787 - RNA, 22 nt, Human
cuuucacaguccugacugagcg

SEQ ID NO: 348788 - RNA, 15 nt, Human
ugggcagaucacuug

SEQ ID NO: 348789 - RNA, 22 nt, Human
ccuccaguacuccaguccagcg

SEQ ID NO: 348790 - RNA, 22 nt, Human
ugaggugaccgcagaugggaag

SEQ ID NO: 348791 - RNA, 22 nt, Human
ugaaagcacucacuucugcucu

SEQ ID NO: 348792 - RNA, 22 nt, Human
gagcagcucugggugacccagu

SEQ ID NO: 348793 - RNA, 22 nt, Human
cagcugacagugaggugggggc

SEQ ID NO: 348794 - RNA, 22 nt, Human
agggcagaaguacagacacuua

SEQ ID NO: 348795 - RNA, 20 nt, Human
ugggagcuggugaggucuca

SEQ ID NO: 348796 - RNA, 22 nt, Human
ggaggccaaggcaggcggauca

SEQ ID NO: 348797 - RNA, 19 nt, Human
cugaagucuuuucagcugg

SEQ ID NO: 348798 - RNA, 17 nt, Human
ucuuuccugccaugcuc

SEQ ID NO: 348799 - RNA, 22 nt, Human
uucuuuugggaauuacguaugc

SEQ ID NO: 348800 - RNA, 22 nt, Human
uuaguaauguguuaauaugaau

SEQ ID NO: 348801 - RNA, 22 nt, Human
cuugauguauaaguugauaugu

SEQ ID NO: 348802 - RNA, 22 nt, Human
aaggcagcagaggaaaggugcu

SEQ ID NO: 348803 - RNA, 22 nt, Human
ucucagggagggcgagucagcg

SEQ ID NO: 348804 - RNA, 22 nt, Human
agcagccaguucucugugguag

SEQ ID NO: 348805 - RNA, 22 nt, Human
aucuggcucgcuaggcucuggg

SEQ ID NO: 348806 - RNA, 22 nt, Human
uacuuuagaaggaaauaaguuc

SEQ ID NO: 348807 - RNA, 22 nt, Human
ucacauuuuaucuauuuuaagu

SEQ ID NO: 348808 - RNA, 22 nt, Human
cagcaggcucugaguggcugcc

SEQ ID NO: 348809 - RNA, 22 nt, Human
uuucuguaaguggcaaauaaug

SEQ ID NO: 348810 - RNA, 22 nt, Human
caggcagccuucucgucucaca

SEQ ID NO: 348811 - RNA, 22 nt, Human
gccaccagguuagauccagccu

SEQ ID NO: 348812 - RNA, 22 nt, Human
uuugggaacucuaucauggaaa

SEQ ID NO: 348813 - RNA, 21 nt, Human
ggccucugccuugccccacuc

SEQ ID NO: 348814 - RNA, 22 nt, Human
caucagucuagauucuaguacc

SEQ ID NO: 348815 - RNA, 22 nt, Human
agccucugguccucccucagcu

SEQ ID NO: 348816 - RNA, 22 nt, Human
acacaggagauauguaauggcu

SEQ ID NO: 348817 - RNA, 22 nt, Human
uacaguuuguuacauuguuagu

SEQ ID NO: 348818 - RNA, 16 nt, Human
ccuggauccccugugg

SEQ ID NO: 348819 - RNA, 22 nt, Human
ucacauacacuaggauauuuuu

SEQ ID NO: 348820 - RNA, 22 nt, Human
caaggccaguuucuccuaguca

SEQ ID NO: 348821 - RNA, 22 nt, Human
auuccaaagcacaucagaacua

SEQ ID NO: 348822 - RNA, 21 nt, Human
ggcuccugcuuugugaggggc

SEQ ID NO: 348823 - RNA, 22 nt, Human
caugguuuugagccuauuaugc

SEQ ID NO: 348824 - RNA, 22 nt, Human
acaaaggugcgucccuucagcu

SEQ ID NO: 348825 - RNA, 22 nt, Human
cucugaccauucccuugauuuu

SEQ ID NO: 348826 - RNA, 22 nt, Human
uuggagguuugaaaauaugugu

SEQ ID NO: 348827 - RNA, 22 nt, Human
gauuucaauccagcuuucuucu

SEQ ID NO: 348828 - RNA, 22 nt, Human
ugucccuggaacuauggcucca

SEQ ID NO: 348829 - RNA, 22 nt, Human
ugucucugccagcuagcagaau

SEQ ID NO: 348830 - RNA, 22 nt, Human
ggaggggagguccagcugaucu

SEQ ID NO: 348831 - RNA, 22 nt, Human
gguuugcacgauauuuccaugg

SEQ ID NO: 348832 - RNA, 23 nt, Human
acacaauagaguacuauucagcc

SEQ ID NO: 348833 - RNA, 22 nt, Human
cccaggaggcagagguugcagu

SEQ ID NO: 348834 - RNA, 22 nt, Human
gggcugcugcugccagcgacac

SEQ ID NO: 348835 - RNA, 22 nt, Human
ucagcuuugcaaguuagaaaau

SEQ ID NO: 348836 - RNA, 19 nt, Human
accaggaguaucagagcug

SEQ ID NO: 348837 - RNA, 22 nt, Human
ggccagagagcagccaggauuc

SEQ ID NO: 348838 - RNA, 22 nt, Human
aacauuggauauuuauuaaaag

SEQ ID NO: 348839 - RNA, 22 nt, Human
uagggauguaaacauaguaauu

SEQ ID NO: 348840 - RNA, 22 nt, Human
uccaggacuagcauuucugaua

SEQ ID NO: 348841 - RNA, 22 nt, Human
aaguuacacauuuucauuguaa

SEQ ID NO: 348842 - RNA, 22 nt, Human
ccugucuguaucgguucagagu

SEQ ID NO: 348843 - RNA, 22 nt, Human
uacuuacagagcuuauaaguua

SEQ ID NO: 348844 - RNA, 22 nt, Human
aaaugaccagaauacaggcuuc

SEQ ID NO: 348845 - RNA, 23 nt, Human
uggauaaagcugugcugcauagg

SEQ ID NO: 348846 - RNA, 22 nt, Human
agggcugacacaccuuauccuc

SEQ ID NO: 348847 - RNA, 22 nt, Human
cagggacaugacuggucucugu

SEQ ID NO: 348848 - RNA, 22 nt, Human
cugcccaggcugaaggaacauc

SEQ ID NO: 348849 - RNA, 22 nt, Human
agcugccacugagggugcacag

SEQ ID NO: 348850 - RNA, 22 nt, Human
augugcaugcacuuacaugugu

SEQ ID NO: 348851 - RNA, 22 nt, Human
agggacagaugaaugacugagu

SEQ ID NO: 348852 - RNA, 22 nt, Human
aaagccauuacaaaauuucaua

SEQ ID NO: 348853 - RNA, 22 nt, Human
uaggaggguuagagggaaauau

SEQ ID NO: 348854 - RNA, 22 nt, Human
aaccccgcucaggcugggugag

SEQ ID NO: 348855 - RNA, 22 nt, Human
ggaagggcaaaagagaugaacu

SEQ ID NO: 348856 - RNA, 22 nt, Human
uuugaagauaaauauggagaaa

SEQ ID NO: 348857 - RNA, 22 nt, Human
ggcucaggccagaccacgacuc

SEQ ID NO: 348858 - RNA, 18 nt, Human
gagguccugcucuagccc

SEQ ID NO: 348859 - RNA, 22 nt, Human
ugaggcaggaaguuauauaaug

SEQ ID NO: 348860 - RNA, 22 nt, Human
gaguccuuccagcaggcauuua

SEQ ID NO: 348861 - RNA, 22 nt, Human
ucauaaaaauagacucuaaagu

SEQ ID NO: 348862 - RNA, 22 nt, Human
aucagagaaguuucacuggcau

SEQ ID NO: 348863 - RNA, 19 nt, Human
uuucagacucaucuccagc

SEQ ID NO: 348864 - RNA, 23 nt, Human
accaggaguugucucaggaaaca

SEQ ID NO: 348865 - RNA, 22 nt, Human
gagcagcuuaugucaagccaga

SEQ ID NO: 348866 - RNA, 22 nt, Human
cagcugucuaaguugagcagga

SEQ ID NO: 348867 - RNA, 22 nt, Human
aagaaauuaaugugccauuacu

SEQ ID NO: 348868 - RNA, 22 nt, Human
ggcuuccuggagaaggucugag

SEQ ID NO: 348869 - RNA, 22 nt, Human
cagggcugagaauuuagagaca

SEQ ID NO: 348870 - RNA, 22 nt, Human
cagcuggcagaaccugcaucca

SEQ ID NO: 348871 - RNA, 22 nt, Human
uuuaauuuuccucuuccuggag

SEQ ID NO: 348872 - RNA, 22 nt, Human
acuuccaaauaccaucacauug

SEQ ID NO: 348873 - RNA, 22 nt, Human
cgaggcagaggcugaaacggcu

SEQ ID NO: 348874 - RNA, 22 nt, Human
gccuggcuccuaaggacuggcu

SEQ ID NO: 348875 - RNA, 22 nt, Human
gagguggguguaucacagguca

SEQ ID NO: 348876 - RNA, 22 nt, Human
ugaggcagcaauugauuauuca

SEQ ID NO: 348877 - RNA, 22 nt, Human
uuuuauuggagugauaccaagc

SEQ ID NO: 348878 - RNA, 22 nt, Human
auccucaguguuucugacaucu

SEQ ID NO: 348879 - RNA, 22 nt, Human
agccagugcaacagcagugaag

SEQ ID NO: 348880 - RNA, 22 nt, Human
agagcuggccagggaucacucu

SEQ ID NO: 348881 - RNA, 22 nt, Human
uaacaagucauuuuaaauuaug

SEQ ID NO: 348882 - RNA, 22 nt, Human
uugaagauggaucgccacucuc

SEQ ID NO: 348883 - RNA, 22 nt, Human
aauuucaauuacuuuugcacca

SEQ ID NO: 348884 - RNA, 20 nt, Human
aucaggauucuugcuuuguu

SEQ ID NO: 348885 - RNA, 22 nt, Human
acauacauauguuuaaaugcau

SEQ ID NO: 348886 - RNA, 21 nt, Human
ccuggccaaucugauaggguu

SEQ ID NO: 348887 - RNA, 22 nt, Human
uaaguuuucuggaauaacuugg

SEQ ID NO: 348888 - RNA, 22 nt, Human
uucagugucaauuuuuaaauau

SEQ ID NO: 348889 - RNA, 22 nt, Human
gugccugcagcaauccauggca

SEQ ID NO: 348890 - RNA, 22 nt, Human
caggaggcagagguugcagcga

SEQ ID NO: 348891 - RNA, 22 nt, Human
gcaaggaccuuugagcgugcca

SEQ ID NO: 348892 - RNA, 22 nt, Human
ugcccaggcuccucgcagccuu

SEQ ID NO: 348893 - RNA, 22 nt, Human
aggaggccgauuucagaggucg

SEQ ID NO: 348894 - RNA, 22 nt, Human
uucuaguguccuuggacuugcu

SEQ ID NO: 348895 - RNA, 22 nt, Human
cccagcaggcauguugggagga

SEQ ID NO: 348896 - RNA, 22 nt, Human
uagggcucagaguccaguuucu

SEQ ID NO: 348897 - RNA, 22 nt, Human
uaaguccuaauggcagaagucu

SEQ ID NO: 348898 - RNA, 22 nt, Human
agaggucagaacaggaaagugu

SEQ ID NO: 348899 - RNA, 22 nt, Human
ugcacccucaucagucaaaugg

SEQ ID NO: 348900 - RNA, 22 nt, Human
caccaggugcuggaggacauca

SEQ ID NO: 348901 - RNA, 22 nt, Human
ggugggcacauucagucucugu

SEQ ID NO: 348902 - RNA, 19 nt, Human
ccaggagagcuuggagaag

SEQ ID NO: 348903 - RNA, 22 nt, Human
agagcugggugaagugccauca

SEQ ID NO: 348904 - RNA, 22 nt, Human
uaaaugagggcugacaugauug

SEQ ID NO: 348905 - RNA, 22 nt, Human
aggaugaauaacugaaauggug

SEQ ID NO: 348906 - RNA, 22 nt, Human
cuggaagugggguuggcuugaa

SEQ ID NO: 348907 - RNA, 22 nt, Human
cauagaaacugagacaaggauu

SEQ ID NO: 348908 - RNA, 22 nt, Human
gccaccagccccaugcgcugug

SEQ ID NO: 348909 - RNA, 22 nt, Human
aggggcugggacagagccaagc

SEQ ID NO: 348910 - RNA, 19 nt, Human
gcgaggaagucacuguggu

SEQ ID NO: 348911 - RNA, 22 nt, Human
ggcagcucaccucugguccagg

SEQ ID NO: 348912 - RNA, 22 nt, Human
ugcagcuucuuguccugugauu

SEQ ID NO: 348913 - RNA, 22 nt, Human
gcugccugaagugucuacacug

SEQ ID NO: 348914 - RNA, 22 nt, Human
aguauaauuagauaucaaaagu

SEQ ID NO: 348915 - RNA, 22 nt, Human
aauguguacaugacagauagaa

SEQ ID NO: 348916 - RNA, 22 nt, Human
uugaagcaugguacuuguucaa

SEQ ID NO: 348917 - RNA, 17 nt, Human
cucacggaggaugaauc

SEQ ID NO: 348918 - RNA, 22 nt, Human
ggugggcaggucacucugccuc

SEQ ID NO: 348919 - RNA, 22 nt, Human
cagcuggggcagccacgugcgg

SEQ ID NO: 348920 - RNA, 22 nt, Human
guuugcauuucuugaacuauau

SEQ ID NO: 348921 - RNA, 19 nt, Human
gcugcuggcucuggcugga

SEQ ID NO: 348922 - RNA, 22 nt, Human
agggaucaaaaaauguacaugc

SEQ ID NO: 348923 - RNA, 22 nt, Human
aagcuuuaugacuuggagacag

SEQ ID NO: 348924 - RNA, 22 nt, Human
uaccuugggguuuuguugcucu

SEQ ID NO: 348925 - RNA, 22 nt, Human
guagaaauauuuaucucugaga

SEQ ID NO: 348926 - RNA, 20 nt, Human
ccaggcacugucccaugcag

SEQ ID NO: 348927 - RNA, 22 nt, Human
gaaccaaguaggauacaaggag

SEQ ID NO: 348928 - RNA, 22 nt, Human
gaaggagagagacaucgucccu

SEQ ID NO: 348929 - RNA, 21 nt, Human
ggcuuuaugcucacccagccu

SEQ ID NO: 348930 - RNA, 22 nt, Human
cccaggaaagagacugcugggu

SEQ ID NO: 348931 - RNA, 22 nt, Human
cagaggaagagauacaagcccu

SEQ ID NO: 348932 - RNA, 22 nt, Human
ccuuuggguucaaucucggucu

SEQ ID NO: 348933 - RNA, 22 nt, Human
uggagcugaacuuugaggccag

SEQ ID NO: 348934 - RNA, 22 nt, Human
uggcugcuagccagagcuucag

SEQ ID NO: 348935 - RNA, 22 nt, Human
uagcaucuggagaaacaagucc

SEQ ID NO: 348936 - RNA, 22 nt, Human
cucaggaucgcuugcccuaggg

SEQ ID NO: 348937 - RNA, 22 nt, Human
ggagcagccacgucucagggca

SEQ ID NO: 348938 - RNA, 22 nt, Human
aaaguccuuuuugccaugcaag

SEQ ID NO: 348939 - RNA, 20 nt, Human
cugcucugcuuugcaggugg

SEQ ID NO: 348940 - RNA, 20 nt, Human
agcagcuguguuuucauccu

SEQ ID NO: 348941 - RNA, 22 nt, Human
ccuuccuggagcccaugcagau

SEQ ID NO: 348942 - RNA, 23 nt, Human
uugaaggagaaagcuuucuuggu

SEQ ID NO: 348943 - RNA, 22 nt, Human
aacucaguuacauauuagaaua

SEQ ID NO: 348944 - RNA, 22 nt, Human
cccagcuccgagcuccgagccg

SEQ ID NO: 348945 - RNA, 18 nt, Human
cuccagggaacucaguca

SEQ ID NO: 348946 - RNA, 22 nt, Human
guauuugauacaugaaauggug

SEQ ID NO: 348947 - RNA, 22 nt, Human
cugcagagguugguucuaagau

SEQ ID NO: 348948 - RNA, 22 nt, Human
cauuuacagcagacugaugaaa

SEQ ID NO: 348949 - RNA, 22 nt, Human
aguggcagaucucuggucugga

SEQ ID NO: 348950 - RNA, 22 nt, Human
gucugucucucuccagagugca

SEQ ID NO: 348951 - RNA, 19 nt, Human
ccuuggaguuccaggugga

SEQ ID NO: 348952 - RNA, 22 nt, Human
aaagguuaagguguucaagaaa

SEQ ID NO: 348953 - RNA, 22 nt, Human
ggaccagagcucgggcuucuca

SEQ ID NO: 348954 - RNA, 22 nt, Human
ggcccugagcugaaguacugug

SEQ ID NO: 348955 - RNA, 22 nt, Human
gcugcagcuguaggacacaauu

SEQ ID NO: 348956 - RNA, 22 nt, Human
acagccagggcauugucgccga

SEQ ID NO: 348957 - RNA, 22 nt, Human
uggcuucugggacuugugagca

SEQ ID NO: 348958 - RNA, 22 nt, Human
aaugaaaauuggacccuagaac

SEQ ID NO: 348959 - RNA, 22 nt, Human
gaaaggucaguuccacuuccau

SEQ ID NO: 348960 - RNA, 22 nt, Human
uguggcugacuccuggucccca

SEQ ID NO: 348961 - RNA, 22 nt, Human
uuccuggugguggugacagcac

SEQ ID NO: 348962 - RNA, 22 nt, Human
uucucuucaucucaguaaaugu

SEQ ID NO: 348963 - RNA, 22 nt, Human
agcagggcuguguagguaauga

SEQ ID NO: 348964 - RNA, 22 nt, Human
ucucagaguaauucuuuaaggu

SEQ ID NO: 348965 - RNA, 22 nt, Human
ugcugccacugguagucucauu

SEQ ID NO: 348966 - RNA, 22 nt, Human
cauuuauugguuaggccagcag

SEQ ID NO: 348967 - RNA, 22 nt, Human
gaggccaggacaugaaagcuga

SEQ ID NO: 348968 - RNA, 20 nt, Human
aagcaauauagugcaaaugu

SEQ ID NO: 348969 - RNA, 22 nt, Human
aaaaguguccagauuaugaaga

SEQ ID NO: 348970 - RNA, 20 nt, Human
ccaagagcaugcaugaggaa

SEQ ID NO: 348971 - RNA, 22 nt, Human
aguacaauuuaaugaagauagc

SEQ ID NO: 348972 - RNA, 22 nt, Human
ugccaaggguaugggcaagaua

SEQ ID NO: 348973 - RNA, 22 nt, Human
ugaaauagacacagugcuauac

SEQ ID NO: 348974 - RNA, 22 nt, Human
guucuucaaagugacaacuaaa

SEQ ID NO: 348975 - RNA, 22 nt, Human
uggcacagacagaucaggaguc

SEQ ID NO: 348976 - RNA, 22 nt, Human
gaggccaggaagcccaagauca

SEQ ID NO: 348977 - RNA, 22 nt, Human
acauuucucagguaagucauuu

SEQ ID NO: 348978 - RNA, 22 nt, Human
ccugcagguaaggcuaacugcc

SEQ ID NO: 348979 - RNA, 18 nt, Human
ucucuuuuccccucauug

SEQ ID NO: 348980 - RNA, 22 nt, Human
cauguuuucuaggcuuucacaa

SEQ ID NO: 348981 - RNA, 21 nt, Human
ucagggcagugggagguuccu

SEQ ID NO: 348982 - RNA, 22 nt, Human
gcagcuuuguaaaguaugaagc

SEQ ID NO: 348983 - RNA, 22 nt, Human
ugcagcuguuacggacccuguc

SEQ ID NO: 348984 - RNA, 22 nt, Human
aggaagcccuugucauuucugu

SEQ ID NO: 348985 - RNA, 22 nt, Human
gauuucuguaacacuucagaua

SEQ ID NO: 348986 - RNA, 22 nt, Human
agugcugucaguuuuauagaua

SEQ ID NO: 348987 - RNA, 22 nt, Human
uagcugccaaaagggugggcua

SEQ ID NO: 348988 - RNA, 22 nt, Human
ccaaagucagugcucagucguc

SEQ ID NO: 348989 - RNA, 22 nt, Human
cuguagcagugugcucuuuuuc

SEQ ID NO: 348990 - RNA, 22 nt, Human
augcuuuaaaugucuuuugcuu

SEQ ID NO: 348991 - RNA, 20 nt, Human
cucucccagcacagcuuccu

SEQ ID NO: 348992 - RNA, 22 nt, Human
aaacuuuguagagaaugcuggc

SEQ ID NO: 348993 - RNA, 22 nt, Human
ggagcagccgcgucucagggca

SEQ ID NO: 348994 - RNA, 22 nt, Human
auuguggcuagacagucacaau

SEQ ID NO: 348995 - RNA, 20 nt, Human
aagcagaagcugcucucagc

SEQ ID NO: 348996 - RNA, 22 nt, Human
gaggccugaggcugccuggagc

SEQ ID NO: 348997 - RNA, 22 nt, Human
cauauuuauagaucuggcauuu

SEQ ID NO: 348998 - RNA, 22 nt, Human
aggcagcaauugaaaucauugu

SEQ ID NO: 348999 - RNA, 22 nt, Human
ugcagaagcagagccgguggcc

SEQ ID NO: 349000 - RNA, 22 nt, Human
aggccagcuuccagaggggcag

SEQ ID NO: 349001 - RNA, 22 nt, Human
agaauaauacugaaaugcugaa

SEQ ID NO: 349002 - RNA, 22 nt, Human
acuuuguauaagacaauaaaga

SEQ ID NO: 349003 - RNA, 23 nt, Human
uuccagaguccacaucugccacc

SEQ ID NO: 349004 - RNA, 22 nt, Human
ugggcagaauugugguaguuaa

SEQ ID NO: 349005 - RNA, 22 nt, Human
uucauaaugagguccuagaggc

SEQ ID NO: 349006 - RNA, 22 nt, Human
aggugccagaugcacagcugaa

SEQ ID NO: 349007 - RNA, 22 nt, Human
ggagggagcauccccuugcuga

SEQ ID NO: 349008 - RNA, 22 nt, Human
aaucuucuuucuuaacaguaca

SEQ ID NO: 349009 - RNA, 22 nt, Human
cucugagagagcuggugagcac

SEQ ID NO: 349010 - RNA, 22 nt, Human
cuugaaguugcaaaacauuaau

SEQ ID NO: 349011 - RNA, 22 nt, Human
ccuggccagaggcgugccugug

SEQ ID NO: 349012 - RNA, 22 nt, Human
cuggcucccucgcugaggugcu

SEQ ID NO: 349013 - RNA, 22 nt, Human
cgcaccacugaauuccagccug

SEQ ID NO: 349014 - RNA, 18 nt, Human
ugcuggguaacuguaugg

SEQ ID NO: 349015 - RNA, 18 nt, Human
gagcccugagucugcaca

SEQ ID NO: 349016 - RNA, 22 nt, Human
cagaaccaggaacugauggaga

SEQ ID NO: 349017 - RNA, 17 nt, Human
ccuguguuugcuccuuc

SEQ ID NO: 349018 - RNA, 22 nt, Human
aggcucagauucacauuugguu

SEQ ID NO: 349019 - RNA, 22 nt, Human
aaguggugguaugaaccgaggg

SEQ ID NO: 349020 - RNA, 20 nt, Human
uguauauuuucugguguaaa

SEQ ID NO: 349021 - RNA, 22 nt, Human
gucuccugagacugcagucacc

SEQ ID NO: 349022 - RNA, 22 nt, Human
agccaugcaccuuacucuugcu

SEQ ID NO: 349023 - RNA, 22 nt, Human
uuauuaaugaguacaaguuauu

SEQ ID NO: 349024 - RNA, 22 nt, Human
gaaagagaaccugggccuagau

SEQ ID NO: 349025 - RNA, 22 nt, Human
cugaaggacacgugaggagcca

SEQ ID NO: 349026 - RNA, 22 nt, Human
gcucuggacccuggaguggcug

SEQ ID NO: 349027 - RNA, 22 nt, Human
cuggcugugcagucuuccagaa

SEQ ID NO: 349028 - RNA, 17 nt, Human
agggucaggugaaguuc

SEQ ID NO: 349029 - RNA, 22 nt, Human
uccucagacacccugcuggcuu

SEQ ID NO: 349030 - RNA, 22 nt, Human
caagggugguauugggagcaua

SEQ ID NO: 349031 - RNA, 22 nt, Human
ucagcagggccuccuugugcag

SEQ ID NO: 349032 - RNA, 22 nt, Human
aggaagcugcuggaguagugug

SEQ ID NO: 349033 - RNA, 22 nt, Human
gcaugagggggguuaggaaguu

SEQ ID NO: 349034 - RNA, 22 nt, Human
aagaggcagcccgcugaggcug

SEQ ID NO: 349035 - RNA, 19 nt, Human
ugacaggcuguugccuuga

SEQ ID NO: 349036 - RNA, 20 nt, Human
guucucacugaucugcaggg

SEQ ID NO: 349037 - RNA, 22 nt, Human
guaucuuuuacaccaggaaauu

SEQ ID NO: 349038 - RNA, 22 nt, Human
cagccccucacagagcuguccu

SEQ ID NO: 349039 - RNA, 22 nt, Human
ggcacugaaguggguguugggu

SEQ ID NO: 349040 - RNA, 23 nt, Human
ucuccagugucucuucauugagu

SEQ ID NO: 349041 - RNA, 22 nt, Human
caacauuugaguaaagaaaugg

SEQ ID NO: 349042 - RNA, 22 nt, Human
uaggauuuaggcuuuaacaucu

SEQ ID NO: 349043 - RNA, 22 nt, Human
ggcucagacucccaggcccucu

SEQ ID NO: 349044 - RNA, 22 nt, Human
uucuccucuguuggccuucccu

SEQ ID NO: 349045 - RNA, 22 nt, Human
aagagcugugggugguaguccu

SEQ ID NO: 349046 - RNA, 22 nt, Human
auggauuuggaugagauuacuu

SEQ ID NO: 349047 - RNA, 22 nt, Human
auacacauguguaugugcaugc

SEQ ID NO: 349048 - RNA, 22 nt, Human
ggccaggcacugugugagauau

SEQ ID NO: 349049 - RNA, 22 nt, Human
gguucacacuuucaugauuuca

SEQ ID NO: 349050 - RNA, 22 nt, Human
aaauuucuggaagugucagagu

SEQ ID NO: 349051 - RNA, 22 nt, Human
cagggacccuacuagcucacac

SEQ ID NO: 349052 - RNA, 22 nt, Human
ggcagcuuucaauaggguuaug

SEQ ID NO: 349053 - RNA, 22 nt, Human
uggcaggaggaugaggcggcua

SEQ ID NO: 349054 - RNA, 22 nt, Human
uccagccaugcaugacaaucac

SEQ ID NO: 349055 - RNA, 22 nt, Human
cagcuggcgggcagagccgcca

SEQ ID NO: 349056 - RNA, 22 nt, Human
gccagguggcugagugacugag

SEQ ID NO: 349057 - RNA, 19 nt, Human
ggacacagaaagcugcauu

SEQ ID NO: 349058 - RNA, 20 nt, Human
uauuucugggcaaccauuua

SEQ ID NO: 349059 - RNA, 22 nt, Human
ugcagugguugagagcccagac

SEQ ID NO: 349060 - RNA, 22 nt, Human
uaagcauucaaugcuuagcacu

SEQ ID NO: 349061 - RNA, 18 nt, Human
augggaggggccaagaga

SEQ ID NO: 349062 - RNA, 22 nt, Human
agccacagucaaccuguccaua

SEQ ID NO: 349063 - RNA, 22 nt, Human
ccucugcagcagagagccagag

SEQ ID NO: 349064 - RNA, 22 nt, Human
uacauuguuuuuucuugccauc

SEQ ID NO: 349065 - RNA, 22 nt, Human
aggguggcaguuacuggagcaa

SEQ ID NO: 349066 - RNA, 22 nt, Human
ucuggcucuuugggugauugua

SEQ ID NO: 349067 - RNA, 22 nt, Human
aaguucuaauuuugcauucagg

SEQ ID NO: 349068 - RNA, 23 nt, Human
gugauuucagggaacagaaucag

SEQ ID NO: 349069 - RNA, 22 nt, Human
uggcagaggcucugugauguug

SEQ ID NO: 349070 - RNA, 22 nt, Human
uccaggcacuauauauacuuuu

SEQ ID NO: 349071 - RNA, 22 nt, Human
aagaaugucguugguauuuuaa

SEQ ID NO: 349072 - RNA, 22 nt, Human
ucuuuuggaaaugaugugcagg

SEQ ID NO: 349073 - RNA, 22 nt, Human
ccagggugggaggcugaaggcg

SEQ ID NO: 349074 - RNA, 22 nt, Human
auguccagggcacacagcagug

SEQ ID NO: 349075 - RNA, 21 nt, Human
aggcuguccuuugccagcccu

SEQ ID NO: 349076 - RNA, 22 nt, Human
aagaggaagucuccauggagag

SEQ ID NO: 349077 - RNA, 22 nt, Human
ggcugccugaggcugaggcccg

SEQ ID NO: 349078 - RNA, 22 nt, Human
aguggcagagcaggugcuggaa

SEQ ID NO: 349079 - RNA, 22 nt, Human
cagggcucgcugccagcuucag

SEQ ID NO: 349080 - RNA, 22 nt, Human
agggaccucuucuugcagcuga

SEQ ID NO: 349081 - RNA, 22 nt, Human
agaccauagggaccucagguug

SEQ ID NO: 349082 - RNA, 22 nt, Human
ccugggagguggagguugcagu

SEQ ID NO: 349083 - RNA, 22 nt, Human
gcugucccgaaccccugguaau

SEQ ID NO: 349084 - RNA, 22 nt, Human
ggaaagagcuaaaagggugaga

SEQ ID NO: 349085 - RNA, 20 nt, Human
cccucugcacauggcugugg

SEQ ID NO: 349086 - RNA, 22 nt, Human
gcaggaguuaggcgucguggau

SEQ ID NO: 349087 - RNA, 22 nt, Human
uggcccugaggggcugugcccc

SEQ ID NO: 349088 - RNA, 22 nt, Human
ugagccagucugucugggugaa

SEQ ID NO: 349089 - RNA, 22 nt, Human
ucucagagggaaacaugaguga

SEQ ID NO: 349090 - RNA, 22 nt, Human
aaacaaguguaaacuagucugu

SEQ ID NO: 349091 - RNA, 22 nt, Human
caggaacacaaguucagggaug

SEQ ID NO: 349092 - RNA, 22 nt, Human
agaggcuggauugagcauagac

SEQ ID NO: 349093 - RNA, 22 nt, Human
acucuucuugcugcucauuaau

SEQ ID NO: 349094 - RNA, 22 nt, Human
aggaaaaagaguugcugccuuc

SEQ ID NO: 349095 - RNA, 22 nt, Human
uccaggaggcagggcugugccc

SEQ ID NO: 349096 - RNA, 22 nt, Human
cccaggagguggagguugcagu

SEQ ID NO: 349097 - RNA, 22 nt, Human
gcuagaucucucauaaauucca

SEQ ID NO: 349098 - RNA, 22 nt, Human
aaugucugagucucuguauccc

SEQ ID NO: 349099 - RNA, 22 nt, Human
ucaccgccuugcccggccgggc

SEQ ID NO: 349100 - RNA, 22 nt, Human
auguauguuaguguauuaucua

SEQ ID NO: 349101 - RNA, 22 nt, Human
auucagugugagguuuucaagu

SEQ ID NO: 349102 - RNA, 22 nt, Human
aucaguuuggugcuuucaguga

SEQ ID NO: 349103 - RNA, 22 nt, Human
aacaugucuggguauucacaag

SEQ ID NO: 349104 - RNA, 22 nt, Human
guggcagggugcucaucaugca

SEQ ID NO: 349105 - RNA, 22 nt, Human
caguuuauagcucuagcagcuu

SEQ ID NO: 349106 - RNA, 22 nt, Human
gaggguggguuucuugcacguc

SEQ ID NO: 349107 - RNA, 22 nt, Human
uugaggagcaggaugggaggcu

SEQ ID NO: 349108 - RNA, 22 nt, Human
gcuggcagucccaucagcuggg

SEQ ID NO: 349109 - RNA, 22 nt, Human
acagaggucauggagaguucuc

SEQ ID NO: 349110 - RNA, 22 nt, Human
aauuucaaacucuugcccucag

SEQ ID NO: 349111 - RNA, 19 nt, Human
ugcaggaggacugagcaga

SEQ ID NO: 349112 - RNA, 22 nt, Human
agccaacuaauuaaacaacuuu

SEQ ID NO: 349113 - RNA, 22 nt, Human
gaggagggagcuggaagcucuu

SEQ ID NO: 349114 - RNA, 22 nt, Human
ggcuccuguccuccuggagcuc

SEQ ID NO: 349115 - RNA, 22 nt, Human
accaggcacuccugaggucuga

SEQ ID NO: 349116 - RNA, 22 nt, Human
gcuauacagcaggagaauggaa

SEQ ID NO: 349117 - RNA, 22 nt, Human
ggcuccugaaagacuaugggaa

SEQ ID NO: 349118 - RNA, 22 nt, Human
gaggcagcugaagcuucaaaga

SEQ ID NO: 349119 - RNA, 19 nt, Human
ucuggagcugaugcaggug

SEQ ID NO: 349120 - RNA, 22 nt, Human
ucagcagauggguuguguuggc

SEQ ID NO: 349121 - RNA, 22 nt, Human
caggcugggcagccuccccggc

SEQ ID NO: 349122 - RNA, 22 nt, Human
guggcugguuuccugcaugcaa

SEQ ID NO: 349123 - RNA, 22 nt, Human
uuucaaauggagucgugaaaug

SEQ ID NO: 349124 - RNA, 22 nt, Human
uauuugagcgaagcaguguuuu

SEQ ID NO: 349125 - RNA, 15 nt, Human
cuccaugauuuugca

SEQ ID NO: 349126 - RNA, 22 nt, Human
uccugcagguggaugauucucu

SEQ ID NO: 349127 - RNA, 22 nt, Human
cccagcagcuugcacagugcug

SEQ ID NO: 349128 - RNA, 22 nt, Human
cacccagcagcacuuaagacua

SEQ ID NO: 349129 - RNA, 22 nt, Human
acagcauugcuccaucucaaga

SEQ ID NO: 349130 - RNA, 22 nt, Human
ccaucccuucaccacagcagua

SEQ ID NO: 349131 - RNA, 22 nt, Human
caguggcaaugggacagagcac

SEQ ID NO: 349132 - RNA, 22 nt, Human
aggcagaggagaaugaucuucc

SEQ ID NO: 349133 - RNA, 22 nt, Human
gcagaggccaggccaccagcaa

SEQ ID NO: 349134 - RNA, 20 nt, Human
caagcccucuuuagccugcc

SEQ ID NO: 349135 - RNA, 22 nt, Human
accucugcucaagaccccuccg

SEQ ID NO: 349136 - RNA, 22 nt, Human
uagggaccuuagaauuguaugu

SEQ ID NO: 349137 - RNA, 22 nt, Human
uucugaggcacuggcucuccca

SEQ ID NO: 349138 - RNA, 22 nt, Human
ugaggcagaguaagauacauga

SEQ ID NO: 349139 - RNA, 21 nt, Human
uccauaagagaccaucuccua

SEQ ID NO: 349140 - RNA, 22 nt, Human
aggagggugauccgggcugguc

SEQ ID NO: 349141 - RNA, 22 nt, Human
uucuuucccaguagaugugaaa

SEQ ID NO: 349142 - RNA, 22 nt, Human
acugagcugcaagucagggagg

SEQ ID NO: 349143 - RNA, 23 nt, Human
ucuccuccuagauacagucaugg

SEQ ID NO: 349144 - RNA, 22 nt, Human
ucugggagcacacgcagugauc

SEQ ID NO: 349145 - RNA, 22 nt, Human
ugugucccuuggaaccucagcu

SEQ ID NO: 349146 - RNA, 22 nt, Human
ggcagcagggucuagauugaug

SEQ ID NO: 349147 - RNA, 22 nt, Human
agacagcuaauaaaugagugug

SEQ ID NO: 349148 - RNA, 22 nt, Human
uggccugguuauauugcuauca

SEQ ID NO: 349149 - RNA, 22 nt, Human
ccagcagacacacaggcguggg

SEQ ID NO: 349150 - RNA, 22 nt, Human
ucccuggcagcuaagggugguc

SEQ ID NO: 349151 - RNA, 22 nt, Human
acaggcugcugggcuccgugcu

SEQ ID NO: 349152 - RNA, 22 nt, Human
uaugcauagguaucuauacuca

SEQ ID NO: 349153 - RNA, 22 nt, Human
guggcucuaggugagcauggag

SEQ ID NO: 349154 - RNA, 23 nt, Human
ugcagccacucaggagcucagug

SEQ ID NO: 349155 - RNA, 22 nt, Human
auuuugaaaagcauuugaguaa

SEQ ID NO: 349156 - RNA, 22 nt, Human
gccuggguuccaugaucuccag

SEQ ID NO: 349157 - RNA, 22 nt, Human
uuuuuuaguuaggucagaaugu

SEQ ID NO: 349158 - RNA, 22 nt, Human
ggagaugguggaagcuggugca

SEQ ID NO: 349159 - RNA, 22 nt, Human
uugagaagaaauaguuugcaau

SEQ ID NO: 349160 - RNA, 22 nt, Human
ugcugucuguuuacuggcuaua

SEQ ID NO: 349161 - RNA, 22 nt, Human
uuuaaauuuguguuuagagggu

SEQ ID NO: 349162 - RNA, 22 nt, Human
aaaucuggccccuugccuauuu

SEQ ID NO: 349163 - RNA, 22 nt, Human
ucucagagaccugaacucccug

SEQ ID NO: 349164 - RNA, 22 nt, Human
aggugcuggaguagaagaaaaa

SEQ ID NO: 349165 - RNA, 22 nt, Human
ccuauugacaauucucuucucc

SEQ ID NO: 349166 - RNA, 22 nt, Human
cuggccacaacuagcccaggac

SEQ ID NO: 349167 - RNA, 22 nt, Human
ugcuguggcaguuuauguauag

SEQ ID NO: 349168 - RNA, 23 nt, Human
uuaagacuggcugaacuuaguag

SEQ ID NO: 349169 - RNA, 18 nt, Human
cucagggcaucagucugg

SEQ ID NO: 349170 - RNA, 22 nt, Human
uuuuucaagacaaccugcaugu

SEQ ID NO: 349171 - RNA, 22 nt, Human
aggcccuggguuagggcccacu

SEQ ID NO: 349172 - RNA, 22 nt, Human
uccuggcccacuaugccagcau

SEQ ID NO: 349173 - RNA, 22 nt, Human
cugagccaugagccugcgccca

SEQ ID NO: 349174 - RNA, 22 nt, Human
ccuccagcugccucagucucuu

SEQ ID NO: 349175 - RNA, 22 nt, Human
guauacauagaugaugaacaag

SEQ ID NO: 349176 - RNA, 22 nt, Human
ucagagaguuacacaaauuguu

SEQ ID NO: 349177 - RNA, 22 nt, Human
aauauucaaguuauucuuucuu

SEQ ID NO: 349178 - RNA, 22 nt, Human
aguguugucaaacggcucagca

SEQ ID NO: 349179 - RNA, 22 nt, Human
uaggagagcugaacuauugucu

SEQ ID NO: 349180 - RNA, 22 nt, Human
augucuuuggcuuugacauggc

SEQ ID NO: 349181 - RNA, 22 nt, Human
uggcacugccaaccugcuaggu

SEQ ID NO: 349182 - RNA, 22 nt, Human
gggcacugcuuugcucugucac

SEQ ID NO: 349183 - RNA, 20 nt, Human
uccuucaggcagggccuagu

SEQ ID NO: 349184 - RNA, 18 nt, Human
uccugccugcgggcuccc

SEQ ID NO: 349185 - RNA, 22 nt, Human
ucuucaaaaaauauccaucagu

SEQ ID NO: 349186 - RNA, 22 nt, Human
gaaggaagugcucauacuaguu

SEQ ID NO: 349187 - RNA, 22 nt, Human
uuugaaaguguuuacuugggaa

SEQ ID NO: 349188 - RNA, 22 nt, Human
cuccugagcucugaggaagcuu

SEQ ID NO: 349189 - RNA, 22 nt, Human
gugccugccccacuccucagca

SEQ ID NO: 349190 - RNA, 22 nt, Human
auacauacauguacacauaaau

SEQ ID NO: 349191 - RNA, 22 nt, Human
aauuagggaaaauuuacuugua

SEQ ID NO: 349192 - RNA, 22 nt, Human
uggagccaaugaacauuugcug

SEQ ID NO: 349193 - RNA, 22 nt, Human
auuuaagacugacuucaccagu

SEQ ID NO: 349194 - RNA, 22 nt, Human
ugccugaugcaggaguaucaga

SEQ ID NO: 349195 - RNA, 22 nt, Human
acaguguucacuuaacaaugga

SEQ ID NO: 349196 - RNA, 21 nt, Human
gccagccuguuuaccuguggu

SEQ ID NO: 349197 - RNA, 22 nt, Human
cagaacauuccaugugcccugc

SEQ ID NO: 349198 - RNA, 22 nt, Human
uccucugccccagaugaaauuu

SEQ ID NO: 349199 - RNA, 22 nt, Human
ugcagcauucuuggccacuacu

SEQ ID NO: 349200 - RNA, 22 nt, Human
cucuucaaaagucuaauccuua

SEQ ID NO: 349201 - RNA, 22 nt, Human
aacaaauggggccuuguaugaa

SEQ ID NO: 349202 - RNA, 22 nt, Human
gaagcccauuuguacagcacau

SEQ ID NO: 349203 - RNA, 22 nt, Human
aaugauggucauggcaacuuuu

SEQ ID NO: 349204 - RNA, 22 nt, Human
agggccucugacgcccccagcc

SEQ ID NO: 349205 - RNA, 21 nt, Human
uaucuacuggugucuuucaga

SEQ ID NO: 349206 - RNA, 22 nt, Human
aaguucaaggcucuagaguucc

SEQ ID NO: 349207 - RNA, 22 nt, Human
ugccagaagauucucuaucaga

SEQ ID NO: 349208 - RNA, 22 nt, Human
auuuaucaccaguuagcugacu

SEQ ID NO: 349209 - RNA, 22 nt, Human
gagcuuccugaugccgaccagu

SEQ ID NO: 349210 - RNA, 22 nt, Human
agauuuagugguggaauuuugg

SEQ ID NO: 349211 - RNA, 22 nt, Human
cuugggagacacaagaagacau

SEQ ID NO: 349212 - RNA, 22 nt, Human
gcagcagagaacacaaugaugg

SEQ ID NO: 349213 - RNA, 22 nt, Human
aaaauugaagugaucaggaacu

SEQ ID NO: 349214 - RNA, 22 nt, Human
uucucuuugacauuauucaggu

SEQ ID NO: 349215 - RNA, 22 nt, Human
uguaucaaaccaaauuaauucu

SEQ ID NO: 349216 - RNA, 22 nt, Human
gcaaagguagccaaggagcuca

SEQ ID NO: 349217 - RNA, 22 nt, Human
cugaagccaugugcucacuggu

SEQ ID NO: 349218 - RNA, 22 nt, Human
gagagggccgggggccagcucc

SEQ ID NO: 349219 - RNA, 22 nt, Human
ggcugcaggcaggguauccacu

SEQ ID NO: 349220 - RNA, 22 nt, Human
aggcuucugcugauauuucauu

SEQ ID NO: 349221 - RNA, 18 nt, Human
uggcucagauggcuuuaa

SEQ ID NO: 349222 - RNA, 22 nt, Human
ucagagucucccccaguuuggg

SEQ ID NO: 349223 - RNA, 22 nt, Human
cagucccagacccagaaggugg

SEQ ID NO: 349224 - RNA, 22 nt, Human
caggccugagacaucugagaua

SEQ ID NO: 349225 - RNA, 22 nt, Human
aucauucuaguccuuauggucu

SEQ ID NO: 349226 - RNA, 22 nt, Human
gccugcagggccugggccuacc

SEQ ID NO: 349227 - RNA, 22 nt, Human
aaguugaaugcguacgugacau

SEQ ID NO: 349228 - RNA, 22 nt, Human
aacaguaacgagauguccuaac

SEQ ID NO: 349229 - RNA, 22 nt, Human
acugaaagauaaaucaguuagc

SEQ ID NO: 349230 - RNA, 20 nt, Human
cugggcagguguuugaucuc

SEQ ID NO: 349231 - RNA, 22 nt, Human
augaugguaaauucaguauccg

SEQ ID NO: 349232 - RNA, 22 nt, Human
uuuccaauaaagugucauuguu

SEQ ID NO: 349233 - RNA, 22 nt, Human
caggcaggucagugaagaagga

SEQ ID NO: 349234 - RNA, 22 nt, Human
ugccaggcugucaauucaccca

SEQ ID NO: 349235 - RNA, 22 nt, Human
agaggaugauuuuaaggacacu

SEQ ID NO: 349236 - RNA, 21 nt, Human
gcagccacagccaccaagcua

SEQ ID NO: 349237 - RNA, 22 nt, Human
uagcuaucuguguccagaucca

SEQ ID NO: 349238 - RNA, 22 nt, Human
aauuagagaucaguucuuugac

SEQ ID NO: 349239 - RNA, 22 nt, Human
acugucuuguguuaaagaacca

SEQ ID NO: 349240 - RNA, 22 nt, Human
gaugguuugguaaaaguauguu

SEQ ID NO: 349241 - RNA, 22 nt, Human
cuugcugugugguguucucaga

SEQ ID NO: 349242 - RNA, 22 nt, Human
auauuaggcaaggagauuauuu

SEQ ID NO: 349243 - RNA, 22 nt, Human
agaggccggccgagcccauggg

SEQ ID NO: 349244 - RNA, 22 nt, Human
uacacauguauuuauguguaca

SEQ ID NO: 349245 - RNA, 22 nt, Human
ccacugucagaggggcugugcc

SEQ ID NO: 349246 - RNA, 22 nt, Human
augucuuucgcaucaguagcua

SEQ ID NO: 349247 - RNA, 22 nt, Human
ccugaagagcacucuagaguug

SEQ ID NO: 349248 - RNA, 22 nt, Human
guuuuauaauugcuucauaaga

SEQ ID NO: 349249 - RNA, 22 nt, Human
gcguggugcugcccugcacaca

SEQ ID NO: 349250 - RNA, 22 nt, Human
cugaggcugggcugaggguaua

SEQ ID NO: 349251 - RNA, 22 nt, Human
cuugccuucuuuuccuauagaa

SEQ ID NO: 349252 - RNA, 23 nt, Human
ccucagcauggcaggagcccagc

SEQ ID NO: 349253 - RNA, 22 nt, Human
uaaugcuuaacagcuggcuuuu

SEQ ID NO: 349254 - RNA, 22 nt, Human
uggcucaggugugagcugaaga

SEQ ID NO: 349255 - RNA, 19 nt, Human
gaaggagagcugaguuagg

SEQ ID NO: 349256 - RNA, 22 nt, Human
guccaggucuggacccugagcc

SEQ ID NO: 349257 - RNA, 22 nt, Human
ggccaggcugguuccuugaccu

SEQ ID NO: 349258 - RNA, 22 nt, Human
uguuaaauguuccuuuacugga

SEQ ID NO: 349259 - RNA, 22 nt, Human
cuacagaauggagggucagaga

SEQ ID NO: 349260 - RNA, 22 nt, Human
acauguaaaaggaacaugcaug

SEQ ID NO: 349261 - RNA, 22 nt, Human
guaacaaaguuucuaggugcug

SEQ ID NO: 349262 - RNA, 22 nt, Human
auucauuccaggucagucagac

SEQ ID NO: 349263 - RNA, 21 nt, Human
ggcagccugacccccagagag

SEQ ID NO: 349264 - RNA, 22 nt, Human
ugaagcaggguggccagauugu

SEQ ID NO: 349265 - RNA, 22 nt, Human
cagucccagcugcucagaaggc

SEQ ID NO: 349266 - RNA, 22 nt, Human
uuuccuucaucaucugagagcu

SEQ ID NO: 349267 - RNA, 22 nt, Human
aaggcagcaacuaauggaucuc

SEQ ID NO: 349268 - RNA, 22 nt, Human
agcugcccagcuaggaagaagg

SEQ ID NO: 349269 - RNA, 22 nt, Human
uggcucuguuuuaugaguacca

SEQ ID NO: 349270 - RNA, 22 nt, Human
gcucucuggaggccauggacag

SEQ ID NO: 349271 - RNA, 22 nt, Human
aggcugaggagggauguugcuu

SEQ ID NO: 349272 - RNA, 22 nt, Human
cauugacaguucuuuaaguugc

SEQ ID NO: 349273 - RNA, 22 nt, Human
agggacaguuacaucaucagac

SEQ ID NO: 349274 - RNA, 22 nt, Human
gcagggcagcuuagucccuguc

SEQ ID NO: 349275 - RNA, 20 nt, Human
ccagagaguagguuagugau

SEQ ID NO: 349276 - RNA, 22 nt, Human
uauucacaggcuggagugaugu

SEQ ID NO: 349277 - RNA, 22 nt, Human
cucucugguacauagaguuugg

SEQ ID NO: 349278 - RNA, 19 nt, Human
acagaaauuaguuauuuuc

SEQ ID NO: 349279 - RNA, 22 nt, Human
ggccucugccccagccacaccu

SEQ ID NO: 349280 - RNA, 22 nt, Human
gugcuuccugccuggugccuuu

SEQ ID NO: 349281 - RNA, 23 nt, Human
aggaacugaggccuagggaggua

SEQ ID NO: 349282 - RNA, 22 nt, Human
agcagcucacaggauuccugaa

SEQ ID NO: 349283 - RNA, 22 nt, Human
agggcuccuccccggccuccac

SEQ ID NO: 349284 - RNA, 22 nt, Human
uguuuuauuucuccaagaggga

SEQ ID NO: 349285 - RNA, 22 nt, Human
aagcuggagaguuaggugaaua

SEQ ID NO: 349286 - RNA, 22 nt, Human
aguucacagccauguucaugug

SEQ ID NO: 349287 - RNA, 21 nt, Human
uuuauguacuucauagaguag

SEQ ID NO: 349288 - RNA, 22 nt, Human
uccaggagaccagauguaggcc

SEQ ID NO: 349289 - RNA, 22 nt, Human
cauuuguuaauuacuauuaucu

SEQ ID NO: 349290 - RNA, 22 nt, Human
ccaggccuggccaggggaugcc

SEQ ID NO: 349291 - RNA, 22 nt, Human
ucaaagcuuagauaauuucuuu

SEQ ID NO: 349292 - RNA, 22 nt, Human
uccuugaagaaugauucuugga

SEQ ID NO: 349293 - RNA, 22 nt, Human
uggcagugccccuugaccagug

SEQ ID NO: 349294 - RNA, 21 nt, Human
ucagcuuugcaacugcacauc

SEQ ID NO: 349295 - RNA, 22 nt, Human
ccaggagccacucaggcccaca

SEQ ID NO: 349296 - RNA, 22 nt, Human
agccugguuuaagcauuuuaua

SEQ ID NO: 349297 - RNA, 22 nt, Human
ggagcagagcauuucacagccu

SEQ ID NO: 349298 - RNA, 20 nt, Human
uuggucagugguucaguuug

SEQ ID NO: 349299 - RNA, 22 nt, Human
cauggcaggaggcugcuggcag

SEQ ID NO: 349300 - RNA, 23 nt, Human
uaguuauuuucucuguaauuugc

SEQ ID NO: 349301 - RNA, 22 nt, Human
uucauucauuacgugccaggca

SEQ ID NO: 349302 - RNA, 22 nt, Human
guucuucaucauuaacacucug

SEQ ID NO: 349303 - RNA, 22 nt, Human
aucuggcuugacuuugcgacuu

SEQ ID NO: 349304 - RNA, 22 nt, Human
gaaaucugucuuuguuugaaua

SEQ ID NO: 349305 - RNA, 22 nt, Human
gcagugaagccagaucugaaau

SEQ ID NO: 349306 - RNA, 20 nt, Human
uggagcugugguaaggagca

SEQ ID NO: 349307 - RNA, 22 nt, Human
cugcagccucaaccuccugagc

SEQ ID NO: 349308 - RNA, 22 nt, Human
uucuuaaaacuuauggacaggu

SEQ ID NO: 349309 - RNA, 22 nt, Human
uacaaagucaccagcuucuugc

SEQ ID NO: 349310 - RNA, 22 nt, Human
gcugccugguuucucagcugca

SEQ ID NO: 349311 - RNA, 22 nt, Human
uuucuguagggauuucacaguu

SEQ ID NO: 349312 - RNA, 22 nt, Human
aucagaagaaauggaugugacu

SEQ ID NO: 349313 - RNA, 22 nt, Human
gccuggagaccugcuccucuac

SEQ ID NO: 349314 - RNA, 22 nt, Human
augggcuguccuaguccagccc

SEQ ID NO: 349315 - RNA, 22 nt, Human
gugccucagcaccgccugcagc

SEQ ID NO: 349316 - RNA, 21 nt, Human
ugaaugaggaggauggcauuu

SEQ ID NO: 349317 - RNA, 22 nt, Human
gcaggggcuaaggacacagaga

SEQ ID NO: 349318 - RNA, 22 nt, Human
ucaggagacuuaugucacagug

SEQ ID NO: 349319 - RNA, 22 nt, Human
ccagucacuggaaaaugggaau

SEQ ID NO: 349320 - RNA, 22 nt, Human
cuggccuggcaggggaccucua

SEQ ID NO: 349321 - RNA, 22 nt, Human
aaaugcauggcuguuuuaaagc

SEQ ID NO: 349322 - RNA, 22 nt, Human
uccaggcacgaggcccugugca

SEQ ID NO: 349323 - RNA, 22 nt, Human
gaaggaagucauuagugcagac

SEQ ID NO: 349324 - RNA, 22 nt, Human
ucuaggagcaugaagggaaggc

SEQ ID NO: 349325 - RNA, 22 nt, Human
ggggacugccuuccacagacac

SEQ ID NO: 349326 - RNA, 22 nt, Human
uucuacaauaugaauaaugaag

SEQ ID NO: 349327 - RNA, 22 nt, Human
ggcaggcugggugucauggagu

SEQ ID NO: 349328 - RNA, 22 nt, Human
cugucauuuaagacauucugga

SEQ ID NO: 349329 - RNA, 22 nt, Human
guuuagaauucuaacuuuaagg

SEQ ID NO: 349330 - RNA, 18 nt, Human
agggaucaucacugcagc

SEQ ID NO: 349331 - RNA, 22 nt, Human
agaggccaguggcugugcuguc

SEQ ID NO: 349332 - RNA, 22 nt, Human
ugcuuuaaccaucuuguuugga

SEQ ID NO: 349333 - RNA, 22 nt, Human
aaauacugucucugagagagcc

SEQ ID NO: 349334 - RNA, 22 nt, Human
caugcuguguguuuuagcucca

SEQ ID NO: 349335 - RNA, 22 nt, Human
gacagggccgcagauggagacu

SEQ ID NO: 349336 - RNA, 21 nt, Human
ccaggcagagcugugaguucu

SEQ ID NO: 349337 - RNA, 22 nt, Human
gcgagggcacgcgguugaaggc

SEQ ID NO: 349338 - RNA, 22 nt, Human
acagaaauuagcagugaguuua

SEQ ID NO: 349339 - RNA, 22 nt, Human
cauuagggccaccauaacaaaa

SEQ ID NO: 349340 - RNA, 22 nt, Human
uauuugauagagauaaaugaua

SEQ ID NO: 349341 - RNA, 22 nt, Human
ucccagaguauuagcaauugcu

SEQ ID NO: 349342 - RNA, 22 nt, Human
ugggcaggggcccugcuuccgu

SEQ ID NO: 349343 - RNA, 18 nt, Human
gccugccuagagcuugcc

SEQ ID NO: 349344 - RNA, 22 nt, Human
gaaguccucaaugcauugucuu

SEQ ID NO: 349345 - RNA, 21 nt, Human
cagaaguaaggguaacuucuc

SEQ ID NO: 349346 - RNA, 22 nt, Human
ccagggcaggggcuggaguuca

SEQ ID NO: 349347 - RNA, 22 nt, Human
uugaaaguuaucuagauucuga

SEQ ID NO: 349348 - RNA, 22 nt, Human
ggggcuguuuuuggaauggcug

SEQ ID NO: 349349 - RNA, 22 nt, Human
ggaugcaggaguugaagaagga

SEQ ID NO: 349350 - RNA, 22 nt, Human
ggugguggagccagcugggagu

SEQ ID NO: 349351 - RNA, 22 nt, Human
gagguggaaggcaggaacaaau

SEQ ID NO: 349352 - RNA, 21 nt, Human
aucaccagcagaagcugcaga

SEQ ID NO: 349353 - RNA, 22 nt, Human
uaauuuaauuccauggauucua

SEQ ID NO: 349354 - RNA, 20 nt, Human
aaacauucauguacaaguga

SEQ ID NO: 349355 - RNA, 22 nt, Human
cacagaggaaaggcaguuggua

SEQ ID NO: 349356 - RNA, 22 nt, Human
cagcagccuacaaugcacagaa

SEQ ID NO: 349357 - RNA, 22 nt, Human
gagacacaggugguuccuguca

SEQ ID NO: 349358 - RNA, 22 nt, Human
gugucacaugguuuacugcagc

SEQ ID NO: 349359 - RNA, 22 nt, Human
gccagagcaugcacugccugca

SEQ ID NO: 349360 - RNA, 22 nt, Human
ucacuuauaaaaugcaagaucu

SEQ ID NO: 349361 - RNA, 22 nt, Human
ugcaggcucacccuggagcuga

SEQ ID NO: 349362 - RNA, 22 nt, Human
uggauuuaauggaugaggggca

SEQ ID NO: 349363 - RNA, 22 nt, Human
uugcaaaggggaauaaagcaau

SEQ ID NO: 349364 - RNA, 22 nt, Human
gcagccugaugaucuggguugu

SEQ ID NO: 349365 - RNA, 22 nt, Human
acaaaggcaggauugacuuagu

SEQ ID NO: 349366 - RNA, 22 nt, Human
uacuuuggauccuuacaauagc

SEQ ID NO: 349367 - RNA, 21 nt, Human
agcagaggcagaauguaugca

SEQ ID NO: 349368 - RNA, 22 nt, Human
ugugcugguacaugugaggaug

SEQ ID NO: 349369 - RNA, 23 nt, Human
cauuucaacgaauuuuccuucug

SEQ ID NO: 349370 - RNA, 22 nt, Human
cagaggcugcucuggguggcau

SEQ ID NO: 349371 - RNA, 22 nt, Human
gcuuuuauugucuuuacgacga

SEQ ID NO: 349372 - RNA, 22 nt, Human
uuuuaugugcuggacuggcagu

SEQ ID NO: 349373 - RNA, 22 nt, Human
ucaugaauauugaaugcuucau

SEQ ID NO: 349374 - RNA, 21 nt, Human
ucauuuuuauugcuaccuugc

SEQ ID NO: 349375 - RNA, 22 nt, Human
gcaggcagucaucuuucauauu

SEQ ID NO: 349376 - RNA, 21 nt, Human
aacauuucaggauccaaauug

SEQ ID NO: 349377 - RNA, 22 nt, Human
aagggcucugugcuugucccau

SEQ ID NO: 349378 - RNA, 22 nt, Human
ccugggucuugguucaugcucu

SEQ ID NO: 349379 - RNA, 22 nt, Human
agaaggccuaacuugggggcaa

SEQ ID NO: 349380 - RNA, 22 nt, Human
cauuaucugccauugacaccau

SEQ ID NO: 349381 - RNA, 22 nt, Human
gaggcagcucuucugaaugggg

SEQ ID NO: 349382 - RNA, 22 nt, Human
cagaggguugucaggcgccuug

SEQ ID NO: 349383 - RNA, 18 nt, Human
cugugcagcaaacugagc

SEQ ID NO: 349384 - RNA, 22 nt, Human
aaucuguuuaguucugcguaug

SEQ ID NO: 349385 - RNA, 22 nt, Human
caaaguauauuggauugaaugg

SEQ ID NO: 349386 - RNA, 22 nt, Human
aggccuuccucggagacaggga

SEQ ID NO: 349387 - RNA, 22 nt, Human
gcuuuaaugcuucguggggcca

SEQ ID NO: 349388 - RNA, 22 nt, Human
uccagcuuauagguagauuuaa

SEQ ID NO: 349389 - RNA, 21 nt, Human
gcccucaggggaggauggccu

SEQ ID NO: 349390 - RNA, 22 nt, Human
ugcugccagccaggccauggag

SEQ ID NO: 349391 - RNA, 22 nt, Human
cuggccacaugugugcugagca

SEQ ID NO: 349392 - RNA, 22 nt, Human
uggagggcucuuucaccuggua

SEQ ID NO: 349393 - RNA, 22 nt, Human
uggaggagggcuggugucugua

SEQ ID NO: 349394 - RNA, 22 nt, Human
aaguccuuggagaauagaaagg

SEQ ID NO: 349395 - RNA, 22 nt, Human
acccaggagguggaggcugcag

SEQ ID NO: 349396 - RNA, 22 nt, Human
cagagauuauuauaacuaauua

SEQ ID NO: 349397 - RNA, 22 nt, Human
guguccagagaaacucacagcu

SEQ ID NO: 349398 - RNA, 22 nt, Human
aggaggcuguggagcacuccau

SEQ ID NO: 349399 - RNA, 22 nt, Human
cacugaaauauuaauaucuuau

SEQ ID NO: 349400 - RNA, 22 nt, Human
gggcaugagagggcagcuggca

SEQ ID NO: 349401 - RNA, 22 nt, Human
ucauccuuuugcaugggaaggc

SEQ ID NO: 349402 - RNA, 22 nt, Human
caucagaagaaagacaaaugau

SEQ ID NO: 349403 - RNA, 22 nt, Human
ucuaauccuugcuaccugggug

SEQ ID NO: 349404 - RNA, 22 nt, Human
aguugaagguuggcugauccau

SEQ ID NO: 349405 - RNA, 22 nt, Human
gagcucccaggccccagcaagg

SEQ ID NO: 349406 - RNA, 22 nt, Human
aacagcaauagcacuauucauu

SEQ ID NO: 349407 - RNA, 22 nt, Human
uggagcuggaauuugagcugga

SEQ ID NO: 349408 - RNA, 22 nt, Human
ucuggcucugaauucacuucug

SEQ ID NO: 349409 - RNA, 22 nt, Human
uacuaaacccucgauggaucuu

SEQ ID NO: 349410 - RNA, 22 nt, Human
ucugaagggcugaguggaggag

SEQ ID NO: 349411 - RNA, 19 nt, Human
ucucacaucagcuccuagc

SEQ ID NO: 349412 - RNA, 22 nt, Human
ggcugaaggaugaaagcugcag

SEQ ID NO: 349413 - RNA, 22 nt, Human
cugagauggccacugggucuca

SEQ ID NO: 349414 - RNA, 22 nt, Human
ggcaagaaggcuucagguagcu

SEQ ID NO: 349415 - RNA, 22 nt, Human
ugcagaagaaaacagcugugug

SEQ ID NO: 349416 - RNA, 22 nt, Human
gagucuuugguaaagucugcug

SEQ ID NO: 349417 - RNA, 22 nt, Human
cacuuaagcaguuaauuuaucu

SEQ ID NO: 349418 - RNA, 22 nt, Human
gggagccagcagggcauggagc

SEQ ID NO: 349419 - RNA, 22 nt, Human
agccugagugcuuaggacuguu

SEQ ID NO: 349420 - RNA, 22 nt, Human
ucagagcuaaggggagagcaaa

SEQ ID NO: 349421 - RNA, 21 nt, Human
aggagggcacaaggccaggaa

SEQ ID NO: 349422 - RNA, 22 nt, Human
ucagcagggagaggagaaugca

SEQ ID NO: 349423 - RNA, 22 nt, Human
gcagcuggggccacacuuaggc

SEQ ID NO: 349424 - RNA, 22 nt, Human
aagcaauaagccagauuuggau

SEQ ID NO: 349425 - RNA, 22 nt, Human
gggggcuggacuuucccacaca

SEQ ID NO: 349426 - RNA, 22 nt, Human
gagcugccuacauugccaagag

SEQ ID NO: 349427 - RNA, 22 nt, Human
cagcugccugcaacacaagcuu

SEQ ID NO: 349428 - RNA, 23 nt, Human
ugcugguguuuuugggaccaggg

SEQ ID NO: 349429 - RNA, 19 nt, Human
ggcuggaguggccaucugu

SEQ ID NO: 349430 - RNA, 22 nt, Human
aauauuuguuaguguuuuaaug

SEQ ID NO: 349431 - RNA, 23 nt, Human
ugcugggguaguuuguggcacag

SEQ ID NO: 349432 - RNA, 22 nt, Human
aaaggaagaugccaggacucug

SEQ ID NO: 349433 - RNA, 23 nt, Human
gccucuggagccccagugcucag

SEQ ID NO: 349434 - RNA, 21 nt, Human
uuuuauugaugaauggccacu

SEQ ID NO: 349435 - RNA, 22 nt, Human
uaaucuacuguuuauaugaaau

SEQ ID NO: 349436 - RNA, 22 nt, Human
uacauggguagguuaagucaua

SEQ ID NO: 349437 - RNA, 22 nt, Human
ucuguucagcugccucagggua

SEQ ID NO: 349438 - RNA, 22 nt, Human
gcagcuccuccugggcuggaga

SEQ ID NO: 349439 - RNA, 22 nt, Human
auaaagauuuuuaggcauuucu

SEQ ID NO: 349440 - RNA, 22 nt, Human
ucaaugauagacaagaucuaag

SEQ ID NO: 349441 - RNA, 22 nt, Human
uucaagauccagcacaacagug

SEQ ID NO: 349442 - RNA, 22 nt, Human
ucaggagaacuuccuucuaccc

SEQ ID NO: 349443 - RNA, 22 nt, Human
caggaagauuagaccaagagcu

SEQ ID NO: 349444 - RNA, 22 nt, Human
agugucugaaccaccggggcau

SEQ ID NO: 349445 - RNA, 22 nt, Human
gcagggcaguaagagcuagagu

SEQ ID NO: 349446 - RNA, 22 nt, Human
cuggcuccuccaaggccuggag

SEQ ID NO: 349447 - RNA, 22 nt, Human
cucauacauaugccauuccugc

SEQ ID NO: 349448 - RNA, 22 nt, Human
cagucaccugaagacuugacca

SEQ ID NO: 349449 - RNA, 22 nt, Human
uuugaaugcaggacauacagaa

SEQ ID NO: 349450 - RNA, 22 nt, Human
ugcaccccauuuuacauuuaca

SEQ ID NO: 349451 - RNA, 22 nt, Human
aggaagcuaaccagggagugag

SEQ ID NO: 349452 - RNA, 22 nt, Human
aaauguaguauguugcauguau

SEQ ID NO: 349453 - RNA, 22 nt, Human
ugucagaggcucagggucucag

SEQ ID NO: 349454 - RNA, 22 nt, Human
uagaaagcuugggguguuuaaa

SEQ ID NO: 349455 - RNA, 22 nt, Human
uuucuaaaugguggcugcauug

SEQ ID NO: 349456 - RNA, 21 nt, Human
cagaggccucaugcucugugc

SEQ ID NO: 349457 - RNA, 22 nt, Human
cagagaaagaagcccauucauu

SEQ ID NO: 349458 - RNA, 22 nt, Human
gcccaguaguucaagguugcag

SEQ ID NO: 349459 - RNA, 21 nt, Human
gagugcagcaagguagagucu

SEQ ID NO: 349460 - RNA, 22 nt, Human
caaggccacuccagagacuggu

SEQ ID NO: 349461 - RNA, 22 nt, Human
gcugggaggaucucucccuguc

SEQ ID NO: 349462 - RNA, 22 nt, Human
agccaggauuggcugagccuua

SEQ ID NO: 349463 - RNA, 23 nt, Human
aaauucaguccuucaacucugag

SEQ ID NO: 349464 - RNA, 22 nt, Human
agggcagcucucaccucuggcc

SEQ ID NO: 349465 - RNA, 22 nt, Human
cuuuggcacagucucauuugau

SEQ ID NO: 349466 - RNA, 20 nt, Human
gcugccuguuucuguaagua

SEQ ID NO: 349467 - RNA, 22 nt, Human
uguaguaagugcgcaauaaaua

SEQ ID NO: 349468 - RNA, 22 nt, Human
uccucagggcggccuccgucuu

SEQ ID NO: 349469 - RNA, 19 nt, Human
uauuucaaagugccgucua

SEQ ID NO: 349470 - RNA, 22 nt, Human
cccugcagaccaaugccauaga

SEQ ID NO: 349471 - RNA, 22 nt, Human
ugugaauaaugccgcaauaaac

SEQ ID NO: 349472 - RNA, 22 nt, Human
gggcugacucugcacugagcca

SEQ ID NO: 349473 - RNA, 21 nt, Human
cucaggaucuuauauauuagu

SEQ ID NO: 349474 - RNA, 22 nt, Human
caggggaagaugccaagggaga

SEQ ID NO: 349475 - RNA, 22 nt, Human
cagggugccucccgcucgccgg

SEQ ID NO: 349476 - RNA, 22 nt, Human
aguguccccuacagaggcauuc

SEQ ID NO: 349477 - RNA, 19 nt, Human
cacacccaugcuugccaag

SEQ ID NO: 349478 - RNA, 20 nt, Human
gggugagauguaggagaggg

SEQ ID NO: 349479 - RNA, 22 nt, Human
accuugaugccuuuccaagaug

SEQ ID NO: 349480 - RNA, 22 nt, Human
ugaaggccucugguacaugcca

SEQ ID NO: 349481 - RNA, 22 nt, Human
uuugcauuucuaaugagcuccg

SEQ ID NO: 349482 - RNA, 22 nt, Human
uauaaaauggcaucagcuccaa

SEQ ID NO: 349483 - RNA, 22 nt, Human
ugaggcucaagaaagauuuguu

SEQ ID NO: 349484 - RNA, 22 nt, Human
uccuuugacuucuugcagucca

SEQ ID NO: 349485 - RNA, 22 nt, Human
gccuggagugguccugcugccc

SEQ ID NO: 349486 - RNA, 22 nt, Human
gaggagcaugggaaggcucugg

SEQ ID NO: 349487 - RNA, 22 nt, Human
cacagguguaugaauaugucca

SEQ ID NO: 349488 - RNA, 22 nt, Human
gcugcuccgucugagcucuggu

SEQ ID NO: 349489 - RNA, 22 nt, Human
gagagaaaugugcaguuugggc

SEQ ID NO: 349490 - RNA, 22 nt, Human
aguggagaauaugcagaaagcc

SEQ ID NO: 349491 - RNA, 22 nt, Human
ucugcaggcuuggaguggcagc

SEQ ID NO: 349492 - RNA, 22 nt, Human
uauucacagcugccgcacucag

SEQ ID NO: 349493 - RNA, 22 nt, Human
ucuuggagaauggcagagaagc

SEQ ID NO: 349494 - RNA, 22 nt, Human
auuuuucucuuuccacugagau

SEQ ID NO: 349495 - RNA, 22 nt, Human
augaaaauucuaugcaggccag

SEQ ID NO: 349496 - RNA, 22 nt, Human
cacccuagcugucauuucaguu

SEQ ID NO: 349497 - RNA, 22 nt, Human
agugcagagagcaauacucuac

SEQ ID NO: 349498 - RNA, 22 nt, Human
gauggcaggugauagccgaguc

SEQ ID NO: 349499 - RNA, 22 nt, Human
gcagccagggagagaaccaggg

SEQ ID NO: 349500 - RNA, 20 nt, Human
ucauccaggacaggaguggc

SEQ ID NO: 349501 - RNA, 22 nt, Human
aggcccaguccucugccgucug

SEQ ID NO: 349502 - RNA, 22 nt, Human
aauauaugagggagcuauuuga

SEQ ID NO: 349503 - RNA, 22 nt, Human
ugccaggcuuuggucaaaggcu

SEQ ID NO: 349504 - RNA, 22 nt, Human
acaacuuuucuaucauguggaa

SEQ ID NO: 349505 - RNA, 22 nt, Human
agaaaugaagagagucaagguu

SEQ ID NO: 349506 - RNA, 22 nt, Human
cauuugaaccuggauguucuua

SEQ ID NO: 349507 - RNA, 22 nt, Human
uguccuuuuggcugucuauggu

SEQ ID NO: 349508 - RNA, 22 nt, Human
cugcccugucugcagccuggcu

SEQ ID NO: 349509 - RNA, 21 nt, Human
ggacagcugcgcgcagggcuc

SEQ ID NO: 349510 - RNA, 22 nt, Human
accugcagcugagaaaaugacu

SEQ ID NO: 349511 - RNA, 22 nt, Human
gcagagugaggaagagcuucca

SEQ ID NO: 349512 - RNA, 23 nt, Human
gccuucagcucgggaaggcuccc

SEQ ID NO: 349513 - RNA, 22 nt, Human
uggcugagugaacauguccauu

SEQ ID NO: 349514 - RNA, 22 nt, Human
gagagggauacugaguuuuggu

SEQ ID NO: 349515 - RNA, 22 nt, Human
gguuugcauucugaaaggcuca

SEQ ID NO: 349516 - RNA, 22 nt, Human
agggaguuagaaauccaggaua

SEQ ID NO: 349517 - RNA, 22 nt, Human
agggcccuaaggaaggcacaca

SEQ ID NO: 349518 - RNA, 22 nt, Human
ggggugggcgugcagggacacc

SEQ ID NO: 349519 - RNA, 18 nt, Human
uugagggaggggcagagu

SEQ ID NO: 349520 - RNA, 22 nt, Human
uacagauauagagauuuauaga

SEQ ID NO: 349521 - RNA, 22 nt, Human
cuguuauuucugccaggugagu

SEQ ID NO: 349522 - RNA, 21 nt, Human
uauuugcugccaucuuugagg

SEQ ID NO: 349523 - RNA, 22 nt, Human
accaggaguaacagugaguggu

SEQ ID NO: 349524 - RNA, 22 nt, Human
gcugccacauuuucaggacuaa

SEQ ID NO: 349525 - RNA, 23 nt, Human
gguggcaggaguggaugcugagc

SEQ ID NO: 349526 - RNA, 22 nt, Human
uuaauuaaauucaugagcauug

SEQ ID NO: 349527 - RNA, 22 nt, Human
ggagaaagcuguaguggaaugu

SEQ ID NO: 349528 - RNA, 22 nt, Human
cugggcugcgggcgccccucca

SEQ ID NO: 349529 - RNA, 22 nt, Human
uccagggaucuuuagagucuuu

SEQ ID NO: 349530 - RNA, 22 nt, Human
uuauugccugauugaggucauu

SEQ ID NO: 349531 - RNA, 22 nt, Human
gcugggcagccccuacagagag

SEQ ID NO: 349532 - RNA, 19 nt, Human
ccagagacauuggcaucuu

SEQ ID NO: 349533 - RNA, 22 nt, Human
aagcuggacucugccauuuacu

SEQ ID NO: 349534 - RNA, 22 nt, Human
gcacccaggccggcgacugcag

SEQ ID NO: 349535 - RNA, 22 nt, Human
cauugcacaucugagaagagau

SEQ ID NO: 349536 - RNA, 22 nt, Human
agcugcugaaugacacugcaag

SEQ ID NO: 349537 - RNA, 22 nt, Human
aaggcacuuuuccugagaugau

SEQ ID NO: 349538 - RNA, 22 nt, Human
agcugcagcguucauuuuucca

SEQ ID NO: 349539 - RNA, 22 nt, Human
uuuguuuagaugguaaaucagu

SEQ ID NO: 349540 - RNA, 19 nt, Human
aggagaagacucucucccc

SEQ ID NO: 349541 - RNA, 22 nt, Human
uucaagauaauaggaaugaaaa

SEQ ID NO: 349542 - RNA, 22 nt, Human
uggcuccuaucaaggagugggu

SEQ ID NO: 349543 - RNA, 22 nt, Human
gaggcaggcccugaaugaguca

SEQ ID NO: 349544 - RNA, 22 nt, Human
aagucauugguagcuugauagg

SEQ ID NO: 349545 - RNA, 22 nt, Human
ggcugcugguggaaugguaggc

SEQ ID NO: 349546 - RNA, 22 nt, Human
uucaggaugacaccauguccag

SEQ ID NO: 349547 - RNA, 22 nt, Human
gggcugcugcccaggaggcacc

SEQ ID NO: 349548 - RNA, 18 nt, Human
ucuuuggacaacuacugg

SEQ ID NO: 349549 - RNA, 22 nt, Human
ugaggcucaaggucugguggag

SEQ ID NO: 349550 - RNA, 22 nt, Human
cuggagcucuguguguuccuga

SEQ ID NO: 349551 - RNA, 21 nt, Human
uccuccuucaaguccuggccu

SEQ ID NO: 349552 - RNA, 22 nt, Human
aucaaaguuucccagaaguugu

SEQ ID NO: 349553 - RNA, 22 nt, Human
uaaaucucacuggguauauugg

SEQ ID NO: 349554 - RNA, 22 nt, Human
uuucaaagguggaagagugaau

SEQ ID NO: 349555 - RNA, 20 nt, Human
uuucaguuaucuugaccuuc

SEQ ID NO: 349556 - RNA, 22 nt, Human
uauguacauguuaaagggcaaa

SEQ ID NO: 349557 - RNA, 22 nt, Human
cagaauuuaaguggauuauucu

SEQ ID NO: 349558 - RNA, 22 nt, Human
uggggacacagagguucguugg

SEQ ID NO: 349559 - RNA, 22 nt, Human
augcugugccuucucugugcca

SEQ ID NO: 349560 - RNA, 22 nt, Human
ccugccuggcugucagcagagc

SEQ ID NO: 349561 - RNA, 22 nt, Human
uuuccucugacugcuccccugc

SEQ ID NO: 349562 - RNA, 23 nt, Human
ugggcagcuucugcaugcccacc

SEQ ID NO: 349563 - RNA, 22 nt, Human
gauuucaaccuaacaguaugac

SEQ ID NO: 349564 - RNA, 20 nt, Human
augugagggguugaaguggg

SEQ ID NO: 349565 - RNA, 22 nt, Human
ucugguuagccaauaaugccaa

SEQ ID NO: 349566 - RNA, 22 nt, Human
caaacauucaaguacaagucuu

SEQ ID NO: 349567 - RNA, 22 nt, Human
cagcucucacacccuccuccca

SEQ ID NO: 349568 - RNA, 22 nt, Human
ggcuuccuggggccuccugcaa

SEQ ID NO: 349569 - RNA, 22 nt, Human
ggagcagggcagugaauucugg

SEQ ID NO: 349570 - RNA, 22 nt, Human
uagaauucauguuacuguuagc

SEQ ID NO: 349571 - RNA, 20 nt, Human
uuucacagucccuguuuccu

SEQ ID NO: 349572 - RNA, 22 nt, Human
aagcagggugucuugacccaug

SEQ ID NO: 349573 - RNA, 22 nt, Human
aaggccugaacaugaggagaug

SEQ ID NO: 349574 - RNA, 22 nt, Human
uuucagacagauucuucucagu

SEQ ID NO: 349575 - RNA, 22 nt, Human
caggagaagguuuggagugcag

SEQ ID NO: 349576 - RNA, 22 nt, Human
aggcacugacagauucuguguc

SEQ ID NO: 349577 - RNA, 22 nt, Human
aucagugcuaaagcaaaugccc

SEQ ID NO: 349578 - RNA, 22 nt, Human
acucaggaaaugagaggcucuc

SEQ ID NO: 349579 - RNA, 22 nt, Human
cugccaggccucaucccagcca

SEQ ID NO: 349580 - RNA, 22 nt, Human
ucucacuggguauaaaugagua

SEQ ID NO: 349581 - RNA, 22 nt, Human
gcagggcaucccugagcgggug

SEQ ID NO: 349582 - RNA, 22 nt, Human
cacugcuuauaaauucuaggca

SEQ ID NO: 349583 - RNA, 18 nt, Human
caauuucauccuuaagcc

SEQ ID NO: 349584 - RNA, 22 nt, Human
aaacuuuguucgucugaugugg

SEQ ID NO: 349585 - RNA, 22 nt, Human
cugagggcaugaacauuccaua

SEQ ID NO: 349586 - RNA, 22 nt, Human
uucacagaauggcaaguuaugg

SEQ ID NO: 349587 - RNA, 22 nt, Human
ucagcuuugccaccagcuguaa

SEQ ID NO: 349588 - RNA, 22 nt, Human
uuauuagcugggcuucagggug

SEQ ID NO: 349589 - RNA, 22 nt, Human
aggcuuccucgugccuuagaua

SEQ ID NO: 349590 - RNA, 22 nt, Human
acacauauucauauguacuuac

SEQ ID NO: 349591 - RNA, 22 nt, Human
aggagcugaagucucugcacuc

SEQ ID NO: 349592 - RNA, 22 nt, Human
auuccaaacucuuucccugucg

SEQ ID NO: 349593 - RNA, 21 nt, Human
agcagccauggaugguaugua

SEQ ID NO: 349594 - RNA, 22 nt, Human
agaggugacauaggagaggcuc

SEQ ID NO: 349595 - RNA, 22 nt, Human
gguguagcucugugucccacug

SEQ ID NO: 349596 - RNA, 22 nt, Human
gccacguugccacccgggugac

SEQ ID NO: 349597 - RNA, 22 nt, Human
uuugaaagggaaauaaacuccu

SEQ ID NO: 349598 - RNA, 22 nt, Human
ccagcucccugaagccuggucu

SEQ ID NO: 349599 - RNA, 22 nt, Human
cagaggugcauacaggucauua

SEQ ID NO: 349600 - RNA, 20 nt, Human
cacaggcuauaugagagcca

SEQ ID NO: 349601 - RNA, 19 nt, Human
ucaguggagaaaggggaag

SEQ ID NO: 349602 - RNA, 22 nt, Human
agcuguguggugucugacagcu

SEQ ID NO: 349603 - RNA, 22 nt, Human
cagcuggcuccaccucugggcu

SEQ ID NO: 349604 - RNA, 22 nt, Human
ggcugaaacagauuucaagaca

SEQ ID NO: 349605 - RNA, 22 nt, Human
cccuggagugugacgaggcauu

SEQ ID NO: 349606 - RNA, 22 nt, Human
uaugaacucuggagucugagug

SEQ ID NO: 349607 - RNA, 22 nt, Human
gggauggcucaaaggagucagg

SEQ ID NO: 349608 - RNA, 22 nt, Human
aaagaguucuaugaucuuucca

SEQ ID NO: 349609 - RNA, 22 nt, Human
ccagcagagucuaggaaggagg

SEQ ID NO: 349610 - RNA, 22 nt, Human
auuucaacauucucaguuguag

SEQ ID NO: 349611 - RNA, 22 nt, Human
cuggaagguucuuugugugccu

SEQ ID NO: 349612 - RNA, 21 nt, Human
uggcugaguggaugcaugaau

SEQ ID NO: 349613 - RNA, 22 nt, Human
ccugccugcaaaaugggacaag

SEQ ID NO: 349614 - RNA, 22 nt, Human
cacagguggcuccaaguuagag

SEQ ID NO: 349615 - RNA, 23 nt, Human
cagguggcuccacgagggguggg

SEQ ID NO: 349616 - RNA, 22 nt, Human
ccagcgcuucccaucagggagg

SEQ ID NO: 349617 - RNA, 23 nt, Human
ccaggccucucagagggugugcc

SEQ ID NO: 349618 - RNA, 22 nt, Human
ggagcugggaauuggaucaucu

SEQ ID NO: 349619 - RNA, 23 nt, Human
agagcaucaugaugcuaagucug

SEQ ID NO: 349620 - RNA, 22 nt, Human
guuccauaucacagcagacgaa

SEQ ID NO: 349621 - RNA, 23 nt, Human
aggcagugggggccacuuugcuu

SEQ ID NO: 349622 - RNA, 22 nt, Human
uguucccaagauaagauuauga

SEQ ID NO: 349623 - RNA, 22 nt, Human
agugcuuuagcauccaacuguc

SEQ ID NO: 349624 - RNA, 22 nt, Human
guauuugauagauuucaaagga

SEQ ID NO: 349625 - RNA, 22 nt, Human
gcagagccugacgggauuuuuc

SEQ ID NO: 349626 - RNA, 22 nt, Human
ugaaucaguauaaauucucaaa

SEQ ID NO: 349627 - RNA, 22 nt, Human
aggagcagcuucugaaccaugu

SEQ ID NO: 349628 - RNA, 22 nt, Human
uacaaagugagcaaccucuuuu

SEQ ID NO: 349629 - RNA, 22 nt, Human
cacaugggugugccuggaggaa

SEQ ID NO: 349630 - RNA, 20 nt, Human
ugaaaggugggaauuguggg

SEQ ID NO: 349631 - RNA, 22 nt, Human
aaugcacagcuaaagugguucc

SEQ ID NO: 349632 - RNA, 22 nt, Human
gaaauguguuguucauuucuaa

SEQ ID NO: 349633 - RNA, 22 nt, Human
cauaauuuuuuuaagucagaac

SEQ ID NO: 349634 - RNA, 22 nt, Human
gaccauuucuaggaaucagacu

SEQ ID NO: 349635 - RNA, 22 nt, Human
uggcugagggcacuaugaagcc

SEQ ID NO: 349636 - RNA, 22 nt, Human
uacaguaacauguuguacaagc

SEQ ID NO: 349637 - RNA, 22 nt, Human
ugcuuuauucgacaucugguag

SEQ ID NO: 349638 - RNA, 22 nt, Human
ugaggaagggugugacggcacc

SEQ ID NO: 349639 - RNA, 22 nt, Human
ucauugcaguagggagagaccc

SEQ ID NO: 349640 - RNA, 22 nt, Human
auauauuuacucuccuguugca

SEQ ID NO: 349641 - RNA, 22 nt, Human
cagcugaagagaggugcugagu

SEQ ID NO: 349642 - RNA, 22 nt, Human
acaaagucacaauaauuaaccu

SEQ ID NO: 349643 - RNA, 22 nt, Human
uuugcuauaaaagggucacacg

SEQ ID NO: 349644 - RNA, 22 nt, Human
ggcaaaaaccacaauuacuuuu

SEQ ID NO: 349645 - RNA, 22 nt, Human
ggaccugccagaacucaggcua

SEQ ID NO: 349646 - RNA, 22 nt, Human
uccuggguccauggcagccgaa

SEQ ID NO: 349647 - RNA, 20 nt, Human
aucagcaacugccacucagu

SEQ ID NO: 349648 - RNA, 22 nt, Human
ucauugcagacuaacaaucuca

SEQ ID NO: 349649 - RNA, 22 nt, Human
gauggcaggcaggugaguagag

SEQ ID NO: 349650 - RNA, 22 nt, Human
gggaagggacuuguuuaagguc

SEQ ID NO: 349651 - RNA, 22 nt, Human
ucacagacacagggagaagcau

SEQ ID NO: 349652 - RNA, 22 nt, Human
cacucugagaaguacaagcucc

SEQ ID NO: 349653 - RNA, 22 nt, Human
cagcugcuguuacugcuuauua

SEQ ID NO: 349654 - RNA, 22 nt, Human
ucugggaauuuauuggcacuuu

SEQ ID NO: 349655 - RNA, 22 nt, Human
ugaaggaagaauaggcaguguu

SEQ ID NO: 349656 - RNA, 22 nt, Human
gauggcuuugugcaccaugauu

SEQ ID NO: 349657 - RNA, 21 nt, Human
ugggagagggcucagcuaccc

SEQ ID NO: 349658 - RNA, 22 nt, Human
uucugaaccauugagcacugcc

SEQ ID NO: 349659 - RNA, 22 nt, Human
aggcacugauucuguuuuccau

SEQ ID NO: 349660 - RNA, 23 nt, Human
ggucccaguggagaggccucacc

SEQ ID NO: 349661 - RNA, 22 nt, Human
uguuacacagcagaauagcaag

SEQ ID NO: 349662 - RNA, 23 nt, Human
aagcugccagucugaagccuggg

SEQ ID NO: 349663 - RNA, 22 nt, Human
agcagcaugaugacagagucuc

SEQ ID NO: 349664 - RNA, 22 nt, Human
gccuggagcccaguguggggcu

SEQ ID NO: 349665 - RNA, 22 nt, Human
ggagugggaacaaugacauggu

SEQ ID NO: 349666 - RNA, 22 nt, Human
ggcugcuggaagacugaacaag

SEQ ID NO: 349667 - RNA, 22 nt, Human
ccuggcaguuuugcccaggauu

SEQ ID NO: 349668 - RNA, 20 nt, Human
gggugggagagucugagggu

SEQ ID NO: 349669 - RNA, 22 nt, Human
ugucucaguucccuucucugga

SEQ ID NO: 349670 - RNA, 22 nt, Human
cccaggagguuggggcuacagu

SEQ ID NO: 349671 - RNA, 22 nt, Human
cagggcuggauccuccagacuc

SEQ ID NO: 349672 - RNA, 22 nt, Human
agauggagaaugacaauuaagg

SEQ ID NO: 349673 - RNA, 22 nt, Human
ggauguugauugaauggccauu

SEQ ID NO: 349674 - RNA, 22 nt, Human
gaauuucaagcagugcaauguu

SEQ ID NO: 349675 - RNA, 22 nt, Human
aauauuucuccuucguuauagc

SEQ ID NO: 349676 - RNA, 22 nt, Human
ugcuuuauggauuuguguccug

SEQ ID NO: 349677 - RNA, 22 nt, Human
cuggcugguuacuauuucuggu

SEQ ID NO: 349678 - RNA, 22 nt, Human
ggcagugaaugaaacagaggcu

SEQ ID NO: 349679 - RNA, 22 nt, Human
uuagaaaggaaucuucauuuca

SEQ ID NO: 349680 - RNA, 22 nt, Human
agagcccucuucacugccccuu

SEQ ID NO: 349681 - RNA, 22 nt, Human
ugaauaaacuaugaggaggaau

SEQ ID NO: 349682 - RNA, 22 nt, Human
aggcuucagguuugcuuugcag

SEQ ID NO: 349683 - RNA, 21 nt, Human
ggggcagagcuaggcccugca

SEQ ID NO: 349684 - RNA, 22 nt, Human
uuugcacuagcauuuguccaug

SEQ ID NO: 349685 - RNA, 22 nt, Human
auaaaaguaggaccaacuuaca

SEQ ID NO: 349686 - RNA, 21 nt, Human
agaaaauggcguuuuagauuu

SEQ ID NO: 349687 - RNA, 22 nt, Human
aaugauguauuaguacaacaca

SEQ ID NO: 349688 - RNA, 22 nt, Human
acugugugggccgcucacuggg

SEQ ID NO: 349689 - RNA, 23 nt, Human
agucuucauuguauuuccagacc

SEQ ID NO: 349690 - RNA, 22 nt, Human
cacauaauaaauguuccugaug

SEQ ID NO: 349691 - RNA, 22 nt, Human
gaaugugucacccugucccaug

SEQ ID NO: 349692 - RNA, 22 nt, Human
cugcucuguuucuuagcugggu

SEQ ID NO: 349693 - RNA, 22 nt, Human
cagcugccugucuggaggcaau

SEQ ID NO: 349694 - RNA, 22 nt, Human
ccagggcuggugggagaugcug

SEQ ID NO: 349695 - RNA, 22 nt, Human
auuuaguguauucuaauaugug

SEQ ID NO: 349696 - RNA, 22 nt, Human
auaaagauuucuuuuucucuac

SEQ ID NO: 349697 - RNA, 22 nt, Human
agucuucucauuucacaugcuu

SEQ ID NO: 349698 - RNA, 17 nt, Human
aggaagggcaaguuucu

SEQ ID NO: 349699 - RNA, 22 nt, Human
auucaaguucuucugucuuugc

SEQ ID NO: 349700 - RNA, 22 nt, Human
aggucagcaggccaggggcgaa

SEQ ID NO: 349701 - RNA, 22 nt, Human
aagauuuccuggauguaauucc

SEQ ID NO: 349702 - RNA, 20 nt, Human
cuucuucaguaguuuguucu

SEQ ID NO: 349703 - RNA, 22 nt, Human
gccaggaggggagaguguguca

SEQ ID NO: 349704 - RNA, 22 nt, Human
gagccugaaauacaggucacug

SEQ ID NO: 349705 - RNA, 23 nt, Human
uaagaacagacaagcauuuacau

SEQ ID NO: 349706 - RNA, 22 nt, Human
ugugaaagauacuaggcagagg

SEQ ID NO: 349707 - RNA, 22 nt, Human
guacauuucauuuaaaugaugu

SEQ ID NO: 349708 - RNA, 22 nt, Human
ggcugcagcagagggacucacg

SEQ ID NO: 349709 - RNA, 22 nt, Human
ucacuguugaccuggaaguggg

SEQ ID NO: 349710 - RNA, 22 nt, Human
acauuugacauuuaguaucagc

SEQ ID NO: 349711 - RNA, 22 nt, Human
ugaggcaguugagcuuccugag

SEQ ID NO: 349712 - RNA, 22 nt, Human
ggagcugucuguagggcacagg

SEQ ID NO: 349713 - RNA, 22 nt, Human
uagggcucuggugggcucuguu

SEQ ID NO: 349714 - RNA, 19 nt, Human
ucucuacacuacauuucua

SEQ ID NO: 349715 - RNA, 22 nt, Human
caguaaauuaucucaucucugu

SEQ ID NO: 349716 - RNA, 22 nt, Human
gcaggagccacuucagggaugc

SEQ ID NO: 349717 - RNA, 22 nt, Human
auaugcauguacgugugcacaa

SEQ ID NO: 349718 - RNA, 22 nt, Human
cagcccagcagucuuagccugc

SEQ ID NO: 349719 - RNA, 22 nt, Human
uaucagaaugcagccaugugca

SEQ ID NO: 349720 - RNA, 22 nt, Human
ugacaccacaacuagccauuga

SEQ ID NO: 349721 - RNA, 22 nt, Human
augguuuuccucugcugcuuaa

SEQ ID NO: 349722 - RNA, 22 nt, Human
uagggcucagagaaguggggcc

SEQ ID NO: 349723 - RNA, 22 nt, Human
cuugaaagauuuggccucugug

SEQ ID NO: 349724 - RNA, 22 nt, Human
aucacugucgucaucugagauu

SEQ ID NO: 349725 - RNA, 21 nt, Human
agucccauccgguaagcaagc

SEQ ID NO: 349726 - RNA, 22 nt, Human
aggguggcugaguagauggaag

SEQ ID NO: 349727 - RNA, 22 nt, Human
gacacagcacuguacaaggaau

SEQ ID NO: 349728 - RNA, 22 nt, Human
ggggaccuucccagagcaguug

SEQ ID NO: 349729 - RNA, 22 nt, Human
uggccuuggcagugagaagagu

SEQ ID NO: 349730 - RNA, 22 nt, Human
uggcugaauaaaauaugguguu

SEQ ID NO: 349731 - RNA, 19 nt, Human
gacagugcaguuguaguac

SEQ ID NO: 349732 - RNA, 22 nt, Human
ugcagaagaaugagcuuggagu

SEQ ID NO: 349733 - RNA, 23 nt, Human
gcagagcugcccuauugccuugg

SEQ ID NO: 349734 - RNA, 22 nt, Human
aggcucagcccaagguggagag

SEQ ID NO: 349735 - RNA, 22 nt, Human
gaggcucaguuaugucaucagg

SEQ ID NO: 349736 - RNA, 22 nt, Human
aagauacauaaagguagagucu

SEQ ID NO: 349737 - RNA, 22 nt, Human
ggcagcaugagccuggugaauu

SEQ ID NO: 349738 - RNA, 22 nt, Human
cuguggcuuucucugccuccuu

SEQ ID NO: 349739 - RNA, 21 nt, Human
uggcagagugcagucuauaca

SEQ ID NO: 349740 - RNA, 22 nt, Human
cuggcuguauuaguuugauccu

SEQ ID NO: 349741 - RNA, 22 nt, Human
ucuuagaaauuccccaguggcu

SEQ ID NO: 349742 - RNA, 22 nt, Human
ccagcagcuguggcuuugccuc

SEQ ID NO: 349743 - RNA, 22 nt, Human
aguaaaaucaccaucucuuugu

SEQ ID NO: 349744 - RNA, 22 nt, Human
ggcagauguuauaugaucugag

SEQ ID NO: 349745 - RNA, 22 nt, Human
ccugaggcuuaaucugucccaa

SEQ ID NO: 349746 - RNA, 22 nt, Human
ccagggaguuuccaaucugaga

SEQ ID NO: 349747 - RNA, 20 nt, Human
auguccagugacuggaccau

SEQ ID NO: 349748 - RNA, 22 nt, Human
ugaaaugagauagauaaucagg

SEQ ID NO: 349749 - RNA, 22 nt, Human
uagagcauuuagaggggcagga

SEQ ID NO: 349750 - RNA, 22 nt, Human
aguggcaggaaaguggaagaga

SEQ ID NO: 349751 - RNA, 22 nt, Human
uggaagcacuuggguuuuguug

SEQ ID NO: 349752 - RNA, 22 nt, Human
caggccuccacuccacgcagac

SEQ ID NO: 349753 - RNA, 22 nt, Human
agaggauguucuaggcacucau

SEQ ID NO: 349754 - RNA, 22 nt, Human
agaagaaaugugaaggccacug

SEQ ID NO: 349755 - RNA, 22 nt, Human
ugcaauaaguuguguuaucacu

SEQ ID NO: 349756 - RNA, 22 nt, Human
cagcucaaguuucccaggucag

SEQ ID NO: 349757 - RNA, 22 nt, Human
ccacugucuuuuccaggcugaa

SEQ ID NO: 349758 - RNA, 22 nt, Human
gcugauccuuuuaugucuagcu

SEQ ID NO: 349759 - RNA, 22 nt, Human
ucccagaggcuccagucucuau

SEQ ID NO: 349760 - RNA, 22 nt, Human
ucauccaguaugacuggugucu

SEQ ID NO: 349761 - RNA, 22 nt, Human
cuacauuuuaauaagcugcuua

SEQ ID NO: 349762 - RNA, 22 nt, Human
aauacugucuuucacagauauu

SEQ ID NO: 349763 - RNA, 22 nt, Human
gagucugagaacugggcucagu

SEQ ID NO: 349764 - RNA, 22 nt, Human
cccaugccuucugacucacagg

SEQ ID NO: 349765 - RNA, 22 nt, Human
agggccaccucucuggguuccc

SEQ ID NO: 349766 - RNA, 22 nt, Human
cugagccaaccacagcaggagc

SEQ ID NO: 349767 - RNA, 18 nt, Human
uuugcaaaggaaguaugg

SEQ ID NO: 349768 - RNA, 22 nt, Human
cuccucugucuaccacgagggu

SEQ ID NO: 349769 - RNA, 22 nt, Human
ggagcugaaggggugggcucag

SEQ ID NO: 349770 - RNA, 22 nt, Human
cagcaggaaagacaucugagca

SEQ ID NO: 349771 - RNA, 22 nt, Human
cuccagggagcuguggagguuu

SEQ ID NO: 349772 - RNA, 22 nt, Human
auuggcaguuagugacgaggcu

SEQ ID NO: 349773 - RNA, 22 nt, Human
uucucauucugacucaguguag

SEQ ID NO: 349774 - RNA, 22 nt, Human
ucuguucauaguaguguauaug

SEQ ID NO: 349775 - RNA, 22 nt, Human
auccaaagauggaaagaacuuu

SEQ ID NO: 349776 - RNA, 22 nt, Human
auguuuauguugggcuauauuu

SEQ ID NO: 349777 - RNA, 22 nt, Human
agggccagcccauaaugccaaa

SEQ ID NO: 349778 - RNA, 22 nt, Human
uuucuucauucaccuucacccc

SEQ ID NO: 349779 - RNA, 22 nt, Human
auacagauguugaauguuauau

SEQ ID NO: 349780 - RNA, 22 nt, Human
augaggcauuccacucaaacuc

SEQ ID NO: 349781 - RNA, 22 nt, Human
ugucagagcaaggccaggccag

SEQ ID NO: 349782 - RNA, 22 nt, Human
guauuagggccaaaggcaggaa

SEQ ID NO: 349783 - RNA, 22 nt, Human
cagcuucccuuggcugagcaga

SEQ ID NO: 349784 - RNA, 22 nt, Human
cagagugaacagugggaugugc

SEQ ID NO: 349785 - RNA, 18 nt, Human
aggaaagaaaggcaggug

SEQ ID NO: 349786 - RNA, 22 nt, Human
agagugaaguuuuugaaaguga

SEQ ID NO: 349787 - RNA, 22 nt, Human
agcugccaaguuucucaguuua

SEQ ID NO: 349788 - RNA, 22 nt, Human
ccagcccugucaccaacuggag

SEQ ID NO: 349789 - RNA, 22 nt, Human
gagaaggcugauccuuggaguu

SEQ ID NO: 349790 - RNA, 22 nt, Human
ugacauuuuaucaauaucacag

SEQ ID NO: 349791 - RNA, 22 nt, Human
caaguaaacaauaugugauuca

SEQ ID NO: 349792 - RNA, 22 nt, Human
aggcagaugguaacugugauau

SEQ ID NO: 349793 - RNA, 22 nt, Human
agcugccaggccccugagaacc

SEQ ID NO: 349794 - RNA, 22 nt, Human
gcacagagggcagugagccucu

SEQ ID NO: 349795 - RNA, 22 nt, Human
aaaucagucccucuuggaauuu

SEQ ID NO: 349796 - RNA, 22 nt, Human
cugcugugcuuguggccacccg

SEQ ID NO: 349797 - RNA, 18 nt, Human
ggagccagucugucucug

SEQ ID NO: 349798 - RNA, 22 nt, Human
ucaucacuguaucauugauaga

SEQ ID NO: 349799 - RNA, 22 nt, Human
acagcuuuguuuucccugcuga

SEQ ID NO: 349800 - RNA, 22 nt, Human
gauuucaaggaguuuucacagu

SEQ ID NO: 349801 - RNA, 22 nt, Human
augaggcaaucaugguccaguu

SEQ ID NO: 349802 - RNA, 18 nt, Human
uguagagccagguuugcc

SEQ ID NO: 349803 - RNA, 22 nt, Human
ugcugccauggucgcugguguc

SEQ ID NO: 349804 - RNA, 22 nt, Human
guagcccaccuggggagggcga

SEQ ID NO: 349805 - RNA, 22 nt, Human
cuggaucaugggaaagggauca

SEQ ID NO: 349806 - RNA, 22 nt, Human
agcuggugcugaagcucuugag

SEQ ID NO: 349807 - RNA, 22 nt, Human
ucuccccaaaggacucacucuc

SEQ ID NO: 349808 - RNA, 22 nt, Human
ugcagggaacuuggacagcuag

SEQ ID NO: 349809 - RNA, 22 nt, Human
ggaggaugagcuacgaggagcu

SEQ ID NO: 349810 - RNA, 21 nt, Human
auggagccuaagaguggaggu

SEQ ID NO: 349811 - RNA, 22 nt, Human
uagcagcugugaguaaaagcca

SEQ ID NO: 349812 - RNA, 22 nt, Human
gagccuggccuccugccucagc

SEQ ID NO: 349813 - RNA, 22 nt, Human
ggccuucacgugaccuggcgug

SEQ ID NO: 349814 - RNA, 22 nt, Human
ccuuuauucaauuaguccuaau

SEQ ID NO: 349815 - RNA, 22 nt, Human
aaguucaaggugauaguggcag

SEQ ID NO: 349816 - RNA, 22 nt, Human
acaagcaugggcuuugacauca

SEQ ID NO: 349817 - RNA, 22 nt, Human
gcucuggacuggggccugagaa

SEQ ID NO: 349818 - RNA, 22 nt, Human
aaucaguuguucacucugaaaa

SEQ ID NO: 349819 - RNA, 17 nt, Human
cugagcauccgugcucu

SEQ ID NO: 349820 - RNA, 22 nt, Human
auucuaacacaugcucuaagaa

SEQ ID NO: 349821 - RNA, 22 nt, Human
ucauuucucccggccaaaaacu

SEQ ID NO: 349822 - RNA, 22 nt, Human
ccagcugcugugcagggaggcu

SEQ ID NO: 349823 - RNA, 22 nt, Human
uccagggacagcgcuggagcua

SEQ ID NO: 349824 - RNA, 22 nt, Human
auuaaagacagcagauggaugg

SEQ ID NO: 349825 - RNA, 22 nt, Human
gggccacauugaagggugggua

SEQ ID NO: 349826 - RNA, 20 nt, Human
cugagcccccagccugcagg

SEQ ID NO: 349827 - RNA, 22 nt, Human
auauucacugagcauaaagcca

SEQ ID NO: 349828 - RNA, 19 nt, Human
ucccagagucuagagguug

SEQ ID NO: 349829 - RNA, 22 nt, Human
acacagggcagagagcuggcuc

SEQ ID NO: 349830 - RNA, 22 nt, Human
acaugcauucucuaaaagcaaa

SEQ ID NO: 349831 - RNA, 22 nt, Human
aguccaggaguugggugacauu

SEQ ID NO: 349832 - RNA, 22 nt, Human
gcagcuuucugggacagaaagg

SEQ ID NO: 349833 - RNA, 22 nt, Human
ugccugucuuaauaucuggaaa

SEQ ID NO: 349834 - RNA, 22 nt, Human
agcaggagcccuuaucaccagg

SEQ ID NO: 349835 - RNA, 22 nt, Human
cagggccaugaggcacaggguc

SEQ ID NO: 349836 - RNA, 22 nt, Human
accaggagguguuugcucaagu

SEQ ID NO: 349837 - RNA, 22 nt, Human
ucagagugugacuuggucauga

SEQ ID NO: 349838 - RNA, 22 nt, Human
cuagaaauguagauucuuagug

SEQ ID NO: 349839 - RNA, 22 nt, Human
gcagcugcaauaggcaucaagc

SEQ ID NO: 349840 - RNA, 22 nt, Human
uccuccaggucuaggguggcuu

SEQ ID NO: 349841 - RNA, 22 nt, Human
aggccucacauugggcuucaag

SEQ ID NO: 349842 - RNA, 22 nt, Human
agaagugccgaaaggaagacag

SEQ ID NO: 349843 - RNA, 22 nt, Human
caagagcuacccugugccauau

SEQ ID NO: 349844 - RNA, 22 nt, Human
guggggaaaggaguggggcuca

SEQ ID NO: 349845 - RNA, 22 nt, Human
ugcaguggugguaaagaugcuc

SEQ ID NO: 349846 - RNA, 17 nt, Human
gguguauggggagggaa

SEQ ID NO: 349847 - RNA, 17 nt, Human
agcuccugcccauggcu

SEQ ID NO: 349848 - RNA, 22 nt, Human
ccagagagauugcuucuaaaga

SEQ ID NO: 349849 - RNA, 22 nt, Human
uggcuucuuagaccaguggccu

SEQ ID NO: 349850 - RNA, 22 nt, Human
agauacauuaguaguuacuugu

SEQ ID NO: 349851 - RNA, 17 nt, Human
ugccagccugucccagg

SEQ ID NO: 349852 - RNA, 20 nt, Human
gcccacucuaauccacuguc

SEQ ID NO: 349853 - RNA, 22 nt, Human
aguacuucagaggcugcccagg

SEQ ID NO: 349854 - RNA, 22 nt, Human
uaaagaucuuaggaagauuuuc

SEQ ID NO: 349855 - RNA, 22 nt, Human
cagccagggucaggcagcuucu

SEQ ID NO: 349856 - RNA, 21 nt, Human
cccuugccugcacuccucggc

SEQ ID NO: 349857 - RNA, 22 nt, Human
gaugagggccugguggcugugc

SEQ ID NO: 349858 - RNA, 22 nt, Human
gcagcugagcgugaggaagagu

SEQ ID NO: 349859 - RNA, 22 nt, Human
ggcccacacugacagcugagcu

SEQ ID NO: 349860 - RNA, 17 nt, Human
gcagugaaaagagauca

SEQ ID NO: 349861 - RNA, 22 nt, Human
ggagcagggaauuacagcgcag

SEQ ID NO: 349862 - RNA, 22 nt, Human
uauaguacauggaaucuucaua

SEQ ID NO: 349863 - RNA, 21 nt, Human
cuacagaaucgagcauucugg

SEQ ID NO: 349864 - RNA, 22 nt, Human
gaggcaggcacuguuaucagca

SEQ ID NO: 349865 - RNA, 22 nt, Human
agggaguuccgaucugugcacc

SEQ ID NO: 349866 - RNA, 19 nt, Human
uagcagcugccaaaggaga

SEQ ID NO: 349867 - RNA, 22 nt, Human
cauuuguauagugcuuagacca

SEQ ID NO: 349868 - RNA, 22 nt, Human
uacaaaaaauugauacugacga

SEQ ID NO: 349869 - RNA, 22 nt, Human
ucuucagacuccaaauguuuua

SEQ ID NO: 349870 - RNA, 22 nt, Human
uuugggcaauucagugggaccu

SEQ ID NO: 349871 - RNA, 22 nt, Human
ucaauaauggcaggauaaauuu

SEQ ID NO: 349872 - RNA, 18 nt, Human
aggcaggugcuggaaguc

SEQ ID NO: 349873 - RNA, 22 nt, Human
cacaggagaacccacagauucu

SEQ ID NO: 349874 - RNA, 22 nt, Human
uuauucagauuggcuacaggau

SEQ ID NO: 349875 - RNA, 22 nt, Human
augaacacauguacacauuucu

SEQ ID NO: 349876 - RNA, 22 nt, Human
ggagggaaugucuagcauucuu

SEQ ID NO: 349877 - RNA, 22 nt, Human
ccucaggauacaggagccacag

SEQ ID NO: 349878 - RNA, 22 nt, Human
aucagagacaaaaccagcacuu

SEQ ID NO: 349879 - RNA, 22 nt, Human
ucaggugguccuaagugccauc

SEQ ID NO: 349880 - RNA, 22 nt, Human
ccucccaccauuuagagagagc

SEQ ID NO: 349881 - RNA, 22 nt, Human
ugcagggaggccccgcagcccu

SEQ ID NO: 349882 - RNA, 22 nt, Human
ggcagucuuaucagcauuggac

SEQ ID NO: 349883 - RNA, 19 nt, Human
cugggagguguucagagaa

SEQ ID NO: 349884 - RNA, 17 nt, Human
gcugagaggcagcacag

SEQ ID NO: 349885 - RNA, 22 nt, Human
uuccuucucagcccucgaggau

SEQ ID NO: 349886 - RNA, 22 nt, Human
uacauaauugucuuuguccuca

SEQ ID NO: 349887 - RNA, 22 nt, Human
ggcuuucuaugaacucaaaggc

SEQ ID NO: 349888 - RNA, 22 nt, Human
ugcagggcauaggguccaguuu

SEQ ID NO: 349889 - RNA, 22 nt, Human
cugccucuauaggaguccacca

SEQ ID NO: 349890 - RNA, 22 nt, Human
uccuggaggcaaaugagcacau

SEQ ID NO: 349891 - RNA, 22 nt, Human
accuuucaaaguggcuaucacu

SEQ ID NO: 349892 - RNA, 22 nt, Human
cagcccugagaaggaggaucuc

SEQ ID NO: 349893 - RNA, 22 nt, Human
gaacccaggcuuuugaggcugu

SEQ ID NO: 349894 - RNA, 22 nt, Human
auuaggcauucugaaugagguc

SEQ ID NO: 349895 - RNA, 22 nt, Human
auauaugcauguguacuuaugu

SEQ ID NO: 349896 - RNA, 22 nt, Human
ccuagagcucugcuuuaucuaa

SEQ ID NO: 349897 - RNA, 22 nt, Human
gaggcagcaugguaccuuggag

SEQ ID NO: 349898 - RNA, 22 nt, Human
aagcuuuaaggaauuuuaugga

SEQ ID NO: 349899 - RNA, 22 nt, Human
uuuguaaauagcaguacucaug

SEQ ID NO: 349900 - RNA, 22 nt, Human
acacccagagcgccagugccga

SEQ ID NO: 349901 - RNA, 22 nt, Human
acugugcaugaaccgaaacaaa

SEQ ID NO: 349902 - RNA, 22 nt, Human
uuaucacuuaugagcuuuuugc

SEQ ID NO: 349903 - RNA, 22 nt, Human
acuguucaucucuuagaaagua

SEQ ID NO: 349904 - RNA, 22 nt, Human
gcucccagcauugcugcugaau

SEQ ID NO: 349905 - RNA, 22 nt, Human
cuggcuggccggaggcaucccu

SEQ ID NO: 349906 - RNA, 22 nt, Human
acauuucuuucuauucaguagc

SEQ ID NO: 349907 - RNA, 22 nt, Human
gcugcccagacauugaaucagg

SEQ ID NO: 349908 - RNA, 23 nt, Human
ugcuguccaacagacuggccaug

SEQ ID NO: 349909 - RNA, 22 nt, Human
uguggcaggcaagauguacaga

SEQ ID NO: 349910 - RNA, 21 nt, Human
uuaagagcuuagcaguaggcc

SEQ ID NO: 349911 - RNA, 22 nt, Human
gguccagggaacuuugaaggau

SEQ ID NO: 349912 - RNA, 22 nt, Human
ggcagugaaucugagagccugg

SEQ ID NO: 349913 - RNA, 22 nt, Human
ucccaggaaugucugaaaguga

SEQ ID NO: 349914 - RNA, 22 nt, Human
ccuggagguggagguugcagug

SEQ ID NO: 349915 - RNA, 23 nt, Human
ucagaggaucaucaaacguuuuc

SEQ ID NO: 349916 - RNA, 22 nt, Human
caauuucucuuuauaucucaca

SEQ ID NO: 349917 - RNA, 22 nt, Human
ccagaggucuccugcacgggau

SEQ ID NO: 349918 - RNA, 22 nt, Human
cagugcuccugauguacccuug

SEQ ID NO: 349919 - RNA, 22 nt, Human
ucgggcucgcucuccuagcgga

SEQ ID NO: 349920 - RNA, 22 nt, Human
ccuguucauuuuuugacucugc

SEQ ID NO: 349921 - RNA, 22 nt, Human
caggauggccccggggcugugc

SEQ ID NO: 349922 - RNA, 22 nt, Human
aacucuauuuacccuacuaaac

SEQ ID NO: 349923 - RNA, 22 nt, Human
accagcucagaagccagaaaga

SEQ ID NO: 349924 - RNA, 22 nt, Human
aucuuccuucacuuucucccac

SEQ ID NO: 349925 - RNA, 20 nt, Human
gccuggaggcagagauaaag

SEQ ID NO: 349926 - RNA, 22 nt, Human
cuucccagaccuuagagugcag

SEQ ID NO: 349927 - RNA, 23 nt, Human
ccagccucugggucuucauccag

SEQ ID NO: 349928 - RNA, 22 nt, Human
ugaugcugcugggaguggugcu

SEQ ID NO: 349929 - RNA, 22 nt, Human
aaauggauggaaagcaauuuuu

SEQ ID NO: 349930 - RNA, 22 nt, Human
aagaagagaacuggcauccuaa

SEQ ID NO: 349931 - RNA, 22 nt, Human
uuugaacaggaguaucuauagu

SEQ ID NO: 349932 - RNA, 22 nt, Human
uagggcucugagaguucagccu

SEQ ID NO: 349933 - RNA, 22 nt, Human
caggggccggcuguccgugccc

SEQ ID NO: 349934 - RNA, 22 nt, Human
gcacacccucucaccagcacug

SEQ ID NO: 349935 - RNA, 22 nt, Human
cccugggacccgcugcagaggc

SEQ ID NO: 349936 - RNA, 22 nt, Human
ugcaagagguaaaaugaaagga

SEQ ID NO: 349937 - RNA, 22 nt, Human
ugggaaauguguuucuggacca

SEQ ID NO: 349938 - RNA, 22 nt, Human
uggagcaagcuggagagaacau

SEQ ID NO: 349939 - RNA, 21 nt, Human
gcacagggacagaucaucaca

SEQ ID NO: 349940 - RNA, 22 nt, Human
caggggccaggcugucugcugu

SEQ ID NO: 349941 - RNA, 22 nt, Human
acauuugucuucuuucagauua

SEQ ID NO: 349942 - RNA, 22 nt, Human
caagcagagacuagauagcugu

SEQ ID NO: 349943 - RNA, 22 nt, Human
cccaguuucaacuuuccagugg

SEQ ID NO: 349944 - RNA, 22 nt, Human
uuucacauaaauauuaugccua

SEQ ID NO: 349945 - RNA, 22 nt, Human
guguccaucagcagccacugug

SEQ ID NO: 349946 - RNA, 21 nt, Human
uggaggaauaaagcacagaag

SEQ ID NO: 349947 - RNA, 22 nt, Human
cuuuauuccuacaagauuuucu

SEQ ID NO: 349948 - RNA, 22 nt, Human
guuuacaaauauuuuaaauggu

SEQ ID NO: 349949 - RNA, 22 nt, Human
aucagagauuguaguaugugca

SEQ ID NO: 349950 - RNA, 22 nt, Human
agaaauguuacaguuguuauuu

SEQ ID NO: 349951 - RNA, 22 nt, Human
ggcucagggaaugaggaagaau

SEQ ID NO: 349952 - RNA, 22 nt, Human
acagccuggacuggcucucugc

SEQ ID NO: 349953 - RNA, 22 nt, Human
uccuucaggccucauucucaua

SEQ ID NO: 349954 - RNA, 22 nt, Human
uuuuaucuucauuccuaucuac

SEQ ID NO: 349955 - RNA, 22 nt, Human
agccacagcgaaccucucuucc

SEQ ID NO: 349956 - RNA, 22 nt, Human
ugcuuuaucugugagaaccuga

SEQ ID NO: 349957 - RNA, 22 nt, Human
cagaggaggccaccgcauaggc

SEQ ID NO: 349958 - RNA, 22 nt, Human
gcuggcagaauuucuucuugcu

SEQ ID NO: 349959 - RNA, 22 nt, Human
ugcugccaugcagagcaacaga

SEQ ID NO: 349960 - RNA, 19 nt, Human
uggaggagaggaaaaguca

SEQ ID NO: 349961 - RNA, 22 nt, Human
ggagagaauuccauggacaugu

SEQ ID NO: 349962 - RNA, 22 nt, Human
uugguuuagagagugugguuac

SEQ ID NO: 349963 - RNA, 22 nt, Human
uaggcugggaagaaagauucuc

SEQ ID NO: 349964 - RNA, 22 nt, Human
gaugggcguggcgcguuuggug

SEQ ID NO: 349965 - RNA, 22 nt, Human
ggggcagaguagcuggggugug

SEQ ID NO: 349966 - RNA, 22 nt, Human
gaggcacuggaggaaaggagaa

SEQ ID NO: 349967 - RNA, 22 nt, Human
agcuuuaugaggagaccuuagu

SEQ ID NO: 349968 - RNA, 22 nt, Human
acaggcugacuuccugccaugu

SEQ ID NO: 349969 - RNA, 22 nt, Human
aggggacacggcuucuccaggg

SEQ ID NO: 349970 - RNA, 22 nt, Human
uagucucugcuuugcccuuggc

SEQ ID NO: 349971 - RNA, 22 nt, Human
ggcugccugugcccaggcacac

SEQ ID NO: 349972 - RNA, 22 nt, Human
cugucuguuuuaccuucuccag

SEQ ID NO: 349973 - RNA, 22 nt, Human
guggagcaaucagagggucagu

SEQ ID NO: 349974 - RNA, 22 nt, Human
aaggacagggaugguugauugu

SEQ ID NO: 349975 - RNA, 22 nt, Human
gcucacugcaaccucugcuucc

SEQ ID NO: 349976 - RNA, 19 nt, Human
uggcagggagaguuugaag

SEQ ID NO: 349977 - RNA, 22 nt, Human
acacauuuacauguuuacguau

SEQ ID NO: 349978 - RNA, 22 nt, Human
uagaacagaggguugcccagau

SEQ ID NO: 349979 - RNA, 22 nt, Human
uggcucaguuugggggauugaa

SEQ ID NO: 349980 - RNA, 22 nt, Human
cugggaggcccacguugggaag

SEQ ID NO: 349981 - RNA, 17 nt, Human
cuggagccuccaacucc

SEQ ID NO: 349982 - RNA, 22 nt, Human
ugugggcaggcccgggucugag

SEQ ID NO: 349983 - RNA, 22 nt, Human
ugcccagggauaagccuagaga

SEQ ID NO: 349984 - RNA, 22 nt, Human
gccucugcaugcucagcaccca

SEQ ID NO: 349985 - RNA, 22 nt, Human
cagagacaguuucacagggucu

SEQ ID NO: 349986 - RNA, 22 nt, Human
aggcacugugcugaugucuuau

SEQ ID NO: 349987 - RNA, 22 nt, Human
ugaagcagcaccauuuuagagc

SEQ ID NO: 349988 - RNA, 22 nt, Human
agcuggccuucggugucacugg

SEQ ID NO: 349989 - RNA, 22 nt, Human
aauguuuuaaaagagauugaga

SEQ ID NO: 349990 - RNA, 22 nt, Human
gucuggaggaggaagaaggcac

SEQ ID NO: 349991 - RNA, 22 nt, Human
ucucugagcccaauguagcaau

SEQ ID NO: 349992 - RNA, 22 nt, Human
ugucuuuggaauauuuagcuga

SEQ ID NO: 349993 - RNA, 21 nt, Human
agggagcuuuagguagaaguu

SEQ ID NO: 349994 - RNA, 22 nt, Human
aagcucugcucagcagacuagg

SEQ ID NO: 349995 - RNA, 22 nt, Human
ccagaauagaaggcagcuguca

SEQ ID NO: 349996 - RNA, 22 nt, Human
acaaagaucuugcuuuccuacu

SEQ ID NO: 349997 - RNA, 22 nt, Human
cccaggauggggcugcaguuau

SEQ ID NO: 349998 - RNA, 22 nt, Human
aggcugaaaacgagauggcaau

SEQ ID NO: 349999 - RNA, 22 nt, Human
aggacccugaggucuccuguga

SEQ ID NO: 350000 - RNA, 22 nt, Human
aggcaggcucaggcccaugcuu

SEQ ID NO: 350001 - RNA, 22 nt, Human
uuugaagucaggcuuucuaccc

SEQ ID NO: 350002 - RNA, 22 nt, Human
acagaguucccacuccagaagc

SEQ ID NO: 350003 - RNA, 22 nt, Human
gacauucacaguuuccgauggu

SEQ ID NO: 350004 - RNA, 22 nt, Human
aauagaaaggaggggcucuugu

SEQ ID NO: 350005 - RNA, 22 nt, Human
cugaggcauguuacaggacaua

SEQ ID NO: 350006 - RNA, 22 nt, Human
accauuuaauaaguauuuccau

SEQ ID NO: 350007 - RNA, 22 nt, Human
acccagaggcggagguugcagu

SEQ ID NO: 350008 - RNA, 22 nt, Human
gcauccagucuuggcuccugga

SEQ ID NO: 350009 - RNA, 22 nt, Human
aaaaguuaccucuguaauauaa

SEQ ID NO: 350010 - RNA, 22 nt, Human
gcaaguacaaacgcaucggcug

SEQ ID NO: 350011 - RNA, 22 nt, Human
ugucaccucuuuggcugcagcu

SEQ ID NO: 350012 - RNA, 22 nt, Human
uggcacuggcgcaggauggcgg

SEQ ID NO: 350013 - RNA, 22 nt, Human
ggguccagcgacagcaggcuca

SEQ ID NO: 350014 - RNA, 22 nt, Human
agcacuuuccuggcaaaugugg

SEQ ID NO: 350015 - RNA, 22 nt, Human
ugcagggcuccuggcuccaauc

SEQ ID NO: 350016 - RNA, 22 nt, Human
ccgggcgggggcucucgucacc

SEQ ID NO: 350017 - RNA, 22 nt, Human
agucaguguucuccggagaggc

SEQ ID NO: 350018 - RNA, 22 nt, Human
uggcagcuauuacaaggaaguc

SEQ ID NO: 350019 - RNA, 23 nt, Human
cacuccuguuucuaagccagcau

SEQ ID NO: 350020 - RNA, 22 nt, Human
gcugcccugugguccagcaggu

SEQ ID NO: 350021 - RNA, 22 nt, Human
uuacagaaguauugagagaucc

SEQ ID NO: 350022 - RNA, 22 nt, Human
ggugcugguucaggguggcugu

SEQ ID NO: 350023 - RNA, 22 nt, Human
ugucuuuagccagcagucuucu

SEQ ID NO: 350024 - RNA, 22 nt, Human
uucaagauggccccagugagcc

SEQ ID NO: 350025 - RNA, 22 nt, Human
gagcucuggcagggcaggucug

SEQ ID NO: 350026 - RNA, 22 nt, Human
uuacaguauuguuaaacucuuu

SEQ ID NO: 350027 - RNA, 22 nt, Human
agucucagccacacagaccuau

SEQ ID NO: 350028 - RNA, 22 nt, Human
caauauucaguggaaaagccau

SEQ ID NO: 350029 - RNA, 22 nt, Human
gcugccaugccacagcacucac

SEQ ID NO: 350030 - RNA, 22 nt, Human
uccaugugccaaggggcagagg

SEQ ID NO: 350031 - RNA, 22 nt, Human
cacugaagguaggaccaaggcu

SEQ ID NO: 350032 - RNA, 22 nt, Human
uuuauuugucuugccauuuagu

SEQ ID NO: 350033 - RNA, 22 nt, Human
uguauuagaucugagaacuucu

SEQ ID NO: 350034 - RNA, 22 nt, Human
uccugccuugccugggacauca

SEQ ID NO: 350035 - RNA, 22 nt, Human
uacauauagacaguuacucuag

SEQ ID NO: 350036 - RNA, 20 nt, Human
ggcaccaggcuaggauugga

SEQ ID NO: 350037 - RNA, 22 nt, Human
gaggccaaguuggagaccaggu

SEQ ID NO: 350038 - RNA, 22 nt, Human
gcagggaggaagagaugcuucc

SEQ ID NO: 350039 - RNA, 22 nt, Human
caagcuggaguuccucagagug

SEQ ID NO: 350040 - RNA, 22 nt, Human
gcuguccugggaacaggcacua

SEQ ID NO: 350041 - RNA, 22 nt, Human
auauacuuggagacuaucauug

SEQ ID NO: 350042 - RNA, 22 nt, Human
ucucagaguuugaaucuggagu

SEQ ID NO: 350043 - RNA, 22 nt, Human
ggaugcaggggcagcagagccu

SEQ ID NO: 350044 - RNA, 22 nt, Human
uggcugagaaaaugguuuuagg

SEQ ID NO: 350045 - RNA, 22 nt, Human
cccucugccugggaccaagucc

SEQ ID NO: 350046 - RNA, 22 nt, Human
ucuaaagaagaggguucugcgg

SEQ ID NO: 350047 - RNA, 22 nt, Human
ugucuuuaaaauuaaacacauc

SEQ ID NO: 350048 - RNA, 22 nt, Human
agaaauuccuaagguacacaag

SEQ ID NO: 350049 - RNA, 22 nt, Human
uuguaacagcugcuuaauagag

SEQ ID NO: 350050 - RNA, 22 nt, Human
gccaggaggcugcuguguaggc

SEQ ID NO: 350051 - RNA, 22 nt, Human
uacccaggagaaacagcagggc

SEQ ID NO: 350052 - RNA, 22 nt, Human
gaggccagcuaguccaggaagu

SEQ ID NO: 350053 - RNA, 22 nt, Human
agaauaucguagcauauuaucu

SEQ ID NO: 350054 - RNA, 22 nt, Human
aauauugagaaccagcauguuu

SEQ ID NO: 350055 - RNA, 22 nt, Human
aaacagaaauuuccucaugcuc

SEQ ID NO: 350056 - RNA, 22 nt, Human
uuuucauuagaaugacugagaa

SEQ ID NO: 350057 - RNA, 22 nt, Human
auguucaaacaaguuaaugcca

SEQ ID NO: 350058 - RNA, 20 nt, Human
accaggagauggaggcaggg

SEQ ID NO: 350059 - RNA, 22 nt, Human
agguaggguuaauggagauaua

SEQ ID NO: 350060 - RNA, 22 nt, Human
aauauaaauuccugggcccagc

SEQ ID NO: 350061 - RNA, 22 nt, Human
uggccugcuuucauuugaugcu

SEQ ID NO: 350062 - RNA, 22 nt, Human
aggcagugccuggaccccagcu

SEQ ID NO: 350063 - RNA, 18 nt, Human
ucuggcucaggacugaac

SEQ ID NO: 350064 - RNA, 22 nt, Human
uguucccauuuucugcauaauc

SEQ ID NO: 350065 - RNA, 22 nt, Human
cugaaaauguuacacaggaaga

SEQ ID NO: 350066 - RNA, 22 nt, Human
agcaauauuucagcuagcaggu

SEQ ID NO: 350067 - RNA, 22 nt, Human
agggccagagucuguguagaua

SEQ ID NO: 350068 - RNA, 22 nt, Human
gugcagugagcagugcagcacc

SEQ ID NO: 350069 - RNA, 22 nt, Human
aagaacaguguccugggacucg

SEQ ID NO: 350070 - RNA, 22 nt, Human
cugcuuugaggggcucuguaua

SEQ ID NO: 350071 - RNA, 22 nt, Human
ccauggcucuagagauugaaaa

SEQ ID NO: 350072 - RNA, 22 nt, Human
accagggcaaauguuuguacuc

SEQ ID NO: 350073 - RNA, 22 nt, Human
ggccuggcauggggacuaaggg

SEQ ID NO: 350074 - RNA, 22 nt, Human
aucuaaacagguguucuuuaga

SEQ ID NO: 350075 - RNA, 22 nt, Human
caggggaaggagccuugaaacu

SEQ ID NO: 350076 - RNA, 22 nt, Human
gaguuauuaauggcugaguuug

SEQ ID NO: 350077 - RNA, 19 nt, Human
cugugcuuuaaacuccuau

SEQ ID NO: 350078 - RNA, 22 nt, Human
uuacagaaugugccauuugguc

SEQ ID NO: 350079 - RNA, 19 nt, Human
augauggucccauucaccu

SEQ ID NO: 350080 - RNA, 22 nt, Human
ugguccugagcaccagccugac

SEQ ID NO: 350081 - RNA, 18 nt, Human
cagauccaggcagcuauu

SEQ ID NO: 350082 - RNA, 22 nt, Human
ugcccacauucaaaaggugaug

SEQ ID NO: 350083 - RNA, 22 nt, Human
cugccucuccccagaguggccc

SEQ ID NO: 350084 - RNA, 22 nt, Human
ugcagcugguuuagaacuagau

SEQ ID NO: 350085 - RNA, 22 nt, Human
gcagggcucauucuaguacaau

SEQ ID NO: 350086 - RNA, 22 nt, Human
agaguccaugaagacagcugag

SEQ ID NO: 350087 - RNA, 22 nt, Human
uggcugagguuaugcugguugu

SEQ ID NO: 350088 - RNA, 22 nt, Human
cccugcagcuuuugcauaguca

SEQ ID NO: 350089 - RNA, 22 nt, Human
uagugaaacaguuaucaaucug

SEQ ID NO: 350090 - RNA, 22 nt, Human
ccauggcuuucuuucauuguaa

SEQ ID NO: 350091 - RNA, 22 nt, Human
ucuucagaggaagucagucuuu

SEQ ID NO: 350092 - RNA, 22 nt, Human
gagcagggagacaacucuggug

SEQ ID NO: 350093 - RNA, 22 nt, Human
agagggcaugcuugguggccug

SEQ ID NO: 350094 - RNA, 20 nt, Human
ggcaggcuuuauauggaggg

SEQ ID NO: 350095 - RNA, 22 nt, Human
cagcuuggcuuccgcuuuacug

SEQ ID NO: 350096 - RNA, 22 nt, Human
ucagugaucuaaggguauggcc

SEQ ID NO: 350097 - RNA, 22 nt, Human
cagagguaccagcagccucugg

SEQ ID NO: 350098 - RNA, 23 nt, Human
uggcucucucagugcugcagagg

SEQ ID NO: 350099 - RNA, 22 nt, Human
auggaucagaaucccgggaggg

SEQ ID NO: 350100 - RNA, 22 nt, Human
gcaggagacaacuguaaggaga

SEQ ID NO: 350101 - RNA, 22 nt, Human
ggcaggagauaaaauauuaguu

SEQ ID NO: 350102 - RNA, 22 nt, Human
agaugcagaaaaacuaagugau

SEQ ID NO: 350103 - RNA, 22 nt, Human
ccugugucagccccugccucca

SEQ ID NO: 350104 - RNA, 22 nt, Human
auuugucuuuggaccugugaga

SEQ ID NO: 350105 - RNA, 22 nt, Human
ugaaagcuguccacuaggcugu

SEQ ID NO: 350106 - RNA, 22 nt, Human
aagcuuuaugaucucucagcua

SEQ ID NO: 350107 - RNA, 19 nt, Human
uggcuucuguuuucauguu

SEQ ID NO: 350108 - RNA, 22 nt, Human
gauuuacaaagcucucuagugu

SEQ ID NO: 350109 - RNA, 21 nt, Human
gcaaguacuaucaucauuauc

SEQ ID NO: 350110 - RNA, 22 nt, Human
uggcccugcuuaugucucucuu

SEQ ID NO: 350111 - RNA, 22 nt, Human
ucuuuaauguacuuucuuucac

SEQ ID NO: 350112 - RNA, 22 nt, Human
gguuuaauggagauauuucaga

SEQ ID NO: 350113 - RNA, 22 nt, Human
acauuucuuccuaauuaucccu

SEQ ID NO: 350114 - RNA, 22 nt, Human
agagccagcauuugacacuggc

SEQ ID NO: 350115 - RNA, 22 nt, Human
auaucagacagaaagcauugac

SEQ ID NO: 350116 - RNA, 22 nt, Human
uggaggcaguuuaagucugaga

SEQ ID NO: 350117 - RNA, 17 nt, Human
guuugcaugguguuaac

SEQ ID NO: 350118 - RNA, 22 nt, Human
guuguauagagggcaugaaucu

SEQ ID NO: 350119 - RNA, 20 nt, Human
ggccuuggccucuuugcagc

SEQ ID NO: 350120 - RNA, 22 nt, Human
agccugguguggggcugcagag

SEQ ID NO: 350121 - RNA, 22 nt, Human
acagauuugacugguaccuggc

SEQ ID NO: 350122 - RNA, 22 nt, Human
cugcaggcaucuaacugugggc

SEQ ID NO: 350123 - RNA, 22 nt, Human
gcugccaguguggcaugaugca

SEQ ID NO: 350124 - RNA, 22 nt, Human
cuuguauuccccuaucucuaaa

SEQ ID NO: 350125 - RNA, 22 nt, Human
agggcugcaucugccuggugaa

SEQ ID NO: 350126 - RNA, 22 nt, Human
cugcgcagcaaucagagaggag

SEQ ID NO: 350127 - RNA, 21 nt, Human
ggagucagggucuggcugggg

SEQ ID NO: 350128 - RNA, 22 nt, Human
uuuaaauggcauuuucccagau

SEQ ID NO: 350129 - RNA, 22 nt, Human
agauguaaacucucaugucauu

SEQ ID NO: 350130 - RNA, 22 nt, Human
ccuggagcccaaggcagugaga

SEQ ID NO: 350131 - RNA, 22 nt, Human
ucagguggcuuggagggggacg

SEQ ID NO: 350132 - RNA, 22 nt, Human
ccuggauucaagucuuucuuuc

SEQ ID NO: 350133 - RNA, 22 nt, Human
ucaggcugcagcugucagcagc

SEQ ID NO: 350134 - RNA, 22 nt, Human
aaaggagacuucagaucuccuu

SEQ ID NO: 350135 - RNA, 22 nt, Human
ccugccugcaccuucucugggg

SEQ ID NO: 350136 - RNA, 21 nt, Human
gccagggaagagaguuggcug

SEQ ID NO: 350137 - RNA, 22 nt, Human
ugagccugcaauaagcacagcc

SEQ ID NO: 350138 - RNA, 22 nt, Human
aaugugguuaacccauuuaaga

SEQ ID NO: 350139 - RNA, 22 nt, Human
caggaucccuggccuccgccca

SEQ ID NO: 350140 - RNA, 22 nt, Human
guggcugcuaagucuccuuccu

SEQ ID NO: 350141 - RNA, 22 nt, Human
gauuuauuggucuuucauuggu

SEQ ID NO: 350142 - RNA, 22 nt, Human
aauccagguggcggagguugug

SEQ ID NO: 350143 - RNA, 23 nt, Human
agaaaagcuuggacacauggccu

SEQ ID NO: 350144 - RNA, 22 nt, Human
gcagguggcagaggugggaucu

SEQ ID NO: 350145 - RNA, 22 nt, Human
aaugauuuggcaaaggaaucca

SEQ ID NO: 350146 - RNA, 22 nt, Human
aucccugcccucauggagcuua

SEQ ID NO: 350147 - RNA, 22 nt, Human
gcagggcuguucaggagggugg

SEQ ID NO: 350148 - RNA, 22 nt, Human
ugggcuacucugggagccuaac

SEQ ID NO: 350149 - RNA, 19 nt, Human
agggcuaggcacauagggc

SEQ ID NO: 350150 - RNA, 22 nt, Human
agggcagagagaugaaugggau

SEQ ID NO: 350151 - RNA, 22 nt, Human
uggacagguuugggugccuguu

SEQ ID NO: 350152 - RNA, 22 nt, Human
agcagccacacgccuccuucuc

SEQ ID NO: 350153 - RNA, 22 nt, Human
gagccuggauugaagugggugg

SEQ ID NO: 350154 - RNA, 22 nt, Human
gggugggaacaggaugccagga

SEQ ID NO: 350155 - RNA, 22 nt, Human
aggagggagcuuaagccaggca

SEQ ID NO: 350156 - RNA, 22 nt, Human
caacagucugguuuauauaaua

SEQ ID NO: 350157 - RNA, 22 nt, Human
aaauauguaagauuagcacuag

SEQ ID NO: 350158 - RNA, 22 nt, Human
ccaggacuucgaggcuacagug

SEQ ID NO: 350159 - RNA, 22 nt, Human
cagagcugcagauugaaggcau

SEQ ID NO: 350160 - RNA, 17 nt, Human
aaugaaugaauucuuug

SEQ ID NO: 350161 - RNA, 22 nt, Human
cagauauuaggagcucaauaau

SEQ ID NO: 350162 - RNA, 22 nt, Human
cauccugguuaccccauaguca

SEQ ID NO: 350163 - RNA, 22 nt, Human
aaagaaucagaagucucaaaca

SEQ ID NO: 350164 - RNA, 22 nt, Human
aggaccuguagggccugcaucc

SEQ ID NO: 350165 - RNA, 22 nt, Human
gagagggcucuguguggguacu

SEQ ID NO: 350166 - RNA, 22 nt, Human
aaauucaauuaacuuucaugcu

SEQ ID NO: 350167 - RNA, 22 nt, Human
gcagggcaaacccagguguuca

SEQ ID NO: 350168 - RNA, 22 nt, Human
ugggacacccucacgccugcac

SEQ ID NO: 350169 - RNA, 22 nt, Human
gcaaagucucaagacccaagug

SEQ ID NO: 350170 - RNA, 22 nt, Human
cugagaauuacucugaugagua

SEQ ID NO: 350171 - RNA, 22 nt, Human
uaggccagaggagcagcuuugg

SEQ ID NO: 350172 - RNA, 22 nt, Human
ggcuggccucaggguccucgcu

SEQ ID NO: 350173 - RNA, 22 nt, Human
guguggcugugggagauguuca

SEQ ID NO: 350174 - RNA, 22 nt, Human
gggugcaggcagcccaggcagg

SEQ ID NO: 350175 - RNA, 22 nt, Human
acagccagaggagccaggcugg

SEQ ID NO: 350176 - RNA, 22 nt, Human
cucaggccauucuuccagcugc

SEQ ID NO: 350177 - RNA, 22 nt, Human
cuggcucaccuccgcuccagca

SEQ ID NO: 350178 - RNA, 22 nt, Human
auguaguauuuggaaauguaaa

SEQ ID NO: 350179 - RNA, 22 nt, Human
cucaacagcucugccauacucc

SEQ ID NO: 350180 - RNA, 22 nt, Human
uccugcagcugauaaauacagu

SEQ ID NO: 350181 - RNA, 22 nt, Human
gcugagagcggccagcugggaa

SEQ ID NO: 350182 - RNA, 22 nt, Human
aggggcugacuggaaagugcca

SEQ ID NO: 350183 - RNA, 22 nt, Human
uaaucauggccucaaauuuuau

SEQ ID NO: 350184 - RNA, 22 nt, Human
ccugucauacuaacguaguggg

SEQ ID NO: 350185 - RNA, 23 nt, Human
acuuaaaugguucuuuaucucag

SEQ ID NO: 350186 - RNA, 22 nt, Human
gauuuccuaauguggaucucug

SEQ ID NO: 350187 - RNA, 22 nt, Human
uggguacuccuauuaguucagu

SEQ ID NO: 350188 - RNA, 22 nt, Human
agggcagaaaccaccuugaugg

SEQ ID NO: 350189 - RNA, 22 nt, Human
gagugcaucguggccauuuuaa

SEQ ID NO: 350190 - RNA, 18 nt, Human
agcuucccucugagaggg

SEQ ID NO: 350191 - RNA, 22 nt, Human
uauuuccaagcugaauccaaug

SEQ ID NO: 350192 - RNA, 22 nt, Human
ucucccagugucuggcagucag

SEQ ID NO: 350193 - RNA, 22 nt, Human
uagcagcucacagccucccauu

SEQ ID NO: 350194 - RNA, 22 nt, Human
gcagaggccaucaacuuugcca

SEQ ID NO: 350195 - RNA, 22 nt, Human
uuuccaaaguugccauaagcuu

SEQ ID NO: 350196 - RNA, 22 nt, Human
uuugggcaguagauguaucacu

SEQ ID NO: 350197 - RNA, 22 nt, Human
cagcaucaccgccauuucugau

SEQ ID NO: 350198 - RNA, 22 nt, Human
gggcuagaaauucugcagugga

SEQ ID NO: 350199 - RNA, 22 nt, Human
gggucucucucggcuccacgcg

SEQ ID NO: 350200 - RNA, 22 nt, Human
agagaugaacauaaaacaagga

SEQ ID NO: 350201 - RNA, 22 nt, Human
cauucacagagggggaagcauc

SEQ ID NO: 350202 - RNA, 22 nt, Human
ucccagaggaaauggcagcuga

SEQ ID NO: 350203 - RNA, 22 nt, Human
cagaggccccagaacuagcucu

SEQ ID NO: 350204 - RNA, 22 nt, Human
acacaaauuguaggauaauugc

SEQ ID NO: 350205 - RNA, 22 nt, Human
uauuucugggaguucagaaauu

SEQ ID NO: 350206 - RNA, 22 nt, Human
cugcagugaaaucaggaagcaa

SEQ ID NO: 350207 - RNA, 22 nt, Human
acaaagugaauugcaucgaguu

SEQ ID NO: 350208 - RNA, 22 nt, Human
gaggcugguucugaaguacugu

SEQ ID NO: 350209 - RNA, 22 nt, Human
uauguacaguccuuaacuuaaa

SEQ ID NO: 350210 - RNA, 22 nt, Human
ucccagaagugaaauuucuaga

SEQ ID NO: 350211 - RNA, 22 nt, Human
uuugcauuaucucacuuauaua

SEQ ID NO: 350212 - RNA, 22 nt, Human
cuguccuuacugcuucuggcuu

SEQ ID NO: 350213 - RNA, 22 nt, Human
auaaaaacugacccauccuuug

SEQ ID NO: 350214 - RNA, 19 nt, Human
cugguccugacugaggggu

SEQ ID NO: 350215 - RNA, 22 nt, Human
gccugcagugagugcagaaggu

SEQ ID NO: 350216 - RNA, 22 nt, Human
gagagguccauuccccugucag

SEQ ID NO: 350217 - RNA, 22 nt, Human
gggggcaguaaccucaaagugu

SEQ ID NO: 350218 - RNA, 17 nt, Human
ggcagcugugugcaugc

SEQ ID NO: 350219 - RNA, 22 nt, Human
uggguggcacuucuggggucca

SEQ ID NO: 350220 - RNA, 22 nt, Human
uaguggaggggaugcaaagcuu

SEQ ID NO: 350221 - RNA, 22 nt, Human
aaggaggaauuucagggugaau

SEQ ID NO: 350222 - RNA, 22 nt, Human
caucaguguggcaguucacugu

SEQ ID NO: 350223 - RNA, 22 nt, Human
gugccugggcaugagcuuguug

SEQ ID NO: 350224 - RNA, 21 nt, Human
gcagagccugagguucuugag

SEQ ID NO: 350225 - RNA, 22 nt, Human
uauuucagacacugaucuugca

SEQ ID NO: 350226 - RNA, 22 nt, Human
agggcccucuggcaggccaggc

SEQ ID NO: 350227 - RNA, 22 nt, Human
auggggcugggauucuccucgg

SEQ ID NO: 350228 - RNA, 22 nt, Human
ggcugccagugagugcagaccg

SEQ ID NO: 350229 - RNA, 22 nt, Human
gcgaaaaauguguaaauauguu

SEQ ID NO: 350230 - RNA, 22 nt, Human
ucagaauuuugguuugguuggu

SEQ ID NO: 350231 - RNA, 22 nt, Human
ccagcucugccaagcgucagcu

SEQ ID NO: 350232 - RNA, 22 nt, Human
uuucauaauagugcaguuuguu

SEQ ID NO: 350233 - RNA, 22 nt, Human
uagcagaaccagcagucaauuu

SEQ ID NO: 350234 - RNA, 22 nt, Human
ggcagccuugacuagugacuua

SEQ ID NO: 350235 - RNA, 22 nt, Human
uuugaaagccuggcuuuucucu

SEQ ID NO: 350236 - RNA, 22 nt, Human
aagccucuggggccucaucugu

SEQ ID NO: 350237 - RNA, 22 nt, Human
acugagcugugacaaugcuuaa

SEQ ID NO: 350238 - RNA, 22 nt, Human
ugcauauugugaaaauguagau

SEQ ID NO: 350239 - RNA, 22 nt, Human
aauacugagaucccacaaagca

SEQ ID NO: 350240 - RNA, 22 nt, Human
aaacacaccuuuggaacuguga

SEQ ID NO: 350241 - RNA, 22 nt, Human
cagggccaagcugcagcaucug

SEQ ID NO: 350242 - RNA, 17 nt, Human
ugagcaguagaagaugc

SEQ ID NO: 350243 - RNA, 22 nt, Human
acuuauuagcugugugaccuug

SEQ ID NO: 350244 - RNA, 22 nt, Human
ccucucuguaagggucccuccc

SEQ ID NO: 350245 - RNA, 20 nt, Human
gaagccagaggggaaaggag

SEQ ID NO: 350246 - RNA, 22 nt, Human
gagucacaaaagaugcccaggg

SEQ ID NO: 350247 - RNA, 17 nt, Human
uagcuguguuucagcua

SEQ ID NO: 350248 - RNA, 22 nt, Human
augauggugggagaugacccag

SEQ ID NO: 350249 - RNA, 22 nt, Human
uccuucagaggacggcagccag

SEQ ID NO: 350250 - RNA, 22 nt, Human
ggcuucccuuuccgagaggaga

SEQ ID NO: 350251 - RNA, 19 nt, Human
uuacuuggcaaagucaguc

SEQ ID NO: 350252 - RNA, 19 nt, Human
acagcagggauuuuuggag

SEQ ID NO: 350253 - RNA, 22 nt, Human
cuguguuggcuuuucucuugua

SEQ ID NO: 350254 - RNA, 22 nt, Human
ucauuacagagauauaaucuac

SEQ ID NO: 350255 - RNA, 22 nt, Human
gagggccaacuagcaccacuuu

SEQ ID NO: 350256 - RNA, 22 nt, Human
cuugcaggcagggccuccugga

SEQ ID NO: 350257 - RNA, 22 nt, Human
gcuggccugaccagccacaggc

SEQ ID NO: 350258 - RNA, 22 nt, Human
ucauuguuucugcuuuucauga

SEQ ID NO: 350259 - RNA, 22 nt, Human
aggagcugaaacuucucauaug

SEQ ID NO: 350260 - RNA, 22 nt, Human
cagggcacaguuauggaggugg

SEQ ID NO: 350261 - RNA, 22 nt, Human
augcaguaaaauaggagguaau

SEQ ID NO: 350262 - RNA, 22 nt, Human
cauggcagagaaggggaacugg

SEQ ID NO: 350263 - RNA, 22 nt, Human
ggaggcaggaaagacagguuca

SEQ ID NO: 350264 - RNA, 20 nt, Human
gagggcaggcacccauuuca

SEQ ID NO: 350265 - RNA, 22 nt, Human
auuuucaaaacaucugcugugu

SEQ ID NO: 350266 - RNA, 22 nt, Human
cgaugguucuggcugcuuguau

SEQ ID NO: 350267 - RNA, 22 nt, Human
accuggccauccagcuggcauc

SEQ ID NO: 350268 - RNA, 22 nt, Human
agccagcuggugggucagcugg

SEQ ID NO: 350269 - RNA, 22 nt, Human
cuggggcucucuggaaugcuug

SEQ ID NO: 350270 - RNA, 22 nt, Human
cagaagcaaaugccuugcugag

SEQ ID NO: 350271 - RNA, 22 nt, Human
ucacacagguuugcaaugauuu

SEQ ID NO: 350272 - RNA, 22 nt, Human
gucuuucuaugaugaacuguug

SEQ ID NO: 350273 - RNA, 22 nt, Human
gucaaguuaagauaaggucaug

SEQ ID NO: 350274 - RNA, 21 nt, Human
uuuucccacugaaagcuccca

SEQ ID NO: 350275 - RNA, 21 nt, Human
acccuggguucuccauacccu

SEQ ID NO: 350276 - RNA, 22 nt, Human
gaggcagagugcaccccaggag

SEQ ID NO: 350277 - RNA, 22 nt, Human
gggagccacagugaggugcaug

SEQ ID NO: 350278 - RNA, 21 nt, Human
guccagagagccggcuccuga

SEQ ID NO: 350279 - RNA, 22 nt, Human
agugcacuggcaccaucucagc

SEQ ID NO: 350280 - RNA, 22 nt, Human
aggaaucccgcaccagcugcug

SEQ ID NO: 350281 - RNA, 22 nt, Human
ugaggggauacgguacacauug

SEQ ID NO: 350282 - RNA, 22 nt, Human
ccaggaguuggagguugcagug

SEQ ID NO: 350283 - RNA, 19 nt, Human
agcuguggaugugggauuu

SEQ ID NO: 350284 - RNA, 22 nt, Human
agcaggugggcaugaaagcuga

SEQ ID NO: 350285 - RNA, 22 nt, Human
gagaaaugcaugcaugucauca

SEQ ID NO: 350286 - RNA, 22 nt, Human
agugaccauuuucagcuagagg

SEQ ID NO: 350287 - RNA, 22 nt, Human
gggccccaaaaugccaggcucu

SEQ ID NO: 350288 - RNA, 22 nt, Human
uuccuuaguguuagauucugug

SEQ ID NO: 350289 - RNA, 22 nt, Human
ucuggccaacaaaaacuaaguc

SEQ ID NO: 350290 - RNA, 22 nt, Human
uccugagggcgauucagcaggu

SEQ ID NO: 350291 - RNA, 22 nt, Human
uuggagcccugaggaucuggau

SEQ ID NO: 350292 - RNA, 22 nt, Human
acucagaguuugcguuccauac

SEQ ID NO: 350293 - RNA, 22 nt, Human
cucuuuccucagccacagucua

SEQ ID NO: 350294 - RNA, 22 nt, Human
uaugcacacauuagcacagggu

SEQ ID NO: 350295 - RNA, 22 nt, Human
aggcaucugaguuugcaagcuu

SEQ ID NO: 350296 - RNA, 19 nt, Human
auuugaaagcugugcuugc

SEQ ID NO: 350297 - RNA, 22 nt, Human
uguguuccuucgucuucccuuc

SEQ ID NO: 350298 - RNA, 22 nt, Human
aaucaguuguccaaaguucaca

SEQ ID NO: 350299 - RNA, 22 nt, Human
cuguggcuaugguguacauacu

SEQ ID NO: 350300 - RNA, 22 nt, Human
ugggcuggugagggaucauuua

SEQ ID NO: 350301 - RNA, 22 nt, Human
ccagggcagaaaaagagggaau

SEQ ID NO: 350302 - RNA, 22 nt, Human
agcaccuguggcucaugcucgu

SEQ ID NO: 350303 - RNA, 22 nt, Human
gcugccuguggcccuucugggu

SEQ ID NO: 350304 - RNA, 22 nt, Human
cagaauaugacaagauuuuccu

SEQ ID NO: 350305 - RNA, 22 nt, Human
ugagcuggucacuccuucugaa

SEQ ID NO: 350306 - RNA, 22 nt, Human
aaggagugcaugacucagagua

SEQ ID NO: 350307 - RNA, 22 nt, Human
uccuggagccacggagcuuuca

SEQ ID NO: 350308 - RNA, 22 nt, Human
ccacagcaugcaggccugacac

SEQ ID NO: 350309 - RNA, 22 nt, Human
gggcagguggagggcccagcca

SEQ ID NO: 350310 - RNA, 22 nt, Human
gaaaugcauaaucuuaguagau

SEQ ID NO: 350311 - RNA, 21 nt, Human
gagugcaggucugaugccauc

SEQ ID NO: 350312 - RNA, 22 nt, Human
uuucacacuagucagaauacca

SEQ ID NO: 350313 - RNA, 22 nt, Human
cagggccucuccuccaggaacu

SEQ ID NO: 350314 - RNA, 22 nt, Human
cacaugcauaaggauaauuacu

SEQ ID NO: 350315 - RNA, 22 nt, Human
ucccuucacagaugcgauguuu

SEQ ID NO: 350316 - RNA, 22 nt, Human
acacagggggcauucuaggagu

SEQ ID NO: 350317 - RNA, 19 nt, Human
ugcagaggguaggaaggcc

SEQ ID NO: 350318 - RNA, 22 nt, Human
cucagaguucuccugggaggug

SEQ ID NO: 350319 - RNA, 22 nt, Human
gcagggcaggauuugaacccag

SEQ ID NO: 350320 - RNA, 22 nt, Human
aggucauuguuaagucaccaua

SEQ ID NO: 350321 - RNA, 22 nt, Human
ugaggcagugugagauaauaaa

SEQ ID NO: 350322 - RNA, 22 nt, Human
ugccaggauggccagggggcca

SEQ ID NO: 350323 - RNA, 22 nt, Human
ucuccgaucacagguuuucaau

SEQ ID NO: 350324 - RNA, 22 nt, Human
cagaaaucauugugaugacagg

SEQ ID NO: 350325 - RNA, 22 nt, Human
aaucauaauuguauacauucau

SEQ ID NO: 350326 - RNA, 22 nt, Human
ucauuuguggaagugauugugg

SEQ ID NO: 350327 - RNA, 22 nt, Human
uuaguuagucccugguaccuuu

SEQ ID NO: 350328 - RNA, 22 nt, Human
uucaccgugaaccgauuccuca

SEQ ID NO: 350329 - RNA, 22 nt, Human
cagugcaugaaacaauaugcag

SEQ ID NO: 350330 - RNA, 22 nt, Human
cagugggugaugaguccugggg

SEQ ID NO: 350331 - RNA, 22 nt, Human
aaggcacuuaacgugggaggau

SEQ ID NO: 350332 - RNA, 22 nt, Human
ugcugaugaguccuucuaucgc

SEQ ID NO: 350333 - RNA, 22 nt, Human
ucaggcugugggcacuggccau

SEQ ID NO: 350334 - RNA, 22 nt, Human
acauuucuuuucaucucuauau

SEQ ID NO: 350335 - RNA, 22 nt, Human
agggcagagacaugcuuccuga

SEQ ID NO: 350336 - RNA, 23 nt, Human
ugagcaucacaggagaaccaggc

SEQ ID NO: 350337 - RNA, 18 nt, Human
agucucagcggaggagua

SEQ ID NO: 350338 - RNA, 22 nt, Human
auggguuucccucugaaauuau

SEQ ID NO: 350339 - RNA, 22 nt, Human
uggagggaacccaggcugcucu

SEQ ID NO: 350340 - RNA, 22 nt, Human
uggcucucaggccugcugcguu

SEQ ID NO: 350341 - RNA, 22 nt, Human
gaggaggaaacccuguuccucu

SEQ ID NO: 350342 - RNA, 22 nt, Human
aacccuggggcagcugcuaggg

SEQ ID NO: 350343 - RNA, 22 nt, Human
cacagggccacuuucccaguaa

SEQ ID NO: 350344 - RNA, 22 nt, Human
uguggaaaauuggaacguuccu

SEQ ID NO: 350345 - RNA, 23 nt, Human
aggauguaggauguauggcagag

SEQ ID NO: 350346 - RNA, 22 nt, Human
uacauguuuacuccaagucagg

SEQ ID NO: 350347 - RNA, 22 nt, Human
cacagcugaaguagccaugugg

SEQ ID NO: 350348 - RNA, 19 nt, Human
ucuguucacauuguuucgc

SEQ ID NO: 350349 - RNA, 22 nt, Human
gcccagagagaugcuguagacc

SEQ ID NO: 350350 - RNA, 22 nt, Human
acaaauguggacauggauaaug

SEQ ID NO: 350351 - RNA, 22 nt, Human
gacuuucucuccucccaggugu

SEQ ID NO: 350352 - RNA, 22 nt, Human
cugggccagauccagccucaca

SEQ ID NO: 350353 - RNA, 22 nt, Human
aggcagcauccagaggagaaug

SEQ ID NO: 350354 - RNA, 22 nt, Human
ucaaaggcuugugguucuggga

SEQ ID NO: 350355 - RNA, 22 nt, Human
gcuggcucccauugguccuucc

SEQ ID NO: 350356 - RNA, 22 nt, Human
uagaaaucauuuagaaguauug

SEQ ID NO: 350357 - RNA, 22 nt, Human
cagcugccagcuucucuccauc

SEQ ID NO: 350358 - RNA, 22 nt, Human
uugguacagaugagguauucuc

SEQ ID NO: 350359 - RNA, 22 nt, Human
ccugccucaucaacuugucgug

SEQ ID NO: 350360 - RNA, 22 nt, Human
auacaucucauguaagagauaa

SEQ ID NO: 350361 - RNA, 22 nt, Human
cccaggcacauccacucuguga

SEQ ID NO: 350362 - RNA, 23 nt, Human
uggcucugagcuuccugguggcc

SEQ ID NO: 350363 - RNA, 22 nt, Human
gagggcagagacagugauucac

SEQ ID NO: 350364 - RNA, 21 nt, Human
agcagcaucagccucaccuga

SEQ ID NO: 350365 - RNA, 22 nt, Human
gucucagggacugcuucugggg

SEQ ID NO: 350366 - RNA, 23 nt, Human
uggccugcagaguuucugcuggg

SEQ ID NO: 350367 - RNA, 22 nt, Human
aaaauuauucauggcuuuugga

SEQ ID NO: 350368 - RNA, 22 nt, Human
ucucagaggucuucagccucug

SEQ ID NO: 350369 - RNA, 22 nt, Human
cuggacagaaagggcugcugug

SEQ ID NO: 350370 - RNA, 20 nt, Human
ccugggcuccaggagccccg

SEQ ID NO: 350371 - RNA, 22 nt, Human
uccacauccauugcuugacuuu

SEQ ID NO: 350372 - RNA, 22 nt, Human
uuugcaaauaccaugaaacuug

SEQ ID NO: 350373 - RNA, 22 nt, Human
ugucaguguauacauacaguau

SEQ ID NO: 350374 - RNA, 22 nt, Human
aggcagugcugugcccugaacc

SEQ ID NO: 350375 - RNA, 22 nt, Human
uuuucaguaaugucuacauaau

SEQ ID NO: 350376 - RNA, 22 nt, Human
uauuggugggggcagagagaga

SEQ ID NO: 350377 - RNA, 22 nt, Human
guaaaauucuagcaucugaaag

SEQ ID NO: 350378 - RNA, 22 nt, Human
ccagugcuucuuugcuagcugg

SEQ ID NO: 350379 - RNA, 21 nt, Human
uuucccagcugaaaauaaaug

SEQ ID NO: 350380 - RNA, 22 nt, Human
uaguuucagcuccuucauccug

SEQ ID NO: 350381 - RNA, 20 nt, Human
ucagccagcuaacaugggga

SEQ ID NO: 350382 - RNA, 22 nt, Human
gcagaggcuccauuuuacagau

SEQ ID NO: 350383 - RNA, 22 nt, Human
aagggccuccuggggagccugg

SEQ ID NO: 350384 - RNA, 22 nt, Human
uuagauaauguagagauaugag

SEQ ID NO: 350385 - RNA, 22 nt, Human
ccagaagacaagaauguucuua

SEQ ID NO: 350386 - RNA, 22 nt, Human
agcagaagaaagccacaugacu

SEQ ID NO: 350387 - RNA, 22 nt, Human
agaucacaguggcaacucccuu

SEQ ID NO: 350388 - RNA, 22 nt, Human
auucuuggcaaggagauuuaaa

SEQ ID NO: 350389 - RNA, 22 nt, Human
gagcuuuacuucugacuggugc

SEQ ID NO: 350390 - RNA, 22 nt, Human
cagcugugaauugucuuaucua

SEQ ID NO: 350391 - RNA, 22 nt, Human
ucacaugaguauuauuuuccaa

SEQ ID NO: 350392 - RNA, 22 nt, Human
ggcuucaccgcgggguugcagg

SEQ ID NO: 350393 - RNA, 22 nt, Human
cucuggccgcagcucagcucug

SEQ ID NO: 350394 - RNA, 22 nt, Human
gucagcagugucagcucugggg

SEQ ID NO: 350395 - RNA, 22 nt, Human
ggccuugguaaagggaugcaug

SEQ ID NO: 350396 - RNA, 22 nt, Human
cagggagggaggaaaauuugcu

SEQ ID NO: 350397 - RNA, 22 nt, Human
gacagagugcagggcuagaaga

SEQ ID NO: 350398 - RNA, 22 nt, Human
aggccagaugucgggcuagaag

SEQ ID NO: 350399 - RNA, 22 nt, Human
uguacaauagcuauuaucucca

SEQ ID NO: 350400 - RNA, 22 nt, Human
agcagcuguacuuucaucuguu

SEQ ID NO: 350401 - RNA, 22 nt, Human
augaguugaagcuacaagaggc

SEQ ID NO: 350402 - RNA, 22 nt, Human
gggcaggugcccagggccagag

SEQ ID NO: 350403 - RNA, 21 nt, Human
gaggccacuaauaggggcaga

SEQ ID NO: 350404 - RNA, 22 nt, Human
caguggucugugcuucuguaca

SEQ ID NO: 350405 - RNA, 22 nt, Human
gugccaggcccagggagcgggg

SEQ ID NO: 350406 - RNA, 22 nt, Human
aggcugugagcaagaacaccua

SEQ ID NO: 350407 - RNA, 22 nt, Human
caucacugacgcugagauucca

SEQ ID NO: 350408 - RNA, 22 nt, Human
gugcucuguguauuaggauguc

SEQ ID NO: 350409 - RNA, 18 nt, Human
uacagauuauagauacau

SEQ ID NO: 350410 - RNA, 22 nt, Human
ucaaugauaguacaaucagccu

SEQ ID NO: 350411 - RNA, 22 nt, Human
auuauccucagaaaacauguga

SEQ ID NO: 350412 - RNA, 22 nt, Human
aaaugugcuugugaucagcugu

SEQ ID NO: 350413 - RNA, 22 nt, Human
aguucuuuugugaacauaugcu

SEQ ID NO: 350414 - RNA, 22 nt, Human
gcagcucccagcuugaaagguc

SEQ ID NO: 350415 - RNA, 22 nt, Human
gggcagcagaggaucccuuaau

SEQ ID NO: 350416 - RNA, 22 nt, Human
uaaauucagugaguaauuucug

SEQ ID NO: 350417 - RNA, 22 nt, Human
aggcuggguaccugucauaugc

SEQ ID NO: 350418 - RNA, 22 nt, Human
gcugguuaggugagggugcgcc

SEQ ID NO: 350419 - RNA, 22 nt, Human
cugcuguguuagcagguuuagu

SEQ ID NO: 350420 - RNA, 22 nt, Human
ggucucaggagacuggagagca

SEQ ID NO: 350421 - RNA, 22 nt, Human
agcugcccugggucuugcugcu

SEQ ID NO: 350422 - RNA, 22 nt, Human
cucagaguccccacaucugggu

SEQ ID NO: 350423 - RNA, 22 nt, Human
cagagguagccgagugcaaucg

SEQ ID NO: 350424 - RNA, 22 nt, Human
ugaggcaggaugcuugcacagg

SEQ ID NO: 350425 - RNA, 22 nt, Human
uauagaaguaagcauugugaug

SEQ ID NO: 350426 - RNA, 22 nt, Human
uggcugaguguuccaaggagca

SEQ ID NO: 350427 - RNA, 22 nt, Human
gcuccuucaggugguagcuguu

SEQ ID NO: 350428 - RNA, 18 nt, Human
aggggcagcuugugugga

SEQ ID NO: 350429 - RNA, 18 nt, Human
ucucagaggccauccuag

SEQ ID NO: 350430 - RNA, 22 nt, Human
acauugcugcauucuccuuccc

SEQ ID NO: 350431 - RNA, 22 nt, Human
caccuggcuggaagugcuccgg

SEQ ID NO: 350432 - RNA, 22 nt, Human
uccagccaugacucggacagug

SEQ ID NO: 350433 - RNA, 22 nt, Human
gccaggagacuccauucauuug

SEQ ID NO: 350434 - RNA, 22 nt, Human
cugcccugggaguaccuguccu

SEQ ID NO: 350435 - RNA, 22 nt, Human
aguggacucuucccagugcuug

SEQ ID NO: 350436 - RNA, 22 nt, Human
cagggcagcuuccuuuguuagg

SEQ ID NO: 350437 - RNA, 22 nt, Human
gcucuguacgcaggaugagggg

SEQ ID NO: 350438 - RNA, 22 nt, Human
uagugauuaaaggcagaauguu

SEQ ID NO: 350439 - RNA, 22 nt, Human
uggcauuucaguauuuucauaa

SEQ ID NO: 350440 - RNA, 22 nt, Human
cuggcuuucucugugguguuca

SEQ ID NO: 350441 - RNA, 22 nt, Human
ggcauuuacauaaucuuauuua

SEQ ID NO: 350442 - RNA, 22 nt, Human
acacugcucacuucuucccuug

SEQ ID NO: 350443 - RNA, 22 nt, Human
aagcccagcaucccugcaccag

SEQ ID NO: 350444 - RNA, 21 nt, Human
ucucuggaguuagcagagaga

SEQ ID NO: 350445 - RNA, 22 nt, Human
gaggaaacauuguagaagcagu

SEQ ID NO: 350446 - RNA, 22 nt, Human
agagcagcugugacauggacag

SEQ ID NO: 350447 - RNA, 22 nt, Human
ggaagccaugagggacaguucu

SEQ ID NO: 350448 - RNA, 22 nt, Human
ucucuguaguugggcagcugcu

SEQ ID NO: 350449 - RNA, 22 nt, Human
auguuuuauauuuugcagcagu

SEQ ID NO: 350450 - RNA, 22 nt, Human
gcacagaacuucucuuaguagg

SEQ ID NO: 350451 - RNA, 22 nt, Human
ccugcagggaaucgaggcagaa

SEQ ID NO: 350452 - RNA, 22 nt, Human
uacaagaaauuucugcauauau

SEQ ID NO: 350453 - RNA, 22 nt, Human
cacaauguauauguauaucaaa

SEQ ID NO: 350454 - RNA, 22 nt, Human
uuucucuguucucuaacuguaa

SEQ ID NO: 350455 - RNA, 22 nt, Human
acauucacgcucucaaagcuga

SEQ ID NO: 350456 - RNA, 22 nt, Human
aguccaguguguucuggcagca

SEQ ID NO: 350457 - RNA, 22 nt, Human
cuagaaaucucuguuuacauca

SEQ ID NO: 350458 - RNA, 22 nt, Human
ccucucccacguggcagaggcu

SEQ ID NO: 350459 - RNA, 22 nt, Human
acagccugcugccugcuucuug

SEQ ID NO: 350460 - RNA, 22 nt, Human
cagucccagacauaguaaggga

SEQ ID NO: 350461 - RNA, 22 nt, Human
cacucugcagcugaagggcugg

SEQ ID NO: 350462 - RNA, 22 nt, Human
cuggaagggucuacuuagcaga

SEQ ID NO: 350463 - RNA, 22 nt, Human
uuaggaguccagaugucuuggg

SEQ ID NO: 350464 - RNA, 22 nt, Human
ggcugccaggagggaggccagu

SEQ ID NO: 350465 - RNA, 22 nt, Human
gucacagaguuauuaauugugu

SEQ ID NO: 350466 - RNA, 22 nt, Human
agcugcuaugacaacaccagcc

SEQ ID NO: 350467 - RNA, 22 nt, Human
uuaguuuucccaucuuuauggu

SEQ ID NO: 350468 - RNA, 22 nt, Human
uugauuaaucccaugugaguag

SEQ ID NO: 350469 - RNA, 20 nt, Human
cauauauaccuagaagugga

SEQ ID NO: 350470 - RNA, 22 nt, Human
aggagcagaacugauucugacu

SEQ ID NO: 350471 - RNA, 22 nt, Human
uccaggaggacugagggggcug

SEQ ID NO: 350472 - RNA, 22 nt, Human
gucaggaugagggaugaggagu

SEQ ID NO: 350473 - RNA, 22 nt, Human
caauuucugggccucacacaag

SEQ ID NO: 350474 - RNA, 22 nt, Human
acuggaucuaauugguuauagu

SEQ ID NO: 350475 - RNA, 21 nt, Human
auuauuauaaagaccacaggg

SEQ ID NO: 350476 - RNA, 23 nt, Human
ucuaauacaugaaaccuagaugu

SEQ ID NO: 350477 - RNA, 22 nt, Human
accacugcccauggugaaaacu

SEQ ID NO: 350478 - RNA, 22 nt, Human
gagccugaugaaacaggcagac

SEQ ID NO: 350479 - RNA, 22 nt, Human
ucaaaccaccuuguuacugggg

SEQ ID NO: 350480 - RNA, 22 nt, Human
ucuucaaaugcuaguaauauca

SEQ ID NO: 350481 - RNA, 22 nt, Human
ggagggugcauuuuacccugug

SEQ ID NO: 350482 - RNA, 22 nt, Human
cccagguggcagaagcugcagu

SEQ ID NO: 350483 - RNA, 22 nt, Human
ccugggagguggagguugcagc

SEQ ID NO: 350484 - RNA, 22 nt, Human
auggccuggccagagcucugcu

SEQ ID NO: 350485 - RNA, 22 nt, Human
agccagccgggggaccacagug

SEQ ID NO: 350486 - RNA, 22 nt, Human
auaauuuacuaagcucuaccuu

SEQ ID NO: 350487 - RNA, 22 nt, Human
ucccagagcucuggagguugga

SEQ ID NO: 350488 - RNA, 22 nt, Human
ugucauuuucuaaucuguuguc

SEQ ID NO: 350489 - RNA, 22 nt, Human
ggggccagcuucgcgugcucuu

SEQ ID NO: 350490 - RNA, 20 nt, Human
ugcagcuucaccugugucau

SEQ ID NO: 350491 - RNA, 22 nt, Human
uuccuuagugacuucuagcuac

SEQ ID NO: 350492 - RNA, 22 nt, Human
aucuuguuaaaaugcagaaacu

SEQ ID NO: 350493 - RNA, 20 nt, Human
cagucccaauccagggccag

SEQ ID NO: 350494 - RNA, 22 nt, Human
ugccaggggaccuagggauguc

SEQ ID NO: 350495 - RNA, 17 nt, Human
cauguguaugugggagu

SEQ ID NO: 350496 - RNA, 22 nt, Human
aggcaagcccccagugaggcuc

SEQ ID NO: 350497 - RNA, 22 nt, Human
ccucagagguguggcaucucug

SEQ ID NO: 350498 - RNA, 22 nt, Human
gccuggagccucagcaaggagg

SEQ ID NO: 350499 - RNA, 22 nt, Human
ucuacugcacuggugucucauc

SEQ ID NO: 350500 - RNA, 22 nt, Human
gaggaaccaaaucagcuugcac

SEQ ID NO: 350501 - RNA, 22 nt, Human
auuuccuauagauauggugagu

SEQ ID NO: 350502 - RNA, 22 nt, Human
auuuccuuugcaaagacugugc

SEQ ID NO: 350503 - RNA, 22 nt, Human
ggauggagaugaccauggugac

SEQ ID NO: 350504 - RNA, 22 nt, Human
cagaacauucacucauaugugg

SEQ ID NO: 350505 - RNA, 22 nt, Human
uuccucaucugugcaccucacu

SEQ ID NO: 350506 - RNA, 22 nt, Human
gcaccaggaggcccuucucauc

SEQ ID NO: 350507 - RNA, 22 nt, Human
ucuucuucccaucccucaaaug

SEQ ID NO: 350508 - RNA, 22 nt, Human
ccucaggauccgcaggugcagu

SEQ ID NO: 350509 - RNA, 22 nt, Human
cagcaggauagguuucuuugga

SEQ ID NO: 350510 - RNA, 17 nt, Human
gauuuccugaaguucuu

SEQ ID NO: 350511 - RNA, 22 nt, Human
guuccaggcaagugggauagga

SEQ ID NO: 350512 - RNA, 22 nt, Human
cuggcagcugugugaagaacug

SEQ ID NO: 350513 - RNA, 22 nt, Human
cuggcuuucauuucaagcacgu

SEQ ID NO: 350514 - RNA, 21 nt, Human
caaagccaggcaacucucucc

SEQ ID NO: 350515 - RNA, 22 nt, Human
gcugggagaggcccugaaguga

SEQ ID NO: 350516 - RNA, 21 nt, Human
auacagaagguggcaaaguac

SEQ ID NO: 350517 - RNA, 22 nt, Human
caugcacagugauaucugaaga

SEQ ID NO: 350518 - RNA, 22 nt, Human
aguauuuagcauagugguuagu

SEQ ID NO: 350519 - RNA, 22 nt, Human
ggcucugcccagaugaagagga

SEQ ID NO: 350520 - RNA, 22 nt, Human
gcaacuuuagaaaaaucuauaa

SEQ ID NO: 350521 - RNA, 22 nt, Human
aggcacugugcuucuuauaugu

SEQ ID NO: 350522 - RNA, 21 nt, Human
aggugcagagccagggaccag

SEQ ID NO: 350523 - RNA, 20 nt, Human
acccagcucugugcccuggg

SEQ ID NO: 350524 - RNA, 22 nt, Human
acccaggcugcuucucaguggc

SEQ ID NO: 350525 - RNA, 22 nt, Human
uggaagugcucuucugaccaac

SEQ ID NO: 350526 - RNA, 22 nt, Human
uuagauauguuuuugcuaaugc

SEQ ID NO: 350527 - RNA, 22 nt, Human
cuuccaaauguaaauaaguuuc

SEQ ID NO: 350528 - RNA, 22 nt, Human
gugggcagugguuugcgcgguc

SEQ ID NO: 350529 - RNA, 22 nt, Human
aagagcuggaagugaagauaac

SEQ ID NO: 350530 - RNA, 22 nt, Human
uuugcauuuuagauuuaggccu

SEQ ID NO: 350531 - RNA, 23 nt, Human
cuuuccuuucuuugacacccagc

SEQ ID NO: 350532 - RNA, 22 nt, Human
cagggagaagucuggucagucc

SEQ ID NO: 350533 - RNA, 22 nt, Human
uuccauaauaaccugagagaaa

SEQ ID NO: 350534 - RNA, 22 nt, Human
aucaggauagugguuaccuggg

SEQ ID NO: 350535 - RNA, 22 nt, Human
aggcagacaaggacacaguggg

SEQ ID NO: 350536 - RNA, 23 nt, Human
caugggagugagaaugccagcuc

SEQ ID NO: 350537 - RNA, 20 nt, Human
ugcagcugguuucacaggga

SEQ ID NO: 350538 - RNA, 22 nt, Human
guuuauuauucaacuucauguu

SEQ ID NO: 350539 - RNA, 22 nt, Human
ugccaggcccucccacagauua

SEQ ID NO: 350540 - RNA, 22 nt, Human
ucuguucaguuguaccuucccc

SEQ ID NO: 350541 - RNA, 22 nt, Human
gguacaauggaccauaaaagcu

SEQ ID NO: 350542 - RNA, 22 nt, Human
auaaggaaugauguaucaguuu

SEQ ID NO: 350543 - RNA, 22 nt, Human
aaagaaucguguguaguuugaa

SEQ ID NO: 350544 - RNA, 22 nt, Human
agcuuuauggugccucacuuga

SEQ ID NO: 350545 - RNA, 19 nt, Human
gcugugugaccuugggcaa

SEQ ID NO: 350546 - RNA, 22 nt, Human
gccagguggagguugcagugag

SEQ ID NO: 350547 - RNA, 22 nt, Human
uuucuuuguuguuaucacauca

SEQ ID NO: 350548 - RNA, 20 nt, Human
uccagggcuagggagcucau

SEQ ID NO: 350549 - RNA, 22 nt, Human
aaaucucaguguucuaagcauu

SEQ ID NO: 350550 - RNA, 22 nt, Human
agggcagcuaaggugcugacug

SEQ ID NO: 350551 - RNA, 22 nt, Human
cagugcagguuuagggcugggg

SEQ ID NO: 350552 - RNA, 22 nt, Human
auaaaugauucagcaggaaaua

SEQ ID NO: 350553 - RNA, 22 nt, Human
aaauaauguuaggccuuugcuc

SEQ ID NO: 350554 - RNA, 22 nt, Human
gccuuugcaccaucagugcaau

SEQ ID NO: 350555 - RNA, 22 nt, Human
agugaaaugauaguguaaauac

SEQ ID NO: 350556 - RNA, 22 nt, Human
ucagcugaguucuagagcacuc

SEQ ID NO: 350557 - RNA, 22 nt, Human
aacaucuuuuuguuugcugaaa

SEQ ID NO: 350558 - RNA, 21 nt, Human
cuguccaguaauuccuggcac

SEQ ID NO: 350559 - RNA, 21 nt, Human
ggucagggggugccuccaggu

SEQ ID NO: 350560 - RNA, 22 nt, Human
ugggccugggucuuugcugcca

SEQ ID NO: 350561 - RNA, 22 nt, Human
caccagggcucugagcucugaa

SEQ ID NO: 350562 - RNA, 22 nt, Human
caaaagaagcucuuggggcuag

SEQ ID NO: 350563 - RNA, 22 nt, Human
aaagauuuaagaauaauuugug

SEQ ID NO: 350564 - RNA, 22 nt, Human
cagacagacagccguggccacc

SEQ ID NO: 350565 - RNA, 22 nt, Human
auauaauuguucugaaguguuu

SEQ ID NO: 350566 - RNA, 22 nt, Human
cugggaaauggcuucgagcuca

SEQ ID NO: 350567 - RNA, 22 nt, Human
cuguggagcuuguggcaguggg

SEQ ID NO: 350568 - RNA, 22 nt, Human
gggaguggguuuggccuaggcc

SEQ ID NO: 350569 - RNA, 22 nt, Human
gugauuccuauuaguacaugca

SEQ ID NO: 350570 - RNA, 22 nt, Human
agguggguaucaugagagauua

SEQ ID NO: 350571 - RNA, 22 nt, Human
ccaggccuccugugaguggacc

SEQ ID NO: 350572 - RNA, 22 nt, Human
ugagccaggaguuugaggcugu

SEQ ID NO: 350573 - RNA, 22 nt, Human
guaaacaucagccacucuauuu

SEQ ID NO: 350574 - RNA, 22 nt, Human
ggggcaggagcccuucuucagc

SEQ ID NO: 350575 - RNA, 22 nt, Human
cagcaggaaacuuaaagguaau

SEQ ID NO: 350576 - RNA, 22 nt, Human
cgggcagauugggaagguucau

SEQ ID NO: 350577 - RNA, 22 nt, Human
uuaguacugauagggucaauca

SEQ ID NO: 350578 - RNA, 22 nt, Human
uggccucuuaggacauccucua

SEQ ID NO: 350579 - RNA, 22 nt, Human
uucuggagagaaaccuuacaaa

SEQ ID NO: 350580 - RNA, 22 nt, Human
uggcagaguuggagguggaaga

SEQ ID NO: 350581 - RNA, 22 nt, Human
uagggaugagccaguggguagu

SEQ ID NO: 350582 - RNA, 23 nt, Human
uggcucuguggaucccucaggag

SEQ ID NO: 350583 - RNA, 22 nt, Human
aucauuccacauguaccacuag

SEQ ID NO: 350584 - RNA, 22 nt, Human
ugucuuccucuuggcuugagcu

SEQ ID NO: 350585 - RNA, 22 nt, Human
ggcagcaguggcugcuauuguc

SEQ ID NO: 350586 - RNA, 22 nt, Human
uuccacaauguaugaauaagau

SEQ ID NO: 350587 - RNA, 21 nt, Human
aacauuucugggagaacucac

SEQ ID NO: 350588 - RNA, 22 nt, Human
aagagcuggcccaaucugagca

SEQ ID NO: 350589 - RNA, 23 nt, Human
uccagggauuaaugaagucaguc

SEQ ID NO: 350590 - RNA, 22 nt, Human
gcuccagguauuugcccuuuua

SEQ ID NO: 350591 - RNA, 22 nt, Human
cucuggaggccuaaggaagugg

SEQ ID NO: 350592 - RNA, 22 nt, Human
agggcuguuuuuggcaccuggg

SEQ ID NO: 350593 - RNA, 22 nt, Human
cauggcuuuuuagcauauucaa

SEQ ID NO: 350594 - RNA, 19 nt, Human
cauguuaugcuguaguauc

SEQ ID NO: 350595 - RNA, 22 nt, Human
uaauuguagcuuuguaaucagc

SEQ ID NO: 350596 - RNA, 22 nt, Human
cugggaggcacuauucaggagg

SEQ ID NO: 350597 - RNA, 22 nt, Human
gucauuucuguuucuucagugc

SEQ ID NO: 350598 - RNA, 22 nt, Human
agccucucuuuauucccagcua

SEQ ID NO: 350599 - RNA, 22 nt, Human
uuguguccugauuugacacaau

SEQ ID NO: 350600 - RNA, 22 nt, Human
aaggcugauuagacugauagcu

SEQ ID NO: 350601 - RNA, 17 nt, Human
agcagcugaagcagcca

SEQ ID NO: 350602 - RNA, 22 nt, Human
agcugcccuuaauaggcauuca

SEQ ID NO: 350603 - RNA, 18 nt, Human
cugaggcuggcaggagcc

SEQ ID NO: 350604 - RNA, 22 nt, Human
cagagcaggcccacugcccucc

SEQ ID NO: 350605 - RNA, 19 nt, Human
uaguggagugacaaguucu

SEQ ID NO: 350606 - RNA, 22 nt, Human
cuucccugauaagagccucaga

SEQ ID NO: 350607 - RNA, 22 nt, Human
ggcaggcuggcuuuguuccagg

SEQ ID NO: 350608 - RNA, 22 nt, Human
ugaggaagcaaaggcuugugug

SEQ ID NO: 350609 - RNA, 22 nt, Human
agaucucaccucuguguauuau

SEQ ID NO: 350610 - RNA, 23 nt, Human
acuuuauccuauaucuuuguucu

SEQ ID NO: 350611 - RNA, 22 nt, Human
cugugcuggcagaccuggaguu

SEQ ID NO: 350612 - RNA, 22 nt, Human
gggcagcugccacuccgcuugc

SEQ ID NO: 350613 - RNA, 22 nt, Human
ccagccagcugcccuuggggcc

SEQ ID NO: 350614 - RNA, 22 nt, Human
ccaaaguccauaguuuacauua

SEQ ID NO: 350615 - RNA, 22 nt, Human
cugggcagguauacaaaaaaug

SEQ ID NO: 350616 - RNA, 22 nt, Human
agggagguccaucccugcagag

SEQ ID NO: 350617 - RNA, 22 nt, Human
ugcagugguguccagguguacu

SEQ ID NO: 350618 - RNA, 22 nt, Human
aagccaggcaugcuuggacagu

SEQ ID NO: 350619 - RNA, 22 nt, Human
aucuggcuuacgaagcacuggu

SEQ ID NO: 350620 - RNA, 22 nt, Human
aagaacauuuuguagaaugaca

SEQ ID NO: 350621 - RNA, 22 nt, Human
agccagugggauuagagccucu

SEQ ID NO: 350622 - RNA, 22 nt, Human
uuugacagacauuuacuacauu

SEQ ID NO: 350623 - RNA, 22 nt, Human
ugacagggugauuaugagagcu

SEQ ID NO: 350624 - RNA, 22 nt, Human
agcucugcaggcacagcugagg

SEQ ID NO: 350625 - RNA, 22 nt, Human
uuccaggagacuuccagaaaua

SEQ ID NO: 350626 - RNA, 22 nt, Human
aggugucuucagggugagacag

SEQ ID NO: 350627 - RNA, 22 nt, Human
ugucccagguccuagaugacca

SEQ ID NO: 350628 - RNA, 22 nt, Human
acagcuugcaauggcuuucaac

SEQ ID NO: 350629 - RNA, 22 nt, Human
cagucucucagcuuucagcugu

SEQ ID NO: 350630 - RNA, 22 nt, Human
ugggcagauguggcucuccuug

SEQ ID NO: 350631 - RNA, 22 nt, Human
gugggcugcccuugaggucagc

SEQ ID NO: 350632 - RNA, 22 nt, Human
aggcagugcagaguccucuucu

SEQ ID NO: 350633 - RNA, 18 nt, Human
ugacucacccugucagug

SEQ ID NO: 350634 - RNA, 22 nt, Human
ggucccugguucccucugagcu

SEQ ID NO: 350635 - RNA, 21 nt, Human
cugugcuuuuuaagugugaug

SEQ ID NO: 350636 - RNA, 22 nt, Human
uacauagcaaggaaaugacaga

SEQ ID NO: 350637 - RNA, 22 nt, Human
cuugucagccaauuguggauuu

SEQ ID NO: 350638 - RNA, 22 nt, Human
agcaugaaagcauaggacaguc

SEQ ID NO: 350639 - RNA, 22 nt, Human
aaauaucauuuauaacuuuuaa

SEQ ID NO: 350640 - RNA, 22 nt, Human
uuauucuuuaaacauauauguu

SEQ ID NO: 350641 - RNA, 22 nt, Human
augaugugugcugaucaagcuu

SEQ ID NO: 350642 - RNA, 22 nt, Human
uggcucugucacugugagcuau

SEQ ID NO: 350643 - RNA, 22 nt, Human
uuucucugcugccugugucgau

SEQ ID NO: 350644 - RNA, 22 nt, Human
cacagaaaaaggcuugaaaauc

SEQ ID NO: 350645 - RNA, 22 nt, Human
aucuggcucaccuggguaaaua

SEQ ID NO: 350646 - RNA, 22 nt, Human
gaggggaaagugugaggcugcg

SEQ ID NO: 350647 - RNA, 22 nt, Human
aagggcucugugugccucccca

SEQ ID NO: 350648 - RNA, 22 nt, Human
aaaggccacuugaaggauuuuu

SEQ ID NO: 350649 - RNA, 22 nt, Human
agccaguguuaagugacugguu

SEQ ID NO: 350650 - RNA, 22 nt, Human
ugacagggcuagaggcaaugca

SEQ ID NO: 350651 - RNA, 22 nt, Human
gcccaggaagugacucagaugu

SEQ ID NO: 350652 - RNA, 22 nt, Human
cagucuuuguucccauuacuga

SEQ ID NO: 350653 - RNA, 22 nt, Human
guggugcauccuugaguaagcu

SEQ ID NO: 350654 - RNA, 22 nt, Human
uucuucuugucugcccucacau

SEQ ID NO: 350655 - RNA, 22 nt, Human
agagcagauggagcuggaagag

SEQ ID NO: 350656 - RNA, 22 nt, Human
gcuuugcauuguuuaaucagga

SEQ ID NO: 350657 - RNA, 22 nt, Human
agcugccugggcuuguacaccu

SEQ ID NO: 350658 - RNA, 22 nt, Human
ccugccagugaagcugacgggc

SEQ ID NO: 350659 - RNA, 22 nt, Human
ucaagauaccaccauuauaugu

SEQ ID NO: 350660 - RNA, 22 nt, Human
agggggugcuacuuccagaguu

SEQ ID NO: 350661 - RNA, 22 nt, Human
uccugccuaccuugcggaggug

SEQ ID NO: 350662 - RNA, 22 nt, Human
uaauguguccugaaagcuucug

SEQ ID NO: 350663 - RNA, 20 nt, Human
ccugucugcaauggagguca

SEQ ID NO: 350664 - RNA, 22 nt, Human
aaugcuguauaucuuagcuaau

SEQ ID NO: 350665 - RNA, 21 nt, Human
gugguuauuuucauuagcauc

SEQ ID NO: 350666 - RNA, 22 nt, Human
uuguccaaaguaacacaucuag

SEQ ID NO: 350667 - RNA, 22 nt, Human
aggguagguguaagauagcccu

SEQ ID NO: 350668 - RNA, 22 nt, Human
agcugccaucugaagaacugca

SEQ ID NO: 350669 - RNA, 22 nt, Human
uaaagcaguguugggucggacg

SEQ ID NO: 350670 - RNA, 22 nt, Human
uugacacaguuuucucauuaag

SEQ ID NO: 350671 - RNA, 22 nt, Human
aggccucacucucagagcuucu

SEQ ID NO: 350672 - RNA, 22 nt, Human
ugggcagagucauacaggagac

SEQ ID NO: 350673 - RNA, 22 nt, Human
uguugauuaguguuuagacuua

SEQ ID NO: 350674 - RNA, 22 nt, Human
uuaaauuuuagaaacagacucu

SEQ ID NO: 350675 - RNA, 22 nt, Human
ccagucccgcaugguccagaau

SEQ ID NO: 350676 - RNA, 21 nt, Human
gguugguguguccaguggcca

SEQ ID NO: 350677 - RNA, 22 nt, Human
ucugaaaguaucuggaucuuuu

SEQ ID NO: 350678 - RNA, 22 nt, Human
acugucugcuggccccugguua

SEQ ID NO: 350679 - RNA, 22 nt, Human
caagggcucacggucugcuggg

SEQ ID NO: 350680 - RNA, 22 nt, Human
ggggcagcucccgagggcagga

SEQ ID NO: 350681 - RNA, 22 nt, Human
agcugcugagccaggcugaugu

SEQ ID NO: 350682 - RNA, 22 nt, Human
ugggugaggaugaugaggcagc

SEQ ID NO: 350683 - RNA, 22 nt, Human
gcccaggaaaugccccguggug

SEQ ID NO: 350684 - RNA, 22 nt, Human
gucagaggggcagcugccaggc

SEQ ID NO: 350685 - RNA, 22 nt, Human
ggcucugcuucagaaggcucau

SEQ ID NO: 350686 - RNA, 22 nt, Human
ucucuucuaacacuagaaauuc

SEQ ID NO: 350687 - RNA, 22 nt, Human
gugcauguuaaugguguacaaa

SEQ ID NO: 350688 - RNA, 22 nt, Human
ugggcugcuguuacaggggcug

SEQ ID NO: 350689 - RNA, 22 nt, Human
acaaacuaccuacagauguuca

SEQ ID NO: 350690 - RNA, 22 nt, Human
ccuguucaagggaugauugacc

SEQ ID NO: 350691 - RNA, 22 nt, Human
uggcagaaagaaccaugugcaa

SEQ ID NO: 350692 - RNA, 22 nt, Human
uugauuucuauucagauguaga

SEQ ID NO: 350693 - RNA, 22 nt, Human
gagggcucugucuggaagggaa

SEQ ID NO: 350694 - RNA, 21 nt, Human
gcucagaguauugcacuguuu

SEQ ID NO: 350695 - RNA, 22 nt, Human
ucacaacucuuuccauuuaaua

SEQ ID NO: 350696 - RNA, 22 nt, Human
gcucugagcacugugcggcugg

SEQ ID NO: 350697 - RNA, 22 nt, Human
uuccaguucccaugaggauuaa

SEQ ID NO: 350698 - RNA, 22 nt, Human
aaucauucuuauuucacagcaa

SEQ ID NO: 350699 - RNA, 21 nt, Human
auggagucaggggaaugggcc

SEQ ID NO: 350700 - RNA, 21 nt, Human
ggcagcugaccgcgcggugca

SEQ ID NO: 350701 - RNA, 22 nt, Human
auuguacaaugccuggaacauu

SEQ ID NO: 350702 - RNA, 22 nt, Human
ggcagcuccucaaaaaauuaaa

SEQ ID NO: 350703 - RNA, 22 nt, Human
acugagcugcuugaagugaacu

SEQ ID NO: 350704 - RNA, 22 nt, Human
cacauuucugugagucaauauu

SEQ ID NO: 350705 - RNA, 22 nt, Human
cagaucuagagcuuuuccaucu

SEQ ID NO: 350706 - RNA, 22 nt, Human
guuguacagcauccagugcaga

SEQ ID NO: 350707 - RNA, 22 nt, Human
uaagacuucauuaguaauaugg

SEQ ID NO: 350708 - RNA, 23 nt, Human
uuagagaugauuaaaaaaucuug

SEQ ID NO: 350709 - RNA, 22 nt, Human
ucuagacacuacuaguaaccgg

SEQ ID NO: 350710 - RNA, 22 nt, Human
ccuguucaagguauuaauuauc

SEQ ID NO: 350711 - RNA, 22 nt, Human
uuuccaaaaugaaucuaaugca

SEQ ID NO: 350712 - RNA, 22 nt, Human
uaacagaagaaaacauauugga

SEQ ID NO: 350713 - RNA, 22 nt, Human
aggccucagugaucaucaucag

SEQ ID NO: 350714 - RNA, 22 nt, Human
acauuucugcaucucagagcua

SEQ ID NO: 350715 - RNA, 22 nt, Human
cuuccuggccauugccauggca

SEQ ID NO: 350716 - RNA, 22 nt, Human
ucuggagcuggagggcaaggca

SEQ ID NO: 350717 - RNA, 22 nt, Human
gggaccugccauugcucacagg

SEQ ID NO: 350718 - RNA, 22 nt, Human
cagcagcucccauccgcugagc

SEQ ID NO: 350719 - RNA, 19 nt, Human
uuacaucugcaacacuggu

SEQ ID NO: 350720 - RNA, 22 nt, Human
acuguucacccagcacuagcag

SEQ ID NO: 350721 - RNA, 22 nt, Human
gagcucauccccaugguccguc

SEQ ID NO: 350722 - RNA, 22 nt, Human
gaaucauuuauuuuugacagca

SEQ ID NO: 350723 - RNA, 22 nt, Human
acaugcuuuaacuuauuuugau

SEQ ID NO: 350724 - RNA, 22 nt, Human
uuuauacuccacucugcaagcg

SEQ ID NO: 350725 - RNA, 22 nt, Human
uggcaucucaaacaggcagauu

SEQ ID NO: 350726 - RNA, 22 nt, Human
cacacaugagucuccccauugg

SEQ ID NO: 350727 - RNA, 23 nt, Human
ccagcucccaggucugaggacug

SEQ ID NO: 350728 - RNA, 22 nt, Human
gagcucagcacuaaaaucaugu

SEQ ID NO: 350729 - RNA, 22 nt, Human
aaggcugagggcuguaccuggc

SEQ ID NO: 350730 - RNA, 22 nt, Human
cacagggcagguacucucagag

SEQ ID NO: 350731 - RNA, 22 nt, Human
gucucagagagcuacucucuua

SEQ ID NO: 350732 - RNA, 18 nt, Human
uggacaggguggagaaaa

SEQ ID NO: 350733 - RNA, 22 nt, Human
uccagcagaccaucaaggcuca

SEQ ID NO: 350734 - RNA, 22 nt, Human
gccugaggaaugcuccugacuu

SEQ ID NO: 350735 - RNA, 22 nt, Human
uguaggaguccaaucaggagac

SEQ ID NO: 350736 - RNA, 22 nt, Human
gaguccaguguuuaccaggggu

SEQ ID NO: 350737 - RNA, 22 nt, Human
cccaggcuggauuucgguggca

SEQ ID NO: 350738 - RNA, 19 nt, Human
ugucccagacuccgugucu

SEQ ID NO: 350739 - RNA, 22 nt, Human
acagaacugggaaaugcacaua

SEQ ID NO: 350740 - RNA, 22 nt, Human
aagagggcagcacagguggguc

SEQ ID NO: 350741 - RNA, 20 nt, Human
cugugccuaaaccuccgggu

SEQ ID NO: 350742 - RNA, 22 nt, Human
gguuucaacucagcuaguaagg

SEQ ID NO: 350743 - RNA, 22 nt, Human
aggcagacugugcgggaagagu

SEQ ID NO: 350744 - RNA, 22 nt, Human
ccagaucuaaguccaaaguacu

SEQ ID NO: 350745 - RNA, 22 nt, Human
aggcccugcccagagcuccucg

SEQ ID NO: 350746 - RNA, 22 nt, Human
acaugaaacuguugcauuagaa

SEQ ID NO: 350747 - RNA, 22 nt, Human
uugucuuaaauggauggacaau

SEQ ID NO: 350748 - RNA, 22 nt, Human
aaaacuuucagggauacagaaa

SEQ ID NO: 350749 - RNA, 22 nt, Human
gacccagcuuaagucacauguu

SEQ ID NO: 350750 - RNA, 22 nt, Human
acagaaauauucguggugcuug

SEQ ID NO: 350751 - RNA, 22 nt, Human
cauugcacuccacccuaggcaa

SEQ ID NO: 350752 - RNA, 22 nt, Human
aaccugcaguuuuuauucugag

SEQ ID NO: 350753 - RNA, 22 nt, Human
aucuggcuccuacacuugaaga

SEQ ID NO: 350754 - RNA, 22 nt, Human
aaaauggucucagcuggcacca

SEQ ID NO: 350755 - RNA, 22 nt, Human
cccugcagaucuaggguccuuc

SEQ ID NO: 350756 - RNA, 22 nt, Human
cagucucucugaaguauuaaga

SEQ ID NO: 350757 - RNA, 22 nt, Human
aaguccagugcuuuagauucca

SEQ ID NO: 350758 - RNA, 22 nt, Human
ucagccugcuccaagugcugcc

SEQ ID NO: 350759 - RNA, 22 nt, Human
agccuccuguagcccucaccca

SEQ ID NO: 350760 - RNA, 22 nt, Human
caggagugaaaugaggcccagg

SEQ ID NO: 350761 - RNA, 22 nt, Human
aauuucagaacccaaauuagcg

SEQ ID NO: 350762 - RNA, 22 nt, Human
guuucgucaggcuuauucuauc

SEQ ID NO: 350763 - RNA, 22 nt, Human
augcucugggcaggagcccugg

SEQ ID NO: 350764 - RNA, 22 nt, Human
ucaagagagugcugcuuggggu

SEQ ID NO: 350765 - RNA, 20 nt, Human
aguaccuuuuguauguuacc

SEQ ID NO: 350766 - RNA, 20 nt, Human
augugucuguaaacaacucu

SEQ ID NO: 350767 - RNA, 22 nt, Human
acuuuaucaggaaucacacagc

SEQ ID NO: 350768 - RNA, 21 nt, Human
ugcuuuaugggaaaaauguca

SEQ ID NO: 350769 - RNA, 22 nt, Human
aggcagcugaggucuggcgccc

SEQ ID NO: 350770 - RNA, 22 nt, Human
ucucagagauguuagggaagag

SEQ ID NO: 350771 - RNA, 22 nt, Human
aagaagaugguuaacuuucagu

SEQ ID NO: 350772 - RNA, 22 nt, Human
uaagaacaguguuucaucucua

SEQ ID NO: 350773 - RNA, 22 nt, Human
uaaggccaauuacauauguuca

SEQ ID NO: 350774 - RNA, 22 nt, Human
accaggcagcaccaaagccggu

SEQ ID NO: 350775 - RNA, 22 nt, Human
auaacagagagcuacugaacug

SEQ ID NO: 350776 - RNA, 22 nt, Human
cugugucccccucagccaggug

SEQ ID NO: 350777 - RNA, 22 nt, Human
ggcagagguagcuggaaccagg

SEQ ID NO: 350778 - RNA, 22 nt, Human
cauuuuaaaugauuuaagccaa

SEQ ID NO: 350779 - RNA, 22 nt, Human
aggucagcaugaguagaaggua

SEQ ID NO: 350780 - RNA, 22 nt, Human
ggcagcaaauauugucagcugu

SEQ ID NO: 350781 - RNA, 22 nt, Human
agcagccacagcagaucugagu

SEQ ID NO: 350782 - RNA, 22 nt, Human
uucagagagaccaaguggcgug

SEQ ID NO: 350783 - RNA, 22 nt, Human
uugugugguagcuucauugaac

SEQ ID NO: 350784 - RNA, 22 nt, Human
auuugcauaauagugauuugua

SEQ ID NO: 350785 - RNA, 22 nt, Human
uccauuuuagagaugaagaaac

SEQ ID NO: 350786 - RNA, 22 nt, Human
ugcugcucuguaaagugaugag

SEQ ID NO: 350787 - RNA, 22 nt, Human
ggccucuggcaggcaggcccuc

SEQ ID NO: 350788 - RNA, 22 nt, Human
gaauagcuuccuuuuuuccaaa

SEQ ID NO: 350789 - RNA, 22 nt, Human
aucuuucuccauauacaucuuu

SEQ ID NO: 350790 - RNA, 22 nt, Human
agcuucuuggcucagcacuugg

SEQ ID NO: 350791 - RNA, 22 nt, Human
uggcagaguggaccauacucaa

SEQ ID NO: 350792 - RNA, 22 nt, Human
agcagcauuccuggcuucuauc

SEQ ID NO: 350793 - RNA, 22 nt, Human
guuagaaacacauucuuauuga

SEQ ID NO: 350794 - RNA, 22 nt, Human
ugaaggccagggauuugcagcc

SEQ ID NO: 350795 - RNA, 22 nt, Human
ucuggcuuucauuuguuuaaag

SEQ ID NO: 350796 - RNA, 22 nt, Human
augggaggaaggaggcccuuga

SEQ ID NO: 350797 - RNA, 22 nt, Human
aagaugcaugcugaagcuggcu

SEQ ID NO: 350798 - RNA, 22 nt, Human
ucauucagguugggcaaguguc

SEQ ID NO: 350799 - RNA, 22 nt, Human
ggcugccuucagacuccagcuu

SEQ ID NO: 350800 - RNA, 22 nt, Human
uuugcaaauauguguuucuauu

SEQ ID NO: 350801 - RNA, 22 nt, Human
ucccaggugaugcugaggccac

SEQ ID NO: 350802 - RNA, 22 nt, Human
gcuguucacaucuggaccauuu

SEQ ID NO: 350803 - RNA, 22 nt, Human
gggggacuggaccguccugggu

SEQ ID NO: 350804 - RNA, 22 nt, Human
aaggcagagggcuggaucagag

SEQ ID NO: 350805 - RNA, 22 nt, Human
uccaggagugauaaggccacug

SEQ ID NO: 350806 - RNA, 22 nt, Human
gucuuucuuaauucaagugcuu

SEQ ID NO: 350807 - RNA, 22 nt, Human
agcagggcaaagucaggcuaac

SEQ ID NO: 350808 - RNA, 22 nt, Human
uccagccuuucuacucacugag

SEQ ID NO: 350809 - RNA, 22 nt, Human
cgacccuacagacagugcugag

SEQ ID NO: 350810 - RNA, 22 nt, Human
ugcagggccuuguugaugugcu

SEQ ID NO: 350811 - RNA, 22 nt, Human
aucaaaaugcuccagugauggu

SEQ ID NO: 350812 - RNA, 22 nt, Human
gccaguggcuugccaggcagga

SEQ ID NO: 350813 - RNA, 22 nt, Human
cacagggcuucucauggggugc

SEQ ID NO: 350814 - RNA, 22 nt, Human
gccucugcucggacuuugccuc

SEQ ID NO: 350815 - RNA, 20 nt, Human
ccuggagccuggaaggaguc

SEQ ID NO: 350816 - RNA, 22 nt, Human
uuggcugagagaggaaaagggc

SEQ ID NO: 350817 - RNA, 22 nt, Human
ugauuuccacgugcacccaggu

SEQ ID NO: 350818 - RNA, 22 nt, Human
cuguacauauacauuuuuuucc

SEQ ID NO: 350819 - RNA, 22 nt, Human
cacucugacuggcccugcagga

SEQ ID NO: 350820 - RNA, 22 nt, Human
aggcagcccacaggacacagga

SEQ ID NO: 350821 - RNA, 22 nt, Human
ggugggcagcucuuggcaggca

SEQ ID NO: 350822 - RNA, 22 nt, Human
uuggcagggccaggcucucucu

SEQ ID NO: 350823 - RNA, 20 nt, Human
uggcuccugcgguggaacca

SEQ ID NO: 350824 - RNA, 22 nt, Human
agcugcccagauaggaggaggc

SEQ ID NO: 350825 - RNA, 22 nt, Human
guccaugauucuguguaguaga

SEQ ID NO: 350826 - RNA, 22 nt, Human
ucauugaauuucacagcuuuau

SEQ ID NO: 350827 - RNA, 22 nt, Human
uaaguaaauuuauaaugugauu

SEQ ID NO: 350828 - RNA, 22 nt, Human
uucugugaaucuuuuuucccac

SEQ ID NO: 350829 - RNA, 22 nt, Human
uccugcagccaagggucaucga

SEQ ID NO: 350830 - RNA, 22 nt, Human
caggcacuucugcugcuugucu

SEQ ID NO: 350831 - RNA, 22 nt, Human
acacacaacucauuguguaaua

SEQ ID NO: 350832 - RNA, 23 nt, Human
acagacaacacugaugagagaaa

SEQ ID NO: 350833 - RNA, 22 nt, Human
ccaggagucuggaugagguguc

SEQ ID NO: 350834 - RNA, 22 nt, Human
uucucagaauugacugggagca

SEQ ID NO: 350835 - RNA, 22 nt, Human
aaggcagccuuuguuugauuga

SEQ ID NO: 350836 - RNA, 22 nt, Human
auagcuuucuuaaauauauaaa

SEQ ID NO: 350837 - RNA, 21 nt, Human
aaagugguaaggauuauuuug

SEQ ID NO: 350838 - RNA, 22 nt, Human
ccagagcuccagggcuacagaa

SEQ ID NO: 350839 - RNA, 22 nt, Human
gaaaacacuuugaucugaaagu

SEQ ID NO: 350840 - RNA, 22 nt, Human
ccagggcaauaggaacacuuuu

SEQ ID NO: 350841 - RNA, 22 nt, Human
aggcucagugauguaaaauaua

SEQ ID NO: 350842 - RNA, 22 nt, Human
ucuggcucucaacaaauauuua

SEQ ID NO: 350843 - RNA, 22 nt, Human
acauuucugagcagggagcugu

SEQ ID NO: 350844 - RNA, 22 nt, Human
uuccagaaaucuuucagcucaa

SEQ ID NO: 350845 - RNA, 22 nt, Human
cagggcucccaaauaucucuuc

SEQ ID NO: 350846 - RNA, 22 nt, Human
cuguccccgcgaguccagagcu

SEQ ID NO: 350847 - RNA, 22 nt, Human
cuggcuuucuauuuggugcuau

SEQ ID NO: 350848 - RNA, 22 nt, Human
uggcccugcugggucagagcug

SEQ ID NO: 350849 - RNA, 22 nt, Human
cagcaggauaugguggagagag

SEQ ID NO: 350850 - RNA, 22 nt, Human
uagaaaucuacuuagacuuucu

SEQ ID NO: 350851 - RNA, 22 nt, Human
cuggcaggcggcagagcccagg

SEQ ID NO: 350852 - RNA, 22 nt, Human
uuuggaaaguugucacuuuaga

SEQ ID NO: 350853 - RNA, 19 nt, Human
ucacaggcaucuccccaga

SEQ ID NO: 350854 - RNA, 22 nt, Human
ucacuuagauggggaucaucac

SEQ ID NO: 350855 - RNA, 22 nt, Human
cacaaaugguuguagacauuaa

SEQ ID NO: 350856 - RNA, 22 nt, Human
cagugccaugucugagccccua

SEQ ID NO: 350857 - RNA, 22 nt, Human
cagcagcugauggggaagugau

SEQ ID NO: 350858 - RNA, 21 nt, Human
auagaacaccaggcauauaua

SEQ ID NO: 350859 - RNA, 22 nt, Human
auacauacguacauacguaugu

SEQ ID NO: 350860 - RNA, 22 nt, Human
agccugccuugggcugcuugag

SEQ ID NO: 350861 - RNA, 22 nt, Human
acagagcauauaaagugcuuug

SEQ ID NO: 350862 - RNA, 22 nt, Human
ugccugaggagucagggcaggu

SEQ ID NO: 350863 - RNA, 22 nt, Human
ccaggcugugguuuagauagag

SEQ ID NO: 350864 - RNA, 22 nt, Human
uagggaggaggguuuucaaauc

SEQ ID NO: 350865 - RNA, 20 nt, Human
gucucagaauggauuugcau

SEQ ID NO: 350866 - RNA, 22 nt, Human
cucuucucugcagccuuugaag

SEQ ID NO: 350867 - RNA, 22 nt, Human
agccagagcagggaauuggaca

SEQ ID NO: 350868 - RNA, 22 nt, Human
ccagcccugaacccugcugcau

SEQ ID NO: 350869 - RNA, 22 nt, Human
acagguggccccgagggagugg

SEQ ID NO: 350870 - RNA, 22 nt, Human
gacagacauuuccugauccaau

SEQ ID NO: 350871 - RNA, 22 nt, Human
ugcauuucagaagaaaauucgg

SEQ ID NO: 350872 - RNA, 22 nt, Human
ucuggcucucauacucgccagu

SEQ ID NO: 350873 - RNA, 22 nt, Human
acuggaagccaguugacaauca

SEQ ID NO: 350874 - RNA, 22 nt, Human
ucuguuuaggcaaaauagcuac

SEQ ID NO: 350875 - RNA, 22 nt, Human
cacugggcaauucugagccuaa

SEQ ID NO: 350876 - RNA, 22 nt, Human
caugguuuauuagagcuuauuu

SEQ ID NO: 350877 - RNA, 22 nt, Human
cagcugccuucugcgggaaguc

SEQ ID NO: 350878 - RNA, 22 nt, Human
cagggucuuauaaggccaauuu

SEQ ID NO: 350879 - RNA, 22 nt, Human
gggagacacgcugcaggcauaa

SEQ ID NO: 350880 - RNA, 19 nt, Human
uucccaggaaaggggugca

SEQ ID NO: 350881 - RNA, 22 nt, Human
gggccagugaacaaugagggaa

SEQ ID NO: 350882 - RNA, 22 nt, Human
ccacucugauuuuggcuccacu

SEQ ID NO: 350883 - RNA, 22 nt, Human
cauuugaaugagauugcuguaa

SEQ ID NO: 350884 - RNA, 22 nt, Human
aaaguuuccugcuaagugcuau

SEQ ID NO: 350885 - RNA, 21 nt, Human
aggcagcuggaaggccuggcu

SEQ ID NO: 350886 - RNA, 22 nt, Human
uggaggaugccauccaggauac

SEQ ID NO: 350887 - RNA, 23 nt, Human
agggcugaugccauugcagcucu

SEQ ID NO: 350888 - RNA, 22 nt, Human
gcagggugauagugaggcucag

SEQ ID NO: 350889 - RNA, 19 nt, Human
aaaaacuuaguccagaaag

SEQ ID NO: 350890 - RNA, 22 nt, Human
ggagccaguuuagaccucaguu

SEQ ID NO: 350891 - RNA, 22 nt, Human
ugcacauucacuuagguauugu

SEQ ID NO: 350892 - RNA, 22 nt, Human
cugcugcucagugucaucaugu

SEQ ID NO: 350893 - RNA, 22 nt, Human
guugggaaggcaagaaguagaa

SEQ ID NO: 350894 - RNA, 22 nt, Human
aauucuugguccuaguguauaa

SEQ ID NO: 350895 - RNA, 19 nt, Human
uccauaagcuuguguucau

SEQ ID NO: 350896 - RNA, 22 nt, Human
ugcaggugcguuuucaagccuc

SEQ ID NO: 350897 - RNA, 22 nt, Human
cuggcccagagagcagagcuua

SEQ ID NO: 350898 - RNA, 22 nt, Human
uuucacauaugguuguugauug

SEQ ID NO: 350899 - RNA, 22 nt, Human
aagaaaugcagaaaugugcugg

SEQ ID NO: 350900 - RNA, 22 nt, Human
ucccaggcaaaggcagcucauu

SEQ ID NO: 350901 - RNA, 22 nt, Human
ucuuuucuggacucugcaugga

SEQ ID NO: 350902 - RNA, 22 nt, Human
ucuuccagcaaugugaaaucac

SEQ ID NO: 350903 - RNA, 22 nt, Human
cuacagaaguuucccuugcuua

SEQ ID NO: 350904 - RNA, 22 nt, Human
ggcuggagauaugucuggaaca

SEQ ID NO: 350905 - RNA, 22 nt, Human
aaaugcacacaccaggaaacua

SEQ ID NO: 350906 - RNA, 22 nt, Human
uggcugagugauauuugcaaag

SEQ ID NO: 350907 - RNA, 22 nt, Human
acaugauuuuaguaucauaaua

SEQ ID NO: 350908 - RNA, 20 nt, Human
cccuccagcaaccaggacuu

SEQ ID NO: 350909 - RNA, 22 nt, Human
ugauuuuuagcuauucugaaga

SEQ ID NO: 350910 - RNA, 22 nt, Human
ucugccuugagguccucagcuc

SEQ ID NO: 350911 - RNA, 22 nt, Human
cugcagggaugugaggcccguu

SEQ ID NO: 350912 - RNA, 22 nt, Human
ccuucugcuggucaucccagug

SEQ ID NO: 350913 - RNA, 22 nt, Human
aggacuucaucaccuguauaaa

SEQ ID NO: 350914 - RNA, 22 nt, Human
gggcugagccauuugaaccuug

SEQ ID NO: 350915 - RNA, 22 nt, Human
agggcagccauugagggauucu

SEQ ID NO: 350916 - RNA, 23 nt, Human
ugaaggccuggaggacgcguugu

SEQ ID NO: 350917 - RNA, 22 nt, Human
ggcaggugcucugugggccugg

SEQ ID NO: 350918 - RNA, 22 nt, Human
cguggccuuugagugagcuccc

SEQ ID NO: 350919 - RNA, 20 nt, Human
uauggcuuggcaaagcuuca

SEQ ID NO: 350920 - RNA, 22 nt, Human
aaugccaacuuggauauacauu

SEQ ID NO: 350921 - RNA, 22 nt, Human
ggucacaggggagaagagugau

SEQ ID NO: 350922 - RNA, 22 nt, Human
ucuggaucuccagcacuuauca

SEQ ID NO: 350923 - RNA, 22 nt, Human
gacaguccuugcccaguaucua

SEQ ID NO: 350924 - RNA, 22 nt, Human
ugcuuuauugcaucaguguggg

SEQ ID NO: 350925 - RNA, 22 nt, Human
gccugcagcaugcuaggucuug

SEQ ID NO: 350926 - RNA, 22 nt, Human
gggcugugagaguggggcugcu

SEQ ID NO: 350927 - RNA, 22 nt, Human
ucucagagugguggucccucug

SEQ ID NO: 350928 - RNA, 22 nt, Human
uggcagagcccagaacugagca

SEQ ID NO: 350929 - RNA, 22 nt, Human
ucauaaaaugcuccugauauug

SEQ ID NO: 350930 - RNA, 22 nt, Human
aagauauacuauuaaguaccau

SEQ ID NO: 350931 - RNA, 22 nt, Human
gggcuucuagaccagcagugag

SEQ ID NO: 350932 - RNA, 22 nt, Human
aaguguuuggggaucauuuuaa

SEQ ID NO: 350933 - RNA, 22 nt, Human
aggcccagagcaggaaaggguu

SEQ ID NO: 350934 - RNA, 22 nt, Human
uggcucugccacuaacuuggua

SEQ ID NO: 350935 - RNA, 22 nt, Human
aacauauaaacucuuaaguuca

SEQ ID NO: 350936 - RNA, 21 nt, Human
aaguggagaagaaaagcugga

SEQ ID NO: 350937 - RNA, 22 nt, Human
ccagggcaauuauuuggagggu

SEQ ID NO: 350938 - RNA, 22 nt, Human
cugugccuggggggcagagcug

SEQ ID NO: 350939 - RNA, 22 nt, Human
gucucagauucagacaucuaca

SEQ ID NO: 350940 - RNA, 23 nt, Human
aguuccagaaaaaugcucaagca

SEQ ID NO: 350941 - RNA, 22 nt, Human
acagagagcugugauugaguua

SEQ ID NO: 350942 - RNA, 22 nt, Human
gaguucaguaguuauagucuag

SEQ ID NO: 350943 - RNA, 22 nt, Human
gggucagcugcugggggcugac

SEQ ID NO: 350944 - RNA, 19 nt, Human
acccagagcccuuugcagg

SEQ ID NO: 350945 - RNA, 22 nt, Human
cucuggaguuagugaucugggc

SEQ ID NO: 350946 - RNA, 22 nt, Human
uggccugucuuguugugcuaga

SEQ ID NO: 350947 - RNA, 22 nt, Human
ccugcagcuguaggagaaggcg

SEQ ID NO: 350948 - RNA, 22 nt, Human
ucuuuccuguaacugcuguuca

SEQ ID NO: 350949 - RNA, 22 nt, Human
aaacagaaggguagguaaacau

SEQ ID NO: 350950 - RNA, 22 nt, Human
uucucagagugaccaagucuuu

SEQ ID NO: 350951 - RNA, 20 nt, Human
agguauaagaaaugugauuu

SEQ ID NO: 350952 - RNA, 22 nt, Human
accugcaguggccacuccuaau

SEQ ID NO: 350953 - RNA, 22 nt, Human
ugccaggagagugcaugcaggg

SEQ ID NO: 350954 - RNA, 22 nt, Human
ggcuucccaaggagccaggaug

SEQ ID NO: 350955 - RNA, 20 nt, Human
uuaagaaaagcacauccugc

SEQ ID NO: 350956 - RNA, 22 nt, Human
gaggggcuggcacgauggcugc

SEQ ID NO: 350957 - RNA, 22 nt, Human
uuuacagagagagaacuggacu

SEQ ID NO: 350958 - RNA, 22 nt, Human
auucuuauuauaguaaaacagu

SEQ ID NO: 350959 - RNA, 22 nt, Human
aggcccuggcacugccugggag

SEQ ID NO: 350960 - RNA, 22 nt, Human
gaaacaacuacuauugauuucu

SEQ ID NO: 350961 - RNA, 21 nt, Human
aaaggccauaaucacggagca

SEQ ID NO: 350962 - RNA, 22 nt, Human
gggcauggaggucugucugcag

SEQ ID NO: 350963 - RNA, 22 nt, Human
uaguaucuauuaguaacaagag

SEQ ID NO: 350964 - RNA, 22 nt, Human
uuugagaagcaucugguccacu

SEQ ID NO: 350965 - RNA, 22 nt, Human
uuuaauuugaaaugaguaaccc

SEQ ID NO: 350966 - RNA, 22 nt, Human
uugcaauagccuuauuuccaaa

SEQ ID NO: 350967 - RNA, 22 nt, Human
uaaugcacagaauugacauggg

SEQ ID NO: 350968 - RNA, 22 nt, Human
gcugucugacuccaaguuggag

SEQ ID NO: 350969 - RNA, 22 nt, Human
caagauggaguccgggaaugug

SEQ ID NO: 350970 - RNA, 22 nt, Human
agcucacaguguccuuccucaa

SEQ ID NO: 350971 - RNA, 22 nt, Human
ucccagggacaccaagcuguuu

SEQ ID NO: 350972 - RNA, 22 nt, Human
auaaaacuuauuagaauugugu

SEQ ID NO: 350973 - RNA, 22 nt, Human
ugaggaugacgauggcaauggc

SEQ ID NO: 350974 - RNA, 22 nt, Human
uugaagaggacuuugcagcugu

SEQ ID NO: 350975 - RNA, 22 nt, Human
gcacaauaauucuuguuuugcu

SEQ ID NO: 350976 - RNA, 22 nt, Human
guguccagggccguguugucuu

SEQ ID NO: 350977 - RNA, 22 nt, Human
ggacaagccugugaguggguuu

SEQ ID NO: 350978 - RNA, 22 nt, Human
gguggagcuguggacaggaagg

SEQ ID NO: 350979 - RNA, 22 nt, Human
uauuucugauugcucaugaggc

SEQ ID NO: 350980 - RNA, 22 nt, Human
gccugagaaggauaggaagcga

SEQ ID NO: 350981 - RNA, 22 nt, Human
cccagcucucgcacuuacuagc

SEQ ID NO: 350982 - RNA, 22 nt, Human
gcuggccucaucacugacuucu

SEQ ID NO: 350983 - RNA, 22 nt, Human
cuggaucaugcauugcuugucc

SEQ ID NO: 350984 - RNA, 22 nt, Human
agggagcugcucugcuuccgug

SEQ ID NO: 350985 - RNA, 22 nt, Human
gcagcagaggcccuacucuuug

SEQ ID NO: 350986 - RNA, 20 nt, Human
agucccuuuggucagguauu

SEQ ID NO: 350987 - RNA, 22 nt, Human
ggugccaggcucccagcucagg

SEQ ID NO: 350988 - RNA, 23 nt, Human
ucacaggggccagcgcucugugg

SEQ ID NO: 350989 - RNA, 22 nt, Human
aggacagagggaccagagccca

SEQ ID NO: 350990 - RNA, 22 nt, Human
uuuuccuauaugcaaagaaugc

SEQ ID NO: 350991 - RNA, 22 nt, Human
uugggacagaaaaggagaagau

SEQ ID NO: 350992 - RNA, 22 nt, Human
caggugggagccacagcguaca

SEQ ID NO: 350993 - RNA, 17 nt, Human
caggcagacauguaagc

SEQ ID NO: 350994 - RNA, 22 nt, Human
uagcacaucuucuuggccugca

SEQ ID NO: 350995 - RNA, 22 nt, Human
aauguuguuuuucugcaugucu

SEQ ID NO: 350996 - RNA, 18 nt, Human
cguuuuuccgggauugca

SEQ ID NO: 350997 - RNA, 22 nt, Human
guggcccaggcuuggcgcuggc

SEQ ID NO: 350998 - RNA, 22 nt, Human
ggccuggcucuugcccagccug

SEQ ID NO: 350999 - RNA, 22 nt, Human
gcaguaggagaagaggaugcuu

SEQ ID NO: 351000 - RNA, 18 nt, Human
gggaucaggcugccuagg

SEQ ID NO: 351001 - RNA, 22 nt, Human
ugcucuguaaggucagaaaagg

SEQ ID NO: 351002 - RNA, 22 nt, Human
gucaacuugcaagaugcugggc

SEQ ID NO: 351003 - RNA, 23 nt, Human
uggagaugccccacucccugucu

SEQ ID NO: 351004 - RNA, 22 nt, Human
aagacugugucuauggcuacuc

SEQ ID NO: 351005 - RNA, 22 nt, Human
caagaugggcaccccagcaccu

SEQ ID NO: 351006 - RNA, 22 nt, Human
gcagcugaagcugcaguuccag

SEQ ID NO: 351007 - RNA, 22 nt, Human
aggugaguuacaggaggagguc

SEQ ID NO: 351008 - RNA, 22 nt, Human
ucagaggaauuugcuuuucaug

SEQ ID NO: 351009 - RNA, 22 nt, Human
cuaucuuucgauucuagcuuaa

SEQ ID NO: 351010 - RNA, 22 nt, Human
gccuguuggguaacagaguuca

SEQ ID NO: 351011 - RNA, 22 nt, Human
acaugcuuucuagguccuucug

SEQ ID NO: 351012 - RNA, 22 nt, Human
uccaggcauaagccuugagugu

SEQ ID NO: 351013 - RNA, 22 nt, Human
ccucagaguaggucucagcugu

SEQ ID NO: 351014 - RNA, 22 nt, Human
guguccuuuuaugugacugguu

SEQ ID NO: 351015 - RNA, 22 nt, Human
auguagcaucuauccugauaaa

SEQ ID NO: 351016 - RNA, 22 nt, Human
gggacaggccccucgcuagcuu

SEQ ID NO: 351017 - RNA, 22 nt, Human
uuuuauguuccucuuuaugcga

SEQ ID NO: 351018 - RNA, 22 nt, Human
augcacccagugucuggacuau

SEQ ID NO: 351019 - RNA, 22 nt, Human
ccugagcugaacuaagcaguuu

SEQ ID NO: 351020 - RNA, 20 nt, Human
ucccaaggaugccugggugu

SEQ ID NO: 351021 - RNA, 22 nt, Human
cagaugaggcaaccucauugcu

SEQ ID NO: 351022 - RNA, 23 nt, Human
ggcagagagcauggcuggggccc

SEQ ID NO: 351023 - RNA, 22 nt, Human
caguaaaugcagauauagauac

SEQ ID NO: 351024 - RNA, 22 nt, Human
ccaggccauucccagaguugcu

SEQ ID NO: 351025 - RNA, 22 nt, Human
uggcugagaaaaaagagcuaua

SEQ ID NO: 351026 - RNA, 22 nt, Human
ccauggcucuuaccuuguuaua

SEQ ID NO: 351027 - RNA, 22 nt, Human
cagccugcuagggcaaugccuu

SEQ ID NO: 351028 - RNA, 22 nt, Human
aacuuuguguguuuaauauggc

SEQ ID NO: 351029 - RNA, 22 nt, Human
gcucagaaaagugaggcucagu

SEQ ID NO: 351030 - RNA, 22 nt, Human
gaggccacagcuaucagggaca

SEQ ID NO: 351031 - RNA, 23 nt, Human
ggcucugugcugggccugcagga

SEQ ID NO: 351032 - RNA, 22 nt, Human
uucucugagauagacuaagugg

SEQ ID NO: 351033 - RNA, 18 nt, Human
uccucucuuuccccaggg

SEQ ID NO: 351034 - RNA, 22 nt, Human
aaguuugagaagcuuauagaua

SEQ ID NO: 351035 - RNA, 22 nt, Human
cagagcuggagaaguggauuua

SEQ ID NO: 351036 - RNA, 20 nt, Human
ucucuucuggggagauaaaa

SEQ ID NO: 351037 - RNA, 22 nt, Human
uaagaacuucggacauguuauc

SEQ ID NO: 351038 - RNA, 22 nt, Human
cuggccagacuacacaugugug

SEQ ID NO: 351039 - RNA, 22 nt, Human
uacauuccacuagugacuggcg

SEQ ID NO: 351040 - RNA, 18 nt, Human
ugaacagaugaguugaag

SEQ ID NO: 351041 - RNA, 22 nt, Human
aagccagauuucacucuuaauu

SEQ ID NO: 351042 - RNA, 22 nt, Human
uggaggaugagugugggcucug

SEQ ID NO: 351043 - RNA, 22 nt, Human
ggcgugggaaguggggcuucug

SEQ ID NO: 351044 - RNA, 22 nt, Human
gggcugcugccaaucacagccu

SEQ ID NO: 351045 - RNA, 22 nt, Human
guaacauaguuugugcuucauc

SEQ ID NO: 351046 - RNA, 22 nt, Human
cugccucuugacagaucguggc

SEQ ID NO: 351047 - RNA, 22 nt, Human
gggaauuauagcugucacaggc

SEQ ID NO: 351048 - RNA, 22 nt, Human
gccccagcguggcuguguuagg

SEQ ID NO: 351049 - RNA, 22 nt, Human
ggauccuuaacuaucacaguga

SEQ ID NO: 351050 - RNA, 22 nt, Human
aucuacccacugaacacaauau

SEQ ID NO: 351051 - RNA, 22 nt, Human
ucaguuuuuaagaguuaugcga

SEQ ID NO: 351052 - RNA, 22 nt, Human
auuguaaguagaaauguuaugg

SEQ ID NO: 351053 - RNA, 22 nt, Human
gccugccuuuguaugacccuga

SEQ ID NO: 351054 - RNA, 22 nt, Human
cagcccugagagaaccaucuau

SEQ ID NO: 351055 - RNA, 22 nt, Human
cugccucugguuuuggucccug

SEQ ID NO: 351056 - RNA, 22 nt, Human
gcaguggggcgcugggaguugg

SEQ ID NO: 351057 - RNA, 22 nt, Human
aguaaacaguaucuuuaguguc

SEQ ID NO: 351058 - RNA, 22 nt, Human
cucagagucugcauuucuguca

SEQ ID NO: 351059 - RNA, 22 nt, Human
ugccuugcgggcguuucuguug

SEQ ID NO: 351060 - RNA, 22 nt, Human
agugcauuauauguuucaaugg

SEQ ID NO: 351061 - RNA, 22 nt, Human
auaaggcauauagucacuuuuu

SEQ ID NO: 351062 - RNA, 23 nt, Human
cccagcgcugagcccugcaggca

SEQ ID NO: 351063 - RNA, 22 nt, Human
cuuaacagauacaucugugguu

SEQ ID NO: 351064 - RNA, 21 nt, Human
gcugucucuggcuccugggaa

SEQ ID NO: 351065 - RNA, 22 nt, Human
auuaggcaauucugggcaucuc

SEQ ID NO: 351066 - RNA, 20 nt, Human
ugcagggcucugcuucucuc

SEQ ID NO: 351067 - RNA, 22 nt, Human
gaagcagcaaaucugcaguauc

SEQ ID NO: 351068 - RNA, 22 nt, Human
uuuucauuguuccucgagcauu

SEQ ID NO: 351069 - RNA, 22 nt, Human
auccuuagaagggagugaggac

SEQ ID NO: 351070 - RNA, 22 nt, Human
aggaagccuggggcugcccucg

SEQ ID NO: 351071 - RNA, 22 nt, Human
aucagcaaaaaugccuucagaa

SEQ ID NO: 351072 - RNA, 22 nt, Human
gggcuguggagccgcgagggcu

SEQ ID NO: 351073 - RNA, 23 nt, Human
ugaagugaaauuucacaagggac

SEQ ID NO: 351074 - RNA, 22 nt, Human
gcugucugucuucacaucucgc

SEQ ID NO: 351075 - RNA, 16 nt, Human
uagggcugggaaggag

SEQ ID NO: 351076 - RNA, 22 nt, Human
ugcuggcccaguauggacugca

SEQ ID NO: 351077 - RNA, 20 nt, Human
cccugagaccagagagcagc

SEQ ID NO: 351078 - RNA, 22 nt, Human
ggcucccugccuguccucaguc

SEQ ID NO: 351079 - RNA, 22 nt, Human
gagggcugauaacaggaauaca

SEQ ID NO: 351080 - RNA, 22 nt, Human
cccuggagguggagguugcagg

SEQ ID NO: 351081 - RNA, 22 nt, Human
caaugaaauugagauccagaga

SEQ ID NO: 351082 - RNA, 22 nt, Human
cugcagcuguagaggacagugg

SEQ ID NO: 351083 - RNA, 22 nt, Human
cuccagggagcugcgggagcca

SEQ ID NO: 351084 - RNA, 22 nt, Human
gucccuggucuaccguggcuuc

SEQ ID NO: 351085 - RNA, 22 nt, Human
agagucugaggcagcugcagcc

SEQ ID NO: 351086 - RNA, 22 nt, Human
cucugugccucaguuuucuucu

SEQ ID NO: 351087 - RNA, 22 nt, Human
ucacacgugagguucuauccug

SEQ ID NO: 351088 - RNA, 22 nt, Human
uagugcuuuaaguuuacagaga

SEQ ID NO: 351089 - RNA, 22 nt, Human
gauuuagagcaggaaugcaugg

SEQ ID NO: 351090 - RNA, 20 nt, Human
uccuuuggccuuagagcugu

SEQ ID NO: 351091 - RNA, 22 nt, Human
aggcacugcuucuaaguaggaa

SEQ ID NO: 351092 - RNA, 22 nt, Human
cugcagaggguuugagcauccu

SEQ ID NO: 351093 - RNA, 22 nt, Human
ucugccugcuaacuccugcacc

SEQ ID NO: 351094 - RNA, 22 nt, Human
uucucacuauguauguagauug

SEQ ID NO: 351095 - RNA, 20 nt, Human
ucccaggcuccacccuagac

SEQ ID NO: 351096 - RNA, 22 nt, Human
gaaauauacauugcaggaagag

SEQ ID NO: 351097 - RNA, 22 nt, Human
ggugucccaggccagcugugug

SEQ ID NO: 351098 - RNA, 22 nt, Human
cuccccagguucaggagguggg

SEQ ID NO: 351099 - RNA, 20 nt, Human
agacaaaaugacuucaugca

SEQ ID NO: 351100 - RNA, 20 nt, Human
gugccuggagaagaggcugu

SEQ ID NO: 351101 - RNA, 22 nt, Human
cucagcagagaccagggaggaa

SEQ ID NO: 351102 - RNA, 18 nt, Human
ccgggcuuuggugacaca

SEQ ID NO: 351103 - RNA, 22 nt, Human
uucacagucacccuucuccaug

SEQ ID NO: 351104 - RNA, 23 nt, Human
agucagagagugugagacaacug

SEQ ID NO: 351105 - RNA, 22 nt, Human
gaagcccuauccucuccuggga

SEQ ID NO: 351106 - RNA, 22 nt, Human
ccauguggugggaaggagaaug

SEQ ID NO: 351107 - RNA, 19 nt, Human
augucuguugaauuucaua

SEQ ID NO: 351108 - RNA, 22 nt, Human
cagggcucugccuugagggaug

SEQ ID NO: 351109 - RNA, 22 nt, Human
ccacccagaccagggaucuggg

SEQ ID NO: 351110 - RNA, 22 nt, Human
aagcacaaugaacaucuuagau

SEQ ID NO: 351111 - RNA, 22 nt, Human
uacuuucuguccuucuguuaaa

SEQ ID NO: 351112 - RNA, 22 nt, Human
ccucacuggccagccaggggug

SEQ ID NO: 351113 - RNA, 22 nt, Human
gccaggugcauggcugagucuc

SEQ ID NO: 351114 - RNA, 22 nt, Human
uuuucacacaaggugauaaguu

SEQ ID NO: 351115 - RNA, 20 nt, Human
ugugcccaauguccagguuc

SEQ ID NO: 351116 - RNA, 22 nt, Human
uuacagaaagguugugggauag

SEQ ID NO: 351117 - RNA, 21 nt, Human
cuacagaagcucuccuaucca

SEQ ID NO: 351118 - RNA, 22 nt, Human
uggagccaggagccugggaguc

SEQ ID NO: 351119 - RNA, 22 nt, Human
acaauauuguacccagaaguuu

SEQ ID NO: 351120 - RNA, 22 nt, Human
auuucucacucacaguccaugu

SEQ ID NO: 351121 - RNA, 22 nt, Human
agcugccacaugcccaagggca

SEQ ID NO: 351122 - RNA, 22 nt, Human
uccaguucuaggucacucucug

SEQ ID NO: 351123 - RNA, 22 nt, Human
acagaaauugggcaaauggaag

SEQ ID NO: 351124 - RNA, 22 nt, Human
cauguacaaaaggcaaaugccu

SEQ ID NO: 351125 - RNA, 22 nt, Human
gggagcugaauggcaauggaga

SEQ ID NO: 351126 - RNA, 22 nt, Human
ucuggccauggcaagccgagug

SEQ ID NO: 351127 - RNA, 22 nt, Human
ucucccacagccgugcuucaag

SEQ ID NO: 351128 - RNA, 22 nt, Human
aauuuguuaaaagugagugaca

SEQ ID NO: 351129 - RNA, 22 nt, Human
agugugaguaauucagggaggg

SEQ ID NO: 351130 - RNA, 22 nt, Human
gauaauaagcacagcaggaugu

SEQ ID NO: 351131 - RNA, 22 nt, Human
ucuuccugaaacccuguuccag

SEQ ID NO: 351132 - RNA, 22 nt, Human
gcucagagauggggaaugaaaa

SEQ ID NO: 351133 - RNA, 22 nt, Human
uggaaggcaugggaacuguucu

SEQ ID NO: 351134 - RNA, 22 nt, Human
ggagccagagggaugcaguuga

SEQ ID NO: 351135 - RNA, 22 nt, Human
gaagccaguacugugcucugca

SEQ ID NO: 351136 - RNA, 22 nt, Human
ucacacacauaaucuaagauua

SEQ ID NO: 351137 - RNA, 22 nt, Human
aaugagcugcugcuguuccacc

SEQ ID NO: 351138 - RNA, 22 nt, Human
gggacagaaggaagugagcaca

SEQ ID NO: 351139 - RNA, 22 nt, Human
uccucaggaucuaggagugcuu

SEQ ID NO: 351140 - RNA, 22 nt, Human
ccuguggcugccacuuggguga

SEQ ID NO: 351141 - RNA, 22 nt, Human
uccuugaaaagaaugucuccau

SEQ ID NO: 351142 - RNA, 22 nt, Human
uccugcaggccuguucccagua

SEQ ID NO: 351143 - RNA, 22 nt, Human
aggggcaguuccaaguuuugug

SEQ ID NO: 351144 - RNA, 22 nt, Human
augaggcacaucacagccaaug

SEQ ID NO: 351145 - RNA, 22 nt, Human
agaaguuaccacauacuucucu

SEQ ID NO: 351146 - RNA, 22 nt, Human
accagagcuuacaugcuagaaa

SEQ ID NO: 351147 - RNA, 22 nt, Human
gccucugcucucagguagccuc

SEQ ID NO: 351148 - RNA, 22 nt, Human
ugagagucucagaccuccuggu

SEQ ID NO: 351149 - RNA, 22 nt, Human
ucacuuaaaaauucuaguuaug

SEQ ID NO: 351150 - RNA, 22 nt, Human
gauuucuugaccccugucucag

SEQ ID NO: 351151 - RNA, 23 nt, Human
ucugagagaacaaugccuccuau

SEQ ID NO: 351152 - RNA, 22 nt, Human
cagugcaguuucccagaugcug

SEQ ID NO: 351153 - RNA, 22 nt, Human
uaugcacaguuacaagaauauc

SEQ ID NO: 351154 - RNA, 22 nt, Human
gucaggauuaaugggaguaugc

SEQ ID NO: 351155 - RNA, 22 nt, Human
uaacagaagagcaggcagcccu

SEQ ID NO: 351156 - RNA, 22 nt, Human
ccugcucugguuuagucagucu

SEQ ID NO: 351157 - RNA, 22 nt, Human
ccaaaggccaggcacugagguu

SEQ ID NO: 351158 - RNA, 22 nt, Human
auaaggcacacauagauagggu

SEQ ID NO: 351159 - RNA, 22 nt, Human
auguauccuuauacacauuuau

SEQ ID NO: 351160 - RNA, 22 nt, Human
uauagagguggaaacugagguu

SEQ ID NO: 351161 - RNA, 22 nt, Human
guggcagagguuccucagugug

SEQ ID NO: 351162 - RNA, 22 nt, Human
cuggguggcgucuggggccagu

SEQ ID NO: 351163 - RNA, 22 nt, Human
uacaaaguagaaauucaguaaa

SEQ ID NO: 351164 - RNA, 22 nt, Human
gggucaggcucagcagggcagc

SEQ ID NO: 351165 - RNA, 22 nt, Human
ggauggcauguugggcucuguu

SEQ ID NO: 351166 - RNA, 22 nt, Human
cuggagcauccaugcccagggu

SEQ ID NO: 351167 - RNA, 22 nt, Human
ucuagaaaaaaacugcugugga

SEQ ID NO: 351168 - RNA, 22 nt, Human
uuucacaucagagguagauuag

SEQ ID NO: 351169 - RNA, 22 nt, Human
uggcuaggcuccaagagcugga

SEQ ID NO: 351170 - RNA, 22 nt, Human
ccagucacucugugagagcuac

SEQ ID NO: 351171 - RNA, 22 nt, Human
uaaaauguguuucuguaugguu

SEQ ID NO: 351172 - RNA, 22 nt, Human
gcagccagaagacucagaacaa

SEQ ID NO: 351173 - RNA, 22 nt, Human
agccuccacagaugcaaagggc

SEQ ID NO: 351174 - RNA, 22 nt, Human
ggcugccugaacuuuggggaaa

SEQ ID NO: 351175 - RNA, 22 nt, Human
ucugucacucccugaugaugaa

SEQ ID NO: 351176 - RNA, 23 nt, Human
ucccagggaaggugagcgaggcu

SEQ ID NO: 351177 - RNA, 22 nt, Human
cagugagggcauucagugcugg

SEQ ID NO: 351178 - RNA, 22 nt, Human
ugcccaggguuucuaagagcag

SEQ ID NO: 351179 - RNA, 22 nt, Human
ggggcugggauuugaacccagg

SEQ ID NO: 351180 - RNA, 22 nt, Human
cacucaggcugugucaggagga

SEQ ID NO: 351181 - RNA, 22 nt, Human
uauacagaaagaauucaagucu

SEQ ID NO: 351182 - RNA, 22 nt, Human
uuuugcuugagugcacaaaaug

SEQ ID NO: 351183 - RNA, 19 nt, Human
agccacagaacuugcagga

SEQ ID NO: 351184 - RNA, 22 nt, Human
uggcagcugucagaaugcaaau

SEQ ID NO: 351185 - RNA, 22 nt, Human
agccuggagcuugaguuaugag

SEQ ID NO: 351186 - RNA, 22 nt, Human
aggaaaaauaaggcagcagggc

SEQ ID NO: 351187 - RNA, 22 nt, Human
cuggagccgcauggagcaggga

SEQ ID NO: 351188 - RNA, 22 nt, Human
ucagagcugcccaugcaagggg

SEQ ID NO: 351189 - RNA, 22 nt, Human
gccaccagcagaaaaggggcca

SEQ ID NO: 351190 - RNA, 22 nt, Human
auugucuuuccacugagaaguu

SEQ ID NO: 351191 - RNA, 22 nt, Human
uuacaugguuguuggaaaugcu

SEQ ID NO: 351192 - RNA, 22 nt, Human
aaggcagcuucaccacagcauu

SEQ ID NO: 351193 - RNA, 22 nt, Human
cacucugcgcugggcgccagcg

SEQ ID NO: 351194 - RNA, 22 nt, Human
aaaagcucuuucugcuguagau

SEQ ID NO: 351195 - RNA, 18 nt, Human
gacccagcagaugggcuu

SEQ ID NO: 351196 - RNA, 22 nt, Human
augguuuacugaucuuuuuggu

SEQ ID NO: 351197 - RNA, 22 nt, Human
gaggaagaaagcauaggugggg

SEQ ID NO: 351198 - RNA, 22 nt, Human
cugaugcuauaagccacagugg

SEQ ID NO: 351199 - RNA, 22 nt, Human
uuagucuucuuccuuauauguu

SEQ ID NO: 351200 - RNA, 22 nt, Human
cugggcuguucugccccugggu

SEQ ID NO: 351201 - RNA, 22 nt, Human
aggaggaauacaauccagcagc

SEQ ID NO: 351202 - RNA, 22 nt, Human
aaagaggauggaguagucagcu

SEQ ID NO: 351203 - RNA, 22 nt, Human
acagccugcagccccaggucgc

SEQ ID NO: 351204 - RNA, 22 nt, Human
uggcugagcugcagcguggcuu

SEQ ID NO: 351205 - RNA, 22 nt, Human
agauucuacucuagauccaugg

SEQ ID NO: 351206 - RNA, 22 nt, Human
agcuuuauagaaaggaucagug

SEQ ID NO: 351207 - RNA, 22 nt, Human
gagcuuugcuggaagccugggg

SEQ ID NO: 351208 - RNA, 22 nt, Human
uucacauugugcagauuauggu

SEQ ID NO: 351209 - RNA, 22 nt, Human
uaagaaauuuaguuauagaaug

SEQ ID NO: 351210 - RNA, 22 nt, Human
uuauuuuguagcucugaucuuu

SEQ ID NO: 351211 - RNA, 22 nt, Human
ggagcugcucagagccaguccc

SEQ ID NO: 351212 - RNA, 19 nt, Human
aaggcagaaguuggauaug

SEQ ID NO: 351213 - RNA, 22 nt, Human
aagggcugagcacagugagcca

SEQ ID NO: 351214 - RNA, 22 nt, Human
guguuccauguuugagguaguu

SEQ ID NO: 351215 - RNA, 22 nt, Human
aggcagcaugcucugcuucuac

SEQ ID NO: 351216 - RNA, 22 nt, Human
uaaaugugcacuuuacuuuuca

SEQ ID NO: 351217 - RNA, 22 nt, Human
ucauuucuguugugcaucacug

SEQ ID NO: 351218 - RNA, 22 nt, Human
ggagguggcagggaacauaauu

SEQ ID NO: 351219 - RNA, 22 nt, Human
aacuagaacgucuaguugcugg

SEQ ID NO: 351220 - RNA, 22 nt, Human
ugaccaaaggugguuuauuugg

SEQ ID NO: 351221 - RNA, 22 nt, Human
ucugaacuccagcccugcucuc

SEQ ID NO: 351222 - RNA, 22 nt, Human
gacagguggggaaacuaaggua

SEQ ID NO: 351223 - RNA, 16 nt, Human
ccacagggcaaggggc

SEQ ID NO: 351224 - RNA, 22 nt, Human
uauaacacucagaaagaaucau

SEQ ID NO: 351225 - RNA, 22 nt, Human
cagcugccuguauuguccucau

SEQ ID NO: 351226 - RNA, 22 nt, Human
cagcugagaccagaaugcaggu

SEQ ID NO: 351227 - RNA, 22 nt, Human
agcccaaggcuucccugcuggc

SEQ ID NO: 351228 - RNA, 22 nt, Human
cuccucugucuggcccugagcc

SEQ ID NO: 351229 - RNA, 22 nt, Human
uucuggaggccccuuccuucuc

SEQ ID NO: 351230 - RNA, 22 nt, Human
agucaauuaucucuaggucauc

SEQ ID NO: 351231 - RNA, 22 nt, Human
ugauuuccuggcuuuggaguuc

SEQ ID NO: 351232 - RNA, 22 nt, Human
acagaguaucuaucaggaguau

SEQ ID NO: 351233 - RNA, 21 nt, Human
gauuucacuuaccuucauuua

SEQ ID NO: 351234 - RNA, 23 nt, Human
uugcauagacauccucauagauu

SEQ ID NO: 351235 - RNA, 22 nt, Human
uccuuuccagccucaccucagc

SEQ ID NO: 351236 - RNA, 22 nt, Human
aggucaccauggcaugcuccac

SEQ ID NO: 351237 - RNA, 22 nt, Human
uuggaauucaaguuguagcuua

SEQ ID NO: 351238 - RNA, 23 nt, Human
cccaggaguuucacugcaaaggu

SEQ ID NO: 351239 - RNA, 22 nt, Human
uugaagcaggaaaauuucuauu

SEQ ID NO: 351240 - RNA, 22 nt, Human
uuaagacauucagauauuucua

SEQ ID NO: 351241 - RNA, 22 nt, Human
uagagcuagcuucaaaaugcga

SEQ ID NO: 351242 - RNA, 22 nt, Human
agcagcaucucuuauugcagug

SEQ ID NO: 351243 - RNA, 22 nt, Human
aguuuuuccugauuuuacagaa

SEQ ID NO: 351244 - RNA, 22 nt, Human
agucugucugucacuucugcag

SEQ ID NO: 351245 - RNA, 22 nt, Human
ggaguaggaguagaacucauca

SEQ ID NO: 351246 - RNA, 22 nt, Human
aagucagcacuccaggaagcca

SEQ ID NO: 351247 - RNA, 22 nt, Human
agccacaggaaacagagacagc

SEQ ID NO: 351248 - RNA, 22 nt, Human
aggccugaggaccuucuggagg

SEQ ID NO: 351249 - RNA, 23 nt, Human
cagggaggagauacuguguaucu

SEQ ID NO: 351250 - RNA, 22 nt, Human
agcuggccuguuagagcugagu

SEQ ID NO: 351251 - RNA, 22 nt, Human
aacaguaucuuuuaucagaaau

SEQ ID NO: 351252 - RNA, 22 nt, Human
cccaaggccucuccuuggcuug

SEQ ID NO: 351253 - RNA, 22 nt, Human
gaaggcacugaacuccuucugg

SEQ ID NO: 351254 - RNA, 22 nt, Human
uguuuauugagugccuacuaua

SEQ ID NO: 351255 - RNA, 22 nt, Human
cagccaggcccccgagucguug

SEQ ID NO: 351256 - RNA, 22 nt, Human
gaagccagcaguggagaaagga

SEQ ID NO: 351257 - RNA, 22 nt, Human
uaaaauagcaugugcagugaaa

SEQ ID NO: 351258 - RNA, 22 nt, Human
agggagaagguuuagcugugag

SEQ ID NO: 351259 - RNA, 22 nt, Human
uauggcuuuaaacaacuuaggu

SEQ ID NO: 351260 - RNA, 22 nt, Human
uucucuuagcuguaaagucaau

SEQ ID NO: 351261 - RNA, 22 nt, Human
auccuugaaugacucugcccuc

SEQ ID NO: 351262 - RNA, 22 nt, Human
cacagcagaaaguguaggagga

SEQ ID NO: 351263 - RNA, 22 nt, Human
gccuucugcgcucgugucuccg

SEQ ID NO: 351264 - RNA, 22 nt, Human
auagugggaauuacgauauacu

SEQ ID NO: 351265 - RNA, 22 nt, Human
gaagggugcauggagggaaguc

SEQ ID NO: 351266 - RNA, 22 nt, Human
agaguccagaaaacagugugcu

SEQ ID NO: 351267 - RNA, 19 nt, Human
ccucccacggauuccuucc

SEQ ID NO: 351268 - RNA, 22 nt, Human
cacagaggacuguagcggggag

SEQ ID NO: 351269 - RNA, 22 nt, Human
gucacaggccuggaugaggggc

SEQ ID NO: 351270 - RNA, 22 nt, Human
uagggauguggugagaacugag

SEQ ID NO: 351271 - RNA, 22 nt, Human
uccagcagggaauuaguagucu

SEQ ID NO: 351272 - RNA, 22 nt, Human
agagaacacgugcaucugcaau

SEQ ID NO: 351273 - RNA, 18 nt, Human
ucagagagcagcuuuauu

SEQ ID NO: 351274 - RNA, 22 nt, Human
gcccaggaagccaccgggaagu

SEQ ID NO: 351275 - RNA, 22 nt, Human
caucagaauuacuuggggagcu

SEQ ID NO: 351276 - RNA, 22 nt, Human
gcucugcuggaaguucucugga

SEQ ID NO: 351277 - RNA, 22 nt, Human
ugacagcugagccccaggcaag

SEQ ID NO: 351278 - RNA, 22 nt, Human
ugcuuggcuuucugagcuucug

SEQ ID NO: 351279 - RNA, 22 nt, Human
aagcagccaccucaucuccacu

SEQ ID NO: 351280 - RNA, 22 nt, Human
aggcccagacucagcggggcgg

SEQ ID NO: 351281 - RNA, 22 nt, Human
caugucuggguauaugcauaug

SEQ ID NO: 351282 - RNA, 22 nt, Human
uugggcugaaguagagggcaga

SEQ ID NO: 351283 - RNA, 22 nt, Human
gcugccucaggcaccuccuggc

SEQ ID NO: 351284 - RNA, 22 nt, Human
cagucucuaaaucaaucugaau

SEQ ID NO: 351285 - RNA, 22 nt, Human
uccuugaaugaagagaggugac

SEQ ID NO: 351286 - RNA, 22 nt, Human
ggcugccugaggcagugagaga

SEQ ID NO: 351287 - RNA, 22 nt, Human
cuccucuggcuuccuggaggca

SEQ ID NO: 351288 - RNA, 22 nt, Human
ugagaagcugcuugugcuguau

SEQ ID NO: 351289 - RNA, 22 nt, Human
gcagcuucaguaggugaagaca

SEQ ID NO: 351290 - RNA, 22 nt, Human
auugcuguaaauuaucuuauua

SEQ ID NO: 351291 - RNA, 22 nt, Human
uguuuucuauuaccugagauug

SEQ ID NO: 351292 - RNA, 22 nt, Human
ugcugggcuaggguggagcucu

SEQ ID NO: 351293 - RNA, 22 nt, Human
agggacuggcucucugagcagg

SEQ ID NO: 351294 - RNA, 20 nt, Human
uguggcaggaugagggcgga

SEQ ID NO: 351295 - RNA, 22 nt, Human
gugagcaggauaggggcucccu

SEQ ID NO: 351296 - RNA, 20 nt, Human
aaagucuguuuaucucugga

SEQ ID NO: 351297 - RNA, 22 nt, Human
acuuucucaaaucagacuuuaa

SEQ ID NO: 351298 - RNA, 22 nt, Human
ucgugucagaucagagguuccu

SEQ ID NO: 351299 - RNA, 22 nt, Human
guccagggaaauagcgacaggg

SEQ ID NO: 351300 - RNA, 22 nt, Human
ugcagggcaguuuguuucggca

SEQ ID NO: 351301 - RNA, 22 nt, Human
ugagacaguuuuucuauuucca

SEQ ID NO: 351302 - RNA, 22 nt, Human
ucacugcaaucucugccuucca

SEQ ID NO: 351303 - RNA, 22 nt, Human
cugggcuacguguugacagcau

SEQ ID NO: 351304 - RNA, 22 nt, Human
uuucuucacaggguauugggug

SEQ ID NO: 351305 - RNA, 22 nt, Human
gaggagcacaugaggcugaggg

SEQ ID NO: 351306 - RNA, 22 nt, Human
ccaguguucauaauuuuacacu

SEQ ID NO: 351307 - RNA, 22 nt, Human
ggcagcugggucacaccgaucu

SEQ ID NO: 351308 - RNA, 22 nt, Human
uggcugcagaucaagggcaggc

SEQ ID NO: 351309 - RNA, 22 nt, Human
cccaggaguuugaguucagcau

SEQ ID NO: 351310 - RNA, 22 nt, Human
cauuuagaaacuguuuuuaaca

SEQ ID NO: 351311 - RNA, 22 nt, Human
acuuugaaggggaacauuuuaa

SEQ ID NO: 351312 - RNA, 22 nt, Human
gcugccuuuugcuccucccacc

SEQ ID NO: 351313 - RNA, 22 nt, Human
auauuucuccaaauguuuucaa

SEQ ID NO: 351314 - RNA, 22 nt, Human
uggcuagcccuuguggggagag

SEQ ID NO: 351315 - RNA, 22 nt, Human
ugcagaggagucagccugggca

SEQ ID NO: 351316 - RNA, 22 nt, Human
gagcacagggaauagacagaua

SEQ ID NO: 351317 - RNA, 22 nt, Human
aggcugccuguuccaaucuccu

SEQ ID NO: 351318 - RNA, 22 nt, Human
aucaggaugacuauaaggcugc

SEQ ID NO: 351319 - RNA, 18 nt, Human
gcuccuggaccaggucac

SEQ ID NO: 351320 - RNA, 22 nt, Human
gagagcugcaagguagggcggg

SEQ ID NO: 351321 - RNA, 22 nt, Human
auuucucaguuccuacuguuua

SEQ ID NO: 351322 - RNA, 22 nt, Human
ggugaccucaccuggucccacc

SEQ ID NO: 351323 - RNA, 22 nt, Human
cccaggaggcagaaguugcagu

SEQ ID NO: 351324 - RNA, 22 nt, Human
ggcuccucucuggccgcucccg

SEQ ID NO: 351325 - RNA, 22 nt, Human
caguccugugucccuugguggg

SEQ ID NO: 351326 - RNA, 22 nt, Human
ucccuggguccugcuugcucuc

SEQ ID NO: 351327 - RNA, 19 nt, Human
cagaguccuugaccagucc

SEQ ID NO: 351328 - RNA, 22 nt, Human
agugcuuugugcucucacugca

SEQ ID NO: 351329 - RNA, 22 nt, Human
uuuuuaguagagguggguuuca

SEQ ID NO: 351330 - RNA, 22 nt, Human
aaggaagagucuagaacaggca

SEQ ID NO: 351331 - RNA, 18 nt, Human
ggacaucaucaggugcuu

SEQ ID NO: 351332 - RNA, 22 nt, Human
cuguccuugcuggccagguaug

SEQ ID NO: 351333 - RNA, 22 nt, Human
aauggcuucugaagcacacuuu

SEQ ID NO: 351334 - RNA, 22 nt, Human
aaggccaugcacauccuaggca

SEQ ID NO: 351335 - RNA, 22 nt, Human
gcuggcaucacuggcuucggug

SEQ ID NO: 351336 - RNA, 17 nt, Human
acagagcacaucaagau

SEQ ID NO: 351337 - RNA, 22 nt, Human
aggaccuguguuuuccuugaau

SEQ ID NO: 351338 - RNA, 22 nt, Human
gaguccaguuagugaggcuggg

SEQ ID NO: 351339 - RNA, 19 nt, Human
ugcccaggccagguugggc

SEQ ID NO: 351340 - RNA, 22 nt, Human
uuaaggauguugugauuuauua

SEQ ID NO: 351341 - RNA, 22 nt, Human
aggaugggccugggauaugcuu

SEQ ID NO: 351342 - RNA, 22 nt, Human
ggguccagacacuccagaggaa

SEQ ID NO: 351343 - RNA, 22 nt, Human
gugcugaguagaaugaaugccu

SEQ ID NO: 351344 - RNA, 22 nt, Human
uggcagaggaggcucagauuga

SEQ ID NO: 351345 - RNA, 19 nt, Human
cuggugcuugagugaguca

SEQ ID NO: 351346 - RNA, 17 nt, Human
uggcaagaauggaaaug

SEQ ID NO: 351347 - RNA, 22 nt, Human
uuacagaaucuacucgugguga

SEQ ID NO: 351348 - RNA, 22 nt, Human
gggcagcucucacagcagccaa

SEQ ID NO: 351349 - RNA, 22 nt, Human
aagcagccacuggccaguuaua

SEQ ID NO: 351350 - RNA, 22 nt, Human
ugggcaagucacuucugucuuu

SEQ ID NO: 351351 - RNA, 22 nt, Human
ugcauuaugcuacccagaagcu

SEQ ID NO: 351352 - RNA, 22 nt, Human
ucacacacauuugcugucugau

SEQ ID NO: 351353 - RNA, 22 nt, Human
gggcugagugaccucaggccaa

SEQ ID NO: 351354 - RNA, 22 nt, Human
gcccaggaugguguguaguggu

SEQ ID NO: 351355 - RNA, 22 nt, Human
agcagcugccagagagaguucc

SEQ ID NO: 351356 - RNA, 22 nt, Human
uucacaaaacacuauuuucugg

SEQ ID NO: 351357 - RNA, 22 nt, Human
ggguccagaguugaagagguua

SEQ ID NO: 351358 - RNA, 22 nt, Human
auuuccaaucucugcauauggg

SEQ ID NO: 351359 - RNA, 22 nt, Human
ccaggaaauggcuugcuucuuu

SEQ ID NO: 351360 - RNA, 22 nt, Human
gccuucaggaggguuccagaca

SEQ ID NO: 351361 - RNA, 20 nt, Human
cagagaccugucuucacaga

SEQ ID NO: 351362 - RNA, 22 nt, Human
cguagguggcucagcaccuggg

SEQ ID NO: 351363 - RNA, 20 nt, Human
uuuuuccuucucuacaggca

SEQ ID NO: 351364 - RNA, 22 nt, Human
uuauuuaaugugaucugaagag

SEQ ID NO: 351365 - RNA, 22 nt, Human
augucuaaaagauaaaguuuaa

SEQ ID NO: 351366 - RNA, 22 nt, Human
ugggccuggaguuuguccagag

SEQ ID NO: 351367 - RNA, 22 nt, Human
uguauuuucugaagauaaucaa

SEQ ID NO: 351368 - RNA, 20 nt, Human
acauguacuaaugaauacag

SEQ ID NO: 351369 - RNA, 22 nt, Human
acccuggggguggccagugcca

SEQ ID NO: 351370 - RNA, 22 nt, Human
uuuacauugcauuagguauuau

SEQ ID NO: 351371 - RNA, 18 nt, Human
guuaauuuugaaguucau

SEQ ID NO: 351372 - RNA, 19 nt, Human
caucuggaugauucuccug

SEQ ID NO: 351373 - RNA, 22 nt, Human
agccaggccagcugucuugagu

SEQ ID NO: 351374 - RNA, 22 nt, Human
caggcugaggcaguaggguuug

SEQ ID NO: 351375 - RNA, 22 nt, Human
uuagaaaucugcugccaugcaa

SEQ ID NO: 351376 - RNA, 22 nt, Human
ugcuagaaaucugaaacuagca

SEQ ID NO: 351377 - RNA, 22 nt, Human
gaggcagagaccuucaggaccu

SEQ ID NO: 351378 - RNA, 22 nt, Human
agcagcaacuuauuuuucuuau

SEQ ID NO: 351379 - RNA, 22 nt, Human
gcagugugaccgagcuugcuuc

SEQ ID NO: 351380 - RNA, 21 nt, Human
uaagaacauuaucuucuuccu

SEQ ID NO: 351381 - RNA, 22 nt, Human
agaggcaguauacaauccgagc

SEQ ID NO: 351382 - RNA, 22 nt, Human
ugggccugggcuccuguccucu

SEQ ID NO: 351383 - RNA, 22 nt, Human
agacagagauacuauguuguca

SEQ ID NO: 351384 - RNA, 22 nt, Human
uccuuccugcaggccaaguccu

SEQ ID NO: 351385 - RNA, 22 nt, Human
uuucaucuuccuuggcauaggu

SEQ ID NO: 351386 - RNA, 22 nt, Human
gaccauuuguugaaaagauuau

SEQ ID NO: 351387 - RNA, 22 nt, Human
auucaguuucauggcacagcua

SEQ ID NO: 351388 - RNA, 22 nt, Human
acagagcucccagccaucuccu

SEQ ID NO: 351389 - RNA, 22 nt, Human
uuucacauuuaggcgugaauug

SEQ ID NO: 351390 - RNA, 22 nt, Human
ugagugccugaacauagaguag

SEQ ID NO: 351391 - RNA, 22 nt, Human
uagggcugugucuccaggacca

SEQ ID NO: 351392 - RNA, 22 nt, Human
uacccagcaaucccuagagguu

SEQ ID NO: 351393 - RNA, 22 nt, Human
gugcagugaaaaaagaaugucc

SEQ ID NO: 351394 - RNA, 22 nt, Human
uugaagcagagaaauacuugaa

SEQ ID NO: 351395 - RNA, 22 nt, Human
guccucuguuagaaaugugcuu

SEQ ID NO: 351396 - RNA, 22 nt, Human
ucucagagccuaacuaaccuaa

SEQ ID NO: 351397 - RNA, 22 nt, Human
ucccaggaaggauucggcauuu

SEQ ID NO: 351398 - RNA, 22 nt, Human
caggcuggagugcaguugugca

SEQ ID NO: 351399 - RNA, 22 nt, Human
uauuugcaacauaaaacucuga

SEQ ID NO: 351400 - RNA, 16 nt, Human
ggcaccagugaacaca

SEQ ID NO: 351401 - RNA, 22 nt, Human
cauuguuaccaucuuuuaccua

SEQ ID NO: 351402 - RNA, 22 nt, Human
ccaggggaaacagggagcacuc

SEQ ID NO: 351403 - RNA, 21 nt, Human
cugcuuuacuucagaggaucu

SEQ ID NO: 351404 - RNA, 22 nt, Human
uuccaaaggaauggggagcuau

SEQ ID NO: 351405 - RNA, 22 nt, Human
cuguuuaucccuuuggucagca

SEQ ID NO: 351406 - RNA, 22 nt, Human
gcagggcuauuggaaggagaug

SEQ ID NO: 351407 - RNA, 22 nt, Human
cuacagaaucuaccucaagcca

SEQ ID NO: 351408 - RNA, 22 nt, Human
ugcagggagggcccagcaaucu

SEQ ID NO: 351409 - RNA, 22 nt, Human
auacagaauucacuacaguuuc

SEQ ID NO: 351410 - RNA, 22 nt, Human
cauuuauuggcauguaguaggu

SEQ ID NO: 351411 - RNA, 22 nt, Human
ggacacagauaaucacacagau

SEQ ID NO: 351412 - RNA, 22 nt, Human
cccauuuaucccaagguuacuc

SEQ ID NO: 351413 - RNA, 22 nt, Human
aguuuuauuccaaugugcagca

SEQ ID NO: 351414 - RNA, 22 nt, Human
gccucuggucccucaugcugug

SEQ ID NO: 351415 - RNA, 22 nt, Human
auaugagagaggaaagauuuua

SEQ ID NO: 351416 - RNA, 20 nt, Human
agcaagaguaaggacagcga

SEQ ID NO: 351417 - RNA, 22 nt, Human
uugcugaaaucuaugacauccu

SEQ ID NO: 351418 - RNA, 22 nt, Human
cucaaggacuuauucaugccug

SEQ ID NO: 351419 - RNA, 17 nt, Human
aguguuuccuuaucauu

SEQ ID NO: 351420 - RNA, 22 nt, Human
ugaaugaacuaaaucauaguuc

SEQ ID NO: 351421 - RNA, 19 nt, Human
gccacuccugaugcugccc

SEQ ID NO: 351422 - RNA, 22 nt, Human
cagaagaaaguggggagacaag

SEQ ID NO: 351423 - RNA, 22 nt, Human
agccaggaaccagcuacagucu

SEQ ID NO: 351424 - RNA, 22 nt, Human
cauuuucaugaguuucuguuca

SEQ ID NO: 351425 - RNA, 22 nt, Human
aguggcagagugcacucaggca

SEQ ID NO: 351426 - RNA, 18 nt, Human
uggcagcuagguaaagaa

SEQ ID NO: 351427 - RNA, 19 nt, Human
gcacacccugcaccaccau

SEQ ID NO: 351428 - RNA, 22 nt, Human
cuuucucaaugccggaaggcac

SEQ ID NO: 351429 - RNA, 22 nt, Human
agaauuccucuaggaucugccc

SEQ ID NO: 351430 - RNA, 20 nt, Human
ugugaaagcaguagaaugac

SEQ ID NO: 351431 - RNA, 22 nt, Human
guucacaucacuucacugaacc

SEQ ID NO: 351432 - RNA, 20 nt, Human
uguaacaaucuggauguugc

SEQ ID NO: 351433 - RNA, 22 nt, Human
ccucagggucugaggagaccgu

SEQ ID NO: 351434 - RNA, 22 nt, Human
gaugggggccagggccugcuuu

SEQ ID NO: 351435 - RNA, 22 nt, Human
cagggagaaaucuccaggaggu

SEQ ID NO: 351436 - RNA, 22 nt, Human
ugggugggagcacccugucugg

SEQ ID NO: 351437 - RNA, 22 nt, Human
caacauuucaaggucuuuagga

SEQ ID NO: 351438 - RNA, 22 nt, Human
gggcaguuuauucuagaugguu

SEQ ID NO: 351439 - RNA, 23 nt, Human
ucuggcucuaugugacagcucuc

SEQ ID NO: 351440 - RNA, 20 nt, Human
agcugccccugggcacugcc

SEQ ID NO: 351441 - RNA, 22 nt, Human
uccaggcaugucccaagccgga

SEQ ID NO: 351442 - RNA, 22 nt, Human
ggaggggagucucccaaagccg

SEQ ID NO: 351443 - RNA, 22 nt, Human
cuguuuaucuaggaguugcagg

SEQ ID NO: 351444 - RNA, 20 nt, Human
cccaggugucugaagcucug

SEQ ID NO: 351445 - RNA, 22 nt, Human
cccaggagguggagcuugcagu

SEQ ID NO: 351446 - RNA, 22 nt, Human
uucagcaaauggacuguucagg

SEQ ID NO: 351447 - RNA, 22 nt, Human
gagguggugguggaggcauagc

SEQ ID NO: 351448 - RNA, 22 nt, Human
cucucugggggccaugccaaga

SEQ ID NO: 351449 - RNA, 22 nt, Human
uuccaggauagcuuucaggaau

SEQ ID NO: 351450 - RNA, 22 nt, Human
ucugguaaccuuuaucccuccu

SEQ ID NO: 351451 - RNA, 18 nt, Human
ugagagugugugcucuug

SEQ ID NO: 351452 - RNA, 22 nt, Human
gcugagagugagcacuggauau

SEQ ID NO: 351453 - RNA, 22 nt, Human
uggaaauggaucugaugagucu

SEQ ID NO: 351454 - RNA, 22 nt, Human
cuucuggggauggagcccagaa

SEQ ID NO: 351455 - RNA, 22 nt, Human
aagacccacaaggcugaauguu

SEQ ID NO: 351456 - RNA, 22 nt, Human
gccaggaguucagaugcauguu

SEQ ID NO: 351457 - RNA, 22 nt, Human
cauggcccucuucuggagcaau

SEQ ID NO: 351458 - RNA, 20 nt, Human
ugaagcagccuugauucugu

SEQ ID NO: 351459 - RNA, 22 nt, Human
uuugaaguaccugguucugacu

SEQ ID NO: 351460 - RNA, 23 nt, Human
ucucaagaggaagcagggcucau

SEQ ID NO: 351461 - RNA, 22 nt, Human
ugccuucaaucaggauggucuc

SEQ ID NO: 351462 - RNA, 18 nt, Human
cccagugcucacugccuc

SEQ ID NO: 351463 - RNA, 21 nt, Human
agcagaggcugccuggugacu

SEQ ID NO: 351464 - RNA, 22 nt, Human
cagcagugugcaggugugcugg

SEQ ID NO: 351465 - RNA, 22 nt, Human
uggcugaguuccuggcacacgg

SEQ ID NO: 351466 - RNA, 22 nt, Human
ccagagaggcaaaacuccuucc

SEQ ID NO: 351467 - RNA, 22 nt, Human
uccaugaguuugaggaaaagag

SEQ ID NO: 351468 - RNA, 22 nt, Human
augggaguuuucucugaugcuc

SEQ ID NO: 351469 - RNA, 22 nt, Human
uggcucugagacacaggcucuc

SEQ ID NO: 351470 - RNA, 22 nt, Human
auucaagagcccauguuuccug

SEQ ID NO: 351471 - RNA, 22 nt, Human
gggaaccagccgcuuccgccuc

SEQ ID NO: 351472 - RNA, 22 nt, Human
auaucuuuguaugguucagcag

SEQ ID NO: 351473 - RNA, 22 nt, Human
gacccaggcccaaggcugccag

SEQ ID NO: 351474 - RNA, 22 nt, Human
agaagccaacagggcaggagag

SEQ ID NO: 351475 - RNA, 22 nt, Human
ugucaccacauuugucaauauc

SEQ ID NO: 351476 - RNA, 22 nt, Human
ccagcuuuugcacuggacuggg

SEQ ID NO: 351477 - RNA, 22 nt, Human
cucugagcagaggccguggcua

SEQ ID NO: 351478 - RNA, 22 nt, Human
ucaggauguccaaaauccagcc

SEQ ID NO: 351479 - RNA, 20 nt, Human
agacccuguguccuguggcc

SEQ ID NO: 351480 - RNA, 21 nt, Human
ugagagccuccaaccggcuac

SEQ ID NO: 351481 - RNA, 22 nt, Human
gagcucagauucuggugucaga

SEQ ID NO: 351482 - RNA, 22 nt, Human
aagauuucugcuuuuggaggca

SEQ ID NO: 351483 - RNA, 22 nt, Human
ggcagaaggccucccagcuccu

SEQ ID NO: 351484 - RNA, 22 nt, Human
ugaaaugaagggcuuguucugg

SEQ ID NO: 351485 - RNA, 22 nt, Human
uuucaauguaacauuuccaggc

SEQ ID NO: 351486 - RNA, 22 nt, Human
aggccuggguguucaccagaag

SEQ ID NO: 351487 - RNA, 22 nt, Human
gugcuuaauacaugucaauaac

SEQ ID NO: 351488 - RNA, 22 nt, Human
ggcugggcucgcugauuggcug

SEQ ID NO: 351489 - RNA, 22 nt, Human
aauuugcaugaugagaacaaua

SEQ ID NO: 351490 - RNA, 22 nt, Human
uaaaggcuuuuagugaugguaa

SEQ ID NO: 351491 - RNA, 22 nt, Human
caggggcaggugugagaucauc

SEQ ID NO: 351492 - RNA, 22 nt, Human
ugucagaacucuauugaugucc

SEQ ID NO: 351493 - RNA, 22 nt, Human
ccauuguaguaucuguuuuagu

SEQ ID NO: 351494 - RNA, 22 nt, Human
aggcuucuucuuccuauuuagu

SEQ ID NO: 351495 - RNA, 22 nt, Human
agaauuagguaaguucaucuga

SEQ ID NO: 351496 - RNA, 22 nt, Human
gccugccuagaauugcagcuuu

SEQ ID NO: 351497 - RNA, 23 nt, Human
ugagcugguauuguccaucucca

SEQ ID NO: 351498 - RNA, 22 nt, Human
aggccagccucaggcagggacc

SEQ ID NO: 351499 - RNA, 22 nt, Human
ugcagggaauccagucuagggu

SEQ ID NO: 351500 - RNA, 22 nt, Human
guggccaggacauugccaggca

SEQ ID NO: 351501 - RNA, 22 nt, Human
aaauuucuugaggcucucuagc

SEQ ID NO: 351502 - RNA, 22 nt, Human
gacagugcauuuccuggcaugg

SEQ ID NO: 351503 - RNA, 22 nt, Human
aaugauugcaaacauugagaac

SEQ ID NO: 351504 - RNA, 22 nt, Human
cuggccugggagcugcuagcgu

SEQ ID NO: 351505 - RNA, 22 nt, Human
ugggcuggagcuuguugcuucc

SEQ ID NO: 351506 - RNA, 22 nt, Human
cagcuuuaccuuuaggaguaac

SEQ ID NO: 351507 - RNA, 23 nt, Human
agacccagagacuggcucugcuc

SEQ ID NO: 351508 - RNA, 22 nt, Human
uacauuuauaaggcuucucugu

SEQ ID NO: 351509 - RNA, 22 nt, Human
cuguacaggugaggagggggcu

SEQ ID NO: 351510 - RNA, 22 nt, Human
ugugcauguauugauuuguacc

SEQ ID NO: 351511 - RNA, 22 nt, Human
cagcagagguuggaacaguucu

SEQ ID NO: 351512 - RNA, 19 nt, Human
gccugggaugggcagaacu

SEQ ID NO: 351513 - RNA, 22 nt, Human
ugggcugaaaugcuguggacua

SEQ ID NO: 351514 - RNA, 22 nt, Human
accuuucauuaaagucuguagu

SEQ ID NO: 351515 - RNA, 22 nt, Human
cuccuggacauggagcggagga

SEQ ID NO: 351516 - RNA, 22 nt, Human
aggccagcagcaugacggcauc

SEQ ID NO: 351517 - RNA, 22 nt, Human
ccagagagaaaauggagggcca

SEQ ID NO: 351518 - RNA, 22 nt, Human
uuugaaaggugucgagaugugu

SEQ ID NO: 351519 - RNA, 22 nt, Human
ggaaagaggauaguggguaggu

SEQ ID NO: 351520 - RNA, 18 nt, Human
ucaaagucuggcuccacu

SEQ ID NO: 351521 - RNA, 22 nt, Human
agcagccaggaaucugcagagc

SEQ ID NO: 351522 - RNA, 22 nt, Human
uuucuguuaggcaucauuuuaa

SEQ ID NO: 351523 - RNA, 22 nt, Human
ucaguggaacugucugggugag

SEQ ID NO: 351524 - RNA, 22 nt, Human
gcauguguggaggagaugugcu

SEQ ID NO: 351525 - RNA, 22 nt, Human
cucuuaaauaacaucauugcuu

SEQ ID NO: 351526 - RNA, 22 nt, Human
cagccugcucucagauguugag

SEQ ID NO: 351527 - RNA, 22 nt, Human
ugccucagucuaaagucucuca

SEQ ID NO: 351528 - RNA, 22 nt, Human
gccagccuucuguggccugcaa

SEQ ID NO: 351529 - RNA, 22 nt, Human
cuggccaggcuugggacagaca

SEQ ID NO: 351530 - RNA, 22 nt, Human
gaacuguaguuaauacuacaca

SEQ ID NO: 351531 - RNA, 18 nt, Human
gugcugugggcaguggcc

SEQ ID NO: 351532 - RNA, 22 nt, Human
gaggaaaauauucagggagguu

SEQ ID NO: 351533 - RNA, 22 nt, Human
cuguaauucacuagggucagcg

SEQ ID NO: 351534 - RNA, 22 nt, Human
gggaagggagggccuccaguca

SEQ ID NO: 351535 - RNA, 22 nt, Human
uuaaacaguguuucaugugggg

SEQ ID NO: 351536 - RNA, 22 nt, Human
ucaucugucccaggcuuuuuuc

SEQ ID NO: 351537 - RNA, 22 nt, Human
acuuccuggcugggugaccugg

SEQ ID NO: 351538 - RNA, 22 nt, Human
gcuggccugggcagaggcuaug

SEQ ID NO: 351539 - RNA, 22 nt, Human
ucccagaggucucugcugguuc

SEQ ID NO: 351540 - RNA, 19 nt, Human
cagaggcaccagguauaga

SEQ ID NO: 351541 - RNA, 20 nt, Human
gccuggcacccggggcuggc

SEQ ID NO: 351542 - RNA, 23 nt, Human
uccugagaugagacagugcugcc

SEQ ID NO: 351543 - RNA, 21 nt, Human
guguuuccuguuuauggcuug

SEQ ID NO: 351544 - RNA, 17 nt, Human
ugaagaugcauggcagc

SEQ ID NO: 351545 - RNA, 22 nt, Human
gggcucucgauuagacccuggg

SEQ ID NO: 351546 - RNA, 22 nt, Human
cagggcucaucugugugaccag

SEQ ID NO: 351547 - RNA, 22 nt, Human
cacugcaggucugagauggggg

SEQ ID NO: 351548 - RNA, 21 nt, Human
ugccaggccugagcugggguc

SEQ ID NO: 351549 - RNA, 22 nt, Human
aaaaaugaaacggcugguuggc

SEQ ID NO: 351550 - RNA, 20 nt, Human
ccuggaagagcuccccaggc

SEQ ID NO: 351551 - RNA, 20 nt, Human
ucagaugggagugagccauc

SEQ ID NO: 351552 - RNA, 22 nt, Human
aagaaauuaaggaaugcaacga

SEQ ID NO: 351553 - RNA, 22 nt, Human
ucagggcauggcugcacuuggc

SEQ ID NO: 351554 - RNA, 22 nt, Human
aaagaaaccuaucagccacaug

SEQ ID NO: 351555 - RNA, 22 nt, Human
uugcucuguaauaaucuggggu

SEQ ID NO: 351556 - RNA, 22 nt, Human
uguccucuaauuggccucuugc

SEQ ID NO: 351557 - RNA, 22 nt, Human
cucuucaauagauuguugaggg

SEQ ID NO: 351558 - RNA, 22 nt, Human
uucuucaaaacaacacuggccu

SEQ ID NO: 351559 - RNA, 22 nt, Human
gccugcagaggugcugcuagcu

SEQ ID NO: 351560 - RNA, 22 nt, Human
agcaggugagcacagccaggcu

SEQ ID NO: 351561 - RNA, 22 nt, Human
cugaggcacagugaacuucucc

SEQ ID NO: 351562 - RNA, 22 nt, Human
gcacaauaacagccaagguuau

SEQ ID NO: 351563 - RNA, 22 nt, Human
uagaaacacagaucugguguca

SEQ ID NO: 351564 - RNA, 22 nt, Human
guguguccucaguaguggcaug

SEQ ID NO: 351565 - RNA, 19 nt, Human
aagggcugggcaccucacu

SEQ ID NO: 351566 - RNA, 22 nt, Human
ucuggcuccguguccgcuccca

SEQ ID NO: 351567 - RNA, 22 nt, Human
cagagcucagagcagggcacuc

SEQ ID NO: 351568 - RNA, 22 nt, Human
cagcauggagacaaagugggca

SEQ ID NO: 351569 - RNA, 22 nt, Human
ugauuucccuguagccucugaa

SEQ ID NO: 351570 - RNA, 22 nt, Human
gcagggcacagacagugccaag

SEQ ID NO: 351571 - RNA, 22 nt, Human
ucccagagacaucauuucuccg

SEQ ID NO: 351572 - RNA, 22 nt, Human
gcagggugccgacuucagggau

SEQ ID NO: 351573 - RNA, 22 nt, Human
gugucaugcacacucaguguug

SEQ ID NO: 351574 - RNA, 22 nt, Human
gcuggaccaggugugcacaggc

SEQ ID NO: 351575 - RNA, 22 nt, Human
ccugggaggcggagguugcagg

SEQ ID NO: 351576 - RNA, 22 nt, Human
gagccugaauuugaccugcuua

SEQ ID NO: 351577 - RNA, 22 nt, Human
ggcagcuaggggcagggaauuc

SEQ ID NO: 351578 - RNA, 22 nt, Human
auucuguauggaaaagcacuau

SEQ ID NO: 351579 - RNA, 22 nt, Human
gcuuccuucuaccacaucaugc

SEQ ID NO: 351580 - RNA, 22 nt, Human
aagggcugcauuugauguguca

SEQ ID NO: 351581 - RNA, 22 nt, Human
acuuucauuuguaauaaacuuc

SEQ ID NO: 351582 - RNA, 22 nt, Human
cuggcagcuggaggcuagaggc

SEQ ID NO: 351583 - RNA, 22 nt, Human
aggccagaaaugucagggagug

SEQ ID NO: 351584 - RNA, 22 nt, Human
agucacaguuccuacccaguaa

SEQ ID NO: 351585 - RNA, 22 nt, Human
cauuuguaguuaaaaaugucuc

SEQ ID NO: 351586 - RNA, 22 nt, Human
aaguaaaagcuuuaccaugcgc

SEQ ID NO: 351587 - RNA, 22 nt, Human
aaugugaucgcuuuagaagcuu

SEQ ID NO: 351588 - RNA, 22 nt, Human
auccauuugaaagaacagucca

SEQ ID NO: 351589 - RNA, 22 nt, Human
ugagcccagucugucugacaug

SEQ ID NO: 351590 - RNA, 22 nt, Human
ccugagcuggaagagcuugugc

SEQ ID NO: 351591 - RNA, 22 nt, Human
gcucugcugagauaucugggag

SEQ ID NO: 351592 - RNA, 22 nt, Human
agcaggugcauggcgagcgcgg

SEQ ID NO: 351593 - RNA, 22 nt, Human
auuguaauuuuagagaaagugg

SEQ ID NO: 351594 - RNA, 22 nt, Human
cgucuuccucuuacgaugcgcu

SEQ ID NO: 351595 - RNA, 22 nt, Human
uuuauguaguuacggacuauca

SEQ ID NO: 351596 - RNA, 22 nt, Human
uagaaacauauaggauggcagg

SEQ ID NO: 351597 - RNA, 22 nt, Human
uccauucauucauugaugaaca

SEQ ID NO: 351598 - RNA, 19 nt, Human
ucccuuccugucgggcucc

SEQ ID NO: 351599 - RNA, 22 nt, Human
acagagcuguacaugugccaug

SEQ ID NO: 351600 - RNA, 22 nt, Human
ugcagaccucccauggcugccu

SEQ ID NO: 351601 - RNA, 22 nt, Human
acagcagcuaaaggugucuccu

SEQ ID NO: 351602 - RNA, 22 nt, Human
uucuuuccaaccagauauuggu

SEQ ID NO: 351603 - RNA, 22 nt, Human
auuucacucauucauguuacuu

SEQ ID NO: 351604 - RNA, 22 nt, Human
cuucucaaaguugugaaucagg

SEQ ID NO: 351605 - RNA, 22 nt, Human
aaguuucaaauauaaaauuaca

SEQ ID NO: 351606 - RNA, 22 nt, Human
gagugugucggucagcguggcg

SEQ ID NO: 351607 - RNA, 22 nt, Human
gggcagcucggaagugggaaag

SEQ ID NO: 351608 - RNA, 22 nt, Human
gcaggagugacauggaugugga

SEQ ID NO: 351609 - RNA, 19 nt, Human
acucaagucuaaugaaauc

SEQ ID NO: 351610 - RNA, 18 nt, Human
gcugucugaggucugagg

SEQ ID NO: 351611 - RNA, 20 nt, Human
guugaaaguaauaugaugcu

SEQ ID NO: 351612 - RNA, 22 nt, Human
caagaaucuugcagcuuagacu

SEQ ID NO: 351613 - RNA, 22 nt, Human
aaauccuaauaaugcacuagug

SEQ ID NO: 351614 - RNA, 22 nt, Human
uuuacagauguggaaagugagc

SEQ ID NO: 351615 - RNA, 22 nt, Human
cuucuaggcuucucagggggca

SEQ ID NO: 351616 - RNA, 22 nt, Human
gcugucugcaagccaggaaaug

SEQ ID NO: 351617 - RNA, 22 nt, Human
ugggcugaguguggaacuaguu

SEQ ID NO: 351618 - RNA, 22 nt, Human
aggaagccuggcauuaaaaagc

SEQ ID NO: 351619 - RNA, 22 nt, Human
uucuggagaucugccuauggga

SEQ ID NO: 351620 - RNA, 22 nt, Human
uuccucaggcuucccuuugucc

SEQ ID NO: 351621 - RNA, 22 nt, Human
uauuuguauuucaugcaguaaa

SEQ ID NO: 351622 - RNA, 21 nt, Human
aguuugaugcaauuucugaga

SEQ ID NO: 351623 - RNA, 22 nt, Human
ccuggcagcaggugggcccgug

SEQ ID NO: 351624 - RNA, 22 nt, Human
ugggagagugcucaaugugcaa

SEQ ID NO: 351625 - RNA, 22 nt, Human
cauuucugggagacaugcuaga

SEQ ID NO: 351626 - RNA, 22 nt, Human
cucuucuugccugaugaggcag

SEQ ID NO: 351627 - RNA, 22 nt, Human
ugcuuccuugagcucuccaauc

SEQ ID NO: 351628 - RNA, 22 nt, Human
ggugaggaaagauggugacagu

SEQ ID NO: 351629 - RNA, 22 nt, Human
ccuguucauuuguauuugucuu

SEQ ID NO: 351630 - RNA, 22 nt, Human
caggauggucagaugcauuguc

SEQ ID NO: 351631 - RNA, 21 nt, Human
gagacagacuuucguccccug

SEQ ID NO: 351632 - RNA, 22 nt, Human
augcaguauaaaucauuucugg

SEQ ID NO: 351633 - RNA, 22 nt, Human
cagcagcuggugagacacagcc

SEQ ID NO: 351634 - RNA, 22 nt, Human
guggauggauugaggcaguggg

SEQ ID NO: 351635 - RNA, 22 nt, Human
ggagggcugccagguggagcgg

SEQ ID NO: 351636 - RNA, 23 nt, Human
agaugagccaacaccuccaugcc

SEQ ID NO: 351637 - RNA, 22 nt, Human
ccacagggccuuuccugcuggc

SEQ ID NO: 351638 - RNA, 22 nt, Human
agcuuuauauuuaaugaauucu

SEQ ID NO: 351639 - RNA, 22 nt, Human
aaagauuuaugaaguucaauua

SEQ ID NO: 351640 - RNA, 22 nt, Human
ugagccuggagucguggagggg

SEQ ID NO: 351641 - RNA, 22 nt, Human
caagauuugccaguggccaacu

SEQ ID NO: 351642 - RNA, 19 nt, Human
cuccucagucccagagguc

SEQ ID NO: 351643 - RNA, 21 nt, Human
ccugagccuguuuauccagaa

SEQ ID NO: 351644 - RNA, 22 nt, Human
aggaaaugcugaugcuccugga

SEQ ID NO: 351645 - RNA, 23 nt, Human
agggugagcaagcuauggagacc

SEQ ID NO: 351646 - RNA, 22 nt, Human
ugccaggcugcccuccagucug

SEQ ID NO: 351647 - RNA, 22 nt, Human
gucauaaagcuuguugcauuua

SEQ ID NO: 351648 - RNA, 22 nt, Human
agaaaucaauaucuauauguug

SEQ ID NO: 351649 - RNA, 20 nt, Human
aggagccauugacugcagca

SEQ ID NO: 351650 - RNA, 22 nt, Human
cagcaauaaugucuacaaaucu

SEQ ID NO: 351651 - RNA, 22 nt, Human
uugguacaaugugcuagguagg

SEQ ID NO: 351652 - RNA, 22 nt, Human
auggagggugucagagagcgaa

SEQ ID NO: 351653 - RNA, 22 nt, Human
agauacauuguucuaagcauug

SEQ ID NO: 351654 - RNA, 22 nt, Human
ucauuuguucucauucucuacu

SEQ ID NO: 351655 - RNA, 22 nt, Human
cggcugaggaucuccaggccug

SEQ ID NO: 351656 - RNA, 22 nt, Human
cucuggagcauuucaccuacau

SEQ ID NO: 351657 - RNA, 22 nt, Human
gcaggaagccuuaccaagccca

SEQ ID NO: 351658 - RNA, 23 nt, Human
ggaaagagaggaguugugcauag

SEQ ID NO: 351659 - RNA, 22 nt, Human
cugccaggacugacgucuucag

SEQ ID NO: 351660 - RNA, 20 nt, Human
uuucaagucagcaauucuca

SEQ ID NO: 351661 - RNA, 22 nt, Human
gcugcagccaaauucauuguca

SEQ ID NO: 351662 - RNA, 22 nt, Human
cuuaauuacuguccaauaugca

SEQ ID NO: 351663 - RNA, 20 nt, Human
uuugucuguuaaguguuucu

SEQ ID NO: 351664 - RNA, 22 nt, Human
ugaaaucuuauacuuugguagu

SEQ ID NO: 351665 - RNA, 22 nt, Human
uguuaucugagcaacgucgacg

SEQ ID NO: 351666 - RNA, 22 nt, Human
acagagagaggcccgaggcugc

SEQ ID NO: 351667 - RNA, 22 nt, Human
gcacaugguaggcauuugaugu

SEQ ID NO: 351668 - RNA, 22 nt, Human
ugaagccaccgaaccagaagag

SEQ ID NO: 351669 - RNA, 22 nt, Human
ucagcugcucaaauuuauguca

SEQ ID NO: 351670 - RNA, 19 nt, Human
cugcagggaugugcagagu

SEQ ID NO: 351671 - RNA, 22 nt, Human
gaagaacacuucaugauucauu

SEQ ID NO: 351672 - RNA, 22 nt, Human
ucaaaauuagugaccaaaggca

SEQ ID NO: 351673 - RNA, 22 nt, Human
ggggauggugggaaggcaaucu

SEQ ID NO: 351674 - RNA, 21 nt, Human
ucagaguggaagacaguuuga

SEQ ID NO: 351675 - RNA, 22 nt, Human
gugcaugucggggugcauguca

SEQ ID NO: 351676 - RNA, 22 nt, Human
ugggcucauggcccagcacugg

SEQ ID NO: 351677 - RNA, 22 nt, Human
ugguuucccauuaucugcagga

SEQ ID NO: 351678 - RNA, 22 nt, Human
aaugcauauguaggcaagcagu

SEQ ID NO: 351679 - RNA, 22 nt, Human
gcagagcuccccaagacaccaa

SEQ ID NO: 351680 - RNA, 22 nt, Human
uugaaaggcacaggcaccuggg

SEQ ID NO: 351681 - RNA, 22 nt, Human
guguauaacuaucuaucuagua

SEQ ID NO: 351682 - RNA, 22 nt, Human
aaucagaaaauucaguggaauu

SEQ ID NO: 351683 - RNA, 22 nt, Human
gcuggccucgcaggcaggaugu

SEQ ID NO: 351684 - RNA, 23 nt, Human
agagcuuucuaaaauguaaaucu

SEQ ID NO: 351685 - RNA, 22 nt, Human
augcccaaugucacaauuuuug

SEQ ID NO: 351686 - RNA, 17 nt, Human
agcugaccagauggacu

SEQ ID NO: 351687 - RNA, 22 nt, Human
uggagcagagaugggagcccaa

SEQ ID NO: 351688 - RNA, 22 nt, Human
cuggcccauggugagcucuggg

SEQ ID NO: 351689 - RNA, 17 nt, Human
ugcauuguaggcuagcc

SEQ ID NO: 351690 - RNA, 22 nt, Human
agucucaggcagaggaaggcua

SEQ ID NO: 351691 - RNA, 22 nt, Human
ggagcuguuggcagcuaucuug

SEQ ID NO: 351692 - RNA, 18 nt, Human
agggagagaccgcggguc

SEQ ID NO: 351693 - RNA, 22 nt, Human
cacugcucgcugcagcauggcc

SEQ ID NO: 351694 - RNA, 22 nt, Human
ucaguaaaugagcaaaaauuuc

SEQ ID NO: 351695 - RNA, 22 nt, Human
uggcucaguuucugcccagcug

SEQ ID NO: 351696 - RNA, 22 nt, Human
agcagggcucuguggagggugg

SEQ ID NO: 351697 - RNA, 22 nt, Human
cauacuuucuuuuucacgcaua

SEQ ID NO: 351698 - RNA, 22 nt, Human
agaauucucuuccauugaaaca

SEQ ID NO: 351699 - RNA, 22 nt, Human
ccacagaggacaacugccuggc

SEQ ID NO: 351700 - RNA, 22 nt, Human
aggagcugcuuaaaugguuggu

SEQ ID NO: 351701 - RNA, 22 nt, Human
ggccucagaccggagcuggcca

SEQ ID NO: 351702 - RNA, 22 nt, Human
uuugaaagucaaccuuccaguu

SEQ ID NO: 351703 - RNA, 22 nt, Human
aagcaccuggguuauaucuuag

SEQ ID NO: 351704 - RNA, 22 nt, Human
ggcucugcgcgguaaagugacu

SEQ ID NO: 351705 - RNA, 22 nt, Human
aggugcagaaaaaaguccuuua

SEQ ID NO: 351706 - RNA, 22 nt, Human
acagguuuuuguggauauaugu

SEQ ID NO: 351707 - RNA, 22 nt, Human
ugucacauguguggcauuuuuc

SEQ ID NO: 351708 - RNA, 22 nt, Human
cagaggaggcgguauacacugc

SEQ ID NO: 351709 - RNA, 22 nt, Human
uauccaaacauauagucucucu

SEQ ID NO: 351710 - RNA, 22 nt, Human
ccuccugggacaggcuggcaca

SEQ ID NO: 351711 - RNA, 22 nt, Human
agucucugcaugaugcagcaca

SEQ ID NO: 351712 - RNA, 22 nt, Human
guguuuuaucagacaaaguaua

SEQ ID NO: 351713 - RNA, 22 nt, Human
ggcuggcuugccaagcucaggg

SEQ ID NO: 351714 - RNA, 22 nt, Human
gaggcauggccugaggcuagga

SEQ ID NO: 351715 - RNA, 22 nt, Human
ggagcugcacgcucugaagccu

SEQ ID NO: 351716 - RNA, 22 nt, Human
guuccaaagcaaaggaggugag

SEQ ID NO: 351717 - RNA, 22 nt, Human
augcugugauuguagaaauauu

SEQ ID NO: 351718 - RNA, 22 nt, Human
uuacagaacugcccuaguuggc

SEQ ID NO: 351719 - RNA, 22 nt, Human
cccucuggcucuucucaggccg

SEQ ID NO: 351720 - RNA, 21 nt, Human
ugcagaggcacaaacaagccc

SEQ ID NO: 351721 - RNA, 22 nt, Human
cugggccugguagggcuugaaa

SEQ ID NO: 351722 - RNA, 22 nt, Human
ucucccacuggccuuguaugau

SEQ ID NO: 351723 - RNA, 22 nt, Human
agagugauggguugugcugacc

SEQ ID NO: 351724 - RNA, 22 nt, Human
accaggcaaaaccacaggagca

SEQ ID NO: 351725 - RNA, 22 nt, Human
gaguguuccagaaacuggcccu

SEQ ID NO: 351726 - RNA, 22 nt, Human
cagcaauauacacagucuaugg

SEQ ID NO: 351727 - RNA, 22 nt, Human
gcuucuggaggagcugggcuga

SEQ ID NO: 351728 - RNA, 22 nt, Human
gugaauaacuuucuauguuaau

SEQ ID NO: 351729 - RNA, 20 nt, Human
gcucccugguagaaauguuu

SEQ ID NO: 351730 - RNA, 22 nt, Human
cacugaagaugcgacuagugcu

SEQ ID NO: 351731 - RNA, 23 nt, Human
cuccccaguguccucaugcaucu

SEQ ID NO: 351732 - RNA, 22 nt, Human
agguaaagacugcaaggagaau

SEQ ID NO: 351733 - RNA, 22 nt, Human
gccagagccggcuucacaggau

SEQ ID NO: 351734 - RNA, 22 nt, Human
ucccagggugcgccugcccucg

SEQ ID NO: 351735 - RNA, 22 nt, Human
cugaauaauguucucuuguaug

SEQ ID NO: 351736 - RNA, 22 nt, Human
auaaacagaguaguugcuacug

SEQ ID NO: 351737 - RNA, 22 nt, Human
gccaguggcccucuggagaagg

SEQ ID NO: 351738 - RNA, 22 nt, Human
ucuuuucaucauuuaauaggua

SEQ ID NO: 351739 - RNA, 22 nt, Human
cacagggcuuugauggcugagu

SEQ ID NO: 351740 - RNA, 22 nt, Human
uagagaaauaagcuuugccuug

SEQ ID NO: 351741 - RNA, 22 nt, Human
agcuggccuuagugagcaccug

SEQ ID NO: 351742 - RNA, 22 nt, Human
gcccaggcuggagugcaguagc

SEQ ID NO: 351743 - RNA, 22 nt, Human
ucccagagauuuccucuccuuc

SEQ ID NO: 351744 - RNA, 22 nt, Human
ccagcuggugacauccccaacc

SEQ ID NO: 351745 - RNA, 22 nt, Human
gaggagagggcugcgggcccac

SEQ ID NO: 351746 - RNA, 22 nt, Human
cuguggaaggccuguccugaaa

SEQ ID NO: 351747 - RNA, 22 nt, Human
uucuaucauacuugaauacauu

SEQ ID NO: 351748 - RNA, 22 nt, Human
ggcacugagcgggcucugagcg

SEQ ID NO: 351749 - RNA, 22 nt, Human
ccaggagagcaaaggucacucu

SEQ ID NO: 351750 - RNA, 22 nt, Human
agauggagaccuuggaugaacu

SEQ ID NO: 351751 - RNA, 20 nt, Human
aggagaugauccagagucag

SEQ ID NO: 351752 - RNA, 23 nt, Human
agaggggagcaucugcuggcuga

SEQ ID NO: 351753 - RNA, 22 nt, Human
caaagcaaggcucaguuugaac

SEQ ID NO: 351754 - RNA, 22 nt, Human
uugcugaauugaauccuuuggu

SEQ ID NO: 351755 - RNA, 22 nt, Human
uggccuuccuggugacucauga

SEQ ID NO: 351756 - RNA, 22 nt, Human
cugagcuggucuauggacuugg

SEQ ID NO: 351757 - RNA, 22 nt, Human
aguuccagcugugaccagaaaa

SEQ ID NO: 351758 - RNA, 22 nt, Human
agccaagcugaucuccugcuga

SEQ ID NO: 351759 - RNA, 22 nt, Human
uuccucucucuugccagaaugu

SEQ ID NO: 351760 - RNA, 22 nt, Human
auacauaauuacuuccgauguu

SEQ ID NO: 351761 - RNA, 22 nt, Human
gggcugagaauucagcuuuccu

SEQ ID NO: 351762 - RNA, 22 nt, Human
aucuaggauuugaaugcacagu

SEQ ID NO: 351763 - RNA, 22 nt, Human
aauaauuuuagcucagaguugu

SEQ ID NO: 351764 - RNA, 22 nt, Human
uagggauguccugagacuuggc

SEQ ID NO: 351765 - RNA, 22 nt, Human
uauuucagguauggugugaaau

SEQ ID NO: 351766 - RNA, 22 nt, Human
uuugaaaauuagacacaggcua

SEQ ID NO: 351767 - RNA, 19 nt, Human
ucuuucauuucuagcucug

SEQ ID NO: 351768 - RNA, 22 nt, Human
acucucucacagcuuggcugau

SEQ ID NO: 351769 - RNA, 23 nt, Human
aguuuuucugcaugguucuguau

SEQ ID NO: 351770 - RNA, 22 nt, Human
agcauuuaugacuaauguaaaa

SEQ ID NO: 351771 - RNA, 22 nt, Human
ccucuucugagugagacucccu

SEQ ID NO: 351772 - RNA, 22 nt, Human
uauuucugaggcccaggaagug

SEQ ID NO: 351773 - RNA, 22 nt, Human
ggccagcucugcacagcagcug

SEQ ID NO: 351774 - RNA, 22 nt, Human
uucuucaaccaucuacauaaac

SEQ ID NO: 351775 - RNA, 22 nt, Human
guccucagucaguuuggugggg

SEQ ID NO: 351776 - RNA, 22 nt, Human
auggauaagaacaaauaucuga

SEQ ID NO: 351777 - RNA, 22 nt, Human
ucucaggacuuugggaagcuca

SEQ ID NO: 351778 - RNA, 22 nt, Human
gccaggaggucagccccucaac

SEQ ID NO: 351779 - RNA, 19 nt, Human
ucaggaguuaguugugcuc

SEQ ID NO: 351780 - RNA, 23 nt, Human
uuugcaaauuggacacaaccaca

SEQ ID NO: 351781 - RNA, 22 nt, Human
ccuggcagcuccuccccggcgg

SEQ ID NO: 351782 - RNA, 22 nt, Human
ugcaauaacccaguaucuguga

SEQ ID NO: 351783 - RNA, 22 nt, Human
agggacacugaugagaaauucu

SEQ ID NO: 351784 - RNA, 22 nt, Human
uaugcacauugguuuccucauu

SEQ ID NO: 351785 - RNA, 22 nt, Human
auuaggcauauaugcuuuuaau

SEQ ID NO: 351786 - RNA, 22 nt, Human
agagaggcgaguuaccugugcu

SEQ ID NO: 351787 - RNA, 22 nt, Human
augcauaauguauguauugacu

SEQ ID NO: 351788 - RNA, 22 nt, Human
uauuugaaggcauacauuuuga

SEQ ID NO: 351789 - RNA, 22 nt, Human
acagguggggaggcugagguuc

SEQ ID NO: 351790 - RNA, 22 nt, Human
guuuuauaugucucugcugaca

SEQ ID NO: 351791 - RNA, 22 nt, Human
ccagcucuagccccauguggcu

SEQ ID NO: 351792 - RNA, 22 nt, Human
uccugcagccuugggcuggagc

SEQ ID NO: 351793 - RNA, 22 nt, Human
aggcagaccaugaaucaugacc

SEQ ID NO: 351794 - RNA, 22 nt, Human
agaggaggcagcuuaacucagu

SEQ ID NO: 351795 - RNA, 22 nt, Human
cagugcugggcagaggagagcg

SEQ ID NO: 351796 - RNA, 21 nt, Human
augaagucuaugcuucugugu

SEQ ID NO: 351797 - RNA, 19 nt, Human
aucagcaagguaggaugug

SEQ ID NO: 351798 - RNA, 22 nt, Human
ccugggcuugcaucugugcugg

SEQ ID NO: 351799 - RNA, 19 nt, Human
guuaggcaggguggggagu

SEQ ID NO: 351800 - RNA, 22 nt, Human
aaggccagaguacuagaggcug

SEQ ID NO: 351801 - RNA, 22 nt, Human
ccacagggauaggaauggggcu

SEQ ID NO: 351802 - RNA, 22 nt, Human
gccuucugauugcuggacugac

SEQ ID NO: 351803 - RNA, 22 nt, Human
uagaaauguuagauguauugag

SEQ ID NO: 351804 - RNA, 22 nt, Human
aacuagucagugauucucagaa

SEQ ID NO: 351805 - RNA, 22 nt, Human
aggagaggcaucaagaaaaucg

SEQ ID NO: 351806 - RNA, 21 nt, Human
ggacaccagucacacuggauu

SEQ ID NO: 351807 - RNA, 22 nt, Human
gcaaaucaccaccuagcuggau

SEQ ID NO: 351808 - RNA, 22 nt, Human
cuggcucauuuuagcaucaggu

SEQ ID NO: 351809 - RNA, 22 nt, Human
uaucuuuagaggaagagaaucu

SEQ ID NO: 351810 - RNA, 22 nt, Human
aagauacugaugauguaggcua

SEQ ID NO: 351811 - RNA, 22 nt, Human
ugcugucccccgugucugggcu

SEQ ID NO: 351812 - RNA, 22 nt, Human
cagagccucagaauccugugga

SEQ ID NO: 351813 - RNA, 22 nt, Human
cagggccucauccucagagauu

SEQ ID NO: 351814 - RNA, 22 nt, Human
gccugccuguuggcugaggugc

SEQ ID NO: 351815 - RNA, 19 nt, Human
guuuuucccagacgaggca

SEQ ID NO: 351816 - RNA, 22 nt, Human
ggcucugcuggauugaggccag

SEQ ID NO: 351817 - RNA, 22 nt, Human
aauuauauuguggugugaaugu

SEQ ID NO: 351818 - RNA, 22 nt, Human
auuuaucucuggaaacuaagca

SEQ ID NO: 351819 - RNA, 19 nt, Human
gaggagcuaucggagacag

SEQ ID NO: 351820 - RNA, 18 nt, Human
agagaugguguagaguuu

SEQ ID NO: 351821 - RNA, 21 nt, Human
agaaaaaccagcauguuuuca

SEQ ID NO: 351822 - RNA, 22 nt, Human
ucagggcagguuaacuugggug

SEQ ID NO: 351823 - RNA, 19 nt, Human
gagcugccuuuugaagacc

SEQ ID NO: 351824 - RNA, 22 nt, Human
gucuccugagccuugacugcaa

SEQ ID NO: 351825 - RNA, 18 nt, Human
gcuggcugcacuucugcu

SEQ ID NO: 351826 - RNA, 22 nt, Human
gggcagguguugucaaucuaau

SEQ ID NO: 351827 - RNA, 20 nt, Human
agacccucuggacugggccc

SEQ ID NO: 351828 - RNA, 22 nt, Human
auacagaauuugcccuuuucau

SEQ ID NO: 351829 - RNA, 22 nt, Human
auuagggcuggaugcaaggaaa

SEQ ID NO: 351830 - RNA, 22 nt, Human
gccucaggacuggcauacucau

SEQ ID NO: 351831 - RNA, 22 nt, Human
ucuuagcacagcuauauaaguu

SEQ ID NO: 351832 - RNA, 22 nt, Human
ccucagaggugaacaucagugc

SEQ ID NO: 351833 - RNA, 22 nt, Human
ucaggagcuugguagugugauu

SEQ ID NO: 351834 - RNA, 22 nt, Human
guuugcauaucugugaaaugga

SEQ ID NO: 351835 - RNA, 20 nt, Human
ucucaggguucagcaaagua

SEQ ID NO: 351836 - RNA, 22 nt, Human
gcauguguuauuuuauguauga

SEQ ID NO: 351837 - RNA, 22 nt, Human
cuagggaccucagcuccuggag

SEQ ID NO: 351838 - RNA, 22 nt, Human
uggcagagguauauugggagga

SEQ ID NO: 351839 - RNA, 22 nt, Human
cauggagauaaacugaaauauu

SEQ ID NO: 351840 - RNA, 20 nt, Human
caccagucaugagucaauac

SEQ ID NO: 351841 - RNA, 22 nt, Human
aucuguucuucaaaauauuaca

SEQ ID NO: 351842 - RNA, 22 nt, Human
uggaguucauccaugacagcuu

SEQ ID NO: 351843 - RNA, 21 nt, Human
ugcucaugcaaugcaugucca

SEQ ID NO: 351844 - RNA, 22 nt, Human
gaaauaagaguccaugccaggu

SEQ ID NO: 351845 - RNA, 22 nt, Human
aaaaguaauugaugcaaucgua

SEQ ID NO: 351846 - RNA, 22 nt, Human
uggucaguugcaucagagaagu

SEQ ID NO: 351847 - RNA, 22 nt, Human
uucacauugguucuugauagcu

SEQ ID NO: 351848 - RNA, 22 nt, Human
acauuucuaucauccuguaaug

SEQ ID NO: 351849 - RNA, 22 nt, Human
uacuuguagcagguggcauuua

SEQ ID NO: 351850 - RNA, 20 nt, Human
gcacugaaauucaauguuug

SEQ ID NO: 351851 - RNA, 22 nt, Human
acauuucuucccuuuagcagaa

SEQ ID NO: 351852 - RNA, 22 nt, Human
ugaaaucuuuaguuucuguccc

SEQ ID NO: 351853 - RNA, 22 nt, Human
ucaaagucacaacucucuaauu

SEQ ID NO: 351854 - RNA, 22 nt, Human
aaguggagucccuacaaccagc

SEQ ID NO: 351855 - RNA, 20 nt, Human
gcugaagauucccaugcaag

SEQ ID NO: 351856 - RNA, 22 nt, Human
cuuuggcaaugaaacacaagaa

SEQ ID NO: 351857 - RNA, 22 nt, Human
gcuggagccaagcugcucuugg

SEQ ID NO: 351858 - RNA, 22 nt, Human
ccuggcucuucagagguuccua

SEQ ID NO: 351859 - RNA, 22 nt, Human
caagaucagggugccagaaugg

SEQ ID NO: 351860 - RNA, 22 nt, Human
ucuuaaaaguaugccaauugga

SEQ ID NO: 351861 - RNA, 21 nt, Human
agggaaagaaaaugagcuaau

SEQ ID NO: 351862 - RNA, 22 nt, Human
ugcaauaacuacuuuaauguug

SEQ ID NO: 351863 - RNA, 22 nt, Human
acacaucagaaauaugaaugag

SEQ ID NO: 351864 - RNA, 22 nt, Human
ccagggugcucuguggcgucgc

SEQ ID NO: 351865 - RNA, 22 nt, Human
ugaggggagacagaguggacuc

SEQ ID NO: 351866 - RNA, 22 nt, Human
ugaguccaucgcagggaagugg

SEQ ID NO: 351867 - RNA, 22 nt, Human
aagugaagaaauacaugagaau

SEQ ID NO: 351868 - RNA, 22 nt, Human
ucacagggauggaauagaaaua

SEQ ID NO: 351869 - RNA, 22 nt, Human
gcuggcugcgucaucacagggc

SEQ ID NO: 351870 - RNA, 22 nt, Human
aaaugaacaguugcauucucug

SEQ ID NO: 351871 - RNA, 22 nt, Human
gagcaccucaauuugcuauuug

SEQ ID NO: 351872 - RNA, 22 nt, Human
auuucugauaaacguaagcugc

SEQ ID NO: 351873 - RNA, 22 nt, Human
guuucauacagauuauucaugg

SEQ ID NO: 351874 - RNA, 22 nt, Human
auacagaagccuguauuucugg

SEQ ID NO: 351875 - RNA, 22 nt, Human
uuccaaaguuaguuauuagaaa

SEQ ID NO: 351876 - RNA, 22 nt, Human
agcauggggcuccgcaaugaac

SEQ ID NO: 351877 - RNA, 22 nt, Human
ugccaaauugcccuauaaauga

SEQ ID NO: 351878 - RNA, 22 nt, Human
ucuuggagacucuuguauauuu

SEQ ID NO: 351879 - RNA, 22 nt, Human
acacagggauauuucagguggu

SEQ ID NO: 351880 - RNA, 22 nt, Human
uuuccucuucuucccaugucau

SEQ ID NO: 351881 - RNA, 22 nt, Human
ccagucccagcucugccaugcu

SEQ ID NO: 351882 - RNA, 22 nt, Human
cagaaggcuuuguggaguagac

SEQ ID NO: 351883 - RNA, 20 nt, Human
uuuaggcauuacucuuuugu

SEQ ID NO: 351884 - RNA, 22 nt, Human
cccccuggcaggcuggccucuc

SEQ ID NO: 351885 - RNA, 22 nt, Human
caugcuuucuguccaaauguua

SEQ ID NO: 351886 - RNA, 22 nt, Human
ucccagaaaaaggaggcuauga

SEQ ID NO: 351887 - RNA, 22 nt, Human
aaggaagacacagaugaaguga

SEQ ID NO: 351888 - RNA, 22 nt, Human
uaaggcacgcauaagagggggc

SEQ ID NO: 351889 - RNA, 22 nt, Human
cccagagcuccgguccugccca

SEQ ID NO: 351890 - RNA, 22 nt, Human
acccaggacuuggcaaccucau

SEQ ID NO: 351891 - RNA, 22 nt, Human
uagagcugcuggacuguaacag

SEQ ID NO: 351892 - RNA, 22 nt, Human
acauuucugcauguaggguaau

SEQ ID NO: 351893 - RNA, 22 nt, Human
ugauugaacugagcuucaagau

SEQ ID NO: 351894 - RNA, 22 nt, Human
uuuuuaagcuccuuugauguca

SEQ ID NO: 351895 - RNA, 22 nt, Human
caucugccuaaguggcccuguu

SEQ ID NO: 351896 - RNA, 22 nt, Human
gcuucacaggcaaguuaagccu

SEQ ID NO: 351897 - RNA, 22 nt, Human
caggagugcagguggugaggca

SEQ ID NO: 351898 - RNA, 22 nt, Human
acagccuggccugaguuaaggc

SEQ ID NO: 351899 - RNA, 22 nt, Human
ccuggcuguggcggugcucuca

SEQ ID NO: 351900 - RNA, 22 nt, Human
ccuggagccccucuggccagcc

SEQ ID NO: 351901 - RNA, 23 nt, Human
agaugaggcuucuccauguuggu

SEQ ID NO: 351902 - RNA, 22 nt, Human
ucagcuuucucaaagaagcugg

SEQ ID NO: 351903 - RNA, 22 nt, Human
agucccagcuacucaagaggcu

SEQ ID NO: 351904 - RNA, 22 nt, Human
aaaauacacauacuaggggaaa

SEQ ID NO: 351905 - RNA, 22 nt, Human
aaggcuuuuaacuacuguuuua

SEQ ID NO: 351906 - RNA, 22 nt, Human
acugaaggucucagcaaggaug

SEQ ID NO: 351907 - RNA, 22 nt, Human
cuuaaauuuucaucuacaagaa

SEQ ID NO: 351908 - RNA, 22 nt, Human
gugccuggcaugcgccggugcu

SEQ ID NO: 351909 - RNA, 22 nt, Human
caguccuugauccaauaguggg

SEQ ID NO: 351910 - RNA, 22 nt, Human
cccagcuccagagccagaaaca

SEQ ID NO: 351911 - RNA, 22 nt, Human
cuggagcugcuguccuugggug

SEQ ID NO: 351912 - RNA, 22 nt, Human
acccagcuaacccuacccugga

SEQ ID NO: 351913 - RNA, 22 nt, Human
acacagauuuuacauguuaugc

SEQ ID NO: 351914 - RNA, 22 nt, Human
caugcacaaagguaagaugcgu

SEQ ID NO: 351915 - RNA, 22 nt, Human
ggcucuggagcacagacgucug

SEQ ID NO: 351916 - RNA, 22 nt, Human
ccaggcagagugcuccagaaag

SEQ ID NO: 351917 - RNA, 22 nt, Human
ugcaacuuguuuggagagaaag

SEQ ID NO: 351918 - RNA, 22 nt, Human
ugaagcagcuucuuucugucaa

SEQ ID NO: 351919 - RNA, 16 nt, Human
cagccugcagugguca

SEQ ID NO: 351920 - RNA, 22 nt, Human
uggcucagucuggguugacuga

SEQ ID NO: 351921 - RNA, 22 nt, Human
gggaaauugugugagaucuuug

SEQ ID NO: 351922 - RNA, 22 nt, Human
acuugcugguggcauuuacagu

SEQ ID NO: 351923 - RNA, 22 nt, Human
gcugucuguggugucagcugac

SEQ ID NO: 351924 - RNA, 22 nt, Human
auguguaugcaugcacuaagau

SEQ ID NO: 351925 - RNA, 22 nt, Human
ggaggcugcugccucacguggg

SEQ ID NO: 351926 - RNA, 22 nt, Human
ccaguggaaauguggucaggau

SEQ ID NO: 351927 - RNA, 22 nt, Human
ggcugagcccccucugcguagg

SEQ ID NO: 351928 - RNA, 22 nt, Human
agucaguggcuccgagccuggu

SEQ ID NO: 351929 - RNA, 21 nt, Human
accucaagcaacaaccaaggu

SEQ ID NO: 351930 - RNA, 22 nt, Human
agaaaauuagauuuuacugugu

SEQ ID NO: 351931 - RNA, 22 nt, Human
agcuuuauauguuguuucucca

SEQ ID NO: 351932 - RNA, 19 nt, Human
gccugagccagccaugcaa

SEQ ID NO: 351933 - RNA, 21 nt, Human
ccagaggccucucuuggccac

SEQ ID NO: 351934 - RNA, 22 nt, Human
caguacuuaacuuauaggagag

SEQ ID NO: 351935 - RNA, 17 nt, Human
aucuggcugcuucuaga

SEQ ID NO: 351936 - RNA, 22 nt, Human
uuuagggaaauugaggguuaag

SEQ ID NO: 351937 - RNA, 22 nt, Human
aguauuucuaguugguucuacu

SEQ ID NO: 351938 - RNA, 22 nt, Human
ggcuggcucagggcuugagaga

SEQ ID NO: 351939 - RNA, 22 nt, Human
aggcugucugaccccagagccc

SEQ ID NO: 351940 - RNA, 17 nt, Human
agauggcaggaggcaga

SEQ ID NO: 351941 - RNA, 21 nt, Human
uaaggccaagucuauuucugu

SEQ ID NO: 351942 - RNA, 22 nt, Human
agacaucaaugaucagagguag

SEQ ID NO: 351943 - RNA, 22 nt, Human
ugucaccaugccagcuucugcc

SEQ ID NO: 351944 - RNA, 22 nt, Human
ucugaggcuaagagacagaggc

SEQ ID NO: 351945 - RNA, 22 nt, Human
gcaggaaagguugagacuuugc

SEQ ID NO: 351946 - RNA, 19 nt, Human
ucaucucacagggccuggc

SEQ ID NO: 351947 - RNA, 23 nt, Human
gcugagguacauuuacaggaaga

SEQ ID NO: 351948 - RNA, 22 nt, Human
uuaauaaaguaugaauuggaaa

SEQ ID NO: 351949 - RNA, 22 nt, Human
guuuuucuuugugugaagacaa

SEQ ID NO: 351950 - RNA, 22 nt, Human
ucagagugaggcgucaacauga

SEQ ID NO: 351951 - RNA, 16 nt, Human
aggcagagauuuaccc

SEQ ID NO: 351952 - RNA, 22 nt, Human
agagggcagggcgguaaguccu

SEQ ID NO: 351953 - RNA, 22 nt, Human
uuugaagugggcauuagaaccu

SEQ ID NO: 351954 - RNA, 22 nt, Human
augccaggccccacgcugggca

SEQ ID NO: 351955 - RNA, 22 nt, Human
uuuuaucuaccuaugcucauuu

SEQ ID NO: 351956 - RNA, 22 nt, Human
ggcucaguguuuguggaacaua

SEQ ID NO: 351957 - RNA, 20 nt, Human
ggagaugcagcccaggugcc

SEQ ID NO: 351958 - RNA, 19 nt, Human
acaggcagaauugggugug

SEQ ID NO: 351959 - RNA, 22 nt, Human
cccuggaagguucucuggcuca

SEQ ID NO: 351960 - RNA, 22 nt, Human
ccaaaggcggaacugagucucu

SEQ ID NO: 351961 - RNA, 22 nt, Human
acaggcagagaacucagccaga

SEQ ID NO: 351962 - RNA, 22 nt, Human
acaggugguaaaauggacuguc

SEQ ID NO: 351963 - RNA, 21 nt, Human
aggaaguggccagauugggaa

SEQ ID NO: 351964 - RNA, 21 nt, Human
auacuuugaauuacagccuug

SEQ ID NO: 351965 - RNA, 22 nt, Human
ggcucuggugggaagguuagau

SEQ ID NO: 351966 - RNA, 22 nt, Human
acaugggaucaaugaggcaggc

SEQ ID NO: 351967 - RNA, 22 nt, Human
cagagcugacccaaggauugaa

SEQ ID NO: 351968 - RNA, 22 nt, Human
ugcucugguaacucacuuccau

SEQ ID NO: 351969 - RNA, 22 nt, Human
uccugccucuccaugcuaacua

SEQ ID NO: 351970 - RNA, 22 nt, Human
caaggagaguaauugaaugaga

SEQ ID NO: 351971 - RNA, 22 nt, Human
cagaauggcuuuuauggcucag

SEQ ID NO: 351972 - RNA, 22 nt, Human
auaagaaacauuauucuuucca

SEQ ID NO: 351973 - RNA, 22 nt, Human
uaaauucugaucaaguuccuuc

SEQ ID NO: 351974 - RNA, 22 nt, Human
ccagcuuucucagaggcuucua

SEQ ID NO: 351975 - RNA, 22 nt, Human
gcaguccaaaguggcucucacc

SEQ ID NO: 351976 - RNA, 22 nt, Human
gaaaucugaacaacagcuguca

SEQ ID NO: 351977 - RNA, 22 nt, Human
gcagagguggcaucugggcucu

SEQ ID NO: 351978 - RNA, 22 nt, Human
gaggcagcuggguccggucggg

SEQ ID NO: 351979 - RNA, 22 nt, Human
caggggacaguaugguggauga

SEQ ID NO: 351980 - RNA, 18 nt, Human
uggcucuggacuugcucc

SEQ ID NO: 351981 - RNA, 22 nt, Human
gcuuugaagucugugucuuuug

SEQ ID NO: 351982 - RNA, 22 nt, Human
auuuauuauugugguuacuucu

SEQ ID NO: 351983 - RNA, 22 nt, Human
agccucugucaagcuuuucaaa

SEQ ID NO: 351984 - RNA, 22 nt, Human
gaggccagaguuccccgaguca

SEQ ID NO: 351985 - RNA, 20 nt, Human
ggcucuggaaucuggugggc

SEQ ID NO: 351986 - RNA, 22 nt, Human
gcuggccuuugaggaagcugcg

SEQ ID NO: 351987 - RNA, 19 nt, Human
gcucugagaggggcauggg

SEQ ID NO: 351988 - RNA, 22 nt, Human
uaacagaauagcagaaacagaa

SEQ ID NO: 351989 - RNA, 18 nt, Human
acagggagggcgcugggg

SEQ ID NO: 351990 - RNA, 22 nt, Human
cagagcauaauugacaugaggu

SEQ ID NO: 351991 - RNA, 22 nt, Human
acagagccaaaaggacauagua

SEQ ID NO: 351992 - RNA, 22 nt, Human
gcaaaugcucuccuuggucagg

SEQ ID NO: 351993 - RNA, 22 nt, Human
gcccugucggaacugcgaccuc

SEQ ID NO: 351994 - RNA, 22 nt, Human
aguguccaacucagcuugucaa

SEQ ID NO: 351995 - RNA, 22 nt, Human
uguguacacagauaguaauggc

SEQ ID NO: 351996 - RNA, 22 nt, Human
cagccaucaguaaagacagcuu

SEQ ID NO: 351997 - RNA, 22 nt, Human
aagaauuauugcaauacuagau

SEQ ID NO: 351998 - RNA, 22 nt, Human
ggagaggcuuggcccagccugg

SEQ ID NO: 351999 - RNA, 22 nt, Human
acagauugaucuugagaauuau

SEQ ID NO: 352000 - RNA, 22 nt, Human
agcuuguuaaggaugcauauua

SEQ ID NO: 352001 - RNA, 22 nt, Human
cugugaggcccugggugcugga

SEQ ID NO: 352002 - RNA, 22 nt, Human
ggcagaggaggggugaauuugc

SEQ ID NO: 352003 - RNA, 22 nt, Human
gaggaggccaguggaaggaagc

SEQ ID NO: 352004 - RNA, 20 nt, Human
ugagugauggaggcggguca

SEQ ID NO: 352005 - RNA, 20 nt, Human
ucugugugccaucaccuaac

SEQ ID NO: 352006 - RNA, 22 nt, Human
ggcuguggcauuaggugaggcc

SEQ ID NO: 352007 - RNA, 22 nt, Human
aagguacagaaauuaacaagga

SEQ ID NO: 352008 - RNA, 22 nt, Human
aggagugggggcgagaaguuaa

SEQ ID NO: 352009 - RNA, 22 nt, Human
agcacauaccagaaccacaggu

SEQ ID NO: 352010 - RNA, 22 nt, Human
aucaggauuacacggggaugcu

SEQ ID NO: 352011 - RNA, 22 nt, Human
uuauggcauauuccucauugua

SEQ ID NO: 352012 - RNA, 20 nt, Human
agccaggccucaaguuaagu

SEQ ID NO: 352013 - RNA, 22 nt, Human
ugucucugcuuuccuugcaggg

SEQ ID NO: 352014 - RNA, 22 nt, Human
uucauuccuucuguaccuugcc

SEQ ID NO: 352015 - RNA, 22 nt, Human
uggagcugagagccaggcuggc

SEQ ID NO: 352016 - RNA, 22 nt, Human
uccugaggcucacuuugaaugu

SEQ ID NO: 352017 - RNA, 22 nt, Human
ucagaggagggacucagaccca

SEQ ID NO: 352018 - RNA, 22 nt, Human
accuuucacgguaucagacauc

SEQ ID NO: 352019 - RNA, 18 nt, Human
cuucagugacagucuggc

SEQ ID NO: 352020 - RNA, 22 nt, Human
ugccaggcccugugcuggaugc

SEQ ID NO: 352021 - RNA, 22 nt, Human
uucucagugaaguuuagaacau

SEQ ID NO: 352022 - RNA, 22 nt, Human
accaggagagauuuuauugaga

SEQ ID NO: 352023 - RNA, 22 nt, Human
uccuuagagacaagaccaguuu

SEQ ID NO: 352024 - RNA, 22 nt, Human
uuggcuucuggcagucuggacg

SEQ ID NO: 352025 - RNA, 22 nt, Human
uagggcagccuuauagcuccca

SEQ ID NO: 352026 - RNA, 23 nt, Human
gucagggcuggggucagagugac

SEQ ID NO: 352027 - RNA, 22 nt, Human
acccagcuggaugcauggaggc

SEQ ID NO: 352028 - RNA, 22 nt, Human
cagcuccccucuguggggcagu

SEQ ID NO: 352029 - RNA, 22 nt, Human
guuuuauaggugaaauauuacu

SEQ ID NO: 352030 - RNA, 22 nt, Human
uccaggcacagaguuggucagu

SEQ ID NO: 352031 - RNA, 22 nt, Human
aaucaugugggauagucugcuc

SEQ ID NO: 352032 - RNA, 21 nt, Human
cgggcuggccgggcccucacc

SEQ ID NO: 352033 - RNA, 22 nt, Human
caucagcacuaugauuaaagua

SEQ ID NO: 352034 - RNA, 22 nt, Human
aacagacaacuccuguggcuca

SEQ ID NO: 352035 - RNA, 17 nt, Human
ggcagccucaggcguuu

SEQ ID NO: 352036 - RNA, 22 nt, Human
uccuggauucugcccugaaggc

SEQ ID NO: 352037 - RNA, 22 nt, Human
uuuuaaucaugcuucuaugucc

SEQ ID NO: 352038 - RNA, 22 nt, Human
aucauaaagugcuaucugauug

SEQ ID NO: 352039 - RNA, 22 nt, Human
ugguuuuagaugccuuuacugc

SEQ ID NO: 352040 - RNA, 19 nt, Human
cucugccucuggcuguggc

SEQ ID NO: 352041 - RNA, 22 nt, Human
ugcagcaggagccaggccuggu

SEQ ID NO: 352042 - RNA, 22 nt, Human
aauguguguauuucuaggcgag

SEQ ID NO: 352043 - RNA, 22 nt, Human
ggaggccaaggugggcggauca

SEQ ID NO: 352044 - RNA, 22 nt, Human
aacaugaaguuuucuauaguga

SEQ ID NO: 352045 - RNA, 18 nt, Human
ggaaaccacaggguucug

SEQ ID NO: 352046 - RNA, 22 nt, Human
acauugaugaaaagguaucauu

SEQ ID NO: 352047 - RNA, 22 nt, Human
gccugggaagacuaagugggag

SEQ ID NO: 352048 - RNA, 22 nt, Human
aaagccagguugugugcaggaa

SEQ ID NO: 352049 - RNA, 22 nt, Human
uuuucuaacaucuaguaauuug

SEQ ID NO: 352050 - RNA, 22 nt, Human
aaucuucuacuugacaguucuc

SEQ ID NO: 352051 - RNA, 22 nt, Human
cucugcagaggcccaaggcuga

SEQ ID NO: 352052 - RNA, 20 nt, Human
aagagcugacucacaguggu

SEQ ID NO: 352053 - RNA, 22 nt, Human
agguaaaauagauaguauuucu

SEQ ID NO: 352054 - RNA, 22 nt, Human
agggccaggaacaccugaaggg

SEQ ID NO: 352055 - RNA, 22 nt, Human
caagaauccuguucuugaagau

SEQ ID NO: 352056 - RNA, 18 nt, Human
ccauuucaugauuauuac

SEQ ID NO: 352057 - RNA, 22 nt, Human
agagggauggccccguaacuca

SEQ ID NO: 352058 - RNA, 22 nt, Human
ccuggcugggccugauuucuca

SEQ ID NO: 352059 - RNA, 22 nt, Human
ggcugcuggcauugagguaggu

SEQ ID NO: 352060 - RNA, 22 nt, Human
uuuauucugugcuacaugaaga

SEQ ID NO: 352061 - RNA, 22 nt, Human
cccaggcagaauuaguguuuca

SEQ ID NO: 352062 - RNA, 22 nt, Human
gggcaggaugcaguuucagaga

SEQ ID NO: 352063 - RNA, 22 nt, Human
gccaggcuggaaagaacagaca

SEQ ID NO: 352064 - RNA, 22 nt, Human
auguagcaugaggcacugugcc

SEQ ID NO: 352065 - RNA, 18 nt, Human
aggaagcaggaggaaggc

SEQ ID NO: 352066 - RNA, 22 nt, Human
agcacccucagccuuauccaga

SEQ ID NO: 352067 - RNA, 22 nt, Human
gggcgccgugggaaacagccgg

SEQ ID NO: 352068 - RNA, 22 nt, Human
uuuagggaagaagcccauggcc

SEQ ID NO: 352069 - RNA, 22 nt, Human
uggagcaggugccaggugugug

SEQ ID NO: 352070 - RNA, 22 nt, Human
guggguggaucaccugagguca

SEQ ID NO: 352071 - RNA, 16 nt, Human
ugggcagaugagaaga

SEQ ID NO: 352072 - RNA, 19 nt, Human
gggcagaauggcaucucag

SEQ ID NO: 352073 - RNA, 22 nt, Human
uccuauugguagacauuucugu

SEQ ID NO: 352074 - RNA, 22 nt, Human
uagcuuuaggaugguucucuug

SEQ ID NO: 352075 - RNA, 22 nt, Human
ucugccuuccccauaaucugau

SEQ ID NO: 352076 - RNA, 18 nt, Human
agcagcugugccacacug

SEQ ID NO: 352077 - RNA, 20 nt, Human
uacagaaacaggacuuuugg

SEQ ID NO: 352078 - RNA, 19 nt, Human
ccagcccugucacuucuug

SEQ ID NO: 352079 - RNA, 22 nt, Human
aagauuauggcagauaacaauu

SEQ ID NO: 352080 - RNA, 22 nt, Human
cuggucugagggcucuugaggc

SEQ ID NO: 352081 - RNA, 22 nt, Human
aagcaauauacugauaugauua

SEQ ID NO: 352082 - RNA, 22 nt, Human
aggacccugagcgggcaugccg

SEQ ID NO: 352083 - RNA, 22 nt, Human
ucuuugcaaauguuauuaucuu

SEQ ID NO: 352084 - RNA, 22 nt, Human
uggcagcugugcuucauucuuu

SEQ ID NO: 352085 - RNA, 22 nt, Human
gugugcaugcauagacaccaca

SEQ ID NO: 352086 - RNA, 22 nt, Human
ucuuugcuccacacucuagaga

SEQ ID NO: 352087 - RNA, 22 nt, Human
gagaaagacguaggcugggagg

SEQ ID NO: 352088 - RNA, 22 nt, Human
ugggacugcucuugcugggguc

SEQ ID NO: 352089 - RNA, 22 nt, Human
uagaggcauuaaugaauaaaca

SEQ ID NO: 352090 - RNA, 22 nt, Human
aagccuuccugagugcaaggcc

SEQ ID NO: 352091 - RNA, 22 nt, Human
aggcugagaaagugggaagaug

SEQ ID NO: 352092 - RNA, 22 nt, Human
aagcagaaaaacugagcuccaa

SEQ ID NO: 352093 - RNA, 22 nt, Human
agcucccagucuccucuccaug

SEQ ID NO: 352094 - RNA, 22 nt, Human
gaucuguuucauucacagucug

SEQ ID NO: 352095 - RNA, 22 nt, Human
ggcaugcucuuuguccacagua

SEQ ID NO: 352096 - RNA, 22 nt, Human
gcugcucuacccaugcaucugu

SEQ ID NO: 352097 - RNA, 22 nt, Human
cagcugagcaucacuagucugg

SEQ ID NO: 352098 - RNA, 22 nt, Human
agggacuauuuacccaucucac

SEQ ID NO: 352099 - RNA, 22 nt, Human
ggaccuggcaauuugcaucucu

SEQ ID NO: 352100 - RNA, 22 nt, Human
uuggcaggaauauugcagaggu

SEQ ID NO: 352101 - RNA, 21 nt, Human
ccagccucagaucagggagcu

SEQ ID NO: 352102 - RNA, 22 nt, Human
ucucaaacuaacaaugauuaua

SEQ ID NO: 352103 - RNA, 19 nt, Human
guuccaaaggccagaccuu

SEQ ID NO: 352104 - RNA, 22 nt, Human
aauuccaaauguuuucaaucca

SEQ ID NO: 352105 - RNA, 22 nt, Human
gagaaacuaacaucugaaggug

SEQ ID NO: 352106 - RNA, 22 nt, Human
guugacagcuggugagcugcua

SEQ ID NO: 352107 - RNA, 22 nt, Human
aggaccagaggccagagucagc

SEQ ID NO: 352108 - RNA, 19 nt, Human
gucagcaccauggacaggg

SEQ ID NO: 352109 - RNA, 22 nt, Human
cagaagcauugacuccuugcuc

SEQ ID NO: 352110 - RNA, 22 nt, Human
aggggcuguggaaaccaacucu

SEQ ID NO: 352111 - RNA, 22 nt, Human
ugccagcacuucuggcugucug

SEQ ID NO: 352112 - RNA, 22 nt, Human
uggggguguccuggugcacaca

SEQ ID NO: 352113 - RNA, 22 nt, Human
gugucacaagagcccaggaaac

SEQ ID NO: 352114 - RNA, 22 nt, Human
cagggccaccguguuugcugcu

SEQ ID NO: 352115 - RNA, 22 nt, Human
gucaugccagcggagcucggga

SEQ ID NO: 352116 - RNA, 19 nt, Human
caggaugaucccaugacac

SEQ ID NO: 352117 - RNA, 23 nt, Human
cauguacacacagcuguacagug

SEQ ID NO: 352118 - RNA, 22 nt, Human
gugcagcugugguggagccagg

SEQ ID NO: 352119 - RNA, 19 nt, Human
augagcuggcauuucaggu

SEQ ID NO: 352120 - RNA, 22 nt, Human
aaaagcagagacucuggagcua

SEQ ID NO: 352121 - RNA, 22 nt, Human
gggacuggaguagaggccggug

SEQ ID NO: 352122 - RNA, 22 nt, Human
uugcaaaagccgaggcacucca

SEQ ID NO: 352123 - RNA, 20 nt, Human
ccaccuggccaaggcugugc

SEQ ID NO: 352124 - RNA, 22 nt, Human
ucuuuggaucccaacuggcugg

SEQ ID NO: 352125 - RNA, 22 nt, Human
uccucccacauaggacaauggg

SEQ ID NO: 352126 - RNA, 22 nt, Human
gcagggaagaucuuggagcugc

SEQ ID NO: 352127 - RNA, 22 nt, Human
uucagaaaaaacuucaauaagu

SEQ ID NO: 352128 - RNA, 22 nt, Human
uuugacagcuuguuacaaaguu

SEQ ID NO: 352129 - RNA, 22 nt, Human
auaugcauuuaccuggcauaua

SEQ ID NO: 352130 - RNA, 22 nt, Human
ugaggcagguaagcaaguuuug

SEQ ID NO: 352131 - RNA, 22 nt, Human
ugcaaucucggcacuuugggag

SEQ ID NO: 352132 - RNA, 22 nt, Human
cuggcagguggauggggacucc

SEQ ID NO: 352133 - RNA, 22 nt, Human
uuucugugguggguaguucaga

SEQ ID NO: 352134 - RNA, 22 nt, Human
uaguggaggguguagcugcugg

SEQ ID NO: 352135 - RNA, 22 nt, Human
ugcagaagugagucaugaggaa

SEQ ID NO: 352136 - RNA, 19 nt, Human
ugggcuuccccagggcaga

SEQ ID NO: 352137 - RNA, 22 nt, Human
agaucauaugaaaaauuucaag

SEQ ID NO: 352138 - RNA, 22 nt, Human
auggccuuagugaugauuaaua

SEQ ID NO: 352139 - RNA, 22 nt, Human
acuuccugcaaucguccacucc

SEQ ID NO: 352140 - RNA, 22 nt, Human
acugggaggcaaagagcaagga

SEQ ID NO: 352141 - RNA, 22 nt, Human
ggagaaggugcuggucacugug

SEQ ID NO: 352142 - RNA, 22 nt, Human
uccauggggcccaggaugagag

SEQ ID NO: 352143 - RNA, 22 nt, Human
cugagcugggaguggauagugg

SEQ ID NO: 352144 - RNA, 22 nt, Human
uggcugaaucugcagcaggaag

SEQ ID NO: 352145 - RNA, 22 nt, Human
auuucuuuucaagagggugcuu

SEQ ID NO: 352146 - RNA, 22 nt, Human
ugccugcuaggcccugcugggu

SEQ ID NO: 352147 - RNA, 22 nt, Human
aauacaguagguaauaguucau

SEQ ID NO: 352148 - RNA, 22 nt, Human
accugcagccacuucucuccuu

SEQ ID NO: 352149 - RNA, 22 nt, Human
guccuggcccacuggcaggcug

SEQ ID NO: 352150 - RNA, 19 nt, Human
ugucucugaaagaugagcu

SEQ ID NO: 352151 - RNA, 22 nt, Human
aucuucaacuugaucauuugaa

SEQ ID NO: 352152 - RNA, 22 nt, Human
auggcagccuguggacagucaa

SEQ ID NO: 352153 - RNA, 22 nt, Human
ucugggcuugguuagggcuguu

SEQ ID NO: 352154 - RNA, 22 nt, Human
cuuauguaugcuacuuuguggu

SEQ ID NO: 352155 - RNA, 22 nt, Human
cagagugaaauaggggaucaag

SEQ ID NO: 352156 - RNA, 22 nt, Human
gaguccaguaguuaggacagag

SEQ ID NO: 352157 - RNA, 22 nt, Human
aggugcagcugguggagucugg

SEQ ID NO: 352158 - RNA, 22 nt, Human
uuccuuagccugccuuccaggg

SEQ ID NO: 352159 - RNA, 22 nt, Human
gggcugacaguuuccccugaaa

SEQ ID NO: 352160 - RNA, 18 nt, Human
uggcagagugucuguucu

SEQ ID NO: 352161 - RNA, 22 nt, Human
uggcagagagacucuccuugau

SEQ ID NO: 352162 - RNA, 22 nt, Human
aggagcagaccguaguccugca

SEQ ID NO: 352163 - RNA, 22 nt, Human
uugacagcuauuuugcuuugau

SEQ ID NO: 352164 - RNA, 22 nt, Human
gccagcagccacagaagucacu

SEQ ID NO: 352165 - RNA, 22 nt, Human
acuuguucauugaguacauaug

SEQ ID NO: 352166 - RNA, 22 nt, Human
gaaucucaguggaagcaggaag

SEQ ID NO: 352167 - RNA, 22 nt, Human
uguaaauaguuagcuugccucu

SEQ ID NO: 352168 - RNA, 22 nt, Human
uggcuauugagugaucucuaga

SEQ ID NO: 352169 - RNA, 22 nt, Human
ccagcagcuuuauuggcucucc

SEQ ID NO: 352170 - RNA, 22 nt, Human
aagauggaguaguguaaugguu

SEQ ID NO: 352171 - RNA, 22 nt, Human
uuuccuuugcccaauacauguc

SEQ ID NO: 352172 - RNA, 22 nt, Human
uaauuccaccuuuuuccaacuu

SEQ ID NO: 352173 - RNA, 22 nt, Human
ucccagccauuccuuuaggugu

SEQ ID NO: 352174 - RNA, 22 nt, Human
ggcagagcuugcagugagccga

SEQ ID NO: 352175 - RNA, 22 nt, Human
aggauuuauuauaugcccucau

SEQ ID NO: 352176 - RNA, 22 nt, Human
caggacagaaauaaggaauaua

SEQ ID NO: 352177 - RNA, 20 nt, Human
cccagagccauagccagaca

SEQ ID NO: 352178 - RNA, 22 nt, Human
gccgaagcugccgucugguccu

SEQ ID NO: 352179 - RNA, 22 nt, Human
cagcugcccauccugggaaaug

SEQ ID NO: 352180 - RNA, 22 nt, Human
cagggccaagccccuuuggcug

SEQ ID NO: 352181 - RNA, 22 nt, Human
uuuaaagagaaugugaaggagu

SEQ ID NO: 352182 - RNA, 22 nt, Human
ggcaguggcuccucucuacucc

SEQ ID NO: 352183 - RNA, 22 nt, Human
aaauccuaagcagaggaauuua

SEQ ID NO: 352184 - RNA, 22 nt, Human
gaaggucaccuccccucucugg

SEQ ID NO: 352185 - RNA, 22 nt, Human
agaaaugugaauuucauuuccu

SEQ ID NO: 352186 - RNA, 22 nt, Human
uuuccaaauaaggucacacuca

SEQ ID NO: 352187 - RNA, 22 nt, Human
uccauuuacuauucucauaucg

SEQ ID NO: 352188 - RNA, 22 nt, Human
uuuccucuucuggcaggcaggg

SEQ ID NO: 352189 - RNA, 22 nt, Human
uacaaaaguaauuacgguuuuu

SEQ ID NO: 352190 - RNA, 22 nt, Human
aaaaauagcuucucuugucccu

SEQ ID NO: 352191 - RNA, 22 nt, Human
aggcagaugggagcuggaaguu

SEQ ID NO: 352192 - RNA, 22 nt, Human
uggccugggccggcagauauac

SEQ ID NO: 352193 - RNA, 22 nt, Human
ucuucccuaaucaccaucuuca

SEQ ID NO: 352194 - RNA, 22 nt, Human
ggggcuggcucacuaagagacu

SEQ ID NO: 352195 - RNA, 22 nt, Human
ucauuuguugcuguuaccugag

SEQ ID NO: 352196 - RNA, 22 nt, Human
auggggcuguucucugcccugc

SEQ ID NO: 352197 - RNA, 22 nt, Human
auauuguugacuauaagaguaa

SEQ ID NO: 352198 - RNA, 22 nt, Human
cuguggcugcagccuugguccu

SEQ ID NO: 352199 - RNA, 22 nt, Human
uggagccagcccaggccccucu

SEQ ID NO: 352200 - RNA, 22 nt, Human
ccugggagugugccaucucugu

SEQ ID NO: 352201 - RNA, 22 nt, Human
gcugucacucaccaggccugca

SEQ ID NO: 352202 - RNA, 22 nt, Human
ugccaggcugaacagggucuua

SEQ ID NO: 352203 - RNA, 22 nt, Human
aggcagcugcccucuccuuccu

SEQ ID NO: 352204 - RNA, 22 nt, Human
agauaugacuagaagcucauuu

SEQ ID NO: 352205 - RNA, 18 nt, Human
uucaccagugugaugggu

SEQ ID NO: 352206 - RNA, 22 nt, Human
ucugccugccagucugguccuc

SEQ ID NO: 352207 - RNA, 22 nt, Human
cauugacaucaggcuuggccaa

SEQ ID NO: 352208 - RNA, 22 nt, Human
uuacaaguauuuaagaugcugu

SEQ ID NO: 352209 - RNA, 22 nt, Human
ugcacuccaggcugggugacag

SEQ ID NO: 352210 - RNA, 22 nt, Human
agagaagacuuacagccacagu

SEQ ID NO: 352211 - RNA, 22 nt, Human
gcugauguaagacuuuugguuu

SEQ ID NO: 352212 - RNA, 22 nt, Human
acagggucaagggugcuacaag

SEQ ID NO: 352213 - RNA, 23 nt, Human
gcagauggccccagagugcugcc

SEQ ID NO: 352214 - RNA, 22 nt, Human
uaguggagaguuguuuugugca

SEQ ID NO: 352215 - RNA, 22 nt, Human
ugugcagcuaguccuggacuug

SEQ ID NO: 352216 - RNA, 22 nt, Human
guaacagaggguuugcagauau

SEQ ID NO: 352217 - RNA, 22 nt, Human
uuugcauuuguucaaguauuga

SEQ ID NO: 352218 - RNA, 22 nt, Human
uauuucaacguaugaaaagcug

SEQ ID NO: 352219 - RNA, 20 nt, Human
auugucagccuucagaggag

SEQ ID NO: 352220 - RNA, 22 nt, Human
gagauggggucagcugggacau

SEQ ID NO: 352221 - RNA, 22 nt, Human
ccugcaguuuguugugaccccg

SEQ ID NO: 352222 - RNA, 22 nt, Human
aacuucuugguccugagcuguu

SEQ ID NO: 352223 - RNA, 23 nt, Human
acuuuauugaccccaggucaguu

SEQ ID NO: 352224 - RNA, 23 nt, Human
aggagccaggugcagcccuugug

SEQ ID NO: 352225 - RNA, 22 nt, Human
cacuguguaagaagaugggcuu

SEQ ID NO: 352226 - RNA, 22 nt, Human
aggcacugaauauccaguaaaa

SEQ ID NO: 352227 - RNA, 22 nt, Human
uggaagagggagcuggguggcc

SEQ ID NO: 352228 - RNA, 22 nt, Human
gcagccccaggagacgcccagg

SEQ ID NO: 352229 - RNA, 19 nt, Human
uggaagaggaagggaaaua

SEQ ID NO: 352230 - RNA, 22 nt, Human
aggaccugagaguuggaaaucc

SEQ ID NO: 352231 - RNA, 22 nt, Human
gugccagggaguggaggagcuu

SEQ ID NO: 352232 - RNA, 22 nt, Human
aucaguuuugggggacauacug

SEQ ID NO: 352233 - RNA, 22 nt, Human
cuaggaggcgggggcugcagua

SEQ ID NO: 352234 - RNA, 22 nt, Human
uuuccaaagguggcaggaacaa

SEQ ID NO: 352235 - RNA, 22 nt, Human
caaaaugugagucccaccucaa

SEQ ID NO: 352236 - RNA, 18 nt, Human
ccugcagcccaggaggcc

SEQ ID NO: 352237 - RNA, 22 nt, Human
ccucagcugcuucccuggagcc

SEQ ID NO: 352238 - RNA, 22 nt, Human
uggagaagauuggucaccauuc

SEQ ID NO: 352239 - RNA, 21 nt, Human
aaagaaucauggguaauuuca

SEQ ID NO: 352240 - RNA, 22 nt, Human
aagauuuccuucaguagagcua

SEQ ID NO: 352241 - RNA, 22 nt, Human
uucaacuauuaugaauaaaauu

SEQ ID NO: 352242 - RNA, 22 nt, Human
ggccaggcuggucucagacuuc

SEQ ID NO: 352243 - RNA, 22 nt, Human
uuuugcuuuuguaacacagugu

SEQ ID NO: 352244 - RNA, 22 nt, Human
gcugucugucucugugacuuaa

SEQ ID NO: 352245 - RNA, 19 nt, Human
acuuugcaugugugucuaa

SEQ ID NO: 352246 - RNA, 22 nt, Human
gcugcugucacggugcuaaggg

SEQ ID NO: 352247 - RNA, 22 nt, Human
agggcuagaguugagaugggga

SEQ ID NO: 352248 - RNA, 22 nt, Human
ucucucagaggaagaggcagug

SEQ ID NO: 352249 - RNA, 22 nt, Human
gagggcugauaaaugcgcaugg

SEQ ID NO: 352250 - RNA, 22 nt, Human
gcucaggagcugacagccucaa

SEQ ID NO: 352251 - RNA, 22 nt, Human
uaguuaggaauagcagcgacuc

SEQ ID NO: 352252 - RNA, 21 nt, Human
auuuucauuaauucagugugg

SEQ ID NO: 352253 - RNA, 19 nt, Human
agggaguuuauauuugcac

SEQ ID NO: 352254 - RNA, 22 nt, Human
gccagacacuccccugggcagg

SEQ ID NO: 352255 - RNA, 23 nt, Human
cugaggccugcugcguucagguu

SEQ ID NO: 352256 - RNA, 22 nt, Human
ugauuucauaguauauacauga

SEQ ID NO: 352257 - RNA, 22 nt, Human
uacuguuuuuuagacucauggu

SEQ ID NO: 352258 - RNA, 22 nt, Human
uuugaagacagaucaauauaag

SEQ ID NO: 352259 - RNA, 22 nt, Human
cagaaugcaaauuuuauaauau

SEQ ID NO: 352260 - RNA, 22 nt, Human
aucuauacucagaguuaauauc

SEQ ID NO: 352261 - RNA, 22 nt, Human
cuggcagcucuacucagagccu

SEQ ID NO: 352262 - RNA, 22 nt, Human
guccucugaaguugugcaaugc

SEQ ID NO: 352263 - RNA, 22 nt, Human
guaguucugcagugucaccuga

SEQ ID NO: 352264 - RNA, 19 nt, Human
cagcugccuuuucuuugca

SEQ ID NO: 352265 - RNA, 22 nt, Human
gcuggagcugaguucccugggc

SEQ ID NO: 352266 - RNA, 22 nt, Human
caggcagggagcuggaaaggau

SEQ ID NO: 352267 - RNA, 22 nt, Human
guucuucaggcugugcucuaga

SEQ ID NO: 352268 - RNA, 22 nt, Human
gggcaguggcucacgccuguaa

SEQ ID NO: 352269 - RNA, 22 nt, Human
uccucugccaaagggaguugcc

SEQ ID NO: 352270 - RNA, 22 nt, Human
ugcucacugaacucuugcuguc

SEQ ID NO: 352271 - RNA, 22 nt, Human
gcaggagucacugacuuggucc

SEQ ID NO: 352272 - RNA, 22 nt, Human
aacuggauuaacuggcucaaau

SEQ ID NO: 352273 - RNA, 22 nt, Human
cucugggcaccaaagagcagcu

SEQ ID NO: 352274 - RNA, 22 nt, Human
uguuccaugucuuuguaggacu

SEQ ID NO: 352275 - RNA, 22 nt, Human
acauuucugucuuagggacugu

SEQ ID NO: 352276 - RNA, 22 nt, Human
uccuucagcuacucaguuucca

SEQ ID NO: 352277 - RNA, 21 nt, Human
aggugcaggccucaagcccca

SEQ ID NO: 352278 - RNA, 22 nt, Human
cagggccacacggaagggaaca

SEQ ID NO: 352279 - RNA, 21 nt, Human
gcaggaugcaucuuggugucu

SEQ ID NO: 352280 - RNA, 22 nt, Human
ucagcaaugugauacugugcaa

SEQ ID NO: 352281 - RNA, 22 nt, Human
gccucugcggggcccgagcccg

SEQ ID NO: 352282 - RNA, 22 nt, Human
agcagccagaaagggcagucga

SEQ ID NO: 352283 - RNA, 22 nt, Human
gggccuggcaugcagccccguu

SEQ ID NO: 352284 - RNA, 22 nt, Human
agaguggagagaaacaacucug

SEQ ID NO: 352285 - RNA, 22 nt, Human
agcucccaauugacuugaacua

SEQ ID NO: 352286 - RNA, 22 nt, Human
uccaaacacccuccaugcugca

SEQ ID NO: 352287 - RNA, 22 nt, Human
ggugggcaggcgaggcccaggu

SEQ ID NO: 352288 - RNA, 22 nt, Human
cugacccauauaagaguggagg

SEQ ID NO: 352289 - RNA, 22 nt, Human
aaggcagccucugccagccggg

SEQ ID NO: 352290 - RNA, 22 nt, Human
uuuagaaugugacuguauuuga

SEQ ID NO: 352291 - RNA, 21 nt, Human
caauuucaugggaagauggga

SEQ ID NO: 352292 - RNA, 22 nt, Human
uuaagaauggaaugaggaauuu

SEQ ID NO: 352293 - RNA, 22 nt, Human
caaggcaguuccccagagggcu

SEQ ID NO: 352294 - RNA, 22 nt, Human
aagcgccacgagaagcuggacc

SEQ ID NO: 352295 - RNA, 22 nt, Human
agccaaggacacggagccuccu

SEQ ID NO: 352296 - RNA, 20 nt, Human
caggaugauuggacacgaug

SEQ ID NO: 352297 - RNA, 22 nt, Human
auuuccagacuuuuuccaggaa

SEQ ID NO: 352298 - RNA, 22 nt, Human
ggaagaagggucauuggcagcc

SEQ ID NO: 352299 - RNA, 23 nt, Human
ugcucugugaauaguuggugacu

SEQ ID NO: 352300 - RNA, 22 nt, Human
ggccugucucacccccgggugc

SEQ ID NO: 352301 - RNA, 20 nt, Human
accauaauguuaauuacaaa

SEQ ID NO: 352302 - RNA, 22 nt, Human
acauuaucccuggcacaacugc

SEQ ID NO: 352303 - RNA, 22 nt, Human
uaugcccagcuuaaaguacaca

SEQ ID NO: 352304 - RNA, 22 nt, Human
ugggcugcagagcccggccuuc

SEQ ID NO: 352305 - RNA, 22 nt, Human
aggcagcugugaggacuggauu

SEQ ID NO: 352306 - RNA, 23 nt, Human
uggagcugacagucagagggagg

SEQ ID NO: 352307 - RNA, 22 nt, Human
uggagggcaucuguggucaggc

SEQ ID NO: 352308 - RNA, 22 nt, Human
agcugccuguccuaggccauca

SEQ ID NO: 352309 - RNA, 22 nt, Human
ucacacacauggauaguauuuu

SEQ ID NO: 352310 - RNA, 22 nt, Human
aagucagagcaacugagacauu

SEQ ID NO: 352311 - RNA, 22 nt, Human
gaaagccagagagaaagggcuc

SEQ ID NO: 352312 - RNA, 22 nt, Human
ggaagccacccagcuuugauag

SEQ ID NO: 352313 - RNA, 22 nt, Human
ucaauuaugccauugcaauauu

SEQ ID NO: 352314 - RNA, 22 nt, Human
auacaaguugugauaauguaaa

SEQ ID NO: 352315 - RNA, 22 nt, Human
uuuaaagaaauuccucaucuuu

SEQ ID NO: 352316 - RNA, 22 nt, Human
ccaggccugauugggaaucuug

SEQ ID NO: 352317 - RNA, 21 nt, Human
uagcuuuaauauucccacauu

SEQ ID NO: 352318 - RNA, 22 nt, Human
uggugcugauaauggcaggauu

SEQ ID NO: 352319 - RNA, 22 nt, Human
ggggcccagcaccccuccucgc

SEQ ID NO: 352320 - RNA, 22 nt, Human
auuccaaaaggauguuagaaug

SEQ ID NO: 352321 - RNA, 19 nt, Human
aguagcagaaagugcagug

SEQ ID NO: 352322 - RNA, 22 nt, Human
caggaggaacaagagguucugg

SEQ ID NO: 352323 - RNA, 22 nt, Human
aguggcaguggggcagggcccu

SEQ ID NO: 352324 - RNA, 22 nt, Human
acagugugguuugagcacuggg

SEQ ID NO: 352325 - RNA, 22 nt, Human
ggaggagacggagugauuagug

SEQ ID NO: 352326 - RNA, 22 nt, Human
gauauuuugagaaauccuauga

SEQ ID NO: 352327 - RNA, 22 nt, Human
cagcauggcuugaguguuuccu

SEQ ID NO: 352328 - RNA, 22 nt, Human
ucugagaguacgggcugcgcgc

SEQ ID NO: 352329 - RNA, 22 nt, Human
aagcuuuaagugucagucagcc

SEQ ID NO: 352330 - RNA, 22 nt, Human
uagaaaguaaaucaguuuuauu

SEQ ID NO: 352331 - RNA, 22 nt, Human
uccuggaguauuucuguggugu

SEQ ID NO: 352332 - RNA, 22 nt, Human
gcaggaagcauagaagaaugcc

SEQ ID NO: 352333 - RNA, 22 nt, Human
cugaggcugcccagggccaggu

SEQ ID NO: 352334 - RNA, 22 nt, Human
cugccucaugcugccugcagcc

SEQ ID NO: 352335 - RNA, 22 nt, Human
acacuguguggucucucucgga

SEQ ID NO: 352336 - RNA, 21 nt, Human
aggagcuguguuagcuggucg

SEQ ID NO: 352337 - RNA, 17 nt, Human
aggugcuggagcaucag

SEQ ID NO: 352338 - RNA, 22 nt, Human
gaggcccaggucaagcagccac

SEQ ID NO: 352339 - RNA, 22 nt, Human
gaagaaucugaggacagucauu

SEQ ID NO: 352340 - RNA, 16 nt, Human
gaggcuggcagauguc

SEQ ID NO: 352341 - RNA, 22 nt, Human
uucucagagcacugcugacaaa

SEQ ID NO: 352342 - RNA, 22 nt, Human
gcuggugagcaaaggagaagga

SEQ ID NO: 352343 - RNA, 22 nt, Human
augcacaagcaagagauaaugg

SEQ ID NO: 352344 - RNA, 22 nt, Human
uggcagagaugaagaguuguuu

SEQ ID NO: 352345 - RNA, 22 nt, Human
uuacucagucucccauacauug

SEQ ID NO: 352346 - RNA, 22 nt, Human
agucagcagugaaagcacagcc

SEQ ID NO: 352347 - RNA, 22 nt, Human
aggcacugaagugguaaaugua

SEQ ID NO: 352348 - RNA, 22 nt, Human
uagagcuauuuagagcauuuua

SEQ ID NO: 352349 - RNA, 22 nt, Human
ggcagcuccuccuagucugccc

SEQ ID NO: 352350 - RNA, 22 nt, Human
cagcauggggaucacuguaggc

SEQ ID NO: 352351 - RNA, 22 nt, Human
gagccagguuugaaucucaguc

SEQ ID NO: 352352 - RNA, 22 nt, Human
agggcugcaggcaagauauggc

SEQ ID NO: 352353 - RNA, 22 nt, Human
agaggucauaucucagaagaga

SEQ ID NO: 352354 - RNA, 22 nt, Human
acuuuugguucuguaacuguga

SEQ ID NO: 352355 - RNA, 22 nt, Human
cccuggagugccggaaucaaga

SEQ ID NO: 352356 - RNA, 22 nt, Human
cugcccuguggcucugagucau

SEQ ID NO: 352357 - RNA, 22 nt, Human
cugccuggaaggagcaagggga

SEQ ID NO: 352358 - RNA, 22 nt, Human
agccaggccuuagggagaggca

SEQ ID NO: 352359 - RNA, 22 nt, Human
agcagagcuauucuugugcaau

SEQ ID NO: 352360 - RNA, 22 nt, Human
agugugagccuacaggccaaag

SEQ ID NO: 352361 - RNA, 22 nt, Human
augugcuucauucuacaugaca

SEQ ID NO: 352362 - RNA, 22 nt, Human
aagggcuggaucucucugagca

SEQ ID NO: 352363 - RNA, 21 nt, Human
aaucauacaaaacaugucagg

SEQ ID NO: 352364 - RNA, 19 nt, Human
gaggucagcaagaaguauu

SEQ ID NO: 352365 - RNA, 20 nt, Human
caggccagagguuugauggc

SEQ ID NO: 352366 - RNA, 22 nt, Human
aaaggucauugaaaaggaggaa

SEQ ID NO: 352367 - RNA, 22 nt, Human
gggccucucccuucucacgcau

SEQ ID NO: 352368 - RNA, 22 nt, Human
cuuagcaugugguguccuugua

SEQ ID NO: 352369 - RNA, 22 nt, Human
cccaggaacagcacagaacagc

SEQ ID NO: 352370 - RNA, 22 nt, Human
gccugucaauuuuguguacaau

SEQ ID NO: 352371 - RNA, 18 nt, Human
acauuucucucugcguga

SEQ ID NO: 352372 - RNA, 22 nt, Human
aagggcucacccaacucacuuc

SEQ ID NO: 352373 - RNA, 22 nt, Human
cuagggaguggcagagcuggga

SEQ ID NO: 352374 - RNA, 20 nt, Human
uccaggagaacugggagccg

SEQ ID NO: 352375 - RNA, 22 nt, Human
ugggaccucucuugagagagca

SEQ ID NO: 352376 - RNA, 22 nt, Human
gacaugcaugaaugcaggucuc

SEQ ID NO: 352377 - RNA, 22 nt, Human
uuugaacuucuaccugucauau

SEQ ID NO: 352378 - RNA, 22 nt, Human
agugaguggacccugcaaggaa

SEQ ID NO: 352379 - RNA, 22 nt, Human
aggaggaggugggacacaguga

SEQ ID NO: 352380 - RNA, 22 nt, Human
uaggcagcuuagguuagaagug

SEQ ID NO: 352381 - RNA, 23 nt, Human
ucccuggaggcagguccagggcc

SEQ ID NO: 352382 - RNA, 19 nt, Human
ugaagcaauaccauuuuug

SEQ ID NO: 352383 - RNA, 22 nt, Human
ucaguuuuucuauacuuuguag

SEQ ID NO: 352384 - RNA, 22 nt, Human
ccagcuucucucugaugcagcu

SEQ ID NO: 352385 - RNA, 22 nt, Human
gccuggagcucuccacuugggg

SEQ ID NO: 352386 - RNA, 22 nt, Human
aagagccagugggaaagucuug

SEQ ID NO: 352387 - RNA, 22 nt, Human
cauaccuuucucaagcacaugu

SEQ ID NO: 352388 - RNA, 22 nt, Human
gucaccagugcuaagaggugga

SEQ ID NO: 352389 - RNA, 22 nt, Human
ggguuccuccaguuccuagagc

SEQ ID NO: 352390 - RNA, 22 nt, Human
acuuccugcuaugagcuucugu

SEQ ID NO: 352391 - RNA, 21 nt, Human
ucucugggaggacuugugaga

SEQ ID NO: 352392 - RNA, 22 nt, Human
ccuuccaggugcaggcaagccu

SEQ ID NO: 352393 - RNA, 22 nt, Human
guuuucauuacugcugugauuu

SEQ ID NO: 352394 - RNA, 22 nt, Human
agagagggcauagaaaaaggga

SEQ ID NO: 352395 - RNA, 22 nt, Human
uggcuucagacuucugcuacgu

SEQ ID NO: 352396 - RNA, 22 nt, Human
aagggcagggaguuugugucua

SEQ ID NO: 352397 - RNA, 22 nt, Human
cccagccaaggugcugguguug

SEQ ID NO: 352398 - RNA, 22 nt, Human
acagggucauuuuaugaucugu

SEQ ID NO: 352399 - RNA, 22 nt, Human
aggcaggggagcuggaagggua

SEQ ID NO: 352400 - RNA, 22 nt, Human
uuuaaauaggacuccugggggu

SEQ ID NO: 352401 - RNA, 22 nt, Human
ccaguggaguuuuuauacccag

SEQ ID NO: 352402 - RNA, 22 nt, Human
aaugaacacagcccucuacuuu

SEQ ID NO: 352403 - RNA, 22 nt, Human
uggcagagacuccuccugggag

SEQ ID NO: 352404 - RNA, 22 nt, Human
aaaaaugugaccacaggguguu

SEQ ID NO: 352405 - RNA, 22 nt, Human
cuggauuuuagaaggcuuccua

SEQ ID NO: 352406 - RNA, 22 nt, Human
uucuaugccauguucagcuacu

SEQ ID NO: 352407 - RNA, 22 nt, Human
uucuccagagggcucugcagga

SEQ ID NO: 352408 - RNA, 18 nt, Human
cucaccauucugcccaau

SEQ ID NO: 352409 - RNA, 22 nt, Human
ugucucugaggugagggucagc

SEQ ID NO: 352410 - RNA, 22 nt, Human
ucagccagcaucagcuaagugc

SEQ ID NO: 352411 - RNA, 22 nt, Human
ucagaagccggaagugcuccuc

SEQ ID NO: 352412 - RNA, 22 nt, Human
ggcuggcacugaggagagcucu

SEQ ID NO: 352413 - RNA, 22 nt, Human
ggccuggaaugcuuuccuacca

SEQ ID NO: 352414 - RNA, 22 nt, Human
uggaaggagacugggaagugug

SEQ ID NO: 352415 - RNA, 22 nt, Human
uggcaccugaacuuagaggugu

SEQ ID NO: 352416 - RNA, 17 nt, Human
agagggaaaaugcgguu

SEQ ID NO: 352417 - RNA, 22 nt, Human
aggcaggaaaaucgcuugaacc

SEQ ID NO: 352418 - RNA, 22 nt, Human
aagauucucagagugaaagaau

SEQ ID NO: 352419 - RNA, 22 nt, Human
cugaggcaugaaugugggcuuu

SEQ ID NO: 352420 - RNA, 22 nt, Human
cuggccuucagacucggacuga

SEQ ID NO: 352421 - RNA, 18 nt, Human
gucaccuggaucagauua

SEQ ID NO: 352422 - RNA, 22 nt, Human
aaguguauauaugacuuauaaa

SEQ ID NO: 352423 - RNA, 22 nt, Human
cugggguggugcaggccucaug

SEQ ID NO: 352424 - RNA, 22 nt, Human
agcacaauagagcaguuaaaaa

SEQ ID NO: 352425 - RNA, 22 nt, Human
aaagauucgagcgauguauaaa

SEQ ID NO: 352426 - RNA, 22 nt, Human
aucaggaugcugucaguuacca

SEQ ID NO: 352427 - RNA, 22 nt, Human
uggacaggaucugagacugaga

SEQ ID NO: 352428 - RNA, 22 nt, Human
ugaaggccagcagagugaaggc

SEQ ID NO: 352429 - RNA, 22 nt, Human
aaaugguguuucuaaugcuaga

SEQ ID NO: 352430 - RNA, 22 nt, Human
gcagugcugaucccauggcaga

SEQ ID NO: 352431 - RNA, 22 nt, Human
gagcaggcauucuaguggcuga

SEQ ID NO: 352432 - RNA, 22 nt, Human
agccagcuggagaccacuguuu

SEQ ID NO: 352433 - RNA, 22 nt, Human
cugucucucuaggacacugggg

SEQ ID NO: 352434 - RNA, 20 nt, Human
agagcagcaguuggugaggu

SEQ ID NO: 352435 - RNA, 22 nt, Human
gcucuguguccacagcuggaaa

SEQ ID NO: 352436 - RNA, 22 nt, Human
ucuucaucucagauuaacagga

SEQ ID NO: 352437 - RNA, 22 nt, Human
aggguggccaugagggagagau

SEQ ID NO: 352438 - RNA, 22 nt, Human
cuguguggacugguugaggccc

SEQ ID NO: 352439 - RNA, 22 nt, Human
gcuggguggaucggaggcucug

SEQ ID NO: 352440 - RNA, 22 nt, Human
agcuugccucuuaaucaccuca

SEQ ID NO: 352441 - RNA, 22 nt, Human
agcaccaugaccuugccauuga

SEQ ID NO: 352442 - RNA, 22 nt, Human
ggcagggugccuggcuccuguu

SEQ ID NO: 352443 - RNA, 22 nt, Human
uuauuccauuauuucacuuagg

SEQ ID NO: 352444 - RNA, 18 nt, Human
cagucccaaaccuuagga

SEQ ID NO: 352445 - RNA, 22 nt, Human
gacccuguuucuacaaauaauu

SEQ ID NO: 352446 - RNA, 21 nt, Human
gcccagcaaggugagaaggcc

SEQ ID NO: 352447 - RNA, 22 nt, Human
auccaugaucaauuuauuacua

SEQ ID NO: 352448 - RNA, 22 nt, Human
aaggcacuguacuaguuaguua

SEQ ID NO: 352449 - RNA, 22 nt, Human
agccuucacugggaccuuggau

SEQ ID NO: 352450 - RNA, 22 nt, Human
ccaaagucuggagcagcagagc

SEQ ID NO: 352451 - RNA, 23 nt, Human
ggccauuucauuugguucaaacu

SEQ ID NO: 352452 - RNA, 23 nt, Human
uuuaacuuuccaauaauucauug

SEQ ID NO: 352453 - RNA, 22 nt, Human
auucuucauaccuacugagguu

SEQ ID NO: 352454 - RNA, 22 nt, Human
gcuucauuacugacagucugug

SEQ ID NO: 352455 - RNA, 22 nt, Human
cacccagcauuggcuaagagag

SEQ ID NO: 352456 - RNA, 22 nt, Human
agaggggaguccuaaucugauu

SEQ ID NO: 352457 - RNA, 22 nt, Human
agcuggaggauaacucacuucu

SEQ ID NO: 352458 - RNA, 19 nt, Human
aggcucugagcuccuggag

SEQ ID NO: 352459 - RNA, 22 nt, Human
acaaaugugucuaauugugccu

SEQ ID NO: 352460 - RNA, 22 nt, Human
uuaacauuucuuuuccacucau

SEQ ID NO: 352461 - RNA, 21 nt, Human
acagaguaguugaaacagaga

SEQ ID NO: 352462 - RNA, 22 nt, Human
guuauauauaguauuucucuga

SEQ ID NO: 352463 - RNA, 22 nt, Human
uccucuggggcgugguccugga

SEQ ID NO: 352464 - RNA, 22 nt, Human
aggcagugcucaagacagcagc

SEQ ID NO: 352465 - RNA, 22 nt, Human
uccucaggaugugggguagaau

SEQ ID NO: 352466 - RNA, 18 nt, Human
ugaggcagucagugaugg

SEQ ID NO: 352467 - RNA, 22 nt, Human
cuacauggagaagaaaauucuu

SEQ ID NO: 352468 - RNA, 22 nt, Human
cuuucauuugauaagaaugcca

SEQ ID NO: 352469 - RNA, 22 nt, Human
ccagcaggcagucauauccuuu

SEQ ID NO: 352470 - RNA, 21 nt, Human
cacuauuuauauaugccagcu

SEQ ID NO: 352471 - RNA, 22 nt, Human
uucuuguauguaugcaaaauca

SEQ ID NO: 352472 - RNA, 22 nt, Human
aggcugagccacggggcuggcu

SEQ ID NO: 352473 - RNA, 22 nt, Human
agaucugaccuaaccccaccac

SEQ ID NO: 352474 - RNA, 18 nt, Human
guccugagcucugcugua

SEQ ID NO: 352475 - RNA, 22 nt, Human
uacaguaaccagucuacuuaga

SEQ ID NO: 352476 - RNA, 20 nt, Human
agaaaucagaccacacacua

SEQ ID NO: 352477 - RNA, 21 nt, Human
uuagaagcuaaugcagcuggu

SEQ ID NO: 352478 - RNA, 22 nt, Human
uagaaguuaaaggaauacagaa

SEQ ID NO: 352479 - RNA, 22 nt, Human
caguccuggggaccaggcugag

SEQ ID NO: 352480 - RNA, 22 nt, Human
ggggccuguagagcuucaggga

SEQ ID NO: 352481 - RNA, 22 nt, Human
cuggccugagaaugcuacccuu

SEQ ID NO: 352482 - RNA, 22 nt, Human
gcagggucuugagaggcagcca

SEQ ID NO: 352483 - RNA, 22 nt, Human
ccagcuuuuccucucauugcuu

SEQ ID NO: 352484 - RNA, 22 nt, Human
caggugaccuuuguccuaaguu

SEQ ID NO: 352485 - RNA, 22 nt, Human
ccagaagaccccguccaccucc

SEQ ID NO: 352486 - RNA, 22 nt, Human
cagcuggguuuaguggggugug

SEQ ID NO: 352487 - RNA, 22 nt, Human
acaggcugccuaccaaguauca

SEQ ID NO: 352488 - RNA, 22 nt, Human
ggcugccuugacccuggcuccg

SEQ ID NO: 352489 - RNA, 22 nt, Human
ucaguaaacagguuuaaguccu

SEQ ID NO: 352490 - RNA, 22 nt, Human
uggcagaaguucacuaguagcu

SEQ ID NO: 352491 - RNA, 22 nt, Human
gcagaggauagcauaugaaccu

SEQ ID NO: 352492 - RNA, 23 nt, Human
ccuggcagcaaacgaggagguua

SEQ ID NO: 352493 - RNA, 22 nt, Human
gggcuggugaggcugcccugca

SEQ ID NO: 352494 - RNA, 22 nt, Human
ccugcagcuccggauuucuggg

SEQ ID NO: 352495 - RNA, 22 nt, Human
ucucagaggugcccuggcaucu

SEQ ID NO: 352496 - RNA, 22 nt, Human
uguaugcagggcuuguaugcag

SEQ ID NO: 352497 - RNA, 22 nt, Human
acuccagggcuccaucccuugu

SEQ ID NO: 352498 - RNA, 21 nt, Human
cccaagggaggcaggauaagg

SEQ ID NO: 352499 - RNA, 22 nt, Human
acagaauucuaguauguggcuu

SEQ ID NO: 352500 - RNA, 22 nt, Human
cagagccauuauggagacuugc

SEQ ID NO: 352501 - RNA, 22 nt, Human
ccucagaugucuuaaggcacug

SEQ ID NO: 352502 - RNA, 20 nt, Human
cuuugccuauucucugccug

SEQ ID NO: 352503 - RNA, 22 nt, Human
ucuucagacccuuagcugugau

SEQ ID NO: 352504 - RNA, 22 nt, Human
cauuuguagcuauuuacuguau

SEQ ID NO: 352505 - RNA, 22 nt, Human
gugaacuauuggguaucauaaa

SEQ ID NO: 352506 - RNA, 22 nt, Human
ggcuccuggggaggugagcuug

SEQ ID NO: 352507 - RNA, 22 nt, Human
uguaauauuguagugacaguac

SEQ ID NO: 352508 - RNA, 22 nt, Human
aagacagagggaagcaaugaug

SEQ ID NO: 352509 - RNA, 21 nt, Human
ucaggcagugcaaauacaugg

SEQ ID NO: 352510 - RNA, 23 nt, Human
cuagggcaguauuucacagacac

SEQ ID NO: 352511 - RNA, 22 nt, Human
aucuaacacuguaaacugucuu

SEQ ID NO: 352512 - RNA, 22 nt, Human
ccugcagguccccggaugcgca

SEQ ID NO: 352513 - RNA, 22 nt, Human
aagcuggaacaucuugaggaag

SEQ ID NO: 352514 - RNA, 22 nt, Human
ugggcuccuugggagcaaguga

SEQ ID NO: 352515 - RNA, 22 nt, Human
auuuccagcagcauauuugucu

SEQ ID NO: 352516 - RNA, 22 nt, Human
gcugcugugccuggcguccugu

SEQ ID NO: 352517 - RNA, 22 nt, Human
uaauuucaauagcuugcauaau

SEQ ID NO: 352518 - RNA, 22 nt, Human
uuuauuguuguuagucauaagu

SEQ ID NO: 352519 - RNA, 22 nt, Human
ucagagugguagccuauuuucu

SEQ ID NO: 352520 - RNA, 22 nt, Human
uccugcagagucccacugauuu

SEQ ID NO: 352521 - RNA, 22 nt, Human
gcaucuucacacaaagccagug

SEQ ID NO: 352522 - RNA, 22 nt, Human
aaauuuaagaagugugugcgug

SEQ ID NO: 352523 - RNA, 22 nt, Human
agcccuccucacaucagcgucc

SEQ ID NO: 352524 - RNA, 22 nt, Human
cugccagcucaaagcgcagcua

SEQ ID NO: 352525 - RNA, 22 nt, Human
cuggccagcugacagcagggcu

SEQ ID NO: 352526 - RNA, 22 nt, Human
gugggaugcaguggugaguggc

SEQ ID NO: 352527 - RNA, 22 nt, Human
cccagcuugcgggcggcaggag

SEQ ID NO: 352528 - RNA, 23 nt, Human
auauuagggagauuagcccucua

SEQ ID NO: 352529 - RNA, 22 nt, Human
ggcucaggggccaggccugucc

SEQ ID NO: 352530 - RNA, 22 nt, Human
gcauggcaaauaucgagggcag

SEQ ID NO: 352531 - RNA, 23 nt, Human
gggggcugguugacucucugcag

SEQ ID NO: 352532 - RNA, 22 nt, Human
gucucagaccacccucuuuggc

SEQ ID NO: 352533 - RNA, 22 nt, Human
agggagaaugaccaagguauau

SEQ ID NO: 352534 - RNA, 22 nt, Human
gcuggccugaccugaggcuggg

SEQ ID NO: 352535 - RNA, 20 nt, Human
gggcagcuccccucauucug

SEQ ID NO: 352536 - RNA, 22 nt, Human
agaaaucucaguaucucaggga

SEQ ID NO: 352537 - RNA, 22 nt, Human
aagcacuuagaagagugccugc

SEQ ID NO: 352538 - RNA, 22 nt, Human
gcuguccagagcaugggagcaa

SEQ ID NO: 352539 - RNA, 22 nt, Human
aaguucuacuguggguaaaaug

SEQ ID NO: 352540 - RNA, 22 nt, Human
uggcaggagguuuucuccagga

SEQ ID NO: 352541 - RNA, 22 nt, Human
ugccugccaugcagaaagcuga

SEQ ID NO: 352542 - RNA, 22 nt, Human
cugaaggaagcagguggccugu

SEQ ID NO: 352543 - RNA, 22 nt, Human
aggcuggcgacaucuggcgggc

SEQ ID NO: 352544 - RNA, 22 nt, Human
auucaguucuaaggucagugcc

SEQ ID NO: 352545 - RNA, 22 nt, Human
cagccaggagccucugcaacua

SEQ ID NO: 352546 - RNA, 22 nt, Human
cccuggagggacagcugcucua

SEQ ID NO: 352547 - RNA, 22 nt, Human
cacugcagaucagaggcugaga

SEQ ID NO: 352548 - RNA, 22 nt, Human
aaauacagauuccagggucuua

SEQ ID NO: 352549 - RNA, 22 nt, Human
caguggcuguuucuggaaggca

SEQ ID NO: 352550 - RNA, 22 nt, Human
aggcacugacaauucuggacug

SEQ ID NO: 352551 - RNA, 22 nt, Human
ucuuuguaacugucuauugaga

SEQ ID NO: 352552 - RNA, 18 nt, Human
gcccugguggagcuggug

SEQ ID NO: 352553 - RNA, 22 nt, Human
agucugucuacuuaaagucugu

SEQ ID NO: 352554 - RNA, 22 nt, Human
uuuacagaugaggaaacugaga

SEQ ID NO: 352555 - RNA, 22 nt, Human
ugggcagaguagcucagaagaa

SEQ ID NO: 352556 - RNA, 22 nt, Human
gauuuccaggucauuaauaaag

SEQ ID NO: 352557 - RNA, 22 nt, Human
cugccagcacugccuccugagg

SEQ ID NO: 352558 - RNA, 22 nt, Human
agugcacagcgugauguauugg

SEQ ID NO: 352559 - RNA, 22 nt, Human
aauggccagcugggagaguuga

SEQ ID NO: 352560 - RNA, 21 nt, Human
agcugggccucagccugcagu

SEQ ID NO: 352561 - RNA, 22 nt, Human
uagggcagaguccaggaugggc

SEQ ID NO: 352562 - RNA, 22 nt, Human
aggccuccuggcuccaggccuu

SEQ ID NO: 352563 - RNA, 21 nt, Human
agggccugugcucuccagguc

SEQ ID NO: 352564 - RNA, 22 nt, Human
agggccagcugaugagaaugag

SEQ ID NO: 352565 - RNA, 22 nt, Human
ugaaacaaauuuggaaaaucua

SEQ ID NO: 352566 - RNA, 22 nt, Human
agucuugcucuugcaucugcuu

SEQ ID NO: 352567 - RNA, 20 nt, Human
auaauuuacccugcaccacu

SEQ ID NO: 352568 - RNA, 22 nt, Human
uuuggaaaguguacaaauuuga

SEQ ID NO: 352569 - RNA, 22 nt, Human
aaggcacuugcccagagcugca

SEQ ID NO: 352570 - RNA, 22 nt, Human
ccuaugccugucacucugcgcu

SEQ ID NO: 352571 - RNA, 22 nt, Human
uagcagggaaggugugcugagc

SEQ ID NO: 352572 - RNA, 22 nt, Human
aguucacauuccgagguacugg

SEQ ID NO: 352573 - RNA, 22 nt, Human
ugaauaauuccuuuuugucaag

SEQ ID NO: 352574 - RNA, 22 nt, Human
agcaggcuccuuccuucucugg

SEQ ID NO: 352575 - RNA, 22 nt, Human
gaauuacaugacccugaguaga

SEQ ID NO: 352576 - RNA, 22 nt, Human
uuuccaaauaaggucacauucu

SEQ ID NO: 352577 - RNA, 22 nt, Human
cuccacagccccuccaguggca

SEQ ID NO: 352578 - RNA, 22 nt, Human
uggcugggcccccaccugccuc

SEQ ID NO: 352579 - RNA, 22 nt, Human
aaggaagacuugagaagguucc

SEQ ID NO: 352580 - RNA, 22 nt, Human
agggaggucuggcugcccugag

SEQ ID NO: 352581 - RNA, 22 nt, Human
augguuuauugcuuuaaugaaa

SEQ ID NO: 352582 - RNA, 22 nt, Human
cagaggccuauccaguguccau

SEQ ID NO: 352583 - RNA, 22 nt, Human
uauuuguauguguguacauaua

SEQ ID NO: 352584 - RNA, 22 nt, Human
ccaggaugacccccacuuuccu

SEQ ID NO: 352585 - RNA, 22 nt, Human
ggcacugaucugauuucccucc

SEQ ID NO: 352586 - RNA, 22 nt, Human
gggcagagagcuggaacuccuu

SEQ ID NO: 352587 - RNA, 22 nt, Human
gggcugcuuauacugaugauaa

SEQ ID NO: 352588 - RNA, 22 nt, Human
ucauugcagcuucagguguuca

SEQ ID NO: 352589 - RNA, 22 nt, Human
aaugaacaggugaaugucagau

SEQ ID NO: 352590 - RNA, 22 nt, Human
guggccuggcgagcuggcgcgg

SEQ ID NO: 352591 - RNA, 22 nt, Human
aaccugcauguuucuaaaagca

SEQ ID NO: 352592 - RNA, 22 nt, Human
cucccugggccucaguuucucu

SEQ ID NO: 352593 - RNA, 19 nt, Human
aaaguuuuauucucauuug

SEQ ID NO: 352594 - RNA, 22 nt, Human
ucaauaaaucccucugacccug

SEQ ID NO: 352595 - RNA, 22 nt, Human
gaucagaauucuuguguguuuc

SEQ ID NO: 352596 - RNA, 22 nt, Human
guccaugacugugacucacaug

SEQ ID NO: 352597 - RNA, 22 nt, Human
ccuccaaguuugacucaggaca

SEQ ID NO: 352598 - RNA, 22 nt, Human
ggcauuuaguuuucauauucug

SEQ ID NO: 352599 - RNA, 22 nt, Human
uuaaaaccaucagcuguaagau

SEQ ID NO: 352600 - RNA, 22 nt, Human
aaucagaacuccuaccacagag

SEQ ID NO: 352601 - RNA, 22 nt, Human
ugcagggcccuugggguugaac

SEQ ID NO: 352602 - RNA, 22 nt, Human
auuaaauuuucacuaggcuccc

SEQ ID NO: 352603 - RNA, 19 nt, Human
uggggccuccugucccugg

SEQ ID NO: 352604 - RNA, 22 nt, Human
guuguauucuucaauaucagag

SEQ ID NO: 352605 - RNA, 18 nt, Human
cagaugagaugcaaucuc

SEQ ID NO: 352606 - RNA, 20 nt, Human
uccuugaaagugggguauau

SEQ ID NO: 352607 - RNA, 22 nt, Human
ugccuguguugauuacuuuguc

SEQ ID NO: 352608 - RNA, 22 nt, Human
aacagaaugcaggggaugcugc

SEQ ID NO: 352609 - RNA, 22 nt, Human
agaaaugcauuagcacauauag

SEQ ID NO: 352610 - RNA, 19 nt, Human
uguagcaguuuaaaacaac

SEQ ID NO: 352611 - RNA, 22 nt, Human
ggaggcugagaaguccaagauc

SEQ ID NO: 352612 - RNA, 22 nt, Human
caggcagaagaaguggaaggac

SEQ ID NO: 352613 - RNA, 22 nt, Human
ccucucaucauuaucgcuuugu

SEQ ID NO: 352614 - RNA, 22 nt, Human
ccaggcugggcuacaaguugag

SEQ ID NO: 352615 - RNA, 22 nt, Human
cagcuggcugcaugaugccaaa

SEQ ID NO: 352616 - RNA, 21 nt, Human
uacagaaugcgcuucagucug

SEQ ID NO: 352617 - RNA, 22 nt, Human
ucuggagccacaaaccucagcu

SEQ ID NO: 352618 - RNA, 22 nt, Human
cccugcagccggccagcucauu

SEQ ID NO: 352619 - RNA, 22 nt, Human
uacauaguuccauuuacaggaa

SEQ ID NO: 352620 - RNA, 21 nt, Human
ccuucuccacagggucuccgg

SEQ ID NO: 352621 - RNA, 22 nt, Human
aaagacuuggcuuaugauuugc

SEQ ID NO: 352622 - RNA, 22 nt, Human
aagggcucucugcauugaaauu

SEQ ID NO: 352623 - RNA, 22 nt, Human
uuccucuuucucugugcuaugu

SEQ ID NO: 352624 - RNA, 22 nt, Human
gaggcccaguccugcaagcacg

SEQ ID NO: 352625 - RNA, 22 nt, Human
ugggcagaggcucugaagucca

SEQ ID NO: 352626 - RNA, 17 nt, Human
gaggagcuccaguaggu

SEQ ID NO: 352627 - RNA, 22 nt, Human
gccaggcauuuauugauugaau

SEQ ID NO: 352628 - RNA, 22 nt, Human
uggcacugccuggcagggcccc

SEQ ID NO: 352629 - RNA, 22 nt, Human
uaugaaacauucauacaaauaa

SEQ ID NO: 352630 - RNA, 22 nt, Human
uuucagauuaucucaacuuugg

SEQ ID NO: 352631 - RNA, 20 nt, Human
cugggaggucuuccaaauca

SEQ ID NO: 352632 - RNA, 22 nt, Human
uugaauaauaugcuucguucuc

SEQ ID NO: 352633 - RNA, 22 nt, Human
ugaaaggugacauuucuuggau

SEQ ID NO: 352634 - RNA, 22 nt, Human
gcagcauuucucaaaggguggu

SEQ ID NO: 352635 - RNA, 22 nt, Human
aaagagcuaacauugccgagau

SEQ ID NO: 352636 - RNA, 22 nt, Human
cuggcugcaggaugaggcugcc

SEQ ID NO: 352637 - RNA, 22 nt, Human
cucaccaggaacagcugcggag

SEQ ID NO: 352638 - RNA, 22 nt, Human
acaguggauauauuaaaugaga

SEQ ID NO: 352639 - RNA, 22 nt, Human
uguaggacauguacuuguaaca

SEQ ID NO: 352640 - RNA, 22 nt, Human
gaaaaugugucaucccuacugu

SEQ ID NO: 352641 - RNA, 22 nt, Human
uggcagaguucgcuccuauuca

SEQ ID NO: 352642 - RNA, 20 nt, Human
ugcagagcuggcuggcuccu

SEQ ID NO: 352643 - RNA, 22 nt, Human
aucacauugccagugauuaccc

SEQ ID NO: 352644 - RNA, 22 nt, Human
uagcuuuaggcacguuugaauu

SEQ ID NO: 352645 - RNA, 22 nt, Human
auggcuuuccugggacaugggc

SEQ ID NO: 352646 - RNA, 22 nt, Human
cuuucuuauaccugucagggcc

SEQ ID NO: 352647 - RNA, 21 nt, Human
uuuuuucuugcgugaggccug

SEQ ID NO: 352648 - RNA, 19 nt, Human
gagcccucuccauggccac

SEQ ID NO: 352649 - RNA, 22 nt, Human
uccaggcaaagggacuagcagg

SEQ ID NO: 352650 - RNA, 22 nt, Human
ucagaauaugcuaaugacauuu

SEQ ID NO: 352651 - RNA, 19 nt, Human
cagagcugcuggccucguc

SEQ ID NO: 352652 - RNA, 22 nt, Human
ggcuccacccugcuuccagaag

SEQ ID NO: 352653 - RNA, 22 nt, Human
acagaccaaguuuccagcaggu

SEQ ID NO: 352654 - RNA, 22 nt, Human
uuucauaauacuguacaugaaa

SEQ ID NO: 352655 - RNA, 22 nt, Human
gaaaugugugacaaguuucaau

SEQ ID NO: 352656 - RNA, 22 nt, Human
ugaggcuugucucagauggggg

SEQ ID NO: 352657 - RNA, 22 nt, Human
uaacagaauccuguuauugcca

SEQ ID NO: 352658 - RNA, 22 nt, Human
uucaaugaggauagaacuggau

SEQ ID NO: 352659 - RNA, 22 nt, Human
uuguccuuggaugaagcuggga

SEQ ID NO: 352660 - RNA, 22 nt, Human
ggaggagguggguuaaguugua

SEQ ID NO: 352661 - RNA, 19 nt, Human
ucaggacugacuugaaguc

SEQ ID NO: 352662 - RNA, 22 nt, Human
cauuuguuaaccaguguggauu

SEQ ID NO: 352663 - RNA, 22 nt, Human
cuugcuuuguccagaaauucag

SEQ ID NO: 352664 - RNA, 22 nt, Human
guagaaauguaaccaggagaua

SEQ ID NO: 352665 - RNA, 22 nt, Human
cuggcagggugggcuuugcuuu

SEQ ID NO: 352666 - RNA, 22 nt, Human
agcugcucucacuggacgccug

SEQ ID NO: 352667 - RNA, 22 nt, Human
caggagcccagaguccucagcu

SEQ ID NO: 352668 - RNA, 22 nt, Human
cucugugauuuugugagccaga

SEQ ID NO: 352669 - RNA, 22 nt, Human
gaggagagaacauuccuccaua

SEQ ID NO: 352670 - RNA, 22 nt, Human
ucccaaggugcucggcaacagg

SEQ ID NO: 352671 - RNA, 22 nt, Human
gagcagggccacuucuguaccu

SEQ ID NO: 352672 - RNA, 22 nt, Human
uccuuugguucucuaagaugcu

SEQ ID NO: 352673 - RNA, 22 nt, Human
uugaaaguagcagcugcauaug

SEQ ID NO: 352674 - RNA, 22 nt, Human
agcagcauuuaaguuucuucua

SEQ ID NO: 352675 - RNA, 22 nt, Human
uugacaauugggagauauaaag

SEQ ID NO: 352676 - RNA, 22 nt, Human
cagagggaaaaggggaguaaua

SEQ ID NO: 352677 - RNA, 22 nt, Human
gcauggcagugaggauggugcu

SEQ ID NO: 352678 - RNA, 22 nt, Human
cagaccuggaaaacaggcuugc

SEQ ID NO: 352679 - RNA, 22 nt, Human
uccugaggcacaauccuagaau

SEQ ID NO: 352680 - RNA, 22 nt, Human
uggaggccagagguacugggac

SEQ ID NO: 352681 - RNA, 22 nt, Human
uucaugugaucacagauuguaa

SEQ ID NO: 352682 - RNA, 22 nt, Human
ccaaggagcaaguuuacaccug

SEQ ID NO: 352683 - RNA, 22 nt, Human
uuccaggauggcaauaaugaau

SEQ ID NO: 352684 - RNA, 22 nt, Human
aggugccagugcuguggucccc

SEQ ID NO: 352685 - RNA, 22 nt, Human
aggaaaaaccuguuaaugguag

SEQ ID NO: 352686 - RNA, 22 nt, Human
auaugugugaugcauggacuaa

SEQ ID NO: 352687 - RNA, 20 nt, Human
aggcacuggggauagguaag

SEQ ID NO: 352688 - RNA, 22 nt, Human
auugaaagauauacuguucuca

SEQ ID NO: 352689 - RNA, 22 nt, Human
cagcacaauuuucaggagucca

SEQ ID NO: 352690 - RNA, 22 nt, Human
guccucuguguaggcugcagac

SEQ ID NO: 352691 - RNA, 18 nt, Human
cauaauuuucuuucuuua

SEQ ID NO: 352692 - RNA, 22 nt, Human
caggggcuguuugccucaggcc

SEQ ID NO: 352693 - RNA, 22 nt, Human
agagacaggguuuugccauguu

SEQ ID NO: 352694 - RNA, 22 nt, Human
ccuggaggagcgcugaccagcu

SEQ ID NO: 352695 - RNA, 18 nt, Human
cuuguucuucucuuggcg

SEQ ID NO: 352696 - RNA, 22 nt, Human
augaggcaaggaucagguaagg

SEQ ID NO: 352697 - RNA, 22 nt, Human
ucacagacaauuguuuuggugu

SEQ ID NO: 352698 - RNA, 22 nt, Human
cugcugugcaggugccuaugau

SEQ ID NO: 352699 - RNA, 22 nt, Human
ugcagccuugccuccucccagc

SEQ ID NO: 352700 - RNA, 22 nt, Human
gcuucacacuaaaaauguuaaa

SEQ ID NO: 352701 - RNA, 22 nt, Human
guuucaaagcacagcucacauu

SEQ ID NO: 352702 - RNA, 22 nt, Human
uccaggagaaggccauccagcg

SEQ ID NO: 352703 - RNA, 22 nt, Human
uggagcugguaaacagugacau

SEQ ID NO: 352704 - RNA, 21 nt, Human
aucauucuggaaaauucaagc

SEQ ID NO: 352705 - RNA, 22 nt, Human
uuugaaagcaggugugggaggg

SEQ ID NO: 352706 - RNA, 22 nt, Human
uggcaagagggaugcaagguuu

SEQ ID NO: 352707 - RNA, 22 nt, Human
auauauuugagaauauucauga

SEQ ID NO: 352708 - RNA, 22 nt, Human
ccuggcucucugcagauccugg

SEQ ID NO: 352709 - RNA, 22 nt, Human
ggcagcuguaagaugagugaau

SEQ ID NO: 352710 - RNA, 22 nt, Human
aucuggcuuuuaccccacggcc

SEQ ID NO: 352711 - RNA, 22 nt, Human
cagcaggacguccaagugcuau

SEQ ID NO: 352712 - RNA, 22 nt, Human
uaaauguauaggcacuaaaccu

SEQ ID NO: 352713 - RNA, 22 nt, Human
gaggccaggggccuggagauga

SEQ ID NO: 352714 - RNA, 22 nt, Human
aaugucugcucuacucaggagg

SEQ ID NO: 352715 - RNA, 20 nt, Human
acugagcugcauggagagga

SEQ ID NO: 352716 - RNA, 23 nt, Human
gacagagugagaccuugucuuac

SEQ ID NO: 352717 - RNA, 22 nt, Human
ggccagcagucacagggucaga

SEQ ID NO: 352718 - RNA, 22 nt, Human
cagaggcagacccuccagggcg

SEQ ID NO: 352719 - RNA, 22 nt, Human
ggccagagaagucagacccuug

SEQ ID NO: 352720 - RNA, 21 nt, Human
ugcugccauagaccugaggga

SEQ ID NO: 352721 - RNA, 22 nt, Human
acauuucuuagccuaguuccag

SEQ ID NO: 352722 - RNA, 22 nt, Human
gcugggagucgcgucuguggcc

SEQ ID NO: 352723 - RNA, 22 nt, Human
agucucugggcaugguugugac

SEQ ID NO: 352724 - RNA, 22 nt, Human
uaaaaguauacuuucaaaggag

SEQ ID NO: 352725 - RNA, 22 nt, Human
ugucacaaacauacauuauaga

SEQ ID NO: 352726 - RNA, 22 nt, Human
acccaggaggcagagguugcag

SEQ ID NO: 352727 - RNA, 22 nt, Human
aaaaguuuaagacucauucuag

SEQ ID NO: 352728 - RNA, 22 nt, Human
gaguguggugaacaggagcacc

SEQ ID NO: 352729 - RNA, 22 nt, Human
cugcugcauuccucuuuaugag

SEQ ID NO: 352730 - RNA, 20 nt, Human
ccucucugaagaggucaucu

SEQ ID NO: 352731 - RNA, 21 nt, Human
agcugcuuucagcuccuagag

SEQ ID NO: 352732 - RNA, 22 nt, Human
ucccaggcuaggccucugcguu

SEQ ID NO: 352733 - RNA, 22 nt, Human
cagggugccaaagaacaaauau

SEQ ID NO: 352734 - RNA, 22 nt, Human
uugcuauuuugagagucauagu

SEQ ID NO: 352735 - RNA, 22 nt, Human
aucccuggacggcgccucccca

SEQ ID NO: 352736 - RNA, 22 nt, Human
ccacagagagugucagccuuug

SEQ ID NO: 352737 - RNA, 22 nt, Human
agagcuguggauaguccuggau

SEQ ID NO: 352738 - RNA, 22 nt, Human
acaggcuucucacagaaaaggg

SEQ ID NO: 352739 - RNA, 22 nt, Human
ucaucacauaugucaugauuug

SEQ ID NO: 352740 - RNA, 22 nt, Human
ugaggcaggagaaucaccggaa

SEQ ID NO: 352741 - RNA, 22 nt, Human
uaaagucaucuuuacaucuuug

SEQ ID NO: 352742 - RNA, 22 nt, Human
gaggcugcaggcaaugcugccc

SEQ ID NO: 352743 - RNA, 22 nt, Human
ccuggcuuccuggagcucacaa

SEQ ID NO: 352744 - RNA, 22 nt, Human
uacaaagccugguagauaucug

SEQ ID NO: 352745 - RNA, 22 nt, Human
gagccaggguuugaaacuagac

SEQ ID NO: 352746 - RNA, 23 nt, Human
caggacaugggaggaaguauggc

SEQ ID NO: 352747 - RNA, 22 nt, Human
cuuugaagauggcaaauuuaga

SEQ ID NO: 352748 - RNA, 22 nt, Human
agaggcuccuagccacuggcuu

SEQ ID NO: 352749 - RNA, 22 nt, Human
aguugacauccagagacauucu

SEQ ID NO: 352750 - RNA, 22 nt, Human
cacaggcagccuuguagaagaa

SEQ ID NO: 352751 - RNA, 22 nt, Human
gacauguugaagaauauuugga

SEQ ID NO: 352752 - RNA, 22 nt, Human
gggcaggugccagcucccuguc

SEQ ID NO: 352753 - RNA, 22 nt, Human
gaaggccacaaaaaaugucaua

SEQ ID NO: 352754 - RNA, 22 nt, Human
uagggaugacgaaaggacagag

SEQ ID NO: 352755 - RNA, 22 nt, Human
agaggggaaguaaugaaugaua

SEQ ID NO: 352756 - RNA, 22 nt, Human
uggagugaaguaaagaggacaa

SEQ ID NO: 352757 - RNA, 22 nt, Human
uggggccuggucagagcugcac

SEQ ID NO: 352758 - RNA, 22 nt, Human
cagggcuguggcuuugugcugu

SEQ ID NO: 352759 - RNA, 22 nt, Human
uggcuggacagugggcagugga

SEQ ID NO: 352760 - RNA, 22 nt, Human
uggcagcugauuagauggugcc

SEQ ID NO: 352761 - RNA, 22 nt, Human
ugcagucuccaccuccugggug

SEQ ID NO: 352762 - RNA, 22 nt, Human
aucaguuugagugcugugucaa

SEQ ID NO: 352763 - RNA, 22 nt, Human
gaaggccucacucugcagcaua

SEQ ID NO: 352764 - RNA, 22 nt, Human
gaggcaguggucugaugcaagg

SEQ ID NO: 352765 - RNA, 22 nt, Human
ucauuuucaaguuugaacagga

SEQ ID NO: 352766 - RNA, 22 nt, Human
cugcucuggucucuucauguuu

SEQ ID NO: 352767 - RNA, 22 nt, Human
ucagggcacaggccuguggguu

SEQ ID NO: 352768 - RNA, 22 nt, Human
aaucaguuaggguguuaaugag

SEQ ID NO: 352769 - RNA, 22 nt, Human
uuucuagggcucuugucuucug

SEQ ID NO: 352770 - RNA, 22 nt, Human
accaugccaguggcagccagac

SEQ ID NO: 352771 - RNA, 22 nt, Human
gucuucuuguguugccugucuu

SEQ ID NO: 352772 - RNA, 22 nt, Human
augcuuaacuuccuagucuaua

SEQ ID NO: 352773 - RNA, 22 nt, Human
auaagcauguuagaauauuuga

SEQ ID NO: 352774 - RNA, 22 nt, Human
ucucccagaggaucccagugga

SEQ ID NO: 352775 - RNA, 22 nt, Human
aggcugggcaccguuuugaucc

SEQ ID NO: 352776 - RNA, 20 nt, Human
uggaccugucucuuuaggga

SEQ ID NO: 352777 - RNA, 22 nt, Human
uuuuuccaccguacuuccugag

SEQ ID NO: 352778 - RNA, 22 nt, Human
agcacccuccaacuucccugua

SEQ ID NO: 352779 - RNA, 22 nt, Human
cugcagggugacguugcccacc

SEQ ID NO: 352780 - RNA, 22 nt, Human
acacaguaugaaaagucuaguu

SEQ ID NO: 352781 - RNA, 22 nt, Human
caugcugugugguuagaacugu

SEQ ID NO: 352782 - RNA, 22 nt, Human
gcuggcuuugcacugggugcau

SEQ ID NO: 352783 - RNA, 21 nt, Human
aagcaggacauaugaugcccu

SEQ ID NO: 352784 - RNA, 22 nt, Human
ccccuuccgucucuugaguguc

SEQ ID NO: 352785 - RNA, 22 nt, Human
ugaggcaguauuuuagugacuu

SEQ ID NO: 352786 - RNA, 22 nt, Human
uuacuuuggauggucaagaaag

SEQ ID NO: 352787 - RNA, 22 nt, Human
cacauggaagagauacagugag

SEQ ID NO: 352788 - RNA, 22 nt, Human
uucacacacagcuuccuauugu

SEQ ID NO: 352789 - RNA, 22 nt, Human
ugggggacugcacuggcgucag

SEQ ID NO: 352790 - RNA, 22 nt, Human
ucccaggaagaucccagggacc

SEQ ID NO: 352791 - RNA, 19 nt, Human
cagaguacaccagauagga

SEQ ID NO: 352792 - RNA, 22 nt, Human
uuucacaaugcaauccuacuuc

SEQ ID NO: 352793 - RNA, 22 nt, Human
gcaaggcugugcacuuugcauu

SEQ ID NO: 352794 - RNA, 22 nt, Human
ucaggagggugacaggcccugg

SEQ ID NO: 352795 - RNA, 22 nt, Human
gucccuuggcucacaaacagcu

SEQ ID NO: 352796 - RNA, 22 nt, Human
augguuuuagaaucaggaaaaa

SEQ ID NO: 352797 - RNA, 23 nt, Human
uuucacaaugagcauuacagaau

SEQ ID NO: 352798 - RNA, 22 nt, Human
cuuauguauaauguuccacaua

SEQ ID NO: 352799 - RNA, 22 nt, Human
ugugaauacagcaugugcuucu

SEQ ID NO: 352800 - RNA, 22 nt, Human
aauuuuauuaacuggauguagc

SEQ ID NO: 352801 - RNA, 22 nt, Human
agagcugcccacacagcagauu

SEQ ID NO: 352802 - RNA, 22 nt, Human
cccuggggcugagggauggccg

SEQ ID NO: 352803 - RNA, 22 nt, Human
gcuugcucaacccccgucucuc

SEQ ID NO: 352804 - RNA, 22 nt, Human
ucuggcucccuggagcuccaca

SEQ ID NO: 352805 - RNA, 22 nt, Human
ccugggcauaaaucacuccaag

SEQ ID NO: 352806 - RNA, 23 nt, Human
agcagcaaaaauuuaucuuucug

SEQ ID NO: 352807 - RNA, 22 nt, Human
caguuuauuuccaagaugacaa

SEQ ID NO: 352808 - RNA, 22 nt, Human
gggagagaugcugauugccaau

SEQ ID NO: 352809 - RNA, 22 nt, Human
ccuuucucuuugcugaucaugu

SEQ ID NO: 352810 - RNA, 22 nt, Human
ucauuucuauugcuacugucug

SEQ ID NO: 352811 - RNA, 22 nt, Human
uggcuccuucauucuccugcca

SEQ ID NO: 352812 - RNA, 20 nt, Human
cccuggagagaagcuccacg

SEQ ID NO: 352813 - RNA, 19 nt, Human
uccugcagguggcuugcag

SEQ ID NO: 352814 - RNA, 22 nt, Human
caugggaggucugcaaggugcu

SEQ ID NO: 352815 - RNA, 22 nt, Human
uggcagcuaucuuuaaugagau

SEQ ID NO: 352816 - RNA, 22 nt, Human
uuuugaaagccagguuuguaug

SEQ ID NO: 352817 - RNA, 22 nt, Human
uccaugagacagauacuguaag

SEQ ID NO: 352818 - RNA, 22 nt, Human
ggccaggcgaugaccccuccac

SEQ ID NO: 352819 - RNA, 20 nt, Human
gcagagccucacugcaaggg

SEQ ID NO: 352820 - RNA, 22 nt, Human
cucaaggaaagucuggagaaga

SEQ ID NO: 352821 - RNA, 22 nt, Human
aauuccugucuuaacaguucug

SEQ ID NO: 352822 - RNA, 22 nt, Human
ccuggaaggugaugguacagca

SEQ ID NO: 352823 - RNA, 22 nt, Human
gcuggauccacaaauaacuuug

SEQ ID NO: 352824 - RNA, 22 nt, Human
cuuuauguuggggugucuuagu

SEQ ID NO: 352825 - RNA, 22 nt, Human
cucccuggaggcccagaccugg

SEQ ID NO: 352826 - RNA, 22 nt, Human
gagaggaguuacuauuuccgag

SEQ ID NO: 352827 - RNA, 22 nt, Human
caggcagccugagggaucuggg

SEQ ID NO: 352828 - RNA, 22 nt, Human
cuggugggagcagcaggcagcu

SEQ ID NO: 352829 - RNA, 22 nt, Human
ucccuggccauuccucuaggcc

SEQ ID NO: 352830 - RNA, 22 nt, Human
ugccaggcgugguggugcgcac

SEQ ID NO: 352831 - RNA, 22 nt, Human
ggcaggcugcuugggucauguc

SEQ ID NO: 352832 - RNA, 22 nt, Human
aauuaugagguagauaucacau

SEQ ID NO: 352833 - RNA, 18 nt, Human
gcaggcuuuuccuggguc

SEQ ID NO: 352834 - RNA, 22 nt, Human
guucuuaagaccacaauaaaaa

SEQ ID NO: 352835 - RNA, 22 nt, Human
auguacaguuucuagacucaaa

SEQ ID NO: 352836 - RNA, 22 nt, Human
agaagccacuggagguugagau

SEQ ID NO: 352837 - RNA, 22 nt, Human
aggggugugcauccuggaggau

SEQ ID NO: 352838 - RNA, 22 nt, Human
auggcauuugaccgcuuugugg

SEQ ID NO: 352839 - RNA, 22 nt, Human
gcuggagccauuggcuuggccu

SEQ ID NO: 352840 - RNA, 22 nt, Human
cagcagcaacaacggaagccuu

SEQ ID NO: 352841 - RNA, 23 nt, Human
ggauuuaguggaugagcugagug

SEQ ID NO: 352842 - RNA, 21 nt, Human
agagcugggacuugccugaga

SEQ ID NO: 352843 - RNA, 22 nt, Human
acagauuuguucuuuugggcua

SEQ ID NO: 352844 - RNA, 22 nt, Human
gcagagccagaauggccaggac

SEQ ID NO: 352845 - RNA, 22 nt, Human
ggagacagugacuuagagacug

SEQ ID NO: 352846 - RNA, 22 nt, Human
cccaggaaugagcaggcagggg

SEQ ID NO: 352847 - RNA, 22 nt, Human
uuugacauugccaauuugcuca

SEQ ID NO: 352848 - RNA, 22 nt, Human
uccagccuaggggaacagcugc

SEQ ID NO: 352849 - RNA, 22 nt, Human
agugugagcccuggaguggugc

SEQ ID NO: 352850 - RNA, 22 nt, Human
uaaacauggauucugaucacag

SEQ ID NO: 352851 - RNA, 21 nt, Human
ggcagcccgcccucuccuggc

SEQ ID NO: 352852 - RNA, 22 nt, Human
ccagcugggauuaagggaaaau

SEQ ID NO: 352853 - RNA, 22 nt, Human
ucagucucuggggcuucuguuu

SEQ ID NO: 352854 - RNA, 22 nt, Human
ugcuggaauaauuucauguuaa

SEQ ID NO: 352855 - RNA, 22 nt, Human
uuccaaagaaauugaccaagac

SEQ ID NO: 352856 - RNA, 22 nt, Human
cagaaaaggaagagcuauguaa

SEQ ID NO: 352857 - RNA, 22 nt, Human
aggcucagagagcuguguccau

SEQ ID NO: 352858 - RNA, 22 nt, Human
cuccaugaauuugagcuuugug

SEQ ID NO: 352859 - RNA, 22 nt, Human
gcaggagcuggaaagugauguu

SEQ ID NO: 352860 - RNA, 19 nt, Human
ugcugcuguccuugcaggg

SEQ ID NO: 352861 - RNA, 22 nt, Human
agugcuuucuugcuccaucagu

SEQ ID NO: 352862 - RNA, 22 nt, Human
gccaggagagcuccuucagguu

SEQ ID NO: 352863 - RNA, 22 nt, Human
uccuguggucuggaaggaaugg

SEQ ID NO: 352864 - RNA, 21 nt, Human
ucuugaaaauuguagcaguuu

SEQ ID NO: 352865 - RNA, 22 nt, Human
cuggaaauuggagaugauguuu

SEQ ID NO: 352866 - RNA, 21 nt, Human
uucucagaucgaguagugaga

SEQ ID NO: 352867 - RNA, 22 nt, Human
ucagaggacuaccuucuccagu

SEQ ID NO: 352868 - RNA, 21 nt, Human
agucuguuaggaugacucuga

SEQ ID NO: 352869 - RNA, 22 nt, Human
guggagccaggggcuguaggua

SEQ ID NO: 352870 - RNA, 22 nt, Human
auuugcuuucagguauaaaagg

SEQ ID NO: 352871 - RNA, 22 nt, Human
caguuucuacgaaggucaaccc

SEQ ID NO: 352872 - RNA, 19 nt, Human
ggcuggcaagugacagugu

SEQ ID NO: 352873 - RNA, 22 nt, Human
aaggccaacuaggaugagcuag

SEQ ID NO: 352874 - RNA, 22 nt, Human
gcucagagggaacaaggggcug

SEQ ID NO: 352875 - RNA, 22 nt, Human
cagcagagcuuauguuggguca

SEQ ID NO: 352876 - RNA, 21 nt, Human
gggccacaccuucugcagacc

SEQ ID NO: 352877 - RNA, 22 nt, Human
cugcucucuguuccccuggauc

SEQ ID NO: 352878 - RNA, 22 nt, Human
agggcagcaaugcagcugcugc

SEQ ID NO: 352879 - RNA, 22 nt, Human
ucaggcagaggauggggagcgu

SEQ ID NO: 352880 - RNA, 22 nt, Human
gcugagaguguaggauguuuac

SEQ ID NO: 352881 - RNA, 22 nt, Human
auacagaaaaugaugcagaguu

SEQ ID NO: 352882 - RNA, 22 nt, Human
cacagaaguuucauagucucga

SEQ ID NO: 352883 - RNA, 23 nt, Human
agcacacuuguacaaugcccuag

SEQ ID NO: 352884 - RNA, 22 nt, Human
uggaauggaaacaaacugagga

SEQ ID NO: 352885 - RNA, 22 nt, Human
aacacuuucuauuauuaugguu

SEQ ID NO: 352886 - RNA, 22 nt, Human
acaggccugagauuuugcauuu

SEQ ID NO: 352887 - RNA, 22 nt, Human
cuuagggaaucuuagagcugga

SEQ ID NO: 352888 - RNA, 22 nt, Human
aucuuucuauuucuaaaaacua

SEQ ID NO: 352889 - RNA, 22 nt, Human
agcaccugccugcauuggcuau

SEQ ID NO: 352890 - RNA, 22 nt, Human
ugccagaguuacaugaggguca

SEQ ID NO: 352891 - RNA, 22 nt, Human
gccucugcugacaagauggaca

SEQ ID NO: 352892 - RNA, 22 nt, Human
uggcugagagcaauugacucug

SEQ ID NO: 352893 - RNA, 22 nt, Human
aguuauccgaaggcacugagau

SEQ ID NO: 352894 - RNA, 22 nt, Human
ugaggcucagugagcccugcag

SEQ ID NO: 352895 - RNA, 22 nt, Human
cagcagcaaggugaggguggag

SEQ ID NO: 352896 - RNA, 19 nt, Human
ucaaaugccaaugucacag

SEQ ID NO: 352897 - RNA, 22 nt, Human
aggugcagcaugaguccaacgg

SEQ ID NO: 352898 - RNA, 22 nt, Human
aaagcucuuauagcagagugug

SEQ ID NO: 352899 - RNA, 22 nt, Human
gcagcuuuaaaggaggcucuga

SEQ ID NO: 352900 - RNA, 20 nt, Human
guccugggagccacagcaca

SEQ ID NO: 352901 - RNA, 22 nt, Human
gcaguggcuaggagucuggcgu

SEQ ID NO: 352902 - RNA, 22 nt, Human
guccuggguccccgcaggucag

SEQ ID NO: 352903 - RNA, 22 nt, Human
uccuugaauccuagcauccuau

SEQ ID NO: 352904 - RNA, 22 nt, Human
agccagugaugaagacucugga

SEQ ID NO: 352905 - RNA, 22 nt, Human
gcagagcucaagguguucagcu

SEQ ID NO: 352906 - RNA, 22 nt, Human
agugggcagcccaggaggucuu

SEQ ID NO: 352907 - RNA, 22 nt, Human
gaaaugugcagaauguguuaga

SEQ ID NO: 352908 - RNA, 22 nt, Human
caaguccucugguuucaaauag

SEQ ID NO: 352909 - RNA, 22 nt, Human
cuagagaggcagauguccugug

SEQ ID NO: 352910 - RNA, 22 nt, Human
uugggugcugucauggggcacg

SEQ ID NO: 352911 - RNA, 22 nt, Human
ggagggcucaauugacuccuga

SEQ ID NO: 352912 - RNA, 22 nt, Human
uggcccugucccuggagccugg

SEQ ID NO: 352913 - RNA, 20 nt, Human
acuguucaagggccuggugg

SEQ ID NO: 352914 - RNA, 22 nt, Human
cagugcccaagaugugccaugc

SEQ ID NO: 352915 - RNA, 22 nt, Human
agugaaauagcauuuaugaagc

SEQ ID NO: 352916 - RNA, 22 nt, Human
aggcucaggucucaggucuggc

SEQ ID NO: 352917 - RNA, 22 nt, Human
cacagcugccauggcugcacuu

SEQ ID NO: 352918 - RNA, 22 nt, Human
cagggccugagggcugcucugc

SEQ ID NO: 352919 - RNA, 22 nt, Human
gucccaggugggcuccaccucu

SEQ ID NO: 352920 - RNA, 20 nt, Human
aacagggggcugcagagggc

SEQ ID NO: 352921 - RNA, 22 nt, Human
ugggacagagugagcuuuggcc

SEQ ID NO: 352922 - RNA, 22 nt, Human
uagccucucuccuccacaaccu

SEQ ID NO: 352923 - RNA, 22 nt, Human
auuguauuuccagcuugaaugu

SEQ ID NO: 352924 - RNA, 22 nt, Human
auuugauuagcuguguaauuuu

SEQ ID NO: 352925 - RNA, 22 nt, Human
ucccugcucagcucaccuggca

SEQ ID NO: 352926 - RNA, 21 nt, Human
ggcaggauggcaguggacccc

SEQ ID NO: 352927 - RNA, 22 nt, Human
acaguguguuggaggagacugu

SEQ ID NO: 352928 - RNA, 22 nt, Human
gaagagcugcaguuuccugggc

SEQ ID NO: 352929 - RNA, 22 nt, Human
ucacuggggccuuuggucagga

SEQ ID NO: 352930 - RNA, 19 nt, Human
ucuaacagaagugucgucc

SEQ ID NO: 352931 - RNA, 19 nt, Human
agucccaggcccgaaagag

SEQ ID NO: 352932 - RNA, 22 nt, Human
uuccaaaccucaaauaauuaau

SEQ ID NO: 352933 - RNA, 22 nt, Human
ucccaggaauugaagccagugu

SEQ ID NO: 352934 - RNA, 22 nt, Human
ccaggagagcucucguucagug

SEQ ID NO: 352935 - RNA, 22 nt, Human
gggcagaggcucuggcccaucc

SEQ ID NO: 352936 - RNA, 22 nt, Human
uggcagagguaauucaaauccc

SEQ ID NO: 352937 - RNA, 22 nt, Human
cagggccagccgcagcauccac

SEQ ID NO: 352938 - RNA, 19 nt, Human
ggccccucucacaggaguu

SEQ ID NO: 352939 - RNA, 22 nt, Human
cuguaaauaugaagaauauaug

SEQ ID NO: 352940 - RNA, 22 nt, Human
ugugauauuugaguauugucaa

SEQ ID NO: 352941 - RNA, 22 nt, Human
gaaaugcauggaucuuggcaga

SEQ ID NO: 352942 - RNA, 22 nt, Human
aggcugaggcagguggaucacc

SEQ ID NO: 352943 - RNA, 22 nt, Human
uuuaggcagcagugaggaugaa

SEQ ID NO: 352944 - RNA, 22 nt, Human
aggucagaagugccagggaauu

SEQ ID NO: 352945 - RNA, 22 nt, Human
aggaguggugcaggaccugcca

SEQ ID NO: 352946 - RNA, 22 nt, Human
cagguggagcugacugagggca

SEQ ID NO: 352947 - RNA, 22 nt, Human
gagggcugccacguugggcgag

SEQ ID NO: 352948 - RNA, 22 nt, Human
gcuggccagggcugcucgcgga

SEQ ID NO: 352949 - RNA, 22 nt, Human
uaaguccuagaugauucacaga

SEQ ID NO: 352950 - RNA, 22 nt, Human
cugggcaguaugaauauucaaa

SEQ ID NO: 352951 - RNA, 22 nt, Human
auuucauugaaguuaauucuuc

SEQ ID NO: 352952 - RNA, 23 nt, Human
ugcagggcaaguuagagacccca

SEQ ID NO: 352953 - RNA, 19 nt, Human
aggaaagguggccuuagca

SEQ ID NO: 352954 - RNA, 22 nt, Human
ucacagcuaagcuuggucacug

SEQ ID NO: 352955 - RNA, 22 nt, Human
gaggcucagagggacuuucaag

SEQ ID NO: 352956 - RNA, 22 nt, Human
guucuaauuuggggcuccuuag

SEQ ID NO: 352957 - RNA, 22 nt, Human
gucccacaccuugaggggucuu

SEQ ID NO: 352958 - RNA, 22 nt, Human
gggcugagggccaauuccuacu

SEQ ID NO: 352959 - RNA, 21 nt, Human
ucuuccuccacagcgugccac

SEQ ID NO: 352960 - RNA, 22 nt, Human
gccacaugcaauugcagcacgu

SEQ ID NO: 352961 - RNA, 22 nt, Human
gaaggcuaaaggggcagagguu

SEQ ID NO: 352962 - RNA, 22 nt, Human
ucaauaaauagcuuggcucagc

SEQ ID NO: 352963 - RNA, 22 nt, Human
uaaaaucauucuggugucagua

SEQ ID NO: 352964 - RNA, 22 nt, Human
aaggagcuuguucgccuuccuc

SEQ ID NO: 352965 - RNA, 22 nt, Human
ggucaggguauaaucaagugag

SEQ ID NO: 352966 - RNA, 22 nt, Human
ggggagugacgcagggccauag

SEQ ID NO: 352967 - RNA, 22 nt, Human
ccugugccauccugagcauccc

SEQ ID NO: 352968 - RNA, 17 nt, Human
uggcuucccugggccac

SEQ ID NO: 352969 - RNA, 22 nt, Human
uagggcuguuuaaaagugaggu

SEQ ID NO: 352970 - RNA, 22 nt, Human
ugggagaugguucugagacuuu

SEQ ID NO: 352971 - RNA, 22 nt, Human
agcagcauagaagcugggagga

SEQ ID NO: 352972 - RNA, 22 nt, Human
gaggagcugggucagggagaca

SEQ ID NO: 352973 - RNA, 22 nt, Human
ggaggaagugcaguucuacuac

SEQ ID NO: 352974 - RNA, 20 nt, Human
uccuggccuucucgggcagu

SEQ ID NO: 352975 - RNA, 22 nt, Human
agggcucugggguggcagagau

SEQ ID NO: 352976 - RNA, 22 nt, Human
aggcuccuaucgcuuucagcaa

SEQ ID NO: 352977 - RNA, 22 nt, Human
cauuguuauagcauuacacacc

SEQ ID NO: 352978 - RNA, 21 nt, Human
uucaaaguuugccuaaagauu

SEQ ID NO: 352979 - RNA, 22 nt, Human
cugcucuggcguacucggcauc

SEQ ID NO: 352980 - RNA, 22 nt, Human
auccuuagguggugcaucaggg

SEQ ID NO: 352981 - RNA, 22 nt, Human
gggagggaucugcuaggcaaug

SEQ ID NO: 352982 - RNA, 22 nt, Human
auagauacauuagguaacuugu

SEQ ID NO: 352983 - RNA, 22 nt, Human
caaucaguaaccggaucauggu

SEQ ID NO: 352984 - RNA, 22 nt, Human
agcagcugaccagugaguccug

SEQ ID NO: 352985 - RNA, 22 nt, Human
agcuggugcucaggggcaugga

SEQ ID NO: 352986 - RNA, 22 nt, Human
auucaaguccagcuucucuaca

SEQ ID NO: 352987 - RNA, 22 nt, Human
agggagcuucuggccucagccu

SEQ ID NO: 352988 - RNA, 22 nt, Human
uuugaagacauauuguuacaua

SEQ ID NO: 352989 - RNA, 22 nt, Human
gagagggagccagccaggaacc

SEQ ID NO: 352990 - RNA, 22 nt, Human
agggcgaggagacggaggcaca

SEQ ID NO: 352991 - RNA, 22 nt, Human
caggauagaaaggccauggagu

SEQ ID NO: 352992 - RNA, 22 nt, Human
ugaguaauaaacugucuugcuc

SEQ ID NO: 352993 - RNA, 22 nt, Human
aucagcaagcaugguuaggugu

SEQ ID NO: 352994 - RNA, 22 nt, Human
agcagggcaugaauaaggguuu

SEQ ID NO: 352995 - RNA, 22 nt, Human
ucaggcagguggcuggcuaugg

SEQ ID NO: 352996 - RNA, 22 nt, Human
auacagaaguuuuccacuuauu

SEQ ID NO: 352997 - RNA, 23 nt, Human
cacaccaggagccgucugggcca

SEQ ID NO: 352998 - RNA, 22 nt, Human
agcagccaauuggaggaugaag

SEQ ID NO: 352999 - RNA, 22 nt, Human
cccaggagagaggccaguuggc

SEQ ID NO: 353000 - RNA, 22 nt, Human
gcagcugguuaaugggagaauu

SEQ ID NO: 353001 - RNA, 22 nt, Human
uccaggaguuugaccugugggc

SEQ ID NO: 353002 - RNA, 22 nt, Human
auauaaguuaguggucauguuu

SEQ ID NO: 353003 - RNA, 22 nt, Human
aguuauauuccauagauucaga

SEQ ID NO: 353004 - RNA, 22 nt, Human
gaauucugggagagaucugaca

SEQ ID NO: 353005 - RNA, 22 nt, Human
uuugaaagaauuuauguacuuu

SEQ ID NO: 353006 - RNA, 22 nt, Human
agggagcaugggugaagcaggc

SEQ ID NO: 353007 - RNA, 21 nt, Human
uuacagaauccaugggaaguc

SEQ ID NO: 353008 - RNA, 22 nt, Human
cugggcugucccaaccccaucc

SEQ ID NO: 353009 - RNA, 22 nt, Human
cauugcacucuggcuggaacgg

SEQ ID NO: 353010 - RNA, 22 nt, Human
aacagaaaagguagguggcuuu

SEQ ID NO: 353011 - RNA, 22 nt, Human
ucaaaggcgguccaggaauaaa

SEQ ID NO: 353012 - RNA, 22 nt, Human
cacauaauacauguuccacuua

SEQ ID NO: 353013 - RNA, 22 nt, Human
gaucagaaucuucauuuucagu

SEQ ID NO: 353014 - RNA, 22 nt, Human
uccagcaguccaugugagacac

SEQ ID NO: 353015 - RNA, 22 nt, Human
ugauuucuuccuugucauuaga

SEQ ID NO: 353016 - RNA, 22 nt, Human
cacucaggguacaauggagggc

SEQ ID NO: 353017 - RNA, 22 nt, Human
cuccagugcacccagaggauuu

SEQ ID NO: 353018 - RNA, 22 nt, Human
ccccaggagaaaucuuaaacua

SEQ ID NO: 353019 - RNA, 22 nt, Human
gcucagagauguucaguagcuu

SEQ ID NO: 353020 - RNA, 22 nt, Human
agagggcauuaacucugucuug

SEQ ID NO: 353021 - RNA, 22 nt, Human
aggcugagucaaguuaggguga

SEQ ID NO: 353022 - RNA, 22 nt, Human
ccagaagggcuauugcagugac

SEQ ID NO: 353023 - RNA, 22 nt, Human
cucuccagaucugcugagccag

SEQ ID NO: 353024 - RNA, 22 nt, Human
agugaaaugacugaaucagaua

SEQ ID NO: 353025 - RNA, 20 nt, Human
accaauguuagcuuaguacu

SEQ ID NO: 353026 - RNA, 22 nt, Human
agccuuguuggucugaguuugg

SEQ ID NO: 353027 - RNA, 22 nt, Human
agcagcuucuuucacuccugga

SEQ ID NO: 353028 - RNA, 22 nt, Human
agagccuggggauuggcaaggg

SEQ ID NO: 353029 - RNA, 16 nt, Human
auuuccagauuaugca

SEQ ID NO: 353030 - RNA, 22 nt, Human
agucucugugagcucccaaugg

SEQ ID NO: 353031 - RNA, 22 nt, Human
auccuucaaggggcugacagcu

SEQ ID NO: 353032 - RNA, 22 nt, Human
auggaaagcuaagccauuuacc

SEQ ID NO: 353033 - RNA, 17 nt, Human
cagggcugucugccuag

SEQ ID NO: 353034 - RNA, 22 nt, Human
caagaauuguacaaacugggug

SEQ ID NO: 353035 - RNA, 22 nt, Human
gggcugcacguauucugcucac

SEQ ID NO: 353036 - RNA, 22 nt, Human
caggaaauaucuccuggcagag

SEQ ID NO: 353037 - RNA, 23 nt, Human
agcacagacuagaaaggucuuuc

SEQ ID NO: 353038 - RNA, 23 nt, Human
uguagcaucucuuauuucucagc

SEQ ID NO: 353039 - RNA, 22 nt, Human
ccugucagaugaaguaauugug

SEQ ID NO: 353040 - RNA, 22 nt, Human
cccaggcagugcugaucccuca

SEQ ID NO: 353041 - RNA, 22 nt, Human
agcagaacugaugagacuugag

SEQ ID NO: 353042 - RNA, 23 nt, Human
ugcucugggaggcccuggagagc

SEQ ID NO: 353043 - RNA, 21 nt, Human
ugcagccauucagcccuaugc

SEQ ID NO: 353044 - RNA, 20 nt, Human
ccugucuggagacaaagaga

SEQ ID NO: 353045 - RNA, 22 nt, Human
cagcuucuggcguggagccuga

SEQ ID NO: 353046 - RNA, 22 nt, Human
ucagugucuugaccugggugug

SEQ ID NO: 353047 - RNA, 22 nt, Human
gauuuacagguuagguccugua

SEQ ID NO: 353048 - RNA, 22 nt, Human
auuuucaucgcuagguuggccu

SEQ ID NO: 353049 - RNA, 22 nt, Human
ucacagugaugacgugggagca

SEQ ID NO: 353050 - RNA, 22 nt, Human
cuuuauuagauguagacuuucu

SEQ ID NO: 353051 - RNA, 20 nt, Human
aggaagcugagauguagagg

SEQ ID NO: 353052 - RNA, 22 nt, Human
acucagaggcagcugcucaccc

SEQ ID NO: 353053 - RNA, 22 nt, Human
ggugugccuggggcuuagcugc

SEQ ID NO: 353054 - RNA, 22 nt, Human
ugaaaugacaaagguuuuucuu

SEQ ID NO: 353055 - RNA, 22 nt, Human
ucaggagagaguuggguaggcu

SEQ ID NO: 353056 - RNA, 22 nt, Human
ugaaugauacagaauuauguag

SEQ ID NO: 353057 - RNA, 22 nt, Human
gggcagcucuggcugugggaag

SEQ ID NO: 353058 - RNA, 22 nt, Human
uguggugagaaacugguagauu

SEQ ID NO: 353059 - RNA, 22 nt, Human
cucccaagauaaauaaggcagu

SEQ ID NO: 353060 - RNA, 22 nt, Human
uccugggguccugacugcuucc

SEQ ID NO: 353061 - RNA, 22 nt, Human
uuuauuaugauggacaccuucg

SEQ ID NO: 353062 - RNA, 22 nt, Human
uaacagaaauaguaggugaggg

SEQ ID NO: 353063 - RNA, 22 nt, Human
aaagcagcagcacguggaagag

SEQ ID NO: 353064 - RNA, 22 nt, Human
uuugcauaggauggacauuuua

SEQ ID NO: 353065 - RNA, 22 nt, Human
caacuuuaugauugguuuguca

SEQ ID NO: 353066 - RNA, 22 nt, Human
cugggcuccuaaccauccaggu

SEQ ID NO: 353067 - RNA, 22 nt, Human
cagcuuccgaccgggggcugca

SEQ ID NO: 353068 - RNA, 23 nt, Human
ggaguuggauuguacuugcugcu

SEQ ID NO: 353069 - RNA, 22 nt, Human
cugcuuugaaaauaaacuuguc

SEQ ID NO: 353070 - RNA, 22 nt, Human
cugccacuuucacccagugcuc

SEQ ID NO: 353071 - RNA, 22 nt, Human
cugagagaugauauagcuuaau

SEQ ID NO: 353072 - RNA, 22 nt, Human
ccagcccuugagauggaaggga

SEQ ID NO: 353073 - RNA, 22 nt, Human
guucuucagauuccauuucagu

SEQ ID NO: 353074 - RNA, 22 nt, Human
cuuuaagacucugcucuuggug

SEQ ID NO: 353075 - RNA, 22 nt, Human
auuuguugcuagcagcacugau

SEQ ID NO: 353076 - RNA, 22 nt, Human
cugugugcugaaaugcagugag

SEQ ID NO: 353077 - RNA, 22 nt, Human
cuugaaagaagggucuuuuaau

SEQ ID NO: 353078 - RNA, 20 nt, Human
uccaggagguuaguguggcu

SEQ ID NO: 353079 - RNA, 22 nt, Human
caggguggggcuggcuaucaaa

SEQ ID NO: 353080 - RNA, 22 nt, Human
cggcagagcccugagucagccu

SEQ ID NO: 353081 - RNA, 22 nt, Human
gggcugucaugugucagugacc

SEQ ID NO: 353082 - RNA, 22 nt, Human
agagcugcaauuucauguggug

SEQ ID NO: 353083 - RNA, 22 nt, Human
gcugagagaucaaggcaggauu

SEQ ID NO: 353084 - RNA, 22 nt, Human
uuucauuacguguuugacuugu

SEQ ID NO: 353085 - RNA, 22 nt, Human
ccaggccagcaggcacaccugc

SEQ ID NO: 353086 - RNA, 22 nt, Human
cugcugugugaccauggacagg

SEQ ID NO: 353087 - RNA, 22 nt, Human
agggccuggcgcguggccgccg

SEQ ID NO: 353088 - RNA, 22 nt, Human
aucuacaggauuuuacagaguu

SEQ ID NO: 353089 - RNA, 22 nt, Human
cagaggccauauuucuucacuc

SEQ ID NO: 353090 - RNA, 20 nt, Human
acuggagccaucucagccua

SEQ ID NO: 353091 - RNA, 22 nt, Human
uagaaaagauaacauucugugc

SEQ ID NO: 353092 - RNA, 22 nt, Human
agugaaauccuggucaacaggu

SEQ ID NO: 353093 - RNA, 22 nt, Human
aguguccccuccaagggccugg

SEQ ID NO: 353094 - RNA, 22 nt, Human
uccuugaauggacauuacacug

SEQ ID NO: 353095 - RNA, 22 nt, Human
gcuguucagggcacucaugggc

SEQ ID NO: 353096 - RNA, 22 nt, Human
uuccaguuaaggaagcuauucu

SEQ ID NO: 353097 - RNA, 22 nt, Human
uaauuucagugggcucugggcu

SEQ ID NO: 353098 - RNA, 22 nt, Human
cccaucaggaacccaggagccc

SEQ ID NO: 353099 - RNA, 22 nt, Human
uuuuccagauuggacuuagucc

SEQ ID NO: 353100 - RNA, 22 nt, Human
acuuucuaggucucaguccuuu

SEQ ID NO: 353101 - RNA, 22 nt, Human
acagagcuucccagccugagca

SEQ ID NO: 353102 - RNA, 22 nt, Human
ccagcuuuaucaagucugagcu

SEQ ID NO: 353103 - RNA, 22 nt, Human
ggagaggagauuguggcauuuu

SEQ ID NO: 353104 - RNA, 22 nt, Human
cauugcacagcccuguggugau

SEQ ID NO: 353105 - RNA, 22 nt, Human
auucuaggcuugaaacaugaag

SEQ ID NO: 353106 - RNA, 22 nt, Human
ugccuggcaagaggggcuggcu

SEQ ID NO: 353107 - RNA, 22 nt, Human
augggugugaaaauggucaucu

SEQ ID NO: 353108 - RNA, 22 nt, Human
uuccuuaggggacagggggaua

SEQ ID NO: 353109 - RNA, 22 nt, Human
caggacagagcccagacugugu

SEQ ID NO: 353110 - RNA, 21 nt, Human
gauugaaaccauggcagugag

SEQ ID NO: 353111 - RNA, 22 nt, Human
ucauacaucuuguauaucuauc

SEQ ID NO: 353112 - RNA, 19 nt, Human
uuagaaacuguugacacug

SEQ ID NO: 353113 - RNA, 22 nt, Human
cuccaguaucuguaggaaaagg

SEQ ID NO: 353114 - RNA, 22 nt, Human
cccaggagccaucugucuuggc

SEQ ID NO: 353115 - RNA, 22 nt, Human
gucauucuuaacaacucaguag

SEQ ID NO: 353116 - RNA, 22 nt, Human
ccagcagagggucuuggccauu

SEQ ID NO: 353117 - RNA, 22 nt, Human
ccagucccaggcagaaauccag

SEQ ID NO: 353118 - RNA, 22 nt, Human
ugaccaaagaguugcuuguauu

SEQ ID NO: 353119 - RNA, 22 nt, Human
uacauguuauuucacuauuggu

SEQ ID NO: 353120 - RNA, 22 nt, Human
uggccgggccgggcgccuccac

SEQ ID NO: 353121 - RNA, 22 nt, Human
agucuugcauuuucugaagaug

SEQ ID NO: 353122 - RNA, 21 nt, Human
guuauuuuaagugagcuuugc

SEQ ID NO: 353123 - RNA, 22 nt, Human
cgggcagugcccagcggggcag

SEQ ID NO: 353124 - RNA, 22 nt, Human
augggcaguguauuggaaggaa

SEQ ID NO: 353125 - RNA, 23 nt, Human
aggcugcagaagaauagggucau

SEQ ID NO: 353126 - RNA, 22 nt, Human
caggugggccgggguuuguucu

SEQ ID NO: 353127 - RNA, 22 nt, Human
cagcaauaagguaagcuucucc

SEQ ID NO: 353128 - RNA, 22 nt, Human
ccaaggagaaaugcugugcuuu

SEQ ID NO: 353129 - RNA, 21 nt, Human
ugcugaugucagagaagcaag

SEQ ID NO: 353130 - RNA, 22 nt, Human
cuucagaauccagaaucagaau

SEQ ID NO: 353131 - RNA, 22 nt, Human
gggauggcuuuguggcugacuc

SEQ ID NO: 353132 - RNA, 22 nt, Human
ucacauaaauuauacaauuuca

SEQ ID NO: 353133 - RNA, 19 nt, Human
cauaauacaguggaucuga

SEQ ID NO: 353134 - RNA, 22 nt, Human
ccacugcccaccccgacgucua

SEQ ID NO: 353135 - RNA, 21 nt, Human
uggcagaguugaguaguuaug

SEQ ID NO: 353136 - RNA, 22 nt, Human
cucuggaauuaaggaagccugu

SEQ ID NO: 353137 - RNA, 22 nt, Human
gugcagcugugugagagcucca

SEQ ID NO: 353138 - RNA, 21 nt, Human
caggaaaagcggaagucuagc

SEQ ID NO: 353139 - RNA, 22 nt, Human
aggauuuaucaggaacucucuu

SEQ ID NO: 353140 - RNA, 22 nt, Human
ugccaggccaauucuauuugac

SEQ ID NO: 353141 - RNA, 22 nt, Human
ugagagagccugaaucucuuac

SEQ ID NO: 353142 - RNA, 22 nt, Human
gccagcugguaggcaccuagcc

SEQ ID NO: 353143 - RNA, 22 nt, Human
uuuauccauaucauuaaaaucu

SEQ ID NO: 353144 - RNA, 22 nt, Human
ggagaugcuauguaguuugguu

SEQ ID NO: 353145 - RNA, 22 nt, Human
uccucuggcucuuucccuagga

SEQ ID NO: 353146 - RNA, 22 nt, Human
cccagcaucuccaggcauggcc

SEQ ID NO: 353147 - RNA, 19 nt, Human
acauuuagaauguacuugc

SEQ ID NO: 353148 - RNA, 22 nt, Human
accaggaggccuugguucugag

SEQ ID NO: 353149 - RNA, 22 nt, Human
ugucaugcuuauguuacauacu

SEQ ID NO: 353150 - RNA, 22 nt, Human
gagagcugggggacuguggaug

SEQ ID NO: 353151 - RNA, 22 nt, Human
uguaugcaccauuguauuaccu

SEQ ID NO: 353152 - RNA, 22 nt, Human
uccaggagguaugaguggcccc

SEQ ID NO: 353153 - RNA, 22 nt, Human
auucucuuuguauaacaucuug

SEQ ID NO: 353154 - RNA, 22 nt, Human
caaggccacguucugcaugcgg

SEQ ID NO: 353155 - RNA, 22 nt, Human
auagacauuuugcauucaagca

SEQ ID NO: 353156 - RNA, 22 nt, Human
agcauauaaauggacauauuug

SEQ ID NO: 353157 - RNA, 22 nt, Human
uuuugagauggagucuugcucu

SEQ ID NO: 353158 - RNA, 22 nt, Human
ucuggcuccugaguccaugcuc

SEQ ID NO: 353159 - RNA, 22 nt, Human
uuuaauuuguauuucuagaggg

SEQ ID NO: 353160 - RNA, 22 nt, Human
ggcucuggcaaggggaggcuac

SEQ ID NO: 353161 - RNA, 22 nt, Human
ccaaggagcucauauucuuguu

SEQ ID NO: 353162 - RNA, 22 nt, Human
aaaaugaggucaauauccuuuu

SEQ ID NO: 353163 - RNA, 22 nt, Human
gugucauguagaaauugaugaa

SEQ ID NO: 353164 - RNA, 22 nt, Human
aaaaugaugcuguaauuuggca

SEQ ID NO: 353165 - RNA, 22 nt, Human
gccagaaacauacacaucacuu

SEQ ID NO: 353166 - RNA, 21 nt, Human
gugucaugguugacuuuggca

SEQ ID NO: 353167 - RNA, 19 nt, Human
ucucccagcugagaagggc

SEQ ID NO: 353168 - RNA, 22 nt, Human
ucagaagaagagacuccacagc

SEQ ID NO: 353169 - RNA, 22 nt, Human
ugaaacauuugaugaucuuugg

SEQ ID NO: 353170 - RNA, 22 nt, Human
aaugcuuuuugcgaaaugugca

SEQ ID NO: 353171 - RNA, 22 nt, Human
gcagccaggaaagcuggacccu

SEQ ID NO: 353172 - RNA, 22 nt, Human
aggaucugugagugcugcagac

SEQ ID NO: 353173 - RNA, 22 nt, Human
cucuuccucucaugcggucaua

SEQ ID NO: 353174 - RNA, 20 nt, Human
ucccaagggcugagaggauc

SEQ ID NO: 353175 - RNA, 22 nt, Human
acagaaggcggggacaaggcgg

SEQ ID NO: 353176 - RNA, 18 nt, Human
aagcugcccucaggcagg

SEQ ID NO: 353177 - RNA, 22 nt, Human
ugcacagcgggugucugucagg

SEQ ID NO: 353178 - RNA, 22 nt, Human
acaugucuuuuaaagucuaaua

SEQ ID NO: 353179 - RNA, 22 nt, Human
caguccagcccccugcuaaaag

SEQ ID NO: 353180 - RNA, 22 nt, Human
ccucccagugccuccagagcag

SEQ ID NO: 353181 - RNA, 22 nt, Human
gcagauggcugagccugcagau

SEQ ID NO: 353182 - RNA, 22 nt, Human
cccucugcucaggugcauaggc

SEQ ID NO: 353183 - RNA, 22 nt, Human
gaggcaugcagagcuggagcag

SEQ ID NO: 353184 - RNA, 22 nt, Human
aauaauuuugagagccuggaaa

SEQ ID NO: 353185 - RNA, 22 nt, Human
uugcaucuaccauaucaaagau

SEQ ID NO: 353186 - RNA, 22 nt, Human
cugggccuggcguuccaggcug

SEQ ID NO: 353187 - RNA, 22 nt, Human
ggaggccaaggagggcggauca

SEQ ID NO: 353188 - RNA, 22 nt, Human
ccacugucugcaggccucagca

SEQ ID NO: 353189 - RNA, 22 nt, Human
agucuccuuggccucaaugccu

SEQ ID NO: 353190 - RNA, 22 nt, Human
gcuguguuggugaagcuguagc

SEQ ID NO: 353191 - RNA, 22 nt, Human
ucaggcagguuggcugcagguc

SEQ ID NO: 353192 - RNA, 22 nt, Human
cuugcugggguaagucugugcu

SEQ ID NO: 353193 - RNA, 22 nt, Human
aagggugggcaccgccagguca

SEQ ID NO: 353194 - RNA, 22 nt, Human
ggcugcagggcagcuggugugg

SEQ ID NO: 353195 - RNA, 22 nt, Human
auugauggcggccucuccauau

SEQ ID NO: 353196 - RNA, 19 nt, Human
ugugaaagcuaguguucuu

SEQ ID NO: 353197 - RNA, 22 nt, Human
agggcagugggaaagccugcuc

SEQ ID NO: 353198 - RNA, 22 nt, Human
gcccagcuccucugcagacccu

SEQ ID NO: 353199 - RNA, 22 nt, Human
acagagagaauuggguuuacag

SEQ ID NO: 353200 - RNA, 23 nt, Human
cuggcucauccugguugcagugg

SEQ ID NO: 353201 - RNA, 22 nt, Human
uggcagcuggcucugcgcaggc

SEQ ID NO: 353202 - RNA, 19 nt, Human
ccugugugggguagagauc

SEQ ID NO: 353203 - RNA, 22 nt, Human
aaaugcauaucaaagacuugaa

SEQ ID NO: 353204 - RNA, 22 nt, Human
ggcaccaggcugggcauaggcc

SEQ ID NO: 353205 - RNA, 22 nt, Human
aggacagcagugcuggcacuug

SEQ ID NO: 353206 - RNA, 22 nt, Human
guggaggguuugcaaugugcag

SEQ ID NO: 353207 - RNA, 22 nt, Human
ucuggcucuguguccucaccca

SEQ ID NO: 353208 - RNA, 22 nt, Human
cugcagccuccugggguacaug

SEQ ID NO: 353209 - RNA, 22 nt, Human
uauuaggguuuugaagguuugu

SEQ ID NO: 353210 - RNA, 23 nt, Human
ugagaagccauuagagcaggugg

SEQ ID NO: 353211 - RNA, 22 nt, Human
uagagugguuaacaguuuagaa

SEQ ID NO: 353212 - RNA, 22 nt, Human
guggcacagugggagagcccca

SEQ ID NO: 353213 - RNA, 22 nt, Human
cuucaagagaaugcagggaugu

SEQ ID NO: 353214 - RNA, 22 nt, Human
acagaauuaaaguguuugugga

SEQ ID NO: 353215 - RNA, 22 nt, Human
gauggcuucacuuacauggcug

SEQ ID NO: 353216 - RNA, 22 nt, Human
uacauguauugauuucucuucu

SEQ ID NO: 353217 - RNA, 22 nt, Human
ugcucuguaacaaauugacaug

SEQ ID NO: 353218 - RNA, 22 nt, Human
ccaaagugcugagauuacaggu

SEQ ID NO: 353219 - RNA, 22 nt, Human
agggccuggcuucacuuucuca

SEQ ID NO: 353220 - RNA, 22 nt, Human
aggcggcuccgggagugugggc

SEQ ID NO: 353221 - RNA, 22 nt, Human
cuucccacuaguaucacagagc

SEQ ID NO: 353222 - RNA, 22 nt, Human
uuuaguaaguucacugcaaagc

SEQ ID NO: 353223 - RNA, 22 nt, Human
guaucacuuuugagagugagaa

SEQ ID NO: 353224 - RNA, 23 nt, Human
cccagagcacagccuccagaugc

SEQ ID NO: 353225 - RNA, 23 nt, Human
cuucucagaagucugugccagga

SEQ ID NO: 353226 - RNA, 22 nt, Human
uccagccacucagcagggauug

SEQ ID NO: 353227 - RNA, 22 nt, Human
gagcagcucugugccuggagac

SEQ ID NO: 353228 - RNA, 22 nt, Human
gggugggguguaucggauccua

SEQ ID NO: 353229 - RNA, 22 nt, Human
uuacaaaguguuaugauaaaca

SEQ ID NO: 353230 - RNA, 17 nt, Human
cagugcagagcccuuuc

SEQ ID NO: 353231 - RNA, 22 nt, Human
agggccagggaaacgaucagca

SEQ ID NO: 353232 - RNA, 22 nt, Human
ugccaggcuccggaacgacagu

SEQ ID NO: 353233 - RNA, 22 nt, Human
gaaaugcagauucugauucugu

SEQ ID NO: 353234 - RNA, 21 nt, Human
ugucagagcuuguaggacauu

SEQ ID NO: 353235 - RNA, 22 nt, Human
agagccuggacuuuucugagcc

SEQ ID NO: 353236 - RNA, 22 nt, Human
uuguuuugcuaaagggucauca

SEQ ID NO: 353237 - RNA, 22 nt, Human
acacagggaggaggugcugugc

SEQ ID NO: 353238 - RNA, 17 nt, Human
gcugcagcgguaggcag

SEQ ID NO: 353239 - RNA, 22 nt, Human
ccaggagauuuuuccauagcac

SEQ ID NO: 353240 - RNA, 22 nt, Human
cagccagguucaaguccuuaua

SEQ ID NO: 353241 - RNA, 22 nt, Human
gggagaaggagcuaguucuuga

SEQ ID NO: 353242 - RNA, 22 nt, Human
ggaggggcagccauggaacucc

SEQ ID NO: 353243 - RNA, 22 nt, Human
ccagagcugauuccugggacuu

SEQ ID NO: 353244 - RNA, 22 nt, Human
ugauacagucagcucacaauug

SEQ ID NO: 353245 - RNA, 22 nt, Human
agcccaggucucaaaguacagg

SEQ ID NO: 353246 - RNA, 22 nt, Human
cacaggcuuccaguccccagcu

SEQ ID NO: 353247 - RNA, 22 nt, Human
ucaaacuguuuacagugagaua

SEQ ID NO: 353248 - RNA, 22 nt, Human
ucccagagccucugccacucug

SEQ ID NO: 353249 - RNA, 22 nt, Human
agggucugacugaauggaaaag

SEQ ID NO: 353250 - RNA, 22 nt, Human
auguguagaacuguaaugccca

SEQ ID NO: 353251 - RNA, 22 nt, Human
gggcugacucaaccuugcaaag

SEQ ID NO: 353252 - RNA, 22 nt, Human
gcacugcagguggguggagagg

SEQ ID NO: 353253 - RNA, 20 nt, Human
caguccaaucagaggccacc

SEQ ID NO: 353254 - RNA, 22 nt, Human
cuggcuuccucaggagcagugg

SEQ ID NO: 353255 - RNA, 22 nt, Human
acuucuugggacccuggcaccg

SEQ ID NO: 353256 - RNA, 22 nt, Human
aaagucuuuauuuuguaucuuu

SEQ ID NO: 353257 - RNA, 22 nt, Human
uagggcagagcuuguacacgau

SEQ ID NO: 353258 - RNA, 22 nt, Human
cugaggaugguguggucuucuc

SEQ ID NO: 353259 - RNA, 22 nt, Human
caggcagcguccugcuuccugu

SEQ ID NO: 353260 - RNA, 22 nt, Human
cacagccugcugcacucaagaa

SEQ ID NO: 353261 - RNA, 22 nt, Human
gguggccuuucaguggaucagg

SEQ ID NO: 353262 - RNA, 22 nt, Human
aggccugcagcaggagcaaacc

SEQ ID NO: 353263 - RNA, 22 nt, Human
acucucagaggguggcagcaau

SEQ ID NO: 353264 - RNA, 22 nt, Human
cccugccuuguuggagccuaug

SEQ ID NO: 353265 - RNA, 22 nt, Human
cuuauuuugcugaugacccagg

SEQ ID NO: 353266 - RNA, 22 nt, Human
guguacauagaauugugcuuug

SEQ ID NO: 353267 - RNA, 23 nt, Human
gccugccugaccugugcaaaguc

SEQ ID NO: 353268 - RNA, 22 nt, Human
gcagcguggggacaggagcuca

SEQ ID NO: 353269 - RNA, 22 nt, Human
cugaaggaagcagaagcgaggu

SEQ ID NO: 353270 - RNA, 22 nt, Human
ugaguucucacccauucuucuu

SEQ ID NO: 353271 - RNA, 22 nt, Human
uagccaggcgaggucagugucg

SEQ ID NO: 353272 - RNA, 22 nt, Human
uucccaugccuggccccuaucc

SEQ ID NO: 353273 - RNA, 22 nt, Human
cugcugugacagcugccguguu

SEQ ID NO: 353274 - RNA, 22 nt, Human
ggcagccuugagggaggccugg

SEQ ID NO: 353275 - RNA, 22 nt, Human
ggagccagugcccucuggugga

SEQ ID NO: 353276 - RNA, 22 nt, Human
gcugccugccuugccuggagga

SEQ ID NO: 353277 - RNA, 22 nt, Human
ggcuuuauuucacuguaccaua

SEQ ID NO: 353278 - RNA, 22 nt, Human
ggggaccuggccacccauccuu

SEQ ID NO: 353279 - RNA, 22 nt, Human
gccuucaggaaaucaguccuug

SEQ ID NO: 353280 - RNA, 20 nt, Human
gagccuuccccucaccacug

SEQ ID NO: 353281 - RNA, 22 nt, Human
ccugaggcccuggcugugcuga

SEQ ID NO: 353282 - RNA, 22 nt, Human
uugggggaagaggauagacagu

SEQ ID NO: 353283 - RNA, 22 nt, Human
ugaggccagucucaucacaggc

SEQ ID NO: 353284 - RNA, 22 nt, Human
cagcugugcuagaagccacgaa

SEQ ID NO: 353285 - RNA, 22 nt, Human
agugggaccggugcuauuccag

SEQ ID NO: 353286 - RNA, 22 nt, Human
ugaaagggguugaguuacagcu

SEQ ID NO: 353287 - RNA, 22 nt, Human
uuuguuagagugugggaggcug

SEQ ID NO: 353288 - RNA, 22 nt, Human
agucucagggccacccggggaa

SEQ ID NO: 353289 - RNA, 22 nt, Human
agaaacuucagcuauucuuuug

SEQ ID NO: 353290 - RNA, 22 nt, Human
ucaggagauggucuuuauaggc

SEQ ID NO: 353291 - RNA, 22 nt, Human
caaauuccucagaaucagaaaa

SEQ ID NO: 353292 - RNA, 22 nt, Human
aagcagcacgcuuugccaacaa

SEQ ID NO: 353293 - RNA, 22 nt, Human
gagugcaguaucuucugugucc

SEQ ID NO: 353294 - RNA, 22 nt, Human
gcaaaaaaugcuuguugcuuag

SEQ ID NO: 353295 - RNA, 19 nt, Human
agggccaggauucuggaac

SEQ ID NO: 353296 - RNA, 22 nt, Human
aaagauuugaaauuaggcauca

SEQ ID NO: 353297 - RNA, 22 nt, Human
cacagcauaaugaaauauacuu

SEQ ID NO: 353298 - RNA, 22 nt, Human
cccuggagcugcuugcauguug

SEQ ID NO: 353299 - RNA, 20 nt, Human
cucuccuugccgacuuggca

SEQ ID NO: 353300 - RNA, 22 nt, Human
auucaacggguagaagggucuu

SEQ ID NO: 353301 - RNA, 22 nt, Human
uagugcacacgcauguagcagu

SEQ ID NO: 353302 - RNA, 22 nt, Human
gagacacacacaggagguggca

SEQ ID NO: 353303 - RNA, 22 nt, Human
uaugcacauuaucuaauccauu

SEQ ID NO: 353304 - RNA, 22 nt, Human
acccaggaggcaagguugcagu

SEQ ID NO: 353305 - RNA, 22 nt, Human
agccagccaguucacuaggaaa

SEQ ID NO: 353306 - RNA, 22 nt, Human
acaugcauaggagaagucuuua

SEQ ID NO: 353307 - RNA, 21 nt, Human
agcagcugggcaacauggagg

SEQ ID NO: 353308 - RNA, 22 nt, Human
agccuucaaccuagcuagagca

SEQ ID NO: 353309 - RNA, 22 nt, Human
uaauuuuuccacguacacuggg

SEQ ID NO: 353310 - RNA, 22 nt, Human
uacaggcacugaaaugcuuauu

SEQ ID NO: 353311 - RNA, 22 nt, Human
cagagccugccaccuuucuccc

SEQ ID NO: 353312 - RNA, 22 nt, Human
uaggcagauguuaacaggaaaa

SEQ ID NO: 353313 - RNA, 22 nt, Human
agggagaacaguugcagcagac

SEQ ID NO: 353314 - RNA, 21 nt, Human
ccugggccaaauucccuggac

SEQ ID NO: 353315 - RNA, 21 nt, Human
uuuagggaccaggucauaggc

SEQ ID NO: 353316 - RNA, 22 nt, Human
cagagagcuuagugugcugcau

SEQ ID NO: 353317 - RNA, 22 nt, Human
uuugcauuaguuuagauuucaa

SEQ ID NO: 353318 - RNA, 22 nt, Human
cucuggaaaaccacuagcagga

SEQ ID NO: 353319 - RNA, 22 nt, Human
ucucauucauacccuacaugcu

SEQ ID NO: 353320 - RNA, 22 nt, Human
guucaaagcuccugguacagua

SEQ ID NO: 353321 - RNA, 22 nt, Human
agcugggcagacugcagugguu

SEQ ID NO: 353322 - RNA, 22 nt, Human
uaauuuuaacugugcuguuugg

SEQ ID NO: 353323 - RNA, 22 nt, Human
uuuuucauugcagccucucucc

SEQ ID NO: 353324 - RNA, 22 nt, Human
auugaaaauauaauucuaggag

SEQ ID NO: 353325 - RNA, 22 nt, Human
caguggaauauauaggggauuu

SEQ ID NO: 353326 - RNA, 22 nt, Human
guuugcauaaaguggaugcagg

SEQ ID NO: 353327 - RNA, 22 nt, Human
aggcucagggacucccucccuc

SEQ ID NO: 353328 - RNA, 22 nt, Human
gaggcugggaaguccaagacca

SEQ ID NO: 353329 - RNA, 22 nt, Human
gacaggcuuccuaagugccaga

SEQ ID NO: 353330 - RNA, 22 nt, Human
uaaauuaugucacaugacucug

SEQ ID NO: 353331 - RNA, 22 nt, Human
agucagugaaggcauugcucaa

SEQ ID NO: 353332 - RNA, 22 nt, Human
uucuaccuacccucugcauaca

SEQ ID NO: 353333 - RNA, 18 nt, Human
ugcuuggagcauuuacca

SEQ ID NO: 353334 - RNA, 22 nt, Human
cauuucugcagaauugcucuuc

SEQ ID NO: 353335 - RNA, 22 nt, Human
gggcuggaggaccggccucgga

SEQ ID NO: 353336 - RNA, 22 nt, Human
uccagucaggcugaauucaagg

SEQ ID NO: 353337 - RNA, 22 nt, Human
gagcugcagcggcugacgcaac

SEQ ID NO: 353338 - RNA, 17 nt, Human
ccucacagggaccagac

SEQ ID NO: 353339 - RNA, 17 nt, Human
uuugaaaggaugucagu

SEQ ID NO: 353340 - RNA, 22 nt, Human
agcccaggagguggagguugca

SEQ ID NO: 353341 - RNA, 22 nt, Human
acagagcaguucuggagcuggc

SEQ ID NO: 353342 - RNA, 22 nt, Human
ugugccuggcauucugggcuuc

SEQ ID NO: 353343 - RNA, 22 nt, Human
caaggccaagucucugugaaga

SEQ ID NO: 353344 - RNA, 23 nt, Human
agaagcagcuucuggaguaucgg

SEQ ID NO: 353345 - RNA, 21 nt, Human
uaauaauuccacuacagagua

SEQ ID NO: 353346 - RNA, 22 nt, Human
cccaggcugaugggaugggcca

SEQ ID NO: 353347 - RNA, 22 nt, Human
cuuagggaauugggaggaugcc

SEQ ID NO: 353348 - RNA, 22 nt, Human
gugggccuugcagggugcaggg

SEQ ID NO: 353349 - RNA, 22 nt, Human
gccugcagccccucugcaguag

SEQ ID NO: 353350 - RNA, 22 nt, Human
ugccugggguuggcaaacugcu

SEQ ID NO: 353351 - RNA, 22 nt, Human
agggaggugguuccccagugga

SEQ ID NO: 353352 - RNA, 22 nt, Human
ugcugcauuuaucuucucaaac

SEQ ID NO: 353353 - RNA, 22 nt, Human
ucugcuguauuagguugaacug

SEQ ID NO: 353354 - RNA, 22 nt, Human
caggaggagcauuagcgucuca

SEQ ID NO: 353355 - RNA, 22 nt, Human
cuucuggaggacacuggcccca

SEQ ID NO: 353356 - RNA, 22 nt, Human
agccuggaagaaccugaagucu

SEQ ID NO: 353357 - RNA, 22 nt, Human
gggaccuggcgagggucacaca

SEQ ID NO: 353358 - RNA, 22 nt, Human
acccacgaagaugagcggcaug

SEQ ID NO: 353359 - RNA, 22 nt, Human
ccugucaguugcugucagggau

SEQ ID NO: 353360 - RNA, 22 nt, Human
uccugcagccauuagaggucaa

SEQ ID NO: 353361 - RNA, 22 nt, Human
gagccuggauugucaccgacuu

SEQ ID NO: 353362 - RNA, 22 nt, Human
cuggagccaugucuugacugcu

SEQ ID NO: 353363 - RNA, 23 nt, Human
cccuguagcccaggacaggcuuu

SEQ ID NO: 353364 - RNA, 22 nt, Human
gcacccagaggucagcagugcu

SEQ ID NO: 353365 - RNA, 22 nt, Human
acagcagggggagcuguuggac

SEQ ID NO: 353366 - RNA, 19 nt, Human
agggagaauuccaagagga

SEQ ID NO: 353367 - RNA, 22 nt, Human
gauuucuucauuuguggugaau

SEQ ID NO: 353368 - RNA, 23 nt, Human
ucuauacauacugcagccucugg

SEQ ID NO: 353369 - RNA, 22 nt, Human
cagcagaggcacgucugugaau

SEQ ID NO: 353370 - RNA, 22 nt, Human
uccugaggaaaguucaugaaug

SEQ ID NO: 353371 - RNA, 22 nt, Human
cuggcucucugagauauugagu

SEQ ID NO: 353372 - RNA, 19 nt, Human
agggaaggauucugucauu

SEQ ID NO: 353373 - RNA, 22 nt, Human
aauguugaggauaucagaaaau

SEQ ID NO: 353374 - RNA, 22 nt, Human
gcaggggaguggcaggcccgga

SEQ ID NO: 353375 - RNA, 22 nt, Human
ugcagggccgcuggaggucaug

SEQ ID NO: 353376 - RNA, 22 nt, Human
cacugaaucucaaggggagggu

SEQ ID NO: 353377 - RNA, 22 nt, Human
ugaggcaggaguuaaugugcuc

SEQ ID NO: 353378 - RNA, 22 nt, Human
uccaggagcauccaggugaagc

SEQ ID NO: 353379 - RNA, 22 nt, Human
aucugaagggaaguggaaggca

SEQ ID NO: 353380 - RNA, 22 nt, Human
gcagagugggagcccagggcug

SEQ ID NO: 353381 - RNA, 22 nt, Human
gccaggcagcuagcaaccccug

SEQ ID NO: 353382 - RNA, 22 nt, Human
uuauguaccugaauuaguaaag

SEQ ID NO: 353383 - RNA, 22 nt, Human
cuaauacacccuauugcuuguu

SEQ ID NO: 353384 - RNA, 22 nt, Human
ucaagagauugaauaauaacug

SEQ ID NO: 353385 - RNA, 22 nt, Human
agauguaguagugggucuuuua

SEQ ID NO: 353386 - RNA, 22 nt, Human
ccaggagaauaauggcagauua

SEQ ID NO: 353387 - RNA, 22 nt, Human
aacucagucauaaagcgaaugc

SEQ ID NO: 353388 - RNA, 22 nt, Human
uuagccauuuuauacaagugua

SEQ ID NO: 353389 - RNA, 22 nt, Human
uugggcaaaguguuucuggagc

SEQ ID NO: 353390 - RNA, 22 nt, Human
gagucugagucuaauggcccca

SEQ ID NO: 353391 - RNA, 20 nt, Human
gauuucaaagcagaguggcc

SEQ ID NO: 353392 - RNA, 22 nt, Human
aucagaaauugcccagcuguuu

SEQ ID NO: 353393 - RNA, 22 nt, Human
uuucaugagauuccuccacauc

SEQ ID NO: 353394 - RNA, 22 nt, Human
gacaauuucucaauauagaaac

SEQ ID NO: 353395 - RNA, 22 nt, Human
aaugcaaagcaagcagagauuu

SEQ ID NO: 353396 - RNA, 22 nt, Human
cccagggcuuuucucacuagac

SEQ ID NO: 353397 - RNA, 22 nt, Human
caggcagaguuagugauuuagg

SEQ ID NO: 353398 - RNA, 19 nt, Human
uuucaauggcuuagagaaa

SEQ ID NO: 353399 - RNA, 22 nt, Human
accugccuauggagccacaugg

SEQ ID NO: 353400 - RNA, 22 nt, Human
aggcucagaggugagcaucugc

SEQ ID NO: 353401 - RNA, 22 nt, Human
aagccaggccauucucugguuc

SEQ ID NO: 353402 - RNA, 22 nt, Human
gaaaggccagcucacagaugag

SEQ ID NO: 353403 - RNA, 22 nt, Human
aggaaaacacaguauugaugga

SEQ ID NO: 353404 - RNA, 22 nt, Human
aucaccaggcaaaaugucagag

SEQ ID NO: 353405 - RNA, 22 nt, Human
agucccagcccaguccuguaag

SEQ ID NO: 353406 - RNA, 22 nt, Human
acaggcugcugagccauuugcu

SEQ ID NO: 353407 - RNA, 22 nt, Human
cagagcugauuggauccagaga

SEQ ID NO: 353408 - RNA, 22 nt, Human
cugggggcaauggucagagugu

SEQ ID NO: 353409 - RNA, 22 nt, Human
gcagauggugggggaggaguac

SEQ ID NO: 353410 - RNA, 22 nt, Human
ucugccugcaguguggcagggc

SEQ ID NO: 353411 - RNA, 22 nt, Human
aagauuuaccacuuuauucaag

SEQ ID NO: 353412 - RNA, 22 nt, Human
auauuucuugagcaccugguau

SEQ ID NO: 353413 - RNA, 22 nt, Human
caguacuugggaaugcugggga

SEQ ID NO: 353414 - RNA, 22 nt, Human
ucaccagggagcuuguccucug

SEQ ID NO: 353415 - RNA, 22 nt, Human
ugcuguagcccugcacagugca

SEQ ID NO: 353416 - RNA, 23 nt, Human
aagcugccuucgcaguuggucug

SEQ ID NO: 353417 - RNA, 22 nt, Human
aaagcugcugccaaucaggcuu

SEQ ID NO: 353418 - RNA, 22 nt, Human
uggcagaggagaauuaagauua

SEQ ID NO: 353419 - RNA, 22 nt, Human
aucuggcucucucauuuacaaa

SEQ ID NO: 353420 - RNA, 22 nt, Human
acguuuucagccuuaauguaga

SEQ ID NO: 353421 - RNA, 22 nt, Human
guaaauuauuucaagaucaucu

SEQ ID NO: 353422 - RNA, 22 nt, Human
uguauguguauguacauaugca

SEQ ID NO: 353423 - RNA, 22 nt, Human
guacagaaauggggccccaggu

SEQ ID NO: 353424 - RNA, 22 nt, Human
agcuuccuguugagagagggag

SEQ ID NO: 353425 - RNA, 22 nt, Human
aaguucaagucuccugaguaua

SEQ ID NO: 353426 - RNA, 23 nt, Human
uugauacagaagaaucaguuugu

SEQ ID NO: 353427 - RNA, 19 nt, Human
ucaaggcucccugagggau

SEQ ID NO: 353428 - RNA, 22 nt, Human
uggcucagaacuacuucuaguu

SEQ ID NO: 353429 - RNA, 22 nt, Human
augcugugccuggaaagcggcu

SEQ ID NO: 353430 - RNA, 22 nt, Human
agucccagcuucccccaugcag

SEQ ID NO: 353431 - RNA, 22 nt, Human
cagugaggugcccagccugccc

SEQ ID NO: 353432 - RNA, 22 nt, Human
cugccugugccaccgccucauu

SEQ ID NO: 353433 - RNA, 22 nt, Human
ugcagaggaccauuguccugga

SEQ ID NO: 353434 - RNA, 22 nt, Human
gaaguacaguuuuaucuagcca

SEQ ID NO: 353435 - RNA, 22 nt, Human
caaauaucuuuggcaaagagaa

SEQ ID NO: 353436 - RNA, 22 nt, Human
ucagaggaaaggucagauggcu

SEQ ID NO: 353437 - RNA, 22 nt, Human
cagccagggagggcaaaugaga

SEQ ID NO: 353438 - RNA, 22 nt, Human
ccaggccuuucuucuuggucug

SEQ ID NO: 353439 - RNA, 22 nt, Human
ugaagcaguuacuggguguuaa

SEQ ID NO: 353440 - RNA, 22 nt, Human
ugccaggccucaggagucucca

SEQ ID NO: 353441 - RNA, 20 nt, Human
accccagccccucuaucuga

SEQ ID NO: 353442 - RNA, 22 nt, Human
cccagcugcaccucuauggccu

SEQ ID NO: 353443 - RNA, 22 nt, Human
uggccagguugggcuuugcagc

SEQ ID NO: 353444 - RNA, 22 nt, Human
cccaggcaguagaaagaagagg

SEQ ID NO: 353445 - RNA, 22 nt, Human
gggcagcuagcccucuagccca

SEQ ID NO: 353446 - RNA, 22 nt, Human
gucuucuuguuuugaaggaaau

SEQ ID NO: 353447 - RNA, 20 nt, Human
augauuuugcacuaacuuca

SEQ ID NO: 353448 - RNA, 22 nt, Human
agaugugguaguugaagggaag

SEQ ID NO: 353449 - RNA, 22 nt, Human
auguaucagauaaagcaugugg

SEQ ID NO: 353450 - RNA, 22 nt, Human
ggcuuuaucaaaugagacccug

SEQ ID NO: 353451 - RNA, 22 nt, Human
aggcacugaagaacucuuuuug

SEQ ID NO: 353452 - RNA, 22 nt, Human
aaagcaaugggucuaagguaaa

SEQ ID NO: 353453 - RNA, 22 nt, Human
aagggcucuguugccauuucag

SEQ ID NO: 353454 - RNA, 22 nt, Human
uaagaaucaguagauauagauu

SEQ ID NO: 353455 - RNA, 22 nt, Human
aggaagccaugguggacgucua

SEQ ID NO: 353456 - RNA, 22 nt, Human
uauuucugucagccagauaugg

SEQ ID NO: 353457 - RNA, 22 nt, Human
ugcucuggagggugaagcuuuu

SEQ ID NO: 353458 - RNA, 22 nt, Human
aaggugucacugggacaggaaa

SEQ ID NO: 353459 - RNA, 22 nt, Human
ucucagagugacaaugagaauu

SEQ ID NO: 353460 - RNA, 22 nt, Human
gccaggcuguuuuuauuacugu

SEQ ID NO: 353461 - RNA, 22 nt, Human
uaugagaaaauaaauaucuguu

SEQ ID NO: 353462 - RNA, 17 nt, Human
uccaggcagcaacugag

SEQ ID NO: 353463 - RNA, 22 nt, Human
cauuuguuuagaagucuuuaua

SEQ ID NO: 353464 - RNA, 22 nt, Human
uaguacaguuuaaauauuaaua

SEQ ID NO: 353465 - RNA, 22 nt, Human
ccagcuugaagaugugcugguu

SEQ ID NO: 353466 - RNA, 22 nt, Human
uugaagcauuugcuauagcauu

SEQ ID NO: 353467 - RNA, 21 nt, Human
agccaggcaagcacccccacu

SEQ ID NO: 353468 - RNA, 20 nt, Human
gcuuuuucuaauagcagucc

SEQ ID NO: 353469 - RNA, 22 nt, Human
uucauucaucucuaaaaugccu

SEQ ID NO: 353470 - RNA, 22 nt, Human
gggcagguggcagggucucugg

SEQ ID NO: 353471 - RNA, 22 nt, Human
gggugggccugucuggccaugu

SEQ ID NO: 353472 - RNA, 22 nt, Human
ggagccugacagugcccagcau

SEQ ID NO: 353473 - RNA, 22 nt, Human
ugcgcaggagcucugccaggag

SEQ ID NO: 353474 - RNA, 22 nt, Human
aucucagacauguuguccauga

SEQ ID NO: 353475 - RNA, 22 nt, Human
cccugagagugagugccaccuu

SEQ ID NO: 353476 - RNA, 22 nt, Human
ccaaggaguagagcaggaagcu

SEQ ID NO: 353477 - RNA, 22 nt, Human
uggcuuuacacauccacugccu

SEQ ID NO: 353478 - RNA, 19 nt, Human
ucucuggggacacuuucac

SEQ ID NO: 353479 - RNA, 22 nt, Human
uagacagauuuaaaggaaugga

SEQ ID NO: 353480 - RNA, 22 nt, Human
ccucagggacuccaugcugcag

SEQ ID NO: 353481 - RNA, 20 nt, Human
gggcuagaccagggcagagg

SEQ ID NO: 353482 - RNA, 22 nt, Human
cgcagggccgcgagcgggacca

SEQ ID NO: 353483 - RNA, 22 nt, Human
guuauaaauaccuaauaggauu

SEQ ID NO: 353484 - RNA, 20 nt, Human
aagaaacuugaaaguacaag

SEQ ID NO: 353485 - RNA, 22 nt, Human
ggaggaggggugacugaaugcu

SEQ ID NO: 353486 - RNA, 19 nt, Human
gagcugagaguagcacugg

SEQ ID NO: 353487 - RNA, 22 nt, Human
uuauuauuggugaguuaaggaa

SEQ ID NO: 353488 - RNA, 22 nt, Human
ggagcuguaacgagccauugcu

SEQ ID NO: 353489 - RNA, 23 nt, Human
gugcaugugucuuuacaguagca

SEQ ID NO: 353490 - RNA, 19 nt, Human
ucagaggauuuggcuauga

SEQ ID NO: 353491 - RNA, 22 nt, Human
ggcuggcaagugucugcucaug

SEQ ID NO: 353492 - RNA, 22 nt, Human
ugcacagagagaugagacacgu

SEQ ID NO: 353493 - RNA, 22 nt, Human
caagauggguguugugaugguu

SEQ ID NO: 353494 - RNA, 22 nt, Human
aguaaaauuucugcugaggaga

SEQ ID NO: 353495 - RNA, 22 nt, Human
auguaucaacaaauuguacagu

SEQ ID NO: 353496 - RNA, 22 nt, Human
guggaauguccuugaucauaag

SEQ ID NO: 353497 - RNA, 22 nt, Human
gccagcucagaugcaggaagga

SEQ ID NO: 353498 - RNA, 22 nt, Human
uauaaaauucucaguuuggggu

SEQ ID NO: 353499 - RNA, 22 nt, Human
ucagggcauucaagaggccugg

SEQ ID NO: 353500 - RNA, 22 nt, Human
cuggcagcauuaacagagagca

SEQ ID NO: 353501 - RNA, 22 nt, Human
gccugcuguuaacugcaggaau

SEQ ID NO: 353502 - RNA, 22 nt, Human
gccuucaguaguauccucauga

SEQ ID NO: 353503 - RNA, 22 nt, Human
gcagggaccucacuacccccag

SEQ ID NO: 353504 - RNA, 22 nt, Human
ccuccuggcccugggccuggaa

SEQ ID NO: 353505 - RNA, 22 nt, Human
cagcuuauucaguaagcacaua

SEQ ID NO: 353506 - RNA, 22 nt, Human
uuuuagauugggaaauguaaag

SEQ ID NO: 353507 - RNA, 22 nt, Human
cagucccacuagugccaauacc

SEQ ID NO: 353508 - RNA, 19 nt, Human
cccucaggucugagcaguc

SEQ ID NO: 353509 - RNA, 22 nt, Human
uauuucagcaagaagaaugugg

SEQ ID NO: 353510 - RNA, 22 nt, Human
cauaauauacuacauugaugaa

SEQ ID NO: 353511 - RNA, 22 nt, Human
uauuccaaaaucccaaacugcc

SEQ ID NO: 353512 - RNA, 21 nt, Human
aggaaaggccagcacguaggg

SEQ ID NO: 353513 - RNA, 18 nt, Human
acucaggaaaugaugaca

SEQ ID NO: 353514 - RNA, 22 nt, Human
guacagaaaugugaugacgcaa

SEQ ID NO: 353515 - RNA, 22 nt, Human
guggccugaugccagcccugug

SEQ ID NO: 353516 - RNA, 19 nt, Human
aggcagucauuggaauaua

SEQ ID NO: 353517 - RNA, 22 nt, Human
agcccaggaaucugcaucuuga

SEQ ID NO: 353518 - RNA, 21 nt, Human
gggcaggucucugaugucaac

SEQ ID NO: 353519 - RNA, 22 nt, Human
uugcauuucccauugaguaaug

SEQ ID NO: 353520 - RNA, 22 nt, Human
ucacagugagccaugucagaga

SEQ ID NO: 353521 - RNA, 22 nt, Human
ggugcucaagagggcauccucu

SEQ ID NO: 353522 - RNA, 22 nt, Human
cugugucucuccuuacaagacu

SEQ ID NO: 353523 - RNA, 22 nt, Human
cacauaauugaacgugaugagu

SEQ ID NO: 353524 - RNA, 17 nt, Human
ggccuguguggcugcag

SEQ ID NO: 353525 - RNA, 22 nt, Human
caugcuuuuuucuaguauaaau

SEQ ID NO: 353526 - RNA, 19 nt, Human
aacuagaaagguuuugaga

SEQ ID NO: 353527 - RNA, 22 nt, Human
uucagaaaaagaccauugcaau

SEQ ID NO: 353528 - RNA, 22 nt, Human
gagggucccugcucagggccag

SEQ ID NO: 353529 - RNA, 22 nt, Human
aaggcuaugaucuuuuucauga

SEQ ID NO: 353530 - RNA, 22 nt, Human
cagcccuuuccuucucagcuuu

SEQ ID NO: 353531 - RNA, 22 nt, Human
ggaggggucucuagcgaggaga

SEQ ID NO: 353532 - RNA, 22 nt, Human
ugcuuuaagacacuaaguuuga

SEQ ID NO: 353533 - RNA, 22 nt, Human
uugaaaggugaacaugaugcac

SEQ ID NO: 353534 - RNA, 22 nt, Human
aaguguguugacugaauugggg

SEQ ID NO: 353535 - RNA, 22 nt, Human
gccugccucaaaaucccaguuc

SEQ ID NO: 353536 - RNA, 22 nt, Human
cagggcucgcucuugcccuucg

SEQ ID NO: 353537 - RNA, 22 nt, Human
guaaaguucuacuagaaucaac

SEQ ID NO: 353538 - RNA, 22 nt, Human
ggucaggggcugcucuacagag

SEQ ID NO: 353539 - RNA, 22 nt, Human
agcagcugucccuuaacaucag

SEQ ID NO: 353540 - RNA, 22 nt, Human
gcagagacuccacugucuugug

SEQ ID NO: 353541 - RNA, 22 nt, Human
gaggcugcccaacuggagugga

SEQ ID NO: 353542 - RNA, 22 nt, Human
aauuccaggcagaaaugugagu

SEQ ID NO: 353543 - RNA, 22 nt, Human
ucauagaagcaccagaagauau

SEQ ID NO: 353544 - RNA, 22 nt, Human
ugcaccauuuugucaggcuacu

SEQ ID NO: 353545 - RNA, 22 nt, Human
acagggcagagaggcaggcuug

SEQ ID NO: 353546 - RNA, 22 nt, Human
ugggaggacuugugggcuucau

SEQ ID NO: 353547 - RNA, 22 nt, Human
agagcaucuaacacauaagccu

SEQ ID NO: 353548 - RNA, 22 nt, Human
ccugagagcgaguggccucaug

SEQ ID NO: 353549 - RNA, 22 nt, Human
aucugguuuggggauccuugug

SEQ ID NO: 353550 - RNA, 22 nt, Human
uaggccauucuuggagcuuacu

SEQ ID NO: 353551 - RNA, 21 nt, Human
cuacuuaaguaggggauuagg

SEQ ID NO: 353552 - RNA, 22 nt, Human
agaggcugagaaacccucuucu

SEQ ID NO: 353553 - RNA, 22 nt, Human
caaggcaggcaguucacuugag

SEQ ID NO: 353554 - RNA, 19 nt, Human
aaucagaaauaucgaggcc

SEQ ID NO: 353555 - RNA, 22 nt, Human
agacaggcuuugcuguauauca

SEQ ID NO: 353556 - RNA, 22 nt, Human
agauuuccuaugguaauuauag

SEQ ID NO: 353557 - RNA, 22 nt, Human
ucaaugaugcugaagguagcgu

SEQ ID NO: 353558 - RNA, 22 nt, Human
caaugucaugauuuuccauuag

SEQ ID NO: 353559 - RNA, 22 nt, Human
agggcucugagugggaaagagg

SEQ ID NO: 353560 - RNA, 22 nt, Human
ugcacacaaaugugaacgugcc

SEQ ID NO: 353561 - RNA, 22 nt, Human
cuggacagaaaaggccacugga

SEQ ID NO: 353562 - RNA, 22 nt, Human
gaggccuggaauuccagccugg

SEQ ID NO: 353563 - RNA, 22 nt, Human
ccuaggcccuaggcuuccauca

SEQ ID NO: 353564 - RNA, 21 nt, Human
gagcugggcgaggcuccgggg

SEQ ID NO: 353565 - RNA, 22 nt, Human
gcccaggacucagggugucgcg

SEQ ID NO: 353566 - RNA, 22 nt, Human
cccuggugguacggcacuggca

SEQ ID NO: 353567 - RNA, 22 nt, Human
acaguguuuuagaaaagcuuga

SEQ ID NO: 353568 - RNA, 22 nt, Human
guucuucacauuucauugagga

SEQ ID NO: 353569 - RNA, 22 nt, Human
caccugcaaggagcuuucauuu

SEQ ID NO: 353570 - RNA, 22 nt, Human
ggcuuuauauuguuugagcaga

SEQ ID NO: 353571 - RNA, 22 nt, Human
uuaugcuaguauaguccuuaga

SEQ ID NO: 353572 - RNA, 22 nt, Human
auacaagacucagcacagacgg

SEQ ID NO: 353573 - RNA, 22 nt, Human
ccagugggugcugggcucugcc

SEQ ID NO: 353574 - RNA, 22 nt, Human
ggaggccaaggcagguggauca

SEQ ID NO: 353575 - RNA, 20 nt, Human
caguagcaauaauuagaagc

SEQ ID NO: 353576 - RNA, 22 nt, Human
ugaagccaucaggaagccagca

SEQ ID NO: 353577 - RNA, 22 nt, Human
ccaggaaauagugcugugaucu

SEQ ID NO: 353578 - RNA, 22 nt, Human
uuugaauaaucacugggcauua

SEQ ID NO: 353579 - RNA, 22 nt, Human
auuucauacuaaggcucaaaaa

SEQ ID NO: 353580 - RNA, 22 nt, Human
ggacagcucugccaggagcuca

SEQ ID NO: 353581 - RNA, 22 nt, Human
ggguaauuggggccuugcagug

SEQ ID NO: 353582 - RNA, 15 nt, Human
ugauuuccuacuaac

SEQ ID NO: 353583 - RNA, 22 nt, Human
cuacccagcaccuaggcugccu

SEQ ID NO: 353584 - RNA, 22 nt, Human
accaaggagccacauacaaccu

SEQ ID NO: 353585 - RNA, 19 nt, Human
uggagaggaaaugcugcuc

SEQ ID NO: 353586 - RNA, 22 nt, Human
gccuuucaguuccaucaaagga

SEQ ID NO: 353587 - RNA, 22 nt, Human
aguccuuagaacagugccuggg

SEQ ID NO: 353588 - RNA, 22 nt, Human
gcugagccccccugcguggguc

SEQ ID NO: 353589 - RNA, 22 nt, Human
cugccagcaaugugaccaugcu

SEQ ID NO: 353590 - RNA, 22 nt, Human
accagggcugacaaucugaugg

SEQ ID NO: 353591 - RNA, 22 nt, Human
uucagcaaacacgaugcuuguu

SEQ ID NO: 353592 - RNA, 18 nt, Human
aggcuucccaggcaggcc

SEQ ID NO: 353593 - RNA, 22 nt, Human
cugcaucacagcaggaggcaca

SEQ ID NO: 353594 - RNA, 18 nt, Human
acagcagguuucauucuu

SEQ ID NO: 353595 - RNA, 22 nt, Human
cagaggcauuacugaaaaggug

SEQ ID NO: 353596 - RNA, 22 nt, Human
uccugagaugagacagugcugc

SEQ ID NO: 353597 - RNA, 20 nt, Human
acaguggaaauugaugucug

SEQ ID NO: 353598 - RNA, 22 nt, Human
aaaaugaauaaguuaacccagg

SEQ ID NO: 353599 - RNA, 22 nt, Human
uauuuauaaucugccaaagaga

SEQ ID NO: 353600 - RNA, 22 nt, Human
ucaggcaggcucagaggaaaac

SEQ ID NO: 353601 - RNA, 22 nt, Human
auuggcaggaaccgaggagggg

SEQ ID NO: 353602 - RNA, 22 nt, Human
ugaguuuuuucaacauaugaag

SEQ ID NO: 353603 - RNA, 22 nt, Human
agcagcauuaugauauaucuua

SEQ ID NO: 353604 - RNA, 22 nt, Human
agcaaggcagucagcuggcugg

SEQ ID NO: 353605 - RNA, 22 nt, Human
agaauuccuccucugggacacu

SEQ ID NO: 353606 - RNA, 22 nt, Human
ugaggaaguuguuucucuucua

SEQ ID NO: 353607 - RNA, 22 nt, Human
agcaucuggugagggccuaguu

SEQ ID NO: 353608 - RNA, 22 nt, Human
aaggccagacaggaccacaucu

SEQ ID NO: 353609 - RNA, 22 nt, Human
cuguccuccggccaccuacagu

SEQ ID NO: 353610 - RNA, 22 nt, Human
cgaggcaggcaggcggaggaua

SEQ ID NO: 353611 - RNA, 22 nt, Human
aagggcagagggaaucccacau

SEQ ID NO: 353612 - RNA, 22 nt, Human
cagcccagcacuaaguagauuu

SEQ ID NO: 353613 - RNA, 22 nt, Human
ggcuucagugagcugagcucac

SEQ ID NO: 353614 - RNA, 18 nt, Human
caugucugcgccacaagg

SEQ ID NO: 353615 - RNA, 22 nt, Human
uguccugcaacugaaggagaag

SEQ ID NO: 353616 - RNA, 22 nt, Human
ggugggugagcccugggagcug

SEQ ID NO: 353617 - RNA, 22 nt, Human
acagugcuggcuacaacccugg

SEQ ID NO: 353618 - RNA, 22 nt, Human
acuuuauuuccuauugcaucca

SEQ ID NO: 353619 - RNA, 22 nt, Human
uguguucuggaaagcucacuga

SEQ ID NO: 353620 - RNA, 22 nt, Human
gagcuggaagucuguggucaga

SEQ ID NO: 353621 - RNA, 22 nt, Human
uagaaacccauguuuauucagu

SEQ ID NO: 353622 - RNA, 22 nt, Human
aaauguguuucuuugugaaugg

SEQ ID NO: 353623 - RNA, 22 nt, Human
cugcugugugcuuacuuggguu

SEQ ID NO: 353624 - RNA, 22 nt, Human
ccuuuuucccuggagggacagc

SEQ ID NO: 353625 - RNA, 22 nt, Human
aggcugaggcagguggaucacu

SEQ ID NO: 353626 - RNA, 22 nt, Human
cuugccuucuguuccuauagaa

SEQ ID NO: 353627 - RNA, 22 nt, Human
gagacauggcaaaagcacuggu

SEQ ID NO: 353628 - RNA, 22 nt, Human
uggggacaggagacuuacagcu

SEQ ID NO: 353629 - RNA, 22 nt, Human
aaaauacuguggaguguugaaa

SEQ ID NO: 353630 - RNA, 22 nt, Human
gcucccacaaccuucuugcucc

SEQ ID NO: 353631 - RNA, 22 nt, Human
cuacagaaggagaaauggguaa

SEQ ID NO: 353632 - RNA, 20 nt, Human
ggcagcucacuacuuucugu

SEQ ID NO: 353633 - RNA, 22 nt, Human
ugguacacauguccaaggucag

SEQ ID NO: 353634 - RNA, 22 nt, Human
ccagggucucugcugccugaga

SEQ ID NO: 353635 - RNA, 22 nt, Human
aggcacaggaaugucauccagu

SEQ ID NO: 353636 - RNA, 22 nt, Human
ccagagcccagcacacggugcu

SEQ ID NO: 353637 - RNA, 23 nt, Human
uuugaaguugacugccuuccaga

SEQ ID NO: 353638 - RNA, 22 nt, Human
ccagucccaucucugucgcuua

SEQ ID NO: 353639 - RNA, 22 nt, Human
caauauauaaugaguacuuucc

SEQ ID NO: 353640 - RNA, 22 nt, Human
ggccuugggcagacacgucaca

SEQ ID NO: 353641 - RNA, 22 nt, Human
ggcagcucugaugaugcucugg

SEQ ID NO: 353642 - RNA, 22 nt, Human
uagacagauuucuuguuagaca

SEQ ID NO: 353643 - RNA, 22 nt, Human
gcagggcagcucacugugguuc

SEQ ID NO: 353644 - RNA, 22 nt, Human
aggcucaguucuguggugagcc

SEQ ID NO: 353645 - RNA, 20 nt, Human
ucacaggggaccaggagcag

SEQ ID NO: 353646 - RNA, 22 nt, Human
uggcauuuagaaaacaacaugu

SEQ ID NO: 353647 - RNA, 22 nt, Human
uuugcagucuggccugcuuugg

SEQ ID NO: 353648 - RNA, 22 nt, Human
gcaggcugugaggcucagaugg

SEQ ID NO: 353649 - RNA, 22 nt, Human
uuccugggacuggagcagccca

SEQ ID NO: 353650 - RNA, 22 nt, Human
ucacauuuguuccucugcacuu

SEQ ID NO: 353651 - RNA, 22 nt, Human
aagggcucccugccugaggugg

SEQ ID NO: 353652 - RNA, 22 nt, Human
gcagaauuuggggguaaccuuu

SEQ ID NO: 353653 - RNA, 22 nt, Human
ucuuccaguguagacaucugcc

SEQ ID NO: 353654 - RNA, 22 nt, Human
uagggacccucccugcucuaac

SEQ ID NO: 353655 - RNA, 21 nt, Human
aaugcauuaacauaaagcuga

SEQ ID NO: 353656 - RNA, 22 nt, Human
cacagggcaccaguuggccauc

SEQ ID NO: 353657 - RNA, 22 nt, Human
gcucucugccuuucucaaugac

SEQ ID NO: 353658 - RNA, 22 nt, Human
aagcugccuugcugaggagaaa

SEQ ID NO: 353659 - RNA, 22 nt, Human
ugggcagaaaucaguaucagau

SEQ ID NO: 353660 - RNA, 22 nt, Human
ccaggccuggaccaugccaggg

SEQ ID NO: 353661 - RNA, 22 nt, Human
caaauucaaauuucaucagugu

SEQ ID NO: 353662 - RNA, 22 nt, Human
ccuggcagcgccgaagcuggcc

SEQ ID NO: 353663 - RNA, 22 nt, Human
aguuuuucuccccuggcuucau

SEQ ID NO: 353664 - RNA, 22 nt, Human
ccagguaggagagagggauccu

SEQ ID NO: 353665 - RNA, 22 nt, Human
uuccagggcuaauuccugugga

SEQ ID NO: 353666 - RNA, 22 nt, Human
aucacauucuuucaaagcaguc

SEQ ID NO: 353667 - RNA, 19 nt, Human
ugcaagugucuuggacaag

SEQ ID NO: 353668 - RNA, 22 nt, Human
caggagaggaggcuacuucuua

SEQ ID NO: 353669 - RNA, 22 nt, Human
cagcugggcuaagaguagaggc

SEQ ID NO: 353670 - RNA, 22 nt, Human
auuccaguuggguucuaauaca

SEQ ID NO: 353671 - RNA, 21 nt, Human
uugcaccaugauaaauucaga

SEQ ID NO: 353672 - RNA, 22 nt, Human
aaggcaguacuuuauguccaua

SEQ ID NO: 353673 - RNA, 22 nt, Human
cuguugucccugggagcucagc

SEQ ID NO: 353674 - RNA, 22 nt, Human
gcugagguggcugccuuaguaa

SEQ ID NO: 353675 - RNA, 22 nt, Human
aggcagcuggcaaauucuagag

SEQ ID NO: 353676 - RNA, 22 nt, Human
cagguuuagguggacgugcagg

SEQ ID NO: 353677 - RNA, 22 nt, Human
aguguuccuugcuuucccagag

SEQ ID NO: 353678 - RNA, 22 nt, Human
agcuugauuucucugcagugug

SEQ ID NO: 353679 - RNA, 22 nt, Human
uuguggcagaccaugagucuaa

SEQ ID NO: 353680 - RNA, 22 nt, Human
ugagaagcaguuucaguaagaa

SEQ ID NO: 353681 - RNA, 22 nt, Human
caggaggcuccuagggcucugu

SEQ ID NO: 353682 - RNA, 21 nt, Human
aaaaugugagcgugaugcuua

SEQ ID NO: 353683 - RNA, 22 nt, Human
gcccaggaguuugcauuuuaac

SEQ ID NO: 353684 - RNA, 22 nt, Human
aacucagcauccugcacagaga

SEQ ID NO: 353685 - RNA, 22 nt, Human
cuggcuuucuguuauaaagaca

SEQ ID NO: 353686 - RNA, 22 nt, Human
uggcaguggcucagagugcaga

SEQ ID NO: 353687 - RNA, 21 nt, Human
uaaauaauaaguugcugagau

SEQ ID NO: 353688 - RNA, 22 nt, Human
ggccuuuaagcaauugaaaaga

SEQ ID NO: 353689 - RNA, 22 nt, Human
ugcacacacaugaaguagcaug

SEQ ID NO: 353690 - RNA, 22 nt, Human
cucuugaagcaggggccaguuc

SEQ ID NO: 353691 - RNA, 23 nt, Human
cccagcagauuguaaagugucca

SEQ ID NO: 353692 - RNA, 23 nt, Human
aucauucuccaaucuggagcagg

SEQ ID NO: 353693 - RNA, 22 nt, Human
aguggcaggcagaagcuucuca

SEQ ID NO: 353694 - RNA, 22 nt, Human
ucucccacgguacaggauaaac

SEQ ID NO: 353695 - RNA, 22 nt, Human
gcucccagggcagcgcagaaga

SEQ ID NO: 353696 - RNA, 23 nt, Human
gcucagagguuuuucucuggaug

SEQ ID NO: 353697 - RNA, 22 nt, Human
agccucugcuggcccuggcacu

SEQ ID NO: 353698 - RNA, 22 nt, Human
ucugugcucuucucaguaucac

SEQ ID NO: 353699 - RNA, 22 nt, Human
ugugccuucucaguccugcuca

SEQ ID NO: 353700 - RNA, 22 nt, Human
ucaaauaugugauagaagcuaa

SEQ ID NO: 353701 - RNA, 22 nt, Human
gaggaggaggaaguggaaccca

SEQ ID NO: 353702 - RNA, 22 nt, Human
ccauuucacucuuccugaagga

SEQ ID NO: 353703 - RNA, 22 nt, Human
cccucccaggaguggccagaga

SEQ ID NO: 353704 - RNA, 20 nt, Human
cagaccugcacccacuucga

SEQ ID NO: 353705 - RNA, 22 nt, Human
uccugcaggccagaggggugag

SEQ ID NO: 353706 - RNA, 22 nt, Human
cagugggcugugauggauucac

SEQ ID NO: 353707 - RNA, 22 nt, Human
uuugcaauuugugcugcaaaug

SEQ ID NO: 353708 - RNA, 22 nt, Human
uguacaaugcugagguuugggg

SEQ ID NO: 353709 - RNA, 22 nt, Human
ggugcagugguguggcaaaggg

SEQ ID NO: 353710 - RNA, 22 nt, Human
auauacugauagcugcacuucu

SEQ ID NO: 353711 - RNA, 22 nt, Human
caggggcucuaaugcaugauca

SEQ ID NO: 353712 - RNA, 22 nt, Human
cagcagguauguuuguucagca

SEQ ID NO: 353713 - RNA, 22 nt, Human
agugucauuccagggacccucg

SEQ ID NO: 353714 - RNA, 18 nt, Human
gagagggaucccucagga

SEQ ID NO: 353715 - RNA, 22 nt, Human
uggagcaggugcucaggguaau

SEQ ID NO: 353716 - RNA, 22 nt, Human
ucaggccacuucacaggugauu

SEQ ID NO: 353717 - RNA, 22 nt, Human
ggcagugguuagaaacaugagc

SEQ ID NO: 353718 - RNA, 21 nt, Human
ccaagacucccaucuaguggu

SEQ ID NO: 353719 - RNA, 22 nt, Human
accugggagucacaccugagaa

SEQ ID NO: 353720 - RNA, 22 nt, Human
ugucacuucaggaaugcaggga

SEQ ID NO: 353721 - RNA, 22 nt, Human
ggagauuuauagcacacuucag

SEQ ID NO: 353722 - RNA, 22 nt, Human
caggaggcccaaagggcgcaga

SEQ ID NO: 353723 - RNA, 22 nt, Human
gggcaugccugcgcagugcaug

SEQ ID NO: 353724 - RNA, 22 nt, Human
uguacaauggcuauaauacccu

SEQ ID NO: 353725 - RNA, 22 nt, Human
agcuuuaccugccuuggggcac

SEQ ID NO: 353726 - RNA, 22 nt, Human
uucugggagagaaagggccuug

SEQ ID NO: 353727 - RNA, 22 nt, Human
cuguccuguagcuccaucaguc

SEQ ID NO: 353728 - RNA, 22 nt, Human
ccccagcugcauacuugccaag

SEQ ID NO: 353729 - RNA, 22 nt, Human
uuucuuccuuaccuuacuagag

SEQ ID NO: 353730 - RNA, 22 nt, Human
cugauacauaguagcaugucau

SEQ ID NO: 353731 - RNA, 22 nt, Human
guggccuggaugagcuucgaca

SEQ ID NO: 353732 - RNA, 22 nt, Human
aaggcacuuuucuaaagaccuu

SEQ ID NO: 353733 - RNA, 22 nt, Human
uuuguuuucaaugugucauuca

SEQ ID NO: 353734 - RNA, 22 nt, Human
ucaggcagaugcagggauggau

SEQ ID NO: 353735 - RNA, 22 nt, Human
ccuccuagaggaaccccagggc

SEQ ID NO: 353736 - RNA, 22 nt, Human
auagaauucuuugaaauuuaug

SEQ ID NO: 353737 - RNA, 22 nt, Human
agggcugccugcucugcauuga

SEQ ID NO: 353738 - RNA, 22 nt, Human
uuugcaguuucauugcugaaau

SEQ ID NO: 353739 - RNA, 22 nt, Human
caggagccccaggcugacaaua

SEQ ID NO: 353740 - RNA, 22 nt, Human
ucagggcaggcgagcagcugcu

SEQ ID NO: 353741 - RNA, 22 nt, Human
uagagcugauaaugaggccaag

SEQ ID NO: 353742 - RNA, 22 nt, Human
uaauuccaaguugagacaugca

SEQ ID NO: 353743 - RNA, 22 nt, Human
aaaucacuaaguuauagugugg

SEQ ID NO: 353744 - RNA, 23 nt, Human
gcagaggagcaagcuggacacca

SEQ ID NO: 353745 - RNA, 22 nt, Human
gaugaagccugacuucucggug

SEQ ID NO: 353746 - RNA, 17 nt, Human
uagcugccccgaaugcu

SEQ ID NO: 353747 - RNA, 22 nt, Human
uuuuuccuaagcaguggagcug

SEQ ID NO: 353748 - RNA, 22 nt, Human
ggagaaggaauauuggaguagg

SEQ ID NO: 353749 - RNA, 22 nt, Human
agggugcagaaggagccuagga

SEQ ID NO: 353750 - RNA, 22 nt, Human
agcucccagagcucgagaguaa

SEQ ID NO: 353751 - RNA, 22 nt, Human
ggcuuggaaauugcaggacaca

SEQ ID NO: 353752 - RNA, 22 nt, Human
uguguuauugccacugaagacc

SEQ ID NO: 353753 - RNA, 22 nt, Human
uuuccauauucugcgucugcca

SEQ ID NO: 353754 - RNA, 22 nt, Human
cugccuuggaaaaugugguaau

SEQ ID NO: 353755 - RNA, 22 nt, Human
cugcaggggccucgagcacagg

SEQ ID NO: 353756 - RNA, 22 nt, Human
acuauacaguauguacgugcac

SEQ ID NO: 353757 - RNA, 22 nt, Human
cuuacauuuaaucaugugucau

SEQ ID NO: 353758 - RNA, 22 nt, Human
ucccuuaaaacucauguguugu

SEQ ID NO: 353759 - RNA, 23 nt, Human
cccauuuucauguuaacuccugg

SEQ ID NO: 353760 - RNA, 22 nt, Human
uuauagaacagccuccucuaga

SEQ ID NO: 353761 - RNA, 20 nt, Human
ugcagggcugccucccagcu

SEQ ID NO: 353762 - RNA, 22 nt, Human
uugccucccagcaugggcagcu

SEQ ID NO: 353763 - RNA, 22 nt, Human
ucacaggguuuggaagccuccu

SEQ ID NO: 353764 - RNA, 22 nt, Human
ugcaggagcugugcggugaggg

SEQ ID NO: 353765 - RNA, 23 nt, Human
uuccuuaacuguuaagauugucu

SEQ ID NO: 353766 - RNA, 22 nt, Human
gcucagagaugucugcugccuu

SEQ ID NO: 353767 - RNA, 22 nt, Human
aacauuuaugguagucauugca

SEQ ID NO: 353768 - RNA, 22 nt, Human
uuugaaaucuaaucaaggaaca

SEQ ID NO: 353769 - RNA, 22 nt, Human
uucaggauaugugauaucugaa

SEQ ID NO: 353770 - RNA, 22 nt, Human
gcagacagccagacugcacugg

SEQ ID NO: 353771 - RNA, 23 nt, Human
ggcacugaagcuacaauggugag

SEQ ID NO: 353772 - RNA, 22 nt, Human
uccuggugucgccuggucaguu

SEQ ID NO: 353773 - RNA, 22 nt, Human
gacuaugugaagugugaauagg

SEQ ID NO: 353774 - RNA, 22 nt, Human
agaagccagauuguagugggac

SEQ ID NO: 353775 - RNA, 22 nt, Human
uggccugccccgagauccuggc

SEQ ID NO: 353776 - RNA, 22 nt, Human
uauguacaugauuucauuugcu

SEQ ID NO: 353777 - RNA, 22 nt, Human
cagcuggcuggucagugcacaa

SEQ ID NO: 353778 - RNA, 22 nt, Human
agucccaggcagccgagccggu

SEQ ID NO: 353779 - RNA, 22 nt, Human
cuguggaaauaaacaaugcuaa

SEQ ID NO: 353780 - RNA, 21 nt, Human
uccagggaacuucucaggaau

SEQ ID NO: 353781 - RNA, 22 nt, Human
uaaagguaacaugaacugcuuu

SEQ ID NO: 353782 - RNA, 22 nt, Human
cccuucagcugagugggacagc

SEQ ID NO: 353783 - RNA, 21 nt, Human
ucuuuccugcccaguugcccu

SEQ ID NO: 353784 - RNA, 22 nt, Human
cucugcauuuuaacagaugauu

SEQ ID NO: 353785 - RNA, 22 nt, Human
gcuguguccucacacagccuuu

SEQ ID NO: 353786 - RNA, 22 nt, Human
ugacacagauuagagacauacc

SEQ ID NO: 353787 - RNA, 22 nt, Human
uaauuucuaauucauuuucagu

SEQ ID NO: 353788 - RNA, 22 nt, Human
gcugugcagguccccacugccu

SEQ ID NO: 353789 - RNA, 22 nt, Human
uuccagagaaaagguuuauuuc

SEQ ID NO: 353790 - RNA, 22 nt, Human
ugaaaucugucccacuuuagcu

SEQ ID NO: 353791 - RNA, 22 nt, Human
cuuaauuacccaaugugguagg

SEQ ID NO: 353792 - RNA, 22 nt, Human
gaggcacugcaguacagugacu

SEQ ID NO: 353793 - RNA, 22 nt, Human
aggaaaaaagucugugauuaua

SEQ ID NO: 353794 - RNA, 21 nt, Human
gcagacugcccugcugucccc

SEQ ID NO: 353795 - RNA, 22 nt, Human
gcaggcagagaaggaacauuua

SEQ ID NO: 353796 - RNA, 22 nt, Human
aggagaggaaucauuauuacaa

SEQ ID NO: 353797 - RNA, 17 nt, Human
cucuccuuccucugagg

SEQ ID NO: 353798 - RNA, 22 nt, Human
ggcagccauacucagaccuggg

SEQ ID NO: 353799 - RNA, 21 nt, Human
ugguggagugugcugagcaug

SEQ ID NO: 353800 - RNA, 23 nt, Human
ccugaagggucaggguccucagc

SEQ ID NO: 353801 - RNA, 22 nt, Human
gcuggagguuucaccugaguuu

SEQ ID NO: 353802 - RNA, 22 nt, Human
acagcagccuuguugguuucga

SEQ ID NO: 353803 - RNA, 22 nt, Human
gcagcccaauggacugagacag

SEQ ID NO: 353804 - RNA, 22 nt, Human
cagagcugcuucccaguuugug

SEQ ID NO: 353805 - RNA, 22 nt, Human
cauggccugccuccuccuggug

SEQ ID NO: 353806 - RNA, 22 nt, Human
ugugaaggagcaugcagagggg

SEQ ID NO: 353807 - RNA, 22 nt, Human
gcucccagcaauugaggcagcc

SEQ ID NO: 353808 - RNA, 21 nt, Human
uacugagaccucacagugugc

SEQ ID NO: 353809 - RNA, 22 nt, Human
gaauuguagagggaacagaagc

SEQ ID NO: 353810 - RNA, 22 nt, Human
ugaggggagcuagcaugccuug

SEQ ID NO: 353811 - RNA, 22 nt, Human
aguuauaugugaaaacacguau

SEQ ID NO: 353812 - RNA, 22 nt, Human
gagucaccuuggccgcuguccc

SEQ ID NO: 353813 - RNA, 22 nt, Human
aggaaggagggcagauauuaag

SEQ ID NO: 353814 - RNA, 22 nt, Human
gggaccuggggacuccuuguuc

SEQ ID NO: 353815 - RNA, 22 nt, Human
ccacugaaggucaacauagagc

SEQ ID NO: 353816 - RNA, 22 nt, Human
gggcaaguccggugcccagagc

SEQ ID NO: 353817 - RNA, 22 nt, Human
aguacagaccugucucuuccug

SEQ ID NO: 353818 - RNA, 22 nt, Human
gagugcaguuggggugagggga

SEQ ID NO: 353819 - RNA, 22 nt, Human
agcuucuugaccaagccuguaa

SEQ ID NO: 353820 - RNA, 22 nt, Human
agcugcuguggggcucggccug

SEQ ID NO: 353821 - RNA, 22 nt, Human
aaggugucggguuagcucagcc

SEQ ID NO: 353822 - RNA, 22 nt, Human
gggcugagucaucuggggccuc

SEQ ID NO: 353823 - RNA, 20 nt, Human
ggguggaguugcggucugug

SEQ ID NO: 353824 - RNA, 22 nt, Human
ucaccacugaacagaccuuugg

SEQ ID NO: 353825 - RNA, 22 nt, Human
gggcuggcucugucuagaaagg

SEQ ID NO: 353826 - RNA, 22 nt, Human
gcccaggaggcagagguugugg

SEQ ID NO: 353827 - RNA, 22 nt, Human
ggcuguggcagcuggaaguggu

SEQ ID NO: 353828 - RNA, 22 nt, Human
ggcaggcaaugaggaugggaag

SEQ ID NO: 353829 - RNA, 22 nt, Human
agcagccaaaugaagauuuuac

SEQ ID NO: 353830 - RNA, 22 nt, Human
augauacaucuucaugucagug

SEQ ID NO: 353831 - RNA, 22 nt, Human
acaggagugaaucuggcacuua

SEQ ID NO: 353832 - RNA, 22 nt, Human
agaaacagcauuagcaucaauu

SEQ ID NO: 353833 - RNA, 22 nt, Human
ucagaaaauaacuguuaguuug

SEQ ID NO: 353834 - RNA, 22 nt, Human
ucagaggacagcagcuaaauaa

SEQ ID NO: 353835 - RNA, 22 nt, Human
agugggcagugcgcucggaugc

SEQ ID NO: 353836 - RNA, 22 nt, Human
gagcugccugugugccaugaug

SEQ ID NO: 353837 - RNA, 22 nt, Human
cuggcucuaucuccaaggcugg

SEQ ID NO: 353838 - RNA, 22 nt, Human
auaaggcagucacuggaauguu

SEQ ID NO: 353839 - RNA, 22 nt, Human
gccaggcuggcaaaaggaaacc

SEQ ID NO: 353840 - RNA, 22 nt, Human
gaguuauucuagguccuuugua

SEQ ID NO: 353841 - RNA, 23 nt, Human
gccucugcagccuaguuaguguc

SEQ ID NO: 353842 - RNA, 22 nt, Human
agaugaaaagauaagcagcaau

SEQ ID NO: 353843 - RNA, 22 nt, Human
aaaugcaucagcucauaagaga

SEQ ID NO: 353844 - RNA, 22 nt, Human
aggccuggccccaguugcuagg

SEQ ID NO: 353845 - RNA, 22 nt, Human
cccagcucaagcagagagcuaa

SEQ ID NO: 353846 - RNA, 22 nt, Human
uggcaggaaaaacauuggagau

SEQ ID NO: 353847 - RNA, 22 nt, Human
cagcucugugggagcguaugug

SEQ ID NO: 353848 - RNA, 22 nt, Human
aaaugcagauugucauucagga

SEQ ID NO: 353849 - RNA, 22 nt, Human
cccagccucagcuuuacuucca

SEQ ID NO: 353850 - RNA, 22 nt, Human
aaauugcauuuuaaagguagau

SEQ ID NO: 353851 - RNA, 22 nt, Human
ucagaauuuuuguuacccuuga

SEQ ID NO: 353852 - RNA, 22 nt, Human
ggccagaaaguuaagcuguggc

SEQ ID NO: 353853 - RNA, 22 nt, Human
gcaaugauauugaagugaugaa

SEQ ID NO: 353854 - RNA, 20 nt, Human
ugcugcaguuucaugggacu

SEQ ID NO: 353855 - RNA, 22 nt, Human
gcagcugcagguggucccaugc

SEQ ID NO: 353856 - RNA, 22 nt, Human
acauucuuaacaguuaaaaacu

SEQ ID NO: 353857 - RNA, 22 nt, Human
ucaucaaagcgcuuggaguagg

SEQ ID NO: 353858 - RNA, 22 nt, Human
agccaggggauucaucagggac

SEQ ID NO: 353859 - RNA, 22 nt, Human
ccagcuuuccaggguugacugg

SEQ ID NO: 353860 - RNA, 22 nt, Human
cugcuguguuggcauuggauag

SEQ ID NO: 353861 - RNA, 22 nt, Human
ggagauggaauagauucugacu

SEQ ID NO: 353862 - RNA, 22 nt, Human
gcacugaaugccaaaguguagg

SEQ ID NO: 353863 - RNA, 19 nt, Human
ccucugccagcccgccucu

SEQ ID NO: 353864 - RNA, 22 nt, Human
aagcagcagaccugauuuugaa

SEQ ID NO: 353865 - RNA, 22 nt, Human
agcagccagagaaugaugcagu

SEQ ID NO: 353866 - RNA, 22 nt, Human
acuuugcaaugggcagaaccca

SEQ ID NO: 353867 - RNA, 18 nt, Human
gugccaggaggcgcagcc

SEQ ID NO: 353868 - RNA, 22 nt, Human
agaaaagggcaggagggauaca

SEQ ID NO: 353869 - RNA, 22 nt, Human
ccagagaguaggaggcauuauu

SEQ ID NO: 353870 - RNA, 22 nt, Human
agaggaggccaggcccacaccu

SEQ ID NO: 353871 - RNA, 20 nt, Human
agaguaacuggcacauaggg

SEQ ID NO: 353872 - RNA, 22 nt, Human
caauuucaauacaaaauacauu

SEQ ID NO: 353873 - RNA, 22 nt, Human
uuucacauucagauauagacuu

SEQ ID NO: 353874 - RNA, 22 nt, Human
cggggcugcucguccuccugug

SEQ ID NO: 353875 - RNA, 22 nt, Human
cugccuggguucaaguccuguu

SEQ ID NO: 353876 - RNA, 22 nt, Human
ucugucaccauucagcuugaau

SEQ ID NO: 353877 - RNA, 22 nt, Human
agagacuggagaugggcagugu

SEQ ID NO: 353878 - RNA, 22 nt, Human
cucuggacagcaggugcugugg

SEQ ID NO: 353879 - RNA, 22 nt, Human
cacugccuggaaggagagacau

SEQ ID NO: 353880 - RNA, 22 nt, Human
caucagaacaaaucgguuaaga

SEQ ID NO: 353881 - RNA, 22 nt, Human
auuuguaauuucuuaucugugu

SEQ ID NO: 353882 - RNA, 20 nt, Human
acuugcugggcuuuguuacc

SEQ ID NO: 353883 - RNA, 22 nt, Human
aggcuucagaaagaguaauugg

SEQ ID NO: 353884 - RNA, 22 nt, Human
auguuucaucaguaagguuuug

SEQ ID NO: 353885 - RNA, 22 nt, Human
ccuuccuggcuguccgccugau

SEQ ID NO: 353886 - RNA, 22 nt, Human
caggugcccagcuccugcugug

SEQ ID NO: 353887 - RNA, 22 nt, Human
gccucugcugcaagccugguug

SEQ ID NO: 353888 - RNA, 22 nt, Human
cagacacaccaggcccauucug

SEQ ID NO: 353889 - RNA, 22 nt, Human
ggaagaggcugagccagguccc

SEQ ID NO: 353890 - RNA, 22 nt, Human
ggagaagccacacauugggugu

SEQ ID NO: 353891 - RNA, 22 nt, Human
ggcagcuggggcagugcccugu

SEQ ID NO: 353892 - RNA, 22 nt, Human
ccaggagcaaagaucacuggga

SEQ ID NO: 353893 - RNA, 22 nt, Human
guguacauauugagucugcuga

SEQ ID NO: 353894 - RNA, 22 nt, Human
gcccaggaguucaagucuagug

SEQ ID NO: 353895 - RNA, 22 nt, Human
uggcugaguaaguugugauaug

SEQ ID NO: 353896 - RNA, 22 nt, Human
gccccagcucugccacaacuag

SEQ ID NO: 353897 - RNA, 22 nt, Human
uguguuuugaacucaucuacug

SEQ ID NO: 353898 - RNA, 22 nt, Human
ugguggccuugauggcaucugc

SEQ ID NO: 353899 - RNA, 22 nt, Human
cugcaggcugagcgccugccgg

SEQ ID NO: 353900 - RNA, 22 nt, Human
agugcuuuccuucuugugacau

SEQ ID NO: 353901 - RNA, 22 nt, Human
gaggaagaauugguuauuggag

SEQ ID NO: 353902 - RNA, 17 nt, Human
ucagagggaugagcagg

SEQ ID NO: 353903 - RNA, 22 nt, Human
aggaccagccuccaggucucuu

SEQ ID NO: 353904 - RNA, 22 nt, Human
ggcagcaggcgacuucccuauu

SEQ ID NO: 353905 - RNA, 20 nt, Human
guauuaggagguaaauguaa

SEQ ID NO: 353906 - RNA, 22 nt, Human
gaggcacauauauacagagccc

SEQ ID NO: 353907 - RNA, 22 nt, Human
uucuuuccacagaggggaugau

SEQ ID NO: 353908 - RNA, 22 nt, Human
agagccuguuuugugggagaug

SEQ ID NO: 353909 - RNA, 22 nt, Human
gugucccaauguucaggacggc

SEQ ID NO: 353910 - RNA, 22 nt, Human
aaggaagggaaauagugauguc

SEQ ID NO: 353911 - RNA, 22 nt, Human
caaggaaaaagcgagcucgggg

SEQ ID NO: 353912 - RNA, 22 nt, Human
uccugccuuagagcaaggaaaa

SEQ ID NO: 353913 - RNA, 22 nt, Human
ggugccaggcuguagucagggu

SEQ ID NO: 353914 - RNA, 22 nt, Human
caggacccaaccucccugcucu

SEQ ID NO: 353915 - RNA, 22 nt, Human
gccagcuggagacuggcagggg

SEQ ID NO: 353916 - RNA, 22 nt, Human
uaaggcacccauguucauacag

SEQ ID NO: 353917 - RNA, 23 nt, Human
agaucugauguuaccaagaauug

SEQ ID NO: 353918 - RNA, 22 nt, Human
agguaguguagcugagugggau

SEQ ID NO: 353919 - RNA, 22 nt, Human
uuuagaaauucaucuauggccu

SEQ ID NO: 353920 - RNA, 22 nt, Human
accaggaguuuugaccaggggc

SEQ ID NO: 353921 - RNA, 22 nt, Human
ucccagccugacagugcaucaa

SEQ ID NO: 353922 - RNA, 22 nt, Human
cuauuauuuccucaucuauaaa

SEQ ID NO: 353923 - RNA, 22 nt, Human
gggagagagaaaacguggcgca

SEQ ID NO: 353924 - RNA, 22 nt, Human
aggagggacaccaauauauguu

SEQ ID NO: 353925 - RNA, 22 nt, Human
uucuucaaaauccagcaugauu

SEQ ID NO: 353926 - RNA, 22 nt, Human
auuccaguucuccucucuaaag

SEQ ID NO: 353927 - RNA, 22 nt, Human
agggcagcacaaggcauggacu

SEQ ID NO: 353928 - RNA, 22 nt, Human
acauaccauacauggugagaug

SEQ ID NO: 353929 - RNA, 22 nt, Human
acauuucuggaguuucucaaca

SEQ ID NO: 353930 - RNA, 22 nt, Human
ggccugagaaccauggggccaa

SEQ ID NO: 353931 - RNA, 22 nt, Human
accagagcucuucagcacagga

SEQ ID NO: 353932 - RNA, 22 nt, Human
uguacaauguguuuguuggcuu

SEQ ID NO: 353933 - RNA, 22 nt, Human
ccuauacaggcuucuuuacaug

SEQ ID NO: 353934 - RNA, 17 nt, Human
gugcagggaugaaggau

SEQ ID NO: 353935 - RNA, 22 nt, Human
uuucaguguaucuuccaaaagc

SEQ ID NO: 353936 - RNA, 22 nt, Human
gaugggauuuuuuauguguuca

SEQ ID NO: 353937 - RNA, 22 nt, Human
acaguaauuaaaauggaucugc

SEQ ID NO: 353938 - RNA, 22 nt, Human
gcauggcaagaucaggagacca

SEQ ID NO: 353939 - RNA, 22 nt, Human
guggaggacaaaagaagccuuu

SEQ ID NO: 353940 - RNA, 22 nt, Human
ugcuaaauaaguggaauagaca

SEQ ID NO: 353941 - RNA, 22 nt, Human
uugauggcugugauuuacucag

SEQ ID NO: 353942 - RNA, 22 nt, Human
agcccagggacagggcggaugu

SEQ ID NO: 353943 - RNA, 22 nt, Human
agggcucccgcgguguccggga

SEQ ID NO: 353944 - RNA, 22 nt, Human
aauuagggaaaacauuugcuuu

SEQ ID NO: 353945 - RNA, 22 nt, Human
agucucuuuaaucacagugucu

SEQ ID NO: 353946 - RNA, 22 nt, Human
agccuggcuaaauucucccaug

SEQ ID NO: 353947 - RNA, 21 nt, Human
gggugggaggacacagcaggc

SEQ ID NO: 353948 - RNA, 22 nt, Human
ccaggcaggcuagaauguaaau

SEQ ID NO: 353949 - RNA, 22 nt, Human
ggacuccucuagaaguugaggc

SEQ ID NO: 353950 - RNA, 22 nt, Human
ucugaaggugcuagagaaagcu

SEQ ID NO: 353951 - RNA, 22 nt, Human
ugcugccacaaauucagcugcc

SEQ ID NO: 353952 - RNA, 22 nt, Human
agaacuguccuuggaggagagu

SEQ ID NO: 353953 - RNA, 22 nt, Human
agaaggggagaagcuaccagga

SEQ ID NO: 353954 - RNA, 22 nt, Human
uggccuggaaccuggcagggac

SEQ ID NO: 353955 - RNA, 22 nt, Human
aguaaaauuguauuggaaaaca

SEQ ID NO: 353956 - RNA, 22 nt, Human
cuucuuuccuuccuccaguggc

SEQ ID NO: 353957 - RNA, 22 nt, Human
cugaauaaagcccucgcgcgcu

SEQ ID NO: 353958 - RNA, 22 nt, Human
ggcugggccagggccuguggac

SEQ ID NO: 353959 - RNA, 22 nt, Human
uacugugaauacaaaauaaauu

SEQ ID NO: 353960 - RNA, 22 nt, Human
cauucucaauaguagaugagua

SEQ ID NO: 353961 - RNA, 22 nt, Human
cauacauuuugcauauuuacca

SEQ ID NO: 353962 - RNA, 22 nt, Human
accauuugacucucuaaggaua

SEQ ID NO: 353963 - RNA, 22 nt, Human
cagcucccuauggugaggcgac

SEQ ID NO: 353964 - RNA, 18 nt, Human
gccugggaggaggaaaug

SEQ ID NO: 353965 - RNA, 22 nt, Human
aaauuucuguuguuuugagcca

SEQ ID NO: 353966 - RNA, 22 nt, Human
acaguaauaaguguuggugagg

SEQ ID NO: 353967 - RNA, 22 nt, Human
cuugcaggauuuugcugcugua

SEQ ID NO: 353968 - RNA, 22 nt, Human
ccugagugccaugagagcaccc

SEQ ID NO: 353969 - RNA, 22 nt, Human
aagagcuggcucuugcagcagc

SEQ ID NO: 353970 - RNA, 22 nt, Human
aaauauagcaauuaugccuacu

SEQ ID NO: 353971 - RNA, 22 nt, Human
gaaggcugagcagacaggccaa

SEQ ID NO: 353972 - RNA, 22 nt, Human
ccaauacacuuuauagaagaaa

SEQ ID NO: 353973 - RNA, 22 nt, Human
uccagggcugacuugggagagg

SEQ ID NO: 353974 - RNA, 22 nt, Human
ccugcugugaccggggagcagg

SEQ ID NO: 353975 - RNA, 22 nt, Human
cccuccagccauggacccaggu

SEQ ID NO: 353976 - RNA, 22 nt, Human
cucagggucugguccuuagauu

SEQ ID NO: 353977 - RNA, 22 nt, Human
uuugugaagggaacagaagugu

SEQ ID NO: 353978 - RNA, 22 nt, Human
cccaggcugauguucagcgggu

SEQ ID NO: 353979 - RNA, 22 nt, Human
cagggccagccauccugcuggg

SEQ ID NO: 353980 - RNA, 22 nt, Human
guggcccugucccaggccuccu

SEQ ID NO: 353981 - RNA, 22 nt, Human
ugagagugaaaugucacauguc

SEQ ID NO: 353982 - RNA, 22 nt, Human
gcuuuaaugcaauuucaccuca

SEQ ID NO: 353983 - RNA, 17 nt, Human
aggccagaugaggcaag

SEQ ID NO: 353984 - RNA, 22 nt, Human
caguccuucuccauuaaggcuc

SEQ ID NO: 353985 - RNA, 22 nt, Human
caggcaggagccagggauucca

SEQ ID NO: 353986 - RNA, 22 nt, Human
augggguggaguccgggcagcg

SEQ ID NO: 353987 - RNA, 22 nt, Human
uggcagcucuguucaacaugag

SEQ ID NO: 353988 - RNA, 22 nt, Human
aggcagccagauggcagccugc

SEQ ID NO: 353989 - RNA, 22 nt, Human
agacagcugggaaauggagugu

SEQ ID NO: 353990 - RNA, 22 nt, Human
uaauaaacugcuacgcuuaguu

SEQ ID NO: 353991 - RNA, 22 nt, Human
auguacaaaauguuuugaaaug

SEQ ID NO: 353992 - RNA, 22 nt, Human
agaugcugccucuccucacaag

SEQ ID NO: 353993 - RNA, 22 nt, Human
uucaagauggcugcaaauacuu

SEQ ID NO: 353994 - RNA, 22 nt, Human
ucugaggcuauguucaggcuaa

SEQ ID NO: 353995 - RNA, 22 nt, Human
caggugggcguggcgagaaggc

SEQ ID NO: 353996 - RNA, 22 nt, Human
accagccugucugagucguggg

SEQ ID NO: 353997 - RNA, 21 nt, Human
uccucugcagugagguggccu

SEQ ID NO: 353998 - RNA, 22 nt, Human
gggcuacauugugagagaaguu

SEQ ID NO: 353999 - RNA, 22 nt, Human
aagagcugcaucuaagccauga

SEQ ID NO: 354000 - RNA, 22 nt, Human
caaaugcaaaauauaacccugu

SEQ ID NO: 354001 - RNA, 22 nt, Human
uaucaauacauguuaucagugu

SEQ ID NO: 354002 - RNA, 22 nt, Human
gcagcuggggaggucgugggga

SEQ ID NO: 354003 - RNA, 22 nt, Human
caaauacuggguaaguuaauuu

SEQ ID NO: 354004 - RNA, 22 nt, Human
agggcugccauuucuggcccaa

SEQ ID NO: 354005 - RNA, 22 nt, Human
acugcuuuagaccuagagcucu

SEQ ID NO: 354006 - RNA, 17 nt, Human
uucaagauauugaaaug

SEQ ID NO: 354007 - RNA, 22 nt, Human
acagaaguuggaauuagauacu

SEQ ID NO: 354008 - RNA, 22 nt, Human
ugcucuggggagcuccucugcg

SEQ ID NO: 354009 - RNA, 22 nt, Human
cauagaaaagaguagguaaugu

SEQ ID NO: 354010 - RNA, 22 nt, Human
uccuucaaagcuccuagugagc

SEQ ID NO: 354011 - RNA, 22 nt, Human
uguaccuuuuucugugcaugcu

SEQ ID NO: 354012 - RNA, 22 nt, Human
cauguuaaaauauacauucuga

SEQ ID NO: 354013 - RNA, 21 nt, Human
gggcuggacaugguggcucau

SEQ ID NO: 354014 - RNA, 22 nt, Human
ggguggaguagaaagaugaauu

SEQ ID NO: 354015 - RNA, 22 nt, Human
guacaaaguggaccugauagua

SEQ ID NO: 354016 - RNA, 22 nt, Human
ucagaggucccuagcaggagug

SEQ ID NO: 354017 - RNA, 17 nt, Human
uaaguccuaguuauuuu

SEQ ID NO: 354018 - RNA, 22 nt, Human
cuggccagguuuugaacaguug

SEQ ID NO: 354019 - RNA, 22 nt, Human
gaaaguuuauagguuauauaau

SEQ ID NO: 354020 - RNA, 22 nt, Human
uggaaggaaagguagcagagaa

SEQ ID NO: 354021 - RNA, 22 nt, Human
gcuggcagaagagcugguucaa

SEQ ID NO: 354022 - RNA, 22 nt, Human
accauguguuuuacacauggua

SEQ ID NO: 354023 - RNA, 22 nt, Human
uggccugggcaugaagcaucgu

SEQ ID NO: 354024 - RNA, 22 nt, Human
cauaucauaggucuuggauaau

SEQ ID NO: 354025 - RNA, 22 nt, Human
gaggccugguuuccagcauccu

SEQ ID NO: 354026 - RNA, 22 nt, Human
gccugcagauauauaggauggu

SEQ ID NO: 354027 - RNA, 22 nt, Human
ucagaaaagguagcugugacaa

SEQ ID NO: 354028 - RNA, 22 nt, Human
ccuguucaaguugcagggcugg

SEQ ID NO: 354029 - RNA, 22 nt, Human
ucagaaauacaaaacacuuacu

SEQ ID NO: 354030 - RNA, 23 nt, Human
ccucccaggcugcgagucccgag

SEQ ID NO: 354031 - RNA, 22 nt, Human
aggaggccccuccuggguugcu

SEQ ID NO: 354032 - RNA, 22 nt, Human
ucuuaaaccacaaaauucagag

SEQ ID NO: 354033 - RNA, 22 nt, Human
augggcagagcuggugggaggc

SEQ ID NO: 354034 - RNA, 18 nt, Human
ucugggcuucccgaggcu

SEQ ID NO: 354035 - RNA, 22 nt, Human
aaaucucaggccucuauuuacu

SEQ ID NO: 354036 - RNA, 22 nt, Human
aucaaaguccaucagaagguag

SEQ ID NO: 354037 - RNA, 22 nt, Human
uggauuaguuaagaaauguuag

SEQ ID NO: 354038 - RNA, 22 nt, Human
uggaggaaguggcuggccagaa

SEQ ID NO: 354039 - RNA, 22 nt, Human
ggagcugugcagugacuacaga

SEQ ID NO: 354040 - RNA, 22 nt, Human
ucuuugcaaaauacaacaaugg

SEQ ID NO: 354041 - RNA, 22 nt, Human
cacugccuccccaggcuccaca

SEQ ID NO: 354042 - RNA, 22 nt, Human
uugaauaauuaauuacacucag

SEQ ID NO: 354043 - RNA, 22 nt, Human
uggagagcaagucgcagacaug

SEQ ID NO: 354044 - RNA, 23 nt, Human
acacaaggguaacugccagccau

SEQ ID NO: 354045 - RNA, 22 nt, Human
gagggagucugugcaaagaauu

SEQ ID NO: 354046 - RNA, 22 nt, Human
ccagggaggguccuguggcuuc

SEQ ID NO: 354047 - RNA, 22 nt, Human
gaaauauucuugucuuguuuuc

SEQ ID NO: 354048 - RNA, 22 nt, Human
aagacauugucauuuuauaauu

SEQ ID NO: 354049 - RNA, 22 nt, Human
accaggagccauagagucaggc

SEQ ID NO: 354050 - RNA, 22 nt, Human
auuuauuaugggauuuggcuca

SEQ ID NO: 354051 - RNA, 22 nt, Human
caucagaagauggcucuggaaa

SEQ ID NO: 354052 - RNA, 22 nt, Human
ucuauacaaguuucacuuugac

SEQ ID NO: 354053 - RNA, 19 nt, Human
ugaggccaaggucacagau

SEQ ID NO: 354054 - RNA, 22 nt, Human
agggaagugaaugacagauauc

SEQ ID NO: 354055 - RNA, 22 nt, Human
uuucaguuguccuguuaauagc

SEQ ID NO: 354056 - RNA, 22 nt, Human
ugaagcagauggucuggucauu

SEQ ID NO: 354057 - RNA, 23 nt, Human
uauuacaauuggucuuauuaaga

SEQ ID NO: 354058 - RNA, 21 nt, Human
aggugggagaccauguagguc

SEQ ID NO: 354059 - RNA, 22 nt, Human
cuggcagcuuccuuugcaucug

SEQ ID NO: 354060 - RNA, 22 nt, Human
uuacuacugcuuuacuacuggg

SEQ ID NO: 354061 - RNA, 22 nt, Human
cagaggcucuuccucacugccc

SEQ ID NO: 354062 - RNA, 22 nt, Human
ugcagggcacacgcacgggugu

SEQ ID NO: 354063 - RNA, 22 nt, Human
cagcauggugccagugagucca

SEQ ID NO: 354064 - RNA, 22 nt, Human
ggcugccacgucgaggguccaa

SEQ ID NO: 354065 - RNA, 23 nt, Human
uccuggugacaugccugagcauc

SEQ ID NO: 354066 - RNA, 22 nt, Human
cucuggaauguuuacaugcccu

SEQ ID NO: 354067 - RNA, 22 nt, Human
agaugaagacucaggagcaggu

SEQ ID NO: 354068 - RNA, 22 nt, Human
agcagcaucuucuaaguaaggc

SEQ ID NO: 354069 - RNA, 19 nt, Human
guuucauuaagauaggaaa

SEQ ID NO: 354070 - RNA, 22 nt, Human
uauucugugugauauguaaaug

SEQ ID NO: 354071 - RNA, 22 nt, Human
caggcagccugcggucugcaca

SEQ ID NO: 354072 - RNA, 22 nt, Human
ugagaguauuuuggcauuauca

SEQ ID NO: 354073 - RNA, 22 nt, Human
aaugcuguaaagaugcuaucug

SEQ ID NO: 354074 - RNA, 22 nt, Human
gccaggcagcaggaagccagug

SEQ ID NO: 354075 - RNA, 22 nt, Human
uagauauaucugucauacuggu

SEQ ID NO: 354076 - RNA, 22 nt, Human
uagaaagugaagguuaauuaau

SEQ ID NO: 354077 - RNA, 22 nt, Human
uggcugagguaacuaugaauaa

SEQ ID NO: 354078 - RNA, 22 nt, Human
caggguugcaugcaucuguggg

SEQ ID NO: 354079 - RNA, 22 nt, Human
agcuuuaugggagcuuagauaa

SEQ ID NO: 354080 - RNA, 22 nt, Human
uucuuucccagaagauauguuu

SEQ ID NO: 354081 - RNA, 22 nt, Human
aaaguguggagauugaacuaaa

SEQ ID NO: 354082 - RNA, 20 nt, Human
ucuuauacagaaaacauuuu

SEQ ID NO: 354083 - RNA, 21 nt, Human
gccugcagaccccaccaggcu

SEQ ID NO: 354084 - RNA, 19 nt, Human
uucauucucuuauuguugu

SEQ ID NO: 354085 - RNA, 22 nt, Human
ugaaagcacaaguucuaacagg

SEQ ID NO: 354086 - RNA, 22 nt, Human
agugaccaaucaugguuagauu

SEQ ID NO: 354087 - RNA, 20 nt, Human
agagugagacuccaucucag

SEQ ID NO: 354088 - RNA, 22 nt, Human
aggcaguuucugggacagcaua

SEQ ID NO: 354089 - RNA, 22 nt, Human
gggcagguuggcaucccgggca

SEQ ID NO: 354090 - RNA, 22 nt, Human
cagcagagaaauuaaacuucug

SEQ ID NO: 354091 - RNA, 17 nt, Human
ccaggagagaugcuugu

SEQ ID NO: 354092 - RNA, 22 nt, Human
aacaguaaagacagaauuuauc

SEQ ID NO: 354093 - RNA, 22 nt, Human
aaguucaagucugcaucuuuuu

SEQ ID NO: 354094 - RNA, 22 nt, Human
cauuucaaggaccacccuggga

SEQ ID NO: 354095 - RNA, 22 nt, Human
gccuucccaagacgccugaguu

SEQ ID NO: 354096 - RNA, 22 nt, Human
ucucaggaaauaggauuugagu

SEQ ID NO: 354097 - RNA, 22 nt, Human
uuuccaaaggcuaaacucaguu

SEQ ID NO: 354098 - RNA, 22 nt, Human
aaggaaccauuugugugcaugg

SEQ ID NO: 354099 - RNA, 22 nt, Human
uuauccaaacuggugaaucauu

SEQ ID NO: 354100 - RNA, 22 nt, Human
gcagaggcaaucagguaugugg

SEQ ID NO: 354101 - RNA, 22 nt, Human
gauuauauaauggaagcucuug

SEQ ID NO: 354102 - RNA, 22 nt, Human
aggguggagggagucccugagc

SEQ ID NO: 354103 - RNA, 20 nt, Human
uauuuacaacuuagagccuc

SEQ ID NO: 354104 - RNA, 22 nt, Human
agggcugcccagugugagagcu

SEQ ID NO: 354105 - RNA, 22 nt, Human
auccacagucuuagccaucaaa

SEQ ID NO: 354106 - RNA, 22 nt, Human
uucuuugcccuuaaugaaauaa

SEQ ID NO: 354107 - RNA, 22 nt, Human
acuggcaguggcagcagaaaga

SEQ ID NO: 354108 - RNA, 22 nt, Human
uuugacaucuaagaauucuuac

SEQ ID NO: 354109 - RNA, 22 nt, Human
gcuggcuguguuccuucugcca

SEQ ID NO: 354110 - RNA, 22 nt, Human
cuugaaagucacaugcagcccu

SEQ ID NO: 354111 - RNA, 22 nt, Human
aguacuuugcacuuugcucaga

SEQ ID NO: 354112 - RNA, 22 nt, Human
ugcuucagaggaaaggcaaaag

SEQ ID NO: 354113 - RNA, 22 nt, Human
uggcuuuacugucauucuuaug

SEQ ID NO: 354114 - RNA, 22 nt, Human
ccugacucuggccaggccagcu

SEQ ID NO: 354115 - RNA, 22 nt, Human
uuccucagcuggccugauuggg

SEQ ID NO: 354116 - RNA, 22 nt, Human
gccugagcccaggugugcagag

SEQ ID NO: 354117 - RNA, 22 nt, Human
acauuguauaaugauuaucaca

SEQ ID NO: 354118 - RNA, 22 nt, Human
gcucuggaagcaucugagagga

SEQ ID NO: 354119 - RNA, 22 nt, Human
gauucugagcugguguuuuacg

SEQ ID NO: 354120 - RNA, 22 nt, Human
aaugcacaaaaauuguauguaa

SEQ ID NO: 354121 - RNA, 22 nt, Human
gcugucuggaggcucugaggga

SEQ ID NO: 354122 - RNA, 17 nt, Human
ugaaacaccaagacugu

SEQ ID NO: 354123 - RNA, 22 nt, Human
uguggccuccuguuccugggua

SEQ ID NO: 354124 - RNA, 22 nt, Human
gaggcucacuaggcauccuggg

SEQ ID NO: 354125 - RNA, 22 nt, Human
acagagccuccaggagugcugg

SEQ ID NO: 354126 - RNA, 22 nt, Human
aggcugagcaaagggccuuacc

SEQ ID NO: 354127 - RNA, 22 nt, Human
ccaggagacccagggaaggagc

SEQ ID NO: 354128 - RNA, 22 nt, Human
aagaguuaagcaacagauacca

SEQ ID NO: 354129 - RNA, 22 nt, Human
aggcagcagccacaaggccuga

SEQ ID NO: 354130 - RNA, 22 nt, Human
aagcagccuggacuugggcugg

SEQ ID NO: 354131 - RNA, 22 nt, Human
ucaggagcagcaugggugagag

SEQ ID NO: 354132 - RNA, 22 nt, Human
caucagcaggcaacacucuugg

SEQ ID NO: 354133 - RNA, 22 nt, Human
guggccugucagaagccguggg

SEQ ID NO: 354134 - RNA, 22 nt, Human
ccuggcagcagcacaugccuuc

SEQ ID NO: 354135 - RNA, 22 nt, Human
gagguagcaugcuggaagggac

SEQ ID NO: 354136 - RNA, 22 nt, Human
agggccugggccagcacccuuu

SEQ ID NO: 354137 - RNA, 22 nt, Human
ccugggcagggagaccaggcuc

SEQ ID NO: 354138 - RNA, 22 nt, Human
ggcaguggaggacccugugucu

SEQ ID NO: 354139 - RNA, 22 nt, Human
ucacugcagagaccucuaguca

SEQ ID NO: 354140 - RNA, 22 nt, Human
ggggcagagucuggacuguugu

SEQ ID NO: 354141 - RNA, 22 nt, Human
ugcuuaaaaugaugauuauuuu

SEQ ID NO: 354142 - RNA, 22 nt, Human
gcacugaaugcuuuuacuguaa

SEQ ID NO: 354143 - RNA, 22 nt, Human
ucuucucaguuucucuaggaug

SEQ ID NO: 354144 - RNA, 22 nt, Human
gcccacacaccagcucaggagg

SEQ ID NO: 354145 - RNA, 22 nt, Human
gccuguuggugacuuucuguug

SEQ ID NO: 354146 - RNA, 22 nt, Human
uaaccauauuuuccauuaaguu

SEQ ID NO: 354147 - RNA, 20 nt, Human
ggccuuggguuucgccuguu

SEQ ID NO: 354148 - RNA, 22 nt, Human
ccaggagcuggagggugcagug

SEQ ID NO: 354149 - RNA, 22 nt, Human
aaggcagcagugcacgacugau

SEQ ID NO: 354150 - RNA, 22 nt, Human
ugcuugagacacauaugaauuu

SEQ ID NO: 354151 - RNA, 22 nt, Human
cagggugcagugucgcugcuag

SEQ ID NO: 354152 - RNA, 22 nt, Human
cuuucucuguguuucacaugcu

SEQ ID NO: 354153 - RNA, 19 nt, Human
agacaaguuuccagaagcc

SEQ ID NO: 354154 - RNA, 22 nt, Human
caguccuuagucuggauggcuu

SEQ ID NO: 354155 - RNA, 22 nt, Human
ugcaucuuacguuuugaaaggg

SEQ ID NO: 354156 - RNA, 22 nt, Human
uauuauuaaauggcagaauuuu

SEQ ID NO: 354157 - RNA, 22 nt, Human
guuugcauguauuaagucaaua

SEQ ID NO: 354158 - RNA, 21 nt, Human
aagaaguuuggauuuuguccu

SEQ ID NO: 354159 - RNA, 22 nt, Human
gcucugcucuaacauuccugac

SEQ ID NO: 354160 - RNA, 22 nt, Human
cugacagucucauugauuugcu

SEQ ID NO: 354161 - RNA, 22 nt, Human
ugcagaagcugcaggucagugg

SEQ ID NO: 354162 - RNA, 22 nt, Human
uguagcauguaaauugguuauu

SEQ ID NO: 354163 - RNA, 22 nt, Human
uccucccugaguggggacagcu

SEQ ID NO: 354164 - RNA, 22 nt, Human
cagucaccuagacagaacuuac

SEQ ID NO: 354165 - RNA, 22 nt, Human
ucccugggcaucacguugcuuc

SEQ ID NO: 354166 - RNA, 22 nt, Human
ccagggugaggaggcucccacg

SEQ ID NO: 354167 - RNA, 22 nt, Human
cccagacuccucuggcuggugg

SEQ ID NO: 354168 - RNA, 22 nt, Human
caggaagagguaucaccgagca

SEQ ID NO: 354169 - RNA, 22 nt, Human
cagcccagcagggucuggcccu

SEQ ID NO: 354170 - RNA, 22 nt, Human
uggaggaauaacagcaaccuua

SEQ ID NO: 354171 - RNA, 22 nt, Human
uggccucucuaccaggcagccu

SEQ ID NO: 354172 - RNA, 22 nt, Human
uaagaacaguagaacaguaggu

SEQ ID NO: 354173 - RNA, 22 nt, Human
gggacagacccaugggccaggu

SEQ ID NO: 354174 - RNA, 22 nt, Human
uuagccauugucagcacauggc

SEQ ID NO: 354175 - RNA, 22 nt, Human
ccacaaguuucagcacccagag

SEQ ID NO: 354176 - RNA, 20 nt, Human
uggcccuguuuucuccaggc

SEQ ID NO: 354177 - RNA, 22 nt, Human
agcugguucagaaauuagaugg

SEQ ID NO: 354178 - RNA, 22 nt, Human
gcagggacaucuuugucuagua

SEQ ID NO: 354179 - RNA, 22 nt, Human
cugggcugcaucaaagaggcau

SEQ ID NO: 354180 - RNA, 22 nt, Human
acaugcuuugcacuuacaucau

SEQ ID NO: 354181 - RNA, 22 nt, Human
ggauuucuuccuuccucagaag

SEQ ID NO: 354182 - RNA, 22 nt, Human
uggccuggccacauccagcagg

SEQ ID NO: 354183 - RNA, 22 nt, Human
ucagcugagcuccagcucauag

SEQ ID NO: 354184 - RNA, 22 nt, Human
aaaugcagaucccugaaucuca

SEQ ID NO: 354185 - RNA, 22 nt, Human
ugcagcugaggccagcuaugcc

SEQ ID NO: 354186 - RNA, 22 nt, Human
agagugaaguucaucgugcagc

SEQ ID NO: 354187 - RNA, 22 nt, Human
caugauuuugucuuguguuaau

SEQ ID NO: 354188 - RNA, 18 nt, Human
ggccugaggauuucagca

SEQ ID NO: 354189 - RNA, 22 nt, Human
aucuggcuuaccuagggugccu

SEQ ID NO: 354190 - RNA, 22 nt, Human
caaauguguagagcuuuugggg

SEQ ID NO: 354191 - RNA, 22 nt, Human
cucugagcuccuggaagcgugc

SEQ ID NO: 354192 - RNA, 22 nt, Human
aacaacugaaaagcuuuuucug

SEQ ID NO: 354193 - RNA, 22 nt, Human
aagcuuuagagaugaguuccuu

SEQ ID NO: 354194 - RNA, 22 nt, Human
aguacauuuauuaaugguaaaa

SEQ ID NO: 354195 - RNA, 22 nt, Human
acacagccaggguaguaaggcu

SEQ ID NO: 354196 - RNA, 22 nt, Human
cugagcugguggaagcaugcag

SEQ ID NO: 354197 - RNA, 22 nt, Human
aagucuggaagucucaguuuuc

SEQ ID NO: 354198 - RNA, 22 nt, Human
cccaggagguggaguucacagu

SEQ ID NO: 354199 - RNA, 19 nt, Human
gcaggcaguggcauucgga

SEQ ID NO: 354200 - RNA, 20 nt, Human
accuugaacccgccagccau

SEQ ID NO: 354201 - RNA, 22 nt, Human
acaauucuggguauuuauauag

SEQ ID NO: 354202 - RNA, 22 nt, Human
aaugaacaucaaaugccuacca

SEQ ID NO: 354203 - RNA, 22 nt, Human
aagauuucucuccuggaaagca

SEQ ID NO: 354204 - RNA, 22 nt, Human
gucagugucuuaacagagauua

SEQ ID NO: 354205 - RNA, 22 nt, Human
ccugccugucccucaguccaca

SEQ ID NO: 354206 - RNA, 17 nt, Human
ugaggccugcaucagug

SEQ ID NO: 354207 - RNA, 22 nt, Human
auagacauagccguaauuuauu

SEQ ID NO: 354208 - RNA, 22 nt, Human
ucugucacccagagugcagugg

SEQ ID NO: 354209 - RNA, 22 nt, Human
auuauguagguuaggugguugu

SEQ ID NO: 354210 - RNA, 22 nt, Human
uauucauaguaaacaaaagugg

SEQ ID NO: 354211 - RNA, 22 nt, Human
ugcagccaucgcagagucugua

SEQ ID NO: 354212 - RNA, 22 nt, Human
caggccuggagugcaauggcac

SEQ ID NO: 354213 - RNA, 22 nt, Human
gcagagaccccgcagugaggcc

SEQ ID NO: 354214 - RNA, 22 nt, Human
gggcugccaagccugccugccu

SEQ ID NO: 354215 - RNA, 22 nt, Human
aggagaggguggcauuaaguuu

SEQ ID NO: 354216 - RNA, 22 nt, Human
auucauaaguaaaugauuaccu

SEQ ID NO: 354217 - RNA, 22 nt, Human
uuaguaaauaaagucuacuuuc

SEQ ID NO: 354218 - RNA, 20 nt, Human
agggcagcuugaggagccgg

SEQ ID NO: 354219 - RNA, 18 nt, Human
acauuucuccuucugacc

SEQ ID NO: 354220 - RNA, 22 nt, Human
aagcagggcuuuaagcgguuuu

SEQ ID NO: 354221 - RNA, 20 nt, Human
ugccaugguaacagagugug

SEQ ID NO: 354222 - RNA, 22 nt, Human
caguguggugugcacagcuuag

SEQ ID NO: 354223 - RNA, 22 nt, Human
cagagcaguccuugucaaucag

SEQ ID NO: 354224 - RNA, 22 nt, Human
caggguggcacucagcgcaucu

SEQ ID NO: 354225 - RNA, 22 nt, Human
ccagcuuucugggugguuucug

SEQ ID NO: 354226 - RNA, 22 nt, Human
guucuucaguaaaauuaaaugu

SEQ ID NO: 354227 - RNA, 22 nt, Human
cacaaaugugcagaaaugugag

SEQ ID NO: 354228 - RNA, 22 nt, Human
ccucucauagucuguauccuuu

SEQ ID NO: 354229 - RNA, 22 nt, Human
acauguggucaaucuguguagg

SEQ ID NO: 354230 - RNA, 22 nt, Human
ggcuggccuguguggccgccac

SEQ ID NO: 354231 - RNA, 21 nt, Human
ggccucugucauccugggaag

SEQ ID NO: 354232 - RNA, 22 nt, Human
cugagcuuccaguuccuccagg

SEQ ID NO: 354233 - RNA, 19 nt, Human
aacuggauaauggccacau

SEQ ID NO: 354234 - RNA, 22 nt, Human
uagcacauuguugaccagaagg

SEQ ID NO: 354235 - RNA, 22 nt, Human
ucucaagaucucaagauggccc

SEQ ID NO: 354236 - RNA, 22 nt, Human
auggcuuaugguaaauauuucu

SEQ ID NO: 354237 - RNA, 22 nt, Human
cucagagaagucuuugcuaaac

SEQ ID NO: 354238 - RNA, 22 nt, Human
uggccagguguggguucucaga

SEQ ID NO: 354239 - RNA, 22 nt, Human
auuaggcagacaacguagccgg

SEQ ID NO: 354240 - RNA, 20 nt, Human
acugcuucuuucucugaccu

SEQ ID NO: 354241 - RNA, 18 nt, Human
ggagagugagaucaaaca

SEQ ID NO: 354242 - RNA, 21 nt, Human
gccugccugcgugacccucuu

SEQ ID NO: 354243 - RNA, 22 nt, Human
ugaaauauuuagagaguaaguu

SEQ ID NO: 354244 - RNA, 22 nt, Human
gggcuaggcuuggccagcacug

SEQ ID NO: 354245 - RNA, 22 nt, Human
gggcucucaaggcagggcccca

SEQ ID NO: 354246 - RNA, 22 nt, Human
gagggcugugaaggagcggguu

SEQ ID NO: 354247 - RNA, 22 nt, Human
ggaggccaggaaggcucggaga

SEQ ID NO: 354248 - RNA, 22 nt, Human
ccucucuguguggccucuccau

SEQ ID NO: 354249 - RNA, 22 nt, Human
gcagcagcccagggcucucaga

SEQ ID NO: 354250 - RNA, 22 nt, Human
cagggaggcugucuuaugccug

SEQ ID NO: 354251 - RNA, 22 nt, Human
uaagagaauguuguggcuaggu

SEQ ID NO: 354252 - RNA, 22 nt, Human
ccagcccugccagagagagcug

SEQ ID NO: 354253 - RNA, 22 nt, Human
agaagcagacucugaggcaagg

SEQ ID NO: 354254 - RNA, 22 nt, Human
ucaaguguaguggugucagguc

SEQ ID NO: 354255 - RNA, 22 nt, Human
ggcucagguuaccagucccucc

SEQ ID NO: 354256 - RNA, 23 nt, Human
cugcuguuuucuguaccugaagc

SEQ ID NO: 354257 - RNA, 22 nt, Human
gagcugcuucugugugccgggu

SEQ ID NO: 354258 - RNA, 22 nt, Human
uacaugcaugucacagaaugaa

SEQ ID NO: 354259 - RNA, 22 nt, Human
ugaaggaaugagggaguggguc

SEQ ID NO: 354260 - RNA, 22 nt, Human
ggcuucaccaggugcaugcaug

SEQ ID NO: 354261 - RNA, 22 nt, Human
ucugggugaugaaaugcacugu

SEQ ID NO: 354262 - RNA, 22 nt, Human
aggcagguuucccggcugucaa

SEQ ID NO: 354263 - RNA, 22 nt, Human
cccugcagaucagugagaacuu

SEQ ID NO: 354264 - RNA, 22 nt, Human
uaucuuguaauagguccacuug

SEQ ID NO: 354265 - RNA, 22 nt, Human
gagcagcugguaggugaaccca

SEQ ID NO: 354266 - RNA, 22 nt, Human
gugcagauccugauugcaguuc

SEQ ID NO: 354267 - RNA, 22 nt, Human
gccugccuuuuggaggcacauu

SEQ ID NO: 354268 - RNA, 22 nt, Human
caguauuuguucccuaucaaug

SEQ ID NO: 354269 - RNA, 22 nt, Human
gaaggcuggaaggcaaguagga

SEQ ID NO: 354270 - RNA, 22 nt, Human
ugaggcucuccaagcagaugag

SEQ ID NO: 354271 - RNA, 22 nt, Human
acauuguagacuuuucauaugu

SEQ ID NO: 354272 - RNA, 22 nt, Human
ucugaaagaagggcagucuuuu

SEQ ID NO: 354273 - RNA, 22 nt, Human
aaaaaugcugugguagcugugu

SEQ ID NO: 354274 - RNA, 22 nt, Human
caccuagggcaucccugcccca

SEQ ID NO: 354275 - RNA, 22 nt, Human
ucaucaguuuagaaaaaauaug

SEQ ID NO: 354276 - RNA, 22 nt, Human
aaaugaaaugagugccuggagg

SEQ ID NO: 354277 - RNA, 22 nt, Human
acagucucuccacacugcaggg

SEQ ID NO: 354278 - RNA, 22 nt, Human
ggaccugaacauaaaacgaggc

SEQ ID NO: 354279 - RNA, 22 nt, Human
gugcagggcuggcaccggaggc

SEQ ID NO: 354280 - RNA, 22 nt, Human
cuugccuguggcuaguuggcuc

SEQ ID NO: 354281 - RNA, 22 nt, Human
cagagacagggcagggagugug

SEQ ID NO: 354282 - RNA, 22 nt, Human
aucauuacuccuguaaaauugu

SEQ ID NO: 354283 - RNA, 22 nt, Human
uuccauaacugaccgaaugcau

SEQ ID NO: 354284 - RNA, 23 nt, Human
ugcauuauccucucugaagacca

SEQ ID NO: 354285 - RNA, 22 nt, Human
acuguucauccuuuuugaacaa

SEQ ID NO: 354286 - RNA, 22 nt, Human
uggcccuguggaggucagugag

SEQ ID NO: 354287 - RNA, 22 nt, Human
gcagccacuuugcaaccaagag

SEQ ID NO: 354288 - RNA, 22 nt, Human
auggcccaggccuccuguggcu

SEQ ID NO: 354289 - RNA, 22 nt, Human
gggggcucugacucccucagcu

SEQ ID NO: 354290 - RNA, 22 nt, Human
uagcugucagcaaucaaguggu

SEQ ID NO: 354291 - RNA, 18 nt, Human
ugaauuaguuugugguuu

SEQ ID NO: 354292 - RNA, 22 nt, Human
cagaggcacaagaaagcaaggc

SEQ ID NO: 354293 - RNA, 22 nt, Human
aaggagaguacaggaguuggua

SEQ ID NO: 354294 - RNA, 22 nt, Human
gcugaagcugcagcaggaggaa

SEQ ID NO: 354295 - RNA, 22 nt, Human
ucucuuucuauugcaccaugcu

SEQ ID NO: 354296 - RNA, 22 nt, Human
uggcauuuggcuuacuuauguu

SEQ ID NO: 354297 - RNA, 22 nt, Human
caggaggccaacugugggacuu

SEQ ID NO: 354298 - RNA, 22 nt, Human
uaucagaaacucuggggcaggg

SEQ ID NO: 354299 - RNA, 22 nt, Human
uuucuucugagaucagggagaa

SEQ ID NO: 354300 - RNA, 22 nt, Human
ucgccagggaugcuguaaggaa

SEQ ID NO: 354301 - RNA, 22 nt, Human
acaauucugaugguuucccagu

SEQ ID NO: 354302 - RNA, 22 nt, Human
uggggagugaugccucggauaa

SEQ ID NO: 354303 - RNA, 22 nt, Human
ugaggcagguggauuacaaggu

SEQ ID NO: 354304 - RNA, 22 nt, Human
auuacagaaugcaguuccuuau

SEQ ID NO: 354305 - RNA, 23 nt, Human
ggacagggcccugcccuauggcc

SEQ ID NO: 354306 - RNA, 19 nt, Human
uccaggcauccuucaggcu

SEQ ID NO: 354307 - RNA, 22 nt, Human
uuucaguguaagguuuccagga

SEQ ID NO: 354308 - RNA, 22 nt, Human
ccuggaucgaugccgagggaaa

SEQ ID NO: 354309 - RNA, 22 nt, Human
uacauguaggugacauuuuaau

SEQ ID NO: 354310 - RNA, 22 nt, Human
ucugcagcuucuugccagagag

SEQ ID NO: 354311 - RNA, 22 nt, Human
ccugggaggcuguuuccagccu

SEQ ID NO: 354312 - RNA, 22 nt, Human
cagggcagggagcuuagaauga

SEQ ID NO: 354313 - RNA, 22 nt, Human
ccucuucuagguuucagccugc

SEQ ID NO: 354314 - RNA, 22 nt, Human
ccuuugggugaauuccucucuu

SEQ ID NO: 354315 - RNA, 22 nt, Human
cucuguagaaacagggcagaag

SEQ ID NO: 354316 - RNA, 22 nt, Human
uagggcaguuauaacauuagug

SEQ ID NO: 354317 - RNA, 22 nt, Human
caaugauucugcaacugugugc

SEQ ID NO: 354318 - RNA, 22 nt, Human
ucaugccacuuacaaaauaaug

SEQ ID NO: 354319 - RNA, 22 nt, Human
cugagccagggccacacaugga

SEQ ID NO: 354320 - RNA, 22 nt, Human
cucuggccagagccugcgggaa

SEQ ID NO: 354321 - RNA, 22 nt, Human
agguggcaggaggucagagaaa

SEQ ID NO: 354322 - RNA, 22 nt, Human
ugcuuggccuacuuguccuuug

SEQ ID NO: 354323 - RNA, 22 nt, Human
cugcccugggauggucugugcg

SEQ ID NO: 354324 - RNA, 22 nt, Human
uccucaggagagcuccuaugcc

SEQ ID NO: 354325 - RNA, 21 nt, Human
gaguggaacgcucuucacacc

SEQ ID NO: 354326 - RNA, 22 nt, Human
cuuuccaacucuagugaaauuu

SEQ ID NO: 354327 - RNA, 22 nt, Human
aaguggagccagggaaacugaa

SEQ ID NO: 354328 - RNA, 22 nt, Human
aggcucugguuggcaaguaaag

SEQ ID NO: 354329 - RNA, 19 nt, Human
gugaggauacugcucagag

SEQ ID NO: 354330 - RNA, 17 nt, Human
acacagggagagggagc

SEQ ID NO: 354331 - RNA, 22 nt, Human
ccuuggagcggucagcacuggu

SEQ ID NO: 354332 - RNA, 22 nt, Human
aagugagugguaaggagcaugg

SEQ ID NO: 354333 - RNA, 22 nt, Human
uccucuggauauaagccucacc

SEQ ID NO: 354334 - RNA, 22 nt, Human
uacaggaaguaaguaaugaaau

SEQ ID NO: 354335 - RNA, 23 nt, Human
cugcccugaucuugaucuauugu

SEQ ID NO: 354336 - RNA, 22 nt, Human
uaaguuuuaagcaaucugauaa

SEQ ID NO: 354337 - RNA, 22 nt, Human
auacaacagaaaaugauuauuc

SEQ ID NO: 354338 - RNA, 22 nt, Human
ucccagaggacuguuggugcua

SEQ ID NO: 354339 - RNA, 22 nt, Human
cuccaguggcaaguccgggcgg

SEQ ID NO: 354340 - RNA, 22 nt, Human
gagcagagacaguacaacuggc

SEQ ID NO: 354341 - RNA, 22 nt, Human
gcuguggaugcuauggaucauc

SEQ ID NO: 354342 - RNA, 22 nt, Human
ucaguuuucucaucuguaauuu

SEQ ID NO: 354343 - RNA, 22 nt, Human
acagacauuuucuguauugccu

SEQ ID NO: 354344 - RNA, 22 nt, Human
ggcugcagaggcgaucugaggu

SEQ ID NO: 354345 - RNA, 22 nt, Human
aucuagauuagguauaagagcu

SEQ ID NO: 354346 - RNA, 22 nt, Human
gcucugcuguguuuguucagca

SEQ ID NO: 354347 - RNA, 23 nt, Human
uaugaacugcauugcuggugugu

SEQ ID NO: 354348 - RNA, 22 nt, Human
ucccuggagauaacuucuggga

SEQ ID NO: 354349 - RNA, 22 nt, Human
gacucguucauaguuccaauuu

SEQ ID NO: 354350 - RNA, 20 nt, Human
agcugguuaucuuaauucuu

SEQ ID NO: 354351 - RNA, 22 nt, Human
guguuuccucuagaagccaugg

SEQ ID NO: 354352 - RNA, 22 nt, Human
gcacggcuaauuuuuguauuuu

SEQ ID NO: 354353 - RNA, 22 nt, Human
auauuugucaauucacuguuca

SEQ ID NO: 354354 - RNA, 22 nt, Human
agcagcugcagagggcuccccc

SEQ ID NO: 354355 - RNA, 22 nt, Human
uaaugucaaggugauagauuug

SEQ ID NO: 354356 - RNA, 22 nt, Human
ugcccugugugugcaagcacug

SEQ ID NO: 354357 - RNA, 22 nt, Human
aagcagaugggacuccaaggca

SEQ ID NO: 354358 - RNA, 22 nt, Human
ggggcacacuuuugguagauau

SEQ ID NO: 354359 - RNA, 22 nt, Human
uggcucuggggacaguaagucc

SEQ ID NO: 354360 - RNA, 21 nt, Human
aaaguucaugcuuuaauauuc

SEQ ID NO: 354361 - RNA, 21 nt, Human
aaacugaccuugccugagaca

SEQ ID NO: 354362 - RNA, 21 nt, Human
gcucccuggcugugugaccug

SEQ ID NO: 354363 - RNA, 22 nt, Human
aggugcuuggcucgugcacaca

SEQ ID NO: 354364 - RNA, 22 nt, Human
gaaggcugaguggguacggagg

SEQ ID NO: 354365 - RNA, 22 nt, Human
uuauuuaauuuucucacucaga

SEQ ID NO: 354366 - RNA, 22 nt, Human
aguuacagugaccauuuauuua

SEQ ID NO: 354367 - RNA, 22 nt, Human
uggagcauauucuggagcuugg

SEQ ID NO: 354368 - RNA, 23 nt, Human
acagugugguggacaaggagcag

SEQ ID NO: 354369 - RNA, 22 nt, Human
uaucagaaaugccuuaaauugg

SEQ ID NO: 354370 - RNA, 22 nt, Human
agguggggugagcugcagacua

SEQ ID NO: 354371 - RNA, 22 nt, Human
ugaggcagcauucuucaagaca

SEQ ID NO: 354372 - RNA, 22 nt, Human
agucucugcacaguaagaagca

SEQ ID NO: 354373 - RNA, 22 nt, Human
ggugaaggucagagcaggaaaa

SEQ ID NO: 354374 - RNA, 22 nt, Human
cuggcucagacagcugugcagu

SEQ ID NO: 354375 - RNA, 22 nt, Human
uuugaaagaaaccagugaguga

SEQ ID NO: 354376 - RNA, 22 nt, Human
uggcuuccaaaggaaugggccu

SEQ ID NO: 354377 - RNA, 18 nt, Human
ccucagggagagagacgc

SEQ ID NO: 354378 - RNA, 22 nt, Human
ucagggcaaagggcagaguuug

SEQ ID NO: 354379 - RNA, 22 nt, Human
uccaguggugguuugaagggca

SEQ ID NO: 354380 - RNA, 22 nt, Human
cagguggguguaugaaugcaaa

SEQ ID NO: 354381 - RNA, 22 nt, Human
cugcaggaauucaaagugagcu

SEQ ID NO: 354382 - RNA, 22 nt, Human
ucaacuuuaguguagcuauuua

SEQ ID NO: 354383 - RNA, 22 nt, Human
caggcaccccaggugagcacug

SEQ ID NO: 354384 - RNA, 22 nt, Human
agacaaaggauuaaugaugaug

SEQ ID NO: 354385 - RNA, 22 nt, Human
gaggcugaggguuagagaguca

SEQ ID NO: 354386 - RNA, 22 nt, Human
agggccuggaacugugggcagg

SEQ ID NO: 354387 - RNA, 22 nt, Human
uuagggaaggcugcugucagcu

SEQ ID NO: 354388 - RNA, 22 nt, Human
cuccagggagcuuggaaagacc

SEQ ID NO: 354389 - RNA, 22 nt, Human
aggcagggugaugauaaugauu

SEQ ID NO: 354390 - RNA, 22 nt, Human
uguuccaagcugcuggauaagc

SEQ ID NO: 354391 - RNA, 22 nt, Human
gggcugggauugcuugcuguga

SEQ ID NO: 354392 - RNA, 22 nt, Human
auacuuucugaccaauuaauug

SEQ ID NO: 354393 - RNA, 22 nt, Human
aggcaauccccugaggauacuu

SEQ ID NO: 354394 - RNA, 22 nt, Human
ugcuuaaacauacuauuuauau

SEQ ID NO: 354395 - RNA, 22 nt, Human
gaaggccugugguagugagacg

SEQ ID NO: 354396 - RNA, 22 nt, Human
gcucugaggcugugaggugcug

SEQ ID NO: 354397 - RNA, 22 nt, Human
ccagcuuuagguugccugccag

SEQ ID NO: 354398 - RNA, 22 nt, Human
cugccagcagaggccagcgcug

SEQ ID NO: 354399 - RNA, 22 nt, Human
ucuggccugaaaguccaugcuu

SEQ ID NO: 354400 - RNA, 23 nt, Human
uggagcugggcucagacccuggg

SEQ ID NO: 354401 - RNA, 22 nt, Human
uucagaaguagcuaagcaguca

SEQ ID NO: 354402 - RNA, 22 nt, Human
ucagaaaagagaaaaucuuaua

SEQ ID NO: 354403 - RNA, 22 nt, Human
gaaaggagaggguuaaggagcu

SEQ ID NO: 354404 - RNA, 22 nt, Human
uuagcucagaaaauuuaaacuu

SEQ ID NO: 354405 - RNA, 22 nt, Human
agacugaauaacaagcaaauaa

SEQ ID NO: 354406 - RNA, 22 nt, Human
augaggcagauguugcaugagg

SEQ ID NO: 354407 - RNA, 22 nt, Human
acauuuguaugcguuuuuacug

SEQ ID NO: 354408 - RNA, 22 nt, Human
ucccaggauguuggcggcaggu

SEQ ID NO: 354409 - RNA, 22 nt, Human
ccuuggcccuagccucaggcaa

SEQ ID NO: 354410 - RNA, 22 nt, Human
cucuugggagugcucuggagaa

SEQ ID NO: 354411 - RNA, 22 nt, Human
cugcagcugucucuacugggca

SEQ ID NO: 354412 - RNA, 22 nt, Human
uuugacauuggcuuauucuguu

SEQ ID NO: 354413 - RNA, 22 nt, Human
agcagcagaagggagacccagg

SEQ ID NO: 354414 - RNA, 22 nt, Human
aucugacaaccuauugacuuga

SEQ ID NO: 354415 - RNA, 22 nt, Human
cagcacagggacaauagcagau

SEQ ID NO: 354416 - RNA, 22 nt, Human
ugcucuguauucuauggcaguu

SEQ ID NO: 354417 - RNA, 19 nt, Human
uuugaauccagcugguaac

SEQ ID NO: 354418 - RNA, 22 nt, Human
aggcuggcuuggcucuccugug

SEQ ID NO: 354419 - RNA, 22 nt, Human
ucccuggacaacagacuucacu

SEQ ID NO: 354420 - RNA, 22 nt, Human
cccugcagccuugcaugccuuc

SEQ ID NO: 354421 - RNA, 22 nt, Human
ugucaaaaauaagagagauugu

SEQ ID NO: 354422 - RNA, 22 nt, Human
aggccagaaauuuggaguaugu

SEQ ID NO: 354423 - RNA, 22 nt, Human
ugcaggagcagagauggcugga

SEQ ID NO: 354424 - RNA, 22 nt, Human
gggagccacaguuuauagugau

SEQ ID NO: 354425 - RNA, 22 nt, Human
ucuggcagggguucugcacuug

SEQ ID NO: 354426 - RNA, 22 nt, Human
caggagacaauggcuguggggc

SEQ ID NO: 354427 - RNA, 22 nt, Human
ugcuauugugaacagugccaca

SEQ ID NO: 354428 - RNA, 22 nt, Human
caaagguauucucauuuuggaa

SEQ ID NO: 354429 - RNA, 22 nt, Human
ucuuuaauucagcaugaugcgg

SEQ ID NO: 354430 - RNA, 19 nt, Human
cacaucagcagggcugugg

SEQ ID NO: 354431 - RNA, 22 nt, Human
aaguccagacuccuuugcgugg

SEQ ID NO: 354432 - RNA, 22 nt, Human
gauggcuucagucuccuugggu

SEQ ID NO: 354433 - RNA, 22 nt, Human
ccugggagagucuguggucucc

SEQ ID NO: 354434 - RNA, 20 nt, Human
ugcuccaucuaaagugauua

SEQ ID NO: 354435 - RNA, 22 nt, Human
cagagccugccucuggcugugg

SEQ ID NO: 354436 - RNA, 22 nt, Human
aaauuucaguuggaaugagcuc

SEQ ID NO: 354437 - RNA, 22 nt, Human
agaagccauagucugggaggca

SEQ ID NO: 354438 - RNA, 22 nt, Human
cuggagcccugaaugggcagga

SEQ ID NO: 354439 - RNA, 22 nt, Human
cagaaggcaaacaaaaggauuu

SEQ ID NO: 354440 - RNA, 22 nt, Human
gucaggauuuacaaacuucagu

SEQ ID NO: 354441 - RNA, 22 nt, Human
caggcuggagugaguguagugg

SEQ ID NO: 354442 - RNA, 22 nt, Human
ucaggacagccagggugcagac

SEQ ID NO: 354443 - RNA, 22 nt, Human
uggccugauuuugcuaagagaa

SEQ ID NO: 354444 - RNA, 22 nt, Human
uuuauguuugacaaugaucugg

SEQ ID NO: 354445 - RNA, 22 nt, Human
cagagcucuauguucauggagg

SEQ ID NO: 354446 - RNA, 22 nt, Human
cucagggcaguauggcugagag

SEQ ID NO: 354447 - RNA, 22 nt, Human
ugcacuggggucccagcgcacg

SEQ ID NO: 354448 - RNA, 22 nt, Human
uguucaauccccagguccugaa

SEQ ID NO: 354449 - RNA, 22 nt, Human
ccagccuggacugggucuugug

SEQ ID NO: 354450 - RNA, 22 nt, Human
gucccuggaucugggacagcug

SEQ ID NO: 354451 - RNA, 22 nt, Human
ggcucagguuuaaagugcuuua

SEQ ID NO: 354452 - RNA, 21 nt, Human
ugugucacuaacuagaggcua

SEQ ID NO: 354453 - RNA, 22 nt, Human
acccugagucagacagccugac

SEQ ID NO: 354454 - RNA, 22 nt, Human
augauuucuauauaaacuuaaa

SEQ ID NO: 354455 - RNA, 22 nt, Human
aaagauuucagaagccugugcc

SEQ ID NO: 354456 - RNA, 18 nt, Human
uggagccauugccaccau

SEQ ID NO: 354457 - RNA, 22 nt, Human
caaaggagguaaugggugugag

SEQ ID NO: 354458 - RNA, 23 nt, Human
ucagggacaugaugugucauauc

SEQ ID NO: 354459 - RNA, 22 nt, Human
accacccucagcagagcugaaa

SEQ ID NO: 354460 - RNA, 22 nt, Human
gagaggcaggcgcugcaauggu

SEQ ID NO: 354461 - RNA, 22 nt, Human
agggcugaccuaagcuccacuu

SEQ ID NO: 354462 - RNA, 22 nt, Human
gggagggaggugaugcuuggcu

SEQ ID NO: 354463 - RNA, 22 nt, Human
gaaugaaaaccuuggcucaaau

SEQ ID NO: 354464 - RNA, 22 nt, Human
gugguaauagagcuccaaacua

SEQ ID NO: 354465 - RNA, 19 nt, Human
aaaauugcguauuuugagg

SEQ ID NO: 354466 - RNA, 22 nt, Human
agggcucuguccccagaggccc

SEQ ID NO: 354467 - RNA, 22 nt, Human
aaggccaucuacuuacggaauu

SEQ ID NO: 354468 - RNA, 22 nt, Human
guauucauauuaaacauaucaa

SEQ ID NO: 354469 - RNA, 22 nt, Human
ggcugcuugcuguuucuuggau

SEQ ID NO: 354470 - RNA, 22 nt, Human
uggcagcacuugaacuugagcc

SEQ ID NO: 354471 - RNA, 22 nt, Human
cugggccaucagaggggcugga

SEQ ID NO: 354472 - RNA, 20 nt, Human
ucugucucugagcuagacuu

SEQ ID NO: 354473 - RNA, 22 nt, Human
ucauaauacaaagaguucugca

SEQ ID NO: 354474 - RNA, 22 nt, Human
agaguguuauuugcucuguauu

SEQ ID NO: 354475 - RNA, 22 nt, Human
uuugcuauuuuucugugcagcu

SEQ ID NO: 354476 - RNA, 22 nt, Human
agcuagccuaggcagagugcau

SEQ ID NO: 354477 - RNA, 22 nt, Human
aggcagccaaucagaggcugac

SEQ ID NO: 354478 - RNA, 23 nt, Human
gccugggacugguagugugaccu

SEQ ID NO: 354479 - RNA, 22 nt, Human
auaaagucauuaugaagaucua

SEQ ID NO: 354480 - RNA, 22 nt, Human
ugaauaauccacagucauucau

SEQ ID NO: 354481 - RNA, 22 nt, Human
ucccagccuuucuuuucugcug

SEQ ID NO: 354482 - RNA, 22 nt, Human
uggcagcaaguucuugggaggu

SEQ ID NO: 354483 - RNA, 22 nt, Human
ccagcagccaccuucucgaaau

SEQ ID NO: 354484 - RNA, 22 nt, Human
ggaggaguguggggcacucugc

SEQ ID NO: 354485 - RNA, 22 nt, Human
cacaugcaucugucauguuugg

SEQ ID NO: 354486 - RNA, 19 nt, Human
uugcauuguaguuggacug

SEQ ID NO: 354487 - RNA, 22 nt, Human
aggagcugggcugcugcuggga

SEQ ID NO: 354488 - RNA, 22 nt, Human
agccacagcccacaggacucuu

SEQ ID NO: 354489 - RNA, 22 nt, Human
gagcuuuaagggauaaaaugau

SEQ ID NO: 354490 - RNA, 22 nt, Human
ugaaggccuaacuuccagugcu

SEQ ID NO: 354491 - RNA, 22 nt, Human
ugggacagggaaucugaucccc

SEQ ID NO: 354492 - RNA, 22 nt, Human
aaauuagucgguuuaggaauuu

SEQ ID NO: 354493 - RNA, 22 nt, Human
caggagaaacauaauuuucugg

SEQ ID NO: 354494 - RNA, 22 nt, Human
ggagccuggcaaugcugcgucc

SEQ ID NO: 354495 - RNA, 22 nt, Human
aggcccaguuauccuacuuguu

SEQ ID NO: 354496 - RNA, 20 nt, Human
ccagucccugagcaccaggg

SEQ ID NO: 354497 - RNA, 19 nt, Human
ccugggaggcggagguugc

SEQ ID NO: 354498 - RNA, 22 nt, Human
gucuucaacaauaacuaccacu

SEQ ID NO: 354499 - RNA, 21 nt, Human
cccaggagaagaaaagaugca

SEQ ID NO: 354500 - RNA, 22 nt, Human
agagugggccucugagucccag

SEQ ID NO: 354501 - RNA, 22 nt, Human
gaggcagcugggcuggugguuu

SEQ ID NO: 354502 - RNA, 22 nt, Human
cacuguuuuauuccaacauagg

SEQ ID NO: 354503 - RNA, 22 nt, Human
caaauucucuuacuguuugaca

SEQ ID NO: 354504 - RNA, 22 nt, Human
cagcauuggguuaccuuuguuu

SEQ ID NO: 354505 - RNA, 22 nt, Human
gaaguccugguccucucauuca

SEQ ID NO: 354506 - RNA, 22 nt, Human
gcuguccucugaucucuggagg

SEQ ID NO: 354507 - RNA, 22 nt, Human
gccugagaguugaaguucagug

SEQ ID NO: 354508 - RNA, 21 nt, Human
cacuggaauuuucugugacau

SEQ ID NO: 354509 - RNA, 18 nt, Human
cccagcuggugggucagu

SEQ ID NO: 354510 - RNA, 22 nt, Human
accucugcaacccuggaauggg

SEQ ID NO: 354511 - RNA, 22 nt, Human
agggacugagcuaggaucuagu

SEQ ID NO: 354512 - RNA, 22 nt, Human
augaaaaguucgaucuagaagg

SEQ ID NO: 354513 - RNA, 22 nt, Human
uucagggagagcgggacgggug

SEQ ID NO: 354514 - RNA, 22 nt, Human
uaguaugggaagaacuuuguag

SEQ ID NO: 354515 - RNA, 22 nt, Human
ugugucaauuuucauuccuacu

SEQ ID NO: 354516 - RNA, 22 nt, Human
cuuuacauccuguuucccguuu

SEQ ID NO: 354517 - RNA, 22 nt, Human
ugcugggcuugaaagcugcuaa

SEQ ID NO: 354518 - RNA, 22 nt, Human
ugaagcuuuccuguggucagga

SEQ ID NO: 354519 - RNA, 22 nt, Human
cugcugugagcacuccagccug

SEQ ID NO: 354520 - RNA, 18 nt, Human
gagacacaagggccugga

SEQ ID NO: 354521 - RNA, 22 nt, Human
ccugaggggcugcaggccagcu

SEQ ID NO: 354522 - RNA, 22 nt, Human
uaaaacuuaacuauccagauua

SEQ ID NO: 354523 - RNA, 22 nt, Human
ugaugguuuuauuaauaggacc

SEQ ID NO: 354524 - RNA, 22 nt, Human
augcugaggacaaagagaucaa

SEQ ID NO: 354525 - RNA, 22 nt, Human
agaaauguuguggguuuuguua

SEQ ID NO: 354526 - RNA, 22 nt, Human
ucuuccaagguugcacacuauc

SEQ ID NO: 354527 - RNA, 22 nt, Human
uguacauacauagauauacaca

SEQ ID NO: 354528 - RNA, 22 nt, Human
ucccugcagacguccugcgggu

SEQ ID NO: 354529 - RNA, 22 nt, Human
uucaagaugucuucacaauagu

SEQ ID NO: 354530 - RNA, 22 nt, Human
ggcuucugguaaagaccacacc

SEQ ID NO: 354531 - RNA, 22 nt, Human
cagugcagaggccagggaggau

SEQ ID NO: 354532 - RNA, 22 nt, Human
ggcccuguuagagcucccacaa

SEQ ID NO: 354533 - RNA, 22 nt, Human
cagagcuguugcggggcuuggc

SEQ ID NO: 354534 - RNA, 21 nt, Human
gauuuuaaagagacugccaca

SEQ ID NO: 354535 - RNA, 22 nt, Human
uugaagaaauuauuuuauauag

SEQ ID NO: 354536 - RNA, 20 nt, Human
uagaaaucuuauaaaagacu

SEQ ID NO: 354537 - RNA, 22 nt, Human
ugucccaguucccaggguugcu

SEQ ID NO: 354538 - RNA, 18 nt, Human
aggugcagccucugaggc

SEQ ID NO: 354539 - RNA, 22 nt, Human
ugagguggcuagggaggcacuc

SEQ ID NO: 354540 - RNA, 22 nt, Human
gagagcuggccagcuucaguau

SEQ ID NO: 354541 - RNA, 22 nt, Human
aggccugagccccagguuuguu

SEQ ID NO: 354542 - RNA, 19 nt, Human
ugcucauggggacuucucc

SEQ ID NO: 354543 - RNA, 22 nt, Human
acucaggaaaugaagacugguu

SEQ ID NO: 354544 - RNA, 22 nt, Human
cagguggaucucuaaggacuga

SEQ ID NO: 354545 - RNA, 22 nt, Human
uaaaugcaagugcuccugggag

SEQ ID NO: 354546 - RNA, 22 nt, Human
ggcaggcaguguggugugaaac

SEQ ID NO: 354547 - RNA, 21 nt, Human
agagucugcauuucugacaag

SEQ ID NO: 354548 - RNA, 22 nt, Human
agggcaguucaacuucauagug

SEQ ID NO: 354549 - RNA, 22 nt, Human
ccagcucucagcgggagacuca

SEQ ID NO: 354550 - RNA, 22 nt, Human
accugcaggcacaggugugcgc

SEQ ID NO: 354551 - RNA, 22 nt, Human
uuagggcaggcaugagagaacu

SEQ ID NO: 354552 - RNA, 22 nt, Human
aaugcacauaaauauggucuua

SEQ ID NO: 354553 - RNA, 22 nt, Human
gugauuuaguguuaaguauguu

SEQ ID NO: 354554 - RNA, 20 nt, Human
aaaguguaagcauauaauua

SEQ ID NO: 354555 - RNA, 22 nt, Human
ccuguucaugaaacugcuuucc

SEQ ID NO: 354556 - RNA, 22 nt, Human
acagaguuaauggauaggcagg

SEQ ID NO: 354557 - RNA, 17 nt, Human
acagagguuauacagac

SEQ ID NO: 354558 - RNA, 22 nt, Human
ucagagugugagacauauugga

SEQ ID NO: 354559 - RNA, 22 nt, Human
accagagcuggcagaguaucaa

SEQ ID NO: 354560 - RNA, 22 nt, Human
cugcugugcauauuuaucuagg

SEQ ID NO: 354561 - RNA, 22 nt, Human
aaggcucucugauggcagcagu

SEQ ID NO: 354562 - RNA, 22 nt, Human
gagggcuccucacauucucuau

SEQ ID NO: 354563 - RNA, 22 nt, Human
ucaacacucuuuggcacaguua

SEQ ID NO: 354564 - RNA, 22 nt, Human
guggcagcggcccaggccgucu

SEQ ID NO: 354565 - RNA, 22 nt, Human
gaggggcuggcuguggucccau

SEQ ID NO: 354566 - RNA, 19 nt, Human
gcuguauuaaagauacaug

SEQ ID NO: 354567 - RNA, 22 nt, Human
aagagcuggauugugcugcaga

SEQ ID NO: 354568 - RNA, 22 nt, Human
uccaggagggauugggcugugg

SEQ ID NO: 354569 - RNA, 22 nt, Human
uuuuugcaccaaccuaauagaa

SEQ ID NO: 354570 - RNA, 22 nt, Human
cagcagagcugugugggaaggg

SEQ ID NO: 354571 - RNA, 22 nt, Human
ggaugcaggacggcauggaugu

SEQ ID NO: 354572 - RNA, 23 nt, Human
ugcaggggaggcuuaaagcaggu

SEQ ID NO: 354573 - RNA, 22 nt, Human
ggcugccuucccugagccccgg

SEQ ID NO: 354574 - RNA, 22 nt, Human
gcuggaggaucacuugagccca

SEQ ID NO: 354575 - RNA, 22 nt, Human
ugagcagggacuuugaguguag

SEQ ID NO: 354576 - RNA, 22 nt, Human
uuccauauuuguguggcaaaag

SEQ ID NO: 354577 - RNA, 22 nt, Human
acugcagccuugaacucugggc

SEQ ID NO: 354578 - RNA, 22 nt, Human
cugggagcuagcucugagcuga

SEQ ID NO: 354579 - RNA, 22 nt, Human
aaagaaggaugggagaaauccu

SEQ ID NO: 354580 - RNA, 23 nt, Human
cagcccuuccugcauguuuuugu

SEQ ID NO: 354581 - RNA, 22 nt, Human
ccauggccgccgcugcucagga

SEQ ID NO: 354582 - RNA, 22 nt, Human
cagggcccagucccugcuguca

SEQ ID NO: 354583 - RNA, 22 nt, Human
ggcaccagccaccuauuucuag

SEQ ID NO: 354584 - RNA, 22 nt, Human
cucaggauguacuacagaaggc

SEQ ID NO: 354585 - RNA, 22 nt, Human
aaaggugacacucugccagcug

SEQ ID NO: 354586 - RNA, 22 nt, Human
cacagggccuugugugacugca

SEQ ID NO: 354587 - RNA, 22 nt, Human
auucagcauaaucaguagcuug

SEQ ID NO: 354588 - RNA, 22 nt, Human
aaacaugcauucaagaaaaucu

SEQ ID NO: 354589 - RNA, 22 nt, Human
ucuggaucggguuccucagguc

SEQ ID NO: 354590 - RNA, 22 nt, Human
ugggcagcagcaaagccagacu

SEQ ID NO: 354591 - RNA, 22 nt, Human
uguuugaauuuugcuaacgugu

SEQ ID NO: 354592 - RNA, 22 nt, Human
auggcauuccaagucuucuuuu

SEQ ID NO: 354593 - RNA, 22 nt, Human
uaauacagaaguguauuaaaau

SEQ ID NO: 354594 - RNA, 22 nt, Human
agagcugaggauccagcugagc

SEQ ID NO: 354595 - RNA, 22 nt, Human
uagauuucucauucauagauug

SEQ ID NO: 354596 - RNA, 22 nt, Human
gacccggcuccaggcccagcag

SEQ ID NO: 354597 - RNA, 22 nt, Human
gcagggcugcagagggcacugu

SEQ ID NO: 354598 - RNA, 22 nt, Human
gcugucccaugguugcaagaug

SEQ ID NO: 354599 - RNA, 22 nt, Human
cugcccagaagcuuagagcuua

SEQ ID NO: 354600 - RNA, 22 nt, Human
agccaaagaucagugugcaagu

SEQ ID NO: 354601 - RNA, 22 nt, Human
uucugagacaauugagagucua

SEQ ID NO: 354602 - RNA, 18 nt, Human
gguggccuugacuucucu

SEQ ID NO: 354603 - RNA, 22 nt, Human
ccuggagcuuggucacgcugcg

SEQ ID NO: 354604 - RNA, 22 nt, Human
ucagaaaugaucguuauucauu

SEQ ID NO: 354605 - RNA, 22 nt, Human
uugugucccccuuugagagcca

SEQ ID NO: 354606 - RNA, 22 nt, Human
ggccucacccaucggugccuuu

SEQ ID NO: 354607 - RNA, 22 nt, Human
cccaguuguugccggcucugga

SEQ ID NO: 354608 - RNA, 22 nt, Human
agaagcagcuuucaaggugauu

SEQ ID NO: 354609 - RNA, 23 nt, Human
agcagugaguaaacagauaggau

SEQ ID NO: 354610 - RNA, 22 nt, Human
uuguuucugaguuuucauguau

SEQ ID NO: 354611 - RNA, 19 nt, Human
gagguggguccccgcagcc

SEQ ID NO: 354612 - RNA, 22 nt, Human
agcauuuaggagaauuugagaa

SEQ ID NO: 354613 - RNA, 22 nt, Human
gcugccacucugagcuugcuuc

SEQ ID NO: 354614 - RNA, 22 nt, Human
uccugccuguuuaccuguacuu

SEQ ID NO: 354615 - RNA, 22 nt, Human
uacauaauaaggggcauggugu

SEQ ID NO: 354616 - RNA, 22 nt, Human
cuacauuuguucuauagcuuuu

SEQ ID NO: 354617 - RNA, 22 nt, Human
uggcagcuauggucuaagggcc

SEQ ID NO: 354618 - RNA, 22 nt, Human
cuccugaguaguagcauuguca

SEQ ID NO: 354619 - RNA, 22 nt, Human
agucucagaguaccugagggac

SEQ ID NO: 354620 - RNA, 21 nt, Human
ccacaggggcuccccugucag

SEQ ID NO: 354621 - RNA, 22 nt, Human
cagaaugagauaacccagauug

SEQ ID NO: 354622 - RNA, 22 nt, Human
agagccacggcaggccuaggaa

SEQ ID NO: 354623 - RNA, 22 nt, Human
agccccacacucucucugagaa

SEQ ID NO: 354624 - RNA, 22 nt, Human
ggcaaaaaguucccaucagugu

SEQ ID NO: 354625 - RNA, 22 nt, Human
cauggcugcgagaagagugggu

SEQ ID NO: 354626 - RNA, 22 nt, Human
cucaggggaccuggcuccgagu

SEQ ID NO: 354627 - RNA, 22 nt, Human
ucucaggcuaccuugcacaagg

SEQ ID NO: 354628 - RNA, 22 nt, Human
ugucucagggcagcagcagggg

SEQ ID NO: 354629 - RNA, 23 nt, Human
accaugaugggagugcaaauaag

SEQ ID NO: 354630 - RNA, 22 nt, Human
aggcgcagacauacagggucug

SEQ ID NO: 354631 - RNA, 22 nt, Human
gcagcuggaagugacacucugu

SEQ ID NO: 354632 - RNA, 22 nt, Human
ccuggccuuaagggcagggagc

SEQ ID NO: 354633 - RNA, 22 nt, Human
cagcucccgccaucgggaggca

SEQ ID NO: 354634 - RNA, 17 nt, Human
ucccaggaacagggaau

SEQ ID NO: 354635 - RNA, 22 nt, Human
cuggagcucuccagagccccgu

SEQ ID NO: 354636 - RNA, 22 nt, Human
gggauggggggaagcguccaug

SEQ ID NO: 354637 - RNA, 22 nt, Human
ccagcuccaaguuugggcauca

SEQ ID NO: 354638 - RNA, 22 nt, Human
augcugugucaccuuaggauuu

SEQ ID NO: 354639 - RNA, 22 nt, Human
aaagacuagcauuuauauguac

SEQ ID NO: 354640 - RNA, 22 nt, Human
ucucagagaggggccgggccuu

SEQ ID NO: 354641 - RNA, 22 nt, Human
agcagggguaacagaaggaaag

SEQ ID NO: 354642 - RNA, 22 nt, Human
augaaggauggcuggcugcccu

SEQ ID NO: 354643 - RNA, 22 nt, Human
cuuauguacacacauauauugu

SEQ ID NO: 354644 - RNA, 22 nt, Human
ccagauuugagcgucuuaaacc

SEQ ID NO: 354645 - RNA, 22 nt, Human
ucaggaggccaccaggaccugu

SEQ ID NO: 354646 - RNA, 22 nt, Human
gugugccaggaacuggcugcug

SEQ ID NO: 354647 - RNA, 22 nt, Human
uacaaaugaccauagccacuua

SEQ ID NO: 354648 - RNA, 22 nt, Human
ucagccuggcaggauggccugg

SEQ ID NO: 354649 - RNA, 22 nt, Human
ugcaccauguaaguggccacgu

SEQ ID NO: 354650 - RNA, 22 nt, Human
gaguccuuuguuccuugccaca

SEQ ID NO: 354651 - RNA, 22 nt, Human
aauuaaaugacaggggaagaug

SEQ ID NO: 354652 - RNA, 21 nt, Human
cacugcagccuugaccugggc

SEQ ID NO: 354653 - RNA, 22 nt, Human
agguggggaggagugucucuuu

SEQ ID NO: 354654 - RNA, 22 nt, Human
aaguuauugcagcaauccaagu

SEQ ID NO: 354655 - RNA, 22 nt, Human
caagggcagaggcagggccccg

SEQ ID NO: 354656 - RNA, 22 nt, Human
cagucccuaguggagcucacag

SEQ ID NO: 354657 - RNA, 22 nt, Human
gguccuggaaauugacggaaag

SEQ ID NO: 354658 - RNA, 22 nt, Human
cuacagaaaccuuuuucauaca

SEQ ID NO: 354659 - RNA, 22 nt, Human
uggcuuuaaaucuguauucaua

SEQ ID NO: 354660 - RNA, 22 nt, Human
uugcaccaaaugaguuaaaauu

SEQ ID NO: 354661 - RNA, 22 nt, Human
aggcccugcccagugccacaag

SEQ ID NO: 354662 - RNA, 22 nt, Human
acaugauucuugauaggcauug

SEQ ID NO: 354663 - RNA, 22 nt, Human
uaaucugaagaaacaggacuug

SEQ ID NO: 354664 - RNA, 22 nt, Human
uccucacauggugagccacaca

SEQ ID NO: 354665 - RNA, 22 nt, Human
accagagcagacuacuggaggu

SEQ ID NO: 354666 - RNA, 22 nt, Human
gcagccacuaguuuuccuguuu

SEQ ID NO: 354667 - RNA, 22 nt, Human
cuucuucaucuguaaaacuugg

SEQ ID NO: 354668 - RNA, 22 nt, Human
guaaaauagaauaacguggcua

SEQ ID NO: 354669 - RNA, 22 nt, Human
ggccucucuccuuggcuugcag

SEQ ID NO: 354670 - RNA, 22 nt, Human
gcagagccaggagcccaggauc

SEQ ID NO: 354671 - RNA, 22 nt, Human
gaauuugaaaagugaugggaau

SEQ ID NO: 354672 - RNA, 22 nt, Human
gggcagaggggcgcuucccucu

SEQ ID NO: 354673 - RNA, 18 nt, Human
guaggucaguaccaagca

SEQ ID NO: 354674 - RNA, 20 nt, Human
agcuggagaagggcccuucc

SEQ ID NO: 354675 - RNA, 18 nt, Human
gaaagccaugcagcagug

SEQ ID NO: 354676 - RNA, 19 nt, Human
uccuccuuacuuccucuug

SEQ ID NO: 354677 - RNA, 22 nt, Human
ccuguguggccaggcuggaguc

SEQ ID NO: 354678 - RNA, 22 nt, Human
uuuauguaaguggaaugaugcc

SEQ ID NO: 354679 - RNA, 21 nt, Human
gcacagugccaggcacacagu

SEQ ID NO: 354680 - RNA, 22 nt, Human
gccaggggacgcggagcgacga

SEQ ID NO: 354681 - RNA, 22 nt, Human
ggcugaguugagaggauuacuu

SEQ ID NO: 354682 - RNA, 22 nt, Human
gagguggucgaggagggguacc

SEQ ID NO: 354683 - RNA, 22 nt, Human
gugaggugggcuggccagagac

SEQ ID NO: 354684 - RNA, 22 nt, Human
ugggggagccuucacaguagcu

SEQ ID NO: 354685 - RNA, 22 nt, Human
uucaguaaaacacugcaauguc

SEQ ID NO: 354686 - RNA, 22 nt, Human
uuuguuaaauauuuauugagug

SEQ ID NO: 354687 - RNA, 22 nt, Human
cuucuucaagagaaugggagac

SEQ ID NO: 354688 - RNA, 22 nt, Human
agauguggauccuaggguagaa

SEQ ID NO: 354689 - RNA, 22 nt, Human
uaacacugguauuucauuuagu

SEQ ID NO: 354690 - RNA, 22 nt, Human
cucucugguuucagcgaagggg

SEQ ID NO: 354691 - RNA, 22 nt, Human
ccaaggaggccccaggucagcu

SEQ ID NO: 354692 - RNA, 20 nt, Human
uccugggguaagccaugguc

SEQ ID NO: 354693 - RNA, 19 nt, Human
gccugccuggguuucugag

SEQ ID NO: 354694 - RNA, 22 nt, Human
uaguccuugcugggcacagagu

SEQ ID NO: 354695 - RNA, 22 nt, Human
cuuucacacacauacauuugga

SEQ ID NO: 354696 - RNA, 22 nt, Human
ggucacugcucuaaacaaaagu

SEQ ID NO: 354697 - RNA, 22 nt, Human
ugaagccuuguguggccucucu

SEQ ID NO: 354698 - RNA, 22 nt, Human
ccucacucugcacccugcagca

SEQ ID NO: 354699 - RNA, 22 nt, Human
ucaggagaaaauaucaggaagu

SEQ ID NO: 354700 - RNA, 20 nt, Human
uacagacaugacaauaaugg

SEQ ID NO: 354701 - RNA, 22 nt, Human
acaugcuucauauuauaaccaa

SEQ ID NO: 354702 - RNA, 22 nt, Human
agggacacaugugauuauuuau

SEQ ID NO: 354703 - RNA, 22 nt, Human
caguccuuccuugccccuuggg

SEQ ID NO: 354704 - RNA, 22 nt, Human
ugggcuggcugaggcauucacu

SEQ ID NO: 354705 - RNA, 21 nt, Human
agaaaaacacgauauaagccc

SEQ ID NO: 354706 - RNA, 22 nt, Human
ugcagggccuugggucuuucuu

SEQ ID NO: 354707 - RNA, 22 nt, Human
agugaaauuccuggucuuuguu

SEQ ID NO: 354708 - RNA, 22 nt, Human
uuucacaacugcuuauuugaga

SEQ ID NO: 354709 - RNA, 21 nt, Human
ucagcagcaucugccuagagu

SEQ ID NO: 354710 - RNA, 22 nt, Human
ugucuucaucuccaugcacaga

SEQ ID NO: 354711 - RNA, 22 nt, Human
agagggagugaaauggaauaga

SEQ ID NO: 354712 - RNA, 22 nt, Human
cgagcaugaugacggcuguggc

SEQ ID NO: 354713 - RNA, 20 nt, Human
gcugggggugugcugaguga

SEQ ID NO: 354714 - RNA, 18 nt, Human
ugugaacacauuuuucug

SEQ ID NO: 354715 - RNA, 22 nt, Human
gucaccaggucugaugcagcca

SEQ ID NO: 354716 - RNA, 22 nt, Human
aauguguagggugccuguuuuu

SEQ ID NO: 354717 - RNA, 18 nt, Human
uguacaguuaugagcauu

SEQ ID NO: 354718 - RNA, 22 nt, Human
ccagagccucuuaugaagaucg

SEQ ID NO: 354719 - RNA, 22 nt, Human
gucccagaaacauauugcuggu

SEQ ID NO: 354720 - RNA, 22 nt, Human
gaggccagggaugcaaugagag

SEQ ID NO: 354721 - RNA, 22 nt, Human
ucauuacaguguuuauaugucu

SEQ ID NO: 354722 - RNA, 22 nt, Human
accacuguaucuccagcacauu

SEQ ID NO: 354723 - RNA, 22 nt, Human
ugaagccacacuagcuuguccu

SEQ ID NO: 354724 - RNA, 22 nt, Human
agagccaggaucuguuuugggg

SEQ ID NO: 354725 - RNA, 22 nt, Human
gcugcucugcuguguaagcagg

SEQ ID NO: 354726 - RNA, 22 nt, Human
uggcugaguucuccaggaguag

SEQ ID NO: 354727 - RNA, 22 nt, Human
caagggaguuacugagggcggg

SEQ ID NO: 354728 - RNA, 22 nt, Human
guaggcagggcuguggggagaa

SEQ ID NO: 354729 - RNA, 22 nt, Human
uucagaaaucgaguuucauguc

SEQ ID NO: 354730 - RNA, 22 nt, Human
gcagcugggacacugaggccag

SEQ ID NO: 354731 - RNA, 22 nt, Human
agaguguaauaagggcaagggc

SEQ ID NO: 354732 - RNA, 22 nt, Human
auuauuauuguugauguuaggg

SEQ ID NO: 354733 - RNA, 22 nt, Human
guaaacaugcuguguacucagc

SEQ ID NO: 354734 - RNA, 22 nt, Human
agaggcugggaaggguccccgg

SEQ ID NO: 354735 - RNA, 22 nt, Human
uuccagagcaguuuucagauca

SEQ ID NO: 354736 - RNA, 22 nt, Human
ggccgggcaggucucagccagc

SEQ ID NO: 354737 - RNA, 22 nt, Human
ucacugcaaccucugccuuccg

SEQ ID NO: 354738 - RNA, 22 nt, Human
acauuucuaguuguucaucucc

SEQ ID NO: 354739 - RNA, 22 nt, Human
cagcaggauuugaaaggaagag

SEQ ID NO: 354740 - RNA, 22 nt, Human
caggucagagucccccuguccu

SEQ ID NO: 354741 - RNA, 22 nt, Human
acagcagagugugagauagcca

SEQ ID NO: 354742 - RNA, 22 nt, Human
agguggcucugacagcucuggu

SEQ ID NO: 354743 - RNA, 22 nt, Human
auuucucaucaagugccaacuc

SEQ ID NO: 354744 - RNA, 22 nt, Human
ccagggcugguggcugcagagg

SEQ ID NO: 354745 - RNA, 22 nt, Human
agcagggcuggggcacgagcca

SEQ ID NO: 354746 - RNA, 22 nt, Human
ggccagaaguuggaaaagagcc

SEQ ID NO: 354747 - RNA, 21 nt, Human
caaucaguuggcauuugagca

SEQ ID NO: 354748 - RNA, 22 nt, Human
gaggccaggagugcuguaaguu

SEQ ID NO: 354749 - RNA, 22 nt, Human
ugaaaagacugcaagagagcau

SEQ ID NO: 354750 - RNA, 22 nt, Human
ucucagagauuuuguuucccuu

SEQ ID NO: 354751 - RNA, 18 nt, Human
auuuugaacaaugcugua

SEQ ID NO: 354752 - RNA, 22 nt, Human
cagggccagcgcccaggcccag

SEQ ID NO: 354753 - RNA, 22 nt, Human
agagugggugaucucuguuguc

SEQ ID NO: 354754 - RNA, 22 nt, Human
agaggcugcacuugcucaugau

SEQ ID NO: 354755 - RNA, 22 nt, Human
agucccagccuguaggauuggg

SEQ ID NO: 354756 - RNA, 17 nt, Human
ucaugcccaacuauuac

SEQ ID NO: 354757 - RNA, 18 nt, Human
ugcuggcaacuacuauug

SEQ ID NO: 354758 - RNA, 22 nt, Human
uaaguucauaagcuuauucuua

SEQ ID NO: 354759 - RNA, 22 nt, Human
uuaugaaagacauuucuguugg

SEQ ID NO: 354760 - RNA, 18 nt, Human
aaauguacuguccauggc

SEQ ID NO: 354761 - RNA, 19 nt, Human
ggccaggcugacugugguc

SEQ ID NO: 354762 - RNA, 22 nt, Human
acagcauugagagcuaaauuua

SEQ ID NO: 354763 - RNA, 22 nt, Human
cguauacaugaagacauugcug

SEQ ID NO: 354764 - RNA, 22 nt, Human
gggccagguggaccccagccuc

SEQ ID NO: 354765 - RNA, 22 nt, Human
gggagggaaggaggcgccgugu

SEQ ID NO: 354766 - RNA, 22 nt, Human
cugcuuugggcagcuuuguggc

SEQ ID NO: 354767 - RNA, 22 nt, Human
augaguucaauuguuucaguca

SEQ ID NO: 354768 - RNA, 22 nt, Human
auguaucaauuaucugucugca

SEQ ID NO: 354769 - RNA, 22 nt, Human
ccuauacagccucagcugagau

SEQ ID NO: 354770 - RNA, 22 nt, Human
gaggacaggagacucacuguuu

SEQ ID NO: 354771 - RNA, 20 nt, Human
gccagcacagggagcaguuc

SEQ ID NO: 354772 - RNA, 22 nt, Human
uuggaggcaaugggaaggaggc

SEQ ID NO: 354773 - RNA, 22 nt, Human
uugcauaaagauuuuauugcau

SEQ ID NO: 354774 - RNA, 20 nt, Human
auccaugagagucuggauuc

SEQ ID NO: 354775 - RNA, 22 nt, Human
guuggccugaauggucaagagg

SEQ ID NO: 354776 - RNA, 22 nt, Human
aucacuguguauguauaugcag

SEQ ID NO: 354777 - RNA, 22 nt, Human
guugaaugaaucauucuaugua

SEQ ID NO: 354778 - RNA, 22 nt, Human
auucuccacacauccagaccuu

SEQ ID NO: 354779 - RNA, 22 nt, Human
caugcacaacauacucaagagg

SEQ ID NO: 354780 - RNA, 22 nt, Human
uuucagaaccgcuaaaauaaau

SEQ ID NO: 354781 - RNA, 22 nt, Human
cucacaggcaucucaucaggcu

SEQ ID NO: 354782 - RNA, 22 nt, Human
uaauuauaacaguuacaucuua

SEQ ID NO: 354783 - RNA, 20 nt, Human
aggcucagauacccagggaa

SEQ ID NO: 354784 - RNA, 23 nt, Human
agucaguguaaguuuggaaugca

SEQ ID NO: 354785 - RNA, 22 nt, Human
uuucuauaugaggagcuaaagu

SEQ ID NO: 354786 - RNA, 22 nt, Human
uguacaguaggaacuuguuauu

SEQ ID NO: 354787 - RNA, 22 nt, Human
agcaguccaacugagguggcau

SEQ ID NO: 354788 - RNA, 22 nt, Human
acaacaaaaucacuagucuucc

SEQ ID NO: 354789 - RNA, 22 nt, Human
gagcaggccagcaauggaaggg

SEQ ID NO: 354790 - RNA, 22 nt, Human
caggguuucaccauguuagcag

SEQ ID NO: 354791 - RNA, 21 nt, Human
ggugucaguuuuggucauuag

SEQ ID NO: 354792 - RNA, 22 nt, Human
caagagcuggagaggcagucua

SEQ ID NO: 354793 - RNA, 22 nt, Human
aaggcagcucagcucauggcag

SEQ ID NO: 354794 - RNA, 22 nt, Human
cagccaggccuggugaccaaag

SEQ ID NO: 354795 - RNA, 22 nt, Human
uguguauucagcaagcgaaaca

SEQ ID NO: 354796 - RNA, 22 nt, Human
ccagagggcaaaaugaagcuua

SEQ ID NO: 354797 - RNA, 22 nt, Human
aguauguagugcaaucagucag

SEQ ID NO: 354798 - RNA, 22 nt, Human
cccagcccugaccuauuggaaa

SEQ ID NO: 354799 - RNA, 21 nt, Human
guauugcagaguuaugugcuc

SEQ ID NO: 354800 - RNA, 22 nt, Human
uguuaggguccugugcaggggc

SEQ ID NO: 354801 - RNA, 22 nt, Human
agccuggaccaggggccucaga

SEQ ID NO: 354802 - RNA, 22 nt, Human
gauuuagagaauguuuuguaag

SEQ ID NO: 354803 - RNA, 22 nt, Human
ugcacauuaguguuugagaugc

SEQ ID NO: 354804 - RNA, 22 nt, Human
ucucuguacaguacaugccgug

SEQ ID NO: 354805 - RNA, 22 nt, Human
cugggugguuuugaugugaauu

SEQ ID NO: 354806 - RNA, 22 nt, Human
gcugcccacaaugauuacaugg

SEQ ID NO: 354807 - RNA, 22 nt, Human
gaaauauuucucuugagccccu

SEQ ID NO: 354808 - RNA, 22 nt, Human
ucugggagguaaccaugcugau

SEQ ID NO: 354809 - RNA, 22 nt, Human
uuacuuugaugaucaaugagcg

SEQ ID NO: 354810 - RNA, 22 nt, Human
acauuucucuuagaguuggacu

SEQ ID NO: 354811 - RNA, 22 nt, Human
aggcagaggaaggguggauuug

SEQ ID NO: 354812 - RNA, 22 nt, Human
cauacauugcucauucaguauc

SEQ ID NO: 354813 - RNA, 22 nt, Human
gauggacagccuggaaggaaag

SEQ ID NO: 354814 - RNA, 22 nt, Human
ggccugaggccaccagcagccc

SEQ ID NO: 354815 - RNA, 22 nt, Human
uuucauaaugucacagucaaaa

SEQ ID NO: 354816 - RNA, 22 nt, Human
ccaggagagcauugcacagagg

SEQ ID NO: 354817 - RNA, 22 nt, Human
aauguguagcauuuaaugcagu

SEQ ID NO: 354818 - RNA, 22 nt, Human
aggcagcucuguggccucccag

SEQ ID NO: 354819 - RNA, 17 nt, Human
gcuuccugugcugggga

SEQ ID NO: 354820 - RNA, 22 nt, Human
ugacagaaauaguucuuaauuu

SEQ ID NO: 354821 - RNA, 22 nt, Human
caggcagaaggaaguaccaggc

SEQ ID NO: 354822 - RNA, 22 nt, Human
ggaggggaggauuaaugacaaa

SEQ ID NO: 354823 - RNA, 22 nt, Human
cuuugcaaacugucacacuuuc

SEQ ID NO: 354824 - RNA, 22 nt, Human
acacugaagagcacuuucaaag

SEQ ID NO: 354825 - RNA, 22 nt, Human
agguacaaaagaguauaugaga

SEQ ID NO: 354826 - RNA, 22 nt, Human
gccaugcuugguaugcugugag

SEQ ID NO: 354827 - RNA, 22 nt, Human
ucuaaacaguuucacucuuaau

SEQ ID NO: 354828 - RNA, 22 nt, Human
ggggugggguuacucauugugc

SEQ ID NO: 354829 - RNA, 22 nt, Human
ccugugcauccgguggucauug

SEQ ID NO: 354830 - RNA, 22 nt, Human
ucacauuuuuuacuggacuuaa

SEQ ID NO: 354831 - RNA, 22 nt, Human
gcugggagccguaccugucacg

SEQ ID NO: 354832 - RNA, 20 nt, Human
uggggccuguuucugugguu

SEQ ID NO: 354833 - RNA, 22 nt, Human
accccaagacaguagaagagaa

SEQ ID NO: 354834 - RNA, 22 nt, Human
aagacauuuauuugaaucaauu

SEQ ID NO: 354835 - RNA, 22 nt, Human
cccuggcaaaacacucucuuga

SEQ ID NO: 354836 - RNA, 22 nt, Human
uuauuagguuuacauaaagguu

SEQ ID NO: 354837 - RNA, 22 nt, Human
uccuucaguuaaagaucucaca

SEQ ID NO: 354838 - RNA, 22 nt, Human
guaggcagguggaggagugaag

SEQ ID NO: 354839 - RNA, 21 nt, Human
ucucugguuggaguugugcca

SEQ ID NO: 354840 - RNA, 22 nt, Human
guccuuaguuacuuuucauguc

SEQ ID NO: 354841 - RNA, 22 nt, Human
ccacagggaacaugacagccuu

SEQ ID NO: 354842 - RNA, 22 nt, Human
uauguacacauacacuuguaau

SEQ ID NO: 354843 - RNA, 22 nt, Human
agacuucuuugugagcauuuuc

SEQ ID NO: 354844 - RNA, 22 nt, Human
gcugagguggagauugcaguga

SEQ ID NO: 354845 - RNA, 22 nt, Human
uagggcaggugaagaaaagcua

SEQ ID NO: 354846 - RNA, 22 nt, Human
acguggagagaauagggcacca

SEQ ID NO: 354847 - RNA, 22 nt, Human
auggcuuugaaguaauguaauu

SEQ ID NO: 354848 - RNA, 22 nt, Human
uccagggaaggugugaggcugg

SEQ ID NO: 354849 - RNA, 22 nt, Human
gcagggccagguacaagaagca

SEQ ID NO: 354850 - RNA, 22 nt, Human
cucaggauugugccuagggaga

SEQ ID NO: 354851 - RNA, 22 nt, Human
cccucugcugccuggcuggguc

SEQ ID NO: 354852 - RNA, 22 nt, Human
gcuguucacggaggaggauggg

SEQ ID NO: 354853 - RNA, 22 nt, Human
cuuaggcaaccaggucaaugcu

SEQ ID NO: 354854 - RNA, 22 nt, Human
cuuuauguccaccagacugcaa

SEQ ID NO: 354855 - RNA, 22 nt, Human
aaauggaucuguggaauacauu

SEQ ID NO: 354856 - RNA, 22 nt, Human
cagcugaguuacucugaggucu

SEQ ID NO: 354857 - RNA, 22 nt, Human
ucugucacugagcucaggauuc

SEQ ID NO: 354858 - RNA, 22 nt, Human
cacccacccacugcucauuggc

SEQ ID NO: 354859 - RNA, 22 nt, Human
uccucaggucaaagcaggagaa

SEQ ID NO: 354860 - RNA, 17 nt, Human
agcugccagggagugug

SEQ ID NO: 354861 - RNA, 22 nt, Human
gauuuuauauggcauacugugg

SEQ ID NO: 354862 - RNA, 18 nt, Human
gaagggagcuggaaugca

SEQ ID NO: 354863 - RNA, 22 nt, Human
gcaccugguuuauauaaucaua

SEQ ID NO: 354864 - RNA, 22 nt, Human
cuggugugauugagcccaggug

SEQ ID NO: 354865 - RNA, 22 nt, Human
ucucugcucugugccucaguuu

SEQ ID NO: 354866 - RNA, 22 nt, Human
gcucaggacccaggugugaccu

SEQ ID NO: 354867 - RNA, 22 nt, Human
gccaggcuggucuugaacuccu

SEQ ID NO: 354868 - RNA, 22 nt, Human
gcuuccuaaaugcacagggcag

SEQ ID NO: 354869 - RNA, 22 nt, Human
gagaggagucccuaucacaguu

SEQ ID NO: 354870 - RNA, 22 nt, Human
gccagaagacuggagucagcug

SEQ ID NO: 354871 - RNA, 22 nt, Human
uaacauguuaagaaauuagaua

SEQ ID NO: 354872 - RNA, 22 nt, Human
gcugggagcaaagccaugcaua

SEQ ID NO: 354873 - RNA, 22 nt, Human
uggcugagccuuuggggcuuuc

SEQ ID NO: 354874 - RNA, 22 nt, Human
cugagccagcgggcucacuuuu

SEQ ID NO: 354875 - RNA, 22 nt, Human
agacagaacagaauaauuguug

SEQ ID NO: 354876 - RNA, 22 nt, Human
uuaauauguugaaauuuauuag

SEQ ID NO: 354877 - RNA, 22 nt, Human
gggggcuguccugugcauugua

SEQ ID NO: 354878 - RNA, 22 nt, Human
aggucauugaaguuauuuucuu

SEQ ID NO: 354879 - RNA, 22 nt, Human
cuucauuaaccaaaaugcaaua

SEQ ID NO: 354880 - RNA, 22 nt, Human
ucucagucagccuugauguccc

SEQ ID NO: 354881 - RNA, 22 nt, Human
ggugaagggugucauggcauuu

SEQ ID NO: 354882 - RNA, 22 nt, Human
ccuccucugggaagauucagag

SEQ ID NO: 354883 - RNA, 22 nt, Human
aggcagcuuucuguaggggugu

SEQ ID NO: 354884 - RNA, 22 nt, Human
uuguuucagcuguaugcuaugu

SEQ ID NO: 354885 - RNA, 22 nt, Human
ccugaggacacacgcugcagga

SEQ ID NO: 354886 - RNA, 17 nt, Human
agguggcugcugcgccu

SEQ ID NO: 354887 - RNA, 22 nt, Human
gugcauauaugcacauaugugu

SEQ ID NO: 354888 - RNA, 22 nt, Human
caaauaguaugagcaaugauuc

SEQ ID NO: 354889 - RNA, 17 nt, Human
uguggccuucugagcuu

SEQ ID NO: 354890 - RNA, 18 nt, Human
aucucccauuggccaagg

SEQ ID NO: 354891 - RNA, 22 nt, Human
ccccuuccaggaagcagaaucg

SEQ ID NO: 354892 - RNA, 22 nt, Human
gagcccucucuguaggcaagua

SEQ ID NO: 354893 - RNA, 22 nt, Human
cucccugguguccccuccagga

SEQ ID NO: 354894 - RNA, 22 nt, Human
uuugcauuguaauauuuaguuc

SEQ ID NO: 354895 - RNA, 22 nt, Human
aauggccagcaacaggagugaa

SEQ ID NO: 354896 - RNA, 22 nt, Human
gccagcagcccagaaggacuuu

SEQ ID NO: 354897 - RNA, 22 nt, Human
agcagcagaggucagaaaggua

SEQ ID NO: 354898 - RNA, 22 nt, Human
uccagagguauguagagaguau

SEQ ID NO: 354899 - RNA, 22 nt, Human
ggcagccagagggcagcuggau

SEQ ID NO: 354900 - RNA, 22 nt, Human
cucaggauggaagccuacagga

SEQ ID NO: 354901 - RNA, 22 nt, Human
agucaccauuuucaccugccuc

SEQ ID NO: 354902 - RNA, 22 nt, Human
ccuggccucagccuagggcuga

SEQ ID NO: 354903 - RNA, 21 nt, Human
cugcuguggcccccgacaugc

SEQ ID NO: 354904 - RNA, 20 nt, Human
ccacaggaguccagucgacc

SEQ ID NO: 354905 - RNA, 22 nt, Human
auguguccacaggugugagaga

SEQ ID NO: 354906 - RNA, 22 nt, Human
aggacagcccuugagagcacau

SEQ ID NO: 354907 - RNA, 22 nt, Human
ucaaugauaucagcaggaugug

SEQ ID NO: 354908 - RNA, 22 nt, Human
guguccuuauuucugucucuca

SEQ ID NO: 354909 - RNA, 22 nt, Human
ugcaggaaauuccaggguggcc

SEQ ID NO: 354910 - RNA, 22 nt, Human
ccagccaggcauugcaaacuga

SEQ ID NO: 354911 - RNA, 22 nt, Human
uugugcauuucucugagugugu

SEQ ID NO: 354912 - RNA, 22 nt, Human
uaucagaaggaagugccuuuaa

SEQ ID NO: 354913 - RNA, 22 nt, Human
ugccagcacaaguuaagagauc

SEQ ID NO: 354914 - RNA, 22 nt, Human
ucaaauaaugccauucaucauc

SEQ ID NO: 354915 - RNA, 22 nt, Human
gugccaaaagcuauaauuuggu

SEQ ID NO: 354916 - RNA, 22 nt, Human
uuuaucuuuggaucuucagaaa

SEQ ID NO: 354917 - RNA, 21 nt, Human
ucauuugugaucugauuucca

SEQ ID NO: 354918 - RNA, 17 nt, Human
gcaaucucagucuccuu

SEQ ID NO: 354919 - RNA, 22 nt, Human
aaaacucugcaguuaguuucua

SEQ ID NO: 354920 - RNA, 17 nt, Human
caauuucauagguuuug

SEQ ID NO: 354921 - RNA, 22 nt, Human
gcagaggagugauuaugccgug

SEQ ID NO: 354922 - RNA, 18 nt, Human
gucuggaggucaggagcu

SEQ ID NO: 354923 - RNA, 22 nt, Human
ucucuucacaugcuugcuccaa

SEQ ID NO: 354924 - RNA, 22 nt, Human
aggaagcuggugugaggaugaa

SEQ ID NO: 354925 - RNA, 22 nt, Human
uauguguuugacacccugcaag

SEQ ID NO: 354926 - RNA, 22 nt, Human
gcugccucuguagcuuuggacc

SEQ ID NO: 354927 - RNA, 22 nt, Human
gaggaagcugcguggcauuuca

SEQ ID NO: 354928 - RNA, 22 nt, Human
ugaaaugauuauaugguguuug

SEQ ID NO: 354929 - RNA, 22 nt, Human
uccagccaacugccuagggagc

SEQ ID NO: 354930 - RNA, 22 nt, Human
uuccgcuggggccgccuggcgg

SEQ ID NO: 354931 - RNA, 21 nt, Human
gccugcaguuuugaagcccuu

SEQ ID NO: 354932 - RNA, 22 nt, Human
agugaaaucagguuuugacugc

SEQ ID NO: 354933 - RNA, 22 nt, Human
augaaaacggaccagagcuauu

SEQ ID NO: 354934 - RNA, 22 nt, Human
caguuaaaggcccaauaucugg

SEQ ID NO: 354935 - RNA, 22 nt, Human
gcucucugguuccagucaggaa

SEQ ID NO: 354936 - RNA, 22 nt, Human
agaggcuccaccuucucugucc

SEQ ID NO: 354937 - RNA, 22 nt, Human
agggucagguuaagggagucau

SEQ ID NO: 354938 - RNA, 22 nt, Human
auggcagggcagccucucagag

SEQ ID NO: 354939 - RNA, 22 nt, Human
gaaguggaauuacugggucaua

SEQ ID NO: 354940 - RNA, 22 nt, Human
accaggagcauuuuuuauuagu

SEQ ID NO: 354941 - RNA, 22 nt, Human
uuccucugaaauggcuuggaaa

SEQ ID NO: 354942 - RNA, 22 nt, Human
cugugcuuaccugcccagguga

SEQ ID NO: 354943 - RNA, 22 nt, Human
ugggaugggaucucgcuguguc

SEQ ID NO: 354944 - RNA, 22 nt, Human
uuccaguugguagaauguaagg

SEQ ID NO: 354945 - RNA, 23 nt, Human
ccacuagcaccuguucaacuucu

SEQ ID NO: 354946 - RNA, 22 nt, Human
ucugucacuuauuaagauggau

SEQ ID NO: 354947 - RNA, 22 nt, Human
uauuaaagggaaguuaugcaug

SEQ ID NO: 354948 - RNA, 22 nt, Human
gagggagggccaggucccaacc

SEQ ID NO: 354949 - RNA, 22 nt, Human
guuuccaaccccaccaaagugc

SEQ ID NO: 354950 - RNA, 22 nt, Human
gggccacacagaaccuccuggu

SEQ ID NO: 354951 - RNA, 22 nt, Human
gcugcugugaauuuuuuaaaug

SEQ ID NO: 354952 - RNA, 18 nt, Human
gaggauggaaggagaugc

SEQ ID NO: 354953 - RNA, 22 nt, Human
ggucccaggaagugcggcggcg

SEQ ID NO: 354954 - RNA, 23 nt, Human
cuuuuaacuugaucugagaccag

SEQ ID NO: 354955 - RNA, 22 nt, Human
gaaaugugggucaugacccauu

SEQ ID NO: 354956 - RNA, 22 nt, Human
uuugagaaaugggcucugugcu

SEQ ID NO: 354957 - RNA, 22 nt, Human
cguguacagucuaucuuuuuuc

SEQ ID NO: 354958 - RNA, 22 nt, Human
uagggcugcugcagaugacagg

SEQ ID NO: 354959 - RNA, 22 nt, Human
uagugcuuggcccuaccagaua

SEQ ID NO: 354960 - RNA, 22 nt, Human
ggauucuaacugaacagaauau

SEQ ID NO: 354961 - RNA, 22 nt, Human
ccucugggagacugcuacugag

SEQ ID NO: 354962 - RNA, 22 nt, Human
agccuggaggaggaguugagca

SEQ ID NO: 354963 - RNA, 22 nt, Human
aagcagaggaccgacggaggga

SEQ ID NO: 354964 - RNA, 22 nt, Human
cccagccugucuuucccaauga

SEQ ID NO: 354965 - RNA, 22 nt, Human
uaacaucuuuagcagcucgaac

SEQ ID NO: 354966 - RNA, 18 nt, Human
caguuuuuauaucuggca

SEQ ID NO: 354967 - RNA, 22 nt, Human
acaugcuuugauguauuuugca

SEQ ID NO: 354968 - RNA, 19 nt, Human
ucaguuuuagucaucaguu

SEQ ID NO: 354969 - RNA, 22 nt, Human
gucuggaguggggccugagaau

SEQ ID NO: 354970 - RNA, 22 nt, Human
guggaggagaggcgccuugcgg

SEQ ID NO: 354971 - RNA, 22 nt, Human
gagcacaggcuuugguggacac

SEQ ID NO: 354972 - RNA, 22 nt, Human
ucugcucuccauacuuccgcac

SEQ ID NO: 354973 - RNA, 22 nt, Human
gggaggcuggcucuggccacag

SEQ ID NO: 354974 - RNA, 22 nt, Human
aggcagugcaugcaaaggucgg

SEQ ID NO: 354975 - RNA, 22 nt, Human
uugcacuccagcccgagcaaca

SEQ ID NO: 354976 - RNA, 22 nt, Human
ugccucagcugaggccgcucca

SEQ ID NO: 354977 - RNA, 22 nt, Human
cuuccccaaccccgacugugug

SEQ ID NO: 354978 - RNA, 22 nt, Human
cugaggccuaagacaugaauga

SEQ ID NO: 354979 - RNA, 21 nt, Human
aagccagcccacagugguuug

SEQ ID NO: 354980 - RNA, 22 nt, Human
gcaggggcaggagaucucaggc

SEQ ID NO: 354981 - RNA, 22 nt, Human
uggcucugcaccucaguguacc

SEQ ID NO: 354982 - RNA, 22 nt, Human
aggcagagagcaguggccgucu

SEQ ID NO: 354983 - RNA, 22 nt, Human
accagggcccgggagagcucuc

SEQ ID NO: 354984 - RNA, 22 nt, Human
uugcauuugagaaaguucuccu

SEQ ID NO: 354985 - RNA, 22 nt, Human
acaggggcuccgaaggugaggg

SEQ ID NO: 354986 - RNA, 22 nt, Human
agaugcugucacacacacuguu

SEQ ID NO: 354987 - RNA, 22 nt, Human
gccucacugcagccccaggaag

SEQ ID NO: 354988 - RNA, 22 nt, Human
gagccaggcaccuucuguguug

SEQ ID NO: 354989 - RNA, 21 nt, Human
cauuucaaagagcuggaaauc

SEQ ID NO: 354990 - RNA, 21 nt, Human
ccuauugaauauaggaagauu

SEQ ID NO: 354991 - RNA, 22 nt, Human
uuaauacagucuccagaaguaa

SEQ ID NO: 354992 - RNA, 22 nt, Human
uacuuuuuagcacagugugugc

SEQ ID NO: 354993 - RNA, 22 nt, Human
guguuuccuaguuuaaugaaug

SEQ ID NO: 354994 - RNA, 22 nt, Human
cagaguggcacucugcuggaug

SEQ ID NO: 354995 - RNA, 22 nt, Human
gcagaagggaauaaggagcuuu

SEQ ID NO: 354996 - RNA, 22 nt, Human
agcuuuaugcuuccuacaagcu

SEQ ID NO: 354997 - RNA, 22 nt, Human
aggccugggacgggagccguga

SEQ ID NO: 354998 - RNA, 22 nt, Human
uggcucuguugugcugagccag

SEQ ID NO: 354999 - RNA, 21 nt, Human
uuagaaagcucacuacaguua

SEQ ID NO: 355000 - RNA, 22 nt, Human
agcugccaucagccuuuggaug

SEQ ID NO: 355001 - RNA, 22 nt, Human
gauuucaaggauguuagaggug

SEQ ID NO: 355002 - RNA, 22 nt, Human
ggagcagagcugggcuuggcug

SEQ ID NO: 355003 - RNA, 22 nt, Human
uuucauaugggcauuggcaaua

SEQ ID NO: 355004 - RNA, 22 nt, Human
gugaauaauauuguuuauaaaa

SEQ ID NO: 355005 - RNA, 22 nt, Human
uugaacaguuuugucagguuca

SEQ ID NO: 355006 - RNA, 22 nt, Human
acauccagaucucagcauggcu

SEQ ID NO: 355007 - RNA, 22 nt, Human
uuagccauggacugaauugacu

SEQ ID NO: 355008 - RNA, 22 nt, Human
cuccucuuuggggauuuacaca

SEQ ID NO: 355009 - RNA, 22 nt, Human
aaggcuuuuguuccuauuuagu

SEQ ID NO: 355010 - RNA, 22 nt, Human
cagggccugcuuccuucuuguu

SEQ ID NO: 355011 - RNA, 22 nt, Human
gauuucaaguaucuugggcgag

SEQ ID NO: 355012 - RNA, 22 nt, Human
ugagaacugaggauuugaauuc

SEQ ID NO: 355013 - RNA, 22 nt, Human
uccaucagauucccuccugaga

SEQ ID NO: 355014 - RNA, 22 nt, Human
uccuggaggggacagcaugggc

SEQ ID NO: 355015 - RNA, 22 nt, Human
cugagcagcaacccagagccuc

SEQ ID NO: 355016 - RNA, 22 nt, Human
ggcugccucaaagcucaagcuc

SEQ ID NO: 355017 - RNA, 22 nt, Human
aagagcuguaugccauaugauu

SEQ ID NO: 355018 - RNA, 22 nt, Human
gccuggagcucggcugagggcg

SEQ ID NO: 355019 - RNA, 22 nt, Human
auaaacaguagagaaagguggu

SEQ ID NO: 355020 - RNA, 22 nt, Human
aaugaugggaaggagaaaagca

SEQ ID NO: 355021 - RNA, 22 nt, Human
aagccaagaguuaacuauuugu

SEQ ID NO: 355022 - RNA, 23 nt, Human
uugauuucaaaugcagagaacac

SEQ ID NO: 355023 - RNA, 22 nt, Human
uucaggauuguguuuuuccuga

SEQ ID NO: 355024 - RNA, 22 nt, Human
aacauugcagcuuaauugcagg

SEQ ID NO: 355025 - RNA, 22 nt, Human
gggugaagcuccugcaggggcc

SEQ ID NO: 355026 - RNA, 23 nt, Human
uggacgccgacuuuggaggcgcu

SEQ ID NO: 355027 - RNA, 22 nt, Human
gcauuccuacaggcugcuauga

SEQ ID NO: 355028 - RNA, 22 nt, Human
ucagggcaucucuuaaguggug

SEQ ID NO: 355029 - RNA, 22 nt, Human
gcugcucuggcucugcaguguc

SEQ ID NO: 355030 - RNA, 22 nt, Human
guguaauugaaauugagaacca

SEQ ID NO: 355031 - RNA, 22 nt, Human
gaggcaccucgcgggaggaggc

SEQ ID NO: 355032 - RNA, 22 nt, Human
cccagggagguagcaggagaaa

SEQ ID NO: 355033 - RNA, 18 nt, Human
ucaagacaucaugaaaua

SEQ ID NO: 355034 - RNA, 22 nt, Human
ugaaagguguccaauauuucuc

SEQ ID NO: 355035 - RNA, 21 nt, Human
cuugaaagguagagucuacag

SEQ ID NO: 355036 - RNA, 22 nt, Human
caagcuggcugggagaggcacg

SEQ ID NO: 355037 - RNA, 22 nt, Human
gggcuuggcacaugggcucagc

SEQ ID NO: 355038 - RNA, 22 nt, Human
ugggcagcauccuccacaguca

SEQ ID NO: 355039 - RNA, 22 nt, Human
ccauuugucaccucugcacucc

SEQ ID NO: 355040 - RNA, 22 nt, Human
ucaccuuagcuagaggaagaga

SEQ ID NO: 355041 - RNA, 22 nt, Human
ccuguggcucucuuuggagguc

SEQ ID NO: 355042 - RNA, 22 nt, Human
gcuucucuggccugcagggcau

SEQ ID NO: 355043 - RNA, 22 nt, Human
ggcaggcaggucuucauggccc

SEQ ID NO: 355044 - RNA, 22 nt, Human
auucucaguucacuaguuucuu

SEQ ID NO: 355045 - RNA, 22 nt, Human
ugaagcaggaaacuucuuguuu

SEQ ID NO: 355046 - RNA, 22 nt, Human
guaacacagaaaugaaauucca

SEQ ID NO: 355047 - RNA, 22 nt, Human
aagcagccuggcaugaugcuuu

SEQ ID NO: 355048 - RNA, 19 nt, Human
gagcacagcggcauuuggu

SEQ ID NO: 355049 - RNA, 22 nt, Human
uuucaguggguuuauuucaugu

SEQ ID NO: 355050 - RNA, 22 nt, Human
aguguggcugcguagggcucuc

SEQ ID NO: 355051 - RNA, 22 nt, Human
uuugacauggaauaacucauuu

SEQ ID NO: 355052 - RNA, 22 nt, Human
cuauuagguuggugcaaaagua

SEQ ID NO: 355053 - RNA, 22 nt, Human
uuuuaccugaaccacacaguau

SEQ ID NO: 355054 - RNA, 22 nt, Human
acaaaguuauucuuucagagga

SEQ ID NO: 355055 - RNA, 22 nt, Human
acagaagagcacauuuaguaug

SEQ ID NO: 355056 - RNA, 22 nt, Human
uguccucuuccagugcuccuuc

SEQ ID NO: 355057 - RNA, 22 nt, Human
uuuuagcacuaagugauaugcu

SEQ ID NO: 355058 - RNA, 22 nt, Human
uggcugcuuguuuuagugaggc

SEQ ID NO: 355059 - RNA, 22 nt, Human
ggcagcagcaagguuggagcug

SEQ ID NO: 355060 - RNA, 22 nt, Human
ugccaggcuguccugggccugg

SEQ ID NO: 355061 - RNA, 22 nt, Human
ggcagcuuccuaggagagggca

SEQ ID NO: 355062 - RNA, 22 nt, Human
agggaaaguaagcauuucauua

SEQ ID NO: 355063 - RNA, 21 nt, Human
ucaggagagcccaucuacaaa

SEQ ID NO: 355064 - RNA, 22 nt, Human
acaugcuuccaaauuauguugg

SEQ ID NO: 355065 - RNA, 22 nt, Human
agaagccauguuuaguaggaug

SEQ ID NO: 355066 - RNA, 21 nt, Human
cucuggagucaagagcuucca

SEQ ID NO: 355067 - RNA, 22 nt, Human
aaugaucuacucucauuaucuc

SEQ ID NO: 355068 - RNA, 22 nt, Human
cuuaacauccugcauuuuucuu

SEQ ID NO: 355069 - RNA, 22 nt, Human
gcacagggagcaggucucuggu

SEQ ID NO: 355070 - RNA, 22 nt, Human
aaagccaugggucuuuggcaua

SEQ ID NO: 355071 - RNA, 22 nt, Human
cacaggaggaggugcccgggcc

SEQ ID NO: 355072 - RNA, 22 nt, Human
uuuucauuuacauuagggaaga

SEQ ID NO: 355073 - RNA, 22 nt, Human
cuccaggccagggaaguggaca

SEQ ID NO: 355074 - RNA, 22 nt, Human
gccaucacauccaggcuaccuc

SEQ ID NO: 355075 - RNA, 22 nt, Human
gcuggcagguccaagauagagc

SEQ ID NO: 355076 - RNA, 22 nt, Human
cagcugugagcagccaguugcc

SEQ ID NO: 355077 - RNA, 22 nt, Human
agcauccaacaggagggaaggg

SEQ ID NO: 355078 - RNA, 22 nt, Human
cccaggaggcagauguugcagu

SEQ ID NO: 355079 - RNA, 22 nt, Human
aguggcagacacaaugugggca

SEQ ID NO: 355080 - RNA, 22 nt, Human
acaggcaggcuucggccagagc

SEQ ID NO: 355081 - RNA, 22 nt, Human
ucagcuuugaucucaggcaauc

SEQ ID NO: 355082 - RNA, 22 nt, Human
gcucugugcaguucagggacac

SEQ ID NO: 355083 - RNA, 22 nt, Human
cagugucuccagaugcuccaau

SEQ ID NO: 355084 - RNA, 21 nt, Human
uagagaaaagaagcuguuccu

SEQ ID NO: 355085 - RNA, 18 nt, Human
gguggcaggucagaugcc

SEQ ID NO: 355086 - RNA, 22 nt, Human
ucucaggagccacagcgggagu

SEQ ID NO: 355087 - RNA, 22 nt, Human
uucagagauggaaggcagaaug

SEQ ID NO: 355088 - RNA, 22 nt, Human
ugaggcaguauucuccauucca

SEQ ID NO: 355089 - RNA, 22 nt, Human
gcuggccucuacaggccggcca

SEQ ID NO: 355090 - RNA, 22 nt, Human
agagaaaagaguucaggcuuug

SEQ ID NO: 355091 - RNA, 22 nt, Human
accacugggcgggcagccugcu

SEQ ID NO: 355092 - RNA, 22 nt, Human
uuucuaggucuuccauacugcc

SEQ ID NO: 355093 - RNA, 19 nt, Human
uggagacugagagugagca

SEQ ID NO: 355094 - RNA, 22 nt, Human
ccaggugucaugcgugugaccc

SEQ ID NO: 355095 - RNA, 22 nt, Human
cuuguacaggaauccaugguau

SEQ ID NO: 355096 - RNA, 22 nt, Human
ggacacaagcuccggggcugca

SEQ ID NO: 355097 - RNA, 22 nt, Human
ccccaggacguggcccucauag

SEQ ID NO: 355098 - RNA, 19 nt, Human
ccaggccuccugggagguc

SEQ ID NO: 355099 - RNA, 22 nt, Human
agggccugcaucaggagcuugg

SEQ ID NO: 355100 - RNA, 22 nt, Human
auuuauuaugggauuuggcaca

SEQ ID NO: 355101 - RNA, 22 nt, Human
ucugaacauccagcaaugcaca

SEQ ID NO: 355102 - RNA, 22 nt, Human
gcugccuggagcucagccugcc

SEQ ID NO: 355103 - RNA, 22 nt, Human
agaaaucauucccaaacccaua

SEQ ID NO: 355104 - RNA, 20 nt, Human
guguuucaugugauacaaug

SEQ ID NO: 355105 - RNA, 22 nt, Human
auguguacaaccaagcacuaaa

SEQ ID NO: 355106 - RNA, 22 nt, Human
ggagucaccaaguaggagucuu

SEQ ID NO: 355107 - RNA, 21 nt, Human
gauuugcagaaacuagacagg

SEQ ID NO: 355108 - RNA, 22 nt, Human
agcacauucugccuugcuuugc

SEQ ID NO: 355109 - RNA, 22 nt, Human
augaagcugaccuugucuugcu

SEQ ID NO: 355110 - RNA, 21 nt, Human
agagagggagaugaaacaucc

SEQ ID NO: 355111 - RNA, 22 nt, Human
ucaccagucuuucuuaccauug

SEQ ID NO: 355112 - RNA, 22 nt, Human
ccuggagauuauuugguccaau

SEQ ID NO: 355113 - RNA, 22 nt, Human
caguuucuauggcugggcucug

SEQ ID NO: 355114 - RNA, 17 nt, Human
ggugaguguccaggugg

SEQ ID NO: 355115 - RNA, 22 nt, Human
acauaauaccuaggacaguuug

SEQ ID NO: 355116 - RNA, 22 nt, Human
uggcucuguucgccaucaggag

SEQ ID NO: 355117 - RNA, 22 nt, Human
uugaagcauuguggcuuguauu

SEQ ID NO: 355118 - RNA, 22 nt, Human
uccugccucuuuucuuauucca

SEQ ID NO: 355119 - RNA, 22 nt, Human
gccuccuggccuuugcuccuca

SEQ ID NO: 355120 - RNA, 22 nt, Human
gcccucugcuggccucaccucg

SEQ ID NO: 355121 - RNA, 22 nt, Human
cccaggacucuucacugcagcc

SEQ ID NO: 355122 - RNA, 22 nt, Human
agcagagguguuuauuauggga

SEQ ID NO: 355123 - RNA, 23 nt, Human
cccaggagccugaguccucucug

SEQ ID NO: 355124 - RNA, 17 nt, Human
cuguuaauucauuuccc

SEQ ID NO: 355125 - RNA, 22 nt, Human
caaaucuauauguugauauucu

SEQ ID NO: 355126 - RNA, 22 nt, Human
uccaugggaagauuuugagugg

SEQ ID NO: 355127 - RNA, 22 nt, Human
uucacagauuucccugcacaug

SEQ ID NO: 355128 - RNA, 22 nt, Human
ucaggauggcuucugcaucaaa

SEQ ID NO: 355129 - RNA, 22 nt, Human
cacaggagagcugggaggugcc

SEQ ID NO: 355130 - RNA, 22 nt, Human
auugagaauccauuugagauga

SEQ ID NO: 355131 - RNA, 22 nt, Human
cagcuuuaggacucauaauaaa

SEQ ID NO: 355132 - RNA, 22 nt, Human
ucagaggacgcacuaggguugu

SEQ ID NO: 355133 - RNA, 22 nt, Human
ggaccugcauuuuaacaagauc

SEQ ID NO: 355134 - RNA, 22 nt, Human
ugaggaagaacaagaauuuaga

SEQ ID NO: 355135 - RNA, 22 nt, Human
cauuuuaagaugaccugguuuc

SEQ ID NO: 355136 - RNA, 22 nt, Human
cucaggauucucgacacucaca

SEQ ID NO: 355137 - RNA, 22 nt, Human
uuucaauguaugucuuucugag

SEQ ID NO: 355138 - RNA, 22 nt, Human
caguggcagagaacagagaccu

SEQ ID NO: 355139 - RNA, 22 nt, Human
ccagaaaaugcagaacauagaa

SEQ ID NO: 355140 - RNA, 22 nt, Human
ggaucauuaacacauccaucac

SEQ ID NO: 355141 - RNA, 22 nt, Human
acagcaggauuuggcgauguug

SEQ ID NO: 355142 - RNA, 22 nt, Human
uugcugaaaacaguggguauug

SEQ ID NO: 355143 - RNA, 22 nt, Human
gaaucucaaggcuugugaggau

SEQ ID NO: 355144 - RNA, 17 nt, Human
aggcaggagauuggaga

SEQ ID NO: 355145 - RNA, 22 nt, Human
ggggaggaagcuggaacacggg

SEQ ID NO: 355146 - RNA, 22 nt, Human
uauguguacaucugguugagca

SEQ ID NO: 355147 - RNA, 23 nt, Human
ggggccugcaccggucugcgcgg

SEQ ID NO: 355148 - RNA, 22 nt, Human
cuccuugguguaguacugagca

SEQ ID NO: 355149 - RNA, 20 nt, Human
ucacuaguaaccaucugcuu

SEQ ID NO: 355150 - RNA, 22 nt, Human
gagcugccggcccacaguacua

SEQ ID NO: 355151 - RNA, 22 nt, Human
ccaggccuguguuguguggagg

SEQ ID NO: 355152 - RNA, 22 nt, Human
aggcuucuaggguuggcagcgg

SEQ ID NO: 355153 - RNA, 19 nt, Human
uucuccaggcugcagaggg

SEQ ID NO: 355154 - RNA, 22 nt, Human
acaaagucugaaaccugaggca

SEQ ID NO: 355155 - RNA, 22 nt, Human
ucugccuuuucacugccacuaa

SEQ ID NO: 355156 - RNA, 17 nt, Human
ggccuugggcugcucuu

SEQ ID NO: 355157 - RNA, 22 nt, Human
cagaggacaauagaauggaaag

SEQ ID NO: 355158 - RNA, 23 nt, Human
acauacauggagauaaagugaug

SEQ ID NO: 355159 - RNA, 22 nt, Human
caaauccagaucccagucguag

SEQ ID NO: 355160 - RNA, 22 nt, Human
aucaggaagccagucuaaugga

SEQ ID NO: 355161 - RNA, 22 nt, Human
ggccugaggcaauagucagaca

SEQ ID NO: 355162 - RNA, 21 nt, Human
ccauaccuaccucaccugguu

SEQ ID NO: 355163 - RNA, 22 nt, Human
gcagagcacccugcagugguau

SEQ ID NO: 355164 - RNA, 22 nt, Human
cagcugaggucaaagaagcagg

SEQ ID NO: 355165 - RNA, 19 nt, Human
cccagcuugaccaccugcu

SEQ ID NO: 355166 - RNA, 22 nt, Human
auaugaaaagaagucaccauug

SEQ ID NO: 355167 - RNA, 22 nt, Human
gaguccuuuugugccacaggga

SEQ ID NO: 355168 - RNA, 22 nt, Human
cccaggagaucuggaucucguc

SEQ ID NO: 355169 - RNA, 22 nt, Human
ucuuuaauuguggaagagcagc

SEQ ID NO: 355170 - RNA, 22 nt, Human
uuacaaagcguugagacaagua

SEQ ID NO: 355171 - RNA, 22 nt, Human
caggccacaaguuggguucaag

SEQ ID NO: 355172 - RNA, 22 nt, Human
agcugcucccuauccuuuccuu

SEQ ID NO: 355173 - RNA, 22 nt, Human
ggcagugagcuggagggaagga

SEQ ID NO: 355174 - RNA, 22 nt, Human
gagcaggaugggagcuggggcc

SEQ ID NO: 355175 - RNA, 22 nt, Human
gagagugagauaauuucacaua

SEQ ID NO: 355176 - RNA, 22 nt, Human
aagcaaagaguuuaguggguga

SEQ ID NO: 355177 - RNA, 20 nt, Human
uccugcaguuccuaggaggg

SEQ ID NO: 355178 - RNA, 22 nt, Human
cagcuuugccaaguaaggucuu

SEQ ID NO: 355179 - RNA, 21 nt, Human
uucuucaguuuaauauaaaau

SEQ ID NO: 355180 - RNA, 19 nt, Human
gugauuucuuuccacaagc

SEQ ID NO: 355181 - RNA, 22 nt, Human
aauuaggaauaaaugaguacuu

SEQ ID NO: 355182 - RNA, 22 nt, Human
cucaucugauaaaucacucuua

SEQ ID NO: 355183 - RNA, 22 nt, Human
caaggccugccucuggcagaaa

SEQ ID NO: 355184 - RNA, 20 nt, Human
gccuggaggcaaugggaaga

SEQ ID NO: 355185 - RNA, 22 nt, Human
gagagaggccuccauguacuga

SEQ ID NO: 355186 - RNA, 22 nt, Human
ugccaggcucagccccuaucuu

SEQ ID NO: 355187 - RNA, 22 nt, Human
uacccaggggcugagcagaggu

SEQ ID NO: 355188 - RNA, 22 nt, Human
caucacuguccaaaguucaguu

SEQ ID NO: 355189 - RNA, 22 nt, Human
uuccucagagggcgcuggggaa

SEQ ID NO: 355190 - RNA, 22 nt, Human
cuggguggcagagccugcagug

SEQ ID NO: 355191 - RNA, 22 nt, Human
guucagcccacagagggggccg

SEQ ID NO: 355192 - RNA, 22 nt, Human
ggguacaaagauuucauaagau

SEQ ID NO: 355193 - RNA, 22 nt, Human
ggagccuguggccgucacgacu

SEQ ID NO: 355194 - RNA, 19 nt, Human
agcauuuggaauucuacac

SEQ ID NO: 355195 - RNA, 22 nt, Human
uggaggcagucaaaugacugac

SEQ ID NO: 355196 - RNA, 22 nt, Human
cacugagcugauagaauuccag

SEQ ID NO: 355197 - RNA, 22 nt, Human
agccaggcuacuccuugcugac

SEQ ID NO: 355198 - RNA, 22 nt, Human
auguacauuuuccuaauguuuu

SEQ ID NO: 355199 - RNA, 22 nt, Human
uuugcauaagucauguccagug

SEQ ID NO: 355200 - RNA, 22 nt, Human
gggaaggacauucugggcucag

SEQ ID NO: 355201 - RNA, 17 nt, Human
cagugaggccuuuccuc

SEQ ID NO: 355202 - RNA, 22 nt, Human
cccaggcagccugcagggaagg

SEQ ID NO: 355203 - RNA, 22 nt, Human
aaaggccaauaaagacaagcug

SEQ ID NO: 355204 - RNA, 22 nt, Human
uggcucagaugcucuuccagug

SEQ ID NO: 355205 - RNA, 22 nt, Human
aaguccuucuuuauaugagagu

SEQ ID NO: 355206 - RNA, 22 nt, Human
gugacucacacaggccugggcu

SEQ ID NO: 355207 - RNA, 22 nt, Human
ccaaagcaagucacaugaucaa

SEQ ID NO: 355208 - RNA, 22 nt, Human
ucuucauuuuauagcaucugug

SEQ ID NO: 355209 - RNA, 19 nt, Human
uggcauugguccagauaaa

SEQ ID NO: 355210 - RNA, 22 nt, Human
cagcuugcaguacuuguuuuug

SEQ ID NO: 355211 - RNA, 22 nt, Human
augguuuugaagggaggucaaa

SEQ ID NO: 355212 - RNA, 22 nt, Human
aggggcagccucacaauccucu

SEQ ID NO: 355213 - RNA, 22 nt, Human
cuguauuuucaugccuacguac

SEQ ID NO: 355214 - RNA, 22 nt, Human
cccuggagggcagacagaugcc

SEQ ID NO: 355215 - RNA, 22 nt, Human
uuugaaauuaagauauugucca

SEQ ID NO: 355216 - RNA, 22 nt, Human
ugcacacacucugcauauacuu

SEQ ID NO: 355217 - RNA, 22 nt, Human
gaggcagccucaguggaccucg

SEQ ID NO: 355218 - RNA, 22 nt, Human
gaggccugaaaggggaccuaug

SEQ ID NO: 355219 - RNA, 22 nt, Human
cucccucugucuuguccagaaa

SEQ ID NO: 355220 - RNA, 22 nt, Human
guuguuuugcaggauccuuaca

SEQ ID NO: 355221 - RNA, 22 nt, Human
ucaggcagaauuaucaaaagau

SEQ ID NO: 355222 - RNA, 22 nt, Human
cagucccaugagcccagaacau

SEQ ID NO: 355223 - RNA, 23 nt, Human
aagaauaaaugacauuaaaggug

SEQ ID NO: 355224 - RNA, 22 nt, Human
aggcagauuuaggagaaaagaa

SEQ ID NO: 355225 - RNA, 22 nt, Human
ucagcuuucucucgccaucagg

SEQ ID NO: 355226 - RNA, 22 nt, Human
ucccagcccagauuugugugac

SEQ ID NO: 355227 - RNA, 22 nt, Human
gagcugaaauaugaagccaauu

SEQ ID NO: 355228 - RNA, 22 nt, Human
ggccucugccucaucugggcac

SEQ ID NO: 355229 - RNA, 22 nt, Human
ggcucuggugaggguaggagau

SEQ ID NO: 355230 - RNA, 19 nt, Human
gcauuucucuuuacagcca

SEQ ID NO: 355231 - RNA, 22 nt, Human
gaccugccugagcugccucugc

SEQ ID NO: 355232 - RNA, 22 nt, Human
agaggggcucaagcaguggucu

SEQ ID NO: 355233 - RNA, 22 nt, Human
aauaauauuugaagcuucaaag

SEQ ID NO: 355234 - RNA, 22 nt, Human
uggacucaaguccaaguucacg

SEQ ID NO: 355235 - RNA, 20 nt, Human
aaaaacaguaaugcugaaga

SEQ ID NO: 355236 - RNA, 22 nt, Human
cagggacugagauccagacugu

SEQ ID NO: 355237 - RNA, 22 nt, Human
ugccugucagggggagugggaa

SEQ ID NO: 355238 - RNA, 22 nt, Human
uucaagaugcacaguggcauuc

SEQ ID NO: 355239 - RNA, 22 nt, Human
agcugcugcggaaagaugccac

SEQ ID NO: 355240 - RNA, 22 nt, Human
ucccagggucaguggugaggcc

SEQ ID NO: 355241 - RNA, 22 nt, Human
ccagccucacuggcaucaccua

SEQ ID NO: 355242 - RNA, 20 nt, Human
uaggcagagcugugcagccu

SEQ ID NO: 355243 - RNA, 22 nt, Human
gcauuucugugcauacacauga

SEQ ID NO: 355244 - RNA, 22 nt, Human
agcaccuugcucuuggccuucc

SEQ ID NO: 355245 - RNA, 22 nt, Human
gccuuggccuuccuaggccuga

SEQ ID NO: 355246 - RNA, 22 nt, Human
cauuuaguuauacuaaaacauu

SEQ ID NO: 355247 - RNA, 22 nt, Human
aacucaguguguuucuuaguau

SEQ ID NO: 355248 - RNA, 23 nt, Human
ucucaggacacacaugucuauca

SEQ ID NO: 355249 - RNA, 22 nt, Human
uggaagaauaggauagaagaac

SEQ ID NO: 355250 - RNA, 22 nt, Human
ucuauuuuauacucaaaucuuc

SEQ ID NO: 355251 - RNA, 22 nt, Human
ugcaggaauagcuacagagcug

SEQ ID NO: 355252 - RNA, 22 nt, Human
acuccuggggcugccaucacag

SEQ ID NO: 355253 - RNA, 22 nt, Human
cuuuucaugccagcccaucaca

SEQ ID NO: 355254 - RNA, 22 nt, Human
uguugagacugagggagucagc

SEQ ID NO: 355255 - RNA, 22 nt, Human
uuugaagucaaagauugauucc

SEQ ID NO: 355256 - RNA, 22 nt, Human
ccuggcugaaccaaugaagugg

SEQ ID NO: 355257 - RNA, 22 nt, Human
uaaucuaccacuauugcaauau

SEQ ID NO: 355258 - RNA, 20 nt, Human
aauguauauuuuaugccagg

SEQ ID NO: 355259 - RNA, 22 nt, Human
aaaucugguucaguaaguccuc

SEQ ID NO: 355260 - RNA, 22 nt, Human
ucucagggcgcagugaggcagu

SEQ ID NO: 355261 - RNA, 22 nt, Human
uaaagguagcaugaaacugcaa

SEQ ID NO: 355262 - RNA, 22 nt, Human
accaggagccacaggaggagcc

SEQ ID NO: 355263 - RNA, 22 nt, Human
uuccauaaucaccuuauucuuu

SEQ ID NO: 355264 - RNA, 22 nt, Human
gggcugagcuaagcuggguuga

SEQ ID NO: 355265 - RNA, 22 nt, Human
gguggccucgguggugcacagg

SEQ ID NO: 355266 - RNA, 22 nt, Human
aggugcugccccgagaaggaug

SEQ ID NO: 355267 - RNA, 22 nt, Human
agcugcccuucucuugcccuug

SEQ ID NO: 355268 - RNA, 22 nt, Human
gcagaggaggacccaggaauua

SEQ ID NO: 355269 - RNA, 22 nt, Human
acagccaggaggaacucaguga

SEQ ID NO: 355270 - RNA, 22 nt, Human
gccuggaguggacuuggccccu

SEQ ID NO: 355271 - RNA, 22 nt, Human
guagccauuggcaaugaagccu

SEQ ID NO: 355272 - RNA, 22 nt, Human
agguggagacccagagaaggcg

SEQ ID NO: 355273 - RNA, 22 nt, Human
uccaggcaucuguauuuuuuaa

SEQ ID NO: 355274 - RNA, 22 nt, Human
ucugccagugguuuggcccuga

SEQ ID NO: 355275 - RNA, 22 nt, Human
cagugguugguagauacuugag

SEQ ID NO: 355276 - RNA, 22 nt, Human
uauuccagugugaucuuuguag

SEQ ID NO: 355277 - RNA, 22 nt, Human
gcagaggacagggauuuagauu

SEQ ID NO: 355278 - RNA, 22 nt, Human
uauuccagguauucuucaagag

SEQ ID NO: 355279 - RNA, 22 nt, Human
aggcugcguuagccucacuccc

SEQ ID NO: 355280 - RNA, 22 nt, Human
cagaguggcgacccccucagcu

SEQ ID NO: 355281 - RNA, 22 nt, Human
uugaacauuggcaauuucauau

SEQ ID NO: 355282 - RNA, 22 nt, Human
cuggcagcaguuaugaaacaau

SEQ ID NO: 355283 - RNA, 22 nt, Human
gagggcugcuggaaaaaugcag

SEQ ID NO: 355284 - RNA, 22 nt, Human
agggcucccgugaggugacugc

SEQ ID NO: 355285 - RNA, 22 nt, Human
ggagauagacuuggugagccac

SEQ ID NO: 355286 - RNA, 21 nt, Human
uuugaaagugggugauucuuu

SEQ ID NO: 355287 - RNA, 22 nt, Human
uggcucagccauucguguugcc

SEQ ID NO: 355288 - RNA, 22 nt, Human
gauuuuucaguauaaaauauau

SEQ ID NO: 355289 - RNA, 22 nt, Human
cagaaauaaacuucucacaucg

SEQ ID NO: 355290 - RNA, 22 nt, Human
gcagcuggcucagagagguggg

SEQ ID NO: 355291 - RNA, 22 nt, Human
uugcuuuguuacugcaguuucc

SEQ ID NO: 355292 - RNA, 22 nt, Human
uccagcuugccuggucuuuugg

SEQ ID NO: 355293 - RNA, 22 nt, Human
caggccagguggcaggcaaaac

SEQ ID NO: 355294 - RNA, 22 nt, Human
aguuuagaguucaaauuaguuc

SEQ ID NO: 355295 - RNA, 22 nt, Human
uagcaggguccaaugugaggca

SEQ ID NO: 355296 - RNA, 22 nt, Human
gccugccugcugucaucugccu

SEQ ID NO: 355297 - RNA, 22 nt, Human
aggcacaguggcucacaccugu

SEQ ID NO: 355298 - RNA, 22 nt, Human
uccaggaguggggcagaggucu

SEQ ID NO: 355299 - RNA, 22 nt, Human
guguaaggccccagguucuuua

SEQ ID NO: 355300 - RNA, 22 nt, Human
aaggcaguuaauuuggcuagaa

SEQ ID NO: 355301 - RNA, 22 nt, Human
ugauuuccaauaaggagaaugu

SEQ ID NO: 355302 - RNA, 22 nt, Human
gaaucauuggaaccacauccaa

SEQ ID NO: 355303 - RNA, 22 nt, Human
ucagaggaugcuguucuuuaau

SEQ ID NO: 355304 - RNA, 20 nt, Human
aggcacuguugucuguaucc

SEQ ID NO: 355305 - RNA, 22 nt, Human
auagcuuuacagaagaguuuag

SEQ ID NO: 355306 - RNA, 22 nt, Human
acagguggagugguuagcaggc

SEQ ID NO: 355307 - RNA, 22 nt, Human
caggcagcugcgacaagagagc

SEQ ID NO: 355308 - RNA, 22 nt, Human
agcagccacccagcugcucauu

SEQ ID NO: 355309 - RNA, 22 nt, Human
uccuguggaagacaguguuggg

SEQ ID NO: 355310 - RNA, 22 nt, Human
guuugcauuccaauuuagggga

SEQ ID NO: 355311 - RNA, 22 nt, Human
aucuucaaagcacaucguuugu

SEQ ID NO: 355312 - RNA, 21 nt, Human
ugaagccugaggcauagcccc

SEQ ID NO: 355313 - RNA, 22 nt, Human
ugcauauuauguguaucugucu

SEQ ID NO: 355314 - RNA, 22 nt, Human
ccugggugaaaucucuccugca

SEQ ID NO: 355315 - RNA, 22 nt, Human
caggaugguggcaugaucagaa

SEQ ID NO: 355316 - RNA, 22 nt, Human
ggcugccugcuccuccugcacg

SEQ ID NO: 355317 - RNA, 22 nt, Human
ucccucuguguugggcaugccu

SEQ ID NO: 355318 - RNA, 22 nt, Human
ugcucuggguccugggccuccu

SEQ ID NO: 355319 - RNA, 22 nt, Human
cugaaauuccauuucagccaca

SEQ ID NO: 355320 - RNA, 22 nt, Human
cucccagggccaucgagucacu

SEQ ID NO: 355321 - RNA, 22 nt, Human
acaccagggccuagccagggcg

SEQ ID NO: 355322 - RNA, 22 nt, Human
ccauuguaaagaguauacuuug

SEQ ID NO: 355323 - RNA, 22 nt, Human
ugauaauauuuugaaucauaag

SEQ ID NO: 355324 - RNA, 22 nt, Human
gaggggcugggcagucccugga

SEQ ID NO: 355325 - RNA, 22 nt, Human
cucccagagaccaagcugagaa

SEQ ID NO: 355326 - RNA, 22 nt, Human
uggcucuggugcgggcuccugc

SEQ ID NO: 355327 - RNA, 22 nt, Human
acaggcuuacaggcugcaagua

SEQ ID NO: 355328 - RNA, 22 nt, Human
ccugucucccuggcauggcuca

SEQ ID NO: 355329 - RNA, 22 nt, Human
ggcggggguccaggagccugca

SEQ ID NO: 355330 - RNA, 22 nt, Human
gccucccuggcccacagcagcg

SEQ ID NO: 355331 - RNA, 22 nt, Human
ucuguuccaguagaaaggugca

SEQ ID NO: 355332 - RNA, 22 nt, Human
acauuucuccuugcaggaguca

SEQ ID NO: 355333 - RNA, 22 nt, Human
uuguuuuggaagaacuuacucu

SEQ ID NO: 355334 - RNA, 22 nt, Human
cagcacaguacaaggcacggau

SEQ ID NO: 355335 - RNA, 22 nt, Human
cuggaaggcucugcugccuguc

SEQ ID NO: 355336 - RNA, 22 nt, Human
ccagucagccaagcugcagcgg

SEQ ID NO: 355337 - RNA, 23 nt, Human
ccugcagcugcuggggcuccacc

SEQ ID NO: 355338 - RNA, 22 nt, Human
aaaguauucuugacuguuuuuc

SEQ ID NO: 355339 - RNA, 22 nt, Human
gggcagagacucagaaacagaa

SEQ ID NO: 355340 - RNA, 22 nt, Human
auuuacagaugaugcuauuuga

SEQ ID NO: 355341 - RNA, 22 nt, Human
uagauauaagguccuuagaaca

SEQ ID NO: 355342 - RNA, 22 nt, Human
agugaaauuuguuuagauaggu

SEQ ID NO: 355343 - RNA, 22 nt, Human
ugggccugaguuugggaacugg

SEQ ID NO: 355344 - RNA, 22 nt, Human
uuucagaaagcaucaucaaagu

SEQ ID NO: 355345 - RNA, 19 nt, Human
acagaaauguaagugagac

SEQ ID NO: 355346 - RNA, 22 nt, Human
aauguuaauguguuugcuuaug

SEQ ID NO: 355347 - RNA, 22 nt, Human
cccaggaugucgaggcugcagu

SEQ ID NO: 355348 - RNA, 22 nt, Human
gagugucugaauuagagcacaa

SEQ ID NO: 355349 - RNA, 22 nt, Human
cagcaggagcagucagacuccu

SEQ ID NO: 355350 - RNA, 22 nt, Human
caguuucuacgacuuaagcaca

SEQ ID NO: 355351 - RNA, 22 nt, Human
uaagacacaugcguacaagaua

SEQ ID NO: 355352 - RNA, 22 nt, Human
cacagcuuccauuagaaugaga

SEQ ID NO: 355353 - RNA, 22 nt, Human
caugcacuuaccugaaauucaa

SEQ ID NO: 355354 - RNA, 22 nt, Human
caaagugcugagauuacaggua

SEQ ID NO: 355355 - RNA, 23 nt, Human
uggggagaguuacccuggaagcg

SEQ ID NO: 355356 - RNA, 22 nt, Human
ccugcugugaaacuggcauaug

SEQ ID NO: 355357 - RNA, 22 nt, Human
gugccugugccaggggugugcu

SEQ ID NO: 355358 - RNA, 22 nt, Human
uuauuuugccacaggugaccuu

SEQ ID NO: 355359 - RNA, 22 nt, Human
cuguguggccucaagccagccu

SEQ ID NO: 355360 - RNA, 21 nt, Human
ucagcagcuuuugcagucccu

SEQ ID NO: 355361 - RNA, 22 nt, Human
uucucuuauucuggauaugcag

SEQ ID NO: 355362 - RNA, 22 nt, Human
agucaaaugaguaaauauauaa

SEQ ID NO: 355363 - RNA, 22 nt, Human
ucagggcaagauugguuaauaa

SEQ ID NO: 355364 - RNA, 22 nt, Human
uugaaagacuucuccugugaaa

SEQ ID NO: 355365 - RNA, 22 nt, Human
ggcucacgcaauuaucccggcc

SEQ ID NO: 355366 - RNA, 22 nt, Human
gucacuggggccacaugcagaa

SEQ ID NO: 355367 - RNA, 22 nt, Human
agauggggcucaguguggaggc

SEQ ID NO: 355368 - RNA, 22 nt, Human
agaagcugacagaugcagcagg

SEQ ID NO: 355369 - RNA, 19 nt, Human
acuuucuccaggaccuguu

SEQ ID NO: 355370 - RNA, 22 nt, Human
gugggcagacagugcuuugcag

SEQ ID NO: 355371 - RNA, 22 nt, Human
uguuccaucaguuuuugguuga

SEQ ID NO: 355372 - RNA, 22 nt, Human
uggcugucagcugccuggugcg

SEQ ID NO: 355373 - RNA, 20 nt, Human
ucccuggaggugguggcauc

SEQ ID NO: 355374 - RNA, 22 nt, Human
gccucugcccuccugggacugc

SEQ ID NO: 355375 - RNA, 22 nt, Human
cagcugacccagugaggaggca

SEQ ID NO: 355376 - RNA, 22 nt, Human
uauguacacacacaugcaugua

SEQ ID NO: 355377 - RNA, 22 nt, Human
ucuccuuuaagauuuccucagg

SEQ ID NO: 355378 - RNA, 22 nt, Human
guuauguacuuuuuaaaucuug

SEQ ID NO: 355379 - RNA, 22 nt, Human
cugcagugcaagcccagaugga

SEQ ID NO: 355380 - RNA, 22 nt, Human
cuacagacccaccuuggaagaa

SEQ ID NO: 355381 - RNA, 22 nt, Human
cagucucagaggugggaguggg

SEQ ID NO: 355382 - RNA, 17 nt, Human
aagacagaagccaugag

SEQ ID NO: 355383 - RNA, 20 nt, Human
cucuccucacccgugucagg

SEQ ID NO: 355384 - RNA, 22 nt, Human
cagcucccaguggcagcuccuu

SEQ ID NO: 355385 - RNA, 22 nt, Human
agcaagcuaccuagauagucua

SEQ ID NO: 355386 - RNA, 22 nt, Human
cacaggagguuaggaagugguc

SEQ ID NO: 355387 - RNA, 22 nt, Human
ggagccuguggcugcuugaagc

SEQ ID NO: 355388 - RNA, 19 nt, Human
uccucaggggcucacagac

SEQ ID NO: 355389 - RNA, 22 nt, Human
uggagcagggcaucacugugcg

SEQ ID NO: 355390 - RNA, 22 nt, Human
gcaggguccauggaggcagccc

SEQ ID NO: 355391 - RNA, 21 nt, Human
ccuuuacaauuuugcauuccu

SEQ ID NO: 355392 - RNA, 22 nt, Human
gugcuugggggaaguaacagac

SEQ ID NO: 355393 - RNA, 22 nt, Human
ugggacuuguguggcaguauuu

SEQ ID NO: 355394 - RNA, 22 nt, Human
ugucauaacuuagugacaaauc

SEQ ID NO: 355395 - RNA, 22 nt, Human
ggcagugagucccggagaggcc

SEQ ID NO: 355396 - RNA, 22 nt, Human
guacauuuugagguuaaaacaa

SEQ ID NO: 355397 - RNA, 22 nt, Human
uuagaaaauuugcuucuuugga

SEQ ID NO: 355398 - RNA, 22 nt, Human
ucacugcaaggaggcuucucaa

SEQ ID NO: 355399 - RNA, 22 nt, Human
uaaugucagcauaguuuauuuu

SEQ ID NO: 355400 - RNA, 22 nt, Human
aguccagugaacuguaaauagg

SEQ ID NO: 355401 - RNA, 22 nt, Human
acccaggaaaacauggugcaga

SEQ ID NO: 355402 - RNA, 22 nt, Human
ugcauugauagaaaaacaugga

SEQ ID NO: 355403 - RNA, 20 nt, Human
auucuacaagaauaagcaug

SEQ ID NO: 355404 - RNA, 22 nt, Human
aaggucauugguucugaauucu

SEQ ID NO: 355405 - RNA, 21 nt, Human
ggcagaaguagcauggacggg

SEQ ID NO: 355406 - RNA, 22 nt, Human
aaugcacaugucuuggccucac

SEQ ID NO: 355407 - RNA, 22 nt, Human
acccaggacaaaauaaccaggu

SEQ ID NO: 355408 - RNA, 22 nt, Human
uuuaaugaauaauucaaaucug

SEQ ID NO: 355409 - RNA, 22 nt, Human
uacagcuaggcaaaaaugacau

SEQ ID NO: 355410 - RNA, 22 nt, Human
ugggcugccagcucuccagaug

SEQ ID NO: 355411 - RNA, 22 nt, Human
cuuuguagcugcuucugauuua

SEQ ID NO: 355412 - RNA, 22 nt, Human
ugaagaauaagauagauggagc

SEQ ID NO: 355413 - RNA, 22 nt, Human
auagaacagaaacagaugcaca

SEQ ID NO: 355414 - RNA, 19 nt, Human
aaggcagcaguagcaucca

SEQ ID NO: 355415 - RNA, 22 nt, Human
cagggugcgccacucagaugua

SEQ ID NO: 355416 - RNA, 19 nt, Human
ucauaaggagagaggaaau

SEQ ID NO: 355417 - RNA, 22 nt, Human
accugagccuagggagguugag

SEQ ID NO: 355418 - RNA, 22 nt, Human
caagaugaucccugaaggcagc

SEQ ID NO: 355419 - RNA, 22 nt, Human
uuacagaagugaaggccuuuaa

SEQ ID NO: 355420 - RNA, 22 nt, Human
cugaggaguuuggguuguucaa

SEQ ID NO: 355421 - RNA, 22 nt, Human
gauuuucaugauaaacuuguga

SEQ ID NO: 355422 - RNA, 22 nt, Human
gaggaaccacucugagaagcca

SEQ ID NO: 355423 - RNA, 22 nt, Human
cugagagcagggacuugagcca

SEQ ID NO: 355424 - RNA, 22 nt, Human
agcuguguguuuccacugagcu

SEQ ID NO: 355425 - RNA, 22 nt, Human
agaagagccuggggaccauggc

SEQ ID NO: 355426 - RNA, 20 nt, Human
uauuuagauucaaguaugga

SEQ ID NO: 355427 - RNA, 22 nt, Human
cagcuggaggagcagcuuccag

SEQ ID NO: 355428 - RNA, 22 nt, Human
cuguugucuucauugucauauc

SEQ ID NO: 355429 - RNA, 22 nt, Human
aagagguugucugugaugaguu

SEQ ID NO: 355430 - RNA, 22 nt, Human
ggucucagcuggaguccuuggu

SEQ ID NO: 355431 - RNA, 22 nt, Human
auuaggcagggcaugguggcuc

SEQ ID NO: 355432 - RNA, 22 nt, Human
acuguagcugccacuggaugca

SEQ ID NO: 355433 - RNA, 22 nt, Human
augcaccugaacuccaucagcu

SEQ ID NO: 355434 - RNA, 22 nt, Human
uacagaaaucacaucgcuuuga

SEQ ID NO: 355435 - RNA, 22 nt, Human
agagccugucugccuuucuacc

SEQ ID NO: 355436 - RNA, 22 nt, Human
uucugcaggagcccuaguguau

SEQ ID NO: 355437 - RNA, 22 nt, Human
ugaaacagucuccagacuugga

SEQ ID NO: 355438 - RNA, 23 nt, Human
uggaggaaacacaucagaagacc

SEQ ID NO: 355439 - RNA, 22 nt, Human
ucucaggguuuccugggggcug

SEQ ID NO: 355440 - RNA, 22 nt, Human
ggggacaguuaaagaccaagac

SEQ ID NO: 355441 - RNA, 22 nt, Human
uccuggagagugggcgagcaca

SEQ ID NO: 355442 - RNA, 22 nt, Human
cugaaggauguguggugggagu

SEQ ID NO: 355443 - RNA, 22 nt, Human
aaaugucuaucuggcauauucc

SEQ ID NO: 355444 - RNA, 21 nt, Human
aaugaaguggcuauuuugagg

SEQ ID NO: 355445 - RNA, 22 nt, Human
caguaaagcauguaugucuuca

SEQ ID NO: 355446 - RNA, 22 nt, Human
cagugcagaacacauggaaaau

SEQ ID NO: 355447 - RNA, 22 nt, Human
guacauguugguuguuuccagu

SEQ ID NO: 355448 - RNA, 22 nt, Human
gccagggaaacugcagaccagc

SEQ ID NO: 355449 - RNA, 22 nt, Human
agcaggugacccaagcaggcug

SEQ ID NO: 355450 - RNA, 22 nt, Human
cuuacauugugugcaugagggg

SEQ ID NO: 355451 - RNA, 22 nt, Human
ugcugguggagaaaguggaggu

SEQ ID NO: 355452 - RNA, 22 nt, Human
cuggugccauucuguggccuag

SEQ ID NO: 355453 - RNA, 22 nt, Human
uauuuccugcauggugauguaa

SEQ ID NO: 355454 - RNA, 19 nt, Human
aagcagcccuggcaagagc

SEQ ID NO: 355455 - RNA, 22 nt, Human
gcaagauguuaacauagggaga

SEQ ID NO: 355456 - RNA, 22 nt, Human
uucuucuuuccuauaauuaauu

SEQ ID NO: 355457 - RNA, 22 nt, Human
ucuggaaguuagaggaggaaag

SEQ ID NO: 355458 - RNA, 22 nt, Human
gugcagagaaaugagaagucga

SEQ ID NO: 355459 - RNA, 22 nt, Human
ugaguccaauaggggccuggaa

SEQ ID NO: 355460 - RNA, 22 nt, Human
cuggccaguuguccuggcuugg

SEQ ID NO: 355461 - RNA, 22 nt, Human
gagagcuguaauagucaugucu

SEQ ID NO: 355462 - RNA, 22 nt, Human
cacauguuuggcaugucaccaa

SEQ ID NO: 355463 - RNA, 22 nt, Human
uggccucugggaaagcagauuc

SEQ ID NO: 355464 - RNA, 22 nt, Human
cagacuggccacaucugcacug

SEQ ID NO: 355465 - RNA, 22 nt, Human
aggacagaccuaggacuggagc

SEQ ID NO: 355466 - RNA, 22 nt, Human
guccucugggagccuugagccu

SEQ ID NO: 355467 - RNA, 22 nt, Human
aaugggagagaacacaaagucc

SEQ ID NO: 355468 - RNA, 22 nt, Human
uacuguuuucuauaauggcugu

SEQ ID NO: 355469 - RNA, 22 nt, Human
auuugaagucuucaugauuucu

SEQ ID NO: 355470 - RNA, 22 nt, Human
uccagggccaagucauggaacc

SEQ ID NO: 355471 - RNA, 22 nt, Human
ucuaaccuuugaaacugcuuuc

SEQ ID NO: 355472 - RNA, 22 nt, Human
cacaaaugacugaaacgacugu

SEQ ID NO: 355473 - RNA, 22 nt, Human
gugcaugugucuuuauaguaga

SEQ ID NO: 355474 - RNA, 22 nt, Human
agcucucaagauaagaaagaac

SEQ ID NO: 355475 - RNA, 22 nt, Human
aagcagcuuaaauuagagccug

SEQ ID NO: 355476 - RNA, 22 nt, Human
ugcuggccaacaaggcuccaag

SEQ ID NO: 355477 - RNA, 22 nt, Human
agcucccauuaucuucugaaac

SEQ ID NO: 355478 - RNA, 22 nt, Human
cuggaguguaaagagcauagaa

SEQ ID NO: 355479 - RNA, 22 nt, Human
cugggccuagcaacagaggagu

SEQ ID NO: 355480 - RNA, 22 nt, Human
gugcugucaauugcuuucagua

SEQ ID NO: 355481 - RNA, 22 nt, Human
aggagcuguuuuguucagcaaa

SEQ ID NO: 355482 - RNA, 22 nt, Human
auuucaggauagccuaguuuug

SEQ ID NO: 355483 - RNA, 22 nt, Human
aagaugcacaauguggcaauua

SEQ ID NO: 355484 - RNA, 22 nt, Human
gcagauggacuguaugaccuga

SEQ ID NO: 355485 - RNA, 22 nt, Human
cugaggccucucuccugggcuu

SEQ ID NO: 355486 - RNA, 22 nt, Human
aggcagguuggugagaagacug

SEQ ID NO: 355487 - RNA, 19 nt, Human
gcuucccaccagccagccc

SEQ ID NO: 355488 - RNA, 22 nt, Human
ucaacacuauccaggcaaucuu

SEQ ID NO: 355489 - RNA, 22 nt, Human
cugcccugacugaccuuuugaa

SEQ ID NO: 355490 - RNA, 22 nt, Human
uucuuguaauuuggagaaauga

SEQ ID NO: 355491 - RNA, 22 nt, Human
ucuuugaauccuuuacaucuga

SEQ ID NO: 355492 - RNA, 22 nt, Human
uucacauuggugauauguuucu

SEQ ID NO: 355493 - RNA, 22 nt, Human
ucagagagcuggugggcagagg

SEQ ID NO: 355494 - RNA, 22 nt, Human
uugaaaguuuauggagucugca

SEQ ID NO: 355495 - RNA, 22 nt, Human
agaacagcagcacgucaagcug

SEQ ID NO: 355496 - RNA, 22 nt, Human
cugggcaguuuauucaguucug

SEQ ID NO: 355497 - RNA, 22 nt, Human
acauuuaaauaccuauguuucu

SEQ ID NO: 355498 - RNA, 22 nt, Human
uucuucuuucccccugugguac

SEQ ID NO: 355499 - RNA, 22 nt, Human
ucccaggcugggggccugaagu

SEQ ID NO: 355500 - RNA, 22 nt, Human
uagccuucucaagacaaaguug

SEQ ID NO: 355501 - RNA, 22 nt, Human
uccugggaagagaccugagcau

SEQ ID NO: 355502 - RNA, 22 nt, Human
uuugguccugagcaaaacuaug

SEQ ID NO: 355503 - RNA, 22 nt, Human
caccaucagcagcaggugucaa

SEQ ID NO: 355504 - RNA, 22 nt, Human
ugcauuuuuaacaaggcuaauu

SEQ ID NO: 355505 - RNA, 22 nt, Human
gggaccuggucuagcacugagc

SEQ ID NO: 355506 - RNA, 20 nt, Human
uugagcuuuuaguacagaca

SEQ ID NO: 355507 - RNA, 22 nt, Human
uggcucaguaaucgagucuccu

SEQ ID NO: 355508 - RNA, 22 nt, Human
ggcuucugaaaucucugugcgu

SEQ ID NO: 355509 - RNA, 22 nt, Human
caggagugucuccacacagcaa

SEQ ID NO: 355510 - RNA, 22 nt, Human
acaaggaggucuggggggcccu

SEQ ID NO: 355511 - RNA, 22 nt, Human
aaaugucugagacuucugaacu

SEQ ID NO: 355512 - RNA, 22 nt, Human
aaaacugaaauacgauccaaug

SEQ ID NO: 355513 - RNA, 22 nt, Human
cccaggaguaagugacauuguu

SEQ ID NO: 355514 - RNA, 22 nt, Human
gcugucaggaacaugccuuggu

SEQ ID NO: 355515 - RNA, 22 nt, Human
agggauggaagcucgucugcaa

SEQ ID NO: 355516 - RNA, 22 nt, Human
guaucuuuugguggaaaaauaa

SEQ ID NO: 355517 - RNA, 22 nt, Human
uugcagaggcaaaaaugaacuc

SEQ ID NO: 355518 - RNA, 22 nt, Human
gccaggagcaugucauuguuga

SEQ ID NO: 355519 - RNA, 22 nt, Human
uagccgcuuaauuauuugguga

SEQ ID NO: 355520 - RNA, 22 nt, Human
cagucaccauagaauaaaacau

SEQ ID NO: 355521 - RNA, 22 nt, Human
auuucaguagaaaaucuugauu

SEQ ID NO: 355522 - RNA, 22 nt, Human
agguuuaugccuuggagcuggg

SEQ ID NO: 355523 - RNA, 22 nt, Human
ugaggcagugauguuuaagcac

SEQ ID NO: 355524 - RNA, 22 nt, Human
ugccaggagucaggccaggcag

SEQ ID NO: 355525 - RNA, 22 nt, Human
agcagagguuuguuggaaaccu

SEQ ID NO: 355526 - RNA, 22 nt, Human
aaugguauuugucaagcauagu

SEQ ID NO: 355527 - RNA, 22 nt, Human
caggccagugugcuucccaggc

SEQ ID NO: 355528 - RNA, 22 nt, Human
ugucauguguucuuaaauacau

SEQ ID NO: 355529 - RNA, 22 nt, Human
cacauccuucagcugagcccag

SEQ ID NO: 355530 - RNA, 22 nt, Human
caagagcugaggcuggagaggu

SEQ ID NO: 355531 - RNA, 22 nt, Human
auuccaaagacagaagcagcug

SEQ ID NO: 355532 - RNA, 22 nt, Human
aguagaaagaaggcacugggcc

SEQ ID NO: 355533 - RNA, 22 nt, Human
uaccugagcccagugcagcaua

SEQ ID NO: 355534 - RNA, 21 nt, Human
agggcagauuagcuguaagag

SEQ ID NO: 355535 - RNA, 22 nt, Human
ucucuuccaguaagagucuuua

SEQ ID NO: 355536 - RNA, 22 nt, Human
cauagaaaguauuauggaauuu

SEQ ID NO: 355537 - RNA, 22 nt, Human
cagcaugcaaguccagaugugg

SEQ ID NO: 355538 - RNA, 22 nt, Human
aggacuuagaacauuauguacu

SEQ ID NO: 355539 - RNA, 22 nt, Human
aggcugaugcuggcugaggcug

SEQ ID NO: 355540 - RNA, 22 nt, Human
uaauccacaauagagauuaucu

SEQ ID NO: 355541 - RNA, 22 nt, Human
uccagggacacagaguccuucu

SEQ ID NO: 355542 - RNA, 22 nt, Human
ugcugcuguuuccuacaucuca

SEQ ID NO: 355543 - RNA, 22 nt, Human
aucaguuuaaaugggcuguugg

SEQ ID NO: 355544 - RNA, 19 nt, Human
cugucaggggcuggauguu

SEQ ID NO: 355545 - RNA, 22 nt, Human
ggagaggauguuuuaguaacuu

SEQ ID NO: 355546 - RNA, 22 nt, Human
ccaguggacuucucccuguggu

SEQ ID NO: 355547 - RNA, 22 nt, Human
caacugcugacaccaucacucc

SEQ ID NO: 355548 - RNA, 22 nt, Human
auuccaaacagugcugcagacu

SEQ ID NO: 355549 - RNA, 23 nt, Human
aaugauuucaugaugauagcagc

SEQ ID NO: 355550 - RNA, 22 nt, Human
gccagccugugggggcucugug

SEQ ID NO: 355551 - RNA, 22 nt, Human
ugaggccagugacauauauuaa

SEQ ID NO: 355552 - RNA, 22 nt, Human
cuugaaagcacuuaguaaauua

SEQ ID NO: 355553 - RNA, 20 nt, Human
aggaggggauagaaucaaag

SEQ ID NO: 355554 - RNA, 22 nt, Human
caguacuuaguucucaugguuu

SEQ ID NO: 355555 - RNA, 22 nt, Human
ggaaaaggccacagggacacau

SEQ ID NO: 355556 - RNA, 22 nt, Human
ggcugccuacuuucccagaguu

SEQ ID NO: 355557 - RNA, 20 nt, Human
auguagaugaaagcaaaggc

SEQ ID NO: 355558 - RNA, 22 nt, Human
ggccucugggguccugagccca

SEQ ID NO: 355559 - RNA, 22 nt, Human
cauuucaauuauuugcucuucu

SEQ ID NO: 355560 - RNA, 22 nt, Human
uguaggauuuucaccagaccuu

SEQ ID NO: 355561 - RNA, 22 nt, Human
aaguccuuguauacagaaucaa

SEQ ID NO: 355562 - RNA, 22 nt, Human
uagggacaaagagcugaggccu

SEQ ID NO: 355563 - RNA, 20 nt, Human
agcccuguuuccuggagaga

SEQ ID NO: 355564 - RNA, 22 nt, Human
guucaaggaagggaggaaagcc

SEQ ID NO: 355565 - RNA, 22 nt, Human
ugccugucucugacugccauua

SEQ ID NO: 355566 - RNA, 22 nt, Human
gcccucucuucugcagccucca

SEQ ID NO: 355567 - RNA, 22 nt, Human
aucagcaucuuuaacaauuacc

SEQ ID NO: 355568 - RNA, 22 nt, Human
acuguucaagcaaaugacauug

SEQ ID NO: 355569 - RNA, 22 nt, Human
auucaguuaaaaacuguacuuc

SEQ ID NO: 355570 - RNA, 22 nt, Human
cugacucagcagcugaugaucc

SEQ ID NO: 355571 - RNA, 22 nt, Human
gcucccaggaagagaagggcca

SEQ ID NO: 355572 - RNA, 19 nt, Human
gggaccugacuaauuggca

SEQ ID NO: 355573 - RNA, 22 nt, Human
ugaagacacauacaagggaaug

SEQ ID NO: 355574 - RNA, 22 nt, Human
uuuuuccuuggaugugucucuc

SEQ ID NO: 355575 - RNA, 19 nt, Human
agucucaguguacagaggc

SEQ ID NO: 355576 - RNA, 22 nt, Human
agccugucugucuccaaagcug

SEQ ID NO: 355577 - RNA, 22 nt, Human
auucuucaguauguguggauug

SEQ ID NO: 355578 - RNA, 22 nt, Human
uggcagcuccggguaggggcug

SEQ ID NO: 355579 - RNA, 22 nt, Human
uagaugcuguagaaauacuuau

SEQ ID NO: 355580 - RNA, 22 nt, Human
ucucauugguauauacaugugu

SEQ ID NO: 355581 - RNA, 22 nt, Human
aagcugccuuccaugugaggaa

SEQ ID NO: 355582 - RNA, 22 nt, Human
uauuagguaaaggacuugcagg

SEQ ID NO: 355583 - RNA, 22 nt, Human
ggaggccaucuggcuggaggcu

SEQ ID NO: 355584 - RNA, 22 nt, Human
ugcauuguugaugaguugaaua

SEQ ID NO: 355585 - RNA, 18 nt, Human
gaugggagcaagagaaga

SEQ ID NO: 355586 - RNA, 22 nt, Human
uuuaaauuauaguuaaugucug

SEQ ID NO: 355587 - RNA, 22 nt, Human
cuucagggugacgcaggcugca

SEQ ID NO: 355588 - RNA, 23 nt, Human
aaauuauugcucuucaauugccu

SEQ ID NO: 355589 - RNA, 22 nt, Human
ccagccuggguguuagaagaca

SEQ ID NO: 355590 - RNA, 23 nt, Human
guuuucaacacaauaaauguaac

SEQ ID NO: 355591 - RNA, 22 nt, Human
aagcugccagcugagcugaggc

SEQ ID NO: 355592 - RNA, 22 nt, Human
ugauuucaaguagugacaugcu

SEQ ID NO: 355593 - RNA, 22 nt, Human
aguguuucucagaagggccuau

SEQ ID NO: 355594 - RNA, 22 nt, Human
gggacuggcacagggcugggag

SEQ ID NO: 355595 - RNA, 22 nt, Human
ugaaggaaagagggaacauccc

SEQ ID NO: 355596 - RNA, 22 nt, Human
agccucaguuucaggccuccuc

SEQ ID NO: 355597 - RNA, 22 nt, Human
acuauacauaaaacauuugggu

SEQ ID NO: 355598 - RNA, 22 nt, Human
ggagcuguugcgcaugcgcucg

SEQ ID NO: 355599 - RNA, 22 nt, Human
caguaggaaggaugcagaaaaa

SEQ ID NO: 355600 - RNA, 22 nt, Human
gcuggccacauugugccguccu

SEQ ID NO: 355601 - RNA, 22 nt, Human
uagucaccugugagcugcguag

SEQ ID NO: 355602 - RNA, 22 nt, Human
cagcuguguagaugcaggguca

SEQ ID NO: 355603 - RNA, 22 nt, Human
aaguccagcagugcuuguugau

SEQ ID NO: 355604 - RNA, 22 nt, Human
aggcccugggcaguucuguagc

SEQ ID NO: 355605 - RNA, 22 nt, Human
aguccccucuaacccaacuuua

SEQ ID NO: 355606 - RNA, 22 nt, Human
cagggagaucuuggcuccuggu

SEQ ID NO: 355607 - RNA, 22 nt, Human
aguccuuacaccuggaaccuau

SEQ ID NO: 355608 - RNA, 22 nt, Human
gugacagaguuuuagaucucau

SEQ ID NO: 355609 - RNA, 22 nt, Human
gaggcucacugggcaaagacuc

SEQ ID NO: 355610 - RNA, 22 nt, Human
acuuugaaucucagauaaccaa

SEQ ID NO: 355611 - RNA, 22 nt, Human
cauaaguuggguaauauaauga

SEQ ID NO: 355612 - RNA, 22 nt, Human
ucagggacugcagagggaagcu

SEQ ID NO: 355613 - RNA, 22 nt, Human
aagaugauagaucugucaaugu

SEQ ID NO: 355614 - RNA, 22 nt, Human
ucugucacccgagcaggcgaga

SEQ ID NO: 355615 - RNA, 22 nt, Human
accaggcaacugugaaugggcu

SEQ ID NO: 355616 - RNA, 22 nt, Human
uagcagaagaacaacaugaucu

SEQ ID NO: 355617 - RNA, 22 nt, Human
uguggcaggaagagcuucugag

SEQ ID NO: 355618 - RNA, 22 nt, Human
acuucuggugucauacugcauu

SEQ ID NO: 355619 - RNA, 22 nt, Human
caucagaauguuagagaaggga

SEQ ID NO: 355620 - RNA, 22 nt, Human
uuuagggacaagggucuggggu

SEQ ID NO: 355621 - RNA, 22 nt, Human
gaaggggacuggcagcugcaga

SEQ ID NO: 355622 - RNA, 22 nt, Human
caggggacauuaaagcuccaua

SEQ ID NO: 355623 - RNA, 22 nt, Human
ucugagaguagagcugccucuu

SEQ ID NO: 355624 - RNA, 22 nt, Human
aagauuucuuacuuauugaugc

SEQ ID NO: 355625 - RNA, 22 nt, Human
caagaugccccugguagggauc

SEQ ID NO: 355626 - RNA, 22 nt, Human
ucugucuccucugaggugccag

SEQ ID NO: 355627 - RNA, 22 nt, Human
ugggacaguuguccuccacucu

SEQ ID NO: 355628 - RNA, 22 nt, Human
uagcuuuaaugaguugguaaga

SEQ ID NO: 355629 - RNA, 22 nt, Human
gcucccaggcauggagguaauu

SEQ ID NO: 355630 - RNA, 22 nt, Human
uugacacagaucaauauucaac

SEQ ID NO: 355631 - RNA, 22 nt, Human
cagccugcccuggaagcccagc

SEQ ID NO: 355632 - RNA, 22 nt, Human
aauuuacaguugcugaugguac

SEQ ID NO: 355633 - RNA, 22 nt, Human
augguuuuguccucuuugguuc

SEQ ID NO: 355634 - RNA, 22 nt, Human
gcuguccucuuggacucagggc

SEQ ID NO: 355635 - RNA, 22 nt, Human
ugcuuuauaggggauugcaggc

SEQ ID NO: 355636 - RNA, 22 nt, Human
ccagccugaaaugccucauccu

SEQ ID NO: 355637 - RNA, 22 nt, Human
aaaaugugcaguuuuuaagcug

SEQ ID NO: 355638 - RNA, 23 nt, Human
uccaggcaugagcucuggaugga

SEQ ID NO: 355639 - RNA, 20 nt, Human
ugcuuccuggccacugcggg

SEQ ID NO: 355640 - RNA, 22 nt, Human
uucaggauucuuucagacuggg

SEQ ID NO: 355641 - RNA, 22 nt, Human
acaaaguccugguguauggcca

SEQ ID NO: 355642 - RNA, 22 nt, Human
auuggcagaaacagcagggcca

SEQ ID NO: 355643 - RNA, 22 nt, Human
cuucuuaaugcauaaacugugu

SEQ ID NO: 355644 - RNA, 22 nt, Human
cucagugugaaugcucaguaaa

SEQ ID NO: 355645 - RNA, 22 nt, Human
cagcuucugagcaagccagggg

SEQ ID NO: 355646 - RNA, 22 nt, Human
gucacacuagggccaaguggag

SEQ ID NO: 355647 - RNA, 22 nt, Human
uuauuucauugauuucuaagac

SEQ ID NO: 355648 - RNA, 22 nt, Human
uucacaggugacuggggauaac

SEQ ID NO: 355649 - RNA, 22 nt, Human
gcuuucuugguucugcaggggc

SEQ ID NO: 355650 - RNA, 22 nt, Human
ucagaggauugccucagcgagc

SEQ ID NO: 355651 - RNA, 22 nt, Human
guggguggaggcgucgagggca

SEQ ID NO: 355652 - RNA, 22 nt, Human
auuacaagaugcauccauauuu

SEQ ID NO: 355653 - RNA, 22 nt, Human
agugcuuuaccuagauaauguu

SEQ ID NO: 355654 - RNA, 22 nt, Human
ugggcugcugucugcacaugcu

SEQ ID NO: 355655 - RNA, 22 nt, Human
gaggucaggggagaggcugaug

SEQ ID NO: 355656 - RNA, 23 nt, Human
ggggaaguggcagugagugaggc

SEQ ID NO: 355657 - RNA, 22 nt, Human
aauagguagccagauauauaaa

SEQ ID NO: 355658 - RNA, 22 nt, Human
ugcacacaaguuggagaaugaa

SEQ ID NO: 355659 - RNA, 22 nt, Human
aaaugcaaggccaugugaagga

SEQ ID NO: 355660 - RNA, 22 nt, Human
ucagaauucugaccuuggguca

SEQ ID NO: 355661 - RNA, 22 nt, Human
gagcugccaagauuacaaucag

SEQ ID NO: 355662 - RNA, 22 nt, Human
acuugauuuugaaccuuucuac

SEQ ID NO: 355663 - RNA, 22 nt, Human
ugagccuggccugcagagacca

SEQ ID NO: 355664 - RNA, 22 nt, Human
caugucuguguacacaugcaca

SEQ ID NO: 355665 - RNA, 22 nt, Human
gcuuuccuggcccugucccugc

SEQ ID NO: 355666 - RNA, 22 nt, Human
gcagaauuggauaguugugaua

SEQ ID NO: 355667 - RNA, 22 nt, Human
gcaggggaguccacucuaugca

SEQ ID NO: 355668 - RNA, 22 nt, Human
uaggcagcgcuuggcugugcuu

SEQ ID NO: 355669 - RNA, 22 nt, Human
ucucuucauagugacacccauc

SEQ ID NO: 355670 - RNA, 22 nt, Human
cagauggaacacagaaaggaga

SEQ ID NO: 355671 - RNA, 22 nt, Human
caauuucagucucagagaguuc

SEQ ID NO: 355672 - RNA, 22 nt, Human
cacaauuuggugcuaaagaaag

SEQ ID NO: 355673 - RNA, 17 nt, Human
gaauuucuuggucaaaa

SEQ ID NO: 355674 - RNA, 23 nt, Human
ugggccuggaaagccuuagagag

SEQ ID NO: 355675 - RNA, 22 nt, Human
agggugccuggaagccacucac

SEQ ID NO: 355676 - RNA, 22 nt, Human
ggcaaaguuuucaucucauaac

SEQ ID NO: 355677 - RNA, 22 nt, Human
uauauagaaaagcagauguugg

SEQ ID NO: 355678 - RNA, 22 nt, Human
ucuggaucccaccgccacacac

SEQ ID NO: 355679 - RNA, 19 nt, Human
gcaggguguugacuguccc

SEQ ID NO: 355680 - RNA, 22 nt, Human
cagggcucagggacugcagaaa

SEQ ID NO: 355681 - RNA, 21 nt, Human
acagaacuguauagugauaaa

SEQ ID NO: 355682 - RNA, 22 nt, Human
caggcuggaguuaccuuuaggg

SEQ ID NO: 355683 - RNA, 22 nt, Human
caaggccagagccagcgauaag

SEQ ID NO: 355684 - RNA, 22 nt, Human
gcucucugggugugucuagaua

SEQ ID NO: 355685 - RNA, 22 nt, Human
aaagaaggaccuggaggaggau

SEQ ID NO: 355686 - RNA, 22 nt, Human
ugcuuuggccacuagaauucag

SEQ ID NO: 355687 - RNA, 22 nt, Human
guggccaggccgacugccaggc

SEQ ID NO: 355688 - RNA, 22 nt, Human
agcuaggacagguagagauggg

SEQ ID NO: 355689 - RNA, 22 nt, Human
gcuggcaggagccuuucccuuu

SEQ ID NO: 355690 - RNA, 22 nt, Human
uguucauuuggcccuuuuguau

SEQ ID NO: 355691 - RNA, 22 nt, Human
guuauuuucauuggcucagacu

SEQ ID NO: 355692 - RNA, 22 nt, Human
caggaaaaaugccaggagucag

SEQ ID NO: 355693 - RNA, 22 nt, Human
uacauauacugagugauuugcu

SEQ ID NO: 355694 - RNA, 16 nt, Human
ccccaggacuuggcac

SEQ ID NO: 355695 - RNA, 22 nt, Human
gaaggaaaggucucaugccuuu

SEQ ID NO: 355696 - RNA, 22 nt, Human
guucaagguuuuacagagugua

SEQ ID NO: 355697 - RNA, 22 nt, Human
gcagcuuucugcaaugucaucc

SEQ ID NO: 355698 - RNA, 22 nt, Human
ggccugcuccgggggcugagcu

SEQ ID NO: 355699 - RNA, 22 nt, Human
uccagggcuggguuggcucagc

SEQ ID NO: 355700 - RNA, 21 nt, Human
agcuuguguguaucacagugu

SEQ ID NO: 355701 - RNA, 22 nt, Human
uuuccucauuuaucugcuggga

SEQ ID NO: 355702 - RNA, 22 nt, Human
ccaggcucugcgcuggacaugg

SEQ ID NO: 355703 - RNA, 22 nt, Human
aggggaugauccucccgcagcg

SEQ ID NO: 355704 - RNA, 22 nt, Human
uggagaugcacgagcaggugga

SEQ ID NO: 355705 - RNA, 22 nt, Human
auuuauuaccucggaguuucug

SEQ ID NO: 355706 - RNA, 22 nt, Human
agaggccuuucuguugagugaa

SEQ ID NO: 355707 - RNA, 22 nt, Human
ugagccuggguggucgaggcug

SEQ ID NO: 355708 - RNA, 22 nt, Human
aagauucagccaaauuguucau

SEQ ID NO: 355709 - RNA, 22 nt, Human
agagagagggaaacugcuaaac

SEQ ID NO: 355710 - RNA, 22 nt, Human
gcucacuggccugaagaggacg

SEQ ID NO: 355711 - RNA, 22 nt, Human
ucucagagcaucauuuucuuag

SEQ ID NO: 355712 - RNA, 21 nt, Human
ucuuugcaucaguuguuuucu

SEQ ID NO: 355713 - RNA, 22 nt, Human
acagaaagaagguguauuugag

SEQ ID NO: 355714 - RNA, 22 nt, Human
acccagagcugggcuuggcaaa

SEQ ID NO: 355715 - RNA, 22 nt, Human
uaaaugcaguacaaauuguucu

SEQ ID NO: 355716 - RNA, 22 nt, Human
agcagggcuccugaaagccgcg

SEQ ID NO: 355717 - RNA, 22 nt, Human
gcagcccaaaaaagagguagau

SEQ ID NO: 355718 - RNA, 22 nt, Human
uacagaauuagauuauuagaga

SEQ ID NO: 355719 - RNA, 22 nt, Human
ccagcagcccucuuccaagacu

SEQ ID NO: 355720 - RNA, 22 nt, Human
acucaggaagaaagcagcuggu

SEQ ID NO: 355721 - RNA, 22 nt, Human
ccagcugguguuccuuaggacc

SEQ ID NO: 355722 - RNA, 22 nt, Human
gggcaugguggugcacaccugu

SEQ ID NO: 355723 - RNA, 22 nt, Human
auuucuguauccugcugucaga

SEQ ID NO: 355724 - RNA, 22 nt, Human
ccagaggcuggguucaccucag

SEQ ID NO: 355725 - RNA, 22 nt, Human
aagugguaggaagagagcacug

SEQ ID NO: 355726 - RNA, 22 nt, Human
uuaugacaggaaaaucacagaa

SEQ ID NO: 355727 - RNA, 22 nt, Human
cuuauuagugucugucugaguu

SEQ ID NO: 355728 - RNA, 18 nt, Human
cagcagagacauucaaaa

SEQ ID NO: 355729 - RNA, 22 nt, Human
cacccaggcuggagugcagggg

SEQ ID NO: 355730 - RNA, 22 nt, Human
aauucauccaugaacaauucca

SEQ ID NO: 355731 - RNA, 22 nt, Human
aggcgcaggguuuggacccagg

SEQ ID NO: 355732 - RNA, 22 nt, Human
gugccugggguugagcuaugaa

SEQ ID NO: 355733 - RNA, 21 nt, Human
aaaaagcuggggcaugcaugc

SEQ ID NO: 355734 - RNA, 22 nt, Human
gaggccugguuugcaugagaau

SEQ ID NO: 355735 - RNA, 22 nt, Human
caggccaggcugcauuugcccc

SEQ ID NO: 355736 - RNA, 22 nt, Human
cagcagcaguggcugcagaaca

SEQ ID NO: 355737 - RNA, 23 nt, Human
agccuucaggcaaugucaguaga

SEQ ID NO: 355738 - RNA, 17 nt, Human
aagagaggcugagcugg

SEQ ID NO: 355739 - RNA, 22 nt, Human
ugcaccauuaauuuaugugaga

SEQ ID NO: 355740 - RNA, 22 nt, Human
ugaagccauuacuguguuaggg

SEQ ID NO: 355741 - RNA, 22 nt, Human
gcugagcugggacaguccuggg

SEQ ID NO: 355742 - RNA, 22 nt, Human
cucugggcaggaccaguggacc

SEQ ID NO: 355743 - RNA, 23 nt, Human
aggcagugucucuuauccugucc

SEQ ID NO: 355744 - RNA, 23 nt, Human
gggcagguuuuuauaggcuucag

SEQ ID NO: 355745 - RNA, 22 nt, Human
aaagccuuggucaucugguucc

SEQ ID NO: 355746 - RNA, 22 nt, Human
cucacuggcaagacuacaggug

SEQ ID NO: 355747 - RNA, 22 nt, Human
ugguagggacacuaugcagaaa

SEQ ID NO: 355748 - RNA, 22 nt, Human
aggcugagauagguggaucauu

SEQ ID NO: 355749 - RNA, 22 nt, Human
ucuccuccuuuuuucaacauag

SEQ ID NO: 355750 - RNA, 22 nt, Human
ugcauaaagugccauaguauua

SEQ ID NO: 355751 - RNA, 22 nt, Human
agccuucaguaaauccacugug

SEQ ID NO: 355752 - RNA, 22 nt, Human
caauuucuuguuaauucucagg

SEQ ID NO: 355753 - RNA, 22 nt, Human
cuugcugucuugcauuuagagc

SEQ ID NO: 355754 - RNA, 21 nt, Human
cccagggaagccgcagucacc

SEQ ID NO: 355755 - RNA, 22 nt, Human
acagggcaccugagguaggaag

SEQ ID NO: 355756 - RNA, 22 nt, Human
acaggcuguugggguccagggu

SEQ ID NO: 355757 - RNA, 22 nt, Human
guuugcauauuugcacaggaau

SEQ ID NO: 355758 - RNA, 22 nt, Human
aagcugccagauucagucugcu

SEQ ID NO: 355759 - RNA, 20 nt, Human
uucauucauuccacaacuuc

SEQ ID NO: 355760 - RNA, 22 nt, Human
aaucagaaagaggucauguugc

SEQ ID NO: 355761 - RNA, 22 nt, Human
cagcagaggugguucacauugu

SEQ ID NO: 355762 - RNA, 22 nt, Human
augggcaguaacaguggcaguc

SEQ ID NO: 355763 - RNA, 22 nt, Human
gcuaggagauugagcucugaag

SEQ ID NO: 355764 - RNA, 22 nt, Human
aucagcaagauugugucuugua

SEQ ID NO: 355765 - RNA, 20 nt, Human
ugaaggccauuuguuccaga

SEQ ID NO: 355766 - RNA, 22 nt, Human
uccugccugcaaucccagcacu

SEQ ID NO: 355767 - RNA, 22 nt, Human
gccuggugcuaugagggccagc

SEQ ID NO: 355768 - RNA, 22 nt, Human
uuacauuagacccacuuucaug

SEQ ID NO: 355769 - RNA, 22 nt, Human
gcaccugggacccagaggcacc

SEQ ID NO: 355770 - RNA, 22 nt, Human
cauggacucugguuuggggagc

SEQ ID NO: 355771 - RNA, 16 nt, Human
uccaggcauaucugag

SEQ ID NO: 355772 - RNA, 19 nt, Human
auggaaaaugccagacuga

SEQ ID NO: 355773 - RNA, 22 nt, Human
cagaguucaaagccugcuggga

SEQ ID NO: 355774 - RNA, 22 nt, Human
acauuucucccugcaugccugc

SEQ ID NO: 355775 - RNA, 21 nt, Human
uccucagggccccagagcacu

SEQ ID NO: 355776 - RNA, 22 nt, Human
uccuguggagaggacuggaggu

SEQ ID NO: 355777 - RNA, 22 nt, Human
uuaauucugccuuucauguaac

SEQ ID NO: 355778 - RNA, 22 nt, Human
auuguacuuuuauuacauguag

SEQ ID NO: 355779 - RNA, 22 nt, Human
gcugccagcuuuccuuggcuga

SEQ ID NO: 355780 - RNA, 18 nt, Human
gggcucugauccuucacc

SEQ ID NO: 355781 - RNA, 22 nt, Human
guggugcaggccagcaggggcg

SEQ ID NO: 355782 - RNA, 22 nt, Human
aaaucuguaagcaauugcucag

SEQ ID NO: 355783 - RNA, 22 nt, Human
ggcuucucgugccgaagcaaga

SEQ ID NO: 355784 - RNA, 22 nt, Human
ggaagaggaggagccaggcuuu

SEQ ID NO: 355785 - RNA, 22 nt, Human
gggucuccauguuaacaucacu

SEQ ID NO: 355786 - RNA, 17 nt, Human
uuucaucugggaccacc

SEQ ID NO: 355787 - RNA, 22 nt, Human
ccacagcugaccgcaggugagc

SEQ ID NO: 355788 - RNA, 22 nt, Human
gcucugucauuuugcagacacu

SEQ ID NO: 355789 - RNA, 22 nt, Human
augaaacaguguguauagcaaa

SEQ ID NO: 355790 - RNA, 20 nt, Human
ucucugagcuucucuugggg

SEQ ID NO: 355791 - RNA, 22 nt, Human
ugucauugaggaaaacuaggug

SEQ ID NO: 355792 - RNA, 21 nt, Human
cuguuucuugugaagugacac

SEQ ID NO: 355793 - RNA, 22 nt, Human
ucaggcagaaaaaucacuaauu

SEQ ID NO: 355794 - RNA, 21 nt, Human
uggccaaacuggagcauuuga

SEQ ID NO: 355795 - RNA, 22 nt, Human
cagagcugcgcuuuuuccuggu

SEQ ID NO: 355796 - RNA, 22 nt, Human
uuucauaaggguuucuagacuu

SEQ ID NO: 355797 - RNA, 22 nt, Human
auauuccauugguuucccuucu

SEQ ID NO: 355798 - RNA, 22 nt, Human
agggccagaugaagccacaagc

SEQ ID NO: 355799 - RNA, 22 nt, Human
gugcaggggaucagguugcagc

SEQ ID NO: 355800 - RNA, 22 nt, Human
uuugaaaggaaguuaauacuuu

SEQ ID NO: 355801 - RNA, 22 nt, Human
gcuguucaagacuaggaaauuu

SEQ ID NO: 355802 - RNA, 18 nt, Human
gcagcuuuugauucaccc

SEQ ID NO: 355803 - RNA, 23 nt, Human
accaggagccaagaucucccugg

SEQ ID NO: 355804 - RNA, 18 nt, Human
ugggauggagaguaacug

SEQ ID NO: 355805 - RNA, 21 nt, Human
agagacugucacugcaguacc

SEQ ID NO: 355806 - RNA, 22 nt, Human
uuuagaaauugcagagugggug

SEQ ID NO: 355807 - RNA, 22 nt, Human
agggucagcuggcugucagggg

SEQ ID NO: 355808 - RNA, 22 nt, Human
uccaggaguuugagacugcagu

SEQ ID NO: 355809 - RNA, 22 nt, Human
agcccagcagaaaguccagccu

SEQ ID NO: 355810 - RNA, 22 nt, Human
agccucucuguuagucacuggg

SEQ ID NO: 355811 - RNA, 22 nt, Human
gcaggugauucacccugggccu

SEQ ID NO: 355812 - RNA, 21 nt, Human
ccugggagaucagcugccuuc

SEQ ID NO: 355813 - RNA, 22 nt, Human
ggccaggcugcccugggagcag

SEQ ID NO: 355814 - RNA, 20 nt, Human
agugacagagacuguguggc

SEQ ID NO: 355815 - RNA, 22 nt, Human
cuuguucaguccugacuuccug

SEQ ID NO: 355816 - RNA, 22 nt, Human
aggacugggugcagagggcauc

SEQ ID NO: 355817 - RNA, 22 nt, Human
uuguuucaugaguguaaaggga

SEQ ID NO: 355818 - RNA, 22 nt, Human
cugaggcaguuuaauuuuugaa

SEQ ID NO: 355819 - RNA, 22 nt, Human
agcagccagugggagugauaca

SEQ ID NO: 355820 - RNA, 22 nt, Human
gaaggcugcgaggggagugccg

SEQ ID NO: 355821 - RNA, 22 nt, Human
gugauuuucuccuccuagaagu

SEQ ID NO: 355822 - RNA, 22 nt, Human
uaucuacuccucuuucagaugc

SEQ ID NO: 355823 - RNA, 22 nt, Human
ucacugcugcugccaugaugga

SEQ ID NO: 355824 - RNA, 22 nt, Human
ugaggcucaagaaucugcauuu

SEQ ID NO: 355825 - RNA, 22 nt, Human
guuuuguugcugcagagcucaa

SEQ ID NO: 355826 - RNA, 22 nt, Human
uuuauguaauuucauaggugug

SEQ ID NO: 355827 - RNA, 22 nt, Human
ucucugggugauggcagggcac

SEQ ID NO: 355828 - RNA, 22 nt, Human
gggcagcugcagggauggugac

SEQ ID NO: 355829 - RNA, 22 nt, Human
uuugaacuucuccauucugaug

SEQ ID NO: 355830 - RNA, 22 nt, Human
agcagugaaacagcugcauaug

SEQ ID NO: 355831 - RNA, 22 nt, Human
ucauuugugugagugauuugac

SEQ ID NO: 355832 - RNA, 22 nt, Human
aauugugcuaugauuaugaaag

SEQ ID NO: 355833 - RNA, 22 nt, Human
ugagccugggagauggaggcug

SEQ ID NO: 355834 - RNA, 21 nt, Human
ggacuuacauagguaaggggu

SEQ ID NO: 355835 - RNA, 22 nt, Human
cugaggugcuauggaggauacg

SEQ ID NO: 355836 - RNA, 22 nt, Human
cuggagcagguuuaggaguccc

SEQ ID NO: 355837 - RNA, 22 nt, Human
ugcuggcuguauaugugagagu

SEQ ID NO: 355838 - RNA, 22 nt, Human
aggacagcaguuggugagguuc

SEQ ID NO: 355839 - RNA, 22 nt, Human
gggaagguauuuagcugcugaa

SEQ ID NO: 355840 - RNA, 22 nt, Human
accccagaggcggaggcugcag

SEQ ID NO: 355841 - RNA, 22 nt, Human
ggaugcacgaaggcgccucgga

SEQ ID NO: 355842 - RNA, 22 nt, Human
gcugugugaaaacugggccugg

SEQ ID NO: 355843 - RNA, 22 nt, Human
uggccacccagcugacgccuuc

SEQ ID NO: 355844 - RNA, 22 nt, Human
uuauucuucuucucuugccagg

SEQ ID NO: 355845 - RNA, 22 nt, Human
ccuccugggccuugcucuguga

SEQ ID NO: 355846 - RNA, 22 nt, Human
ucugggaacucugucauuuccc

SEQ ID NO: 355847 - RNA, 22 nt, Human
agcuggaggggccagcaggugu

SEQ ID NO: 355848 - RNA, 22 nt, Human
ugaaccaggaggcagccagcac

SEQ ID NO: 355849 - RNA, 22 nt, Human
acauuucucaucuaguagagua

SEQ ID NO: 355850 - RNA, 22 nt, Human
accagagauggggcuucucugu

SEQ ID NO: 355851 - RNA, 22 nt, Human
ugcuggcccuggcucagggaac

SEQ ID NO: 355852 - RNA, 22 nt, Human
aucuuucagggccauuuguauu

SEQ ID NO: 355853 - RNA, 22 nt, Human
aucagaaaucuaggauucagaa

SEQ ID NO: 355854 - RNA, 22 nt, Human
cugagccaaaaagcagagcuug

SEQ ID NO: 355855 - RNA, 22 nt, Human
gcagagugagccgaggcugcuc

SEQ ID NO: 355856 - RNA, 22 nt, Human
uauuagggaacugcaagacuaa

SEQ ID NO: 355857 - RNA, 22 nt, Human
ugggcagaggacagggaagauc

SEQ ID NO: 355858 - RNA, 22 nt, Human
aaacucuggagauguuuaugca

SEQ ID NO: 355859 - RNA, 22 nt, Human
augucuuucucacagccaguuc

SEQ ID NO: 355860 - RNA, 22 nt, Human
cagaucuguuugccagaucagc

SEQ ID NO: 355861 - RNA, 22 nt, Human
gcagacaggcccaguggaggga

SEQ ID NO: 355862 - RNA, 22 nt, Human
ugagggagagggcgaaaaugaa

SEQ ID NO: 355863 - RNA, 21 nt, Human
gcaugccugcaucuuaguguu

SEQ ID NO: 355864 - RNA, 22 nt, Human
uacagagacuuuauggcacaaa

SEQ ID NO: 355865 - RNA, 22 nt, Human
gggagggaggugcugguucacg

SEQ ID NO: 355866 - RNA, 22 nt, Human
ggggauggaggcgugugguccu

SEQ ID NO: 355867 - RNA, 22 nt, Human
ccauggaguuccucuggucuau

SEQ ID NO: 355868 - RNA, 22 nt, Human
ggagaggagcuauugggggcuc

SEQ ID NO: 355869 - RNA, 22 nt, Human
ugugggcacuaaugacaugcag

SEQ ID NO: 355870 - RNA, 22 nt, Human
uggugaagucagcggagcccgg

SEQ ID NO: 355871 - RNA, 22 nt, Human
gcugucagcgcccaaggagcuc

SEQ ID NO: 355872 - RNA, 22 nt, Human
uucuuaaagaggcaaaacacag

SEQ ID NO: 355873 - RNA, 22 nt, Human
gagagugucgggggccccagga

SEQ ID NO: 355874 - RNA, 22 nt, Human
ugccaggcucaggaugucccug

SEQ ID NO: 355875 - RNA, 22 nt, Human
agcagccauuuaaaaugaauug

SEQ ID NO: 355876 - RNA, 22 nt, Human
uuugcauuuguuuagaaccuga

SEQ ID NO: 355877 - RNA, 22 nt, Human
uuucaacuugaagaauugauac

SEQ ID NO: 355878 - RNA, 22 nt, Human
cuggcucaggguggucuggguc

SEQ ID NO: 355879 - RNA, 22 nt, Human
ugaaagguagcuggccucauag

SEQ ID NO: 355880 - RNA, 22 nt, Human
aucauguuccagaaacagugau

SEQ ID NO: 355881 - RNA, 22 nt, Human
uaagugcaauguuuuacuuaaa

SEQ ID NO: 355882 - RNA, 21 nt, Human
agccagucuguuuucuagugc

SEQ ID NO: 355883 - RNA, 22 nt, Human
uaaugcacaugacugaacuauu

SEQ ID NO: 355884 - RNA, 19 nt, Human
cucagcuguagcucaugug

SEQ ID NO: 355885 - RNA, 22 nt, Human
agucucugccagcuuguccucu

SEQ ID NO: 355886 - RNA, 22 nt, Human
uagucuuuuuaauaaauaaugc

SEQ ID NO: 355887 - RNA, 22 nt, Human
cugagccagcuggcaugugcua

SEQ ID NO: 355888 - RNA, 23 nt, Human
cuuugccacccagagccugacag

SEQ ID NO: 355889 - RNA, 22 nt, Human
caguggaggcucaagugugcuu

SEQ ID NO: 355890 - RNA, 19 nt, Human
ugaguucugugguucucaa

SEQ ID NO: 355891 - RNA, 22 nt, Human
cccugggcaagcccuauuuucc

SEQ ID NO: 355892 - RNA, 22 nt, Human
cccagggucccugcucucugug

SEQ ID NO: 355893 - RNA, 22 nt, Human
cuuucucugugugguaaagggc

SEQ ID NO: 355894 - RNA, 22 nt, Human
ucccaggaugugcgugccgccg

SEQ ID NO: 355895 - RNA, 22 nt, Human
cacagcugcccuacuccaugug

SEQ ID NO: 355896 - RNA, 22 nt, Human
ucucugagguuguuuccagcac

SEQ ID NO: 355897 - RNA, 22 nt, Human
acugcuuuucuaagauucugug

SEQ ID NO: 355898 - RNA, 22 nt, Human
agucaacaaaaauguggagccu

SEQ ID NO: 355899 - RNA, 22 nt, Human
acagugugugcuuucccuuacg

SEQ ID NO: 355900 - RNA, 22 nt, Human
aauugcuaaagauuauguuuuc

SEQ ID NO: 355901 - RNA, 22 nt, Human
ucagaggugguaaaggacagca

SEQ ID NO: 355902 - RNA, 22 nt, Human
aggagcuggguuccuuuggugg

SEQ ID NO: 355903 - RNA, 19 nt, Human
cuugcugggugguuucugc

SEQ ID NO: 355904 - RNA, 22 nt, Human
cugguuuagcuguaagguuccc

SEQ ID NO: 355905 - RNA, 22 nt, Human
ggcagaagauaggacagggaau

SEQ ID NO: 355906 - RNA, 22 nt, Human
aaaguccugacugcaggggaug

SEQ ID NO: 355907 - RNA, 22 nt, Human
gaggcucaaaccuggacagagc

SEQ ID NO: 355908 - RNA, 22 nt, Human
gcuggggagcuagaccucagca

SEQ ID NO: 355909 - RNA, 22 nt, Human
cugcuuuguguggucccuccag

SEQ ID NO: 355910 - RNA, 22 nt, Human
uccaugagcuagcuuuccaaag

SEQ ID NO: 355911 - RNA, 21 nt, Human
aggaggggucuuucccacuga

SEQ ID NO: 355912 - RNA, 22 nt, Human
uacaguauuaugagugauugaa

SEQ ID NO: 355913 - RNA, 21 nt, Human
aggcagcaggauccagggaca

SEQ ID NO: 355914 - RNA, 22 nt, Human
gcagggagguuugcugaccugg

SEQ ID NO: 355915 - RNA, 22 nt, Human
caguggugaagagcaggggcuc

SEQ ID NO: 355916 - RNA, 22 nt, Human
ugccuggguccaggccaagccu

SEQ ID NO: 355917 - RNA, 22 nt, Human
acuuccugcagcuucucagccc

SEQ ID NO: 355918 - RNA, 22 nt, Human
augggaggcagacacuaaguuc

SEQ ID NO: 355919 - RNA, 22 nt, Human
agaagggccagcuggacaccug

SEQ ID NO: 355920 - RNA, 22 nt, Human
ucccaaagcuacucuucugacu

SEQ ID NO: 355921 - RNA, 19 nt, Human
aggcagcaggccagggaug

SEQ ID NO: 355922 - RNA, 22 nt, Human
ccagagccucaacacagguccu

SEQ ID NO: 355923 - RNA, 22 nt, Human
cucugagaaagcugugagcuaa

SEQ ID NO: 355924 - RNA, 22 nt, Human
acuuguguaacacagaaagaac

SEQ ID NO: 355925 - RNA, 20 nt, Human
gucaucgccggcagcaaaga

SEQ ID NO: 355926 - RNA, 22 nt, Human
caucccugcccucaugccuaua

SEQ ID NO: 355927 - RNA, 22 nt, Human
cagcccugcacgcugccuccgc

SEQ ID NO: 355928 - RNA, 20 nt, Human
cucuggcuccgcgugaccgc

SEQ ID NO: 355929 - RNA, 22 nt, Human
aagccgggccugagaaaugaca

SEQ ID NO: 355930 - RNA, 21 nt, Human
aagggagauaggaaucaggcc

SEQ ID NO: 355931 - RNA, 22 nt, Human
cccaggagguagagguugcagu

SEQ ID NO: 355932 - RNA, 22 nt, Human
caguucuuauuuggccaguguc

SEQ ID NO: 355933 - RNA, 22 nt, Human
aaggcugcuuuuaacaugcaua

SEQ ID NO: 355934 - RNA, 22 nt, Human
agggcugagugggagagaguug

SEQ ID NO: 355935 - RNA, 22 nt, Human
ggaggaggcggcagaaguuccu

SEQ ID NO: 355936 - RNA, 20 nt, Human
uauuccaaggguagagaaaa

SEQ ID NO: 355937 - RNA, 22 nt, Human
uucacauuucauaccacagcuu

SEQ ID NO: 355938 - RNA, 20 nt, Human
agccagaagaaggcuggaga

SEQ ID NO: 355939 - RNA, 22 nt, Human
ccuguucacgguguguuguuag

SEQ ID NO: 355940 - RNA, 22 nt, Human
ugaacucgggaggaggcugcag

SEQ ID NO: 355941 - RNA, 22 nt, Human
cgcccagggcaggaggccgcuc

SEQ ID NO: 355942 - RNA, 22 nt, Human
aguaaugucccuuaaauguggu

SEQ ID NO: 355943 - RNA, 22 nt, Human
cucaggguaaugaaagacgaau

SEQ ID NO: 355944 - RNA, 22 nt, Human
ucccagagcugauaagccuuua

SEQ ID NO: 355945 - RNA, 22 nt, Human
ugacacauuaaaugcucacaaa

SEQ ID NO: 355946 - RNA, 22 nt, Human
cacauauuguaguucaccagga

SEQ ID NO: 355947 - RNA, 23 nt, Human
ccagcuccgugagccucgggcuc

SEQ ID NO: 355948 - RNA, 22 nt, Human
uguuuaaucuauaaaauggaga

SEQ ID NO: 355949 - RNA, 22 nt, Human
ccagaucuaguguuguaaagcu

SEQ ID NO: 355950 - RNA, 22 nt, Human
uauaagaaacaaggcaaauuuu

SEQ ID NO: 355951 - RNA, 22 nt, Human
gcccaggagguugggcugugca

SEQ ID NO: 355952 - RNA, 22 nt, Human
agcuggagccagugugaggcuu

SEQ ID NO: 355953 - RNA, 22 nt, Human
aggcaugugacccuggacucag

SEQ ID NO: 355954 - RNA, 22 nt, Human
ccagcagcagcguccaaggaga

SEQ ID NO: 355955 - RNA, 22 nt, Human
gcccaggauaaugcugucccug

SEQ ID NO: 355956 - RNA, 22 nt, Human
ggcugucucugugacugccacc

SEQ ID NO: 355957 - RNA, 22 nt, Human
ugccaggcuuagagcaggggcu

SEQ ID NO: 355958 - RNA, 22 nt, Human
ucaaaugcaggucuggucuugg

SEQ ID NO: 355959 - RNA, 22 nt, Human
ugugaccucaucuuaacuggaa

SEQ ID NO: 355960 - RNA, 22 nt, Human
aggcaguuuaggcagcgauuua

SEQ ID NO: 355961 - RNA, 22 nt, Human
uugcauuugaucuuggguucuc

SEQ ID NO: 355962 - RNA, 22 nt, Human
auuucuguaguccacauucuuu

SEQ ID NO: 355963 - RNA, 21 nt, Human
gccaaggggguagcuauuccu

SEQ ID NO: 355964 - RNA, 20 nt, Human
ucagagucaucaaagauggu

SEQ ID NO: 355965 - RNA, 19 nt, Human
aaaagucuauucaauuaca

SEQ ID NO: 355966 - RNA, 22 nt, Human
gcagaacauuucacaguaucuu

SEQ ID NO: 355967 - RNA, 22 nt, Human
uuugugcagauguauauuugug

SEQ ID NO: 355968 - RNA, 22 nt, Human
agcagcauauugugucuucaua

SEQ ID NO: 355969 - RNA, 22 nt, Human
ugucuccucauacugucauauu

SEQ ID NO: 355970 - RNA, 22 nt, Human
uggcagcugucuguggggucuc

SEQ ID NO: 355971 - RNA, 22 nt, Human
caaagucagcugccagucccaa

SEQ ID NO: 355972 - RNA, 22 nt, Human
ccagaauuuggaucaugauuuu

SEQ ID NO: 355973 - RNA, 22 nt, Human
uuccauauguauauagcuguua

SEQ ID NO: 355974 - RNA, 22 nt, Human
uguuuuaaagccauugccuuuc

SEQ ID NO: 355975 - RNA, 22 nt, Human
auguauuucuauguagugaaga

SEQ ID NO: 355976 - RNA, 22 nt, Human
gcagagccccauugcuggcggg

SEQ ID NO: 355977 - RNA, 17 nt, Human
ggcaccagacggagagu

SEQ ID NO: 355978 - RNA, 22 nt, Human
cuucauuaaugucuauaaguuu

SEQ ID NO: 355979 - RNA, 22 nt, Human
uagaaaugaauguuuaaaaguc

SEQ ID NO: 355980 - RNA, 22 nt, Human
agaaguuguagguuugcauauu

SEQ ID NO: 355981 - RNA, 22 nt, Human
ggccccugcggacugccuagag

SEQ ID NO: 355982 - RNA, 22 nt, Human
cauuuucagcacccaucugaaa

SEQ ID NO: 355983 - RNA, 22 nt, Human
uccaggagugcugguuagagua

SEQ ID NO: 355984 - RNA, 22 nt, Human
uauuuugagguauuuuugagcu

SEQ ID NO: 355985 - RNA, 22 nt, Human
uccaugagaacccuuggagaua

SEQ ID NO: 355986 - RNA, 22 nt, Human
ucaggcugcccguucagggcuc

SEQ ID NO: 355987 - RNA, 22 nt, Human
auggauuugcuuauacacaugu

SEQ ID NO: 355988 - RNA, 22 nt, Human
gcaccuggcugcccagguggag

SEQ ID NO: 355989 - RNA, 19 nt, Human
gucacauuugucucccagg

SEQ ID NO: 355990 - RNA, 17 nt, Human
gagaguguauuggaugc

SEQ ID NO: 355991 - RNA, 22 nt, Human
ggagccuggucagguuggcucc

SEQ ID NO: 355992 - RNA, 22 nt, Human
aagaacuuccuaauauauuuuc

SEQ ID NO: 355993 - RNA, 22 nt, Human
gcccagcuuuucacuuccacac

SEQ ID NO: 355994 - RNA, 22 nt, Human
uaauuauuugaagacauuagag

SEQ ID NO: 355995 - RNA, 22 nt, Human
gcucaaagaauauucagaauga

SEQ ID NO: 355996 - RNA, 22 nt, Human
cugcuguguuucacaccucugg

SEQ ID NO: 355997 - RNA, 22 nt, Human
uugggguguuggauggagcaag

SEQ ID NO: 355998 - RNA, 18 nt, Human
caaagcucacguuccauc

SEQ ID NO: 355999 - RNA, 22 nt, Human
ccaggguaccccaagggcaggu

SEQ ID NO: 356000 - RNA, 22 nt, Human
agcugaaggcuagaacagcugg

SEQ ID NO: 356001 - RNA, 22 nt, Human
aguaucaaggaucuccagcacc

SEQ ID NO: 356002 - RNA, 22 nt, Human
uggcagcugaggggaggcuuug

SEQ ID NO: 356003 - RNA, 17 nt, Human
ucaggauccaggguucu

SEQ ID NO: 356004 - RNA, 22 nt, Human
gccuggaggggccaggguggua

SEQ ID NO: 356005 - RNA, 22 nt, Human
uuaaauuagucaagcuucucug

SEQ ID NO: 356006 - RNA, 22 nt, Human
cacagcugugagaagggagccu

SEQ ID NO: 356007 - RNA, 22 nt, Human
gccuggagaauuaaaaggaagg

SEQ ID NO: 356008 - RNA, 21 nt, Human
agagaauugccuuagauguuc

SEQ ID NO: 356009 - RNA, 22 nt, Human
ugcacacacgcggcacaucugu

SEQ ID NO: 356010 - RNA, 22 nt, Human
uguuuuaagagcgcacuuuaua

SEQ ID NO: 356011 - RNA, 22 nt, Human
ccagcaccuugaucuuggaguu

SEQ ID NO: 356012 - RNA, 21 nt, Human
gggcagcucuguuuuauuuuc

SEQ ID NO: 356013 - RNA, 22 nt, Human
ccaucagcaugggagcaugggc

SEQ ID NO: 356014 - RNA, 22 nt, Human
ccaggcagcaaauuuucugaau

SEQ ID NO: 356015 - RNA, 22 nt, Human
gcugaggcuccucgggaggaca

SEQ ID NO: 356016 - RNA, 22 nt, Human
gcugauguuuaguugauguuac

SEQ ID NO: 356017 - RNA, 22 nt, Human
gccuuccuuacaccugcucagc

SEQ ID NO: 356018 - RNA, 22 nt, Human
uccuucagcuuauuucuuagga

SEQ ID NO: 356019 - RNA, 22 nt, Human
ugcagcuccucuggcugccuga

SEQ ID NO: 356020 - RNA, 19 nt, Human
ggcagaagguguaggggga

SEQ ID NO: 356021 - RNA, 23 nt, Human
ucagagaggcccccugcagagau

SEQ ID NO: 356022 - RNA, 22 nt, Human
uuagagucaagcugcauguucu

SEQ ID NO: 356023 - RNA, 22 nt, Human
ugggcaggcaagugaauaccuu

SEQ ID NO: 356024 - RNA, 21 nt, Human
uccaggaguucuaauaggugu

SEQ ID NO: 356025 - RNA, 22 nt, Human
auacuuuggggguuaguguaga

SEQ ID NO: 356026 - RNA, 22 nt, Human
ugaggcuggcaaggcugguauu

SEQ ID NO: 356027 - RNA, 21 nt, Human
ggagaaggacaauguugagua

SEQ ID NO: 356028 - RNA, 22 nt, Human
auguuucaccagcaaauuaccu

SEQ ID NO: 356029 - RNA, 22 nt, Human
ggcaguagccagggacuggcag

SEQ ID NO: 356030 - RNA, 22 nt, Human
acccaggaggugacacagggcu

SEQ ID NO: 356031 - RNA, 22 nt, Human
cagcuggcagcccuggcccugc

SEQ ID NO: 356032 - RNA, 22 nt, Human
aaaacaggugucagcaaacuau

SEQ ID NO: 356033 - RNA, 22 nt, Human
caggguggcaggcaccauggcc

SEQ ID NO: 356034 - RNA, 22 nt, Human
uagcuuuaccauagaagaguau

SEQ ID NO: 356035 - RNA, 22 nt, Human
gccuguccuggaugcucugcaa

SEQ ID NO: 356036 - RNA, 22 nt, Human
gccaccagugggggccugggca

SEQ ID NO: 356037 - RNA, 22 nt, Human
uuuaccaagcuuuaauuacaua

SEQ ID NO: 356038 - RNA, 22 nt, Human
cugggcugcaggaguggggcaa

SEQ ID NO: 356039 - RNA, 22 nt, Human
gcugcagugagccaagaucgug

SEQ ID NO: 356040 - RNA, 22 nt, Human
gggcaugguggcaggcaccugu

SEQ ID NO: 356041 - RNA, 22 nt, Human
ugcuggggguucagaugaguaa

SEQ ID NO: 356042 - RNA, 22 nt, Human
ugcuggccaauggcagaggcgg

SEQ ID NO: 356043 - RNA, 22 nt, Human
aguauucuggaauucuauguga

SEQ ID NO: 356044 - RNA, 22 nt, Human
aaaagaggagugguuuaugaca

SEQ ID NO: 356045 - RNA, 22 nt, Human
ccagagagggcgccaccuggag

SEQ ID NO: 356046 - RNA, 22 nt, Human
cucuccuccaacagcccugccg

SEQ ID NO: 356047 - RNA, 19 nt, Human
aggagaaguagcagaaauu

SEQ ID NO: 356048 - RNA, 22 nt, Human
cugggaggugcagcaaaaauca

SEQ ID NO: 356049 - RNA, 19 nt, Human
ccugcagggaugagagguu

SEQ ID NO: 356050 - RNA, 22 nt, Human
cccaggaagaggggucaggugu

SEQ ID NO: 356051 - RNA, 22 nt, Human
gggccaggucggugaaugguca

SEQ ID NO: 356052 - RNA, 22 nt, Human
gaggaagaagggauuagaacuc

SEQ ID NO: 356053 - RNA, 22 nt, Human
gcugcucuugaggggcucacug

SEQ ID NO: 356054 - RNA, 22 nt, Human
aacuuuauuguuaggggcuaaa

SEQ ID NO: 356055 - RNA, 21 nt, Human
agcugagcccagaagacuggu

SEQ ID NO: 356056 - RNA, 17 nt, Human
agugaaauuuacauugc

SEQ ID NO: 356057 - RNA, 22 nt, Human
ucaacuuugaaaccauagugaa

SEQ ID NO: 356058 - RNA, 22 nt, Human
uauagaagagacaugugcauag

SEQ ID NO: 356059 - RNA, 22 nt, Human
uuucauguuuucuuaaauggca

SEQ ID NO: 356060 - RNA, 22 nt, Human
aggcugcucaguagauggagcu

SEQ ID NO: 356061 - RNA, 22 nt, Human
ucucacugcaaauauuauguau

SEQ ID NO: 356062 - RNA, 22 nt, Human
aggcccagagagccaguuagug

SEQ ID NO: 356063 - RNA, 22 nt, Human
gagaaggggugauguggguaau

SEQ ID NO: 356064 - RNA, 22 nt, Human
auuguggugucaguuauaggca

SEQ ID NO: 356065 - RNA, 22 nt, Human
agcagggggccacagucacagc

SEQ ID NO: 356066 - RNA, 20 nt, Human
gggguuggcuggcacaggga

SEQ ID NO: 356067 - RNA, 20 nt, Human
uaugaguauuacuuucagga

SEQ ID NO: 356068 - RNA, 22 nt, Human
cagggccauaucuugugcacca

SEQ ID NO: 356069 - RNA, 22 nt, Human
gaaggcaacaccaggaugcacu

SEQ ID NO: 356070 - RNA, 18 nt, Human
uccagcgugcuccagggc

SEQ ID NO: 356071 - RNA, 22 nt, Human
cucuguccuccaccugcuuuca

SEQ ID NO: 356072 - RNA, 22 nt, Human
aaguucaagagugacauauuag

SEQ ID NO: 356073 - RNA, 22 nt, Human
gcacaauaauuuuuuuaagagg

SEQ ID NO: 356074 - RNA, 23 nt, Human
ucugucaccuauggcugcucuuc

SEQ ID NO: 356075 - RNA, 22 nt, Human
caggagacuauggcccaaggcc

SEQ ID NO: 356076 - RNA, 22 nt, Human
uuugggaaacuuaggggucaga

SEQ ID NO: 356077 - RNA, 22 nt, Human
ugaggggaaggcaugauaaaua

SEQ ID NO: 356078 - RNA, 22 nt, Human
agggcagagaucugagugggca

SEQ ID NO: 356079 - RNA, 22 nt, Human
ugucaugcccaggagcaaggua

SEQ ID NO: 356080 - RNA, 22 nt, Human
gcucucugccauaugaggauac

SEQ ID NO: 356081 - RNA, 22 nt, Human
agaagccaccagcugaggaaga

SEQ ID NO: 356082 - RNA, 22 nt, Human
gcugccugucccaggaugagga

SEQ ID NO: 356083 - RNA, 22 nt, Human
uggauuaaagauuaaaaugaca

SEQ ID NO: 356084 - RNA, 22 nt, Human
ucuuagaaugucaacugauguu

SEQ ID NO: 356085 - RNA, 22 nt, Human
ccugagagagaagcgaccuggu

SEQ ID NO: 356086 - RNA, 22 nt, Human
uugauguacagaauuguucaca

SEQ ID NO: 356087 - RNA, 22 nt, Human
uaggcagagguaugguaaggac

SEQ ID NO: 356088 - RNA, 22 nt, Human
gcagggugaaggucacauagaa

SEQ ID NO: 356089 - RNA, 22 nt, Human
aagggcucuucuauuuauggcc

SEQ ID NO: 356090 - RNA, 22 nt, Human
cuucuugcugggggccucagug

SEQ ID NO: 356091 - RNA, 22 nt, Human
cacaugaguccugccagguaug

SEQ ID NO: 356092 - RNA, 22 nt, Human
acccagaggugucuagcaagcu

SEQ ID NO: 356093 - RNA, 21 nt, Human
ucuuguccuugcucucccacu

SEQ ID NO: 356094 - RNA, 22 nt, Human
ccugccagggccuuggaagaaa

SEQ ID NO: 356095 - RNA, 21 nt, Human
ucuccaguauccuucucugag

SEQ ID NO: 356096 - RNA, 22 nt, Human
gcugucuugcucacucuugcag

SEQ ID NO: 356097 - RNA, 22 nt, Human
ccucuggggguccucagagucu

SEQ ID NO: 356098 - RNA, 23 nt, Human
uacaugcuauaauuucacccuca

SEQ ID NO: 356099 - RNA, 22 nt, Human
uuccuuaggcuguuugcagugc

SEQ ID NO: 356100 - RNA, 20 nt, Human
gccugcagagaaggucagag

SEQ ID NO: 356101 - RNA, 22 nt, Human
agggcagaggcggacacggaag

SEQ ID NO: 356102 - RNA, 22 nt, Human
ccagucugugugccagccugcg

SEQ ID NO: 356103 - RNA, 22 nt, Human
cucacuguuuaauagcuggauc

SEQ ID NO: 356104 - RNA, 22 nt, Human
gaagugaagagauuagaaauca

SEQ ID NO: 356105 - RNA, 22 nt, Human
uuuuccuucugauacuccauuu

SEQ ID NO: 356106 - RNA, 22 nt, Human
aggcuuccgaguagcugggacu

SEQ ID NO: 356107 - RNA, 19 nt, Human
ucucagaggaaaaauugcu

SEQ ID NO: 356108 - RNA, 22 nt, Human
gccaccagggggugcaaggucc

SEQ ID NO: 356109 - RNA, 22 nt, Human
agcagggcaguuaaaggguccu

SEQ ID NO: 356110 - RNA, 22 nt, Human
acauacuaugaauacauguguc

SEQ ID NO: 356111 - RNA, 22 nt, Human
auggcuuuucacagaggguucu

SEQ ID NO: 356112 - RNA, 22 nt, Human
agcuggguguguaucagauaaa

SEQ ID NO: 356113 - RNA, 22 nt, Human
gugagggguggcugagcaguuu

SEQ ID NO: 356114 - RNA, 22 nt, Human
uaguggagguggucugugaacu

SEQ ID NO: 356115 - RNA, 22 nt, Human
gcaggccuuggcaaugagccug

SEQ ID NO: 356116 - RNA, 22 nt, Human
cccaagggagugccuggucaac

SEQ ID NO: 356117 - RNA, 22 nt, Human
uucuucuucauuucugacgaug

SEQ ID NO: 356118 - RNA, 22 nt, Human
uccaggaggugaggggaccaaa

SEQ ID NO: 356119 - RNA, 22 nt, Human
acaggccugacacacagagggc

SEQ ID NO: 356120 - RNA, 22 nt, Human
aggaagcuccuggagagccagu

SEQ ID NO: 356121 - RNA, 22 nt, Human
ccagcagcccacaggcgucccu

SEQ ID NO: 356122 - RNA, 22 nt, Human
cagucacacaaguggacuuggg

SEQ ID NO: 356123 - RNA, 22 nt, Human
ggccugggcccacugucaagag

SEQ ID NO: 356124 - RNA, 22 nt, Human
ggagaagcagcuucuugaugaa

SEQ ID NO: 356125 - RNA, 22 nt, Human
ucauuucaaugauacuacuaag

SEQ ID NO: 356126 - RNA, 21 nt, Human
gagauuuagaaggaucaauuu

SEQ ID NO: 356127 - RNA, 22 nt, Human
uggcagaggaaaaagucacugg

SEQ ID NO: 356128 - RNA, 22 nt, Human
uccagaguacggaagagucauc

SEQ ID NO: 356129 - RNA, 21 nt, Human
aaguaaaucagagaaauaacc

SEQ ID NO: 356130 - RNA, 22 nt, Human
ucacagggcauuauggcuccag

SEQ ID NO: 356131 - RNA, 22 nt, Human
cuuccucaugugcaaugcaagc

SEQ ID NO: 356132 - RNA, 22 nt, Human
cuaaaugacuuccagugguuau

SEQ ID NO: 356133 - RNA, 22 nt, Human
uucagagaagcaaaggcagauu

SEQ ID NO: 356134 - RNA, 22 nt, Human
gaggcagcaaaauauaucauaa

SEQ ID NO: 356135 - RNA, 18 nt, Human
ccugagcccugcuuacuu

SEQ ID NO: 356136 - RNA, 22 nt, Human
gcaggagaacaaagcaagcugc

SEQ ID NO: 356137 - RNA, 22 nt, Human
ucuguucagaauuguaacacuc

SEQ ID NO: 356138 - RNA, 22 nt, Human
cuggcucaauaaauauuagcug

SEQ ID NO: 356139 - RNA, 22 nt, Human
ggcuugggagcaggcaugugac

SEQ ID NO: 356140 - RNA, 22 nt, Human
agcuggggcugcagagaacagg

SEQ ID NO: 356141 - RNA, 22 nt, Human
gcacugaaaauguuggauucca

SEQ ID NO: 356142 - RNA, 22 nt, Human
ucuggcccagccccugagguca

SEQ ID NO: 356143 - RNA, 22 nt, Human
ccacccuuggguucggaggccg

SEQ ID NO: 356144 - RNA, 22 nt, Human
gggaucagcaagccacugcacc

SEQ ID NO: 356145 - RNA, 22 nt, Human
ucucugaguucuccuccagccc

SEQ ID NO: 356146 - RNA, 22 nt, Human
caacagcugaucuuugaugaag

SEQ ID NO: 356147 - RNA, 22 nt, Human
cuggagagggagcccuggcagu

SEQ ID NO: 356148 - RNA, 22 nt, Human
aucauuucccuuuagaucacaa

SEQ ID NO: 356149 - RNA, 22 nt, Human
aguggcagaagucacuggguag

SEQ ID NO: 356150 - RNA, 22 nt, Human
uguacacaauucuuaacauaca

SEQ ID NO: 356151 - RNA, 22 nt, Human
uugcauuguugcaaugaaguau

SEQ ID NO: 356152 - RNA, 22 nt, Human
ggcaugcugcguacagaugaac

SEQ ID NO: 356153 - RNA, 22 nt, Human
uucuuucucaacaugaauguuu

SEQ ID NO: 356154 - RNA, 22 nt, Human
aucaggauagucuguaaauugu

SEQ ID NO: 356155 - RNA, 22 nt, Human
uuaucauugucgcagucuaauu

SEQ ID NO: 356156 - RNA, 22 nt, Human
acagccugagaguggagcuggc

SEQ ID NO: 356157 - RNA, 22 nt, Human
aagggcuccacuugaaucacac

SEQ ID NO: 356158 - RNA, 22 nt, Human
ccaaacaaauccccauucuuag

SEQ ID NO: 356159 - RNA, 22 nt, Human
ucaaaauuucagcacuagcccu

SEQ ID NO: 356160 - RNA, 22 nt, Human
cagcagugucuccagcaucaca

SEQ ID NO: 356161 - RNA, 22 nt, Human
ugugaagcuggauccuggagcu

SEQ ID NO: 356162 - RNA, 22 nt, Human
uguccuuaaggagcuuaauguc

SEQ ID NO: 356163 - RNA, 19 nt, Human
ugcagcucagggcaggggc

SEQ ID NO: 356164 - RNA, 22 nt, Human
ugucccauggacacaacuucuu

SEQ ID NO: 356165 - RNA, 22 nt, Human
uaaaugugagugaugcggugaa

SEQ ID NO: 356166 - RNA, 22 nt, Human
ccaggacaaguguggccauggc

SEQ ID NO: 356167 - RNA, 22 nt, Human
uuaaagauucugaggcugauua

SEQ ID NO: 356168 - RNA, 22 nt, Human
aucuuucaguuucauaccaauu

SEQ ID NO: 356169 - RNA, 22 nt, Human
gcuuccuggagggagagagcug

SEQ ID NO: 356170 - RNA, 22 nt, Human
uggcagcuccuggggccagcac

SEQ ID NO: 356171 - RNA, 18 nt, Human
gcuuuauuucuuggggaa

SEQ ID NO: 356172 - RNA, 22 nt, Human
ugugcaguuucuauguugucca

SEQ ID NO: 356173 - RNA, 22 nt, Human
ucagggcauacucuucaagguc

SEQ ID NO: 356174 - RNA, 20 nt, Human
cacugaagacuucuugcuca

SEQ ID NO: 356175 - RNA, 22 nt, Human
agggcagacuaggauggaagug

SEQ ID NO: 356176 - RNA, 22 nt, Human
ucucacucauuuccuaggucuu

SEQ ID NO: 356177 - RNA, 22 nt, Human
auugaaaaaugacuauugcuua

SEQ ID NO: 356178 - RNA, 22 nt, Human
agaaaguucugugaguuguuca

SEQ ID NO: 356179 - RNA, 22 nt, Human
ggcucugccugcccagcagcac

SEQ ID NO: 356180 - RNA, 22 nt, Human
caaauguauaaauguacuuucu

SEQ ID NO: 356181 - RNA, 22 nt, Human
ggcaguggguuccccaaggcac

SEQ ID NO: 356182 - RNA, 22 nt, Human
uguugaagauaaaguucucauu

SEQ ID NO: 356183 - RNA, 22 nt, Human
agcaggagaacacuguggcucu

SEQ ID NO: 356184 - RNA, 22 nt, Human
cugggcagagcuaacaccugag

SEQ ID NO: 356185 - RNA, 22 nt, Human
caaaguccuagaacagugcuug

SEQ ID NO: 356186 - RNA, 22 nt, Human
ggccucuggucaagacaagcau

SEQ ID NO: 356187 - RNA, 22 nt, Human
augggcagaguggggacaggaa

SEQ ID NO: 356188 - RNA, 22 nt, Human
uuucacauacaguguauaguag

SEQ ID NO: 356189 - RNA, 22 nt, Human
uuugcaaagaaauuauugcugu

SEQ ID NO: 356190 - RNA, 22 nt, Human
gccauuuagggaggcaagguga

SEQ ID NO: 356191 - RNA, 20 nt, Human
caucagaaauccugacccac

SEQ ID NO: 356192 - RNA, 22 nt, Human
uauaauuuggggaaaguggugu

SEQ ID NO: 356193 - RNA, 22 nt, Human
uaguuauuauuguuacuaucag

SEQ ID NO: 356194 - RNA, 22 nt, Human
cugcccagaaucacucacucga

SEQ ID NO: 356195 - RNA, 22 nt, Human
gggcugagagcuggaaucugag

SEQ ID NO: 356196 - RNA, 22 nt, Human
cuucaggauuuaggaagaugaa

SEQ ID NO: 356197 - RNA, 22 nt, Human
uagaucugauacaauucaucug

SEQ ID NO: 356198 - RNA, 22 nt, Human
uccaggagcucauccacgucaa

SEQ ID NO: 356199 - RNA, 22 nt, Human
caaggcugugcaggguccauau

SEQ ID NO: 356200 - RNA, 22 nt, Human
aggcagugagugugacuucaca

SEQ ID NO: 356201 - RNA, 22 nt, Human
cagcuggcccuuugguagccuu

SEQ ID NO: 356202 - RNA, 22 nt, Human
uucuaacucuguuauguguuuc

SEQ ID NO: 356203 - RNA, 22 nt, Human
agagugauucuaguuagggaau

SEQ ID NO: 356204 - RNA, 22 nt, Human
ccuggcagcuguuuggcuuggc

SEQ ID NO: 356205 - RNA, 22 nt, Human
ugucacauugaauaugauuuau

SEQ ID NO: 356206 - RNA, 22 nt, Human
auaaacucaugccaagaaauga

SEQ ID NO: 356207 - RNA, 22 nt, Human
ucaggagaaagccaauuagagu

SEQ ID NO: 356208 - RNA, 19 nt, Human
acacagggaucagaggguu

SEQ ID NO: 356209 - RNA, 19 nt, Human
uggcuccugccugccuucu

SEQ ID NO: 356210 - RNA, 22 nt, Human
agccaggaauuggacaacacau

SEQ ID NO: 356211 - RNA, 22 nt, Human
gcccaucaucacuguggaggcu

SEQ ID NO: 356212 - RNA, 22 nt, Human
aaggugucggcagagccgcuuc

SEQ ID NO: 356213 - RNA, 22 nt, Human
uuuuccuacugauaaacaguua

SEQ ID NO: 356214 - RNA, 22 nt, Human
ugaaaugauguacaagaaggca

SEQ ID NO: 356215 - RNA, 22 nt, Human
aaugaugguauugaugagcuaa

SEQ ID NO: 356216 - RNA, 22 nt, Human
gaacagaagaggcuggugccac

SEQ ID NO: 356217 - RNA, 22 nt, Human
aaagucaucagaaccuuccaga

SEQ ID NO: 356218 - RNA, 19 nt, Human
uuccuuagaggaggcggug

SEQ ID NO: 356219 - RNA, 22 nt, Human
gcaaggcuuugugaauuuuaaa

SEQ ID NO: 356220 - RNA, 22 nt, Human
cagggcucaggaaaucagacgu

SEQ ID NO: 356221 - RNA, 22 nt, Human
ugcagaagacacaagguaacgu

SEQ ID NO: 356222 - RNA, 22 nt, Human
aaaauuauggaguaucccaaag

SEQ ID NO: 356223 - RNA, 22 nt, Human
ggggcagagaauaaaaaccuaa

SEQ ID NO: 356224 - RNA, 22 nt, Human
gccaaaucuggauuuagcaaga

SEQ ID NO: 356225 - RNA, 22 nt, Human
aggcagccugguuugaauggaa

SEQ ID NO: 356226 - RNA, 22 nt, Human
gacagaagaggaacuuggacag

SEQ ID NO: 356227 - RNA, 22 nt, Human
aaagagcuucauuuccauuuau

SEQ ID NO: 356228 - RNA, 22 nt, Human
gaaggaggcguuagcccuagga

SEQ ID NO: 356229 - RNA, 20 nt, Human
cuguggaauuuuaccaugcg

SEQ ID NO: 356230 - RNA, 22 nt, Human
cucagagaaaugucacaacaau

SEQ ID NO: 356231 - RNA, 19 nt, Human
acacugaauguagaauugg

SEQ ID NO: 356232 - RNA, 22 nt, Human
aaucagaaaggcuaaggaagca

SEQ ID NO: 356233 - RNA, 22 nt, Human
cccaggagauggugcguggucu

SEQ ID NO: 356234 - RNA, 22 nt, Human
agagcuguucaacguagcaaug

SEQ ID NO: 356235 - RNA, 22 nt, Human
gucaacuuuaagaugaucuuuu

SEQ ID NO: 356236 - RNA, 22 nt, Human
aggcagccuauggggagcucag

SEQ ID NO: 356237 - RNA, 22 nt, Human
gccacucaugggaggugugcaa

SEQ ID NO: 356238 - RNA, 22 nt, Human
ggcaaaaaccauaauuacuuuu

SEQ ID NO: 356239 - RNA, 22 nt, Human
ucaagcaucuuggucuacgauc

SEQ ID NO: 356240 - RNA, 22 nt, Human
gagcucugggaaacaaagugua

SEQ ID NO: 356241 - RNA, 22 nt, Human
augauauuugcaaugugcuugc

SEQ ID NO: 356242 - RNA, 20 nt, Human
cacagcuugccuuuuaugac

SEQ ID NO: 356243 - RNA, 20 nt, Human
uggagccaaggugugucugg

SEQ ID NO: 356244 - RNA, 22 nt, Human
aggaaagguagcgugccagcag

SEQ ID NO: 356245 - RNA, 22 nt, Human
ucagaacauuuaaaaagugguu

SEQ ID NO: 356246 - RNA, 22 nt, Human
agcuuuauucaugauuucaggg

SEQ ID NO: 356247 - RNA, 22 nt, Human
aggcacuguucccaguuauccu

SEQ ID NO: 356248 - RNA, 19 nt, Human
ugagacagggauucaggug

SEQ ID NO: 356249 - RNA, 22 nt, Human
gaggcagccagagguucucauu

SEQ ID NO: 356250 - RNA, 22 nt, Human
agagagcauugaggaaaucuuc

SEQ ID NO: 356251 - RNA, 22 nt, Human
gcccaugcucucaggcgggccu

SEQ ID NO: 356252 - RNA, 22 nt, Human
ugcagggccaugguggcggcug

SEQ ID NO: 356253 - RNA, 20 nt, Human
auacuuguuuucaggcuuuu

SEQ ID NO: 356254 - RNA, 22 nt, Human
cccuggaggaccccaauguggc

SEQ ID NO: 356255 - RNA, 22 nt, Human
uacugcaugguggaguggagcu

SEQ ID NO: 356256 - RNA, 22 nt, Human
ugcaguggaggccgugagacag

SEQ ID NO: 356257 - RNA, 22 nt, Human
uagugcuuaauaaauuucagaa

SEQ ID NO: 356258 - RNA, 22 nt, Human
aaucuuucccuauuaaaugugg

SEQ ID NO: 356259 - RNA, 22 nt, Human
gcaggaugagugaguacauuua

SEQ ID NO: 356260 - RNA, 20 nt, Human
gcccaggaauuugcauuucu

SEQ ID NO: 356261 - RNA, 22 nt, Human
caggcacuggggaugcugggau

SEQ ID NO: 356262 - RNA, 22 nt, Human
gacagcauggugucuguucagg

SEQ ID NO: 356263 - RNA, 22 nt, Human
ugcuuuauuaagagagaaauuu

SEQ ID NO: 356264 - RNA, 22 nt, Human
ucucagagaagugaugagcaau

SEQ ID NO: 356265 - RNA, 22 nt, Human
ucccaggacuuccaguuggagg

SEQ ID NO: 356266 - RNA, 22 nt, Human
ucuguucaucaucuggacacau

SEQ ID NO: 356267 - RNA, 22 nt, Human
agcagccacagucugggacagg

SEQ ID NO: 356268 - RNA, 22 nt, Human
aauuuuaucucuaagcaggcuu

SEQ ID NO: 356269 - RNA, 22 nt, Human
gccugcagggugaugggcugcc

SEQ ID NO: 356270 - RNA, 22 nt, Human
cugggcagugcagcuauagaac

SEQ ID NO: 356271 - RNA, 18 nt, Human
gggcaagcggcugucacc

SEQ ID NO: 356272 - RNA, 22 nt, Human
uucuuucacucaagaaggaucu

SEQ ID NO: 356273 - RNA, 18 nt, Human
uggcaggaaaugcacuuu

SEQ ID NO: 356274 - RNA, 22 nt, Human
gucccugcccuccugggacuca

SEQ ID NO: 356275 - RNA, 19 nt, Human
uggggcuguguuuugaccc

SEQ ID NO: 356276 - RNA, 22 nt, Human
agaaucugguagaaccaaggau

SEQ ID NO: 356277 - RNA, 22 nt, Human
agcuggcaguaugacuggugac

SEQ ID NO: 356278 - RNA, 17 nt, Human
gagccacccugugcgag

SEQ ID NO: 356279 - RNA, 22 nt, Human
ggucaugcugugaaucagugcu

SEQ ID NO: 356280 - RNA, 22 nt, Human
agcuuguuagaaauguagacuc

SEQ ID NO: 356281 - RNA, 22 nt, Human
ucugggcucugucagcaccucu

SEQ ID NO: 356282 - RNA, 22 nt, Human
cuguacucaagguaaaccagga

SEQ ID NO: 356283 - RNA, 21 nt, Human
ccugugugucugacugggcua

SEQ ID NO: 356284 - RNA, 22 nt, Human
ccugugcccucagccuggcucu

SEQ ID NO: 356285 - RNA, 22 nt, Human
augcugugucaggaauuugaua

SEQ ID NO: 356286 - RNA, 22 nt, Human
augaaggcaguuaaacgucauc

SEQ ID NO: 356287 - RNA, 22 nt, Human
aguggggacuuaugccagcauu

SEQ ID NO: 356288 - RNA, 22 nt, Human
ucugccugaaauucacauguaa

SEQ ID NO: 356289 - RNA, 22 nt, Human
aaugaacaaaauaugcuuugca

SEQ ID NO: 356290 - RNA, 22 nt, Human
ggucccugcugaagccuuggug

SEQ ID NO: 356291 - RNA, 22 nt, Human
agucacccuccaacucuccacu

SEQ ID NO: 356292 - RNA, 22 nt, Human
uagaaacaucagcuaaccaaaa

SEQ ID NO: 356293 - RNA, 22 nt, Human
acucaggaauggggcugggacu

SEQ ID NO: 356294 - RNA, 22 nt, Human
gccuggcacucacugaagaggc

SEQ ID NO: 356295 - RNA, 22 nt, Human
ggaggcacuucccgucucagcc

SEQ ID NO: 356296 - RNA, 22 nt, Human
gagggcucuaccaaguaacucu

SEQ ID NO: 356297 - RNA, 21 nt, Human
cgcagagcgaacuugcggcgc

SEQ ID NO: 356298 - RNA, 22 nt, Human
cacaccagagguuaccugcaaa

SEQ ID NO: 356299 - RNA, 22 nt, Human
aaggaagaagacucuuuacucc

SEQ ID NO: 356300 - RNA, 19 nt, Human
gcuccugggccucacucau

SEQ ID NO: 356301 - RNA, 22 nt, Human
guggccagaagacugcaaugcu

SEQ ID NO: 356302 - RNA, 22 nt, Human
ucacacagauugguagagcuga

SEQ ID NO: 356303 - RNA, 22 nt, Human
uggcccugcuggccaaaggcua

SEQ ID NO: 356304 - RNA, 22 nt, Human
cucuguccacagguuugucccu

SEQ ID NO: 356305 - RNA, 22 nt, Human
gucauuccuauccauuugauac

SEQ ID NO: 356306 - RNA, 22 nt, Human
ggugacuggagggacccaggcc

SEQ ID NO: 356307 - RNA, 22 nt, Human
ugugacaucgcugugucuguuu

SEQ ID NO: 356308 - RNA, 22 nt, Human
uguguacacaaugauugcagag

SEQ ID NO: 356309 - RNA, 20 nt, Human
guauuagguguuccucuuuc

SEQ ID NO: 356310 - RNA, 22 nt, Human
cagcugugcuguauuaagcucu

SEQ ID NO: 356311 - RNA, 20 nt, Human
agaaaaaguguggaaauuuc

SEQ ID NO: 356312 - RNA, 22 nt, Human
gcagcuuucuugcccuaaucuu

SEQ ID NO: 356313 - RNA, 22 nt, Human
aagggaggccagagguuuugca

SEQ ID NO: 356314 - RNA, 22 nt, Human
cuaauuauguuguuauaaucaa

SEQ ID NO: 356315 - RNA, 20 nt, Human
uuggcucugaucaguggagc

SEQ ID NO: 356316 - RNA, 22 nt, Human
auucuacaacccaauaauaauu

SEQ ID NO: 356317 - RNA, 22 nt, Human
agagugaagguugacacuucac

SEQ ID NO: 356318 - RNA, 22 nt, Human
aaauagcacagcagcugaggcu

SEQ ID NO: 356319 - RNA, 22 nt, Human
cuuucagagguuacucaggaaa

SEQ ID NO: 356320 - RNA, 22 nt, Human
uccacagaauguaagauccaca

SEQ ID NO: 356321 - RNA, 19 nt, Human
aggguggcaaaggagggug

SEQ ID NO: 356322 - RNA, 22 nt, Human
cccaggagaccugugaaaggac

SEQ ID NO: 356323 - RNA, 22 nt, Human
gggcuucucccuaaggacucug

SEQ ID NO: 356324 - RNA, 22 nt, Human
guuugauucaagaacaaagagu

SEQ ID NO: 356325 - RNA, 22 nt, Human
ugaagaaucccagggaauuugg

SEQ ID NO: 356326 - RNA, 22 nt, Human
ugucucaguacacuccgauguu

SEQ ID NO: 356327 - RNA, 22 nt, Human
uugucugaaagaucauuacauu

SEQ ID NO: 356328 - RNA, 22 nt, Human
gaaggaaaucugugauuuaugc

SEQ ID NO: 356329 - RNA, 22 nt, Human
uguggcaguauaagagcuagaa

SEQ ID NO: 356330 - RNA, 22 nt, Human
auggcuuaagaaugcuuuugug

SEQ ID NO: 356331 - RNA, 22 nt, Human
cagaggaaguuccuugaugaga

SEQ ID NO: 356332 - RNA, 20 nt, Human
aagagaagaagucuuugaaa

SEQ ID NO: 356333 - RNA, 22 nt, Human
uuauccaacaugacuuaugucc

SEQ ID NO: 356334 - RNA, 22 nt, Human
gguagcagggcugugagucaga

SEQ ID NO: 356335 - RNA, 22 nt, Human
ucauagaaugaguuaaugaacu

SEQ ID NO: 356336 - RNA, 22 nt, Human
uuugcauaaaggagcauuucuc

SEQ ID NO: 356337 - RNA, 23 nt, Human
ugggaccuguuugcccacagaug

SEQ ID NO: 356338 - RNA, 22 nt, Human
uucacaauagcuggcaucaucu

SEQ ID NO: 356339 - RNA, 22 nt, Human
uuucccagagguaugaauaagu

SEQ ID NO: 356340 - RNA, 22 nt, Human
gggcaagcacagcgagcgugcg

SEQ ID NO: 356341 - RNA, 22 nt, Human
uggcugcucaagggaggaggcu

SEQ ID NO: 356342 - RNA, 22 nt, Human
ugcagcauugcaaagcagucuu

SEQ ID NO: 356343 - RNA, 22 nt, Human
auguuauuaaaguacagauucu

SEQ ID NO: 356344 - RNA, 22 nt, Human
uggaggggcaauggagcgcgga

SEQ ID NO: 356345 - RNA, 22 nt, Human
uguagaaagaauauguuucaua

SEQ ID NO: 356346 - RNA, 23 nt, Human
ccuccugggcacaggccugaugg

SEQ ID NO: 356347 - RNA, 22 nt, Human
cagaaauucccauuucagauuc

SEQ ID NO: 356348 - RNA, 22 nt, Human
ccagcuauugcuguguaacagu

SEQ ID NO: 356349 - RNA, 22 nt, Human
ugaagccacuuuccagaaucac

SEQ ID NO: 356350 - RNA, 22 nt, Human
acaguaaaucaacagaauaucu

SEQ ID NO: 356351 - RNA, 20 nt, Human
gugugaagcccucaggagga

SEQ ID NO: 356352 - RNA, 22 nt, Human
aaacuguaaacacagcaguaca

SEQ ID NO: 356353 - RNA, 22 nt, Human
ccuugcguuuuacagcuucuag

SEQ ID NO: 356354 - RNA, 22 nt, Human
ggagccugggcauuaguaauuu

SEQ ID NO: 356355 - RNA, 22 nt, Human
gguggccugcccugaucccugg

SEQ ID NO: 356356 - RNA, 22 nt, Human
gagaggucaucucccaucagca

SEQ ID NO: 356357 - RNA, 22 nt, Human
ccacugggggcugcaggcacuc

SEQ ID NO: 356358 - RNA, 22 nt, Human
uccaaagggaagcgcuuucugu

SEQ ID NO: 356359 - RNA, 22 nt, Human
gccugguggugugcucaagugg

SEQ ID NO: 356360 - RNA, 22 nt, Human
ugaacagauggcccagcagagg

SEQ ID NO: 356361 - RNA, 22 nt, Human
cugccuuugcccuugacacugu

SEQ ID NO: 356362 - RNA, 22 nt, Human
gcccaggaguucaaggcugcag

SEQ ID NO: 356363 - RNA, 22 nt, Human
uccagggaccucccugagagcu

SEQ ID NO: 356364 - RNA, 22 nt, Human
ucccugcacagccgagccaugc

SEQ ID NO: 356365 - RNA, 22 nt, Human
uugcugugucauuuguuuaauc

SEQ ID NO: 356366 - RNA, 22 nt, Human
aucaggaucaugcuggguggga

SEQ ID NO: 356367 - RNA, 22 nt, Human
uggcucaggaucuaagcagaau

SEQ ID NO: 356368 - RNA, 22 nt, Human
cuuacagagaagaaaauguagu

SEQ ID NO: 356369 - RNA, 22 nt, Human
aaggcagauauaaagacuagag

SEQ ID NO: 356370 - RNA, 23 nt, Human
gccuggccaccccagggcugcuu

SEQ ID NO: 356371 - RNA, 22 nt, Human
uaugcauaugaccccaagcuug

SEQ ID NO: 356372 - RNA, 22 nt, Human
aggccuguuccaggccccuuuu

SEQ ID NO: 356373 - RNA, 22 nt, Human
auuuaaugucgagcuauuguag

SEQ ID NO: 356374 - RNA, 22 nt, Human
caggcugagcucuggccugggc

SEQ ID NO: 356375 - RNA, 22 nt, Human
ugauuuccugugcgcccuuagg

SEQ ID NO: 356376 - RNA, 22 nt, Human
agaauucuccuucagggcagga

SEQ ID NO: 356377 - RNA, 17 nt, Human
aauagcugcucagagag

SEQ ID NO: 356378 - RNA, 22 nt, Human
uggcugggagcuggaacugggc

SEQ ID NO: 356379 - RNA, 22 nt, Human
uucacuuaacaucauaucauga

SEQ ID NO: 356380 - RNA, 22 nt, Human
ccucccugcgcuccugcggcgg

SEQ ID NO: 356381 - RNA, 20 nt, Human
ugcuugucaugcacucaggc

SEQ ID NO: 356382 - RNA, 22 nt, Human
acauuucuaauuuaauguaaca

SEQ ID NO: 356383 - RNA, 22 nt, Human
gggcuucucuuaugcuaacugg

SEQ ID NO: 356384 - RNA, 22 nt, Human
augagacuaccuguaauguggc

SEQ ID NO: 356385 - RNA, 19 nt, Human
aucugagauuauaaacaga

SEQ ID NO: 356386 - RNA, 22 nt, Human
aauaauuagugggacagagaac

SEQ ID NO: 356387 - RNA, 22 nt, Human
aagagcaucuauuucacagugg

SEQ ID NO: 356388 - RNA, 22 nt, Human
aaaguguacuaugucaugaaca

SEQ ID NO: 356389 - RNA, 22 nt, Human
guacuuccguggacuaauuguu

SEQ ID NO: 356390 - RNA, 22 nt, Human
gugagaguguuuggaaauagaa

SEQ ID NO: 356391 - RNA, 22 nt, Human
gagggcuccauuccccgugccc

SEQ ID NO: 356392 - RNA, 22 nt, Human
auguagagcaguguuguccaau

SEQ ID NO: 356393 - RNA, 21 nt, Human
acuuuaauauacaugaggagg

SEQ ID NO: 356394 - RNA, 22 nt, Human
augcuuaaccuugguguacaau

SEQ ID NO: 356395 - RNA, 22 nt, Human
cuuuauguccuugaagaguugu

SEQ ID NO: 356396 - RNA, 22 nt, Human
caaugugucaggaaaagggcca

SEQ ID NO: 356397 - RNA, 22 nt, Human
caggaggaaaugugacccugcu

SEQ ID NO: 356398 - RNA, 22 nt, Human
ucagggcacguuucugcaaugc

SEQ ID NO: 356399 - RNA, 20 nt, Human
uaaggcuguuuuguauuccu

SEQ ID NO: 356400 - RNA, 22 nt, Human
augggaggaucacuugaggcca

SEQ ID NO: 356401 - RNA, 22 nt, Human
guggagacgggacagaagcuaa

SEQ ID NO: 356402 - RNA, 22 nt, Human
ggcacugacugugcagcgcacc

SEQ ID NO: 356403 - RNA, 22 nt, Human
ugccugaguuuaacccucagag

SEQ ID NO: 356404 - RNA, 22 nt, Human
cucugcaggggaggcaugcacu

SEQ ID NO: 356405 - RNA, 22 nt, Human
gcaggcaggagcccaacugccu

SEQ ID NO: 356406 - RNA, 20 nt, Human
agauuauuccuaagauuucu

SEQ ID NO: 356407 - RNA, 22 nt, Human
augaaacaugagaaauggagag

SEQ ID NO: 356408 - RNA, 22 nt, Human
ucucuuaaaagauuuuaaugac

SEQ ID NO: 356409 - RNA, 22 nt, Human
aaagccuugcccgucacuggga

SEQ ID NO: 356410 - RNA, 22 nt, Human
gcagggcuguggacacuuuggu

SEQ ID NO: 356411 - RNA, 22 nt, Human
cagcuuguuaccgagggagggu

SEQ ID NO: 356412 - RNA, 23 nt, Human
aguacaauaaguauaauucuuuc

SEQ ID NO: 356413 - RNA, 22 nt, Human
ugggcacaggggaauggaugaa

SEQ ID NO: 356414 - RNA, 22 nt, Human
ugugacagaucuuuaaauaaug

SEQ ID NO: 356415 - RNA, 22 nt, Human
guggcuucuggcugggccucag

SEQ ID NO: 356416 - RNA, 22 nt, Human
cugaggcuuugugugcaugccu

SEQ ID NO: 356417 - RNA, 22 nt, Human
cuucuuaacuguauauacuaug

SEQ ID NO: 356418 - RNA, 22 nt, Human
acacauuucucuuuuuguaagu

SEQ ID NO: 356419 - RNA, 22 nt, Human
uguuuuuaaauaaugauagaaa

SEQ ID NO: 356420 - RNA, 22 nt, Human
gaggcucacgacgggacgaacu

SEQ ID NO: 356421 - RNA, 22 nt, Human
ucagaagguggagguugcagug

SEQ ID NO: 356422 - RNA, 22 nt, Human
cccagccugugacagccguccu

SEQ ID NO: 356423 - RNA, 22 nt, Human
cucugucccagacccaccucuc

SEQ ID NO: 356424 - RNA, 22 nt, Human
uucacaggaggguggaugcaug

SEQ ID NO: 356425 - RNA, 22 nt, Human
ggcaggagaaaggucucuucuu

SEQ ID NO: 356426 - RNA, 18 nt, Human
cauuguacaaugcuuuau

SEQ ID NO: 356427 - RNA, 22 nt, Human
uaacagaaauuuuaguuagggg

SEQ ID NO: 356428 - RNA, 22 nt, Human
uuuauccaaggguuuuaacugu

SEQ ID NO: 356429 - RNA, 22 nt, Human
uuugaaaguccuaggagagucc

SEQ ID NO: 356430 - RNA, 20 nt, Human
ucccaggcugggcuccagcu

SEQ ID NO: 356431 - RNA, 22 nt, Human
ugugugucagagucuccauggu

SEQ ID NO: 356432 - RNA, 22 nt, Human
aucaguuuuuauuaauguagcu

SEQ ID NO: 356433 - RNA, 19 nt, Human
acagaagcauagaaaagga

SEQ ID NO: 356434 - RNA, 22 nt, Human
cagaccagcucuaugaacccaa

SEQ ID NO: 356435 - RNA, 22 nt, Human
caagaaauuucuuaagaacuaa

SEQ ID NO: 356436 - RNA, 22 nt, Human
ucccuggggauguuggccugcc

SEQ ID NO: 356437 - RNA, 18 nt, Human
ucuuggaguaaugaucaa

SEQ ID NO: 356438 - RNA, 22 nt, Human
uccaggcaaagugcugggcugc

SEQ ID NO: 356439 - RNA, 22 nt, Human
uuauguaauuuguuugcucuuc

SEQ ID NO: 356440 - RNA, 22 nt, Human
cagcugugcugauugcucagua

SEQ ID NO: 356441 - RNA, 22 nt, Human
ugucccagaucacaggagggga

SEQ ID NO: 356442 - RNA, 22 nt, Human
acuguggcgucaggaagaaauu

SEQ ID NO: 356443 - RNA, 22 nt, Human
accagcuguguccuggcugcag

SEQ ID NO: 356444 - RNA, 23 nt, Human
ucugcucugaaguucggcugagc

SEQ ID NO: 356445 - RNA, 22 nt, Human
ucagagugcagcgggaggcugg

SEQ ID NO: 356446 - RNA, 22 nt, Human
uaaguucaguuggucgaaguag

SEQ ID NO: 356447 - RNA, 22 nt, Human
uagcuuuacaaagugcugcacc

SEQ ID NO: 356448 - RNA, 22 nt, Human
gggcacagagggucuugaagaa

SEQ ID NO: 356449 - RNA, 22 nt, Human
agcaggaaagaaaaaucugugu

SEQ ID NO: 356450 - RNA, 23 nt, Human
uggcagcagaucuuaaagugacc

SEQ ID NO: 356451 - RNA, 21 nt, Human
uggccaaaaccauauuauuaa

SEQ ID NO: 356452 - RNA, 22 nt, Human
uuacagaaaggaaggacugacu

SEQ ID NO: 356453 - RNA, 22 nt, Human
uguacauugucacucaucaagu

SEQ ID NO: 356454 - RNA, 18 nt, Human
uaaaugcauguuaauaac

SEQ ID NO: 356455 - RNA, 22 nt, Human
cuguucucuggcgguggcuguu

SEQ ID NO: 356456 - RNA, 22 nt, Human
ucaggagacauucuuaaaguag

SEQ ID NO: 356457 - RNA, 22 nt, Human
gggcuggagccagcuguggcug

SEQ ID NO: 356458 - RNA, 22 nt, Human
aggcugaggcuggcagcuccag

SEQ ID NO: 356459 - RNA, 22 nt, Human
ucaguuuuuguuugccagauag

SEQ ID NO: 356460 - RNA, 20 nt, Human
ggggcagguuuuuauggcua

SEQ ID NO: 356461 - RNA, 22 nt, Human
ucagcauaucuugagcuucaug

SEQ ID NO: 356462 - RNA, 22 nt, Human
ggcagggaggaggugaaaguga

SEQ ID NO: 356463 - RNA, 22 nt, Human
gagcugagaucgugccauugca

SEQ ID NO: 356464 - RNA, 22 nt, Human
ggcugcugggaauaugccagcu

SEQ ID NO: 356465 - RNA, 22 nt, Human
ggugaagguggaacgcagagca

SEQ ID NO: 356466 - RNA, 22 nt, Human
cccaggcagcccuucugacgca

SEQ ID NO: 356467 - RNA, 22 nt, Human
aauaacuggcacauaucacaua

SEQ ID NO: 356468 - RNA, 22 nt, Human
agacaaagacagcaucucaggu

SEQ ID NO: 356469 - RNA, 23 nt, Human
gaggccacauuccccugcuugag

SEQ ID NO: 356470 - RNA, 22 nt, Human
uuuguaugugauaagacuauuc

SEQ ID NO: 356471 - RNA, 22 nt, Human
acagggccaggugagaggugcu

SEQ ID NO: 356472 - RNA, 22 nt, Human
gagcuuaggccagggacaggga

SEQ ID NO: 356473 - RNA, 22 nt, Human
uccuugaacagagggccugggu

SEQ ID NO: 356474 - RNA, 22 nt, Human
acagcuuuucugauagauccug

SEQ ID NO: 356475 - RNA, 22 nt, Human
cugcccugccuggccagugugg

SEQ ID NO: 356476 - RNA, 18 nt, Human
ucagcuggggcugcagcc

SEQ ID NO: 356477 - RNA, 22 nt, Human
ccagcuuuggaguguuguugcu

SEQ ID NO: 356478 - RNA, 22 nt, Human
cagcuucugucugauuagcaag

SEQ ID NO: 356479 - RNA, 22 nt, Human
gaagagcuauguccagggagca

SEQ ID NO: 356480 - RNA, 22 nt, Human
cugggaggauucauugagguga

SEQ ID NO: 356481 - RNA, 22 nt, Human
aaaagagucuuaggcagucaua

SEQ ID NO: 356482 - RNA, 22 nt, Human
aguccaugguucugacucaucu

SEQ ID NO: 356483 - RNA, 22 nt, Human
cuggcugcaggaaggagugggc

SEQ ID NO: 356484 - RNA, 22 nt, Human
uuguaacagcuguuuauauagu

SEQ ID NO: 356485 - RNA, 22 nt, Human
caucagcagucacaugaugcug

SEQ ID NO: 356486 - RNA, 22 nt, Human
uggcucaguuccaucaucugga

SEQ ID NO: 356487 - RNA, 22 nt, Human
ccucuggucccagcucugcugc

SEQ ID NO: 356488 - RNA, 19 nt, Human
aggcagcauucuggggcuu

SEQ ID NO: 356489 - RNA, 22 nt, Human
cagagccagaacuagaccuugu

SEQ ID NO: 356490 - RNA, 22 nt, Human
ugcagaaguauuccaggcccca

SEQ ID NO: 356491 - RNA, 21 nt, Human
gccucugcugucuuauuguga

SEQ ID NO: 356492 - RNA, 22 nt, Human
uggcucaguagcagugugguca

SEQ ID NO: 356493 - RNA, 22 nt, Human
gagagcugcagccgagaggggg

SEQ ID NO: 356494 - RNA, 22 nt, Human
cgcagaagagguugucuagucc

SEQ ID NO: 356495 - RNA, 22 nt, Human
ugcuucaggaagaaacgccagg

SEQ ID NO: 356496 - RNA, 22 nt, Human
uuaaaauuauggcccauuugga

SEQ ID NO: 356497 - RNA, 22 nt, Human
guggcucuccauugacauggaa

SEQ ID NO: 356498 - RNA, 22 nt, Human
cuggcaaguacugggccagcuc

SEQ ID NO: 356499 - RNA, 22 nt, Human
uggaaagaaaguaaaggcguau

SEQ ID NO: 356500 - RNA, 22 nt, Human
ucacugcucuccaauguggagu

SEQ ID NO: 356501 - RNA, 22 nt, Human
uguucagagacagaaauucuaa

SEQ ID NO: 356502 - RNA, 22 nt, Human
ugaaggagcucaaugaugaugc

SEQ ID NO: 356503 - RNA, 22 nt, Human
ccuggcugguggcagcgacaag

SEQ ID NO: 356504 - RNA, 22 nt, Human
cugaagaggacgcagcagcaag

SEQ ID NO: 356505 - RNA, 22 nt, Human
ugcuuuuaagaacaaugcugcu

SEQ ID NO: 356506 - RNA, 22 nt, Human
cauuuccacuucugaaaacugg

SEQ ID NO: 356507 - RNA, 22 nt, Human
cuggcucccguuguccuugaag

SEQ ID NO: 356508 - RNA, 22 nt, Human
uuaacacuccuaacuacagucu

SEQ ID NO: 356509 - RNA, 22 nt, Human
gagaugaauguaaacaaaggca

SEQ ID NO: 356510 - RNA, 22 nt, Human
augcugugguagacagcauucc

SEQ ID NO: 356511 - RNA, 22 nt, Human
auugcuaggaacagguugcacc

SEQ ID NO: 356512 - RNA, 22 nt, Human
uuucaaugacacaaaagagaaa

SEQ ID NO: 356513 - RNA, 22 nt, Human
agcucacagaaauccugcagga

SEQ ID NO: 356514 - RNA, 22 nt, Human
ccaggagagcagaagcccaggc

SEQ ID NO: 356515 - RNA, 22 nt, Human
uuugacaaaggaaaaaugcaca

SEQ ID NO: 356516 - RNA, 22 nt, Human
gagggccagcagccucagcaug

SEQ ID NO: 356517 - RNA, 22 nt, Human
auauuagggucucuaaauucua

SEQ ID NO: 356518 - RNA, 22 nt, Human
ccugggugaugugcugcccucg

SEQ ID NO: 356519 - RNA, 20 nt, Human
uccaggcagacagcuauggg

SEQ ID NO: 356520 - RNA, 22 nt, Human
caaaggcaguuacugaaugaag

SEQ ID NO: 356521 - RNA, 20 nt, Human
ccuccuggucaggugugcag

SEQ ID NO: 356522 - RNA, 22 nt, Human
uaaaggcucguauuguugugug

SEQ ID NO: 356523 - RNA, 19 nt, Human
uagucuuuauucuuaauuu

SEQ ID NO: 356524 - RNA, 22 nt, Human
gcacagaaguaaaauacaaguc

SEQ ID NO: 356525 - RNA, 22 nt, Human
gagccuggggacccuccugagu

SEQ ID NO: 356526 - RNA, 16 nt, Human
ucagggcagaauggca

SEQ ID NO: 356527 - RNA, 22 nt, Human
gugguuuugccauuacaaguaa

SEQ ID NO: 356528 - RNA, 22 nt, Human
uuagauaaauugcaacuugauu

SEQ ID NO: 356529 - RNA, 22 nt, Human
gcugagagcaaagcaugucuag

SEQ ID NO: 356530 - RNA, 19 nt, Human
accaggagacagugagcuu

SEQ ID NO: 356531 - RNA, 22 nt, Human
ugaugcuucacgcugaauaugc

SEQ ID NO: 356532 - RNA, 22 nt, Human
gguccccagcaguggcugcuuc

SEQ ID NO: 356533 - RNA, 20 nt, Human
gcaugaggaaucauugcagc

SEQ ID NO: 356534 - RNA, 22 nt, Human
cccaguggaaggaguagaagac

SEQ ID NO: 356535 - RNA, 21 nt, Human
ugucagaaauaagcaugugau

SEQ ID NO: 356536 - RNA, 22 nt, Human
cugucaucacaguugagcagcc

SEQ ID NO: 356537 - RNA, 22 nt, Human
aggaccugccaggugcaaagca

SEQ ID NO: 356538 - RNA, 22 nt, Human
cugcuucugggaugauggagua

SEQ ID NO: 356539 - RNA, 22 nt, Human
guuauuagaagugaaggauugu

SEQ ID NO: 356540 - RNA, 22 nt, Human
cuggcagguuuggugucuggug

SEQ ID NO: 356541 - RNA, 22 nt, Human
gaggccuggugugucucccgcu

SEQ ID NO: 356542 - RNA, 19 nt, Human
ugcagggcugcgccugggg

SEQ ID NO: 356543 - RNA, 22 nt, Human
ucggagcuguagaugaaacccu

SEQ ID NO: 356544 - RNA, 22 nt, Human
ugaaaucuacccuauucagggu

SEQ ID NO: 356545 - RNA, 22 nt, Human
gcucaggacuggaggagcgggg

SEQ ID NO: 356546 - RNA, 22 nt, Human
agggcagcagcccauggcucug

SEQ ID NO: 356547 - RNA, 22 nt, Human
gcagaauucuacagaugauaaa

SEQ ID NO: 356548 - RNA, 22 nt, Human
cugccagcucgccacaaugaca

SEQ ID NO: 356549 - RNA, 22 nt, Human
gcugccuugaacuuggccuggg

SEQ ID NO: 356550 - RNA, 22 nt, Human
ucugggaagcugcgugccuguu

SEQ ID NO: 356551 - RNA, 22 nt, Human
cuuuggcaaugucauuuucaau

SEQ ID NO: 356552 - RNA, 22 nt, Human
gucuucuguaagaugagguccc

SEQ ID NO: 356553 - RNA, 22 nt, Human
auucuucaaagagugucaaagu

SEQ ID NO: 356554 - RNA, 22 nt, Human
gcccagcacagcuggaagaguc

SEQ ID NO: 356555 - RNA, 22 nt, Human
gcagcuggacccacacggcuua

SEQ ID NO: 356556 - RNA, 22 nt, Human
agucaggagcugcugcauugua

SEQ ID NO: 356557 - RNA, 22 nt, Human
auggauaauggugauaguugca

SEQ ID NO: 356558 - RNA, 22 nt, Human
uacagaaaaacuggcauugaag

SEQ ID NO: 356559 - RNA, 21 nt, Human
ucuguucaaggaacuacggau

SEQ ID NO: 356560 - RNA, 22 nt, Human
uugcauugaaaauauauuuuaa

SEQ ID NO: 356561 - RNA, 22 nt, Human
cucugaacucuugggcagcaug

SEQ ID NO: 356562 - RNA, 22 nt, Human
ccagggcacuuaggcccagccc

SEQ ID NO: 356563 - RNA, 22 nt, Human
ugcagaggagcuggaaggcugg

SEQ ID NO: 356564 - RNA, 17 nt, Human
uccaggagaggcaaugg

SEQ ID NO: 356565 - RNA, 22 nt, Human
agaauuucuggaagauugcaag

SEQ ID NO: 356566 - RNA, 22 nt, Human
cuccagugcgcaggacagcccc

SEQ ID NO: 356567 - RNA, 22 nt, Human
caagugucuauaucagugcuug

SEQ ID NO: 356568 - RNA, 22 nt, Human
cuuaaagaaauugaggagagga

SEQ ID NO: 356569 - RNA, 22 nt, Human
cuacauaaauuuaucacagacu

SEQ ID NO: 356570 - RNA, 17 nt, Human
agccaggcauaugaagu

SEQ ID NO: 356571 - RNA, 20 nt, Human
agcccaggccugugugaguc

SEQ ID NO: 356572 - RNA, 22 nt, Human
aacaguaaaaaucauuuaguug

SEQ ID NO: 356573 - RNA, 22 nt, Human
uguacaaugccagggaacacca

SEQ ID NO: 356574 - RNA, 22 nt, Human
ucaggaaagaagaugcucagug

SEQ ID NO: 356575 - RNA, 22 nt, Human
ugaagcaggcauugacugauga

SEQ ID NO: 356576 - RNA, 22 nt, Human
aaauugugcucacacugauauu

SEQ ID NO: 356577 - RNA, 22 nt, Human
cuggauuuaauuaacuguugcu

SEQ ID NO: 356578 - RNA, 22 nt, Human
cauuucaaaagaauugccagaa

SEQ ID NO: 356579 - RNA, 22 nt, Human
ggcuucuccagguacugagcau

SEQ ID NO: 356580 - RNA, 22 nt, Human
agauuuagacugccuuaaucau

SEQ ID NO: 356581 - RNA, 22 nt, Human
uacugcauaacuggcauguggg

SEQ ID NO: 356582 - RNA, 22 nt, Human
aggcaggcuagucgcuugagcc

SEQ ID NO: 356583 - RNA, 22 nt, Human
cucauggauauaagaacuguuu

SEQ ID NO: 356584 - RNA, 22 nt, Human
cagaaggcauagaugaaggccu

SEQ ID NO: 356585 - RNA, 22 nt, Human
ggcacagggagccgcaguugca

SEQ ID NO: 356586 - RNA, 22 nt, Human
acugugcuuucucuggaggcau

SEQ ID NO: 356587 - RNA, 22 nt, Human
agaggcccucucucuccugaug

SEQ ID NO: 356588 - RNA, 22 nt, Human
ucauugucuugauaugauuguc

SEQ ID NO: 356589 - RNA, 22 nt, Human
cugagccagagggagucggguc

SEQ ID NO: 356590 - RNA, 22 nt, Human
ccaggagcaggagcuggacaga

SEQ ID NO: 356591 - RNA, 21 nt, Human
ccaggaaggacugagcucccu

SEQ ID NO: 356592 - RNA, 22 nt, Human
ugaggcagggaguuuaauuguc

SEQ ID NO: 356593 - RNA, 18 nt, Human
agucuucugauccauuuu

SEQ ID NO: 356594 - RNA, 22 nt, Human
cucgcaggacagugcuaggacu

SEQ ID NO: 356595 - RNA, 22 nt, Human
agcagcugagccccagcuguga

SEQ ID NO: 356596 - RNA, 22 nt, Human
auuaauuuccaggcacugugcu

SEQ ID NO: 356597 - RNA, 22 nt, Human
uaccauuucauucuuuccucau

SEQ ID NO: 356598 - RNA, 22 nt, Human
aauuucaagucuugaagaagua

SEQ ID NO: 356599 - RNA, 22 nt, Human
agggaaaggcugaugcuguggg

SEQ ID NO: 356600 - RNA, 22 nt, Human
gagggcugcaaugagacagaga

SEQ ID NO: 356601 - RNA, 23 nt, Human
cgcccagccucagugaccugggc

SEQ ID NO: 356602 - RNA, 22 nt, Human
cgaggcagacaaaaguuggaag

SEQ ID NO: 356603 - RNA, 22 nt, Human
aacaggcaaacugugggauccc

SEQ ID NO: 356604 - RNA, 22 nt, Human
acuuuuuacaggguguauacca

SEQ ID NO: 356605 - RNA, 22 nt, Human
cccaggcacaccccgaacggaa

SEQ ID NO: 356606 - RNA, 22 nt, Human
aaugaaugaaccacauauaaca

SEQ ID NO: 356607 - RNA, 22 nt, Human
uagggacacugcucaugaguuc

SEQ ID NO: 356608 - RNA, 22 nt, Human
uauguuaagugggauaaucaaa

SEQ ID NO: 356609 - RNA, 22 nt, Human
ggcugcagagcugggugggccu

SEQ ID NO: 356610 - RNA, 22 nt, Human
uccaggcuagguuuacaggaca

SEQ ID NO: 356611 - RNA, 22 nt, Human
ucaaaugcggucauggcuuuua

SEQ ID NO: 356612 - RNA, 17 nt, Human
accagccucuccugggg

SEQ ID NO: 356613 - RNA, 22 nt, Human
ucaggcugccuaucagacugug

SEQ ID NO: 356614 - RNA, 22 nt, Human
gccugcaggcuguaguuuguga

SEQ ID NO: 356615 - RNA, 22 nt, Human
uuucagaugcaauuaauuuuca

SEQ ID NO: 356616 - RNA, 22 nt, Human
ccuggacucaggcugugggcac

SEQ ID NO: 356617 - RNA, 22 nt, Human
gcugagcugcuguucauccugc

SEQ ID NO: 356618 - RNA, 22 nt, Human
acaugauauuaaugucuuauuu

SEQ ID NO: 356619 - RNA, 20 nt, Human
agcaggaaugaugcuuucau

SEQ ID NO: 356620 - RNA, 22 nt, Human
gcuggcccagggucaccuagga

SEQ ID NO: 356621 - RNA, 22 nt, Human
cugggugaguugaugaaggaga

SEQ ID NO: 356622 - RNA, 22 nt, Human
gcugucacaagcaucuggggca

SEQ ID NO: 356623 - RNA, 23 nt, Human
gcugucaguuguuuuugucucua

SEQ ID NO: 356624 - RNA, 22 nt, Human
ucaccaggauuccuaucaguag

SEQ ID NO: 356625 - RNA, 22 nt, Human
cauugcacuccagcuugggcaa

SEQ ID NO: 356626 - RNA, 22 nt, Human
aaggcagcuuuaaaaaagaugc

SEQ ID NO: 356627 - RNA, 22 nt, Human
ccagggcagcgccccuccacgc

SEQ ID NO: 356628 - RNA, 20 nt, Human
cuguccccgaggucaccagg

SEQ ID NO: 356629 - RNA, 22 nt, Human
aauguauuccucaugcaagagu

SEQ ID NO: 356630 - RNA, 23 nt, Human
gcaggugguucgaacagaaguuu

SEQ ID NO: 356631 - RNA, 22 nt, Human
gccaccucuuugucucugccgc

SEQ ID NO: 356632 - RNA, 22 nt, Human
aggcugugcacagggcaccugc

SEQ ID NO: 356633 - RNA, 22 nt, Human
uaaagcacauaucuuacaauaa

SEQ ID NO: 356634 - RNA, 22 nt, Human
cggaggggauacauuuucugaa

SEQ ID NO: 356635 - RNA, 22 nt, Human
ggaggggaacuaaucccgugac

SEQ ID NO: 356636 - RNA, 23 nt, Human
acaguuauagcugugaauaacau

SEQ ID NO: 356637 - RNA, 22 nt, Human
ucagccuuguggcccugcucca

SEQ ID NO: 356638 - RNA, 22 nt, Human
caggaggaagaacucugcaaca

SEQ ID NO: 356639 - RNA, 22 nt, Human
uugauagguuuuauguauaguu

SEQ ID NO: 356640 - RNA, 22 nt, Human
aggccuggugaaugaaguaucu

SEQ ID NO: 356641 - RNA, 22 nt, Human
aagcaggcauuccagagacaau

SEQ ID NO: 356642 - RNA, 22 nt, Human
ggaaaaggccauuguuucucug

SEQ ID NO: 356643 - RNA, 22 nt, Human
aucuaacagcaacaccagaaua

SEQ ID NO: 356644 - RNA, 22 nt, Human
uucuggaguauuccuggcaccu

SEQ ID NO: 356645 - RNA, 22 nt, Human
agucucugagguucagaugccu

SEQ ID NO: 356646 - RNA, 22 nt, Human
uuagaaauauggugcugccgcc

SEQ ID NO: 356647 - RNA, 22 nt, Human
uucuccaacacaagcaugaugu

SEQ ID NO: 356648 - RNA, 22 nt, Human
gccuucagcccugacuggccag

SEQ ID NO: 356649 - RNA, 22 nt, Human
uguggucucguuauguugccca

SEQ ID NO: 356650 - RNA, 23 nt, Human
cagugcagggcaacucagacucc

SEQ ID NO: 356651 - RNA, 22 nt, Human
guuauaaaaugcacaguuguuu

SEQ ID NO: 356652 - RNA, 21 nt, Human
uuucuuaggcucuaaaaugac

SEQ ID NO: 356653 - RNA, 23 nt, Human
uaaagacagccuucaggauucug

SEQ ID NO: 356654 - RNA, 22 nt, Human
uccaggcagagcaacaaaauau

SEQ ID NO: 356655 - RNA, 23 nt, Human
agggguggucaguacccgcagug

SEQ ID NO: 356656 - RNA, 22 nt, Human
ggagccagagucugcaguguaa

SEQ ID NO: 356657 - RNA, 18 nt, Human
ggcugugcguggaggcug

SEQ ID NO: 356658 - RNA, 22 nt, Human
ccagcugagaaguguaaaguga

SEQ ID NO: 356659 - RNA, 22 nt, Human
caaggccauaagagauacaaaa

SEQ ID NO: 356660 - RNA, 20 nt, Human
cauuaugguugggcacagug

SEQ ID NO: 356661 - RNA, 22 nt, Human
ucucugagcaugccauauugcu

SEQ ID NO: 356662 - RNA, 20 nt, Human
cuuagaaauuuuuacccugg

SEQ ID NO: 356663 - RNA, 22 nt, Human
ugaugaaacugagguuccaaga

SEQ ID NO: 356664 - RNA, 22 nt, Human
aacaggcaacaguugacucuga

SEQ ID NO: 356665 - RNA, 19 nt, Human
ggcugucuggcguguggau

SEQ ID NO: 356666 - RNA, 22 nt, Human
uggcagcucccagagcuuccaa

SEQ ID NO: 356667 - RNA, 22 nt, Human
aggacucaucccugcuugucag

SEQ ID NO: 356668 - RNA, 20 nt, Human
agccaggcucaagcuccccc

SEQ ID NO: 356669 - RNA, 22 nt, Human
agcagccuuugaucaucuggga

SEQ ID NO: 356670 - RNA, 22 nt, Human
ucauugcaggcauuccccugcc

SEQ ID NO: 356671 - RNA, 22 nt, Human
uuuauuuauaagccacuugcug

SEQ ID NO: 356672 - RNA, 22 nt, Human
aagagcaucaaugacucgcagu

SEQ ID NO: 356673 - RNA, 22 nt, Human
ccugagggaaggaugcuaccca

SEQ ID NO: 356674 - RNA, 23 nt, Human
cagugugacgaggugaggcaggc

SEQ ID NO: 356675 - RNA, 23 nt, Human
uaauacugcuucagaggcuuaga

SEQ ID NO: 356676 - RNA, 19 nt, Human
gcaugcuugguggcuucug

SEQ ID NO: 356677 - RNA, 22 nt, Human
gcagagccaggcuggggcaggu

SEQ ID NO: 356678 - RNA, 22 nt, Human
aaguucaaggcagguccugagg

SEQ ID NO: 356679 - RNA, 22 nt, Human
uggccugccugggagcagcagg

SEQ ID NO: 356680 - RNA, 22 nt, Human
ucacugcucagucuguacuaca

SEQ ID NO: 356681 - RNA, 22 nt, Human
uguauacaggauuacucauagc

SEQ ID NO: 356682 - RNA, 22 nt, Human
agggcuggagccacagcuggga

SEQ ID NO: 356683 - RNA, 22 nt, Human
gacauuucaaucucauuauggg

SEQ ID NO: 356684 - RNA, 22 nt, Human
uuauuccagcuaagaguccugg

SEQ ID NO: 356685 - RNA, 22 nt, Human
gguaacaguauguagaguaaga

SEQ ID NO: 356686 - RNA, 22 nt, Human
gcacagcaauuucuauaagcuc

SEQ ID NO: 356687 - RNA, 22 nt, Human
gccaggagggaaaggacaauuu

SEQ ID NO: 356688 - RNA, 22 nt, Human
aagcacagaaaaggagcaugga

SEQ ID NO: 356689 - RNA, 20 nt, Human
gcuguucacauuauuaguag

SEQ ID NO: 356690 - RNA, 22 nt, Human
gguuucaaaguggacaguuagu

SEQ ID NO: 356691 - RNA, 22 nt, Human
ccuguucacugcacaguuuccg

SEQ ID NO: 356692 - RNA, 22 nt, Human
ugaaggccacuuccugugagcu

SEQ ID NO: 356693 - RNA, 22 nt, Human
aaugcacagcguuccaugcuug

SEQ ID NO: 356694 - RNA, 22 nt, Human
uuccaagaguaaauucaaauug

SEQ ID NO: 356695 - RNA, 22 nt, Human
aaggcagccuuuugaguugauu

SEQ ID NO: 356696 - RNA, 22 nt, Human
aaauugugagcuauagaucuag

SEQ ID NO: 356697 - RNA, 21 nt, Human
uuacaaagcaagugcuguguc

SEQ ID NO: 356698 - RNA, 22 nt, Human
gggugaggagcugccagucaug

SEQ ID NO: 356699 - RNA, 22 nt, Human
ccauuguaaauucuguggaagu

SEQ ID NO: 356700 - RNA, 22 nt, Human
uguucaaaugaucuucuuaaau

SEQ ID NO: 356701 - RNA, 22 nt, Human
acagggcagugucuugaaaaau

SEQ ID NO: 356702 - RNA, 22 nt, Human
auggacagugugaagcagauag

SEQ ID NO: 356703 - RNA, 22 nt, Human
auuuucuauucugcugguuuag

SEQ ID NO: 356704 - RNA, 20 nt, Human
gacaggagaguuagguaggu

SEQ ID NO: 356705 - RNA, 22 nt, Human
uuugcauugccucugacuuaug

SEQ ID NO: 356706 - RNA, 22 nt, Human
uuccagcaggcagacaggagau

SEQ ID NO: 356707 - RNA, 22 nt, Human
gugcccaggcccaaggcaccac

SEQ ID NO: 356708 - RNA, 22 nt, Human
caggagcagaggguggucagca

SEQ ID NO: 356709 - RNA, 22 nt, Human
aguaaaucagaccucauuaugu

SEQ ID NO: 356710 - RNA, 22 nt, Human
ccaggaaaauaccaagcuuuaa

SEQ ID NO: 356711 - RNA, 22 nt, Human
uccaggcugauccaugaagaau

SEQ ID NO: 356712 - RNA, 22 nt, Human
aaucucuuuggcucaaggaucc

SEQ ID NO: 356713 - RNA, 22 nt, Human
aggcacugggggaugagcaagg

SEQ ID NO: 356714 - RNA, 20 nt, Human
ggaggguggaagaaagcaag

SEQ ID NO: 356715 - RNA, 22 nt, Human
ucauugcauuuauucacuggca

SEQ ID NO: 356716 - RNA, 22 nt, Human
aaugaugguuaaacacuggagg

SEQ ID NO: 356717 - RNA, 22 nt, Human
ccauaaucuggcuuugagagag

SEQ ID NO: 356718 - RNA, 22 nt, Human
ccuucugcucccuggccagggc

SEQ ID NO: 356719 - RNA, 22 nt, Human
acagcuuuuuacuaauagauug

SEQ ID NO: 356720 - RNA, 22 nt, Human
cuucucaguugcaagugucaga

SEQ ID NO: 356721 - RNA, 22 nt, Human
auugaaaguccuaucuaaggga

SEQ ID NO: 356722 - RNA, 22 nt, Human
agagccuggcucccagcuaccg

SEQ ID NO: 356723 - RNA, 22 nt, Human
guucauuuuacuguaaauagca

SEQ ID NO: 356724 - RNA, 22 nt, Human
uggcucugggcaccguguccac

SEQ ID NO: 356725 - RNA, 22 nt, Human
uccaggcaagggaggagcaugg

SEQ ID NO: 356726 - RNA, 22 nt, Human
uggcccgaccucugcucaugca

SEQ ID NO: 356727 - RNA, 22 nt, Human
caugauaauuguuaacaaagua

SEQ ID NO: 356728 - RNA, 22 nt, Human
uuugaacaugcugcaugauaau

SEQ ID NO: 356729 - RNA, 22 nt, Human
uagagcuggaauuugcagcaag

SEQ ID NO: 356730 - RNA, 22 nt, Human
uaucuguuguccaugcagaaag

SEQ ID NO: 356731 - RNA, 22 nt, Human
gcacagaagagcuuuggaauga

SEQ ID NO: 356732 - RNA, 22 nt, Human
aauguguguucggggcccagag

SEQ ID NO: 356733 - RNA, 22 nt, Human
uuuggaauauuaaaaugucuca

SEQ ID NO: 356734 - RNA, 22 nt, Human
aucacaggugguaggaaaagaa

SEQ ID NO: 356735 - RNA, 22 nt, Human
cagagggcucggcggccgcucc

SEQ ID NO: 356736 - RNA, 20 nt, Human
ggcucugcuugugagcagcc

SEQ ID NO: 356737 - RNA, 22 nt, Human
gcagagcagcaaauggaaagga

SEQ ID NO: 356738 - RNA, 22 nt, Human
cucagagucccuucccucgugg

SEQ ID NO: 356739 - RNA, 22 nt, Human
cagcugccccgcuggcugacca

SEQ ID NO: 356740 - RNA, 22 nt, Human
aaauguuucuacuugugagcau

SEQ ID NO: 356741 - RNA, 22 nt, Human
uauuuccaccuauuauuuucug

SEQ ID NO: 356742 - RNA, 20 nt, Human
acagaaagagagaaugucag

SEQ ID NO: 356743 - RNA, 22 nt, Human
guggccuuuccugaagaaauga

SEQ ID NO: 356744 - RNA, 22 nt, Human
caucagaacgugagcuccuugu

SEQ ID NO: 356745 - RNA, 22 nt, Human
cugugcuugcggguguggagcc

SEQ ID NO: 356746 - RNA, 22 nt, Human
aaaaucugcuuccuuuuacaga

SEQ ID NO: 356747 - RNA, 22 nt, Human
cuugaaagucagcagaguggau

SEQ ID NO: 356748 - RNA, 22 nt, Human
acagucuugcuguauggucagg

SEQ ID NO: 356749 - RNA, 22 nt, Human
auucuucaucacuaccuuguga

SEQ ID NO: 356750 - RNA, 22 nt, Human
gcagggcauagaggcacggagg

SEQ ID NO: 356751 - RNA, 22 nt, Human
agccacagucugaugccugaga

SEQ ID NO: 356752 - RNA, 22 nt, Human
ucaugacaacuauauuauucca

SEQ ID NO: 356753 - RNA, 22 nt, Human
cacauguacagaagcaggcugg

SEQ ID NO: 356754 - RNA, 22 nt, Human
aaggcagccagauccuuugggu

SEQ ID NO: 356755 - RNA, 22 nt, Human
gcaugggcaagaggacuggggg

SEQ ID NO: 356756 - RNA, 22 nt, Human
aggcccugaagucggccccuca

SEQ ID NO: 356757 - RNA, 22 nt, Human
agcuugaguuuuggaugaagug

SEQ ID NO: 356758 - RNA, 22 nt, Human
aaggucauuuuuuccucuguug

SEQ ID NO: 356759 - RNA, 22 nt, Human
cagccagugguugaagaugcag

SEQ ID NO: 356760 - RNA, 22 nt, Human
uuucaacuagccccuaaguccu

SEQ ID NO: 356761 - RNA, 22 nt, Human
aaaucugggagcagcucggcca

SEQ ID NO: 356762 - RNA, 21 nt, Human
auuuucauuuccaggggagga

SEQ ID NO: 356763 - RNA, 22 nt, Human
aaguaacaaugcuguugaauug

SEQ ID NO: 356764 - RNA, 22 nt, Human
gaugauuuuaugucuugucauu

SEQ ID NO: 356765 - RNA, 22 nt, Human
ggcaucuguccaucucuccagc

SEQ ID NO: 356766 - RNA, 22 nt, Human
gaagccacuauagauauucuaa

SEQ ID NO: 356767 - RNA, 22 nt, Human
augauguugauaaauuacuuua

SEQ ID NO: 356768 - RNA, 22 nt, Human
uaggacaggugaggggcugugg

SEQ ID NO: 356769 - RNA, 22 nt, Human
aaggccuggauuuagguuguga

SEQ ID NO: 356770 - RNA, 22 nt, Human
ugucagagagcaggcaguagaa

SEQ ID NO: 356771 - RNA, 19 nt, Human
ucugugcugggaggcagca

SEQ ID NO: 356772 - RNA, 19 nt, Human
cuuugucagaacaugcuuc

SEQ ID NO: 356773 - RNA, 22 nt, Human
aucagcaaucucguguauuagg

SEQ ID NO: 356774 - RNA, 19 nt, Human
cccagagcauccugaacuu

SEQ ID NO: 356775 - RNA, 22 nt, Human
cccaggagcuucucucugccuc

SEQ ID NO: 356776 - RNA, 22 nt, Human
uacaagagguauauagaaacag

SEQ ID NO: 356777 - RNA, 22 nt, Human
cagccugacaccagcuuugggc

SEQ ID NO: 356778 - RNA, 22 nt, Human
caauuucaucuugugcuucaau

SEQ ID NO: 356779 - RNA, 22 nt, Human
uaggggaacuggcacagggcag

SEQ ID NO: 356780 - RNA, 22 nt, Human
cagguggguacaucacagagac

SEQ ID NO: 356781 - RNA, 22 nt, Human
ucuggcucaucucuccagguaa

SEQ ID NO: 356782 - RNA, 22 nt, Human
ucagccaggccaccuucagcuu

SEQ ID NO: 356783 - RNA, 22 nt, Human
ggugaggcuaagugacacaggg

SEQ ID NO: 356784 - RNA, 22 nt, Human
ccaaagucugcauuuuaacaug

SEQ ID NO: 356785 - RNA, 21 nt, Human
ugcaggaaagugcugcgaccc

SEQ ID NO: 356786 - RNA, 22 nt, Human
ggucagccuuggauuugguagc

SEQ ID NO: 356787 - RNA, 22 nt, Human
cuuccugguuugaagcucgccg

SEQ ID NO: 356788 - RNA, 22 nt, Human
cgcagggauuucaaggggccuu

SEQ ID NO: 356789 - RNA, 22 nt, Human
uauggcuugucuuuauaccagg

SEQ ID NO: 356790 - RNA, 22 nt, Human
auuacacuuguucaucaucacc

SEQ ID NO: 356791 - RNA, 22 nt, Human
cagcucugaggaacacuccuuu

SEQ ID NO: 356792 - RNA, 22 nt, Human
uauuccuauuucuaaacauaug

SEQ ID NO: 356793 - RNA, 22 nt, Human
aggcugcuucagcugcagggag

SEQ ID NO: 356794 - RNA, 22 nt, Human
cugggccugucagggcuuuuug

SEQ ID NO: 356795 - RNA, 22 nt, Human
cgcugggggaacagcgagggug

SEQ ID NO: 356796 - RNA, 22 nt, Human
gcugucugcaucucuagagcuu

SEQ ID NO: 356797 - RNA, 22 nt, Human
agggcagcauugccuuucucca

SEQ ID NO: 356798 - RNA, 22 nt, Human
accaaggaguuugguauuuuag

SEQ ID NO: 356799 - RNA, 22 nt, Human
aaugugaaaccgcacagaauaa

SEQ ID NO: 356800 - RNA, 21 nt, Human
agcaacucugacuagaugagg

SEQ ID NO: 356801 - RNA, 22 nt, Human
gggcuggcgggaaaggcaauuc

SEQ ID NO: 356802 - RNA, 19 nt, Human
uuuggcacucugaaguguu

SEQ ID NO: 356803 - RNA, 22 nt, Human
gaggcaucugggcacagaagug

SEQ ID NO: 356804 - RNA, 22 nt, Human
agaauguagucuuggagauuua

SEQ ID NO: 356805 - RNA, 22 nt, Human
uuugaagaccuuaucucuaaau

SEQ ID NO: 356806 - RNA, 22 nt, Human
ucuccucaccaccagcagcaga

SEQ ID NO: 356807 - RNA, 22 nt, Human
cagugaaguuuaaaguguagau

SEQ ID NO: 356808 - RNA, 22 nt, Human
ugccaggcgauugcuaucagca

SEQ ID NO: 356809 - RNA, 22 nt, Human
aagacuuucaaaccuauguuug

SEQ ID NO: 356810 - RNA, 22 nt, Human
ugggcagacugagcccuguccc

SEQ ID NO: 356811 - RNA, 22 nt, Human
agguggaacguucaggugcuag

SEQ ID NO: 356812 - RNA, 22 nt, Human
ucagccucucugaguccagacc

SEQ ID NO: 356813 - RNA, 22 nt, Human
uggcugagaaguucugguggga

SEQ ID NO: 356814 - RNA, 20 nt, Human
ugaggcucagagagguugag

SEQ ID NO: 356815 - RNA, 22 nt, Human
aagguacaaaguauuauuuaaa

SEQ ID NO: 356816 - RNA, 22 nt, Human
aaggugugaagagaugggaaga

SEQ ID NO: 356817 - RNA, 22 nt, Human
uagcaggguaaauguagaugga

SEQ ID NO: 356818 - RNA, 22 nt, Human
ucuggagauaagacagacagau

SEQ ID NO: 356819 - RNA, 22 nt, Human
gcaaacaaggacauacauccug

SEQ ID NO: 356820 - RNA, 22 nt, Human
uggaguucucaggugagggcuu

SEQ ID NO: 356821 - RNA, 22 nt, Human
auuuccagugcacugaauagaa

SEQ ID NO: 356822 - RNA, 22 nt, Human
gagauuuaauuggauuaacuua

SEQ ID NO: 356823 - RNA, 22 nt, Human
ggucccaggcucccucuugucc

SEQ ID NO: 356824 - RNA, 22 nt, Human
ucugggcacugcugagccugua

SEQ ID NO: 356825 - RNA, 22 nt, Human
aaaugcauugguuucuacuugu

SEQ ID NO: 356826 - RNA, 22 nt, Human
augaggcaucuaacauugcaaa

SEQ ID NO: 356827 - RNA, 22 nt, Human
ugcugcacucaccaacagauaa

SEQ ID NO: 356828 - RNA, 22 nt, Human
aguggcagagccaaguagagcc

SEQ ID NO: 356829 - RNA, 22 nt, Human
cguuggagacacuugaggacuu

SEQ ID NO: 356830 - RNA, 22 nt, Human
agggucccgaaggagacagcaa

SEQ ID NO: 356831 - RNA, 22 nt, Human
cuggcaggaaguuagaugguaa

SEQ ID NO: 356832 - RNA, 22 nt, Human
agauuucagguuggggcagaag

SEQ ID NO: 356833 - RNA, 23 nt, Human
agccagggcacugguggagauug

SEQ ID NO: 356834 - RNA, 22 nt, Human
acugcccuguaacugccaggua

SEQ ID NO: 356835 - RNA, 22 nt, Human
uuugaaaguucuucugacacua

SEQ ID NO: 356836 - RNA, 22 nt, Human
uggccuguggcuuaaggucugu

SEQ ID NO: 356837 - RNA, 22 nt, Human
ccacucugcugugcuccaugau

SEQ ID NO: 356838 - RNA, 21 nt, Human
gggcagaggggccuccugggu

SEQ ID NO: 356839 - RNA, 22 nt, Human
gcugcagcucgccuuccggccu

SEQ ID NO: 356840 - RNA, 22 nt, Human
ggagccugcgggagcucccauu

SEQ ID NO: 356841 - RNA, 22 nt, Human
ugaaugaguuuggcugcuguuc

SEQ ID NO: 356842 - RNA, 22 nt, Human
gaguuauuuguagggauuauau

SEQ ID NO: 356843 - RNA, 18 nt, Human
uaaauauauuucccccuu

SEQ ID NO: 356844 - RNA, 22 nt, Human
ggcugccugccuccaagccggg

SEQ ID NO: 356845 - RNA, 22 nt, Human
auguuacauaguccuuauuugu

SEQ ID NO: 356846 - RNA, 22 nt, Human
cuggggcccaucgagggcugag

SEQ ID NO: 356847 - RNA, 23 nt, Human
aggcccugccugucccucuuuuu

SEQ ID NO: 356848 - RNA, 20 nt, Human
gcauccagacacccagcugc

SEQ ID NO: 356849 - RNA, 22 nt, Human
cccugcagaaccacagacaaac

SEQ ID NO: 356850 - RNA, 22 nt, Human
aaagccagagcaagcugucaca

SEQ ID NO: 356851 - RNA, 22 nt, Human
agccucuggcccuagacugcuu

SEQ ID NO: 356852 - RNA, 21 nt, Human
ugcagagauaucugaagcaga

SEQ ID NO: 356853 - RNA, 22 nt, Human
aguucuucauaaccuuacugug

SEQ ID NO: 356854 - RNA, 22 nt, Human
ugcucuggaguggcuugugcac

SEQ ID NO: 356855 - RNA, 22 nt, Human
ccaggcagagggauccccaucc

SEQ ID NO: 356856 - RNA, 22 nt, Human
ggcagauggaagaggcuggguc

SEQ ID NO: 356857 - RNA, 22 nt, Human
gcagagcaccaaagugaaagau

SEQ ID NO: 356858 - RNA, 22 nt, Human
agggcagcuagcuguagaaaga

SEQ ID NO: 356859 - RNA, 22 nt, Human
acagauuuuaaaugacacuccc

SEQ ID NO: 356860 - RNA, 22 nt, Human
ucucacagugcaggucugucuc

SEQ ID NO: 356861 - RNA, 22 nt, Human
gcaccugggcaaggauucagag

SEQ ID NO: 356862 - RNA, 22 nt, Human
uucuuuccucccagccuuugga

SEQ ID NO: 356863 - RNA, 22 nt, Human
cuaguucuagaucccugaggaa

SEQ ID NO: 356864 - RNA, 22 nt, Human
cagcagagacgguaagcagaac

SEQ ID NO: 356865 - RNA, 21 nt, Human
uugaaaguaaauucagcagcu

SEQ ID NO: 356866 - RNA, 22 nt, Human
ggucaggguuccagguaucuuc

SEQ ID NO: 356867 - RNA, 22 nt, Human
gaggccagcgcgcagcacuuuu

SEQ ID NO: 356868 - RNA, 22 nt, Human
ccugcagggugcugccacagau

SEQ ID NO: 356869 - RNA, 23 nt, Human
aguuuguaaagaaauauuugcac

SEQ ID NO: 356870 - RNA, 22 nt, Human
uucucuuuucaccaguugcuaa

SEQ ID NO: 356871 - RNA, 22 nt, Human
uuugcauuuauaaguuggugga

SEQ ID NO: 356872 - RNA, 22 nt, Human
guggagccaggaucuccgcaca

SEQ ID NO: 356873 - RNA, 20 nt, Human
ggcugccuccuuccuuuccu

SEQ ID NO: 356874 - RNA, 22 nt, Human
agggagccuuccuggcuguggu

SEQ ID NO: 356875 - RNA, 22 nt, Human
ccaguggguaggccauggugag

SEQ ID NO: 356876 - RNA, 22 nt, Human
gagccagguuggaggcugcagu

SEQ ID NO: 356877 - RNA, 22 nt, Human
ucuucucccaucuccaggcagg

SEQ ID NO: 356878 - RNA, 22 nt, Human
ucagggaccccucugaguggag

SEQ ID NO: 356879 - RNA, 22 nt, Human
ugaaaugacagucuuaagcucu

SEQ ID NO: 356880 - RNA, 22 nt, Human
ccaggcaggcgauggugcagug

SEQ ID NO: 356881 - RNA, 22 nt, Human
uuagugucuucuucauccucug

SEQ ID NO: 356882 - RNA, 22 nt, Human
ccaggccugcaucugcugcgca

SEQ ID NO: 356883 - RNA, 22 nt, Human
ugaucagucccaugaucuucca

SEQ ID NO: 356884 - RNA, 22 nt, Human
agagaacaaauuaaaggugguu

SEQ ID NO: 356885 - RNA, 21 nt, Human
aguguccuugaucuugccuug

SEQ ID NO: 356886 - RNA, 22 nt, Human
aaaccaucagauaauucauacu

SEQ ID NO: 356887 - RNA, 22 nt, Human
acaggugauucaggcucuggga

SEQ ID NO: 356888 - RNA, 22 nt, Human
cuuuacauaaggauaaaccugg

SEQ ID NO: 356889 - RNA, 22 nt, Human
acuggaucagaaucugauuuuu

SEQ ID NO: 356890 - RNA, 22 nt, Human
uuauucugcacuuuuaaaauau

SEQ ID NO: 356891 - RNA, 22 nt, Human
ggggauggaauguaguagugau

SEQ ID NO: 356892 - RNA, 22 nt, Human
gcuggcagggacagcugcgugu

SEQ ID NO: 356893 - RNA, 21 nt, Human
gggcgaggccugauguggcuc

SEQ ID NO: 356894 - RNA, 22 nt, Human
ggaguucacugugcaggcucug

SEQ ID NO: 356895 - RNA, 20 nt, Human
aguaggggaaugcaagagca

SEQ ID NO: 356896 - RNA, 22 nt, Human
aggagcagcccacuccuguccu

SEQ ID NO: 356897 - RNA, 22 nt, Human
uucagagagaaaccagugggaa

SEQ ID NO: 356898 - RNA, 21 nt, Human
ugucagcaacaauacuuucuc

SEQ ID NO: 356899 - RNA, 22 nt, Human
agcugcccccagggcugugcuu

SEQ ID NO: 356900 - RNA, 22 nt, Human
ugggccaggauuucaagacccu

SEQ ID NO: 356901 - RNA, 22 nt, Human
cacagcuucccaaaguggaccu

SEQ ID NO: 356902 - RNA, 22 nt, Human
cugugcuucgcaacuccaaggu

SEQ ID NO: 356903 - RNA, 22 nt, Human
aaugaacauauaaagagaucuu

SEQ ID NO: 356904 - RNA, 22 nt, Human
uuuguuuacucauucauugaug

SEQ ID NO: 356905 - RNA, 22 nt, Human
ccugcugggccugagcaaugag

SEQ ID NO: 356906 - RNA, 22 nt, Human
ucaguggagcuaagcaugagau

SEQ ID NO: 356907 - RNA, 22 nt, Human
aaguuucauuguucauguaaca

SEQ ID NO: 356908 - RNA, 22 nt, Human
agccuggcacugaggcagggcg

SEQ ID NO: 356909 - RNA, 22 nt, Human
agggcagcugugagccacugug

SEQ ID NO: 356910 - RNA, 22 nt, Human
aacagcuuugcuucuggagaca

SEQ ID NO: 356911 - RNA, 22 nt, Human
uuuccuaugauauucuaugugu

SEQ ID NO: 356912 - RNA, 22 nt, Human
ccuguccuccaagagcacaucu

SEQ ID NO: 356913 - RNA, 22 nt, Human
aaagccaguucuuagagaaagc

SEQ ID NO: 356914 - RNA, 22 nt, Human
cagcacugcuucgcagccaggg

SEQ ID NO: 356915 - RNA, 22 nt, Human
auagaaaacagauguccuuaaa

SEQ ID NO: 356916 - RNA, 22 nt, Human
cuuguccuuuacuugagacuca

SEQ ID NO: 356917 - RNA, 22 nt, Human
acauaaguuauggauaaaaugu

SEQ ID NO: 356918 - RNA, 22 nt, Human
ucucuccuuaucauuguguuua

SEQ ID NO: 356919 - RNA, 22 nt, Human
uuuaucuuuaggacuuugcaga

SEQ ID NO: 356920 - RNA, 22 nt, Human
agccaggcgcaguggcuuaugc

SEQ ID NO: 356921 - RNA, 22 nt, Human
gauuuacagaucuaagggucac

SEQ ID NO: 356922 - RNA, 22 nt, Human
caaauauuccagguacaucccu

SEQ ID NO: 356923 - RNA, 17 nt, Human
cagacagauauccuggg

SEQ ID NO: 356924 - RNA, 19 nt, Human
uagaggagaagggaagugg

SEQ ID NO: 356925 - RNA, 22 nt, Human
cccuggaguagcacugggucgc

SEQ ID NO: 356926 - RNA, 22 nt, Human
agccucugcuuaugcaaaggua

SEQ ID NO: 356927 - RNA, 18 nt, Human
cucucuggucuggauccc

SEQ ID NO: 356928 - RNA, 22 nt, Human
ccugggucacucaggcaggcgg

SEQ ID NO: 356929 - RNA, 22 nt, Human
ccugugugcacacgaggccaug

SEQ ID NO: 356930 - RNA, 22 nt, Human
ucuggagaacuugcaagaggau

SEQ ID NO: 356931 - RNA, 22 nt, Human
cuucugcaauaaguuuuggucc

SEQ ID NO: 356932 - RNA, 20 nt, Human
cugcugugauucccuccucc

SEQ ID NO: 356933 - RNA, 22 nt, Human
uugaauaauauguucaggagga

SEQ ID NO: 356934 - RNA, 22 nt, Human
ugcugucugcaacaguacuaca

SEQ ID NO: 356935 - RNA, 22 nt, Human
acugggccggugcagaguaguu

SEQ ID NO: 356936 - RNA, 21 nt, Human
agaggccuuacaggauagacc

SEQ ID NO: 356937 - RNA, 22 nt, Human
uuacaguaugaucaacuuuuca

SEQ ID NO: 356938 - RNA, 20 nt, Human
ucugaggcugagcucuacuu

SEQ ID NO: 356939 - RNA, 22 nt, Human
aaagcagauucugaugcaguag

SEQ ID NO: 356940 - RNA, 22 nt, Human
ugggcugcuucuauuggugguc

SEQ ID NO: 356941 - RNA, 22 nt, Human
ccagcuccaggacugggagcug

SEQ ID NO: 356942 - RNA, 22 nt, Human
cagugcaggcugggggcccugc

SEQ ID NO: 356943 - RNA, 22 nt, Human
ugggcuggcccaccacaccucg

SEQ ID NO: 356944 - RNA, 22 nt, Human
gagggggagaugugcacacacu

SEQ ID NO: 356945 - RNA, 22 nt, Human
uaucaacauuaauauuuucugg

SEQ ID NO: 356946 - RNA, 22 nt, Human
ccagagggccuuuggaguuauc

SEQ ID NO: 356947 - RNA, 22 nt, Human
ugggccacgugacccuuacccu

SEQ ID NO: 356948 - RNA, 22 nt, Human
caauuucacuaaugaugugggg

SEQ ID NO: 356949 - RNA, 22 nt, Human
cuuauuuuaagucaguuugggu

SEQ ID NO: 356950 - RNA, 22 nt, Human
ccagccacugggccacugccag

SEQ ID NO: 356951 - RNA, 22 nt, Human
ggaagccagaaagugagaauau

SEQ ID NO: 356952 - RNA, 22 nt, Human
uaaaugcaguuaguacuugcca

SEQ ID NO: 356953 - RNA, 22 nt, Human
ccucuguccuggggaguggagc

SEQ ID NO: 356954 - RNA, 22 nt, Human
ugccuguccugaggaugagggu

SEQ ID NO: 356955 - RNA, 22 nt, Human
aagaaaucauaucauuucuugg

SEQ ID NO: 356956 - RNA, 22 nt, Human
cuauuacauuucuggacauuca

SEQ ID NO: 356957 - RNA, 20 nt, Human
cagcaguggaugagaguuuu

SEQ ID NO: 356958 - RNA, 22 nt, Human
aaacaugagcaucucuucaagc

SEQ ID NO: 356959 - RNA, 22 nt, Human
aggcuggcuggcaggggacaca

SEQ ID NO: 356960 - RNA, 23 nt, Human
gagcugggauacaggcuuacugc

SEQ ID NO: 356961 - RNA, 22 nt, Human
ugccaggcagugucagauugag

SEQ ID NO: 356962 - RNA, 22 nt, Human
cagagccugcucacgucucugu

SEQ ID NO: 356963 - RNA, 22 nt, Human
ggcauuuagauugaauuucugu

SEQ ID NO: 356964 - RNA, 22 nt, Human
gccagagguucaacaacugucu

SEQ ID NO: 356965 - RNA, 22 nt, Human
ucuuugcaugugcuucuuggcc

SEQ ID NO: 356966 - RNA, 22 nt, Human
cugugcauugucuugucuguag

SEQ ID NO: 356967 - RNA, 19 nt, Human
augauacaggugaaaauug

SEQ ID NO: 356968 - RNA, 22 nt, Human
acacagccgugaaucugcuucu

SEQ ID NO: 356969 - RNA, 22 nt, Human
aucaggaaauacuuauuuauaa

SEQ ID NO: 356970 - RNA, 19 nt, Human
uuagccauccacagugaaa

SEQ ID NO: 356971 - RNA, 22 nt, Human
uuucccaguucccugcucuaua

SEQ ID NO: 356972 - RNA, 22 nt, Human
gccagcagguggagagaucaag

SEQ ID NO: 356973 - RNA, 22 nt, Human
gcagagaaaguuuuguccucag

SEQ ID NO: 356974 - RNA, 22 nt, Human
uuugucagucaugucugcuuuu

SEQ ID NO: 356975 - RNA, 20 nt, Human
agagccuggaaaaagacauc

SEQ ID NO: 356976 - RNA, 22 nt, Human
gcaggaugggagcuucacucug

SEQ ID NO: 356977 - RNA, 21 nt, Human
cugaggcagcacagcuaguca

SEQ ID NO: 356978 - RNA, 22 nt, Human
gcugcagcuuuaggauccagug

SEQ ID NO: 356979 - RNA, 22 nt, Human
cccuggagcuagucugagcaga

SEQ ID NO: 356980 - RNA, 22 nt, Human
ccucagagaaagguauggcuga

SEQ ID NO: 356981 - RNA, 22 nt, Human
acuuugaaagccuuggccccgg

SEQ ID NO: 356982 - RNA, 22 nt, Human
acagguggcauaggcaguuuga

SEQ ID NO: 356983 - RNA, 22 nt, Human
ucuguaucuaauuuuacaguag

SEQ ID NO: 356984 - RNA, 21 nt, Human
aggcaucuaaagagaguagac

SEQ ID NO: 356985 - RNA, 22 nt, Human
ugccuguguccccuucuuggca

SEQ ID NO: 356986 - RNA, 17 nt, Human
cucagaguugcuuuguc

SEQ ID NO: 356987 - RNA, 22 nt, Human
uuugcauugcagugguuuacag

SEQ ID NO: 356988 - RNA, 22 nt, Human
ccucuuccacugggccccaucc

SEQ ID NO: 356989 - RNA, 22 nt, Human
uccuuuggagcuugacugguag

SEQ ID NO: 356990 - RNA, 22 nt, Human
uggggcuggcuauugucucccu

SEQ ID NO: 356991 - RNA, 22 nt, Human
acccaggacaugggcacccgug

SEQ ID NO: 356992 - RNA, 22 nt, Human
cuuccaaacccaggguaugggc

SEQ ID NO: 356993 - RNA, 22 nt, Human
ccaggcugcuuagccuuaucuu

SEQ ID NO: 356994 - RNA, 22 nt, Human
caaauguguaaggaaguguuag

SEQ ID NO: 356995 - RNA, 22 nt, Human
aagugagauuauauguacggga

SEQ ID NO: 356996 - RNA, 22 nt, Human
ugggcagacgggagcuugccuu

SEQ ID NO: 356997 - RNA, 22 nt, Human
cagcaggguagguuguaucagu

SEQ ID NO: 356998 - RNA, 22 nt, Human
cagccugggcuccagagucccu

SEQ ID NO: 356999 - RNA, 22 nt, Human
accauccugaaaccuucaugcu

SEQ ID NO: 357000 - RNA, 23 nt, Human
cagcaggagggugccugggcugc

SEQ ID NO: 357001 - RNA, 22 nt, Human
cauuuacacuucuaaccacaag

SEQ ID NO: 357002 - RNA, 20 nt, Human
cccugagacaaaggaggggc

SEQ ID NO: 357003 - RNA, 22 nt, Human
aaagacugguguguuacauaua

SEQ ID NO: 357004 - RNA, 22 nt, Human
ugcagggaaucuguggcuggac

SEQ ID NO: 357005 - RNA, 22 nt, Human
ccucuccuugcacccgucccgc

SEQ ID NO: 357006 - RNA, 22 nt, Human
uuuaauauucugcauucuccuu

SEQ ID NO: 357007 - RNA, 22 nt, Human
gagacagcagggccagggccug

SEQ ID NO: 357008 - RNA, 22 nt, Human
auacagaagaccccuccgucau

SEQ ID NO: 357009 - RNA, 22 nt, Human
uuccagaagccuccauauuacu

SEQ ID NO: 357010 - RNA, 17 nt, Human
cccaugagcccacuccc

SEQ ID NO: 357011 - RNA, 22 nt, Human
cuccagaagacccauccucaug

SEQ ID NO: 357012 - RNA, 17 nt, Human
uuagcaaaauagcacuu

SEQ ID NO: 357013 - RNA, 22 nt, Human
acagaauuuacacaucucuaaa

SEQ ID NO: 357014 - RNA, 22 nt, Human
augauggugagguugagcacag

SEQ ID NO: 357015 - RNA, 21 nt, Human
gagacagcccagugccagggc

SEQ ID NO: 357016 - RNA, 22 nt, Human
uuaaaaugaauauugauuagca

SEQ ID NO: 357017 - RNA, 22 nt, Human
cuuaggcagacugcugaugcag

SEQ ID NO: 357018 - RNA, 22 nt, Human
cagagcugagaauguugaugcu

SEQ ID NO: 357019 - RNA, 22 nt, Human
auuuucaucauggguuuaacau

SEQ ID NO: 357020 - RNA, 22 nt, Human
agaaagcaucuccauuguaggu

SEQ ID NO: 357021 - RNA, 22 nt, Human
uugaauucauuucucauugagu

SEQ ID NO: 357022 - RNA, 22 nt, Human
ugcauacacaagcauacaugua

SEQ ID NO: 357023 - RNA, 22 nt, Human
ggccugagcagacagcaugaug

SEQ ID NO: 357024 - RNA, 22 nt, Human
gcccaggagguggaggugcagu

SEQ ID NO: 357025 - RNA, 22 nt, Human
cagcccuggugccaagguuccc

SEQ ID NO: 357026 - RNA, 21 nt, Human
ucaguaaaccuaaagauugua

SEQ ID NO: 357027 - RNA, 22 nt, Human
uagaauucaagauucaacaggc

SEQ ID NO: 357028 - RNA, 22 nt, Human
auccaugauuaguaggauaaag

SEQ ID NO: 357029 - RNA, 22 nt, Human
aaagaauuuguacacccuacua

SEQ ID NO: 357030 - RNA, 22 nt, Human
cagggcugucuccaaaggcccc

SEQ ID NO: 357031 - RNA, 22 nt, Human
ugcuagugcaggguuuucaguu

SEQ ID NO: 357032 - RNA, 22 nt, Human
guacccagaggcaugaucccag

SEQ ID NO: 357033 - RNA, 22 nt, Human
auauucuuccaaaacaucauuu

SEQ ID NO: 357034 - RNA, 22 nt, Human
uccagagccuauauguucaacu

SEQ ID NO: 357035 - RNA, 22 nt, Human
gugccugguuuggggaguguuc

SEQ ID NO: 357036 - RNA, 22 nt, Human
gguuucaacuuuugugaggaau

SEQ ID NO: 357037 - RNA, 22 nt, Human
ucacuccucauugcugcccauu

SEQ ID NO: 357038 - RNA, 22 nt, Human
uggcacugaccccaggccugug

SEQ ID NO: 357039 - RNA, 22 nt, Human
cacaggcugcccgcagcuggga

SEQ ID NO: 357040 - RNA, 22 nt, Human
ggaggggccggcugccugccac

SEQ ID NO: 357041 - RNA, 22 nt, Human
ccagggcaugggaagaacugaa

SEQ ID NO: 357042 - RNA, 22 nt, Human
augaaggcuguguggagccccc

SEQ ID NO: 357043 - RNA, 20 nt, Human
ccagcugagccaaggggaga

SEQ ID NO: 357044 - RNA, 22 nt, Human
ucccugggccacagcugugagc

SEQ ID NO: 357045 - RNA, 22 nt, Human
uccaggagucagacagauggug

SEQ ID NO: 357046 - RNA, 22 nt, Human
auagaaauggcagcuggugcua

SEQ ID NO: 357047 - RNA, 22 nt, Human
gaauuucaggacaacuggaagg

SEQ ID NO: 357048 - RNA, 22 nt, Human
cagucaccuugaggacucagac

SEQ ID NO: 357049 - RNA, 22 nt, Human
ccuggcaggcuggggacagugc

SEQ ID NO: 357050 - RNA, 22 nt, Human
uuaacacuugaacucuacaugu

SEQ ID NO: 357051 - RNA, 22 nt, Human
uccauccauguaggaagauggu

SEQ ID NO: 357052 - RNA, 22 nt, Human
auccaguuuaugucauauucuu

SEQ ID NO: 357053 - RNA, 22 nt, Human
aggucaaaccacagcucuaggc

SEQ ID NO: 357054 - RNA, 22 nt, Human
ccagaggaugcuggucagccuc

SEQ ID NO: 357055 - RNA, 22 nt, Human
aggcagcuuucuggugcaccau

SEQ ID NO: 357056 - RNA, 22 nt, Human
cacguuuuaugacagaagaagc

SEQ ID NO: 357057 - RNA, 22 nt, Human
gacaggggucccucugggcugu

SEQ ID NO: 357058 - RNA, 22 nt, Human
uuugacaggacuaacauauggc

SEQ ID NO: 357059 - RNA, 22 nt, Human
aaaauugagagucuugugcaag

SEQ ID NO: 357060 - RNA, 22 nt, Human
ccucccucuguuagagcugucu

SEQ ID NO: 357061 - RNA, 22 nt, Human
gcaggaugggagcuucacuuug

SEQ ID NO: 357062 - RNA, 22 nt, Human
ucuuuccuacuuuauugugaac

SEQ ID NO: 357063 - RNA, 19 nt, Human
caguggccuggaggucucu

SEQ ID NO: 357064 - RNA, 22 nt, Human
gaguggagcaaaagagguagau

SEQ ID NO: 357065 - RNA, 22 nt, Human
ccccuuccuuccucagacagcc

SEQ ID NO: 357066 - RNA, 19 nt, Human
acuguaaggcauuuuuuuc

SEQ ID NO: 357067 - RNA, 22 nt, Human
guggccugccgugugguauggg

SEQ ID NO: 357068 - RNA, 22 nt, Human
uagauuucgcugcaucucaauc

SEQ ID NO: 357069 - RNA, 22 nt, Human
uuccucagacccucauugugag

SEQ ID NO: 357070 - RNA, 22 nt, Human
gagauggggaauaggagcaagc

SEQ ID NO: 357071 - RNA, 22 nt, Human
caccaggcugcccaggacaggg

SEQ ID NO: 357072 - RNA, 22 nt, Human
gagcucuguguagccugagggu

SEQ ID NO: 357073 - RNA, 17 nt, Human
uccuucagugccucugc

SEQ ID NO: 357074 - RNA, 22 nt, Human
agggcccaggacagcaucaggg

SEQ ID NO: 357075 - RNA, 22 nt, Human
gggaaggagguggcuugaagug

SEQ ID NO: 357076 - RNA, 22 nt, Human
uggagcaggacggggaguggua

SEQ ID NO: 357077 - RNA, 22 nt, Human
gggcagcagcaggaggucucug

SEQ ID NO: 357078 - RNA, 22 nt, Human
cagcuccccaugguuccugaag

SEQ ID NO: 357079 - RNA, 22 nt, Human
uccaggagggggagccgugccg

SEQ ID NO: 357080 - RNA, 22 nt, Human
gauagaaagagugguucuuuuu

SEQ ID NO: 357081 - RNA, 22 nt, Human
gaugauaacagcauuucaacug

SEQ ID NO: 357082 - RNA, 22 nt, Human
gcaggagagccagcaggcuucc

SEQ ID NO: 357083 - RNA, 22 nt, Human
ggcuguggggccggguacagug

SEQ ID NO: 357084 - RNA, 22 nt, Human
gguuugaacagcuuuggagaag

SEQ ID NO: 357085 - RNA, 23 nt, Human
gagauuuagcagacaaagcucuu

SEQ ID NO: 357086 - RNA, 22 nt, Human
uuguuaaaaugcauauucuggu

SEQ ID NO: 357087 - RNA, 22 nt, Human
aggcuuuaaguggccuacagcu

SEQ ID NO: 357088 - RNA, 19 nt, Human
gccaggagggcucuggcug

SEQ ID NO: 357089 - RNA, 22 nt, Human
uggcugagggggcaguucagga

SEQ ID NO: 357090 - RNA, 22 nt, Human
agcgggugcugugucagcccuc

SEQ ID NO: 357091 - RNA, 22 nt, Human
auaaggcagugacuucaucuau

SEQ ID NO: 357092 - RNA, 22 nt, Human
gcagccacagaggagggaugca

SEQ ID NO: 357093 - RNA, 22 nt, Human
gcucaggaaacagcagggcuug

SEQ ID NO: 357094 - RNA, 23 nt, Human
gcauugucuccccacuucugggc

SEQ ID NO: 357095 - RNA, 22 nt, Human
gaguccuuuucucuguccacug

SEQ ID NO: 357096 - RNA, 22 nt, Human
ccaaaugugccuguuucaacaa

SEQ ID NO: 357097 - RNA, 22 nt, Human
acauaauagguaccugaauaau

SEQ ID NO: 357098 - RNA, 16 nt, Human
gggagggaguuggugg

SEQ ID NO: 357099 - RNA, 22 nt, Human
agcaggguuuggggauuggcac

SEQ ID NO: 357100 - RNA, 22 nt, Human
agaggacagguuuuccaugggc

SEQ ID NO: 357101 - RNA, 22 nt, Human
gcagagugauggaaugugggug

SEQ ID NO: 357102 - RNA, 22 nt, Human
accuggcaugaagcaugccuua

SEQ ID NO: 357103 - RNA, 22 nt, Human
agcaccaucagaugcaauaucu

SEQ ID NO: 357104 - RNA, 20 nt, Human
ugggcugaggaucaggugcc

SEQ ID NO: 357105 - RNA, 22 nt, Human
uauuucugaauccaaaagguca

SEQ ID NO: 357106 - RNA, 23 nt, Human
agaguccacaagauuuuccagug

SEQ ID NO: 357107 - RNA, 22 nt, Human
ucuuuacaguccucugucaauc

SEQ ID NO: 357108 - RNA, 22 nt, Human
agggagccagaguugggagcuc

SEQ ID NO: 357109 - RNA, 22 nt, Human
aaaagucagucucuccuagcuc

SEQ ID NO: 357110 - RNA, 22 nt, Human
uccugcaggcuugaguccucag

SEQ ID NO: 357111 - RNA, 22 nt, Human
ccaaguacagauuccuccacug

SEQ ID NO: 357112 - RNA, 22 nt, Human
ggcagccaugcacgcugccugg

SEQ ID NO: 357113 - RNA, 23 nt, Human
gggcagcuuaagcuuguuuuucu

SEQ ID NO: 357114 - RNA, 22 nt, Human
uccuguggcguuaucaugugau

SEQ ID NO: 357115 - RNA, 22 nt, Human
uguauguaaaguuuguaauaga

SEQ ID NO: 357116 - RNA, 22 nt, Human
ccagcuggcaggagagucaggg

SEQ ID NO: 357117 - RNA, 22 nt, Human
aguauugugacucaaguauucu

SEQ ID NO: 357118 - RNA, 22 nt, Human
gagcugcugguugcuggugccu

SEQ ID NO: 357119 - RNA, 22 nt, Human
acaggcagguaauuuacauauu

SEQ ID NO: 357120 - RNA, 22 nt, Human
agcuuuauuugucauucacggc

SEQ ID NO: 357121 - RNA, 22 nt, Human
augguuuguaacccaauacucc

SEQ ID NO: 357122 - RNA, 22 nt, Human
ucccuguccugggcaaucccag

SEQ ID NO: 357123 - RNA, 22 nt, Human
guggcagugugaggauccugcu

SEQ ID NO: 357124 - RNA, 22 nt, Human
aagauguaucaguuaagucuuc

SEQ ID NO: 357125 - RNA, 22 nt, Human
agggccagaaucccucagucua

SEQ ID NO: 357126 - RNA, 22 nt, Human
gagagcugggcuuugggugaag

SEQ ID NO: 357127 - RNA, 22 nt, Human
ggccagaggccauccuccugcu

SEQ ID NO: 357128 - RNA, 22 nt, Human
acucugaggagugacuagaggu

SEQ ID NO: 357129 - RNA, 22 nt, Human
cuuuaacaaaugacucuugucu

SEQ ID NO: 357130 - RNA, 22 nt, Human
ugucuucaucucagacacaguu

SEQ ID NO: 357131 - RNA, 22 nt, Human
ugggccaggcaugugaucagca

SEQ ID NO: 357132 - RNA, 22 nt, Human
uuuacuuugugucaagucaaga

SEQ ID NO: 357133 - RNA, 22 nt, Human
ucccuggcugggggcugccuug

SEQ ID NO: 357134 - RNA, 22 nt, Human
uucaaacaguguagaauauaug

SEQ ID NO: 357135 - RNA, 22 nt, Human
ccucacuuuccuuucuccuggg

SEQ ID NO: 357136 - RNA, 22 nt, Human
auggcuuaugaauaacaguagg

SEQ ID NO: 357137 - RNA, 22 nt, Human
aagcugcagacccccugucuca

SEQ ID NO: 357138 - RNA, 22 nt, Human
aggcugcuucaauggauaagau

SEQ ID NO: 357139 - RNA, 22 nt, Human
aaucuucacagagaaaauuagg

SEQ ID NO: 357140 - RNA, 22 nt, Human
uccucagaugcucuuggacgcc

SEQ ID NO: 357141 - RNA, 22 nt, Human
ucagagaacacagaggugaugu

SEQ ID NO: 357142 - RNA, 21 nt, Human
gccacugcacuccagccuggg

SEQ ID NO: 357143 - RNA, 22 nt, Human
agucccagccuaggcugugcug

SEQ ID NO: 357144 - RNA, 22 nt, Human
uccaggaguccugggagugauu

SEQ ID NO: 357145 - RNA, 22 nt, Human
ucagcugccuuucccaugcuag

SEQ ID NO: 357146 - RNA, 22 nt, Human
agagcuggggccagagucaagg

SEQ ID NO: 357147 - RNA, 22 nt, Human
auuuauuaagcaucugcuaugu

SEQ ID NO: 357148 - RNA, 22 nt, Human
uaggaaaaauacagaauuauau

SEQ ID NO: 357149 - RNA, 22 nt, Human
ugcuuuaucugacuuggcgcug

SEQ ID NO: 357150 - RNA, 22 nt, Human
uugauaaaaugauaucuucuuu

SEQ ID NO: 357151 - RNA, 22 nt, Human
gccaggcaguucaaguacacca

SEQ ID NO: 357152 - RNA, 22 nt, Human
uaucuguuaggaucagagcugg

SEQ ID NO: 357153 - RNA, 22 nt, Human
cugcuguggccagccaggucaa

SEQ ID NO: 357154 - RNA, 22 nt, Human
uuuccaagacuccaguucuccc

SEQ ID NO: 357155 - RNA, 18 nt, Human
ucaggagacacagacgca

SEQ ID NO: 357156 - RNA, 22 nt, Human
aagucauuaucucuucuaaucu

SEQ ID NO: 357157 - RNA, 22 nt, Human
cacugaaggaaggacuacugca

SEQ ID NO: 357158 - RNA, 22 nt, Human
ugaaguccuagaacuccuggua

SEQ ID NO: 357159 - RNA, 22 nt, Human
caggagccgccaggcacguugg

SEQ ID NO: 357160 - RNA, 22 nt, Human
uuggaucacucugaagccuuac

SEQ ID NO: 357161 - RNA, 22 nt, Human
uuucacauaucaacucuauccu

SEQ ID NO: 357162 - RNA, 22 nt, Human
cagaaauggaauuuuccaucac

SEQ ID NO: 357163 - RNA, 22 nt, Human
ggaggagggguuuacauuggaa

SEQ ID NO: 357164 - RNA, 22 nt, Human
uucuucaauuuuccauauacug

SEQ ID NO: 357165 - RNA, 22 nt, Human
gaagagcugcucagaacaugau

SEQ ID NO: 357166 - RNA, 22 nt, Human
augcuguguccuagugaaagaa

SEQ ID NO: 357167 - RNA, 22 nt, Human
aagggagacaguugugugagga

SEQ ID NO: 357168 - RNA, 22 nt, Human
auuguuaugaaaauaagauguu

SEQ ID NO: 357169 - RNA, 17 nt, Human
aggcuggcucacaggga

SEQ ID NO: 357170 - RNA, 22 nt, Human
ucuucacaggagccugccugcc

SEQ ID NO: 357171 - RNA, 22 nt, Human
guccucuggaagaugaguucuu

SEQ ID NO: 357172 - RNA, 22 nt, Human
gcucacagccggcuggcagggg

SEQ ID NO: 357173 - RNA, 22 nt, Human
uuuccaaaggaggaaccaguuu

SEQ ID NO: 357174 - RNA, 22 nt, Human
uaucuuuaacuugcaguauuua

SEQ ID NO: 357175 - RNA, 22 nt, Human
uggcagagucugggcuugggca

SEQ ID NO: 357176 - RNA, 22 nt, Human
aggugcaguggcucaugccugu

SEQ ID NO: 357177 - RNA, 22 nt, Human
ucagcuuucucagaggccuaac

SEQ ID NO: 357178 - RNA, 22 nt, Human
agggcccuagggaaugagacau

SEQ ID NO: 357179 - RNA, 21 nt, Human
ggcagccucuguggaagggga

SEQ ID NO: 357180 - RNA, 19 nt, Human
gaucagagugucagcuugu

SEQ ID NO: 357181 - RNA, 22 nt, Human
aagaggucauaccagauaaggg

SEQ ID NO: 357182 - RNA, 22 nt, Human
cagaggcuaagaugagugggug

SEQ ID NO: 357183 - RNA, 22 nt, Human
uucugugauugacauguggcuu

SEQ ID NO: 357184 - RNA, 22 nt, Human
aggcccagggcugcucucugaa

SEQ ID NO: 357185 - RNA, 22 nt, Human
acccaggacucucuuccaguag

SEQ ID NO: 357186 - RNA, 17 nt, Human
ugcuuaauuuugacugg

SEQ ID NO: 357187 - RNA, 22 nt, Human
ggcaaggccuugcccagcauuc

SEQ ID NO: 357188 - RNA, 22 nt, Human
uuacagaagagaaagaauucag

SEQ ID NO: 357189 - RNA, 22 nt, Human
ugucaugccaggaaauaguccc

SEQ ID NO: 357190 - RNA, 22 nt, Human
aaguuugagagccuuuaguaua

SEQ ID NO: 357191 - RNA, 22 nt, Human
agggaagaagcugguaguaggu

SEQ ID NO: 357192 - RNA, 22 nt, Human
uggcucagcugucacagccugg

SEQ ID NO: 357193 - RNA, 22 nt, Human
cagcuugggaguuugguuuuau

SEQ ID NO: 357194 - RNA, 22 nt, Human
aggucauuccagccauuccccu

SEQ ID NO: 357195 - RNA, 22 nt, Human
ucaggagacuggcagugcccac

SEQ ID NO: 357196 - RNA, 18 nt, Human
agcagagcccaugcauuc

SEQ ID NO: 357197 - RNA, 19 nt, Human
cugugcaggccgggcugag

SEQ ID NO: 357198 - RNA, 22 nt, Human
uauguacaaucagcaguucaua

SEQ ID NO: 357199 - RNA, 22 nt, Human
uuacuuugcuuucucauuacag

SEQ ID NO: 357200 - RNA, 23 nt, Human
uccuuccuuugagaggcuccauc

SEQ ID NO: 357201 - RNA, 22 nt, Human
aagggcugaaugaaggguugaa

SEQ ID NO: 357202 - RNA, 22 nt, Human
aggcucagggacggggccccuu

SEQ ID NO: 357203 - RNA, 22 nt, Human
agggggcaucagguccuggcuc

SEQ ID NO: 357204 - RNA, 22 nt, Human
aauuuccaaauuucugucacac

SEQ ID NO: 357205 - RNA, 22 nt, Human
gcacagggccuggcacauaaga

SEQ ID NO: 357206 - RNA, 22 nt, Human
uaugcuguggaaaauacaaaga

SEQ ID NO: 357207 - RNA, 19 nt, Human
uacuaaacaugcauauugg

SEQ ID NO: 357208 - RNA, 22 nt, Human
uggcagguuuccuccucauagu

SEQ ID NO: 357209 - RNA, 22 nt, Human
uauguagaagcugcucaaagaa

SEQ ID NO: 357210 - RNA, 22 nt, Human
uaugauuuguagacauuugauu

SEQ ID NO: 357211 - RNA, 22 nt, Human
ucaggggacuuaggagagaagu

SEQ ID NO: 357212 - RNA, 22 nt, Human
cggagaggaccugcaacucgcu

SEQ ID NO: 357213 - RNA, 22 nt, Human
ggcagcuggguuggccagaaac

SEQ ID NO: 357214 - RNA, 22 nt, Human
agcugccauccuguucagcacc

SEQ ID NO: 357215 - RNA, 18 nt, Human
gcugccugcauuccucac

SEQ ID NO: 357216 - RNA, 22 nt, Human
uaugaguacaaggacucugucu

SEQ ID NO: 357217 - RNA, 22 nt, Human
ucugugcaggaagucauuauga

SEQ ID NO: 357218 - RNA, 22 nt, Human
agggccugacacccuugccagc

SEQ ID NO: 357219 - RNA, 22 nt, Human
uggcagcugcguuguguuucug

SEQ ID NO: 357220 - RNA, 22 nt, Human
gcaaaugaguuguaacauaaaa

SEQ ID NO: 357221 - RNA, 22 nt, Human
cucuuucugauucgcugggacc

SEQ ID NO: 357222 - RNA, 22 nt, Human
agguaggggguuugggaacugc

SEQ ID NO: 357223 - RNA, 22 nt, Human
accagcugcugauugcuaaaug

SEQ ID NO: 357224 - RNA, 22 nt, Human
uccaggaguccuggguggcccc

SEQ ID NO: 357225 - RNA, 22 nt, Human
cuacagaaaaucagccacaggc

SEQ ID NO: 357226 - RNA, 22 nt, Human
aggcuucuacguggucccaggg

SEQ ID NO: 357227 - RNA, 22 nt, Human
uucagaaagguuaaucuggauu

SEQ ID NO: 357228 - RNA, 22 nt, Human
agcuuuaucuucaccugggaau

SEQ ID NO: 357229 - RNA, 21 nt, Human
ucugucugguuuuagaguggc

SEQ ID NO: 357230 - RNA, 18 nt, Human
agccuggaggguugaagu

SEQ ID NO: 357231 - RNA, 22 nt, Human
ugucaccaugcgaggcuaauuu

SEQ ID NO: 357232 - RNA, 19 nt, Human
agccuggagggcuggucac

SEQ ID NO: 357233 - RNA, 22 nt, Human
gugucauggaaaauugcaaugg

SEQ ID NO: 357234 - RNA, 22 nt, Human
aacaaaugauaccaguucucaa

SEQ ID NO: 357235 - RNA, 22 nt, Human
gccagcucagugccaggccccu

SEQ ID NO: 357236 - RNA, 22 nt, Human
gcaggcuggucugaccaucccu

SEQ ID NO: 357237 - RNA, 22 nt, Human
aaagcuaugaggcaugcauuuc

SEQ ID NO: 357238 - RNA, 22 nt, Human
agccuccaguagcugaagagac

SEQ ID NO: 357239 - RNA, 22 nt, Human
acagggccauuaucuguucuag

SEQ ID NO: 357240 - RNA, 22 nt, Human
acucagaaccauuuacucugag

SEQ ID NO: 357241 - RNA, 22 nt, Human
agggucagagucaggugcagua

SEQ ID NO: 357242 - RNA, 22 nt, Human
ggcagacuguaauaggagaauu

SEQ ID NO: 357243 - RNA, 22 nt, Human
uuucuacauucaaaaacuacca

SEQ ID NO: 357244 - RNA, 22 nt, Human
ucucccacagucucccauggcu

SEQ ID NO: 357245 - RNA, 22 nt, Human
gggacugggagauccuccuggc

SEQ ID NO: 357246 - RNA, 22 nt, Human
agccacagcauguguguaugua

SEQ ID NO: 357247 - RNA, 22 nt, Human
agccagcaggugagugcagccu

SEQ ID NO: 357248 - RNA, 22 nt, Human
uauuccaacugucauagucaua

SEQ ID NO: 357249 - RNA, 22 nt, Human
ugugaagguaaggaggggcaag

SEQ ID NO: 357250 - RNA, 22 nt, Human
uuuccucuuugugacacagcug

SEQ ID NO: 357251 - RNA, 22 nt, Human
gcugccugauguccagcaggac

SEQ ID NO: 357252 - RNA, 22 nt, Human
uggcugggccgggccuugugcc

SEQ ID NO: 357253 - RNA, 22 nt, Human
acagauguacacucauauauaa

SEQ ID NO: 357254 - RNA, 22 nt, Human
gcuauacaaguguagaauagag

SEQ ID NO: 357255 - RNA, 22 nt, Human
ucuguaucacccguucccagaa

SEQ ID NO: 357256 - RNA, 22 nt, Human
aggucacccguuugacuaucca

SEQ ID NO: 357257 - RNA, 19 nt, Human
ggucagcugggcuagaggc

SEQ ID NO: 357258 - RNA, 22 nt, Human
guuuaaucagaggaauuauaga

SEQ ID NO: 357259 - RNA, 22 nt, Human
auuccaaagguuaaugcccauu

SEQ ID NO: 357260 - RNA, 22 nt, Human
ucuuuccuaggugauaugcaau

SEQ ID NO: 357261 - RNA, 19 nt, Human
acaagggcaggcaagguga

SEQ ID NO: 357262 - RNA, 22 nt, Human
gccacugcacuccagcccaggc

SEQ ID NO: 357263 - RNA, 22 nt, Human
ccaugcacaccagcaggcagac

SEQ ID NO: 357264 - RNA, 22 nt, Human
uucuucaguuugguaaauguaa

SEQ ID NO: 357265 - RNA, 22 nt, Human
aaauauaauuucugccucaaua

SEQ ID NO: 357266 - RNA, 22 nt, Human
augaguaagaccauaauuuuug

SEQ ID NO: 357267 - RNA, 22 nt, Human
ccaaagugcugggguuacaggc

SEQ ID NO: 357268 - RNA, 22 nt, Human
aagcuuucagagcagaauguga

SEQ ID NO: 357269 - RNA, 22 nt, Human
agcugcaguaaagcucuccagg

SEQ ID NO: 357270 - RNA, 22 nt, Human
aaagccuuugucucaggcucug

SEQ ID NO: 357271 - RNA, 22 nt, Human
uuucucaaguucagauauuuga

SEQ ID NO: 357272 - RNA, 22 nt, Human
augcuuaauacacuguuaaagg

SEQ ID NO: 357273 - RNA, 22 nt, Human
uggagcagcuaagccucugaga

SEQ ID NO: 357274 - RNA, 21 nt, Human
uggcugagccaggugugugga

SEQ ID NO: 357275 - RNA, 22 nt, Human
agggugccugcugcagguucag

SEQ ID NO: 357276 - RNA, 22 nt, Human
auugcuguacacuucuagaucu

SEQ ID NO: 357277 - RNA, 22 nt, Human
gaagucugcugcucaggaguuu

SEQ ID NO: 357278 - RNA, 22 nt, Human
gaaggccauuagagccugugcc

SEQ ID NO: 357279 - RNA, 22 nt, Human
gggggaagacugggcuagugau

SEQ ID NO: 357280 - RNA, 22 nt, Human
uagcugccagaccauucuuacu

SEQ ID NO: 357281 - RNA, 22 nt, Human
agguguguauaaacauacauau

SEQ ID NO: 357282 - RNA, 22 nt, Human
agauuucucuuucccuggcuga

SEQ ID NO: 357283 - RNA, 22 nt, Human
ccagggcaggagaaagacucac

SEQ ID NO: 357284 - RNA, 22 nt, Human
ugcugcacaauuggaaaguauc

SEQ ID NO: 357285 - RNA, 22 nt, Human
gcugccaugguccaggcuccag

SEQ ID NO: 357286 - RNA, 22 nt, Human
acagaacugcaggaggaaaagc

SEQ ID NO: 357287 - RNA, 19 nt, Human
ggcagcuugggaagguagc

SEQ ID NO: 357288 - RNA, 22 nt, Human
ugcuucuggaaacaguggcugu

SEQ ID NO: 357289 - RNA, 22 nt, Human
aagugguagacaaagauaauug

SEQ ID NO: 357290 - RNA, 22 nt, Human
guauuuauaggggaaugagagu

SEQ ID NO: 357291 - RNA, 22 nt, Human
cauuugaauuguucugugggaa

SEQ ID NO: 357292 - RNA, 22 nt, Human
uaggcagcauggauucugaaua

SEQ ID NO: 357293 - RNA, 22 nt, Human
cugaggcucccucgggucugcu

SEQ ID NO: 357294 - RNA, 22 nt, Human
cacccagcuuuugcauccuccg

SEQ ID NO: 357295 - RNA, 22 nt, Human
ggcagcucugugucugggaagc

SEQ ID NO: 357296 - RNA, 22 nt, Human
cuccucacacccacugcaacca

SEQ ID NO: 357297 - RNA, 20 nt, Human
acaggggcagcacaauaaug

SEQ ID NO: 357298 - RNA, 22 nt, Human
gcauggcauuaacaagauggaa

SEQ ID NO: 357299 - RNA, 22 nt, Human
gcugcucuuuucagagaugaga

SEQ ID NO: 357300 - RNA, 22 nt, Human
gcuggcagccaagugaagaggg

SEQ ID NO: 357301 - RNA, 22 nt, Human
ugaguccacuuuaaaaugucag

SEQ ID NO: 357302 - RNA, 22 nt, Human
acugcagccuagggaccacagu

SEQ ID NO: 357303 - RNA, 22 nt, Human
gccuuugccugcgacguggcug

SEQ ID NO: 357304 - RNA, 20 nt, Human
aggcagacaaggagucuguu

SEQ ID NO: 357305 - RNA, 22 nt, Human
uaaaauugcggugaauauuucc

SEQ ID NO: 357306 - RNA, 22 nt, Human
aggcgcagaaggccaggggccu

SEQ ID NO: 357307 - RNA, 22 nt, Human
uugaccauaccuccaggcaguu

SEQ ID NO: 357308 - RNA, 22 nt, Human
auauacaggugguauguguaaa

SEQ ID NO: 357309 - RNA, 22 nt, Human
aagggaggggauguaagccugg

SEQ ID NO: 357310 - RNA, 22 nt, Human
ccuuucagaugggcauggaccg

SEQ ID NO: 357311 - RNA, 22 nt, Human
aggcuucuuagauuggcuggag

SEQ ID NO: 357312 - RNA, 22 nt, Human
auucuucacauggauaggaucu

SEQ ID NO: 357313 - RNA, 22 nt, Human
ggccucagugggccgcugcagg

SEQ ID NO: 357314 - RNA, 22 nt, Human
caauguaucaaccagaaaguuc

SEQ ID NO: 357315 - RNA, 22 nt, Human
agagaugucgccuugcccaggg

SEQ ID NO: 357316 - RNA, 22 nt, Human
agaggcaggagguugacuugag

SEQ ID NO: 357317 - RNA, 22 nt, Human
gcaggcuggaggcuguucuggg

SEQ ID NO: 357318 - RNA, 22 nt, Human
ucagcccugaggacagaggcag

SEQ ID NO: 357319 - RNA, 15 nt, Human
uggcagcuuguuaag

SEQ ID NO: 357320 - RNA, 22 nt, Human
ggcgcaggccuuggauccuggu

SEQ ID NO: 357321 - RNA, 22 nt, Human
cauaauuucuguaucagcacca

SEQ ID NO: 357322 - RNA, 16 nt, Human
uguuagcugugcauua

SEQ ID NO: 357323 - RNA, 22 nt, Human
uuugaagauuaugccagaguga

SEQ ID NO: 357324 - RNA, 22 nt, Human
gccagggaggcuguaggguccu

SEQ ID NO: 357325 - RNA, 18 nt, Human
cccagcuuagcgccccuc

SEQ ID NO: 357326 - RNA, 22 nt, Human
ugucauaaaacacaagcuguug

SEQ ID NO: 357327 - RNA, 22 nt, Human
gggcucuggaaggugcaccaug

SEQ ID NO: 357328 - RNA, 22 nt, Human
aggugagugugacugcaagaga

SEQ ID NO: 357329 - RNA, 22 nt, Human
uguccacaucacucacuuguca

SEQ ID NO: 357330 - RNA, 22 nt, Human
ugggcuccguugccuggggcag

SEQ ID NO: 357331 - RNA, 22 nt, Human
augaggcucucaggggagcugu

SEQ ID NO: 357332 - RNA, 19 nt, Human
uggcaucuguaaaauggug

SEQ ID NO: 357333 - RNA, 22 nt, Human
uaaaugugucuuuuuaaggccu

SEQ ID NO: 357334 - RNA, 22 nt, Human
ggccagaggccacagcuguguc

SEQ ID NO: 357335 - RNA, 22 nt, Human
acaaauauuuacugaauccacu

SEQ ID NO: 357336 - RNA, 22 nt, Human
ggcucuggguucugcaaugcgu

SEQ ID NO: 357337 - RNA, 22 nt, Human
gcagugccuugcuucucugucu

SEQ ID NO: 357338 - RNA, 22 nt, Human
caaagcucaugcucuuagccau

SEQ ID NO: 357339 - RNA, 22 nt, Human
ucaaagucuaucuguaauuacu

SEQ ID NO: 357340 - RNA, 22 nt, Human
uccuuuuugguccaaggugacc

SEQ ID NO: 357341 - RNA, 20 nt, Human
cuucaggacccauccucccc

SEQ ID NO: 357342 - RNA, 22 nt, Human
ucuggauggucagcucuuccug

SEQ ID NO: 357343 - RNA, 22 nt, Human
uacagggguaacaguggggaau

SEQ ID NO: 357344 - RNA, 22 nt, Human
uggcaguccccugugccuggaa

SEQ ID NO: 357345 - RNA, 22 nt, Human
aguaauaauuuauauuagggag

SEQ ID NO: 357346 - RNA, 20 nt, Human
ggggcugcaugcagagaaga

SEQ ID NO: 357347 - RNA, 22 nt, Human
uuuggaaugguaccuucaguug

SEQ ID NO: 357348 - RNA, 22 nt, Human
caaaggcaacauauacuuguuu

SEQ ID NO: 357349 - RNA, 22 nt, Human
uccugagauucugcauuucuaa

SEQ ID NO: 357350 - RNA, 22 nt, Human
gccugagagucugcauuucuaa

SEQ ID NO: 357351 - RNA, 21 nt, Human
agaagccaugugguggagaac

SEQ ID NO: 357352 - RNA, 22 nt, Human
agcucuccacacauaggacuag

SEQ ID NO: 357353 - RNA, 22 nt, Human
gagcuggcaggaggcuccccga

SEQ ID NO: 357354 - RNA, 22 nt, Human
cacaggaggaggccagagcgua

SEQ ID NO: 357355 - RNA, 22 nt, Human
ugccagucucacccuggguccu

SEQ ID NO: 357356 - RNA, 22 nt, Human
uaaaugcaaugugcuuuaccag

SEQ ID NO: 357357 - RNA, 22 nt, Human
caguuucuguuuuaaauagcag

SEQ ID NO: 357358 - RNA, 22 nt, Human
uaaggccaauuaacaaccaggg

SEQ ID NO: 357359 - RNA, 22 nt, Human
cuuccagguccuucuugagaag

SEQ ID NO: 357360 - RNA, 22 nt, Human
aagcagcacaguaauauuggug

SEQ ID NO: 357361 - RNA, 22 nt, Human
caauacuuccuuguuagaggca

SEQ ID NO: 357362 - RNA, 21 nt, Human
uggcucuggguaggagagugc

SEQ ID NO: 357363 - RNA, 21 nt, Human
acagcauguuuguguguuugc

SEQ ID NO: 357364 - RNA, 20 nt, Human
gccagcccugacacaggagc

SEQ ID NO: 357365 - RNA, 22 nt, Human
acuccugguuuguguccuggcu

SEQ ID NO: 357366 - RNA, 22 nt, Human
ucugucacccaggcuggagugc

SEQ ID NO: 357367 - RNA, 22 nt, Human
ugcuggaggccugacuguguuu

SEQ ID NO: 357368 - RNA, 22 nt, Human
agccagggagguggagguugca

SEQ ID NO: 357369 - RNA, 22 nt, Human
gggaguggagagcaauggauga

SEQ ID NO: 357370 - RNA, 22 nt, Human
ccugccaggcuuugggcuucug

SEQ ID NO: 357371 - RNA, 22 nt, Human
uaaggguucagaaugcaguggu

SEQ ID NO: 357372 - RNA, 22 nt, Human
aaauuucuaagcagccacuucc

SEQ ID NO: 357373 - RNA, 22 nt, Human
acuuagaacaggcagaauucca

SEQ ID NO: 357374 - RNA, 22 nt, Human
cuguggcauugccgaggcuggc

SEQ ID NO: 357375 - RNA, 22 nt, Human
acaaaaagggagaugagguaga

SEQ ID NO: 357376 - RNA, 22 nt, Human
ucauugcacuccagccugggca

SEQ ID NO: 357377 - RNA, 22 nt, Human
gggggcuggaauauccaucaac

SEQ ID NO: 357378 - RNA, 22 nt, Human
acccaggauaaucuguguaucu

SEQ ID NO: 357379 - RNA, 22 nt, Human
agagccugaggaugucccagcu

SEQ ID NO: 357380 - RNA, 22 nt, Human
gugaaaucugaggcccaugaug

SEQ ID NO: 357381 - RNA, 22 nt, Human
ugaagcaggaucguuugcuuca

SEQ ID NO: 357382 - RNA, 22 nt, Human
gcccucagaugggaaaggaggg

SEQ ID NO: 357383 - RNA, 22 nt, Human
gaagagcuuagacagaaucaaa

SEQ ID NO: 357384 - RNA, 22 nt, Human
ucacaacuugaagcugauuuaa

SEQ ID NO: 357385 - RNA, 23 nt, Human
ccugcucaggcgugugcccugcu

SEQ ID NO: 357386 - RNA, 22 nt, Human
acuguguggaccacucugaggc

SEQ ID NO: 357387 - RNA, 22 nt, Human
uauuacugagguuuuauggagu

SEQ ID NO: 357388 - RNA, 22 nt, Human
cugcagagcaaguaacauccuc

SEQ ID NO: 357389 - RNA, 22 nt, Human
augaacaaguauuugcaugagc

SEQ ID NO: 357390 - RNA, 19 nt, Human
guugaaaguaggugagggu

SEQ ID NO: 357391 - RNA, 22 nt, Human
augcaguggcagcuccuggugu

SEQ ID NO: 357392 - RNA, 19 nt, Human
ugagaaggcaguggggagc

SEQ ID NO: 357393 - RNA, 22 nt, Human
ugggaggaucgcuugagcccag

SEQ ID NO: 357394 - RNA, 20 nt, Human
ggcagggcaucaacagcucu

SEQ ID NO: 357395 - RNA, 22 nt, Human
gcugccaguaguuggagcucca

SEQ ID NO: 357396 - RNA, 22 nt, Human
aucaguuuggaacauucaggcc

SEQ ID NO: 357397 - RNA, 22 nt, Human
acacagggucuagaguuaggcc

SEQ ID NO: 357398 - RNA, 22 nt, Human
auccuugagccaaugacugauu

SEQ ID NO: 357399 - RNA, 17 nt, Human
cuggagccaagagggcc

SEQ ID NO: 357400 - RNA, 22 nt, Human
agggcuccgggcaggcgaugga

SEQ ID NO: 357401 - RNA, 22 nt, Human
aggcacuguggguguggccgga

SEQ ID NO: 357402 - RNA, 22 nt, Human
acagaguagcucaagaagauug

SEQ ID NO: 357403 - RNA, 22 nt, Human
agagcagaggcauggccguggg

SEQ ID NO: 357404 - RNA, 22 nt, Human
acaucucaugaaugauaaauca

SEQ ID NO: 357405 - RNA, 22 nt, Human
acagcagagacacucaggaggc

SEQ ID NO: 357406 - RNA, 22 nt, Human
ucaguagcagaaagcaaugagu

SEQ ID NO: 357407 - RNA, 22 nt, Human
cugggagauugcuagagaugca

SEQ ID NO: 357408 - RNA, 19 nt, Human
aggucauugauagugcagg

SEQ ID NO: 357409 - RNA, 22 nt, Human
aaauccuaccaagaaauucccu

SEQ ID NO: 357410 - RNA, 22 nt, Human
auggcagagaaagcgagccaca

SEQ ID NO: 357411 - RNA, 22 nt, Human
ucagaaauguaagcugaugacu

SEQ ID NO: 357412 - RNA, 22 nt, Human
agcagagcccuuccauggccuu

SEQ ID NO: 357413 - RNA, 22 nt, Human
auaacagauacucucugugagg

SEQ ID NO: 357414 - RNA, 22 nt, Human
ucacacauucuagguauguuga

SEQ ID NO: 357415 - RNA, 22 nt, Human
ccuggaagauucaccacuacca

SEQ ID NO: 357416 - RNA, 22 nt, Human
uucuucuucuggcugcaccugg

SEQ ID NO: 357417 - RNA, 22 nt, Human
gaugccucuuuuggcugaauua

SEQ ID NO: 357418 - RNA, 22 nt, Human
ucccaggaugaagacaguguug

SEQ ID NO: 357419 - RNA, 19 nt, Human
ccaguagagacagcugcag

SEQ ID NO: 357420 - RNA, 22 nt, Human
acucaggaaauugagauaaugg

SEQ ID NO: 357421 - RNA, 22 nt, Human
gucccagggagguucagggcuu

SEQ ID NO: 357422 - RNA, 22 nt, Human
uauuuguugaguuguuaugucu

SEQ ID NO: 357423 - RNA, 21 nt, Human
uauuucuuugacucucucccu

SEQ ID NO: 357424 - RNA, 22 nt, Human
uuaacacuaucugucauaauua

SEQ ID NO: 357425 - RNA, 22 nt, Human
ucaggagagaaagaauacaauu

SEQ ID NO: 357426 - RNA, 22 nt, Human
caggaacaauguaagucucauu

SEQ ID NO: 357427 - RNA, 22 nt, Human
guccucuggugaaagcauuccc

SEQ ID NO: 357428 - RNA, 22 nt, Human
uagcagugccaggauuuugcug

SEQ ID NO: 357429 - RNA, 21 nt, Human
ugcaugcuauguuuuuauuuc

SEQ ID NO: 357430 - RNA, 22 nt, Human
agcagcauuaagggaacugcag

SEQ ID NO: 357431 - RNA, 22 nt, Human
agugcugacucugggcacagug

SEQ ID NO: 357432 - RNA, 22 nt, Human
gucugcccucacgccagcuggg

SEQ ID NO: 357433 - RNA, 22 nt, Human
gacccagccugguuuuuauagg

SEQ ID NO: 357434 - RNA, 22 nt, Human
cucagccccaauucuccccauu

SEQ ID NO: 357435 - RNA, 22 nt, Human
gcugucugcugugcacugagca

SEQ ID NO: 357436 - RNA, 22 nt, Human
caaauaguuuuucauguauuau

SEQ ID NO: 357437 - RNA, 22 nt, Human
aauaauuacccaucuuuuugua

SEQ ID NO: 357438 - RNA, 22 nt, Human
ccagcccuccuccaucagagga

SEQ ID NO: 357439 - RNA, 22 nt, Human
gccuuggcugaugugcgaauga

SEQ ID NO: 357440 - RNA, 22 nt, Human
ccuccuggugggcgcuucuggc

SEQ ID NO: 357441 - RNA, 22 nt, Human
gaauuagguaauagaacuagua

SEQ ID NO: 357442 - RNA, 22 nt, Human
ccagcuggucugugcucauguu

SEQ ID NO: 357443 - RNA, 22 nt, Human
uggaggcauuuuagguugucac

SEQ ID NO: 357444 - RNA, 21 nt, Human
gauaaaaugggccuugguccu

SEQ ID NO: 357445 - RNA, 22 nt, Human
cuccaggaaaauagggaaugag

SEQ ID NO: 357446 - RNA, 22 nt, Human
cagcuuguuuuauuuggggacc

SEQ ID NO: 357447 - RNA, 22 nt, Human
gaguucaguguuucuaguagug

SEQ ID NO: 357448 - RNA, 23 nt, Human
ugcagagggacugaagccagcuu

SEQ ID NO: 357449 - RNA, 22 nt, Human
cucacugugaccucagcagaca

SEQ ID NO: 357450 - RNA, 22 nt, Human
ugccucagaguugucccuacca

SEQ ID NO: 357451 - RNA, 22 nt, Human
cccugcaggggaccugcagccu

SEQ ID NO: 357452 - RNA, 22 nt, Human
ggaucugauuaauaagguggac

SEQ ID NO: 357453 - RNA, 22 nt, Human
agcugggagcagagccacagcc

SEQ ID NO: 357454 - RNA, 22 nt, Human
ucacuugccuagcccaguucag

SEQ ID NO: 357455 - RNA, 22 nt, Human
uuucauaaacaguagaagacua

SEQ ID NO: 357456 - RNA, 22 nt, Human
ucagaauugucuggggaauguu

SEQ ID NO: 357457 - RNA, 22 nt, Human
aauaaacugcucaauugcauca

SEQ ID NO: 357458 - RNA, 22 nt, Human
ggcucaggcuggagugcagugg

SEQ ID NO: 357459 - RNA, 22 nt, Human
agaagccauugaagcagaccuc

SEQ ID NO: 357460 - RNA, 22 nt, Human
gugcugcucacaucuggaggua

SEQ ID NO: 357461 - RNA, 22 nt, Human
ugagaaccaugaaaagcuguca

SEQ ID NO: 357462 - RNA, 22 nt, Human
guccucaggaaagcagauaaca

SEQ ID NO: 357463 - RNA, 20 nt, Human
uacaauacacaugcauauga

SEQ ID NO: 357464 - RNA, 22 nt, Human
uggaaugacagagagucugaau

SEQ ID NO: 357465 - RNA, 22 nt, Human
gaggaaccaaucugugauauuc

SEQ ID NO: 357466 - RNA, 21 nt, Human
auuuccaaggguaccuaagau

SEQ ID NO: 357467 - RNA, 17 nt, Human
aagauuucauuagcuga

SEQ ID NO: 357468 - RNA, 22 nt, Human
agggacacacuccaguguuauu

SEQ ID NO: 357469 - RNA, 22 nt, Human
ugcuggagaggaaggugggguc

SEQ ID NO: 357470 - RNA, 22 nt, Human
ucagaaauuuucucaguaguuc

SEQ ID NO: 357471 - RNA, 20 nt, Human
ggcacuggaagcacacagga

SEQ ID NO: 357472 - RNA, 21 nt, Human
uuuagggaggauauuuaacuu

SEQ ID NO: 357473 - RNA, 22 nt, Human
caagaaggcuauaugggccagg

SEQ ID NO: 357474 - RNA, 23 nt, Human
cccagggacacgaugacaccucc

SEQ ID NO: 357475 - RNA, 22 nt, Human
uccaggcaaaaggaacugcuug

SEQ ID NO: 357476 - RNA, 22 nt, Human
gcucccagauuucagccuugug

SEQ ID NO: 357477 - RNA, 22 nt, Human
ugaggcucagaaauguaaguuu

SEQ ID NO: 357478 - RNA, 22 nt, Human
cugaauaauuuucuguuguaug

SEQ ID NO: 357479 - RNA, 22 nt, Human
cagaaauguacugacaugcagu

SEQ ID NO: 357480 - RNA, 22 nt, Human
gugccugugcggacucagggaa

SEQ ID NO: 357481 - RNA, 22 nt, Human
cauugcucaggcccagcaggaa

SEQ ID NO: 357482 - RNA, 22 nt, Human
caggccucuauggucagcugag

SEQ ID NO: 357483 - RNA, 22 nt, Human
gggagggaaggaccuuaugaau

SEQ ID NO: 357484 - RNA, 22 nt, Human
gcugucaguuuuacccacagac

SEQ ID NO: 357485 - RNA, 22 nt, Human
gcugccugcucggcuccuggga

SEQ ID NO: 357486 - RNA, 22 nt, Human
uuaaagaguaaucauaggucaa

SEQ ID NO: 357487 - RNA, 18 nt, Human
uccugccugugccccagg

SEQ ID NO: 357488 - RNA, 22 nt, Human
gccuucugugcuccuggccuuu

SEQ ID NO: 357489 - RNA, 22 nt, Human
uccaggagaggccugaccaggu

SEQ ID NO: 357490 - RNA, 21 nt, Human
cugcaucucauagaacauguc

SEQ ID NO: 357491 - RNA, 22 nt, Human
cacagggcaggccccaggccuc

SEQ ID NO: 357492 - RNA, 22 nt, Human
caccaggcugaaccagagggga

SEQ ID NO: 357493 - RNA, 22 nt, Human
uuucaaaauuuugcagugguaa

SEQ ID NO: 357494 - RNA, 22 nt, Human
cuuuggaagugaccacaauccu

SEQ ID NO: 357495 - RNA, 22 nt, Human
cauuggaaugcauuugaagaga

SEQ ID NO: 357496 - RNA, 22 nt, Human
cuuagaugaagucacagaaccc

SEQ ID NO: 357497 - RNA, 22 nt, Human
cagggcugcuggccgugcccuc

SEQ ID NO: 357498 - RNA, 22 nt, Human
uacauguaauuuucauaguaag

SEQ ID NO: 357499 - RNA, 22 nt, Human
ugguuuaccccuguccuauauc

SEQ ID NO: 357500 - RNA, 22 nt, Human
ugaugaauaaacuugagaguca

SEQ ID NO: 357501 - RNA, 22 nt, Human
cacagcuuaugccacugauugg

SEQ ID NO: 357502 - RNA, 22 nt, Human
cacuguaucuuuuccaaagucu

SEQ ID NO: 357503 - RNA, 21 nt, Human
gcagccagccgagaccaugcc

SEQ ID NO: 357504 - RNA, 22 nt, Human
acuugcauuauauuuaucacaa

SEQ ID NO: 357505 - RNA, 22 nt, Human
aaaugucuguuagucauaucau

SEQ ID NO: 357506 - RNA, 22 nt, Human
gaaaucugaaucuucuguuggu

SEQ ID NO: 357507 - RNA, 22 nt, Human
gcacagggagacagccguggcc

SEQ ID NO: 357508 - RNA, 22 nt, Human
ucccagggacucucugccuucc

SEQ ID NO: 357509 - RNA, 22 nt, Human
uuuccaaagcugaguugagcaa

SEQ ID NO: 357510 - RNA, 22 nt, Human
cuuauuauaaaauccuguuuga

SEQ ID NO: 357511 - RNA, 22 nt, Human
ugaguccauguggaggggaggu

SEQ ID NO: 357512 - RNA, 22 nt, Human
acagugucuccugguacccagu

SEQ ID NO: 357513 - RNA, 22 nt, Human
accccagcucugagccacacca

SEQ ID NO: 357514 - RNA, 22 nt, Human
ugcaucuguucagagcugucga

SEQ ID NO: 357515 - RNA, 22 nt, Human
ugucuucaguaaaauacacuau

SEQ ID NO: 357516 - RNA, 22 nt, Human
ugaaaugaaacagaacauauca

SEQ ID NO: 357517 - RNA, 22 nt, Human
uggcagucuggguuggcaguua

SEQ ID NO: 357518 - RNA, 22 nt, Human
ucacugcucucuaagcaucgcc

SEQ ID NO: 357519 - RNA, 22 nt, Human
caguucaggccggcugacucag

SEQ ID NO: 357520 - RNA, 22 nt, Human
cucuuaguaaugccaugaagca

SEQ ID NO: 357521 - RNA, 22 nt, Human
agggagugguuaagaaggugca

SEQ ID NO: 357522 - RNA, 22 nt, Human
gagauuucuuuugaugccuguc

SEQ ID NO: 357523 - RNA, 22 nt, Human
ucucccaggucauacacagaga

SEQ ID NO: 357524 - RNA, 23 nt, Human
ggguccagagacaggcaugggug

SEQ ID NO: 357525 - RNA, 20 nt, Human
gagagcuggggaugaggcug

SEQ ID NO: 357526 - RNA, 22 nt, Human
ccaggccuucugaggacacucu

SEQ ID NO: 357527 - RNA, 19 nt, Human
uuucccagcccuugcugug

SEQ ID NO: 357528 - RNA, 22 nt, Human
uaaauguguuguggaugaaguu

SEQ ID NO: 357529 - RNA, 22 nt, Human
auaguguuacccuucuuaaagu

SEQ ID NO: 357530 - RNA, 22 nt, Human
aaggagaaaugguagaugugca

SEQ ID NO: 357531 - RNA, 22 nt, Human
uggcucaggauaauuuucccaa

SEQ ID NO: 357532 - RNA, 22 nt, Human
cuagaaauucugauucaguagg

SEQ ID NO: 357533 - RNA, 22 nt, Human
aggccacaguacuuugcagacc

SEQ ID NO: 357534 - RNA, 22 nt, Human
gcagcccagagcgcaggacccc

SEQ ID NO: 357535 - RNA, 22 nt, Human
ggcaccugcucaucuggacuca

SEQ ID NO: 357536 - RNA, 22 nt, Human
gcagccacugggagugcuuaua

SEQ ID NO: 357537 - RNA, 22 nt, Human
caggacagcucaacaccuccuc

SEQ ID NO: 357538 - RNA, 22 nt, Human
ggcacugacacuagcauggcac

SEQ ID NO: 357539 - RNA, 22 nt, Human
cuggcagcccaaccuagagucu

SEQ ID NO: 357540 - RNA, 22 nt, Human
augaagcugguuuuggcuuggg

SEQ ID NO: 357541 - RNA, 23 nt, Human
agggagcuaaaaggcuggagcag

SEQ ID NO: 357542 - RNA, 22 nt, Human
caugaaaaugucaaguucugcu

SEQ ID NO: 357543 - RNA, 22 nt, Human
uggcucagagccuugagagcug

SEQ ID NO: 357544 - RNA, 18 nt, Human
cucucugggugaggacaa

SEQ ID NO: 357545 - RNA, 18 nt, Human
ucagaggagauaccuaaa

SEQ ID NO: 357546 - RNA, 21 nt, Human
agugaaauugcaucagaggga

SEQ ID NO: 357547 - RNA, 22 nt, Human
agcugccagcaaguuucaaaca

SEQ ID NO: 357548 - RNA, 22 nt, Human
ugcagccaggaaauauuugcug

SEQ ID NO: 357549 - RNA, 22 nt, Human
uccuuagagauacugucuugaa

SEQ ID NO: 357550 - RNA, 22 nt, Human
agaagccaaucagcucucugcu

SEQ ID NO: 357551 - RNA, 22 nt, Human
cccaggucccgccccagcucua

SEQ ID NO: 357552 - RNA, 22 nt, Human
accauguuggccaagcuggucu

SEQ ID NO: 357553 - RNA, 22 nt, Human
uggcagaguaggauggcccugu

SEQ ID NO: 357554 - RNA, 22 nt, Human
gacggcagaaacucaugagguc

SEQ ID NO: 357555 - RNA, 22 nt, Human
caguggagagacuuuuacucuu

SEQ ID NO: 357556 - RNA, 22 nt, Human
caaagcaccacaaaccagguga

SEQ ID NO: 357557 - RNA, 22 nt, Human
acuguguccuauuuccuugaca

SEQ ID NO: 357558 - RNA, 22 nt, Human
gcagcugggccccagccucucc

SEQ ID NO: 357559 - RNA, 22 nt, Human
uuugaaagcuacuuucggguca

SEQ ID NO: 357560 - RNA, 22 nt, Human
uauguuauuuucauacaacaga

SEQ ID NO: 357561 - RNA, 22 nt, Human
uggagcccagacacuggcauug

SEQ ID NO: 357562 - RNA, 22 nt, Human
aggcagcaaagaaaugaugcug

SEQ ID NO: 357563 - RNA, 22 nt, Human
gugggcuucuguuagggaggcu

SEQ ID NO: 357564 - RNA, 22 nt, Human
gaacaguaaauuuaugcagcac

SEQ ID NO: 357565 - RNA, 22 nt, Human
cucuccucugaaguggugaccc

SEQ ID NO: 357566 - RNA, 22 nt, Human
ucaggagucugugcaguuccac

SEQ ID NO: 357567 - RNA, 22 nt, Human
ggggaccugggcuucaaggguu

SEQ ID NO: 357568 - RNA, 22 nt, Human
uggcucaguuuagcagcucagu

SEQ ID NO: 357569 - RNA, 22 nt, Human
uggggcagcuccaucuauucca

SEQ ID NO: 357570 - RNA, 22 nt, Human
gaucugaagagcaaugaaauau

SEQ ID NO: 357571 - RNA, 22 nt, Human
ucagugcagaauagugaugcau

SEQ ID NO: 357572 - RNA, 17 nt, Human
ggcugcugugcuggugc

SEQ ID NO: 357573 - RNA, 20 nt, Human
acaaaauagguacuggguag

SEQ ID NO: 357574 - RNA, 22 nt, Human
agaggcucugccgccucaggua

SEQ ID NO: 357575 - RNA, 22 nt, Human
agagccagguguagucucggag

SEQ ID NO: 357576 - RNA, 22 nt, Human
gccuuaggggucagacagagcu

SEQ ID NO: 357577 - RNA, 22 nt, Human
auuucaggagcaguuucagugg

SEQ ID NO: 357578 - RNA, 17 nt, Human
ucaggcugugccuggua

SEQ ID NO: 357579 - RNA, 22 nt, Human
ggugauuuucgaguuucauguu

SEQ ID NO: 357580 - RNA, 18 nt, Human
gugagcagagagcaucac

SEQ ID NO: 357581 - RNA, 22 nt, Human
cugugugugucugcagcauacu

SEQ ID NO: 357582 - RNA, 22 nt, Human
uccagcagguccgagacaaguu

SEQ ID NO: 357583 - RNA, 22 nt, Human
ucaggaguaaagacagaguucc

SEQ ID NO: 357584 - RNA, 22 nt, Human
ugcucucucaggccuggcccac

SEQ ID NO: 357585 - RNA, 22 nt, Human
uaucuguuugcucacagguguu

SEQ ID NO: 357586 - RNA, 22 nt, Human
accaaggaagaaucuauuugag

SEQ ID NO: 357587 - RNA, 22 nt, Human
uaacagaaauauuuccagguga

SEQ ID NO: 357588 - RNA, 22 nt, Human
uccagcagcccgaaggcccauc

SEQ ID NO: 357589 - RNA, 21 nt, Human
ugaaagaaggugcagucugaa

SEQ ID NO: 357590 - RNA, 18 nt, Human
uccagagcuacuguggug

SEQ ID NO: 357591 - RNA, 22 nt, Human
agaaaucauugaauuauuugcu

SEQ ID NO: 357592 - RNA, 22 nt, Human
ucccccacucuaaaggagccuu

SEQ ID NO: 357593 - RNA, 22 nt, Human
gaagaacaccugcugcccagug

SEQ ID NO: 357594 - RNA, 22 nt, Human
gccaggaguguguggcuauguu

SEQ ID NO: 357595 - RNA, 22 nt, Human
agcagcucuggcacuguagcau

SEQ ID NO: 357596 - RNA, 22 nt, Human
ccacccagccagaugcaggaag

SEQ ID NO: 357597 - RNA, 22 nt, Human
gucccaggaguugcugggccuu

SEQ ID NO: 357598 - RNA, 22 nt, Human
uccagccuaauguucuucccac

SEQ ID NO: 357599 - RNA, 22 nt, Human
uggagcaggacugcugcccuca

SEQ ID NO: 357600 - RNA, 20 nt, Human
cccaggcagagcuagcggca

SEQ ID NO: 357601 - RNA, 22 nt, Human
uggcagagaauaaaucuugacu

SEQ ID NO: 357602 - RNA, 22 nt, Human
uccagggaugguaaugagcagu

SEQ ID NO: 357603 - RNA, 21 nt, Human
gcagcuggucucagagcuugc

SEQ ID NO: 357604 - RNA, 22 nt, Human
ucugggggcgaccagggacugc

SEQ ID NO: 357605 - RNA, 22 nt, Human
aggcugcagaacagucaggugc

SEQ ID NO: 357606 - RNA, 22 nt, Human
uucauagaucucaauuuugagg

SEQ ID NO: 357607 - RNA, 22 nt, Human
caggaggcagagguugcaguga

SEQ ID NO: 357608 - RNA, 19 nt, Human
accugcaguaauaauuccu

SEQ ID NO: 357609 - RNA, 23 nt, Human
gaggcacucaggaaaugugagug

SEQ ID NO: 357610 - RNA, 22 nt, Human
gcuggucacucugggagcugcu

SEQ ID NO: 357611 - RNA, 22 nt, Human
auuagggaaacugacuugucuc

SEQ ID NO: 357612 - RNA, 22 nt, Human
caguauuuauggcuugaguauu

SEQ ID NO: 357613 - RNA, 22 nt, Human
ccuggcucuguccucgcgcaaa

SEQ ID NO: 357614 - RNA, 22 nt, Human
auuucccuccagggaaagcuua

SEQ ID NO: 357615 - RNA, 22 nt, Human
ccaguggccaugcacgagcagc

SEQ ID NO: 357616 - RNA, 22 nt, Human
ugugaggagaggcccagcuccc

SEQ ID NO: 357617 - RNA, 22 nt, Human
aagaaucauccugcaagagucu

SEQ ID NO: 357618 - RNA, 22 nt, Human
uuuaagaugguauuuuauaaag

SEQ ID NO: 357619 - RNA, 22 nt, Human
cagcaggaaguacuagcuuuga

SEQ ID NO: 357620 - RNA, 22 nt, Human
ggggcugguggugguuucucca

SEQ ID NO: 357621 - RNA, 22 nt, Human
cuacagaagccguggucaggaa

SEQ ID NO: 357622 - RNA, 23 nt, Human
cuuuucauugccuuagcgcagag

SEQ ID NO: 357623 - RNA, 22 nt, Human
aagggcuguaagccaaguaaag

SEQ ID NO: 357624 - RNA, 22 nt, Human
gaaaccagcuagaggcagaggg

SEQ ID NO: 357625 - RNA, 22 nt, Human
gcaggcucuucuuucugcccag

SEQ ID NO: 357626 - RNA, 19 nt, Human
cucuggccucuggaugcug

SEQ ID NO: 357627 - RNA, 21 nt, Human
cauuuacaugacagauugguu

SEQ ID NO: 357628 - RNA, 22 nt, Human
uccugcagucugcacucugccu

SEQ ID NO: 357629 - RNA, 22 nt, Human
uucucauggugucuuuauacau

SEQ ID NO: 357630 - RNA, 22 nt, Human
acaugauuuuuaaagagauaau

SEQ ID NO: 357631 - RNA, 22 nt, Human
cacugcuucuggaggaauuugg

SEQ ID NO: 357632 - RNA, 19 nt, Human
ugaagcagcaaacucucag

SEQ ID NO: 357633 - RNA, 22 nt, Human
uaggcaacaugucgaauacugu

SEQ ID NO: 357634 - RNA, 22 nt, Human
gccuguguggaugcgccggugc

SEQ ID NO: 357635 - RNA, 22 nt, Human
uuuccucacuucaugagaguuu

SEQ ID NO: 357636 - RNA, 22 nt, Human
uguagaaagcucuucugaaauc

SEQ ID NO: 357637 - RNA, 22 nt, Human
gagggaggcaucaugaauccag

SEQ ID NO: 357638 - RNA, 22 nt, Human
uuuaguagaaugauacagggca

SEQ ID NO: 357639 - RNA, 22 nt, Human
aacaugaagguaggaugguuuu

SEQ ID NO: 357640 - RNA, 22 nt, Human
agagucagcuuaugacacaguc

SEQ ID NO: 357641 - RNA, 22 nt, Human
gaggacagcuuagggcuuccug

SEQ ID NO: 357642 - RNA, 22 nt, Human
agggguggagaguguugccagu

SEQ ID NO: 357643 - RNA, 20 nt, Human
cagggcacacugcagccucg

SEQ ID NO: 357644 - RNA, 22 nt, Human
auuuccaggagaaaggauuuua

SEQ ID NO: 357645 - RNA, 22 nt, Human
cccagcagauggcuaugugcua

SEQ ID NO: 357646 - RNA, 22 nt, Human
cugccugggccggccacccucu

SEQ ID NO: 357647 - RNA, 22 nt, Human
agcagggccugagugaccuaac

SEQ ID NO: 357648 - RNA, 22 nt, Human
ccucugcucccuggugucugag

SEQ ID NO: 357649 - RNA, 22 nt, Human
ucccagagcagaugugcuaaag

SEQ ID NO: 357650 - RNA, 22 nt, Human
aacaaauguaaaaugcagaugc

SEQ ID NO: 357651 - RNA, 22 nt, Human
uaugcauacaaugagauauucc

SEQ ID NO: 357652 - RNA, 22 nt, Human
uucagaaaggauaauuggaagg

SEQ ID NO: 357653 - RNA, 22 nt, Human
ugcccuguuaucuuggaagagu

SEQ ID NO: 357654 - RNA, 22 nt, Human
caggcagaugcugacaagaguu

SEQ ID NO: 357655 - RNA, 22 nt, Human
uccuucuuugacaaguggcaga

SEQ ID NO: 357656 - RNA, 22 nt, Human
cuguuaaucugcuugcaugaug

SEQ ID NO: 357657 - RNA, 22 nt, Human
uggcuuccugcacagugucugc

SEQ ID NO: 357658 - RNA, 22 nt, Human
ggagccugugcccaagcccaga

SEQ ID NO: 357659 - RNA, 22 nt, Human
uguuuaauaauucuaugauagu

SEQ ID NO: 357660 - RNA, 22 nt, Human
gagagcaggaggcagcgggacg

SEQ ID NO: 357661 - RNA, 22 nt, Human
gaaacccaaacuaagacaguag

SEQ ID NO: 357662 - RNA, 22 nt, Human
gccugccuggagcuugagguga

SEQ ID NO: 357663 - RNA, 22 nt, Human
guuauguaugagggaaugauua

SEQ ID NO: 357664 - RNA, 22 nt, Human
uucugcaucugaauuuaaguac

SEQ ID NO: 357665 - RNA, 22 nt, Human
gguggccuccagggcauaggug

SEQ ID NO: 357666 - RNA, 22 nt, Human
gcauuuagcuuuaaaauauuuc

SEQ ID NO: 357667 - RNA, 22 nt, Human
gaugaggcucaugcacccugcg

SEQ ID NO: 357668 - RNA, 22 nt, Human
uugcucagcacuggagccagcu

SEQ ID NO: 357669 - RNA, 22 nt, Human
guccaaauuuuucacauguaga

SEQ ID NO: 357670 - RNA, 22 nt, Human
gggcagugacaaaggggaugaa

SEQ ID NO: 357671 - RNA, 22 nt, Human
gccuccugagaagccacaggcu

SEQ ID NO: 357672 - RNA, 22 nt, Human
aaaugcacaggagaaccaauuc

SEQ ID NO: 357673 - RNA, 22 nt, Human
gcagugggaagguuggcacaug

SEQ ID NO: 357674 - RNA, 22 nt, Human
aggcucaguauagcuggcaagu

SEQ ID NO: 357675 - RNA, 18 nt, Human
acagaaauagcugugccu

SEQ ID NO: 357676 - RNA, 22 nt, Human
cuuaggaacgcucugccuagug

SEQ ID NO: 357677 - RNA, 22 nt, Human
uucucugaaggccaugcucacu

SEQ ID NO: 357678 - RNA, 22 nt, Human
ggcagagcuuguuccuucuguu

SEQ ID NO: 357679 - RNA, 22 nt, Human
acuggcaggcugcuggccggcg

SEQ ID NO: 357680 - RNA, 22 nt, Human
uaugacaagguggaguaugagu

SEQ ID NO: 357681 - RNA, 22 nt, Human
aaauccuaaugacaaguuuagu

SEQ ID NO: 357682 - RNA, 22 nt, Human
cugagccuguguuucucuggca

SEQ ID NO: 357683 - RNA, 22 nt, Human
cagaagagaugaaauaguauua

SEQ ID NO: 357684 - RNA, 21 nt, Human
ccaaaggcuauguaucuucug

SEQ ID NO: 357685 - RNA, 19 nt, Human
uugguggugguuuugguuc

SEQ ID NO: 357686 - RNA, 22 nt, Human
gggcugccuuucuucugggagc

SEQ ID NO: 357687 - RNA, 22 nt, Human
aacauuucagcaaauaagaaca

SEQ ID NO: 357688 - RNA, 22 nt, Human
uucaggagcuggcugcgaagga

SEQ ID NO: 357689 - RNA, 22 nt, Human
gccugcagccucagagaauuuu

SEQ ID NO: 357690 - RNA, 22 nt, Human
cuuauuagaaagaaaagacaug

SEQ ID NO: 357691 - RNA, 22 nt, Human
agaggaggcucugggaucgucc

SEQ ID NO: 357692 - RNA, 22 nt, Human
cucagagaaaaggagcaagggu

SEQ ID NO: 357693 - RNA, 22 nt, Human
aagaauguuaguuucugauaca

SEQ ID NO: 357694 - RNA, 22 nt, Human
gccacacugcuucuuugagccu

SEQ ID NO: 357695 - RNA, 22 nt, Human
ggaggugggauuaggaccuaaa

SEQ ID NO: 357696 - RNA, 22 nt, Human
uaagccacuagucuguuaugaa

SEQ ID NO: 357697 - RNA, 19 nt, Human
gcgaggaagucacuguggc

SEQ ID NO: 357698 - RNA, 22 nt, Human
acacagggcugcgccugacccc

SEQ ID NO: 357699 - RNA, 22 nt, Human
uccaugagagguaacuuuacaa

SEQ ID NO: 357700 - RNA, 21 nt, Human
agaaaaguagaguuuucagag

SEQ ID NO: 357701 - RNA, 22 nt, Human
aauuaguaaccuaauuccaucu

SEQ ID NO: 357702 - RNA, 22 nt, Human
caugggcucuucuggacugcac

SEQ ID NO: 357703 - RNA, 22 nt, Human
uacagauacagaucuagauaca

SEQ ID NO: 357704 - RNA, 22 nt, Human
caaugauggcuaggcagcugcu

SEQ ID NO: 357705 - RNA, 22 nt, Human
agggccugggucuguacuccuc

SEQ ID NO: 357706 - RNA, 22 nt, Human
aaaucaguucacguucugaggu

SEQ ID NO: 357707 - RNA, 22 nt, Human
uucagaauauuuguuuuacaug

SEQ ID NO: 357708 - RNA, 22 nt, Human
cugcagagaauuguggggcuuc

SEQ ID NO: 357709 - RNA, 22 nt, Human
uccucaggcugccuggaagacu

SEQ ID NO: 357710 - RNA, 22 nt, Human
ucuggcucggauuugucuagca

SEQ ID NO: 357711 - RNA, 22 nt, Human
uggcagcaguggagguagaaag

SEQ ID NO: 357712 - RNA, 22 nt, Human
ccauuuguucgcccagcuccaa

SEQ ID NO: 357713 - RNA, 22 nt, Human
uacaaagcuguauagccugguc

SEQ ID NO: 357714 - RNA, 22 nt, Human
gcuggcucuucaguggagauag

SEQ ID NO: 357715 - RNA, 22 nt, Human
cccagacucaucccugggagcu

SEQ ID NO: 357716 - RNA, 22 nt, Human
cuggccuuggugcuugcagaca

SEQ ID NO: 357717 - RNA, 22 nt, Human
cauaugaaauaugaguugaaca

SEQ ID NO: 357718 - RNA, 22 nt, Human
aguaccaugcuuccugacuggu

SEQ ID NO: 357719 - RNA, 22 nt, Human
uuuaaauuuagaagaaacacug

SEQ ID NO: 357720 - RNA, 22 nt, Human
gcugugugcucacguaguggaa

SEQ ID NO: 357721 - RNA, 22 nt, Human
agcauuuagucuuuauugcagc

SEQ ID NO: 357722 - RNA, 19 nt, Human
ugucucagugucccuuccu

SEQ ID NO: 357723 - RNA, 22 nt, Human
cuggagagauccuccugaaaaa

SEQ ID NO: 357724 - RNA, 22 nt, Human
cugcuggccuagcccauccucu

SEQ ID NO: 357725 - RNA, 22 nt, Human
gugaauaauuuuuuaguauaag

SEQ ID NO: 357726 - RNA, 20 nt, Human
gcccaagguccagaaggggg

SEQ ID NO: 357727 - RNA, 22 nt, Human
agcagcauucucugguaugggg

SEQ ID NO: 357728 - RNA, 22 nt, Human
gcugggcaccggagagacccca

SEQ ID NO: 357729 - RNA, 22 nt, Human
cucuggagguugagcccagcaa

SEQ ID NO: 357730 - RNA, 22 nt, Human
caccugggcuaaacuaugcagg

SEQ ID NO: 357731 - RNA, 22 nt, Human
uacauauuugucuuuguacugu

SEQ ID NO: 357732 - RNA, 22 nt, Human
agccacagagcaggagaccuuu

SEQ ID NO: 357733 - RNA, 22 nt, Human
ugcaggugaaaauuaugaggau

SEQ ID NO: 357734 - RNA, 22 nt, Human
cugagucucccggcaguggagg

SEQ ID NO: 357735 - RNA, 22 nt, Human
agaagugcuccagugaguuggg

SEQ ID NO: 357736 - RNA, 22 nt, Human
gagagaagggggauaugagccu

SEQ ID NO: 357737 - RNA, 22 nt, Human
ugucacauaggcaaaauguuuu

SEQ ID NO: 357738 - RNA, 18 nt, Human
aggagccuuugcacugga

SEQ ID NO: 357739 - RNA, 19 nt, Human
ggcucagggcgcugccgcc

SEQ ID NO: 357740 - RNA, 22 nt, Human
caaggccaguccauuuuggaag

SEQ ID NO: 357741 - RNA, 22 nt, Human
agagccaggcaggcaauguuga

SEQ ID NO: 357742 - RNA, 22 nt, Human
gcuauacacauuucuugguagu

SEQ ID NO: 357743 - RNA, 22 nt, Human
cagucuucuaaccuagcagccu

SEQ ID NO: 357744 - RNA, 22 nt, Human
caauaugcaagcuauuaaguau

SEQ ID NO: 357745 - RNA, 22 nt, Human
cauuuauucaugaucuguagcu

SEQ ID NO: 357746 - RNA, 22 nt, Human
auacaacuuuacaugcaauucc

SEQ ID NO: 357747 - RNA, 22 nt, Human
aaacuucagugaaugacuuaug

SEQ ID NO: 357748 - RNA, 23 nt, Human
cagaagcaccuguugacugcugc

SEQ ID NO: 357749 - RNA, 22 nt, Human
uuuaggcauugggugcucaagu

SEQ ID NO: 357750 - RNA, 22 nt, Human
gaggccagaaugagcugaaugc

SEQ ID NO: 357751 - RNA, 22 nt, Human
ugccuggaaggcccaugggaag

SEQ ID NO: 357752 - RNA, 22 nt, Human
uggcucugugucucccagcagc

SEQ ID NO: 357753 - RNA, 22 nt, Human
ucucucagggggaaggcugaag

SEQ ID NO: 357754 - RNA, 22 nt, Human
ucagcugccccaguggccccag

SEQ ID NO: 357755 - RNA, 22 nt, Human
ucccagagccaagcuauggaug

SEQ ID NO: 357756 - RNA, 22 nt, Human
uuauagugggcccaacauggcg

SEQ ID NO: 357757 - RNA, 22 nt, Human
agcaguggccuggggcucugug

SEQ ID NO: 357758 - RNA, 16 nt, Human
gagccaggugccuuga

SEQ ID NO: 357759 - RNA, 22 nt, Human
agcaggcuaagggaccuguuua

SEQ ID NO: 357760 - RNA, 22 nt, Human
uuacagauggaucuagcaaaau

SEQ ID NO: 357761 - RNA, 22 nt, Human
acagcuguggucuccuuagugu

SEQ ID NO: 357762 - RNA, 22 nt, Human
uuuauuagugcuuguaucacug

SEQ ID NO: 357763 - RNA, 22 nt, Human
cucaggauuaaggaaucuaaau

SEQ ID NO: 357764 - RNA, 22 nt, Human
aaguuuaagguggaaguggugg

SEQ ID NO: 357765 - RNA, 19 nt, Human
gagaggccugugcuugaag

SEQ ID NO: 357766 - RNA, 22 nt, Human
agcccucugcaaacaccugaua

SEQ ID NO: 357767 - RNA, 22 nt, Human
ugcuggagaucauuaauguuca

SEQ ID NO: 357768 - RNA, 22 nt, Human
ucaggcagcauuaaacuucagc

SEQ ID NO: 357769 - RNA, 22 nt, Human
agugggcaugaucuggugucug

SEQ ID NO: 357770 - RNA, 22 nt, Human
auuauauugaguauaaccagag

SEQ ID NO: 357771 - RNA, 22 nt, Human
ucugcugugggucuauauuuua

SEQ ID NO: 357772 - RNA, 22 nt, Human
cagcuugaaauauuaggagaug

SEQ ID NO: 357773 - RNA, 22 nt, Human
aaaguccuagcgauccacagaa

SEQ ID NO: 357774 - RNA, 22 nt, Human
cugggacuuuacccuguggccc

SEQ ID NO: 357775 - RNA, 22 nt, Human
aaaaucuaaguagcgaguaagg

SEQ ID NO: 357776 - RNA, 22 nt, Human
auauaaaguguuuagaaagcug

SEQ ID NO: 357777 - RNA, 22 nt, Human
ugaggcagaaauuccuguuuuc

SEQ ID NO: 357778 - RNA, 22 nt, Human
ccagggcagccaacccagaugc

SEQ ID NO: 357779 - RNA, 22 nt, Human
gaaaagagaacaucugaggauc

SEQ ID NO: 357780 - RNA, 22 nt, Human
auuguucaaagugcuuugcaug

SEQ ID NO: 357781 - RNA, 22 nt, Human
uagacacaagagaaggguauaa

SEQ ID NO: 357782 - RNA, 22 nt, Human
aggcugaggggcgagggacccu

SEQ ID NO: 357783 - RNA, 22 nt, Human
ccauaaggagccagacauucca

SEQ ID NO: 357784 - RNA, 22 nt, Human
ggcuucugagugcucugcuguu

SEQ ID NO: 357785 - RNA, 22 nt, Human
acaggacaggcugggcuagacu

SEQ ID NO: 357786 - RNA, 22 nt, Human
uuuccuaguucuaagaaaugua

SEQ ID NO: 357787 - RNA, 22 nt, Human
ccaggaggcagagguuacagug

SEQ ID NO: 357788 - RNA, 22 nt, Human
ggcuggagugggcuccagaguu

SEQ ID NO: 357789 - RNA, 22 nt, Human
cuggccacuggagguggcaccc

SEQ ID NO: 357790 - RNA, 22 nt, Human
ucaguucugcuagaaaaacagu

SEQ ID NO: 357791 - RNA, 20 nt, Human
ucauugcacauaauggaagc

SEQ ID NO: 357792 - RNA, 21 nt, Human
accagcaggagaucagaagga

SEQ ID NO: 357793 - RNA, 22 nt, Human
gcaggcaguuauuuaguagaau

SEQ ID NO: 357794 - RNA, 22 nt, Human
ugggcagagaguagaggcaacg

SEQ ID NO: 357795 - RNA, 22 nt, Human
ggcagcugaccuagcaccaucc

SEQ ID NO: 357796 - RNA, 22 nt, Human
ugggccuguggcuuggcucuag

SEQ ID NO: 357797 - RNA, 22 nt, Human
uuuuucaugagacuagaaguca

SEQ ID NO: 357798 - RNA, 22 nt, Human
cauuucaauacaguuuguaaau

SEQ ID NO: 357799 - RNA, 22 nt, Human
gcuggccauagaagccaaagag

SEQ ID NO: 357800 - RNA, 22 nt, Human
ucccugggcuucuccagacuug

SEQ ID NO: 357801 - RNA, 22 nt, Human
gaggccuguagucauggaugua

SEQ ID NO: 357802 - RNA, 22 nt, Human
gcagggccagggcucaggcugu

SEQ ID NO: 357803 - RNA, 22 nt, Human
uucuucuccuaaggagaguccu

SEQ ID NO: 357804 - RNA, 22 nt, Human
uagaaacagauguuuuugaaga

SEQ ID NO: 357805 - RNA, 22 nt, Human
ccugggagagccaucuguggcc

SEQ ID NO: 357806 - RNA, 22 nt, Human
cucacugacgaggaagcugaga

SEQ ID NO: 357807 - RNA, 22 nt, Human
auguaaggcugccuaugacacu

SEQ ID NO: 357808 - RNA, 22 nt, Human
uaacacugauuuguucucaggg

SEQ ID NO: 357809 - RNA, 22 nt, Human
uuccaugaaggagacugagaag

SEQ ID NO: 357810 - RNA, 22 nt, Human
caggguacagaguuuucuaaac

SEQ ID NO: 357811 - RNA, 22 nt, Human
uggcugaggcuuuucuuaaaga

SEQ ID NO: 357812 - RNA, 22 nt, Human
ccuccugggcuccugucugcac

SEQ ID NO: 357813 - RNA, 22 nt, Human
ggcugccucuggaagcuggaga

SEQ ID NO: 357814 - RNA, 22 nt, Human
gcaagcugcuuaagcucauugu

SEQ ID NO: 357815 - RNA, 22 nt, Human
ccagcucuuuuggcugagugag

SEQ ID NO: 357816 - RNA, 22 nt, Human
ccagcacugcucucagacugag

SEQ ID NO: 357817 - RNA, 22 nt, Human
ccaggcuggauuuugcaguuca

SEQ ID NO: 357818 - RNA, 22 nt, Human
gacccugccaugagugacaggg

SEQ ID NO: 357819 - RNA, 19 nt, Human
aggcagcacccaguccuug

SEQ ID NO: 357820 - RNA, 22 nt, Human
uccuggcccuguggccugcagu

SEQ ID NO: 357821 - RNA, 20 nt, Human
ggcagcuugggcagcaguua

SEQ ID NO: 357822 - RNA, 22 nt, Human
ugucuagggagcugcucaggcu

SEQ ID NO: 357823 - RNA, 22 nt, Human
uuucccaaguguaaacauggca

SEQ ID NO: 357824 - RNA, 22 nt, Human
aaaagucugcucucauuucaga

SEQ ID NO: 357825 - RNA, 22 nt, Human
gacacagagauaggccuguguu

SEQ ID NO: 357826 - RNA, 22 nt, Human
gcagcugcuguggcaucaagcu

SEQ ID NO: 357827 - RNA, 22 nt, Human
aagcccaguuucacacugagac

SEQ ID NO: 357828 - RNA, 22 nt, Human
gcugcucugugacagccuccgg

SEQ ID NO: 357829 - RNA, 22 nt, Human
aaguuauuuccucgugacugaa

SEQ ID NO: 357830 - RNA, 22 nt, Human
cuggagccccaggcugugcaga

SEQ ID NO: 357831 - RNA, 22 nt, Human
cagcugccuaugaccuagccuc

SEQ ID NO: 357832 - RNA, 22 nt, Human
gugcugagcugcagaugcgcuc

SEQ ID NO: 357833 - RNA, 18 nt, Human
cuuucagauggauaugcu

SEQ ID NO: 357834 - RNA, 22 nt, Human
ucugcugcugagcacacuccua

SEQ ID NO: 357835 - RNA, 22 nt, Human
agccaggacguugcucagcucc

SEQ ID NO: 357836 - RNA, 22 nt, Human
gcugagcuagaaaaggaccaca

SEQ ID NO: 357837 - RNA, 22 nt, Human
uuuuccucugcagagcaguuag

SEQ ID NO: 357838 - RNA, 22 nt, Human
auguccagagccggccugcuga

SEQ ID NO: 357839 - RNA, 22 nt, Human
ucugaggcccugcaggcagugu

SEQ ID NO: 357840 - RNA, 22 nt, Human
cuugugcauuucauuccucagg

SEQ ID NO: 357841 - RNA, 22 nt, Human
ccuggagcacauggcaggaggc

SEQ ID NO: 357842 - RNA, 20 nt, Human
ccugaggguuuguguucuuu

SEQ ID NO: 357843 - RNA, 22 nt, Human
acccagccuacaaagcucaccu

SEQ ID NO: 357844 - RNA, 22 nt, Human
accaggcaugauguggagcaca

SEQ ID NO: 357845 - RNA, 22 nt, Human
uccugaaaaauuacauguucag

SEQ ID NO: 357846 - RNA, 22 nt, Human
ggucccaggcugcgggcuggug

SEQ ID NO: 357847 - RNA, 20 nt, Human
cuguggcucaugcaucugcc

SEQ ID NO: 357848 - RNA, 17 nt, Human
gcugccaccuuuggagc

SEQ ID NO: 357849 - RNA, 22 nt, Human
cugagccuuauucaccagcccu

SEQ ID NO: 357850 - RNA, 20 nt, Human
acagaauaugcugguugugg

SEQ ID NO: 357851 - RNA, 22 nt, Human
ucucagagaaaugugucaccau

SEQ ID NO: 357852 - RNA, 22 nt, Human
agucuucacucuucacuacuau

SEQ ID NO: 357853 - RNA, 22 nt, Human
guuucuuagguaaauucuuuga

SEQ ID NO: 357854 - RNA, 22 nt, Human
uugcagggcaggaccauggaca

SEQ ID NO: 357855 - RNA, 22 nt, Human
uuuguacauauauaaaaucugu

SEQ ID NO: 357856 - RNA, 18 nt, Human
accugccuguucuucucu

SEQ ID NO: 357857 - RNA, 22 nt, Human
gugcauuuggugacucucaccc

SEQ ID NO: 357858 - RNA, 22 nt, Human
ucaguuaagaggccacggcagu

SEQ ID NO: 357859 - RNA, 22 nt, Human
cuugaaagcacuccuuugacug

SEQ ID NO: 357860 - RNA, 22 nt, Human
uacaaaugaaccaacuuugaug

SEQ ID NO: 357861 - RNA, 17 nt, Human
gguggccugcaguggcu

SEQ ID NO: 357862 - RNA, 22 nt, Human
ugggcuccagcaccugugcucu

SEQ ID NO: 357863 - RNA, 22 nt, Human
auguccaggaucuauccccaga

SEQ ID NO: 357864 - RNA, 22 nt, Human
ggaagggcaauaaaaucucagg

SEQ ID NO: 357865 - RNA, 22 nt, Human
agggccugggguagcuuacugc

SEQ ID NO: 357866 - RNA, 22 nt, Human
ggagugaaucacuagaugcaga

SEQ ID NO: 357867 - RNA, 22 nt, Human
cagugcagccaaggacaggcac

SEQ ID NO: 357868 - RNA, 22 nt, Human
gccaggagccagcuucuuagca

SEQ ID NO: 357869 - RNA, 22 nt, Human
ugucucugugacuccuuccgcc

SEQ ID NO: 357870 - RNA, 22 nt, Human
cugugcugauucagcacaggcc

SEQ ID NO: 357871 - RNA, 22 nt, Human
ugucucagauacgccaucaagg

SEQ ID NO: 357872 - RNA, 22 nt, Human
agaguguuucagucuuccuaga

SEQ ID NO: 357873 - RNA, 22 nt, Human
acagucuacuugagcuuguaua

SEQ ID NO: 357874 - RNA, 22 nt, Human
ucugcgcugccuugauccuugg

SEQ ID NO: 357875 - RNA, 22 nt, Human
gagggcagaaaauuaugcggug

SEQ ID NO: 357876 - RNA, 22 nt, Human
cagcagagcugggcuuugaauu

SEQ ID NO: 357877 - RNA, 22 nt, Human
agguggccggugccagccgggc

SEQ ID NO: 357878 - RNA, 22 nt, Human
ugaaugaugcaguauaaugaua

SEQ ID NO: 357879 - RNA, 22 nt, Human
uuuuccucugcaauaaaagcag

SEQ ID NO: 357880 - RNA, 22 nt, Human
cagggcuguggaaaacuggugc

SEQ ID NO: 357881 - RNA, 22 nt, Human
cauuuguaggaugcuucuuguu

SEQ ID NO: 357882 - RNA, 22 nt, Human
uugugucugggggagugacauc

SEQ ID NO: 357883 - RNA, 22 nt, Human
cuggccuagcucucugcuugaa

SEQ ID NO: 357884 - RNA, 22 nt, Human
uuggaugaagucuagcuuuagu

SEQ ID NO: 357885 - RNA, 22 nt, Human
agccucuguagaaagcagugug

SEQ ID NO: 357886 - RNA, 22 nt, Human
uagcccagaagagggaagcaac

SEQ ID NO: 357887 - RNA, 22 nt, Human
aucaggaaugaauacuuuugga

SEQ ID NO: 357888 - RNA, 22 nt, Human
acaggggaauuuacugucauua

SEQ ID NO: 357889 - RNA, 19 nt, Human
agcagagcccugaagaucc

SEQ ID NO: 357890 - RNA, 22 nt, Human
uucuagaugauaaaccagcagc

SEQ ID NO: 357891 - RNA, 22 nt, Human
uguuccauaaguggugcuuugu

SEQ ID NO: 357892 - RNA, 22 nt, Human
agaggggaggcgaaccagaguc

SEQ ID NO: 357893 - RNA, 22 nt, Human
acuuaaaaccagacagcgucau

SEQ ID NO: 357894 - RNA, 22 nt, Human
ugggcugcacccucagccucug

SEQ ID NO: 357895 - RNA, 22 nt, Human
cccucugccucugaguaggaca

SEQ ID NO: 357896 - RNA, 22 nt, Human
cauuuauucucagauccuuguc

SEQ ID NO: 357897 - RNA, 22 nt, Human
acuccugggugcugaccagcgu

SEQ ID NO: 357898 - RNA, 22 nt, Human
caggagugagaugcgaucacuu

SEQ ID NO: 357899 - RNA, 22 nt, Human
cauuagaagaacaguuauauua

SEQ ID NO: 357900 - RNA, 22 nt, Human
gcagaggcuguagggaagguug

SEQ ID NO: 357901 - RNA, 22 nt, Human
aaauuccagaaacucaguauau

SEQ ID NO: 357902 - RNA, 22 nt, Human
aucaggauguuuggcugucaua

SEQ ID NO: 357903 - RNA, 22 nt, Human
ccugcagagccacgugccagcg

SEQ ID NO: 357904 - RNA, 22 nt, Human
uuuauuauguacaggcacuaua

SEQ ID NO: 357905 - RNA, 22 nt, Human
auaaggcaagcugucaguuugu

SEQ ID NO: 357906 - RNA, 22 nt, Human
aguuaaagucugaaauagagaa

SEQ ID NO: 357907 - RNA, 19 nt, Human
acagggcagcaauaggaua

SEQ ID NO: 357908 - RNA, 21 nt, Human
uccaggagcacgggacuagga

SEQ ID NO: 357909 - RNA, 22 nt, Human
gaaaugcaggcuuggauucagc

SEQ ID NO: 357910 - RNA, 22 nt, Human
gccugaaguuucaugccucuau

SEQ ID NO: 357911 - RNA, 22 nt, Human
gcagaagcccggucagcgcacg

SEQ ID NO: 357912 - RNA, 22 nt, Human
ugaaggcuguuggauggggaag

SEQ ID NO: 357913 - RNA, 22 nt, Human
cuuguggcccauggcuuccugc

SEQ ID NO: 357914 - RNA, 20 nt, Human
ggggcccaagcccucuugcc

SEQ ID NO: 357915 - RNA, 22 nt, Human
ucugggaaccagugcggcuggg

SEQ ID NO: 357916 - RNA, 22 nt, Human
agcagcuuacauguggccuauc

SEQ ID NO: 357917 - RNA, 20 nt, Human
cucaguguggccugaguguu

SEQ ID NO: 357918 - RNA, 22 nt, Human
ucuuuaaucauaaccaagaugg

SEQ ID NO: 357919 - RNA, 22 nt, Human
cuacauuucccagcugccuucc

SEQ ID NO: 357920 - RNA, 22 nt, Human
acaaaauuaugaagaggccuug

SEQ ID NO: 357921 - RNA, 21 nt, Human
acuguucauuugaugaacugg

SEQ ID NO: 357922 - RNA, 23 nt, Human
aggcagcuggguagcaucuuucu

SEQ ID NO: 357923 - RNA, 22 nt, Human
ugcuauacauguacauauuagu

SEQ ID NO: 357924 - RNA, 22 nt, Human
cacuggggaaaacaggcuucuu

SEQ ID NO: 357925 - RNA, 22 nt, Human
aaagcagaggugauaugacuua

SEQ ID NO: 357926 - RNA, 22 nt, Human
cugccugcaugcugccauagcu

SEQ ID NO: 357927 - RNA, 22 nt, Human
aaggccauuauucugauauauu

SEQ ID NO: 357928 - RNA, 22 nt, Human
ugccagggugucaggagagcua

SEQ ID NO: 357929 - RNA, 22 nt, Human
aagaaugagcucaaagaucuua

SEQ ID NO: 357930 - RNA, 23 nt, Human
uauuagggccaggacuggcaaau

SEQ ID NO: 357931 - RNA, 17 nt, Human
auccccagcaucuagaa

SEQ ID NO: 357932 - RNA, 22 nt, Human
cagcaggcagccauuucacugu

SEQ ID NO: 357933 - RNA, 22 nt, Human
cccuggaggagcuuagagcuug

SEQ ID NO: 357934 - RNA, 23 nt, Human
cugucuccugggcuagguggaau

SEQ ID NO: 357935 - RNA, 22 nt, Human
auuauguagcuaaaaauugugu

SEQ ID NO: 357936 - RNA, 22 nt, Human
caggcagcuagauuuauaacaa

SEQ ID NO: 357937 - RNA, 22 nt, Human
uucucagaugauucagauaaac

SEQ ID NO: 357938 - RNA, 22 nt, Human
cuguuuauuacacuggauagca

SEQ ID NO: 357939 - RNA, 20 nt, Human
aguggggagucaggagugcc

SEQ ID NO: 357940 - RNA, 22 nt, Human
ccaggguggcguagaugcuggg

SEQ ID NO: 357941 - RNA, 22 nt, Human
ucaaggaggugcuuggcuucac

SEQ ID NO: 357942 - RNA, 21 nt, Human
ccuccaggagcagagcccuga

SEQ ID NO: 357943 - RNA, 22 nt, Human
augcaguacagauaauucuaca

SEQ ID NO: 357944 - RNA, 22 nt, Human
aggucacacuuggaucauagaa

SEQ ID NO: 357945 - RNA, 22 nt, Human
auaguggugagcugcauuuaug

SEQ ID NO: 357946 - RNA, 22 nt, Human
ccaggagcauuaagagaacaua

SEQ ID NO: 357947 - RNA, 20 nt, Human
gaggaaaagcugccaggccu

SEQ ID NO: 357948 - RNA, 22 nt, Human
ccaugagacagcaacugaaagu

SEQ ID NO: 357949 - RNA, 22 nt, Human
gcuuggccagcagccgggaugc

SEQ ID NO: 357950 - RNA, 22 nt, Human
uuguuuucacagcuuugcccgg

SEQ ID NO: 357951 - RNA, 22 nt, Human
acaggccacaguggagucucug

SEQ ID NO: 357952 - RNA, 22 nt, Human
cauuuacagugagaguuuuuac

SEQ ID NO: 357953 - RNA, 22 nt, Human
ugugcuucaucacuucucaguu

SEQ ID NO: 357954 - RNA, 22 nt, Human
ucuuugaacuuggcugaucucu

SEQ ID NO: 357955 - RNA, 22 nt, Human
caggggcagucugugugcgugg

SEQ ID NO: 357956 - RNA, 22 nt, Human
auacagaacaagccucaccucc

SEQ ID NO: 357957 - RNA, 22 nt, Human
gcagugguccaguucacaccca

SEQ ID NO: 357958 - RNA, 22 nt, Human
cccagccucuguuugcuccucu

SEQ ID NO: 357959 - RNA, 22 nt, Human
gucaggauuauuuuauuaaaag

SEQ ID NO: 357960 - RNA, 21 nt, Human
uucaagauauuuaaaaggugg

SEQ ID NO: 357961 - RNA, 22 nt, Human
gaggagcuggcagcgucuccgc

SEQ ID NO: 357962 - RNA, 22 nt, Human
cccaggagguguagcugcgugg

SEQ ID NO: 357963 - RNA, 22 nt, Human
uuagaaaugauuucaccucuuu

SEQ ID NO: 357964 - RNA, 22 nt, Human
ucaaaguagggguaagccaggc

SEQ ID NO: 357965 - RNA, 22 nt, Human
aaaggccaagcaugagguggac

SEQ ID NO: 357966 - RNA, 22 nt, Human
uguacaaucuuggucccuuuau

SEQ ID NO: 357967 - RNA, 22 nt, Human
cccugcagagggaugggggcag

SEQ ID NO: 357968 - RNA, 22 nt, Human
agcagcugcagggagggucugc

SEQ ID NO: 357969 - RNA, 23 nt, Human
auaaggcauaaagguacauugga

SEQ ID NO: 357970 - RNA, 22 nt, Human
gaccucagugaauggucaugua

SEQ ID NO: 357971 - RNA, 22 nt, Human
uugaacaguccuaagagacccu

SEQ ID NO: 357972 - RNA, 22 nt, Human
agaugggcgcccuggacugagg

SEQ ID NO: 357973 - RNA, 22 nt, Human
gcagcagaugcuuucauggaca

SEQ ID NO: 357974 - RNA, 22 nt, Human
uccagaccauggauggcugcaa

SEQ ID NO: 357975 - RNA, 22 nt, Human
ucagauggguuuugaaggaugu

SEQ ID NO: 357976 - RNA, 22 nt, Human
ucugagagguuaagcaauuuga

SEQ ID NO: 357977 - RNA, 22 nt, Human
guuauguaugggggccuuauga

SEQ ID NO: 357978 - RNA, 17 nt, Human
ccagagaguaguuagga

SEQ ID NO: 357979 - RNA, 17 nt, Human
accaggcaacacgccca

SEQ ID NO: 357980 - RNA, 21 nt, Human
acaggagaccgccuggcaguc

SEQ ID NO: 357981 - RNA, 22 nt, Human
auaaaacuuggguaugaucccu

SEQ ID NO: 357982 - RNA, 22 nt, Human
cuccucacuuuccagacugggc

SEQ ID NO: 357983 - RNA, 22 nt, Human
caguaucugucaguaaucaggu

SEQ ID NO: 357984 - RNA, 22 nt, Human
aggcucagacaggaaaaguaac

SEQ ID NO: 357985 - RNA, 22 nt, Human
cccccaggcucugacacaggag

SEQ ID NO: 357986 - RNA, 22 nt, Human
aaguguagauuauggagugucu

SEQ ID NO: 357987 - RNA, 22 nt, Human
aggcagcuuaagcccuggccca

SEQ ID NO: 357988 - RNA, 22 nt, Human
uauaucaccaaaaacaguucug

SEQ ID NO: 357989 - RNA, 22 nt, Human
gggaagccaugcucagagguac

SEQ ID NO: 357990 - RNA, 22 nt, Human
gaguccagacaccauaccugau

SEQ ID NO: 357991 - RNA, 22 nt, Human
uggaggaaaaaaccaggcagag

SEQ ID NO: 357992 - RNA, 21 nt, Human
gcugccaccgcgugcuccagg

SEQ ID NO: 357993 - RNA, 22 nt, Human
aucagcugaaaaacaggcagca

SEQ ID NO: 357994 - RNA, 22 nt, Human
auguacacaugcaugcaugugc

SEQ ID NO: 357995 - RNA, 22 nt, Human
cagcugacccgugggaggcggg

SEQ ID NO: 357996 - RNA, 19 nt, Human
ugaggggcucacagucuca

SEQ ID NO: 357997 - RNA, 22 nt, Human
ccacagggacuguuaaaacccu

SEQ ID NO: 357998 - RNA, 22 nt, Human
acacaguauuacaauaggugcu

SEQ ID NO: 357999 - RNA, 22 nt, Human
gagaaccucuccacaagucugg

SEQ ID NO: 358000 - RNA, 22 nt, Human
uccuucagccaugggcucucca

SEQ ID NO: 358001 - RNA, 22 nt, Human
caugcuuugggucagaaaugcc

SEQ ID NO: 358002 - RNA, 22 nt, Human
aagccagcauuuucccauuccu

SEQ ID NO: 358003 - RNA, 22 nt, Human
ccuggccugcucggcucuuaag

SEQ ID NO: 358004 - RNA, 22 nt, Human
uggcuggcaguaggcuaguggc

SEQ ID NO: 358005 - RNA, 19 nt, Human
ccagagcccgccagauggg

SEQ ID NO: 358006 - RNA, 22 nt, Human
gguuugcaugugauguugggca

SEQ ID NO: 358007 - RNA, 19 nt, Human
agcagagcagggccguggg

SEQ ID NO: 358008 - RNA, 22 nt, Human
aaggcaggaugcggacccaucu

SEQ ID NO: 358009 - RNA, 22 nt, Human
cagagcugggaucccaugggcg

SEQ ID NO: 358010 - RNA, 22 nt, Human
gccugggugaauuugauccuaa

SEQ ID NO: 358011 - RNA, 22 nt, Human
cccaggcagagagcuggugagc

SEQ ID NO: 358012 - RNA, 22 nt, Human
aggcucagccccugggaggaga

SEQ ID NO: 358013 - RNA, 22 nt, Human
caggaaccuaaagagacauuac

SEQ ID NO: 358014 - RNA, 22 nt, Human
agggccagcugcagaauuagca

SEQ ID NO: 358015 - RNA, 22 nt, Human
ccuggagcaggagcugcagagg

SEQ ID NO: 358016 - RNA, 22 nt, Human
ucagaggucacacagcaaguuu

SEQ ID NO: 358017 - RNA, 22 nt, Human
gcucuugucaaaaauuaguuga

SEQ ID NO: 358018 - RNA, 22 nt, Human
acuuccugggcaugcagagucc

SEQ ID NO: 358019 - RNA, 22 nt, Human
uguuuauaccuugguauaacca

SEQ ID NO: 358020 - RNA, 22 nt, Human
auuuccuagccucucuugcagu

SEQ ID NO: 358021 - RNA, 22 nt, Human
ccugccugaaggucagccaccc

SEQ ID NO: 358022 - RNA, 22 nt, Human
ugggccugccccaggcuucagc

SEQ ID NO: 358023 - RNA, 19 nt, Human
uuccaaaaucaggauuuga

SEQ ID NO: 358024 - RNA, 22 nt, Human
gcuuggcauugaccauuaucau

SEQ ID NO: 358025 - RNA, 22 nt, Human
ggcucaggacacagugguuuag

SEQ ID NO: 358026 - RNA, 22 nt, Human
ggacuggccggcgcugaggccc

SEQ ID NO: 358027 - RNA, 22 nt, Human
cuuugaaaacuuaaauaacagc

SEQ ID NO: 358028 - RNA, 22 nt, Human
aaagcaaugaugguagacacgu

SEQ ID NO: 358029 - RNA, 22 nt, Human
caagagcuagacuuugucagga

SEQ ID NO: 358030 - RNA, 22 nt, Human
ggggaccuaggcucugucucuu

SEQ ID NO: 358031 - RNA, 22 nt, Human
caguuuuucaaaauuacaugau

SEQ ID NO: 358032 - RNA, 22 nt, Human
cugggaguugacgaggcuugua

SEQ ID NO: 358033 - RNA, 22 nt, Human
uaccucaugcuguacagcacgu

SEQ ID NO: 358034 - RNA, 22 nt, Human
uccauuuucuaaguaucacuua

SEQ ID NO: 358035 - RNA, 22 nt, Human
uuauuucauguaaaauuuaugu

SEQ ID NO: 358036 - RNA, 22 nt, Human
uuccagugaugggcaauuuggu

SEQ ID NO: 358037 - RNA, 22 nt, Human
uaaaugugucuauggacccgcc

SEQ ID NO: 358038 - RNA, 20 nt, Human
aaggcacuaugucugcuagc

SEQ ID NO: 358039 - RNA, 20 nt, Human
cuaucuccuggcgugccuuc

SEQ ID NO: 358040 - RNA, 22 nt, Human
ccuggugccacuagagaauguc

SEQ ID NO: 358041 - RNA, 23 nt, Human
acaugggagggacauggaggcug

SEQ ID NO: 358042 - RNA, 17 nt, Human
uugggagagaaagguau

SEQ ID NO: 358043 - RNA, 22 nt, Human
gaggaggcacuaguuagugaca

SEQ ID NO: 358044 - RNA, 22 nt, Human
caggcagagucagauuagacuu

SEQ ID NO: 358045 - RNA, 22 nt, Human
gcaggagaaaugaagauugggu

SEQ ID NO: 358046 - RNA, 20 nt, Human
ucagugauuaucucugagug

SEQ ID NO: 358047 - RNA, 22 nt, Human
caccugagugucaguauucuca

SEQ ID NO: 358048 - RNA, 19 nt, Human
uaucuguuuccugcuuguc

SEQ ID NO: 358049 - RNA, 22 nt, Human
gcaggagcugcucuccugacga

SEQ ID NO: 358050 - RNA, 22 nt, Human
augaggcuaugaauggggagau

SEQ ID NO: 358051 - RNA, 22 nt, Human
gcuggcugaggucuagcucuuu

SEQ ID NO: 358052 - RNA, 20 nt, Human
uagauuucauacuucucuuu

SEQ ID NO: 358053 - RNA, 22 nt, Human
ugccucugguuaucugguaccu

SEQ ID NO: 358054 - RNA, 19 nt, Human
cuucuucuuggcagccaag

SEQ ID NO: 358055 - RNA, 22 nt, Human
caggagaggcuguacguuucuc

SEQ ID NO: 358056 - RNA, 22 nt, Human
uuuaaaauuuagaccucuccac

SEQ ID NO: 358057 - RNA, 22 nt, Human
aaagaacaaaugauauaugguu

SEQ ID NO: 358058 - RNA, 22 nt, Human
ugcagggccuucuagaccaugg

SEQ ID NO: 358059 - RNA, 22 nt, Human
gcucugcugaagccccuugcau

SEQ ID NO: 358060 - RNA, 22 nt, Human
uucuuaacuggaaaaugucaga

SEQ ID NO: 358061 - RNA, 22 nt, Human
ugcuggcucaguuugcagacuc

SEQ ID NO: 358062 - RNA, 18 nt, Human
uccuccuuuggccuuuuc

SEQ ID NO: 358063 - RNA, 22 nt, Human
cugaagaugucugagaugcuca

SEQ ID NO: 358064 - RNA, 22 nt, Human
cacugaaggcugcagcucagcc

SEQ ID NO: 358065 - RNA, 22 nt, Human
agcucccaggcagucaugagga

SEQ ID NO: 358066 - RNA, 22 nt, Human
acaagaauuuacauguagugga

SEQ ID NO: 358067 - RNA, 22 nt, Human
aggagccaggaaaccugcucug

SEQ ID NO: 358068 - RNA, 22 nt, Human
gcugaaggaggcucugguacua

SEQ ID NO: 358069 - RNA, 22 nt, Human
ucacugaauacuugucucaucc

SEQ ID NO: 358070 - RNA, 20 nt, Human
aguuuauuccaggagaacug

SEQ ID NO: 358071 - RNA, 22 nt, Human
agucuucccugugccagagugu

SEQ ID NO: 358072 - RNA, 22 nt, Human
acaguggaaagaacauggauuu

SEQ ID NO: 358073 - RNA, 22 nt, Human
uuuccucugggcccugccaccc

SEQ ID NO: 358074 - RNA, 22 nt, Human
ggaggaagcacacggcuuguau

SEQ ID NO: 358075 - RNA, 22 nt, Human
gcaagcugaugugauagugaaa

SEQ ID NO: 358076 - RNA, 22 nt, Human
gcugccagcucacucuccugag

SEQ ID NO: 358077 - RNA, 21 nt, Human
ugggaugggucugggaccagc

SEQ ID NO: 358078 - RNA, 20 nt, Human
gccugagcuauugccaggau

SEQ ID NO: 358079 - RNA, 20 nt, Human
auacacauauucuugcaacu

SEQ ID NO: 358080 - RNA, 17 nt, Human
ugauaguucauuuuaag

SEQ ID NO: 358081 - RNA, 22 nt, Human
cuggcucuucagugcuugguuc

SEQ ID NO: 358082 - RNA, 22 nt, Human
agggcuccaggggaccaucagu

SEQ ID NO: 358083 - RNA, 22 nt, Human
aaaucugggucaagguggagug

SEQ ID NO: 358084 - RNA, 22 nt, Human
accuuaaaacugacacauggag

SEQ ID NO: 358085 - RNA, 22 nt, Human
aggcugagguaggaggaucgcu

SEQ ID NO: 358086 - RNA, 22 nt, Human
gcaggugggggucggugcaucu

SEQ ID NO: 358087 - RNA, 22 nt, Human
cuguccucuguccucagcagga

SEQ ID NO: 358088 - RNA, 22 nt, Human
uuucagcugguaaaggaguagc

SEQ ID NO: 358089 - RNA, 22 nt, Human
uggcucugugcuucuaguaucu

SEQ ID NO: 358090 - RNA, 22 nt, Human
caguccuugcucaaagucuaca

SEQ ID NO: 358091 - RNA, 22 nt, Human
acagugucugacacauuguagc

SEQ ID NO: 358092 - RNA, 22 nt, Human
uccaggagguugagacugcagu

SEQ ID NO: 358093 - RNA, 21 nt, Human
agcuggcagauauggugucug

SEQ ID NO: 358094 - RNA, 22 nt, Human
auagauauuugaguuguuucca

SEQ ID NO: 358095 - RNA, 17 nt, Human
aggugcagaggcagagc

SEQ ID NO: 358096 - RNA, 22 nt, Human
acugcaucugaaacauggguca

SEQ ID NO: 358097 - RNA, 22 nt, Human
ucaguuuuaagguuugagaauu

SEQ ID NO: 358098 - RNA, 22 nt, Human
gagagugaaggcuucccagcaa

SEQ ID NO: 358099 - RNA, 22 nt, Human
ccugccagcauggcuuaucucc

SEQ ID NO: 358100 - RNA, 22 nt, Human
ugggaggcagguaggugaugau

SEQ ID NO: 358101 - RNA, 22 nt, Human
acagcagcauaaacugacuaag

SEQ ID NO: 358102 - RNA, 22 nt, Human
gcuggccaggugcuuugguucu

SEQ ID NO: 358103 - RNA, 20 nt, Human
gcagcuacucugucucgcuc

SEQ ID NO: 358104 - RNA, 21 nt, Human
auccuugaucagaagagugcu

SEQ ID NO: 358105 - RNA, 22 nt, Human
cagcuggccaaucagggcgccc

SEQ ID NO: 358106 - RNA, 22 nt, Human
ccucccacuucuugcugagguc

SEQ ID NO: 358107 - RNA, 22 nt, Human
uuucaguuuuugcucgauguau

SEQ ID NO: 358108 - RNA, 22 nt, Human
cauguugaauggccuugauuuu

SEQ ID NO: 358109 - RNA, 22 nt, Human
ccagaggagggcucugaugagg

SEQ ID NO: 358110 - RNA, 22 nt, Human
caggucccgccccgggcugacc

SEQ ID NO: 358111 - RNA, 19 nt, Human
ccuggcccugcugcgcggg

SEQ ID NO: 358112 - RNA, 22 nt, Human
gugggcaaggucccugccagcu

SEQ ID NO: 358113 - RNA, 22 nt, Human
uuuccucugucaugacagcuga

SEQ ID NO: 358114 - RNA, 22 nt, Human
gucaggcugccagucuuuauug

SEQ ID NO: 358115 - RNA, 22 nt, Human
ugaagcaguucucagaaguggg

SEQ ID NO: 358116 - RNA, 22 nt, Human
cccagcucucugcucuuagccu

SEQ ID NO: 358117 - RNA, 22 nt, Human
guccugggcccaggggcugccu

SEQ ID NO: 358118 - RNA, 22 nt, Human
gaguggggcguggauccagcgu

SEQ ID NO: 358119 - RNA, 22 nt, Human
ugagccugaguucaaggcugca

SEQ ID NO: 358120 - RNA, 17 nt, Human
uuaaaggaugcucucuc

SEQ ID NO: 358121 - RNA, 22 nt, Human
cccugcagacgucuugaugccu

SEQ ID NO: 358122 - RNA, 19 nt, Human
agcuguggggccuagcacc

SEQ ID NO: 358123 - RNA, 22 nt, Human
cauuucaaacaguuacagcugc

SEQ ID NO: 358124 - RNA, 22 nt, Human
ucuggaguccagauccauuugg

SEQ ID NO: 358125 - RNA, 22 nt, Human
ccaggccucaccugcccaccua

SEQ ID NO: 358126 - RNA, 22 nt, Human
gaaaucugcuucuugcauagua

SEQ ID NO: 358127 - RNA, 22 nt, Human
cuuuucaugagucuguuauggg

SEQ ID NO: 358128 - RNA, 22 nt, Human
acauuuuuuagagucccacauu

SEQ ID NO: 358129 - RNA, 22 nt, Human
aggugaaguugaggaggcagaa

SEQ ID NO: 358130 - RNA, 22 nt, Human
gcugaggccccagggugauggg

SEQ ID NO: 358131 - RNA, 22 nt, Human
gcuguucauagaaauggucuca

SEQ ID NO: 358132 - RNA, 22 nt, Human
aauaaauguuaagauugucuca

SEQ ID NO: 358133 - RNA, 22 nt, Human
uagucaccucuuuaaauguccu

SEQ ID NO: 358134 - RNA, 22 nt, Human
ccagggcucaggcucccagugg

SEQ ID NO: 358135 - RNA, 22 nt, Human
uggcagcagacaaaaggccauu

SEQ ID NO: 358136 - RNA, 22 nt, Human
gccugagacagugugguccaau

SEQ ID NO: 358137 - RNA, 22 nt, Human
aguccuuagaacacuguaucug

SEQ ID NO: 358138 - RNA, 22 nt, Human
uagugaaauuuaugcacagcua

SEQ ID NO: 358139 - RNA, 20 nt, Human
accagguggcugaugacacc

SEQ ID NO: 358140 - RNA, 22 nt, Human
guccucaguaagagggccucug

SEQ ID NO: 358141 - RNA, 22 nt, Human
ucagccagguaauguggagaug

SEQ ID NO: 358142 - RNA, 22 nt, Human
ggccuggccuccagaugugggc

SEQ ID NO: 358143 - RNA, 22 nt, Human
gagaggcugacuggcuguccug

SEQ ID NO: 358144 - RNA, 22 nt, Human
ggcagcacugcagcuuguuggg

SEQ ID NO: 358145 - RNA, 22 nt, Human
cccaagcagggugcagaggcau

SEQ ID NO: 358146 - RNA, 22 nt, Human
auuuaugacuggugaauagaac

SEQ ID NO: 358147 - RNA, 22 nt, Human
agaaauacuuuguaaaucucac

SEQ ID NO: 358148 - RNA, 22 nt, Human
aagcugccaccagcccagggca

SEQ ID NO: 358149 - RNA, 18 nt, Human
gagcagaggcucaacugg

SEQ ID NO: 358150 - RNA, 22 nt, Human
ugacauuucgguguaugugaug

SEQ ID NO: 358151 - RNA, 22 nt, Human
ggaagccagagugcugggcagg

SEQ ID NO: 358152 - RNA, 22 nt, Human
guucuaauauuuuaaaagccaa

SEQ ID NO: 358153 - RNA, 22 nt, Human
guguguuuagcauuagcagggg

SEQ ID NO: 358154 - RNA, 22 nt, Human
acuggcaguagagggagcgcau

SEQ ID NO: 358155 - RNA, 22 nt, Human
uuuuagauaguuuaacugcacu

SEQ ID NO: 358156 - RNA, 22 nt, Human
agcagggggaguuagacuagau

SEQ ID NO: 358157 - RNA, 22 nt, Human
gugcagcugcaggagucagguc

SEQ ID NO: 358158 - RNA, 22 nt, Human
cuccuguauguugggcuucaca

SEQ ID NO: 358159 - RNA, 19 nt, Human
gaaggcugaaaugaagcac

SEQ ID NO: 358160 - RNA, 22 nt, Human
uuuugucuaagaacuuugcaaa

SEQ ID NO: 358161 - RNA, 22 nt, Human
ucauugcagaaauaaaggugaa

SEQ ID NO: 358162 - RNA, 22 nt, Human
aaaagacaucuauuucaggcag

SEQ ID NO: 358163 - RNA, 22 nt, Human
ugguaauuaauuugauagguuc

SEQ ID NO: 358164 - RNA, 22 nt, Human
uaucuguugucuuuuacaugua

SEQ ID NO: 358165 - RNA, 22 nt, Human
uucauacuguguuuccaaguuu

SEQ ID NO: 358166 - RNA, 22 nt, Human
ucaugcuuauugcauauuugga

SEQ ID NO: 358167 - RNA, 23 nt, Human
cagaggguuccauggagcauggu

SEQ ID NO: 358168 - RNA, 22 nt, Human
ugagaagcagcuuacagguguc

SEQ ID NO: 358169 - RNA, 22 nt, Human
caaggagaaaacggcuucugaa

SEQ ID NO: 358170 - RNA, 22 nt, Human
ccaguacugucuccaauauucc

SEQ ID NO: 358171 - RNA, 22 nt, Human
uuagagaaauucugguaaugua

SEQ ID NO: 358172 - RNA, 22 nt, Human
gaggccacgguuuuccuugggg

SEQ ID NO: 358173 - RNA, 21 nt, Human
aggggacagaguagcuccagg

SEQ ID NO: 358174 - RNA, 23 nt, Human
ugucccagagggagggauaggcu

SEQ ID NO: 358175 - RNA, 22 nt, Human
aagacugucuuuucugagugac

SEQ ID NO: 358176 - RNA, 22 nt, Human
ucuccuuugaaaguuaggacug

SEQ ID NO: 358177 - RNA, 22 nt, Human
aguuaacaaguuggcaaucaac

SEQ ID NO: 358178 - RNA, 22 nt, Human
acaaaauuguguuaaacuuuau

SEQ ID NO: 358179 - RNA, 22 nt, Human
aggcagcagucaugaggaaaga

SEQ ID NO: 358180 - RNA, 22 nt, Human
uuucccaagaaaaauaauugga

SEQ ID NO: 358181 - RNA, 22 nt, Human
cgccugggaguccacaccugcu

SEQ ID NO: 358182 - RNA, 22 nt, Human
cucuggaguggguggccgggag

SEQ ID NO: 358183 - RNA, 22 nt, Human
uuuaaucaggcaaagcauaaua

SEQ ID NO: 358184 - RNA, 22 nt, Human
uggccucuggcugaggacuaac

SEQ ID NO: 358185 - RNA, 22 nt, Human
ugaaacuaggccaaucaaauua

SEQ ID NO: 358186 - RNA, 22 nt, Human
gcuguggcugaagaugcaggga

SEQ ID NO: 358187 - RNA, 22 nt, Human
caguggcacccacgggcugggc

SEQ ID NO: 358188 - RNA, 22 nt, Human
cauauaaauacaacauguguua

SEQ ID NO: 358189 - RNA, 22 nt, Human
cagaaguaagauuacugugaga

SEQ ID NO: 358190 - RNA, 22 nt, Human
acuuuaauuaaugaacuguggc

SEQ ID NO: 358191 - RNA, 22 nt, Human
ggagaugcuuuccaguggggau

SEQ ID NO: 358192 - RNA, 22 nt, Human
gggcugagcuguucugaguuua

SEQ ID NO: 358193 - RNA, 22 nt, Human
ucuccucugcgcggcagugccc

SEQ ID NO: 358194 - RNA, 22 nt, Human
ucugucacaauuugcuuacucu

SEQ ID NO: 358195 - RNA, 17 nt, Human
aggcauggucuggggug

SEQ ID NO: 358196 - RNA, 22 nt, Human
ugcucacagcccagaacauaau

SEQ ID NO: 358197 - RNA, 22 nt, Human
cuucuucaguugcauguauugg

SEQ ID NO: 358198 - RNA, 22 nt, Human
aucuggcuuggguguggguagc

SEQ ID NO: 358199 - RNA, 22 nt, Human
cagcugccacuugcucucggcu

SEQ ID NO: 358200 - RNA, 22 nt, Human
caggccugggcuucggggcuga

SEQ ID NO: 358201 - RNA, 22 nt, Human
uccuuggcaugccgucuucucc

SEQ ID NO: 358202 - RNA, 22 nt, Human
acauuucucauaggagagccac

SEQ ID NO: 358203 - RNA, 22 nt, Human
caucacagggggcuagaagucu

SEQ ID NO: 358204 - RNA, 22 nt, Human
ggcaggaggugaguggcgggug

SEQ ID NO: 358205 - RNA, 23 nt, Human
agcauggaauaggaaagaggcag

SEQ ID NO: 358206 - RNA, 22 nt, Human
aggcagauauuggggugaugug

SEQ ID NO: 358207 - RNA, 19 nt, Human
ggcugccuggagcgagggc

SEQ ID NO: 358208 - RNA, 22 nt, Human
gcacccagaauaaggacaggac

SEQ ID NO: 358209 - RNA, 22 nt, Human
cuggagcagcagguggccaggg

SEQ ID NO: 358210 - RNA, 23 nt, Human
cauaaaauauuaguaugguagca

SEQ ID NO: 358211 - RNA, 22 nt, Human
uugucccaggacuugcauagau

SEQ ID NO: 358212 - RNA, 22 nt, Human
augcuuuagugucaaguuuggg

SEQ ID NO: 358213 - RNA, 22 nt, Human
ggcuucucucuucacauggcuu

SEQ ID NO: 358214 - RNA, 22 nt, Human
cagaggcagugggguugcuccu

SEQ ID NO: 358215 - RNA, 22 nt, Human
aguucacauaucuguuuuauuu

SEQ ID NO: 358216 - RNA, 22 nt, Human
ugucucugauaaguaguucagu

SEQ ID NO: 358217 - RNA, 22 nt, Human
uggcaggaaaguaacagagcac

SEQ ID NO: 358218 - RNA, 22 nt, Human
cagcuuuaccaauauuuggaaa

SEQ ID NO: 358219 - RNA, 22 nt, Human
auguaagguucagaguauguga

SEQ ID NO: 358220 - RNA, 22 nt, Human
cacaggccugucucuuucuaac

SEQ ID NO: 358221 - RNA, 22 nt, Human
uaaugcaguacugauauaaaca

SEQ ID NO: 358222 - RNA, 22 nt, Human
uggcagggugggcuucagcccc

SEQ ID NO: 358223 - RNA, 18 nt, Human
caagaaucucuaaagaag

SEQ ID NO: 358224 - RNA, 18 nt, Human
gcacuucacccagcuagu

SEQ ID NO: 358225 - RNA, 22 nt, Human
aggaccugcuaaugugccaagu

SEQ ID NO: 358226 - RNA, 21 nt, Human
ucagaguguguuacagcaagc

SEQ ID NO: 358227 - RNA, 22 nt, Human
aggagccaugagugacaucaca

SEQ ID NO: 358228 - RNA, 22 nt, Human
cucucugggcccaguuggcacc

SEQ ID NO: 358229 - RNA, 22 nt, Human
gggaaggagccugcuugcuaga

SEQ ID NO: 358230 - RNA, 22 nt, Human
agcugcaggcccaugcucaguc

SEQ ID NO: 358231 - RNA, 20 nt, Human
cucuuaaauguaaaguaggc

SEQ ID NO: 358232 - RNA, 22 nt, Human
uuccuuagcugucccuggaaau

SEQ ID NO: 358233 - RNA, 22 nt, Human
auuuaaauuuucugauggagag

SEQ ID NO: 358234 - RNA, 22 nt, Human
aaugcugcaagaggugaaaaga

SEQ ID NO: 358235 - RNA, 22 nt, Human
ggcagccuccagggcacuggug

SEQ ID NO: 358236 - RNA, 22 nt, Human
aaaauuauagaucuagugccug

SEQ ID NO: 358237 - RNA, 22 nt, Human
ucagaggguggcugggagcauc

SEQ ID NO: 358238 - RNA, 22 nt, Human
accaggaggaaguguuaaugau

SEQ ID NO: 358239 - RNA, 22 nt, Human
acuguugucaggcugcuuugga

SEQ ID NO: 358240 - RNA, 22 nt, Human
caugaagcuugaagcaguccac

SEQ ID NO: 358241 - RNA, 19 nt, Human
caggccagugucagggggc

SEQ ID NO: 358242 - RNA, 22 nt, Human
ccugcuguaaugugucuuuauu

SEQ ID NO: 358243 - RNA, 22 nt, Human
uuagaaaugucacagaucugau

SEQ ID NO: 358244 - RNA, 22 nt, Human
aaacagcuggucucaaauguuc

SEQ ID NO: 358245 - RNA, 22 nt, Human
caguauguuugggagacaugac

SEQ ID NO: 358246 - RNA, 22 nt, Human
caguguggugagauuccaggug

SEQ ID NO: 358247 - RNA, 18 nt, Human
ugagaggcuauuuuuugc

SEQ ID NO: 358248 - RNA, 22 nt, Human
gccugguguccagaggcgagug

SEQ ID NO: 358249 - RNA, 22 nt, Human
auguuuccgugagcauccuuga

SEQ ID NO: 358250 - RNA, 22 nt, Human
gggcagcuggcuuauagguuug

SEQ ID NO: 358251 - RNA, 21 nt, Human
aggcucagcagguguauaaag

SEQ ID NO: 358252 - RNA, 22 nt, Human
uuuccaaaaguuuguucugugc

SEQ ID NO: 358253 - RNA, 22 nt, Human
uuuucucuacaaaauaaccagc

SEQ ID NO: 358254 - RNA, 22 nt, Human
ugaaugaauccuaacaaagaca

SEQ ID NO: 358255 - RNA, 22 nt, Human
agcagcugagaugguaagauuc

SEQ ID NO: 358256 - RNA, 23 nt, Human
ggcuggcccggggcugcuccuga

SEQ ID NO: 358257 - RNA, 22 nt, Human
aaguccuuaggaagcagucguu

SEQ ID NO: 358258 - RNA, 22 nt, Human
uaacagaaaggggacagaaaua

SEQ ID NO: 358259 - RNA, 22 nt, Human
cagagaaacucagauagcugau

SEQ ID NO: 358260 - RNA, 22 nt, Human
aguggcagagccaagauaugau

SEQ ID NO: 358261 - RNA, 21 nt, Human
aguucauacugaguaacaaaa

SEQ ID NO: 358262 - RNA, 23 nt, Human
augguuuaugucacacuuuugau

SEQ ID NO: 358263 - RNA, 22 nt, Human
gggcugagcacauacugacagc

SEQ ID NO: 358264 - RNA, 22 nt, Human
aagucaccccacacucuuggga

SEQ ID NO: 358265 - RNA, 22 nt, Human
caaguccucaaagggcucugcu

SEQ ID NO: 358266 - RNA, 22 nt, Human
acaucugaccauuacaagacau

SEQ ID NO: 358267 - RNA, 20 nt, Human
gagauuuccaaucaugccca

SEQ ID NO: 358268 - RNA, 22 nt, Human
gccugcagccucaagggcugag

SEQ ID NO: 358269 - RNA, 22 nt, Human
agggccugucagcgguguccug

SEQ ID NO: 358270 - RNA, 22 nt, Human
ggcacagagcccagcuuccuag

SEQ ID NO: 358271 - RNA, 22 nt, Human
aaacuucauggauaauauaaag

SEQ ID NO: 358272 - RNA, 22 nt, Human
uagggcucagcucuagcuccug

SEQ ID NO: 358273 - RNA, 20 nt, Human
ucuaauuaaaauugucuagu

SEQ ID NO: 358274 - RNA, 22 nt, Human
aucuacaggcugaggugggagg

SEQ ID NO: 358275 - RNA, 22 nt, Human
cuacuucugugaugaaacuaca

SEQ ID NO: 358276 - RNA, 22 nt, Human
aucaaguuuucuuaguugacug

SEQ ID NO: 358277 - RNA, 22 nt, Human
gcagaggcauuucugacgcugc

SEQ ID NO: 358278 - RNA, 22 nt, Human
agagcugagaauguggcuuccu

SEQ ID NO: 358279 - RNA, 22 nt, Human
uguacaaugccgagacuaacuc

SEQ ID NO: 358280 - RNA, 23 nt, Human
uucaaaacuggaaaaucagaugc

SEQ ID NO: 358281 - RNA, 20 nt, Human
auuccauaguuggcacuuuu

SEQ ID NO: 358282 - RNA, 22 nt, Human
aaugggauaggucuucaggaau

SEQ ID NO: 358283 - RNA, 19 nt, Human
ucgagucaagacacuaggc

SEQ ID NO: 358284 - RNA, 22 nt, Human
uauaauccugcuucacauugaa

SEQ ID NO: 358285 - RNA, 22 nt, Human
gcagcuuggauuucuguaguuu

SEQ ID NO: 358286 - RNA, 22 nt, Human
ccccaggagauuugggagcaca

SEQ ID NO: 358287 - RNA, 22 nt, Human
agggggcccuugcaggugagcg

SEQ ID NO: 358288 - RNA, 22 nt, Human
cacaggggcaaacuguagggga

SEQ ID NO: 358289 - RNA, 22 nt, Human
ggguccaggucuucaggcagag

SEQ ID NO: 358290 - RNA, 18 nt, Human
cgaggcaggcggaucacg

SEQ ID NO: 358291 - RNA, 23 nt, Human
acacauuuuucccguucugaggu

SEQ ID NO: 358292 - RNA, 22 nt, Human
ccacccuggacaggccucugag

SEQ ID NO: 358293 - RNA, 22 nt, Human
gcugccucccccauggcuggaa

SEQ ID NO: 358294 - RNA, 22 nt, Human
ggcgcucaguguugccccagag

SEQ ID NO: 358295 - RNA, 22 nt, Human
aaauggauggaauugacauuua

SEQ ID NO: 358296 - RNA, 22 nt, Human
cagcccaggccgacaguuccuc

SEQ ID NO: 358297 - RNA, 22 nt, Human
ccuggcugcuuucacuauggag

SEQ ID NO: 358298 - RNA, 22 nt, Human
acuuucuccagaaaaccaagga

SEQ ID NO: 358299 - RNA, 22 nt, Human
cuggacucugcagagaaaagua

SEQ ID NO: 358300 - RNA, 22 nt, Human
ccagggccaagagaccucgagg

SEQ ID NO: 358301 - RNA, 21 nt, Human
guggcucugccaggacugaaa

SEQ ID NO: 358302 - RNA, 22 nt, Human
cuggcugggagcgagcugcuca

SEQ ID NO: 358303 - RNA, 22 nt, Human
uggagaaggccggccaggagug

SEQ ID NO: 358304 - RNA, 22 nt, Human
uucaccacagucucaucuacgc

SEQ ID NO: 358305 - RNA, 22 nt, Human
uguuccuaaauaugaauggaga

SEQ ID NO: 358306 - RNA, 22 nt, Human
cccaggaggaggaaaaagcucg

SEQ ID NO: 358307 - RNA, 22 nt, Human
caggagauguaagacuucuguu

SEQ ID NO: 358308 - RNA, 22 nt, Human
uccugcagaccucagucagguc

SEQ ID NO: 358309 - RNA, 22 nt, Human
aacauguugcuuuaauaauauu

SEQ ID NO: 358310 - RNA, 22 nt, Human
ucucgacagccuggcacagugg

SEQ ID NO: 358311 - RNA, 20 nt, Human
ucaaaggcaaaggugggugu

SEQ ID NO: 358312 - RNA, 22 nt, Human
ggcccagccggcgagucucgcg

SEQ ID NO: 358313 - RNA, 22 nt, Human
gggaggaaagagaaguggucca

SEQ ID NO: 358314 - RNA, 19 nt, Human
cugccuguuauggagagaa

SEQ ID NO: 358315 - RNA, 20 nt, Human
ugggcagcacugcuggcugg

SEQ ID NO: 358316 - RNA, 22 nt, Human
uggcagagacaaggccgggccu

SEQ ID NO: 358317 - RNA, 22 nt, Human
cccagcaggucggugcugccug

SEQ ID NO: 358318 - RNA, 20 nt, Human
aguacaauguaugauucaga

SEQ ID NO: 358319 - RNA, 21 nt, Human
auggcuuuuuuaaagcuugug

SEQ ID NO: 358320 - RNA, 22 nt, Human
gaggucagucagaccaggguuu

SEQ ID NO: 358321 - RNA, 22 nt, Human
uuaagucacuuaucuaaagaca

SEQ ID NO: 358322 - RNA, 22 nt, Human
cugcugugccucuuuucacgug

SEQ ID NO: 358323 - RNA, 22 nt, Human
gggugggguucaggaaucuuca

SEQ ID NO: 358324 - RNA, 22 nt, Human
uggcugccuuucaccucaucuc

SEQ ID NO: 358325 - RNA, 22 nt, Human
gagggcauaguuaaauaggagg

SEQ ID NO: 358326 - RNA, 17 nt, Human
ucuguccagggagugug

SEQ ID NO: 358327 - RNA, 22 nt, Human
aaauagcagccuuuaguuaaca

SEQ ID NO: 358328 - RNA, 22 nt, Human
uuugcauuuugauaagaucacu

SEQ ID NO: 358329 - RNA, 22 nt, Human
uuuacagaugaggauacugagg

SEQ ID NO: 358330 - RNA, 22 nt, Human
aggcucagccugggccuagagc

SEQ ID NO: 358331 - RNA, 22 nt, Human
cagcuguguaugagagcaugcu

SEQ ID NO: 358332 - RNA, 22 nt, Human
gggcuccaccuagggacacugg

SEQ ID NO: 358333 - RNA, 22 nt, Human
acuauacauugaauguuaaggu

SEQ ID NO: 358334 - RNA, 22 nt, Human
gaaugugugacucuauugagca

SEQ ID NO: 358335 - RNA, 22 nt, Human
agccacgucccugucaggguca

SEQ ID NO: 358336 - RNA, 22 nt, Human
cacugcuuuaaggcugaguaac

SEQ ID NO: 358337 - RNA, 22 nt, Human
aaacaaacaauuaguugugugg

SEQ ID NO: 358338 - RNA, 22 nt, Human
ggucagguuuuuaggagugacc

SEQ ID NO: 358339 - RNA, 23 nt, Human
uuuuaauuuggacauaagaagau

SEQ ID NO: 358340 - RNA, 22 nt, Human
ucuucagauugcacugagcaag

SEQ ID NO: 358341 - RNA, 18 nt, Human
cucagagaugcccuuauu

SEQ ID NO: 358342 - RNA, 22 nt, Human
caggaugaagggcaaaggcaag

SEQ ID NO: 358343 - RNA, 22 nt, Human
aggagucauugagagggguccu

SEQ ID NO: 358344 - RNA, 22 nt, Human
uccuuguugcugcagucaccug

SEQ ID NO: 358345 - RNA, 22 nt, Human
cagcuccugcagcugcugccgu

SEQ ID NO: 358346 - RNA, 22 nt, Human
agggaggucuuugaggggcuua

SEQ ID NO: 358347 - RNA, 18 nt, Human
cagcugccagcucaugga

SEQ ID NO: 358348 - RNA, 22 nt, Human
ggacuucuaagugccagacacu

SEQ ID NO: 358349 - RNA, 22 nt, Human
gcagagaggaaugaagccaucc

SEQ ID NO: 358350 - RNA, 22 nt, Human
gccagggcucgcggucccucgu

SEQ ID NO: 358351 - RNA, 22 nt, Human
agcuggcagucauccuagugag

SEQ ID NO: 358352 - RNA, 22 nt, Human
uccagugguaguaaagaggucu

SEQ ID NO: 358353 - RNA, 22 nt, Human
ggcaguggugggaggcucgcuc

SEQ ID NO: 358354 - RNA, 22 nt, Human
aaguucaaggaagccuccaguu

SEQ ID NO: 358355 - RNA, 22 nt, Human
gugaauaaagggaguuuucaaa

SEQ ID NO: 358356 - RNA, 22 nt, Human
aguacaacauuagaguaucuua

SEQ ID NO: 358357 - RNA, 22 nt, Human
cagcaggcguugggagaaagac

SEQ ID NO: 358358 - RNA, 22 nt, Human
gaggagguuccggguggagaag

SEQ ID NO: 358359 - RNA, 22 nt, Human
auggaagguccuacagagcgca

SEQ ID NO: 358360 - RNA, 22 nt, Human
gccuggcccagggcucuuguug

SEQ ID NO: 358361 - RNA, 22 nt, Human
aauuuuaaucaguggugcugag

SEQ ID NO: 358362 - RNA, 22 nt, Human
ucaaggugcugugcugugcuag

SEQ ID NO: 358363 - RNA, 22 nt, Human
ugugaaagucaaauuaauugaa

SEQ ID NO: 358364 - RNA, 22 nt, Human
gcacccagccagcaucucagag

SEQ ID NO: 358365 - RNA, 22 nt, Human
ccaggcuggagugcaauggugc

SEQ ID NO: 358366 - RNA, 21 nt, Human
auugaaagucaacaaucaguu

SEQ ID NO: 358367 - RNA, 22 nt, Human
agcuuuaucagaggagucucua

SEQ ID NO: 358368 - RNA, 22 nt, Human
ugcaagaggaauucuagaagca

SEQ ID NO: 358369 - RNA, 22 nt, Human
aggcagaaaauagucauccaaa

SEQ ID NO: 358370 - RNA, 22 nt, Human
uguagcucuccagccagcaagg

SEQ ID NO: 358371 - RNA, 22 nt, Human
gaggaaggcuaaggggcuuaga

SEQ ID NO: 358372 - RNA, 22 nt, Human
aggugagggugccagugcaugg

SEQ ID NO: 358373 - RNA, 22 nt, Human
cccacacauuuuucacuuaccg

SEQ ID NO: 358374 - RNA, 22 nt, Human
agaagugagugugacucagcag

SEQ ID NO: 358375 - RNA, 22 nt, Human
uggucucuucuuccaagauggc

SEQ ID NO: 358376 - RNA, 22 nt, Human
aauuugauuuucuuaaaccaua

SEQ ID NO: 358377 - RNA, 21 nt, Human
gcaggguccuuuccauuccua

SEQ ID NO: 358378 - RNA, 19 nt, Human
ugcugaaguugucagucug

SEQ ID NO: 358379 - RNA, 22 nt, Human
guuuuccuucucagccauugcc

SEQ ID NO: 358380 - RNA, 22 nt, Human
cagagguacaagcuaaguuggg

SEQ ID NO: 358381 - RNA, 18 nt, Human
gagaggcccggcugugcc

SEQ ID NO: 358382 - RNA, 22 nt, Human
ggcacugaaccaggacacaagc

SEQ ID NO: 358383 - RNA, 22 nt, Human
ggaggaagagguuguucucuca

SEQ ID NO: 358384 - RNA, 22 nt, Human
aaguccaucucugccccacaca

SEQ ID NO: 358385 - RNA, 22 nt, Human
aauauaauuuuauuccuagagu

SEQ ID NO: 358386 - RNA, 19 nt, Human
gcuuuggagggagguucua

SEQ ID NO: 358387 - RNA, 22 nt, Human
aaagaacaauguggaaucuccu

SEQ ID NO: 358388 - RNA, 23 nt, Human
uuauuuugucagaagggacuuuu

SEQ ID NO: 358389 - RNA, 22 nt, Human
uuugacaucaauacccuagaau

SEQ ID NO: 358390 - RNA, 23 nt, Human
uuacaguaggaguuggaaaacca

SEQ ID NO: 358391 - RNA, 22 nt, Human
cugccuggucucaggcaugggg

SEQ ID NO: 358392 - RNA, 22 nt, Human
uaacaguguggacuugagaucu

SEQ ID NO: 358393 - RNA, 21 nt, Human
guuuucaugauagagucugua

SEQ ID NO: 358394 - RNA, 22 nt, Human
gcaggauggugcccuuucugcc

SEQ ID NO: 358395 - RNA, 22 nt, Human
cugugacuagaccugcaggaga

SEQ ID NO: 358396 - RNA, 22 nt, Human
auggaguucugccagcgcugcu

SEQ ID NO: 358397 - RNA, 22 nt, Human
ugucacagggauaccauggggc

SEQ ID NO: 358398 - RNA, 22 nt, Human
ucuucagagacucugagccccu

SEQ ID NO: 358399 - RNA, 22 nt, Human
cagggcucgcucgcucgcucgc

SEQ ID NO: 358400 - RNA, 22 nt, Human
ccuggccucagacagagggugg

SEQ ID NO: 358401 - RNA, 22 nt, Human
uggagccaaggccaguucucag

SEQ ID NO: 358402 - RNA, 22 nt, Human
ccaagggcugcugaggugucca

SEQ ID NO: 358403 - RNA, 22 nt, Human
ccaggagguggagauugcagug

SEQ ID NO: 358404 - RNA, 22 nt, Human
cauugcugugggcauuugcugc

SEQ ID NO: 358405 - RNA, 22 nt, Human
agcuguccuggcucaggcugug

SEQ ID NO: 358406 - RNA, 22 nt, Human
gcucccugaaaagaacaaaguc

SEQ ID NO: 358407 - RNA, 22 nt, Human
ggcuccacugcugaccacucca

SEQ ID NO: 358408 - RNA, 22 nt, Human
cauuuguacagaacagcuuuau

SEQ ID NO: 358409 - RNA, 22 nt, Human
cagagccaggucuaggagucuc

SEQ ID NO: 358410 - RNA, 22 nt, Human
acaacuuuaauggguuucagcu

SEQ ID NO: 358411 - RNA, 22 nt, Human
caggaccccauauucacugaac

SEQ ID NO: 358412 - RNA, 22 nt, Human
cggagccugcuuguugcagcug

SEQ ID NO: 358413 - RNA, 20 nt, Human
acaauauguagaugaauagc

SEQ ID NO: 358414 - RNA, 18 nt, Human
ugucucugaauuccagug

SEQ ID NO: 358415 - RNA, 22 nt, Human
cuggaagaggaagccagcugga

SEQ ID NO: 358416 - RNA, 22 nt, Human
ggcuuuauuaagcaggguaagu

SEQ ID NO: 358417 - RNA, 22 nt, Human
ucaguguauggagugcuggauu

SEQ ID NO: 358418 - RNA, 22 nt, Human
agccugugugcuuuggacaggg

SEQ ID NO: 358419 - RNA, 22 nt, Human
agcaguggcugaagauguuccu

SEQ ID NO: 358420 - RNA, 22 nt, Human
uuauuuucagcuaggaaagcca

SEQ ID NO: 358421 - RNA, 22 nt, Human
ugccugggagugaccaagacuc

SEQ ID NO: 358422 - RNA, 18 nt, Human
aguaaagcuuauuacaug

SEQ ID NO: 358423 - RNA, 22 nt, Human
uguuucuuuguagauauucuuu

SEQ ID NO: 358424 - RNA, 22 nt, Human
uccugcagcugcagaccugggg

SEQ ID NO: 358425 - RNA, 23 nt, Human
acagggcauugcuggccucgagg

SEQ ID NO: 358426 - RNA, 22 nt, Human
gcucucuugguggcuguccugg

SEQ ID NO: 358427 - RNA, 22 nt, Human
ugaggugaagaguggagcucag

SEQ ID NO: 358428 - RNA, 22 nt, Human
guuuuccacuggauuguuugga

SEQ ID NO: 358429 - RNA, 22 nt, Human
gaacagcuucuugggagcuggg

SEQ ID NO: 358430 - RNA, 22 nt, Human
uuccucucaacaugccugccgg

SEQ ID NO: 358431 - RNA, 22 nt, Human
ucccagcagucagagcuaugug

SEQ ID NO: 358432 - RNA, 22 nt, Human
gccaugccugugucuccaggcc

SEQ ID NO: 358433 - RNA, 20 nt, Human
uagggcucauuaugaucucc

SEQ ID NO: 358434 - RNA, 22 nt, Human
cauuucaaugccuucaacauag

SEQ ID NO: 358435 - RNA, 22 nt, Human
cagggcuggcuguggcaaucuc

SEQ ID NO: 358436 - RNA, 22 nt, Human
auuauaaagaacaugugugugg

SEQ ID NO: 358437 - RNA, 22 nt, Human
gaagagcuaaaggcacaggcuu

SEQ ID NO: 358438 - RNA, 22 nt, Human
aggggccauuguucugcccgcu

SEQ ID NO: 358439 - RNA, 22 nt, Human
auucuguauuucuaauaagauc

SEQ ID NO: 358440 - RNA, 22 nt, Human
uagcugcccaucuuuccuuuag

SEQ ID NO: 358441 - RNA, 22 nt, Human
gucugcugcagagcauggcuuu

SEQ ID NO: 358442 - RNA, 21 nt, Human
ucccugcuuucuggcccaguc

SEQ ID NO: 358443 - RNA, 22 nt, Human
ucucaggccccugaguuucucu

SEQ ID NO: 358444 - RNA, 22 nt, Human
ucuggcucagggcucugaggga

SEQ ID NO: 358445 - RNA, 22 nt, Human
caaaguuaugaaugauaagauu

SEQ ID NO: 358446 - RNA, 22 nt, Human
ugaugaaaauaugauucugagg

SEQ ID NO: 358447 - RNA, 22 nt, Human
aaauagauugcugaggcauuac

SEQ ID NO: 358448 - RNA, 22 nt, Human
uuaagacaguguauuuguuuuc

SEQ ID NO: 358449 - RNA, 22 nt, Human
ucacgagaggcacagaauagag

SEQ ID NO: 358450 - RNA, 22 nt, Human
cugcugugcagacagacucucu

SEQ ID NO: 358451 - RNA, 22 nt, Human
ggcaugggagugagcaaccuua

SEQ ID NO: 358452 - RNA, 22 nt, Human
cggcugagacggccauagacac

SEQ ID NO: 358453 - RNA, 22 nt, Human
gcagggucgcucuaggagauca

SEQ ID NO: 358454 - RNA, 22 nt, Human
uugggcucaggaguuugagacc

SEQ ID NO: 358455 - RNA, 22 nt, Human
gccagcucccaagugagccccu

SEQ ID NO: 358456 - RNA, 22 nt, Human
cuacagaauucaacaaaugguu

SEQ ID NO: 358457 - RNA, 22 nt, Human
cucaggaugucggugacuauug

SEQ ID NO: 358458 - RNA, 22 nt, Human
ggggccagcacugugccuuugu

SEQ ID NO: 358459 - RNA, 18 nt, Human
ggcucaggcuauccuaac

SEQ ID NO: 358460 - RNA, 22 nt, Human
gcagagccugggggucugcgga

SEQ ID NO: 358461 - RNA, 22 nt, Human
uggcgugcccuccagacuuggc

SEQ ID NO: 358462 - RNA, 22 nt, Human
cugcuguggugucaagcaucuc

SEQ ID NO: 358463 - RNA, 22 nt, Human
agggccagaggcaccuugcagc

SEQ ID NO: 358464 - RNA, 22 nt, Human
ugcucagacaagcugaacagua

SEQ ID NO: 358465 - RNA, 22 nt, Human
aaagcagggaugaggcuagagg

SEQ ID NO: 358466 - RNA, 22 nt, Human
ucuucucuacaccagcagcccc

SEQ ID NO: 358467 - RNA, 22 nt, Human
ucaggcagcuccaggaauggua

SEQ ID NO: 358468 - RNA, 22 nt, Human
uggauuuauuagguuggugaaa

SEQ ID NO: 358469 - RNA, 22 nt, Human
cacacaggaugaagcagcagaa

SEQ ID NO: 358470 - RNA, 22 nt, Human
uagcuuuagugaaaaauaucag

SEQ ID NO: 358471 - RNA, 22 nt, Human
aaggcugccucugccagaggag

SEQ ID NO: 358472 - RNA, 23 nt, Human
aacaauagguuuuggcagaauag

SEQ ID NO: 358473 - RNA, 22 nt, Human
acagauuuauugaagcugcugc

SEQ ID NO: 358474 - RNA, 22 nt, Human
uuaaacagguuuuugaauggcc

SEQ ID NO: 358475 - RNA, 19 nt, Human
guagggacagugguucuga

SEQ ID NO: 358476 - RNA, 22 nt, Human
ggccaccucugcccuacugagu

SEQ ID NO: 358477 - RNA, 22 nt, Human
caucaucaaaagugacagagaa

SEQ ID NO: 358478 - RNA, 22 nt, Human
uuaaugcagaaaucaaacugac

SEQ ID NO: 358479 - RNA, 22 nt, Human
ugggagcccaagggagcugccg

SEQ ID NO: 358480 - RNA, 22 nt, Human
agggaccuugauggguuuggga

SEQ ID NO: 358481 - RNA, 22 nt, Human
gccugagcaggcguggaccaug

SEQ ID NO: 358482 - RNA, 22 nt, Human
uauuccagaugaaaucauucag

SEQ ID NO: 358483 - RNA, 22 nt, Human
uuuccucuuccgagggggaggc

SEQ ID NO: 358484 - RNA, 22 nt, Human
ugagcccaggaguuggagaccg

SEQ ID NO: 358485 - RNA, 22 nt, Human
uuugcagcaaggagagagcauu

SEQ ID NO: 358486 - RNA, 22 nt, Human
uuuuauuaucuuugaaugggac

SEQ ID NO: 358487 - RNA, 20 nt, Human
uugcagcagugaggugaagg

SEQ ID NO: 358488 - RNA, 22 nt, Human
agcugugguucugggcagcgac

SEQ ID NO: 358489 - RNA, 22 nt, Human
gcagugauuggaucagagaugg

SEQ ID NO: 358490 - RNA, 22 nt, Human
aaagcuuuucaguauguucaug

SEQ ID NO: 358491 - RNA, 22 nt, Human
acagaggccccgugggagagcc

SEQ ID NO: 358492 - RNA, 22 nt, Human
cagaggcugaugugggaugggc

SEQ ID NO: 358493 - RNA, 18 nt, Human
ugcucuggucucacuugg

SEQ ID NO: 358494 - RNA, 22 nt, Human
uaucuguuggcuccuaguugua

SEQ ID NO: 358495 - RNA, 22 nt, Human
uuuuaucugcuucauuaguuga

SEQ ID NO: 358496 - RNA, 22 nt, Human
uggcugggugcuauccaguacu

SEQ ID NO: 358497 - RNA, 22 nt, Human
cacucccuucaggagccuagga

SEQ ID NO: 358498 - RNA, 22 nt, Human
gauaugaaguggcauugugaag

SEQ ID NO: 358499 - RNA, 22 nt, Human
ucaggggcccuucccucagcag

SEQ ID NO: 358500 - RNA, 22 nt, Human
cugcuggagguuggagcaugca

SEQ ID NO: 358501 - RNA, 22 nt, Human
aucaguuuuguucacuacuaua

SEQ ID NO: 358502 - RNA, 22 nt, Human
caguugccuacuacauggcagg

SEQ ID NO: 358503 - RNA, 18 nt, Human
gggcucacacaggucauc

SEQ ID NO: 358504 - RNA, 23 nt, Human
aggugcagcccuggaccugcccc

SEQ ID NO: 358505 - RNA, 22 nt, Human
ugaggcagaaaauagcaguuca

SEQ ID NO: 358506 - RNA, 22 nt, Human
ugaaagcagcaccaauaccauu

SEQ ID NO: 358507 - RNA, 22 nt, Human
cugccugcuucugagccagagg

SEQ ID NO: 358508 - RNA, 22 nt, Human
gaggcaugucuggccuguccca

SEQ ID NO: 358509 - RNA, 21 nt, Human
uggcugcuggcccucucucca

SEQ ID NO: 358510 - RNA, 22 nt, Human
aggagagagcugagcuuugcug

SEQ ID NO: 358511 - RNA, 19 nt, Human
aauacaguguuauagaauu

SEQ ID NO: 358512 - RNA, 23 nt, Human
guggccuccccggaaugccucgc

SEQ ID NO: 358513 - RNA, 22 nt, Human
ccagcccuugcugaaggguggc

SEQ ID NO: 358514 - RNA, 22 nt, Human
gaugccuccaaaugagggcaga

SEQ ID NO: 358515 - RNA, 21 nt, Human
aauuagggugccucuuauaau

SEQ ID NO: 358516 - RNA, 22 nt, Human
ugucccagacauaaguggacau

SEQ ID NO: 358517 - RNA, 22 nt, Human
cugagcuuggccaggaaugaau

SEQ ID NO: 358518 - RNA, 22 nt, Human
aggcucugugacaaucaagcug

SEQ ID NO: 358519 - RNA, 22 nt, Human
cggcuggguucggcugcaggcc

SEQ ID NO: 358520 - RNA, 22 nt, Human
auguacaguggaaacuaacaaa

SEQ ID NO: 358521 - RNA, 22 nt, Human
ugaaggccagcucuuuaucagc

SEQ ID NO: 358522 - RNA, 22 nt, Human
aaugagcuagaccugcuuccuc

SEQ ID NO: 358523 - RNA, 22 nt, Human
acagaguauuggaaaggcagug

SEQ ID NO: 358524 - RNA, 17 nt, Human
uccaugagacaugaaga

SEQ ID NO: 358525 - RNA, 22 nt, Human
auggccuggggagcaugggaag

SEQ ID NO: 358526 - RNA, 22 nt, Human
ccuguucacccuccaugcacag

SEQ ID NO: 358527 - RNA, 22 nt, Human
ccugccugguguaagucuaagg

SEQ ID NO: 358528 - RNA, 22 nt, Human
cagcaguguacaaggugucaga

SEQ ID NO: 358529 - RNA, 22 nt, Human
cuucuucaaccugaaaguuuca

SEQ ID NO: 358530 - RNA, 22 nt, Human
guggcgcagaggguggcagaga

SEQ ID NO: 358531 - RNA, 22 nt, Human
augagcugugggauuccagagg

SEQ ID NO: 358532 - RNA, 22 nt, Human
uccugucagugaggcagaugaa

SEQ ID NO: 358533 - RNA, 22 nt, Human
agguauauauucugguccuuau

SEQ ID NO: 358534 - RNA, 22 nt, Human
cuggccugaggccgccuucaga

SEQ ID NO: 358535 - RNA, 22 nt, Human
ucccacuggacgucugugcugg

SEQ ID NO: 358536 - RNA, 22 nt, Human
uguguugugacauucuuggaug

SEQ ID NO: 358537 - RNA, 22 nt, Human
uauuugaagauucuucugaugu

SEQ ID NO: 358538 - RNA, 22 nt, Human
cacagccuugagcgaggacaag

SEQ ID NO: 358539 - RNA, 22 nt, Human
ucacucagguucaugucuuugu

SEQ ID NO: 358540 - RNA, 22 nt, Human
guauuaggaggaacacaggccu

SEQ ID NO: 358541 - RNA, 19 nt, Human
ccauggagagagaugcauu

SEQ ID NO: 358542 - RNA, 22 nt, Human
aauguaaacagcaagagaaggg

SEQ ID NO: 358543 - RNA, 22 nt, Human
ccagcucuggcuucuugcuggg

SEQ ID NO: 358544 - RNA, 22 nt, Human
aaucaaaaccuacagagguaau

SEQ ID NO: 358545 - RNA, 22 nt, Human
aaaauuuugcccuauccuucau

SEQ ID NO: 358546 - RNA, 22 nt, Human
gucaugccuggcuucuuagaca

SEQ ID NO: 358547 - RNA, 22 nt, Human
ccugccagauccccugagcuga

SEQ ID NO: 358548 - RNA, 22 nt, Human
ccucaggcuuacgggcaaugga

SEQ ID NO: 358549 - RNA, 18 nt, Human
ggaaaaggagugucuagc

SEQ ID NO: 358550 - RNA, 22 nt, Human
ucacugaagacugggcucuaaa

SEQ ID NO: 358551 - RNA, 22 nt, Human
gaggguccccaugcagagcuca

SEQ ID NO: 358552 - RNA, 22 nt, Human
aacuuucaggcaaugaauauuu

SEQ ID NO: 358553 - RNA, 22 nt, Human
uuugugaaaugaagucacaacu

SEQ ID NO: 358554 - RNA, 22 nt, Human
cauucuuacacaauauuuuaau

SEQ ID NO: 358555 - RNA, 22 nt, Human
ggucagcagugcagggcagagc

SEQ ID NO: 358556 - RNA, 22 nt, Human
agggagagguugaaaccucagu

SEQ ID NO: 358557 - RNA, 22 nt, Human
aaacaucauaggcaugcaugau

SEQ ID NO: 358558 - RNA, 16 nt, Human
ucccaggaggcggaac

SEQ ID NO: 358559 - RNA, 16 nt, Human
cuacccagugagaagg

SEQ ID NO: 358560 - RNA, 22 nt, Human
acccaggagacagguugcagug

SEQ ID NO: 358561 - RNA, 23 nt, Human
aauaucaaggugauguucccaga

SEQ ID NO: 358562 - RNA, 22 nt, Human
ggcagggcuugucucugugaug

SEQ ID NO: 358563 - RNA, 22 nt, Human
ugcauaauacguuuccuauaac

SEQ ID NO: 358564 - RNA, 22 nt, Human
auaccuuuuagacauguaguug

SEQ ID NO: 358565 - RNA, 22 nt, Human
aggcaacuuuuggggaugaugg

SEQ ID NO: 358566 - RNA, 22 nt, Human
gauggcagcagcagccagggau

SEQ ID NO: 358567 - RNA, 22 nt, Human
gcuuccuagaucugugguacuc

SEQ ID NO: 358568 - RNA, 22 nt, Human
uguggccucaaggcugcccuca

SEQ ID NO: 358569 - RNA, 22 nt, Human
agugacugacaccuguaauccc

SEQ ID NO: 358570 - RNA, 22 nt, Human
aaggguugaagauaaauaaggu

SEQ ID NO: 358571 - RNA, 22 nt, Human
ugaaaucuuagccauucugccu

SEQ ID NO: 358572 - RNA, 22 nt, Human
aaagggcugucaaauaagcaac

SEQ ID NO: 358573 - RNA, 21 nt, Human
acaugucuggucauuuuuagc

SEQ ID NO: 358574 - RNA, 22 nt, Human
aggaccauccuaagguaggcaa

SEQ ID NO: 358575 - RNA, 22 nt, Human
uuuaauuuucugggcccagcag

SEQ ID NO: 358576 - RNA, 18 nt, Human
agggucagugucacuggc

SEQ ID NO: 358577 - RNA, 22 nt, Human
cauuaucucuucuauaugcuag

SEQ ID NO: 358578 - RNA, 22 nt, Human
auuucuguaacuuaugaaaguu

SEQ ID NO: 358579 - RNA, 22 nt, Human
agccuguccagaggacagggcu

SEQ ID NO: 358580 - RNA, 22 nt, Human
cuagccugggauuugaacuuau

SEQ ID NO: 358581 - RNA, 20 nt, Human
uacuugaauguugcagcagu

SEQ ID NO: 358582 - RNA, 22 nt, Human
cucaggaggaggaaguucauug

SEQ ID NO: 358583 - RNA, 22 nt, Human
ucuuugcaggagcccuuugaac

SEQ ID NO: 358584 - RNA, 22 nt, Human
augggcagcagcugccauucau

SEQ ID NO: 358585 - RNA, 22 nt, Human
guuugcauguguacuuaauugg

SEQ ID NO: 358586 - RNA, 21 nt, Human
ccagcagcucaaggaucucuu

SEQ ID NO: 358587 - RNA, 22 nt, Human
ggcuccuguccccucagcugcu

SEQ ID NO: 358588 - RNA, 22 nt, Human
cugcugucuuuauuucacugcu

SEQ ID NO: 358589 - RNA, 22 nt, Human
cggcuggggcuguccccaugac

SEQ ID NO: 358590 - RNA, 22 nt, Human
uccaaaguguugggauuauagg

SEQ ID NO: 358591 - RNA, 23 nt, Human
ugaguucucaucuuggcuucuau

SEQ ID NO: 358592 - RNA, 22 nt, Human
cuucaucaacucuaacaaaugu

SEQ ID NO: 358593 - RNA, 22 nt, Human
gaagccucaacaucucugcguc

SEQ ID NO: 358594 - RNA, 23 nt, Human
aggaaggagguccuaacaguauc

SEQ ID NO: 358595 - RNA, 22 nt, Human
caguuauuaugaggucauuagg

SEQ ID NO: 358596 - RNA, 22 nt, Human
uguguauuaccauuuuacagcu

SEQ ID NO: 358597 - RNA, 22 nt, Human
cuccugguucagagagcugaga

SEQ ID NO: 358598 - RNA, 22 nt, Human
accugagggcccaaacuuggua

SEQ ID NO: 358599 - RNA, 22 nt, Human
cucuuaaagaauguuccagcug

SEQ ID NO: 358600 - RNA, 22 nt, Human
aaaggcuccuucucccaugacc

SEQ ID NO: 358601 - RNA, 22 nt, Human
gcagggccuuagcagcggcugc

SEQ ID NO: 358602 - RNA, 22 nt, Human
cagcaguggcugcaggcagcug

SEQ ID NO: 358603 - RNA, 22 nt, Human
cugcuguguuucugcuagaaaa

SEQ ID NO: 358604 - RNA, 22 nt, Human
aaaugucuuuaucucauguaac

SEQ ID NO: 358605 - RNA, 22 nt, Human
ggagccaggggaccuucacaga

SEQ ID NO: 358606 - RNA, 20 nt, Human
ggagagcagggaagacagua

SEQ ID NO: 358607 - RNA, 19 nt, Human
agcauccagucaugggauc

SEQ ID NO: 358608 - RNA, 22 nt, Human
gagggguguggagccaucaguu

SEQ ID NO: 358609 - RNA, 22 nt, Human
ccagcaggggaauauuuuuagg

SEQ ID NO: 358610 - RNA, 22 nt, Human
guauuaggaaauaugaagaaag

SEQ ID NO: 358611 - RNA, 22 nt, Human
gcugugcuauaucucugagugu

SEQ ID NO: 358612 - RNA, 21 nt, Human
gggccuggcugcgcaggacgg

SEQ ID NO: 358613 - RNA, 22 nt, Human
ugcagagaaaccaguggaggac

SEQ ID NO: 358614 - RNA, 23 nt, Human
ugucacauuuaguuggcauuguu

SEQ ID NO: 358615 - RNA, 19 nt, Human
ucaggcaguuauucacaaa

SEQ ID NO: 358616 - RNA, 22 nt, Human
ucugagccguauggcuuggcua

SEQ ID NO: 358617 - RNA, 22 nt, Human
ugugaaaagcaggcuacuuucu

SEQ ID NO: 358618 - RNA, 22 nt, Human
acagaauacuacagacugguua

SEQ ID NO: 358619 - RNA, 22 nt, Human
acagcuuuaguguggguggugc

SEQ ID NO: 358620 - RNA, 22 nt, Human
cuggcuccaucacugggugaug

SEQ ID NO: 358621 - RNA, 22 nt, Human
uggcucagagcagggacucugg

SEQ ID NO: 358622 - RNA, 22 nt, Human
aaucucuugggaggaaugaauu

SEQ ID NO: 358623 - RNA, 22 nt, Human
ugaauaauuaugggaguccuaa

SEQ ID NO: 358624 - RNA, 22 nt, Human
aggcagcauuugaauccagguc

SEQ ID NO: 358625 - RNA, 22 nt, Human
ugucagggcaugcgguccagcc

SEQ ID NO: 358626 - RNA, 22 nt, Human
cccaaggccuucaagccagcuc

SEQ ID NO: 358627 - RNA, 22 nt, Human
ggaaaugacuuggugcuucguu

SEQ ID NO: 358628 - RNA, 22 nt, Human
gcaggaggaucacuugagccca

SEQ ID NO: 358629 - RNA, 22 nt, Human
uaaggcauucucaugcugugaa

SEQ ID NO: 358630 - RNA, 22 nt, Human
uagaaauccccagucucauagu

SEQ ID NO: 358631 - RNA, 22 nt, Human
gagacugcauuguccaaggguu

SEQ ID NO: 358632 - RNA, 22 nt, Human
ggcauguuucaucacaucaaga

SEQ ID NO: 358633 - RNA, 22 nt, Human
cacagagagcuacgugcagcgu

SEQ ID NO: 358634 - RNA, 22 nt, Human
gccaggcugcuccagggaggcc

SEQ ID NO: 358635 - RNA, 22 nt, Human
gcugggagugggcaagaugaga

SEQ ID NO: 358636 - RNA, 22 nt, Human
gagggccaauggauuucaacug

SEQ ID NO: 358637 - RNA, 22 nt, Human
gcucccugccuacacggaccuu

SEQ ID NO: 358638 - RNA, 22 nt, Human
ggaaaguggugguggaaagagg

SEQ ID NO: 358639 - RNA, 22 nt, Human
ugagccagauaagggcucacgc

SEQ ID NO: 358640 - RNA, 22 nt, Human
ucuggagagucacagugccaga

SEQ ID NO: 358641 - RNA, 22 nt, Human
ugcauuguugaauauuucauag

SEQ ID NO: 358642 - RNA, 22 nt, Human
caggagaagucucuagggggug

SEQ ID NO: 358643 - RNA, 22 nt, Human
uggguaaacugggucuggagag

SEQ ID NO: 358644 - RNA, 22 nt, Human
gcaggcuccaggccggccccuu

SEQ ID NO: 358645 - RNA, 22 nt, Human
cccagcuccuuacagggccgaa

SEQ ID NO: 358646 - RNA, 18 nt, Human
uccagagguguuggagcc

SEQ ID NO: 358647 - RNA, 22 nt, Human
ccuggcagacagcacugaagcu

SEQ ID NO: 358648 - RNA, 18 nt, Human
uccugcagcuucuaugua

SEQ ID NO: 358649 - RNA, 22 nt, Human
cauugcaccacauugcaucccu

SEQ ID NO: 358650 - RNA, 22 nt, Human
ucugggaaugaauaagaccugu

SEQ ID NO: 358651 - RNA, 22 nt, Human
acccugggucauauacagugug

SEQ ID NO: 358652 - RNA, 22 nt, Human
ugggcuguggagcaccuuugca

SEQ ID NO: 358653 - RNA, 22 nt, Human
ucaagaaagggcuucaccagga

SEQ ID NO: 358654 - RNA, 22 nt, Human
uccugcagcucugagaagcauc

SEQ ID NO: 358655 - RNA, 22 nt, Human
gaggcucagagacuuuaaguuu

SEQ ID NO: 358656 - RNA, 22 nt, Human
auuugcagagcucugaauuuug

SEQ ID NO: 358657 - RNA, 22 nt, Human
caagggcagcagccucaagcgg

SEQ ID NO: 358658 - RNA, 22 nt, Human
ggagcacuauaauagagauuuu

SEQ ID NO: 358659 - RNA, 22 nt, Human
gccagggagucugggccacaga

SEQ ID NO: 358660 - RNA, 22 nt, Human
agggccagggaagcuguauuuu

SEQ ID NO: 358661 - RNA, 22 nt, Human
gccaggcuguggggaacuugaa

SEQ ID NO: 358662 - RNA, 22 nt, Human
ugcagcuguaacagaggccuca

SEQ ID NO: 358663 - RNA, 22 nt, Human
gcuggggagggcgucaaggcca

SEQ ID NO: 358664 - RNA, 22 nt, Human
aaguucaagaucaagguuccag

SEQ ID NO: 358665 - RNA, 18 nt, Human
uguggcaggggugggaga

SEQ ID NO: 358666 - RNA, 17 nt, Human
agcagaagucagaggga

SEQ ID NO: 358667 - RNA, 17 nt, Human
ccagagcuacugagacu

SEQ ID NO: 358668 - RNA, 22 nt, Human
cgcuggggcuuuuugcuugaga

SEQ ID NO: 358669 - RNA, 17 nt, Human
gcaagggaugggagauu

SEQ ID NO: 358670 - RNA, 22 nt, Human
gcagggcagaccuccagccuau

SEQ ID NO: 358671 - RNA, 22 nt, Human
cugcuuuggacaacuauucuug

SEQ ID NO: 358672 - RNA, 22 nt, Human
caugaagcacagcucucuuuuu

SEQ ID NO: 358673 - RNA, 22 nt, Human
accugcagcuaaagauguaggg

SEQ ID NO: 358674 - RNA, 22 nt, Human
cuggcuggcaaguagaacacaa

SEQ ID NO: 358675 - RNA, 22 nt, Human
agcugaggcucugagagggaag

SEQ ID NO: 358676 - RNA, 22 nt, Human
cagaaagaccugggcucaagag

SEQ ID NO: 358677 - RNA, 22 nt, Human
cacauugaaaugacccaauaau

SEQ ID NO: 358678 - RNA, 22 nt, Human
gccugugcauagcagcggacuc

SEQ ID NO: 358679 - RNA, 17 nt, Human
uucaaugauuaaugcau

SEQ ID NO: 358680 - RNA, 22 nt, Human
caggccugacccugagcuucac

SEQ ID NO: 358681 - RNA, 18 nt, Human
uggugaaggguggaggag

SEQ ID NO: 358682 - RNA, 22 nt, Human
aucuggcugacuuugugggaca

SEQ ID NO: 358683 - RNA, 22 nt, Human
ggaaggaggaugcucuggccuu

SEQ ID NO: 358684 - RNA, 22 nt, Human
ccugggcaacauagugagaccc

SEQ ID NO: 358685 - RNA, 22 nt, Human
cucaggauagauuguccucuca

SEQ ID NO: 358686 - RNA, 22 nt, Human
uccucaggauguggaguagaau

SEQ ID NO: 358687 - RNA, 22 nt, Human
ucucuggaagcgcagaucuguu

SEQ ID NO: 358688 - RNA, 22 nt, Human
aaagaggaaccaagagcacgug

SEQ ID NO: 358689 - RNA, 22 nt, Human
uggagcaggccggaaguggcuu

SEQ ID NO: 358690 - RNA, 22 nt, Human
uggcugaggcuggagugcagug

SEQ ID NO: 358691 - RNA, 22 nt, Human
uucccaguauuaccuucaggaa

SEQ ID NO: 358692 - RNA, 22 nt, Human
aauugcaauuuucuuaaggucu

SEQ ID NO: 358693 - RNA, 22 nt, Human
auggcauuugaaucugucuuuu

SEQ ID NO: 358694 - RNA, 22 nt, Human
guugaguggguuaggaugcuga

SEQ ID NO: 358695 - RNA, 22 nt, Human
uuccuuagauccuucaaucacg

SEQ ID NO: 358696 - RNA, 22 nt, Human
uagggcagcugcaucaggcacu

SEQ ID NO: 358697 - RNA, 22 nt, Human
cagaggccuuucuacagugaua

SEQ ID NO: 358698 - RNA, 22 nt, Human
uggcuggcgccgggcuagccac

SEQ ID NO: 358699 - RNA, 22 nt, Human
aguguacauguuuacagcaucu

SEQ ID NO: 358700 - RNA, 22 nt, Human
uguuuucagucauauagcaggu

SEQ ID NO: 358701 - RNA, 22 nt, Human
cuggagcuggcuuccuuccacu

SEQ ID NO: 358702 - RNA, 22 nt, Human
ggcaggcaggagcgugcuuggg

SEQ ID NO: 358703 - RNA, 22 nt, Human
auccucagaccucagcaaagcc

SEQ ID NO: 358704 - RNA, 22 nt, Human
ucccagcagggccgaccagccu

SEQ ID NO: 358705 - RNA, 22 nt, Human
aguuuuucugggaggcacugcu

SEQ ID NO: 358706 - RNA, 22 nt, Human
ucuggcucacuucaggcuucac

SEQ ID NO: 358707 - RNA, 22 nt, Human
uaguuaaaauaauggagauguu

SEQ ID NO: 358708 - RNA, 22 nt, Human
cugggcagugguggcaucuuug

SEQ ID NO: 358709 - RNA, 22 nt, Human
uagcagcuuccagagagggcag

SEQ ID NO: 358710 - RNA, 22 nt, Human
ggaggaccccagcagcucccca

SEQ ID NO: 358711 - RNA, 22 nt, Human
uaguccagccuuggguguagcc

SEQ ID NO: 358712 - RNA, 22 nt, Human
agccuggaggccaggagacagu

SEQ ID NO: 358713 - RNA, 21 nt, Human
uccagaccucccucuccuagc

SEQ ID NO: 358714 - RNA, 22 nt, Human
agagugaucagauaucaggugu

SEQ ID NO: 358715 - RNA, 22 nt, Human
gcugcccuaauaucacauguua

SEQ ID NO: 358716 - RNA, 22 nt, Human
ugcauuccuccaccuccugcac

SEQ ID NO: 358717 - RNA, 22 nt, Human
auaguaacuggcauguuuauga

SEQ ID NO: 358718 - RNA, 17 nt, Human
aggccucccuccaggcc

SEQ ID NO: 358719 - RNA, 22 nt, Human
ccugccaggacauugcuugaag

SEQ ID NO: 358720 - RNA, 22 nt, Human
cugggcugagccugggcugugu

SEQ ID NO: 358721 - RNA, 22 nt, Human
guggcaggagagacacagccau

SEQ ID NO: 358722 - RNA, 22 nt, Human
ggccucucauguccugggcuuc

SEQ ID NO: 358723 - RNA, 22 nt, Human
cagcugaguguuggcauguuca

SEQ ID NO: 358724 - RNA, 22 nt, Human
ggccugcuucucagugagcuug

SEQ ID NO: 358725 - RNA, 22 nt, Human
uuuccagagcaugucugcucag

SEQ ID NO: 358726 - RNA, 22 nt, Human
ccaggagcaccaggccugugcc

SEQ ID NO: 358727 - RNA, 22 nt, Human
uccugcagcugaagcucaugug

SEQ ID NO: 358728 - RNA, 19 nt, Human
gaguuauugccagggcaug

SEQ ID NO: 358729 - RNA, 22 nt, Human
ggcaauuucaugugguuuaaac

SEQ ID NO: 358730 - RNA, 22 nt, Human
gcacagguugcaaaaguucaca

SEQ ID NO: 358731 - RNA, 22 nt, Human
gagggcucugaaaggaggucac

SEQ ID NO: 358732 - RNA, 22 nt, Human
aucaggaugacaacugcugggu

SEQ ID NO: 358733 - RNA, 22 nt, Human
ugagggcugcuuccagagcuag

SEQ ID NO: 358734 - RNA, 22 nt, Human
agggguggccugccuuacuccc

SEQ ID NO: 358735 - RNA, 22 nt, Human
ccucuggguaucuguggaagua

SEQ ID NO: 358736 - RNA, 22 nt, Human
ucucugaguauccugaacugcc

SEQ ID NO: 358737 - RNA, 23 nt, Human
gugagcagcccacuaggaaugcc

SEQ ID NO: 358738 - RNA, 22 nt, Human
cugugggcugaaagugcucccg

SEQ ID NO: 358739 - RNA, 22 nt, Human
cugcucugaagccaggauucug

SEQ ID NO: 358740 - RNA, 20 nt, Human
uguucacaguaguugcugcu

SEQ ID NO: 358741 - RNA, 23 nt, Human
uuacuuuugcaccaaccuaauau

SEQ ID NO: 358742 - RNA, 22 nt, Human
ugcguugcgcuccugcagcagg

SEQ ID NO: 358743 - RNA, 22 nt, Human
gcuguggcuugcagcuggggcu

SEQ ID NO: 358744 - RNA, 22 nt, Human
aguacauauaguaauuuagcca

SEQ ID NO: 358745 - RNA, 22 nt, Human
caggcccauucuaggcuugcua

SEQ ID NO: 358746 - RNA, 22 nt, Human
uuuauccaguguuggaauuuuu

SEQ ID NO: 358747 - RNA, 22 nt, Human
ccaaggcuucccagagaugcuc

SEQ ID NO: 358748 - RNA, 22 nt, Human
augugaggcagcacggagauua

SEQ ID NO: 358749 - RNA, 23 nt, Human
agggcaugaagcagaggacgugg

SEQ ID NO: 358750 - RNA, 22 nt, Human
auucacaaaaugauauagauac

SEQ ID NO: 358751 - RNA, 22 nt, Human
auugcaccuuggguuuugaaag

SEQ ID NO: 358752 - RNA, 22 nt, Human
ugggccacaagccaugggacca

SEQ ID NO: 358753 - RNA, 23 nt, Human
agugagcagcuguagggcaagga

SEQ ID NO: 358754 - RNA, 22 nt, Human
aucaaaguggaaguuuacuagg

SEQ ID NO: 358755 - RNA, 22 nt, Human
uagauaaauuagaaaguuuacu

SEQ ID NO: 358756 - RNA, 21 nt, Human
aucccagcacccaggagugca

SEQ ID NO: 358757 - RNA, 22 nt, Human
gggccagagcuuggcagcuggg

SEQ ID NO: 358758 - RNA, 22 nt, Human
ccugggcaucucaugcaccugc

SEQ ID NO: 358759 - RNA, 22 nt, Human
ucaaggagcccacagucuaaug

SEQ ID NO: 358760 - RNA, 22 nt, Human
cauguaaaacacucagaacagu

SEQ ID NO: 358761 - RNA, 19 nt, Human
agcuggggcgguguguguu

SEQ ID NO: 358762 - RNA, 22 nt, Human
agaauuuuugauuaucuacucg

SEQ ID NO: 358763 - RNA, 22 nt, Human
guuugcauggaagacagugagu

SEQ ID NO: 358764 - RNA, 22 nt, Human
ucuggagccuuggaugggaaag

SEQ ID NO: 358765 - RNA, 22 nt, Human
uaugugcaguuugcucuuaaca

SEQ ID NO: 358766 - RNA, 22 nt, Human
cugcagcuccccugagaucaag

SEQ ID NO: 358767 - RNA, 20 nt, Human
acugccuugguucaguaggu

SEQ ID NO: 358768 - RNA, 22 nt, Human
uccucugcuccaggcuggacuu

SEQ ID NO: 358769 - RNA, 22 nt, Human
aaugcacauguuguaauaaaua

SEQ ID NO: 358770 - RNA, 22 nt, Human
auguaaaucaagcagugcuggu

SEQ ID NO: 358771 - RNA, 23 nt, Human
agaugaaagcuucccaucacagu

SEQ ID NO: 358772 - RNA, 22 nt, Human
ccaggcucugagccucacucuu

SEQ ID NO: 358773 - RNA, 22 nt, Human
ucagcuuuugucagaaauugua

SEQ ID NO: 358774 - RNA, 22 nt, Human
ugcccuuggguaacuugcugau

SEQ ID NO: 358775 - RNA, 22 nt, Human
aucagaagcuuguagucucucu

SEQ ID NO: 358776 - RNA, 22 nt, Human
aaugggaggauuuucucucuug

SEQ ID NO: 358777 - RNA, 22 nt, Human
uagcugccauugcuccaggaag

SEQ ID NO: 358778 - RNA, 18 nt, Human
aguccuuacgaggcuaua

SEQ ID NO: 358779 - RNA, 22 nt, Human
uaauuacagguccaaaacaauc

SEQ ID NO: 358780 - RNA, 22 nt, Human
aaaaugaacagaacaaugggga

SEQ ID NO: 358781 - RNA, 22 nt, Human
acagagcacauagauuggaguu

SEQ ID NO: 358782 - RNA, 18 nt, Human
ggucuuuaggucaguguc

SEQ ID NO: 358783 - RNA, 22 nt, Human
aggcagagcuaggaagaauugu

SEQ ID NO: 358784 - RNA, 22 nt, Human
guuuaauaauguugaauuacua

SEQ ID NO: 358785 - RNA, 22 nt, Human
acagccuguuugaucuggugcu

SEQ ID NO: 358786 - RNA, 22 nt, Human
agagauucauguuuacuguagg

SEQ ID NO: 358787 - RNA, 22 nt, Human
cuggcuuccaugcuguaguggc

SEQ ID NO: 358788 - RNA, 22 nt, Human
gggcaguggguggcugcagccu

SEQ ID NO: 358789 - RNA, 20 nt, Human
ccucaggaugagggugagca

SEQ ID NO: 358790 - RNA, 22 nt, Human
cugcugcauuacucuucucaag

SEQ ID NO: 358791 - RNA, 22 nt, Human
agagggagcccagucauagcug

SEQ ID NO: 358792 - RNA, 22 nt, Human
gcucccuguucucagccaugau

SEQ ID NO: 358793 - RNA, 22 nt, Human
gcagaagucagaccaucugaau

SEQ ID NO: 358794 - RNA, 22 nt, Human
ccagugcauaaucaauacagcc

SEQ ID NO: 358795 - RNA, 22 nt, Human
ucuacccagagcuaugaccuga

SEQ ID NO: 358796 - RNA, 22 nt, Human
aggcagcguagcaaggcuagua

SEQ ID NO: 358797 - RNA, 22 nt, Human
agccaccaccacugaaagguua

SEQ ID NO: 358798 - RNA, 21 nt, Human
caugaagccgguucccuguuu

SEQ ID NO: 358799 - RNA, 22 nt, Human
gacccuggaguuaguccugugu

SEQ ID NO: 358800 - RNA, 19 nt, Human
cuuauuagagugagagcuu

SEQ ID NO: 358801 - RNA, 21 nt, Human
aagagcugucaggaaggcugc

SEQ ID NO: 358802 - RNA, 22 nt, Human
ggugaggaauuggggacugacc

SEQ ID NO: 358803 - RNA, 22 nt, Human
acugcuuuaucugagaaguccu

SEQ ID NO: 358804 - RNA, 22 nt, Human
agcagaacauuuucagggcugu

SEQ ID NO: 358805 - RNA, 22 nt, Human
ugcagcccuuccuuccucuggg

SEQ ID NO: 358806 - RNA, 22 nt, Human
cugggaggcaccgcgucgugcu

SEQ ID NO: 358807 - RNA, 23 nt, Human
ugggccuggccucccaguccagc

SEQ ID NO: 358808 - RNA, 22 nt, Human
cugggaggcggagguuguagug

SEQ ID NO: 358809 - RNA, 22 nt, Human
acagagguguuccagaccuagg

SEQ ID NO: 358810 - RNA, 22 nt, Human
ugggggugacuaucucgggaau

SEQ ID NO: 358811 - RNA, 22 nt, Human
ugugccugaguuggcugaguac

SEQ ID NO: 358812 - RNA, 22 nt, Human
aaagccacugcauguguaguau

SEQ ID NO: 358813 - RNA, 22 nt, Human
cagcaguggccaucuguguggu

SEQ ID NO: 358814 - RNA, 22 nt, Human
uaaaguucagugcaugaaugug

SEQ ID NO: 358815 - RNA, 22 nt, Human
uggugguuaugcgcuuuguggg

SEQ ID NO: 358816 - RNA, 22 nt, Human
ucagagccaaucauggugcauu

SEQ ID NO: 358817 - RNA, 22 nt, Human
cagggccaggcugauggccugg

SEQ ID NO: 358818 - RNA, 22 nt, Human
uaauguguugaauauuuguaca

SEQ ID NO: 358819 - RNA, 22 nt, Human
uaggcagaaaggaaggcaaguu

SEQ ID NO: 358820 - RNA, 22 nt, Human
aagggcuggccacauucugggu

SEQ ID NO: 358821 - RNA, 22 nt, Human
cagcauugaucccaggcugugg

SEQ ID NO: 358822 - RNA, 22 nt, Human
aaggccagcuuguagggcuggu

SEQ ID NO: 358823 - RNA, 22 nt, Human
acugucuccucaucaugccugg

SEQ ID NO: 358824 - RNA, 21 nt, Human
uugaagcaaggguggcucuga

SEQ ID NO: 358825 - RNA, 22 nt, Human
ucucauguauugcccuggugug

SEQ ID NO: 358826 - RNA, 22 nt, Human
acaaaugccauauauaaauucu

SEQ ID NO: 358827 - RNA, 22 nt, Human
gcagcauugugagguccugccc

SEQ ID NO: 358828 - RNA, 22 nt, Human
ccaaagagcuagaauuauaggc

SEQ ID NO: 358829 - RNA, 22 nt, Human
gauccuugcacuugacuuggca

SEQ ID NO: 358830 - RNA, 22 nt, Human
ugaaggagggaagaaggcucug

SEQ ID NO: 358831 - RNA, 21 nt, Human
gcaggggauagaaauggucug

SEQ ID NO: 358832 - RNA, 22 nt, Human
cagcagcaggcgcacggccguc

SEQ ID NO: 358833 - RNA, 22 nt, Human
acuugguuggucucacccuguu

SEQ ID NO: 358834 - RNA, 22 nt, Human
gccaguggcaugcggcagggac

SEQ ID NO: 358835 - RNA, 22 nt, Human
uggaggcaguaacugagcaaca

SEQ ID NO: 358836 - RNA, 21 nt, Human
ugcuucucuagaucaacuacu

SEQ ID NO: 358837 - RNA, 22 nt, Human
gaaggccaguuuugagauaggu

SEQ ID NO: 358838 - RNA, 22 nt, Human
acagagguguguguaggacagu

SEQ ID NO: 358839 - RNA, 22 nt, Human
gcuucuauuauuuggagcugag

SEQ ID NO: 358840 - RNA, 22 nt, Human
cccagcaguuguuggugcacau

SEQ ID NO: 358841 - RNA, 22 nt, Human
acauuuaggauguuuugagaga

SEQ ID NO: 358842 - RNA, 22 nt, Human
guaaaauugcaauuacuuuugc

SEQ ID NO: 358843 - RNA, 22 nt, Human
auaauuaauuucaguaaucucc

SEQ ID NO: 358844 - RNA, 22 nt, Human
agcagggccaacaguaaacacc

SEQ ID NO: 358845 - RNA, 22 nt, Human
gcuguccaugucuggccucagu

SEQ ID NO: 358846 - RNA, 22 nt, Human
ugucagugguagacccagaggu

SEQ ID NO: 358847 - RNA, 19 nt, Human
agggucaggacaaggacuu

SEQ ID NO: 358848 - RNA, 22 nt, Human
uuucacaacguuguggugagag

SEQ ID NO: 358849 - RNA, 22 nt, Human
agaacagaagggaggaaggccu

SEQ ID NO: 358850 - RNA, 23 nt, Human
augcucugggcugugggaccugc

SEQ ID NO: 358851 - RNA, 22 nt, Human
ucuuuguaaaugccuagcauaa

SEQ ID NO: 358852 - RNA, 22 nt, Human
gcaggaugccagggcagcagcg

SEQ ID NO: 358853 - RNA, 22 nt, Human
gacucagugauuugacaugccu

SEQ ID NO: 358854 - RNA, 22 nt, Human
agaaaacauuacauaggugugu

SEQ ID NO: 358855 - RNA, 22 nt, Human
gagcagugacuggagcaugaga

SEQ ID NO: 358856 - RNA, 22 nt, Human
gggcugagaaguugaucccaag

SEQ ID NO: 358857 - RNA, 22 nt, Human
gcucccagguucuugggccuug

SEQ ID NO: 358858 - RNA, 22 nt, Human
uuauuuugguaaauguuugccu

SEQ ID NO: 358859 - RNA, 22 nt, Human
aagauuucugcuccugagagaa

SEQ ID NO: 358860 - RNA, 22 nt, Human
ggaagagggaaccacgacugua

SEQ ID NO: 358861 - RNA, 23 nt, Human
agcagccauagggaagcaauaca

SEQ ID NO: 358862 - RNA, 22 nt, Human
ucucugggaaugggccugggua

SEQ ID NO: 358863 - RNA, 22 nt, Human
cugcccaguuugggagccuuuc

SEQ ID NO: 358864 - RNA, 22 nt, Human
caggugggagcgaggagcuacu

SEQ ID NO: 358865 - RNA, 19 nt, Human
agugcagggagcacccuca

SEQ ID NO: 358866 - RNA, 22 nt, Human
auggaaagugcauggaagucau

SEQ ID NO: 358867 - RNA, 20 nt, Human
ccagguggugccuggagagg

SEQ ID NO: 358868 - RNA, 22 nt, Human
ggcucaagcagucugccugccu

SEQ ID NO: 358869 - RNA, 21 nt, Human
uggcucugaaagagugcugca

SEQ ID NO: 358870 - RNA, 22 nt, Human
uacaugcuccacuuucuccugu

SEQ ID NO: 358871 - RNA, 16 nt, Human
uggcagagguucagcc

SEQ ID NO: 358872 - RNA, 22 nt, Human
gcagccacacuguuacagaaug

SEQ ID NO: 358873 - RNA, 22 nt, Human
cagaggaagcuggguguggagu

SEQ ID NO: 358874 - RNA, 22 nt, Human
auaacaugagccagauugaaag

SEQ ID NO: 358875 - RNA, 22 nt, Human
ugcuuuauaucucucuucuuag

SEQ ID NO: 358876 - RNA, 22 nt, Human
agaggcaacauggggaacagau

SEQ ID NO: 358877 - RNA, 22 nt, Human
gccuggagcuacuggacacuga

SEQ ID NO: 358878 - RNA, 22 nt, Human
ucugugaacaucacauugacag

SEQ ID NO: 358879 - RNA, 22 nt, Human
gcuccacuugcagcuaggcuug

SEQ ID NO: 358880 - RNA, 22 nt, Human
aucacauuguuagcauagacug

SEQ ID NO: 358881 - RNA, 22 nt, Human
uuuggacaaguuacugguuucc

SEQ ID NO: 358882 - RNA, 22 nt, Human
uagcugccuuugggcuccugcu

SEQ ID NO: 358883 - RNA, 22 nt, Human
acuuccuggcguagcugacauu

SEQ ID NO: 358884 - RNA, 22 nt, Human
ucccacugugccuguuguaauc

SEQ ID NO: 358885 - RNA, 22 nt, Human
cauuagggacugaggaauaagg

SEQ ID NO: 358886 - RNA, 22 nt, Human
agcaauauuuaaagguuugcaa

SEQ ID NO: 358887 - RNA, 21 nt, Human
cagagguggccugaccucuga

SEQ ID NO: 358888 - RNA, 22 nt, Human
ugaaaucuccucuuuauauauc

SEQ ID NO: 358889 - RNA, 21 nt, Human
uuagcaaagcaaacacaugcu

SEQ ID NO: 358890 - RNA, 22 nt, Human
uccuuuuuaagucguuguggua

SEQ ID NO: 358891 - RNA, 22 nt, Human
ugaggcucagagaagugcuguu

SEQ ID NO: 358892 - RNA, 22 nt, Human
augcuguggaaguuccugaagc

SEQ ID NO: 358893 - RNA, 22 nt, Human
gagcagugguugaacagaggca

SEQ ID NO: 358894 - RNA, 22 nt, Human
augaggcagucuggccugaggg

SEQ ID NO: 358895 - RNA, 22 nt, Human
gcugucacacaugggaucucag

SEQ ID NO: 358896 - RNA, 22 nt, Human
agcagggcuggauuuggcaaga

SEQ ID NO: 358897 - RNA, 22 nt, Human
caggcaggugcagauuccucuu

SEQ ID NO: 358898 - RNA, 22 nt, Human
cugugcaagcccaagauaaaac

SEQ ID NO: 358899 - RNA, 22 nt, Human
ucagcaauaugauaggcuuugu

SEQ ID NO: 358900 - RNA, 22 nt, Human
ucaugucaguuucuucuauaaa

SEQ ID NO: 358901 - RNA, 22 nt, Human
uggcccuguguccugcugccag

SEQ ID NO: 358902 - RNA, 22 nt, Human
cagugagggcccccuuccaggu

SEQ ID NO: 358903 - RNA, 22 nt, Human
uaauacuuaccuugcagagucu

SEQ ID NO: 358904 - RNA, 22 nt, Human
aauucugugcaggcagagcuau

SEQ ID NO: 358905 - RNA, 22 nt, Human
ucagaccauccugcuguuagug

SEQ ID NO: 358906 - RNA, 22 nt, Human
gcucaggaaauaguuuaguguu

SEQ ID NO: 358907 - RNA, 20 nt, Human
agagccuugaggaagaugau

SEQ ID NO: 358908 - RNA, 22 nt, Human
auuuauguaucuguguagauca

SEQ ID NO: 358909 - RNA, 22 nt, Human
cguguggucccggcaaggcaag

SEQ ID NO: 358910 - RNA, 21 nt, Human
gugguucuagagaaacagaau

SEQ ID NO: 358911 - RNA, 22 nt, Human
gugugggcugcagaggcacagc

SEQ ID NO: 358912 - RNA, 22 nt, Human
cccuggagggauuucucaauca

SEQ ID NO: 358913 - RNA, 22 nt, Human
ugcaggugguuuggacacugcu

SEQ ID NO: 358914 - RNA, 18 nt, Human
ugcuuuaugcuuauauaa

SEQ ID NO: 358915 - RNA, 22 nt, Human
ugaagccaucccucagauggcc

SEQ ID NO: 358916 - RNA, 22 nt, Human
ugggccugggagggcagacgcu

SEQ ID NO: 358917 - RNA, 22 nt, Human
gagcgggaggaacggcucgggc

SEQ ID NO: 358918 - RNA, 22 nt, Human
cuuggcagauccaaaaaugaca

SEQ ID NO: 358919 - RNA, 22 nt, Human
ccugccugucaucgccugcgcc

SEQ ID NO: 358920 - RNA, 22 nt, Human
ccuggcagacugugagggcagg

SEQ ID NO: 358921 - RNA, 22 nt, Human
gcaguggcaugaugugggcuca

SEQ ID NO: 358922 - RNA, 22 nt, Human
augcagcuucaggauuaugaug

SEQ ID NO: 358923 - RNA, 22 nt, Human
agcucauggugcuaucucaggg

SEQ ID NO: 358924 - RNA, 22 nt, Human
cuguggcaggaagggacuagca

SEQ ID NO: 358925 - RNA, 21 nt, Human
uucaaaaugguguguuugucu

SEQ ID NO: 358926 - RNA, 22 nt, Human
ugggagcaccuugagggcagaa

SEQ ID NO: 358927 - RNA, 22 nt, Human
ugguggcuguugcagaacugag

SEQ ID NO: 358928 - RNA, 22 nt, Human
ucaggagacaaagggugcggag

SEQ ID NO: 358929 - RNA, 22 nt, Human
cagugagguggauggauggccu

SEQ ID NO: 358930 - RNA, 22 nt, Human
ggucccaggauugguugcgcag

SEQ ID NO: 358931 - RNA, 22 nt, Human
ugaaguaacuguccaggaucca

SEQ ID NO: 358932 - RNA, 22 nt, Human
gccaccucggcuuucucugcuc

SEQ ID NO: 358933 - RNA, 22 nt, Human
ucugggaaaugcuguuccuugu

SEQ ID NO: 358934 - RNA, 22 nt, Human
agcuucuggaagccuggcagca

SEQ ID NO: 358935 - RNA, 20 nt, Human
ugcagaagaacguucugguu

SEQ ID NO: 358936 - RNA, 22 nt, Human
gguuauauaauucagugcuuuc

SEQ ID NO: 358937 - RNA, 22 nt, Human
aauucuagcauugugaaaauau

SEQ ID NO: 358938 - RNA, 22 nt, Human
ucaguauccacaaaugcucaaa

SEQ ID NO: 358939 - RNA, 22 nt, Human
ggguggggcccaggaaaucuau

SEQ ID NO: 358940 - RNA, 18 nt, Human
acagacaaaauggaaaug

SEQ ID NO: 358941 - RNA, 22 nt, Human
gcuuuauuuugugagggauuac

SEQ ID NO: 358942 - RNA, 22 nt, Human
gagaaggcuggucuuaagucga

SEQ ID NO: 358943 - RNA, 22 nt, Human
caacuuucuguuaaauguuagu

SEQ ID NO: 358944 - RNA, 22 nt, Human
ggacucuguuuuccugaucacu

SEQ ID NO: 358945 - RNA, 22 nt, Human
gucccuggggaaucagcuggag

SEQ ID NO: 358946 - RNA, 22 nt, Human
gggagccaugcuggucuucuuu

SEQ ID NO: 358947 - RNA, 22 nt, Human
caugcugugcaucuugaugacc

SEQ ID NO: 358948 - RNA, 22 nt, Human
aggugcuggagucugggcagga

SEQ ID NO: 358949 - RNA, 17 nt, Human
cagucgaggaggaccug

SEQ ID NO: 358950 - RNA, 21 nt, Human
auggagggaccagggaagcag

SEQ ID NO: 358951 - RNA, 22 nt, Human
gccuggagacaaggacaaaggg

SEQ ID NO: 358952 - RNA, 22 nt, Human
uuugaaagcaccauuugaguag

SEQ ID NO: 358953 - RNA, 22 nt, Human
ccugagccugaguggugcaggg

SEQ ID NO: 358954 - RNA, 22 nt, Human
ggccuugggcuggcugcaguau

SEQ ID NO: 358955 - RNA, 22 nt, Human
caauuucaagauucuguucuuu

SEQ ID NO: 358956 - RNA, 22 nt, Human
ugaaugauguauaauauugaga

SEQ ID NO: 358957 - RNA, 22 nt, Human
ggcuuuauguuuuucauguggu

SEQ ID NO: 358958 - RNA, 22 nt, Human
ucuguggcacgauugcacugca

SEQ ID NO: 358959 - RNA, 22 nt, Human
ugaaaugagagcacagaauaaa

SEQ ID NO: 358960 - RNA, 22 nt, Human
uauuucagcacaugggauaggu

SEQ ID NO: 358961 - RNA, 22 nt, Human
aaauccuaaggagaauaugauu

SEQ ID NO: 358962 - RNA, 22 nt, Human
uaauauguguuacugacuuuuu

SEQ ID NO: 358963 - RNA, 22 nt, Human
cucugaagggagggccaagccc

SEQ ID NO: 358964 - RNA, 22 nt, Human
cuauuucaaggcccagauauga

SEQ ID NO: 358965 - RNA, 22 nt, Human
ucuuugcaggccaaauuguuaa

SEQ ID NO: 358966 - RNA, 22 nt, Human
acagaaauaacuuuuuauguuu

SEQ ID NO: 358967 - RNA, 21 nt, Human
ucacacacguuuccaagggca

SEQ ID NO: 358968 - RNA, 22 nt, Human
gcugggagccccgagccagcgc

SEQ ID NO: 358969 - RNA, 22 nt, Human
uuuccucugaugcugacuugga

SEQ ID NO: 358970 - RNA, 22 nt, Human
aacaaaugaccugauuucuucc

SEQ ID NO: 358971 - RNA, 21 nt, Human
gaaggagaaagcaagugcugc

SEQ ID NO: 358972 - RNA, 22 nt, Human
ccaugagcuuccuauauagggu

SEQ ID NO: 358973 - RNA, 22 nt, Human
uguccuuagggauauaaaauau

SEQ ID NO: 358974 - RNA, 22 nt, Human
gcauguuuugcaacaagugacc

SEQ ID NO: 358975 - RNA, 22 nt, Human
cugggccugggaggccaggucu

SEQ ID NO: 358976 - RNA, 22 nt, Human
guccuggggaauacagaagccg

SEQ ID NO: 358977 - RNA, 22 nt, Human
augauugaccaucugcugggcu

SEQ ID NO: 358978 - RNA, 22 nt, Human
gaagcagcuaggaucuucauuu

SEQ ID NO: 358979 - RNA, 22 nt, Human
uuuuccuaguaggccuauuaga

SEQ ID NO: 358980 - RNA, 22 nt, Human
agaaaagaggcuuucuaagcau

SEQ ID NO: 358981 - RNA, 20 nt, Human
uucugcuugcaaauaucaag

SEQ ID NO: 358982 - RNA, 22 nt, Human
uuuaugagcaaugcugagggga

SEQ ID NO: 358983 - RNA, 22 nt, Human
aaauaauuauagcgagucuauc

SEQ ID NO: 358984 - RNA, 22 nt, Human
cucacugcaaguuccaccuacc

SEQ ID NO: 358985 - RNA, 21 nt, Human
gggugcuguggucaugcagga

SEQ ID NO: 358986 - RNA, 20 nt, Human
agauggugaaggccagggag

SEQ ID NO: 358987 - RNA, 22 nt, Human
acaaaggcauagugaauguuuu

SEQ ID NO: 358988 - RNA, 20 nt, Human
gggcagccucgggagugggu

SEQ ID NO: 358989 - RNA, 22 nt, Human
uauuuucuggacagucuugcuu

SEQ ID NO: 358990 - RNA, 22 nt, Human
cuccuuccugguuagcaccuua

SEQ ID NO: 358991 - RNA, 20 nt, Human
gcugaccccugcugucaugc

SEQ ID NO: 358992 - RNA, 22 nt, Human
ugguccuggggaucugcaguga

SEQ ID NO: 358993 - RNA, 22 nt, Human
gagcgauguggguauguagaag

SEQ ID NO: 358994 - RNA, 22 nt, Human
agggcaaguugagugugcgugg

SEQ ID NO: 358995 - RNA, 18 nt, Human
auagaaaccuuuaaucag

SEQ ID NO: 358996 - RNA, 22 nt, Human
ucacccuugauaauguucuucu

SEQ ID NO: 358997 - RNA, 22 nt, Human
cuugcuucauuagugucuuagu

SEQ ID NO: 358998 - RNA, 22 nt, Human
uugauacagcagccugugaucc

SEQ ID NO: 358999 - RNA, 22 nt, Human
ugggcugcuuccucagcugaga

SEQ ID NO: 359000 - RNA, 22 nt, Human
gcugaaggcccggaggacaggg

SEQ ID NO: 359001 - RNA, 22 nt, Human
gccugugacucgucuugggcca

SEQ ID NO: 359002 - RNA, 22 nt, Human
cugggcugcagcgggagcgacg

SEQ ID NO: 359003 - RNA, 22 nt, Human
aaucagaacuucucaggguggg

SEQ ID NO: 359004 - RNA, 22 nt, Human
gggcugcacagaucuucaaggg

SEQ ID NO: 359005 - RNA, 19 nt, Human
gcauaaaaugucaaugugu

SEQ ID NO: 359006 - RNA, 22 nt, Human
gccuucagcggccgcucgcugc

SEQ ID NO: 359007 - RNA, 22 nt, Human
ccagcugcccaagaggcauccu

SEQ ID NO: 359008 - RNA, 19 nt, Human
gaagaagcuugagaaguag

SEQ ID NO: 359009 - RNA, 22 nt, Human
uacaaaguuugagaaugcuuuc

SEQ ID NO: 359010 - RNA, 22 nt, Human
aggcagcagacuguuaaucaga

SEQ ID NO: 359011 - RNA, 22 nt, Human
agaagccaauucugugugaguc

SEQ ID NO: 359012 - RNA, 22 nt, Human
uaucagaagacuuacaguaucg

SEQ ID NO: 359013 - RNA, 22 nt, Human
aagggcugcaauccaaaacacu

SEQ ID NO: 359014 - RNA, 22 nt, Human
aguccagucucacucuuggcag

SEQ ID NO: 359015 - RNA, 22 nt, Human
uaauuuuaugacaguguauuuu

SEQ ID NO: 359016 - RNA, 19 nt, Human
ccucugcgcuguccugcuc

SEQ ID NO: 359017 - RNA, 22 nt, Human
aaguccuuucucauggaggaau

SEQ ID NO: 359018 - RNA, 22 nt, Human
aguggcagggcuggcugcugca

SEQ ID NO: 359019 - RNA, 22 nt, Human
uucucuuuugugaugugagaug

SEQ ID NO: 359020 - RNA, 22 nt, Human
uaagacaauucuucagucacaa

SEQ ID NO: 359021 - RNA, 22 nt, Human
uuuuagaaauacugauuuagug

SEQ ID NO: 359022 - RNA, 22 nt, Human
cagcuuggaggaggaucuaaga

SEQ ID NO: 359023 - RNA, 22 nt, Human
ggaggggauuuaguagaugcua

SEQ ID NO: 359024 - RNA, 22 nt, Human
ucucccacugcaagcccaggcu

SEQ ID NO: 359025 - RNA, 22 nt, Human
cauagagugauguaagguaugu

SEQ ID NO: 359026 - RNA, 22 nt, Human
cuucagaggggacucaaaguca

SEQ ID NO: 359027 - RNA, 21 nt, Human
agaguaauuccugcuggaaag

SEQ ID NO: 359028 - RNA, 22 nt, Human
gccaguggucacugaggaagaa

SEQ ID NO: 359029 - RNA, 22 nt, Human
uagccaggucacacuguguguu

SEQ ID NO: 359030 - RNA, 22 nt, Human
auuguguaauuuucagcucaua

SEQ ID NO: 359031 - RNA, 22 nt, Human
cugcugugggcaggguagcugg

SEQ ID NO: 359032 - RNA, 22 nt, Human
cauuuuauccucugggaagcua

SEQ ID NO: 359033 - RNA, 22 nt, Human
ugcuuuaacauaagauaucuuu

SEQ ID NO: 359034 - RNA, 18 nt, Human
ccagagcuggcuccucgc

SEQ ID NO: 359035 - RNA, 21 nt, Human
cagcuucuucugugaccuggu

SEQ ID NO: 359036 - RNA, 22 nt, Human
agggcaugcuggaggagagaca

SEQ ID NO: 359037 - RNA, 23 nt, Human
gcugggcuuacucuuucagugag

SEQ ID NO: 359038 - RNA, 22 nt, Human
aggcaggucacaugcuuggcga

SEQ ID NO: 359039 - RNA, 22 nt, Human
agcaggagagcagugcgugguc

SEQ ID NO: 359040 - RNA, 22 nt, Human
ugucaugccaccguuucccaga

SEQ ID NO: 359041 - RNA, 22 nt, Human
uggcucagugacauuccuccca

SEQ ID NO: 359042 - RNA, 18 nt, Human
caggagcaggaguugaac

SEQ ID NO: 359043 - RNA, 22 nt, Human
ugagggaggcccuuugagcaga

SEQ ID NO: 359044 - RNA, 22 nt, Human
agcaccugcuaugugucaggga

SEQ ID NO: 359045 - RNA, 22 nt, Human
uauuccaagcacagcaacccag

SEQ ID NO: 359046 - RNA, 22 nt, Human
gcagggcugcugaaacuuguuu

SEQ ID NO: 359047 - RNA, 22 nt, Human
cagaguaaggagcugucaaacg

SEQ ID NO: 359048 - RNA, 22 nt, Human
gggucuggcaugcugagaugga

SEQ ID NO: 359049 - RNA, 22 nt, Human
ucaucuaagagucuuacauuua

SEQ ID NO: 359050 - RNA, 22 nt, Human
cccaggcagucuggcucuaaag

SEQ ID NO: 359051 - RNA, 22 nt, Human
uuauccaagcagaagcugcaca

SEQ ID NO: 359052 - RNA, 22 nt, Human
agccuggaauuaaggaaaugca

SEQ ID NO: 359053 - RNA, 22 nt, Human
aggcaggagugacccugacagg

SEQ ID NO: 359054 - RNA, 22 nt, Human
aagcaaaggcaggagcuuguga

SEQ ID NO: 359055 - RNA, 17 nt, Human
gagauggguggaucacc

SEQ ID NO: 359056 - RNA, 22 nt, Human
auccccagaaaauaggugccua

SEQ ID NO: 359057 - RNA, 22 nt, Human
aggcaguggagcuggaauaggc

SEQ ID NO: 359058 - RNA, 22 nt, Human
ugccugcugcuaagcucuuugu

SEQ ID NO: 359059 - RNA, 22 nt, Human
uagucaccuuuggcaccugcaa

SEQ ID NO: 359060 - RNA, 22 nt, Human
uaguccuuuaauaguuaaugug

SEQ ID NO: 359061 - RNA, 22 nt, Human
agaagccaaaugccagugaccu

SEQ ID NO: 359062 - RNA, 22 nt, Human
gguggcaggcccugagcauccc

SEQ ID NO: 359063 - RNA, 22 nt, Human
uguauauucugccuaaaagcuu

SEQ ID NO: 359064 - RNA, 22 nt, Human
caguggcugugaccagggaccu

SEQ ID NO: 359065 - RNA, 22 nt, Human
ucugcaggcucuagaugagguu

SEQ ID NO: 359066 - RNA, 22 nt, Human
aggcuagcuuuggcucaguaaa

SEQ ID NO: 359067 - RNA, 22 nt, Human
ggguaccaagcugcuugggggc

SEQ ID NO: 359068 - RNA, 22 nt, Human
ccugcagacacuuguccagcaa

SEQ ID NO: 359069 - RNA, 22 nt, Human
gugcuuucugcaugguuccuac

SEQ ID NO: 359070 - RNA, 22 nt, Human
gccugagagacccauggggcaa

SEQ ID NO: 359071 - RNA, 22 nt, Human
uuagccaugcccuagaagagga

SEQ ID NO: 359072 - RNA, 22 nt, Human
uccugaaaauaauuucacaaga

SEQ ID NO: 359073 - RNA, 21 nt, Human
uaaaugugagcagggcugggc

SEQ ID NO: 359074 - RNA, 22 nt, Human
gcugagucuugagcacugagca

SEQ ID NO: 359075 - RNA, 22 nt, Human
caggagcucuuaaggaugugau

SEQ ID NO: 359076 - RNA, 22 nt, Human
ucauugcagugauguuguaugu

SEQ ID NO: 359077 - RNA, 21 nt, Human
cagaggcagguccugggacgg

SEQ ID NO: 359078 - RNA, 22 nt, Human
ucugcugcacaaauucaucucu
